United States Patent Application Publication US 2005/0228172 A9 - sequence listing, part 63

SEQ ID NO: 270996 - DNA, 606 bp, Homo sapiens
acttacacagtattttattttattaccagccttagaatcttcccattcatatagtaacagctcctcaggtaatatataggaggcatggactggtttatatggaaaggattaggagaatttttagcctcaggatatcaatccataggcttttatcttttagaaaaaaaaaagtcatgaagacttatataaggacctctatccaatattgcaatatcttcaccagtcttttcccaatttgactgtttcctattgtttaaattacccaattattccataattaaagagggagaccaggaaagagcttcttctgttttattttctgtgtctcatcttcttctttgacattccaccatctatagcatcaccaacctgagcctgagtctccaactattgaagaatatttggtgccaatattcttgtgccatactttttacgtgtttggatgtactcccaaaygcctaatggtacccattaaacttcaaattacaaagatttttttgagggaagaggcatacaatcctgtaaataagtaatgtagaaggagaaatacacatacacacaaacacacacacacgttaccatgtgtgccaagagacatgaaatcta

SEQ ID NO: 270997 - DNA, 606 bp, Homo sapiens
acttacacagtattttattttattaccagccttagaatcttcccattcatatagtaacagctcctcaggtaatatataggaggcatggactggtttatatggaaaggattaggagaatttttagcctcaggatatcaatccataggcttttatcttttagaaaaaaaaaagtcatgaagacttatataaggacctctatccaatattgcaatatcttcaccagtcttttcccaatttgactgtttcctattgtttaaattacccaattattccataattaaagagggagaccaggaaagagcttcttctgttttattttctgtgtctcatcttcttctttgacattccaccatctatagcatcaccaacctgagcctgagtctccaactattgaagaatatttggtgccaatattcttgtgccatactttttacgtgtttggatgtactcccaaatgcctaatggtacccattaaacttcaaattacaaagatttttttgagggaagaggcatacaatcctgtaaataagtaatgtagaaggagaaatacacatacacacaaacacacacacacgttaccrtgtgtgccaagagacatgaaatcta

SEQ ID NO: 270998 - DNA, 522 bp, Homo sapiens
atatccctatgtgctccaaggccatgcctgattctatgggtgcacttttgaccctattatggtgttggtatatttgtttgctagaactacactttgcttaagaaacagaattttgttttcacacaattctggtagctagacatccaagatcaagatttcaacagggttggcttcctctgaggcctctctccctggcttgtagataattgtcttcccctccctatgtcgtcatgtggtcttttctctttattgtctgtgtccaaatctscttctctgttaaggatgcaaggcagattggatcagggaccaccctaatgatctcattgtaagttacgtgcttctttaaagactctctccaaatacagtcacatcctgaggtactggggcctaaggcttcaacatatggattttgcagagaacacaattcaccccacaacagttgtcgtgctttagctcagaacatgaaaagggtccctggagaaccaggtaaccagtcacatgtgcaatacaaggtgtgcatgg

SEQ ID NO: 270999 - DNA, 522 bp, Homo sapiens
atatccctatgtgctccaaggccatgcctgattctatgggtgcacttttgaccctattatggtgttggtatatttgtttgctagaactacactttgcttaagaaacagaattttgttttcacacaattctggtagctagacatccaagatcaagatttcaacagggttggcttcctctgaggcctctctccctggcttgtagataattgtcttcccctccctatgtcgtcatgtggtcttttctctttattgtctgtgtccaaatctccttctctgttaaggatgcaaggcagattggatcagggaccaccctaaygatctcattgtaagttacgtgcttctttaaagactctctccaaatacagtcacatcctgaggtactggggcctaaggcttcaacatatggattttgcagagaacacaattcaccccacaacagttgtcgtgctttagctcagaacatgaaaagggtccctggagaaccaggtaaccagtcacatgtgcaatacaaggtgtgcatgg

SEQ ID NO: 271000 - DNA, 539 bp, Homo sapiens
ccacctgttctcacttttaagtgggagctaaacattgagcacacctggacataaacatgggaacatagacgctgtggactactagaaggggggaaagaagaggagagcatggttagaaaaactacctattgggtcctctgctcactccctgggtgacaagatccattccacaacctcatcatcatgcaatacacccatgtaacaatcatgcccatgaaccctctatatctaacataaacactgaaatttaaaaaaatgttccatctgttattctgcttctctctttctgaattttaattgaatattagtttatggttatatcttttttgacttattagtcatgataacttgtgttattacattagtggttgctttrgagttcacgtatctttacttatatatctttaacttgtaagagtgtaagttcaagtggtactacataacttctcatacagtataagaatcctacaaaaacatacttccatttctcccctccagaactttgttctatggctgtcgtacatttcactattgcatat

SEQ ID NO: 271001 - DNA, 538 bp, Homo sapiens
ctcccccttttcctatggatgtggcttcctgagagaatagctgtagtgattgttatctttcttctggatctagccacccagcaagtctaccaggctctgggccagtactggggattttctgcagagtcctgtgatgtgaaacatctgtaggtctgtcagccgtgaataccagcagagtatttggcatgtctcctgggtcctgcaggagcaatccgcttccttcaggggtctgtgggtcctttcaggtttcctgatttattcctgcagttgttgtggagcagaaattcataatgcaagcctccacatgctgctctgtctgagttagagctgcagtctagtcctgcctcccatctgccatgattccctaggagttgaaaacacatgtcttcttttgagaagtgtctgttcatgtgctttgctcacgttttaatsgggttgtatgtttttttctggtaaatttgcttaagttccttatagactctggatattaggcctttgtcacatggatagattgcaaaaattttctcctattttgtag

SEQ ID NO: 271002 - DNA, 523 bp, Homo sapiens
atgttggtcagactggtctcgaactccttaccttaagtgactcgcccacttcagcctcccaaattgctgggattacaggcctgagccaccgcgcctggcctactgtagttttataggaactattaaagttggatagtatcagcactctgtgtttttcttcagtattgtgttgactattctagatcttttgccttttcatatatactaaaaacccatttgttgatatctgcaaaatagttttttgtgattttgattgggattgtgttgaatttatagatcaagttagaaagtatttctatcttaacaatactgagtcttccaaggcatgaacatggaacacatttctatttatttagctctttgatttctttcatcagagttttatagttttccacataaatatcctatatatagtttgttatatacataattattttttcggtgctattgtgaatggtatttttayatttcaaatttcaagtgttaattgataatgtatagaaaaacattgacttctgtatat

SEQ ID NO: 271003 - DNA, 592 bp, Homo sapiens
taaaagctttcctaaaagaaaactcaccagtggattttaagctataacacctatataacacaattttattaagattttttaaagtgctaatgttttctaaattatttaggaagcctaattatctttatgccaaaatctgatagggcttttctttttaaatttttttttagtttttagttttttggggcatataataggtgtatatatttatgaagtgcatgagatattttgatacaggcatagaatgcataatattcacaccagggtaaatgggatatccatcacctcaagcagttattctttttttaatttaatttaatttaaagttctgggatacatgtgtgggatgtgcaggtttgttacacaggtaaatgtgtgttgtggtggtttgctgcacctatcaacccattacctaggtattaagccctgcatgcattwgctatttaacctgatgctctctctctcccccgccaccaccaccgcaggcccccacatgtattatccccctcccagtgtccatgtgttctcattgttcggctcccacttataagtgagaagatgtgtttcttggttttctcttcctgtgttagtt

SEQ ID NO: 271004 - DNA, 568 bp, Homo sapiens
tgagagactgtgatgcattcttcattatgtcatttgtgcttttcaactctggaatttctgcttgattcttttaattatttaatttctttgttaagtttatctgataggattctggattccttctctgtcttatcttgaatttcattgagtttcctcaaaacacctattttgaattctgtgtctgaaatgccacatttctgtgtctctcatggattggtccctggagtcttatgtagtttgtttggtgaggtcttgttttcctggatggtcgtgatgcttgtggataatcatcagtgtctgagcattgaagagttaggcatttattatagtttttacagtctgggcttatttttacctgtccttaggaagactttccacgtatttgaggggacttgggtcttgtgatctaagtttttcattactgcagccatatctgcatgaggggacaccccaagctcagtaacactttggctcttrcatacttgtaaagatactacattggtggtcttgaataagatccagaagaattatctggattaccaagcagagactcttattctcatcactt

SEQ ID NO: 271005 - DNA, 494 bp, Homo sapiens
aaaataaaaatctatgcatcagtattggcaagtctgcctacattattattaacttcaatatatgaatacctaatgaacacatttcagctcaatcttgacttagaagatccttggctgatatttttagttttcataatcctatcatttggccttagtccttcctgacaaatgaaacttaactwttgcagatagtaggaatacatgttcccagatatatttcctaaatgggatatttagttattttagtaggcttagttagtcttaaatgataatagggaaaaatcttattttgctcaaaagagcacctgccttcattccaaagtgggcaggactgtttaatgttgaattgatctctatgggaataaccgaaaacatttcggatacagctgaaatccaatagatggcagtgaaatacagaaaattcactgattcctgaatccttatgtgattgctttcagtggtaagctgctagtctgttgccaattagaagctcc

SEQ ID NO: 271006 - DNA, 591 bp, Homo sapiens
ttttcacaagttctacttatttcaggacagtttttgaataagtttaatttgcccctcctcacttttaccttgtaacttttggtatcccttaaatcagggttctcccactggttccagtccatggcccattrggaactgggcagtacagcaggagatgagcggcaggcgagccggcaaagcttcgtgtgtatttacaggggctccccatctcttatattactgcctgagccctgcctcctgtcagatcaaaagcagcattagatcctcataggagcatgaaccctattgttaactgtgcatgcaagggatctaggttgtgcactccttaagagaatccaatgcctgatgatctgtcactgtttcccatcaaccccagatgggaccatctagctgtgagaaaacaagctcagggctcccactgatcctacattacagtaaatcgtataattatttcattatatactacaatgcaataataatagaaataaagtgtacaatatgtacttgaatcaaccccctccctcgtctgtggaaaaattgtcttccatgaaaccagtctctggtgccaaaaaggttggggaccactgcctt

SEQ ID NO: 271007 - DNA, 591 bp, Homo sapiens
ttttcacaagttctacttatttcaggacagtttttgaataagtttaatttgcccctcctcacttttaccttgtaacttttggtatcccttaaatcagggttctcccactggttccagtccatggcccattgggaactgggcagtacagcaggagatgagcggcaggcgagccggcaaagcttcgtgtgtatttacaggggctccccatctcttatattactgcctgagccctgcctcctgtcagatcaamagcagcattagatcctcataggagcatgaaccctattgttaactgtgcatgcaagggatctaggttgtgcactccttaagagaatccaatgcctgatgatctgtcactgtttcccatcaaccccagatgggaccatctagctgtgagaaaacaagctcagggctcccactgatcctacattacagtaaatcgtataattatttcattatatactacaatgcaataataatagaaataaagtgtacaatatgtacttgaatcaaccccctccctcgtctgtggaaaaattgtcttccatgaaaccagtctctggtgccaaaaaggttggggaccactgcctt

SEQ ID NO: 271008 - DNA, 576 bp, Homo sapiens
gtgagcctttagcaacatggtaatctttttgctgatggagggtctcatctcaatgttgacagttgctgattgatcagggtggtggttgctgaagtttggagttgctgtggaaatttcttaaaataagacaacaataaagcttgtcccctcagttgactcttcctttcacaaaakatttctctgtggtgtgcaatactgtttgatagcattttactcatggtagaaattcttttataattgatgtcaattatctcaaatcctgatgctgctttataaactaagtttatgaaatattataaattatttgttttcatttcaacaatattcacaacatctttaccatgagtagatttcatcttaagaaatcagtttctttgcttattcataagaagcagctcatctgttcaaatttgatcatgagatggaagaaattcagttacatcttctggcttcacttccaattctagttctcttgctttttctaccacatctgcggctacttcctctacttaaatcttgattccctcaaagtcacccataagggttagaatcaactcattccaattcctgttaatg

SEQ ID NO: 271009 - DNA, 576 bp, Homo sapiens
gtgagcctttagcaacatggtaatctttttgctgatggagggtctcatctcaatgttgacagttgctgattgatcagggtggtggttgctgaagtttggagttgctgtggaaatttcttaaaataagacaacaataaagcttgtcccctcagttgactcttcctttcacaaaatatttctctgtggtgtgcaatactgtttgatagcattttactcatggtagaaattcttttataattgatgtcaattatctcaaatcctgatgctgctttataaactaagtttatgaaatattataaattatttgttttcatttcaacaatattcacaacatctttaccatgagtagatttcatcttaagaaatcagtttctttgcttattcataagaagcagctcatctgttcaaatttgatcatgagatggaagaaattcagttacatcttctggcttcacttccaattctagttctcttgctttttctaccacatctgcggctacttcctctactkaaatcttgattccctcaaagtcacccataagggttagaatcaactcattccaattcctgttaatg

SEQ ID NO: 271010 - DNA, 514 bp, Homo sapiens
tttaaaattacaattacctccaaagcatttcaaatacttcttctggcaataatgtctgcttggaagcagaattcttaactctcctcccacaggtcttttcttttatgattccatagccttgtgggtttccttaatagtccgaaattccacaatataatccatgtgtgctgaaagacatttgaaatcattgacatgcctcagggtctccggattaagcaactatcagctctgcccttatgtaattggactcagaggtgatctcctgtttagatgcatctcaraaattccttctcctcctcctccatccagccacttcctgcacttagaggaaatccatttttggtttagacaagtttgtcaagcatcacatttttatccctatggaaatctttcaagtcaaaccccaagaggtggacaatacctctttgtgtatatgacaaagggtgtagtcttaaatataactttcgattcttatgaggttctaagcaagaactcagtcaccctggagaatgaa

SEQ ID NO: 271011 - DNA, 651 bp, Homo sapiens
ttttaatggctttttttttcacttctataggttagcactcttttctcaatctaagaaaaagatcaaatagccctagctaaattattttaaaaataaaaacttgtctatgtaagatgcttttgctttttatattatgtatgtgaaatgacacataaacktccaagaaaaaataaatgtccaaaaggacatgccacacagtctccaatgccattgacatggcatctatgaaaataactttatttctgtcccccaaaattcagagtctgatatttttatttttagcattttgtgtatttgaaaatggtttccatgtgtagaatagacttctcaaagttcactttaattttcataattaatattcttttttccttaaaattttaactttatgaatttttgttctttccataagtatagcaagtttggacaatcacatttatttaatgtttgttaccacttgcaaattaaatttcttaaactgcatgtataggtttaatagatttgattttcttgtttagtatttcaattgatttattgataataatactttccatatagttaaataagttatataattctaagaaatgtagcgattcatttcacctaaattttgcaaaacagcttgaaaaaaattaacagattttcttatcattg

SEQ ID NO: 271012 - DNA, 533 bp, Homo sapiens
atgttgaatatggtttaataagagctccgtatatattaggtgcttagtttttccgaatagataacaatttgttgcatatttactaggcatttcacagaaataagtacacacctgtgcccttctttcttccattgatacatctgtagagtatattaaagtcattttaaataaatgctacaracactcagagaaatttatcagatagattgcctattaagcatctggaaattaataaattaagtcaaatgtttatacaatttacatcctcattttctgaactttcgtcagttgttaaatgtttcccataattacaatggcaacattcattacaacttagagcttcccgataggaaagaattaatcataagtacttacggatcccactttttttgttgaaaatttctatattttttgttttttaatttttaaaattttttattgatacataatagaaatattttaggatacatgtgataatttaatacattcatataatttgtaaagatcaaatcagtgtaattgggatagctatc

SEQ ID NO: 271013 - DNA, 603 bp, Homo sapiens
tgttaatataattatagtttggtagagttgtttcattatatgtatggtttaacattttattttctagctccaaaaagatatttcacatacttagacttttttttctatgtgaagtagtttctttttcatattcatttagtggctcaagctgatgaatcagttagataaaattctcacwttcttagtcttctgagtagaactcattaagtactgtagaaaaaaacacccaagtttcaaagatgccagttgattcggtcattttcagattaccctatttgattcacactggaattactgagcaaacttacttatttttctgagacagtgtctcactctgttgccaaggctggagtgcaatggcatgatcacagcccactgaagcctggacctcccaggctcagacgatcctcccacctcagcctcacaggcgtacttctcctcatgtatgtcttcgttgtctttctctgtggcctattttcattttcaaatacagacagtataggaaaaagctaaaggattcagtgctgttttcccagaacttgcattctttgccacattcttatcaatgtaaaggtgaaatcaggggccaacataaaaatgtct

SEQ ID NO: 271014 - DNA, 603 bp, Homo sapiens
tgttaatataattatagtttggtagagttgtttcattatatgtatggtttaacattttattttctagctccaaaaagatatttcacatacttagacttttttttctatgtgaagtagtttctttttcatattcatttagtggctcaagctgatgaatcagttagataaaattctcacattcttagtcttctgagtagaactcattaagtactgtagaaaaaaacacccaagtttcaaagatgccagttgattcggtcattttcagattaccctatttgattcacactggaattactgagcaaacttacttatttttctgagacagtgtctcactctgttgccaaggctggagtgcaatggcatgatcacagcccactgaagcctggacctcccaggctcagacgatcctcccacctcagcctcacaggcgtacttctcctcatgtatktcttcgttgtctttctctgtggcctattttcattttcaaatacagacagtataggaaaaagctaaaggattcagtgctgttttcccagaacttgcattctttgccacattcttatcaatgtaaaggtgaaatcaggggccaacataaaaatgtct

SEQ ID NO: 271015 - DNA, 603 bp, Homo sapiens
tgttaatataattatagtttggtagagttgtttcattatatgtatggtttaacattttattttctagctccaaaaagatatttcacatacttagacttttttttctatgtgaagtagtttctttttcatattcatttagtggctcaagctgatgaatcagttagataaaattctcacattcttagtcttctgagtagaactcattaagtactgtagaaaaaaacacccaagtttcaaagatgccagttgattcggtcattttcagattaccctatttgattcacactggaattactgagcaaacttacttatttttctgagacagtgtctcactctgttgccaaggctggagtgcaatggcatgatcacagcccactgaagcctggacctcccaggctcagacgatcctcccacctcagcctcacaggcgtacttctcctcatgtatgtcttygttgtctttctctgtggcctattttcattttcaaatacagacagtataggaaaaagctaaaggattcagtgctgttttcccagaacttgcattctttgccacattcttatcaatgtaaaggtgaaatcaggggccaacataaaaatgtct

SEQ ID NO: 271016 - DNA, 594 bp, Homo sapiens
tctaaaatttttggctgtgcaatccgatagtaaaaagtttggatcttccctaccccattgtgtatgatataaattataacctgtgctgatatatattagacattagacattagagcccctaggttccatgaattataatacattgtatacattataaaatattcaagtaacaaaatatttacagtaaaatttctaataactgttaaaaatattttgtcatcaatgctataaagtcattttgctttccccagaacagtactgtgatatttctattataatttcaaatttaaattttgccagtatttacatttttagcagagcaacatgatcaaatatgctcaaatatgctcaataattttgaaaagttttgtttagtatatcacttcaatcatcattttacatttattttcatttaaaaacagtgctaatcatgatggcctaactcaccagctaatctatcaaggcaaatatgaatcattaacagcacatttattactcctagtagtctagaaarttttgaattccttggccagtctatcatagtagatcatcattatttttaccttataatgtagttgacagcttgttattgta

SEQ ID NO: 271017 - DNA, 532 bp, Homo sapiens
attttagctaatatagtcacacagagaatatcttttccaagagtaatctttcacaaacctcccataacttgctcaaatctgtagctttgttttaacttaaaataatcatttaaccctctaaacttgggcaaaaatccacatttctatgcctttttataattttttttttttttaccraaagcacattttgcttttcttacacactttgtatgtaaaactttttctttgatagttccaactgcatgttacaatgttaactcttagtaacttttaattttggtgaaaaacctggtaagtaagggattttgtaagtgaatcatgtactcggtgtggagcccaggacaccagacagaagtgcacataaagtttggttctttccagcatagccgggggcatggctaactccacatgtgcccaggccttacctagaatttaattgctccaaagcaggtaagttgaacaattttcaaaagttaaagaggcagtttatgaccttaaagcatttagcaaacctaatatctgacctgcataa

SEQ ID NO: 271018 - DNA, 594 bp, Homo sapiens
atttgatgtaaaaccaccgactccagggcatttataatatataaaataactgaatctctgtgtttgttcaattgttgttttatattgattgagtggttgcttcaaactgtaagcytaatggggttaattaaggacctcaaatacaatttcaaaatgtttacagacagcacattttacattgccaattccatctgtagacactgctatattaatgacacaatatttgttttagaggtcatagtgctgtttgccaggttaaacatttgtaatctggatccagctttaatataccctttcaaagaaagccacaggctgctatacactacatcaacagtactcttcaatcgactagtttgtcaggattacagagacaactaagccaacaataacaggcaccttccatctggacgctaattagaatgttgacctagtaaaatcccttactagggacaagttggtgttcagtactcacaagccaagatcatactgaaggcatagctgttaatagaatttgtccccagagtgaccaaaggagagcacaaagagctacagccttgtgtatatcccgtggaggtggtgagtgtgtgggtgtaa

SEQ ID NO: 271019 - DNA, 480 bp, Homo sapiens
agtgtattcgtctgttctcacagtgctgtaaagaactacctgagactgggtaatttatagagaaaagaggtttaattgactcacagttccacaggctgtacaggtcacatggctggggaggcctccggaaacttacagtcatggtggaaagtgaaggggaagccagcatgtcttatatggtggagccaggagcaagagagagagagaaggggaagtgccacacactttcaaacaaccagatctcatgagaacagcaaggggggaagtctgctcccatgattcaatcaccttccaccaggcccctcctgcaacactgggaattacaattcaacatgagatttggttgggactcaaagccaaacgatatcaagtaggtctaccmgataacctctagaaactcagagcatataaaggcaaccaaacaaccaatcattatcgggcattgatgctgtctccagccttactttctctgtatatcat

SEQ ID NO: 271020 - DNA, 401 bp, Homo sapiens
gcttagtcttgctttctggcctattatagggtccaatttgataagtggtccattgacacacatacagaacattattatgcagttgttggataaagtcttctatatgtacaaataagtcatattggtgggtcaaatcttctaggtctctcttgaatttttttgactgctgattttgtcaattattaagacatgtgctccaacttccccaatgattgttgaaatgtccatttttttcttttagttctgccatatctttacgttgaaaatatatggcttggtgcctaaaactttataatttttatatttttccataaaatcaagataaaataactttttttttaatactttaagttttagggtacatgtgcacattgygcaggttagttacatacgtatacatg

SEQ ID NO: 271021 - DNA, 526 bp, Homo sapiens
atgtttttgtgtgtgtgtatatacacacatatacatatatgtgtatgtgtaggtgtgtgtgtatacatggtatatatattatgtgtgtgtgtgtgtgtgtrtatatatatatatatatatatatatatatatatatatatatagacagagagagagagagaatgagattatgggaattgatttgcatgatcaattgcagaggccaaaaagtcccactatctgccatctgcaaatgagagaaacagaaatgccagtgctgtaatatagactgagtctgaaggcctgagaaccaagtaaggggtgggatgctgtggtacagactgagtatctcacctttatccaaaatgcttgggactggaaatattttagatttcaatttttttcagaatttgggatatttgcattatacttaccaattcatcatcccaaatctgaaaatcccaaaatgaaatgctccactaagcatttcctttgagggtcacgttagcattcaaaatatttcacattttggagcaattggatttga

SEQ ID NO: 271022 - DNA, 573 bp, Homo sapiens
caacagcatatctgcctctgccttcactgtctcttgtaggatctctacactatcttctttaaacatgatttgctagcagttctgggagtcctctggtgtagctcaaagatgctcacagagagcatcctctcagtatctcgaagcatctgccaattccttyctcctggcttatcagtctttgatctatgacggctatcagacctgctgaaagtcatgaaacagctaaactacttccactctgccaatagccctagggatgttgcattcacaggtacatttatttaaaaattctccctgtgaagagttgatgtacgtgcatgttaagtcaacctatagctacagctttgaacagttatggctctctaatcaggaattaaaactctattttgttgttgttgttgttgctgagacagggtgaagtgcaggctggagtgcagtggcatgatcatggctcactgcagccttgacctcctgggctcaagtgatcctcctgcctcagcctcctaagtagcgaggactgtaggttggcaccaccatgcccagctaattttttattttgtgctgagacggggc

SEQ ID NO: 271023 - DNA, 615 bp, Homo sapiens
ggaaagacaaattaaacttctgtctatcagagccttagtaaatagaagttcaaaaagcagagtttttataggaaaagaaggaatcttgagattaaagtgcattcaaggaaacaccaaattatatttagtagagctttaccagagatttatttttggaaattgttctgatagtcaaactagatagtagattccccattcacggagttctatgtggaaatactcaaaattataggttaagcatggtagatctttcattagcatcaattttaccaagctatttttgccaggataaagggaagtatttttatataagtaaaaatagtgtactactgaataataaacataatttgcttcggtttctaacagaagtctttgaagaaatgttgttttcttggttagccatttagtgtaaggccccagacttttctggaaaatttaggtaagcactaaaaagcaatatttgggattgtcagcaaacatwaaatcactgtatctaaatatgaatcttctatattttaattttaaccatgatccctgcaatttgaagtgaggtaagaggaagagaaggaaagatcatccattttaaagaacaaagaggccaaaacaagcaatatc

SEQ ID NO: 271024 - DNA, 626 bp, Homo sapiens
ctctttacgctcttaaaaactgttaaagactgtaaagaacttttgttgataccagttatatctatcactatttactatattaaatgttaaaacagaaatttaaaacaataaacaattttaatttattaaaataatgatataaaaccattacatgccaaaaataactgctacagaataaatatttgtatgcccctaaaattcacacgttgaagccctaacccccaatgtgatgatacttggaggttattgggttgagataaggtcatgtggrtggggccctcgcaatgggattattgtccttaaaggaagaggaagagataccagagtactctctctccactttcatgtaccaaagaaaggccgtgtgaatgtatagcaagcatgtggctgtctccgagccaagaagatggccaacaccagaacataaccacgctggcaccctgtgctcagacttccagcttccagaactgtgagaaaataaatgtccgttgcttaggtcacccagtctgtagtattttgttacagtagcccaagctaagacaataacatattttgtaaaaaaacaaaaaaacaacaaaaaaaaaacaacaaaaaaaacctatattttctttaaaaatcatgagaag

SEQ ID NO: 271025 - DNA, 626 bp, Homo sapiens
ctctttacgctcttaaaaactgttaaagactgtaaagaacttttgttgataccagttatatctatcactatttactatattaaatgttaaaacagaaatttaaaacaataaacaattttaatttattaaaataatgatataaaaccattacatgccaaaaataactgctacagaataaatatttgtatgcccctaaaattcacacgttgaagccctaacccccaatgtgatgatacttggaggttattgggttgagataaggtcatgtgggtggggccctcgcaatgggattaktgtccttaaaggaagaggaagagataccagagtactctctctccactttcatgtaccaaagaaaggccgtgtgaatgtatagcaagcatgtggctgtctccgagccaagaagatggccaacaccagaacataaccacgctggcaccctgtgctcagacttccagcttccagaactgtgagaaaataaatgtccgttgcttaggtcacccagtctgtagtattttgttacagtagcccaagctaagacaataacatattttgtaaaaaaacaaaaaaacaacaaaaaaaaaacaacaaaaaaaacctatattttctttaaaaatcatgagaag

SEQ ID NO: 271026 - DNA, 626 bp, Homo sapiens
ctctttacgctcttaaaaactgttaaagactgtaaagaacttttgttgataccagttatatctatcactatttactatattaaatgttaaaacagaaatttaaaacaataaacaattttaatttattaaaataatgatataaaaccattacatgccaaaaataactgctacagaataaatatttgtatgcccctaaaattcacacgttgaagccctaacccccaatgtgatgatacttggaggttattgggttgagataaggtcatgtgggtggggccctcgcaatgggattattgyccttaaaggaagaggaagagataccagagtactctctctccactttcatgtaccaaagaaaggccgtgtgaatgtatagcaagcatgtggctgtctccgagccaagaagatggccaacaccagaacataaccacgctggcaccctgtgctcagacttccagcttccagaactgtgagaaaataaatgtccgttgcttaggtcacccagtctgtagtattttgttacagtagcccaagctaagacaataacatattttgtaaaaaaacaaaaaaacaacaaaaaaaaaacaacaaaaaaaacctatattttctttaaaaatcatgagaag

SEQ ID NO: 271027 - DNA, 626 bp, Homo sapiens
ctctttacgctcttaaaaactgttaaagactgtaaagaacttttgttgataccagttatatctatcactatttactatattaaatgttaaaacagaaatttaaaacaataaacaattttaatttattaaaataatgatataaaaccattacatgccaaaaataactgctacagaataaatatttgtatgcccctaaaattcacacgttgaagccctaacccccaatgtgatgatacttggaggttattgggttgagataaggtcatgtgggtggggccctcgcaatgggattattgtccttaaaggaagaggaagagataccagagtactctctctccactttcatgtaccaaagaaaggccgtgtgaatgtatagcaagcatgtggctgtctccgagccaagaagatggccaacaccagaacataaccacgctggcaccctgtgctcagacttccagcttccagaactgtgagaaaataaatgtccgttgcttaggtcacccagtctgtagtattttgttacagyagcccaagctaagacaataacatattttgtaaaaaaacaaaaaaacaacaaaaaaaaaacaacaaaaaaaacctatattttctttaaaaatcatgagaag

SEQ ID NO: 271028 - DNA, 542 bp, Homo sapiens
gctttctgttttagcagtatctgttatagcccaatatgctttaaactgaggcactagtgtggcataaagctaactcaaatctatttattgctacaatcaagaggttgacatgctttgagaacattcaagttaaaagaacaggaggtgaaatataatgaaagagaaggatacagaaagaaaggactgaaaatatgattaaatgtcagagaagaattcagaagtggtgttgtagaactcctaagtgctcacacattttcattaatcataccattgcaggatactatgaattgtgatcatctactgcccatttatttttattttgtttttgagatggactctcgctctctgttgctcaggctggagtgcagtggcatgatctcggctcactgcaagctccgcctcccaggttcacgccattctcctgcctcagcctcccaagtagctgggactacagttgcccrccaccatgcctggctaattttttgtgtttttagtagagacagggtttcaccatgttagccaggaaggtttcgacctcctga

SEQ ID NO: 271029 - DNA, 554 bp, Homo sapiens
gtcgggtaccacaattctgaaaggttttcagggtctttctggccttgaaatctaaccatgagaattgatcttttaccatgttcaaccctaatccctcttgttcaaatattttgccaagacgacaggacagaaaagggaaatattagcctgatgtgttcatgaattcagtagggttgatcaaaggaatggaacccagagtttggttatgagaagggcccacagtgtgcagttaaggaaggcaggcctgggcagagcatggaggcagctgagcttgtatagcatcataaaaaggtacgagaggtcttgttggagaaaggaggaagtcacaaataaatgaggaagattctcaaggaaaagggacagtgactacagaagacagaaattaatagtttgtcctgactcaacccttatatctaagtcgtatcaaaactctggggtctgactgacmctgctttgtctgtagaatttatattgctggaaccctccagcagtagtatggaacttgatgagtttgcttggactggaggaggactccctgccatgtctcttaatat

SEQ ID NO: 271030 - DNA, 554 bp, Homo sapiens
gtcgggtaccacaattctgaaaggttttcagggtctttctggccttgaaatctaaccatgagaattgatcttttaccatgttcaaccctaatccctcttgttcaaatattttgccaagacgacaggacagaaaagggaaatattagcctgatgtgttcatgaattcagtagggttgatcaaaggaatggaacccagagtttggttatgagaagggcccacagtgtgcagttaaggaaggcaggcctgggcagagcatggaggcagctgagcttgtatagcatcataaaaaggtacgagaggtcttgttggagaaaggaggaagtcacaaataaatgaggaagattctcaaggaaaagggacagtgactacagaagacagaaattaatagtttgtcctgactcaacccttatatctaagtcgtatcaaaactctggggtctgactgacactgctttgtctgtagaatttatattgctggaaccctccagcagyagtatggaacttgatgagtttgcttggactggaggaggactccctgccatgtctcttaatat

SEQ ID NO: 271031 - DNA, 540 bp, Homo sapiens
ccaatgcctatttgctgaactaataaacacagaagagtcagatcatattttagtgtggtaatatccgaaaagagaaaggcaagattgtgcgtgtgtacttttctgcttccattgttccttctaaaaattatcctttgmtaattctccagaaagattactcgcttcctccagtggtaatttgttcttcaggcaagtcattaggtggggaacagtaggtcagaaaacaaaaccctttgtaccataggccactgaacagtggtaaataaaattaaaacatagagacatgttaggaccttagggcacggcaagcatccggaaacatttcaaggctcagaaaatttaagacattactttaaattacacagccagtgtcagagctaagaacagctctaaagacaactttctccagatatctacatagtatatttaaaacccgtggtaaaatatttttgttttggaagatgtaataaatactactacttaagctgtttacatgaatagtaacagttatgactgactgccaattaacttgcagggagc

SEQ ID NO: 271032 - DNA, 540 bp, Homo sapiens
ccaatgcctatttgctgaactaataaacacagaagagtcagatcatattttagtgtggtaatatccgaaaagagaaaggcaagattgtgcgtgtgtacttttctgcttccattgttccttctaaaaattatcctttgctaattctccagaaagattactcgcttcctccagtggtaatttgttcttcaggcaagtcattaggtggggaacagtrggtcagaaaacaaaaccctttgtaccataggccactgaacagtggtaaataaaattaaaacatagagacatgttaggaccttagggcacggcaagcatccggaaacatttcaaggctcagaaaatttaagacattactttaaattacacagccagtgtcagagctaagaacagctctaaagacaactttctccagatatctacatagtatatttaaaacccgtggtaaaatatttttgttttggaagatgtaataaatactactacttaagctgtttacatgaatagtaacagttatgactgactgccaattaacttgcagggagc

SEQ ID NO: 271033 - DNA, 540 bp, Homo sapiens
ccaatgcctatttgctgaactaataaacacagaagagtcagatcatattttagtgtggtaatatccgaaaagagaaaggcaagattgtgcgtgtgtacttttctgcttccattgttccttctaaaaattatcctttgctaattctccagaaagattactcgcttcctccagtggtaatttgttcttcaggcaagtcattaggtggggaacagtaggtcagaaaacaaaaccctttgtaccataggccactgaacagtggtaaataaaattaaaacatagagacatgttaggaccttagggcacggcaagcayccggaaacatttcaaggctcagaaaatttaagacattactttaaattacacagccagtgtcagagctaagaacagctctaaagacaactttctccagatatctacatagtatatttaaaacccgtggtaaaatatttttgttttggaagatgtaataaatactactacttaagctgtttacatgaatagtaacagttatgactgactgccaattaacttgcagggagc

SEQ ID NO: 271034 - DNA, 540 bp, Homo sapiens
ccaatgcctatttgctgaactaataaacacagaagagtcagatcatattttagtgtggtaatatccgaaaagagaaaggcaagattgtgcgtgtgtacttttctgcttccattgttccttctaaaaattatcctttgctaattctccagaaagattactcgcttcctccagtggtaatttgttcttcaggcaagtcattaggtggggaacagtaggtcagaaaacaaaaccctttgtaccataggccactgaacagtggtaaataaaattaaaacatagagacatgttaggaccttagggcacggcaagcatccggaaacatttcaaggctcagaaaatttaagacattactttaaattacacagccagtgtcagagctaagaacagctctaaagacaactttctccagatatctacatagtatatttaaaacccgtggtaaaatatttttgttttggaagatgtaataaatactactacttargctgtttacatgaatagtaacagttatgactgactgccaattaacttgcagggagc

SEQ ID NO: 271035 - DNA, 613 bp, Homo sapiens
atgtggtattcttacaactaagtaaacaagagaaaggaaatgttattaaaaagattaaaagaaggagaaaatatgtttactattttttaaatggaagtggatcatcatataagtcttcatcttcgtcatcttcatattgagtagactaagaaggaggaagaggaggggttggtcttactatctcaggggtggcagaggtggaaaaaatccacaaataattggacctgggtcattcaaacccatgttgttcaaaggtcacctgtgggtggtctggggagacctcagaacaaatttagtctcattttgagaactcaagttagattttatgggtttggggggttagataagaaagaattgtacagaaggaaactagtgtccaagcaactggggaaagaagaaagacattctttcctccagggcagaagggaagtcgaaagatgtgaatgatgacacagagaaactttgagttagaaaaggaaactaatggcctcagtctactccatgaagcaaaacgtctgggctttctagtgtgtatgtttccttctttgaaagttggtggcttgagagtaaaaattagaaaacamaatacaacttaataaaagaaatgagaaaa

SEQ ID NO: 271036 - DNA, 614 bp, Homo sapiens
cagaaacaggctgttcttatatggctggtgaaattcctgttgttggtgcttttacgaggcttgataaacattttgcatggaagattctgaaacaagggcaacaaaattctctttttttcacattttaaattatttattttgaaatattttaaaacttagtaaacatctgtcaggacagcacaataaatctccatctttcacacacartctccatcacacgccctcctcattaccacggtacctctctctgactgaaaaaattaacactgattaacactgccatccaatacaatggccccatttgagaagccatacctggaaggtaaattctttcagatattaaccaagtgtttctaaggtttagatcaaagtcactttataaatacaaatctatcatattgtttataccaaagtattaacttttcatggaagtacaatgtatatacagaaaagtatacatatccaaagtgtactgcttgatgtatttctaataaactggacacaacagggtaatcaatgaccagatcaaaagcacaaccagcaccccagaatccacccttgtgcttccttccaatcattgccctcttccggtttttatttttgtttttgttttt

SEQ ID NO: 271037 - DNA, 617 bp, Homo sapiens
cctgagtgctacatagatgctgtctgttytcacactgctaatgaagacataccggagactgggaaatttataaaggaaagaggtttaattgactcacagttctacgtggctaggtaggcctcacaatcgtggtggaaggcaaaggaggagcaaagtgacatcctacatgatggtaggcaagagagcttgtgcaagggaactcccatttataaaaccatgagatctcatgagacttattcactaccacgagaacagtatgggggaaccgccgccgtgattcagttatctccacctgaccctgcccttgacacctgggaattattacaattcaaggtgagatatgggtagtgtcacagccaaaccatatcaacaaccttatttaatctgtccgtcaagcctataaagtgattagcattaatagccccattttaaatatcaggaaaagaaagcttagaatggtaagcgcctggctccaaatactaatcttttacttatcacacagaattcagttcttaacacaagacttatctaaatggaatattatctgtttctggggatgcaataagatatgtaagaaatagcacataatcatagtgctccttactgataataacgta

SEQ ID NO: 271038 - DNA, 612 bp, Homo sapiens
gaccttcaaggtcaggtgagaatttaggacttgctattcatgcctgaccttgacagagagcccatgtaaaagcctagataccagtcttctttctacctggaaggtttgctttggcaagaaagcaaaaagaattctttaaataagcaaatttttcattagaaagaattgttcagcatttctctgtagatttaaaggtatsaagacacccttgctacttgctttttgtctacaaagaaaccatttgatttctctggaccttggttttctcatgagtaaaatgagaaggtgaacttgatcccttccagaaacactcttatttctcttcactaaattggaaataccaagagacaaaaaccttttttcttttctttttttttttttttgctatttctcttctctcaacaaagttgatattgataaatattcattgtcaaaaagttgaattttgtgtttcctgagagctgtgggagttagagtcagatacacaatggctcaaatctgagttctgtttgagttgggctgccttgaaacaaatagtttgatttctcagagcctctcttttcctgtatgttgaatagggattctatttgtagtcgctctcactaccaaaag

SEQ ID NO: 271039 - DNA, 181 bp, Homo sapiens
tgagttctgtttgagttgggctgccttgaaacaaatagtttgatttctcagagcctctcttttcctgtatgttgaatagggattctatttgtagtcgctctcactaccaaaagaaatcaccaggattggatgagatactgtatgygaaacaaacacaatgccaagtgcttaactgatttat

SEQ ID NO: 271040 - DNA, 660 bp, Homo sapiens
ctgtctcacaataaaataaaataaaataaaataaaataaaataaaataaaataagacaaaataaaataaaaaaagccctcctgctgattctgatgcacattcaagtccgagaaccactgcttattcatctagtcaygctggcttctcaatagcaaagagttcagactggggaggcttctctggagcaaaaggtaggggcagaggcatcattcaggacttatgaagccactgtctccaagtggggctgacttcaccggggaattctatttgtcttggatatttctaaactactttgcttcttatttgcccatatcaaagtcccacttcggttccttttgtcagtcatcacagtttttcaggatgtagctgaatggagttgagatcatgtagatgagatcatgctcttgagggagaggaaaaataaataaaaagaaagctgcccttacctgtccattctggggtcaggtatctgttgtcaatactatgtcagctgcactgtcaaggtgaggctgcatagactagccctggacttttttgctaggagtctgtacctttttaagcttcaaatatcacaaagaccccccttcttttatgctagccctgattagtgccagatccaggaatatggggataatgtggagagccaaagaagaagaaaaa

SEQ ID NO: 271041 - DNA, 660 bp, Homo sapiens
ctgtctcacaataaaataaaataaaataaaataaaataaaataaaataaaataagacaaaataaaataaaaaaagccctcctgctgattctgatgcacattcaagtccgagaaccactgcttattcatctagtcacgctggcttctcaatagcaaagagttcagactggggaggcttctctggagcaaaaggtaggggcagaggcatcattcaggacttatgaagccactgtctccaagtggggctgacttcaccggggaattctatttgtcttggatatttctaaactactttgcttcttatttgcccatatcaaagtcccacttcggttccttttgtcagtcatcacagtttttcaggatgtagctgaatggagttgagatcatgtagatgagatcatgctcttgagggagaggaaaaataaataaaaagaaagctgcccttacctgtccattctggggtcaggyatctgttgtcaatactatgtcagctgcactgtcaaggtgaggctgcatagactagccctggacttttttgctaggagtctgtacctttttaagcttcaaatatcacaaagaccccccttcttttatgctagccctgattagtgccagatccaggaatatggggataatgtggagagccaaagaagaagaaaaa

SEQ ID NO: 271042 - DNA, 631 bp, Homo sapiens
aaaccttacagtttacccaagatcacaaagttggtaaatggaaaagctgttatttaaataaaagttcttttaactccaaatcagggttctgttccccataatatatctatcaccccatttgattgatagtattttaaaagccctaccagtaaaactaatattgtaatgccacatagcaagagcaagtgagtttatatakaacaagaataaacatttaataagaggggaaatgaactattttctttttttcctaccagccaatctgtggtttgactcacatttttcagactctgggtgtctcaaaaggagtataccccagaaaggaaacaaagtgaaattagaaagggaaatgcataaccacagaacaagtctctgtcacagagggacttttgcatcattaaaagtaatttgtgggaacagcaaatgttctttataagccaacaaaggcagctttgtttacagccactgttgttctcaaagaaaatgtataatgtctgaagattttaatagacttattcagatttaccatcagagccaaaaaatacagaattatagacagaattaattacatggaaatattttgtatatcaattaaaataaattgattcattattgatttatatgtcacaga

SEQ ID NO: 271043 - DNA, 449 bp, Homo sapiens
tttaaattaattgtatatttggggaagtggaaggatacggagacatagcatccttcaggagccctcctcagtcattactgctcatgagattttctgatcaggtatcatagctatttatctattgcatgaagtataattctaagaggctttattaaacatttggaaattgtgtcttctctttaaattaaaattattcaaaggaggcaagaacatatgaagtgaaaaccaaatatatattgtaaatgaatatatttagtatataaaataagaaacacaaggaaatttattttytacatttaaaagagctattttcaaaataattctcgaagaaccaactttagtgctttgtatcatgatacttggtggttgctataataaaaaataatatttttgatgttcaaatgaggagatatttgatgaagacattacatagtcaaacagaataaaaa

SEQ ID NO: 271044 - DNA, 617 bp, Homo sapiens
ttgataaatttttttgtttttaaattttgagggatttggagtttaatggctgaaactttgtcccattgtctgtccagctttaaattaattgtatatttggggaagtggaaggatacggagacatagcatccttcaggagccctcctcagtcattactgctcatgagattttctgatcaggtatcatagctatttatctattgcatgaagtataattctaagaggctttattaaacatttggaaattgtgtcttctctttaaattaaaattattcaaaggaggcaagaacatatgaagtgaaaaccaaatatatattgtaaatgaatatatttagtatataaaataagaaacacaaggaaatttattttctacatttaaaagagctattttcaaaataattctcgaagaaccaactttagtgctttgtatcatgatacttggtggttgctataataaaaawtaatatttttgatgttcaaatgaggagatatttgatgaagacattacatagtcaaacagaataaaaaaactgaaggaccctaaagtaggtatagcttgttaaacagcctgttacctgcacagcaaaaattaggttatgtttagaaataaaatttgac

SEQ ID NO: 271045 - DNA, 462 bp, Homo sapiens
tgagcatttattacattttggaagtatataaaacatacatcatatttatattttaattagctcaaacattgaaaaacttaaatgagccaattgtgtgagatgccaaaaaatgggtcatagatgtgttgtcaaaagtggccttgttggaatctctagagtcctttctataaaggatacctttcattcctgcctcaacactgagaaagctgaaaaataagcaggaaggatagagaccaagccataaccaagttggggcacgtgactttcaaacaagggtaagtgcagtkgctaatatgaaccacaatctgacctggattgtggggcaatttggcttccaagagggaggctcctacagaatttacagatgtaaagcatggagtgaaagaggacagcccaggctctccataggaaggctgtttctagacagaagagtcactctccccagtttgaacaaccaaataa

SEQ ID NO: 271046 - DNA, 525 bp, Homo sapiens
gaaagattggctctgctgattctcagggcttcagggtcaaacaaaaactatagcaccagctctcctggctctcctgcttgcrgactcaccatgtagatcttgcaatttgtttgactctataattgtgtgccagtttcttataataatctctgtgtgacacacacacacacacacacacacatgcacacacacatacatatatgattggttctgtttctctggagaaccttgactaatacaccagtcatatgggttaggttggcctcctaatccaatctgacctcatcctaactaattacatctatagtcacaaaatttccaaatacagtcacaatctgaaagactagaggctaggacttcagcatgtgaatttgggagaacaccatttaacctatcactgatggaatatattttatttaaatagcaagattccataataaggagccactgtataatggaaggagagatttcttatccatttgtctgtgatttgcttgaggacataggagaatttaatttacattg

SEQ ID NO: 271047 - DNA, 597 bp, Homo sapiens
gtaatggtttggataaatatcatacarctttatatataccagaacaaagattgaagagtaccctatctaacagggaagaaaattacctgtccaaaatgttcagtgtattcagggttagccagggctggaattcaggcatcctgatgctagagtgtgtgacttcccctgtgagacatttacaaagttagtacccatcttaatggtgtctgcctattgaattagaagtatatttcccaaggaaacctgtagcactgttaaggtttcatgcagctcacctgattctatttccctgacttggtgagacagaggcaatgatttatgtcttttcatgtctgccaattattctgaaatccagcattatgactggggtcagcagaaaatagtcctcataccatttctgtaaccagcttagcatatttctgtcccataatccatgtctttgcatgagattccttctatttcttcacactctggttaccctccctacctgtcacaaacatgtttttatttttgaattgctggcattggctgactccttgaagaaacttcctctaatctgacattatgtatatttcactgtgctgttcaggtttcact

SEQ ID NO: 271048 - DNA, 597 bp, Homo sapiens
gtaatggtttggataaatatcatacagctttatatataccagaacaaagattgaagagtaccctatctaacagggaagaaaattacctgtccaaaatgttcagtgtattcagggttagccagggctggaattcaggcatcctgatgctagagtgtgtgacttcccctgtgagacatttacaaagttagtacccatcttaatggtgtctgcctattgaattagaagtatatttcccaaggaaacctgtagcactgttaaggtttcatgcagctcacctgattctatttccctgacttggtgagacagaggcaatgatttatgtcttttcatgtctgccaattattctgaawtccagcattatgactggggtcagcagaaaatagtcctcataccatttctgtaaccagcttagcatatttctgtcccataatccatgtctttgcatgagattccttctatttcttcacactctggttaccctccctacctgtcacaaacatgtttttatttttgaattgctggcattggctgactccttgaagaaacttcctctaatctgacattatgtatatttcactgtgctgttcaggtttcact

SEQ ID NO: 271049 - DNA, 517 bp, Homo sapiens
tatggatgaaactagagtccttgaatataattgcactcataagtcaaagaaggcaattcataacaatttggcccagcattttaattttgtctgttaaattattcatgcgaatactttcatgagttaagccatgaatatttgattggtggttgattcataaccataaactatattagccctttatttttctcatttatgtccaattaacatatacgggaaggtggagaaaatttattcttcttaatatgagaaacatctttccccacagacttatcgaggctgtctgatgaacatttactatgactccgggtcaacattacgtttattctggcagtttaataaytgttctaataataattctcattacatagagggaaaatattacaaatctctactttacaagtgaggagatgacattcagagaggttaaataatgttccagaatccacacgatatgttggtggctgagattagattcaaatccaggattaaaaaattgaatgttccccaccccaca

SEQ ID NO: 271050 - DNA, 603 bp, Homo sapiens
gcatcagtatttttatggtagatagtgccaaattacccttataaatgtgtgccaattaacagtcttataaagtcattgattcttttcttcaacaaatatttatggtgtacttactatatgctagctactgttctaggtggtagttatatgtataattagaacaaaycaaaacccctagttttgtgggagaaaggaagttcagttctctaaactctaaaagttttgatagttcagacctgatatttcattgcttaataggcagctctttgattactattgaagttgaatattttcaaagttttttggttatttaaaattttactttacatattgaatatattaagcatcatctatatatatataagtgtatttccacatcatattttgcttctaactgacttcttcaccctcctcccctctctcaactttaccgcttatctttttcttctgagaccgctgagaatttcccttcatggtgtttatttcactgataccattttcagttgactccagatagccattcactttctctactgcattgttaatttggcgattatgtttttcatttgaaagcatttttcctactctcccagtattcatttg

SEQ ID NO: 271051 - DNA, 603 bp, Homo sapiens
gcatcagtatttttatggtagatagtgccaaattacccttataaatgtgtgccaattaacagtcttataaagtcattgattcttttcttcaacaaatatttatggtgtacttactatatgctagctactgttctaggtggtagttatatgtataattagaacaaaccaaaacccctagttttgtgggagaaaggaagttcagttctctaaactctaaaagttttgatagttcagacctgatatttcattgcttaataggcagctctttgattactattgaagttgaatattttcaaagttttttggttatttaaaattttactttacatattgaatatattaagcatcatctatatrtatataagtgtatttccacatcatattttgcttctaactgacttcttcaccctcctcccctctctcaactttaccgcttatctttttcttctgagaccgctgagaatttcccttcatggtgtttatttcactgataccattttcagttgactccagatagccattcactttctctactgcattgttaatttggcgattatgtttttcatttgaaagcatttttcctactctcccagtattcatttg

SEQ ID NO: 271052 - DNA, 543 bp, Homo sapiens
gcagtctccttgggaaggcatataagattgccattacactccctckctttctccttagggtaactccctgttgatagatgcataattcaggcctgcatgtggctttcaaaaatcatgaatgcattagctttgtgctgatttggaagatacatataaatcttatcttattagtgttctgacaattctcaatagagccccatgcttctaaaattttagagttgagaaaatgcaattatatatctacattaaattcactgaaaatttcttgcagaatacaaatcttcataaaagcacaaaccagaagaaatgcactagagaggttcttttctacctgaatccttctacaaatgaagggaacagatgacacccccacagctcatagagggtttgagcttcttgggcccaaacaaacctggggctttggcaactcagtctgcagtgttctccaactcacatgctttggtggccaggtagggagtgaacgcatgacatccacagggctgtaaagatgcttgttttgtaaccagacctccacagcacatt

SEQ ID NO: 271053 - DNA, 543 bp, Homo sapiens
gcagtctccttgggaaggcatataagattgccattacactccctctctttctccttagggtaactccctgttgatagatgcataattcaggcctgcatgtrgctttcaaaaatcatgaatgcattagctttgtgctgatttggaagatacatataaatcttatcttattagtgttctgacaattctcaatagagccccatgcttctaaaattttagagttgagaaaatgcaattatatatctacattaaattcactgaaaatttcttgcagaatacaaatcttcataaaagcacaaaccagaagaaatgcactagagaggttcttttctacctgaatccttctacaaatgaagggaacagatgacacccccacagctcatagagggtttgagcttcttgggcccaaacaaacctggggctttggcaactcagtctgcagtgttctccaactcacatgctttggtggccaggtagggagtgaacgcatgacatccacagggctgtaaagatgcttgttttgtaaccagacctccacagcacatt

SEQ ID NO: 271054 - DNA, 633 bp, Homo sapiens
gtgactttttgttccactctgggctttggcctggcctgggcaattgcactagaaaagtgcaggccacatctgcggtgctggctcctcaatcatggtgcagccacatcggagttcacgaggctcagcagaaatccaggtcccagtgaggcactgagggctggtattccctaccttttcatgcccatgaactttgacattgaaagacagggcttgctaggcatgctgccatggaagtaggggaccccttggagctagctggctggaagccagggcagagattcagccgtctgcagtcagcaggacctactgtgaggcctagacagcctgggagcactctgctctggcctgacccctttggagtccaagctacaaatgccaaggtggggaggcaggcagtgccatgtggttttggttgacacccagacaccagatgaccctgaccacattgcacccaaagattcgaacccttccccgttgccacaagatcaagaagactcctgactccatttacctaagtgtctcttggggaaagacatagaaagggcagacatgggatactgaccaccacttcaaawgattgattaaattttgagatgcaacgatttaaactggacgaaacaatttgcgcactac

SEQ ID NO: 271055 - DNA, 583 bp, Homo sapiens
gtgtgtgtatttagttttatgcaggcttagcacctgtgtaggtttgtgtattcatcgccagcactgaagcagaacaaccatatcacagcagggtctcttgctttacctttcataaccacagccattaattcctacaccactcccccgcaagtccctgacccctgccagccaccaatcaggtcttcatttctataattttgtcatttctagattgttgtatacatggaattatacagcatgtaaccatttgggattgactttttaaacttagcataattccctagagtagtatccatattgtgcagatatcaggagttcattcatttttattgctgaataacattccctggtatgcatggtccacagtttctttaaccatttacacattgtgggacatctgggttgtttccagcttttggctattgtgtcttctgtttctcttttcttgccttcctgtggattacttaaacattkttgagcatcctcaccctaagacatgattttaggatacccattctaaaaaataatttattgatactgtctttgagtgtatctttttgcatgatgttcttacaaagaacgt

SEQ ID NO: 271056 - DNA, 676 bp, Homo sapiens
gctttacagtattcatagcattcacacatcatctcaatcctcctaataccttggggatgtgcattatactgttcgttttgtggatgagaaaactggggcttgaggagattaaaagtcttcctgaagtctaacagttagaaaggttcagggatgtgaatttaacctggattctttaaaaatgtcagtgccctctgaagcttacttatgctatcaccaactgaaatgctctgtattttacatgatttttttttttcatattctcagttctacactggaggcaaggcttttcttytgtcttgatctttcatgtagctactgggcataaaatagcaacaggaaatattagttgctcaataaatatttgttggatgaatggataaatgaggaaatgccagctcttcgcacagagcagggaaaatcacagctaatttccactgtctgtcatttggatattgaattttctgttttccaggctggggcagaggaacccagttgtcactgcttcttatttttgctcattagtgttttagctgttagctctgcagatgactttcagggctccgggatcacagctccatccttcacagaggcactctgcttataatgacagaattctgtccattcatactatagagacaactctagcaggagaaatggtgtgtagcttttgtcactt

SEQ ID NO: 271057 - DNA, 558 bp, Homo sapiens
ggcatctgcccattggaagtctggctcagacagctcctcttggaaaagttagtgatgataatgcaagtaggagcccttacggtggcatctggcacaagtgagggtcaataaatatagctgaaaaaaagaagaaaaatttccctactatcaaatcttctcttcaacctgagcccaatgttcatctccctcactgttcctatcaccttccacttacctgtcttcttcatatgcrctgaggtccttgaaaccagaaagagtggagcttaatttaaattcatctcaatatcttcagctttaatctcactccccagcccaaatgagatgctcagtaaggtctgatgggtgattgaatggatggatattgaccaaatattgtattcagcatccctatctatgtattgccttcctgaggtgaggcttctctctctcctgggtccattcttcccctcctcagaaaacctaataccacctctgcagttcctttaacctcttgatttcactctcaactttgacagccatgcctagtgggcctcattcaggagcagttttcaagtcatt

SEQ ID NO: 271058 - DNA, 592 bp, Homo sapiens
atgtcatttagtcctcattgccttttttaaagtcctagctatagtcacatgctgaggtactgagggttaagacttcaacaaacagggaacacagttcagtccgtaccaccagcgcacagctagaaggccaataaaagagagaatagccccataacttatgattgtaagtagaattctttttccatcacaccaaggcagtgtatctccagatgtgatgcatggactagcagcgtctcctgagaactcgttagaaatgcaagttctcaggccccatcctggacctcctgagtcagaagatttgggggtgaaacccaataatctgtgttgtaacaaactctccaggtcatcattcagttgtgagrtcactaaatttctcaggaagctgactagttaattcagtgatttatgtatattctaaacattacactaagcagttaatatatactaaacattataaattcaatgatttatgtatattgagccttggaaaagccttttcaaaaaataaaaattattaaaattattttaaaaaaggacccaaagggactgcaatggcagatgtataaccataagaaagaggataaatataggc

SEQ ID NO: 271059 - DNA, 547 bp, Homo sapiens
gttgtacaattaacatctgtgccatttactataagatgtatgcagtttatgttagtgaaaataaatttagaacactattcttaaawaaatatgtaatttatatgtaaaggtaaggaaaaacattgttaccaaagagaaaatgcaaatggctaataaatatgaagagaggctcaagttgcggaaattcagtttagcttgttataatactgttttggtaggaagaagtctaaagtggcccccaatgactcaaacccatgtacaatcccctccccttgagtgtgagtgagaccctgaatacacactgtcactcccacaattaaactacgtcatatgacaaaggtgaagacattttacagatctcattaagaacgctaatcagttgcctttaaattaatcaaaacagattatcctgctcactttgaagaagtaaacttccagtttacttctgacagagctcttataaaattttttatgccaaagggtaattctatcactttagtatgattgtgcctgtttttgagctttatgtaaaaggaattatatagta

SEQ ID NO: 271060 - DNA, 547 bp, Homo sapiens
gttgtacaattaacatctgtgccatttactataagatgtatgcagtttatgttagtgaaaataaatttagaacactattcttaaataaatatgtaatttatatgtaaaggtaaggaaaaacattgttaccaaagagaaaatgcaaatggctaataaatatgaagagaggctcaagttgcggaaattcagtttagcttgttataatactgttttggtaggaagaagtctaaagtggcccccaatgactcaaacccatgtacaatcccctccccttgagtgtgagtgagaccctgaatacacactgtcactcccacaattaaactacgtcatatgacaaaggtgaagacattttacagatctcattaagaacrctaatcagttgcctttaaattaatcaaaacagattatcctgctcactttgaagaagtaaacttccagtttacttctgacagagctcttataaaattttttatgccaaagggtaattctatcactttagtatgattgtgcctgtttttgagctttatgtaaaaggaattatatagta

SEQ ID NO: 271061 - DNA, 547 bp, Homo sapiens
gttgtacaattaacatctgtgccatttactataagatgtatgcagtttatgttagtgaaaataaatttagaacactattcttaaataaatatgtaatttatatgtaaaggtaaggaaaaacattgttaccaaagagaaaatgcaaatggctaataaatatgaagagaggctcaagttgcggaaattcagtttagcttgttataatactgttttggtaggaagaagtctaaagtggcccccaatgactcaaacccatgtacaatcccctccccttgagtgtgagtgagaccctgaatacacactgtcactcccacaattaaactacgtcatatgacaaaggtgaagacattttacagatctcattaagaacgctaatcagttgcctttaaattaatcaaaacagattatcctgctcactttgaagaagtaaactkccagtttacttctgacagagctcttataaaattttttatgccaaagggtaattctatcactttagtatgattgtgcctgtttttgagctttatgtaaaaggaattatatagta

SEQ ID NO: 271062 - DNA, 584 bp, Homo sapiens
aacaatattgataaatatgaagaaatttggagaattcccactttctgatttcaaaggttactacaaagccatggtaatcaaaacagtgtggaactggcacaaaaacagacrtaaagaccaatggaataaaatagagaactcagaagaaaatgttcacatatatggtcaattggttttcaacaaatgagccaaaaccattcagtgagaaaaagtcatttccataactgatgtggggaatactggatatccatatgcaagagaataaaaatggacacctaccatacacagtatagaaaattaactcaaaataaatcaaagaccttaatgtaaaagctaaaactataaacttcttggaagaaaacacaggaaaaaacttcaggatattgcagttgccagtgattttttgggtttgccaccataagcacaggcaacaacaacaacaaaataggtaagctaaattccatcaaaattaaaaactttagtacaagaaaaactacaattaatagagtaaaaaggtagcccatggaaagagaaaaaaattgcagattatatttctaatatgagattaatatccagaaaacaac

SEQ ID NO: 271063 - DNA, 584 bp, Homo sapiens
aacaatattgataaatatgaagaaatttggagaattcccactttctgatttcaaaggttactacaaagccatggtaatcaaaacagtgtggaactggcacaaaaacagacgtaaagaccaatggaataaaatagagaactcagaagaaaatgttcacatayatggtcaattggttttcaacaaatgagccaaaaccattcagtgagaaaaagtcatttccataactgatgtggggaatactggatatccatatgcaagagaataaaaatggacacctaccatacacagtatagaaaattaactcaaaataaatcaaagaccttaatgtaaaagctaaaactataaacttcttggaagaaaacacaggaaaaaacttcaggatattgcagttgccagtgattttttgggtttgccaccataagcacaggcaacaacaacaacaaaataggtaagctaaattccatcaaaattaaaaactttagtacaagaaaaactacaattaatagagtaaaaaggtagcccatggaaagagaaaaaaattgcagattatatttctaatatgagattaatatccagaaaacaac

SEQ ID NO: 271064 - DNA, 584 bp, Homo sapiens
aacaatattgataaatatgaagaaatttggagaattcccactttctgatttcaaaggttactacaaagccatggtaatcaaaacagtgtggaactggcacaaaaacagacgtaaagaccaatggaataaaatagagaactcagaagaaaatgttcacatatatggtcaattggttttcaacaaatgagccaaaaccattcagtgagaaaaagtcatttccataactgatgtggggaatactggatatccatatgcaagagaataaaaatggacacctaccatacacagtatagaaaattaactcaaaataaatcaaagaccttaatgtaaaagctaaaactataaacttcttggaagaaaacacaggaaaaaacttcaggatattgcagttgccagtgattttttgggtttgccaccrtaagcacaggcaacaacaacaacaaaataggtaagctaaattccatcaaaattaaaaactttagtacaagaaaaactacaattaatagagtaaaaaggtagcccatggaaagagaaaaaaattgcagattatatttctaatatgagattaatatccagaaaacaac

SEQ ID NO: 271065 - DNA, 625 bp, Homo sapiens
tatccactctttcttttcaagggacagtaaattcaaaagttttgggattcttcatttggggatctacatctccttaatttaaaagagctttgaggtctaggcatttatgacagcccagtgtcatctctacactgattgtgctatcagtccctcagccatgagtcctatgccccrtccttttgggttctctgtttaaagggtgttgtcaagcagcatgagaccccagatatgatctacacttaaagtgtcagtttgatggattgtgtcctggagatggtcagtgcaaggtacttttttgcttagatgctagagaaatttttgaagctgaccaaatttttgtaagacaaggacaatggaacccagctgagtgatgacttgagcagaggaagaatttccaaacttgacctacatgtcacataagatgtactctttctgtttccccaaagtgattgttttttaaggaagcagaagatgaaaacacatggacaacttagatgatacgaaacactagaggtactagcaactgctctctaaatatgggatcttgggcagggctgtcccctgacatgctaacacaatgcatgcagcaagatttgttattttacaggagcttgtatgaatttcc

SEQ ID NO: 271066 - DNA, 625 bp, Homo sapiens
tatccactctttcttttcaagggacagtaaattcaaaagttttgggattcttcatttggggatctacatctccttaatttaaaagagctttgaggtctaggcatttatgacagcccagtgtcatctctacactgattgtgctatcagtccctcagccatgagtcctatgccccatccttttgggttctctgtttaaagggtgttgtcaagcagcatgagaccccagatatgatctacacttaaagtgtcagtttgatggattgtgtcctggagatggtcagtgcaaggtacttttttgcttagatgctagagaaatttwtgaagctgaccaaatttttgtaagacaaggacaatggaacccagctgagtgatgacttgagcagaggaagaatttccaaacttgacctacatgtcacataagatgtactctttctgtttccccaaagtgattgttttttaaggaagcagaagatgaaaacacatggacaacttagatgatacgaaacactagaggtactagcaactgctctctaaatatgggatcttgggcagggctgtcccctgacatgctaacacaatgcatgcagcaagatttgttattttacaggagcttgtatgaatttcc

SEQ ID NO: 271067 - DNA, 625 bp, Homo sapiens
tatccactctttcttttcaagggacagtaaattcaaaagttttgggattcttcatttggggatctacatctccttaatttaaaagagctttgaggtctaggcatttatgacagcccagtgtcatctctacactgattgtgctatcagtccctcagccatgagtcctatgccccatccttttgggttctctgtttaaagggtgttgtcaagcagcatgagaccccagatatgatctacacttaaagtgtcagtttgatggattgtgtcctggagatggtcagtgcaaggtacttttttgcttagatgctagagaaatttttgaagctgaccaaatttttgtaagacaaggacaatggaacccagctgagtgatgacttgagcagaggaagaatttccaaacttgacctacatgtcacataagatgtactctttctgtttccccaaagtgattgttttttaargaagcagaagatgaaaacacatggacaacttagatgatacgaaacactagaggtactagcaactgctctctaaatatgggatcttgggcagggctgtcccctgacatgctaacacaatgcatgcagcaagatttgttattttacaggagcttgtatgaatttcc

SEQ ID NO: 271068 - DNA, 625 bp, Homo sapiens
tatccactctttcttttcaagggacagtaaattcaaaagttttgggattcttcatttggggatctacatctccttaatttaaaagagctttgaggtctaggcatttatgacagcccagtgtcatctctacactgattgtgctatcagtccctcagccatgagtcctatgccccatccttttgggttctctgtttaaagggtgttgtcaagcagcatgagaccccagatatgatctacacttaaagtgtcagtttgatggattgtgtcctggagatggtcagtgcaaggtacttttttgcttagatgctagagaaatttttgaagctgaccaaatttttgtaagacaaggacaatggaacccagctgagtgatgacttgagcagaggaagaatttccaaacttgacctacatgtcacataagatgtactctttctgtttccccaaagtgattgttttttaaggaagcagaagatgaaaacacatggacaacttagatgatacgaaacactagaggtactagcaactgctctctaaatatgggatcttgggcagggctgtyccctgacatgctaacacaatgcatgcagcaagatttgttattttacaggagcttgtatgaatttcc

SEQ ID NO: 271069 - DNA, 568 bp, Homo sapiens
ttgacaaatgggccagggctatgacagtgaaacaaagaaaattggaggcaacttataatgccaactttaaaataatttactgatacataatttttgtacatatttaaaagaacatgtgatattttgttacatgcatagaaagtgtaatgattaagtcaggttatttaggatattaatcacctccagtattatcattcttatgtgtttggaacatttcaggtactctcttctaactattttgaagtatataatatattgttgttatctatagtcaccctactctgcattagaacattagaacttattccttctatctaactatatatttgtacccattaaccaacttctttttatccccttccccgcgacacatcttttccagcctccagtagmtaccattctactctctatctatgtaagatccaccttttttagctcccacatgtgagtgagaacatatgacatttgtgtttctgtgactggcttatttcacttaatatgatgccctccagttccatccatgttgctgcaaatgacagaatttaattctttttatggccaactagta

SEQ ID NO: 271070 - DNA, 579 bp, Homo sapiens
tttgggtggaaacacagcaccaaaccatatcagaagactacctcaatacatttaataatcaaatttacaaagatcaaggacaaagaaaggatcctaaaagcagcaagagaaaagaaacaaataacatacaatggagcaccaatacatctggcagcaaacttttcagtggaagccttacaggccaggagagaatgaggtgacatatttaaaatgctgaaggaaaaaaacttctacmctagaatagtatatcttgtgaaaatatacttcaaatatgacaaagaaataaaaacttccccagacaaataaataaataaataattagctcagggatttcatcaaaaccagacctgccatgcaagaaatgctaaagggagttcttccacctgaaaggaaaagacatttttgagcaatgagaaatcacctcaagatacaaaactcatgggtaagtatacataaaaacacagaatattacaacaatgtaactgtacaacaactttttaaggcatagatagtacaatgtgataaaaattagaaacaacaaaaagttgagaagaagagagatgaagacaaggtgtagag

SEQ ID NO: 271071 - DNA, 564 bp, Homo sapiens
attttccctgtttggtgatgacatcatcacatatatggaaaacccttaaaaacctgttaaaactacaacaaattcagtgagggtacaacgtacaaaatccacatacaaaaatcagtagcatttcttcaatctcattcaggtagctgcaaatgtcattaattcattcccttttatggctgagattatatatatatatatattcctaagctatggaaatagtatatatatatatatatatacacacaccactctttcctaagctatggagatgcaaaggcataagaatgccacaatggactttggggacttggggggaagggtgggaagggaggagtgataaaagactataaagagtgtgtagtgtattctgctccagtgatgggtgcaccaaaatctcacaaatcaccactaaataayttactcatgtaaccaaataacacttgttccccagtaacctatggaaataaaaaaaaattaaaaatcactagcatttctatatactaacaaaaattatcttaaaatgaaaacaagaaaacaattccacttacaaaaacaattacaaac

SEQ ID NO: 271072 - DNA, 555 bp, Homo sapiens
gctggaagatgggggaggggtggcattggtaatacaagactgttttcctacctctttagtgcctcttttagcaatataaagttaaaagcaggtactgtgagtgctcaaccaatttttgattcttatgaaggtgctttttgtgtgtagatagttgttgaattagtgtacttgtgggrgaggtcaaattagtggaatcttctattgcgccatcttgctacactctctcagtactccatttcttaacagctgagtaatatgccattgtatggatacggacatcgttttaattcattcatcactttatgcacgtgtgttgtttacaccttttggttattgtgcataatggtgctgtataaatttgtttacaaatgtttgaacatttgtttttagttcttttgagtatatatctaggagtggaactgctgggtcatgtagtatttgtatgtttaactttttgagaaatcaccaaatggtttttcatagtagctgcacctttttacatttttaccagcaatgtatgaggggtccaatgtcctacatagtcataaacactaa

SEQ ID NO: 271073 - DNA, 555 bp, Homo sapiens
gctggaagatgggggaggggtggcattggtaatacaagactgttttcctacctctttagtgcctcttttagcaatataaagttaaaagcaggtactgtgagtgctcaaccaatttttgattcttatgaaggtgctttttgtgtgtagatagttgttgaattagtgtacttgtgggagaggtcaaattagtggaatcttctattgcgccatcttgctacactctctcagtactccatttcttaayagctgagtaatatgccattgtatggatacggacatcgttttaattcattcatcactttatgcacgtgtgttgtttacaccttttggttattgtgcataatggtgctgtataaatttgtttacaaatgtttgaacatttgtttttagttcttttgagtatatatctaggagtggaactgctgggtcatgtagtatttgtatgtttaactttttgagaaatcaccaaatggtttttcatagtagctgcacctttttacatttttaccagcaatgtatgaggggtccaatgtcctacatagtcataaacactaa

SEQ ID NO: 271074 - DNA, 555 bp, Homo sapiens
gctggaagatgggggaggggtggcattggtaatacaagactgttttcctacctctttagtgcctcttttagcaatataaagttaaaagcaggtactgtgagtgctcaaccaatttttgattcttatgaaggtgctttttgtgtgtagatagttgttgaattagtgtacttgtgggagaggtcaaattagtggaatcttctattgcgccatcttgctacactctctcagtactccatttcttaacagctgagtaatatgccattgtatggatacggacatcgttttaattcattcatcactttatgmacgtgtgttgtttacaccttttggttattgtgcataatggtgctgtataaatttgtttacaaatgtttgaacatttgtttttagttcttttgagtatatatctaggagtggaactgctgggtcatgtagtatttgtatgtttaactttttgagaaatcaccaaatggtttttcatagtagctgcacctttttacatttttaccagcaatgtatgaggggtccaatgtcctacatagtcataaacactaa

SEQ ID NO: 271075 - DNA, 580 bp, Homo sapiens
caaagccaagtcttctaactctctatggtcccatcccacacaaagtaaacattgtaacttgccaggattgtccttaggtccaagcattggagtagaaagtacagatgccttaatgaaactggtgactatcatgatttcattttaaatcttaatttcactagcttgtaggtaaagttggagatcataatttatagtaagtgtattccagtttagaaataaaatatgctttttagctgaagagctcaactggagagttaattggcaggtcctcctcactcctgtaaagtcatcaggcaaaatgcagatgaaggaagagaaaagcaccctcagcgctacaacagccatgctaactgtgkatcagacataagaaaggaaagtcaatgctcgccaagtgtcaagagacaaaattggttgagacagacattttatagcctctaccaaacaaaagaaggttctccaaaagccccaatctttttccaatttaagatacctttctcaaacggctctaaatataccatttatattttgttagatctcatatacattgtatatatattccagattctttgcccatggttgc

SEQ ID NO: 271076 - DNA, 580 bp, Homo sapiens
caaagccaagtcttctaactctctatggtcccatcccacacaaagtaaacattgtaacttgccaggattgtccttaggtccaagcattggagtagaaagtacagatgccttaatgaaactggtgactatcatgatttcattttaaatcttaatttcactagcttgtaggtaaagttggagatcataatttatagtaagtgtattccagtttagaaataaaatatgctttttagctgaagagctcaactggagagttaattggcaggtcctcctcactcctgtaaagtcatcaggcaaaatgcagatgaaggaagagaaaagcaccctcagcgctacaacagccatgctaactgtgtatcagacataagaaaggwaagtcaatgctcgccaagtgtcaagagacaaaattggttgagacagacattttatagcctctaccaaacaaaagaaggttctccaaaagccccaatctttttccaatttaagatacctttctcaaacggctctaaatataccatttatattttgttagatctcatatacattgtatatatattccagattctttgcccatggttgc

SEQ ID NO: 271077 - DNA, 580 bp, Homo sapiens
caaagccaagtcttctaactctctatggtcccatcccacacaaagtaaacattgtaacttgccaggattgtccttaggtccaagcattggagtagaaagtacagatgccttaatgaaactggtgactatcatgatttcattttaaatcttaatttcactagcttgtaggtaaagttggagatcataatttatagtaagtgtattccagtttagaaataaaatatgctttttagctgaagagctcaactggagagttaattggcaggtcctcctcactcctgtaaagtcatcaggcaaaatgcagatgaaggaagagaaaagcaccctcagcgctacaacagccatgctaactgtgtatcagacataagaaaggaaagtcaatgctcgccaagtgtcaagagacaaaattggttgagacagacattttatagcctctaccaaacaaaagaaggttctccaaaagcccyaatctttttccaatttaagatacctttctcaaacggctctaaatataccatttatattttgttagatctcatatacattgtatatatattccagattctttgcccatggttgc

SEQ ID NO: 271078 - DNA, 580 bp, Homo sapiens
caaagccaagtcttctaactctctatggtcccatcccacacaaagtaaacattgtaacttgccaggattgtccttaggtccaagcattggagtagaaagtacagatgccttaatgaaactggtgactatcatgatttcattttaaatcttaatttcactagcttgtaggtaaagttggagatcataatttatagtaagtgtattccagtttagaaataaaatatgctttttagctgaagagctcaactggagagttaattggcaggtcctcctcactcctgtaaagtcatcaggcaaaatgcagatgaaggaagagaaaagcaccctcagcgctacaacagccatgctaactgtgtatcagacataagaaaggaaagtcaatgctcgccaagtgtcaagagacaaaattggttgagacagacattttatagcctctaccaaacaaaagaaggttctccaaaagccccaatctttttccaatttaagatacctttctcaaacrgctctaaatataccatttatattttgttagatctcatatacattgtatatatattccagattctttgcccatggttgc

SEQ ID NO: 271079 - DNA, 519 bp, Homo sapiens
cagtagagcagagaagctaaggcagggaagccatttaagaacatattgtaataacctacatattaatgtgattttagaaagaaaacaataagttaaaattcaaggagcttgcagagaaatgaatagaaagatttggcagcatattggatgtagtataaagatttaacagggattaaaatcattccacagctccaaggatagacattggaaaactaatggtgctattggtggtaatggtgtggttaggaggaattcttgttttgaaaagggtyagacaagtgagaagggagaataattaagattttgacatattaattttcaggggatagtaggaaacccaagggaaaaatatcttgcaggcaactgaaacgagaatacagcaatgaaaataagaagttcgaattaagtcagtgctggtgctggacatattagagtcatttgtacacaaggagtagccaaaatcaaaagaatacatgaactcccctgaaggagtgaggacaaaagggaatagacaggggg

SEQ ID NO: 271080 - DNA, 620 bp, Homo sapiens
cacataataattatttattcaacattgagaccaactgaaggtacaagccgtgttactgggctggtgatacatgaatgagccaaacagaaaaaggtcctgccattaaggatctttcattycagtgtgtcggcaaggtgggaggggacataaaataatccaataaacacagagattgctatgttctgtctctgccaaaactcatgttgacatttaatatgcccatgtgatggtattgagaggtgatgcagcctttaagaggtgtttgggttatggggtctccatcactcatgaatggattaatgcagttctcatgagacaagttgagtttccaggatactggattgatagattccaggtacttgagatagctggctgttatgaagcagggttgcctctcatgtatggagcgcacaccctcttccccttacactttccgccatgagttgaagtggcatgacaccctcagcagaagctgaccagaaaggctgcctgatcttggacttcctgccagaattatgagccaaataaatttctcttcttcacagactacccagtctcgggtattctgtgatagcagcacagaaaggactaaaacagagatgcataatatcaggtagtga

SEQ ID NO: 271081 - DNA, 620 bp, Homo sapiens
agaaatgcaactaaaggaaacaggaatagagttttttaaaatgtaaaaatctattgattagaaacacagggaaaagaaaygcaggcaattaaactccctgaaaaagaaaaactaagtatttctaaatttgcaaagctagaatacatcaagagtctccattaaaaaaaattaaaatctacacatccagaggaacttgtcttgtcatcatagaaaattgtcctagaatgttaacaatgaaacatactcttaataaaattatttgcgttttcaagctactggcagcttgccaaaattaccaagttatataaaagggagaaaataacaatgtggccccagatttctccataataacatttaagaccaaagacaatttttacaggatacttaaggaaggaatgaaccaagggttttctattcagccaagatgtccttcaaatataaatgctacaaagaggtttacgtatgtaggaattcaggttatattatcttatgagagcttcttaaggaaattactagatggcaaacttcatcccgccaaatgatgactggtaaattacagtgaaagggctgatggtaagcaatgagtacattttcctgtaaaagcaagactaaaacaaaaa

SEQ ID NO: 271082 - DNA, 523 bp, Homo sapiens
tcttgtcttttttttttttttccaaacagggtctcactctgttgcccaggctggagtacagtggcatgatctgggctcactgtagcctcagcctcctgggctcaagcaattctcccctctcaccctcccaattagctgggactacagaacacaccayaacgcccagctaattttgtttattttctgtagagatggggtcttgctatgctgtccaggctggttgtctcatcttaatacggtcataacaatccctgctctccaagcttcctcaaggcaggactacatctttccctactacatatgtcatgcgattacagtgcatgacacataataagtactgcgtaaatagttcccaaatgagtatgtagcacaaaaactttcaggctaactcttggcaagactttgcgatttctagtttgtaaaacatgaatcacaacgacaaagaatgagggactcatcccaaaagaaaacataaataaacaaataagtgtctatttggaacaggatattaagtgtgaattat

SEQ ID NO: 271083 - DNA, 523 bp, Homo sapiens
tcttgtcttttttttttttttccaaacagggtctcactctgttgcccaggctggagtacagtggcatgatctgggctcactgtagcctcagcctcctgggctcaagcaattctcccctctcaccctcccaattagctgggactacagaacacaccacaacgcccagctaattttgtttattttctgtagagatggggtcttgctatgctgtccaggctggttgtctcatcttaatayggtcataacaatccctgctctccaagcttcctcaaggcaggactacatctttccctactacatatgtcatgcgattacagtgcatgacacataataagtactgcgtaaatagttcccaaatgagtatgtagcacaaaaactttcaggctaactcttggcaagactttgcgatttctagtttgtaaaacatgaatcacaacgacaaagaatgagggactcatcccaaaagaaaacataaataaacaaataagtgtctatttggaacaggatattaagtgtgaattat

SEQ ID NO: 271084 - DNA, 573 bp, Homo sapiens
actggggcttagagaatttaggtgtttttgcagctagcaagaggccaagcccagatgctgctgggcttgaggaccatcactgaggtctgccctgggagtagagacatgcttcctcactctgtgcactgggactctgctggcctgccaggaagatgttcttgcacagagatactgcaagagttccaagagaaggaaggagggagtcacaaagtgggtgaggattgtgagctgtctggctgatatagatgggctgtgaggccagtgagggaggaaaggcatgctctgccatgattgctggaaggttggctctacaacttcaagcrtgcagctcaacgtctgacaacctctaagtgaccaaggcttgtttgcaggagatgaggggttggttaatcccacttctgaacctgatggggaaagaaaagctacacagcaataaagctccctggccagttttccccagagcaggggcagccatggaacctgctcagggcagggcgtttctcaagtttttgggctgtttaacaactgcttctcttctagcaacatgtacaacaacatgtgcatttagaaaga

SEQ ID NO: 271085 - DNA, 475 bp, Homo sapiens
taggcatgtcttcagtctttcctttatttctggaaagtacccataagtggaatcttaacagacattgctactgcaatctggccattagtttctgcccatcggtaatttgaagtttcttgtgttattttctttattgttaagcagaaaatakgtttcaatgttacttgtgattcatactttttctttttttgctaactccaattatacatatgttggattttgttttcttgcttaatgtctatttcaaccaattttctctggccctttttacttccttctttcactttcattctcctagctattttcctgattttattctatagcttcttttatgaaaatttcttttcaaatatattctttctcaggcagtttttaaattcacctttatttctaaatgacagtacctttttcttctttctcttctgagttctataacttctacttcaatttctttctcttcttgtttattttattg

SEQ ID NO: 271086 - DNA, 544 bp, Homo sapiens
cggtaatttgaagtttcttgtgttattttctttattgttaagcagaaaatatgtttcaatgttacttgtgattcatactttttctttttttgctaactccaattatacatatgttggattttgttttcttgcttaatgtctatttcaaccaattttctctggccctttttacttccttctttcactttcattctcctagctattttcctgattttattctatagcttcttttatgaaaatttcttttcaaatatattctttctcaggcagtttttaaattcacctttatttctaaatgacagtacctttttcttctttctcttctgagttctataamttctacttcaatttctttctcttcttgtttattttattgtaatttctgaatttttaatattatcacatgcagtgcttctctgagcatatttgatttactttgaagtgttgcattagttttatttcacttttttggtggtggattcatccactgaaagactttgatctaaattttctgtttattctcacgttagctttgcataaatga

SEQ ID NO: 271087 - DNA, 652 bp, Homo sapiens
atgtggctggggaggccccacaatcaaggtggaaggcgaaaggcgaaaggcacaggcagcaggcgagagagagaatgagaaccaagcaaaaggggtttccccttataaaagcatcagatctcrtgagacttctccattaccacaagaacagcatgggggaaattgcccccatgattcaattatctcccatcgggtccctcccacaacatgagggaatttcgggagctgcaattcgagatgagatttgggtggagacacagccaaactgtatcacatgtgattttagtggttcgtcacaggccatctgggattgtcttactacagtgttcaagggatctggcagagcaggcccagaaggctctactcaattacatgaaagacatctcaggttcttctgacacccattcctgctatatttcttctggtacctcggttcacacaaatggctcgtggagagtttcttatgaccagttgactgaggaaaaactgctcagccctggcatacagatggttctgcttgaattgctggcaccaaccagagtggactcctagagcgttacacactcaataaagagaatctgaaagacagcaggcagtaaaaaatcctcccggtcagcagaaatttgagctcagtgagttgttgcagacatgt

SEQ ID NO: 271088 - DNA, 556 bp, Homo sapiens
atgtcatacttcttacaggaaaattaggcttttcattgacaatcaacactccattgtttatttttcaaaacaaaatgctgatcttcttacagaaatagttcaggaagggacctcaatcattgccaaagccattgatgtgggatccccaagttctctggggtgcatgtgaatgtgcaccggctaagtgctgaattgcctctgcagagggtcagtagagcttctacagacaggatggagccagtcccggcctgggattcatgatgacttttaacttgacgggaggcaagagggactttgcaggtgygttggagtctgaacagaggtccaaccttgctcccttgccctaaatccttctatagggttctaagtgaacaagagcatggctggtccagaaatagggatcctggagacagcgtgtgagcgggaggtgggctcacacctagctgcacagctgggattagcacattctccgagttgaatgctggctccaggagacgctgcagctcttctgatgatttgctgatgctctcttgcttgggagtttgtctgtttccat

SEQ ID NO: 271089 - DNA, 481 bp, Homo sapiens
ccccaactccattagccagcaccctgccaaggggaatagtgaggattttaaaatataataattggtgtcactttgctttccttatctcaaccccggagctatcctctagtgatttaggaaagagaaccatggattcaaatcccagcttgggacattaggacagttgcttaatatctgtgggtctcatttcttcatctttaaacatgttcattcgtaattgatagggctcttggtgaggattacgtgagatgaagaatgtaaagcacctggcatagtggctggcacacactgggtggcagactggctggagaaagaaggggttcaacaggatattgccyggcagtccataaggaggaggaagataatgctggaaatgtaatgagatgagcaaaattgcagtcggcagatcttctctcaccgtatttattattctgtctgaagctttctgccttttggccaggatctaataggtgctcagcat

SEQ ID NO: 271090 - DNA, 559 bp, Homo sapiens
atagtttctatcacttggtgtgccagcagctgccaacagcagagtccccagagtgtaggtgttgaccagccagaccccaggcagcagtgaggcatggttcacagtgctagcccagtccactggtgcactccataattgactgttgctcatagtttgctgacctctgatgtagaataaggggaactcttttaaactgtaggtaggagtaaagttagtatactgctttggaaaaccactggtattgtctcctaaaatacaagcacaaagcatactctgcaattcctaagtgtacatccaacaaaaatgcatgcacatgtgcatgcagagacatgtacgaaaatgtttataagagcattagtcataaaagccaaaatgtgaaatcaattatcaaatgtccaccagcattagaactggaaaataaatrttgaactgttcacataacacaattctttacagcaatgaaaatgaaaaaaaaaagttgccacttcatgtgacagaaatgaatctgatgaagagaatgttgagaaaaaaatacattccatatgacttcattaatgta

SEQ ID NO: 271091 - DNA, 581 bp, Homo sapiens
aagattccaggaatagccattggaaaccactgatcatttagtaacactctcaagaactgctgagagataaaggctgctcccgtactcaacaatcctaaattttgttctgaaattgctgtctttttttttaagtgtgttttatagtgtccttcttaatgtcaacaatcgcttcttgctgaatcagtgtagatccctgtatctgtgctctgtccacccactaaccctcaacatccgtggtttctgtagattgggaaaataaagtccccaggctttctagaagtgtgggaaaattaaaagtccacacactaacaggcctcgagagactttctcaagtaaaggacatgggctttacattctggamcttgaatgatctctcttgatggtcaaacacctatttttctgtctaatttccagattaccaacaggatattagaagctaggtgacacttatataagtaaggacattttctatcatcaagacgaaaatggatttgcattgcagatggtgattttaatttctcaagtgagaaaacgtttctagaatctcttagtcgtatctactagtaacttgttgctattat

SEQ ID NO: 271092 - DNA, 655 bp, Homo sapiens
gattttagacagcaagaaaacatgcatatggattgctgcagtattcagccagggcaaatagatgttcccttcctgatcagagtcaggttaaaattcagccagataattgctgagagggaagagatgtgaaaggaaatgatcttatttgctttcggaggctagataactcatttcaatatgcccagctttgggcttttattcataggtatatgtatcagtttatgaataaaagagatacatattttgatttggaatgaggttgggatggaaggtgcaatttgaatttttcaagacttggattttatttccaatgctgtttgtgaggatttttttagtttttattttataagaactttttaataccaggcaatgtcattttagtaacacataacacaagaattgaattacatctgttgcatatcctctccctccctccartattcagcctagagaatttaaagttttagcctttaaaaaatttacaggctgtgcttgtctttatagcagctgatgtgaaatcaactcttagcttccattttcaaccttaagctttcttcattctgggtaaactcaaggcttcccaatccgtactggtgataagtgcatgatccaatcaagctagctggtggctcaaggttgttgactaaagagttgt

SEQ ID NO: 271093 - DNA, 522 bp, Homo sapiens
ggagccttggtgtcagacctaggctggagtcccaagaccatggggaaagtgcctctgcctgtctaagcccgtttccccagctatgatgctgggtgatgaaagtcctctccccagctaaggatgtcctgccaatgaattgggaatgcctgattgggcccagcactactgcctggcatakgcattcacctattccgtacacatggagcgggcttgaggctgggactaggaccactaatagaacagactcaatcttgcccctcaaaaaggttacagctagagagacagcctgtaaacatgaatattgcaagagattgcataattactgtggtaaacagattcagtttaaattaggtgataattctgcactgtccagctttataaaaagaaaactgactgtaaatgcctttgtgatcataactaccttcaaattaaggagtctccggcattactctccacacctttcacctccatttgttggttaactcctgtttaccttttgggtctcagcttaaagaccaccag

SEQ ID NO: 271094 - DNA, 522 bp, Homo sapiens
ggagccttggtgtcagacctaggctggagtcccaagaccatggggaaagtgcctctgcctgtctaagcccgtttccccagctatgatgctgggtgatgaaagtcctctccccagctaaggatgtcctgccaatgaattgggaatgcctgattgggcccagcactactgcctggcatatgcattcacctattccgtacacatggagygggcttgaggctgggactaggaccactaatagaacagactcaatcttgcccctcaaaaaggttacagctagagagacagcctgtaaacatgaatattgcaagagattgcataattactgtggtaaacagattcagtttaaattaggtgataattctgcactgtccagctttataaaaagaaaactgactgtaaatgcctttgtgatcataactaccttcaaattaaggagtctccggcattactctccacacctttcacctccatttgttggttaactcctgtttaccttttgggtctcagcttaaagaccaccag

SEQ ID NO: 271095 - DNA, 525 bp, Homo sapiens
tccctctttcctcttgtctctcctcagcctttggccctcaatgccccctctgcacacgtgtctgatgatcactcatggtcaagaggcctctgaccctggatttagaatctgctcatcaggaaggtgagaatatgaattgtkgaatccacacaaccagtactacctggcactttctagtcctgttgtgcaaggagaagtgctctgaatacagaggctggagagagggaactctataaacaaggccacacatgcagggaaaggcagaaccaaggcgcctgcccagtctctgtggttccaggaccacagggtttctttccaccatgctaaaacatgacctgaaagatgaatttacctaaatgcctttatagagtctagggctgttccattcaaaattaactaaggatcaaatctgccagacaacaaatgctcagaccttgattgatcacctactgtgtgcatagggacaatgtactgaaatttctcatgaggtttcaattttaaatattctgtcccactattcccata

SEQ ID NO: 271096 - DNA, 564 bp, Homo sapiens
gacagtggtacagagtaggccctcagtaaaggtcaacttcatggcacccatctcttcccacccctctaaaaaatgccagctgccacagaaaaaaacctacaaacmttcaatcctctaatgttgtcagataaatgtcttaggaagaagaaatagaaaaatattggaaaggaggaggatagttccttaatcatttgtggaacttaccactttgtgttgtgaccacaagggtcacacactgactatagcaagacgctttacaaagttggtgtcagtggaccacattaatcctaacagcgactcaagtcctaccacatctgaggagaagacactgagaactttccagttaagcttgaaggtcatctggattataactggaaagtacaatttctcaccagatcttgcagatcagggcttagaacacctggggctttattctgtctgtccaaggtttagtgagctaaccaagcacaagtcttatttctcttcaaggcactttaaggagataactaatcaaaatagcccccgaagtaaacaaatgtggctggcttattttagaacctaaaa

SEQ ID NO: 271097 - DNA, 595 bp, Homo sapiens
tgacctaccccaaaaagttaagaagcatggagtttaggtctcatttttccactgagaagtccaatgttctccaaaaactacacagatagaagaaatagctttttgcaaggccatatgtggagacatgatccctatrccatacttgttatatctcttttgtttctctccatcctcctccgttattctctaacaatccaataagagagaaaatagacaaggaaacagaggtaaagaggcagggtgaatataatgatgtagggggaacaaggaagaactttatagagacttagagaaccagggatatttctgaaggtgtagggaaaatacttgatgcatccaagtatttttgaacattttaaggcaattaggtgccggtcttaaaggaatcgaaccataagccagatgttttgttatcactgatacaatttaattcataacatttaattttctaaagttaaaataaccttgcagtctggcatgagaatgtgtttgagcccacagtttttaaaatagaatcagaagaagggtggtggttttctaccatcctcttttcatatctgagctcaggctgaacccagctctcatttgtggttct

SEQ ID NO: 271098 - DNA, 574 bp, Homo sapiens
tcttccttgttcttgtctttctcatactattcttgaacagagcagatctttttttatttcttaaggcctaccagcaagactccttcaagcccttctactccttgagtcctttggcaggtcacagccagcccttcagggatacgggtctatgtggcagtcctgtctatatggattacttcttggggtggaggggaaatgagacatggtaaggaagggattgagatcttgagatccttggtctgcagacagggaatgcacttggccctagtgaatcattgctatttgttcttagggttggtgaaggttaagtagggtgagagyggtgacattcttagcatggaggtgactggcacagtttcgtggagacagaaagggaggtcggcttggaacatccaagaggaaccacccctagtttcctccagttccccaggaaggctccctagaggggaaaggagcagtcctgcagcctgtgcccttagaacaggagcacgtgctgccagtcatctttggacatgccatcttccctacatttgtggtgacaagccataagggagtgccagaggtctctcagagc

SEQ ID NO: 271099 - DNA, 583 bp, Homo sapiens
atatataatttagttctattcagtttcccaaatacagttgtccctcagtatccacaagggattgagtccaggaccctctatgggtaccaatatcttaggatactcaaaacccttatatacaatagtgtaatatttgcatttattytacacacaacatcctgtatactttaaatcatttctaaatgacttataataccttatacaacctaaatgctatgaaagtagttatcacactgtattatttttaattgttttttttttaatgttttcaatgggggagttggttgaatccacagacagggaattcaggtacagggagggccaactctagttctgcacccacagaggataggaacataaaaatgcggactccctaaggcctccttcccctccacgttctttcttcagtcttcctctagggggagctcaagttagctttagcacagtgtgaagccagtgcagcgtctcgcttccacttctccagggggcgctgcaaagattttggtcgccaaagatatcacggtgcgcgcgtctggaagcatttccgctctggagcattttcgttccgccgggtgccagcgtt

SEQ ID NO: 271100 - DNA, 505 bp, Homo sapiens
gtttctgggttctctagtttataccatcagtctctttgcctattgttgaaccagtaccacgctgtcttaattactgtaatgttatcataggccttgatatatggtcgagcaccttttacctttcctttttcttcaatacacatttactgccagcttatcaattctgtctgtctctctctctctcacacamacacacacacacacacacagtgtgcacccataaacacatgcacagacatacaccctgttgggattttgattagaagtgcattgaatctatagatcatttggaaggattcacatgtttacaatattaaacctttaaacctcctatccagttctttccaatttttttcctatgctccccctgaaactgaaggagccccccggttttttttttttacttttttccctaacttctcctactgtgaaattttaataccacaggtatactgtatatctttgctttgcatataagaagatttttttatcatcctaaaaccta

SEQ ID NO: 271101 - DNA, 545 bp, Homo sapiens
tcactaattatcagggaaatgcaaattaaaaccagtatcagatattacctcacaaccataaggatggcttttatcagtaagacaagagataacaaatgttggtgactggagaaaaaggaacattagtacactgttcatgggaatagagattggtacagccattatggaaaaaagtatgaaccttcctaaacaaattacagcaattcctcttttggayatatacccaaagaagatgaaatcaccactttgaaaagatatctgagctcccatgttcactgcagtaatattcatagtagccaaagtatggaaacaacgtaaatgtctgtagatgagcaaatggatacagaaaatgtggtgtgtgtacacacacacacacatacacactggaatattattcagcctcaaaaaaagaaggaaatcctgccatttgccataacttggatggacctaaaggacattgcattaagtgaaataagccagacacataaataaaaatattgcatgatctcacatatgtgaatttttttaaaaaaagaagtcaaata

SEQ ID NO: 271102 - DNA, 571 bp, Homo sapiens
taatttacaacatgtggactaaagttaataaaattgtattatattagggatttaaaaaaataagtagattttagctgcttttgtcataaaaacagaaactacgtaagatgatagatatgttaatctgcttcactatagtaacattttactatctatatgtatccataataatgtattgcaaaccttaaatacatacaataaaatttatttttaaaaagtctattggaaaataacattaggtttctagaaattttatcaacattctcaaggatattaaagttatctcagaaaattccccaaggacaaactgagagttacattttcctaaacagatggaatttttccattagagaaatgactctggcattccattaggaagagactgaacaatgtgatcataaatatatgtagccccaaatccctaccttgaatgatagaggctaaactttccaaaagtgaattctgtgcttatagctatttctcaaagccaatccctggggacttayggtgtacatttatgaatcatgtagggcaaagggtggttccaaacaggaaataaaagagaccatga

SEQ ID NO: 271103 - DNA, 571 bp, Homo sapiens
taatttacaacatgtggactaaagttaataaaattgtattatattagggatttaaaaaaataagtagattttagctgcttttgtcataaaaacagaaactacgtaagatgatagatatgttaatctgcttcactatagtaacattttactatctatatgtatccataataatgtattgcaaaccttaaatacatacaataaaatttatttttaaaaagtctattggaaaataacattaggtttctagaaattttatcaacattctcaaggatattaaagttatctcagaaaattccccaaggacaaactgagagttacattttcctaaacagatggaatttttccattagagaaatgactctggcattccattaggaagagactgaacaatgtgatcataaatatatgtagccccaaatccctaccttgaatgatagaggctaaactttccaaaagtgaattctgtgcttatagctatttctcaaagccaatccctggggacttacggtgtasatttatgaatcatgtagggcaaagggtggttccaaacaggaaataaaagagaccatga

SEQ ID NO: 271104 - DNA, 593 bp, Homo sapiens
tggtctctctgcatagggatacactctagggctgacatttgagattgttgaagtggatcatcaattaacctcacttaacaatgagttgaatcataccatgttctattactctttaatgtactgtggaaaaaaatctatttgatgggatacactttttctttttttcataaatcattttttctttagtctgttttcatcatragttatttaacattttagtggcttttcatcacactagtaatattgtgattagcaataattagaatggccaaaattaacctacctggatgtgaatgaaatcaaccttctttatatcatgaaaatttcattgagttattctagcttgaagagatacagatgaaaataaaatgcttcactagaaattatattagatgacaatgtcaaataagtagggaaaaaaacctctgatgccagtcaaaaatatactcaatttataattttccacccttacctcttatgttttcctgtagtaatagcaagagtctcaacccgagttagtgttcaatacgttttctcttaagtgacttttttgtgtttaggaaatgtgttatttattttatacattttcttcc

SEQ ID NO: 271105 - DNA, 572 bp, Homo sapiens
agcaatttattttaatatatgtgcgttagagtagataaccatagatgtaaaactgcttaaagtattaaatacagtgatttgatttgccttttaagattgacacttatttaaatccagaatatctcaaagtctggaactaagaattggaatcccctcatctgctgctatttgctaagccactaggggcctgtataactgttcttatatccaggaggtatcctggtatggcatatgcaaacccttcctagagagacattaaaaaaaaaaaaaaattcargtaggcattcccccaagtttttgttttttcctttttaatacattaactcatattctgatactagttatagacaatgattgaagactatttcaagaattttatttagggcttctctggcactatgattttccatatagagtgtgaaaaatagaaaagagaaaaggtattggtgcaaattcatatgtgattccagttctcagtgtatgacaaagataaacaagaaggaacattaataacttttctttattggactgataaggatgttatttgcataatgtagggttaaaagataaat

SEQ ID NO: 271106 - DNA, 548 bp, Homo sapiens
ctgttttcagtcagttcccattctcaacctggtcccagacaacctcagatctgttttctgtctccgtaggtttgtcctttctgtaaagttcatataaactgagtcatacaatgtgtagtattttgtttgtgtctgacttctttcacttctcatgtttctgaagttcatccatgttttagggtttatcaatggtttgtttcttttcattgctcgttattactccattccaagtatatataacattgtttatccattcaccaactgatggacatttggtttggttcccgttgggtctataaagaataatgctactatgaacatttgcatacatayttttacatggacatatatttttatttctcttgggtaaacacctaagagtggaattcctgggtcatctgccaaatctatgtttaacattttacagaattgtcaaaatgtttttctgaagtggtatgttatttttcactaccactagtaatgtatgagtattccactctctccacatccttaccagtacttgttactgttagtctttttgaatatag

SEQ ID NO: 271107 - DNA, 548 bp, Homo sapiens
ctgttttcagtcagttcccattctcaacctggtcccagacaacctcagatctgttttctgtctccgtaggtttgtcctttctgtaaagttcatataaactgagtcatacaatgtgtagtattttgtttgtgtctgacttctttcacttctcatgtttctgaagttcatccatgttttagggtttatcaatggtttgtttcttttcattgctcgttattactccattccaagtatatataacattgtttatccattcaccaactgatggacatttggtttggttcccgttgggtctataaagaataatgctactatgaacatttgcatacatatttttacatggacayatatttttatttctcttgggtaaacacctaagagtggaattcctgggtcatctgccaaatctatgtttaacattttacagaattgtcaaaatgtttttctgaagtggtatgttatttttcactaccactagtaatgtatgagtattccactctctccacatccttaccagtacttgttactgttagtctttttgaatatag

SEQ ID NO: 271108 - DNA, 563 bp, Homo sapiens
tctcttgggtaaacacctaagagtggaattcctgggtcatctgccaaatctatgtttaacattttacagaattgtcaaaatgtttttctgaagtggtatgttatttttcactaccactagtaatgtatgagtattccactctctccacatccttaccagtacttgttactgttagtctttttgaatatagtcattctagtgggactagggttgtatcgcattgcagttttaatgggcatttatctaatgactaacgaagcgagaatttttttattaatcattcatatatcttctttgataaaatgtctgttcaagccttttgctcatttttaattgagttstttatcttattgaagtttatgagttatttatatcttttggatataattcctctatcagaaatataatttgcaaatattttcttcatttgtgggtcatttttcactttcttaatgccaccctttaaacagaaaaaaaattaaattttgctcaagttcacctattgctttttaaaaatttttatggatcatgtttttggcatcatatgtaagaaatctttacct

SEQ ID NO: 271109 - DNA, 655 bp, Homo sapiens
tgggttgggtcatgaggtgtgcattgctaatcatctctaaggtcacagtgaagttgctgttctaccaacaacactttgagtagcaacagtttctgtcacatgacagtgtcataaacacacatatacctagaaactctggtggaagcctaaatgagattaatattatgtcaatatgtgcatagtatatgataatacagtaatagactcataaataactgaatagagattatgcatatgggatatctgtgtgtgtatgtgcaattgtgtagaaaaaggctgactggaacactctatctgaatcccttatttttcaagtaagaaaattaagattcagagaatttaatagatttatccagaattgttgacacaaagccagagagctggtacttgttcctatgcctgtgtctggaatttcagagaaggatttcatcatcttatatgtatgaaaatcattagtatgactatttttgttagagaacaaaaggaaattataaagtcagaccaaggacagcaatgagatctagaaagagaatatgctcatctgaaacaatgaataatgtgatgcaattacactcatttcaagtaatttattttctgatttaggatacactagcmtggctaattaattgggagtagccagagaaagaaggggaac

SEQ ID NO: 271110 - DNA, 596 bp, Homo sapiens
tctgtattttaatttagtttttgaatgctattttatatatgtaaaatgtaatgcaatacttttattaactcattattattttgtagttattcaattcaatccatataaaatagaaatctggattgccayctacattgtataaataatcaccaagagtagaatgagagaacagtcaggctacctgggatggggtcagtttgtacttaggttttcctctgccaccatcaccaaactttcagttttcttctccttcccctctatccccaactctttgcttccaagtataggagattcctggggctctcagatagttattttaaaagaaaaaaaaaagttcattttctctcagagttgataatgccactgagaggcacacatccttatataaaagagaatatgagtaaaaatggataatgtcctacaaatcatacataagagttgagggcatgagaagactgacaagggatgaggaggggaaactttcaggaaagagagtgtctagggcagagaagtgagaaatggaaatgaattaatagggaagagtggaagaaggttaatggtgaccatatttcagctaatgaatcagagaaaatgtg

SEQ ID NO: 271111 - DNA, 596 bp, Homo sapiens
tctgtattttaatttagtttttgaatgctattttatatatgtaaaatgtaatgcaatacttttattaactcattattattttgtagttattcaattcaatccatataaaatagaaatctggattgccacctacattgtrtaaataatcaccaagagtagaatgagagaacagtcaggctacctgggatggggtcagtttgtacttaggttttcctctgccaccatcaccaaactttcagttttcttctccttcccctctatccccaactctttgcttccaagtataggagattcctggggctctcagatagttattttaaaagaaaaaaaaaagttcattttctctcagagttgataatgccactgagaggcacacatccttatataaaagagaatatgagtaaaaatggataatgtcctacaaatcatacataagagttgagggcatgagaagactgacaagggatgaggaggggaaactttcaggaaagagagtgtctagggcagagaagtgagaaatggaaatgaattaatagggaagagtggaagaaggttaatggtgaccatatttcagctaatgaatcagagaaaatgtg

SEQ ID NO: 271112 - DNA, 510 bp, Homo sapiens
tattaacttagacttacgaacctatgaattcttcttgaatagatttctgccaggagcaaataatgaaacctttaaccaggaaatgacgaagctccaaattcttctgaggatactgtagtaaagtgattaccctggaatactatagtgcatgagcattacaaaggaggtttataggcatgtggagttttcagaactcatgacattttttcccacagaaaatcacattcctggtctatttccagtgtttaaaaggaaaggtaaactggcatttagtakattataggcttttcatcagcttatttggtttgatgactattcctaatatataccccaagtgtagtatttaaaaaaaacagtctgagtaaatttttacagctatgtctcatgagctgtttaaacaacaacaacaacaacacacacacacatactcagataggctctcttggtttggattaacctggtacagaatattagaacaaaactggtggaaacacaaaatcaggccaattc

SEQ ID NO: 271113 - DNA, 475 bp, Homo sapiens
atgattttgtggattgagtaatgccatatgctttaaatgcttagcccaatgtccagtgcctaggaagtaatcagttaagcttcatattattttttagtcatttacaaaatatttattcggtatctaccatgaaccgaacaaaatagaaatgcagtttgtgtgtgtatatcttccaggaatgaagcatggcctgacaacgcctctgtattatatggaaatgtataattagagtttttaagcattttttaaccaccagcacattagcaaacaacaaacactattgcacggtgcagagtttgtttacttggcaaaatgtarataatgcagctgcttcacacaacagtcaaggggtagggggtgctgactgcagaaaaaattcagccctaggactatatttagttagaatgtgacatcattttaaaacttgaattatttaaaccatgcattttaaatgtttgttatttaagaaaactcg

SEQ ID NO: 271114 - DNA, 443 bp, Homo sapiens
gttttctcatcattgtgcttctagtgttttgcagtgcctaccaagctcagtggacatttgagtaaatrcatggagaaaagtatgaatgaatgaatgaaaaaatgaatgcagagccaagcctattgggcccaatcacattgtatggtcagtactcattactgaccctctccactaatgctcagcacatttattttctgtgaaaccaggataacaggaacaatgaaatagctttgaaggagatttcccatcagtgtctcgatcacccatctctcagctaacagatcttattttcctgagctcatgctgggcccaagaaaagacaacatacgcctatagatacttggggacccaggcctctctctggaatacagaaaggtgtactgtttaaaggaagtgtgaatgcgtgtaacttaggcctactattccattctcacccagagtaa

SEQ ID NO: 271115 - DNA, 459 bp, Homo sapiens
tacataatatatatacacatatataaaaatatatatgatagagtagtcttcccttacttgactataactatttaccttatttctctctgattaatgttctctgtatataattccgaattgcctcccccactaaaataatgtgagtttcatgagggcagggactttgttttgcttacttttttgctttgttttgttcacttctacacattaattaccaacctctaatagatatttgttgaagaaacaaactgataattaatgtatgttcttacatgtcaaatctcatggaccttggaacacacagataaaaattcagcatattaatataagtaattgtcatcaasgtactgcattttatttgcactattctataaaggaatgcacagggcaatttttcttgaattagcaacacaatctgtatgttttacctttacccttaaaccatatcaactaaacata

SEQ ID NO: 271116 - DNA, 602 bp, Homo sapiens
tattggtaaatttctgtaaaatcaaccgttatacttggtaaatgaatgaacatgtgcacagtgtgactggggaaagaaagatgatgttgtacacttgtcacatgataggtgaggtactcgatgaatactgttggaataacattttcatgcccaagctctaatttaactaattttataaaactgagaatgttttagcaactccgtctacatgccctggagaaaaatayttgtttttaaatattctaaagcactcaaaagttttcaagatcatgaaactttatccatctggcttagtggaggatttgataagaaatatagctgctttccaaaggatatactcaatgattctttcattaaaattaattcccaacttactgcatctaaatatagactttattttaaacaactactaaatgcaaatggttaaaatcatgttaatcttctgatatatcatctgatacttgcacttggtgatgtttcaagactttggatgaagcccaaaatgcctaccatgatgattctcaaggcttttgatttctgatcgctgctctcctcctctcactctctctccacttgagctcttcaaattctccaaaatatta

SEQ ID NO: 271117 - DNA, 447 bp, Homo sapiens
tgtgataagaaaatcaactcaaactaacttaaaacaaaattcattggctcacatagtaggaagactagaaggaggtgtggactttcagggaatttgatccaatggctgttctctattatcttacctctcagacaatatctccagtccttttccattgtggttatgggatgatgtcagtagcaattaagactacatgcttcttcaggcatgtccagtgagaaatgctgagagactctttctcttctgaaattcttataaaagtttggaaaaargaaaaacacttgttttagaaataactaggctcaattccttctgtaccttattggctcaaatccaactatgtgtccgtttctcaaatatttactgtcatttcggaagctttattggcttagtccttggtttctgagtcaatcattgatgtagataatgggtttatcatgactggtt

SEQ ID NO: 271118 - DNA, 537 bp, Homo sapiens
aggatgtgctattttatcctagttctatcacgstttgtgcagatacctggcccaaaattttcttattcattgagaagacagagaaaagtataattatggccaaaatactagcttgtacaaagctgttttctttattgtgtttttaatacaagctccatattcccagttttacacaggattgtaataatacaacattgttaacaaaaaaatactcaatcatgtgagagaacaacattgagcagagaagtcttttgtttttctgaagacagagcctttttgataggggatgggagatcatatcacacacagttgctccagagtaaaggagacagacttgctgatctctctgctagcacaaagataatccactcactctacaggctccttgttggcacctcttcctctttgcattctcactgtcacattcctcaccctttgccataggagacccaggagaggaaattattttggctacgctgagacataagcacaggtggtaccacttgttataaacttttcagtttttgttggagctat

SEQ ID NO: 271119 - DNA, 634 bp, Homo sapiens
cacttatgaatgcagattataggtaatttgaaaccctaatctctgcttattttcaccatactcaactgtgattctgaaaatgtggctttataagaaagggaatctgatgtgaactgatgtgaaattaaacatttctctgtatgtgactaactgtaaatcccatgcacgttctttgattcctgactgtcttatctatattttcatgcctcctgtgatgctcatcaggtgataatagtaatgtcaccgtgactgtctcaaattgtttggagactttttaagaaaacgttactcaacacaatatagctaatcaacatttttctcagrtagtcaatacattatgatgcggtaaaaaaactaccatttctattctctaatattagaaggaacacacgccatcagaaagtggtaatgtctgtaacatctatccaaatactttatttcttacttgttaccaaaaacaaataaaccaaaaaagtgctcctcttactagatgagttgataagaatggattagtaagtaaaatccaaattactcagtaatattattatttttctattgcatttgattcatgtaaatctcaaagtgaattctgtataagaaaccattttgaattatcccatgttcaccatataaa

SEQ ID NO: 271120 - DNA, 634 bp, Homo sapiens
cacttatgaatgcagattataggtaatttgaaaccctaatctctgcttattttcaccatactcaactgtgattctgaaaatgtggctttataagaaagggaatctgatgtgaactgatgtgaaattaaacatttctctgtatgtgactaactgtaaatcccatgcacgttctttgattcctgactgtcttatctatattttcatgcctcctgtgatgctcatcaggtgataatagtaatgtcaccgtgactgtctcaaattgtttggagactttttaagaaaacgttactcaacacaatatagctaatcaacatttttctcaggtagtcaatacattatgatgcggtaaaaaaactaccatttctattctctaatattagaaggaacacacgccatcagaaagtggtaatgtctgtaacatctatccaaatactttatttcttacttgttacyaaaaacaaataaaccaaaaaagtgctcctcttactagatgagttgataagaatggattagtaagtaaaatccaaattactcagtaatattattatttttctattgcatttgattcatgtaaatctcaaagtgaattctgtataagaaaccattttgaattatcccatgttcaccatataaa

SEQ ID NO: 271121 - DNA, 573 bp, Homo sapiens
gatacaactgccagagctctggggtcagtcctggagcagaagtgtttaaatgaaatatttccaccaagaatagttcttaaaatcaaaaaggctgccattttcatagctgcccaacaggtaagaaatcagaagcatttttataaagagaactatcgatccagcagggatatctgaagagcagtcaccsatcaaagaaatggaattatgccaagtgactgttatatatgcattctgcttattggcagcctgccctataccattttatctgagaaacttttgttaattataatgtcttctaaaatactcttgttttcatttcacccgttagtttcattatcaataagggtggatgatttgattattttttccatttaaccattttataatagtttagcctcttctccttgtctgtaagtcctcagagaactatttctgattatgattttataaataataaaatacaggatcttatatttgtttgatgatttggaaaattattttttctctgacaagaaggtaccccgaagttttaaatcagacatgatacataaaataaagttacatggaaaatta

SEQ ID NO: 271122 - DNA, 576 bp, Homo sapiens
attgctatatgactcagcaatcccattatttgattggatatgaaatgaaaacaaatcatcctactaaatggaaagaaatcatcctaccaaaaagacacatgcacttgcatgttcactgtggcactatccacaatggcaaaaacatgggatcagcacagatgccccattaacagtgggctggataaagaaaatgtggtacatatataccatggaatactacatagccataaaaaaatraaaaccatgtcctttgcaacaacatagatgaagctggaggccattatcctaagcgaattaacacaccaaatcaatcttggaggtcaataactaagaacgtggtatcaaaaaacaatagaaaattaatgagtcacttagtatatggtattgaaaatgattcataacatgcaaaaaataaaactgaattcttactgaaatatacgtatgttatttatcataacagcaacatttatacaatgctcagtatgtacaggcaggcactttttttaaattaaagttttagggtacaagtgcacaacgtgcaggtgtgttacatatgtatacctgtgccatgttggt

SEQ ID NO: 271123 - DNA, 576 bp, Homo sapiens
attgctatatgactcagcaatcccattatttgattggatatgaaatgaaaacaaatcatcctactaaatggaaagaaatcatcctaccaaaaagacacatgcacttgcatgttcactgtggcactatccacaatggcaaaaacatgggatcagcacagatgccccattaacagtgggctggataaagaaaatgtggtacatatataccatggaatactacatagccataaaaaaataaaaaccatgtcctttgcaacaacatagatgaagctggaggccattatcctaagcgaattaayacaccaaatcaatcttggaggtcaataactaagaacgtggtatcaaaaaacaatagaaaattaatgagtcacttagtatatggtattgaaaatgattcataacatgcaaaaaataaaactgaattcttactgaaatatacgtatgttatttatcataacagcaacatttatacaatgctcagtatgtacaggcaggcactttttttaaattaaagttttagggtacaagtgcacaacgtgcaggtgtgttacatatgtatacctgtgccatgttggt

SEQ ID NO: 271124 - DNA, 552 bp, Homo sapiens
gcaaatatatgtaattttcaacgaacattttaacccaagtaatttatattgagtcaaattgttattatatacaaaaacaagaaatactttattagatataagttaacttagaatttatgtctttactgaatatcatgagccaaagacatacttyagctggccaagatatagacacatataatccacaattgagaaaaatgagaaattaaaaaaaaccccaaaaccttcctgcctgttcaaagtcaatataatacagtggttaaatactggcttgagcttgagttcacagcctggctcctgtaattacttgatttctttgtatttcattttctttatctgtgagatgggaaggacagttatgcctaattcacaaagttattgtgaatattaaatgaattgatataggtaagtgtttaggatgaggtctgctacatagttaaagttcaatgaacatgatctataattacatgtttagattctagtggcaaactattgaagtttcctcttttgtaaaatttgtatggggaaatcatcctatctaacgagatgaca

SEQ ID NO: 271125 - DNA, 552 bp, Homo sapiens
gcaaatatatgtaattttcaacgaacattttaacccaagtaatttatattgagtcaaattgttattatatacaaaaacaagaaatactttattagatataagttaacttagaatttatgtctttactgaatatcatgagccaaagacatactttagctggccaagatatagacacatataatccacaattgagaaaaatgagaaattaaaaaaaaccccaaaaccttcctgcctgttcaaagtcaatataatacagtggttaaatactggcttgagcttgagttcacagcctggctcctgtaattacttgatttctttgtatttcattttctttatctgtgagatgggaaggacagttatgcctaattcacaaagttattgtgaatattaaatgaattgatataggtaagtgtttaggatgaggtctgctacatagttaaagttcaatgaayatgatctataattacatgtttagattctagtggcaaactattgaagtttcctcttttgtaaaatttgtatggggaaatcatcctatctaacgagatgaca

SEQ ID NO: 271126 - DNA, 594 bp, Homo sapiens
cagttctctatgtgccatgctacctgcctcccgagtagctgggactacaggtgcctgccaccatgcccagctaattttttgtattttcagtagagatggggtttcaccatgttagccaggatggtctcaatctcctaaccytgtgatcaccccgcctcagccaaccgaagtgctgggattacaggcgtgagccactgttctcggccctacaaatactcttaatacaccagtacatgagcatgcaaaggacagaatgtaatgacactttcttttgtaatgtttgctaggaaggaaccttgcagtgactgtggcaacacgatactgccaaggatatcagtttggcctccaaaatgaggttttctggaatgcaggatctgagactcccagttttaagccaaggatttaaggaagttcattgcaattgcattaccagtatttataagttttaactttgaattcaatcctcatttagtgggtgaggtaaataatggttggtgctttgtgaacttttatggctggagtgatggatggcctaaacaattggcagtctgctctatccattcattaactctaaactacatattttccaggttc

SEQ ID NO: 271127 - DNA, 622 bp, Homo sapiens
ctctgtctatatattttaaaaactgatgtatagtttacaaatagtaaagtacagaaattgaaagtgtatagcttaatgagattttacatatatgtaaattttacacatatgtgcaaattgtacatgtatatatgcacatctctgcctgccagatcaagctatagaacatttctagcattctagatggttttatcatgtctcatcccagtcagaactcaccataatgtttcatactactccaatctccatcatcacaaaccagttttccatgtttttgcccctcatataagttgaattatattgtatatactatttcttgtttggctactttcacttcgaatgtttttcagattttttctattttgaattatatatcattcatgaattatctttcttatttctgtatatgattgtatattattccatcatgcaactatactacagtttattcattctaatattgaggccatttgagtggtctacagttttgggcattgatgaagaatactgctatgaatatttctgttcatgtctttttgtgaacataaatactcatttstctgggtatatactgaggagaggaagtgctgagtcatagagtgggagtatgctcagctttagt

SEQ ID NO: 271128 - DNA, 552 bp, Homo sapiens
tagatattggcacaccgttttccaaagtatttgtatcactttaaagtttcaccaggcagtaattaaagccctgctgrtgggctatgtagggatacctcatgtggctttagtttgcattcttctgataatgatgtttaacaccttctcattcatttattgataatttggctatcttctttatgaagatatcagatattttgttcattttttaattgcatagtgtaatttcttcttacagacctgtggaaattcattagatactttggatacaagttctatttggatctatgtagcacaaatagcttctccctgtccttttcctttctattctcataatagtgtcttttgataaagagaagtctgtaattttgactgagtatcatttttagtctttatgattagtgcttttggtgtctgtttaagaattctttaattatcctcagttctttaagatagtctcctaagttttctttaagaaatttggttattttatcattcacttttagatatatggttcatcttgctttaattttttattatggtgtgatggat

SEQ ID NO: 271129 - DNA, 588 bp, Homo sapiens
tgaatttaatgaaacttacatcgcaagagagcgtgggtaatgatgtgctataccttgggatatagtttttactccctaacccactcatttgattctcacaacaatytttgaaggtttgcacatgagaaaaaccgagactcggttttaagaggttaggcaacttatccaagtctcagaaggaaactgaaatccaatttggtttgaatctcacattttaaattctacttttaaactttcttggttaaaaaaagtatttcaaaatatggggaatgtatcagaaatggcaggattcagaaatcactgtagttcttctgccctatatatttaatcaggatgaaaagaacaccaaaaaaagtacctgttcgaagcatttgtcattcattattttgaggaaatcttggagtaagatgtccaggtttgaaaaaatatttgctattttttctgttaatgacaacattgctatttagctaaaaaaggaattttggaaaatgtagaaaattatggagaaaataaaaatcactaggaagcccactatattagtcagagtttatgctagctgctataataaagtcacccccaaattgagtg

SEQ ID NO: 271130 - DNA, 588 bp, Homo sapiens
tgaatttaatgaaacttacatcgcaagagagcgtgggtaatgatgtgctataccttgggatatagtttttactccctaacccactcatttgattctcacaacaatctttgaaggtttgcacatgagaaaaaccgagactcggttttaagaggttaggcaacttatccaagtctcagaaggaaactgaaatccaatttggtttgaatctcacattttaaattctacttttaaactttcttggttaaaaaaagtatttcaaaatatggggaatgtatcagaaatggcaggattcagaaatcactgtagttyttctgccctatatatttaatcaggatgaaaagaacaccaaaaaaagtacctgttcgaagcatttgtcattcattattttgaggaaatcttggagtaagatgtccaggtttgaaaaaatatttgctattttttctgttaatgacaacattgctatttagctaaaaaaggaattttggaaaatgtagaaaattatggagaaaataaaaatcactaggaagcccactatattagtcagagtttatgctagctgctataataaagtcacccccaaattgagtg

SEQ ID NO: 271131 - DNA, 588 bp, Homo sapiens
tgaatttaatgaaacttacatcgcaagagagcgtgggtaatgatgtgctataccttgggatatagtttttactccctaacccactcatttgattctcacaacaatctttgaaggtttgcacatgagaaaaaccgagactcggttttaagaggttaggcaacttatccaagtctcagaaggaaactgaaatccaatttggtttgaatctcacattttaaattctacttttaaactttcttggttaaaaaaagtatttcaaaatatggggaatgtatcagaaatggcaggattcagaaatcactgtagttcttctgccctatatatttaatcaggatgaaaagaamaccaaaaaaagtacctgttcgaagcatttgtcattcattattttgaggaaatcttggagtaagatgtccaggtttgaaaaaatatttgctattttttctgttaatgacaacattgctatttagctaaaaaaggaattttggaaaatgtagaaaattatggagaaaataaaaatcactaggaagcccactatattagtcagagtttatgctagctgctataataaagtcacccccaaattgagtg

SEQ ID NO: 271132 - DNA, 588 bp, Homo sapiens
tgaatttaatgaaacttacatcgcaagagagcgtgggtaatgatgtgctataccttgggatatagtttttactccctaacccactcatttgattctcacaacaatctttgaaggtttgcacatgagaaaaaccgagactcggttttaagaggttaggcaacttatccaagtctcagaaggaaactgaaatccaatttggtttgaatctcacattttaaattctacttttaaactttcttggttaaaaaaagtatttcaaaatatggggaatgtatcagaaatggcaggattcagaaatcactgtagttcttctgccctatatatttaatcaggatgaaaagaacaccaaaaaaagtacctgttygaagcatttgtcattcattattttgaggaaatcttggagtaagatgtccaggtttgaaaaaatatttgctattttttctgttaatgacaacattgctatttagctaaaaaaggaattttggaaaatgtagaaaattatggagaaaataaaaatcactaggaagcccactatattagtcagagtttatgctagctgctataataaagtcacccccaaattgagtg

SEQ ID NO: 271133 - DNA, 520 bp, Homo sapiens
ttcctctttctggtaagtttgcagaggttgaaatcccctacataaagtgtgcaggactttagaaattttcagtggagttttgccctatagagagttgttttaaagcaaacatcgtttagaagtagctaaaagagcctattacattattaccagtctgagacargagaagattattttttgtttatgttaatctagatctcagacatgctatgaacgtgaatccatgatagcaaatccaactgagaagaaagcaacttgtcaactctgtgccttcctcaccaaggagctcttttctgcagcaaaattagagatcattaattattagtctcattttcctgatggtgatactgagaccttataagaggaaactgattaaagactattctatgagttatgaaatagtcaagggcacaatctgctaattggttgtgtaaattatactttttggtaaatacaaaacagtgttatccaaaacagtcatctatcaacaggatcatccagggaacattttataaatgat

SEQ ID NO: 271134 - DNA, 520 bp, Homo sapiens
ttcctctttctggtaagtttgcagaggttgaaatcccctacataaagtgtgcaggactttagaaattttcagtggagttttgccctatagagagttgttttaaagcaaacatcgtttagaagtagctaaaagagcctattacattattaccagtctgagacaggagaagattattttttgtttatgttaatctagatctcagacatgctatgaacgtgaatccatgatagcaaatccaactgagaagaaagcaacttgtcaactctgtgccttcctcaccaaggagctcttttctgcagcaaaattagagatcattaattattagtctcattttcctgatggtgatactgagaccttataagaggaaactgattaaagactattctatgagttatgaaatagtcaagggcacaatctgctaattggttgtgtaaattatactttttggtaaatacaaaacagtgttatccaaaacagtcrtctatcaacaggatcatccagggaacattttataaatgat

SEQ ID NO: 271135 - DNA, 601 bp, Homo sapiens
tgttagcttttacattttgagctctgtaggatgtcaggcacttcagagcaggggtggcatctatctttatggtgctagatgcacaggcatcctatttggatgaaatcatcctttgtttcatttttttaaaaaaatagagtttgtcaaggtccccagagttccttctaaagaggcaatatgtcctctattttcatctgcaattctgggcaccccactgcagagcaacgtgctgctgactgcagagtggcctcctgcatgagcctttgtgtgctcaagcttcagaatgttcctgccatttgagagctcatcatgccttttcctgggggcctccagggacatagcagtgggaatgcmcatgtcctgttgtcccatgccacttgtcgtcaccaacagaagctctcaaatgcccatttttttgtgaggcagtggttgccatggctgcccatgggaatcgcatggggaagctttaacaaacactgaggcctgagacccatctgaagatcctgacttaatggatcagtggtacagcatgactattgatctttaaagtctccttgggtgattctaatattcacctgatgttgaaggacacagggaggaa

SEQ ID NO: 271136 - DNA, 597 bp, Homo sapiens
tagttcccacttataagcgagaagaggcagtatttggttttctgtctctgccttaatttgcttaggataatagcctccagttgcatccatgttgctgcaaaggacatgatcttgttctttttttatggctgcacagtattccatgagtatctatgacattttctttatccaatccactgttgacaggcatctaggttaattccatgccttttctattgtgaatagaactgtgatgarcaagagtacatgtgtcttctttgtagaatgattttcctttgggcatatacctagtaatgggattactgggtcaaatggtagttatcttttaaaagttcatcccttacttacaccttacacaaaaattaattcaagatggattaaagaattaaacataagaccaaaaaccataaaaaccctagaagaaaacctaggcaataccattcaggacagacatgggcaaagacttcatgactaaaacaccaaaagcaatggaaacaaaagccaaaatagacaaatgggatctaactcaactaaagagcttctgcacagcaaaagaatttatcatcagagtgaacaggcaatctacagaatgggaga

SEQ ID NO: 271137 - DNA, 491 bp, Homo sapiens
ctcactcataagtgacagttgaacaatgagaacacatggacacaggaaggggaacatcacacactggggcctgttggagagtkgggtctaggggagggagagcattaggagaaatacctaatgtagatgacgggttgatgggtgcagcaaaccaccgtggcacatgtatacctatgtaaaaaacttccacattctatacatgtaccccagaacttaaagtataataatttttttaaaaagttctttgaggaatctccaaactgcttttcacagtgactgaactaatttacatttccatcaacaacatataagcatttcctttctctgcagccttgccagcatctgttattttttgactttttaataatagccattctgactggtttgagatggtatttcattgtgattttaattggcatttctctgatgattaatgatgtggaacattttttcatttgtttgttgcccaggtgtatgtcttcttttgagaa

SEQ ID NO: 271138 - DNA, 491 bp, Homo sapiens
ctcactcataagtgacagttgaacaatgagaacacatggacacaggaaggggaacatcacacactggggcctgttggagagttgggtctaggggagggagagcattaggagaaatacctaatgtagatgacgggttgatgggtgcagcaaaccaccgtggcacatgtatacctatgtaaaaaacttccacattctatacatgtaccccagaacttaaagtataataatttttttaaaaagttctttgaggaatctccaaactgcttttcacagtgactgaactaatttacatttccatcaacaacatataagcatttcctttctctgcagccttgccagcatctgttattttttgactttttaataatagccattctgactggtttgagatggtatttcattgtgattttaattggcatttctctgatgattaatgatgtggaacattttttcatttgtttgttgcycaggtgtatgtcttcttttgagaa

SEQ ID NO: 271139 - DNA, 491 bp, Homo sapiens
ctcactcataagtgacagttgaacaatgagaacacatggacacaggaaggggaacatcacacactggggcctgttggagagttgggtctaggggagggagagcattaggagaaatacctaatgtagatgacgggttgatgggtgcagcaaaccaccgtggcacatgtatacctatgtaaaaaacttccacattctatacatgtaccccagaacttaaagtataataatttttttaaaaagttctttgaggaatctccaaactgcttttcacagtgactgaactaatttacatttccatcaacaacatataagcatttcctttctctgcagccttgccagcatctgttattttttgactttttaataatagccattctgactggtttgagatggtatttcattgtgattttaattggcatttctctgatgattaatgatgtggaacattttttcatttgtttgttgcccasgtgtatgtcttcttttgagaa

SEQ ID NO: 271140 - DNA, 518 bp, Homo sapiens
catccattaaagcaatttccatcaatatcaagtcctgcttgtctgatgttgtccaattaagaacaatgtgaaacargaagtgtctagagatgctgattctcattttctttttccttccttttttttattcccattttcattagtaacaaaggtcagtgctcatttcatctaattccccttctatggatctgaaacctgatgttaccatgcaattgagcaatcgagttatacaaacgtagttccttggccataaaaatttaaaatgatcgatggtggatttcccattaatttttaaagtgctttgattgctctacattattataatatttatgtcaagtcattttttgaaactgacattatctctctaattttgcagtgattccttaatttgttgatcagctgatctgttgattcactaggtagaaaattactaggtagagcagaggtattttttaataaataccgataaatttttatttcatattgctattcaaaaggtcaattctgtttcttttctg

SEQ ID NO: 271141 - DNA, 515 bp, Homo sapiens
gtggttcagccacactggccttctgtccatcctctgagcaccaggctgagtttgtcccttatctttgcctgcccaactcttccacacccttcagatccatgcttaaactcactcctcagaaaggcctgctctcactttccccatctaagtctccttgaaataatctctcatcatagccttcacttttcctgcatagcacttaatgaaatgtataactgcaagtcgattggaatggttatttgtgagtaacaacttggcttttcaagccaaatgagcttctccctgggaccacctaagtggggaaatgtgaaagagaagagaggaggctggsgtagtgtgggagaaggatggaacacttcactcctggttgggtggaggggaagcagctgagaagggatttggaagattaagaatgatgtacggggatttttatgctatttctgtgaataaattaaaacttttcctcctggaaaaaaagtccattgctcattagtgtcatcttgctgtagtggtgg

SEQ ID NO: 271142 - DNA, 608 bp, Homo sapiens
aattttgaaatttttggtacttttttggtccctttttgcattctgtatttcttgaattttttttcaattttttttgagatggagtttccttcttgttgtccaggcttggagtccagtggcgtgatctcggctcactgcaacctccgcctcccaggttcaagggattctcctgcctcagcctcccaagtagctgggattacaggcrtctgccatcactcccggctaatttttgtatttttagtagagatggtgtttcaccatgttggctacactggtctcgaactcttgacctcgggtgatccacccccctcagcctcccaaagtgcgtgagccactgtgcctagcttttgaattattacattaagaaagtatcattgctataaaagcaataaggttattttaaaatagtattcaataggccaaaagggaatatggaagtaacagccttgaactcctggcctcaaaggattctcctgcctcagtcacactttagagtttccctttacattcaggatgaatcctgaaaagaggggtaatgctgccttagacactggagggactaaactctgacaaaagaacattaccaagaactatctagccttgtgaaa

SEQ ID NO: 271143 - DNA, 608 bp, Homo sapiens
aattttgaaatttttggtacttttttggtccctttttgcattctgtatttcttgaattttttttcaattttttttgagatggagtttccttcttgttgtccaggcttggagtccagtggcgtgatctcggctcactgcaacctccgcctcccaggttcaagggattctcctgcctcagcctcccaagtagctgggattacaggcgtctgccatcactcccggctaatttttgtatttttagtagagatggtgtttcaccatgttggctacactggtctcgaactcttgacctcgggtgatccacccccctcagcctcccaaagtgcgtgagccactgtgcctagcttttgaattattacattaagaaagtatcattgytataaaagcaataaggttattttaaaatagtattcaataggccaaaagggaatatggaagtaacagccttgaactcctggcctcaaaggattctcctgcctcagtcacactttagagtttccctttacattcaggatgaatcctgaaaagaggggtaatgctgccttagacactggagggactaaactctgacaaaagaacattaccaagaactatctagccttgtgaaa

SEQ ID NO: 271144 - DNA, 608 bp, Homo sapiens
aattttgaaatttttggtacttttttggtccctttttgcattctgtatttcttgaattttttttcaattttttttgagatggagtttccttcttgttgtccaggcttggagtccagtggcgtgatctcggctcactgcaacctccgcctcccaggttcaagggattctcctgcctcagcctcccaagtagctgggattacaggcgtctgccatcactcccggctaatttttgtatttttagtagagatggtgtttcaccatgttggctacactggtctcgaactcttgacctcgggtgatccacccccctcagcctcccaaagtgcgtgagccactgtgcctagcttttgaattattacattaagaaagtatcattgctataaaagcaataaggttattttaaaatagtattcaataggccaaaagggaatatggaagtaacagccttgaactcstggcctcaaaggattctcctgcctcagtcacactttagagtttccctttacattcaggatgaatcctgaaaagaggggtaatgctgccttagacactggagggactaaactctgacaaaagaacattaccaagaactatctagccttgtgaaa

SEQ ID NO: 271145 - DNA, 661 bp, Homo sapiens
  misc_feature (1)...(661): n = A,T,C or G
gggctccacccagttcaagcttcccaactastttgtttacctactcaagcctcagcaatggcagatgcccctccccccacctggctacagcctggcaggttgatctcaggctgctgcactagccgtgagcaaggctccatgggtgtgggacccactgagccaggcatgagaatctcctggtctgctggttgctaagactgtgggaaaacggcagtatttgggtggaagtgtcctgtttttccaggtacagtctgtcatagcttcccttggctaggaaagggaaatcccctcacccttgcacttcntgggtgaggcaatgccctgccctgcttcggctcgccctctgtgggttgcacccactgtccaaccagtcccagtgagatgaaccaggtacctcagttggaaatgcagaaatcacctgtcttctgtgttcatcacgttgggagctgcagactggagctgtttcctattcagccatcttggaatggagtcctacatcttttgaatgaagaatttaatctactcacttttagagtaattattaagcaaggacttaccattgccattttgttaattgttttctgactgttttgcagttctcttgttcctttttttctttcttgctgtcttcctttgagatttgataatgtatatctagtgg

SEQ ID NO: 271146 - DNA, 540 bp, Homo sapiens
ggaagtattttcaacaactttatgccaataaatttgacaacttagatgaaaygaacaaatttcttgaagacacaaatgaccaaagattattcaagaagaaagtggtattcaatcgtccaatatctattgaagaaattgaagttatggttgaaaaccttcccacaaagaaaactcaatgccaaaatgacttctgaggggattctatcaaatgtaaaatgaagaagtaatatcaattccatgcaaactctcccagaaagttgaagtaaaaggaatactttccaaatgactctgtaagcctggcattactttgatacgtcaaccagacaaagatatttcaagaaaaaaacactatagaccgacatccatcatgaacagaaatgcaaaaatttttaacacatttttagcaaagtgaatccaacaatacattaaaagaataatacaacattaccaagtagtgtttatccctagaatgcagggtttgatttaacatttgaaaatcaatcaatgtaatttatcttactaaagactaacaaagaaaat

SEQ ID NO: 271147 - DNA, 541 bp, Homo sapiens
gactattattctaagtgaagtcactcaggaatagaaaaccaaacatcgttatgttctcactataagtgggagctaagctatgtggatgcaaaggcataagaatgacacagtggactttggggactagggggaaaatgtgggaaggaggtgagggataatagactactaattgtgttcagctatactgctcgggtgatgggtgcaccaaaatctcacagatcacccctaaagagcttactcatgtaagcaaacaccacctgttccccaataacctatgcaaataaaaacttttaaaaataaaaataaaaaaatacaaagattaaaggacaggaaaatactggagtcatttaaagctatgtacataatttaatgttytctgggcaattctttcatctttccaaaaaaatgcttcgcaactccaaatatctatataaaaggtcttctttacatcaaaaaaggagattaaaaataaaataaaatgaatgcagatgcaggaatgtatatagatctggtaatagacaatagatatttcttaaaattc

SEQ ID NO: 271148 - DNA, 609 bp, Homo sapiens
tataagttttaaaaagttttttctgcaacaaggatttcattttaaaggaataaaaaaaagaacggtaagtaaataaatgtttttcttttctccagctattttcttggtttattttcatgtctctcttttctattgcaggacttcctcaaatgtctggagacctttaatttacscaagagaaattactgttacaatttgggaaatttcctttctgctttttctttactagtgtaactttatgtataaaaatgatataaaatattggtatgaacatctggggctctaaaatgttacagatgtcagtgacacactcagacctctcagacactcagaatatttccctttgccttcttaatggagaaaacagtgattctattaaacctgcctaaaaataactgaatataacaagaaaactacagaacaatatccctcataaacataaatgcaaaatttctaaacaaaatttaagcaaatcaaatttaacaataagttaaaatataatggattatgaccaagtggagtttatcctaagaatgcaaacttggcttaacattaaaaaaccaatcaaggtagctaactgtattattaaattaaatgtaaaaggaaaac

SEQ ID NO: 271149 - DNA, 494 bp, Homo sapiens
agacctagtcctatttggaatcatatttaaatatgatcctctgttcaagatgacaatttgcatgcaacatgtttcaaaagcccatctggtgttacaaaatccactgtggtttcaacctgtcctttcaatcaaccatcctggttggattataaagactttacaataaaaatcataggaataataaggataatagaattgacacagtagaaaaaacaaaacgaggaaccagatagtaaaggaggtggcagaaaaatctatatattgaacaacacaacttttggcmgaggaggactataaaactgagcctaatctttggtcttagcatcccatcagcctgggagagaaaataatgccctgaatgagcaccaggcatcccattcaggtcccatcaggtaggtatcttcatcttcattttgtagaggaggaacctaaacctcatggtggttatttggctttcctgaggtcatgcagttcttatatgatagaggcactct

SEQ ID NO: 271150 - DNA, 494 bp, Homo sapiens
agacctagtcctatttggaatcatatttaaatatgatcctctgttcaagatgacaatttgcatgcaacatgtttcaaaagcccatctggtgttacaaaatccactgtggtttcaacctgtcctttcaatcaaccatcctggttggattataaagactttacaataaaaatcataggaataataaggataatagaattgacacagtagaaaaaacaaaacgaggaaccagatagtaaaggaggtggcagaaaaatctatatattgaacaacacaacttttggcagaggaggactataaaactgagcctaatctttggtcttagcatcccatcagcctgggagrgaaaataatgccctgaatgagcaccaggcatcccattcaggtcccatcaggtaggtatcttcatcttcattttgtagaggaggaacctaaacctcatggtggttatttggctttcctgaggtcatgcagttcttatatgatagaggcactct

SEQ ID NO: 271151 - DNA, 621 bp, Homo sapiens
tactagtattccaagatacccttttatctcagaataactagatcctgaatagaatgcatatttagagatattgctgatctattaggaaagaatcttctatggccctccattcattgacagagagagagagaaagagaaagagagacagagaaagagagaatatgaactatagtgttttggcagccaggtggtgtggggttgccttgaggacaaatgacaatagctgcacttatctcaaaatattgagcttaggctgatgctaaaacaaaggaagcatatagaacaatatatacaacaaacactgatacaawttaaagaaggaattgacatatttttcatcaaagtatgttttaacacatctctttgaaatattataggttacacatgccaaaagaacatagtaatgtagatgatttgagtaaataatcttgatctaatatgtagatcacacatagaactctgctccctcaaattggagaattaccttcttctcaacattcacaaaagttgatcataatcttgttaagcaagctacaacaaatgtaaaactttgtacataaagaccacattctctgacaagagtgcaatttggtgaaagtcaataacaaaatgatgaaaaaa

SEQ ID NO: 271152 - DNA, 557 bp, Homo sapiens
ggaggcttgcctcgtgaactttagacccagaacaacttcaggaataaaacaggaaagccaagagaacccacacaccctctgaaggaagtggattgctcctgcaggctccaagaaacacccccacatactgtgagtgcccaaactgtggaggtgggaaagggggaatcttccatccccaaacacacaccctcagtcaggaacctgaaggtctagaacacgggagaagattctgaccttacctggagctgagtgaacttagaaagccaaccgaaatacaggagtagaggaagcagtgagaaaagccctgtggacttgctgggtcccctaggaagccatttctgccttgcctcacaggggtccttggggagtgctggcagaggcagtgggaaaaggccagtgagagagaagaaaacctccagctgaactttgtaataatttgaactgatcgagaagtctcctggccagaactcaagagagggcgtgaatctggtgtgcagactccagaggagggggaagcacraataccctatttgctttcacagctgggaggtgggtag

SEQ ID NO: 271153 - DNA, 619 bp, Homo sapiens
atctttaggattctggaaatagctttagtgtttcttagggtctggatgttataaaggtggcaagatgagtacaggaaaaagttaaataataataaaacaattattcatccaatataagttggtccctgctcaagtcaatgtgttctgtcattgttcaacaaaaacgaaatgataggaaaacaacagtagagttctttctgcagcttgagtgctaacaagggcctccagtgcttcaggaatcaaggggtaaatggagcgctcaaaagtccatccatctggcgctgtgtgcttgctggcacattctttatcgccactatgggaagctatagtagggtggccacagatggctctaataattacacccttttctccctctggatgagacagatttatgcacctggtcactgacagaggccttgctttgtagggacaagactcttgttacacagctgaagagtgcatcacagtgttatcttcttgccatgctgcagatctgaagaggggtcttagaagaggcagartcacccacactcaagaccatttctcaaattcatctacgagataagtccattctcctccttaggggaaaaggcaggagtatgaccctaatggaaatccc

SEQ ID NO: 271154 - DNA, 565 bp, Homo sapiens
ttcatttattgagtacatgttagtcactgtcttaatttttctaacttatttatttctcactacaacattcaaagttagatgttatttttatccccatttaacagttggccaaactgaggcacagaaacatttcaaacatgctcaaggtcacaagtagaggagccaggattcaaacgcaggcactctgactttatactttgtgcttttaaccaatacrtcaatattcaaagtggtggaattcagactcaaattcattccaaaccttctctttgtttttcacttggactcacaggagaatattcctacccttaaatccagatgcctctgaagaccaggaattgactttctccttagtaagtcacagacacttttaagacaagtgtgagaatattatcacctttctggggtattcagagttccccaaggagcctcaggaaaatagtatgttcagtgtgataattgatagctctgattcatctggctattcctcttccttccagagtttcctgccatgtcataccattcctttcacatcatcactgtgtgtccatgtaaatgtatctag

SEQ ID NO: 271155 - DNA, 565 bp, Homo sapiens
ttcatttattgagtacatgttagtcactgtcttaatttttctaacttatttatttctcactacaacattcaaagttagatgttatttttatccccatttaacagttggccaaactgaggcacagaaacatttcaaacatgctcaaggtcacaagtagaggagccaggattcaaacgcaggcactctgactttatactttgtgcttttaaccaatacatcaatattcaaagtggtggaattcagactcaaattcattccaaaccttytctttgtttttcacttggactcacaggagaatattcctacccttaaatccagatgcctctgaagaccaggaattgactttctccttagtaagtcacagacacttttaagacaagtgtgagaatattatcacctttctggggtattcagagttccccaaggagcctcaggaaaatagtatgttcagtgtgataattgatagctctgattcatctggctattcctcttccttccagagtttcctgccatgtcataccattcctttcacatcatcactgtgtgtccatgtaaatgtatctag

SEQ ID NO: 271156 - DNA, 565 bp, Homo sapiens
ttcatttattgagtacatgttagtcactgtcttaatttttctaacttatttatttctcactacaacattcaaagttagatgttatttttatccccatttaacagttggccaaactgaggcacagaaacatttcaaacatgctcaaggtcacaagtagaggagccaggattcaaacgcaggcactctgactttatactttgtgcttttaaccaatacatcaatattcaaagtggtggaattcagactcaaattcattccaaaccttctctttgtttttcacttggastcacaggagaatattcctacccttaaatccagatgcctctgaagaccaggaattgactttctccttagtaagtcacagacacttttaagacaagtgtgagaatattatcacctttctggggtattcagagttccccaaggagcctcaggaaaatagtatgttcagtgtgataattgatagctctgattcatctggctattcctcttccttccagagtttcctgccatgtcataccattcctttcacatcatcactgtgtgtccatgtaaatgtatctag

SEQ ID NO: 271157 - DNA, 565 bp, Homo sapiens
ttcatttattgagtacatgttagtcactgtcttaatttttctaacttatttatttctcactacaacattcaaagttagatgttatttttatccccatttaacagttggccaaactgaggcacagaaacatttcaaacatgctcaaggtcacaagtagaggagccaggattcaaacgcaggcactctgactttatactttgtgcttttaaccaatacatcaatattcaaagtggtggaattcagactcaaattcattccaaaccttctctttgtttttcacttggactcacaggagaatattcctacycttaaatccagatgcctctgaagaccaggaattgactttctccttagtaagtcacagacacttttaagacaagtgtgagaatattatcacctttctggggtattcagagttccccaaggagcctcaggaaaatagtatgttcagtgtgataattgatagctctgattcatctggctattcctcttccttccagagtttcctgccatgtcataccattcctttcacatcatcactgtgtgtccatgtaaatgtatctag

SEQ ID NO: 271158 - DNA, 393 bp, Homo sapiens
aacatatagaaaaaaaatatgggcatgtgtttatgatgaagatattagttttgtttttttaaagaaaaaaaagaaataacactgatgcttaaaagcactttttatggtttggatacctttctccttaactgccgtctactttcctggctaattgttatccacatcagctctcagtaytgcagactttaacacggcttgtttttctgctttctagcaaatctcttggtctgaagaaagagtacaatttctttggaaagggccatgcagtaggcccagcatgaccaaaactctgtgactctatcttctcttcgccacctgtataacccccttgtcatgtccttccacaactcagatttgatcttgggccatggctgatagagtgtaagaacaggg

SEQ ID NO: 271159 - DNA, 552 bp, Homo sapiens
ttgctttttaaaaagtaattttcttcttacatgtcttcattccctaatcatccattggagttgagttatgccatggcctgtccactaactgtttactctccagttaaagtccacatatcattctttttaaatctgttaagtgtgcacctgcctgtgtggcctgggttgtgttttcttggcatggtttttcagaggatttctttctttgtggctttctctgtgaatttgctgacagccttcagctttccctcttctgctcaggcatgtgcttaaccttgttgtctgggttgctcactgcaggacacgagcccatatttcagccaactatgctgccaagcaaccactgccactgaagtggacttgccagcccatcaatcaacaacctctgttaggyttcgatttgcagtgttgattagctgcctctagtcattcaatcctctctgtagtcatgcccaatgatgacagcatgtgacttttctatgggacatttttctttgtactaaacttctgaattccatgtgttgtatggtttctatttttgttccattttac

SEQ ID NO: 271160 - DNA, 552 bp, Homo sapiens
ttgctttttaaaaagtaattttcttcttacatgtcttcattccctaatcatccattggagttgagttatgccatggcctgtccactaactgtttactctccagttaaagtccacatatcattctttttaaatctgttaagtgtgcacctgcctgtgtggcctgggttgtgttttcttggcatggtttttcagaggatttctttctttgtggctttctctgtgaatttgctgacagccttcagctttccctcttctgctcaggcatgtgcttaaccttgttgtctgggttgctcactgcaggacacgagcccatatttcagccaactatgctgccaagcaaccactgccactgaagtggacttgccagcccatcaatcaacaacctctgttaggtttcgatttgsagtgttgattagctgcctctagtcattcaatcctctctgtagtcatgcccaatgatgacagcatgtgacttttctatgggacatttttctttgtactaaacttctgaattccatgtgttgtatggtttctatttttgttccattttac

SEQ ID NO: 271161 - DNA, 562 bp, Homo sapiens
ggagtgcagactcagcagagctcagaggctcaggaacttgcttcaacttttctgggcaggagcagtgaagaaggttggccctgagagggcctccccacaggaataaatgtgatccctattttcttcagcgtgcctgcccagatgaccaagtgatgctgcagcacccatctgggtagagctctgactaaagcatctccattgtctgccgtcaggtggccctatgctcactccagccctattttatcacccattatgtaggcagaatatactgaactgacctctctctgcccagctctacagtgcccactctatgcctgatgtttctaagtctgtattgatccccatagagggattacacacgtatagaagtggttggtcctagactgtgacagtctaggaggtctaggacacrtcctgaggactaggatcttatcttttctccatcagtttatccagccaaaacaagatgaatgaaacatgtctctgagttgggtcccttgtacaatgtctgacactaagcaggaactctatttgctaaggggatgaagtcaggaggagctgg

SEQ ID NO: 271162 - DNA, 542 bp, Homo sapiens
ttgcctctgcccaggggtttcttcttgactgtctgttagggcatccctctgttaggggattgagttatgtttctcttgatttcccagaattgaagctgcrggtcccttccagaacctactgatggggcctacctcaccctacctcatgcactggctggatctggctgcagttcacattactggaagctgatttttcttcaaggccctgtgggagagagcaaagctggtctacagagatgtgttaggggataggcttaggaagcctcagttgtctacagtatccccactctagagatctggcagattcctacaactttaccttgtattgaagacagcagggacagagagttgcaactcatcaaaggaacattagcagtaacaataccataatgcaccagtatggttggatatttagcattcacaagacataacagagggtgaattgtaatccacattttatagttgaaaaacatgagggtctgagagtctaaaaatattttgctaagttacatgactaataagtgacaatgcttcgagcttcc

SEQ ID NO: 271163 - DNA, 574 bp, Homo sapiens
gagtacaggagggattgccctatagaggcccacaaacataatgtaaaaagtgcaagagatactctggccaaagtgatgagtaagggcagaaagcatggttggtgtgtacaacatgagaatgacactgacatgagaaccacaggtgcttagggccttcagaagggcatcactggatggaaggtggaaaacagcatgaagggtgagggtgtaggaaatatcagtgaggatcagatctgagataatagtcattaccaatatagtaaagtcataccagatattgatggagatatcagcataggaaagcagggccacacctatgtgctcacagtatgtgttagaattaatgtgtgttctgcagaagggcaaatgcttccccaggaaatcaatgggcaaaatgttattaaaccttcaatcaatgctcaccacaatcttgccaagtgtygaggtgtcaagccactggtgtatctcagaaggaaaccaatggtcatgtaatgatcaaatgccagacccaacaagatggccaagtccagaaaaaaagctaaagtgaagtagaccaaaaaaaaaaaacctggtg

SEQ ID NO: 271164 - DNA, 574 bp, Homo sapiens
gagtacaggagggattgccctatagaggcccacaaacataatgtaaaaagtgcaagagatactctggccaaagtgatgagtaagggcagaaagcatggttggtgtgtacaacatgagaatgacactgacatgagaaccacaggtgcttagggccttcagaagggcatcactggatggaaggtggaaaacagcatgaagggtgagggtgtaggaaatatcagtgaggatcagatctgagataatagtcattaccaatatagtaaagtcataccagatattgatggagatatcagcataggaaagcagggccacacctatgtgctcacagtatgtgttagaattaatgtgtgttctgcagaagggcaaatgcttccccaggaaatcaatgggcaaaatgttattaaaccttcaatcaatgctcaccacaatcttgccaagtgttgaggtgtcaagccactggtgtatctcagaaggaaaccaatggtcatgtaatgatcaaatgccagacccaacaagatggccaagtccagaaaaaaagstaaagtgaagtagaccaaaaaaaaaaaacctggtg

SEQ ID NO: 271165 - DNA, 497 bp, Homo sapiens
ttttgcctaaacagagactaggtgaagagttgagtatcaccatgataagttaactaggcaagtattatgccacaattattatcttcatgcatcatgaaataatcttggagccagaaaactgggctgagaagcagcaagatggtgcaagagtgacatctatccacttccaagtccaagggaaacacagatgtagccactgctggagaagcagtgtcttcactagacattcagatctccattatagcaaaaaggtgtagtcatccttaggaagaaggttgtagatatgtgggcttttctattgctaaattatgacttctaaatggtaggatgaagaggctggaaaactggtgacgagtagaaaaatgagtcaagtgaggaattttcagagcatattgtgatgaaaataaaaaagatgacctggatagcctgagctttytatgcaagctgtagcaaagagggtatgaagcttaatcatattaaatggggaggtaaaaaat

SEQ ID NO: 271166 - DNA, 453 bp, Homo sapiens
tgttctttcagcgtttcttcagattttgtgtcctgtagtagctgctaccaggtgctctggttttccgagctccctaccactagcctgactgaaaagtggttatagtttcttatttttatctcccctgaagactatcccccaagcagcttkcacttccaggatttgatgctgatctctaagcagatagagatagagcagcaaaggagtcagggtgacttctcagattcctgaatcttaccgactttatacagtcccttgtagccagatccagagagttaattttttgcaacttcaagctcaaaactgaagacatactttgtgtatagcattttgctagctattaggaattcaatatgagcaaaagagttttactcactgccctgcctcaatgaatttatgatcttatagcaagaattgtgcaaattgtgactatataattcacattatatataa

SEQ ID NO: 271167 - DNA, 561 bp, Homo sapiens
gcattttaaatatgtcatcccactgcctgctcaccttcagggtttctcatgtgctatcagcattaatcttattcaggatcccttgcacataatgagtcacttctctctttcctctctctttttaaaataaggtgctgctgttttactaagaggtatatgaataatggaaatgcctcctgtaatcctagcactttgggaggccgaggcgggcggatcacctgaggttgggagttcgagaccagcctgaccaacatggggaaaccccctctctactaaaaatacaaaattagctgggcgtggtggtccatgcctgtaatcccagctacttgggaggctgaggcaggagaatcgcttgaacccacgaagcggaggttgaggtgagccgagatcatgccattgcactgtagcctgagcaacaagagtgaaagtctgtctaaaaaaaccaaaaaatttaaaaaataataataacggaaaatgcctttctgcttgtggaygccgccgaagaagcatcatcaaagtctctcttctcccttccctcatgtctaagtcagagtctcctaa

SEQ ID NO: 271168 - DNA, 517 bp, Homo sapiens
tcctttgatttttaaaaataagctgggcagtctgctattgattactatcacttgaaatattggttggtgccataaattggcatagcagcaattacggagttacatttaccgaagaatagaaatgtgtgcacagcaatatgtgattgtcctttattccatattaaaacatttccctaatatttcttaaagagccaaggcatttttcctattcacgaagatcaacttggcaaataatatctctgatgtgatgtctcaagcttttaaaatggaagaagttatgtgtgtgagctcagacttcatagacaagcaaccaagaagtctagatcaacatctagctacccacagaggataagatttgagaagtacccatagggtccctgtcttctctatcaagagcactgattccccagaccacttacwtgggagcatctctgatctggactcctaccttgagttagaagactagagcccctcttgaatagaccctattaaaagcctgtgtcattcaggagcccct

SEQ ID NO: 271169 - DNA, 574 bp, Homo sapiens
gtgtgcaggagaagctcatacgggttcatgaacrgactggtaaaatttcaggaatttcgtgagctggttgtcaaacagttattaaaaattaacttaggcaaatttacaattaaatacattataacaaaaacaaagctaatgaatgccaaaaattcatcacttcctatttatcccatctttcaattacctatgctgttgaggttgtttacatctattgtatatgtatggcagaaataccatatgaaggtgcgctactgagcatctctgttcaacacctcctgcagtaactcatgttggtggcttgaaatcagcgatggtgggaatatttacatcaaacaaattgacaaatgctacaaatcagagcctgattattgttttgttgatagtctagagttaagaaaataatggagaaaatgttaatgtagattatacttaaaagtatgttgtgctggtagcctttaattgtaaatagcatgaaaaagaattgaggacatattcttccaatattcaaaaactattctttaattcagcaaataagtcacttgtgtcattgccaaatgaatgaaattcatgc

SEQ ID NO: 271170 - DNA, 409 bp, Homo sapiens
aatgattttgtcctttgcagcatctgtgcctgggggtctgctgagtcatggcccacttgccttcagccctcaaaagggtttttggtgttgtggtratggcaaagtgaatgcccccaacagaggacaaatcccagccccacacttgctgtacgtcagcacagctgtcagcctggctcacatttcaggatctttcaggaagctgtgagacgcagaaagaagccagttttaggctctgtgggcaagaagataccttttgacttataaactgcagatcctcagatgtggatgttgtcataggactgagtgtgttggtcctgcacatggtccccagtagaactcctctacagaaaagaacccttttatcagcagatgggcaggaacccctcagagggagaggtagacactcaag

SEQ ID NO: 271171 - DNA, 409 bp, Homo sapiens
aatgattttgtcctttgcagcatctgtgcctgggggtctgctgagtcatggcccacttgccttcagccctcaaaagggtttttggtgttgtggtaatggcaaagtgaatgccmccaacagaggacaaatcccagccccacacttgctgtacgtcagcacagctgtcagcctggctcacatttcaggatctttcaggaagctgtgagacgcagaaagaagccagttttaggctctgtgggcaagaagataccttttgacttataaactgcagatcctcagatgtggatgttgtcataggactgagtgtgttggtcctgcacatggtccccagtagaactcctctacagaaaagaacccttttatcagcagatgggcaggaacccctcagagggagaggtagacactcaag

SEQ ID NO: 271172 - DNA, 574 bp, Homo sapiens
  misc_feature (1)...(574): n = A,T,C or G
accctggaagtctttcctgaggactgagtgcagacccggtgcaaggatgttgggaagtaagtttgtctgtgancttcantttctttttttgtaacatgggagtcataacattgacctaaaagagttgtgtgcaattgaagagacaaagaatgcaaaacatagtctgtgaacctacaaaaggtgctcgctcagctcagtttcaaccactattcccctctccttcttcctcactgactgcctttgtccagcctccaggagcagccagcctccaggagcrggcagcctccggcctcctgcctcctttctgtgccagcccancaacctgagtcacactctggattcagtcccagtctgcttggctgaagtctggtgtttgctgcacttactattccaggcaccctgtgatttacttttctagtgagttaattgcaaaatccatatggagtggagagaaaacatcaacccaagcttgccatgaaaagcangggaacagaggaagttttccatcttggccancacaacctggaaaggangcaaananggaggatgatgctgctgccccacttgccaagct

SEQ ID NO: 271173 - DNA, 574 bp, Homo sapiens
  misc_feature (1)...(574): n = A,T,C or G
accctggaagtctttcctgaggactgagtgcagacccggtgcaaggatgttgggaagtaagtttgtctgtgancttcantttctttttttgtaacatgggagtcataacattgacctaaaagagttgtgtgcaattgaagagacaaagaatgcaaaacatagtctgtgaacctacaaaaggtgctcgctcagctcagtttcaaccactattcccctctccttcttcctcactgactgcctttgtccagcctccaggagcagccagcctccaggagcggscagcctccggcctcctgcctcctttctgtgccagcccancaacctgagtcacactctggattcagtcccagtctgcttggctgaagtctggtgtttgctgcacttactattccaggcaccctgtgatttacttttctagtgagttaattgcaaaatccatatggagtggagagaaaacatcaacccaagcttgccatgaaaagcangggaacagaggaagttttccatcttggccancacaacctggaaaggangcaaananggaggatgatgctgctgccccacttgccaagct

SEQ ID NO: 271174 - DNA, 574 bp, Homo sapiens
  misc_feature (1)...(574): n = A,T,C or G
accctggaagtctttcctgaggactgagtgcagacccggtgcaaggatgttgggaagtaagtttgtctgtgancttcantttctttttttgtaacatgggagtcataacattgacctaaaagagttgtgtgcaattgaagagacaaagaatgcaaaacatagtctgtgaacctacaaaaggtgctcgctcagctcagtttcaaccactattcccctctccttcttcctcactgactgcctttgtccagcctccaggagcagccagcctccaggagcgggcagcctccggcctcctgcctcctttctgtgccagcccancaacctgagtcacactctggattcagtcccagtctgcttggctgaagtctggtgtttgctgcacttactattccaggcaccctgtgatttacttttctagtgagttaattgcaaaatccatatggagtggagagaaaacatcaacccaagcttgccatgaaaagcangggaacagaggaagttttccatcttggccancacarcctggaaaggangcaaananggaggatgatgctgctgccccacttgccaagct

SEQ ID NO: 271175 - DNA, 574 bp, Homo sapiens
  misc_feature (1)...(574): n = A,T,C or G
accctggaagtctttcctgaggactgagtgcagacccggtgcaaggatgttgggaagtaagtttgtctgtgancttcantttctttttttgtaacatgggagtcataacattgacctaaaagagttgtgtgcaattgaagagacaaagaatgcaaaacatagtctgtgaacctacaaaaggtgctcgctcagctcagtttcaaccactattcccctctccttcttcctcactgactgcctttgtccagcctccaggagcagccagcctccaggagcgggcagcctccggcctcctgcctcctttctgtgccagcccancaacctgagtcacactctggattcagtcccagtctgcttggctgaagtctggtgtttgctgcacttactattccaggcaccctgtgatttacttttctagtgagttaattgcaaaatccatatggagtggagagaaaacatcaacccaagcttgccatgaaaagcangggaacagaggaagttttccatcttggccancacaacctggaraggangcaaananggaggatgatgctgctgccccacttgccaagct

SEQ ID NO: 271176 - DNA, 633 bp, Homo sapiens
gacaagtcagcgtagaaccgcacgaggcatgtggctgaagccacagccctttatctcagcagactccgggaaactccagtaaaagcaggcaggctatggggcaaccccaaactacttgaagaagagctttcctggttgtcccagagctttcttgaatagacggaacagctggctttggcattcaccctcagggaagagtcacgagaacaactctcaaaatcaaatgagggttctgcaggcatttctgtcgactaacccttcctgacctccttagcagactcagagaaaaaagataaaggaaaggaactccacagaggaataaacttggtctgtttgactacagtgtgtgtttctwtgatctgcattactcatacacaattgatgcataggagcacgatgtcagtaacagcagctgaatgcaaagaaagctgaacccagagatgtggtgccagaagcaacccgcacacacctacactcctcctcatggtcacttgtgttgtcttggaaaggcctgttaaatagttatccccattcttgatgcattttgtcctcattttcataactcagaagcctaaaccctatctcatacctccttctatgaagctactttcacttttttttttttttttaaag

SEQ ID NO: 271177 - DNA, 590 bp, Homo sapiens
ggttttgccatgttgcccaggctggtctggagctcccaggctgaagcaatctgcccatctcggcctcccaaagtcctcaggtctcttttatatatgggcattaatcctattcacaagggctatgtcctcacggccaaatcacctcccaaaagccccatctccaaactgtcacttgggggttaggatttcaacttatgaatttgggggtaacataaacattcagtccattgtaccctctaacctgtgaattcctttatgacaaaggcagtatcttgctcatctttcaaaccctaatacctaacacagtgattggcacaaaaataactcaataaatgcttgcaaaataaatgagcagtggcaactaccccatgtagagcctaggggagcataaaatcatagccagccattgcttaataaatgtgaacttgatcgtcctttctgaactgtmattccagctctaggtttatcctaggaaggcttttccaggggcaccaggaagacaggaagattgccaaaatgtttatagtaggattgtttataagagccccaaatggaaacaacccaaatatctacaaacagtagaacagata

SEQ ID NO: 271178 - DNA, 450 bp, Homo sapiens
atgatctctttgtcactccctcttgcactcaggacaatggtttcaaaaggcagttccctactcttgacaacagaaaggctggggggcaaacactgtcttcagatagtaaagagatactgctaatcagcacatcaggaaacctatgacccaaccattgttaaaaatgaaagcaattaggtacagtccttctacagggaacttcctaaaatacatgtctgagattatgagcttgttcagttgcatgagaaacaacagggaaagctaaacttctttcccaaggctggcacttacttagttgaatgaccttasaaaggtaagaaactccctgaatctctgtttcttaatccataaagggggatgagtacttgtgtgataattcccactccataggattattgcgagaattaaatatgacatatataagatgatcatgcacagagcctaacacat

SEQ ID NO: 271179 - DNA, 607 bp, Homo sapiens
aatgtaactggtctatgatacagtgtggctaatctgaacttagttgtggaaattacaagatgatcaattaacgctgcccaacttaattccttgaagcctcacttggtggattcaggtaggcagttattgtgtcagcctttagagagcaatttatctcaccaacattccaactaaaaggaaactaacatttgttagcagctaattatgtggcaggctctaagcacaagcatttgcatcagccatctcccactctctcagcagtgaccatattacccccagaattgtacagatgtgcaaagtgaggctcagagatgctaaataacttgctctaacacacatctggtatgtagcaaagcctggattcaaacctggacttgtctggtttcaaagacattggtgttggtgggacaagaagaggtaggcctgccggggttcaaatcccggctcctacatatattaggacgtagctttggcaaatgtcttaaatttccctatccttagttttatctgtcaaatggataccatatttgtaccaatttcataaaatgagtgtgaaaastaagtgagactgcagaaagaacaaaggggagttgttagctgttcactc

SEQ ID NO: 271180 - DNA, 493 bp, Homo sapiens
ttgaaacaccaccagggctacctagcattaacgaggatgtggaaccatcagaacattcctgccctgctagcaggactgtatattgatacaactttagaaaacctattggcagtgtctccctaaatggaacacacctgtaccctctgatacaggatttccactcttagatatataccaaactgtataccaaacaatataccaaataggaatgagtatataattgtcctaagggcataaagaagaatgtccttaattatcattgtgaaaaattggaaacaaatatcttcaatagtagactaagtaaacaagatgttgcatattcaggtaatgaaataatttacagtatggagggtggacaaatcattgctacacacaaccacaaggctaatattactaacataatgttgagcaaaagaagccagacacaaaatagtacatgttctatgattccacttatataaagttcaasaacaagcaaaacctagaagtcaag

SEQ ID NO: 271181 - DNA, 505 bp, Homo sapiens
atcttctttgtgaccaaaaagacagattccaaacactgccagctgagtacaatctacaccctccaaatatagcagagctaactgcctacaccggaccctggtgccattagctcatgctctagctccctgcactggccacccatactgctttatgaaatgcaatctctttttaaagataatgacacagtaagtgtrttatgacttcagtgatacagtaagttaggcaaattctttgaaagctatcagctcattttgagcagggccaccagcctctggtagagagaagtttgttgatctgaagtcataaaaccaaggggtaaaggacatgctgaaccagacgataaacaccgtcatggcgggtgtccctcccactgccaaattccaacaaatcatagcaagaagatgaggttacatagcagaaatgcatggaaatcagcctgatcagaatcattgacctttgaattttagagcaaaacagtcatttagagattggccagtcttcatg

SEQ ID NO: 271182 - DNA, 448 bp, Homo sapiens
aaatgcaactaaacattaatttttttcttaaaattcaggccctttctactggacacttcaaatttcagctggggcatggagacagtttctgtttttcccggaccagccactgttaaaaggtaccaaaatagagccctttgcaattcaaacagttgatagaattttaggaagatagacctaaatagtcagagcattgcaccagaaaatgacaatgaagtcccttctaatccaaagatttaatagtcctatatgtgtatcaatgcaccatgcattgattcaagggctgatggaaactaatatagaagcacattcataaatgtgtggttcttcccaaagacagacttctccattagtgggaaagagaattgtttttatggctaaccaggcaagcaaacttggtgagtttyagctgctttatctatcttctgggtacatgtaagatacattc

SEQ ID NO: 271183 - DNA, 448 bp, Homo sapiens
aaatgcaactaaacattaatttttttcttaaaattcaggccctttctactggacacttcaaatttcagctggggcatggagacagtttctgtttttcccggaccagccactgttaaaaggtaccaaaatagagccctttgcaattcaaacagttgatagaattttaggaagatagacctaaatagtcagagcattgcaccagaaaatgacaatgaagtcccttctaatccaaagatttaatagtcctatatgtgtatcaatgcaccatgcattgattcaagggctgatggaaactaatatagaagcacattcataaatgtgtggttcttcccaaagacagacttctccattagtgggaaagagaattgtttttatggctaaccaggcaagcaaacttggtgagttttarctgctttatctatcttctgggtacatgtaagatacattc

SEQ ID NO: 271184 - DNA, 588 bp, Homo sapiens
ggcacttagcaaactctccaaaacagcctttattattattttttgagggactgagaagtagcatgtattggacatattgatatccccagccccaaagtgagtattgtatagatatcatctcaggcaaacatcayaacaattttccagggtagttcctgttattgattgcagtttactaaggtacagagaagttgacacctccacaagtcctcttggcacttgatagtaagtggtggagaccacatttgaatccaggcctgcttgtggttaaagtctacctttctgcactgcactaagctgcttggaagaatcctttcggggtcctcatgttttggtaacccatttgctgctgacaccactagaagacttgaagccatttccgaatgacttcaagctgctcctttctgaaatagcgtactgttacccattttagagaaggcacatggggacaggaagtgactgtcccaggttgcctcttaagagattaagtgcaagaggctccaagctgaaatggaggcatcaggacagggtcctgacccccttccaggcccccttactgaccagcccctgagagcagggctacacttc

SEQ ID NO: 271185 - DNA, 589 bp, Homo sapiens
aatcttcaacaaaatgtctagaataaatggtttagttatctgatatctttaaagggcctgaataatttggtggcagtgagaacacaggtcctactcctttgtcttacctggagcattttaagttgcaacttccatcgaccagaaattagtagtcatgatgctgacctactctggggaccctggaaagattaagctatagtcacagattgctgtgattaactggaggtggtgctctcargcttacactgttctccttcaggctggcttcccatgcaaatcagtcatatttgaataaatggctcatattccctttaacacagagaatccccagaaacatggaaaagggtcaatttgtgacccaggaaggggaaaattctcaaagagaaagacaatactcaagatcaggttgggtttaatcagccatgttgagagaaacaaaaattattaaagctatccactccttagggcactagatctttcaggagacatcccttccctcttcttctacccaactcttcaatgtttttgcttgtcctactttctcagtgtctttttcatcgaggagcctgcatccaggggctctcaaagt

SEQ ID NO: 271186 - DNA, 589 bp, Homo sapiens
aatcttcaacaaaatgtctagaataaatggtttagttatctgatatctttaaagggcctgaataatttggtggcagtgagaacacaggtcctactcctttgtcttacctggagcattttaagttgcaacttccatcgaccagaaattagtagtcatgatgctgacctactctggggaccctggaaagattaagctatagtcacagattgctgtgattaactggaggtggtgctctcaggcttacactgttctccttcargctggcttcccatgcaaatcagtcatatttgaataaatggctcatattccctttaacacagagaatccccagaaacatggaaaagggtcaatttgtgacccaggaaggggaaaattctcaaagagaaagacaatactcaagatcaggttgggtttaatcagccatgttgagagaaacaaaaattattaaagctatccactccttagggcactagatctttcaggagacatcccttccctcttcttctacccaactcttcaatgtttttgcttgtcctactttctcagtgtctttttcatcgaggagcctgcatccaggggctctcaaagt

SEQ ID NO: 271187 - DNA, 589 bp, Homo sapiens
aatcttcaacaaaatgtctagaataaatggtttagttatctgatatctttaaagggcctgaataatttggtggcagtgagaacacaggtcctactcctttgtcttacctggagcattttaagttgcaacttccatcgaccagaaattagtagtcatgatgctgacctactctggggaccctggaaagattaagctatagtcacagattgctgtgattaactggaggtggtgctctcaggcttacactgttctccttcaggctggcttcccatgcaaatcagtcatatttgaataaatggctcatattccctttaacacagagaatccccagaaacatggaaaagggtcaatttgtgacccaggaaggggaaaattctcaaagagaaagacaatactcaagatcaggttgggtttaatcagccatgttgagagaaacaaaaattattaaagctatccactccttagggcactagatctttcargagacatcccttccctcttcttctacccaactcttcaatgtttttgcttgtcctactttctcagtgtctttttcatcgaggagcctgcatccaggggctctcaaagt

SEQ ID NO: 271188 - DNA, 491 bp, Homo sapiens
gtcaatttgtgacccaggaaggggaaaattctcaaagagaaagacaatactcaagatcaggttgggtttaatcagccatgttgagagaaacaaaaattattaaagctatccactccttagggcactagatctttcaggagacatcccttccctcttcttctacccaactcttcaatgtttttgcttgtcctactttctcagtgtctttttcatcgaggagcctgcatccaggggctctcaaagtctctgctccaacccaggctttgtcatatatgtgttatattactttgattgagcatcagtttctgcatctaaaaaacagagattaaaatgccaatttattagcttcctagggtcgctataactgagaaccayaaactgagtggctcaaataacaaaaatttattatctcacagttctagaggctagaagttcaagatcaaggtatcagaaggtgtcttattctgtcacttgagctggagtacagtggc

SEQ ID NO: 271189 - DNA, 648 bp, Homo sapiens
tttgtgccaagtgaagttggcttgaaagtgactttgtcacttttcaactgttatgacttcagacgagcttcttgcctgctgccagcctcagtttctccaatttgtaaaatggaaacagttatgycaaccttgcagagctattaggagagattaaatgaaatgatgtgtacagcttgcctgacagagtgcttggctgaaagtacttaatacaaattaccttctttgtctgttttccacatttgtggttgacaaccctttccaaacagacacttactcttccgaatatcagtgtataaaatgattttatggaagcacagtgattttatgggttaaaaagtgacatctattcctggggctggaatcttcagaccacaggttagattctgtagtttagtgcagcagaaagaacccaatgaagtttcacagaaccatagactactagagcaatgggggacattgctccggaaaactgaggcatgatgaagagaagtgacctacccacagtcttatagctagtggcatgtgtggtgggtgggattcacagcacgtttaaggaagaagctctacaaattgtgtgggatgttatctgatccttaggaaagctgcctaggatgggatgagagctctcggttaaatgtgttagcctct

SEQ ID NO: 271190 - DNA, 596 bp, Homo sapiens
gaaaagggaggagtggggctgggtgcagtggctcaggcctgtaatctcagtactttgggaggcctagatgggtggatcacttgaggcctggagttcaagaccggcctggccaacatggtgaaatgctgtctctactaaggatacaaaaattagctgggcatggtggckcatgcctgtaatcccagctactctggaggctgactcaggagaatcgctggaacccaggaggtagaggttgtagtgagcagagatcacgccactgcactccagcctgggcaacagagcaagactccgtctcgtaagcacattgagaagccattgaaatggcttgagtgggggtttagcaagtattttcatagaaaagtcattctggccgccatatggagaactgattatagagaatagaagtggacacagggagatcaagttggagaaaattgtagtggttcaggtgaatgttactggaagcttggacttgcatggggcagtggagaaagtaggcagatttgagagctatttaaaaagtaacctcttaacaatttaagaggtaacatcaacaagattagacataggcagagagagaggcaaaaacatca

SEQ ID NO: 271191 - DNA, 608 bp, Homo sapiens
tactattacttaaatatttgtttaacatcacaatgaaagcacggacaacaaaaatgtggcataacagaccaccagcctaagataggaccatacactggatctggataaataagcacaaccaaaacatgtctgtgaccttacaagataaactgctggagcctcaattctgcgtcttcccatctcctcttccccagctattttgacttccagcaaaattcctggatgactccagaagtctctctgctgtgaccaaagaccatcttataggccatctcatccatcgctgctgtttctccttgcccctgttagttaccccctctgctctgcagtcctggtgtcartagaagcagaaagcagtgaagcatttccaaccatcccagaaatgaggtgcattattctttctcagaaattcagagatctcagaagcatccacatgtaactgctcattaacagctttttcttatttctatttcctataacacagcaaatcagaaacgtctaaagaaaagggtaaattttatgtactatttcaaaactaaaaaataaccaattatgtaataagtgaaaaaaaaaattgaagcagaaatggaaaaatgatttgagctcac

SEQ ID NO: 271192 - DNA, 608 bp, Homo sapiens
tactattacttaaatatttgtttaacatcacaatgaaagcacggacaacaaaaatgtggcataacagaccaccagcctaagataggaccatacactggatctggataaataagcacaaccaaaacatgtctgtgaccttacaagataaactgctggagcctcaattctgcgtcttcccatctcctcttccccagctattttgacttccagcaaaattcctggatgactccagaagtctctctgctgtgaccaaagaccatcttataggccatctcatccatcgctgctgtttctccttgcccctgttagttaccccctctgctctgcagtcctggtgtcaatagaagcagaaagcagtgaagcatttccaaccatcccagaaatgrggtgcattattctttctcagaaattcagagatctcagaagcatccacatgtaactgctcattaacagctttttcttatttctatttcctataacacagcaaatcagaaacgtctaaagaaaagggtaaattttatgtactatttcaaaactaaaaaataaccaattatgtaataagtgaaaaaaaaaattgaagcagaaatggaaaaatgatttgagctcac

SEQ ID NO: 271193 - DNA, 621 bp, Homo sapiens
gtaaataatctaaatataccaattaaaagaccatgattggcacattggattaaaaaacatgaaccattaatatgctgcctataagaaactcacttcaaatatatcaccataggtaagttgaaagtaaaagaatggtaaaagttacatcatgcaaacattaatccaaaagatacccctccaaaaaagtcgattggtgtttacagcaaaaacaacaaagtacttttacaacatttgcagaggtaaaacatatgacagcaacaccacaaaggaagagaaaaagtcacttgtgtgccaaagagcctccagcggataaaagtcagtccttagaaactccttcaaatccccgtgcaatctgtccttgttaccactctcacttccttcccaactattctcccttttgttgactgtgtgctaatcacgttaacctataggctgttcctagaacatcctggaaaagctcccactaaagcacctgaacacagctggctccctctgctcagaaggctcttacacccagaggaccaaaagctaactcactcyttaatgagcatcatcccaacaaatctctctacacacactctcatcctgccccccctctcattgccttactcgattttttgt

SEQ ID NO: 271194 - DNA, 533 bp, Homo sapiens
aatgagcatcatcccaacaaatctctctacacacactctcatcctgccccccctctcattgccttactcgattttttgtagcacctatcaycttttaatattctataagttccttccttattgagtttattacttatagctggactataaattccaagagagcatgacttttgtttcttttcttcataaatgtatcccaagtccatagaatagtggctggtatataacagttatttaaatgttaatttgtcaaaggaatggaagaatatttgttagaaggaggagaaagagaaagatgttcatgatacagtagaaatattattctgagaacccagagcaccaaaagagaaggcctgactgcggtcagctgttcagattcattttagccttttctatagaggaatatatggatgaaaagcataccttaagaatctcaatataacagacattaagacattgaaaggtgagaaatctcaagtgtttctccaccccaaagataagtccatttttcaaaaaggaaactgagtaaggga

SEQ ID NO: 271195 - DNA, 638 bp, Homo sapiens
tcagctgttcagattcattttagccttttctatagaggaatatatggatgaaaagcataccttaagaatctcaatataacagacattaagacaktgaaaggtgagaaatctcaagtgtttctccaccccaaagataagtccatttttcaaaaaggaaactgagtaagggaaatggcacaaacaattctgtatcaatcacattccaactgtatatcatatgtttagagtcaccttgacagaagaatatcatgtttgcacaaagcacttagacgtgtgtttgtcatttttattccttttttaaaaaactcattgcacacaaaattctaaagcaaagggatttgcagatcatccattagagataagaaatacccagctgttgtttgttcattttcaactagtggacatctctaggcatagatgtcacccagactagtaatgtaaataggtcatttaaacaaggaattcaagtagaaaattgaaatcattgaactaccattaatgcacacatgagcctcaatcagaaacaaagaggaaataggcacctaccatcaaagctgacagtacagaacacattaagctagcatgtccttcaagcctgctggcatcctcccaaatgaaaatgtgggcaacctttaaga

SEQ ID NO: 271196 - DNA, 638 bp, Homo sapiens
tcagctgttcagattcattttagccttttctatagaggaatatatggatgaaaagcataccttaagaatctcaatataacagacattaagacattgaaaggtgagaaatctcaagtgtttctccaccccaaagataagtccatttttcaaaaaggaaactgagtaagggaaatggcacaaacaattctgtatcaatcacattccaactgtatatcatatgtttagagtcaccttgacagaagaatatcatgtttgcacaaagcacttagacgtgtgtttgtcatttttattccttttttaaaaaactcattgcacacaaaattctaaagcaaagggatttkcagatcatccattagagataagaaatacccagctgttgtttgttcattttcaactagtggacatctctaggcatagatgtcacccagactagtaatgtaaataggtcatttaaacaaggaattcaagtagaaaattgaaatcattgaactaccattaatgcacacatgagcctcaatcagaaacaaagaggaaataggcacctaccatcaaagctgacagtacagaacacattaagctagcatgtccttcaagcctgctggcatcctcccaaatgaaaatgtgggcaacctttaaga

SEQ ID NO: 271197 - DNA, 495 bp, Homo sapiens
gccttttttttccctttttctgccaaattgatctggcaaggattcttatktcaatgttaaacagaagacattcttggaatcttcttcctcgtaaagatgttttctatgtttaaccactagagataatacctgccctatgttctttgaagttaactttctttagattaagctaattttttattagtttgcacatcatgaatgaatgttcaattttataaaaattatttttatctacacttttgaaattatctttcccttaatttgtcaatataattaactatggtaaatgaaagttctaatattagaatcattaaagtaacctcacatttctgggatgagtccaagttggtcatgataaattagttattttgtacaatattcagtttgattaaagaattttgtatctataattgtgtgagatcatctgtaatttttcattcttttagtatccttgcaaaagtgttggtactcatatctattagctttttattcact

SEQ ID NO: 271198 - DNA, 495 bp, Homo sapiens
gccttttttttccctttttctgccaaattgatctggcaaggattcttatttcaatgttaaacagaagacattcttggaatcttcttcctcgtaaagatgttttctatgtttaaccactagagataatacctgccctatgttctttgaagttaactttctttagattaagctaattttttattagtttgcacatcatgaatgaatgttcaattttataaaaattatttttatctacacttttgaaattatctttcccttaatttgtcaatataattaactatggtaaatgaaagttctaatattagaatcattaaagtaacctcacatttctgggatgagtccaagttggtcatgataaattagttattttgtacaatattcagtttgattaaagaattttgtayctataattgtgtgagatcatctgtaatttttcattcttttagtatccttgcaaaagtgttggtactcatatctattagctttttattcact

SEQ ID NO: 271199 - DNA, 459 bp, Homo sapiens
tctattggccattccctgggcctaaggatgttcttgtcattggtgtgttctgttctcaagagacagggcctagggaagaggcattctctggctctagaagtgagctcagggacactttggcagagaattttggggtccaggtacaagaagcctggtctagagggagagaagcaggttgagggtgagcatatacccttggctccagaaaggtcttgatttgtgagaaggaagatggctagagaaggccaggagtcttctttgcccaagcttaagtatgcaatggtaaaaggtagagccagtctcatgcttctgtaacgctgggagtacaagccagtttagccatgctcttcctcttcacaagggacattttggggcaatggraagtaatggttatctttatactcgaggaaaaactgtaaaatatggtgtttctgacctacttctcagaaggtggtgatc

SEQ ID NO: 271200 - DNA, 488 bp, Homo sapiens
cagggattttatgaagattaaaagggtarcaaaggcaagacacatagcttatactcaataaattttaagtattcctgttttctgttttttttttttttttttttgagtggggagaaaagacaaagaaagtggattgagaacataatgacttgttcgacaagctgggtgcagcttgtgttgttagaatacagtttgcacaagagaagtgactggagattagtctaaagagctcattgaaaccagactgtattatctgacgaggagttcacgtatgtcctataggaaagaggactcagtgaatggcctgatgagagggctaacacaaggagatttgccattttagaaaattcatttgtgtagtgtcatagaggatggtttggagatagaagagactggcaacaggctgatctgcaatcattcagataataacatgagatggtctcaaactaagactctggctgtggaatacttaagagaggacaaatgtt

SEQ ID NO: 271201 - DNA, 488 bp, Homo sapiens
cagggattttatgaagattaaaagggtagcaaaggcaagacacatagcttatactcaataaattttaagtattcctgttttctgttttttttttttttttttttgagtggggagaaaagacaaagaaagtggattgagaacataatgacttgttcgacaagctgggtgcagcttgtgttgttagaatacagtttgcacaagagaagtgactggagattagtctaaagagctcattgaaaccagactgtattatctgacgaggagttcacgtatgtcctataggaaagaggactcagtgaatggcctgatgagagggctaacacaaggagatttgccattttaraaaattcatttgtgtagtgtcatagaggatggtttggagatagaagagactggcaacaggctgatctgcaatcattcagataataacatgagatggtctcaaactaagactctggctgtggaatacttaagagaggacaaatgtt

SEQ ID NO: 271202 - DNA, 548 bp, Homo sapiens
ggtctcgctctgtcacccaggctggagtgccgtggcatgatcatggctcactgcagacttgacctcctgggttcaaaccatcttcccatctcagcctcctgagtagctgggacaacagttgtgtgccaccatgactggctactttttaattttttgtagagatggggttcttcctatgttccctaggctggtctcaaacttctgaactcaagcaatactccctccttggcctcccaaagggagaactgaactttttttttttttgagatggagtcttgctctgtcactcaggctggagtgcagtggcgtgatcttggctcactgcaacctctgcctcttgggttgaaacgattctcctgcctcagcctccygagtagctgagattacaggcacatgttaccaagcctggctaatttttgtatttttagtagagacagggccttaccatgttggcaaggctggtctcgaagttctgacctcgggtgatctgcccacctcggcctcccaaagtgctgggattagaggcgtgagcagccaccgtgcccagc

SEQ ID NO: 271203 - DNA, 593 bp, Homo sapiens
attaaaaccaccattattcctggctcaatcagctggttgaagaagcagctctcctatttcacctttcctctctcttccagccccattgcaatcagaagattatttatggaaaaaagcaaaatggagatatttaaaagackgagagagacagcagaaagctgcttaagaaattgctttgagtccacaggagggaagcacaaaggagatgggataatagtgttatacactacatggtaagtgtaataaactccaagctgggaggacagcaagggcactctgtgtgggttaattggtgccctgcctacgctcgagagagaataaattttcaaccacatcaaagtcttctccagaaaaaaaaaaaagctcgttaaaaatcccatttccaggaaccctggcagccagacaataagaaggctaaacaacaacaacaacaacaacaacaaaaatcacctctatttggcctactactccctcaaacattaaactatttgccttgaaaagaacaaagaaagtatgtaagtaatatgtttaaattcaacgtcttagaaagtggagtgatttagctagggttggcttcgatcaatctgagacct

SEQ ID NO: 271204 - DNA, 608 bp, Homo sapiens
caatatccccaggttgaaagcagctatgtgttcttgagccaataacccaaactactttatagtttgtatatataactaggtacaagtagactatatatagtaaatagtctcagactacaactgaactattcaaaatatccttatttatttggacacaaagttataaaaacttggacatgtagaacaaatatcttttaaaatctgcaacacttaagagaaatttgctgtcctgatgctacacaatttccaaatattttagtgggtgtgataggcagamtaatggcccctaaaatgtcagatctcaatgtctggaagctgtaaacattgccttataaggaaaaagggtctttgcatatatgactaaggatcttcagatgaatatattatcctgggttattcaggtgggttccaagtgctttcacaagtgttctgataagagaggaaaaaagattagagagagacatagaagaggaggaagcaatgtggccatccaggcagagattatggtattggaaaggaagggaaaaaggaatgaagaagagcaatactttatttttcattacttaaataaacgtctatgtatagacctgtcatgtctgccaggtgga

SEQ ID NO: 271205 - DNA, 608 bp, Homo sapiens
caatatccccaggttgaaagcagctatgtgttcttgagccaataacccaaactactttatagtttgtatatataactaggtacaagtagactatatatagtaaatagtctcagactacaactgaactattcaaaatatccttatttatttggacacaaagttataaaaacttggacatgtagaacaaatatcttttaaaatctgcaacacttaagagaaatttgctgtcctgatgctacacaatttccaaatattttagtgggtgtgataggcagaataatggcccctaaaatgtcagatctcaatgtctggaagctgtaaacattgccttataaggaaaaagggtctttgcatatatgactaaggatcttcagatgaatatattatcctgggttattcaggtgggttccaartgctttcacaagtgttctgataagagaggaaaaaagattagagagagacatagaagaggaggaagcaatgtggccatccaggcagagattatggtattggaaaggaagggaaaaaggaatgaagaagagcaatactttatttttcattacttaaataaacgtctatgtatagacctgtcatgtctgccaggtgga

SEQ ID NO: 271206 - DNA, 359 bp, Homo sapiens
ttcttcagaattaaatttttaaagaacaaaatatgaaaatctttaataataccctgaagatttaattctccagcagcctttatatttaaggaacaacaattttatatttataatatattgtttcacaaagtggtttgcaatgatgcctaaactgtttagattgctttgggyacattaagttgtcattaaaaaaaaaaaagattagctgaacattctcacagtaactcagtgactccctgattctgtgtgttgtgggcttacaatagtttctctttttatttattcttttaatttcaatagcttttggtttgggctacaagtggtttttggctacatggatgaattctgtagtggtgaat

SEQ ID NO: 271207 - DNA, 618 bp, Homo sapiens
tatattatattctaagaggcatctttattatgttttgtgcgagtaggtattcattctgacttctgcataatattccattgtgtgaacataccaaagttaatacactttcctgtttagagcatyggggctattttttcagtttgtttgttttttgctatcatgaacagtgtcgttatatacaatcttgaacatttctcctggtataaatatgaaagtgtgcctgttggtttttgttgaatggaattactagcttgtatgaaatgtgaatgttcggttttaaagaataatcccaaactggtttccagagtggccattaacagtttatagtccaaccactaatgtttctgttaacacacatgctgtctatagattctgttaatacacatgctatgtatacttggtatgtcagacttttaaatatttgccaatattaatataaattgatattgtggtcttgattgcatttctcagcttgtggtattagctcactgttatgaagatacataagagaatggtatcttaccacatttcccatatgtgccctctgtgccaatggatactgtctatcttagtctgttgtgctgctgtaacacaatacctgagacttgtaaacacaga

SEQ ID NO: 271208 - DNA, 618 bp, Homo sapiens
tatattatattctaagaggcatctttattatgttttgtgcgagtaggtattcattctgacttctgcataatattccattgtgtgaacataccaaagttaatacactttcctgtttagagcatcggggctattttttcagtttgtttgttttttgctatcatgaacagtgtcgttatatacaatcttgaacatttctcctggtataaatatgaaagtgtgcctgttggtttttgttgaatggaattactagcttgtatgaaatgtgaatgttcrgttttaaagaataatcccaaactggtttccagagtggccattaacagtttatagtccaaccactaatgtttctgttaacacacatgctgtctatagattctgttaatacacatgctatgtatacttggtatgtcagacttttaaatatttgccaatattaatataaattgatattgtggtcttgattgcatttctcagcttgtggtattagctcactgttatgaagatacataagagaatggtatcttaccacatttcccatatgtgccctctgtgccaatggatactgtctatcttagtctgttgtgctgctgtaacacaatacctgagacttgtaaacacaga

SEQ ID NO: 271209 - DNA, 532 bp, Homo sapiens
ctctgttgccctggctggagtacagtggctcaatcatagctcactgcagcttcagacttctaggctcaagggatcctcttatttcagcctcctttctactactgactgtagtcctagtcaagcagcactaggtgagcaccaccacacccagccaatttttttcttttgtgttgtagagacaggttctcaccaggttgcgcaggctaatttctaacctctgtctcccaaagcactgagaatacaggtatgaaccactgcacccagctcacatgaacattttyaatgcagtactttcttttcttcagttccccagataggctttgttttcgtttgtttgcttattttgctgacactcaaaaattataaagtaataaaatcataatcaaatacaaacatacaggtatatgtacatacctagcaggagtttaagccactgattgttttataaaatttatgaatgttttacatattcttctctgcatcttacttttccactgaaaaataccaagaggttatctaacttttgggttaa

SEQ ID NO: 271210 - DNA, 554 bp, Homo sapiens
ccttatatattctggttattaataccttgtcaaatgggtggttttcaaacatttttttccattctgtggattgtctcttcactttgttgattgtttcctttgctgggcagaagcttttttaagttgatatgatctcatttatctatttttcctttggttgcctgtgcttgtgggatattactcaagaaatctttgctcacttcaatgtcctacagagtttccccraagttttcttgtattttcatagcttgagattttagatttcagtctttaatccattttgatttggtttttgtatatgtcaagagataagggtctcctttcattcttatgcatatgaatatccagtgtcccagaaccatttattgaagacactgtcccttcctcaatgcatgtttgtggtaccattgtcaacaatgagttcactatagacgtagggaattatttatgggttctctcttctgttctggtctatatgtctgttgttatgacagtaccatggcattttggtaactaaagctctgtagtataatttgaaatcaggtaatgtgatt

SEQ ID NO: 271211 - DNA, 589 bp, Homo sapiens
cagtcattacacaaccaacactgctgctccaaggccaagactccctgggcagctgtcagcattgttcccatggggatgaggaccgctgggttgtgtccttacctcacaatgtgattactgactcctcatccattagtgtcatttctgaacctgcactgggttaacactrggaaataaaaacttcccacccacttcttgcaggaggctgtgtgggtaagctcaacataatcttatttcaagagatcataaattgattggtacaactttttggaaggtgatttgataacagctagtaaaatttagtataataatttagcaagatacaagtgtaaaaatgtatgggcttacatgtgaaggtatttattgcagcattatgctggtaaaaaattgaaaacacaaaatatttgttagcagggtactcattaagtaaatgatagttttttcataaggtgaatatttagtaatcatttaaaatatgagggatatataaatgctaatatgggaaggcttaataaacacacacatatacacatataacaaaaagaaagttgcaggccaatattttactaaaatatcaagtttttaaaag

SEQ ID NO: 271212 - DNA, 617 bp, Homo sapiens
ggagggtgaatgtaccatgtcaagattgaagaatgtgtgagacagaaaaaggggccacaggccacctgtccctctgccctctctccaatccaccctcagcccaaggacaccgcaaagccatctatcccttatcacatcgccttccagaacatacctccattgcgctccctcatttgatgttggcgacgttaggtaaaaaaaaaatgtttctttctaaaacctttcatctatggctaagaaggtgcacaaattagggttaaacctgtatcaaaacacattcattctgaagattgctaagcagtcagtatgggggagtgagttcactgtcacaacttccagtcagaaaacccatagaaagttactatcaccattgaatattggaggcaggaactacattgaaagcttgagggtggaccacaggtcactgagagacacaatagtgaggcttacacgatgagaacacaccaygaaaccataaggcaataaaggggaagataattctggcatctagaatcaaattagtacagcagacatcagataaatcacatttcttgcttttcccattcacagtctgagagttctaaaatcttcatgtatttcagatgtttacacttgtc

SEQ ID NO: 271213 - DNA, 553 bp, Homo sapiens
agatgcctctgttcccctgcatgttcgtataccctcccacacctcctttttttgatcttcaatagtcagtgctctgatccacaaggctcagacctattctcagtatttcccattcaggatatgatcttaactttctagggatgattttttctcggttatcctttctctctgataagaccaatgactatatattatgaaagtcaccccaatcatactaatagtgtgggactgaagtttatgctctggaacctttactagaaatttcactttatcttacagtgagccatcagtcagcacctgtttggagtagtgtatacacaccaggggacatctaattaatgatactatcatccagttattcattttacatcttcttttaaaaagtaacattgttttgaaatatgtcgattaaaattaagttacrttatgtttgtggcatttctttttgtacaggtaaagtagattacgtgtctttaaactattaatacaaaatttactaacatttattgaatgcctaccaagtgctagttattcttctttgcaatggagaaaa

SEQ ID NO: 271214 - DNA, 592 bp, Homo sapiens
ttggattctctgtctaaaaggtcacatatttctgtttctccaggattggtccctggtgccttatttacctcaactggtgaggtcatgttttcctgaatggtcttgatacttgtggatgttcatcagtgtctgggcatagaagatttaggtatttattgtagtcttcatggtctgggtttatacccatccttcttgggaaggctttccaggtattcaaaaggacttgggygctgtgacctaagctctatctgcatgggggacatcccaagcccagtaatgctgtgggtcttgcagactcgtagaggtacccacctggttggtcttggataagatctgaaagatttatctggattaccagacagagactcttattctttttccttactttctcccaaacagaatctctttctctatgctgaccttcccagacctgggagtggggtgacacaagcatccctgtgaccaccaccactgggactgcattgggtcagacctgaagccagcatagcactgagtctcactcaaggcccactgtaaccactacatggctactgcttatgttttgtcaatgtcctggggctctataatcagc

SEQ ID NO: 271215 - DNA, 571 bp, Homo sapiens
aaacatactagaagaaaactgagggaaaactcttctgaacattggtctatgcaaagaattcatgactaagacctcaaaagcacaggcaacaacaacaacaacaaaaaagcatagggaaatggtacttagttaaactaaaaagcttctgcagagcaaaggaaataatcaacagacttaagagacaacctgcagaatgtgagaaaatatttgcaaactatgcatccaacaatatccagaatatgcaaggaacccaaacaattcaacaacaacaacaaaataattccattaaaaagtgtgaaaaggacatgaatagacatttttcaaaagaagacatacaaatggaaaacatgttcaacattactactaatcaaagaaatgcaaattgaaaccacaatgagatgtcatcttatgccagtcagaatggccattattaaaaagtcaaaaaataacagatattgaagagaatgcagtgaaaagtgaaaagggaaattttaaacactattggtgagaatgtaaattattaaaatctctrtggaaaaaagtatggagatttctcaaagaactaaaaata

SEQ ID NO: 271216 - DNA, 573 bp, Homo sapiens
tgtgctttgtgaggactgtcctggcagcagtgtgcaggcctgattggaaggagttactcaacagagacataatgacataatccagtatcagaactgggaagacacaggaagggctggaacaccttctgaagaggcatcctaggtgtggctgttaagctctaaggcctaagaataccaggctcccttagttctctctagactggatggcccttgagaacaatctacatttttggttttgggggagttttttcatttttttttttgagacagggtcttgctatgttgtccaggctggagtgcagtggctatttgtaggcacaagcatagcgcactgccaccttgaactcctggcctcaagcaatcctcccgccccagccttccaaggagctgggactataggcatgcaccaccatgcctggcactctacatttttaagtaccctgcaatgtacaacacygtactgtgtatacagtaggtgctagtgtttgtgaatgaataaataaacacaatggaagaaattaatggataagttaatgtctctaggagataattctataaactaaggaacacaaa

SEQ ID NO: 271217 - DNA, 492 bp, Homo sapiens
ggtgtcccctgatttactgttcaggaaagtctcccaactkggaggtttcatgtcagctgaaaatcctacaagtaacatcccaagaataaccttcccactgggaggtgataatggatgtctgtcactggaaatctgtctagttttgctctgtagcacctcaagatccattccccagatgatccattccctgtgggaatggtaggaggaatttcataaaaagaaaacacaaaaggaattgttagactgaaatattttgtgtcagaaaccatgctaggcacatagtagacaccagattaatgtgtggttaatggaattgaaaatatctattaagggaaaacaacaacagcaacaacaaaagagaagcagccccagcagtttgctacagatagattcacacaacaggccaagggctggtgggatcaaaacaatagtaccagcactttaaacaatttgggcaggtatgcctgggcagatgtttgggaaaaaacccaa

SEQ ID NO: 271218 - DNA, 581 bp, Homo sapiens
taaagccaagtccttattattcattcaattttaagcttttaaaattcaagaggtctgagtttgaatctagtgtgctgtgtaatcctggaaaacttgtgaattagtcaggccaggctaagctatgctgtagtaacaaacacgcccctcaaatctccatgggtttacaataagtctcacaaagtcctctgcagtccaaggcctctttaggtcagtttgattccaagttatgagtcagggatacagttgttccaccttgaagcttcctcttctcaataagtgccttctccaatcactgtaccaggggaagagagagcagagagcaacctcatccactctgttaagctttgaccttaaagggactcatttcttttgctcacagccyattggccagaattcattacatggccttgcctaatgcaaggaggctgggaaaggttggggagcacagatatattaaaggaacaataattgtgtctgtaggaactaggtgtcaatttctacatatttaaactaacttactaattgaatagtgcatgcattaaagaaatagtacatatattttaggtttagtcattgtatta

SEQ ID NO: 271219 - DNA, 620 bp, Homo sapiens
ccagcaccttctggagtatagccttggtaatagtacaaattgtaattaacaaatgtgttaatcaaytacaattagtcatacctctggatacccacacccttggccatgtaactttacagggtcctctctatctgggcagagcaatctgcctgacctcttaattctgagctcagccatgtgatgtgctttggcgaatgggataatgcaagttattgtacctgcaagtaccacatgtacatttcccagctatcccccaggaggatgaagggcatcccaataaacttggccaacctggccaagactatcttagatcaaccaacagccattcaacccccagacaggtgaacaaacccagccaagatcagcagagccgattaaccaacctgcagccaaccccagatacatggaacactcaaaatcagctaagtccagtcaagatcagctaatccctgcagatttccaggctaaacaaatgttaatgccctatgctaatgatgctttatggttgcttgttactcagttttattgtagcagtaggtaactaatacagcctccccaacacgagcctacaagaattgtgtttagaagatttgagagtgaaacaggtagggaacctaatt

SEQ ID NO: 271220 - DNA, 620 bp, Homo sapiens
ccagcaccttctggagtatagccttggtaatagtacaaattgtaattaacaaatgtgttaatcaattacaattagtcatacctctggatacccacacccttggccatgtaactttacagggtcctctctatctgggcagagcaatctgcctgacctcttaattctgagctcagccatgtgatgtgctttggcraatgggataatgcaagttattgtacctgcaagtaccacatgtacatttcccagctatcccccaggaggatgaagggcatcccaataaacttggccaacctggccaagactatcttagatcaaccaacagccattcaacccccagacaggtgaacaaacccagccaagatcagcagagccgattaaccaacctgcagccaaccccagatacatggaacactcaaaatcagctaagtccagtcaagatcagctaatccctgcagatttccaggctaaacaaatgttaatgccctatgctaatgatgctttatggttgcttgttactcagttttattgtagcagtaggtaactaatacagcctccccaacacgagcctacaagaattgtgtttagaagatttgagagtgaaacaggtagggaacctaatt

SEQ ID NO: 271221 - DNA, 634 bp, Homo sapiens
gggggctgaggctgtaacaggtgatagctaaagggtaagggtttctttttgagatcatgaaaatgttctccaataaaacagactgtgcagatatctatgaataaactaaaaaccattgaactgtatactttcaataggcacatgaatggcacatgaactttgaaaactgttttcaaaacatttatctgataaaggacttgtagctagaatatataatctagaatatattcctctttcaaggaaataagacaacaaacaatccaattaaaataatatgattaaaataacaaaagacaacctgatttaagcacatgaaaagatgttcaacatcattgatcattagggaaatgcatattaaaaccacattgaaataccattatacattccttagaatggctgaaattaaacaccgataataccattaattgacaaggatttgatgcaactagaactcttctacattgycagagggagtgcaaagtgatatagccactttggaagacaggttggcagtttcttatgaactaccatatgacccagaaatcacactgttaggtatttatccaaaataaattagtgctataacagctttattcataatacttaaaaaaacaaaagtaacataagtattcat

SEQ ID NO: 271222 - DNA, 576 bp, Homo sapiens
agctgagctctggttggtgttaagatgctgtttggctctttttcatcaggcagattaaccattagaagaacagtaatgacaaaaatgttaagtcctcatcagctgcaaggattgactacttaccttgccaatcaaaaatcacctttaacctaggatgccaatataaaaagcacatggaaaagaaattgtctaattacaggaaagaagtaaaacttgacaggtaattttctataactggaaaagctaataygggtaaatggaaacagtagtttcattaataaacatctcaacatagatgtattcattcttaaggcccagatgaataactcatctgccttcatctgctccatcttctagttccatttagaacatgaaggtagccagtctttttgtcactgaacagtgaatctgaatgcccatcacactattctccaagttttgtgaatatgcacatctattttatccacaatgcaatgataagtgatgtccctggtatctaccaaaggtgccacaaaatctagaaatgcattttgaaatgtcaaagagaataaattgcattcaatatagttttagtgc

SEQ ID NO: 271223 - DNA, 602 bp, Homo sapiens
acctagcctcagaactcatcgtactggaatttatcccatgtcataagcttttataccacgtttgcatgagttttatttttccatgttgtttcttttcccattaccattagcaattgaaacttgactataaaaaaaggacttgtttgtaggaatcaggaatactacatttttatagaggaaggagtattgctttggagttaaacacatccaggttggaataccagctgtaccactttttaacttagtatctttgcctgacttatttaatctctgatcctcagtttccttattttaaaacagaaataaaaacagctattttaccagattgttgtaatgctaatatgaattagtaggcatttaataaattgtagctatttaaattatattatatcatattctctttttctgttttcaagatactacatacttattgaggacacagtagtcgacctatatccatggttttgctttscatagttttgattgcccacagtccagaaatattaaatggaaaattccagaaatatataattcataagttttaaattgcatgctgttctgagtagtgtgatgaaatcttacaccatcctgctttgtgctgc

SEQ ID NO: 271224 - DNA, 538 bp, Homo sapiens
gagtggttttattttacatttttataactaataactggtttaatagaaggcagctggattcctatatctgcctctttattcactctgttgtatgtactatgttgtcttggtcaagctgtagaaggcaaatctggctttacatagatayataatgtgagaaaggaggactatttaatagcacatatatttgtggttattctttttttaatacttaaccaaaactcaacaagtagtaatttcttataagttgcatgcaatgtaaaatctaaaaccaaataaataaacccttcctagtctcttgtacattaaaatccattggtttattttgcactttaaatgaatcttttacccatgtgtgattttgtaatattgtgcattagtcatgtggaaagcattgatccatcaagttatgcagatcttccaaatgttgatacatcttgttctgtaatatccaaaaaatcacatttgttaatgtcatcccttattttcaaaaacatctttcagtgtttcggtaattccaaggtagtggttttgagtt

SEQ ID NO: 271225 - DNA, 666 bp, Homo sapiens
aatgacataactcccaggagagattagcagtatccagaaatcagtccactttttatcctccacccaattaaaatrtaatattatgtaaatgttttgacatatctatatctagtaggaagaattataacagaagagaaaaaccttattttttaggcaaacaagtgaaatgaattggtagattttaatctggagaagttcacaggcacttaaaaattacttgcttatctttttctaaacattaacagaattttttatagtgctggaaaatcaaaatggaagtatagttatagtcatttaaatacctacatgattttttaaaatgtacagggtctggtgcctagtgacatcagcaaaataacagaagaggaagtctcaagctccacttccatgccctgcctcccactgctgcccctccgccaccccgcagccccgacccacaaagttcagctagactagactagagcatccttttgaaaactgctacacttggaaacaagcctgagatacctgcatgattttcataactgaataaaacctgaattagaagtgtaagaacggtcttattccaacagtgctgcccctccccttcccttaagtcaagcacaacaccagatggagatttttttccctgaacccagaatttcaacaggggggaagggaattgga

SEQ ID NO: 271226 - DNA, 666 bp, Homo sapiens
aatgacataactcccaggagagattagcagtatccagaaatcagtccactttttatcctccacccaattaaaatataatattatgtaaatgttttgacatatctatatctagtaggaagaattataacagaagagaaaaaccttattttttaggcaaacaagtgaaatgaattggtagattttaatctggagaagttcacaggcacttaaaaattacttgcttatctttttctaaacattaacagaattttttatagtgctggaaaatcaaaatggaagtatagttatagtcatttaaatacctacatgattttttaaaatgtasagggtctggtgcctagtgacatcagcaaaataacagaagaggaagtctcaagctccacttccatgccctgcctcccactgctgcccctccgccaccccgcagccccgacccacaaagttcagctagactagactagagcatccttttgaaaactgctacacttggaaacaagcctgagatacctgcatgattttcataactgaataaaacctgaattagaagtgtaagaacggtcttattccaacagtgctgcccctccccttcccttaagtcaagcacaacaccagatggagatttttttccctgaacccagaatttcaacaggggggaagggaattgga

SEQ ID NO: 271227 - DNA, 654 bp, Homo sapiens
tccacatccagaatggcagggcaacatggaaatgttttcaaaatggccatcgagctacaagaattgcggatcacaccatctgcagaagcacaaagtgtgctctcttgaggtacctggggggcaacatcaatcaacctgtgtgctagtccagaggtttgcgtgagggagaatgagcaaatttaaacaggaacaacaaactacagctgataggtagaaagctggagcccscaaaagaaaagcacatatgcccctcaacaattctcaataatcatttatatattgcagttgtgtcttgtgatcattactaagaatacagaaacatctgtaaaaagctgcttatcaagtagtctatctgacaggctccctgataagtttatgtagtagacccactgtttaataaaaaacgttattagggagactctgggcacactgcccatgggttaaccctgctcctcaaggagcagtataagaaaaattattagtaaaaataagacaattaagaccagttttaatgttttgtgttcagaacctgtctttactgatctaagttctctctatcccttaacatgttaggtaagattacttaaatttatttgaattgatttttagtataatactttgtggtatcctaaattatatgctgtcatgactata

SEQ ID NO: 271228 - DNA, 520 bp, Homo sapiens
gaacagtaatttatttcaaattatttatgtttgggtttgcttttatttgaaaatgaaaatatgaaaagcccttaatttaattaaaaaaaaaaaaaggtggccgggagcagtggctcacgcctgtaattccagcactttgggaggccgaggcaaacagatcacctgaggtcaggagttcaagaccaacctgaccaacatggtgaaaccctatctctcctaaagatacaaaaattagctggggcatggtggcaggtgcctgtaatcccagctactccagaggctaaggcaggagaatcacttgaacttgggaggtggaggttgcagtgtgccgagatcacgccgctgcactccagcctctgcaacagagacagactgtctcaaaaaaaaaaaaaggttttcgtcctttaagcatctgactctgaaaacactgtttggctcttttgtccctccctgaagtagatcttagatatctaataaatgctgtcagcaaaamtgctttgggctgaagaatatgatagag

SEQ ID NO: 271229 - DNA, 646 bp, Homo sapiens
ggcttattaacagttgctgtcacagaatagccactcagtacacttctttttttttaagagattgtctcgctatgttgttcaggctggctttgaactcctaggcccaagtgatcctcccacctcagcctcctgagtagctgtgactacacgcctgcaccactacacccagctcaatacactgttttttttttttaaatgaatgaatttgcagctacttaragctgatagctccttgactctggtcctgagacaacagagggtataagtataagctcttttaatctatacagtgaaagctgtggatagataacattggttcattaggtaggtagccaatgaagagactcaagtggattgaagattaagtttctgactagctcctagggaaaggataagggacatactttataacatgcaggaacaaatgtgcagtacttaacttgcagtcttacaaactaagagttggaatacaagttttagcccaggctctgctgataactcacatgagacactagctaagtaatgtcacttacctggtccttagttgcttcatctatcaacaggaagttagattagaagatcctcaagctacttcctagctcttgtgctctagtaaactgatggttatagtgatgttggacatttc

SEQ ID NO: 271230 - DNA, 441 bp, Homo sapiens
tgtgtaattatgaattgaagttttaattgaagacagtaggacacagtgtggacctttgtatcatacatacctcagctcatatccaagctttactatattctaattttggtcatatcctgtttcctcacttgtaaaataggtttattgatactttcctcatagataatcaaaacaccctagcatagtgcttgacatatartaagttcttagtagatattcttttttaattccatccttcattactatctgtttagcatgtatttcatagaaatttcaggtaatgatgaatagtcattataatgcatcattattgtttatgaatcatccagtgtacattgagatttataagaaaagtaaaagtagagcactctgtattagaaaaacagaattattttaaatgtcttgtgtattttattagccagttttacttcactaaaatca

SEQ ID NO: 271231 - DNA, 630 bp, Homo sapiens
gatatccttaagtcaggtaattaaaaatctccaaagaccaagaactggagcagccagtgggtataacaggaggtggtatgactgccttgtcttttctgaacttgattatttagatttatgactttctggaaaaaaaattgacaacactatgaatttgactgggtttctatatttacctgacatgttttccattttgataaatgactgtaatatgtctacattataaacctattagtggccagcttttctgacctcaaacagttggctggattggatcagtctttctgagctcaattttattattgtaatttgtgatgcaaaggtgatttacttttttaagttcttaattgkcattggtagatggacagaaaaaattaccaaatcaatcttttccacctggaatttatgtgaacaccttcagccatatcttggcattttatcttatggatggaattgatggaattcattagcaaaatgatatgtctgagaggaaatcccatttaccctgaggcagttttgagtatttatttagacagggaaattgcttttgggaaattctaagtattctattacttgagatttttaagttaattttatggaatttaactttagaaaatcttaaaattttag

SEQ ID NO: 271232 - DNA, 630 bp, Homo sapiens
gatatccttaagtcaggtaattaaaaatctccaaagaccaagaactggagcagccagtgggtataacaggaggtggtatgactgccttgtcttttctgaacttgattatttagatttatgactttctggaaaaaaaattgacaacactatgaatttgactgggtttctatatttacctgacatgttttccattttgataaatgactgtaatatgtctacattataaacctattagtggccagcttttctgacctcaaacagttggctggattggatcagtctttctgagctcaattttattattgtaatttgtgatgcaaaggtgatttacttttttaagttcttaattgtcattggtagatggacagaaaaaattaccaaatcaatcttttccacctggaatttatgtgaacaccttcagccatatcttggcattttatcttatggatggaattgatggaattcattagcaaaatgatatgtctgagaggaaatcccatttaccctgaggcagttttgagtatttatttagacagggaaattgcttttgggarattctaagtattctattacttgagatttttaagttaattttatggaatttaactttagaaaatcttaaaattttag

SEQ ID NO: 271233 - DNA, 502 bp, Homo sapiens
agcaaaatgatatgtctgagaggaaatcccatttaccctgaggcagttttgagtatttatttagacagggaaattgcttttgggaaattctaagtattctattacttgagatttttaagttaattttatggaatttaactttagaaaatcttaaaattttagaatgaaatgtcatttccatgagatacagtctgtcccttttatttcattgaaagaaaataatktagtagtacatggaattttaatttgaagttttatcagatcaactaattctacatgcaggcatacagacacaaagaagcattaagttgcccttcatcagcactttagggaacatctgctttaattttatagctgtttgtgagaaaattatcacaaggtaaaattagcccaagctaaaatactacatgtttcagtggtaagatcgtgtaccactgaattaggcagattaatagacaacccttaaaataatatttgttgcccaactatctaccctgaccta

SEQ ID NO: 271234 - DNA, 629 bp, Homo sapiens
agcattaagttgcccttcatcagcactttagggaacatctgctttaattttatagctgtttgtgagaaaattatcacaaggtaaaattagcccaagctaaaatactacatgtttcagtggtaagatcgtgtaccactgaattaggcagattaatagacaacccttaaaataatatttgttgcccaactatctaccctgacctaatatcaaatttgtgtaattcaattgtttctcaactcttgttagtccrcctatagttggtagtcagtggaattttttcttagctctgttgagtatatctttaaaaaaaatcaaattggtattaaatgattaacaaccacaatcaaattaaaagcttcaaaatacatccaagtagtaaaactcaaagatagttgcagataaaaaacaactcctgaatcacttgaacccgggaagtggaggttgcagtgagccaagatcgcgccattgcactccagcctgggcaacaaaagcaaaactctgtctcaaaaaataaataaataaaaaacataacttctcaacaactttagaagctgtcgctctctttagagcattctttatttaaagcagtatgggagcatttacagctgtataatgatagggaacaccct

SEQ ID NO: 271235 - DNA, 578 bp, Homo sapiens
attctaactctcaaggataatataaatcaatacattctaaagagatgcaaatacctcttttctattttgacaagagaagcttctcccacatgtgcatttcactgcttcctgtctgccatacaaaatctaattgtaaaaacagtagggttgtcatatttctgatatacatagctgaagttcaaggattttttttgtttgtttgttttgaaggtgattccttggatacggattaactggttctcaatgaactgaataggcactttaaaagtggtatttttatttcaagtggcccaagaaacrgtttagtccagaatatccaaaaattattgctattaatgtccaaacagaagaaaaatggaagcttgccagaaatgctaaatatagtatggtttctattacaattaatactattccaaaattttaaccataactggtaaaggcaattaaaacaaaccacctagtctacattgagagattatgcaacattatttaaataattgaatataatgttaaagtgttattccttttaaatagtagctccaaaaaatgacttattttattagcatcagagtcataca

SEQ ID NO: 271236 - DNA, 578 bp, Homo sapiens
attctaactctcaaggataatataaatcaatacattctaaagagatgcaaatacctcttttctattttgacaagagaagcttctcccacatgtgcatttcactgcttcctgtctgccatacaaaatctaattgtaaaaacagtagggttgtcatatttctgatatacatagctgaagttcaaggattttttttgtttgtttgttttgaaggtgattccttggatacggattaactggttctcaatgaactgaataggcactttaaaagtggtatttttatttcaagtggcccaagaaacagtttagtccagaatatccaaaaattattgctattaatgtccaaacagaagaaaaatggaagcttgccagaaatgcyaaatatagtatggtttctattacaattaatactattccaaaattttaaccataactggtaaaggcaattaaaacaaaccacctagtctacattgagagattatgcaacattatttaaataattgaatataatgttaaagtgttattccttttaaatagtagctccaaaaaatgacttattttattagcatcagagtcataca

SEQ ID NO: 271237 - DNA, 555 bp, Homo sapiens
gtgactgaatcaacctgaaaggtagtttatctcatataggaaatgtccagaggtaggcatttcaagctgcaacaatggttccacgaagtcttcaaggacgcatgctcctctctattctaccgtccttagctcaagtcatcaaatctgtgtgccaggctgacaggaagaggcaggtaygaaagagggctagcttctttcttccttcctttaaaaaagacggcctgaatgtctgacacatttctgtttcacctctttagccaaaatttggtcatacgaccatacttaacaatgaaggagactgatgaatgtgtttcagttaagcagccatgactccagttaaacactggcattctggtaagagggaaggaaggatagatgttggaggagctacccatccttgccacatctgcatacttcgtggctttccatttcctctatcaatggcataattgagtggacacctgacctgggccacgccaataagattctctctcccaaatattcagattttggacacagaaatccagtcaatttacttctgaagaactcaactgc

SEQ ID NO: 271238 - DNA, 555 bp, Homo sapiens
gtgactgaatcaacctgaaaggtagtttatctcatataggaaatgtccagaggtaggcatttcaagctgcaacaatggttccacgaagtcttcaaggacgcatgctcctctctattctaccgtccttagctcaagtcatcaaatctgtgtgccaggctgacaggaagaggcaggtacgaaagagggctagcttctttcttccttcctttaaaaaagacggcctgaatgtctgacacatttctgtttcacctctttagccaaaatttggtcatacgaccatacttaacaatgaaggagactgatgaatgtgtttcagttaagcagccatgactccagttaaacactggcattctggtaagagggaaggaaggatagatgttggaggagctacccatccttgccacatctgcatacttcgtggctttccatttcctctatcaatggcataattgagyggacacctgacctgggccacgccaataagattctctctcccaaatattcagattttggacacagaaatccagtcaatttacttctgaagaactcaactgc

SEQ ID NO: 271239 - DNA, 587 bp, Homo sapiens
tcgactccacatcttggctattgtgaatagtgctgcaataaacatgggggtataggtatccctttgatataacaatttccttttctttaaataatatccagtagagggatttaagctgaatatcttctatacaacaggagatactataaataaataactacataagaaaatttttattactacaatgtcaacatatttacaatttttataagatcattcgttattacttgattgaagtagttttttaaaatcctgcaattattttttaactgtgcagcttttgaacatgmgattgaggatttaaaatggaaatgtcaagtatcttgcataactgtcagtctagtttttattttttcccagatgcttttttcattttctccagtttctaggaatgtgccttaggaaaacttctagttatatctattattttttcttatgtcacgagaaatattattttaatataagggtgatgaagtcaagcactgatcttctctaatattcacatttaaaaaattgatgaagattatcaagacctgagtgacatgctgttggagagatcttaaatctacataaatggaatatgtgtt

SEQ ID NO: 271240 - DNA, 587 bp, Homo sapiens
tcgactccacatcttggctattgtgaatagtgctgcaataaacatgggggtataggtatccctttgatataacaatttccttttctttaaataatatccagtagagggatttaagctgaatatcttctatacaacaggagatactataaataaataactacataagaaaatttttattactacaatgtcaacatatttacaatttttataagatcattcgttattacttgattgaagtagttttttaaaatcctgcaattattttttaactgtgcagcttttgaacatgcgattgaggatttaaaatggaaatgtcaagtatcttgcataactgtcagtctagtttttattttttcccagatgcttttttcattttctccagtttctaggaatgtgccttaggaaaacttytagttatatctattattttttcttatgtcacgagaaatattattttaatataagggtgatgaagtcaagcactgatcttctctaatattcacatttaaaaaattgatgaagattatcaagacctgagtgacatgctgttggagagatcttaaatctacataaatggaatatgtgtt

SEQ ID NO: 271241 - DNA, 589 bp, Homo sapiens
tgagtctgtctcaaatgctttgtctctactttctgatatagaaaacacactgttaactactatggccttcaaggtatgtagtgaattagtgtaatatactgttaaattggccagaataataacagtgtgaataagagaaaaacaagcaagccaacattgagaaatatttctgagaaacttaaggttactggattctttcttaatagtctgccaagcattttcacaagatacataccacagactggcaaaatcttcagcaataatatagtaaatgttgcaacactcttctattcaaccayaaccaaatgggtgagaataaacataattattcttctataaatgcctcacatggcaacttggcaaagcatggaataaagtacaagggacttctccatgggttttgtagaatggaaagtacaaaaaacgtatttttgatgttgttttctatagcagactaaagtcagtctcctgaagtctcaaataataatgcaactaagatgttcagaaataagctagaagagtggacaaaaataaaattaatactgctaattcttggttgagactatctgaaaggagcacaaactgtaag

SEQ ID NO: 271242 - DNA, 634 bp, Homo sapiens
gggggctgaggctgtaacaggtgatagctaaagggtaagggtttctttttgagatcatgaaaatgttctccaataaaacagactgtgcagatatctatgaataaactaaaaaccattgaactgtatactttcaataggcacatgaatggcacatgaactttgaaaactgttttcaaaacatttatctgataaaggacttgtakctagaatatataatctagaatatattcctctttcaaggaaataagacaacaaacaatccaattaaaataatatgattaaaataacaaaagacaacctgatttaagcacatgaaaagatgttcaacatcattgatcattagggaaatgcatattaaaaccacattgaaataccattatacattccttagaatggctgaaattaaacaccgataataccattaattgacaaggatttgatgcaactagaactcttctacattgccagagggagtgcaaagtgatatagccactttggaagacaggttggcagtttcttatgaactaccatatgacccagaaatcacactgttaggtatttatccaaaataaattagtgctataacagctttattcataatacttaaaaaaacaaaagtaacataagtattcat

SEQ ID NO: 271243 - DNA, 634 bp, Homo sapiens
gggggctgaggctgtaacaggtgatagctaaagggtaagggtttctttttgagatcatgaaaatgttctccaataaaacagactgtgcagatatctatgaataaactaaaaaccattgaactgtatactttcaataggcacatgaatggcacatgaactttgaaaactgttttcaaaacatttatctgataaaggacttgtagctagaatatataatctagaatatattcctctttcaaggaaataagacaacaaacaatccaattaaaataatatgattaaaataacaaaagacaacctgatttaagcacatgaaaagatgttcaacatcattgatcattagggaaatgyatattaaaaccacattgaaataccattatacattccttagaatggctgaaattaaacaccgataataccattaattgacaaggatttgatgcaactagaactcttctacattgccagagggagtgcaaagtgatatagccactttggaagacaggttggcagtttcttatgaactaccatatgacccagaaatcacactgttaggtatttatccaaaataaattagtgctataacagctttattcataatacttaaaaaaacaaaagtaacataagtattcat

SEQ ID NO: 271244 - DNA, 633 bp, Homo sapiens
gctatctttcccactacagtaattcaagcaacccctacaagcatttcagagttggctcacaagaaggtaccatttaccaacaaagctatttatcctattataacaatctctgcctcagagtctcaaactgatggccagaagatagctaaagggggaatctgatayataagaataaaaaaatgaataaacactaacaaaaattgatattttattggatttcaatggaaaatcacaacagaaacactgtatttgccttaccagtaatgatggctaacctttaataagtatccactatgtaccaggttcatttcaaagagcttgcaatgaattaagaagtttagtagtcatacgctatgagggaagaaatattattgtaattttctttttaaagacaaagaaactgagacagaggagttcagtgatttgcctgaggttatggtcctgataagtgacagagctaagttgctggatgcagagtccatactctgagtctctgcactatatgatgtttcaatggcagcaatggactgaatctaagtacatgttgcatcctttagttatggcaccccctgtgcagcccaccatcgtccctccacttctacttgtcgtttcctcacaggggtcagaataaag

SEQ ID NO: 271245 - DNA, 383 bp, Homo sapiens
tttttctatatataaggcaacatgatctgaaaacaaggacgatttgtctgytattcagtttggatgcccttatttctttttcttgcctaaatactctgaccacgacttcaatgctacgttgaacagaagtggtaagagtgggcttccttatattccagttcccagaggaaaaccaaagcttttccccatgtaatatgatgttagctgtggatttgtcatatataacttttattgtgttgagctactttccttttatacctaatttattgagagtctttatcatgaagaagtgttgaatattatcaaataccatttctgtatcttttgagattatcatgctttttgttctttattctgttgatgtgatgtatcatgttttgatt

SEQ ID NO: 271246 - DNA, 568 bp, Homo sapiens
gcagttaccaaaacctattgccgtattggccttgaattctccctaatggatgccattcagttactgttctctgatcattctgacagaaaattgaagtctgaagagaccttgtttgtttgtcctttaatatccaagggagcagcatgcttcatgttccatctgtgaatcatctttattttatcatctttattttaatcagtatctcctacataagctaaaagagaaattgattgaagctgttactttgctggcaaagtgaaaatttttatttgcaaaaacctctggagaaaaatatgctttctgcaaagacatacrcagaacagttacctttgtggtatctacacattttattattgctttcaacagcatatctcacaaagtgaccgtgatggttaattttaggtgtcaacttgactggctgaaagaaaacccagggaacgggtaaagcagcatgacttctgggtgtgtctgtgagggtgtttccaaaggagattggcatgggagtcaggggacttagtggggaagattcaccttcaatgtgaaaagatcccatccaattagccagggg

SEQ ID NO: 271247 - DNA, 493 bp, Homo sapiens
caagtatcttcttagacaaccatgaaattaaatttaaaatcaattttaagaattctcaaaactatacaattacatgaaaatttaagaatctgttcatgaacaatctttgggtcaatgaaaaaaataagctcgaaaattgttaaagttttcaaaatgaatgataacagtgacagaagttatcaaaatctctgggatacaacaaaagaagtagcaagaggcaagtttatggttccaaatgcctgcaccaaaaagacagaacaatcacaaactggtaacctaatatcacacctcaaggaactataaaaacaagaacaaacccaaacccaaggatggcaggaaaaaaaaaacaaatatggggctgggtatggtggctcacgtctgtaatcccagcacttggggaggctkaggtgggtggattacgaggtcaggagatcgagaccatcctgtctaacatggtgaaccctgtctttactaaaaatacaaaaaaaaaaat

SEQ ID NO: 271248 - DNA, 690 bp, Homo sapiens
attttatttaagggatttgagcatctgtgaattatgtcattcttggaagttcctcctattcttggaaggtcaaggatatggagtgatgtatatatatatatatatatatatatatatatatatatacatacacataatcagtttcacatgcatacacatacatatgtatgtatatacactcagaaacatttcataggtgagaagaaatattgggttttggttttgaaatattggtagaataaagatagcaaggaggataaaaaataaaaaatggctttaagccagaaaaaagaaaacacgggggaaatataaataagtgaaaaatacaacttagctcaatcagattcttactagcacctacaatattgcatgacctttagaatccttaaaagccaatttttaagaatcttttcttgtttaacatgcattaccaaaaatatttttttaatttagtgataaaaatcttgcatcctatttttcttcaaaatgtctttgaattatataacaaataacactaaactataaagytctctcacttttaacaagaaaaacaaacttactgatatattttatgccatatattaaaaaggcataaatattacacatatatataattcttctgagaatattttaaatttttttccaatattcaacccttacatttatgtcttacttctatattttccccaa

SEQ ID NO: 271249 - DNA, 668 bp, Homo sapiens
acaataatagtaaataaaacaactagaattcaaattcaggttaactgaactgcaaaactaaaaaactatatgttactgaggaattttaaaatagtcttgtttcaaaagatttgtatgtggaagctgatgtgtaaatggttgctctaataaaatcaggatggcaataattgcagcaggaagggagactagtaataagatctccacaagttattccctcccctttcagaggaagcacctaggggaacaatctgaagatcaatggactgtttagcactacctctcatacactaactagtaaatattggtgcaaactctttcctgtaggctttatagagcctatttcatgttctgctaagaaaagyccagaaatgcaaagtagcaaagtacttgggaatgtatctgtgaaataaatattgggagaacttaaattgtacccaaataatcagaggaataaaatttatgcatgaattggaaaattcagtaagttttaaagttctcctaaatttaatataaatacaataacaatagtttatatgtaattaaaaattaatttaaaaactacatatagaaagacagagtctttcagataatgttgaaaataaaagacaaagatgagaagtgtcatattatcagttatcaagatacaggaataaaccttcactattttg

SEQ ID NO: 271250 - DNA, 668 bp, Homo sapiens
acaataatagtaaataaaacaactagaattcaaattcaggttaactgaactgcaaaactaaaaaactatatgttactgaggaattttaaaatagtcttgtttcaaaagatttgtatgtggaagctgatgtgtaaatggttgctctaataaaatcaggatggcaataattgcagcaggaagggagactagtaataagatctccacaagttattccctcccctttcagaggaagcacctaggggaacaatctgaagatcaatggactgtttagcactacctctcatacactaactagtaaatattggtgcaaactctttcctgtaggctttatagagcctatttcatgttctgctaagaaaagcccagaaatgcaaagtagcaaagtacttgggaatgtatctgtgaaataaatattgggagaacttaaattgtacccaaataatcagaggaataaaatttatgcatgaattggaaaattcagtaagttttaaagttctcctaaatttaatataaatacaataacaatagtttatatgtaattaaaaattaatttaaaaactayatatagaaagacagagtctttcagataatgttgaaaataaaagacaaagatgagaagtgtcatattatcagttatcaagatacaggaataaaccttcactattttg

SEQ ID NO: 271251 - DNA, 585 bp, Homo sapiens
gctgatgtgtaaatggttgctctaataaaatcaggatggcaataattgcagcaggaagggagactagtaataagatctccacaagttattccctcccctttcagaggaagcacctaggggaacaatctgaagatcaatggactgtttagcactacctctcatacactaactagtaaatattggtgcaaactctttcctgtaggctttatagagcctatttcatgttctgctaagaaaagcccagaaatgcaaagtagcaaagtacttgggaatgtatctgtgaaataaatattgggagaacttaaattgtacccaaataatcagaggaataaaatttatgcatgaattggaaaattcagtaagttttaaagttctcctaaatttaatataaatacaataacaatagtttatatgtaattaaaaattaatttaaaaactacatatagaaagacagagtctttcagataatgttgaaaataaaagacaaagatgagawgtgtcatattatcagttatcaagatacaggaataaaccttcactattttgagagacaaacaaatgaatgagtagaatataatagaatgt

SEQ ID NO: 271252 - DNA, 593 bp, Homo sapiens
cattcataactgaaaagacgattaatgaaagcacttagaatgtcataattaagaaagtcagaggaagagaatgtctccaaactaagaagaaatgtccagagcttgaaagaaaacaaggcatgcatagatcacagagagaaaaaacgtggacagagtgttgagaatggaggtagcattgccaaactgtacaagtgagatcaagtaagataaggtctagaaagtgatcttttgagtttttaagtagttgccattgataactttgtcaagggaagttttattacactggtcatttctaagcagattgcagattttgaagagtggatgtttataatagcatataggaaggatttgtggctcacctgttggaatgctggagacaasgttgtggaagatagaggaagacacttgtttatgtcaaggtgtcttttggaactaagataaaatgactagcgttgagatggtgtcttttgtaaatgggatattttccaactacatataggaaatgaataaatactgagaggaaaataggatttaagtctaaatcttactgtggtaattgaataactttcttccatattttatataacaatcac

SEQ ID NO: 271253 - DNA, 582 bp, Homo sapiens
aattatatatatgtacatatgtgtgtrtgtgtgcatgtgtgtgtgtatgtatatgtaataacttatatgtatatatttgtcttccttcttgttaatgagcattaatttaagcacagataaacttctaggaaatgttgggaaaaaactaaacaaatgaagaaaatgtcgtgattcatctttttctggcatgcagttttaacttgtcaccaggaacactgacatagtcgtttcatgtgtctgctgaggaaatgatctgaataccgattgtgaattttgactgcagatgttagaagcaaaccatttctaacagatgtataatctgattaaatatgcaatgcaatgatattgtcaaaacctattaatcactctttcaggacacattagtgtaggctttactgacagctgtgaggatttgaatatctctacagttgcaggtactgttgctcatccacaccgcccaatagatgttaaaaagaaaaataaccacaataggcaagtgtacagggtaatttaaatgttgcatgttaatttttttcagcattgggggaagagatatatttttattccagtaatgtttaccct

SEQ ID NO: 271254 - DNA, 582 bp, Homo sapiens
aattatatatatgtacatatgtgtgtgtgtgtgcatgtgtgtgtgtatgtatatgtaataacttatatgtatatatttgtcttccttcttgttaatgagcattaatttaagcacagataaacttctaggaaatgttgggaaaaaactaaacaaatgaagaaaatgtcgtgattcatctttttctggcatgcagttttaacttgtcaccaggaacactgacatagtcgtttcatgtgtctgctgaggaaatgatctgaataccgattgtgaattttgactgcagatgttagaagcaaaccatttctaacagatgtataatctgattaaatatgcaatgcaatgatattgtcaaaacctattaatcactctttcaggacacattagtgtaggctttactgacagctgtgaggatttgaatatctctacagttgcaggtactgttgctcatccacaccgcccaatagatgttaaaaagaaaaataaccacaataggcaagtgtacagggtamtttaaatgttgcatgttaatttttttcagcattgggggaagagatatatttttattccagtaatgtttaccct

SEQ ID NO: 271255 - DNA, 479 bp, Homo sapiens
aatattaaattatatgattaaatattaaattagtcaatataaataggatgctaagtaagggataaattgtcagctgatcatacaatatatgtgtctctggatatctaactctatttctaatccaggtggttataataattggttgatagctactaagaaatctttaatttctcttacttttgacagaagraagagtagaatgattttgttgcttaaaatatatggataaaatatatataaaacaaatttttataaaacaaaatattctaataaccaaaatatattaaaaagtttagtctacaatagcatcttattcatactccatttttaattttattttccaacttttactaaaacctagaaaaagattcaatttatgtttataccaaaaaacaattcaggcaccaatatacatctggtatctatatgaagtttcctctaattacaatattaatgacatattgtatttcttttttttt

SEQ ID NO: 271256 - DNA, 479 bp, Homo sapiens
aatattaaattatatgattaaatattaaattagtcaatataaataggatgctaagtaagggataaattgtcagctgatcatacaatatatgtgtctctggatatctaactctatttctaatccaggtggttataataattggttgatagctactaagaaatctttaatttctcttacttttgacagaagaaagagtagaatgattttgttgcttaaaatatatggataaaatatatataaaacaaatttttataaaacaaaatattctaataaccaaaatatattaaaaagtttagtctacaatagcatcttattcatactccatttttaattttattttccaacttttactaaaacctagaaaaakattcaatttatgtttataccaaaaaacaattcaggcaccaatatacatctggtatctatatgaagtttcctctaattacaatattaatgacatattgtatttcttttttttt

SEQ ID NO: 271257 - DNA, 479 bp, Homo sapiens
aatattaaattatatgattaaatattaaattagtcaatataaataggatgctaagtaagggataaattgtcagctgatcatacaatatatgtgtctctggatatctaactctatttctaatccaggtggttataataattggttgatagctactaagaaatctttaatttctcttacttttgacagaagaaagagtagaatgattttgttgcttaaaatatatggataaaatatatataaaacaaatttttataaaacaaaatattctaataaccaaaatatattaaaaagtttagtctacaatagcatcttattcatactccatttttaattttattttccaacttttactaaaacctagaaaaagattcaayttatgtttataccaaaaaacaattcaggcaccaatatacatctggtatctatatgaagtttcctctaattacaatattaatgacatattgtatttcttttttttt

SEQ ID NO: 271258 - DNA, 527 bp, Homo sapiens
aggatttttagtggaagaaatatctaagcagcaaagtgttcaagaagctgcatggcagcctttggctccgtctaatcatttgggagagcaaagagatgacagaacttataactaaaagggaaacaaagtagagagatttggaaaatttttagcctggccacgtgaagagtgaaaaggcatattcagaacacagagctcaagatgtggcccagttactaaagagattaatatggctggaagggagccaagtgcttatcatcagtactaataaccaggaggaaagacccagaaagcttttcagaaatcttggaggttgccctttacatcacaagctgagaatgttaaggtttsacagcagaaagagttcactgccctgagctgccttgagtccctgcttcctgcatcctgaagcagcattccttcaatactatagctatggctccagaggccccaggtacagcttgattcactgtcccaacacactaaagctggaaaccttggtatcactacatcaaagctgaagcaaa

SEQ ID NO: 271259 - DNA, 527 bp, Homo sapiens
aggatttttagtggaagaaatatctaagcagcaaagtgttcaagaagctgcatggcagcctttggctccgtctaatcatttgggagagcaaagagatgacagaacttataactaaaagggaaacaaagtagagagatttggaaaatttttagcctggccacgtgaagagtgaaaaggcatattcagaacacagagctcaagatgtggcccagttactaaagagattaatatggctggaagggagccaagtgcttatcatcagtactaataaccaggaggaaagacccagaaagcttttcagaaatcttggaggttgccctttacatcacaagctgagaatgttaaggtttcasagcagaaagagttcactgccctgagctgccttgagtccctgcttcctgcatcctgaagcagcattccttcaatactatagctatggctccagaggccccaggtacagcttgattcactgtcccaacacactaaagctggaaaccttggtatcactacatcaaagctgaagcaaa

SEQ ID NO: 271260 - DNA, 369 bp, Homo sapiens
atgcaaaatccaactagatttcaaaggatgtatcaaacagctctcagacccaggcagaaacttgtaacggggtaaagtcataacagagagttaccaccagggcaatgcagagcagatatatggggttggagctactgtatagaatctccaccagggcagtgcacactggagccacacaagcagaactgctgctagaaagcaagaactgtagagctaccagtgtgcaatgccagcatgcaacaaagcctcaggcaactgatttctccccaggagagcagtcatgkggggtgcaaccagaaaagccatgagacccagattgcccgaggcctcgagggaccaactttctcccaagtatgtccaggaagggac

SEQ ID NO: 271261 - DNA, 618 bp, Homo sapiens
tggcagcagctttggaaatgggtaacaggcagaattttgaagcatgtggtgggatcagaggaaaacaggatgatgagagaatgtttagaacttcttagagactggttaaatggttgtgatcaaaatgctcatcataatatgaaaaataaagtccaggctgcaaagttctcagttggaaatgagaaacttattgggaaatggggtaaaagttacttttgctatgccttagaaaagaagttggctgttttatgtccatgtcctagagtgcctatggaaatctggacttgagaatgctgatttagggtatctggtgaaaggaatttgtgttcaaaatgttcaagagtttacctgaccayttctaacaacctattctgagatgcaggagcaaatgaatgacttgaagttggaatttatatgtaaaagggaagccgaagataaaaggttagaaaatttgcagtctagccatgtggcaaagaaataaaaagacttttgaggagaggaattcaagcagattgtggagcaaccacttgttctagatatgtgaataaccaggaagccaagtgtgatggccaagacaatgggaaaaggccttagaggcatttgagaccttcagggcag

SEQ ID NO: 271262 - DNA, 587 bp, Homo sapiens
cttttgaggagaggaattcaagcagattgtggagcaaccacttgttctagatatgtgaataaccaggaagccaagtgtgatggccaagacaatgggaaaaggccttagaggcatttgagaccttcagggcagcccctgccatcacaggcctgaaaaccaaggagggaagaatggctttgtgggccaggcctargtacccactgccctgaacagcttcaggacattgctccctgtatcctggcaactctagctttgacagtgactcaaaggggcccaggtacagctcaggccactgcttcagagggtgcaacccataatccttggtggcttctacattgtgataagccactgggtacacagaatacaagagttgagtcttggaagcctccacctggatttcagagacgtatggaaaaacctgagtgtccaggcagaagcttgcttcaggggcagagccctcacagagaacttatactaaggcagtacagagggaaaatatgaggttggaattccacacagagtccccactagggcacagcctagtggaactgtgagaagagagccaccatcctcatgactgcagaatg

SEQ ID NO: 271263 - DNA, 430 bp, Homo sapiens
tgtagttggagactccaacacccctctctcaactactgatagaataactagacagaaaatcaacaaagatttggaagaccaataccatcaccccacaggatgtaattgacatttatagaccacctcccttcagcagtagcagaatatgcattcttttaagaacctattgacttatataaaacttgctatattcctgtaatggcaaaattataaaaatggaaaacagatcaatggttcctatcaatcacatttgttatgtttaacattttgtttaagtttttatatttctgtggtgatcataagtatcattcatttaattgatcaaaaggatgaataaataattytgataatgaaaatgtgttaaagtgcatgtgattttagaatggtttattaaaacagaggtagaatttggaaggaatgacatatttgc

SEQ ID NO: 271264 - DNA, 635 bp, Homo sapiens
tccttcatagaggagttgaaatgttaacggaaggaaattttttgtcatccaacactgataatctgataagcaaaattatttcatagctagaaatattacaacaataaaatagacaaaaagtatattgtttaaaatcaaatcacatggaagtgataatattttttaaaattatacaagattcccatctaatgaatacaagtatttgtaaattcaggaaatagtgcttgatgaatttttgatatttgtggtttctcaaaaaagtgacatgtttcacatctcttatcacttaggtacattgggtacagatttaatttggagttcgcttgcagtcagyctgattaaaatgtcaaattttaatgtaaaccaaacatatttggaggaaagaacacaggaaccaatttaattaaaaacttcaatcccagcactgtagtttaaagtttttctccaagacacaaatttaactttttttaaaaaattaatcatgggtcttgtgcttctttgattaatttatggatgacttaagtgtcctcagaaatacataacaggagaaaataagaaagatataaatcatatcctataagtagagccggaatgacccaaatagaggccatttacaatcctaatttatttaaaga

SEQ ID NO: 271265 - DNA, 635 bp, Homo sapiens
tccttcatagaggagttgaaatgttaacggaaggaaattttttgtcatccaacactgataatctgataagcaaaattatttcatagctagaaatattacaacaataaaatagacaaaaagtatattgtttaaaatcaaatcacatggaagtgataatattttttaaaattatacaagattcccatctaatgaatacaagtatttgtaaattcaggaaatagtgcttgatgaatttttgatatttgtggtttctcaaaaaagtgacatgtttcacatctcttatcacttaggtacattgggtacagatttaatttggagttcgcttgcagtcagcctgattaaaatgtcaaattttaatgtaaaccaaacatatttggaggaaagaacacaggaaccaatttaattaaaaacttcaatcccagcactgtagtttaaagtttttctccaagacacaaatttaactttttttaaaaaattaatcatgggtcttgtgcttctttgattaatttatggatgacttaartgtcctcagaaatacataacaggagaaaataagaaagatataaatcatatcctataagtagagccggaatgacccaaatagaggccatttacaatcctaatttatttaaaga

SEQ ID NO: 271266 - DNA, 635 bp, Homo sapiens
tccttcatagaggagttgaaatgttaacggaaggaaattttttgtcatccaacactgataatctgataagcaaaattatttcatagctagaaatattacaacaataaaatagacaaaaagtatattgtttaaaatcaaatcacatggaagtgataatattttttaaaattatacaagattcccatctaatgaatacaagtatttgtaaattcaggaaatagtgcttgatgaatttttgatatttgtggtttctcaaaaaagtgacatgtttcacatctcttatcacttaggtacattgggtacagatttaatttggagttcgcttgcagtcagcctgattaaaatgtcaaattttaatgtaaaccaaacatatttggaggaaagaacacaggaaccaatttaattaaaaacttcaatcccagcactgtagtttaaagtttttctccaagacacaaatttaactttttttaaaaaattaatcatgggtcttgtgcttctttgattaatttatggatgacttaagtgtcctcagaaatacataacaggagaaaataagaawgatataaatcatatcctataagtagagccggaatgacccaaatagaggccatttacaatcctaatttatttaaaga

SEQ ID NO: 271267 - DNA, 582 bp, Homo sapiens
aataagtagttgatttccatagggtttttgcatgaataactgtaggcatgattgagcccacgctcgcatctttattgaggttgagtttaaggtttaaaccaataacttcagtgaagggtgtgatttaaaaacatctttcatatacttaagttgagtagaattttctcttatcattcatgtttatgatgtaaaaccactccattgggtcaatttaaagcatgactgatgctattcaaatataaaatttatagctttcctaaaattttattatacataaaaatcttactaaaagagtacgggaagtttagagtgtttagaaatggctaggaaaaaaatgcaaaaaaacaaactgctctataatattcaaatactttcaatttaattttaaaattcagtttctatcactttaaaagacaaygaataattaataaattaaattttgtaaagcagaaataaatatgatatgccatttctttttttgcctgagtttcaagttaattttttatttttatttaaatggtggtttgaccatcacattctcatatgaattatgaaacacaaactctaaattcagagaaagat

SEQ ID NO: 271268 - DNA, 568 bp, Homo sapiens
ctgtgtgtatgtgaatatgtgtgtgtatttatataatctgcattgccagatttaacaaataaaaatacagaaaatccacttaaatttggatttttgatgaaaaagcaattcttaaatatatctccatcatttcatcatacatacttatactaaaatattgtttgttgtgcatctgaaaytcaaatttgcttggcatcttgtgttttatcccacagttcaagatagaaccttggcacccaacattggggaggaagtttttctgtgttcacacagatgaagaaacaagacttttagaaaaataaattgttttgttttgtttatttgcctattaactaacccagatgactcttatgagagcaaaaatgcccaaaacacttcattttcaattaaattgactgaaattagctcagatcctaagatatcaaaactgacaagcaccagtatttcctaggagtctgactggtgatacccctaaattgtctgtagcttaatctcacactgaaaaaaatactgtgttttgaatcacatgtaattcatattttattgtgtatagatttgtcatatatgg

SEQ ID NO: 271269 - DNA, 568 bp, Homo sapiens
ctgtgtgtatgtgaatatgtgtgtgtatttatataatctgcattgccagatttaacaaataaaaatacagaaaatccacttaaatttggatttttgatgaaaaagcaattcttaaatatatctccatcatttcatcatacatacttatactaaaatattgtttgttgtgcatctgaaactcaaatttgcttggcatcytgtgttttatcccacagttcaagatagaaccttggcacccaacattggggaggaagtttttctgtgttcacacagatgaagaaacaagacttttagaaaaataaattgttttgttttgtttatttgcctattaactaacccagatgactcttatgagagcaaaaatgcccaaaacacttcattttcaattaaattgactgaaattagctcagatcctaagatatcaaaactgacaagcaccagtatttcctaggagtctgactggtgatacccctaaattgtctgtagcttaatctcacactgaaaaaaatactgtgttttgaatcacatgtaattcatattttattgtgtatagatttgtcatatatgg

SEQ ID NO: 271270 - DNA, 568 bp, Homo sapiens
ctgtgtgtatgtgaatatgtgtgtgtatttatataatctgcattgccagatttaacaaataaaaatacagaaaatccacttaaatttggatttttgatgaaaaagcaattcttaaatatatctccatcatttcatcatacatacttatactaaaatattgtttgttgtgcatctgaaactcaaatttgcttggcatcttgtgttttatcycacagttcaagatagaaccttggcacccaacattggggaggaagtttttctgtgttcacacagatgaagaaacaagacttttagaaaaataaattgttttgttttgtttatttgcctattaactaacccagatgactcttatgagagcaaaaatgcccaaaacacttcattttcaattaaattgactgaaattagctcagatcctaagatatcaaaactgacaagcaccagtatttcctaggagtctgactggtgatacccctaaattgtctgtagcttaatctcacactgaaaaaaatactgtgttttgaatcacatgtaattcatattttattgtgtatagatttgtcatatatgg

SEQ ID NO: 271271 - DNA, 568 bp, Homo sapiens
ctgtgtgtatgtgaatatgtgtgtgtatttatataatctgcattgccagatttaacaaataaaaatacagaaaatccacttaaatttggatttttgatgaaaaagcaattcttaaatatatctccatcatttcatcatacatacttatactaaaatattgtttgttgtgcatctgaaactcaaatttgcttggcatcttgtgttttatccmacagttcaagatagaaccttggcacccaacattggggaggaagtttttctgtgttcacacagatgaagaaacaagacttttagaaaaataaattgttttgttttgtttatttgcctattaactaacccagatgactcttatgagagcaaaaatgcccaaaacacttcattttcaattaaattgactgaaattagctcagatcctaagatatcaaaactgacaagcaccagtatttcctaggagtctgactggtgatacccctaaattgtctgtagcttaatctcacactgaaaaaaatactgtgttttgaatcacatgtaattcatattttattgtgtatagatttgtcatatatgg

SEQ ID NO: 271272 - DNA, 414 bp, Homo sapiens
gtgtgggccaccctactgtgtctaaggacatagagcattgtggacagcatcagcagtgtagcccccagccaagatgtgatasctatatgtggaagacagaagtggaggtggaatctgtctgttctccctccaagctagagcaagagacagttgcctctgacatgatcagcggtcagtctgaataaaagtttttacatcagattgtcacagacaagtaaaaggtaaaattcaccaaatttatcttttgatgatgtaacagtcatcaatttgttagtatattaattcatcaaacattcattggtcatctacatagtgctagacatgatactggacactaagtagatgtgttgataaaaggcatatcaaggacttgtaagttttacctgagggagaaactgtgctttgaacagcatt

SEQ ID NO: 271273 - DNA, 270 bp, Homo sapiens
tgaaatactgggggcaggttcccccaataatcttctgaactccactcctgtcagttagttcatcttatcctctgtccagttctgggcccctaatggggagactttatgatcatttggaggagaagaggcactctggcyttttgggttttctgcattttttttgttgttgattctttctcatctttgtgagtttgtctagtttcagtctttgagacttctgacccttggctggggttttggtgggggtctttttgttgttgatgccattgt

SEQ ID NO: 271274 - DNA, 629 bp, Homo sapiens
tattttaattatccaaaaattggttgctatttgtgacaatttatattgcaatgcaacatgcaggaataacataatttraaacataaatgtgatatcatgtttctacagataaaaatatatacctagaaattaaaggtttgcaaataaataccactatttacaacttgtacttctatgagatacttcactcataagcacctcctctgctacaaaaaagcgtattttcattcctaacttattatcgttaaataagacatcttctatataataagaaaaccaccttgtttgcataaatacattattacagtccttaatagatttgctttacaattgatgagagtataaaacatgccctaagtttcttgtcagtgtagtattttttctttacttttcaattattatacaaagaaaatcttattataatctgctctttgttcttcatctagttaagcacgggtattactactggtttcagtattgagaatttgagtgcacaaaagattgtcagttcaaagggttttcaactaatgaaacagagaaataccattggttagaagctgaagtgttatatcattaacaagaccttcagaacagttatcttatttaaaaaaactggggcaggctttgtt

SEQ ID NO: 271275 - DNA, 629 bp, Homo sapiens
tattttaattatccaaaaattggttgctatttgtgacaatttatattgcaatgcaacatgcaggaataacataatttgaaacataaatgtgatatcatgtttctacagataaaaatatatacctagaaattaaaggtttgcaaataaataccactatttacaacttgtacttctatgagatacttcactcataagcacctcctctgctacaaaaaagcgtattttcattcctaacttattatcgttaaataagacatcttctatataataagaaaaccaccttgtttgcataaatacattattacagtccttaatagatttgctttacaattgatgagagtataaracatgccctaagtttcttgtcagtgtagtattttttctttacttttcaattattatacaaagaaaatcttattataatctgctctttgttcttcatctagttaagcacgggtattactactggtttcagtattgagaatttgagtgcacaaaagattgtcagttcaaagggttttcaactaatgaaacagagaaataccattggttagaagctgaagtgttatatcattaacaagaccttcagaacagttatcttatttaaaaaaactggggcaggctttgtt

SEQ ID NO: 271276 - DNA, 528 bp, Homo sapiens
gaaaatcttattataatctgctctttgttcttcatctagttaagcacgggtattactactggtttcagtattgagaatttgagtgcacaaaagattgtcagttcaaagggttttcaactaatgaaacagagaaataccattggttagaagctgaagtgttatatcattaacaagaccttcagaacagttatcttatttaaaaaaactggggcaggctttgttaacttatataatttttaaatgtttaaaaatgagcaacgatgaaracattgttatcgaaaattagcaagcctgtttcttgttattctacagatctttggaagggtatttatgtgtatgtgtgtgtgtgtctgggcctgtgcatgcttatcttttaagtaatatatttgtgcatctctattttttctagttctttctgaaaatatgggaaaggaaatgagtaggaacaccttatagatgcctctctataatccctgaagtataattattattaaaagtaatagccagaatccagcatatttaaaaaat

SEQ ID NO: 271277 - DNA, 569 bp, Homo sapiens
aaatgagtaggaacaccttatagatgcctctctataatccctgaagtataattattattaaaagtaatagccagaatccagcatatttaaaaaatatatttattcatgtagcataatagcaactttattccctctaaaccctwtaagttgacttctatgaatttcctaaatttgactacatgagttagtaaattgttcttcaataatccttgcaaggattacagtggctcagtatgaaactatatactaaacatatattacatattcttaaaaatgatttttttctgaaaactatatctaggtttctcatgaaagaattaaatcagaaataaaaaagtatatttcaccatgcagtatttgccttctttttccatattctttaaaatacaatgtgatatcctatatgtgagttctaagtacattccttttatttaaaaacaaaaacctattctgctcactctatggtcttttacctaatccccaaattatcactgtgggtccttattgcttcctacttaatctgattatctcaacctactttattctaatgttatgaaaataaacagtat

SEQ ID NO: 271278 - DNA, 514 bp, Homo sapiens
gtggcgtaatcttggctcactgcaacctctgcctcccatgttcaagcaattctcttgcctgagcatcccaaatagctgggactacaggtgtgtgccaccatgcccagctaatttttgtaattttagtggagataggattgcatcatattggtaaggctggtctcgaactcctgacctcaggtaatccatttgccttggcctcccaaagtgctgggattacaagcacaagccactgcactcagcctaaaggggagtttgtaaaggagtattgactcatgcaatcacaaggtgaggtcccacaatgggccatctgcaagtagaggagaaaggaagacagtccgagtgccaaagctgaataacttggartctgatgttcgagggcgagaaacatccagcacaggagaaagacatagactagaagactaaactgggctagtctttccatgcttttctgccctgcttttattctagccaggctagccagttgattagattgtgcccacccaaattaaag

SEQ ID NO: 271279 - DNA, 514 bp, Homo sapiens
gtggcgtaatcttggctcactgcaacctctgcctcccatgttcaagcaattctcttgcctgagcatcccaaatagctgggactacaggtgtgtgccaccatgcccagctaatttttgtaattttagtggagataggattgcatcatattggtaaggctggtctcgaactcctgacctcaggtaatccatttgccttggcctcccaaagtgctgggattacaagcacaagccactgcactcagcctaaaggggagtttgtaaaggagtattgactcatgcaatcacaaggtgaggtcccacaatgggccatctgcaagtagaggagaaaggaagacagtccgagtgccaaagctgaataacttggaatctgatgttcgagggcragaaacatccagcacaggagaaagacatagactagaagactaaactgggctagtctttccatgcttttctgccctgcttttattctagccaggctagccagttgattagattgtgcccacccaaattaaag

SEQ ID NO: 271280 - DNA, 514 bp, Homo sapiens
gtggcgtaatcttggctcactgcaacctctgcctcccatgttcaagcaattctcttgcctgagcatcccaaatagctgggactacaggtgtgtgccaccatgcccagctaatttttgtaattttagtggagataggattgcatcatattggtaaggctggtctcgaactcctgacctcaggtaatccatttgccttggcctcccaaagtgctgggattacaagcacaagccactgcactcagcctaaaggggagtttgtaaaggagtattgactcatgcaatcacaaggtgaggtcccacaatgggccatctgcaagtagaggagaaaggaagacagtccgagtgccaaagctgaataacttggaatctgatgttcgagggcgagaaacatccagcacaggagaaagacatagactagaagactaaactggkctagtctttccatgcttttctgccctgcttttattctagccaggctagccagttgattagattgtgcccacccaaattaaag

SEQ ID NO: 271281 - DNA, 578 bp, Homo sapiens
ttcattcttcctacccttctggattcacctgctatgagctctccacatatactcctttatgagttttaagaagcaatttacttttactgaatgaattatagctcttgtattgaataaaacttttcagcttctccatcaacttagctggtagttaccgttaacagcatccagccgaggcccagacaaaacataccagcaaggaacccccttccatagatcccatcaagcagcctccccatcagggatcagattgtggcaggacttccacgacaccactacaatgtgaatgattaagagctttagtacttgcagaccttgagaggtacatggcgttccgggaggccacagaaaggtcagggagcacaggcagagaaaaaaagaggagagcgtggcaattctcagtatatactgcagaaatagggtgtgggttacattaagttcacagttagatgccggaatcgtccrtttaaaggaaacatcaggaaagagaggagcccagtctgctaggcaagagagatgtctccaagttcttatctctggccaccagctaacgccatttggatgtgatgtagaactgc

SEQ ID NO: 271282 - DNA, 567 bp, Homo sapiens
ccaaaaccgctcacgctaagattaataatgaccttgaagttactaaatgaatatttcaaagtcctcatatgattttaacacaaagcatcatttggccttgttgatcactctttgcttcttgaagtaccctccttaccctctcctgttcatcctcatacatttctaaccactttacaatctccactgaatgctcgtctgccaacaataacctgttaaatgtkgaggtttctcaatactctgtgctaatctatttcttttctcattgatgctctctcccagtaaccagtacagccaatttgctagcttgctttaaaaagtaatccctgcctcattttttttcttgctatacatatatctaactacgtgtttgcttgagaattccaaaggctaatcttaaagcaactcaggcgtaaagtggagatggcagttaaagttttctcccttctgagaagaaattggtgcacagttaatccataccctgacctaagcaagttgacaccaaggcctccagatggttcattattcaagacagccactggaaaatgacaagcagacctgcaacctaca

SEQ ID NO: 271283 - DNA, 567 bp, Homo sapiens
ccaaaaccgctcacgctaagattaataatgaccttgaagttactaaatgaatatttcaaagtcctcatatgattttaacacaaagcatcatttggccttgttgatcactctttgcttcttgaagtaccctccttaccctctcctgttcatcctcatacatttctaaccactttacaatctccactgaatgctcgtctgccaacaataacctgttaaatgttkaggtttctcaatactctgtgctaatctatttcttttctcattgatgctctctcccagtaaccagtacagccaatttgctagcttgctttaaaaagtaatccctgcctcattttttttcttgctatacatatatctaactacgtgtttgcttgagaattccaaaggctaatcttaaagcaactcaggcgtaaagtggagatggcagttaaagttttctcccttctgagaagaaattggtgcacagttaatccataccctgacctaagcaagttgacaccaaggcctccagatggttcattattcaagacagccactggaaaatgacaagcagacctgcaacctaca

SEQ ID NO: 271284 - DNA, 567 bp, Homo sapiens
ccaaaaccgctcacgctaagattaataatgaccttgaagttactaaatgaatatttcaaagtcctcatatgattttaacacaaagcatcatttggccttgttgatcactctttgcttcttgaagtaccctccttaccctctcctgttcatcctcatacatttctaaccactttacaatctccactgaatgctcgtctgccaacaataacctgttaaatgttgaggtttctcaatactcwgtgctaatctatttcttttctcattgatgctctctcccagtaaccagtacagccaatttgctagcttgctttaaaaagtaatccctgcctcattttttttcttgctatacatatatctaactacgtgtttgcttgagaattccaaaggctaatcttaaagcaactcaggcgtaaagtggagatggcagttaaagttttctcccttctgagaagaaattggtgcacagttaatccataccctgacctaagcaagttgacaccaaggcctccagatggttcattattcaagacagccactggaaaatgacaagcagacctgcaacctaca

SEQ ID NO: 271285 - DNA, 559 bp, Homo sapiens
cagctgtctcttcagctgctagcacttcaataaacctctttcttcccaccaactcttgattcttgtgtctggcttttcaagtggggagcagccrtacaggaattcagttccatcccttggcaatcttgaacagaaccatctccagatctttatgataatctatatagtgattactcctaaattttatactaaccctctgagttccaattgtttattcaacatgtgcatgtggaggtctcaaaagctacctctgagaactgggaccacagttgtcttgtttgttccagtaaacctatacacagaaaagataagactgtaatcctataaataactctactgtttgcttcaggaaattcttgcagatcaatttagagacaacagtctgctcacctgaaaaagtctgccttgaaaaatccaccttaaactcctggatcccagaccccaaaatttaataaaatctcatttctgactttccctttttgagacaataaaactctttccagtagtttctgaatgcaattaggttccaatacatttagcattgctttattaacaggtt

SEQ ID NO: 271286 - DNA, 666 bp, Homo sapiens
aatgtgaactatggaaacaggaatagaattgattttgaactgtaatagattcacaggtcatgctagayactttcgaaaccacaaaacacagcttaggtgaaacaataaaaataagttaagatggtctttgtcaaaggactcgacactgaaccatcacttccggccagatcttctttctaaaggaaggaaagggggtatgcagagcaactgaattccctccaatcataggagcactgagggtagaaagtccatttttgttattatggctatttacattattttctctgatagtaagctgtgaaatttaggaagattttgcctcttcatggatcaattattcattggcagtacatagatccctatgttgaattgatatctacttcacagacctgatgtctaatatgaacaggcctctggtaataaaagtttttaaaaaaaaaaatcagaaagaaattaatacaataggtatgtatttgtgtttgtaaaactatctcgaaaaaattaaaaatgcagctagaattaaaagtggtagtaaagtcaaacagtttacccctttccttgtgaatgctgattattgtgtacactttagggaaataagagtatagagaaaatggtttgggttaataataagttatgaaatatttggaatggaattattggcaattt

SEQ ID NO: 271287 - DNA, 609 bp, Homo sapiens
gattacctatatttatttcctatagagaagacagtattgcaactgtttcaactgtttacatctggctttagcatatttttagaagcctgtactgtacttgataataatactttgaacagcatgtataaaatgtttaataatgcgaagataagagaattgaaaaaatctgatggttaaagaatggttgaaagcaaaaacataagaacaaattttatcatttaagggaaaatacatattttttcttctttgaaagtaatttttcccttctctgagctctcataagattttattggtgtgtttcatagttcctcttatacactacagtgtaattatctttactagattacaggttacttagcgacatctttgtatacttcatagcttcttacaaaatgccttatgtaggyggctctcaagaaatttgtcgaatttcctgagttttatttttattttatcatgttttgttttctggttgacgatcaaaatgaacctccttttatcagaacacatttcaaaacaacaacaaaacaaaatgaagtggctgtaatcactctaattcaataataaataggtggataatgtgagacattgtaaatatattaaataact

SEQ ID NO: 271288 - DNA, 526 bp, Homo sapiens
ggtacagtatagaaaaaaagcaaaagaaagtgaacagaatctgataatattgtgttatatacttcctatgtatgctccatctgatttcctaagtgaattttaaggggytcttaaataaattttgtacagaaaattggtcaagtgaaagagaataatatttatgtataaaaagttaaaaagacaagttgtactatcaaacctgaagaaaagatatttgcctgtgatcatgatcatgatattagccaatactatgtagctggcacaacattaggccctttatatgcaataccattattaattaacaaaatcatatggaatagatagcccagttttccagatgagtagatagataaaataattacttcaagattataaatctaaaaaagcccagattagggatcactacattgagcatgtctcattgcagagcccgaatttcactgtgcagccaaatgctgtcagacaagatctttgaccatatgctttcctcaaaagaaatattctcttttaagctgctacactatat

SEQ ID NO: 271289 - DNA, 526 bp, Homo sapiens
ggtacagtatagaaaaaaagcaaaagaaagtgaacagaatctgataatattgtgttatatacttcctatgtatgctccatctgatttcctaagtgaattttaaggggttcttaaataaattttgtacagaarattggtcaagtgaaagagaataatatttatgtataaaaagttaaaaagacaagttgtactatcaaacctgaagaaaagatatttgcctgtgatcatgatcatgatattagccaatactatgtagctggcacaacattaggccctttatatgcaataccattattaattaacaaaatcatatggaatagatagcccagttttccagatgagtagatagataaaataattacttcaagattataaatctaaaaaagcccagattagggatcactacattgagcatgtctcattgcagagcccgaatttcactgtgcagccaaatgctgtcagacaagatctttgaccatatgctttcctcaaaagaaatattctcttttaagctgctacactatat

SEQ ID NO: 271290 - DNA, 526 bp, Homo sapiens
ggtacagtatagaaaaaaagcaaaagaaagtgaacagaatctgataatattgtgttatatacttcctatgtatgctccatctgatttcctaagtgaattttaaggggttcttaaataaattttgtacagaaaattggtcargtgaaagagaataatatttatgtataaaaagttaaaaagacaagttgtactatcaaacctgaagaaaagatatttgcctgtgatcatgatcatgatattagccaatactatgtagctggcacaacattaggccctttatatgcaataccattattaattaacaaaatcatatggaatagatagcccagttttccagatgagtagatagataaaataattacttcaagattataaatctaaaaaagcccagattagggatcactacattgagcatgtctcattgcagagcccgaatttcactgtgcagccaaatgctgtcagacaagatctttgaccatatgctttcctcaaaagaaatattctcttttaagctgctacactatat

SEQ ID NO: 271291 - DNA, 526 bp, Homo sapiens
ggtacagtatagaaaaaaagcaaaagaaagtgaacagaatctgataatattgtgttatatacttcctatgtatgctccatctgatttcctaagtgaattttaaggggttcttaaataaattttgtacagaaaattggtcaagtgaaagagaataatatttatgtataaaaagttaaaaagacaagttgtactatcaaacctgaagaaaagatatttgcctgtgatcatgatcatgatattagccaatactatgtagctggcacaacattaggccctttatatgcaataccattattaattaacaaaatcatatggaatagatagcccagttttccagatgagtagatagataaaataattacttcaagattataaatctaaaaaagcccagattagggatcactacattgagcatgtctcattgyagagcccgaatttcactgtgcagccaaatgctgtcagacaagatctttgaccatatgctttcctcaaaagaaatattctcttttaagctgctacactatat

SEQ ID NO: 271292 - DNA, 575 bp, Homo sapiens
aggtagtatttacacatttgtgtctttcttctctcaacatttaaggtacattcttattttcatgtgtcaataattttgcttgtttgtcttttaatttatattgctgagtggtattatagtctataaatataatatggtatcttctaaatgtcattttctgtttgctgctgtatatacaaatgatattttatattgattttatatctagcactcttgctcagacttttaattctgataattcaactgtagattcttgtgaattttctgcaaattgtcttgtcatttgcaattaataagagtttttgcctcttcttttgttattttacaccttctagggatgatgttgaatggaaataacagtagtaggcatttttggatcgttatcaatctcggagagaaaacattcamcactataccactatactactatatatttataactaacttagatcagattaaggaaactccatacgttcctgggatatgcataattttatataaaattgcttatacatatgtaaaattataattatgcttatgtttacataaaattatttgatttgctaccaccttgc

SEQ ID NO: 271293 - DNA, 575 bp, Homo sapiens
aggtagtatttacacatttgtgtctttcttctctcaacatttaaggtacattcttattttcatgtgtcaataattttgcttgtttgtcttttaatttatattgctgagtggtattatagtctataaatataatatggtatcttctaaatgtcattttctgtttgctgctgtatatacaaatgatattttatattgattttatatctagcactcttgctcagacttttaattctgataattcaactgtagattcttgtgaattttctgcaaattgtcttgtcatttgcaattaataagagtttttgcctcttcttttgttattttacaccttctagggatgatgttgaatggaaataacagtagtaggcatttttggatcgttatcaatctcggagagaaaacattcaccactataccactatactactatatatttataaytaacttagatcagattaaggaaactccatacgttcctgggatatgcataattttatataaaattgcttatacatatgtaaaattataattatgcttatgtttacataaaattatttgatttgctaccaccttgc

SEQ ID NO: 271294 - DNA, 649 bp, Homo sapiens
ggtggtacttatttagcagatggtatatcaacatgttagcacattgtatatacccttgaagataaattcaggtaaaactcaaagtcaaattttgaaatcgctaaggttttctatacccttaaattttgcccaagaatgtggttatttctgtttctgttagtcactatatagaatttctaaaaaaaaaattaatttgagcaaaagttattataagaagacataaaaagtaaagattaaataactctacgtttaaggaatcaatatatgtttttcattagaagagttttacrtaatgttgtttgcttatttgtctcatttttgttaagtttgccagtgctgctcacatattattgcagactgaattccagtattaaaatgtaatactctagacttagtgtctttgaactttatcacaaacggaataaggctaggaaaagctgattaaagctggtttcacaaccaatcttaattgcatagtaatgcttaatatcttcataaaagtgttttctcataagttggtaaaataaaatgtacgtcagagatattttacctcctaggtacagtggtttctcagatatacttagaatctttattcgggctctccagctttaaattcacaaagtctacaactttgtgttcttgggcaaac

SEQ ID NO: 271295 - DNA, 649 bp, Homo sapiens
ggtggtacttatttagcagatggtatatcaacatgttagcacattgtatatacccttgaagataaattcaggtaaaactcaaagtcaaattttgaaatcgctaaggttttctatacccttaaattttgcccaagaatgtggttatttctgtttctgttagtcactatatagaatttctaaaaaaaaaattaatttgagcaaaagttattataagaagacataaaaagtaaagattaaataactctacgtttaaggaatcaatatatgtttttcattagaagagttttacataatgttgtttgcttatttgtctcatttttgttaagtttgccagtgctgctcacatattattgcagactgaattccagtattaaaatgtaatactctagacttagtgtctttgaactttatcacaaacggaataaggctaggaaaagctgattaaagctggtttcacaaccaatcttaattgcayagtaatgcttaatatcttcataaaagtgttttctcataagttggtaaaataaaatgtacgtcagagatattttacctcctaggtacagtggtttctcagatatacttagaatctttattcgggctctccagctttaaattcacaaagtctacaactttgtgttcttgggcaaac

SEQ ID NO: 271296 - DNA, 585 bp, Homo sapiens
tcatgttctcttgcgctcagacatgggcactcctggttctcaggccttcagactccagctgggaattgcaccatcagccccccagttctcgggccttacacccagactgggactgacatcattggctctcttgtttcttaggcccttgggtttagactgaaactataccacccacttttctggttctctagtttccagatagctaatcttggaacttcttagcctccgtaattatgtgagccaatctctcatatcaaatctctgtatatggcatatatttatatttaaatatatatttatatatacatatattcccctggagaaccctgacaataccttggtatgatatcttaccacgtttgagggaagagctaattgtgaggaatttagctactattggcatccatactctcagagaacattcacagacatgaatatgctcataaagagaccgagakagtctgtggtgtcatctgtagtccacatgcttaggattagttgggttaggagttcaagactgtgtctgatacagaggaggcaaagtttagtttccttcccactctactagagagcatcaacagtggg

SEQ ID NO: 271297 - DNA, 512 bp, Homo sapiens
tataatgaatcaacaaacatagatctttctcmaactttagttcaactaaaagtcacttttgacacatgttaaaaaaaaacatcaatactcaagctcggttcccagagattataattgagggcttttcgaaaggagctcaaaaatctgtgtttttaacaagcagtatctgtagttccaccacactttacgaaagtgctttataggaaacttgcaaagtatagggaattaggaactgtcaaaagacatacaatgtgatccttgcacctaagtggcttacagcctctttgtgggacaagtcatgtacacaatctaactcagtattagtgacaggttcttacaagtgccacattacaggttgtgagttctagatgaaatcctataattaagcactcactcaggctggaattgccagggaaaccaggaaataatagaggaaagggtaaagaaaatttcaagtggaatgacctgtatatacagaatagagagatgcgtgggcctggcatatttaagag

SEQ ID NO: 271298 - DNA, 641 bp, Homo sapiens
gaaacagctacatgtgaaaaatcacatagtattaactattttaaagttcataacaatccaatcagtgcaagtctataagtattcacatttcctagataggtaagcttagtgagaagttaaataatctgtccacagtctcacaactagcaagtggtgtccctgtaaaacagaccaggcagtctggctccaaagtcctacactctattgaatgatcttaataagaaatgacaactagttttatggcctgatgcattcaawttcattctagaaatatttatccatgggcaacagaatgtctccccaatacagagataagaaaaatgatgcaaagtaaatgtattcctaaagagcaagactatttttgtagttgtagttgttgttgttgttgtagaacatggtggggtacaatggagatgcttggaccaaagcttgactacctaccctaatttcagtcttgcctccttaagacttgatctctatcagtttgatggaatttgagtatgcataaaaaagatgtattgtggtcaacagaagcaatcaagaagggcagaaataaagcggagttgtgaagagctacatgtgcaagtcctgaaaatatcattgtgtctgggtgagattcaaaaagaaggagaacaaaaaca

SEQ ID NO: 271299 - DNA, 443 bp, Homo sapiens
taacagtacacagaatcagaaacagctagatgtgaaaaatcacattacagaaagcttagagaaagaatggctaggagatcagataacaataaaatgaaaatgccacaaaagaaaagagaaactgtcaaaatggacttcagaccacacaatcacagatggtgytgataaagaagaaaatgggcatccaaagagatcagcacagcagcccaaggagctagcaataaatgtgagaacatggaaaatgatgaaagtagaggtatataagtaagaatgataatggaagaataatatagacacctaaaaaaattgacagtgagtttaaagcaagaatggagttgagaaaaattccaaaggtgttttaaaaatcatgcgtaatacaagaaagataataaaaagaggaaactctgctacttggggctgaggatgacatattaacaatggcc

SEQ ID NO: 271300 - DNA, 602 bp, Homo sapiens
taaattctggctgcattcaataaaaatgttgcaatataatctgatgaatgcctttaaacaatgaaaatctaggtgaaacatcagtagagaaccaacaaagagaataggctgaaaggaaggtaatgatataaaagatgagataatatgagaaaagaaaacaaaaaagaataaagacaaacttctactgcagaataaaaataacagttgggagtagtaaagaatgcaaatgatatatcaggactaatgaataagttacacaataagtgaacttttaaaactctcaagttgcaaagaaaaggtcaaaaagaagagaataatgagaaatatgacctataaagacaggaatgcaatctaaggccttaagattttccagaagagggttaggtacagtggctyacacctggaatcccatggctttgggaggttgaggtgggaggatcactcgaggccccaaattcaagactagtttgggcaacatatcaaaaccctatctctacaaaacatttataaaaattagtcaaatgtggtggcatttgactgggtggtagtcccagttattttagaggctgaggtgggaggattgcttgagcccaggagttgaa

SEQ ID NO: 271301 - DNA, 568 bp, Homo sapiens
actcactttacaggccctctttattgtcctcaatatttatcttctctcatattcttgcactttacaattcccttgtacagaaatgcagtgttaaaatactacagaaaatctgatgtctcttgcacttaagcttcatgaatrttttacttgatactctgccctcgggggccttgcatcactaaagcattatacccttttcttgatgcataaattattctaaaaatgcttccaatttcaagcaaggtcagcctgaaaaaatctgaaaataagcaggcctaatttaatgcagtttgaataaaaaaatacacaagttaagaaggaaacataataatttgcaatttgtttttctttatttctttgcaccatagttgattttgctctgcataaccagttatcacttttcctaaaataaaattcattttaatactaggttttatatacaaatcattcattttagtgcctattcctctttcatcaattatttatcacacacttgttttgtcccagaaatgataccaggcacaagggataaagtgatcaatgaaaaacttgtttcttgccctcacca

SEQ ID NO: 271302 - DNA, 568 bp, Homo sapiens
actcactttacaggccctctttattgtcctcaatatttatcttctctcatattcttgcactttacaattcccttgtacagaaatgcagtgttaaaatactacagaaaatctgatgtctcttgcacttaagcttcatgaatattttacttgatactctgccctcgggggccttgcatcactaaagcattatacccttttcttgatgcataaattattctaaaaatgcttccaatttcaagcaaggtcagcctgraaaaatctgaaaataagcaggcctaatttaatgcagtttgaataaaaaaatacacaagttaagaaggaaacataataatttgcaatttgtttttctttatttctttgcaccatagttgattttgctctgcataaccagttatcacttttcctaaaataaaattcattttaatactaggttttatatacaaatcattcattttagtgcctattcctctttcatcaattatttatcacacacttgttttgtcccagaaatgataccaggcacaagggataaagtgatcaatgaaaaacttgtttcttgccctcacca

SEQ ID NO: 271303 - DNA, 590 bp, Homo sapiens
tttaccattcaattttccctccaaagagaaagccctctgagagctctaggtataaatgttactgctcctaagacaaactctttcaycttcgggacattaggtgactccagcttaatagtggacctcttacctctccaccagtcagtaaacccatagaaatatcagagaacagtgtgtagtgcatcactttaaagaggaactagtgtcatcagacatttgagaaaaagagcaacttaaaatcaaagaaggaaccaaaaactgaaaataatctagaaaccagaatacacttacacaaaacaaccaaaaaaactcctccccttctaattagcacttcagagagattcaagtatatatggctccctaaaggtaagattaaaatgaacatctgaaaattaaaaagaaataaaacagcaggaacccaaagaaattttaaatgattaacaaaattttaaaaaagtaatagcctagaatgacaaaaaagaactttaagaaaaagaaagacagacagaaaaggggcatagtgggccaatttaggagcttcaacatttttctacagaaagttaaaaaaaaaaaaaaaaaagagaggagat

SEQ ID NO: 271304 - DNA, 590 bp, Homo sapiens
tttaccattcaattttccctccaaagagaaagccctctgagagctctaggtataaatgttactgctcctaagacaaactctttcatcttcgggacattaggtgactccagcttaatagtggacctcttacctctccaccagtcagtaaacccatagaaatatcagagaacagtgtgtagtgcatcactttaaagaggaactagtgtcatcagacatttgagaaaaagagcaacttaaaatcaaagaaggaaccaaaaactgaaaataatctagaaaccagaatacacttacacaaaacaaccaaaaaaactcctccccttctaattagcacttcagagagattcaagtatatatggctccctawaggtaagattaaaatgaacatctgaaaattaaaaagaaataaaacagcaggaacccaaagaaattttaaatgattaacaaaattttaaaaaagtaatagcctagaatgacaaaaaagaactttaagaaaaagaaagacagacagaaaaggggcatagtgggccaatttaggagcttcaacatttttctacagaaagttaaaaaaaaaaaaaaaaaagagaggagat

SEQ ID NO: 271305 - DNA, 571 bp, Homo sapiens
gagaataaaacaattgtttttgtgattgtgtctattttctcagagagaaatattcaaggaacatagtgtytctggagtctccagaatgaagtggaaaagggggaagcagaggatataatactggagagataatgagtgaaatggggggggggttagatagcagcaggcactgaggctgttgtattatttttgtttttgttgccaatgaaatgagattttggagagttttgaacagagaagacaaatgatctgatatactttttaagataatttttctggctactcctactgaaaagagacaagagtagggagacagctatgagaatgtgcctttcagtaatctgacttcagggagcaaaatcaccaatggccccagctgctgtgttctgtaatctatcactaccttgtctggatcctcttccaatcaacacctcagagaaggggaatagattagaagatttgagaagaaatatacttgaaaagaaagagaaggtgtgaaagattcttctgacagggttgtctatatggagtaaatggccttcctataggtttgcatggaattgtgtgtata

SEQ ID NO: 271306 - DNA, 605 bp, Homo sapiens
taggactcttggtttttattttgtaaatttctattttatttgatatttataataagctggcattactttaaaaattaatatgtgttaaaacaaatactaaataaaatatatgttttaatgaagaaatgaaaatatttctttcaatacatgtatgtagcaattaactaaatatataatcagtgcagatattctctctccaatctaaggacactgaagaaccttgcctggtaatcacccatgtgatgggatggacagatctgaagcagagatggagtctcctaactcctgattcttctcttatttctggagaaataagggtcttccacctcactccctaactttgatatcagaactaggagagatagggttttgtgaacctccccttaaacagaatcacatgcactactatgttattttaaatgatatttcaagcctgaatataaaggagcaggagaaagcacttttgtttgttcttcttaaacctaatgcgatyaaatattagtattatctgggtctaacacaaccaccaggtattttacctgtaataaatgtttatatgagtaaaggaacagaactaataataggttataattttataatatttt

SEQ ID NO: 271307 - DNA, 582 bp, Homo sapiens
tagtagtcagcttttagtagccaccattttctgttaaggtctgtgtccttgagaaaatatttaacagttgcacttaatgtggtatcctcttgagatttaactgttgttaattctaaatttttactgtgactgttgcagacaaatctggggayttattcacaaatttgccatcctttgatattcagtaataacagagtcatctctttattagtttccaaatagttatttcatactatctttccaaatgtttaattaggatcttgagaaactattattagttttctttcatgatagcatgacctaatgtattgataacatgactcagatcttgaatctaaagaagaatcttagacatattattattaacagatatcaaaaacatagagacattcttcaaaactaggaaatgccagcatgcaatgaagggagcatttaaatactatagactaagggtgtttactgatataaattcaatgtattaatatttagtatagcgacaaatgtcttctaatagtcataatgtcaatgcctccagttttcttgatatgtgtaatgaattgtattgagacattatcttatttg

SEQ ID NO: 271308 - DNA, 582 bp, Homo sapiens
tagtagtcagcttttagtagccaccattttctgttaaggtctgtgtccttgagaaaatatttaacagttgcacttaatgtggtatcctcttgagatttaactgttgttaattctaaatttttactgtgactgttgcagacaaatctggggacttattcacaaatttgccatcctttgatattcagtaataacagagtcatctctttattagtttccaaatagttatttcatactmtctttccaaatgtttaattaggatcttgagaaactattattagttttctttcatgatagcatgacctaatgtattgataacatgactcagatcttgaatctaaagaagaatcttagacatattattattaacagatatcaaaaacatagagacattcttcaaaactaggaaatgccagcatgcaatgaagggagcatttaaatactatagactaagggtgtttactgatataaattcaatgtattaatatttagtatagcgacaaatgtcttctaatagtcataatgtcaatgcctccagttttcttgatatgtgtaatgaattgtattgagacattatcttatttg

SEQ ID NO: 271309 - DNA, 582 bp, Homo sapiens
tagtagtcagcttttagtagccaccattttctgttaaggtctgtgtccttgagaaaatatttaacagttgcacttaatgtggtatcctcttgagatttaactgttgttaattctaaatttttactgtgactgttgcagacaaatctggggacttattcacaaatttgccatcctttgatattcagtaataacagagtcatctctttattagtttccaaatagttatttcatactatctttccaaatgtttaattaggatcttgagaaactattattagttttctttcatgatagcatgacctaatgtattgataacatgactcagatcttgaatctaaagaagaatcttagacatattattattaacagatatcaaaaacatagagacattcttcaaaactaggaaatgccagcatgcaatgaagggagcatttaaatactatagactaagggtgtttactgatataaattcaatgtattaatayttagtatagcgacaaatgtcttctaatagtcataatgtcaatgcctccagttttcttgatatgtgtaatgaattgtattgagacattatcttatttg

SEQ ID NO: 271310 - DNA, 522 bp, Homo sapiens
tattgttgactgaggtgaaaaagactgagggaaaatccattgtgggtaggttggagaaagtaaaatttatattttggacctttaatgtctgttkgaaatgttttataaacttctaggaaggaatatcatgcagtctttgtataaatgatctggagcaaaagggaaaggtctaacttgaatatattaatttggaagtcaccagcatataaagatgacatttaaaaaaccatactgaataagaccatttaggaaaagaatataaatacataagagaagaggcctgaagactggttcctaggaaattccaacacttagcagctgggaagaagaggaattagcaaaggagactaagaagtactggccattaagatatcaaaaaatataaaaagaaaaaaatgtccttaagacatagttgtacatttagcaaacagatgtgatagaaacccattctgtatatcataagtaaaactaccagatccagtattttaaaacatcttctatatacacagttgagcctgatga

SEQ ID NO: 271311 - DNA, 522 bp, Homo sapiens
tattgttgactgaggtgaaaaagactgagggaaaatccattgtgggtaggttggagaaagtaaaatttatattttggacctttaatgtctgtttgaaatgttttataaacttctaggaaggaatatcatgcagtctttgtataaatgatctggagcaaaagggaaaggtctaacttgaatatattaatttggaagtcaccagcatataaagatgacatttaaaaaaccataytgaataagaccatttaggaaaagaatataaatacataagagaagaggcctgaagactggttcctaggaaattccaacacttagcagctgggaagaagaggaattagcaaaggagactaagaagtactggccattaagatatcaaaaaatataaaaagaaaaaaatgtccttaagacatagttgtacatttagcaaacagatgtgatagaaacccattctgtatatcataagtaaaactaccagatccagtattttaaaacatcttctatatacacagttgagcctgatga

SEQ ID NO: 271312 - DNA, 575 bp, Homo sapiens
catttggaatggtcctagagaagtgttatttcctggaactaaatggagattggagacattcagtgtggctttctgtttgtaaaatccwtcgaggggataattcttactaattagctccctttggaaaagtaattgggagatttagtcataagcagcaaacacaggaaattcactgcaacttagaacctgaactttaatcaaatatcccttcagggacttgagtctttataaaagaatatcctgttttttcctggacactaggcaatggaaaagagcatcacatcctaggatgccttttggtgcactaccaaataaggagtaaaatttgtggtgaccatttgaaatactttctttacctatttgcatatgatttctataatcctttaggaataactttgccataatcatctcctgttaaatacttacaataaggcaaagacatagggatgctgaagtgttcagttttttccagtaagtaaagggaaccattaaaattttctgagcaagtaacttacatgcatagagaagttaaggaagttgactttagaaagatatagttgaagaaggagaaaaaa

SEQ ID NO: 271313 - DNA, 575 bp, Homo sapiens
catttggaatggtcctagagaagtgttatttcctggaactaaatggagattggagacattcagtgtggctttctgtttgtaaaatccttygaggggataattcttactaattagctccctttggaaaagtaattgggagatttagtcataagcagcaaacacaggaaattcactgcaacttagaacctgaactttaatcaaatatcccttcagggacttgagtctttataaaagaatatcctgttttttcctggacactaggcaatggaaaagagcatcacatcctaggatgccttttggtgcactaccaaataaggagtaaaatttgtggtgaccatttgaaatactttctttacctatttgcatatgatttctataatcctttaggaataactttgccataatcatctcctgttaaatacttacaataaggcaaagacatagggatgctgaagtgttcagttttttccagtaagtaaagggaaccattaaaattttctgagcaagtaacttacatgcatagagaagttaaggaagttgactttagaaagatatagttgaagaaggagaaaaaa

SEQ ID NO: 271314 - DNA, 647 bp, Homo sapiens
ctccaaacctatgcatatgttacattcctgaggaatgtaatggggaaagaggaattatatgggaaagaggaattaaaggctataattatctggctttaaaatgagggattgaggattatctgggtaaggccagagtgataacatgggacctaaaagggaaaaaggggagacagaagggagatcagagggatgtgccctaagaaagacaggccctgccattgctgaatttgaagatggagggattgggccatgagtgaagaaatgtggatgcctttacaaggtggcaatacctctcagtttaaagctagcaagataacaaaaacctcagagaactgcaaggaactgaattctaccaacaattgcaattatcaaaagataaattttccttttcattcccaaagaatgtagctgtgcagacaccttgattttagcctggtgagacacatttgggactcacttagtattcatttagctatttcactttttataatgcagaatctgcmgatattataatgcaaattaagatctttatgattagcatctttgaaaaaatactttttctttttttgtttttaaacttcatatatttttgtaactattttgaaacataatagctgatgttatcggaatatatttgcacctgaaaa

SEQ ID NO: 271315 - DNA, 574 bp, Homo sapiens
gattagcatctttgaaaaaatactttttctttttttgtttttaaacttcatatatttttgtaactattttgaaacataatagctgatgttatcggaatatatttgcacctgaaaactgtttcctcatatttttatcataatattaatattcttaaaatcctgcagtggcattgatagtagccaataaaatcaagatttaaattttaaaaatgttctagacacagttaaatcttaattatgccatttgcttaacaaggcactttgtaacaccttcggttacaccaaaggcacttcggggttttattgttgtattattgttattactttacactttctgtcctacaattataactgaaagctacgagaytggatttcaggaaatgagaaaagttgaaaagcaattttactgtaacttctcagaagaattactagcagatttaagaaaaaagaagtaaataatcactaccaaaattaggtaatggtctcatactgcatgtgggtaattcatgaatttcatttcatatcacttctcatttctacaaggttttaggtacaatatgaaaaatgctcatag

SEQ ID NO: 271316 - DNA, 554 bp, Homo sapiens
ggctctgtgatactttctatcaggatcttagtatgagtaaagcaagcatagtatacatgactggaaaaattagtttccattttgaagggcattgtatgcgaaactgcggagtttggattttaccccatgtgacaggtttttgtgagtgtaaagcaagatgtatatggcagcaatgtgatggatcgcttagagaagcactaatgtttggcagggagctatgaagttgttgcagaagtacaagcaaaaaatggtgagtgctaggtttaagactatggaagccaggagaagtttggtatctgtgataggattttgtgacctattgattgcaaggttgagagatagagaacaaacaaaacaatatggaaatttagattttggaagatttggagcattatatcataaactgggccctctttagggagtcctcartggcctttcttcctgccattgcactggtcaacacgtttaatagttaccactacttagccatgcaacacattttatttctagtttaatgcattattattgtacaggcataaacaattatatacaaa

SEQ ID NO: 271317 - DNA, 584 bp, Homo sapiens
gtttgattttcttttccttacaagatgacagattttctactttttcttatctttttactggcagcttcttgtctccttttattaatgtttaaatcttcaatttacagccctaatatacctatataatgatagcttgattcttttgcatctaagggtggaaatgaaaacataacaacattttttgctctttttacttcccatttctttaaatataaattgaaaatattagaagagctagatccaaccactaaagcctgtcatcacatggacacatagaggggatcaacacacattggggcacacattggagggtgcaggatgggaggagggaaaggatcaggaaaaacaaccaatgggtactaggcttaatacctcggtgatgacatagctgtrcaacaaccccctatgatacacatttacctatgtaacaaacctgcacatgtacccctgaacttaaaatagaagttaaaaataataattaaaatatataataaattaataaataaaagcacatttttcaattatgtgactacaacagaaggattatatcttcaatttccccactccaccttgtttgaagatag

SEQ ID NO: 271318 - DNA, 584 bp, Homo sapiens
gtttgattttcttttccttacaagatgacagattttctactttttcttatctttttactggcagcttcttgtctccttttattaatgtttaaatcttcaatttacagccctaatatacctatataatgatagcttgattcttttgcatctaagggtggaaatgaaaacataacaacattttttgctctttttacttcccatttctttaaatataaattgaaaatattagaagagctagatccaaccactaaagcctgtcatcacatggacacatagaggggatcaacacacattggggcacacattggagggtgcaggatgggaggagggaaaggatcaggaaaaacaaccaatgggtactaggcttaatacctcggtgatgacatagctgtacaacaaccccctatgatacacatttacctatgtaacaaacctgcacatgtacccctgaacttaaaatagaagttaaaaataataattaaaatatataataaattaataaataaaagcacatttttcarttatgtgactacaacagaaggattatatcttcaatttccccactccaccttgtttgaagatag

SEQ ID NO: 271319 - DNA, 652 bp, Homo sapiens
aacagggttttttgggggtgggagagaacgagttgttcaacatatttatcagcatattactaaaaataaattttgcctaattttttatatcttgcttgtcagaatagtaaatccaggtggctgcctgtggatatctcatctcatgctgtgactccagccatgccttgcccctcaccagctctgacaccagcagaaggaggagrtatggcataagcctggacaacagatgcttctctaagatgtggactcttgaatgagaaacacaaggatagaaggaatggttgaaacatactttaaatggatgagtggtatgctcttgaattatatctcaataaagctgttttttttaaaaaaagatactatgtgatcattcctgccatccctgcttcctagtcttccagagcagttatgctccctttggctttcgaggtttaattcttgagactcctcttaatgagtccagcatacattcagcaaattactttttgctttaagtagcctaaatctttatcttgtggcttgcaagttagaaactaactatataatatcaatttcaagtctacattaataacaatgaaaacaatggcttctttggaagtgacctattttcaacataatctaacattaattcacaaactggtggcatatattt

SEQ ID NO: 271320 - DNA, 652 bp, Homo sapiens
aacagggttttttgggggtgggagagaacgagttgttcaacatatttatcagcatattactaaaaataaattttgcctaattttttatatcttgcttgtcagaatagtaaatccaggtggctgcctgtggatatctcatctcatgctgtgactccagccatgccttgcccctcaccagctctgacaccagcagaaggaggagatatggcataagcctggacaacagatgcttctctaagatgtggactcttgaatgagaaacacaaggatagaaggaatggttgaaacatactttaaatggatgagtggtatgctcttgaattatatctcaataaagctgttttttttaaaaaaagatactatgtgatcattcctgccatccctgcttcctagtcttccagagcagttatgctccctttggctttcgaggtttaattcttgagactcctcttaatgagtccagcatacattcagcaaattactttttgcttwaagtagcctaaatctttatcttgtggcttgcaagttagaaactaactatataatatcaatttcaagtctacattaataacaatgaaaacaatggcttctttggaagtgacctattttcaacataatctaacattaattcacaaactggtggcatatattt

SEQ ID NO: 271321 - DNA, 634 bp, Homo sapiens
gcttaaatgattaattcatggctaattacatttaaaccatactccccacacatttccgcaaaagaaattcatatgtatcatacaatgtcacctataaacatttcattatatgttgctgaaataaaatgacagtaagaaatagtcaatatcattatcatgcctaaaagaatcaacaatcaataataatttctcaatatcataaaatgctgagtttgtgcatgaatttgtctcgcttttttcctgtttgttagaattggcatccaaataaggtccatacattgtggttttttaaatttattttttattttttattttttttttgagacagaatctcactctgtcayccaggctggagtgcagtggtgtggtcttggctcactgcaacctctgcctccagggctcaagcgattctaaggcctcagcctcctgaatggctgggattacaggtgcctgccaccactcctggctaatttttgtgttttcagtagagacagggtttcaccattttggtcaggctggtcttgaactcctggcctcaagtgatccacccactccggactcccaaagtgctgggattacagatgtgagccagtgcacccagcccatacattgtgtttgatatgtcttttataat

SEQ ID NO: 271322 - DNA, 601 bp, Homo sapiens
cctgaaagagcaggaaagattcctggagctggaaaagactatagtgatcctatagttcaacctcttgggcccacattgagaacgtccatcagaaactcaracaggttgtgaagtttcaggcagaggctctggagtcagacagacctgggtatgaatctggctctgaccctattatctgggaaacttaggacaagtgactcaaactctctgaggcccagtgttctgatgataagtgcgggtctcataggtcattgtgagactacttagtgaatatccatggagtcctcagcaaaaaccttggaacacagaatgcagtcagtaagtggtagctgttattatgattctcactaaagaagaggttagtcgaacaactgtcagggatctttgcagagtagatgactgaattgaatgactttacatacctgggactctcaaatggtgcagggggcgaagccaagcctgcttctgcttgtagttcactccatctgagcctcaatgttcttacctataaaaattgaatcaaatatgaaattgcaccactagatatgaaaatacatacacagtgttttttcataacagctacctcgaggattttagaaat

SEQ ID NO: 271323 - DNA, 563 bp, Homo sapiens
tgtagtgcctggcagtgtgaatggaacattttagctttaaagtggactcttaatacaggatgtcaccaggatcccctttcagacagagcatttacccccaaatccacccatccccatgcccagctccaccttgctttatatccaaggcaaacatggagcaaggggggaaacgtcttttgcaaacttcagtgcttttatcgctcagttggcaaatgtgtcccctttcttgttagccatggcaacaatttggggagcaccactgcctgttatggaaaaccagtgggcggcccagtggtgctgtatctgctttatacctgctcagaagtggtgtgttgtgctgcagttctcctccagaacagttttttatatttatttatttatttttgagatggagtctcgctctgtctcccagtctggagtgcagcggcgtgatgtyggctcactgcaagctccacctcccgggttcacgccattctcctgcctcagcctctcgagtagctgggactacaggcgcccggctaatttttttgtatttttagtagagatggggtttcaccatgtta

SEQ ID NO: 271324 - DNA, 563 bp, Homo sapiens
tgtagtgcctggcagtgtgaatggaacattttagctttaaagtggactcttaatacaggatgtcaccaggatcccctttcagacagagcatttacccccaaatccacccatccccatgcccagctccaccttgctttatatccaaggcaaacatggagcaaggggggaaacgtcttttgcaaacttcagtgcttttatcgctcagttggcaaatgtgtcccctttcttgttagccatggcaacaatttggggagcaccactgcctgttatggaaaaccagtgggcggcccagtggtgctgtatctgctttatacctgctcagaagtggtgtgttgtgctgcagttctcctccagaacagttttttatatttatttatttatttttgagatggagtctcgctctgtctcccagtctggagtgcagcggcgtgatgttggctcactgcaagctccacytcccgggttcacgccattctcctgcctcagcctctcgagtagctgggactacaggcgcccggctaatttttttgtatttttagtagagatggggtttcaccatgtta

SEQ ID NO: 271325 - DNA, 587 bp, Homo sapiens
gcctgcatagaagagagggtattacagcaggcccttgaggagaaacgggatttcacagagcacagatgggttgaaggtagaagggaggcagtgagggactcaggaggctctgatctagttgcaatttatcatagggtgctgggagtatttatttccccatggaattcagtgatttcctcttgtctgtatgttgacttcccatgccactgattcaagggctgtgaagcagagtagtgggtacaggggaaggctgattctactttggagacttctctctgggcaaaaatgtcttccattaaaattataatctctttatcctttccctaatcctgccaaactaagagataggagagttaacgttgtccgtctggtccagaaagatctaacctttcaaagcatcagaggggaaggggcacgattcccctcattgttcatgctacgtttctaacatgtcaccctcactttagcaactttaatggcatgacaaggcatacaggagcgccgtctggtcatgcaaagagctttccagctgcaagctccatttytcccaaaaaagggaaagcctgaagttccccaatacattcatg

SEQ ID NO: 271326 - DNA, 570 bp, Homo sapiens
gacaattgtctcaacactgactgatattacacagytaactctgccatgggtgatttgttgcctctgatgcccagataaatacaattgaagcagaatttaaatacatgccgtttctgtagtctctggagcactgattttaaatagggctataaaggaactctgggctgggggagggggaaggaagaaaaggtaaagtaaaaatttttaaatgtgagtgtgagaccatctgagatgcctagccccagtggaaccaccccacctagtagcccaaggagcagggatgaactgtctctgctgagtcctgcccaaattccagacccacagaagcgagaaccataaaatggtggctactttgagccagtgatttggggggtagtttgtttcacagcaatagataactgatacaggggtaaatagatgcagtattctgtgcattttatttgattatgaaatttttctctgtaacactattctacctaacagattcttggaaatgctgatctaagtagttaacatgatggacatgtctaaatcacagtgagacaacttcttaataagtgattgctgtgg

SEQ ID NO: 271327 - DNA, 561 bp, Homo sapiens
caggcgttggtctgaaaaacatgcaatataagataatgaaatctagtgtaattcccttcctttttatgttgaatcgatttttttgtaagaataagcatttgtaataaaattgagtatattttctatattaatttgcatttgtttattccagaaggtagtccaaggatatgttgataatgcagaaaacattgtaaatatatcattaatacaattaaaactgaaatatatagttttttgaataagtctatttttgtttcataccataatgtaaacagttggttttcaaaagaaaatctgcttatctatgttaatcatttctaaatgattataatttaaaagccttagattctctcccggttgtagctccagaatttctattctaggaaaattctaggacttggttttctggaaaggagtagaaaaatatatctttacaaggtggaaatacagcaaggtcattgctgtgacatagagctttyttgtttgcaatggcttgagcaaacaaatggttatgtggcagtgagggaatgttccaccccctttgtgctgccatgggcccct

SEQ ID NO: 271328 - DNA, 543 bp, Homo sapiens
acaaatacaaactgcatattcttttggtgtatattgtctttcttgagaattatcaggccactctcattgaatatctctgttgaaactcagccaattcttcatattgtggtttacaaggtatgagcagctaaagggatagaatgcagagaatgtcctccaattggcacgagtgagctagagcaatttttccttcagtgttgtggatgacactcttaagctgaagctgacagatggaacccagagaaaggtattgggaaagaaacaggagagataagcacattcttcagggttcctgtgtattagatwaaaaaaaagcatatagttggctacccagaggccccctgcagttctgcaagtcatcgtattcatctgcagaagacattttaacaacctggattctcaaagacgactcatattgtcaggaaaggtgtgcactttccaagtccagggcattattccaatagacatttcccaaatttaataagcatacataaacaaatcacctgagaccttattccaatgcagattctgattcagtagata

SEQ ID NO: 271329 - DNA, 512 bp, Homo sapiens
caaataatcatgtgaatactcttacatattttttaaatgaacagatgcatgccttcctattgggtgtatgcctaaaagcggaattgctgggacatggagtctgcatatgttaatccttaatactcaacaaaaagttctacaaagtggttgtggtgagaattccaattaatttctatgaaaaasacataaatatcatttgtatttttaaatttatccattctagaatgtatggttgaatatcattgtggttttaatttgtatttctctgatgaataataatgttgaaacttttattcatgtatataacctatgtaaatattttctgaagtatttttattgaattatctatattttctcacttatttttaggttatatattatacatgaatctatttttgaaaagtatatgtgtgtatatgtaaaattaatatataattcccataaagtgggaattttgtatatagctatatataattatatttaaatttataaatacttaaattttatatata

SEQ ID NO: 271330 - DNA, 536 bp, Homo sapiens
agccttgttttgtcacgttaccagggtcatttgtctggttccttcttatttgggtaggctgtgtcagagggaaggtctagggctcaaggctgttattctgtttcttttgtcccatgggatgttcccttgatgtagtactctcccccttttcctatggatgtgagttcctgtgagccaaactgcaatggttgttgtctctcttctgggtctccyggctccgggctggtgctgtgggttgtcacagtgctctgtgatgtgaactatctgtgggtctctcagccatggataccagcacctgttccagtggtgtggcaggggggtgcagtgggctacatgggggttcttagctttggtggtttaatgccctattttttgtgctggttggcctcctgccaggaggtggtgctttccagagagcatcacctttggtagtatgggaaggaactggtggtgggcaggtctctagaactcccaagattatataccctttgtcttctgctaccaggatgtgtagggaaggaacatcaggtgagggc

SEQ ID NO: 271331 - DNA, 565 bp, Homo sapiens
gtgaggtaattgaatcatggtggcctgtctttcctgtgctattcttgtgctagtgaataagtcttacgagatctgatgggtttatcaggggtttctgcttttgattttccctcatttttcctttctgccaccacataaaatccacttttcacctcctgctatgattctgagaccacctcagccatgtagaactctaagtccaattaaacctctttttcttcccagtctcaggtgtgtctttatcagctgcatgaaaacagactaatacatcatctacagactttaactgcaattacaatagcaaagacactgtatcaacgtaagtgcccatcaatgatagactgaataaagaaaatgtggaacatatacaccatggaatactatgtagccacaaaaaaagaaaacaagatcatgtcctttgcagggacatggatggagctggggccattattattagcaaactaatacagaaacagaaaaccaaatactgactgttctcacttataagtgggcrctaaataatgagaacacatggacacataaaggagaacaacatgcactgggg

SEQ ID NO: 271332 - DNA, 573 bp, Homo sapiens
ctttaaatattataaatatcagtaacaaaaatattaaaaatacatttgctttggttctggaatataattaaatgaattaagaactttataaatctcaaattttgacaaaaatgaactaaggttttttaaaaagagatgttgttgaatagagaatgggaataaaaaggcagccattttatatgtgggattattaaaataaaattatttatggatgcacagatacacacaaaccaatacacacatgcaaattttttttaaaaaaatcattataaacagtaaatttcaaaaacaattttagaggaaacatgtttgatgatttgtaagataacttagcaataattcctagaatacagaagtaagagtgatacaacagggcaaatggggagagaatatgaycactatggaagagccagaagaaaacacacactgtttgtgggagtgttgcataatagacaaactcgtaatagttgctggtagtgatagtcagtatgttcatttattcaacaaatatttagcacctatgatgcatgaggcattactatagataactataactggaatacatcagtgcag

SEQ ID NO: 271333 - DNA, 514 bp, Homo sapiens
tgaaagctatttttgtttcttcccaagttctctattaaatagcagaccagattcataccagaaataagccattgatatttctaccatgttgtatcttccatttttgttatggatgtcaattagtattgatgatattaaccctattatatcattagtctttaaggtacttcatttataggactagaattcctgtactttaatttatgtatgtaatctaactttagatcactacatgctctttttaatcttcaaagatrctgcttattccctaaacatcattcctcaaatatctattatccttaccgcctactcactctgcttttgctgtcaggccagggattgctgatgaaagaaaatgcacaagagtttgaaaattgcagattcattctttggagtttcatcatgattatgcctgtcatcacatcaacccttttattcacctctcaaatgtcaccaagctattatcctggttattattttctacttaaaacatttaaccatcctccatttttct

SEQ ID NO: 271334 - DNA, 601 bp, Homo sapiens
ttgcttccaaacttactcaactatatgcattattaaaacataaaatgaacccaccttccttgaccctgctacttttctggctacattttagtctttccatttacatcaaaatattgaagaaagggacttctccattgcttctagttcatacccacttgctccattttaactatgtgaaataagatttatcttccaaattcatgaactcctgaaaatactatcaaaagattaccagtgacctctttgcccctacagccaggaactgtaccttagctattattttttttagatgttttggttttttggaagcacttaaatrtttaatatttgaaatcaccttctttttgaatctttcttctgctttggttggtaagttgcatagattctcccattctgctactcattctttctctatgtttttaatgacttccttttcttctctcagtctttaagggagggcactcaagcttctacctcaaacctttcctgttcttagaatatactcatggtttcctttctgatttctatgcagataattcccaaatgacatcttcagccctggtttcctgcatgccttcttcctgtgtttattctcaactcg

SEQ ID NO: 271335 - DNA, 537 bp, Homo sapiens
tttgtacccttaaaatatattttattcaacttacaacagttaaagtattgaaatcatagcccagtgaattcttgcttattacacattgcacatcaatatgtaaatgaatataattctgataaagatagacaaaactatacaaatctttgattaatagaatataggtttaaacatatttcttgtttactctatgctgttcaaattactaaggacaaccaacaagcaccttaaaattgagacaaaatgactgtttttataacacagaattttaggttaaattataaattataaacattatatagttcttgatgaaacaagaggttgtagtttcttctataactggcttacgggggtggggagtggagattagagagggtaagactcagaataagacagttyttaaaaaaattaaccttttattgttttggtttgggagtgcttggcaagtttttttttccaggtattctttaaacataactactttcatgtatataagtgtagaaaaatgtgacttgtgcatcagctgtaggttaaaat

SEQ ID NO: 271336 - DNA, 590 bp, Homo sapiens
actttaaaaacatgaagaacaaaaagctgaagaaatcaagtgtgtttgttttttggagttctctgggaaatcataccttctacaatcaatactgtgagttccctgtgtgtcttcacataggctttatttttaggctttgtaactctgagtgtactgggtcatgtgttcctaatatcacttgttaaattctaccttgaaaatagcccacatcaatatagtgaataagtcaaatattttccaaaatatatgaggcatttaaatgtatatggcatgttctgtacctcaaaataataaaagcaatatatgacaaacccacagccaacattagactaagtgaggataagttgaaagcwttcccattaagaactggatcaaaacaaggatgtccactttcgccatttctattcaatatagtacaggaaatcccagccagagcaatcagggaagagaaaaataaaaatcatctaaattggaaaacaggaagtcaaactatttctgttagatggtgatatgctcttatacgtagaaaaccctaaagactcctccatgagtcctagatttagtaagttaataaagtctcagtttacaaa

SEQ ID NO: 271337 - DNA, 582 bp, Homo sapiens
aaacgtggaggcatcacattaaccaccttcaaattgtactatgtgcctatagtaacgaaaacagcatggtactggtattaaaatagacacataaactaatggaacagaatagagaatcaagaaacaaaagcaaatacttgcaaccaactgatcttcaacaaaggggacaaaacatacactggggaaaggacattcaataaatgatgctgggaaattttgatagccacatgcagaaaaaatgaaactggtcctcatctctcaccatataaaatattcaagatcgattagagtcttacatctcaaagctaaaactgaaaagattctagaacaaaacccatgaaaaactgttctggacattgttctagacaaataatttatcrctaagaccacaaaagcaaatacaagaaaaaacaaaattaaataaatgggactttaaagtaaaaagcttctgcacaacaaaagacctaacagagtaagcagacaacctacagaataggagaaaatatttgtaaactgtgcatctgacaaaggactattatccagaatctaaaaggaactcaaaatataaccaagaaaaaacat

SEQ ID NO: 271338 - DNA, 576 bp, Homo sapiens
aatgtgactaatttataagtttaactttatcataggtatgtatgtataaacaaacagtatatatagggcttgattctcttccatggtttcaggcatccactgggcttcttgcagcatatcccccatggatcaggaagtactatggtatatcaatttaatatgatgcaactcttatccagtttatactgttatgacatccaatataatgtagtaagctactgccatacttctcacagcaaaacatgacttgaagtccaattgacttggatatcattatttctatcattagtaagaataaacataaaagctcatatttacatgtgttgcattctatgaaatagtaactgttgttatcaccactttttatgcaaggaaactgatatagactaattttcttttagttacataaccagcaaatgatagagcctargatttagcctatgacttgggtttttctgagtccagaccctgagtcctttgccactatgctattgtgtttcagagttagaaccttaagtttcaaagagcaaaccaaccgtgggagcccttgtagaactctcagatcacctggggcaa

SEQ ID NO: 271339 - DNA, 489 bp, Homo sapiens
tggttagtgctagtagcaaaagttactttcctccccaaagtgcagcctttataacagtggatcatcaatggctcttcttygtgacagatgttatctgacataatataagtgggaatgccacaataaggcaccattagaaaatctgataattaagtgatattttgatgtgtttcaagcttatatttaaaaataaagtgtagatagaagaatttctgagtttgatctattgcccaagtttgcatattttcacagaataggaacaaaacaaaaccttccataatacctattggaaaaccatgaaccttgcaaactaccatccacaagtcatcaaattttatttttcttcaccttttttgagtaacttagattttcaggtaaggtaattttatacttcttgtttcatgttataggaccccttgtaatcatctctttcttgctatttatgcaatatatggcccatataactttggatccgtataattttgtatt

SEQ ID NO: 271340 - DNA, 418 bp, Homo sapiens
aagaagcaaagcaacaccatggacatcccagcagagaaagcttcttgtttcccatcactttactggagcaaagattactgtccaaaggtagcttctctatcaggggactagcttttgggcttgggcccaaggaacaatcaacagtgcaaatgtgcatcagctgttacactttgccttacagttttgcagtctttctgtttgttctatatggccagctgcttgtctgccacttggcagcctcacaccaacatagtgttaaccagtttgcttcccccttatctggttctggaaattgatccctgcatatctgattsattacttcaaacaaacctctgatcaagaggcttgagagccacaggtggccacttcagctgagagaaacaaaaggccctatgtagacgttctctttagaatcaag

SEQ ID NO: 271341 - DNA, 594 bp, Homo sapiens
aaagatcattgttgagaaaataagtgttatcactctgtcaacggcctattttaactaccttccttgggcagtgatcagaaatgagctgaataaaaaggaatgaaagtatttcaaacaaatctgtttatagtacgcaggaagcaagaaaagtcagtcttgattctttactggcttaccatttacacagtaccatctacatatttacatagtagaataatctactcttgaaaaattctataatattgaagagtatattgcaaatgtcatttggtcattcacccaggaacatgaaaaccattggtatgatttaattttttaatctgcagtatttattaggtatctttacaaatctcatctcttagagacagctatgataaaaatagctcactcagaaataaacgttcgcctttagaaaacttctttccacctaagtcctaggtgcctgcacttgcttgtttcttgggtcatcattcaggtattacactttatctgttcctcctcaarcagccacatttataccaatcataagattttacttacctgcaccattttccccagattcctaattcctgggtaaagaattagtataataaa

SEQ ID NO: 271342 - DNA, 551 bp, Homo sapiens
ccccagggtcactaactcccaaatacttgagagtggggactgagcagcagccatagctcagagaaagccctgatgcagaaagctgaaagatttggcaggcactggaggtggaatgccatcagtgtgcacagaagctatagtaaaactagctgcaatgtaagttaaatgtgggtgaagggtaggttgcatggatacacaaggaatgtcatgggttcrctcagagaataggttcagagacagagagcaagactgagacttcattgccatgaagtaaggaaattaaaattttggatgggcgatgatatagttgactaaattgagactgggcctggaggaactgggcatattcaaagaatgaatttcacaactgattagcattggagggaagaagtagacctgttcatgtggcgtcacacatacccatagatatttgggttataatggtttccggaatataggcagtggaggaggaaacataaattagcagcagtaggaagatgaggcttggttgaaatgaattttttgtgaacatgtttataggcattcattca

SEQ ID NO: 271343 - DNA, 551 bp, Homo sapiens
ccccagggtcactaactcccaaatacttgagagtggggactgagcagcagccatagctcagagaaagccctgatgcagaaagctgaaagatttggcaggcactggaggtggaatgccatcagtgtgcacagaagctatagtaaaactagctgcaatgtaagttaaatgtgggtgaagggtaggttgcatggatacacaaggaatgtcatgggttcgctcagagaataggttcagagacagagagcaagactgagacttcattgccatgaagtaaggaaattaaaattttggatgggygatgatatagttgactaaattgagactgggcctggaggaactgggcatattcaaagaatgaatttcacaactgattagcattggagggaagaagtagacctgttcatgtggcgtcacacatacccatagatatttgggttataatggtttccggaatataggcagtggaggaggaaacataaattagcagcagtaggaagatgaggcttggttgaaatgaattttttgtgaacatgtttataggcattcattca

SEQ ID NO: 271344 - DNA, 644 bp, Homo sapiens
atcagtgtgcacagaagctatagtaaaactagctgcaatgtaagttaaatgtgggtgaagggtaggttgcatggatacacaaggaatgtcatgggttcgctcagagaataggttcagagacagagagcaagactgagacttcattgccatgaagtaaggaaattaaaattttggatgggcgatgatatagttgactaaattgagactgggcctggaggaactgggcatattcaaagaatgaatttcacaactgattagcattggagggaagaagtagacctgttcatgtggcgtcacacatacccatagatatttgggttataatggtttccggaatataggcagtggaggaggaaacataaattagcagcagtaggaagatgaggcttggttgaaatgaattttttgtgaacatgtttataggcattcattcatttattcaaaagcatttttgaatgtttactgctcaattctgagytatgctttaaagttgctatggtgaatataacaggtgtagtcagtccctccttcatgaagattgatatctagtctaggagaaaaaaattactaaaacagcactcatgataacttacttattatatgatcactaccacaaaggaacaatagagtatgctatgagagca

SEQ ID NO: 271345 - DNA, 587 bp, Homo sapiens
tttgcttttttaaagtggtatttaatacctgtatagtacaatgttaaatgaaagaagtgaaatktggccgttttgttttgagctgcatctttaaatagtttctaattttttttctgttcttgttttattttgttttttaagcaatcagcattattttgctttagaattcttcaggtacccttgaccaggtctttaatgttgtgtctgcttataagtatgcttcgtgtcaaccactgttataaggcttttacctatattaattcttataagtatttcagtagatctatgggttaactactggtttgttaaaagctttttattataatacatgtggtatgtggtattttatttaaagcctcatgtcatctcttttgaaaacagtatcctttattcttcttaatcagttaataaattagagtatacttatagattttttcaaaaagtgaaagcatacttgccaatgagatagttccaattgatcctgaaatatcgtctttatatatattgttaaattttgcttcctaatattcattatttacaattacatttatgagagtgattgctcgataattttcttttcttttttc

SEQ ID NO: 271346 - DNA, 587 bp, Homo sapiens
tttgcttttttaaagtggtatttaatacctgtatagtacaatgttaaatgaaagaagtgaaatgtggccgttttgttttgagctgcatctttaaatagtttctaattttttttctgttcttgttttattttgttttttaagcaatcagcattattttgctttagaattcttcaggtacccttgaccaggtctttaatgttgtgtctgcttataagtatgcttcgtgtcaaccactgttataaggcttttacctatattaattcttataagtatttcagtagatctatgggttaactactggtttgttaaaagctttttattataatacatgtggtatgtggtattttatttaaagcctcatgtcatctcttttgaaaacwgtatcctttattcttcttaatcagttaataaattagagtatacttatagattttttcaaaaagtgaaagcatacttgccaatgagatagttccaattgatcctgaaatatcgtctttatatatattgttaaattttgcttcctaatattcattatttacaattacatttatgagagtgattgctcgataattttcttttcttttttc

SEQ ID NO: 271347 - DNA, 564 bp, Homo sapiens
ttctctgtcatgtccatgagatttggggaaagaagggtgggatcaatgtaaatgctcagtgtaccgtaatgaattaarttcctgaggacctagtcaatataatttgacttttttaaaatcctagcagtagttatcttaaggatataaattttaaaaaatgttttaatgagttttgaaagcagtataaaactaaagtttgaaattgctacagaaattaattacatagaatggtgaaaatgtatagcattttcttaaaaataacaaacatcaaagtgaaatttatcagatatataaataatcagaagaaaaatatccattgcaagattagtgttttatctactgatcacattatatttgttgtactgtgccctgaaaattgctgaaacaagttggccttttttgagacgtagagttagtgaattgaagcgactttttttctataatgggatttgacttacctatcttaagtgaaagttttttccataaagagaatatcaagtttcccttaccagttagatttttatttgggaggtagcacagaataattagggaggcctagattta

SEQ ID NO: 271348 - DNA, 622 bp, Homo sapiens
cattatatatttcagtatttcacttatgaacttgcattatctaagactttcttcttagatataagtgctcgattttcattttatagacaagggatactatatttacagataatgaagaaatatcaattatccgttttcttacagaaagactacatttgaattcatattcttaaatcttrctattaatattggttaaaaatagccaccacatttgatctacctactaatttgtatgcataccattttgttaaagagcagctagattgcctgcattgagattttggctctattacttactagcttgacaacattatgcaacttccttagcctccttgtacttccattcctctcttataaaactgcaataatgattataatggtttttacttcgtaggattttcttgggaattgtatatttataaaggacagagcttagtagttgttttttttatgacaccatgttaatcactcccattgactcatttaattctcacacaatcctctgaagcaggcagtaatatccccattttgtagataggagaaatgaggtttccaagagcttacacatcttgtacaaggacaaagaattggaagagtttgaagatggaattttaacctagga

SEQ ID NO: 271349 - DNA, 524 bp, Homo sapiens
atgtcactgttctgccaaaaaactatgatactgctgagaagtatgactcagaactcagcagtaaatggtgcttctgactttgatccctttgcagctttgagcgggctatgccatctgtatcagtcaaatgctggtgtgtaacaaacacatcaaacacaatttattagttcctgactcaatgagtaagcaatttggactcatctcagttgagcagctctrtttgtcttgcctgggttcattcatgtgattacagttggcttgtgaatcatacaagcattgacttatcctggatagccttattcatatctggcttttggatgggtgaataacatacatgtctccagcagacttactcaagcattttcacacacaacagtaagtcccaatgcacaagcacttttcaagcttctgcttgcattatgtttgctaatatcccattagccaaagcaagtcacaaggtcaaatgcagatttaagaggtgaagatgaatactccatcactagataaaatatgctgtcaaacgc

SEQ ID NO: 271350 - DNA, 511 bp, Homo sapiens
aatacgctgtttaaacagaggtttctgtggttggatagatggcactgaaggagatgtgacaaagaaacagtggtaaataggttctagagttggagaaagtcaggaccccaggatgtaatgaaagctgagctttatacatagtttcctattttcttgacctagttgagaacctcttgaaactttstatttagtcgttagtttctctgcccaggtatatttcagaccctcagtttaacctcaggcacatgaccttacatagtttgttgataaatctttgtaattactgccctttatttgacaggttgttgtattcaaattgcttggtcaatttttaaatatttcaagaactttgaggtaatcagtttgcctaaaacgctaatatattagttttgcttttttttttttttttcaaatagtcaacagaaaacaaagttggaatgagcttcctaaagaaaagctaattttctgcactggaagtaattgaatttaaaaaaaaaaagtaacattcaaa

SEQ ID NO: 271351 - DNA, 611 bp, Homo sapiens
cattatattttaagtggatctgtcatagacagcatatagttcagtcttgctcttttattacatctgacttttttcattttatttattcttagtccatttacatttgatgtaaccatcaacatcgtagtgcttaagttgccatgttggtacttatttttcacttgtcccttcatatttcttcttattttkttgccccttcttgacttccttaggttaatcaattttttgtttgtttttcgtttcattttctgtacttgttttggtgtttcctcattttattatttgccttggggctcacagtttgcattcctaacttactgaaggccattcagagtaaatattatttaccacttcacatttcacactttacacttgacactgtatgatttccacttattactgcacacttcccacttaaatagtatacttctatttatccactacacttcatttttgatatattgaagttatatcttttccttctctatctgttacaaaatctgtcttaccaatattgttctttctgctttaaacaatcaccttttaaatagattactaggacaaaatgtcatttacatcgacttgcttgtcatgttctgtgttcttcattt

SEQ ID NO: 271352 - DNA, 567 bp, Homo sapiens
gcttctgtaattttattttttcggtaattttttgttttcggtagtttgagtataatttccctagaaacagccttcttgtatttatcctgggcagagggagagtccaaagtccgtggcaggttttctgtgagttcttggctatgggttcacccacacttcagctccctccctcctctccagtgtcctgcctgcagactttatccacttcagttgccctcacattgatttctgtctccttatgtgaatagtacttctacactctgttttgattctacgttactaagccacaataagaaacattcctgaggcagagattctgggtaataaggagactctgtagttagtttctctgctctcagagttcacagttttttttttttttttttacttctacttgtaaaacttacaagtataatactttattaatgcaaacctggaatgtaattatgcaatatgttatcgtgccatatttttttcatttaraaaaaacttcttgaagacagtctgacaacttataagtaatgggaatttttaaatgagtatagaaaggatataactttttttgtt

SEQ ID NO: 271353 - DNA, 602 bp, Homo sapiens
gctgtgacttccttgatctgcatatgcactagtagataaaggcaatatactatagtgctgacaactagacttcacaggcatgaattcctgccctgccagccattggtgatgtgactttgagtaacttatttctttgtttttcaatttccttttctgaaaagaaagtgcatcctgggaagaagcattgcattttggcagttgggttgtaacagtctttacttaagcaactctttttccgtgtgctttctcaaaggaaaatgggaatctcatcactcagaataaaagtctataaaaatcaagtttccaaatgaatgcaatgatccatgatggaagcaatcattatcttgggtaaagattagatagacaatgagtctttttttttctacaattgtaggtttaggaggccctgtaactacattcttgtgtattatccattgctttccctagtgtgaattattgataatcattttgttgtactmttctatggaataattaaagtttataggcaaaacaagtattcccagaacttgacagctattgagggggtgggacatgtatatacagagttagtggagtggagagaacagctgtttctttagtaa

SEQ ID NO: 271354 - DNA, 538 bp, Homo sapiens
gggcttagtgtacaactttgcattatttcaaagttgaacatataaggtgacaagttgtgcagtagttgtaagtatacggctttagggtggtagaactttgctatttattgagaagcctgggcaatttttcttagcttcggttcttttttttttttttttcccatgttacatgcaaataatggtacagtatagagttgtcatgaggattaatgagataatgctcaatacatcttagctctttttattcaaattatttgagttctaatgtcttaattaggtgaccacaaacaatgtggctaaatatttggttggtgcaaaagtaattgcagtttttgcaattaaaagtaatcacaaaacttgaatcactcrtatttcttcagtaaaaaaagaaatgaatatctgcaaaatggggttaatgagagagtattgtggagaggtggagaaaaaacacatacttttaaaagaactaagtctagcacatagtagacctgcaataaatcttggttctcttttactagcatacctcaccggcatctta

SEQ ID NO: 271355 - DNA, 561 bp, Homo sapiens
tttttaaggaagactaataaattaagaactgccaaggaatatgaataattattctgttgaatgaaaaaaattatttatcataattaactatatcttaccttgtatgaatttaaatgcctgtaaggtaaagcatcaacaagctaagttagagtgatttgcctgagagcaggacagaattaatttgtttaaactctatctggcacagtcaaattattaaattaagtgtggaagggaaagaaaaaaaacagagacagagctatgaaactgattgctattagggagggctgcaggcctgatatgagaacgaagtgtaggtggtgcccagtgattcgtacatgaaaccaattgrgaaatagcagcaaataatatttatagcttcagatgcatgtacaccaattttcagagcatgggtaataaacaaaacttaaaatgttggtactatgtggtatattttatatttttattaacttataacattgtatatattcacatatttatgtatgtatatatctaatttgtgtgtgttaggactaagatgtataatgaacattatcaataaga

SEQ ID NO: 271356 - DNA, 494 bp, Homo sapiens
atattcacatatttatgtatgtatatatctaatttgtgtgtgttaggactaagatgtataatgaacattatcaataagaaagacttcccattaygagtagttgaatgaattatagaaaagtgcccagcagagttctgtgaagttatgtttcaggctactaaagacttgtgtttgaaactgctattctgcttccagtggtcttgaaacatgataaaatgggttttgtgccacaaggctacagatacagtggtagttctttttaaaagggattgtaattagccacacacaaactttatgacttgtgatttacaagcttgaaataaatgttaagcacaattgaatagcagactattaaagtaacagtttgtaagcatttggaagtggaaacagaaatcagcaggatgagtttaagaagaatgagtcaggtcagactgacttcattcccccttgaacaagaatttgaaaaaggtggattacatccatctggatttagc

SEQ ID NO: 271357 - DNA, 625 bp, Homo sapiens
tttttgtatttttagtaaagatggggtttcaccatgttggccaggttggtcttgaactcctgacctcaggtgatccacccrcctcagcctcccaaagaactggaattacaggcgtgagccactgcccccggccctaaatttatattttaatgttagaattcatctcaaacagttttcatggcagccgtatgaatttatgctaatttatttaactatttccttacaattggatatttacattattttttaaatgccttgccagctgcagctaacactgcattggacatctttgtattaaagtcttttgcctatattttgggctttttcctctggatataattctagacataaaattactgagccaaaagaactatacgttagggttcttaataagagttgccatattttttcaaaataatttattttactctcccaagttttaattaaatgcttaagtgtgtatagtgaattttttttttaatatatggaacctgaggcagttgagcatagtaataaacagcaccagatttggagctaaacctacctaagttcaagaacgtatgaatagaaacttttaacctttcttctagagcttgccactcataaggttgaacaaaagtctatg

SEQ ID NO: 271358 - DNA, 625 bp, Homo sapiens
tttttgtatttttagtaaagatggggtttcaccatgttggccaggttggtcttgaactcctgacctcaggtgatccacccgcctcagcctcccaaagaactggaattacaggcgtgagccactgcccccggccctaaatttatattttaatgttagaattcatctcaaacagttttcatggcagccgtatgaatttatgctaatttatttaactatttccttacaattggatatttacattattttttaaatgccttgccagctgcagctaacactgcattggacatctttgtattaaagtcttttgcctatattttgggctttttcctctggatataattctagacataaaattactgagccaaaagaactatacgttagggttcttaataagagttgccatattttttcaaaataatttattttactctcccragttttaattaaatgcttaagtgtgtatagtgaattttttttttaatatatggaacctgaggcagttgagcatagtaataaacagcaccagatttggagctaaacctacctaagttcaagaacgtatgaatagaaacttttaacctttcttctagagcttgccactcataaggttgaacaaaagtctatg

SEQ ID NO: 271359 - DNA, 636 bp, Homo sapiens
tatagtctgttacgacaataggattagaaattgaaagatattggagaagataatataatgcagaaaaaaaggcctgccctaggaaagcttcaggcaaattttcaacttctcaagtcagccttaagacatagcataataacttttcatcctttttagtaaaaggcaacatcaagtcaatagaatatcttaaaattttatgagccaaactagtcttagctttctatcatctcccaactccttaaggtatctgaggcacataaatgaaacgtacttaatctatcttgcaaatatagaagaaaagatagtacagttattattatacctatatagatcccactctgctccctctgtaagatatatatacatatatatgtgtgtgtgtrtatatatatatatatatctctatctcacaagcaagattatgcacatactttgaagtttatttcccagaagttgtgaatataatccccacttacgtgcactagaaaattttagagaatttgtgaaaaacgaaaattgggttatgcatttcagatgcagaacaggtactaagaacagtggtagagacaagggaaaaacaatcaaaaaaatgtacaaatttgcttgtatgtctcagtcagcacttatgaaacacta

SEQ ID NO: 271360 - DNA, 661 bp, Homo sapiens
attttggtttagtaacaaattcctcagtatgtactgttggtgattataggaaataatttagttttttaaaaaatgagcctacaatttttcatggtttttaaatggctttaactcaggaaacatggaggtacagggccttaatagacctaaactcaaatcctttcttgactacctaggatataggtaactttacagaagatacacctgttttctcacccataaagtgagatttaatatcaactatatagaatgtggataaaagttaggttttatatatatatwttttaaatcttcttacaggctatatcatatagctaaagtgttatacatgttattgttgtttctattttccagaagtggagtaagttgcttttatttattaagatataatattttagtcctttatctctctattatactgtggattactcttctaaggacctacaataatgacttcggatatgcagcatatacatatgttatatatttatacacagatccaaaaatggccatgaaagctttggagaaaataaaataacttattacatctttgagagccaatattggcctcctacaagcataaaaccctgggtatctttatcagaaatgattatttgaattacattattttttcaaaaagaatatatatgctttcagacat

SEQ ID NO: 271361 - DNA, 585 bp, Homo sapiens
catatgtatatatacacacatacacacatacatatgtatgtatacacatatatatgtgtaaccaaacaaacaaaatcaaaccactcgtttgaatctcaccttcataattaactgtttgcatgattattttctattcctgttatagtgaggtaggtaatattaagctatccttcattctaagaacaactatcaaaactggataaagtttaagggaaaaagcatatgtttgaatatattggagagcagactatagctagggcttgaggaatcacaatgccagatasagtcagagataatgtaaacacattgtgagcaactatgtatttatgccaaaattttctcctcagggaatttgtttttaatagtgataaatagaggccgaacagaaaatagtgatccagatactgcagtggtttcactgaacaagtgaaactaaaatttgaatttaaggctgctaaagcatttataacttgaaggaccaaaaaaagagaaacacaaataagtaatctatgaattttaatgaaatttatttttcttttttaaaatttttccataagtcattggggtacaggtggtatttggtta

SEQ ID NO: 271362 - DNA, 581 bp, Homo sapiens
gattgcgtcattattgtcattcagttcaaagaatttttaaatttccatcttgattttgttttygacccaatgctcattcaggagcaggttatttaatttccgtgtatttgcatggttttgaaggttccttttggagtggattttcagttttattccactgtggtctgagacagtgcttgatataatttcaattttattacatttattgaggctcgttttatggcctatcatatggtctatcttggagaaaattccatgggctgtcaaatagaatgtgtattctgaggttggatgaaacgttctgtatatatctgttaagtccatttgctccaaggtatagattaaatccattgtttcttcgttgactttctgtcttgatggcctgtctagtgctttcagtggagtattgaagtcccccactattattgtgttgctgtctatctcatttcttttcttaggtctattagtaattgttttatgaacttgggacctccagtgttaggtgcatatatgtttaggactatgatattttcctgttggataaggccttttaccattatatactgtccctctttgtctct

SEQ ID NO: 271363 - DNA, 581 bp, Homo sapiens
gattgcgtcattattgtcattcagttcaaagaatttttaaatttccatcttgattttgttttcgacccaatgctcattcaggagcaggttatttaatttccgtgtatttgcatggttttgaaggttccttttggagtggattttcagttttattccactgtggtctgagacagtgcttgatataatttcaattttattacatttattgaggctcgttttatggcctatcatatggtctatcttggagaaaattccatgggctgtcraatagaatgtgtattctgaggttggatgaaacgttctgtatatatctgttaagtccatttgctccaaggtatagattaaatccattgtttcttcgttgactttctgtcttgatggcctgtctagtgctttcagtggagtattgaagtcccccactattattgtgttgctgtctatctcatttcttttcttaggtctattagtaattgttttatgaacttgggacctccagtgttaggtgcatatatgtttaggactatgatattttcctgttggataaggccttttaccattatatactgtccctctttgtctct

SEQ ID NO: 271364 - DNA, 514 bp, Homo sapiens
gcctccgcatgctgcattttcattttaaaaggcactacaagtgctttacctttcagagaagccatataattccatagacacactccattatcatatgctaaagattatttaagctgttcattcttgctaaattgaaccataatcaaactgtcaagaaggcatagaaactcaaagactgctgttaaatcacccttttgccccctcattagcagggaaactgacctcagatgttttcatctcaccccacaagcgttatttctccagcctttactcactgccccttccctctacagtcctgagcctaggtttctagragaagagaagctgctttggatgggtcccttctcccatatgtcccaccctctctctctaattttggcaaccttggctaatgtcaccagagatgtgtctgattttgtcagttttctcaaagaagcaacttgccattattgataacttttattttatctttgttttctattctatgtaatttacatgtattaagtttttagcc

SEQ ID NO: 271365 - DNA, 646 bp, Homo sapiens
tcctcttggctctcctctaaattgcttttagaggaagaagcagtggcgggaccagaatggcagccccatcactcatctccacagccacacggtgactaccttacaaatatcctgttcagatcagaaaaggggtttgcagccacgcccttgcctctctccagctagatctgaaattgcacatcccaackatgatttcccctggaagctgacattagccctagcagcgtatgtgactgatggtgcctctgaaagagggactctcaggatcaaatactaagagcttattataccagttagaacacagtgtttcactgtgaatatatacttttattataaaaatgacatatgcttattataaacaattcaaggtgaagaaaagttgggaagttcacagggaatttttcttctgctctcactcagccccagcactgatccaaagactgccctccctctagaaacctcttttatcagtttctggcattttctatgcatccacaagcaaatggatatatacacacacacacacatatatatatatatatacacacacacaaacatacatatatatatatatatgcatttaaataaatcactctaaaggctttaaagtgatttcataataacaagcaagtccacatttgataaa

SEQ ID NO: 271366 - DNA, 646 bp, Homo sapiens
tcctcttggctctcctctaaattgcttttagaggaagaagcagtggcgggaccagaatggcagccccatcactcatctccacagccacacggtgactaccttacaaatatcctgttcagatcagaaaaggggtttgcagccacgcccttgcctctctccagctagatctgaaattgcacatcccaacgatgatttcccctggaagctgacattagccctagcagcgtatgtgactgatggtgcctctgaaagagggactctcaggatcaaatactaagagcttattataccagttagaacacagtgtttcactgtkaatatatacttttattataaaaatgacatatgcttattataaacaattcaaggtgaagaaaagttgggaagttcacagggaatttttcttctgctctcactcagccccagcactgatccaaagactgccctccctctagaaacctcttttatcagtttctggcattttctatgcatccacaagcaaatggatatatacacacacacacacatatatatatatatatacacacacacaaacatacatatatatatatatatgcatttaaataaatcactctaaaggctttaaagtgatttcataataacaagcaagtccacatttgataaa

SEQ ID NO: 271367 - DNA, 635 bp, Homo sapiens
ctttcttcttttaatatagtaaaatgtatatgtaatgtaaaattcatcwttttagccaattttttagtgtacagttgagtggcattaagtatgttcacaatgttgtacaaccggcatgatcgttcatctccagaactttttcatctccacaaactgaaactctgtcctcattaataactccccattccctactatattagttcattttcatactgctatgaagaaatacctgagactggctaatttataaagaaaaagaggtttaatggattcgcagttacacatggctgaggaggcctcacaatcatggcagaaggcgaaggaggagcaaaggcatgtcttacatggcggcaggcaagagagtgtgtgtaggggaattgccctttataaaaccatcagatctcatgaagcttattcactatcataagaacagcatgggaaaaactcacccccatgattcagttacctcccactgggtcccttccacaatatgtggggattatgggagctacaattcaagatgagatttgggtagggacacagccaaactgtatcacctacttctcccagcccctggcaattatcattctagtttctgcttctatgaatttgactactctaggtacttcacataa

SEQ ID NO: 271368 - DNA, 584 bp, Homo sapiens
ttaacatatgcaaagcagttggaataatatatatattgttaatactcagtaaagcctttagaataatacacggtgagtgctcaataagtgtgagccttgttttaacattttgaattggccattcaagtcttgtctcctgtgaattttctattcctttccttaccctaggacttatcattttracttaactattctgaacataatcattcatttgtggttatatgctggaaatatcttcttttagtctgtggcttgtcttttttgtttttatgacattttttgttaagaagttttaaattggaatctagtcaatatatcgttctttgtactcttttttctcttgtttaatcaatccttctctttggtgcggtcatacaaatattctcctatattttatttgtaaaagtttttaaagtttgttcttcacatttaggattttatgatttaatccatgttgaatttaattttgtgactagtgtgaggtaaggagttttttcaatcacttctccatatgagaaaccaaatattgtgatatcattaatgaatttgtaatgtcatttttgtcatgttatttctatatatga

SEQ ID NO: 271369 - DNA, 584 bp, Homo sapiens
ttaacatatgcaaagcagttggaataatatatatattgttaatactcagtaaagcctttagaataatacacggtgagtgctcaataagtgtgagccttgttttaacattttgaattggccattcaagtcttgtctcctgtgaattttctattcctttccttaccctaggacttatcattttaacttaactattctgaacataatcattcatttgtggttatatgctggaaatatcttcttttagtctgtggcttgtcttttttgtttttatgacattttttgttaagaagttttaaattggaatctagtcaatatatcgttctttgtactcttttttctcttgtttaatcaatccttctctttggtgcggtcatacaaatattctcctatattttatttgtaaaagtttttaaagtttgttcttcacatttaggattttatgatttaatccatgttgaatttaattttgtgactagtgtgaggtaaggagttttttcaatcacttctccatatgagaaaycaaatattgtgatatcattaatgaatttgtaatgtcatttttgtcatgttatttctatatatga

SEQ ID NO: 271370 - DNA, 284 bp, Homo sapiens
cctaggaaaagcaggagggcttccgggcaggaagcccccacggaggtggaggctagagggctggtgaggcatgcgggtgccagtagagcccgcgggtgccagtagagcccgcgggcgccaggagctccacattcctggcrggcctggcaggtcccccctcccctggctctctcctctgtcacaccaggtgactgtccgtgccacccttttgagcccatccccagacctttgcatctgccattttctcttctgggagtgtccctggtgctctcctgccatgagga

SEQ ID NO: 271371 - DNA, 594 bp, Homo sapiens
ggtatcccatacaattctcaaggaccagccatagtagaaagaatgaatctctccctaaaacagcagttgcaacagcagaaaaggggagacagagagtatgggaccccacagatacaactgaacctagcattattaactttaaattttttgagcctgcccaaaggatagatgttatcagcagctgaacagcatctacagaaaccagctgcaaagacagaagcagaacaactgatttggtggagagatctgattacaaaaacttaggaaataggtaaaataataacttggggtagaggttatgcttgtatttctccaggcaaaaatcaacagctgatttggataccaccaagacacctgaaaccttattatgagccagatgccaaggaagagattccgggaggatcccragtactccccggttgcagccatgtcaagactgatgctgaggaggaccccaactgtcacaaacaacacatgtcaaacacagccactcatctggggacagatcaagaagctgccacagatggcggaagaaaacctgaggaaagtgggacaaccagtcacaacaagtaatttaatggtagctatgatagc

SEQ ID NO: 271372 - DNA, 633 bp, Homo sapiens
ggtgctgcacaacaattcctatggaatcattattaactggtcccctaaggggatgtttagcttgaattgctcctctcagtccgcgtcccacggtcatgctatgttcagataatctgaayaaaacggtcagatggtagaaataatagaagtatggcaagagttcctattatctggaaccatgtcggtatagtggcacctcaacctcaaatgatatggcccactctaggagcttaacataaggatttgtggaaactattaaatgcacttaatgagatcaaaatttggaaaagaataaaaaagcatctagaaggacactctacaaacttgtctttggatattgcaaaattaaagaacaaatatttaaagtatcccaggcacacctgaccttaatgccaggaactggagtccttaaaggagctgcagacagattagcagccagtaacccaataaaaacacttggaagctctgtgatttcaatgatgattgtgcttttaatctatgttgtttgtctttatgtagtctgcagatgtggatcctgactcctgcaagaagtagctcaccatgacaaagctgcccttgcttttattgatttgcaaatcaaataagggggacatgttgggagcaagcccccca

SEQ ID NO: 271373 - DNA, 499 bp, Homo sapiens
gaaaccctggagatggggctgaggctggggaaactccccgacactcctaaaccacagcttctctcttttatctttatgaatgttagagccctgtctcaaacagctgttgagaaaatacaaaagaacaacaaaaaaaagtccttaatatcaaccttgatgtggaaaaaaataatctttcktcaaaagacaagagcaaatatagttctctccttcccctcgccacatggagacattttgccatctgcgatctcccagtgccatctctcctgaccatccacgtggaaaaaaggaagcagtttgggaccccatctccattcccacctgcttctgcccctagtttcttttcctgacagccctggcaatagcaatcgctgtcaggctgtaatttaaagcaaaccagtgcaaacttgaaccaactttacctgggtgattgatgggtcgaactggattttttttttctacttacatgagatttctgcaagtaggtattatgatctca

SEQ ID NO: 271374 - DNA, 565 bp, Homo sapiens
agaatgaccacatggacatggaggggttagggaagtcccatctccttaaagccgagagaatcatgccgtatagagctataacaggcttcctgctgcccagaaccacttccagcttagtccacaccccgagaggtgaactggcattcaagtgtaaagtgacagcaattctgaaaagggctaaacccagacactgtcatttaacaattcattccaagtagttgcagcgggccacgtaccgagttcagtacttcacctgcattctcacctctaattacaacatccgctttataagggaaaggctgtcatcattccctcctgatagctgaagatactaaacttttgaaaagctaaattttctgccaaggacatcccactaggaactctgcacatctgaccccaatatctgtaagtttaagcagtacattaaatcgacgyatttctgaaacaaaccaggaacaagttcacaggagacaagcagagtgatgaggcaggagctggtggtaacattgggctttgtgtggctctcttagagaacaggaagtgcaggaagccagagacacagccc

SEQ ID NO: 271375 - DNA, 555 bp, Homo sapiens
tgggttccccacagttaaattcaatttgggcactgtctacctggagatagcatcagatctcacagattgagacctcagtcyccaagactgccctcacttcacatgctagtctctctagccacaggttatggcctttgcttctgaccaaccaaaaaattgggcattcccataacccctttttgggttcaattaatttgttagagtggctcagagaactcaaggaaacattttactttgttgattcatgtattataaaggctattacaaaggatgcaggtgaacagccaggtggaaaaggtgtatagggtgaagcctgggagaagggatgtggagcttccatgccctccctaggcatgccactctccagggacttccacatgctcagcaatttgggagctctctgaaccctgtcttttggggttcctatggaagcttcactatgtaggcgtgattaattacatcactgaccattgatgatcaactcaaattttagcccctctatcctttccagaggtcaggagtgagcctgaaagtttcaatgctctaatcacatga

SEQ ID NO: 271376 - DNA, 582 bp, Homo sapiens
agtgagcctgaaagtttcaatgctctaatcacatgattggttcccctggcaaccaaccccatcctgagctatccaggaacccaagaaaagtcaccccattagaacaaaagatgcttctgtcacccaaggaacttaggagctctgtatcagatgttcctacaactcaggaaattacaaaggccttaggagctctgttttagaaactggtgtcaaagaccaaacattagaagacaagattctcctagcacctatatccacaagggttttagcagctttgtctcagcaactggaggtagagaccaaatagatatttcttgttatatcacagtatcacattcttctctctttgactgtcatcacacctccaggcagcatttcatctgagagtyccttctgtgtttgatagcagaatcatgtacctcagcatctctaagcctgagtttgaacacttgaaaatgaggttgagcatctccaccttgtcagcttttgagagtcctcgtgatgtggaggctttacaaatgttgctagtaaataagagaaatcttcctcagactgtgggcagctcatgcccttcaggtcctc

SEQ ID NO: 271377 - DNA, 582 bp, Homo sapiens
agtgagcctgaaagtttcaatgctctaatcacatgattggttcccctggcaaccaaccccatcctgagctatccaggaacccaagaaaagtcaccccattagaacaaaagatgcttctgtcacccaaggaacttaggagctctgtatcagatgttcctacaactcaggaaattacaaaggccttaggagctctgttttagaaactggtgtcaaagaccaaacattagaagacaagattctcctagcacctatatccacaagggttttagcagctttgtctcagcaactggaggtagagaccaaatagatatttcttgttatatcacagtatcacattcttctctctttgactgtcatcacacctccaggcagcatttcatctgagagttccttctgtgtttgatagcagaatcatgtacctcagcrtctctaagcctgagtttgaacacttgaaaatgaggttgagcatctccaccttgtcagcttttgagagtcctcgtgatgtggaggctttacaaatgttgctagtaaataagagaaatcttcctcagactgtgggcagctcatgcccttcaggtcctc

SEQ ID NO: 271378 - DNA, 591 bp, Homo sapiens
caaaaatgcaaacttcacaatatctggtacacaatcaagaattaccaagtatgcaaacaaaaactaaaataataagaaaaaaatcaataaattaaaacttcccagtatcagcacagatattaaaattagtaagcaaggacattggatgtataatttttctcatatgtttaaaaattaagtagagacaggacaaatataaatataaaccaaaatattattggtaaaatgtaaaatgtttgagagaaagatctatgatgtatgtagcttagatataactggaagaaacattagtaaacttgaagacatggtaatagaaatgatgcaaaatcaaatactttaaaaaagtaaaaaagaaatggagaaaagcattagtgatctrtaggacgattttaagagatctaatatacactaaattggaatacccaaaagaggagaagaaaacaaaaattgaggaaacagttgcccaaatgtttccaagttagattaaaactataaatatgtagatttgaaaagccctataaacaccaaacatagaaaactaacccaaagcagagcataaccaaatttctcaaaacaagtgatgagtacaaa

SEQ ID NO: 271379 - DNA, 596 bp, Homo sapiens
tctccaccctctacccttcatgtcttacctaatatgggaaaaaacactgagatacacttaggatggtcacagatcagagacagaagcccactaaaagactgaggcttaatcatagcattatagaaagtgtataccttaccaccctgtcatcaaagctttcatataataacagtgaattacagttaaaagaactgcaaggcacagactattaaaaaggagtttttaggaaaactcaracacaaaaaaggaaaaaaaaatcaaggacaccagaggaaattgaaatctttaatacgcatagataaagaaaacattaaacagagccaatgcctagctcagtttccatagcaatgtacacaaaagcccttttaccttagttcctattactcaataagtcatgtttaattttcaacaaaagtatacatggcatgctaaaaggcaaaaaaaaaattgaagagacaagcatcagaatcagaatcaaatataacatagattttgtaattatcaggcagataattttaaataattaatatgttaaatgctttaagggaaaaagtagacaacatgtaagaacagatgggtaatgtgagcaagtacag

SEQ ID NO: 271380 - DNA, 586 bp, Homo sapiens
ataatatattatgcaatatataaatataaaatattgtaattaatattgttaaatatttaaatactagtattcttcaaaggaagagtgaggccataattatctgaataaattatcttttggggaatccattccagaactaaattccctaatttcacaattccataacaaaatcattcaacacttacaaacgttccatgggaaaataaataaaaataatatcctgaaagtcaaggaatggaagcaagtagagaaattaaatttgaatagttagaacctcgcaaacaaagcagaaagaattaagaaggaataggactggcttcactatttcagaaataggatactggtagaagaatatgcaggagggaacagcttagacatcagagggttacgacgtacctgtagcagaggctgccaagggtaggggtagattcagcttgaccctcaaaatgttctctsgaatcagcatcacgcattgtcctcccatttcacatatggataaactgaagttcagagaggggaagtggctaagccactaggtaggattgaaacaaggtcttcaggaaattctgtccatgtctataaaacc

SEQ ID NO: 271381 - DNA, 552 bp, Homo sapiens
attcttcggtgtaaatgtaaacagtttgtttagtcagtcacccataaaggatactttggttgttttcagtttgacttactacatataaagctgccttgaacaatcatgaacagcccctgtgaatataactttttatttttctgggataagtgtccaggagtgtaattctgagtggtatggttttaagaaactgccaaactattttccagagtggcggtaccattttacattttcaccagcagtgtttaaaatatctagtttctgtacatcctcatcagcatttgttattttcacttttttttatttcagctgttctaataagtgtgttgtgatatttcattttgttttaatttgcatttccttcatggctaataacgttaaccatctttcgttattagatgcttgttattcacttttcagtgaaataattcttcctgttgtttgtacattttctaattagattgttttttaatatttagttattagaattcttcaaatattttacmcatgagttctttattaagtggtttgcaaatactgttctctcccagt

SEQ ID NO: 271382 - DNA, 582 bp, Homo sapiens
accactatgttagagcatgagatttgtctccttcatcatctctgctgttgctcttccatcttcccttagtcctgcctctttctgccttgccatctgtctgccttctgggaacaaccttcttccttgataattgcccctgagccatcttttctgtccaagtcactcgatgcctttatcttagagttggctgcttcaaacagcctagaatctcaraattagatagaaaccaagagttcctatttttatcatcctctctaataaatgtttttaaagactgtgcacaagagtctttgggtttgtaaatttcagtgaaaaaatgtccaacttcatttttactgactcctatctgaaatttagcatttcgttctattatgaataacagagtggtggtagcaatagccttcgcttggtcaccaatagataccacagagagtttcatatcaatgcagttatgtcaactgtattgaaattctatgaatgctccttaaagcttcaaaaatataaaattaataggtctcatgctacatcttgtcatttgatattgatagaaaagcatacacaattctgtatttcaagtattta

SEQ ID NO: 271383 - DNA, 604 bp, Homo sapiens
agcagcctatttgaaacaggaacacacacatgcatacacacacacatatacattccttgcactaacaaagataaatgaatatatacatatgaaattatcactatagacagatgtctgggaaaacaatttatgcaggtcatttgatattccctaggcattggctaaatttggacttcaaaggatagctagttattttaatgtcatattctatatttaatattttattagctttaaaaatcctgctttttagaaaaaaaaagaggactcagaaataaatgtatgtttttcttttaacccatgatctaaatttgcctatcctaaatacatgtataaattcttaaatacttcatacttctaattaaatagcatgaaatgtaccacaaatatttattatgggtgcttagaatttggtattgttgtattttttttctcaaatgaatatcaaacactaaaattggagcataatgagattctttttttcttaggtagtgtcaactgtattaaatgatatgagatgactatgactttggacataaagattaaaatactaggatgatattagaggtttcaraacttagtttatatacctgcttatgagcttatc

SEQ ID NO: 271384 - DNA, 594 bp, Homo sapiens
agcatttaattctgcaatatatatgcatttttcttgaaacccactgtctctttaacatctttgtccaggcattttcttagtaaccctgcaacctgtctgaacactttttttggtttcatgtgtaagctccaatttcctttgctctgttattatggtgttcctccagattgtgtcatagctgtcaccgcctatcaacagttcaaatcacttatgacctatgcatcacactgcctacttgacagttatgcttgcacatatcatgataaccttaaatatatgttcaaaactaaacaagacccttctgtcttcctccagcacctctgtgttacatcaaattatctctggatcccatactcaccaycagaatatccaattacaaaatcatatcaattctatttccaatacatttctagacttagtctccctaaatatttgtagaaaacatctctcatcacgatgctaaaacagtgtcataccttgttttctttgctccaatatcatcctctatactttggtatctagaaaagtcacagtgatctttctgaagtacagatgtgattaagccagtcttcaattcttcttataacagcctat

SEQ ID NO: 271385 - DNA, 566 bp, Homo sapiens
ggccttgccctctgcagctggttctgcacagaaccagagtctacaaaaaattaaaaatcaaagctaaggaggttttaactttgcctgatttttcttacctggaaaagaagcagacagcacaggctgctttatgttccacatgaaatggtaaaaatagtatgagctgtaaagcacacaaatgaagttttgaatcatggttacctgctagctcttacgttgaagaagttttgtaacgtcgagatcttcaacatccttttccataaaaggaaagaattccatttccataaattgttttgagaattaaatgagttaatgaacttgatagtgtcaaacattactcctracatgtaatacatattcagtggaaattagtttctttctttctatttgttgagatatcttgagtaaaatttaatttcttctcatcctcacatttgtggcttttgaatatcagttaattacttttctaaagtatgaagtcagctgggtgcggtggctcacgcctataatcccagcactttgggaggccgaggcaggcggatcatgaggtcaagcgtctgagacca

SEQ ID NO: 271386 - DNA, 511 bp, Homo sapiens
ttatgacatatacatggcttcaaattgtattttacaggaaatgtattaaaatttgtcactataactctaatttcatttaaatacataaatctttgctcatataaactggaattaaattttaaatttccaatttcatctgccaacatgcttcatctttgctggattttctgatgctaattggaatgctctgaagcccacaggacagccaatgacaacttttgggctatttccaygtttccaatttgcgctggataaagcaggatggccaaattatgacagagttttctcttccaaatcaatcaacttttaatacaaagatttcctcaagagtcaaagactctaaaagagaaaggtttaaattttggatgttgcaagctcaaatcaccaagtgaaatttgatccttgaacatctaaatcaatgattaaaatgtttcatagatagactgcaccttgaaaatactaagtctagagacagcctcttcaggagacttgtgtggatacatagacatca

SEQ ID NO: 271387 - DNA, 583 bp, Homo sapiens
tgtgaacaaggcttttttttattcccattgcttaagaaaatggtgctacacagtagtttgttgataaatatgtatgaattacaggatgaattaataatagattattctcatggtcccaccatacacattcaacatttttaattctttttaaaataagttttgyttcgtgtacaataagttatttgtaaactttaactttgatgttattttggcttttagcacttttcattatctcgttagacatttatattccacccttgatattaaatataatgctcctgtgggatttaatctttgcattgtacacagaatagtgtcttacagtagaaagaactcagtgtttaaagtgttaattataaaagaatgaatggataactgtatgaatgaatagaatgattatgatatgttgtaatagtgatacatataaaagtaataatcttaattactaaaaaatctacatcttgtttttaatattagcgagccatgtaaataatgagggtgatagaataccttcaggtaagcattttagaaaaaaaatgttagataagtaaagtttacataatttgattacaagttaaatttt

SEQ ID NO: 271388 - DNA, 583 bp, Homo sapiens
tgtgaacaaggcttttttttattcccattgcttaagaaaatggtgctacacagtagtttgttgataaatatgtatgaattacaggatgaattaataatagattattctcatggtcccaccatacacattcaacatttttaattctttttaaaataagttttgtttcgtgtacaataagttatttgtaaactttaactttgatgttattttggcttttagcacttttcattrtctcgttagacatttatattccacccttgatattaaatataatgctcctgtgggatttaatctttgcattgtacacagaatagtgtcttacagtagaaagaactcagtgtttaaagtgttaattataaaagaatgaatggataactgtatgaatgaatagaatgattatgatatgttgtaatagtgatacatataaaagtaataatcttaattactaaaaaatctacatcttgtttttaatattagcgagccatgtaaataatgagggtgatagaataccttcaggtaagcattttagaaaaaaaatgttagataagtaaagtttacataatttgattacaagttaaatttt

SEQ ID NO: 271389 - DNA, 628 bp, Homo sapiens
tccatattgagataatttaaaattattttgccctactctgaaaagtttaagtctgataggtaaattttatgatatggtgacaagactgtgcaaagtatttaactctaattctctgagccttggttctttgatttgtaaaatagtgataataaacccattttaaaaataggtgaaaagtatttttcattatttctggcacatagtaaatatgcaccagaagtcaggcattaatatttgaatttttaaaaagtactgcaggtaaattatctcagtgtgtttaaataataaaagtatcactaagaacccagcaaaagacaagctatatgttaaagcacaaagtactgaaagaatataactctgaaagaacaagtgtaatatcatataacacatattaattaaaatggaaatgtgtctctttttttactttctctagtttatagaatcattcctcaataatggtttctcttggtctcccaaagaaataaactttatgtgaacaattagatcataatttttctgtgcccttcctttcatcttttttttctccttttttttctttctatttttmtcatcttttcttcaggtatcacaggcattaacctataggcattctcccaagtcacttggt

SEQ ID NO: 271390 - DNA, 629 bp, Homo sapiens
  misc_feature (1)...(629): n = A,T,C or G
tatggaattatataaaatattttgattacttcatttgttaaaatgatttatacataatttcaatttattatttaataataatttattaattggggagataatacattagagacaatgaagacagaattagaaaatgttatgtggcagagggctgacaaacaaaaygcatgtaaagaatagtccttgttcttcataaagtactaactgtttctctgcatgccttgtgggatcaaaaggagagaagggtattggataagatctttgaccctccttgtgtttggacaggcctctgctttaaacttagttttttctctttttcagaagagttatctgaatttttaatatcaaatcttaccaaatagaaagcaaagaagaaagagtagttatggatttatatcatactcaattatacatggagtattgtcatgaagatttttaacccaagcaagaagagagtcatagctgtaaacgtaaagcaccgctttcctactaaaaagaaaaaatccattccttattatgagattatatgctacaaactgaacttcacattatagaatttccaatgttcaggtcttaaattagtattaatgtctaatacatgagttttgcttttttccataatacattgn

SEQ ID NO: 271391 - DNA, 554 bp, Homo sapiens
agccaccacacaatagatcagtttacaacagcatgtcttcatcgtaccacgtcaaactctatatataacctacagtaacacattttcaaagacagaatgcatttttgtacttcagagtgcactagtcaaagtatggcttaaatacttattctttctattggaaaatgacacctttgcatcctttgaataggatrttgttaatcgggttattggcctacccaattttgtctaccattagaagtaaaccgttccaccagtcctcacataggtcactggatctcttgtttgaggctgtccatccattgtggttgtgcctctttctttttctacctaatttagactctttttcagcagaatcattataattctcctgcacacttatttattttctttcactatcacctacaaagagctttcagtggtgatgcacttcagtgtccctaaaacattttgtttcctcttttcactccaaattgcctttagccaataacttgttgtagcttaaagtattctgctctaaaaggagtttaactctttttaactgtttcggcaaa

SEQ ID NO: 271392 - DNA, 600 bp, Homo sapiens
gtacttcttcaaggagttttcaaatatgtttgctccttcagatgtgagggaaaattaaaaagaaaaagcacatgtccttaagatacaaaagaaggcctaacccccgctgcagagagagcatctccgactttagtgcactgctcagaataagagggatatctctgtcacttagatagcagttatgtgtttacatttttgacactaggaattgtgggaaatctaactcattgggtggcaaaaaatagaacatatctctatagtttgtatggtagttgctacgcaatttcactccttctgcttttgcaacatcaaaacttaacaaattctgaagttttagaacaactggttcatgcaagatacccagagtttcaaaaaaattaatttttcatccattccagaattagaytagtcatcgtcaattattacctacctggcttttatgttgaagttcctatgcatttactattcatcaaattggacacttattttttagtcttttcttctatgtacatgtaagtccacacatacctacatttactgcgctgaatccttccattctctttagaaatgtgttgtctcattcatctggaagaaaatatt

SEQ ID NO: 271393 - DNA, 554 bp, Homo sapiens
taagctgggtcagaggaaataatgaaagctgaatgtggcatcaactccagttatagaataaaagccactgttttagtctttatagtgcaacagttgcragtaatacaaaatgaatttaatggagcaccaaaatgtaacaacttgaataaaatgtatttttgttgatgaaaaaaggaaacaatcttgtgggtcacaattacttgatcctgtgaattcagatccctttgaagggtacaatattgatttgtggagtgtcttgttattactgaaggctattctctttactgggatgcttttcccttgcaaaaagaaattagattatacagctgatatcattaaagcaagaggaaaattgcattaaaatgcaatgtttggagagttgaacatgaaagtcaaagagtttgcctccctcatgtaaatttctcaagcctaaaaaccagtctcagaatgaactcagatcagcttctaaagggaaatgaaacacctgacctttactttcaaagttctttttctttatttacttagaaaactataaaacatttatttttaccttc

SEQ ID NO: 271394 - DNA, 554 bp, Homo sapiens
tacttaggtacccttaaatgtggttattaaaatgtaaacaataacaagggawtaatcacaaatacatttattctctagtgcaaatataatatactgtacaaatgaccctcaattgtctgaacaaaatggtattgaagtgtttatagtgggaaggggctaataattatttggagaaataattgggaaccaagtcatgaaaatattcatataaatcaatggaagagaacactttgtacattaatttttaatacacaagaaatcagttgaactggcctctgattcaaaatgtgttcgtttgttcgtgttggcattttcaagttttgttttctgttctttcagttccttcttggaagctgggaagacagtgaatttgtctttactgggaaggaagacaaactgagcaggaacagcttctaagcaaacttttttacatacttgtaataatttccaagtgaaattactgcatcaaaatttcaaggttattttgattatttatttataaattgacttccagaagcattgatacagtcagggtttccctgggacctcaggct

SEQ ID NO: 271395 - DNA, 612 bp, Homo sapiens
tatgtgtaaaggagtgaaatataaattttaaggggcaagaacaaagcaaaggtaaacatgaaaattatacaactgatctttattttcacagaatttcttacattgcaattgagagggggaaatggcctcgctgtgattctttactgaagtgctctaatagaatggattcctgctgcgtgtttctcttaagttataaragtcactgacttcaacttccataagtgtaccttgagctttggaattctagtcaatgacatattccttttctcttcaatttttcaaggcataaaaaaataagaaaaaataatccaagctgcaacaaatcattttactagaagatctctaaaaatagattagctctcactctacagatcaagtgaatatgttcaaagcatttaaggataaataagccttcaggaattcatacctgtaaaaatattcattgtaagctgacttgaaaacttctacttaaggactcactagtattaaattaaaatctctctgtaaagcttagcatcattctaggaacagcagcatagcattgtgtctgactatttgaggaagaaaaattcaagttaattaataaccagaaccacatggatacagtagatt

SEQ ID NO: 271396 - DNA, 562 bp, Homo sapiens
agatgactttgcgctattcctctgtcctcgttagtgttcctttaatattcctctgtcttcataagcataatttattatttcagaaataccttgccaaggcaaaggttttgattgttcattatagagtcttcctgaaacacccacctactcttcaatgaaacatcagcaggcagtttttccttacgattctttgctgctcttgccttaaactcccaccttgctgtttctaccaatcctgaacggttgtggcatggtctttaacccatcctagtccagttcttacttcgaaagaccctccttaaatcaaacatccaattctccataaattctgactttatattccctagtccaagacactgtctaaattttgcaaggttctctgttctctctcactgcaataakcaaaacattcatctttgttttatctcttatcaacagtttctgttggtgatatctgcagagtaagtctttgacatgttcaatctatgttttgtattcaaaattaacttctgttagtaaaaaaagtgaagaaaagtaaactaaatgaagtaattctcaaaac

SEQ ID NO: 271397 - DNA, 587 bp, Homo sapiens
caacatggcgaaaccccatctctactgaaaatacaaaatttcggctgggctcagtggctcatgcctgtaatcccagcactttgggaggctgaggcgggtggaatcacctgaggtcgggagttcgagaccagcctgaccaacatggagaacccatccctcctgtatactgtgaaggagaactgtgtatgtaaaaacttagacatggtagatcttgtgaaaatgtaaacatgtttgttcaactaaaagttttttgttctctctgtttcctctaatctatggaggtatkaaatagtattattttaaagaggcatagaaaagtgcctagataatctgctgactttattacatcagtgttcaaccaactgctcaagtgtccctttgctgaagaaaaattgatgccacacagcagtcctaaagaaaattaccactgaaaccctccaagatatttaagaaaaatttgattttaaatgaacccaaatatgttttgacaatatacacttcatgaatggaaagagatgtttttaattaaaaaaaacagcaaaatcagaaggattaaaagagaagatatgtttatccaaaaggaatgt

SEQ ID NO: 271398 - DNA, 626 bp, Homo sapiens
atggcatatacaattatgtacagtgcataggacttggtgatgatagtaaacaactatgttattggttatgtatttactatactatgcttctaatcattatttttgaatgtatttcttctacttataacattaattactgtaaaacagcctgaggcagggccttcaggaggtgttccagaagaagagattgttatcatagaagataacagccccatgcatgttattgcccctgaagactttccactgggacaaaatatggagttaraaagaagtgatgctgatgatgtcgaccctgcagagaactgggctaacgtgtgtgtttgtgtctttgtttttaacaaaagagtttaaaaaatcaaaacaaaatgaaacaaaaattgtcgatagaaataagcttacagaataagaatttttttaaaaaagttttgtattttatacaggtgtataacgtgttgtgttataagtaaaatggtagaaaaaagtcaaaaaaattctaaaagcataaaaagtttataaagtaaaaacgttacaatcagctaagattaatttattattaaagatagaaaattttttatataaatttagtgtaacctaagtttacactgtttctaaagtctacagaagca

SEQ ID NO: 271399 - DNA, 523 bp, Homo sapiens
tcaattgtctcaacttggcttcagactgtctagataatgtactgttcaaaatggtgtctgctgataccagacaactctgactttttgttatcaaaatgcttataatcaaagtcagccaatatctgcagaggtgtgcttcagatgcactgacaggcagatccaaaactcccatttaaaggtaacctctgacctctgtatagatcaaaagttagactcagactcaaagttcttcactatcaaatgtggaaagaaggtcacgtgatgtcatttgttatttttatgtgtagaagtaatagctttcatttcatatattttgtgttattttgggtaatttatctactctttgtcatcatgaagcagaatatccctggagattgaccactatgtcttttaaatacacacacacacgaacacactcatacmcactttctcatgcccatgccgaagccaatcacataattgtttgaggcttgtgggctttgcgtttctgctggcttttgtccaacacttaaaagaggagtca

SEQ ID NO: 271400 - DNA, 523 bp, Homo sapiens
tcaattgtctcaacttggcttcagactgtctagataatgtactgttcaaaatggtgtctgctgataccagacaactctgactttttgttatcaaaatgcttataatcaaagtcagccaatatctgcagaggtgtgcttcagatgcactgacaggcagatccaaaactcccatttaaaggtaacctctgacctctgtatagatcaaaagttagactcagactcaaagttcttcactatcaaatgtggaaagaaggtcacgtgatgtcatttgttatttttatgtgtagaagtaatagctttcatttcatatattttgtgttattttgggtaatttatctactctttgtcatcatgaagcagaatatccctggagattgaccactatgtcttttaaatacacacacacacgaacacactcatacccactttctcatgcccatgccgaagccaatcacmtaattgtttgaggcttgtgggctttgcgtttctgctggcttttgtccaacacttaaaagaggagtca

SEQ ID NO: 271401 - DNA, 602 bp, Homo sapiens
ctgactgtgtagtttttataatattggcatttttgtaatctgtgaactactagtagtacactttaagaagttatttttacccaggtttagtgtccaaatgactcttctaacacatatttaagtgtgtgtgtgtatatttttctgtgattgtgtgtctgtgcgtttgtaagtctgcatgcctttgtatgtgtctatatgagctgggattcttcctttacataaacttatagttaaggaccttgctgtcatagtttttaggcaacttgttggcaaacactttattacacttccaaaatggtcattgtttaaagaagagaacactgtgtagcgaatcacatctgctaccgcaagacaacttccaaaatcggaactgcccttgacagttcttctgagaattatctcttaggatgagctaggagataatttctatggagtccaaacgaaagagaatttgcaaaaagctctttcaaagaacaaagactgatggtttggaacaactgtttgtctcttttttkttgttgttgttgttgttttaattgccttatacaacagcgtgtgttaaagttattggaaaacatgcaataaattaatagatatattat

SEQ ID NO: 271402 - DNA, 601 bp, Homo sapiens
ttaagatgtccttcagtattcagtaggtgaatggataaactgtgatatagccagataatgagacattacccagcattaagaagaaatgagctatcaaagcatgaaaagacatagaggaaactaaaatgcatatttctaagtgaaagaagccaacatgaaaaggctacatactatatgattccaactgcatgacattctggaaaaggcaaaactataaagacagtagtaaaaagatcactggttgccagggactagaggagaggaaggaatgaataggcagaagaaagatttttaagactgaaaatgttctgtatgatactataatgtgaatacattcaacatatatttctccaaactcataaacgtacagtaacaagagtgaaccctagtgtaaactattgactataggtgacaatgatgtgtcaatgtaggttcatcaattttaacaaatgtaccgctttggcraaggatgttaatagtgggagaggttatgagtgtgtgaaggcagtgagtacacgggaaatcttagcactttctgcttatttttgctataaacttaaaattgctaaaataaaaaagtttactttaaaatgtttgattt

SEQ ID NO: 271403 - DNA, 576 bp, Homo sapiens
aagcaggaaccagaatatcgaaacaaaggaccagagggggcccaaagacagaggctggctaagggctggccctatttgaggactgtggggaaggcaaggcagctttgccagtggggccaagccttgggaaggggctggggcacaggctgagtatgggaggcagagagaacactccagtgggcagataagcttgagctaggcctgagagaatcccagagagggcacgctgaacccagaggtcttaggaaccatggagaactggaagagtcataaaggagggatgaagttgtccagagcctcagagagaatggggaactgctcagaggtctagatcaaagcctccaagacaaattcatcccttgtgtgaactccccaaagctggacaacatcacctggactggcccacctgtttggtgcatgagggctcacatagaaaatgacagtgttaataccacttgctgggtacatggatagggctgcatagcatgttctagaacagcaccatccaatagcactgcctgtgttgatggaaatgtcacacagtggcrctgtccaatccagtagccactagcccca

SEQ ID NO: 271404 - DNA, 618 bp, Homo sapiens
aacaacactcatctcctctactcccttgcagctcatgcatgaaagcaaacaggtccctttggggctcgcaggaagagagagaatctgggagtaagggctgcttggcttggtttaatgaggccatgtcatgtagtctgagatctcaaggctaactagagagggtggcaagccagtggttctgtgaagagccagtaatgaggacacagagagccaggggtggggtaggggaagcctgatgtggcccttccaaattagtgctgaggctcaacaggcagccatggtgcatcactgatggagggaggagaggacagagcacctagaaaggcgtggtgctagtggggcagaggggaggctggaggctggaggaattatgcagatacaagaggtggtatttgttgacaactccaggaaggcaaggatttcttgtatagacaccagcaccaatgtcttcctcttacacaaacacacattcaccctgtctctcacacacatacctactaaatagcaaatacttcaggctcacttcatctaacctgtgggtgtctgttagtcaggggaggcaaytgctgttgcaaataattgccataatggaaagcctcaagcagaatcaaatttgat

SEQ ID NO: 271405 - DNA, 550 bp, Homo sapiens
tcacacagtgagttcatgaccaggtcagggtagaagccaaggccacctgcctcctggcagtggtatttgggatccatgaccctgtcttcactctgcctagggcttttctgtgtccaaaggctgtcccatgtttgttccttaagaaagtggctcagggtgggatggrgggatgcctgctcttggtttcttgaggagggtccatccttggaaattacagggtggaatgggaggggtgcatagactcctttccatctagggataacccctccctgccagacagtggcaagagaaggggaagaggagatgtgcccacggagaacctgctgtagacagattggaatgactttccccggcatccctgtcccatgtctactcatcagcaattcactacctctccctcagtctctccaactcattctttcctctcccaactccttccatagacctctattttctctcttttgttcttccttcttccacttgccaaccacgcagcctacaaagcatacaggcaagaccattctggaccaaaaagttccaatggcctcag

SEQ ID NO: 271406 - DNA, 574 bp, Homo sapiens
ataattgtcagccaggctaggcaacagtcactgtctcaggattcccccttcccaaatgcaaagtaacttttctttaaaagtctgtgagtattgatttttcataagtacagcctgagtacttctgtatcttctgttctcagtgtgcctgcagtgaaggtctcagggcttcagcaagctgggtggggcttyctctgttcttacaaccagtgggatttctgcaaactgctgccagaaaaatagacacacttattcaaaagaagagactattggcaggcagcactcaaaacctgcatacaccgttttaaagatcccacctagattatcaaacctagcctttccatgtgatgcagttggcagcaagaagaatttgttgtgacaaggaggcttctcacaggtaaatacctgaggtttctacctttgcataatagaatcaggcccatccaggttactgccccaatatctaaaaggaaccctgtcactttcacagtttaaaaatatctatttgtgctttcagcccttaaaccaaaggttgtagcttccatcatctcaattaaggttctgtacctcacagtca

SEQ ID NO: 271407 - DNA, 574 bp, Homo sapiens
ataattgtcagccaggctaggcaacagtcactgtctcaggattcccccttcccaaatgcaaagtaacttttctttaaaagtctgtgagtattgatttttcataagtacagcctgagtacttctgtatcttctgttctcagtgtgcctgcagtgaaggtctcagggcttcagcaagctgggtggggctttctctgttcttacaaccagtgggatttctgcaaactgctgccagaaaaatagacacacttattcaaaagaagagactattggcaggcagcactcaaaacctgcatacaccgttttaaagatcccacctagattatcaaamctagcctttccatgtgatgcagttggcagcaagaagaatttgttgtgacaaggaggcttctcacaggtaaatacctgaggtttctacctttgcataatagaatcaggcccatccaggttactgccccaatatctaaaaggaaccctgtcactttcacagtttaaaaatatctatttgtgctttcagcccttaaaccaaaggttgtagcttccatcatctcaattaaggttctgtacctcacagtca

SEQ ID NO: 271408 - DNA, 544 bp, Homo sapiens
gatttttcataagtacagcctgagtacttctgtatcttctgttctcagtgtgcctgcagtgaaggtctcagggcttcagcaagctgggtggggctttctctgttcttacaaccagtgggatttctgcaaactgctgccagaaaaatagacacacttattcaaaagaagagactattggcaggcagcactcaaaacctgcatacaccgttttaaagatcccacctagattatcaaacctagcctttccatgtgatgcagttggcagcaagaagaatttgttgtgacaaggaggcttctcacaggtaaatacctgaggtttctacctttgcataatagaatcaggcccatccaggttactsccccaatatctaaaaggaaccctgtcactttcacagtttaaaaatatctatttgtgctttcagcccttaaaccaaaggttgtagcttccatcatctcaattaaggttctgtacctcacagtcagtcaatgtttacaaggctcgtggtttcccttccctgaagcttctatcagagagaaattggca

SEQ ID NO: 271409 - DNA, 611 bp, Homo sapiens
ctttctaccccaaaccaaagatgaaggggctcagacaagagtgcctgattccagggctcaacagtgagggttccttccctgcctgcattcagctttgtctgcagaatggtggaaaagaaacaaaactggagacatttatatgtagaggtatacaaagtcagcagcactgtcagaaagattctatagcatctcaacattccaaacatttctttagcatggatgaccatttcttcyattctttatcaaaagtctaatttcttcacattacaaaagtttccaaactgaggatcaaagttgtttatttggcttagtttttatagtgcttatgggacagaagtaggtctcaaactttaaatcttctgaccccagaactggagttcccttcacaccacatccccgcactcatgcattacagtgatggctggctcccacagcaggaaaaagggcaaaacatgaggctgagaaggcagcccagagctaggaaagacaatgtccatgcaagtgggaggagagtcaggcctgggagaggtagacaaagggcacaggaccctggagagttgagacggggctgaagatagcagctctgccagaattctccatggacaggaggc

SEQ ID NO: 271410 - DNA, 611 bp, Homo sapiens
ctttctaccccaaaccaaagatgaaggggctcagacaagagtgcctgattccagggctcaacagtgagggttccttccctgcctgcattcagctttgtctgcagaatggtggaaaagaaacaaaactggagacatttatatgtagaggtatacaaagtcagcagcactgtcagaaagattctatagcatctcaacattccaaacatttctttagcatggatgaccatttcttccattctttatcaaaagtctaatttcttcacattacaaaagtttccaaactgaggatcaaagttgtttatttggcttagtttttatagtgcttatgggacagaagtaggtctcaaactttaaatcttctgaccccagaactggagttcccttcacaccacatccccgcactcatgcattacagtgatggctggctcccacagcaggaaaaagggcaaaacatgaggctgagaaggcagcccagagctaggaaagacartgtccatgcaagtgggaggagagtcaggcctgggagaggtagacaaagggcacaggaccctggagagttgagacggggctgaagatagcagctctgccagaattctccatggacaggaggc

SEQ ID NO: 271411 - DNA, 429 bp, Homo sapiens
tggtcaaacacataggctcagtgctggtgcccaggctgcagctggcttgctatggagcaagggtcctctgccccatctcagagactttggggccatactgacccctggaggctcctcctgcacatatggggtgcactgtggctgtttactcatgaagccctagtctccgacaaccataagagtgagtgtggctggggctgtctcttcaggaccacccttgggatggttgaggtcattgtccttgaagacccagaaaagcacagggttttctagcatcattttcttgttttaagaaacagaagctggaaccaaaagagtgtttgtgatggaatagcaamctccaaatgataatttcacttggaaccttagaatatgaccttatttggaataaggatctcaaaatgaaatcattatgggctgggtgcagtg

SEQ ID NO: 271412 - DNA, 260 bp, Homo sapiens
tgaaatactgaaactaggagcaggggagattagtcaggagctattgcagcagtccaggggagagataaagagcctccaaattagcattctggttgcagaggtagagagatatccaagggcagctctgtttgtagayaaaatactattatataacttaggacaaggtatgactttgagtgacagaaaatccaaactgtacaatagaagtttattttcctcttatataaactctaactaggtggtccaagctccttgcacct

SEQ ID NO: 271413 - DNA, 531 bp, Homo sapiens
ctggctcaaaaaattatttgctatgcgaaggaatgaaatcatttggtataattgttggacatgcagtgtgtataatttcttttttttagtttttattttatttttttagagtcagggtctcactctatcacccaggctggagtgcaatggtgtgatcatggctcactgcagccttgaactccttggctcaagcaatcctcccacttcagcctccatagtagctgggactgcaggtgtgactaccaygcccgactaatgttttttatttttttgtagagactaatccttgctatgttgaccaggctggtcttgaactcctggcctcaagccatcttcccacctcagcctcccaaattgctggaattacaggcatgaaccactgcgcccagcccagtgtgtaaaatttctaatgtcacttttcagctcaaaatgctgtttccagatgcttggtatatagtgtatgcttcctgattgcctggctggttgattaaataaatgaatgaatcaaatgttacattacaatgatggaaa

SEQ ID NO: 271414 - DNA, 531 bp, Homo sapiens
ctggctcaaaaaattatttgctatgcgaaggaatgaaatcatttggtataattgttggacatgcagtgtgtataatttcttttttttagtttttattttatttttttagagtcagggtctcactctatcacccaggctggagtgcaatggtgtgatcatggctcactgcagccttgaactccttggctcaagcaatcctcccacttcagcctccatagtagctgggactgcaggtgtgactaccacgcccgactaatgttttttatttttttgtagagactaatccttgctatgttgaccaggytggtcttgaactcctggcctcaagccatcttcccacctcagcctcccaaattgctggaattacaggcatgaaccactgcgcccagcccagtgtgtaaaatttctaatgtcacttttcagctcaaaatgctgtttccagatgcttggtatatagtgtatgcttcctgattgcctggctggttgattaaataaatgaatgaatcaaatgttacattacaatgatggaaa

SEQ ID NO: 271415 - DNA, 622 bp, Homo sapiens
tctatacttgacacatcataatttactgtaaaaagacagtgtttgcaatttactaaggagttatgtgtcacacacaacctctccaagcttcttactctatttggtcaccccttgggtagagagaccaggggaacacatcgtccctcacaattgaagttcctctggcctattactcttatgacttctccatcatagactttgttcactttgttgaaaatgtggtggccaaggtaaagaaacaatttccttggattcttgggggaaatgagaatgagacagtgagatccaaagggcacccttcagtgccctccaacctgcctgcctagtccagggacctggctttccttcttagggaaggtagagatctttagccaagtttacaaaccagaaakactttttgttatgttggtctcatgagttcttggaaaccacgtatgaaataaactaaaacatttgttgtagcatcttttaatccagtgtatcagttaggataaggtaaagttgctgtaacaaagagtctgaaaagagaatggcttaaataagacggaagtgtattttcctctcacagagcagtctagttggtgccagctggtggggtcagttgtgctggacagtcattcag

SEQ ID NO: 271416 - DNA, 568 bp, Homo sapiens
ccagtgtatcagttaggataaggtaaagttgctgtaacaaagagtctgaaaagagaatggcttaaataagacggaagtgtattttcctctcacagagcagtctagttggtgccagctggtggggtcagttgtgctggacagtcattcagacccaggattcttctatcttatggttcaaaccccttgggtgctgggctcatctgtgttgttggggctgggtggctggcaactacccarctcctgggaattggaaagagaagccaagaagaacagtttttgtttaaagcaagggatgaagaagttgcgttcatcactgctgcacactttccttgggagaacacaaggtcacattgtcattctaggagaggctggtaccatttgcccaagcaaccctggaggagggatggggtctgttagcatggaaggaagggtgattagtgattctgctctatctcactgctggggaaatggagaaagctgagactttatgttgctctggactatcacccgtcaacatagccaggatatagaaaccaacgtgtagagtgcagtggacagccctagactg

SEQ ID NO: 271417 - DNA, 568 bp, Homo sapiens
ccagtgtatcagttaggataaggtaaagttgctgtaacaaagagtctgaaaagagaatggcttaaataagacggaagtgtattttcctctcacagagcagtctagttggtgccagctggtggggtcagttgtgctggacagtcattcagacccaggattcttctatcttatggttcaaaccccttgggtgctgggctcatctgtgttgttggggctgggtggctggcaactacccaactcctgggaattggaaagagaagccaagaagaacagtttttgtttaaagcaagggatgaagaagttgcgttcatcactgctgcacactttccttgggagaacacaaggtcacattgycattctaggagaggctggtaccatttgcccaagcaaccctggaggagggatggggtctgttagcatggaaggaagggtgattagtgattctgctctatctcactgctggggaaatggagaaagctgagactttatgttgctctggactatcacccgtcaacatagccaggatatagaaaccaacgtgtagagtgcagtggacagccctagactg

SEQ ID NO: 271418 - DNA, 537 bp, Homo sapiens
tgtctttaaatacattatcttacacttgcccacaccaaatctcatctgtcacttctctgcccactcgtacacacccttgtgggattctgtagcgtatccccattggcttgacatttcattccctcaaaaaacttagtgccatttgcacatccccagctttcactgcgtaamtcccttttccagatgatttattaacatttcaaatgaggcggcctcatcctaaccatgggacacttctgttgctcattctccacccagagaagtgcccagcaagttctctgaccctctacccattccttacccaggcacaggtccgctgagatgccctcctgccatccccccaagcccatcataaccctgaaagaatctgccataaagccccactaactgccgaattccccaaggaatctctgtactccagggctcaggggtcccgccttttgttacagatgcatccagctcttattgcacagtcaggaatggaaactcattagcccaggggtcttgagttccttctaagattactcattgggtggc

SEQ ID NO: 271419 - DNA, 545 bp, Homo sapiens
aaagtgaggtctgagaggtgaaataacttgccagagtcaggcagcgagtaagtggctgatgagttgtcacagactctttcttctcaaccaccctggtgccttctgggctttggcggaggaagggagagttccaagaacggggagaggccaagggaacagagggacagtggctgcagcagggacagggagctggcagtggcgtgggcacagccccttagggcgccctagtcatgtccgggagtccttggcaggcctgcaccacccgggagcccattactgtcacttatctgcctgtactctgagttcctctgaagtcctcctccactccagcctgagccatcccaaagaaagctggcctggccaggagggggaggcagggcctggggtggagctgagatgggcagggcgagggcggaggggtgtgcagaaggagggcgcagtgggggargctgctgaggctgctggagggagctaagcgctgacttcagaggagctggcagatgttgccatggcaaccacagactagggacatctttgaaaaagaa

SEQ ID NO: 271420 - DNA, 545 bp, Homo sapiens
aaagtgaggtctgagaggtgaaataacttgccagagtcaggcagcgagtaagtggctgatgagttgtcacagactctttcttctcaaccaccctggtgccttctgggctttggcggaggaagggagagttccaagaacggggagaggccaagggaacagagggacagtggctgcagcagggacagggagctggcagtggcgtgggcacagccccttagggcgccctagtcatgtccgggagtccttggcaggcctgcaccacccgggagcccattactgtcacttatctgcctgtactctgagttcctctgaagtcctcctccactccagcctgagccatcccaaagaaagctggcctggccaggagggggaggcagggcctggggtggagctgagatgggcagggcgagggcggaggggtgtgcagaaggagggcgcagtgggggaagctgctgaggctgctggagggagctragcgctgacttcagaggagctggcagatgttgccatggcaaccacagactagggacatctttgaaaaagaa

SEQ ID NO: 271421 - DNA, 577 bp, Homo sapiens
agcaagcacagtttccttctttagttgggaggggtaacagggaagtcaggctaggggctcagaagtataaccaaagcaaccaactcttccttgacacgcagcattgtgctcttcctctgtggggtgactatcacagcctcttggttgttccctaatacmcattttcctgttcttccctagtaagaatccccaattgcacatggtgaatatagttaataatagagtattgtacatttcaaaattgctaagagagcgcacttcaaatgttctcactacaaaagtgttaagtatttgaggtgatggatatgttaactaagttgacataattattccacaatgtgtttataaatcaaaacattcctttgtaccccataaatatatacaaattgtaaatttacaacaaaatatacaaattttaaaaagagaaaagaagtcccaagtgttatttggccaaaaggccacccccaaataaagactgtatttcccagcctcccttgtactcagttgcagccatgtgacttagttctaaccaaagggttgtgagtaaatgtctactatgtgatgacccacaagtatc

SEQ ID NO: 271422 - DNA, 507 bp, Homo sapiens
tggtgaatatagttaataatagagtattgtacatttmaaaattgctaagagagcgcacttcaaatgttctcactacaaaagtgttaagtatttgaggtgatggatatgttaactaagttgacataattattccacaatgtgtttataaatcaaaacattcctttgtaccccataaatatatacaaattgtaaatttacaacaaaatatacaaattttaaaaagagaaaagaagtcccaagtgttatttggccaaaaggccacccccaaataaagactgtatttcccagcctcccttgtactcagttgcagccatgtgacttagttctaaccaaagggttgtgagtaaatgtctactatgtgatgacccacaagtatccttagagaaaggtcatgcctgtctttgctccttcctgctttctactgattggaatgtagatggggtgggtagagcttgagcagtcatcttggaccataaggtggtggccaggtttgagaatgcaaaacaa

SEQ ID NO: 271423 - DNA, 577 bp, Homo sapiens
agcaagcacagtttccttctttagttgggaggggtaacagggaagtcaggctaggggctcagaagtataaccaaagcaaccaactcttccttgacacgcagcattgtgctcttcctctgtggggtgactatcacagcctcttggttgttccctaatacacattttcctgttcttccctagtaagaatccccaattgcacatggtgaatatagttaataatagagtattgtacatttcaaaattgctaagagagcgcacttcaaatgttctcactacaaaagtgttaagtatttgaggtgatggatatgttaactaasttgacataattattccacaatgtgtttataaatcaaaacattcctttgtaccccataaatatatacaaattgtaaatttacaacaaaatatacaaattttaaaaagagaaaagaagtcccaagtgttatttggccaaaaggccacccccaaataaagactgtatttcccagcctcccttgtactcagttgcagccatgtgacttagttctaaccaaagggttgtgagtaaatgtctactatgtgatgacccacaagtatc

SEQ ID NO: 271424 - DNA, 595 bp, Homo sapiens
acatacacacaaacacacacataagcacatctatttatcttctatatgctgtcgatgtataagccagaaattttttgaaaggtttctcttagagctgtaactgggaatctaggacataaaaaagacgtcctttttattatacacacttttgcactgttcccattttttaaatttaaatctattgcttttataataagaagaaactatttgtaaagtaaataactgaaataaaatgtatacctcttgactgtttcccytcctctttattctcatggtttctgccttggagtcatgctttcctctcacttggcttatcacagtagctttctgtcactcctcaatatgcaatgcctgtgcatctctgagactactttgcaccactctaccaaacacatcatgatctcatggcctcacctgcccctcagaccaccagctgtttgctccacctcagttgtcacctcagcagaacatttccatgcagccatgtggattccatgtggggtctggcataagcccccacaccaccttgtggcatgagatctggcttcaagagcagacccttaaggggccaatgacacaacctggaagtgcaggg

SEQ ID NO: 271425 - DNA, 404 bp, Homo sapiens
tctgagactactttgcaccactctaccaaacacatcatgatctcatggcctcacctgcccctcagaccaccagctgtttgctccacctcrgttgtcacctcagcagaacatttccatgcagccatgtggattccatgtggggtctggcataagcccccacaccaccttgtggcatgagatctggcttcaagagcagacccttaaggggccaatgacacaacctggaagtgcaggggagttaactccttatggggtactagccaatggaaatatcctaaaatggagataaaagtattacatattccccccagggctctcaaacaagctagcaattatcccagctttattcactctaaaggactgtgcaaacctgaggatttaccatgcagcagcagcagtatcac

SEQ ID NO: 271426 - DNA, 404 bp, Homo sapiens
tctgagactactttgcaccactctaccaaacacatcatgatctcatggcctcacctgcccctcagaccaccagctgtttgctccacctcagttgtcacctcagcagaacatttccatgcagccatgtggattccatgtggggtctggcataagcccccacaccaccttgtggcatgagatctggcttcaagagcagacccttaaggggccaatgacacaacctggaagtgcaggggmgttaactccttatggggtactagccaatggaaatatcctaaaatggagataaaagtattacatattccccccagggctctcaaacaagctagcaattatcccagctttattcactctaaaggactgtgcaaacctgaggatttaccatgcagcagcagcagtatcac

SEQ ID NO: 271427 - DNA, 404 bp, Homo sapiens
tctgagactactttgcaccactctaccaaacacatcatgatctcatggcctcacctgcccctcagaccaccagctgtttgctccacctcagttgtcacctcagcagaacatttccatgcagccatgtggattccatgtggggtctggcataagcccccacaccaccttgtggcatgagatctggcttcaagagcagacccttaaggggccaatgacacaacctggaagtgcaggggagttaactccttatggggtactagccaatggaaatatcctaaaatggagataaaagtattacatattccccccagggctctcaaacaagcyagcaattatcccagctttattcactctaaaggactgtgcaaacctgaggatttaccatgcagcagcagcagtatcac

SEQ ID NO: 271428 - DNA, 590 bp, Homo sapiens
tggagagggccatgcagctgggagtggtaggcagcccctaggaagaaggagagacccgcaggttgacagcctgcaagagagaaggggcctcagttctacaacttcaaggaactgaattctgccaacttagaagtagatattcccctagaatcaagcctacagataagaattccttgacttcagctgtgtgagaccctgagcaaagaagtcacagaaactgcaaggcagtaaacctgtgttgctttaagccaagttcctgctaattcattatgcaataacaaaaaactaacacatacccagaagtgtgaattcatttcagactgaaagaaggaggcagaaaactgcttrgaaagccagaggagaaggacaatgaactcctaggaaatgaatctaggaaagagagactgagagaaactagacccaggtatgtcgatgacatgtgtttcctaagcctgaagtagcctactctgtagctagcctgagtacttagggtcactgatctctttgaatcttgtgctcttgtgtgtggccaaggccacaaaataatgatcgtgctgctgctgcgtggcaatgccttgtgtttgcacagc

SEQ ID NO: 271429 - DNA, 585 bp, Homo sapiens
gggacagtaagaaagacaaggagaaggaggtcacctggtattgcagctggctcagcgatgcagaagccaatgggtccagcctgagtgagaatgttagaaagacactgtgcaggcccagkatggagtcaggtggggagatggaaataaagaagttcatggtcaatggccagctgcatgtgaccagtcaccggaggttctgcttcaagcagaggcagagcaggagacccggaaaggctcagaggctcctgcctgaggggtgaggcctgggcaaacctcgaggagagagccaggtgctccagcagctcccagggtgagtggggggccggttctgtccacagggagccccagtctgaggggagacacagccctgcctcagggagccccactctgagggagacacagccccgtcctcagggagccccagtctgaatgggaataaataatccctactttctaggtacttctagtctgagagaagagtcaaagtcactgccttcctggaaccgaacccagaacatgtattacacacatgttaactattccccaaggtcacagtgtgacttaacagaatgacagcaaatgaag

SEQ ID NO: 271430 - DNA, 585 bp, Homo sapiens
gggacagtaagaaagacaaggagaaggaggtcacctggtattgcagctggctcagcgatgcagaagccaatgggtccagcctgagtgagaatgttagaaagacactgtgcaggcccagtatggagtcaggtggggagatggaaataaagaagttcatggtcaatkgccagctgcatgtgaccagtcaccggaggttctgcttcaagcagaggcagagcaggagacccggaaaggctcagaggctcctgcctgaggggtgaggcctgggcaaacctcgaggagagagccaggtgctccagcagctcccagggtgagtggggggccggttctgtccacagggagccccagtctgaggggagacacagccctgcctcagggagccccactctgagggagacacagccccgtcctcagggagccccagtctgaatgggaataaataatccctactttctaggtacttctagtctgagagaagagtcaaagtcactgccttcctggaaccgaacccagaacatgtattacacacatgttaactattccccaaggtcacagtgtgacttaacagaatgacagcaaatgaag

SEQ ID NO: 271431 - DNA, 585 bp, Homo sapiens
gggacagtaagaaagacaaggagaaggaggtcacctggtattgcagctggctcagcgatgcagaagccaatgggtccagcctgagtgagaatgttagaaagacactgtgcaggcccagtatggagtcaggtggggagatggaaataaagaagttcatggtcaatggccagctgcatgtgaccagtcaccggaggttctgcttcaagcagaggcagagcaggagacccggaaaggctcagaggctcctgcctgaggggtgaggcctgggcaaacctcgaggagagagccaggtgctccagcagctcccagggtgagtggggggccggttctgtccacagggagccccagtctgaggggrgacacagccctgcctcagggagccccactctgagggagacacagccccgtcctcagggagccccagtctgaatgggaataaataatccctactttctaggtacttctagtctgagagaagagtcaaagtcactgccttcctggaaccgaacccagaacatgtattacacacatgttaactattccccaaggtcacagtgtgacttaacagaatgacagcaaatgaag

SEQ ID NO: 271432 - DNA, 420 bp, Homo sapiens
ccagtgcctggattcccacctcctggctttatcccctccatgaaggagccccatggaggagggcgacgctccctccctgacactgttgcctccaccaaacacttgggctgcgactttcccaagtccttgcctggcagctgcatctgccatgcctcccaagycagggagcaaacacagggcctcccaacgagtgatcctcacctgtcaccaggtaaggcctaacgctggggagatgagcacagaggcagcctgctggggctcagctttctttggcctaatttcctgtcatctctgccattgctcagccaggcctttactaacacttcctccacatgaactctgaacaatagtttcatggggggttggaggggggacccattctgctgcaagtattgaagccaagatgcctccctgccagcc

SEQ ID NO: 271433 - DNA, 568 bp, Homo sapiens
caccacaaaaatcaaagtcaaaggcaacatggcatggaaagtcaaaaggcagaatggctcacgcctgtaattccaacactttgggaggctgaggtgggtagatcacctgaggtcaggagttcaagagcatcctggccaacatggtgaaacccccyctctactaaaaatacaaaaaaaaaattagctgggcgtggtggcaggtgccggtaatcccagctactcaggaggccgagacaggagaatcacttgaacctgggaggcaaaggttgcaggaagccaagatcatgccattgcactccaacctgggcaacaagagtgaaactccatctcaaaaaaaaaagagagagagagagagagaattagcccctaggagtcaataaatgtaagctgacttggagagaacagaattgagcacatcactaagaaagagtcatgggagtggaagaaacagatagatcgattataaggagctgagctttgccttgagttctcaaaatgtgtaagacttgtctagcaagaaaagagagaggtattccagggagagttgcagtaagtcattgatagcccc

SEQ ID NO: 271434 - DNA, 568 bp, Homo sapiens
caccacaaaaatcaaagtcaaaggcaacatggcatggaaagtcaaaaggcagaatggctcacgcctgtaattccaacactttgggaggctgaggtgggtagatcacctgaggtcaggagttcaagagcatcctggccaacatggtgaaaccccctctctactaaaaatacaaaaaaaaaattagctgggcgtggtggcaggtgccggtaatcccagctactcaggaggccgagacaggagaatcacttgaacctgggaggcaaaggttgcaggaagccaagatcatgccattgcactccaacctgggcaacaagagtgaaactccatctcaaaaaaaaaagagagagagasagagagaattagcccctaggagtcaataaatgtaagctgacttggagagaacagaattgagcacatcactaagaaagagtcatgggagtggaagaaacagatagatcgattataaggagctgagctttgccttgagttctcaaaatgtgtaagacttgtctagcaagaaaagagagaggtattccagggagagttgcagtaagtcattgatagcccc

SEQ ID NO: 271435 - DNA, 529 bp, Homo sapiens
tgccatgttggaagaagagaatggcctcacctcaccagacaccaaacctgccaatgccatgactttagccttcccagcctccagagctatgagccaatacatttctgttctttataaattcctaagtcttagatgttctgtattattctgcattattgaacaactgtgttgttcagcacaaatgggactatggcagmcgccatcttgagaggacagtatagagcagtgagatgtgacagaggccaatgaggacagaccggacataagagggttttctgagaattaacctaaatcaaagattcaaaatgtgctcctagggccggatgcagtgggtcacgcctataatcccagcactttgggaggccgagtcgggcagatcacctgaggtcaggagttcgagaccagcctgggccttggcatggcaaaaccccatctctactaaaaatacaaaaattagccaagcatggtggtgcacacctgtagtcccagctactcggaaggctgaggcaggaggatcacttgaacccac

SEQ ID NO: 271436 - DNA, 529 bp, Homo sapiens
tgccatgttggaagaagagaatggcctcacctcaccagacaccaaacctgccaatgccatgactttagccttcccagcctccagagctatgagccaatacatttctgttctttataaattcctaagtcttagatgttctgtattattctgcattattgaacaactgtgttgttcagcacaaatgggactatggcagccgccatcttgagaggacagtatagagcagtgagatgtgacagaggccaatgaggacagaccggacataagagggttttctgagaattaacctaaatcaaagattcaaaatgtgctcctagggccggatgcagtgggtcacgcctataatcccagcactttgggaggcygagtcgggcagatcacctgaggtcaggagttcgagaccagcctgggccttggcatggcaaaaccccatctctactaaaaatacaaaaattagccaagcatggtggtgcacacctgtagtcccagctactcggaaggctgaggcaggaggatcacttgaacccac

SEQ ID NO: 271437 - DNA, 541 bp, Homo sapiens
ggggactcagggggaaagggtgggaagggtgggaagggggtgagggataaaagaccacaaattgggttcagtgtatactacttgggtgataggtggaccaaaatctcacaaatcatcacaaaagaacttactcatgtaaccaaawgccacctgttcctcaataacctacagaaataaaaaataaaaaaatcggttggctgtaaatttgtgaatttatttctgggctctctattctgtttcactgatctatgtgtctgtttttatcctagtactatgatgggtttttttaaaaatccatgctgtttgattactataactttgtagtatattttgaagtcaggtagtgcgatgcctccagttttgttccttttgctcaagcttggtttggctattcaggatcttttgtagttccatacaaattttagaattgttttttctatctctgtgaaaaatatcactgatattttgatagagattgcactgaatctgcagatcactttgtgtagtatagacatttcaacaacattaattattccaatcc

SEQ ID NO: 271438 - DNA, 541 bp, Homo sapiens
ggggactcagggggaaagggtgggaagggtgggaagggggtgagggataaaagaccacaaattgggttcagtgtatactacttgggtgataggtggaccaaaatctcacaaatcatcacaaaagaacttactcatgtaaccaaatgccacctgttcctcaataacctacagaaataaaaaataaaaaaatcggttggctgtaaatttgtgaatttatttctgggctctctattctgtttcaytgatctatgtgtctgtttttatcctagtactatgatgggtttttttaaaaatccatgctgtttgattactataactttgtagtatattttgaagtcaggtagtgcgatgcctccagttttgttccttttgctcaagcttggtttggctattcaggatcttttgtagttccatacaaattttagaattgttttttctatctctgtgaaaaatatcactgatattttgatagagattgcactgaatctgcagatcactttgtgtagtatagacatttcaacaacattaattattccaatcc

SEQ ID NO: 271439 - DNA, 541 bp, Homo sapiens
gcttggtttggctattcaggatcttttgtagttccatacaaattttagaattgttttttctatctctgtgaaaaatatcactgatattttgatagagattgcactgaatctgcagatcactttgtgtagtatagacatttcaacaacattaattattccaatccatgcacatagggcatctttccatttatttgtgccttccttaatttgtttcatcaatgttttatattgttcagcatataacaggccttttttctctttggttaaatttatccctaagtaygacattttattttttgtagctatcataaatggtattgttttcttgatttcttttttgtacagtttattgttagtatatggaagtgctatttatttttgtatgttggttttatatcctgcaactttactatatttattagttacatcagttttttttttttttggtggcgtctttaaaggtttctatgtataaggtcatcttgtccacaaacaaggacagtttaaattcttcttaaatttaggtgtcatttatttattt

SEQ ID NO: 271440 - DNA, 677 bp, Homo sapiens
gaaaaatattaaaaagagagaagaatcctctgggttcattttactctgcaaagaaaaaagtcaatttcctctgagcatatcaagtcagtaaatacagttactaccatgggtgggtacttactgggaacaaacacctgtatggaaaatgtgagtgagaaagtatttatttcagggctcctggcagggaggggtaggcrttataaatgacctaattggaacacctggtgagctcatggaagattaaaaatcatcagcaatgtccccccaccatgacccaaatgaattcatgcaaacgcattgatattaaaatgcagctcttaatgaaagtgctttctatgaaagagagggtgacattattatttacaacacaggcacttttaatatctaaagaagaatctcatttgctctagccttaattatgtcagactgcagtacacacagcaaaaagaatgcaattgtactccctaacaattagagaagggaaccatgtcttaataacaaaggatgtttggttaccaggacattgcaaccactgttcataagcaactcaacaaattgaattatatgtgctctggccctcaccaaaatgagtggtttgttaattgtcctcctcaagtggcttttagggtttcaaagaggtttttaagcagctgttagccttgaggagaaaaaaaaaa

SEQ ID NO: 271441 - DNA, 677 bp, Homo sapiens
gaaaaatattaaaaagagagaagaatcctctgggttcattttactctgcaaagaaaaaagtcaatttcctctgagcatatcaagtcagtaaatacagttactaccatgggtgggtacttactgggaacaaacacctgtatggaaaatgtgagtgagaaagtatttatttcagggctcctggcagggaggggtaggcattataaatgacctaattggaacacctggtgagctcatggaagattaaaaatcatcakcaatgtccccccaccatgacccaaatgaattcatgcaaacgcattgatattaaaatgcagctcttaatgaaagtgctttctatgaaagagagggtgacattattatttacaacacaggcacttttaatatctaaagaagaatctcatttgctctagccttaattatgtcagactgcagtacacacagcaaaaagaatgcaattgtactccctaacaattagagaagggaaccatgtcttaataacaaaggatgtttggttaccaggacattgcaaccactgttcataagcaactcaacaaattgaattatatgtgctctggccctcaccaaaatgagtggtttgttaattgtcctcctcaagtggcttttagggtttcaaagaggtttttaagcagctgttagccttgaggagaaaaaaaaaa

SEQ ID NO: 271442 - DNA, 527 bp, Homo sapiens
ggctggaggccaccttcagttccttggcacatggcactttctaacatggtggctcacaacatggaaacttgcttcatcaaagcagyaagggacagaaacttctagcaagacaaaactcacatcttgtgtagtttcatcacagaagtagcatccaattactttgaccatattctgttggttagaatcaagccaccagggcaatacacacttaggggagaggattacacaagtgcacaaagaccaggaggtgggaatcactggggccatatcgagtctacctgccacagcaattgaagagcaaagctgggatgtgaagccagtttcatccaagtctgaagctcccaacagttaaccattaagctccactgccttccacagaaattaatctgattactttttagaaatattaatctggttattccaacatggactgcagtgtttatctcaatgggttacccttttaaatctgttctctcaagtgagaactgaaagatccatccaaagtgaatgaattcactagttttatg

SEQ ID NO: 271443 - DNA, 574 bp, Homo sapiens
cacacatgtttacagctgcacaattctcaagtgcaaaaatgtggaaccaggccaggcatggcggctmacgcctgtaatcccagcactttgagaggccgaggcaggtggatcacctgagctcaggagtttgagaccagcctgaccaacatggtgaaaccccatctctactaaaaatacaaattagctgggcatggtggtgggcgcctgtaatcccagctgctcaggatgctgaggtgggagaatcggttgaacccaggaggaggaggttgcagtaagccaagattgtgccactgctctccagcctgagcgaaagagcaagactccatctcaaaatccatcagtcaatcacttgggcccactcctggagtgtatgattctgtagtgctaaagtgagcttgaaaatgtgcctttctgataggttccctggtgagtctgctgttactagactagggaatacattttgagaatcaccgattcagctcctgaccatgtggtctggcaacgtgggctgtgctcagctgggctgttcttctggtcttggctgggctcactcatgcatctgtggtcagctgcc

SEQ ID NO: 271444 - DNA, 574 bp, Homo sapiens
cacacatgtttacagctgcacaattctcaagtgcaaaaatgtggaaccaggccaggcatggcggctaacgcctgtaatcccagcactttgagaggccgaggcaggtggatcacctgagctcaggagtttgagaccagcctgaccaacatggtgaaaccccatctctactaaaaatacaaattagctgggcatggtggtgggcgcctgtaatcccagctgctcaggatgctgaggtgggagaatcggttgaacccaggaggaggaggttgyagtaagccaagattgtgccactgctctccagcctgagcgaaagagcaagactccatctcaaaatccatcagtcaatcacttgggcccactcctggagtgtatgattctgtagtgctaaagtgagcttgaaaatgtgcctttctgataggttccctggtgagtctgctgttactagactagggaatacattttgagaatcaccgattcagctcctgaccatgtggtctggcaacgtgggctgtgctcagctgggctgttcttctggtcttggctgggctcactcatgcatctgtggtcagctgcc

SEQ ID NO: 271445 - DNA, 607 bp, Homo sapiens
tgacgcatgaataaatgcagcctattttttgtatcaatttaccatatagcttaaatctcattactaccaatcacaatcaaatgaaaatctccatatcaccaaggctgcccaaccaacaatattcagaggattggcgagtatacaaccagcctttgcctcaagagacaagtgtaatacatgtaatagaagctatgactgtaaaatagcatcctattggactcaggggagagtttaatacatttaatacaacctgggggtcaggaaggtagagtggtgggctggataatggcccccctccccaagatatccgggtcctaatccctagaacctgaaacctattacctggcaaaaggggctttgcagattcagaagctggtacacatgaattctactgcaaccaaagaactaacagtcatagagagctgaataagctgtgttttcgcctacatattcagaataaccctcggaaatttgaaagtttsgtgtaccagtatgaagacacatgtccaagccaatgaactgggaagtctttgacatcactctgcttctcaactttcatatcccaacagtcactaagttctgtcaattctcccttctaagtgaatat

SEQ ID NO: 271446 - DNA, 636 bp, Homo sapiens
gtgacctaatagagaaggatgatggtgagatctttacatgggctgggatattttctgtaggtaaggccccccaaaaagataacagtttacccaagacctaaacaatgagaaggagccagcattgcaaagatctggaggaagcttgttgcaggcagagggaagagcgtatgtaaaacccctgaagtggaagcaattctgggacatttaaaacatgtttttttcccttcaacttttattttaagtgcagggctacgtgtgcaggatgtgcagggcttttttacatatataaacgtgtgcagtggtggtttgctacacagattatcccatcacctgggtattaagcccagcatccatcagcttttcttcctgatgctctccctcctcccaacccccgagaggccccagtatgtgttgttcccctccctgtgtccatgtgttctcatcattcagctcccacttataagtaagaacatgcagtgtttgcttttctgttyctgcattggtttgctgaggataatggcttccagctccatccatgtccctgcaaaggacaagatctcgttcctttttatggctgcatagtattccatggtgtatctgtaccacattttctttatccagtctatcattgatggg

SEQ ID NO: 271447 - DNA, 636 bp, Homo sapiens
gtgacctaatagagaaggatgatggtgagatctttacatgggctgggatattttctgtaggtaaggccccccaaaaagataacagtttacccaagacctaaacaatgagaaggagccagcattgcaaagatctggaggaagcttgttgcaggcagagggaagagcgtatgtaaaacccctgaagtggaagcaattctgggacatttaaaacatgtttttttcccttcaacttttattttaagtgcagggctacgtgtgcaggatgtgcagggcttttttacatatataaacgtgtgcagtggtggtttgctacacagattatcccatcacctgggtattaagcccagcatccatcagcttttcttcctgatgctctccctcctcccaacccccgagaggccccagtatgtgttgttcccctccctgtgtccatgtgttctcatcattcagctcccacttataagtaagaacatgcagtgtttgcttttctgtttctgcaytggtttgctgaggataatggcttccagctccatccatgtccctgcaaaggacaagatctcgttcctttttatggctgcatagtattccatggtgtatctgtaccacattttctttatccagtctatcattgatggg

SEQ ID NO: 271448 - DNA, 631 bp, Homo sapiens
ccagcattagtagcaatttttgaaaagagcccaggagacaacttacagaaagtgatttttttccctttaagggttgtctttctctgttgcttgyacacacacacacacacacacacacatacacacacacaatctcattttctgggtgcaaatataagacatgctggggaccatacagattcttactgacctggtctgccagtaagacaaaataatcagtaattcctaacagaacaaaagctcatgtgttttaagtggaaagagaagaaaaccgtaagacaggaacaaatggcaaagaacaggacagctgctccatccaagctatttccttgggaaggaattgacggtttcttcatttctcatctgcattgaaacattagtaataacaaacactcccatgcacacacacacacggtgttatcaactggcacgcagagtgaaaacattttcactgtgaagacaactgcacaatgaattcatgccgatttgtatcattgtcccctaatgaacagccaactttcgcaccaatagtcactcattctacaaacaatattagtaacaactaatatttatgttaccaggcactatgctaagttctttacatgtgttaattaatcctcacaacaacctt

SEQ ID NO: 271449 - DNA, 614 bp, Homo sapiens
aaatataagacatgctggggaccatacagattcttactgacctggtctgccagtaagacaaaataatcagtaattcctaacagaacaaaagctcatgtgttttaagtggaaagagaagaaaaccgtaagacaggaacaaatggcaaagaacaggacagctgctccatccaagctatttccttgggaaggaattgacggtttcttcatttctcatctgcattgaaacattagtaataacaaacactcccatgcacacacacacacggtgttatcaactggcacgcagagtgaaaacattttcactgtgaagacaactgcacaatgaattcatgccgatttgtatcattgtcccctaatgaacagccaactttcgcaccaatagtcacwcattctacaaacaatattagtaacaactaatatttatgttaccaggcactatgctaagttctttacatgtgttaattaatcctcacaacaaccttgtaaggtagacatagttttactccttttatagaatgggaaactgaggttcagagaatttgattaatgtttccaagactgcacagtgaacaagtacacagcaaatacccaatcttggttgtctacccctcaag

SEQ ID NO: 271450 - DNA, 614 bp, Homo sapiens
aaatataagacatgctggggaccatacagattcttactgacctggtctgccagtaagacaaaataatcagtaattcctaacagaacaaaagctcatgtgttttaagtggaaagagaagaaaaccgtaagacaggaacaaatggcaaagaacaggacagctgctccatccaagctatttccttgggaaggaattgacggtttcttcatttctcatctgcattgaaacattagtaataacaaacactcccatgcacacacacacacggtgttatcaactggcacgcagagtgaaaacattttcactgtgaagacaactgcacaatgaattcatgccgatttgtatcattgtcccctaatgaacagccaactttcgcaccaatagtcactcattctacaaacaatattagtaacaactaatatttatgttaccaggcactatgctaagttctttacatgtgttaattaatcctcacaacaaccttgtaaggtagacatagttttactccttttatagaatgggaaactgaggttcagagaatttgattaatgtttccaagaytgcacagtgaacaagtacacagcaaatacccaatcttggttgtctacccctcaag

SEQ ID NO: 271451 - DNA, 615 bp, Homo sapiens
tttcacagatagcttgtttctactttttgtcacaggaaattcagtttttcactattgtactcaatgcgtaagaagtgtcccttcatatattctacaaaaatagtgtttccaacctgttgagtcaaaacacaggtttcatttggtgagatgaatttatgcatcagaaagcgttttcacagacagcttgtttctaattttcattgtaagatatatactttttcactgtggtttcagagggctcagaaatataccttcatcaattctacaaaaagagtgtttccaacctggtgaatcaaaacaaaggtcccattcagtgaggcaaatccacacatcacaaagcattttcacagatagattgtttctagtttttatgcaaataattcagtttttcactacaggtcacaatgggctcagaaatttctatttgtatattttaaaaaatgagtgtttccaacctgttgaatcaaaacaaaggtttaactttttgagatgaatgcacasattgaaaagcatttacacagatagcttgtttctagtttttatcacatgaaatttggtttttcactacgggcctcaacggacccagaaatgtcccttcatagattctacaaaaag

SEQ ID NO: 271452 - DNA, 543 bp, Homo sapiens
ttaatgtaccaagctgctaatggtttacgtaaaaataaataaattaataaataaataataaaatgtaaggtttaatataattaatatgtaaatttaatgcaacatcaactgtaatcccaatgcagtttttgaggaaatcagggattctgggttgggagtcgtattgataaaattttcttaaagtcaaataccataataaatgcctaaatatagccaaaaaagttataaaaaagactgatgaagggatttttgccttatgagatagaaagcacatgataaagtaatatcatggaaacagtgtggtactggcacaagaattgacaaatagattagtgaaacatagaaagcccagtaatagtgggtgtgacaaaggtggtattggaagtgaaaaatatatatattaataattggtgcttgcaccattatttttacactcttrcacaaaacagaggccagccattgggaaggaattgacgagactcctgagctcagagggcacttttttttttgagtcagagtctcgctctgtcacccaggctggag

SEQ ID NO: 271453 - DNA, 586 bp, Homo sapiens
agtgatgtgatgctcccacctgggccctacttgcaagaaagattgtgacatatggccaggcccatcagctaggtaatgtgactctccttttcatcctgtgcctgcccacagtgaagattgtgacaaatgtctgagccaatcagctgtgtaaaatgactcttctttcttgcctggatcctgataacagggagcattgtgacatatcagtaggcccagcacctakgtaacatgactcttcttgctgcttgggccctacttacagaagattttatgacatattgctgaaccaagtagtcagatgatgtgattctcctgcctgtgccctgcctacagtgggcactgtgacatatcactgggcctagcacccaagtgatatgactcctgtcttgtcccagcccaaaggtgaaattgtgacatatacctgggcccagctcacaggaaaaatgatgcctctcatacctacacacagacaataggagatattttgactgtcctagccaggcttcgggccacaaataatgtcctggatcttccacttttataaagttcacagaagattagaacttcaggcctattgtataaagcc

SEQ ID NO: 271454 - DNA, 586 bp, Homo sapiens
agtgatgtgatgctcccacctgggccctacttgcaagaaagattgtgacatatggccaggcccatcagctaggtaatgtgactctccttttcatcctgtgcctgcccacagtgaagattgtgacaaatgtctgagccaatcagctgtgtaaaatgactcttctttcttgcctggatcctgataacagggagcattgtgacatatcagtaggcccagcacctaggtaacatgactcttcttgctgcttgggccctacttacagaagattttatgacatattgctgaaccaagtagtcagatgatgtgattctcctgcctgtgccctgcctacagtgggcactgtgacatatcactgggcctakcacccaagtgatatgactcctgtcttgtcccagcccaaaggtgaaattgtgacatatacctgggcccagctcacaggaaaaatgatgcctctcatacctacacacagacaataggagatattttgactgtcctagccaggcttcgggccacaaataatgtcctggatcttccacttttataaagttcacagaagattagaacttcaggcctattgtataaagcc

SEQ ID NO: 271455 - DNA, 600 bp, Homo sapiens
atcactggaccaagcacatccagatgatgtgactcttctgccagggtcctgtccacaagggggattgtgacatgtccctggaccagcatccaggtgatgtgcctttcctgccctctctctgcccacaggtagcattgtgttgtatacccagaaccaaatcacaagcacaatggtgactcttgtacctggagccaagacatgtgcgggatggtgaatcttatcactgggcctttccacaagtgttattgtaaaatatacctttgtccaacacatgagtgatttgactctctagacctggcccagttcacaaataaaattgtgacatatacctgggccaagaacctaggagatatgmctcctatgcctgggccctgctctcagaaggatagtgacatcacactgaacccagcacctaggtgatgttatttttcttttctacatgggtcctgcttgcagtgggacttgtggcatactgatgggctcagcaccaaggtgatgtgacctgggccctgatgacatgggcaattgtgacatatcactggccccaacactcaggtagtgtgattctcctgtctggtatctgccaacagagggcattgt

SEQ ID NO: 271456 - DNA, 527 bp, Homo sapiens
caacatttagcagaaatcccgtctctgctaaaaatacaaaacttagccagacattgtggcaggtgcctgtaatcctagctagtctagtgaggctgaggcagaagcatcacttgaacctgggaggcggagagtgcagtaagctgagatcgcacaattacactccagcctgggtgacagagtaagactctatctcaaaaaaagaaaaaaaaatgtagaaaatcttagacaaattaaatttaacrgagtttaattgagcaaagaatgattcaaaaatagggcagtcttgagccagaatagggtcagagagactctcaagcaactacattgtcaaaaatgttcaaaccagagcaactccatcttgaatatgggctaggcaaaataaggctgagacctgttgggctgcattcccaggaggttaggcattcctagtcacaggaaggaggtcaacaggactgatatcacaaaatacaggggataaagactctgctgataaaacagaatatagtaaagaaactgtccaaaaatcc

SEQ ID NO: 271457 - DNA, 592 bp, Homo sapiens
caaagagaaatcagcaaatccacaatctggattgcagtttttaacatacaatgttagaaacagtagatcaactaaaatgtgcaaataaaaatataagaaatttgaacaacaaattaacaaacttcacctaatacacatacagacacacatacacagacgcacacacacccacacatatatatatacatatatataaccctacattcaaggatcattttcatatataatatttagaaaaaaataatttaaaacatagccactaacaaaataactttcaaaggaattgttatcatcagatactatactataactgtaatgcaattaaacaagaaattaataataaaaattggtttatttcygtggtatatttggaaaattaaaaatgcattcttatataattcattattttaatagagaaactgaaaatacatcttatttggcaaggaaagcaaaagaacaatgtatcaaaatatgtgggatgctttcaaatgagaggaaaatttataaatgcatttttataaatgcatttttatctcaaatgcatttattaaaagtcaaccaaaatatttttgtgttcccttgggacagtaaa

SEQ ID NO: 271458 - DNA, 590 bp, Homo sapiens
tagaaaactgaataaccagttagctttatttttaaaaaatctagttacatgaaagcttaccttggacttgtgagaattcttttccatatataataccactgatcagtctaatcaattgtaattttcctttttaatgttgaaagtggattttggcccatgctcagttgctcattttcttcagaaatttcataaggatttttagtataaaaagttattgagcatgcaagcttctgcggataaaaagctccctaagcatgcattgacaaggaggaccagggttgttacagtttgttgtgtcaatgatttgcaaataatgggtctctgggagatttttaaattgcagctttcactccaggccatggtgctttttaggatgagctgagttgctatgaggcttggcactcttcaacgcaccttaggcaggggctctaatatttccattgagatcgtaatagctgcccattacartcaatctcaatgacatatttttcttgcatttttttcttttaataaaaaacaaaaaagcacactcaaaagacaatattaaagttgtaacttaagccaactacagtgaagagctttcacagaat

SEQ ID NO: 271459 - DNA, 472 bp, Homo sapiens
tgtatctatacaaactcctgacacataagctttttttaattgctaggttttaataatccttaaaacctctgcactaactgctatctygctgcctggactcttacccctgtgtatggccggcttcctcatatttatgtcttggcttcatggagaccttctcgggcttccaaggaacaatccatggaggctctgtttctgatcaagttcctccaaagcacttactgagatttccttgtttggttattgtcctagaattatacttggtcatgtaagtttagttcactgaaggatccccaggacctgtttcttgaaggaaaaatgtacatatacccaaaatactaatagcagtttaactcaatgtggtggcattaaggataatcagtactttaatatttaaaactcttacagtattaccatttaattatatttaatgctgttcattaagttgaatgttttcttgaaatattgcaat

SEQ ID NO: 271460 - DNA, 601 bp, Homo sapiens
ccatggtcaattcacaatgtgtctggccactgagctgcatgcccatgagtcccaggagcctctcttgagctcttggctgatattcaactgcatcttgggttccatgggtccaaatttgaattgttttcactaaggtagaaaaacagaaacacttggggatcttggraaaaagataacagatctattttgacaaaattaatgaaaatattgattatcatgaccatgactcatttaaacatggtctttggaacaatttgtgtagctctttagggaaaatgacagcattagagtaaatgttattgctgttttcactaaatttacttgcctaatatttgaccagttttaatccaggttttattttattcatgaccttctttccctataaccttggtgaatcaaaagctccttttgcttattctgttatgctacactctcctcctttctccaatatttagtatactattcttcatttctaacttgagaaagtaaaatttttaaaattacatttacaccaagactaaatattccttgatttggtttatcatcagacattcattttaatgcttgacttattttttcctactaactcttgtttattcac

SEQ ID NO: 271461 - DNA, 552 bp, Homo sapiens
ccatatattgatagggctcctcttctgagtaagccaaagcaaaaaaagaaaaagaaacaaacaaaaatacaccaaactatatgaatgtgaattttgggggtaaacaagttttgggggaaatccagtcaatagcttatgtttatttgaacttcctctacgaaagctctcaactacagtttcattctgtgactacaattaaacagcagttcaaaaacagaaatatatctgagcatttgtgtgtgtgtaattgygcaaatctaaatggtcaatgtctctgtagggaaaaagttaaatacagggaacataaccaaggccactgaacgtgcatgctgtggttgagttatcttgtatccaagttttagaccttagatcataaaagatgtgaagaatgctagagagagagaggaaggaaagtgacagttttaatttaaaaaaatgaaaaacagggctctttccaattgcttagcaccctggccagcctccatctcatggctgacatctcacccatgttagaatgtcagccatgttcctcttgcccaattgacttgggta

SEQ ID NO: 271462 - DNA, 422 bp, Homo sapiens
aatttgaaaatagcttttcactaaggaaaaggatggattctgcctccagtcaaaatattcattttttttaaagamcaaattagcagatactgaaggaataaatagcttttttgtgtggcataaattggcatctctagtaactattctgcatgtgagtggtggaaaaactttcaaattctcagactattattaaatgttaccttaaatgagaatcaaactaatctaaaacatacattagatgtcaattaaaccaaaacaatgtcatcacaaattcaaaacatggccagaaaagcgtatggcttagaaagcacaataacccgtcatggggggagttctgtacataaagcagatcaccaaatctaaaggaataatacaaactacagagacagctctctgacaggtttctcccattttaatgaaac

SEQ ID NO: 271463 - DNA, 422 bp, Homo sapiens
aatttgaaaatagcttttcactaaggaaaaggatggattctgcctccagtcaaaatattcattttttttaaagaccaaattagcagatactgaaggaataaatagcttttttgtgtggcataaattggcatctctagtaactattctgcatgtgagtggtggaaaaactttcaaattctcagactattattaaatgttaccttaaatgagaatcaaactaatctaaaacatacattagatgtyaattaaaccaaaacaatgtcatcacaaattcaaaacatggccagaaaagcgtatggcttagaaagcacaataacccgtcatggggggagttctgtacataaagcagatcaccaaatctaaaggaataatacaaactacagagacagctctctgacaggtttctcccattttaatgaaac

SEQ ID NO: 271464 - DNA, 557 bp, Homo sapiens
tacaagctcacaagcaatatgttaaggttcccatttctctacattgtagccaacactggttacgtcttgtcatttttagtcatcctactgggtgtaaagttgtatctcatcatggttttgatttacattttctatatgactaatgatattgaggatcttttaatatgcttattggccatttgcacattttctttgggtacatgtctacttaaagatttttcccattttttaattkccttgttgtgtttttattgttgaatactaagaattctttatgctgggtattaactcctcatcaaatacatcatttaaaactattttctcccattctatggattttcttgtcactttcttgattgtgtcataggaagcataaagttgtttaatttgatgaagtccaatgcatctatttttcttttacagtttgtggttttggtattgtacctagaaaccattacttaataaaatactataagaattttctcttaaattttattctaggaatttatagttgtagctgtcacattaaggtctaagattcattctgagttaatttt

SEQ ID NO: 271465 - DNA, 522 bp, Homo sapiens
acacttatcagtcaggacacatgctggccattacagagtatgtaggacagatgctcagcctgcttttaggaaggaagcctcaaagttcactttatctacttcatgatgctggagggcctcctggccaatgacattaargcagtccaatggatttccacctgcactgtatttagcctgtgatcccacagaaaaccaggactattatatctttcaatatgatatatgtcattaagaatttgataaaaattattattctattcttcagaaacgagcacactgcataacactgcctataatattagggagctcaaagatgttagagtcagctagacctgggtttacagctcaattttgcttcttacttagctttgtaaccttgaataagtcacttaagccttctgaattactgttttctcatctgtaaaataaagatattattacctaatctttagagctgttgaaaggataacatgagattctttctaacttccttaccttattcaaactatcacaaataaataa

SEQ ID NO: 271466 - DNA, 464 bp, Homo sapiens
attagatcatgagttcaacaaaaatattgtgttgttttaaaaatatttatatcccttatacctagcacaaaatataggtatgcattgaggaccccataagtgcttgtcaaatgagtaaatacctccaactgcataacagaaaacacttgaagtgactttcttcctttctttttttttttttttttttgagacaagatctcactctgccacccaggctggagtgcagtggtaagatcatggttcacygcagcctcaacctgctaggttcaagtgatcctcttacctcagcctcccaaggagctgggactacaggcacatgccaccaaactcagctagtttttgcattttttgtagagatagggactcactatgttgtccagtctggtgtcaaacttctgaagtcaagtaatccaccttcctcggcctctcaaagtgctgggattacaggcatgaaccaccacacc

SEQ ID NO: 271467 - DNA, 464 bp, Homo sapiens
attagatcatgagttcaacaaaaatattgtgttgttttaaaaatatttatatcccttatacctagcacaaaatataggtatgcattgaggaccccataagtgcttgtcaaatgagtaaatacctccaactgcataacagaaaacacttgaagtgactttcttcctttctttttttttttttttttttgagacaagatctcactctgccacccaggctggagtgcagtggtaagatcatggttcaccgcagcctcracctgctaggttcaagtgatcctcttacctcagcctcccaaggagctgggactacaggcacatgccaccaaactcagctagtttttgcattttttgtagagatagggactcactatgttgtccagtctggtgtcaaacttctgaagtcaagtaatccaccttcctcggcctctcaaagtgctgggattacaggcatgaaccaccacacc

SEQ ID NO: 271468 - DNA, 562 bp, Homo sapiens
tggtgtcaaacttctgaagtcaagtaatccaccttcctcggcctctcaaagtgctgggattacaggcatgaaccaccacacccatcytgaagtgactttccattccgcgaaaaataaaataaaaaagctaaatggtcttagggaagggatacctaacttctttttcaaaaatttagaatacaccaagtgagggtaagctgtttgtcaccttaccagaacataccataggttccagtgtccctccttgtaggtcacaagaaaaatgtgattctataagtaagagaatgtgtcattttgtgaaaattcacagggagtctctccttgagtttgcctactttcataacgaataaaagagatacctttatttttcctatactgaggccagacaagtgagataagtagcataagtggagcacactgaaccatgtcataagtcattcctccagatttctaaatggagaccttatggtacaggtcctgccagcatactgttattttttgttttgttttatgtttgttttaataacacagctattgcaattaaattacaggagagctatag

SEQ ID NO: 271469 - DNA, 562 bp, Homo sapiens
tggtgtcaaacttctgaagtcaagtaatccaccttcctcggcctctcaaagtgctgggattacaggcatgaaccaccacacccatcctgaagtgactttccattccgcgaaaaataaaataaaaaagctaaatggtcttagggaagggatacctaacttctttttcaaaaatttagaatacaccaagtgagggtaagctgtttgtcaccttaccagaacataccataggttccagtgtccctccttgtaggtcacaagaaaaatgtgattctataagtaagagaatgtgtcattttgtgaaaattcacagggagtctctccttgagtttgcctactttcataamgaataaaagagatacctttatttttcctatactgaggccagacaagtgagataagtagcataagtggagcacactgaaccatgtcataagtcattcctccagatttctaaatggagaccttatggtacaggtcctgccagcatactgttattttttgttttgttttatgtttgttttaataacacagctattgcaattaaattacaggagagctatag

SEQ ID NO: 271470 - DNA, 562 bp, Homo sapiens
tggtgtcaaacttctgaagtcaagtaatccaccttcctcggcctctcaaagtgctgggattacaggcatgaaccaccacacccatcctgaagtgactttccattccgcgaaaaataaaataaaaaagctaaatggtcttagggaagggatacctaacttctttttcaaaaatttagaatacaccaagtgagggtaagctgtttgtcaccttaccagaacataccataggttccagtgtccctccttgtaggtcacaagaaaaatgtgattctataagtaagagaatgtgtcattttgtgaaaattcacagggagtctctccttgagtttgcctactttcataacgaataaargagatacctttatttttcctatactgaggccagacaagtgagataagtagcataagtggagcacactgaaccatgtcataagtcattcctccagatttctaaatggagaccttatggtacaggtcctgccagcatactgttattttttgttttgttttatgtttgttttaataacacagctattgcaattaaattacaggagagctatag

SEQ ID NO: 271471 - DNA, 545 bp, Homo sapiens
tgagttttgtaagaattaaaaggaataatgcatgtgaaacttcatggtacaaagcctgataaatagtaggcacttacggaatgtyagtctccttacttcattaaaagtgagacaggattttaaaaatcagccagacttatccttaactttgcacatggagaaactaagactcagaggaaagttagttgctaaatgtatcaacagattagtctggcactcataaattatggttgagattagttatattgaatcaaaagtaaaattaaaaagtgtgtttggaaagagggttcaacaacaacaacaaaaatctattatatgtgtaaggtaagttatgttgagtcaaagtgaaacgaaaatgtgtgtttggaaaaagggttacacacacaaacaaaaaaaaatcattacttgcattctgatgattacttgcatttgtacagtggcaggtacaaaaaatgtttgtaaaccacctgatggtacattaattatttttattttattgagtgtgtgttcttctgtgaaacaggtgtgatatacgtgagactaca

SEQ ID NO: 271472 - DNA, 597 bp, Homo sapiens
ctggggagcagacagatgatcaggagataaatgggatgaggagaggtagaggactatagctggagagcatgatgttgaaggaggaaggcttttacatagggtgtaggagaagctgctctaaaaatcaccaggttcgggctgggcgcggtggctcacgcctgtaatcccagcactttgggaggctgaggcggacggatcacgaggtcaggagatcacgaccatcttggctaacacggtgaaaccccgtcttctactgaaaaatagaaaaaattagscgggcatggtggcaggcacctgtagtcccagctactcgggaggctgaggcaggagaatggcatgaagccaggaggcggagcttgcagtgacgatcgtgccactgcactccagcctgggcaatagagtgagactccgtctcaaaaaaaaaaaaaaaaaaaatcaccagcttccaggtgctatgcttaatggaacagttattggcacagaatgactatacataacaaatgccttgaggaatatcaatggatgcatctactagaccaacagtaaagggtcaagagaggataatgatgaaaggaaagagtatgaatagactttcaa

SEQ ID NO: 271473 - DNA, 597 bp, Homo sapiens
ctggggagcagacagatgatcaggagataaatgggatgaggagaggtagaggactatagctggagagcatgatgttgaaggaggaaggcttttacatagggtgtaggagaagctgctctaaaaatcaccaggttcgggctgggcgcggtggctcacgcctgtaatcccagcactttgggaggctgaggcggacggatcacgaggtcaggagatcacgaccatcttggctaacacggtgaaaccccgtcttctactgaaaaatagaaaaaattagccgggcatggtggcaggcacctgtagtcccagctactmgggaggctgaggcaggagaatggcatgaagccaggaggcggagcttgcagtgacgatcgtgccactgcactccagcctgggcaatagagtgagactccgtctcaaaaaaaaaaaaaaaaaaaatcaccagcttccaggtgctatgcttaatggaacagttattggcacagaatgactatacataacaaatgccttgaggaatatcaatggatgcatctactagaccaacagtaaagggtcaagagaggataatgatgaaaggaaagagtatgaatagactttcaa

SEQ ID NO: 271474 - DNA, 554 bp, Homo sapiens
gatgaataatattctgcagtatgggtctggtccaaatataagaaacatagattgggtcacttttcacagaacaaatctttctactaataacattattgaagtgaagactcctactaaaggcaaagatgaagtttagacaatttctgtcctctggtatcctctaacctaagggaggagatagtcatgtatcgagtgatgtacaggatgttgatatgagtaaactgcactatggatccagaggagaataaaatgggacacagaaaaatggtaacagaataggtaatatttaggcttcctctgagggtagagatggcagtcttccccacacattaaaaagacaaagccataatatttcaacatccgtttgtaaaagtaagtgatttctgttactgggattgggcttaatggggttcaaagtatagggagggacaggcrtgcaatgcaagaggtaagatgacattctgttgaaatgagtgaatccatcaaaagttttactgagtaaagagatttaacaagaatatacgtttaacacatataatatgtgcagtaagcgg

SEQ ID NO: 271475 - DNA, 554 bp, Homo sapiens
gatgaataatattctgcagtatgggtctggtccaaatataagaaacatagattgggtcacttttcacagaacaaatctttctactaataacattattgaagtgaagactcctactaaaggcaaagatgaagtttagacaatttctgtcctctggtatcctctaacctaagggaggagatagtcatgtatcgagtgatgtacaggatgttgatatgagtaaactgcactatggatccagaggagaataaaatgggacacagaaaaatggtaacagaataggtaatatttaggcttcctctgagggtagagatggcagtcttccccacacattaaaaagacaaagccataatatttcaacatccgtttgtaaaagtaagtgatttctgttactgggattgggcttaatggggttcaaagtatagggagggacaggcatgcaatgcaagaggtaagatgacattctgttgaaatgagtgaatccatcaaaagttttactgagtaaagagatttaacaaraatatacgtttaacacatataatatgtgcagtaagcgg

SEQ ID NO: 271476 - DNA, 562 bp, Homo sapiens
gaagataataagtattttaaaggtcacaaggtaatatggatggcttaaaaaataatactttctggatctttctcaaactggtaacaattggatatcatgatttggttgtgtactggtatttgtactggacgtcaggaaaacgggtttctcatatctctgttttaccacttaccagagttataacttctgataggtgcagccacataattaatagaatgatgtaatgataaatttgtctacttaaagacacacaatgccttattttgtggtccacaagagctctaagacaagggtcagcaaagaacagacaatgcagtaaatccagcccacaacccaattttataaataaagttttgttggaatacagctctgcctatttatttatgtattgtctacagcagctttcatgcctcagtgacagagttgagtmgttgcaacagagcccatgtggcccacaaagcccaaattatttacttgtctggccttctacagaaaaatttcattgacccctgctatgccagctgtgctattgtcatgctgaacacatcctgctatagatggg

SEQ ID NO: 271477 - DNA, 598 bp, Homo sapiens
tatttgagcagagagaaatagtattttctagtgtatggcttaatgccttcaacaatgtaatgtgaaaatttttacctttatgccacctcagtatccctccatttctagaggaatatgtgctgtctcagtcagcatgggyggctataagaaaatatcgtagactggttggcttaaacaacagaaatctattttatcatagttttagaggctggaagtacaagatcaaggtgccagcattattagcagaaatgatgtcccaattattaatacaatcctggatggcccagtggatactctatttgccatagcaatttacatgggcatcacaactcactgcagtgggcacgggatgctgccttttggacctctgccaatgatgcctctgaaatccgcatgttgtttccaagattctaccatctgcacatgagttgattcttaacacccttttcttcactgtcctctgaatcacagtctcgcacaggtgcagttcattatcagggcctaggtcatatgcctgaacctagctgaaaaggatgctgagaaagcaagtttctgacattgatgcggtgggactcaaatagtgagagatgcttgcaaa

SEQ ID NO: 271478 - DNA, 567 bp, Homo sapiens
aacacactccttgtatactttggatctaagatttagtgctaaaactggaaggcaaagaattggaaatactgagtgggacacatgtaatacattttaaaaaggctggagggrgaaaacactagaactctgtctcacctatgtgtggggccaaaggcagaacaatctctatatgccttttggggcagataaacccatccatcaagctgcatctggtgcacagactgaggccttgacacctatgtgctgaaggatttattggccttgttcagggactcgtaaacctacttcttggtttttctctggctccttgtccatgctgtactttgagtcactaagcctattggttatgctggttggtgtttcagtcctctcctttgtgaagaaagagtactacactttttatgcctttgagtatctcagaggcttaggcaactccttagcaaagaaatcttcatactcgccgacagatgacacaatgacaaagcaaggggattgtatttttctctctaacctttgtgttatctctccgtttttacactttgcactagcgcatagtttggcctgcta

SEQ ID NO: 271479 - DNA, 538 bp, Homo sapiens
gtgtgttttcagtgtgagtcagatcaaaactgtaaggggagggacagggttggtaagaagaaatgataaagaggagttgcaagcctcacaatgactttatctgttttttcatataaacacatctctagaggaaggcattttagacaccaaggccagccaggaaagggagccagcctggcctggagcagctaactacaaagaagcctacgcagccctgcctcccagtcacagcccactgtgcccacatgaggcccacccacaggcaggcagagcaggtatgcaagcagcatcagcatcgcctgggcattctttataaatgtstattctcaagtcccaccacagccccacagaatcataagccctgggggtggagcccagcaatctgagttttaacaagtcctcctagtgattggatgcacacattagtctgaagaacactgctttaaggaacaggaaggccgtgcagggattaagaaggttgagggcatgcgggaacccaaatggtaacaaaagaatcaaggcagcccggaaatacaaa

SEQ ID NO: 271480 - DNA, 655 bp, Homo sapiens
attcaggtgagcaaacatgcttatggtttaaactcagagagttctattacttaaagtagaagcaaagaataagtactggggttgggggaaaaataataattttgtaaattttatctttttagttgctaatgaaaatagacttttttttccattatagcttttgagtgattgttgtttgtaacatgaaggttatattctaccaattattattattttttgtcaagtcatcccctcatcgaattattttgtttcatgatagagttcattttcttcaaatatccagattaaaaagatcatccgtaaagaattataattttatatactttataaatcatatccctctgatgtaattatattaactaactgctttggctagcaactccagaatgatattaaataatagtggtgataaaagataacttaattgtgtttctgactttaatggaacagctttcaatattttcctataaatatgatgtttgcttttaggtcaaatatggtatgcatattatcatattaagatatgcataatattagaaaaaatatagcttttctattttattaagtttttatttyatcaagattgactgttgaattttacttgatgagtttaggcttccataaagataatagtataaattttcactttaaatct

SEQ ID NO: 271481 - DNA, 539 bp, Homo sapiens
  misc_feature (1)...(539): n = A,T,C or G
tgatctttcctgtttaggctcagtatactgaggaggttttgagctttagtaatgttttcaacttgtaatgarctatcacaatttctctctcttctgtgatattttgctaatttataatctccagaaaatgatccattttaacctagtttttaaaattatttacaaaaagcaagcacattggtattttaagattcttttgatttcttgtatctggggttatttttgtataataatattctattttgcatatttgtgctataaagtttttgttttgagtgatatttagtgatgtatcaataaactctctgcgtatgcatatgtgtgtgtgtttatagccaattnttgtgtttatttattagttatataatttttctgagtcactatgttctcagtatttctcttgaatatagcatgtaattgagatttgctttgtagtctgatctgaaaatctattttaataggtaagtttatctcatttgtatttttatatgaaacatatgttttgctgtaggtatgttgtcatattttatgctatactt

SEQ ID NO: 271482 - DNA, 554 bp, Homo sapiens
agtacttcacttgatcccacttggcacaaactctagagaaagtagaacaagagggggtggttcagcctctaggggtgtgtctgagggacaggggttggcagtggtaaaagaggaaagatttggcaatatgaacagccttggagtgcatataaaatctctttttytctctctctctctcacacacacacacaaacacacacacacacgcaccctataggaagaattccagctagccctggccactctctaccatgaatatcctgcagtagaaggttaaggaaaaactgtagtcaagaatgagaaatagtataaaaggaatgagcaaagaagctacacaataccacaaggataaaattatggaatgctgaaaatagaaatggcagatgcaaaatgctcacacacacacaacactcagtaataagcaaataaaaaaatttgaccttgaattttcaaaatccaatgaaataatttgcttaataaaagagtacacagaagaaaacctgtgctcaagaaaacgtgtagtgagtatgtctgtatgggtgagtgtgaagcaa

SEQ ID NO: 271483 - DNA, 661 bp, Homo sapiens
atataataagtgaagtgaaaataaacaaagaattaaagggaatctggaatgaaaattattatattaaagattggcaaagagagcaccaaaatacaaaataagtgtttgtaaataagagaaccaggaagtcctagccagagcaawcaggcaagagaaagaagtaaaaggcacccaaacaggaaaataagtcaaactgtctctcttcactgataatacaattctatacctagaaaaccctgaaggctctgccaaaaggctcctggaattgataaacaactttagtaaagttttagtacaataatcagtagcatatctatacaccaataaagttcaagctgaaatcaagaaggcaatcctatttacaatagacacacacacacacacacacacacacacacacacacacacaaataaaatacccagaaatacatctaactaaggaagtgaaagacctctacaaggagaactaaaaaacactgctgaaagaaattgtagatgacacaaacaaatggaaaagcatcccatcctcatggattggataaatcaatatcattaaaatggctaaactgtccaaagcaatttacagattcaacactattcctatcaaactaccaatgtcatttttcacagaattagaaaaaaactattctaaaatacatat

SEQ ID NO: 271484 - DNA, 482 bp, Homo sapiens
ggtttcattcccagcctctcttaagcaatatgatttgcaaacaaaagagacccactcatgagagaggcacaaatcttttcctattcacgttcttcatttatctcctttggaatatttttccattgctttgttagaggagtgtcttagtatctttcccccttttattgcattagcaagttctcatttattttcagtcttctcttgttatcagcattgtttcctatcttaaaagcagagttataagttctctgtccccttagactttataagatagcaaaaatataactctatggagacttttgccttactcatttttttactcagcttgcatgtcagaatcaaatcattctagtattaattgattgaaaawactggtatactaattcataactagaaataaaagtgaatggtttcgaccttgtctttaaggacacatatcgtcaaatccatttgggaattctatttttaagaatgaaaatagc

SEQ ID NO: 271485 - DNA, 538 bp, Homo sapiens
ttagatacaccttagtaatactgatttgtgagtttgaaacagctgaaattatgatccagtctatgaaccctgaaatcattgtcatgaaatacaaaatcaatctaaaatctgagaaaagaatttctttggggtactttgggatatacatactgaacaacacaggaatatgaatatttaataaggaaaagcgttataaatgatcttccagtaattatattgtcaaaacataatctgagaagaaaaactgagggatgggcaagcaggtccaaatacaatagtcagtaaccactgaccctcatcacctttcctccaaaaataaatgaggaaaataaaatgaagggtccttgataagacagtgaacaaacacaggcaactggcgcctttccctgaacccagactcagagrtgtacaggatcaaaggagatgtggatagttctgagagtacaatattttaaaatagcaacaaaatgctagaaagacagaaaattttgatttataagagcatgagagggtttgggtgaatggtctgggtgtcaag

SEQ ID NO: 271486 - DNA, 516 bp, Homo sapiens
atggcaacggtgagcagagtcttgaagaactgtggagccaagcaggcacaggggcaggggatgggaagagagagggagtgaagagtgttttagcaacaagaggcctgggccaagcacaggggaaaatcccaaagtcagcaaggagaggtgaggccccccagagtcrgcatcagacatgaggacactccctcactgtgcaggatgaagctgagagccactgtccccccggggacccacagccaggaatctctatgacccatgtaggggccacgagtcagatccctactgggctcccccctggaaaatgagccccactccataccagctcaccaggaaagtcctgattccagagccccgacccgaggccaaaatctggagcctcttcttcaccactttcttgatgcttctaaacatcaattttcctctcaacctcccctcccacctccaagttggcctcccctctggctgcccctcactggacacttggttttgccagtttcttcctagaccacctct

SEQ ID NO: 271487 - DNA, 578 bp, Homo sapiens
  misc_feature (1)...(578): n = A,T,C or G
tgggcatgctctcctaggcaaggggccagaaggtctgagtttgaatctcggctttaccacacacttactgtgcaacactgggcatgccactgtctctgagccttaacgcttatctcacagggcagttagggaatcaagcagtgaaatgctgtacagatttatatcatggtatcarcgttaattattatgattagacaaatgaggcccagagagggtaagttacacctgagggccacacagcaagtcagtcaccaggcagcgatgacagcaccagtctcctgactcagtcccacgctcctctgccctcacaatcatgcttgtttcctttttatttgtcccatttggcttatttagtacatcacntcaccttctcctcccttcccacccctctctcctctcccatccccctcccctgtacacacacacacacacacacacacacacacacacacacacacacgtgtacacattctctgggtcctgtagcccaccttttgaacaaagtcctcctggtgtgaagatcaccaggcacctgtgtagaggaggattggcagggatggggcctgaggccatggctc

SEQ ID NO: 271488 - DNA, 588 bp, Homo sapiens
gctcctttgccttctccacccatatcctatccagtctgtcccaaagcctgcccattgtacctcctaagtgtttctcaaatctgtacttttgcccatcagcacagcttccatcttggtccaggtccagcatgatctcaaaacaggatgactgcaacagcccctccctggtctccctgcctccagtcttgccctccaatcagttctccattcctgtgagcacagtgatgattctaaaatgcaaatctgatcatggaactccccagtttaaagcttttccatggctttcctttgcctctcaggctctcaaagacctccgtgagcctctgcttctccttccagactggtctcttgcctctcactcctgccttcccattctctcctccaacttctgagccactttcatctctgtatcccckcccaaggtctgtgggcctgaggtgagttgaggcaaactaatctgatttatgagtggggctagaagaatgcaggaggccaccagaatcatgattggtgcagtagtaaatgagacctgggagatttggcctcagtgtgtgctatgatgttcatcccctaataggtgcctgggga

SEQ ID NO: 271489 - DNA, 575 bp, Homo sapiens
agtcaagaaagggacataataaaaagcagaacatgggtgattcaagtcctaaataagtttacaatcttacaaagaaaggaaaaacatacttgggtgaaacaactatagaatgtcaaaagagttataaaactaaatacctaagtactgcaagaggtggaggtgcacaacagcgaaaggcaggcaatgaaacaaagcacatcttttacaatgaaacatatgttaagtgcaaagatacacaagaaacaaggcaattatccatattaatctcatatttacctgcttagcccgggcacaatagcacatgcctgtagtcccagctactcagaaggctagagtgggaggactgcaagtttgaggccaaccccaggcaaagtagggaaaccccatctccaaaaaaaagcagccaatcaaatttacctgstgataccatccactaaaccttgaacaaccactgtcaaatgaagtaagtgaaaggagaaactttaatgtttaaaataaatgcaccatttaaaagtagtaaggtagaaatacaggagtgaaccacaaatgtattctaaaaccaaactattgtaaat

SEQ ID NO: 271490 - DNA, 568 bp, Homo sapiens
catgctttgcttctgctgggggcctggctgaamcatgtgcttggtgtacagtgctctgggaaggccaggtgaccccattcactagtgagggaggcttggagaggttgagtcacttgcccgagcttacccactgtgattccagcttcgggcctgagcggcctggaaactcatgccatttccaaattttggggcgtggaaggacagcctgggcagcccgtgggtgtgtgggagaagccagggcctagtgacagcggggagcatagagctgatgcacggtgcgctgactcccacccctctgggaccctgaatcaccattctcaaaggatgtctccttgcaggtggtcccaccctccctagagcctgcttccccctgtctgcactctgtgctgaggccacgcatgagggttgtgggtcagtgggtatgcagtgctgcagtgggtggaggtgttgactgaccgtcaccccccagaaagcccaagtgctttcagtcactttctgttcctgtagctccaccccctcccttcctcttctttcttcctgaggcacatgttttggtccttacagccag

SEQ ID NO: 271491 - DNA, 533 bp, Homo sapiens
cacaggcagtgcccgcccccagagtccggctygtccctcccattgaggacttgacctaatttaaagagtgtgctgttgtccactgtgtacggtgggtggcgattgctggaccccagacgctttccttggagcttcaggaaagcctgggcctccctgtctctggctaagcctgagactgctgcccagttcctcatcagaatgtctgagggatgttaatttcctccaggagtcttgccctattgattcagtagctgattcccccagatggctcttgccccttgctctgtggctgatgacagggttcctaattgagctagaactgaaggcacaggcctgaaaggaccatcaggaattgggaggccccagtgcaaaagagccctcggtgggtgggggtggagggcgtctcttcccctcaccgccactagagggcagccgtggactctggttggagcctcgccccaggcagttcggccacctggttgccagaagggggcacctttctgacatgttttttggggaggcgggcaatggct

SEQ ID NO: 271492 - DNA, 618 bp, Homo sapiens
gcagctttaccataatagccacgctaaatatatgtcagtaagcaaattttatagttaactcagatacaagtgaccagaatacaaagaatggttttgatcttacagaaatggcaacatttgggaagcaatatagaagcaggctatcaggactctgaaaagagccttccccaaatttctcccccatgtgcctcagtttctccatctataaaatgaggataagagctctaagtatctcatatggcttagtgcgttacaacagttcatacaagtagactctttggaactgtgcctggaatatcgtaataatcaacaaatcttagcaagaagagsctgatgataaataccttgaaggcaaggactgtttcttattcaccacgataagccccagtacctaccacagtcctattacactgaagctgatcaatgagcattttcttttaagatattaagagtggtagagactgtgacgtgcttcccagattcttctttgagaaataaaaggaattttacccaggctgctaggagtgctgctagcaaatagtccttagctaccatctttctttggggattgccccagctaaagagcaatgccttggtaaagtcaaactccttctccaa

SEQ ID NO: 271493 - DNA, 641 bp, Homo sapiens
attcaccacgataagccccagtacctaccacagtcctattacactgaagctgatcaatgagcattttcttttaagatattaagagtggtagagactgtgacgtgcttcccagattcttctttgagaaataaaaggaattttacccaggctgctaggagtgctgctagcaaatagtccttagctaccatctttctttggggattgccccagctaaagagcaatgcmttggtaaagtcaaactccttctccaaggtggtccacttacaacacaatgactgttgggcaggctgtctgctcctcagggaagagagtttcgaaaggccattccagctccagagttcctcgtccttgtgtatatatccttgggcatgcaccatactccacttctccctctactgcatcctgttttcttcccctcccttccactggtgccaatcccaaaagtactccccagtaaacatcctgtatgtgaatacacaacccagagaatgccaactgcaatgaaaagaaacaaggactgcctattgaaagaatagttaacactatgaataaataatatttaccaatgttttcttaacaatttatattaaccaggtcagtacaaatattgccagtataccacacagcacagattctctcct

SEQ ID NO: 271494 - DNA, 634 bp, Homo sapiens
tgtgtatggaccaataatacatttaacagtagagcaaggtaaaaaagagctatcccaaaaatctcaattcaatgacaactgcagsaggatccatgctactattctctctactaatgggtatgtatgaaattatccataattttgaaaaaaaaaaaaataactccaaatctagcttgggacagtgtaactaagtcacatacagcattgagtgctaagtatgagacaccgagcacaaaatatttagagaccagagggctcagtgtgggctaaactgatcgaagaagcctttgagacttaggtaacataacgactgatagttattgccctcttgttctgtgccacgtgatattagcagcatatcacctgcagtttatcatttaatcccaacaaggactgtatgagggagttacctctattaatagatgagaaagctgaggtccaaagtgaagtaacttactccagagtgtacaattatcagatcgtggaactggaattggaactgtttggcccaaaagcctaaagtcttcaacaaccaaaccagaccaaatacttgacaaagagctaggatgggtcagaaaggcatagagccaataatgaagattgggatactgagacaggccaccaggaaaggcag

SEQ ID NO: 271495 - DNA, 634 bp, Homo sapiens
tgtgtatggaccaataatacatttaacagtagagcaaggtaaaaaagagctatcccaaaaatctcaattcaatgacaactgcaggaggatccatgctactattctctctactaatgggtatgtatgaaattatccataattttgaaaaaaaaaaaaataactccaaatctagcttgggacagtgtaactaagtcacatacagcattgagtgctaagtatgagacaccgagcacaaaatatttagagaccagagggctcagtgtgggctaaactgatcgaagaagcctttgagacttaggtaayataacgactgatagttattgccctcttgttctgtgccacgtgatattagcagcatatcacctgcagtttatcatttaatcccaacaaggactgtatgagggagttacctctattaatagatgagaaagctgaggtccaaagtgaagtaacttactccagagtgtacaattatcagatcgtggaactggaattggaactgtttggcccaaaagcctaaagtcttcaacaaccaaaccagaccaaatacttgacaaagagctaggatgggtcagaaaggcatagagccaataatgaagattgggatactgagacaggccaccaggaaaggcag

SEQ ID NO: 271496 - DNA, 634 bp, Homo sapiens
tgtgtatggaccaataatacatttaacagtagagcaaggtaaaaaagagctatcccaaaaatctcaattcaatgacaactgcaggaggatccatgctactattctctctactaatgggtatgtatgaaattatccataattttgaaaaaaaaaaaaataactccaaatctagcttgggacagtgtaactaagtcacatacagcattgagtgctaagtatgagacaccgagcacaaaatatttagagaccagagggctcagtgtgggctaaactgatcgaagaagcctttgagacttaggtaacataacgactgatagttattgccctcttgttctgtgccacrtgatattagcagcatatcacctgcagtttatcatttaatcccaacaaggactgtatgagggagttacctctattaatagatgagaaagctgaggtccaaagtgaagtaacttactccagagtgtacaattatcagatcgtggaactggaattggaactgtttggcccaaaagcctaaagtcttcaacaaccaaaccagaccaaatacttgacaaagagctaggatgggtcagaaaggcatagagccaataatgaagattgggatactgagacaggccaccaggaaaggcag

SEQ ID NO: 271497 - DNA, 506 bp, Homo sapiens
ccaggaaaggcagattgagagaacacaggtagcaatgtaagccatgccatgaagagaaactagcaatacagagtccagtttggggtctgggtaggatgccagaccttggaatgacaaatcaggccaaaggaattagaaaatgtgcaggagcccaaagtgggaatgcacttactggaatgccttataagayaggattttggttactaggcaagccggaaagagcatagttctagatgcaaaaaatgaattctcagcagagtatcatcagggctaattgatgccctcatcataccctgtctaggaatagaattagtcctcaagtctggccttgggctcattacttaggaattcagtcaccataactataagagagctgtatcctccaaaacacatagtatggcattgtagccccatgaaatattttaaaagaaaacaaaaaaggatgggaggaggaaggaagagaatgaggaagggaggaagaaagaatagaagagggagggaggaag

SEQ ID NO: 271498 - DNA, 621 bp, Homo sapiens
taagtgctacagcagggaggtctagatttaggatcatttttttttcttgagacatgtggctctcctactatacctttctatttttttttttcctttgagacgggcatgggtattaaattctcattttcctttttattacaacgaaaagagtacaaacgtggttaaaaagggcacctcccttagtgtcaggaaaacaaaagggaagatctgtgtgtgcagtgactgcataaagccacaaaggtggctctgccgattgtcaccaggggctgttcaggctagaaataccatgctgtccgatgtttcaagaaaagcaagaaacctagatctttaatgagaagtctttgcatttaagcgttgaaaactaatttttttttaaaatggacaggccaatataacatggcaaaccaaatattcccatagaaaagatgctagtactgcctacttttgggtgaaacctctgcattattctgccttaggaagagtgagctggttagttctgagtgaagacctccagaacccagagagactgggggayattaggaacccagcaggaccaagcccatccgtgaaaggaacacttcagagtttctgtgaccgcggagtaagtaaggtcacacaagg

SEQ ID NO: 271499 - DNA, 540 bp, Homo sapiens
ccatccgtgaaaggaacacttcagagtttctgtgaccgcggagtaagtaaggtcacacaaggtatcctcagagaaagctggctgtagtctccctacttaatgggcgtggagaaacattaatcacaaagataatccaataggaacaacaggatgagaatcatatcgaaagggtattggagggtttgggggggaaagacgggtttatgtattatctctgtgacattttcaatgaaatgcaaaatcaacagagcatcttctgccagggtcactgtggtaatgaatgctgacctcaacttgttagcacaccaatccctcaaaacagcaaaaaagagaataaatcaactgcctttgctacctttatcagcataaacaaagagataaaaatacggtrtaaaattttaactgtctttccccattctacctgcaaatgcgaaattcccctgtgcttcaataaaggaaaaatacatccaatgaagtctaacaaatgtgccatctgttcagaaagcagcaggcgagcatcttttacacgtgacaccattg

SEQ ID NO: 271500 - DNA, 570 bp, Homo sapiens
catcttaccaagggagtactgaatggggatattcacaggcattcaaacattgacagtgaagggcatcacctcactatattgcttcccgaaatagctgttaggaacagaaattgctaaagcaatagtaattcagttgaactctgtgcagatgcaaatgtcaggagatggagctaagagacacactttgctgtgattatcatatcaacacatatgtcaaaagagagactggcacactctgggacagtgaagaggatgacaatacargctgatgacctgagccaggataacaatagataaaaaggaccaagatcaagaacaagagactaaccaccctgtctgcctctgacaaggggcatcatcaacatctcgtaatgagcaactagtaattaatgccaaaactacatgtggttacatatgcatgtcattcatactgtcctgttgatgtaggatttttcttctcagtcactttgcaatctggggaaccctggctggtgacgccccacccagacctcacacagccacactggcttgccccagcttgcctgtgttatagcttgtacccacgtttag

SEQ ID NO: 271501 - DNA, 593 bp, Homo sapiens
ccaggcccatgctatgaactattattgttataattattctgaatcaattttaatcaggaaacaacacactcatttaagtaaaatagaaataaaggcaccaggaagaaaaccaaagtttgatttcaagaaaaactgaagacttcaacctttacaaagaaaaatctaattctgccaaaatttagcacatttcatatttaattttgctctgatttatgactaaatctcctgggtaccaatagtatataaaaaaccattagctctgaggaggcaattgttagtttttataataaaaaatgcatactgcttataccattattgcttaggaaattagggaacacagcttctaatacccagtgcatggaacactgtagcaaaccacttaagttgcaataatagagtattgactgggtacagtgatatgtgagacacagccacagtcagamtaagcgaccatcacactgtgctcaatagagcctctcatataatacatttattccaccctagtcaaagaattccaaacagattagctatgaaaaggcctaagatgctctacctgtaaaacatacaattttcctcttttcactttcttttta

SEQ ID NO: 271502 - DNA, 598 bp, Homo sapiens
gatcatatctcactgtggtttttatttgcatttctctgatggccagtgatgatgagcattttttcatgtgtctgtaggctgcataaatgtcttcttttgagaagtgtctattcatatccttcacccacttgttgaactcaaacagatttacaaggaaaaaacaaatgaccaacagtgttaaaagtacaaaagaatacaggctctttctgaatacagaaggccattcgtctctctctctctctctctctctctctcacacacacacacatccctacacacacacacacactccacrtatactcactcactttcatgtagatttttccttattctctagttaatctgctgaagcaatccagcatattacacaatgacaggatataagatttctggtttctgtcgctactctttaatggacactgaaacatttagtctgaagcctttcctttgcataccaaaggcaaaacctattagaactgtagacctagcctaaccatttgtgccagataagtctaaataacaagaaagacaagacaacaccttggaaaaatttatccaatttatagaccagagaaggaaaaccctcagtgggtataac

SEQ ID NO: 271503 - DNA, 633 bp, Homo sapiens
acataagacattaatcagctttttggaacattctaagtgttcagaaactagtagctattatctaattatcattattatcatcatcactatcttttaagacccctgttaaaactcctttttttgtaagacccctttgccaaatacaacttcctccctcaaaatgctttcttacattttgtcccacrcctgaaacttggacatacttctaatatggctctcatactgaatcataaatattttttgcatatctgttccctctctgaaagcttctaaagaaagggaaccacattgcattcatctttgtattctcagtggctaccagtgcctgacacacgggagatacgaaaataaatattagctgaatgaatcaataattgaaggagttctttaaaagccaagcaaaaaccaaataccaatcaatcaaatcatatttaactgcactaaggaaatttactattcagagaaatcataagaaaaattaaagaaccgaatgaaatcgtgaaaagcacgtggatttgggagtcaggcttgtctgagttagaaccccagctgttcctcttccaaactccatgacctagatcaagttattcaaccttcaagagcctttgcaccttcatctttaggtaaggtgag

SEQ ID NO: 271504 - DNA, 570 bp, Homo sapiens
aaaaggaaaatgtagacttacaagggaacaagaaaaccatctggatcacaatgcctcccaaatttcacattcagtcctgccatccaagcaaggatttagaagcgtttttcctaaaccaataactgagtggtgcctgccaatttctcccagaacttggcttttcttaacaagccattctaccgcctttaytacttttgtcctttataatgagaataacagaaactggatgaattgtacatgatcacaagggatatgaaggaggtacaagatgtgtaacaaactgttaataaaattaaaaaaaaaaacagtggctttccaagtcacggggttttctgagaaaaatccacaaattaaaaaagtaccatctagaaagctgacagctttataactgtctatgaaacagcaatgctcaaatttttttactagtctagaaattattgagttttgacataaatggcctaagtagcaaggcctatatttctataaggaacatgataaatacataaagatataggaccattgtattcccaaaaaagaataaactaagttactttcagagaagaatgaact

SEQ ID NO: 271505 - DNA, 570 bp, Homo sapiens
aaaaggaaaatgtagacttacaagggaacaagaaaaccatctggatcacaatgcctcccaaatttcacattcagtcctgccatccaagcaaggatttagaagcgtttttcctaaaccaataactgagtggtgcctgccaatttctcccagaacttggcttttcttaacaagccattctaccgcctttactacttttgtcctttataatgagaataacagaaactggatgaattgtacatgatcacaagggatatgaaggaggtacaagatgtgtaacaaactgttaataaaattaraaaaaaaaacagtggctttccaagtcacggggttttctgagaaaaatccacaaattaaaaaagtaccatctagaaagctgacagctttataactgtctatgaaacagcaatgctcaaatttttttactagtctagaaattattgagttttgacataaatggcctaagtagcaaggcctatatttctataaggaacatgataaatacataaagatataggaccattgtattcccaaaaaagaataaactaagttactttcagagaagaatgaact

SEQ ID NO: 271506 - DNA, 558 bp, Homo sapiens
cagctgtgggtccagtaatcagcactgtccaaagacttacaagggaacctcgccctgactctaccactgactagctgagccgtgggcactcgcttaacctctctgaaactccaaatcctcaatcataaaatgagagatatgaatgttgtagtctctagaggctccactagaactcaggaaaaagcattctaaatatccataattctactaaatcaaatactcagatgatccataaaggattgcaagtcaggctagcttttccctggagaaatccagcttgcatcacagggaactaatgcctcatttggcagtgagtccagatccactggtctgggyatgcaggtgccccacatttctgtattaatgtttctgctggtgccaagggctgcatgtagcctggaactagaaaggaagagattaaactgaaggcacaaacacctgcctcaaagcctgtagggagctctaaccattctgacaggccatttgcggtaattgtcctgtctgatccaataaactggctattcaagcaccgagaggttgatgcctcctgtcagttga

SEQ ID NO: 271507 - DNA, 558 bp, Homo sapiens
cagctgtgggtccagtaatcagcactgtccaaagacttacaagggaacctcgccctgactctaccactgactagctgagccgtgggcactcgcttaacctctctgaaactccaaatcctcaatcataaaatgagagatatgaatgttgtagtctctagaggctccactagaactcaggaaaaagcattctaaatatccataattctactaaatcaaatactcagatgatccataaaggattgcaagtcaggctagcttttccctggagaaatccagcttgcatcacagggaactaatgcctcatttggcagtgagtccagatccactggtctgggtatgcaggtgccccacatttctgtattaatgyttctgctggtgccaagggctgcatgtagcctggaactagaaaggaagagattaaactgaaggcacaaacacctgcctcaaagcctgtagggagctctaaccattctgacaggccatttgcggtaattgtcctgtctgatccaataaactggctattcaagcaccgagaggttgatgcctcctgtcagttga

SEQ ID NO: 271508 - DNA, 560 bp, Homo sapiens
ggagaaatactcttccaattattctgaacacattcacaatacatacactatagtctgtctgaaatataatctaatgaaagataactaggttggagggtggaggttgaaaraactaggtttttttgtccaaatgacatcattacttatagggtgacctctgataaatttcttaagttttttgaatcttagtttcttcctatatgaattcactagcctaccaaatgattggagagaagcattctcatacatgagaaagaggataagcaactatcccccttctagttctacattcaggtagggaagtaaaagggaactagggtttgttgagaacatgccaggcattctcgcatcagacttacagctactccatgatatttggtgttattcccatttcatcaatcatgaaactgaggctaagagctcctaggttggtcacacaactaaactgtcagtttctttatcagaccaattactggttctatgcccaatatccagcatgtttagcagaggtaggtgcttatgaacgtttgcaggaagaatggatatgggaggaaacaaaa

SEQ ID NO: 271509 - DNA, 560 bp, Homo sapiens
ggagaaatactcttccaattattctgaacacattcacaatacatacactatagtctgtctgaaatataatctaatgaaagataactaggttggagggtggaggttgaaagaactaggtttttttgtccaaatgacatcattacttatagggtgacctctgataaatttcttaagttttttgaatcttagtttcttcctatatgaattcactascctaccaaatgattggagagaagcattctcatacatgagaaagaggataagcaactatcccccttctagttctacattcaggtagggaagtaaaagggaactagggtttgttgagaacatgccaggcattctcgcatcagacttacagctactccatgatatttggtgttattcccatttcatcaatcatgaaactgaggctaagagctcctaggttggtcacacaactaaactgtcagtttctttatcagaccaattactggttctatgcccaatatccagcatgtttagcagaggtaggtgcttatgaacgtttgcaggaagaatggatatgggaggaaacaaaa

SEQ ID NO: 271510 - DNA, 560 bp, Homo sapiens
ggagaaatactcttccaattattctgaacacattcacaatacatacactatagtctgtctgaaatataatctaatgaaagataactaggttggagggtggaggttgaaagaactaggtttttttgtccaaatgacatcattacttatagggtgacctctgataaatttcttaagttttttgaatcttagtttcttcctatatgaattcactagcctaccaaatgattggagagaagcattctcatacatgagaaagaggataagcaactatcccccttctagttctacattcaggtagggaagtaaaagggaactagggtttgttgaraacatgccaggcattctcgcatcagacttacagctactccatgatatttggtgttattcccatttcatcaatcatgaaactgaggctaagagctcctaggttggtcacacaactaaactgtcagtttctttatcagaccaattactggttctatgcccaatatccagcatgtttagcagaggtaggtgcttatgaacgtttgcaggaagaatggatatgggaggaaacaaaa

SEQ ID NO: 271511 - DNA, 509 bp, Homo sapiens
cataactgatttgaaagtaacatttgttataagcttaagtctcgatgctattatcccatggcagttaatttcaaccactgtgaaatgtcaagggtgacctgtttatagtgactctcattcttttcccttgccaaagcagaaggcactagataagcayctagattctaggaagttgaggaacaggcacctgacacccctgatgattgattaatctccttctcccccaaattgaatcaaaggcatccacagctgttgggtggtcccactctttattccctttgacacttcctattggctgctactagagttaaatcctaaaatagacatctaataatggacttccactgccctcaaacttttgaagtgtctttcctagaaagtaccttgaaatcctacccattctttaacattcacctctaatctcattatccaagttggaattaattattctttccttcatatttttatgacacttggcttttctatgttataaggacaacctcacatta

SEQ ID NO: 271512 - DNA, 466 bp, Homo sapiens
atgtctatcacaatgtgatagacacacacagtggtaaatacataacaaccacctttccagggtttgtgttgggggtggggagtagggaaaattcctgatttaagtgttttccggtttttgtagtgtaaatattgctactacgccctatttcaagctatcaatgtgagtcgctgaatgtgaagttgcagagatatgcaccgtcagctcctgtgacctggcacaggctggctccagccaaccacctgtctgtcaacacagagactatggcaacctctagagaggagtggcagctccttcactttcaccttcctcgtctttagcacattccttttttggccagctctaactcagaagaggsttctaggaatcttatttctggtttaacaagttatttttggcttcatggagaacaaactgccattattagtatttttaatttatttggtggttattgccctcatcagct

SEQ ID NO: 271513 - DNA, 466 bp, Homo sapiens
atgtctatcacaatgtgatagacacacacagtggtaaatacataacaaccacctttccagggtttgtgttgggggtggggagtagggaaaattcctgatttaagtgttttccggtttttgtagtgtaaatattgctactacgccctatttcaagctatcaatgtgagtcgctgaatgtgaagttgcagagatatgcaccgtcagctcctgtgacctggcacaggctggctccagccaaccacctgtctgtcaacacagagactatggcaacctctagagaggagtggcagctccttcactttcaccttcctcgtctttagcacattccttttttggccagctctaactcagaagagggttctaggaatcttatttctggtttaacaagttatttttggcttcatggagaacaaactgccattattagtayttttaatttatttggtggttattgccctcatcagct

SEQ ID NO: 271514 - DNA, 616 bp, Homo sapiens
aagtgggagctaaattatgagaacacatggacacatagaggggaacaatgcaaacactgggcctatcaaagggtagagtgagaggagggagaggatcaggaaaaataacaaatggatactaagcttaatgctggggtgatgaaataatctgtatcacaaaccccatgacacaagtttgtctgtgtaacaaacctgcacatgtacccctgaacttaaaataaaagtaaaaaaaagaagttcccagtttttggatgatgatgtaccagacactggagatttacgcttttagtttttattcatgatccatttggagaggtcttccctagccaccctgtccacagctgtacctctcatctgaatgtacttctttaattggtttattttgtttcataacatttawccttacctcacataatattatattagtatattgtttttacacagtaaaatgtctacagttctcctgctggaatataacctccatgagggcagacaggtcttgtttcctgcctggagaattgtactaatacctggtatatagcaggtactcaaacttttttttaagcaaatgaaaacattttctttaaaagcaaatagtatctcaatattgcctcct

SEQ ID NO: 271515 - DNA, 563 bp, Homo sapiens
tggggtgatgaaataatctgtatcacaaaccccatgacacaagtttgtctgtgtaacaaacctgcacatgtacccctgaacttaaaataaaagtaaaaaaaagaagttcccagtttttggatgatgatgtaccagacactggagatttacgcttttagtttttattcatgatccatttggagaggtcttccctagccaccctgtccacagctgtacctctcatctgaatgtacttctttaattggtttattttgtttcataacatttaaccttacctcacataatattatattagtatattgtttttacrcagtaaaatgtctacagttctcctgctggaatataacctccatgagggcagacaggtcttgtttcctgcctggagaattgtactaatacctggtatatagcaggtactcaaacttttttttaagcaaatgaaaacattttctttaaaagcaaatagtatctcaatattgcctcctgcagtcctgtggctctactgtttgaccatgggagtatatgttatctctccctatttattatccccatttgaaaaataa

SEQ ID NO: 271516 - DNA, 610 bp, Homo sapiens
ctttgttctttttgcttaagattgcttaactatttgggatcttttttggttccatatgaattttagaatagtttttttctaattcggtgagaaatgacttcgcggggtttgataggaatagtgctgaatctgtagattgctttgggcagtatggctattttaatgatattgttcttccaattcataagcatggaatgctttttcatttgtttgtgtcatctatgattttttcttcagtgttttgtagttctccttgtagagatctttcacctccttggttacatgtattcctaggcatttttaaatggctattgtaaacgggattgcattcttgrtttgcctcttaccttgaatgttattaatgtatagaaatgctactgatttttgcacattgattttgtatcctggaattttaccgaagtcatttagcagtaacagtagccttttggcagagtgtttagggttttctgtgtataggatcatatcaccggtgaagacagatagtttgacttcttttcctatttggatgtcttttatttctttctcttgtctgattgctctggcaaggacttccagtactatgttgaataggagtcgtgagagtgggcat

SEQ ID NO: 271517 - DNA, 610 bp, Homo sapiens
ctttgttctttttgcttaagattgcttaactatttgggatcttttttggttccatatgaattttagaatagtttttttctaattcggtgagaaatgacttcgcggggtttgataggaatagtgctgaatctgtagattgctttgggcagtatggctattttaatgatattgttcttccaattcataagcatggaatgctttttcatttgtttgtgtcatctatgattttttcttcagtgttttgtagttctccttgtagagatctttcacctccttggttacatgtattcctaggcatttttaaatggctattgtaaacgggattgcattcttggtttgcctcttaccttgaatgttaytaatgtatagaaatgctactgatttttgcacattgattttgtatcctggaattttaccgaagtcatttagcagtaacagtagccttttggcagagtgtttagggttttctgtgtataggatcatatcaccggtgaagacagatagtttgacttcttttcctatttggatgtcttttatttctttctcttgtctgattgctctggcaaggacttccagtactatgttgaataggagtcgtgagagtgggcat

SEQ ID NO: 271518 - DNA, 574 bp, Homo sapiens
aagttcttaaatttgtgtgtgtgtgtaaaacacatacgcatacatttataaaagtagcatacagttaatatgcttttgtagtcatctttatactttctttgtcaacatatacaggtggtcaaaggataaaatagcttttgcgtgtgttgacccttttacctaggctgcccttcttttactcttaagagacttttctgatctccctgatttgtctgtttcccattggaagctctcattgctkagtggatttctcctgggcactaataacaattgtaactttttatttctgtgtgatttttgattgtctctctctagagactatgctgtgaactacatatagatagggactaagtattcccaaggcctagcacagtgcccgacacacagtaggttaaactttggtttggacgaatgaatgataagttttcagatctacaagttattccattgcatgcataaaagattgcttgtcccactatagtttaatttgaggattcttattggctattataaatgggatactaagaaactttatataaaacagccttgcctacatccttagttatttagaaaa

SEQ ID NO: 271519 - DNA, 574 bp, Homo sapiens
ttggtcatattctcaccctggatcaatcgcatggtgtgatgaatggggtgcttttattatttagacctggtcttcttgcccactctacttgtggtggccatggggtactagaaccggcactcccaccactatcacatgattagagaatgggaggaagagtcttctaatgggatgtggtggtattataggctgtgttaacagataaaaacaaccagtctgctacttttcttayaggactgttgtgagaattcaatgatagaacttggttgtatcctggtctggaatatagcaagctcttactaatatgattatttattggaaggatatttgtgtctaggcatcttgcagaaagtagtcactttgttaattgtttaaacctctgaatgagtttattctaaacatgtaagaacgagttctaggaggtcatatggtaagagacaaaaggcaaaggagccatccttactcttcgtagggattaggctagaaaagggcactgggggttagaaaaggaagtctatcttttccaacctgggattcctcataataagtacttatttttggtggcagtcgtagg

SEQ ID NO: 271520 - DNA, 644 bp, Homo sapiens
taatattcaattctctttaatcttgctcatacattctcctctacgctctcctgcccccttttccacaaaattgcgggcctgtttttatgagggtgccacctcggcagtgagacagtgccccatgtttgtgctgatccatctgaccctttcctggtgcttttccatgaggaaaaaatggaacaatgaggagtcggtgcttgatctaatgttgcctgttgtttaacacaatcacagaaaggaagacaaaaaggcataactatttctttgatgtgggcctcttgctttaatttaaaactctgatattaagcaggttagctcttcccagctcagctcagctcttgaaatttcatggaagaaattctgtttttattggtctaaattttgtgtcttttatatagaaaaacggtaataaaattgcatcttatatttaaaaattgaatkccttctgttttgccattttactgaagagaaaatctgtgtagcctattggcattattaacagtgaagctccaagtactaatattcagaaaaaataatgaatcaaaatccaactatttctcagtaccattttctttttttataaactttctattttattgtctgtaatttaaaaacttctgtggaaaagagtttaaaattttcaa

SEQ ID NO: 271521 - DNA, 576 bp, Homo sapiens
tctttatggtcgcttgacattccacataatttgttggttcctttttctatttcaaaaaaattgctaatttaaaagggattgcattgaatctgtaactcgctttaggcatcatgagcattcttcataatatcaagtcttacaacccttaaacatgagcatgctcaaaagtgagttgtttaatttccatatatatgttgctatttttgttttcttctgttattcatttctagttttattccattttgatcagaaataatagtcactgaaaggctaaaccactctgggaagtgacccccattatagaacattacaaagakatgtgagggcaccacttctgccctgatgggctagagggatgtgttctctgagatgacacattgcacacaaatgcagggaacagtataacccccttttcgtgtaaactcttccctatttttctaaagtattaatgatagtggtggctttgaagtcttgaggaaggtctggcagtgccgtgaagctgcctgctacaagtgataccagggggaataattaaaaccataccaactgtagtaacatgaataaatacagcctagt

SEQ ID NO: 271522 - DNA, 575 bp, Homo sapiens
gaccaaaatactaaccctaaccagtttattatctcaaagaattggaaaaacaaagttttcgaatactacgggattagaagagtaaacaagatatgccttttctttggagctacatatatgtattaaaaatgggatgtacaaagaattttttatcacatggagaagtgcttatgagatgatataacattaaacaaattaatgaaaggcacacataaaaagtataaccaaacttatacattagaactcaaaatttaaaatgtgtagaaaaatgattgagaggaaatatgccgaattataggaattgatgtgtttcttataggaatcaggatcctgtgagaaattaaattgctttattgattmtcttgtacttttatagtttccaaaagttctacagagagtgtaatgtagcaccttagtcaggaataaacatctctttaaataagcagcagagaatttcaaaggaagtgtgtggtatgggtttatgtgtttctttcaagatctaatattttccacgtagtgcttcagaaaagacaaggtaatttcaacaacttaaccccatcatcaagagggtgtta

SEQ ID NO: 271523 - DNA, 575 bp, Homo sapiens
gaccaaaatactaaccctaaccagtttattatctcaaagaattggaaaaacaaagttttcgaatactacgggattagaagagtaaacaagatatgccttttctttggagctacatatatgtattaaaaatgggatgtacaaagaattttttatcacatggagaagtgcttatgagatgatataacattaaacaaattaatgaaaggcacacataaaaagtataaccaaacttatacattagaactcaaaatttaaaatgtgtagaaaaatgattgagaggaaatatgccgaattataggaattgatgtgtttcttataggaatcaggatcctgtgagaaattaaattgctttattgattatcttgtamttttatagtttccaaaagttctacagagagtgtaatgtagcaccttagtcaggaataaacatctctttaaataagcagcagagaatttcaaaggaagtgtgtggtatgggtttatgtgtttctttcaagatctaatattttccacgtagtgcttcagaaaagacaaggtaatttcaacaacttaaccccatcatcaagagggtgtta

SEQ ID NO: 271524 - DNA, 575 bp, Homo sapiens
gaccaaaatactaaccctaaccagtttattatctcaaagaattggaaaaacaaagttttcgaatactacgggattagaagagtaaacaagatatgccttttctttggagctacatatatgtattaaaaatgggatgtacaaagaattttttatcacatggagaagtgcttatgagatgatataacattaaacaaattaatgaaaggcacacataaaaagtataaccaaacttatacattagaactcaaaatttaaaatgtgtagaaaaatgattgagaggaaatatgccgaattataggaattgatgtgtttcttataggaatcaggatcctgtgagaaattaaattgctttattgattatcttgtacttttatagtttccaaaagttctacagagagtgtaatgtagsaccttagtcaggaataaacatctctttaaataagcagcagagaatttcaaaggaagtgtgtggtatgggtttatgtgtttctttcaagatctaatattttccacgtagtgcttcagaaaagacaaggtaatttcaacaacttaaccccatcatcaagagggtgtta

SEQ ID NO: 271525 - DNA, 576 bp, Homo sapiens
tctttatggtcgcttgacattccacataatttgttggttcctttttctatttcaaaaaaattgctaatttaaaagggattgcattgaatctgtaactcgctttaggcatcatgagcattcttcataatatcaagtcttacaacccttaaacatgagcatgctcaaaagtgagttgtttaatttccatatatatgttgctatttttgttttcttctgttattcatttctagttttattccattttgatcagaaataatagtcactgaaaggctaaaccactctgggaagtgacccccattatagaacattacaaagatatgtgagggcaccacttctgccctgatgggctagagggatgtgttctctgagatgacacrttgcacacaaatgcagggaacagtataacccccttttcgtgtaaactcttccctatttttctaaagtattaatgatagtggtggctttgaagtcttgaggaaggtctggcagtgccgtgaagctgcctgctacaagtgataccagggggaataattaaaaccataccaactgtagtaacatgaataaatacagcctagt

SEQ ID NO: 271526 - DNA, 576 bp, Homo sapiens
tctttatggtcgcttgacattccacataatttgttggttcctttttctatttcaaaaaaattgctaatttaaaagggattgcattgaatctgtaactcgctttaggcatcatgagcattcttcataatatcaagtcttacaacccttaaacatgagcatgctcaaaagtgagttgtttaatttccatatatatgttgctatttttgttttcttctgttattcatttctagttttattccattttgatcagaaataatagtcactgaaaggctaaaccactctgggaagtgacccccattatagaacattacaaagatatgtgagggcaccacttctgccctgatgggctagagggatgtgttctctgagatgacacattgcasacaaatgcagggaacagtataacccccttttcgtgtaaactcttccctatttttctaaagtattaatgatagtggtggctttgaagtcttgaggaaggtctggcagtgccgtgaagctgcctgctacaagtgataccagggggaataattaaaaccataccaactgtagtaacatgaataaatacagcctagt

SEQ ID NO: 271527 - DNA, 576 bp, Homo sapiens
tctttatggtcgcttgacattccacataatttgttggttcctttttctatttcaaaaaaattgctaatttaaaagggattgcattgaatctgtaactcgctttaggcatcatgagcattcttcataatatcaagtcttacaacccttaaacatgagcatgctcaaaagtgagttgtttaatttccatatatatgttgctatttttgttttcttctgttattcatttctagttttattccattttgatcagaaataatagtcactgaaaggctaaaccactctgggaagtgacccccattatagaacattacaaagatatgtgagggcaccacttctgccctgatgggctagagggatgtgttctctgagatgacacattgcacacaaatgcagggaacagtataacccccttttcrtgtaaactcttccctatttttctaaagtattaatgatagtggtggctttgaagtcttgaggaaggtctggcagtgccgtgaagctgcctgctacaagtgataccagggggaataattaaaaccataccaactgtagtaacatgaataaatacagcctagt

SEQ ID NO: 271528 - DNA, 340 bp, Homo sapiens
gttgtaatggttctttaaaatatatttttgctgagagtgctagctcacacctgtaatgtaaacactttaggtggccaaggtgggattatcgcttgatcccaggagttcaagatgagtctgagcaacataagtaggctcagtctctagaaaaaaattaaaaaattgtctgggtgtagctttgcatgcctgtagtcccagctacttgagaggctgatttgaaagcatcactggagcctaagaatttgaagatgcagtgacccatgattcagccactgcattgacagartgagatatgtgtgtgtgtgtctgtgtgtgtgtataaagaatttgtatgtgaaaa

SEQ ID NO: 271529 - DNA, 625 bp, Homo sapiens
acccagatggaagggggttcccagtgagggcagggccaggctgcatgcacctcttcaggaatgttctcctcattgtccaacttcaaggtgtgcatcctctgtgtgcatgcagtccatggcaggctctgcctggggaaccgtccagctgcacacctgcaatgtggtggtgaccctcttgaatgagtggttgtgggccccatggcagtcatcagagagggagatgcttagcccaccaagccgagagccctgccacagccttctgtgaggcctccatctrctctgggttcttgccctgaaaggctgtcctgaagtcaaacagaagaaggtgggcctctcttccagggctgctctttatcccactgacagctccctagagggtgactaagacagcggggacagattcctcaggcagaaggactggagtttaggctgacgggttcattccatacccccacatgagatgacacaaggcaggggctgtgggacaaaggcattgcctttccttctgggatgaggaatggcataggagacagggtatggtggggctggggttgagcgatgggcttcactgagtaagtgtcctggttatctgtccacagacccagaacaagtggcatcccaggag

SEQ ID NO: 271530 - DNA, 604 bp, Homo sapiens
tctcattcacccagcctaatttttaaccttaccttcctgctcccaccctctcttcactctgaacaagattttactaggttgttgttatgttctggggttcggagaatctgactagtgtgagtttcccaaggtaaaggtaatgccttaataattttcactttaattgctstttgcgcagtgttttgcacaaaatttaacacaataattgctcccggagtaaatgcataaatctttgtaatatcctatttggctcccttagagtctgaaacttttccccttcaaccatccagagtcctgtctaaccaaagtgaaaatggggaactccctctttctggctggcatcactgctgagaacggaaataaatgctgtctatgccaactccctagaacaagtataggtttcatctagactagttttcaaaatgaggaaacaggatgcagacaaatactttattcccactttttcgcctggggtttattaacaaggtgaaattatacagaagaataaattagtttagctgaaaaaagaaaaaatgtatagttaatggagggaaaaaattgaaaatgcaataaaaccagaagatgttcaagaattcaaagttgt

SEQ ID NO: 271531 - DNA, 604 bp, Homo sapiens
tctcattcacccagcctaatttttaaccttaccttcctgctcccaccctctcttcactctgaacaagattttactaggttgttgttatgttctggggttcggagaatctgactagtgtgagtttcccaaggtaaaggtaatgccttaataattttcactttaattgctgtttgcgcagtgttttgcacaaaatttaacacaataattgctcccggagtaaatgcataaatctttgtaatatcctatttggctcccttagagtctgaaacttttccccttcaaccatccagagtcctgtctaaccaaagtgaaaatggggaactccctctttctggctggcatcactgctgagaacggaaataaatgctgtctatgccaactccctagaacaagtataggtttcatctagactagttttcaaaatgaggaaacaggatgcagacaaatactttattcccactttttsgcctggggtttattaacaaggtgaaattatacagaagaataaattagtttagctgaaaaaagaaaaaatgtatagttaatggagggaaaaaattgaaaatgcaataaaaccagaagatgttcaagaattcaaagttgt

SEQ ID NO: 271532 - DNA, 583 bp, Homo sapiens
agccaacatccttatataaatagaaactgtccaacaagataaacagacgaacaaaaaacaataaaaaagttgtgctaccaccaatcaaatgatttttttgtttttacattttttcaataaatacttgcttcttactctgtcagagaagcaataaataacttttggtctgatattttataatttatcaattgctcttactcaaatagacacttggcaatttcattgtgtctcaaattactttttagcagaataaaataaactaggaataaacattacaaaaaygtgtacagaatatgagaaaaacatagaaagtttatgaaatatatgaatgtagacataagcaaatagacaatttgtatcatattcttaggcagcaaatctcaatattatcaacataaattgtccttaagtttatttataaattcaattttgttcctagacagataccattaaatattggaagtacacgttagtataaaatattagagagaggaaaacacacataagaatagacaagaaaactctgaaaaaaaagcaaaaaacaagactggcaagctctgtgaaaaatcttgattgattaaaa

SEQ ID NO: 271533 - DNA, 583 bp, Homo sapiens
agccaacatccttatataaatagaaactgtccaacaagataaacagacgaacaaaaaacaataaaaaagttgtgctaccaccaatcaaatgatttttttgtttttacattttttcaataaatacttgcttcttactctgtcagagaagcaataaataacttttggtctgatattttataatttatcaattgctcttactcaaatagacacttggcaatttcattgtgtctcaaattactttttagcagaataaaataaactaggaataaacattacaaaaacgtgtacagaatatgagaaaaacatagaaagtttatgaaatatatgaatgtagacataagcaaatagacaatttgtatcatattcttaggcagcaaatctcaatattatcaacatmaattgtccttaagtttatttataaattcaattttgttcctagacagataccattaaatattggaagtacacgttagtataaaatattagagagaggaaaacacacataagaatagacaagaaaactctgaaaaaaaagcaaaaaacaagactggcaagctctgtgaaaaatcttgattgattaaaa

SEQ ID NO: 271534 - DNA, 562 bp, Homo sapiens
agaaagtgtcatagtgcatccaggctgctataacaaaatacctcagactgggtaaaggataaacaacagaaatgtatttttcacagttatggagtctggaaagtgcaagatcaaggcagcagaaaatttagtatatgttgagagccctgttccccatagatggtaccatcttgcacacgggacaagggcattgccttcaacttcccttgaaagagcactgattccattcatgaagatgaagaactcttggcctcaccacttccccaaaggccacacgcctaaaattatccacataggaatttgcaaagggacataaacattcaggccatcgcaacaaaaactacatgggggatgrcatcattaatacttgaggtgtaaaaatgtgatgttcttatcgcaaaggaaataaatgatttattcttcatggcatataacaaaataaaggtccaaaagaaaatattttttatgaagataaatctatatggtaaaaaactaagtgttgataaggttaaccctacaggttgcatcaggattttcaaggtttctggtgatgagcaaggcc

SEQ ID NO: 271535 - DNA, 575 bp, Homo sapiens
tggtaaaaaactaagtgttgataaggttaaccctacaggttgcatcaggattttcaaggtttctggtgatgagcaaggccccagagtttcctcctgtgacatttacctggaagttgctcatgctgttattcaatttgaaagtagataatattgtttgtttctgttccaatatttactaaattcaaaataatatagggctctttatgcgtaattgtcaaacagtcattcagtcaatggtcctctgctgaggaagagcacagatacatccaaacacatatgatgttcctcaaatagaggacttctccctgtgcgggagtyacctatgttgcacttgatcagaggctttcccaggcgagcatttctctgcagccctaccacagacttaaccctggaaatctgactcagaaggtgatagatgaacacccaacctagcattctaatctaatggatcctctcttaataatcccttccagggatctgggagctttcctggattcgtctgccacacacagctaggctaaaacatttggatagaagctttgatcctcactggccctcctgccctgttctaccag

SEQ ID NO: 271536 - DNA, 523 bp, Homo sapiens
  misc_feature (1)...(523): n = A,T,C or G
gaggagggtgagcaatcagcagcccagcagggactttgcatagatttatggaggaaaagggctcaggggataaaaccttgaagaagttaacagacttcccttgtgasaaaacctaacagaatttagaactttgggaaccagacacccacattctagagacagccctgtatctagctaacttcttgggagatgcttgagagggcactgtgttctcattgtatgttatattcccaagctgttgcctgagaaaggctcaaagtgagagccttttctgacagtatacatactggctcagcctacatccttgataccactggccattcgacaagatgcacccacaggtaacacagtgtagcccagggcaggtccgtccatgccaggccacctgtgtcatctaatctgggcaacccgaccctgcctaccattaccctgtgtngcaaggggagcaggaaaggagggggcttttcctcacaggggcaggttttaagacacaggaaccctggtgggtctgtcatgttcatac

SEQ ID NO: 271537 - DNA, 523 bp, Homo sapiens
  misc_feature (1)...(523): n = A,T,C or G
gaggagggtgagcaatcagcagcccagcagggactttgcatagatttatggaggaaaagggctcaggggataaaaccttgaagaagttaacagacttcccttgtgagaaaacctaacagaatttagaactttgggaaccagamacccacattctagagacagccctgtatctagctaacttcttgggagatgcttgagagggcactgtgttctcattgtatgttatattcccaagctgttgcctgagaaaggctcaaagtgagagccttttctgacagtatacatactggctcagcctacatccttgataccactggccattcgacaagatgcacccacaggtaacacagtgtagcccagggcaggtccgtccatgccaggccacctgtgtcatctaatctgggcaacccgaccctgcctaccattaccctgtgtngcaaggggagcaggaaaggagggggcttttcctcacaggggcaggttttaagacacaggaaccctggtgggtctgtcatgttcatac

SEQ ID NO: 271538 - DNA, 579 bp, Homo sapiens
ttttagttattttaacactccaaaagggaactagttttctcatgcattttccaaatgtgtggcaggcagagactcaaatctaactcccttttgccccagcctaactctggcttgcaatcagaattttaaatttccagttctttcctgacactcaccaacactaactaaccttccataattcacaacattatcaactgttctttattggacatttcagacacagtatttcaattcttctttttgtcaaaaagcagtggatgtcatttaaaaaaattttttctcatttgtaaacattttacaggagaagaaagcggagaataatcccctgacaccccactgtaaaaaaaataaataaaaagcggaaaacttttgtgcccctttgtttaaacttctcttggcacagacaccccatcagaaagcctttgggttcaggtttcattttggaaacttcacagggcaatacatcctcagccatcctgttattttcttggttttgaatttcaaaactgtttgaggattccccaagatgccaacagtggccatgactcttgaartgtctagtaaatagcatcccttgtg

SEQ ID NO: 271539 - DNA, 569 bp, Homo sapiens
gtttgtgtatgctttaattactttctctttttctttactatgtttttttttccccagtggttatcatgagacttatgtaaaacctcttgtattttaatagtctagtttaagatgataacaatttagagtattctgaatttcagtatgtatttaccatttttagtgacatttatactttagtatttttcatattgttagttagcatttcgtcatatcaatgtgaagatttcttccagaccatggctggagaaggaaagaaggtgtgttttgcctgattcagggactatagagagaaccaagttctgcaggcctgtcacctaagtctcagatgagtatgaattctcttgtgtttttcacagatttttgcagtggcaggaccaagttcaaatgagttatagccaagtctacagtaagatgtggcagtattctgttttgaaccgaggaccatgattggcaagcttgccacttggtcaagtrcttaccctctaaagatgtcttccttggtctttgcctccagctgggtgtcacaaactctgaactggattccaaggctttcatgaatgcactta

SEQ ID NO: 271540 - DNA, 546 bp, Homo sapiens
aacatgcaaattctcatacctggaatccggactgtgtggagttgttcatctcatccctgtcgctttctgcaggtgggattgtgacatacatctctgcccagctcccgagtattttagctctgtttcctgtgcccagctcacagatgggattctgatatatcactgaagccagcacctaggttatgtgactcttacctcctgccttggtgmtgcccacaggggacattgggacatatcactcggccttgcacctaggtaatgtaagttttctgtcttgcattagtgctactcaccggggcgttgtgatgtattgctgggtctcacatccatgttatgtgactcttctgccggtgcccaggccacaatggccattgtgacatactgttgcatccaaaacctagatgatctacctctccttcctgagctttgcctaaggggacattgtgaaatatctatgagcccatcacccatgtggtgtgattttcttctcctgcctagtccctgcttaaagaaaggattgtgacatatcactgtgcccagcaccta

SEQ ID NO: 271541 - DNA, 546 bp, Homo sapiens
aacatgcaaattctcatacctggaatccggactgtgtggagttgttcatctcatccctgtcgctttctgcaggtgggattgtgacatacatctctgcccagctcccgagtattttagctctgtttcctgtgcccagctcacagatgggattctgatatatcactgaagccagcacctaggttatgtgactcttacctcctgccttggtgctgcccacaggggacattgggacatatcactyggccttgcacctaggtaatgtaagttttctgtcttgcattagtgctactcaccggggcgttgtgatgtattgctgggtctcacatccatgttatgtgactcttctgccggtgcccaggccacaatggccattgtgacatactgttgcatccaaaacctagatgatctacctctccttcctgagctttgcctaaggggacattgtgaaatatctatgagcccatcacccatgtggtgtgattttcttctcctgcctagtccctgcttaaagaaaggattgtgacatatcactgtgcccagcaccta

SEQ ID NO: 271542 - DNA, 546 bp, Homo sapiens
aacatgcaaattctcatacctggaatccggactgtgtggagttgttcatctcatccctgtcgctttctgcaggtgggattgtgacatacatctctgcccagctcccgagtattttagctctgtttcctgtgcccagctcacagatgggattctgatatatcactgaagccagcacctaggttatgtgactcttacctcctgccttggtgctgcccacaggggacattgggacatatcactcggccttgcacctaggtaatgtaagttttctgtcttgcattagtgctactcaccggggcgttgtgatgtattgctgggtctcacatccatgttatgtgactcttctgccggtgcccaggccacaatggccattgtgacatactgttgcatccaaaacctagatgatctacctctccttcctgagctttgcctaaggggacattgtgaaatatctatgwgcccatcacccatgtggtgtgattttcttctcctgcctagtccctgcttaaagaaaggattgtgacatatcactgtgcccagcaccta

SEQ ID NO: 271543 - DNA, 530 bp, Homo sapiens
agggaagtctgttgacttcttcaaggttttatcccctgagcccttttcctccataaatctatgcaaagtccctgctgggctgctgattgctcaccctactctcccatgtcaactgttttcttgtaaacagttatgcaaacacaagtatgcatcttactccccataaagatctaaatacagccagggccccaggtttgagagaagagagttggattaaaatcttcttttccttttcatttctgtgaccatatgaaaatgactgtgygcttcagttctccccagccctgaagtatgcataatgggattaggctagcatcaacttccagaaagagtcattggcgatatatgagatagaatgaatcaaaatcagttggatgtagttgctcttgcttgtaatcttagcagattggtagaccaagacgggtggaacacttaaggccaggggtttgaaaccagccatggccagcatggcaaaaacccttctccactaaaaatgcaaaaattagccagatgtgttgatgcatgcctgt

SEQ ID NO: 271544 - DNA, 530 bp, Homo sapiens
agggaagtctgttgacttcttcaaggttttatcccctgagcccttttcctccataaatctatgcaaagtccctgctgggctgctgattgctcaccctactctcccatgtcaactgttttcttgtaaacagttatgcaaacacaagtatgcatcttactccccataaagatctaaatacagccagggccccaggtttgagagaagagagttggattaaaatcttcttttccttttcatttctgtgaccatatgaaaatgactgtgtgcttcagttctccccagccctgaagtatgcataatgggattaggctagcatcaacttccagaaagagtcattggmgatatatgagatagaatgaatcaaaatcagttggatgtagttgctcttgcttgtaatcttagcagattggtagaccaagacgggtggaacacttaaggccaggggtttgaaaccagccatggccagcatggcaaaaacccttctccactaaaaatgcaaaaattagccagatgtgttgatgcatgcctgt

SEQ ID NO: 271545 - DNA, 530 bp, Homo sapiens
agggaagtctgttgacttcttcaaggttttatcccctgagcccttttcctccataaatctatgcaaagtccctgctgggctgctgattgctcaccctactctcccatgtcaactgttttcttgtaaacagttatgcaaacacaagtatgcatcttactccccataaagatctaaatacagccagggccccaggtttgagagaagagagttggattaaaatcttcttttccttttcatttctgtgaccatatgaaaatgactgtgtgcttcagttctccccagccctgaagtatgcataatgggattaggctagcatcaacttccagaaagagtcattggcgatatatgagatagaatgaatcaaaatcagtkggatgtagttgctcttgcttgtaatcttagcagattggtagaccaagacgggtggaacacttaaggccaggggtttgaaaccagccatggccagcatggcaaaaacccttctccactaaaaatgcaaaaattagccagatgtgttgatgcatgcctgt

SEQ ID NO: 271546 - DNA, 530 bp, Homo sapiens
agggaagtctgttgacttcttcaaggttttatcccctgagcccttttcctccataaatctatgcaaagtccctgctgggctgctgattgctcaccctactctcccatgtcaactgttttcttgtaaacagttatgcaaacacaagtatgcatcttactccccataaagatctaaatacagccagggccccaggtttgagagaagagagttggattaaaatcttcttttccttttcatttctgtgaccatatgaaaatgactgtgtgcttcagttctccccagccctgaagtatgcataatgggattaggctagcatcaacttccagaaagagtcattggcgatatatgagatagaatgaatcaaaatcagttggatgtagttgctcttgcttgtaatcttagcagattggtagaccaagacgggtggaacacttaaggccaggggtttgaaaccagccatggccagcatggcaaaaacccttctccactraaaatgcaaaaattagccagatgtgttgatgcatgcctgt

SEQ ID NO: 271547 - DNA, 571 bp, Homo sapiens
tctcccacacaagcctttcaccttccctcttaaactgagaacggagtggtttgctatgatgtttttaaattctcacaggcaagcattactctgtgctgccttttaataaaggctaattttaaccaaattaaagaagattgaatggattttcttgmtcataatggttgagtacaacatctcttaccttctactagttttcagtataactgaagtaacagaatgtcaatactccatggaggggtgctccgcttgctaaggctccctcctctgggctaggccttctacaccatggctgtcctgctgtggctggagctggaatttggattgacctctgtgtgtcttcctagcacacaataggtgtccaattagcatgggcagaatcaagctcctccctctcaccatttatttctccatttgtcccttgttgggaatggagagtcctgccactgagttcagcccagggttgaagttcaaatctcagctgatacttggtggatgttgacttttttgagaagaacttgggagaataaagcattataaaggcgctggccaggcacggtgtctcatgcct

SEQ ID NO: 271548 - DNA, 571 bp, Homo sapiens
tctcccacacaagcctttcaccttccctcttaaactgagaacggagtggtttgctatgatgtttttaaattctcacaggcaagcattactctgtgctgccttttaataaaggctaattttaaccaaattaaagaagattgaatggattttcttgctcataatggttgagtacaacatctcttaccttctactagttttcagtataactgaagtaacagaatgtcaatactccatggaggggtgctcckcttgctaaggctccctcctctgggctaggccttctacaccatggctgtcctgctgtggctggagctggaatttggattgacctctgtgtgtcttcctagcacacaataggtgtccaattagcatgggcagaatcaagctcctccctctcaccatttatttctccatttgtcccttgttgggaatggagagtcctgccactgagttcagcccagggttgaagttcaaatctcagctgatacttggtggatgttgacttttttgagaagaacttgggagaataaagcattataaaggcgctggccaggcacggtgtctcatgcct

SEQ ID NO: 271549 - DNA, 607 bp, Homo sapiens
gtttggtcctgggttggggggtgcagacatgatgtaatarttttctgtaccacatgttggacccaccagggtcgctggcaaatggtgagcgcaagggaaaaaagactggctaagtgattatatgggggatccctaatatcccttccccttttgaccacatgataatgtggacatcactgataacaacatgaggtgtgtgactgttacttgttccagctgctccagcaaagctcagtgggcaccagaaacacagtaggctgtaaccacctcctggccatcactaaccctacagccccaagcaggagcactactgaacaaatctgataccttgatttttctgtcctcaagacactggttcttcaaggtcctaggggataaagtagcgggatctgaaggccccaagtataatgagtgacctaggaatcccgttttgccctctctttgcctccacctttttggttgtgctatttactcatgaggtatcctccccttatccagtgaaattattttctaccactttcaaatgaggaccttaagaacgcaacagtagctgagattttctgtggacctcagcctcagagtccagtgctctggcacatttaactct

SEQ ID NO: 271550 - DNA, 607 bp, Homo sapiens
gtttggtcctgggttggggggtgcagacatgatgtaataattttctgtaccacatgttggacccaccagggtcgctggcaaatggtgagcgcaagggaaaaaagactggctaagtgattatatgggggatccctaatatcccttccccttttgaccacatgataatgtggacatcactgataacaacatgaggtgtgtgactgttacttgttccagctgctccagcaaagctcagtgggcaycagaaacacagtaggctgtaaccacctcctggccatcactaaccctacagccccaagcaggagcactactgaacaaatctgataccttgatttttctgtcctcaagacactggttcttcaaggtcctaggggataaagtagcgggatctgaaggccccaagtataatgagtgacctaggaatcccgttttgccctctctttgcctccacctttttggttgtgctatttactcatgaggtatcctccccttatccagtgaaattattttctaccactttcaaatgaggaccttaagaacgcaacagtagctgagattttctgtggacctcagcctcagagtccagtgctctggcacatttaactct

SEQ ID NO: 271551 - DNA, 567 bp, Homo sapiens
ctgcctggcctgcctggggtttggtgaggctgttttgtggtcagctgctttagaagctcactttctctgcaatcaaacagtgactgttttcatgtctgtttatgggtttaaaaaatcctaatatttcctttatagtagttcagcttgtatgtgtttatttgtataaattttattagaataaagakagcttaagacaatagcattttaaggtcttaatggggcatagactttcatgtcacaacagctattgttgacctctgtttgctacctttgtgtaatgtatacacataaagtacagccagatgtgactagagttgagcttcttgggcttgcttgctggcctgcagtcaggtggactctggctgtgagggcggtgcccaccctggatctacatcccccaccccctctcgttagtccctgagtaaccaccaaggccgtgctaattagagggcgagtgatgggcatcgggcaccccaatactatccgggaagatttgaaggccatctgggctggagctgttgggattaggggctgtggctgtcttggcttgtcatggggccacccaca

SEQ ID NO: 271552 - DNA, 567 bp, Homo sapiens
ctgcctggcctgcctggggtttggtgaggctgttttgtggtcagctgctttagaagctcactttctctgcaatcaaacagtgactgttttcatgtctgtttatgggtttaaaaaatcctaatatttcctttatagtagttcagcttgtatgtgtttatttgtataaattttattagaataaagatagcttaagacaatagcattttaaggtcttaatggggcatagactttcatgtcacaacagctattgttgacctcygtttgctacctttgtgtaatgtatacacataaagtacagccagatgtgactagagttgagcttcttgggcttgcttgctggcctgcagtcaggtggactctggctgtgagggcggtgcccaccctggatctacatcccccaccccctctcgttagtccctgagtaaccaccaaggccgtgctaattagagggcgagtgatgggcatcgggcaccccaatactatccgggaagatttgaaggccatctgggctggagctgttgggattaggggctgtggctgtcttggcttgtcatggggccacccaca

SEQ ID NO: 271553 - DNA, 567 bp, Homo sapiens
ctgcctggcctgcctggggtttggtgaggctgttttgtggtcagctgctttagaagctcactttctctgcaatcaaacagtgactgttttcatgtctgtttatgggtttaaaaaatcctaatatttcctttatagtagttcagcttgtatgtgtttatttgtataaattttattagaataaagatagcttaagacaatagcattttaaggtcttaatggggcatagactttcatgtcacaacagctattgttgacctctgtttgctacctttgtgtaatgtatacacataaagtacagccagatgtgactagagttgagctkcttgggcttgcttgctggcctgcagtcaggtggactctggctgtgagggcggtgcccaccctggatctacatcccccaccccctctcgttagtccctgagtaaccaccaaggccgtgctaattagagggcgagtgatgggcatcgggcaccccaatactatccgggaagatttgaaggccatctgggctggagctgttgggattaggggctgtggctgtcttggcttgtcatggggccacccaca

SEQ ID NO: 271554 - DNA, 574 bp, Homo sapiens
aaataggtagtggtttcttaattgatcaaaaccttaacaaaactacagtaagtaaaagcaaccaggaaatgtaacctaatcaaaggagaaaaatatatattcaagtgaacctaaagaagtggagatctaggaattatttttttaacttaaaatccttttatttttctttactttttcattttatgcagaggatcttactttatctcctgggacagagtacactggtggaatcacagctcacttgtaacctcaaatttcgcaagtcaagcagtcatgccacctatgtcttctgagtaaatatgaccacagtttgtgcacattacccctcctgtatagtttctttaaaaaaatttgtacaaacagtatgttgctgtgttgcctcggctggtctcaaactcctggtctcaggcaatcygactgcttcagtctgaaagtgctggcacaagctaccatacctggaattgtttctcttttaagaaaaaatagctttaaatcattaatagtaaaataaaacaaagaaaggtattgcataacgatagagggttcaattcaacaagaagacttaactatcgta

SEQ ID NO: 271555 - DNA, 566 bp, Homo sapiens
tgctgtgttgcctcggctggtctcaaactcctggtctcaggcaatctgactgcttcagtctgaaagtgctggcacaagctaccatacctggaattgtttctcttttaagaaaaaatagctttaaatcattaatagtaaaataaaacaaagaaaggtattgcrtaacgatagagggttcaattcaacaagaagacttaactatcgtaaatgtagatgcacccaactttggggaacatagagttatacaacaattactgctagacctacaataagactcaagtagacacacaataatagtaggggaatgcaactccccactaagtgtttgacagattatctaggcagaaacttaacaaagaaattctggagtttgattcgacacttgatcaattgaaactaatagacatttatagtatatgcaacacatcatctaaagaaagtaaattcttctcatctgctcacagaatatgacaggccacaatggaacaaagataaaaatcaataccaagaaaatctcacaaaatcacagaatgatattgaaattaaacaacttgctcctgaatgaa

SEQ ID NO: 271556 - DNA, 566 bp, Homo sapiens
tgctgtgttgcctcggctggtctcaaactcctggtctcaggcaatctgactgcttcagtctgaaagtgctggcacaagctaccatacctggaattgtttctcttttaagaaaaaatagctttaaatcattaatagtaaaataaaacaaagaaaggtattgcataacgataragggttcaattcaacaagaagacttaactatcgtaaatgtagatgcacccaactttggggaacatagagttatacaacaattactgctagacctacaataagactcaagtagacacacaataatagtaggggaatgcaactccccactaagtgtttgacagattatctaggcagaaacttaacaaagaaattctggagtttgattcgacacttgatcaattgaaactaatagacatttatagtatatgcaacacatcatctaaagaaagtaaattcttctcatctgctcacagaatatgacaggccacaatggaacaaagataaaaatcaataccaagaaaatctcacaaaatcacagaatgatattgaaattaaacaacttgctcctgaatgaa

SEQ ID NO: 271557 - DNA, 424 bp, Homo sapiens
taagactacaatcccagcatgcttggggctcacggacattccccttcactggataacgatgggaaggttgtgtgcacctcgctgcgcttcctgggaaatgtagtttcataaagcctctcagaccttttgtcatagggctgcaggactacaatcccagtatgtatcaggatcaaaaacagtatgcgtcactgggaaaagatgtgggsctgtgtgcgtctccctacgttttctgggagatgtatctcataaacactcttggccctttggtcacagggctgcaggactacaatcccagcatgcagcgagttcagggactctgtgtgtgtgtgtgtgtgtgtgtgtgtgtgtgtgtgtgtgtgtgtgtgtccctggaggaagacgtggagctgtgcgtgcctcgctgggcttgctgggagatgcattc

SEQ ID NO: 271558 - DNA, 500 bp, Homo sapiens
gcatgcaccgggctcagggaaagttggcgtcactggagaaagaggcagggttgtgtgcacctcctgggcttggtaggagatgtagtctcataaacactcccagacctttcatcaccgggctgcaagactacaatcccagcatgcacccrgctcagggacagtgcgcattactggaggaaaaggctaggctgtggacgcctccttctgcttcctgggagatgtagtttcatagagactcccagaactttcatcacagggatgcaggactaccatcccagtatgcaatggggtcagggtacagtccgcgtcagtggaaaaagaggcggggctgtgtgcgtcttcctaggcttgctgggagatatatgctcataaacactcccagccctttggtcgcagagcttcaggactacaatcttagcatgcacctgtctcagggacaatgcgtgtcactggaggaagaggcggggctgtgtgctcctccctaggattgctgggagttg

SEQ ID NO: 271559 - DNA, 622 bp, Homo sapiens
agcatgcacctgtctcagggacaatgcgtgtcactggaggaagaggcggggctgtgtgctcctccctaggattgctgggagttgtattctcataaacactcccagccctttggtcaaatggctacaggactacaatcccagcatgcgccagtctccggggtaaggcatagccctggaagaaggggcaaagttgtacatgccccacctaatatgctgggagmtgtagtccgttaactgctctcagcctatttgtcggtgggcttcagaaccataatcccagcatataccgggatccggggtgcatagccctggagggagggacagagctgtgtggacttcccagtgtccaaagcattgctgagttcttatgctatgccgactctttgccacagagagtgagtacagaggtggacctggaggacaggtctgggctgagcattgaggagggtattaccctatgtaggcaccttacctttgcccaaatcaggcgggttgtcctcacccgattggccctatgcttctcaggttcctctttcagctgcacccagggttccttccagagcattgcaccttctgcagcttagggcactgccttctttcctaaactgctgtggaaactgtc

SEQ ID NO: 271560 - DNA, 575 bp, Homo sapiens
  misc_feature (1)...(575): n = A,T,C or G
gcactcagttaccagctgactcacgtcagaaagactgggcccggaacagagacaacacctgacttttatacacacttcacaaaagggggtgggctagcttgaagcgagcttacagtggcgtgaaagcaggaanacagaggcaggacaaagacaggattgcacatgaccgttgccaagcaacccacatgtccattatctaggtttccctgggcatgggcttatcctataaccctcactatggtgcccaaacagctgtagttcagcctactcaggcttctcatgacttacattgtacttcttagataaaacacaatacttgaagtcactagttacagagaacaakaatctataaactcattccataaaacaaagggaatttgtttttcttttccatgtgttgggggagtgttgggagaacctccagagcacattacataatattatcaagaattttcctgggtctgggctgtgcctattgctgcctctgggacaagtcagcctaatacaagaaaacttatttctctttctttttaattttatttttctttaatttccttccttagtcctgcagccct

SEQ ID NO: 271561 - DNA, 575 bp, Homo sapiens
  misc_feature (1)...(575): n = A,T,C or G
gcactcagttaccagctgactcacgtcagaaagactgggcccggaacagagacaacacctgacttttatacacacttcacaaaagggggtgggctagcttgaagcgagcttacagtggcgtgaaagcaggaanacagaggcaggacaaagacaggattgcacatgaccgttgccaagcaacccacatgtccattatctaggtttccctgggcatgggcttatcctataaccctcactatggtgcccaaacagctgtagttcagcctactcaggcttctcatgacttacattgtacttcttagataaaacacaatacttgaagtcactagttacagagaacaataatctataaactcattccataaaacaaagggaatttgtttttcttttccmtgtgttgggggagtgttgggagaacctccagagcacattacataatattatcaagaattttcctgggtctgggctgtgcctattgctgcctctgggacaagtcagcctaatacaagaaaacttatttctctttctttttaattttatttttctttaatttccttccttagtcctgcagccct

SEQ ID NO: 271562 - DNA, 515 bp, Homo sapiens
  misc_feature (1)...(515): n = A,T,C or G
acaagtataggtttcatctagactagttttcaaaatgaggaaacaggatgcagacaaatactttattcccactttttggcctggggtttattaacaaggtgaaattatacagaaaaataaattagtttagctgaaaaaagaaaaaatgtctagttaatggagggaaaaaattgaaaatgccttaaaaccagaagatgttcaggaattcaaagttgttgatgcctanaaatactactgrtttttgtacattggttttgtgtcctaaaactttacttgcttatccatttcaggaggcttttcaagttttctccannaggagttttggaaagactttagcattgtctacgtnctgactctttctgcanntggagaaagagaattcaatttttttttctatttgtctgcctttttcttttctcttggctgcttgctgtggataggacttttaaatctaactaaattgtatttgctcgatttttgcctattctaatatgtctccaattaattttatatct

SEQ ID NO: 271563 - DNA, 435 bp, Homo sapiens
acaataatctataaactcattccataaaacaaagggaatttgtttttcttttccatgtgttgggggagtgttgggagaacctccagagcacattacataatattatcaagaattttcctgggtctgggctgtgcctattgctgcctctgggacaartcagcctaatacaagaaaacttatttctctttctttttaattttatttttctttaatttccttccttagtcctgcagccctgtgaccaaaggactgggagtgcacagttacacatctgttcacttgtcatgagactgttttcctttaaccccatgaacatacttaccatagcttctttcaaatcttacctaccgattacagcatcttgcacatcttgagaataggttctattgtctgctttttatcttgtgaatcgattacattttcatccttcttcac

SEQ ID NO: 271564 - DNA, 630 bp, Homo sapiens
  misc_feature (1)...(630): n = A,T,C or G
actttattcccactttttggcctggggtttattaacaaggtgaaattatacagaaaaataaattagtttagctgaaaaaagaaaaaatgtctagttaatggagggaaaaaattgaaaatgccttaaaaccagaagatgttcaggaattcaaagttgttgatgcctanaaatactactgatttttgtacattggttttgtgtcctaaaactttacttgcttatccatttcaggaggcttttcaagttttctccannaggagttttggaaagactttagcattgtctacgtnctgactctttctgcanntggagaaagagaattcawtttttttttctatttgtctgcctttttcttttctcttggctgcttgctgtggataggacttttaaatctaactaaattgtatttgctcgatttttgcctattctaatatgtctccaattaattttatatctgtataatgtccccttataaaggaatatgtagctgttttatttagttattttactactgatgcacatttgagtttttttcagtttggaaaagtaccaaataatgctgcttagagcatttgtctgcattggaaaatatgctggcatttctattgggtgtatatacctagtagcaga

SEQ ID NO: 271565 - DNA, 435 bp, Homo sapiens
acaataatctataaactcattccataaaacaaagggaatttgtttttcttttccatgtgttgggggagtgttgggagaacctccagagcacattacataatattatcaagaattttcctgggtctgggctgtgcctattgctgcctctgggacaagtcagcctaatacaagaaaacttatttctctttcyttttaattttatttttctttaatttccttccttagtcctgcagccctgtgaccaaaggactgggagtgcacagttacacatctgttcacttgtcatgagactgttttcctttaaccccatgaacatacttaccatagcttctttcaaatcttacctaccgattacagcatcttgcacatcttgagaataggttctattgtctgctttttatcttgtgaatcgattacattttcatccttcttcac

SEQ ID NO: 271566 - DNA, 435 bp, Homo sapiens
acaataatctataaactcattccataaaacaaagggaatttgtttttcttttccatgtgttgggggagtgttgggagaacctccagagcacattacataatattatcaagaattttcctgggtctgggctgtgcctattgctgcctctgggacaagtcagcctaatacaagaaaacttatttctctttctttttaatttyatttttctttaatttccttccttagtcctgcagccctgtgaccaaaggactgggagtgcacagttacacatctgttcacttgtcatgagactgttttcctttaaccccatgaacatacttaccatagcttctttcaaatcttacctaccgattacagcatcttgcacatcttgagaataggttctattgtctgctttttatcttgtgaatcgattacattttcatccttcttcac

SEQ ID NO: 271567 - DNA, 524 bp, Homo sapiens
gaatatgtagctgttttatttagttattttactactgatgcacatttgagtttttttcagtttggaaaagtaccaaataatgctgcttagagcatttgtctgcattggaaaatatgctggcatttctattgggtgtatatacctagtagcagagttgctgggtcctagagtgtgcttatgtacatcgtgtgtgtgaggagttactactcaagaggttttgaatgccgttataacagtttgcacacagaatggtataagaaagttccagttgcttgacatcatcactagtacttaattttgtcagttttcaaaaatgtgaatgattgcatagtggtattcaattgyagttttcatatgcattgttctgatgcataaggatgtggatatgttcatctacttgttggcccttcggttctgtatgtggaactcctagtcacatgtttgccaattttgttcaatgtattgcatctttgtttattaattgatgggatttagttaaatagaactagatataaggcttttgc

SEQ ID NO: 271568 - DNA, 545 bp, Homo sapiens
ggaactgataattttaccacaagcctgagttaggctgaaaaacagggtggtcgattagaggttccacttgccatatattaaaaaaacacaggagaaaaccagtcctcctctggagtgttaaaataattaaagagcagaaaattagactaaagtggctctagtgtcctgggttcataggttaaaaaaaamaaaaactaaaacctaactcaaatacatttcctataaaccattatcttagcctgaaacaaaatgcacgtttaaccaatggcaaacatgcaattaacctctgaatatgtaaccaggacatttccatctggatagttcaaataaggtgactacataactggaaccaatttttgaatttgggctgctttctcatgcatcttatgaaagcctttcctttatgcccctctggtggaccagaaatcatggctgggtgctttccatttcaccaatcactgtttgttcagataaactggttaacgtttaacatagactcccgttaatttttaacaagagagactggggaccccacgggccgcagc

SEQ ID NO: 271569 - DNA, 610 bp, Homo sapiens
ggaactgataattttaccacaagcctgagttaggctgaaaaacagggtggtcgattagaggttccacttgccatatattaaaaaaacacaggagaaaaccagtcctcctctggagtgttaaaataattaaagagcagaaaattagactaaagtggctctagtgtcctgggttcataggttaaaaaaaaaaaaaactaaaacctaactcaaatacatttcctataaascattatcttagcctgaaacaaaatgcacgtttaaccaatggcaaacatgcaattaacctctgaatatgtaaccaggacatttccatctggatagttcaaataaggtgactacataactggaaccaatttttgaatttgggctgctttctcatgcatcttatgaaagcctttcctttatgcccctctggtggaccagaaatcatggctgggtgctttccatttcaccaatcactgtttgttcagataaactggttaacgtttaacatagactcccgttaatttttaacaagagagactggggaccccacgggccgcagctcctcccacgcaaacacccagtcgcggtttttccctgatgacccaccaggcctccctgaacaatc

SEQ ID NO: 271570 - DNA, 610 bp, Homo sapiens
ggaactgataattttaccacaagcctgagttaggctgaaaaacagggtggtcgattagaggttccacttgccatatattaaaaaaacacaggagaaaaccagtcctcctctggagtgttaaaataattaaagagcagaaaattagactaaagtggctctagtgtcctgggttcataggttaaaaaaaaaaaaaactaaaacctaactcaaatacatttcctataaaccattatcttagcctgaaacaaaatgcacgtttaaccaatggcaaacatgcaattaacctctgaatatgtaaccaggacatttccatctggatagttcaaataaggtgactacataactggaaccaatttttgaatttgggctgctttctcatgcatcttatgaaagcctttcctttatgcccctctggtggaccagaaatcatggctgggtgctttccatttcaccaatcactgtttgttcagataaactggttaacgtttaacatagactcccgttaatttttaacaagagagactggggaccccacgggccgcagctcctcccacgcaaacacccagtcgcrgtttttccctgatgacccaccaggcctccctgaacaatc

SEQ ID NO: 271571 - DNA, 618 bp, Homo sapiens
acagctaattaagacgtgagctgagacttgaaatgcacatgctccttcccttacctgggtctgttgtataatgcatcttatcagctatttaacagtaggaattagaacattcggacatctttttaacaactttttaacctatattttgataatgcaggaaagaccttcatcccatccctgagcccctctgtcaccacgctacatcccactgctgaccacattgtagggtggccataaggaatcaggygggcagcgggggccgggaataaataagcaaggattatgctgcccaaatttgctcatcttagaaagtctcctcaaccattctgtgtgaagtgattattccagggtaattgtggcctgactgcgctgcatgtcagtctgacttgtctttttgaaaatcactggattactctcatgaacgggggtatttctctttctatttgaaaacggccaactgtcctctgcaggtgtcctgatttgctagttgagaccctgaaggtagtggtgagaaaatatttgggccacatcagaatacctattctcagctggaagatatatagaaatttcttaataatatctaaccattttctcaataaccattatatttaacattga

SEQ ID NO: 271572 - DNA, 591 bp, Homo sapiens
gtcctttgcagggacgtgaatgaagctggaaaccattaacctcagcaaactaacacgggaacaggaaagcaaacaccatatgctctcactcatatgtgggagttgaaaaatgagaacacatggacaccgggaaccaaagatcacacactggggcctgttaaggggttgaggtcaaggggagggagaaaattaggacaaatacctaatgcatgtggggcttaaaccctagatggcaggttgataggtgcagcaaaccaccatggcacatgtaaaactatgtaacaaacctgcactttctgcacatgtattccagaacttaaagaaaaacaaactaacaaaaatgyactaaggctgagggggagtgggggtaagggcaggagtcaggctcgggtgggtgcgtcctggagttttatccagtcattgacactgatgtgggaaccgcccaatcaggcgcgcggtggcagaggagaggaaaggagggcgtggcttcctgcatttggcgggatctgtgtctctcgctggtgctggcacaggagcttgggatctgtctcctctttcgcctcctgcaccttgagagccctgggctactct

SEQ ID NO: 271573 - DNA, 467 bp, Homo sapiens
tccagttatatggtagccttatttgaactatccagatggaaatgtcctggttacatattcagaggttaattgcatgtttgtcatgggttaaacctgcattttgcttcaggctaagatagtgttttataggaaatgtatttgagttaggttttagattttttttttttttttttttttttttttttaacctatgaacacagggcactagagccactttagactaattttctgatctttaattattttaacactccagaggaggactggttttctcctgtgwttttttaatgtatggcaagtggaacctctaatcgaccaccctgtttttcatcctaactcaggcttgcagtaaaattatcagttcccactttctttgctgcattctcaaacgcaacacatgagaccagctttcccttgccaatttacaatgctgttaactatatgtcctttattatacatttcattaa

SEQ ID NO: 271574 - DNA, 314 bp, Homo sapiens
gccatttttaataaatctgttgtgcttcaattcagaagtgtgtgaggggagttgtggaggaattggcatttgggttagaaattmtaggaacaacagagacagatgacacctgttttctgcttcataatgtcaagttttatgaaagctaaaacctaattctacaaaaaaattagactgaaaaactttataggcaaaaattatcttattaaataggaaaatctaattattttattttaaaattttcttttccttagtaggacctaatcatagaaatttaaacactgtatgccaacagcctctactgtaggatggtt

SEQ ID NO: 271575 - DNA, 516 bp, Homo sapiens
tatatattatgtatcaattatataattaattattaaaatatttggcttgtatgtttaattgactctaggcacaatgttactattarcatcttcttccagttttcccaacttttatttgactaatagtacaatttatttccagtttttattttatctgtcaatgttttatactgtatttacaatatttatattgtcaccatatgtaaaaatgtaagacctttctattaaaggctagattacagccttacccttttgtgtaaggaaagcagcaatgcatcagtagcataatttaaaactttctctagtattacttaaatttttatttcttaaaactttctcatcacatctctttctaataattataatatggtttctttgaaatgttgttgccctaattgtatccaaataattcaaaatttatactttttacggattcaaaggaagagttgaaaattgtagttacctaggattctttttcagttggacactatgtttattcaggattttatagatcaa

SEQ ID NO: 271576 - DNA, 610 bp, Homo sapiens
tggtatagaagtctgaactaagtcagaagtgataacctatcacatttgttgttttccctttgacagaaactagaaccaggtccccaaagagttcatccaatgactaacagaaattcttcagtttgcagaatgacagataagaaaagatacaacttgttgaaagaatgaaatttattccacttatgagacttctaaaaagtggctaaaattggtcggaaccaatatggtcaactggagtctgtgtgaaataagctcactgatgtmaaagcccaaatttccatcacatgttttgtactaactgtccccaaatttgcacatgtgatctgtgtgtagcaagaaaaaatagttgttcatgcccagtgattttccatacatttttcctttaagcaattccgtactaatccagaagctacctcctaaacctttctgagaatattactacctttaagtaagcacagggaaacagacttgagctggaatcccatctctttgttagaaacccggtgttatagtacctgcttctgaggcactgagaggtgagctgcgttttaaaataacagagtcactcacaacttagtgttgttgtgagactttgttgggggcgcccacc

SEQ ID NO: 271577 - DNA, 610 bp, Homo sapiens
tggtatagaagtctgaactaagtcagaagtgataacctatcacatttgttgttttccctttgacagaaactagaaccaggtccccaaagagttcatccaatgactaacagaaattcttcagtttgcagaatgacagataagaaaagatacaacttgttgaaagaatgaaatttattccacttatgagacttctaaaaagtggctaaaattggtcggaaccaatatggtcaactggagtctgtgtgaaataagctcactgatgtaaragcccaaatttccatcacatgttttgtactaactgtccccaaatttgcacatgtgatctgtgtgtagcaagaaaaaatagttgttcatgcccagtgattttccatacatttttcctttaagcaattccgtactaatccagaagctacctcctaaacctttctgagaatattactacctttaagtaagcacagggaaacagacttgagctggaatcccatctctttgttagaaacccggtgttatagtacctgcttctgaggcactgagaggtgagctgcgttttaaaataacagagtcactcacaacttagtgttgttgtgagactttgttgggggcgcccacc

SEQ ID NO: 271578 - DNA, 610 bp, Homo sapiens
tggtatagaagtctgaactaagtcagaagtgataacctatcacatttgttgttttccctttgacagaaactagaaccaggtccccaaagagttcatccaatgactaacagaaattcttcagtttgcagaatgacagataagaaaagatacaacttgttgaaagaatgaaatttattccacttatgagacttctaaaaagtggctaaaattggtcggaaccaatatggtcaactggagtctgtgtgaaataagctcactgatgtaaaagcccaaatttccatcacatgttttgtactaactgtccccaaatttgcacatgtgatctgtgtgtagcaagaaaaaatagttgttcatgcccagtgattttccatacatttttcctttaagcaattccgtactaatccagaasctacctcctaaacctttctgagaatattactacctttaagtaagcacagggaaacagacttgagctggaatcccatctctttgttagaaacccggtgttatagtacctgcttctgaggcactgagaggtgagctgcgttttaaaataacagagtcactcacaacttagtgttgttgtgagactttgttgggggcgcccacc

SEQ ID NO: 271579 - DNA, 610 bp, Homo sapiens
tggtatagaagtctgaactaagtcagaagtgataacctatcacatttgttgttttccctttgacagaaactagaaccaggtccccaaagagttcatccaatgactaacagaaattcttcagtttgcagaatgacagataagaaaagatacaacttgttgaaagaatgaaatttattccacttatgagacttctaaaaagtggctaaaattggtcggaaccaatatggtcaactggagtctgtgtgaaataagctcactgatgtaaaagcccaaatttccatcacatgttttgtactaactgtccccaaatttgcacatgtgatctgtgtgtagcaagaaaaaatagttgttcatgcccagtgattttccatacatttttcctttaagcaattccgtactaatccagaagctacctcctaaacctttctgagaatattactacctttaagtaagcacagggaaacagacttgagctggaatcccatctctytgttagaaacccggtgttatagtacctgcttctgaggcactgagaggtgagctgcgttttaaaataacagagtcactcacaacttagtgttgttgtgagactttgttgggggcgcccacc

SEQ ID NO: 271580 - DNA, 535 bp, Homo sapiens
atgtggacatctttggaggctattattctgcccaccatccccttctccattaaaggggcctgggagcaatggctgattccagggctgaagcatcttgttgtgccagaaaataagaaaggattcaaagaatgaaggaggcctttctaaaggacacagaagccaaaggccaggtcaagaacaagatacataatgacagttacaaattgcaagttagaacaacatagatatccaggagttcatatggatataaataaattaatgaatacattctgagcttcaggatgggmgctggtcaccagaaagtccaaggcatgatttgagagttgaaactttcagaccttccaggagaaggaaggagggacagatagggcccaattaccaatggtcaatgatgtcatcaatcatgcctctgtaatggaatctttacagaaacccctgaattgacagggctggagagcttctgaattggtgaacacatggaggtgctgggaaggttgcttacttggagaaggcctggaagctccgtgtcactgtc

SEQ ID NO: 271581 - DNA, 589 bp, Homo sapiens
attgcaggagaatccaggcaagataatagggatgattgagtgcaacctcatcccaaattccaactaccccaagagcatatgtctttgggaccccaggtaggcactccagtacccttctctacaaaaggggaggaacagtgttttattcaagccaccagagaaaacaataagctctatttcacaagtctctggtggtactaggtaggtgctaggagaatgagggagagtgaaatgagtgaaatatgatccttggcatccaccagcctacatagtctatgtcaaggtcggctgcatccaagacaatgaattgagtattttgaggacaggggactcagtctcacaaaggagcaatgggttatgccagtggagagatggcactctgggaaggaaacggcttccctccccattgaattcratcacagctcctccagagttagtcagtgctagggtcagtgagcaacaggatctgaaaattgtgagcaaatttccaaaatctgacagaaagcatggaattccatttcccgtctggtctaggcaagagtttgggtttcagcagctgagagtaccgaggagaagaacagaacaatag

SEQ ID NO: 271582 - DNA, 589 bp, Homo sapiens
attgcaggagaatccaggcaagataatagggatgattgagtgcaacctcatcccaaattccaactaccccaagagcatatgtctttgggaccccaggtaggcactccagtacccttctctacaaaaggggaggaacagtgttttattcaagccaccagagaaaacaataagctctatttcacaagtctctggtggtactaggtaggtgctaggagaatgagggagagtgaaatgagtgaaatatgatccttggcatccaccagcctacatagtctatgtcaaggtcggctgcatccaagacaatgaattgagtattttgaggacaggggactcagtctcacaaaggagcaatgggttatgccagtggagagatggcactctgggaaggaaacggcttccctccccattgaattcaatmacagctcctccagagttagtcagtgctagggtcagtgagcaacaggatctgaaaattgtgagcaaatttccaaaatctgacagaaagcatggaattccatttcccgtctggtctaggcaagagtttgggtttcagcagctgagagtaccgaggagaagaacagaacaatag

SEQ ID NO: 271583 - DNA, 594 bp, Homo sapiens
caataggacaaacctatagaatcaagaccagaaattatagaggtaatagaattcgcagaaaagaactttaaaacagctattataaatatattcaagrcttaagaaaaacatagcacactgaagagataaaaggtttttttaatccagaacacctagagccaaaaaatatataatatctaaaatggaatattcaccagacaggcttaatagcagattaaacatcgcaaaaagaagttgtaaataagattgaatagaaggcaagaactatccaaatagaagcaaagagatatttttaaaaagctaataaattaaacagagcctcagtgacataaaggacaatattcagtgatctaccattctgaagaaaaaaacacattgttttctgtctacccttgcacacaacacagaaaacttctgtgtccaaaatgtgtgaagatttctttccacaaacaaccagttcttcagcagataccagctgggtgtcctataattcaattcagtttgatactatctgcctggagacagggtcagatcccataggtgaaggactcagttccacaagactgtccccatcaacttcagatgctaattgta

SEQ ID NO: 271584 - DNA, 585 bp, Homo sapiens
tcaggagcaatacccctcctggtggtgggggatgaggaccttccaggccaggaggccccccaccttttcctcacagagctctcaggggaacattgtggacacagattyctgggacccagcctacaccgctccccgccccagttactctaggggtgggactggagacccatttctgaacagctcaccaggtgacctccctgcagacaaggtctgcgaacatctacatcatatgccccctctgccagtctggcctggtctggtctgctagacatagacctgcagtgacaaatatggccctttctaagtgcagggcttcagggaaagagagaaaggcctcaagtagtaaggctccttcggagaatgtatcttatatgccgagaaagacaggaaaaaacaaggctttgttccactctagcatctaatttgctatgtgagcttgagcaagtcactctctgggtctcagattctgaacctataaaattagatttaaaggactttaggctggagtttccctaagtttgaaacatctggacacactccggatgatccagcacaagaagcagggccctcagcagccagtgaaca

SEQ ID NO: 271585 - DNA, 556 bp, Homo sapiens
cccatgtgcccacttcctcagaccagctcatatttaccctctgaggtggtcactgacacagccactgactgcccttctgagcaggggctccctgcagatcctcagcatgctgggtgggcatgagcaggctgctctgaaaagcttggcttccctttctgaggattttatcagtatataaaaataaacagagttggctgactccttgatgtctcagggttgcattttaattgctgctgcttccgagaagacaggccagctccacttcctggtagaygcccgcactcacaggaacagagctgaactctgggtgttggggccagagcatcccagagtgtgactgactggtttgcaattagcacttcattagagggacacctctggttcacaggaccaagactggctcacagagcctgcatagggatgaacatctcccgcctgcccacagagtgatctttctagaacccgcctctagccacactacttcttgtttaaagttcttcttacccctccctgccttaaggaccaagttcaaactctcagcccggcttacagggac

SEQ ID NO: 271586 - DNA, 505 bp, Homo sapiens
ggagtgcttagcaagtatgtcagcttccagaccaaggcctgctgttcttggctccgggagatgtttttcagcacagtatgcttgctgtagactgctctgcaggggtgggggtgggagggtgagggcagacctctctactgatcagaattcagagtatgactcctccaatctgtccccttggtgactttacatgttctcaggacagctttcagaaagcctcctgcctgctacttgcacttggggatgtagggggaggggtcagcagtcgtgcrgggactatatgtggaatttgttgagatcaggcagaaggaagtgaagacaccctcttctgatttgtgacatgtgagaacattctcctgacagaagcagctcccggtaatagtaacagcttccgggccctcgacaggctgcagcccatcaccttcagcgtcctgccaagctcagcagcagcgtggcaggagggggcagagagctggaggcagcgtctgcctggggatgggggcta

SEQ ID NO: 271587 - DNA, 537 bp, Homo sapiens
  misc_feature (1)...(537): n = A,T,C or G
atgcccagtgatataagatcctcatcactctgccccaggaacaactggtttgatccatgagcagtcctgggcagggcaaatacctgggctccccgccctcaataaggtgngatgcacagtccctaagaatcatgatgacatccttagagtgttatcttaaggtagccctgtttagtccttgcctcttatccacccgctacaaagagcagtcagtttaaaaaatggcttggctcacagatcaggaacccctcaagagcaaagacctacctcccccactgcagcccagcaacctgtagggttttcctgcagtcgaacaagtgtagctggaattgcattcacccacctgttcctgagttctcctgggacacaatgttggattggtggrcactagtatattcttttcacaagtgctggaatatcactatttcaaacagcttaatgatcattgtacatgtgccctgagcaaggctgcatgaataactaaaatgtcaaatgtctttgttttagctgcgattctatcaactctgcaggtctcat

SEQ ID NO: 271588 - DNA, 645 bp, Homo sapiens
cataagttgaaaatattgtaggttgaaaatgcatttaataaaccgaacctattgaagatcataggttagcccagtctatattaaatgtgctcgaagctcttacattagtctaaaattgggcaaaacccctctaatgcaaatattattctataattaagaatgtataattcacattcagtagaaagcatacttcaaattttgaatttttaattagtcaaaattcaaaattggatgtgtggtttctactgaatgtgtatcactttcacaacatcatgaagtcaaaaattcacaagttgaaccattgtaagttgaggattgtctgtgtgtgtgtgtatgtgtgcatgtgtataatcttaaagcacatgtttattataatatactgcttgtgttccagataaaagcaggaggataacaaaatgctcactatcacaactgctacttaacattttataaggtgcattagctaatgagattaatatgggaaagaaattagagatataacaatgtaaaacaaggaggtaaaagtatttcatgtaacagataataagaaagcgtaactgtaaycccaggagaatgatctgaaaagctactagaaaaaaaataagttattgggttataaaattagtattcaaaaatcaatagaca

SEQ ID NO: 271589 - DNA, 590 bp, Homo sapiens
tggttattggtgtaatccccagtgccccaacatccatttcagatttggccaagtaggataatggacttgcaagatcttcctgargttagagccaagggacacagagacaaatgggcaaaagtattcctcctattaaaacagaagagtccaaatggatatttagtagtctgaagtatagaatatgggaggaactgccaatggtttaccaaaactaaattttctcttttttttctgaacacagagctcatctttatttcatagcctccctttcagtgatgtatgaccatgtgacagtagagatgtaagtggaaatatatattccattcccagacctagggcataagaacttcccaggtgtacttttccacattatttcatagttctcattgataggatggaggtaaacagggctcatatatagaatgagccctttccaactaaggactcatgactttcttcactttgatcagatgctattttattattgctgacttattcctctttctgaaatttctgttggatgtatttttgaaacatctaattatctcctcttacttttcttactgtttctactatccttctcaatattt

SEQ ID NO: 271590 - DNA, 639 bp, Homo sapiens
aaagcacaactaaaacaatatctataattgggctttagaagattttattgacatttgtaagattttctcaccatctaattccaaaagtatttagacagaaggctggcttttgttttgtttgaaaacattcattttggtggttttgtgtaaatctgatcaaaaaagatggaagaatatagatttggttaaactacagaaaggctaaaatgcttacgtctccttttccatccatcatccaaaagtaaattgttatcaygataccccctttattaaatgcctttgaattttctccaatctccttacatattctagattcaaagtaccagagattagtttaataaaggctgaactacaactgataattttattttatgtctctaagggttcttgggaccataaatgtgaatctttttttatttttttctattagtatgccaaatcaatgtagcttatttgtttagtgaactttactaaaaaaattatttctaaaaatggtataatggtacttttatctgacaggatggaaaaggaacatctgtcacatcaactagttttttaaactccatattttatgcatccccatggagtttatattcatgtgtctgaagtttcctgaagttttatatgtatattgaagaa

SEQ ID NO: 271591 - DNA, 620 bp, Homo sapiens
actcaatatctacaattacaattgccagtaaattaatgcataaaaggaaataagatctgaaatatttcagaaaagtatttaaaatttaccttaaagattgtaaagtcatcaaagaaaaaaattgctttatatctttaatgcrttgttttttctttgataatttttcaaaaacaatgtgtttgattacttttacttctgtcccctttttccacattttatatgccatttttgctcatgatttttatttaaatatttttagtattctacttgtgaatgtggcatgcagtagtaaagaaagcctagaaatgatgccattctcccttggaaagcagaagagaggggataaagagggattggctttggaataagcttttaggcacatccttagctaggataagcggaaagatacatcagtttctcaaagctgtgctgttgtcaattgactcttttatcatcaggactctgagaactgattgtcaatgcccctaccaggtaactcactacactcttttacacgtatctctttactgaacaattctaccacgagactctggcatctttgaaaacaggaactgcatgttctataccctcacatgatagctactattaaaagttgttaa

SEQ ID NO: 271592 - DNA, 601 bp, Homo sapiens
tagaaaatgtggtacatatacacaatgggatgctattcatccttaacaaataaggaattcctgtcatttgtgacaatgtggatgaacctggaggactttatgctaagcgaaataaggcaggcacagaacgacaaatamcacataatctcatttatatgtggaatctaaaaaggttaaactcagctgtagcaagtagaatggtggttacccaaggctaagaatgaggtgagtattgaggagaggttggtcaaagggtacaaaatttcagttagatgggaggaataaattcaggagatctattatacaacacggtgattataattaatgacaatgtattatatacttaaaaatcgctaccacagtagatttcaaatgttctaaccacaataaatgataaatatgtgagtaatgattatgttaattagtttagtcactttacaatgtatacatatatccaaacattattttatatatcataaatatttacaattttaatttgtcgattaaaaaatactgacagcctttcccaggaatagctaaaattattccttctccatttaaaaattccctataagtaggcggtctaataccaaaaacctaa

SEQ ID NO: 271593 - DNA, 575 bp, Homo sapiens
tttgttttatttatatatgttattaatttggaaggcactattgtttgttgatgcaacaactgttgcatcccttttctgtcttgatttgtctcccagcatagaggccaaaaatatcagatagtcacttcctgagcctactgggccaagttaccaatgtctcttgcctttggcatatgggggtttggctaccagagaacttgtaggactgaatctcctccatacaaatggagaggacacatgagaggatcttcattttttaacaactgctttctttccagtttgagacatttcagtgtgaagatgttatatttgctacagtcatgttgctaccatttcaccaagagatttacagagataatgacttgggcccttgagccttggactaatcatagactatctactttaaactttttcttaaaaaatatgtttgtagtagttaagccactattatttgcatatttggtcacttgctgttgaatgaatcttaactgtacaccgtctgacttttaaaaaaaatgacttctttctgctttatgtctargaaaactcaaactctcaaatgtatgaaacaattg

SEQ ID NO: 271594 - DNA, 535 bp, Homo sapiens
catgtagcctaccataagagtcaaaatggactgatagtttcctggcccctagtctaaaccttggatcaacccatccaatgaaagattgtgccttcagaccaatgtatctaaatctttgcctttcactcccaagttggagaacggaccagttctcctgagtgctgtaactttgacaggatagatgaaactaactgaaaaaggaggaaygaaaattaaagcattttatgtgttgaggagtattaacacatctggaaatgggtcataagtgttaaggaaaaaaaaaaatccatcctcataggaggggaaaggatatataaggagtagggaagaacctttgcccttaatattttttttctctttgctttatttaccattggggaaaaccattgacttatagtcaagcaacagttttgcattctcctgttagaattgattgattcttttgattcaaacaaaagtgaaaattgattctcacttttatgagactatttcttgcatagcgatcactgcttctttggttatccttccaggggaa

SEQ ID NO: 271595 - DNA, 535 bp, Homo sapiens
catgtagcctaccataagagtcaaaatggactgatagtttcctggcccctagtctaaaccttggatcaacccatccaatgaaagattgtgccttcagaccaatgtatctaaatctttgcctttcactcccaagttggagaacggaccagttctcctgagtgctgtaactttgacaggatagatgaaactaactgaaaaaggaggaatgaaaattaaagcattttatgtgttgaggagtattaacacatctggaaatgggtcrtaagtgttaaggaaaaaaaaaaatccatcctcataggaggggaaaggatatataaggagtagggaagaacctttgcccttaatattttttttctctttgctttatttaccattggggaaaaccattgacttatagtcaagcaacagttttgcattctcctgttagaattgattgattcttttgattcaaacaaaagtgaaaattgattctcacttttatgagactatttcttgcatagcgatcactgcttctttggttatccttccaggggaa

SEQ ID NO: 271596 - DNA, 535 bp, Homo sapiens
catgtagcctaccataagagtcaaaatggactgatagtttcctggcccctagtctaaaccttggatcaacccatccaatgaaagattgtgccttcagaccaatgtatctaaatctttgcctttcactcccaagttggagaacggaccagttctcctgagtgctgtaactttgacaggatagatgaaactaactgaaaaaggaggaatgaaaattaaagcattttatgtgttgaggagtattaacacatctggaaatgggtcataagtgttaaggaaaaaaaaaaatccatcctcataggaggggaaaggatatataaggagtagggaagaacctttgcccttaatattttttttctstttgctttatttaccattggggaaaaccattgacttatagtcaagcaacagttttgcattctcctgttagaattgattgattcttttgattcaaacaaaagtgaaaattgattctcacttttatgagactatttcttgcatagcgatcactgcttctttggttatccttccaggggaa

SEQ ID NO: 271597 - DNA, 596 bp, Homo sapiens
tttaggctgccagtatcagaaagcataacaacgatgacttaaacaagatggctgcttatttttctgcgtaaacaaatccagaggtaggctgccctggtggtgccatcaaagacccaggctcctctcattattcttactatggggcttttctcctttcattgctgtcacatggcttctacatggccaatctgccttgagaacagcatttctatcccatcccagaagagaaagaacaaaaagaatgtatgttcctgtgaaatatgctctcttgaaagggctttctcagaagaatcacagtttcatgaacatttrattgaacataattgtgtcacggagttgcaagggatattgggaaacatcatattttagctgggcacattatcttcttgaaaataccgtacatgagaagaggagaataaatattgatattgataggcaactagtagtgtgtctcaatgagcagaactttgctgtgactatcttaaaagaaaggcttctagttagacaacctgaggtcaggagttcatgactagcctggccaatatggtgaaactcagcctctactaaaaatacaaaaattagccaggcgtggtggt

SEQ ID NO: 271598 - DNA, 584 bp, Homo sapiens
agggttgggaaaacttccttcatcttacattttacatataattatcattagtgtgtgacagatagatgttcttaattcttcttacctcaaggttctaaaattttcaatggcacaatagtaagcattcattctcctccataatgaaatatattgcatggtctctaatattctatgaaaaagtaatcaatgaggtatcatgatacgtgactccttaccagttttctaatgggagtaacttctggttacagggagawgaggcattaaatataaaatttgatgtaaagatttaaagatttacaatttaacattctaataagcattgtgataacctccttacaaaaaaaatctgagtggtcgtcattacttagaattcaaaagaaaatttctctatttgtatttttgaacccactagtgactttaacagataaaatttcttattatggaggttgaggggatgcttctggagcaaatagtcatcagatcaactcaaatcacaggtacacacaaaactgctaaaaatcttctggttattatgtcacttatcagaatgtgttgaagctatgtttcaaaaccaaatatagtaa

SEQ ID NO: 271599 - DNA, 564 bp, Homo sapiens
atgaagatgttctaccacattttcttctagacactatattgttttacctttcacagctagatagagaactcatctggaagtcttttttattatgctaattagaagtcaaggttaattttttcctcataaatatctagttgatccaggactatttacaaaaaagacagttctttccctaytgcattccaattttcataaatcaagtgactatatatgtaggtatatttcaaaactctctagccttttccattggcctacttgtctatttttccgcaaatattgtattgtcttaattactgtagtttggtatgtaaaatagtatctgataattagtgacaattcatagccatttattttttttcttttgaaaccttatgtctccacttacagtatataagtattttttgcctcattgaactggctggaacagcttttaaaatgataaatagaagcgataacagtattattaacatgcatatttgtcttgtttctgatgtaagaaagaaaactttcaatgatgtttgctgtggtaatttagatgttcttcattaaattcaaggcatt

SEQ ID NO: 271600 - DNA, 428 bp, Homo sapiens
ccttctttttacttctgcctttgcctggctaccacttattcacctgtcaagactcagtctggatatcaccaattttaggaagccattgatgatactacctcattcctctcaactcccaatctatgattctgtcttagattgtacttatctgcttcatagactagactctgtgccccaaggaaatagggtagaggtctgactcatttactactctgtctccttacataaagcctggcacacaaaaagtgttcaataaatactaatyaaatggataaataaatgaatagcatttgttacagtatcttatggttgtctctaaaaacccgtaaaatcaagaatattttgaaaatctctatgtcccaatcattcagcataattctcagtacatactagattttcagcaagtaaatgcatgaatacgagtacac

SEQ ID NO: 271601 - DNA, 398 bp, Homo sapiens
actttgatgagcttaaccttgggacagaattagctgtgtaggcagctattttataagacatacaaagagggttcaccagcattggccatggatgttagattttgttttacacccacaacattttagtatttcccttgagtggaaagaaaaccttttttkaagcataatacctgtaaggaaagtacacacaaatcctatgtgtacacttggtgacttttcataaaatggacccagatccagcccctagatctagcaaacaccccagaagcccaccccactctactcctcttctagtttttacccaccgagggtaaccaatgttctggctcctaacacagtggattagttttggcttttgagcttatgatataaatcacacagtatcaatttttgtgttt

SEQ ID NO: 271602 - DNA, 462 bp, Homo sapiens
cctagccttggaagtcacatagcatcacttctgcctcattctattcattagaagtgagccactaagtctagcccatactcaagacttcacctttggaaggaaggcatggcaaagaatrtatggatgtatcttaaaaccaataacaccacaatgttttaaagcttataattaactcaatctaagggtttaaaaataagagaagtttatagaaatttacacaaggatctaaaagaaataaattcaagccagcttctcttcttctattcatttaaaactttgcaaatgtccatagagttttcaaggtattttttggagacagcatggtacaatagaaagtgcagaggctctagagccagaaacaaccaagtctgaatcctggattcactacttactaattaggggtacttggacaagtcagcctcttggatttccaggttccctcaactgtaaaatgaaggtaat

SEQ ID NO: 271603 - DNA, 558 bp, Homo sapiens
ctaaggggttttttgtagctattgtaaatgggattgtttccttgattattttcaggtagtttactattagtatataaaaacactacagatttttgtttgttgattttaaatcctgcaactttactgaatttgtttgttctaacaattttttagtaaagttgtagggttttctatatatgagatcatgccatctgcaaacaaggacagtataactttttcctttccaatttgaatgccctttatatggttctcttaactaattggtttggctaagacttgcagtactatgttgaagaaaagtggtgaacatgsatattcttgtctggttccagatctaagaggaaaaaatttcagttattccccattcagtattatattagctgtggatttgtcatatatggcctttatattcctgaagccttctcaacctaatttgttatgagtttttatcatgaatggatgttgaattttgtcaacagctttttctacatctattgtctttcttataatagccattctaactggggtgagatgatacctcactgtggttttggtttg

SEQ ID NO: 271604 - DNA, 579 bp, Homo sapiens
atggagtacatagtgatgttttgatataattaatatatggtgatcagatctgggcaattagcatatccatcattgcaaacatttatcatttcttttactgacaacactgcggtaggtaggtaggtagatgcttttatactgtgcgcttgcaatttttcaagagaaaacatagttagtggcaaaagtctgggtagaccagccatgcattggtggttagcccatatttcaaaggagtgccccaatttccacagtcaccaccaagtaacatctcatattctttcttatcttcaggaaagccactagtgaaaacgtcacgaatgacagtgatcaacacggagaagcctgcagtcacagtcgatataggaagcaccatcaaaacagtgcagggagtgaatgtgacaatcaactgccaggttgcaggtgagaaattmatgttcatttgttcacacgttaatggagccctgtgctaggttggggatacaaagacaaattagacacaaattctactctcagggatatagtgctagtaggaaagccaaagcatgaacctcagtcgctctgaaagtagaaagtgctaca

SEQ ID NO: 271605 - DNA, 543 bp, Homo sapiens
tgttgctatggataactaaggttttaaatttagttttacagtgttttgcatgattttttaggttcgaccttctcttactgctgtcaaattcttacatcgaaccaacaagttatactataatcagatcagttctaaacttttcttgttcattctttctttttataagtagccaactaaccacgtggattactgactcctaaggatttgccaaatttggggactatattctccacaatactttccattctgtgaattactaagattcttccatgaacttaytgtaatttttctgaaaccacaattgttggaaagaaacaagtttgtgctgataaatcaaaaattttaattttaagctctgacctctcccctatgcctactcaacatgtccacttaaatgcaaataggcatcttgaattaaacatgcctaaaatggaactcttaatactgcccttccaacctcatcccaaacctacttctctctcagtcttccccattcatttaattgtgccacatccaggacaaaaactttggcccctgagtttt

SEQ ID NO: 271606 - DNA, 578 bp, Homo sapiens
aatgtcaaaagcattcttcacagaaatagaaaaacaatcttaaaattcatatggaaccacaaaagacccagaataaccaaagctatcctaagcaaaacaaaacaaaacaaaacaaaattggaggaatcacattatctgacttcaaattataatacagagcaatagtaccagctatagcatagtactggcatgaaaacagacatatagaccaatggaatagaatagagaacccagaaacaaaactacagagctacagtgaactcattttcaacaaaggtgccaagaacatamactggggaaaagacagtttcttcaatgaatggtgcttggaaaactggatatctctatgcagagtaatgaaaatagacccctatctcttgccatatacaaaaattaaataaaatgaattaaagacttaaatctaagacctcaaacaaagaggctactacaaaaaaaaattgggggaatctccaggacattggtctggacaaaaatttcttgagcaatacccctcaagcacaggcaaatatgaacaaatggaatcacaagttaaaaagcttctgcacagcacaggaaac

SEQ ID NO: 271607 - DNA, 573 bp, Homo sapiens
tgctaggcactgtattggatgctggggatttataaaaaatggttactaagcctcagatatttgcagtccagtgagggagaaaaacttactatacaatgtgatcagttttacaaaaagggaatacaacaaagagtgcaattaaatctctctgggaaaattagggaagctctagacagcagtgacacatgagcagtttccagggagatgaggatgctggcatagcaagattgtgtgtacgcactgaaggtgcaaagggacatggcatgttctgatgactcagagcagtccttagacggtgcaccatttgggtccatgaagaagagtaggtggaaaattattctgagacattagattaggrgcacatggtgaagtgcctttggacataatcttaaaaccatgaggtatcaataggggtttcaaagtagggggtaacatgatccaatttgtagaaaatgactcaggcagcataggccagtaagttccaaacaatactgctttgtgaggtattaataggtgtgccatggagaaagggcttcctggtaaaataagtctatgtaacactgcatatcataa

SEQ ID NO: 271608 - DNA, 572 bp, Homo sapiens
acctataggagtcagggatgggagcttgtccagatgggagccactggactaagaccaggatgaggtactagctggggaagttcaggatggaaggagggcattaggattgttggggtgagggtctgagccaaatctgaatggacaagctgtggctgaggcttgttcgttttgatggcctagtttctatcccagtttagctgcctgtcatcagtcttaaagcaatggtgttttacagttgtttctgaacagacatctgatacatatcttgcacatttttcatcttggggctcatggaatcttcctcaccttgagtgcccatttctcttcctttctgcctatttgaatcccacccattctgcagtgctcagctccaaagcatcataatgaggctctgsctgtctcaacctacttctcagagtcctgatacttgacatcattttctcattcatctccacaattccatgtgagtctcctagttctatagtgctggcgtgacactgacattcaccattcaagttcatttggtccaggcagttacattcagggactttatgaatactgactcactgtct

SEQ ID NO: 271609 - DNA, 549 bp, Homo sapiens
gaaatgaaaagtgaggatatkacacttgtttcagaccatctttctttctctttgcttttctgatctaaatgaacagaaaatgatttgaaaatttgcttttccttgcaaatagtctacttaaaaggccacatcccagggactcagatgccatcacagcttacaatgctatcactgcatttgtagttctcagcttaatattggaatgtactttaaatgcataacattttccctgactttgataaagatttaaaatattggaaactcaatacttttcatgtaccatttcttctttacatggaatgaaattagtttatcttgtaattttgtgaggtttctttcccttaattcaacatgtttggcaaagctttccaatgaaaagttcagttcattaaaaatgaccttaatggacttaacatatattggtggtgacagggtgcatactttattttggcacacaaggatcccattaatttgtctttgtcactctctagggctctgctaagcgacagttcagatttagctttctgaaagtagccacagaacgagcaa

SEQ ID NO: 271610 - DNA, 549 bp, Homo sapiens
gaaatgaaaagtgaggatattacacttgtttcagaccatctttctttctctttgcttttctgatctaaatgaacagaaaatgatttgaaaatttgcttttccttgcaaatagtctacttaaaaggccacatcccagggactcagatgccatcacagcttacaatgctatcactgcatttgtagttctcagcttaatattggaatgtastttaaatgcataacattttccctgactttgataaagatttaaaatattggaaactcaatacttttcatgtaccatttcttctttacatggaatgaaattagtttatcttgtaattttgtgaggtttctttcccttaattcaacatgtttggcaaagctttccaatgaaaagttcagttcattaaaaatgaccttaatggacttaacatatattggtggtgacagggtgcatactttattttggcacacaaggatcccattaatttgtctttgtcactctctagggctctgctaagcgacagttcagatttagctttctgaaagtagccacagaacgagcaa

SEQ ID NO: 271611 - DNA, 594 bp, Homo sapiens
agctaaactccacggatccagactgaagcaatttacctggaaactacttcctttccttcaaaagtttgcctaggccattcggatttggaagatttctgagcaagatggctgagtgctgaatttaacagccaagatgattctccaatctctgtgcttatgtctgcacacatcagagactctcctttacctagccctgtttattcctgaacacaaagtaattaatacttcaaagtgttaggtatgtgacattttggtgacattcctataatctcctccctgcaatcctcccctcctaagctactttcatctacacttggagcagtgaaacaggcatccagctaagtkaatttagagggaggaattttgtgccatttggtctaaatggctgtgagttccatgggctgttccagggaggtagggagggaaacactggccatctccatgctgagagacacttgcaaggtactcccaaatccctgagacttaaagataaaatcagcacgtaatggaagagtttagagaggagcaaaaggcacaaaagacagtattttataggccaaacagggcagagcaaggaaggtttggctgtattct

SEQ ID NO: 271612 - DNA, 623 bp, Homo sapiens
agggttttgccatgttgtccaggctggtcttgaactcccgatcttaagcaatccatctgccttggcctcccaaagtactgggattacaggtgtgagccaccacgcccagactgamgcttaagtattaagactttagttaaataaaaacatctaataaaatttaagtcctgaatttttaaaaatcacgttttcttttaaactagaagtactagtttgaaaatgaaaagaaaggagaagataatgaatttttttgagtgcctactatgttcctatttcagagatgagaaaattgaggattcaaaaggtgtatggcctcttgaaggtcagatagctaaaagtgacagagtaggtctaaatcaatgtgctggttcttttattttggtgtctcagggatgtaaaagatttttagtgcataatattaaatggcaaaatcaaatttcccaacaatatacaaaataaaatcccatttacaaagggaaaaagctttatctatttgtatatcttcttatgtgtatataaattcatagaaaactatctggaagtgtatgtagcaaagcattaacaatggttatctctgggtataagaaggaactagaactgaagaagatggtggtgataaggga

SEQ ID NO: 271613 - DNA, 623 bp, Homo sapiens
agggttttgccatgttgtccaggctggtcttgaactcccgatcttaagcaatccatctgccttggcctcccaaagtactgggattacaggtgtgagccaccacgcccagactgacgcttaagtattaagactttagttaaataaaaacatctaataaaatttaagtcctgaatttttaaaaatcacgttttcttttaaactagaagtactagtttgaaaatgaaaagaaaggagaagataatgaatttttttgagtgcctactatgttcctatttcagagatgagaaaattgaggattcaaaaggtgtatggcctcttgaaggtcagatagctraaagtgacagagtaggtctaaatcaatgtgctggttcttttattttggtgtctcagggatgtaaaagatttttagtgcataatattaaatggcaaaatcaaatttcccaacaatatacaaaataaaatcccatttacaaagggaaaaagctttatctatttgtatatcttcttatgtgtatataaattcatagaaaactatctggaagtgtatgtagcaaagcattaacaatggttatctctgggtataagaaggaactagaactgaagaagatggtggtgataaggga

SEQ ID NO: 271614 - DNA, 623 bp, Homo sapiens
agggttttgccatgttgtccaggctggtcttgaactcccgatcttaagcaatccatctgccttggcctcccaaagtactgggattacaggtgtgagccaccacgcccagactgacgcttaagtattaagactttagttaaataaaaacatctaataaaatttaagtcctgaatttttaaaaatcacgttttcttttaaactagaagtactagtttgaaaatgaaaagaaaggagaagataatgaatttttttgagtgcctactatgttcctatttcagagatgagaaaattgaggattcaaaaggtgtatggcctcttgaaggtcagatagctaaaagtgacagagtaggtctaaatcaatgtgctggttcttttattttggtgtctcagggatgtaaaagatttttagtgcataatattaaatggcaaaatcaaatttcccaacaatatacaaaataaaatcccatttacaaagggaaaaagctttatctatttgtatwtcttcttatgtgtatataaattcatagaaaactatctggaagtgtatgtagcaaagcattaacaatggttatctctgggtataagaaggaactagaactgaagaagatggtggtgataaggga

SEQ ID NO: 271615 - DNA, 623 bp, Homo sapiens
agggttttgccatgttgtccaggctggtcttgaactcccgatcttaagcaatccatctgccttggcctcccaaagtactgggattacaggtgtgagccaccacgcccagactgacgcttaagtattaagactttagttaaataaaaacatctaataaaatttaagtcctgaatttttaaaaatcacgttttcttttaaactagaagtactagtttgaaaatgaaaagaaaggagaagataatgaatttttttgagtgcctactatgttcctatttcagagatgagaaaattgaggattcaaaaggtgtatggcctcttgaaggtcagatagctaaaagtgacagagtaggtctaaatcaatgtgctggttcttttattttggtgtctcagggatgtaaaagatttttagtgcataatattaaatggcaaaatcaaatttcccaacaatatacaaaataaaatcccatttacaaagggaaaaagctttatctatttgtatatcttcttatrtgtatataaattcatagaaaactatctggaagtgtatgtagcaaagcattaacaatggttatctctgggtataagaaggaactagaactgaagaagatggtggtgataaggga

SEQ ID NO: 271616 - DNA, 565 bp, Homo sapiens
ctgagacttaaagataaaatcagcacgtaatggaagagtttagagaggagcaaaaggcacaaaagacagtattttataggccaaacagggcagagcaaggaaggtttggctgtattctatgtctaaaactaaatggtgtttacatgttcaaagaaaacttgtgtacagaataagaagtagaactgaaatgaatctgagaggcagaattggcaagacaccagatctacgggacggggcaaactcaatggcaggcatcttgctgtgggccagggagagcccatcaggcrtctctctctgttgcccacgtgaaatattcatcacaagccatctcccttgctctgaatccaggcaccccaagtactttccagatggctaatctagcttccctatttgacactgagacattcagagagctgctctacaaagggtttgtgagcatcctggtccctgaaaaggagtctctcccactgtaaacataagttggcttttgttgtatgtattattctctcaataataatagctaacaaatattgagtgcctgctacatgccagccacaattataaa

SEQ ID NO: 271617 - DNA, 565 bp, Homo sapiens
ctgagacttaaagataaaatcagcacgtaatggaagagtttagagaggagcaaaaggcacaaaagacagtattttataggccaaacagggcagagcaaggaaggtttggctgtattctatgtctaaaactaaatggtgtttacatgttcaaagaaaacttgtgtacagaataagaagtagaactgaaatgaatctgagaggcagaattggcaagacaccagatctacgggacggggcaaactcaatggcaggcatcttgctgtgggccagggagagcccatcaggcgtctctctctgttgcccacgtgaaatattcatcacaagccatctcccttgctctgaatccaggcaccccaagtactttccagatggctaatctagcttccctatttgacaytgagacattcagagagctgctctacaaagggtttgtgagcatcctggtccctgaaaaggagtctctcccactgtaaacataagttggcttttgttgtatgtattattctctcaataataatagctaacaaatattgagtgcctgctacatgccagccacaattataaa

SEQ ID NO: 271618 - DNA, 647 bp, Homo sapiens
cactttgcagaaagagaaaaactatcattcaaaatcagcattcccccttttatctaggatctgaccctattcagcaacatttcttcattccatcagcagatttgaaagtctggatttrgttcttaaacgtctcccttccaaacccatagatgagatttgctcaaaaagaagtatctagaaggcaagtttctcaagacaccataaaattgtagggactgaagcagtgattggattgattaattcaatcaaggctgtgactcaatgttggctaataatgagacccaggcagggctgaacaatgaaatgctctaattgattttacgcatgtggaatgacacacacacacccccagagcatgctacgatgaatctgcatgctgtgtgcatatagatttcacagtggatcaattataccacccagttgcttcaggcccttatattctgcaattcacagaccagttcattactatggtgtgagtgcttaggacacaggctaaaaggtggcagagcccatgaagtctgtggtcacctcatgttccctttaggggaaagcaactgcgtggcacacacacataccagccatgccacaggctcaagtgaatgcacggtatcttccagattctggcatgaccattgactgggctagaa

SEQ ID NO: 271619 - DNA, 596 bp, Homo sapiens
ctctacaaagggtttgtgagcatcctggtccctgaaaaggagtctctcccactgtaaacataagttggcttttgttgtatgtattattctctcaataatratagctaacaaatattgagtgcctgctacatgccagccacaattataaacattttttatgaatgattgcatttaatctccatgagaactttctgagtcaggtgctgttattagcaccactttccagatgaagaaattgagtcagtgagtataaagacgttgctcaaggttacacttaggaagtgacagagccaggatacagacctagaccctaaggctccagagcccatgattttaactgccatgctatgcctgcttttgtgaatcattatgaacaaatttccctgcatctggtaaatgcaggcacactggcaacacacaagtccatactttccttataaaatcatggggacacttgattatcttgaggctcaaagttttttttttttttcctctttggcctacattaatactaaagtccaggaaaaaacccctgcagtttccataaaaacatagtagtgctgagattcatcaagaggatttgactgcaagtgaac

SEQ ID NO: 271620 - DNA, 647 bp, Homo sapiens
cactttgcagaaagagaaaaactatcattcaaaatcagcattcccccttttatctaggatctgaccctattcagcaacatttcttcattccatcagcagatttgaaagtctggatttggttcttaaacgtctcccttccaaacccatagatgagatttgctcaaaaagaagtatctagaaggcaagtttctcaagacaccataaaattgtagggactgaagcagtgattggattgattaattcaatcaaggctgtgactcaatgttggctaataatgagacccaggcagggctgaacaatgaaatgctctaattgattttacgcatgtggaatgacacacacacacccccagagcatgctacgatgaatctgcatgctgtgtgcatatagatttcacagtggatcaattataccacccagttgcttcaggcccttatattctgcaattcacagaccagttcattactatggtgtgagtgcttaggacacaggctaaaaggtggcagagcccatgaagtctgtggtcacctcatgttccctttaggggaaagcaactgcgtggcacamacacataccagccatgccacaggctcaagtgaatgcacggtatcttccagattctggcatgaccattgactgggctagaa

SEQ ID NO: 271621 - DNA, 485 bp, Homo sapiens
cttaacctcacaacaaccctgtaaaataatgttagttaaatttttacagatgagaacagagactcaatgaggttatatactttgtccaagatcacacagctaataaggagtataactggcaataaaacttagaaatgcctgatactcattcacccccacccctccaatttaatttatgttcagattatatcttataacctactaagcagggtctccatgcatacatttgaagtaaattgcaactttctcccaattctaggtagccgggtatcsatcgcttgccttcactcctctgtaagcatcagggaccacaaaacacaggttttatttattgctgtaggttccacaacatgtggcagagggtgtgctcacaacaggagctggtgaaccacctaacactgtgagtgtagacattggcacaggtgtggatgataaactcaggtaagggtacaaatacagtcttaaggcaatgtacatttgagcct

SEQ ID NO: 271622 - DNA, 485 bp, Homo sapiens
cttaacctcacaacaaccctgtaaaataatgttagttaaatttttacagatgagaacagagactcaatgaggttatatactttgtccaagatcacacagctaataaggagtataactggcaataaaacttagaaatgcctgatactcattcacccccacccctccaatttaatttatgttcagattatatcttataacctactaagcagggtctccatgcatacatttgaagtaaattgcaactttctcccaattctaggtagccgggtatccatcgcttgccttcactcctctgtaagcatcagggaccacaaaacacaggttttatttattgctgtaggttccacaayatgtggcagagggtgtgctcacaacaggagctggtgaaccacctaacactgtgagtgtagacattggcacaggtgtggatgataaactcaggtaagggtacaaatacagtcttaaggcaatgtacatttgagcct

SEQ ID NO: 271623 - DNA, 290 bp, Homo sapiens
atttagtctgtgatagagctgaaccatatctggattaatataaacaagagaattaatcctgcaagagccactatctgccagcaagtggmaagatgtcagcagtgcccttgctaaagcaggttggagggtggatggcaggagagatttaacaagattggtgctgagcatctggactctgtataaagaggggaataaagattgcaactggaatacattagaagaaaagcaaatgttttattcacaaaaaataggcattaataatatcagtctttaatccggcccagggctcc

SEQ ID NO: 271624 - DNA, 577 bp, Homo sapiens
aatgtgagtcttcacatgctgctctgtacatctgagtggaagctgcaagttagttttgtctcctatctgccatttttcccctcaggattattagaatttcgaagcttggaggagaggccacaaggagctgagactcagagctctgcagggagtgggaggtgccagttgctgctrggatctctgagagggcacaataaggcagcctctgaagtgtgggaaaagcaaattgcaaactaggaccaactactgacaatggaaccagctgcactgccaggttgaaaagcctaaataaccttcatatataacatttcttccatgaccccatcattggcttagttccgtttcactatatgtcaacccaagcaatatagatttaaataggtccactttgccctggcacttggctttgtgggagagagaagaggaggggtgagaatgaatttgagatgatgttaagacatttgggaacctaaaagcaccttaaaggttatttcattcgaacataaatgaacctttaaaatcatcaaatattctcacttgcaaattagaaaactgagaccagagaaccctactgaaa

SEQ ID NO: 271625 - DNA, 502 bp, Homo sapiens
agattggtgctgagcatctggactctgtataaagaggggaataaagattgcaactggaatacattagaagaaaagcaaatgttttattcacaaaaaataggcattaataatatcagtctttaatccggcccagggctccttaaattgccttcttcattgttgactttgatcttccccgcaaagccgcctgctaagggtcccttcccagatcagcctgaagtcatgggggcaggaatactgttgctaaacagatatgcaagggggtagcatgtgtgactggagtacagtatgacaacataatcctggcagggacagatgaagtcagtgtggggtgatgttggcttttctascatctactgaatcatctgatgagagcagcaattgaaaagaataaatacaaacacatgcaacacagccacaaagactggatggcccagatctgagaggatggatcctattttctcagatcagtggggaagtagggagaacaatgagctgggag

SEQ ID NO: 271626 - DNA, 524 bp, Homo sapiens
aactgaaactctgcactcctcctccctcycttctcccagcctctggtagccactattccactttctgtttctatgaatttggctgctccaggtacctcatataagtggaatcatacaatatttgtccttttatatctgacttccttcatttagcataatgttttcaaggctcatccatgttgtagcatatgtcagaatgtcattccttaaggctgtataatattccatcatacatatataccacattttgtttatctacccattgattattggatatttgagtggtttaaatcttttgggtattatgaataatgctgctatgaacataggtgtacaaatatcttttaaagttcctgctttcaattcttttgaatatataccctaaagtggaattgctggagcatatgataatcctatatttaattttttgaggggccaccatactgttttccacaacagctgttccattttatattcccactagcaatgcacaagggttccaattttttcacatatttgcaaac

SEQ ID NO: 271627 - DNA, 542 bp, Homo sapiens
atgtgtataatattgtacatgtccagtgcaggcttggcaaaagccttcagaagacaaagccttatgcagaaaaaagatccatgtctaaaattgctttcctagtctctgattggaaaaatctcataacaagtaaaatgagggaatatgatacttttaccaaatcaagtttgtttcttaactattactatatagtatggtattttttcccaacatatcgtatttgaagaaggaatttctgtcagaaaaaaatcactataagaactacttaccttgaaaaaactgttcaatgaatgaagattaattgtatctttttttaaagttagtatagggacataaacagaaagaaacaggtacttttgttatccagtaattttacttaattgaatgaatcatagtcaccctcctagaaattcagagaataaaaacatctcctgtttgctcaggaatggcaaatgtaataaaaatgccacagacaaggccacattgtgtgtacaatttctagagccacamagacagtaaaccagtgcaccagcaatgtgttc

SEQ ID NO: 271628 - DNA, 566 bp, Homo sapiens
acggtacagatagatttggggaaggcttattaaggaaaaagcaaagttacaaaagagaagtggagcttggttggatggttgaaagaacgtagggcttccagagatcaagacagacatcttggccagacaccatggctcatgcctataatcccagcactttgggaggctgaggcgggcaaatcacctgagaccaggagttcaagaacagcctggccaacatggcaaagctccgtctctactaaaactacaaaaataataaaattatctgggcatgggggtgtatgcctataatcccagctacttgggaggctgaggtgagagaatcacttgaacgtggggggcagaggttgtagtgrgctgagattgccccactgtactccagcttgggacacagagcatgactctgtctcaaaaaacaacaacaacaaaaaaaaacaacaaaaaacaaccagacagacatctgttcaggtttgcaggtagaagagaaaaagccaagaattgcatattgagaggatcttacacatatttgaaggaaattctgtgtcacagccgctgtgtagtcatat

SEQ ID NO: 271629 - DNA, 620 bp, Homo sapiens
ttcttcatatccactgctatgctgtggctttggttcagcagaagagaaatgaaatgggatgtagacagggctgtgagcgaaggttctttttttgtgttggggtaaagggcgttatttcttttgcaraggctctcacccaaaatcagagcaaaacttagcctgagttcctgaggcatgctggctcggagctgctgctggcttttgtttttcctccaagctgatctgtgtattttctagcttgcctttccattggctggagtgaggggatgagaacagctatatcactcaagagaagggaatattcatagagtccgcaggttttcctctgaaactgttgttttcttctcagagcagtagcaccttgattatagagcgcttccttgaaagtcctaaaataatgtcctatttcagaccaaatgtgaaacatcaatttcattccttacagaatctaatcttggtgtgcgtgatagataagtatacacagagaggggaatttctgacctaggactctcctcaaaagtatggtatgacccaagtatgatccacattctagagttcattaaaaggccatctcatctgtggattgaaattacttccttagctccaggcagcctgcagcc

SEQ ID NO: 271630 - DNA, 474 bp, Homo sapiens
gcctttaccctaaggcctttctggggtctctattaaatgctctggatgatcaacaattacattccactcttgctggtcagaactcaaaggccttccagccctatttgaagtttggaaaatataaagctcacagctycctggttgctctttgctaaaccttgcagattttaacctgatgcacgtacatcttcagttgggcaaaatctcaagaggaatttatgcagattttgggagctctttttctgtgtagcaccctcaactccggaattctgctcaatagtgtccagttgcctccgcctcttcaaactctcttctttgtctcatcaatttgtctagactattgtgctctgtttgggatatccctctgttatgtgttgaattgtatccccacaaaagatgttgaaatcctaatctccagtacctgtggatgtgcccttatgtggaaatagggtatttgtagatgatcaagttaag

SEQ ID NO: 271631 - DNA, 474 bp, Homo sapiens
gcctttaccctaaggcctttctggggtctctattaaatgctctggatgatcaacaattacattccactcttgctggtcagaactcaaaggccttccagccctatttgaagtttggaaaatataaagctcacagcttcctggttgctctttgctaaaccttgcagattttaacctgatgcacgtacatcttcagttgggcaaaatctcaagaggaatttatgcagattttgggagctctttttctgtgtagcaccctcaactccrgaattctgctcaatagtgtccagttgcctccgcctcttcaaactctcttctttgtctcatcaatttgtctagactattgtgctctgtttgggatatccctctgttatgtgttgaattgtatccccacaaaagatgttgaaatcctaatctccagtacctgtggatgtgcccttatgtggaaatagggtatttgtagatgatcaagttaag

SEQ ID NO: 271632 - DNA, 363 bp, Homo sapiens
tcactgatagtggtatcagagtagattatgattcacaaaggactgtccaacaaacaatgatttagatgaaatgctcccaataagtaaagaaagaggaaagggagaagcaaaatatgaggactgcaggttacaaaattttatcaagacagcatcatgccatgacaatatacatctctccttcctggtaatgagggtttgtctgcaactatatacaaagagaaacacraaactggaaattcagactctcttctgagtctagtctacctcctaattcagccctgttatacacagatttctgtaaaatatttgaaggaacgatgatggcgtataattacagaacaaataactaacttttcctgtgtg

SEQ ID NO: 271633 - DNA, 569 bp, Homo sapiens
ggatgtgaaggagttaagagctgactaatgctatatatgtccattaataaaatggatttgggttcagttcttttacacaaaataattttctcattctttaagagtttgacttattttcgtgtaaaagtttaaaagttaaaatataaagtggacagaaattagcttaataattggtaatttccaattaatatactctctatgagcatacttacagtgacaatttagcaaaattattttaccacttattgaaatgattaaaaataatctgattataaagccaataatttagactagtaatacttaagccakgaaagaattgaatctattctttttatatcctttctcttctttactctctttctcaaacaatataaaatttctgaagcaaatgcaaaatgaaattggaaatagatgtttgaagcagtgttctctcttcctaagtttctgttcagacatttatctgacatttactacaaataaggttgcttaacattatttttaaaaccttcacaaccacagcaaaggtatctatattgggctcaaatttaaaacaaagaaacaaagagtca

SEQ ID NO: 271634 - DNA, 569 bp, Homo sapiens
ggatgtgaaggagttaagagctgactaatgctatatatgtccattaataaaatggatttgggttcagttcttttacacaaaataattttctcattctttaagagtttgacttattttcgtgtaaaagtttaaaagttaaaatataaagtggacagaaattagcttaataattggtaatttccaattaatatactctctatgagcatacttacagtgacaatttagcaaaattattttaccacttattgaaatgattaaaaataatctgattataaagccaataatttagactagtaatacttaagccaggaaagaattgaatctattctttttatatcctttctcttctttactctctttctcaaacaatataaaatttctgaagcaaatgcaaaatgaaattggaaatagatgtttgaagcagtgttctctcttcctaagtttctgttcagacatttatctracatttactacaaataaggttgcttaacattatttttaaaaccttcacaaccacagcaaaggtatctatattgggctcaaatttaaaacaaagaaacaaagagtca

SEQ ID NO: 271635 - DNA, 619 bp, Homo sapiens
gtttaattatcttgcctacttttcttttggttgatttttccttattgatgtgtagaagtatattatatattcagatatgagccctttgtggctagagcatttcaaataatcctttttccattttgtgatttgcctttttgttcccttaatgatgtcttctgatacacacataaaaattatctcttgatttagtccaatatatcaatctttcttttttgtcttatttaaaaagtctttccctgtaccaaaatcttggagatttttctccartattatcttccaagagatttatttttttatttctcattaaaatataataatcaatctgaattgatttttaagtatggggaaaagtaaatgacatgacaattttttcatgtggatatctcctaattattctagcaccaattaatggaaatattatactttcccatggttttaaagtatcatctttttcctgacttaggtgttactaagtctgtcaacctgtctaccctattgctctttcttcatctcatattattgccaatactgcatactcttaatgtaatcttataataattattgatatttggtagagcatgttttctcactttgttattcttctttaagagtatct

SEQ ID NO: 271636 - DNA, 619 bp, Homo sapiens
gtttaattatcttgcctacttttcttttggttgatttttccttattgatgtgtagaagtatattatatattcagatatgagccctttgtggctagagcatttcaaataatcctttttccattttgtgatttgcctttttgttcccttaatgatgtcttctgatacacacataaaaattatctcttgatttagtccaatatatcaatctttcttttttgtcttatttaaaaagtctttccctgtaccaaaatcttggagatttttctccagtattatcttccaagagatttatttttttatttctcattaaaatataataatcaatctkaattgatttttaagtatggggaaaagtaaatgacatgacaattttttcatgtggatatctcctaattattctagcaccaattaatggaaatattatactttcccatggttttaaagtatcatctttttcctgacttaggtgttactaagtctgtcaacctgtctaccctattgctctttcttcatctcatattattgccaatactgcatactcttaatgtaatcttataataattattgatatttggtagagcatgttttctcactttgttattcttctttaagagtatct

SEQ ID NO: 271637 - DNA, 497 bp, Homo sapiens
ctggagagtaagatcactttttgttctacccactggttgcaaccaccagcttttctcaaataaagtcacacgtactctttgggctataacactgtatatctggaggtgatgcaaatccatgttataataaacacagtatttcttcttagtacattaccttttactggacaatttctggagtatagattaaaatttttaaatattatatttatattgaaataaaaaatgagctatcatatattttaatgcaaatttgatgataaaagaaagagataatttcatgaaatattgtawtagtggtggcagctcagagtaagctcctgacttctagggcttgaggtcactctcttttccgattaagggaatatcagtaaaaatatctaagatgaaaagctttagagtcctaatcagattcagatgattgatccacacaatgaagtatttcttgcgcccttatcagtgccattaatcggtgctagacagggtgggtagaaaag

SEQ ID NO: 271638 - DNA, 617 bp, Homo sapiens
tgacataatgaagagcatgattattaatagaaataaatcagaccaatttctaacatgagtcttatttggaaaaacaattttttcagtaagctgggagaataatgatgataatgatgcttacaaagaaaggtgcttaacaaaactctcagggtgcaaatctgtcccatgttggcctgccttgattggtaatctcaatgtactcacctcatggtgagatgarggataccacacaaatttgacaaacaattctaggattggcaacccaattgactacagggttatggaagatttaaaaagtctagacattcaatagagaaacagaattccaaataggcaggtcatttagataacgtgaatgtgaataaaattacacaaacacatagcacatggaaattatacatcattaagatcaaagtcatgaagagaagaattggaaaaaaagtgggaaaagaaattgggcaggatgagtatagaatcatgagaacaagctgagtaatgaagcatataaagttgtaaaaagttgtaaccttggtgtccatgagactttgcagtaatctaagctgtgtgaaggggtcaaacatttttatcagcgaggcagccaaactctgtacattttg

SEQ ID NO: 271639 - DNA, 551 bp, Homo sapiens
tttagttcatgcctgaaatataattgttcagaaaatattttttcaattgacaattttattttgtaaaaacaactgttttttgaaactttaagaaaaaagaaatgtaattttttcttcctctcttttacttaggatcagtttatgtcattgaaatatgtaattttttcttcatctcttttactaaggatccatttatgtcattaaataaacacatgagaataagtctatttgtaagcacagaagtgtgctggaaagaatgtgatctatagagacacaaactgatgggaaattacaaagtctatggaagagtattgatgttttctctctcagtgaattctctttagtagttggtcatcaatgtactgaartgccttgagaaatttcctgaaacttctctttgtagagttctgtctgattagctccagacacttggaccattactgcaagatagttctctagttattcatgctgaccatggcatgcatgaatcatgtggtgagggacagaagttattattaagtgatagctttggaagataacagaaagataaa

SEQ ID NO: 271640 - DNA, 588 bp, Homo sapiens
tatgtttactgtgaaatcagggaatgtgataagaatttgatagacatcacttgtattaatcctcacagcacctctaatacagtgagtggtatggctacatccaattcataatctcttcaaaaaccatagttataataatgactttaatatttttatttatagatgaatgcttacaaaccattgtcattttctcgttagatcttcaccacatatctaggtctctatgtaactagtaatatagagraaggagaataatttgttcttgcctctccttagcttcagaaacagtgacagttcctaactcctttacataagaataatttggagcctccaaagactctagataattgtacctattcagtttccatttctccggcaaattccattgtattgttatccccacaattgagaaatagcatgagattggacagagagcatttgcatcagaacacatagaataagctcatcttctgcatcttattagttctgcaattaactcagaggtcatctataagctgcctgcccacatcttgaaagtatcatatacaatatgtaaaagcattttctaactctaaagctctataaaaa

SEQ ID NO: 271641 - DNA, 588 bp, Homo sapiens
tatgtttactgtgaaatcagggaatgtgataagaatttgatagacatcacttgtattaatcctcacagcacctctaatacagtgagtggtatggctacatccaattcataatctcttcaaaaaccatagttataataatgactttaatatttttatttatagatgaatgcttacaaaccattgtcattttctcgttagatcttcaccacatatctaggtctctatgtaactagtaatatagagaaaggagaataatttgttcttgcctctccttagcttcagaaacagtgacagttcctaactcctttacataagaataatttggagcctccaaagactctagataattgtacctattcagtttccatttctcyggcaaattccattgtattgttatccccacaattgagaaatagcatgagattggacagagagcatttgcatcagaacacatagaataagctcatcttctgcatcttattagttctgcaattaactcagaggtcatctataagctgcctgcccacatcttgaaagtatcatatacaatatgtaaaagcattttctaactctaaagctctataaaaa

SEQ ID NO: 271642 - DNA, 588 bp, Homo sapiens
tatgtttactgtgaaatcagggaatgtgataagaatttgatagacatcacttgtattaatcctcacagcacctctaatacagtgagtggtatggctacatccaattcataatctcttcaaaaaccatagttataataatgactttaatatttttatttatagatgaatgcttacaaaccattgtcattttctcgttagatcttcaccacatatctaggtctctatgtaactagtaatatagagaaaggagaataatttgttcttgcctctccttagcttcagaaacagtgacagttcctaactcctttacataagaataatttggagcctccaaagactctagataattgtacctattcagtttccatttctccggcaaattccattgtattgttatccccacaattgagaaatagcatgagattggacagagagcatttgcatcagaacacatagaataagytcatcttctgcatcttattagttctgcaattaactcagaggtcatctataagctgcctgcccacatcttgaaagtatcatatacaatatgtaaaagcattttctaactctaaagctctataaaaa

SEQ ID NO: 271643 - DNA, 618 bp, Homo sapiens
ctattcttttatcatcccattattcagtacattttttaagaacaaagcaattgctatctacaaatatctcttcttttcttgtttttgttatctgcagtcattttaactgtttcacagtatgattttttcaaaatattatgtccaaaaaattttttttctactctgtgtggaggcggtggagagttgtagtctggttctggaatgcactatggtragtggtcaagtgttttgttttttgttttctttgtagaggtgggggtcaccctatattgctcaggttgtcttgaactcctgggctcaagtgattctcccacctcagcctcccaatgtgctgggattacaggcatgagccaccatgcttagtctctgagttgccaatttgtaaaatatttcaatacctttaaatttctgattgtggagtctcatcctggctgagctatggttaaaatatcatcataaaaaagtctcctgttagtacaatcccatgctttcccacagcttatcttccactaggtttcaggtactactaatcaatacaggcatgggaaaggtggaggaatctatagggaagaggttttctaaggggcagactcatgtctcccattgtctactcatgcc

SEQ ID NO: 271644 - DNA, 670 bp, Homo sapiens
aattccctcacaatgacctggcccctcttgagccttgtcacttcccatgaccatattctgctccctggagagtatcatgttggtcttctgtcttgcagagagctgttaagatgctgcatttcttctcccgtgtttcatgtgctggtagctttccttaagcttgaagagtaaactttccttcatggcaccacagttcaggcacagaggtcagctagggtgttggctataaaggggtagggatggtagtgagatttggagagacagtgggcatgtctatgccttcccagtgtttctgacacccatctaggcctgttttgctttttctaaactgcagccatcctttctttcaaggagatagagagccctacagagagaaataagagggaggagaacattcaggttctgttggcataaaaaaccataaacaccaatctctgctgcccctgcaggccctgaaggctcatggagcaaggtggcagaagaattttctcaaacgtttccttgctcttgttttcctctatgcctatggctctcaatttatcttctcattccttcctgtcaaaaactattgtttttatttcttcactgcrttgtcctctctttgtcctaggctttcagtcttgaatctatgtaattttttttaatagcttgagctaattgggttttccag

SEQ ID NO: 271645 - DNA, 492 bp, Homo sapiens
gtatgtctggtactttggtctttctttggtatgccttttcctagaatattgaacaagagagccagcatatgaagttattttaacctgacttgtattctgcaatgtaaaattgtgccataattgaagtggaattacatatggtgrgattcagtggtaatggtcagatcatgttagtctcctgtgagtgagggcttctctaggacttgggatgtagagagcctcttttcctctaagaccagattaaagatccaatgctaggggtggaaactgggggctggcaaataccaggaacagaggcaggaggctggcatagagtttttccagattatcctttccttttctctggatatccttagggctcttttctcattcacttagctctctgtttttatggcagtattcatgaattgctgtattcctctgtctccaccccaccctcaacccagatggcaccctttttgaagacaagatatttgacactgagatttgtta

SEQ ID NO: 271646 - DNA, 492 bp, Homo sapiens
gtatgtctggtactttggtctttctttggtatgccttttcctagaatattgaacaagagagccagcatatgaagttattttaacctgacttgtattctgcaatgtaaaattgtgccataattgaagtggaattacatatggtgagrttcagtggtaatggtcagatcatgttagtctcctgtgagtgagggcttctctaggacttgggatgtagagagcctcttttcctctaagaccagattaaagatccaatgctaggggtggaaactgggggctggcaaataccaggaacagaggcaggaggctggcatagagtttttccagattatcctttccttttctctggatatccttagggctcttttctcattcacttagctctctgtttttatggcagtattcatgaattgctgtattcctctgtctccaccccaccctcaacccagatggcaccctttttgaagacaagatatttgacactgagatttgtta

SEQ ID NO: 271647 - DNA, 534 bp, Homo sapiens
gttgcttttccagaaggcagttatactgtacatggtactacaaaaaaggaattgcacaaaatgatagaatataacgcatgaaataagagaaacttatgaagtgtcttgagtaacacagaagatgtgtggtctatctctggagactggtcagagaagagggactcccagaatcaaatttttaagaatgaacatgaattttccargtctaagaatgaaaaaagaaatgtgttatatgttaaccaataggaactgtgtgtgtgcctgtatatgagtgtgtgtatgtccatgtacaaatgtgtgtgcatgactatatttgagtgagatgtgtgtatgtgtgttcatgcaagtgcatagctgtttgtgaatgtatgtgcatctgtgagtgtacatgttagtatatgaatgtgtgtaaaagtacatgtgtataacatgcatgttcatgtatgacattgtggggaaagtatttgtagtggtagagtggtgattgtactagttggtagatagcctgcagggttggaaagtttctcagccata

SEQ ID NO: 271648 - DNA, 534 bp, Homo sapiens
gttgcttttccagaaggcagttatactgtacatggtactacaaaaaaggaattgcacaaaatgatagaatataacgcatgaaataagagaaacttatgaagtgtcttgagtaacacagaagatgtgtggtctatctctggagactggtcagagaagagggactcccagaatcaaatttttaagaatgaacatgaattttccaagtctaagaatgaaaaaagaaatgtgttatatgttaaccaataggaactgtgtgtgtgcctgtatatgagtgtgtgtrtgtccatgtacaaatgtgtgtgcatgactatatttgagtgagatgtgtgtatgtgtgttcatgcaagtgcatagctgtttgtgaatgtatgtgcatctgtgagtgtacatgttagtatatgaatgtgtgtaaaagtacatgtgtataacatgcatgttcatgtatgacattgtggggaaagtatttgtagtggtagagtggtgattgtactagttggtagatagcctgcagggttggaaagtttctcagccata

SEQ ID NO: 271649 - DNA, 534 bp, Homo sapiens
gttgcttttccagaaggcagttatactgtacatggtactacaaaaaaggaattgcacaaaatgatagaatataacgcatgaaataagagaaacttatgaagtgtcttgagtaacacagaagatgtgtggtctatctctggagactggtcagagaagagggactcccagaatcaaatttttaagaatgaacatgaattttccaagtctaagaatgaaaaaagaaatgtgttatatgttaaccaataggaactgtgtgtgtgcctgtatatgagtgtgtgtatgtccatgtacaaatgtgtgtgcatgactatatttgagtgagatgtgtgtatgtgtgttcatgcaagtgcatagctgtttgtraatgtatgtgcatctgtgagtgtacatgttagtatatgaatgtgtgtaaaagtacatgtgtataacatgcatgttcatgtatgacattgtggggaaagtatttgtagtggtagagtggtgattgtactagttggtagatagcctgcagggttggaaagtttctcagccata

SEQ ID NO: 271650 - DNA, 534 bp, Homo sapiens
gttgcttttccagaaggcagttatactgtacatggtactacaaaaaaggaattgcacaaaatgatagaatataacgcatgaaataagagaaacttatgaagtgtcttgagtaacacagaagatgtgtggtctatctctggagactggtcagagaagagggactcccagaatcaaatttttaagaatgaacatgaattttccaagtctaagaatgaaaaaagaaatgtgttatatgttaaccaataggaactgtgtgtgtgcctgtatatgagtgtgtgtatgtccatgtacaaatgtgtgtgcatgactatatttgagtgagatgtgtgtatgtgtgttcatgcaagtgcatagctgtttgtgaatgtatgtgcatctgtgagtgtacatgttagtatrtgaatgtgtgtaaaagtacatgtgtataacatgcatgttcatgtatgacattgtggggaaagtatttgtagtggtagagtggtgattgtactagttggtagatagcctgcagggttggaaagtttctcagccata

SEQ ID NO: 271651 - DNA, 562 bp, Homo sapiens
cctataatcatgaaggccaatttctattgtgtgtgcattggccggtgggggtggggtgtcctattggttctgtctcttgggagaattctgactaatgcactggctatttcacaaaaattttatagaaagaacaataattgttattttaaaattcaggctagaatagcaagaacaaaagataaayagtttttgaaaaaaactgtagccattaccacattctccaagtgggtgtagtatttatctttgggaaaagatagtgctttttttttctgaaaaagaaatactttactggggctgggtcttcataatacgactgataatagttaaagaaatattatgcttagtatgtgctgggtagagatccaggtgctttccatggccaacttgtgtggcaacattataagtataatgaatgtaatcttcatggtgacagagaagctaagtcacattctagtaaatatgacagccaggatttaaacctgggtagcaactctgtagtgactctgctcctaaccatttggctattctgtgctgtgctaggagcatgagatagtgaacgata

SEQ ID NO: 271652 - DNA, 592 bp, Homo sapiens
tagaagatagtggaaaatgtctatttacttgtaatgaagaatcatgaatatcccaactcatctcctatcagaacttacacccactaaggaaaacgcacttctgttccaaccttttctacacaatttaaaatatcaattaattaactgagtcaacaaatatttattaggagtgtctgattttctaggcaatattgtgggaatacgagtgagaacaaaaatttttgattatgattgatgcatctcacactgggtaattatttatgtaaatcaaccatgtggcgtttgtcatatctgcttktttattgttggctatattatttcttttcatgttacccatctccaccaatttttatctacattgaatgttattgaaatattattgaagtaaatatagtgttgcaatttgtgattcatctgcagagtcaagtacttgtgggtttaaatcctacattcttaatttaatgactttggcaacatttagaaatgtctttgttcgtccattgctaatgtctccaatagtcttttttaaaaattgcaaaatgtgaaaaaaaaagattgctttgctgatgttgtgattcaacaaatgtaatag

SEQ ID NO: 271653 - DNA, 586 bp, Homo sapiens
tactgtaatcttgatgtcttccaagggaataagacatggaattatacaattttggagctcaatgggtccttacagttaatttgatcttttacttgacaggtgatgaaactgatctggagcacttaagtgagatgtctgttaactttggcatgacagagtcagattctgaatccaaatcatctatgtcctagccaatgcctgactcacaagttcacacagaaagataattgtgcctctttcacccttcatcctcaattatagcattgtggattactacaaaaaacacagttccacctccgtgactcccatttttcttccatcatgttgyaatgctcctcttccctacttcacaatcaaaaattcaggccactgctgagactatcctgtgttagaaataggcagtggctgtgcatttaaacaaaggtctttccagaattctcatttggttcctggttgcttggcaaggccatctctctttctcttagtcagtatcactcagcccattgactggtgtaggctctcataaacttccactgagcacctaccatcatcaaaacaaggctgaatttttgggcaatgctttaaa

SEQ ID NO: 271654 - DNA, 647 bp, Homo sapiens
actgagtcaacaaatatttattaggagtgtctgattttctaggcaatattgtgggaatacgagtgagaacaaaaatttttgattatgattgatgcatctcacactgggtaattatttatgtaaatcaaccatgtggcgtttgtcatatctgcttgtttattgttggctatattatttcttttcatgttacccatctccaccaatttttatctacattgaatgttattgaaatattattgaagtaaatatagtgttgcaatttgtgattcatctgcagagtcaagtacttgtgggtttaaatcctacattcttaatttaatgactttggcaacatttagaaatgtctttgttcgtccattgctaatgtctccaatagtctkttttaaaaattgcaaaatgtgaaaaaaaaagattgctttgctgatgttgtgattcaacaaatgtaatagacataaagaacttagcatgatgctttgacaaagatgctcaatggtgtcattgatgagggtagacaccatagcttctctgtccactcagtcccctggaaagccttgtgcattacctaatgaggttgatacctaatgcaggtacattgattaattttgatgaatctgttactaaaatgtttaatgttttgtcaaagaaaa

SEQ ID NO: 271655 - DNA, 647 bp, Homo sapiens
actgagtcaacaaatatttattaggagtgtctgattttctaggcaatattgtgggaatacgagtgagaacaaaaatttttgattatgattgatgcatctcacactgggtaattatttatgtaaatcaaccatgtggcgtttgtcatatctgcttgtttattgttggctatattatttcttttcatgttacccatctccaccaatttttatctacattgaatgttattgaaatattattgaagtaaatatagtgttgcaatttgtgattcatctgcagagtcaagtacttgtgggtttaaatcctacattcttaatttaatgactttggcaacatttagaaatgtctttgttcgtccattgctaatgtctccaatagtcttttttaaaaattgcaaaatgtgaaaaaaaaagattgctttgctgatgttgtgattcaacaaatgtaatagacataaagaacttagcatgatgctttgacaaagatgctcaatggtgtcattgatgagggtagacaccatagcttctctgtccactcagtcccctggaaagccttgtgcattacctaatgargttgatacctaatgcaggtacattgattaattttgatgaatctgttactaaaatgtttaatgttttgtcaaagaaaa

SEQ ID NO: 271656 - DNA, 551 bp, Homo sapiens
gcaagtctgcccttctgttctttttttcaccttttgatttatgcaagggcagagttatattcctgaggctcatccattccctacgaaattaatttttttaaactgaagtctccccatttggttaaaaccaaatgtgacaaattagattcaatatccttttcttggatacaacaaaaacagtagttataattaggacttctctttggtaaaattttgaattaggtgaagcttgtatacagtggctgtgggctcatgttctctccctattacccaaccctgtttttatactttatctcaaaattacattttcttgttttcctatatgaagtgccctaccctcacattgtctgtctactacctttttcacccttacaggatcattgttcactggcctgcccttaactgtgaagaaaaaaaaaaaagatctaataaaattacaccaccacaatgagaatcctscccacctccatgagacagctgggatttgaaatgggacacttagagaaacaatgccttaattataacttcataatttataatgggccattcac

SEQ ID NO: 271657 - DNA, 588 bp, Homo sapiens
ccaaacattttcttatttgaacaagtcatcatcagcactgtctcctattttctacctgtgctaattttgctcttttatggtattagtggataagagatggtaggaaaaagcaagccttctaaggaaagtgagggagagaagagagcgagaaagagagaaaagaaagaggccacattataaaaagagaatggagtccagtattgtatttgtctaccttaaaaatcggtcaatttgttagttgcccaatttgtctttttttcatagtgctaacttgtgctaccatttatagcaggggttggtgaacttttcttgtaaaagtctaggtagtaaatatttttaagttttgtagaccacatactcaatctcaattctcaactcaattctgcagttctagcataaaagcacccttataaactatgcaaatgaatgactgtggctgtatttcaagaaaactttatttacagaaaaaagcaaaaggctggawatggcttacagattgtattttgccaacttctgtcctataaagttcacagggcatgaacggcatggtaatatattttagaagatagatagattattgttttttcc

SEQ ID NO: 271658 - DNA, 487 bp, Homo sapiens
ggcaacatatcttcccactgatatgtttgggtaggctgtacagtttccataccagtcatttccatttctctctaacattctacattctcttttgtgttttctactgcagctcctcacacaatccatcctcccattctccctttcctgggccagctctccctatctattcttgctgaagtcttctttccttactattatacatctcttatgtattatacataaagtctttgtcatctgacctaaaagactgagctcctttatttatttatttatttttgagacagagttttgcgttgttgcccaggctagagtgcagtggtgtaatcatggctcaagactcactgcagccttgaattcctgggctcaagcaatccccctgcctcaacctcccaagcagctaggactgtatcagcacaccyggccaatttttctatttgctctagagatggcgtatcactatattgcccagatggtcttgaactcctga

SEQ ID NO: 271659 - DNA, 526 bp, Homo sapiens
tgagtacttcagttgtgtatgtagattgttgtggttttcaaagaccaaatatgtcagggaaacatctttaaatagtagaaatacactggatgctwgatctgggttttgttgcaaatttgtggtgtgattctggcagagtcgactttcataaggtttgtaaatcagactcttgtaaaggaagctagacaggaagtcaagagttctagaattctagtctttgccctatctattcagggcctacttctcttcacataaaatatgacaaatttatatcagtgtcttctgaagttagcaaacccaaattttaggcttctgtcccataagccatcaattattcaggctgtggttcttgggcagtgacatcacaggctctcttgaccttcagaagaatgttttacattttggtgattgtaaataaaggcatctctgtgtgtgagcatactattttccatatggagtaagagtggtgctgatctatattagggagaaaaagtactcctcagtaaacacaacatgctgatataga

SEQ ID NO: 271660 - DNA, 526 bp, Homo sapiens
tgagtacttcagttgtgtatgtagattgttgtggttttcaaagaccaaatatgtcagggaaacatctttaaatagtagaaatacactggatgctagatctgggttttgttgcaaatttgtggtgtgattctggcagagtcgactttcataaggtttgtaaatcagactcttgtaaaggaagctagacaggaagtcaagagttctagaattctagtctttgccctatctaytcagggcctacttctcttcacataaaatatgacaaatttatatcagtgtcttctgaagttagcaaacccaaattttaggcttctgtcccataagccatcaattattcaggctgtggttcttgggcagtgacatcacaggctctcttgaccttcagaagaatgttttacattttggtgattgtaaataaaggcatctctgtgtgtgagcatactattttccatatggagtaagagtggtgctgatctatattagggagaaaaagtactcctcagtaaacacaacatgctgatataga

SEQ ID NO: 271661 - DNA, 481 bp, Homo sapiens
ttacactctctttctttatatatatataatatatatattatgtatatatatattctatatatatacataatatgtatataatttgcccaagtatgaaggcttctttttctttgtaatatttatagagccttgacattgagacttaaccwttagaataatatttgacagtaatgatgctagacaaaagaaattactattgtagaggtaacaaaaatcactgattactaaaaaatggaataacagtcacttggtttataatattaagatactcagaggaaacaaaacagtcaggaaaactggatgtttggtgccacttgtgaaattcaacatgagaaaatccaaatttgcaaccttttccagtagttttttttttctttgtcataggcagtggtttacaagttatttttccccaatgaatgtatctatacatttccaagctaaatttaagttacttattttttgctgacagctctaacttctt

SEQ ID NO: 271662 - DNA, 481 bp, Homo sapiens
ttacactctctttctttatatatatataatatatatattatgtatatatatattctatatatatacataatatgtatataatttgcccaagtatgaaggcttctttttctttgtaatatttatagagccttgacattgagacttaacctttagaataatatttgacagtaatgatgctagacaaaagaaattactattgtagaggtaacaaaaatcactgattactaaaaaatggaataacagtcacttggtttataatattaagatactcagaggaaacaaaacagtcaggaaaactggatgtttggtgccacttgtgaaattcaacatgagaaaatccaaatttgcaaccttttcsagtagttttttttttctttgtcataggcagtggtttacaagttatttttccccaatgaatgtatctatacatttccaagctaaatttaagttacttattttttgctgacagctctaacttctt

SEQ ID NO: 271663 - DNA, 481 bp, Homo sapiens
ttacactctctttctttatatatatataatatatatattatgtatatatatattctatatatatacataatatgtatataatttgcccaagtatgaaggcttctttttctttgtaatatttatagagccttgacattgagacttaacctttagaataatatttgacagtaatgatgctagacaaaagaaattactattgtagaggtaacaaaaatcactgattactaaaaaatggaataacagtcacttggtttataatattaagatactcagaggaaacaaaacagtcaggaaaactggatgtttggtgccacttgtgaaattcaacatgagaaaatccaaatttgcaaccttttccagtagttttttttttctttgtcataggcagtggtttacaagttatttttscccaatgaatgtatctatacatttccaagctaaatttaagttacttattttttgctgacagctctaacttctt

SEQ ID NO: 271664 - DNA, 576 bp, Homo sapiens
cttaaactccaagcaaaagtaatatcacagagagaatgccttgcaacttcaatatcacaactgaaagggcaactgagcactacttatgttttaaaactaaagttggaaatttatgacatataacatttggccaaatggggatttgacattttgtragccagcatcttatgatatcaaatgaatttttttagttttgttatttttatttttattttttggtgttgttacatccagatgtatgacataatggtgaccaaatgtatctacattttgtttccaagtcatttattataaaagaaataataaggacaattttaattatcaagaggctggtcattgttaatgaggaaaaaggatgaacaaatatgtagtttcaagtctacaagtttctaattcttctgcattagctgacttgcacaaaacaataacctgcaagtcagcatgtaacattttccccatcacttgagtgggaaaactatcatgttagtgtgtacttagaaggtggacaatagatgtatatttatgatgcctataattttcttgttgtgctataatcatgatacacaaagtgttgtg

SEQ ID NO: 271665 - DNA, 576 bp, Homo sapiens
cttaaactccaagcaaaagtaatatcacagagagaatgccttgcaacttcaatatcacaactgaaagggcaactgagcactacttatgttttaaaactaaagttggaaatttatgacatataacatttggccaaatggggatttgacattttgtaagccagcatcttatgatatcaaatgaatttttttagttttgttatttttatttttattttttggtgttgttacatccagatgtatgacataatggtgaccaaatgtatctacattttgtttccaagtcatttattataaaagaaataataaggacaattttaattatcaagaggctggycattgttaatgaggaaaaaggatgaacaaatatgtagtttcaagtctacaagtttctaattcttctgcattagctgacttgcacaaaacaataacctgcaagtcagcatgtaacattttccccatcacttgagtgggaaaactatcatgttagtgtgtacttagaaggtggacaatagatgtatatttatgatgcctataattttcttgttgtgctataatcatgatacacaaagtgttgtg

SEQ ID NO: 271666 - DNA, 594 bp, Homo sapiens
acgttgacaatagcctccatttaaattcatgtaatagatctaatatggtactttgtagcattttgcagagctgttctttttattttatcaggataggaacagttactttttaacaaaagaatagggttgaaagaatgtaataaaaaagaaaaagtacctcaacattgtyatatttcactgtaataatgtacagattatcatgcatattattggttcaaaattttattctccctttattactctttggaattgtaagcttgctgagggccgaaatcaagcctgaccacttatctttgcaactacattaagtctgccaagagaaaagatattctatcaaggatagataaaattagttattgaaaaagaaagttgacagggcacaatgactcatggttgtaatcccagcattttaggaggctaagacaggagaatcatttaagcccaggagtcaggactaacctgggcaagatagtgagaccctatcgctacaattttttttttcaaaaattagccaggcatgatggcgggcacctgcagtcccagttgctagggagcctgacgcaggaggattgcttgagccctaggaactcgagg

SEQ ID NO: 271667 - DNA, 538 bp, Homo sapiens
gaatgtgatctaaaagcggcaactgacagctatcaagagcactagacaggagattgtactgtcacacagaacaataataaatgatgttgactttgtcctattttctttgctttaaaaagcaaagaaacttacaaaactgcctcgaaagtttcccagacaacatggttacatattgggaagtggggttgggaaagctatgtgtaagcacaaattacctgaaaaaccacttgagtgtaacactttctttccaggtgactttggatgcatgagaggcaagatatagttctaggaataccacaattaatgagagaaattaaaaaaataaaacttaacctyattcagaaaacacggaagtgacatcactagcgctattgctcaatatgccctttctgaactaaaaatgaataataaaagggtatataagaatttctgatcctgtaatcttcagttttcagcctaatgactgaaagtctaaagtcttctccgtagaagtagctgctcagcagagattcacttaagtcttggatattagaggctt

SEQ ID NO: 271668 - DNA, 574 bp, Homo sapiens
aaacttaacctcattcagaaaacacggaagtgacatcactagcgctattgctcaatatgccctttctgaactaaaaatgaataataaaagggtatataagaatttctgatcctgtaatcttcagttttcagcctaatgactgaaagtctaaagtcttctccgtagaagtagctgctcagcagagattcacttaagtcttggatattagaggctttatcygtttatttgatgattggaattttctgcccattattgatccctgccactcttatgaacaacttaagtgtctgacacaagtgagttgataaaatagactgtattttttatccattaactggcacttcatatattgtccaaaatctgtcatgagctttgcaacatttccacagcaatagcacctgcctattcagggatcatatatcaaggtgcattcagttcatctgccacaacaggaattggctgctgctgtttatattttcccccccaactcttatcatgaagttaccccttacccttacttttgaaaaaaaatgggacatacttccaggattattttcttcaatatttctctatc

SEQ ID NO: 271669 - DNA, 539 bp, Homo sapiens
tactttcttcttttcttccttctttacttccttttctcttttttctttatttctgtaatatctgttgaattttgctctcaagattatgwtaagtatatatatgaaaatagtgttcaacatcactaatcatcagagaaatgaaaatcaaaaccacaatgggataccatcacataccagtcagaatggctattatcatttttattatttgagacaggatcttggtgtgtcatccagtcgggagtacagtggtgctatcacagcttactgtagcctctatattctgggctgaagcaatcctcctacctcagccccccaagtacctgggatcacaggcatgtgccaccatgaccagctaattttttaaatttttgtagaggcagggtctccctatattgcccaggtttgtctcaaattcctaggctcaagtgattctccatctcagccccccacactgctggaattataggcataagccactgggcctggctggctattattaaaaagttaaacaataacagatgctggtgaggttgcagagg

SEQ ID NO: 271670 - DNA, 565 bp, Homo sapiens
agaactttcaatgcttgacatgacacacataatatgaaagagaagttgtaaactctttagaaataatttcagctgaaagaaacagaaaacctacctaatggtggctgaattttgtagctgcttagaaagcacacatttaggattaacatgtttgatagtgaaagacagtaaggaagcagtgacatctgaaatgtattttggtttgccaatcatatagctttattttgataagaaggaataagtgtatatgactttcaattttttaaagtaaagtatgtgttctaaaaacataagtgtggcctttaaaataagagaaatagaatggaaaattatatatctctaggatgtaaaaataaaatagtaaaattatggtaaattcagtaaaagacaagagaaaatgaaacaaaggaatagttaaaatgaggacacaatataagttggttttaacaaacccaaatgtatcagaaaataagyaaatgtcaatagatgtttattaaaatacaattaatttcagatcagaaaattaaaaataaatatatctaactatatgctgtttacaaagata

SEQ ID NO: 271671 - DNA, 492 bp, Homo sapiens
tatcaaaacagtttgatcaaaacagtctgatgtgtgtgtgtgtgtgtgtgcgtgtgtgtgtgcgtgtgtgtgtgtgtgtgtgtgtgtgtgtgtgtgtagttcagggtctcttcgactgaacactttgctttcctcttcataacctaagggggtttcaatatgtagccttatagcttattttgttttgttttgaaggttttgtgcttgagatgcctctggaagtctcaagattcatttccccactaagagaaaggcatgatgttgcaattggtctattatcaacgtatgctggaatagaattactgagtgctggtagattgacttcycttgcctccatgagaccagaaaatgctgaagatactctgttacacaggaaaagactccatgccttctgctaacctttttgttacactacctctaagaacatgaatttttttccccatgatggaaggcataccaaagctgtttcatttcgtcccctaccttcccttt

SEQ ID NO: 271672 - DNA, 535 bp, Homo sapiens
tctgccccagtgtatcacaatttccctattaggcttctgcattgaaaacatctttatcaaatgtctttacatagtcgttaattttttaaataaaatttattttctttttaaatacatatttattttagaatagtttcaaaataaaataataaagaaattaattcctcatagtgccaccaagtgataaatgattttcatggtttttctttcctcaatcataatatttctatgcaattgttttyatacatattatactattttatgtcaattcatagatatcctgctcagttaaaattaagtgttcttggaattaaaacaagattgtcaagacacataactagtccagtgacttcatttaattgacaaaactactacccagttgcataaattgctcaatatcctgtagcaaacaaagggaggaaccagatcctccgtatttgcctagagctgctgcattgccctacatatgcaagaacccagggttagaatgggaagatgtaacttttgttaggactgtttttttcttaagtagctt

SEQ ID NO: 271673 - DNA, 565 bp, Homo sapiens
tcatcattttgttgagcatcaattatgtgccaggttttatgatgggtgctaggtttttttgagataatgttctatttaaagtcatccattkgttatttaaaccaaattgttatagttgacctccaccacgaattttcacttttctgttgataatttcccaatccatctcccttccatgaatatatatgctctaatattgtcccttctttggaaagctagaataaactcctctactaatccaaatcttttgcttgtataatttttaaaacaatgtgcattatattttttcatttttctactctttctttactctggaaaatgttttgtcttttgtcccttgtttagccactcaagaatcatttattttatttctccaactgctttctttatttcttacatcccctcttgccctctgaagttgtatttctgttcattggtactggggtacattgcactgcaaggtataatttcttgatgactaaggaatgcatatatcatgtccttttctcctccacagtgtaaacatacccagtgctttacagtattcaatatagaagaaatattt

SEQ ID NO: 271674 - DNA, 565 bp, Homo sapiens
tcatcattttgttgagcatcaattatgtgccaggttttatgatgggtgctaggtttttttgagataatgttctatttaaagtcatccatttgttatttaaaccaaattgttatagttgacctccaccacgaattttcacttttctgttgataatttcccaatccatctcccttccatgaatatatatgctctaatattgtcccttctttggaaagctagaataaactcctctactaatccaaatcttttgcttgtataatttttaaaacaatgtgcattatattttttcatttttctactctttcttkactctggaaaatgttttgtcttttgtcccttgtttagccactcaagaatcatttattttatttctccaactgctttctttatttcttacatcccctcttgccctctgaagttgtatttctgttcattggtactggggtacattgcactgcaaggtataatttcttgatgactaaggaatgcatatatcatgtccttttctcctccacagtgtaaacatacccagtgctttacagtattcaatatagaagaaatattt

SEQ ID NO: 271675 - DNA, 498 bp, Homo sapiens
actgtagttttgtagtaaattttgaaaagatgaaatgtgattcccttatctgtgttcttatttttcaaaattatttttgctattcaggatcccttgggattccatatgaatttcagaatagattttcctacatcagtaaaaaatgtcattggaattttgagaggaatttcactgaatctatcgattacttaagtagcattgttatcttaacaatattaagtcttataatccatgaacataagatgtgttttcattattttatgtcttctttaatttgtttcagcaatgttttgtagtattcgttgtgcaactctttcactttcattaatcacactattttattattttagatgctgtastaaataaaattatttttaatttttcctgtacagattgttcactcttaatgtgtagaaatgcaactgattttttgcatgttgaccatgtatcctgctattttgcttaatttattagttttacagtttgtgtgtatgtgtg

SEQ ID NO: 271676 - DNA, 486 bp, Homo sapiens
atttgctttaacaaaaatgtttatatccataaattcttcccttagccttgctttcactgtttcccataattttgaaatttttgtatttttgtttcatttatcttcaagtattttttatgttttcattgtgatttcttcctcgttccattggtttctgaygaccatgttatttaatttatgcaaatttgtgaatttttgctttttatttctgttattgatttctaatttcatcctgttttggtcagagaagatactctgcatgttatctgtctctctaaatctattgatactcagtttgctgcctaacatatggtctatcctggaatgtcccatgtgtacttcaagaggtacatgctgtttttgttgactagattgttcggtatatctctgttatatctggttggtttattgagttgtttaagtacttttttttttattaatttctgtctgtttttttcatccattattgagagcgaggtattgaaa

SEQ ID NO: 271677 - DNA, 597 bp, Homo sapiens
tttagaaaactcatgaagaggttatagaaataaacatgcatacatgcattcaacatacaaaataaaatatttaaatatctgaatgcaccgatatattaataagtgtaagaacagtaagaaaggggattaaatgctaggattaggacaattagggcaggttctttggggaagatatgttttacaatggaacaagttcacattaggtttgcctacctacaagttcatggcattgtcagatctttcaaaccttgttatcatagtagcaaatataccattcagagatagctggagctgggcagatttttccagttctccttatgctattttaccagccccagttcctggagctgcaaactgacactacttcaggcccgtatgtgtacacactcgatattggttctgcctcacaagctgttctggaaggcctgtcatgccgaacgctatggtctttttggatctgcttgcaacttgctctccctaccgggaactcataaagagctactgcatcagtgctactgaatccagttattttttattgcctccttattattattagtgattattaygacttaaaatttattgagtgaaaacaatatg

SEQ ID NO: 271678 - DNA, 603 bp, Homo sapiens
atgctatatgctattataggaagcatcagacgactgtgcatttaacaatattttagagggcttattcttaaacagagttttaggccatggttaacttggtgccatcaacacagtcaccaggcagaaaacccatatggtcattccaaatgcatggtcattctaaatatttacgcaagtggttatagcaagaatgtcactgcttcctrgggaatccagggaaagtcggtcttaggtcttcatcagtctgtaaagatgatcaaaagtagaaaagaggaaagaaggaaatgattcatggaatttgacatatattgttgagtacagtttgtttccaaatattttattttttctggttttgaaagtaatgcttgtttacaaaagtttggaaatataactcatgtataatcatgttagcaaacaaagaactaagttaattttcacacatttacctttaaaagtgtaaacacgtgcacatatacatacacgtataaatcaaaattagatagtgttgtatttataatgttatatattattttattttttgcctattattgtattgtgagctttttcaatatcattaactagtctttgaatacatggtattag

SEQ ID NO: 271679 - DNA, 603 bp, Homo sapiens
atgctatatgctattataggaagcatcagacgactgtgcatttaacaatattttagagggcttattcttaaacagagttttaggccatggttaacttggtgccatcaacacagtcaccaggcagaaaacccatatggtcattccaaatgcatggtcattctaaatatttacgcaagtggttatagcaagaatgtcactgcttcctagggaatccagggaaagtcggtcttaggtcttcatcagtctgtaaagatgatcaaaagtagaaaaraggaaagaaggaaatgattcatggaatttgacatatattgttgagtacagtttgtttccaaatattttattttttctggttttgaaagtaatgcttgtttacaaaagtttggaaatataactcatgtataatcatgttagcaaacaaagaactaagttaattttcacacatttacctttaaaagtgtaaacacgtgcacatatacatacacgtataaatcaaaattagatagtgttgtatttataatgttatatattattttattttttgcctattattgtattgtgagctttttcaatatcattaactagtctttgaatacatggtattag

SEQ ID NO: 271680 - DNA, 548 bp, Homo sapiens
ggaaaaaagaaagtcaaattgttcctggttgcagatgacattgtctttagcattagattatactagcctcatagaaggaactggggcatgtttctctattttgttttatctgaaaaaggttgcataagattggaattatctatgatttgaatatttgataacattttcctgtaaaaccacctgggcccaatgggaaagtttaaaattattaatttattctacaaatgtagaattattaaagtttcttatttcttcttgartcagcgttggtaaggtataattgtctaggattttgttcattttgtctaagttttcaaatgtagtgtcactaatagatacatatttttcttatgcttttactatctgctatatctgtagttatctgcctttttaattcttaaaattatttgtgcctttttttcttcaacaattttgccaacattttgttcatcttttcagccttttaaaaaaccagcttttaactttgctgctccattatttttgtgtttgttatttctttccttctatctgtttttttggttgcattt

SEQ ID NO: 271681 - DNA, 548 bp, Homo sapiens
ggaaaaaagaaagtcaaattgttcctggttgcagatgacattgtctttagcattagattatactagcctcatagaaggaactggggcatgtttctctattttgttttatctgaaaaaggttgcataagattggaattatctatgatttgaatatttgataacattttcctgtaaaaccacctgggcccaatgggaaagtttaaaattattaatttattctacaaatgtagaattattaaagtttcttatttcttcttgagtcagcgttggtaaggtataattgtctaggattttgttcattttgtctragttttcaaatgtagtgtcactaatagatacatatttttcttatgcttttactatctgctatatctgtagttatctgcctttttaattcttaaaattatttgtgcctttttttcttcaacaattttgccaacattttgttcatcttttcagccttttaaaaaaccagcttttaactttgctgctccattatttttgtgtttgttatttctttccttctatctgtttttttggttgcattt

SEQ ID NO: 271682 - DNA, 543 bp, Homo sapiens
gagtttggacttctagcctccagaaatatgagataataatcttctattttttgttttttgcttttgtgagatggagtctcactctgtcacccaggctggagtccagtggcgcaatctcagcrcactgcaacctccgcctcctgggttcaaatgattctcctgcctcagcttcctgagtaactgggattacaggtgcctgccaccacgtccagcctatttttatatttttagtagagacggggtttcaccacattggccaggctggtctcaaactcctgacctcgtgatccgcccacctcggcttcccaaagtgctgggattacaggcatgagccaccacacccagccaataatcttctgttgttttaagcaaaatttaaaaaataaaaaaaggcaaaacaaatttattggctcccaaactaggtaaattggaaaaatatgtactctgagtaattagaaatataatctccatagctcaagtggtcagaacgcttctgcaatatggccttactcccagatattgctggcctcactgaaatgatcg

SEQ ID NO: 271683 - DNA, 607 bp, Homo sapiens
tgtaatattggccacaaagcttcccaaggtctattttctgcctttctacatcaccttctctcagtgcagcacataaactaaacaaaatttagttccaaatcctcaagatggtttgtttgtttgtttatttgtttattttttgcctctgaccctttgcacctgctgtgttcactctgaggaatgctttgcctccaggctctgcatgtccctctccttccagtatgtagtgtttggctgaggagacatctcttctgctcagatgatcatcccatgttgttggcagaagtctgagtacctgattctcctttcactttggtcctatcccatactggaccacaaagtttcttgagggcagagatagggtatatctttactttgtattccatgtacttaacacaatgtctagtttcaaatacattttgattaatgaataaacaggtatcatatgagagtgagctgtgagctgactttggctacatcatctaccagagagaggtttcaggcaaaaatattctttgcttcctaaccagragagtttaaaacaggcagaaaacatctatatttgggaataaatacactgtatcaaatatattgaatatcatttcaa

SEQ ID NO: 271684 - DNA, 595 bp, Homo sapiens
atataagttaattcattgagcatttattgggtacttagtaggagcactatggtattttagatatagtgaacattgcaaaaaagaaaaaatcaggatgaaacagcagtcataaatggctctaaaatctaactggggaagcaaaatttaaaacaagaaggagaagaaagaagatgttctaggatactgaccttgctyaggagctacaaagtagtctgaaacacgtgaaatgtcagggttgctgaggaaggcctgatagtaaaatgatggatttatctgggtctttaaagctttccaaaagtgatggtaagggggaaaataggatgtaagcaaacacaaagccaaggacattgccaagcgtgtcctggggattggaaggcaagggggaaggatgtggatcttcgtgtgggagaattgcccacagggagaatgggatggaagcagggactagatttgccgacagctgagaatggagctgggtagcaaacaccaccaaaaagagacactccagagtctgagcagggccacagatgaaaaggagagatctgcctcaagggaaatggaaaacatgaagggacccctccgcaggtatcacaat

SEQ ID NO: 271685 - DNA, 595 bp, Homo sapiens
atataagttaattcattgagcatttattgggtacttagtaggagcactatggtattttagatatagtgaacattgcaaaaaagaaaaaatcaggatgaaacagcagtcataaatggctctaaaatctaactggggaagcaaaatttaaaacaagaaggagaagaaagaagatgttctaggatactgaccttgcttaggagctacaaagtagtctgaaacaygtgaaatgtcagggttgctgaggaaggcctgatagtaaaatgatggatttatctgggtctttaaagctttccaaaagtgatggtaagggggaaaataggatgtaagcaaacacaaagccaaggacattgccaagcgtgtcctggggattggaaggcaagggggaaggatgtggatcttcgtgtgggagaattgcccacagggagaatgggatggaagcagggactagatttgccgacagctgagaatggagctgggtagcaaacaccaccaaaaagagacactccagagtctgagcagggccacagatgaaaaggagagatctgcctcaagggaaatggaaaacatgaagggacccctccgcaggtatcacaat

SEQ ID NO: 271686 - DNA, 595 bp, Homo sapiens
atataagttaattcattgagcatttattgggtacttagtaggagcactatggtattttagatatagtgaacattgcaaaaaagaaaaaatcaggatgaaacagcagtcataaatggctctaaaatctaactggggaagcaaaatttaaaacaagaaggagaagaaagaagatgttctaggatactgaccttgcttaggagctacaaagtagtctgaaacacgtgaaatgtcagggttgctgaggaaggcctgatagtaaaatgatggatttatctgggtctttaaagctttccaaaagtgatggtaagggggaaaataggatgtaagcaaacacaaagccaaggacattgccaagcgtgtcctggggattggaaggcaagggggaaggatgtggatcttcgtgtgggagaattgcccacagggagaatgggatggaagcagggaytagatttgccgacagctgagaatggagctgggtagcaaacaccaccaaaaagagacactccagagtctgagcagggccacagatgaaaaggagagatctgcctcaagggaaatggaaaacatgaagggacccctccgcaggtatcacaat

SEQ ID NO: 271687 - DNA, 526 bp, Homo sapiens
tctctaactcaccagagcacttcctgctttgagcatctctgcctgccctgttgttcatagcaatagaactgtatgaaaacctcctcgccaaattagtagttacccattaaccaataagttagttgatagaagagttgactacataagaagttaaaaaagtgggaacccctactacctgattaaatgagcaagaaaaagtttttgacatttccttttttgtcatactgttacttgataactgaccccaaactatcgtctgctctgctgttacaaacatgaggaccaaaggacaagtcattacacacaaacacacacaagcccacctttctccttctgctctaacaaggaagtctacattaacggtatcacttcccttttagtttagtgtatttacttctgtgaaartaataataccattataaggttaggaaatcgtccttaaaatgtaatcagtcactggcagctcagtgtgagtgagtttattaccattcaacagaaacaattaccttggctgaaaatgcacaaa

SEQ ID NO: 271688 - DNA, 594 bp, Homo sapiens
ttagtgaaataaaatagccctgaattattaatcttgatctttcctattttcactagagccctgttttaggtagaattctcaaatgattcccaaattcctgctcctttatgtgcacaccttgtagaattccttcttcttgagtatagraaggacatgtgaatatgatgagatccctgttcccttgattagattatgttataggagactgtattggcctgtttcacagggagaagtcaatgagacacagtcctattgggctgaaagaaagcaagcatccatgttgtgagatgcctatggggttcatgtgacaaggaactgtggatgaactctagcagctgagagcagtccctggctatttgatagctaacaaagaaacggggacctcagtcatacaactgcaaggaaatgaattctgccaacaaccagtgagttgggaagagaccctagagcctccgatgaaattcacagccctagctgacacctttattatcatttggtgaaaccccaggagaagatccagctaacccagactaagacttctgacccacacaaactgtgaaataagaaatctggttattttaggctgctaagttt

SEQ ID NO: 271689 - DNA, 594 bp, Homo sapiens
ttagtgaaataaaatagccctgaattattaatcttgatctttcctattttcactagagccctgttttaggtagaattctcaaatgattcccaaattcctgctcctttatgtgcacaccttgtagaattccttcttcttgagtataggaaggacatgtgaatatgatgagatccctgttcccttgattagattatgttataggagactgtattggcctgtttcacagggagaagtcaatgagacacagtcctattgggctgaaagaaagcaagcatccatgttgtgagatgcctatggggttcatgtgacaaggaactgtggatgamctctagcagctgagagcagtccctggctatttgatagctaacaaagaaacggggacctcagtcatacaactgcaaggaaatgaattctgccaacaaccagtgagttgggaagagaccctagagcctccgatgaaattcacagccctagctgacacctttattatcatttggtgaaaccccaggagaagatccagctaacccagactaagacttctgacccacacaaactgtgaaataagaaatctggttattttaggctgctaagttt

SEQ ID NO: 271690 - DNA, 558 bp, Homo sapiens
ccccgaagcatgagaattgataggccttataattttacccaacctaatgtaacagcagctgctgtccttggtgcttgctatctgattaaattcccaaattaggaattgccttttgtaacctgaattctgtcatggtggtaaaatctgacaataactgctctcatttttacctcgcccaccatagagtgtttcttcaataacacatcaaccatctcagaccatcacatattactcttgcwctttattagaatttggaaattttgtaatcctactcaaaatgagattgcatgctttctaatgtaagaaaggagacagagaggccaattcagctctaaaactgcaattgtttgccttcctccagggacacatctcacagattgccatgaaaataaattggaaagtttacaattccaaatcattgcctaccatgtattacttcacagacaaaaacaaacactaccaccaccatcaccaccaccaagaatacaagaaaatatatccgtgaactttcatctcttcaagaggaaaaatgcattacaattagattagactataacc

SEQ ID NO: 271691 - DNA, 558 bp, Homo sapiens
ccccgaagcatgagaattgataggccttataattttacccaacctaatgtaacagcagctgctgtccttggtgcttgctatctgattaaattcccaaattaggaattgccttttgtaacctgaattctgtcatggtggtaaaatctgacaataactgctctcatttttacctcgcccaccatagagtgtttcttcaataacacatcaaccatctcagaccatcacatattactcttgcactttattagaatttggaaattttgtaatcctactcaaaatgagatygcatgctttctaatgtaagaaaggagacagagaggccaattcagctctaaaactgcaattgtttgccttcctccagggacacatctcacagattgccatgaaaataaattggaaagtttacaattccaaatcattgcctaccatgtattacttcacagacaaaaacaaacactaccaccaccatcaccaccaccaagaatacaagaaaatatatccgtgaactttcatctcttcaagaggaaaaatgcattacaattagattagactataacc

SEQ ID NO: 271692 - DNA, 576 bp, Homo sapiens
cagtgcataatttaatttcttacttcaatattaaaaatgaaaacataaaggtaggcactttcttttcaaattctggattttagtgagtatttcggtgctcagaaaacatctcacaattgaaactttgcaaacagagtcatgtttgtttacaacaaaagtacttgaaatwaaactacagcatgttattctgttgccactttgtcatttattctcattttcatatgttttaaattatgttacaaatttattgatagcttgggagaaaatgccaattttgatatcttttttctttctttttcttgttattatttttcttttcttcccctgctcctttctttctttttaatacactcttcttttgttaccattgcatttagtccttgatataagcaatgacaaactacctatctccagtacatgtcaggttatctttggattttatttctccctgtctcaaatgaagcaataatactactcacttaccacaaagaaaccatctgagaattaataaaatattgtggactgtttgatcttctccgagcgaggtactttttcctcctttgttcaagagctatt

SEQ ID NO: 271693 - DNA, 615 bp, Homo sapiens
catcattctgggtagagagacaaggacatgtgtgtcctgtctggccaagagagtaagacacaatgttttgacttatttgttaatgaaagtatttccttagccgagatgcagcttgggatcctggagagggcaggattccatcaccagacaggtgaaaatgtgtgttcccatcccatcatttactacctgtgtgaccatagaaaatttactcaggctccaagaccagttttctcattagtacaaaggacacaattgtatttgcactgaaygacttgaaagatgatgaacataacagttaccctttcataggtacctatttgtgtcaaacttagcaaagagcttatatatatatcattgtgtttaatcttcgcaatctggaataatgagtattatccccattttgagagtgagaactgaaaagtgctagagtaatgttctcaagggcacacagctattaagtgagagaaagatattcaaactcaggtttgcttgcctctaaagcctttgttctcctgtctattgaaacaaatctcagtctttctgtaacatttactttgctgactctgcacatctttggtgacatcctgttctgtgtctttgggccagcggagccag

SEQ ID NO: 271694 - DNA, 615 bp, Homo sapiens
catcattctgggtagagagacaaggacatgtgtgtcctgtctggccaagagagtaagacacaatgttttgacttatttgttaatgaaagtatttccttagccgagatgcagcttgggatcctggagagggcaggattccatcaccagacaggtgaaaatgtgtgttcccatcccatcatttactacctgtgtgaccatagaaaatttactcaggctccaagaccagttttctcattagtacaaaggacacaattgtatttgcactgaatgacttgaaagatgatgaacataacagttaccctttcataggtacctatttgtgtcaaacttagcaaagagcttatatatatatcattgtgtttaatcttcrcaatctggaataatgagtattatccccattttgagagtgagaactgaaaagtgctagagtaatgttctcaagggcacacagctattaagtgagagaaagatattcaaactcaggtttgcttgcctctaaagcctttgttctcctgtctattgaaacaaatctcagtctttctgtaacatttactttgctgactctgcacatctttggtgacatcctgttctgtgtctttgggccagcggagccag

SEQ ID NO: 271695 - DNA, 535 bp, Homo sapiens
gaaaaactgtgccacaagtaggacatcagagaaggctccatctagtagctcgcttatgatctatgatctgagctttaaaacacatgacatgggtgtctggaaaaggacattggaggtgaggggaacaacagggctctgtagtcccggattcctcaacagagttttaaaataatctatgagccaatgcatttggagctccaagataatttccaaccttgtctccaactctctctgccactttcacccaccatacattgtctcctttcttcatgcctaattatgagttcagtactcaggatcatgttcttttcaatgtttttttcctaagaamgtcatgagcaccaggctcttcataggctactgaaatgaggaaagctctgaccctccactcaagaagttgctacgctggtaagtgagctaacaactatccaatgatggtatataatgctcactctttcacaaaatctgctctcctttgttttattttcccagaagaagctgcatttccagtctcctttgtaggtatagatagctt

SEQ ID NO: 271696 - DNA, 602 bp, Homo sapiens
gttggtgaagggggctgagttcatgtgtctggtgactgctaaagtatattcggttcatccggaagctaccttctgaggcctatagaaacataccttatgtggaaacatactaaaacatgagatrattttaatttttttctgattgccatagcaatgcatagtcataaatatattattgaaaatatcaaatacaacaaaaagaaatgtgaaaaatgaaagaagctatctcctccataacccagaaagacataacaacttttggagtgtttcctaacctcttctctccttaccttgcctctccctattaatattagactccatcaattagactccactaatgtaaccaagttaaattatttaaattcagctacatttttaatttttaaatatgatattaacactcttgatatacaatgccactttattaatgacaggtgaagatttataaatttcagtttctaaaataatacttgtatttttctctaagatgaaataatattttcccataaaacattttataccttgattatgtcttcactataatcctgttctctggtcaatttttgctgtttaagacaaactgataattaaatggtgtgcca

SEQ ID NO: 271697 - DNA, 602 bp, Homo sapiens
gttggtgaagggggctgagttcatgtgtctggtgactgctaaagtatattcggttcatccggaagctaccttctgaggcctatagaaacataccttatgtggaaacatactaaaacatgagataattttaatttttttctgattgccatagcaatgcatagtcataaatatattattgaaaatatcaaatacaacaaaaagaaatgtgaaaaatgaaagaagctatctcctccataacccagaaagacataacaacttttggagtgtttcctaacctcttctctccttaccttgcctctccctattaatattagactccatcaattagactccactaatgtaaccaagttaaattatttaaattcagctacatttttaatttttaaatatgatattaacactcttgatatacaatgccactttattaatgacrggtgaagatttataaatttcagtttctaaaataatacttgtatttttctctaagatgaaataatattttcccataaaacattttataccttgattatgtcttcactataatcctgttctctggtcaatttttgctgtttaagacaaactgataattaaatggtgtgcca

SEQ ID NO: 271698 - DNA, 567 bp, Homo sapiens
gtctagctctctttttcttattgtgttagttctatatattctgcataatattttggtaaatataagtaaatatttcaatctggccttcataatttatcttaatattcgatgtcttttgttaargtgttaaagttaaatgtaggaaaattaatcatttttatgctttgtgcttttggtttatttcagaaattcttaaaaatgtttttctctatttttattcatatatattacccccctttgttccatatttacatctttaaactgtctaccttctgcagagcaacagaaataatcagcagagtaaacagacaaaccacagagtgggagaaaatattaacaaattatgaacctgacgaaggactaatatccagaatctaccagaaactcaaatcagcaagaaaaaaaaaacaaccccatcaaaaagtgggcaaaggacatgaatagacaattctcaaaagaagatatacaaatggccaacaaacatatgaaaatgtgcccaacatcagtaattatcagggaaatgcaaattaaaaccacaatgagataccaccttactcctgcaagaat

SEQ ID NO: 271699 - DNA, 595 bp, Homo sapiens
tgacactgtgtacctgagggcacaaagagcctatgtgtccccactccggttttcacattccttagagggcttgaggggagagctgctttgttatttttctcaagtcctgtcacaaatggtctttgacagagatgcccagaaggcctgagctagtaccgctggggctggtgggcaccagaggtaccccacgcccatgacgcaggaggtggaaaggggctctttctgaaggcaccagtgattgtccctggctctggcaaagaaaagtcatttgtcaggggaaaagcaaacatccatgactgaatggaaaggaagttmtgacagaaagaaggaccaggcttaggagaatacaaggacaggtcatagatgtctcttgccacctctggcaaagggctacaacagtttccataactttccagtcagtcagccaggtggtagattttgtaatgagagaacattttccccaagcctttttccatgcattttctctatgattccaaaaaagcctgtgtctcagtgagtacagtggtaaggaatgtcatccctacattagtgccacacttggtatatgcagcacatcttatcaaagattccaatg

SEQ ID NO: 271700 - DNA, 585 bp, Homo sapiens
aatgaaaacaacaacagatctttaaacaaatatctaagatggaaaagtatgaggatcatttgatccagagcatccaatatatacggagtaaagtataaaagcatgaaatrtaagtagattggagcatattgtagatgatcttgcatgtctaagggtgagtcaattgtctactcagtaggcaataggaaattatgaaaagttttaaaaataaaatgcccttttggagttttaccacgttggcagccatggtttggattgggggaggaaaggcaatagtcagacatccaatttgaggattttggaaataatctaagtgagatatgattaggacttaaattaagatggccacaatggtaataaaaaggtagggacatgtgtgagtgattgtagaataattgtctcctctaatctatgtcttccttcacccctctatatctaaacataactgtagtctaaagatagagaagccaagggatccgttgatgggtctttaaaaataaatatgaaaagagagacgtggaggaagctaatttcaatagaaaatgcataagacgttaataaacatgttaaccactcagatccagc

SEQ ID NO: 271701 - DNA, 592 bp, Homo sapiens
ggacgtaagtcttttgtgccttctgttttcctcatgtctctagtcgggctctttgggagaatgcatgtgagcatgtgtgtttcttttccttggctcccaagtcaaatcagtccactcctggtacttggcaacccagcacgcttcctcccactaacgacaagcctgtctgcaaaacagaacaacatctttgagatggggtgtttatctgggcagcacacagcctctgcagcccacaggggcccctccttcaaaggcattgctgaacagggctcacctgatgaaagcctgaactgtgcatgcttgacttgatttacgggcaatggccagctcattagrcacactggcctgaggaagccagccagctgtggggacaaatgttttcggagctctgtggtgcccacagggctgcttgtagctgggggacaagagtacagtggggacagtgataaggaactctggaatccaagcctggctcagggagccttaactacccacgagattgatatctagggtgcaaaggctataaaaattagattaacttagctcagctgtgctcactgaaggattaggttgcagctggtgctgaaacatt

SEQ ID NO: 271702 - DNA, 592 bp, Homo sapiens
ggacgtaagtcttttgtgccttctgttttcctcatgtctctagtcgggctctttgggagaatgcatgtgagcatgtgtgtttcttttccttggctcccaagtcaaatcagtccactcctggtacttggcaacccagcacgcttcctcccactaacgacaagcctgtctgcaaaacagaacaacatctttgagatggggtgtttatctgggcagcacacagcctctgcagcccacaggggcccctccttcaaaggcattgctgaacagggctcacctgatgaaagcctgaactgtgcatgcttgacttgatttacgggcaatggccagctcattaggcacactggcctgaggaagccagccagctgtggggacaaatgttttcggagctctgtggtgcccacagggctgcttgtagctgggggacaagagtacagtggggacagtgataaggarctctggaatccaagcctggctcagggagccttaactacccacgagattgatatctagggtgcaaaggctataaaaattagattaacttagctcagctgtgctcactgaaggattaggttgcagctggtgctgaaacatt

SEQ ID NO: 271703 - DNA, 592 bp, Homo sapiens
ggacgtaagtcttttgtgccttctgttttcctcatgtctctagtcgggctctttgggagaatgcatgtgagcatgtgtgtttcttttccttggctcccaagtcaaatcagtccactcctggtacttggcaacccagcacgcttcctcccactaacgacaagcctgtctgcaaaacagaacaacatctttgagatggggtgtttatctgggcagcacacagcctctgcagcccacaggggcccctccttcaaaggcattgctgaacagggctcacctgatgaaagcctgaactgtgcatgcttgacttgatttacgggcaatggccagctcattaggcacactggcctgaggaagccagccagctgtggggacaaatgttttcggagctctgtggtgcccacagggctgcttgtagctgggggacaagagtacagtggggacagtgataaggaactctggaatmcaagcctggctcagggagccttaactacccacgagattgatatctagggtgcaaaggctataaaaattagattaacttagctcagctgtgctcactgaaggattaggttgcagctggtgctgaaacatt

SEQ ID NO: 271704 - DNA, 592 bp, Homo sapiens
ggacgtaagtcttttgtgccttctgttttcctcatgtctctagtcgggctctttgggagaatgcatgtgagcatgtgtgtttcttttccttggctcccaagtcaaatcagtccactcctggtacttggcaacccagcacgcttcctcccactaacgacaagcctgtctgcaaaacagaacaacatctttgagatggggtgtttatctgggcagcacacagcctctgcagcccacaggggcccctccttcaaaggcattgctgaacagggctcacctgatgaaagcctgaactgtgcatgcttgacttgatttacgggcaatggccagctcattaggcacactggcctgaggaagccagccagctgtggggacaaatgttttcggagctctgtggtgcccacagggctgcttgtagctgggggacaagagtacagtggggacagtgataaggaactctggaatccaagcctggctcagggagcsttaactacccacgagattgatatctagggtgcaaaggctataaaaattagattaacttagctcagctgtgctcactgaaggattaggttgcagctggtgctgaaacatt

SEQ ID NO: 271705 - DNA, 573 bp, Homo sapiens
taattattagtaaagctacttactttcacaaaagcatctaggtttggattataaatgcttatgctcagcatayatataattaattcacagattagatgtacgcgtgtgttattattaactaggtgctcaaccagtggtgatattgtgaacaacaataaaggttctgactataaaactgaacatggaatatagaagaagcaaagcctagatcaataaaagcccacttcttacaatgtttcttattcagaatgtgaatgccatttgagaggttaggttaaagctgacacaaaagagatcactggctttttaaactgagaactgtagagggtttacctcaaggaaggcagtttgctggggagtgacaccttgcatgatcgaataaggactcacagaaaattgatgtccgagttatcagccctcaccctgtcatggaccagtcccatgatccaagggaaatcatttcatttttctttcaaggtgcatatgttgttctgtttattttttgcacaaggaaacactggaagtttaacaaggaactgaaagaaaaaggttatctatggagtattttggaat

SEQ ID NO: 271706 - DNA, 573 bp, Homo sapiens
taattattagtaaagctacttactttcacaaaagcatctaggtttggattataaatgcttatgctcagcatatatataattaattcacagattagatgtacgcgtgtgttattattaactaggtgctcaaccagtggtgatattgtgaacaacaataaaggttctgactataaaactgaacatggaatatagaagaagcaaagcctagatcaataaaagcccacttcttacaatgtttcttattcagaatgtgaatgccatttgagaggttaggttaaagctgacacaaaagagatcactggctttttaaactgagaactgtagagggtttacctcaaggaaggmagtttgctggggagtgacaccttgcatgatcgaataaggactcacagaaaattgatgtccgagttatcagccctcaccctgtcatggaccagtcccatgatccaagggaaatcatttcatttttctttcaaggtgcatatgttgttctgtttattttttgcacaaggaaacactggaagtttaacaaggaactgaaagaaaaaggttatctatggagtattttggaat

SEQ ID NO: 271707 - DNA, 573 bp, Homo sapiens
taattattagtaaagctacttactttcacaaaagcatctaggtttggattataaatgcttatgctcagcatatatataattaattcacagattagatgtacgcgtgtgttattattaactaggtgctcaaccagtggtgatattgtgaacaacaataaaggttctgactataaaactgaacatggaatatagaagaagcaaagcctagatcaataaaagcccacttcttacaatgtttcttattcagaatgtgaatgccatttgagaggttaggttaaagctgacacaaaagagatcactggctttttaaactgagaactgtagagggtttacctcaaggaaggcagtttgctggggagtgacaccttgcatgatcgaataaggactcacagaaaattgatgtcygagttatcagccctcaccctgtcatggaccagtcccatgatccaagggaaatcatttcatttttctttcaaggtgcatatgttgttctgtttattttttgcacaaggaaacactggaagtttaacaaggaactgaaagaaaaaggttatctatggagtattttggaat

SEQ ID NO: 271708 - DNA, 578 bp, Homo sapiens
ggctttgcctaagccaatatccacaagaagttttacattgttttcttctagaatttttatggtttcaggtcttagatttaagtctttgatccatcctgagttgatttttatataaggtgagagatgaggatccagtttcattcctctacatgtggcttgccaattatcccaaaaccatttgttgaatagggtgtccttccccsactttatgtctttgtctgctttgtcaaagatcggttgactataagtatttggttttatttctgggttccctattctgctccattggtctatatgcctatttttataccagtaccatgctgttttggtgactatggccttagtttgaagtcaggcaatgcgatgcatccagatttgttctttttgcttagtcttgatttggctatgcaggctcttttttggctccatatgaattttagaattgttttttctagttctgtgaagaatgatggtgacattttgatgcacaatgcattgaatttgtaggtttcttttgaccatatggtcattttcacaatattgattctacccaagcatgagcatgggatgtgttttca

SEQ ID NO: 271709 - DNA, 560 bp, Homo sapiens
ttttctttttttgttatgtcctttcctggttttctttcagaacattcctcatttgtaaaacataagcatcaaattagataatctacagaaaatttcactgaaaattataaaaccttaaacttatgaataaagtctacatctcagaaaggttgtgatatttcccaactcacacatctactaagtagtaaaggagaaaaccaacactcatgcctcgcagtctctacctcagtgcctctgtcacacrctccgtattcttgtaaggactggtaaaaaagtgcaggtccttgatagaatgaaaagtaaaatcaaggaatagccacaaaccactatttaaacagagccacaaaatcaaacatttacaaatggcaaaattaacattcttggattaagttcaaaggcaagcaaaatggtgtgcaaccagaactgcttcaacatagaaattcatggggtgatggtcccagggtcacactgcctctcagagaacaggactctcatttaaataaccctaaattcaaccagcacagaaatgtaagaagacttaacttctgcaaaaagaccac

SEQ ID NO: 271710 - DNA, 560 bp, Homo sapiens
ttttctttttttgttatgtcctttcctggttttctttcagaacattcctcatttgtaaaacataagcatcaaattagataatctacagaaaatttcactgaaaattataaaaccttaaacttatgaataaagtctacatctcagaaaggttgtgatatttcccaactcacacatctactaagtagtaaaggagaaaaccaacactcatgcctcgcagtctctacctcagtgcctctgtcacacactccgyattcttgtaaggactggtaaaaaagtgcaggtccttgatagaatgaaaagtaaaatcaaggaatagccacaaaccactatttaaacagagccacaaaatcaaacatttacaaatggcaaaattaacattcttggattaagttcaaaggcaagcaaaatggtgtgcaaccagaactgcttcaacatagaaattcatggggtgatggtcccagggtcacactgcctctcagagaacaggactctcatttaaataaccctaaattcaaccagcacagaaatgtaagaagacttaacttctgcaaaaagaccac

SEQ ID NO: 271711 - DNA, 587 bp, Homo sapiens
ttcttggattaagttcaaaggcaagcaaaatggtgtgcaaccagarctgcttcaacatagaaattcatggggtgatggtcccagggtcacactgcctctcagagaacaggactctcatttaaataaccctaaattcaaccagcacagaaatgtaagaagacttaacttctgcaaaaagaccactcataacagcaagaggaagccgttgttaacttctaagaaaactgcaccagtacagtggtaatgcagaaataagactctgggacaggagttttaaatcaaaatacctgcaagggtgagaaattgcataaatgaatgaagtaggctggggataaaagtgcagagcattgagactgtggcaaatacaaaagcagatgctgtatcattactcagcttcagtccactggggccatgtccaaatgcatgaccaatggggtctgaactaacagtttttcaagaaaagacaaaagattttatgcaaattctctttttaatgcttacaagaaagttaaaactctgttcaggccaaacaaaatgtatgtctctgggcatcattatgtaacctttgtttatgaaagtggagagaa

SEQ ID NO: 271712 - DNA, 455 bp, Homo sapiens
aggccaaggaagagtcttgagggaagtaaaaagcgctactccagtgaacacacgaattgtaagaaagtgaaagaggcttattgctgatacagagaaagatttagttgtctggatagaaaattaaaccagtgacaacattctcttgagccaaaggctaattcagagtaaggccctaactttattcaattctacgaagkttgagagaggtgaggaagatgcagaagaaacatctaaatctaacagaggttggctcatgtggtttaaggaaggaagctatcttcataacataaaaatgcaaagtgaaggcaggaagaaaaccacaatggccaactaaatgcagccaggaagaatttctcccagtgagagatcagatgatcaggaagactggcacactccaagcagatcttcagaagaaaggtattgagacaggatggagggaagatgtagaccctggg

SEQ ID NO: 271713 - DNA, 611 bp, Homo sapiens
agcaggcttatgctgcttcatgagagctgattgctaagttttcaggaatttgcaagccaatttttaaacacagtcattattaaaattaaactgtatacactttcaattaaataagaacaaagctactttctaattaccacagtttgtagtatctatgttcttgtgggtattcacaccgattgcatctgtatggtggaaatactatacaatggagtgctaccacacatctcttaccaattccgtgtttaataatgtcatattggtacctcgaaactggccacagtgggagtatttacactatggaagtcagcaaatgcctcaaaatctgggcttgatttattgtttacttgactgtctagattatgaaaaatatataaaatgttaatgcatagtaatcttaagtgtgtcaagtctagccatttacattgttaatagcacacaaatttgaagaaatagtcttcaaatatttgaaaattaatatccaattcagcaaaaaagtttttcatgtcatgaaggacaagtgaagttcctactctctctctctctctctmtatatatatatgcattatccactattataatgcataatagtgaggctgaaagaagattca

SEQ ID NO: 271714 - DNA, 561 bp, Homo sapiens
cagtttaatgaatgaacattcattaatgattcgttaaattcattaatgattcattttaaaattttaatgaaaaagtgagaaattatttaataatacataatgtattcgatttaataaaacttttttttttggaagcaatatagcacattaggatgcacctccattgtcaaaataaggttgctgtgcaactatggattggctatagataaaataatttggcaaaaataatgggcaggtcgcggtagctcatgcctgtaatcccagcactttgggaggccaaggcargtggatcacctgaggtcaggagttcacgaccagcctggccaacatggtgaaaccccgtctctactaaaaatacaaaaaaaaaaaattaggctggcatggtggcagatgcctgtaatcccaggtactcaggaggctgaggcaggagaatcgcttgaacccaggaggcagagggtgcagtgagccaagatcgtgccattgcactccagcctgggcaacaagagtgaaactctgtctcaaaaaagaaaaaaaaaaaatggcaaaaataaaaaaaattca

SEQ ID NO: 271715 - DNA, 562 bp, Homo sapiens
cagtagcacttttctatggtatgtagtttttgaggtcttaactaaatgctcagagtatttagaaaggtctctacacttaactggttggaactccaccatatttcagcattgtataatctccagaatctccttccagctcacaatccttcagtagctgttatcccagattttttttcagggtttcacactttacatgcacagcttaatattcaaggggatatatcatgtatagcttccttctctcctgtactgtgcccttcaaattccaccttccctagaagccctgaattttgatccctctttcacttagagagattgctgctgtctgtttggtctgtrctttactgcaccatagttggtaaggttttttgaagtagaaaactgtggcaaatttgaagctcattcgtgtgtttcccttttctcaaagatcagagacaactctctcttgtctattgtcaaattctagacagagttgcttaaaaatattttgtttacttttttagttatttgagacaaagtctgacccattacttttatgtttatggttcaaaatggaagttct

SEQ ID NO: 271716 - DNA, 562 bp, Homo sapiens
cagtagcacttttctatggtatgtagtttttgaggtcttaactaaatgctcagagtatttagaaaggtctctacacttaactggttggaactccaccatatttcagcattgtataatctccagaatctccttccagctcacaatccttcagtagctgttatcccagattttttttcagggtttcacactttacatgcacagcttaatattcaaggggatatatcatgtatagcttccttctctcctgtactgtgcccttcaaattccaccttccctagaagccctgaattttgatccctctttcacttagagagattgctgctgtctgtttggtctgtgctttactgcaccatagttggtaaggytttttgaagtagaaaactgtggcaaatttgaagctcattcgtgtgtttcccttttctcaaagatcagagacaactctctcttgtctattgtcaaattctagacagagttgcttaaaaatattttgtttacttttttagttatttgagacaaagtctgacccattacttttatgtttatggttcaaaatggaagttct

SEQ ID NO: 271717 - DNA, 562 bp, Homo sapiens
cagtagcacttttctatggtatgtagtttttgaggtcttaactaaatgctcagagtatttagaaaggtctctacacttaactggttggaactccaccatatttcagcattgtataatctccagaatctccttccagctcacaatccttcagtagctgttatcccagattttttttcagggtttcacactttacatgcacagcttaatattcaaggggatatatcatgtatagcttccttctctcctgtactgtgcccttcaaattccaccttccctagaagccctgaattttgatccctctttcacttagagagattgctgctgtctgtttggtctgtgctttactgcaccatagttggtaaggttttttgaagtagaaaactgtggcaaatttgaagctcattcrtgtgtttcccttttctcaaagatcagagacaactctctcttgtctattgtcaaattctagacagagttgcttaaaaatattttgtttacttttttagttatttgagacaaagtctgacccattacttttatgtttatggttcaaaatggaagttct

SEQ ID NO: 271718 - DNA, 585 bp, Homo sapiens
ttttttttttttttttctggatatcagtctcaggcctgctacattaacttctttctgcacacctgttcatttatttgtgtatacatgtagtcatataattagaagaatagccattgaatttgtattatagtttcaatttatgttaaagaatactggatcttccctataatatataaaacaaatttaatacctatttttagtggtatgctggagctattctgtaactgcatgttagagccaattattaaatctccaggaattttgtgagctactcacttgcaatcacctataacaggaatattcacaccaaagaaattggcaagttctgcagatcaggacttccccgtctccatgaagagctggttattaaacattgaacagcatacctttgctgttgaaaggaaagagtgagaaagtaaaaagaataaactttcacacctaataaataaaatccctattcagatttatttattcattcatttaaatttatttaataaatgtgaaatrcagaagaagttctgcagctaaattcactgactatatggagcttacaatctagtaggagagccagatgatacacacaaa

SEQ ID NO: 271719 - DNA, 654 bp, Homo sapiens
tgtcagcttagcgtgatataaatatattttgagttattgtgaaattgacctctctctctgaaggacgcttgggagttttgccctttggaatctcattggtccccctgagtttcttttttgtcttgcttactgcctgtgagcctgctgtaggccttcagtagaaaaggatgcttttgagtctatgtgctcatgcagtatgtcattttgaagaaagtcagctgcagtcataactgcattygctaaattgataaattctttgtgtgagctttgttcctttccatacaattctttcagaggctctctcacctgtcagagattctggagagaaagctatgaattcaagaaatctgtttaaaaatatgtccattaagaaaactcctctttgaaagctgagtcttctaaaaactcttactatcgcttgctaaaattagtttaatgcaaatacattgtataattgagtttaatagtgagactaagtagagaatatttgcctaaaatggccaaaaatggctaggagaagtttattcctatattacctattctttgcctccttttttgctttttttcctcatcttttggccaaataaataaagtactggagaaccatccattcaagtccgctttgccagaatatttttctggaattttcccttc

SEQ ID NO: 271720 - DNA, 654 bp, Homo sapiens
tgtcagcttagcgtgatataaatatattttgagttattgtgaaattgacctctctctctgaaggacgcttgggagttttgccctttggaatctcattggtccccctgagtttcttttttgtcttgcttactgcctgtgagcctgctgtaggccttcagtagaaaaggatgcttttgagtctatgtgctcatgcagtatgtcattttgaagaaagtcagctgcagtcataactgcattcgctaaattgataaattctttgtgtgagctttgttcctttccatacaattctttcagaggctctctcacctgtcagagattctggagagaaagctatgaattcaagaaatctgtttaaaaatatgtccattaagaaaactcctctttgaaagctgagtcttctaaaaactcttactatcgcttgctaaaattagtttaatgcaaatacattgtataattgagtttaatagtgagactaagtagagaatatktgcctaaaatggccaaaaatggctaggagaagtttattcctatattacctattctttgcctccttttttgctttttttcctcatcttttggccaaataaataaagtactggagaaccatccattcaagtccgctttgccagaatatttttctggaattttcccttc

SEQ ID NO: 271721 - DNA, 615 bp, Homo sapiens
ttctgccaatcagatacattcatgaaagtcttttgtaattgattcatgtgaaaagagagtatgcagagtctgtctttcagtaagcaaggcagaagaggtaccagccttttgatgcaaagaatgaaaaactttgtgtcttgtagtcaccagcatcttcactgcaatctggaaggtctgggctgcagcaggccttgatgtgtggcttgggtaccattcctagttgtatagcccctactttggttctctggctctctaagaaaactggtgagcatcctaatttcctttggcaaagttcttttctgtttaaactaactagagtaaattttggttttgctaatgagaaccctgtcaggtatgacactaactgacttcttgatttaccattatccatggaatcttaggatagtctgttagaaaagtactactccattggacacccttctaccatttttacatctgcatattcagttttacacccaaataattatatgttatgagcagtgatgacagaatgtgttattaaacataaaaacatgagaactattataatgtttacaaggtcataacttcatttttaragatgggccaacctggtggtttttggattatgaaaac

SEQ ID NO: 271722 - DNA, 520 bp, Homo sapiens
aatttcatttgaaactgaatcatggcactataccctatgctacttgtttccttggtagtctacccattcttcattttgtgcgtagctgaaatacaatctggatgccctcatgagttggattcatttttcctggtttaaagtttacatgactggaaaatgtcagtgatttaggtccacactgatagagtacaaaataatttttttccaccccatcractccatttgctttggatttaagctgagggacacagttattgatgaggccatagcaaaaagagtgttaagatttttgtagttcttggctaaacactccagctccctgctaccaactatcaccaaccaatctgtcccaattaaactccattgaattaagcttcttaatccaataggcaaattcacaactcactggcagtattttatttctgttgcataaaattcagcgtccacattagtgtatgtctatcccaggaggctgtgtgccctctccccaatagtttctattcttggaagagatgttaga

SEQ ID NO: 271723 - DNA, 520 bp, Homo sapiens
aatttcatttgaaactgaatcatggcactataccctatgctacttgtttccttggtagtctacccattcttcattttgtgcgtagctgaaatacaatctggatgccctcatgagttggattcatttttcctggtttaaagtttacatgactggaaaatgtcagtgatttaggtccacactgatagagtacaaaataatttttttccaccccatcaactccatttgctttggatttaagctgagggacacagttattgatgaggccatagcaaaaagagtgttaagatttttgtagttcttggctaaacactccagctccctgctaccaactatcaccaacmaatctgtcccaattaaactccattgaattaagcttcttaatccaataggcaaattcacaactcactggcagtattttatttctgttgcataaaattcagcgtccacattagtgtatgtctatcccaggaggctgtgtgccctctccccaatagtttctattcttggaagagatgttaga

SEQ ID NO: 271724 - DNA, 599 bp, Homo sapiens
  misc_feature (1)...(599): n = A,T,C or G
ttatgacatgtatttgacattgtgctatatgtactggccactgcaacaacacagattaaaaataaataaaaggcatacaaattgcaaaggaaaaaattaaacttttctttattcatagacttcattgtccacctggtgagtccccaaagagctaacaaaaggcactggaccttgaatatgacaagaccacagagtaagtaaaaggtcaaatataaaatcaaaagtacttctatattctaggaaaaaacaattgtagtgacatgatccaattgagattaaaaaaaaaaattctggttaactgtgaatcatggcaggtgatggcatactcagaagaaggccatttaggaaagttcagtattccagcaggtggtaatgatcagttggcctggagtgatgatggaggtggagagttgattgattccagaaatgtttaagaagtaaaatcaatgggatcagcaatggattattcatgggagaaaagagaggtgttaaggatcaccattttgcctggcttttgtaaatgggtgaaagatgatgcagttcaccgasgaaaaaattctacaaacaacaannnnnnnnnnnnnnnnnnnnnnnnnnnn

SEQ ID NO: 271725 - DNA, 569 bp, Homo sapiens
gatatgggctaactacaatttgggcttccgtagttttcctttatacaatttgtccacaacttcctgcctttgtcattcattcatttattcattcattctttcatccatactaaagttaacaggcattcctttttttttttcagtcagggtctcaccctgttgcccaggctggagtgcagtggagaaatctcggctcactgcaacctctacctcctgggttcaagcrattctcctgcctcagcctccttacagccacccaccaccacacctggctaatttttgtatttttagtagagatggggtttcaccgtgttggcaaggctggtcttgaactccttgacctcaagtgatccacgcacctcagcctcacagagtgctgggattacaggcataagccacaatgcccaatttcaacaggcatttcttgagtatcaaccaggtgttagaaataattctaattccaaaaactattttaaaattcatatggattcaaaaaagatccccaatagccaagacaatcctaagcaaaaagaacaaagctggaggcatcattctacctaacttcaaac

SEQ ID NO: 271726 - DNA, 569 bp, Homo sapiens
gatatgggctaactacaatttgggcttccgtagttttcctttatacaatttgtccacaacttcctgcctttgtcattcattcatttattcattcattctttcatccatactaaagttaacaggcattcctttttttttttcagtcagggtctcaccctgttgcccaggctggagtgcagtggagaaatctcggctcactgcaacctctacctcctgggttcaagcgattctcctgcctcagcctccttacagccacccaccaccacacctggctaatttttgtatttttagtagagatggggtttcaccgtgttggcaaggctggtcttgaactccttgacctcaagtgatccacgcacctcrgcctcacagagtgctgggattacaggcataagccacaatgcccaatttcaacaggcatttcttgagtatcaaccaggtgttagaaataattctaattccaaaaactattttaaaattcatatggattcaaaaaagatccccaatagccaagacaatcctaagcaaaaagaacaaagctggaggcatcattctacctaacttcaaac

SEQ ID NO: 271727 - DNA, 601 bp, Homo sapiens
aagtatactttttcaagaaactacgtcttagcctttgcatattcttttgtgatttgttcatactcatactctgcgtttttcaatggattttctctgaaattccagatgattatttcaccttctggatacgatgacaactctatattagtagcatatttggaatatgcagcaaacctttctcaacagtgatgctggttatggtcattctgcaccctgggcccctttcaagtacaaggctcaaactgccatacacatacaaggggggaaggccctggctgggggatgggcttgctggttttgtttgggttacccagtgctccccagctccttctcatgtttataagtctgtcttttaccctagagccacaggaaggccctccttcgttaaagcctggaaatggcagtagtagcatatgatatctactcctaggataataacctccatttctcaggaatcagcaaagaaatgaacaaagacttgctgtgggctttaggtatrcaacaaagggagaacttaagactgcgtctgcaacagaccaagactgggaaaataacaaaactttcccaacaaatgatttcattctggggtcccaggacataa

SEQ ID NO: 271728 - DNA, 525 bp, Homo sapiens
taactattatataaggggagagaatcatgtttacactgttcactgttgcatttttaacacctagcatagtaaatggaaattagttgtagctccaaaattatttaatggaatatcatttaccaaagttaaagatggtaataatttcccccattcttcaggctacacttcacttatttcatcaaataaaatgtgtctgatttttacctcttggtttgtcttattttagagtcctcattcagtgctcctcagacggcaaaatgtattagcccttcttaatatctcagaacacagttcctcggctgttttcctaaaagagtggctatcttttccaaagttgttatctgtataggttgtattttccattattgtaatcatttaggaattattaactctctatttaaacattcatgcaattttcctcatttttaattacctgtcaatgttggattcagacttttmtaagaatatggacagtatgggaaaaccttggctccaaggaaagtataatttcttagtgcttatggg

SEQ ID NO: 271729 - DNA, 598 bp, Homo sapiens
catctataattggcttgtgtaagtggtcttttgcttgctgtaccttccttccatactgtttccacaatgcacttcttctcctcttattcagctatgactatttctacaaattccagcttaatttcttccaacatagttccattctagccactgacatttggagattgggctttacaccaaactcattatgacacagaaaggaaatctccatactctgacatgaggccccagatgtaagaagtgctcagaatattatggaggattatggtcataatgataatagcaaagatcatataattaaatgcaaagcaagcacagaacaattaaacataatgcctttggtatggtttcaggtagtgttgtgtgcrgttctgtcaaggacttttgtttcatttctcagccccaaatagggagagaaattgtgttataaaaatccctttgggtttcattcaaattttacctatatttgtggtttaccatcatatgttgattctccataaaatattcaaaatgagaagggtaatcttttctctaatatcctacctaaaaagtatactttaattcagaaaataaagtgcttctagtagtaaataaatcc

SEQ ID NO: 271730 - DNA, 598 bp, Homo sapiens
catctataattggcttgtgtaagtggtcttttgcttgctgtaccttccttccatactgtttccacaatgcacttcttctcctcttattcagctatgactatttctacaaattccagcttaatttcttccaacatagttccattctagccactgacatttggagattgggctttacaccaaactcattatgacacagaaaggaaatctccatactctgacatgaggccccagatgtaagaagtgctcagaatattatggaggattatggtcataatgataatagcaaagatcatataattaaatgcaaagcaagcacagaacaattaaacataatgcctttggtatggtttcaggtagtgttgtgtgcggttctgtcaaggacttttgtttcatttctcagccccaaatagggagagaaattgtgttataaaaatccctttgggtttcattcaaattttacctatatttrtggtttaccatcatatgttgattctccataaaatattcaaaatgagaagggtaatcttttctctaatatcctacctaaaaagtatactttaattcagaaaataaagtgcttctagtagtaaataaatcc

SEQ ID NO: 271731 - DNA, 588 bp, Homo sapiens
acattatttagctttcacttataagggagaacatgcagtatttgactttctgtttctgagatgtttcacttaatggccaacaagcatatgaaaaaatgatcaacttaattgataatttttagtgtaggtaacttgcttctagctctactagttaaatttacttcttcttcatggtgaatttcacatttttatgttttccttctggtgactttcctttctggaatctagagtcaagacaaggtaactagaaagagaagaaattgctgtttaaaaccctctccttctcatgactccacataaagtcatagcagaaaatacctctacctacatgaatatataaagagttactaagttcactccctatgtatctagatatatgtgataatgtacagaaatgaattcacacaaactggccaactaggatatatgtaccaacacaaacaagcatgacacagcagatttatatgccaaggaatatcaraatacaccaagaaagaaaaacagcagtatttgtttcttcatgcagactttgtttgatatggctagatacagagatgagagaaacgtcttacaaataagcacaaaata

SEQ ID NO: 271732 - DNA, 619 bp, Homo sapiens
acttaatgtgatcctatttgtccatttttgcttaggttgcctgtgcttgtgggatattgctcaagaaatttttacccagatcaatgtcctggagaatttccccaatgtttttttgtagtagtttccccaaagttttctgtagtagttttcacttaaataatttggctattctggttattttatggttccatacaaattaagattgttttttctatttctgtgaagaatgtcattgatattttcattggaattgcattaaatctatagagtgctttggacggtatggacattttaacaatatttattctttcagtccatgaacttagaatacttttcaatttcttggtaycctcttcaacttctttcatccgtgttttatagttttcattgtagatatcttttatttatttggttcaattaatttttaggtatttaattttacatgtggctattgtaaatgagattactttttaatttctttttctttttaatttttgatcactgttggcttatagaaatgctactgatttttgtatgctaattttgtatcctgcaaatttactgaatttgttcctcagttctaataattgttttggtaaagtctctaggtttttccaaa

SEQ ID NO: 271733 - DNA, 586 bp, Homo sapiens
tcaacaacacaccttttttgcacaagcattcaaatcccctgccttcctacttctgtatacagaggagagaggaaagggatgggttaatgcttcaagctctagtctccagtctcagaaggaagccagtgtgcatgtgaggcactggaaatcaggggagtgagaaaactaatacttaaaggtyggaaacgtccagacataaccctttaaatatgccttgatctgaggtctctgccaaaggctgaatttcagaactccttctggccatgccatgcttggttaaagacagagtagaggtctgggtgagtgatcatctgtacttcaggcacctctgcccatcacagaaagcattaggagtcatagagctcccagaagcaggaaggccaatgcaatggcctaactcaatgggagcttcaggtctacagatccaagactactgatcttcattctaagaatgggagaagactcagtgcttccactgtgtcctccagggagacctgagaaaggtaggaatactgcctccacacacaacatttccataagaggtggctctgaaccccacactgctccagcattattgctctatgcc

SEQ ID NO: 271734 - DNA, 540 bp, Homo sapiens
aattaaaattgtaaaggatattgtcagataagataaatttgttatacagatagcaaattgtcctccagtcacttttttaatgaaaaataaaatatttgtaacattttaaatttctattcaagtaatatattgagcaattactcttcacctagcattctgccaaaaggtggggatagaatagggaacaaaagaaactgacaaacagaacatctaatttgcatgatttccacccaaaatcaaaacaatgaatacckgcaattccagcccaaatatagacattaattagttaagctgtattactctatcatgattgtaagtaaacttaaatattctgaaccaatgaaaatagatgactaacttcattataacatgaagaatccttatgtccaaaatataaagcatatgactaactcaaatgtgcctgtagttgatatgatttggacctggctcccctccaaatctgttgaaatgtgattcccagtgttggaggtggggcctagtgggagggattggatcatggggacagatccttcatgaatg

SEQ ID NO: 271735 - DNA, 586 bp, Homo sapiens
ctctctctttgccttccaccatgattgcaagcatcctgaggccttgccagaagcctagaagatgctggtgccatgcttgtacagtcttcagcctgagccaattaagtctcttttctttataaattaccctgaggtaattttcttaaagcctcaggtattttcttaaagcaaaacaatggactaacaagataaacatttacagaagmtatcaagtgagcttgttgactgagggactcgattttccatttgtaggcgggcagagacctcacggtgcctctcttccctcaaataaacaaatctataatcacagtgactaagaaaaggccagacaaaaccgtattaaaggcagctcctggtacatcagcttttcgtggttttcaaacatgacttagaaccaaactgtgatgtcagggctccgttttagagtactttccaaaaggggaaagcttcatcagtattttctactctgcacagagccaaacataatgttattattttttcacactcaaatcaacaagcaatttttgaccaataactgtttctccagtgcaatgcttagtgcctggaatacagagctaaaagttca

SEQ ID NO: 271736 - DNA, 583 bp, Homo sapiens
ttctcatcatactcacttcctcctctatgccataatgatctggtgtgtgtcagcctccatgctgtgcacaccatgagaaaaaatggtgctttagttacctcagatttcagcaaatcctagcakagtgcaagcatcaataagtacatgcaaagcagtatgtttccgttcaatggagagtagaggcatgtcagtaaagacctaaaatataaactttcaatactttgcattgtgagtattgtgtgtatttatgccatgtaggtagacccgtggtctagacctcccctggaagatgataaagccaaaggctgaaggtgggtgaggtcctgtagtcccaccttgacatgaaaaattttgaagtttagtcttggtctgctaatcctgaagtcactggctcatcctgctctgtcttctgaggccagaggtggaaggaaagaaaggtccaggtgatgtgtaaagagactttgcagagcttgtctcttcccttcaccccatccccacccctgatgaagctggactgtcagtctttggtttccagttctcaacatgtctatcttaagtatgggccgtcgtgaaagagatttga

SEQ ID NO: 271737 - DNA, 583 bp, Homo sapiens
ttctcatcatactcacttcctcctctatgccataatgatctggtgtgtgtcagcctccatgctgtgcacaccatgagaaaaaatggtgctttagttacctcagatttcagcaaatcctagcatagtgcargcatcaataagtacatgcaaagcagtatgtttccgttcaatggagagtagaggcatgtcagtaaagacctaaaatataaactttcaatactttgcattgtgagtattgtgtgtatttatgccatgtaggtagacccgtggtctagacctcccctggaagatgataaagccaaaggctgaaggtgggtgaggtcctgtagtcccaccttgacatgaaaaattttgaagtttagtcttggtctgctaatcctgaagtcactggctcatcctgctctgtcttctgaggccagaggtggaaggaaagaaaggtccaggtgatgtgtaaagagactttgcagagcttgtctcttcccttcaccccatccccacccctgatgaagctggactgtcagtctttggtttccagttctcaacatgtctatcttaagtatgggccgtcgtgaaagagatttga

SEQ ID NO: 271738 - DNA, 583 bp, Homo sapiens
ttctcatcatactcacttcctcctctatgccataatgatctggtgtgtgtcagcctccatgctgtgcacaccatgagaaaaaatggtgctttagttacctcagatttcagcaaatcctagcatagtgcaagcatcaataagtacatgcaaagcagtatgtttccgttcaatggagagtagaggcatgtcagtaaagacctaaaatataaactttcaatactttgcattktgagtattgtgtgtatttatgccatgtaggtagacccgtggtctagacctcccctggaagatgataaagccaaaggctgaaggtgggtgaggtcctgtagtcccaccttgacatgaaaaattttgaagtttagtcttggtctgctaatcctgaagtcactggctcatcctgctctgtcttctgaggccagaggtggaaggaaagaaaggtccaggtgatgtgtaaagagactttgcagagcttgtctcttcccttcaccccatccccacccctgatgaagctggactgtcagtctttggtttccagttctcaacatgtctatcttaagtatgggccgtcgtgaaagagatttga

SEQ ID NO: 271739 - DNA, 583 bp, Homo sapiens
ttctcatcatactcacttcctcctctatgccataatgatctggtgtgtgtcagcctccatgctgtgcacaccatgagaaaaaatggtgctttagttacctcagatttcagcaaatcctagcatagtgcaagcatcaataagtacatgcaaagcagtatgtttccgttcaatggagagtagaggcatgtcagtaaagacctaaaatataaactttcaatactttgcattgtgagtattgtgtgtatttatgccatgtaggtagacccgtggtctagacctcccctggaagatgataaagccraaggctgaaggtgggtgaggtcctgtagtcccaccttgacatgaaaaattttgaagtttagtcttggtctgctaatcctgaagtcactggctcatcctgctctgtcttctgaggccagaggtggaaggaaagaaaggtccaggtgatgtgtaaagagactttgcagagcttgtctcttcccttcaccccatccccacccctgatgaagctggactgtcagtctttggtttccagttctcaacatgtctatcttaagtatgggccgtcgtgaaagagatttga

SEQ ID NO: 271740 - DNA, 511 bp, Homo sapiens
gggattttgagacaatagctgtggatataaattccagattttttatcttaaactaatcattcaatattctagtccctgaatttcttaattcataaattgaaattatggttatccatttcaaagaactgtggtttaagctaagtaaaagaaagcatgtacttaaaggagacaaatgcagaacttgaagatagtgggtgctcagtaarcattactgttcttctttttgttattagagaagaaatacgggttggcatgggagagaaatgcaacagaatatgattgaatcaggtagaccccagcaggaagaaaagcccccattacatttcttttgattttgtttgaaagagtttgaggatagccctgcggatttgtttagtcttcacactatatatgatggggttcagccgagaggggccaaggaaatagatgttggacaatagtgggtggacatattggtgaagccttgtggaaaaatctgtggacaactgaaagaacaacccagggaatgtag

SEQ ID NO: 271741 - DNA, 570 bp, Homo sapiens
agtgtttgactcaaaaaaaaaaaaggatgtgctcacactaacacaaactcacagttcagttcacaaagacagacacaacctgaaagaaaacacaaatagcaaataatgataattatggaattatttccttcggaggcaacttctctcttaaaaaggaagagtttttaacgggcckaagtacaaaacaccctatcgccctccctccagcccctaacaaacccttagcaacatatttagggagagagatttttgacaagaaccaccaggtcactagaatgtctagtttgatcattttaagtgactttgagagtaaagagccttgtttgtgggttatgcagattttctctgttgtcctgaggaaagaatgagagaagcaatatccattttcactgtcttgggtcagaataagagaacacacacccctcagtagaatgcactacttatcaatagtacttgggtcattagaaaacacgaaaatcagatagagagttaaaaatcaaaaactgaaaagcaatcctattgcctgggtagaacatgaacttctgttatcacatacatggcttacagttg

SEQ ID NO: 271742 - DNA, 559 bp, Homo sapiens
gtcttgcaatttttagtgaggtttagagaactctatctggtgcttaattatagttatctcctgcttcagtcatttatcacctcatgaggctgtttgttaaaagctgcattctatttgcagaatttgaaaggaaaaatatttgggctgaaggtttttatgtatagtgaattaggatttgtaatgataattatgaaaataatgaaataatgtacaatagctaagaatttgaaaagtcatgtaagtaaagtcaattatgagaaagaaataatctagtaggcatgagaaatacccactaaatctagaggatggtacaaaatactgttaatttmtctactgagttaccttgtagctaatgagtctcggacaataagtatacatatcaaaaggaatagtcattaattatctgtgttcaaggaactttaactacagagtctcatctatacctagatatgaattaggggacaagatcttgaacttcaagctgatataataagatgagacatggagtacttaagagagaggataaatacattttttaatttgttaacaatgcaaatta

SEQ ID NO: 271743 - DNA, 621 bp, Homo sapiens
aataatctagtaggcatgagaaatacccactaaatctagaggatggtacaaaatactgttaatttctctactgagttaccttgtagctaatgagtctcggacaataagtatacatatcaaaaggaatagtcattaattatctgtgttcaaggaactttaactacagagtctcatctatacctagatatgaattaggggacaagatcttgaacttcaagctgatataataagatgagacatggagtacttaagagagaggataaatacattttttaatttgttaacaatgcaaattatggctagtacagggatcaactgtctgctctttcccagaactgaagggttttttggaatgtgagactttcagtgacagtcttgggcaaactggaagggttggttatcttactagaggcctgagggtagcagactgtattttgcagagatggtcacaccagtatatatcaacccacatgcatttcttacaagcaacattgacacctgtctatcaaaaaatgaagtctatattgcctccccttgaatctggatgggcctgtgactctggcaaaattgakgttttgtgaaaacattcaaaatcttctctttccaccatcttgaaatatg

SEQ ID NO: 271744 - DNA, 570 bp, Homo sapiens
agtgtttgactcaaaaaaaaaaaaggatgtgctcacactaacacaaactcacagttcagttcacaaagacagacacaacctgaaagaaaacacaaatagcaaataatgataattatggaattatttccttcggaggcaacttctctcttaaaaaggaagagtttttaacgggccgaagtacaaaacaccctatcgccctccctccagcccctaacaaacccttagcaacatatttagggagagagatttttgacaagaaccaccaggtcactagaatgtctagtttgatcattttaagtgactttgagagtaaagagccttgtttgtgggttatgcagattttctctgttgtcctgaggaaagaatgagagaagcaatatccattttcactgtcttgggtcagaataagagaacacacacccctcagtagaatgcactacttatcaatagtacttgggtcattagaaaacacgaaaatcmgatagagagttaaaaatcaaaaactgaaaagcaatcctattgcctgggtagaacatgaacttctgttatcacatacatggcttacagttg

SEQ ID NO: 271745 - DNA, 570 bp, Homo sapiens
agtgtttgactcaaaaaaaaaaaaggatgtgctcacactaacacaaactcacagttcagttcacaaagacagacacaacctgaaagaaaacacaaatagcaaataatgataattatggaattatttccttcggaggcaacttctctcttaaaaaggaagagtttttaacgggccgaagtacaaaacaccctatcgccctccctccagcccctaacaaacccttagcaacatatttagggagagagatttttgacaagaaccaccaggtcactagaatgtctagtttgatcattttaagtgactttgagagtaaagagccttgtttgtgggttatgcagattttctctgttgtcctgaggaaagaatgagagaagcaatatccattttcactgtcttgggtcagaataagagaacacacacccctcagtagaatgcactacttatcaatagtacttgggtcattagaaaacacgaaaatcagatagagagttaaaaatcaaaaactgaaaagcaatcctattgyctgggtagaacatgaacttctgttatcacatacatggcttacagttg

SEQ ID NO: 271746 - DNA, 544 bp, Homo sapiens
cataacaccactacatatatgtcagagtggctaaaattggagacaatacyaagtgttagtgatgatgcagatactaaaattctcatgcactgcttgtgggagggttgtttgctatatccttacaaaaacctttttggtcatgtatgttaaaactgcattccttatgaactagaaattttatttcttgataaaccccaacagaaatgtgttcatgggcttacaaagggaatatgcaagaaagtttacaataacaatatttgtagtaattcaaaattgaaaaataaaaacaaaatgaccaacaatagtcaacaaactaataagttgatgtatacccacaaatggaattctatgcaatgatgataatgagaaaaactactacatatagcaacatggatgaatatacaatcactcatttcaacattgagtaaaaaactcaaggagcaaaaatgtatgtacagtttaattcaatttatacaaagttcagttactggaaaaaaatacggtgcttcagtaaggaggctggttgccattgaggaggttttga

SEQ ID NO: 271747 - DNA, 544 bp, Homo sapiens
cataacaccactacatatatgtcagagtggctaaaattggagacaatactaagtgttagtgatgatgcagatactaaaattctcatgcactgcttgtgggagggttgtttgctatatccttacaaaaacctttttggtcatgtatgttaaaactgcattccttatgaactagaaattttatttcttgataaaccccaacagaaatgtgttcatgggcttacaaagggaatatgcaagaaagtttacaataacaatatttgtagtaattcaaaattgaaaaataaaaacaaaatgaccaacaatagtcaacaaactaataagttgatgtatacccacaaatggaattctatgcaatgatgataatgagaaaaactactacatayagcaacatggatgaatatacaatcactcatttcaacattgagtaaaaaactcaaggagcaaaaatgtatgtacagtttaattcaatttatacaaagttcagttactggaaaaaaatacggtgcttcagtaaggaggctggttgccattgaggaggttttga

SEQ ID NO: 271748 - DNA, 544 bp, Homo sapiens
cataacaccactacatatatgtcagagtggctaaaattggagacaatactaagtgttagtgatgatgcagatactaaaattctcatgcactgcttgtgggagggttgtttgctatatccttacaaaaacctttttggtcatgtatgttaaaactgcattccttatgaactagaaattttatttcttgataaaccccaacagaaatgtgttcatgggcttacaaagggaatatgcaagaaagtttacaataacaatatttgtagtaattcaaaattgaaaaataaaaacaaaatgaccaacaatagtcaacaaactaataagttgatgtatacccacaaatggaattctatgcaatgatgataatgagaaaaactactacatatagcaacatggatgaatatacaatcactcatttcaacattgagtaaaaaactcaaggagcaaaaatgtatgtacwgtttaattcaatttatacaaagttcagttactggaaaaaaatacggtgcttcagtaaggaggctggttgccattgaggaggttttga

SEQ ID NO: 271749 - DNA, 525 bp, Homo sapiens
acagaaatgacacttatagagaaagatgtgaattgwtttgaactgccatgcactgccatatacactgtgggagtatatatggctatacacgatttctgtggaaaactttttggccatatctactaaagccaaacaaaaacctactcagtcatccaacaattccactctcaggtatataaccattgaaaaggtatgcatatgttatgcatgttttgtaatgccaagcacagtaatattcatagcagaattattcacaatagaaaatgggagaaacaacaacatccatcaacaacaggatggaaaagttaattaaggtgaggtatagtcatacgctggaacattacaaggcaataaaaagcaaagaactataactatacacactctgtggaagaatttctcagacacaatgttaatataaatacagcactgatccaatcagataacatccaaaaacaggcaaaactaacctatttggatagaagtgaggagagtgatcacctttgaggagaaaggaataatggttga

SEQ ID NO: 271750 - DNA, 525 bp, Homo sapiens
acagaaatgacacttatagagaaagatgtgaattgatttgaactgccatgcactgccatatacactgtgggagtatatatggctatacacgatttctgtggaaaactttttggccatatctactaaagccaaacaaaaacctactcagtcatccaacamttccactctcaggtatataaccattgaaaaggtatgcatatgttatgcatgttttgtaatgccaagcacagtaatattcatagcagaattattcacaatagaaaatgggagaaacaacaacatccatcaacaacaggatggaaaagttaattaaggtgaggtatagtcatacgctggaacattacaaggcaataaaaagcaaagaactataactatacacactctgtggaagaatttctcagacacaatgttaatataaatacagcactgatccaatcagataacatccaaaaacaggcaaaactaacctatttggatagaagtgaggagagtgatcacctttgaggagaaaggaataatggttga

SEQ ID NO: 271751 - DNA, 525 bp, Homo sapiens
acagaaatgacacttatagagaaagatgtgaattgatttgaactgccatgcactgccatatacactgtgggagtatatatggctatacacgatttctgtggaaaactttttggccatatctactaaagccaaacaaaaacctactcagtcatccaacaattccactctcaggtatataaccattgaaaaggtatgcatatgttatgcatgttttgtaatgccaagcacagtaatattcatagcagaattattcacaatagaaaatgggagaaacaacaacatccatcaacaacaggatggaaaagttaattaaggtgaggtatagtcatacgctggaacattacaaggcaataaaaagcaaagaactataactatacacactcwgtggaagaatttctcagacacaatgttaatataaatacagcactgatccaatcagataacatccaaaaacaggcaaaactaacctatttggatagaagtgaggagagtgatcacctttgaggagaaaggaataatggttga

SEQ ID NO: 271752 - DNA, 525 bp, Homo sapiens
acagaaatgacacttatagagaaagatgtgaattgatttgaactgccatgcactgccatatacactgtgggagtatatatggctatacacgatttctgtggaaaactttttggccatatctactaaagccaaacaaaaacctactcagtcatccaacaattccactctcaggtatataaccattgaaaaggtatgcatatgttatgcatgttttgtaatgccaagcacagtaatattcatagcagaattattcacaatagaaaatgggagaaacaacaacatccatcaacaacaggatggaaaagttaattaaggtgaggtatagtcatacgctggaacattacaaggcaataaaaagcaaagaactataactatacacactctgtggaagaatttctcagacacaatgttaatataaayacagcactgatccaatcagataacatccaaaaacaggcaaaactaacctatttggatagaagtgaggagagtgatcacctttgaggagaaaggaataatggttga

SEQ ID NO: 271753 - DNA, 593 bp, Homo sapiens
tggaattaggaaaataacaataatgaaatgataaataatactcctggcaattaacatgtattgactctttgtttcaggctaggtgttctactaactgcttttaagacatattccatttattcttccaaaacagcraaatgaaatatatattactattagtgatatattacagatgatggaacagatttatagacatttaggcccccaaaggccatgtgaataacatgaggcacagttgagatttgaacccaggtgttctgtatctcaaatgctatgctcttcatcactgtattacatactctgccaaagtcatgtagcagaaatgttttaagatcaaaagtaagacctggatctccatggttccatcctttgtcttaaaaagttgtagtaaccttcttagaatatactctagctgttttcttcatggataattcataatacaaaaggtaggaatagatatgtcagggcatgtgagtcactatccagtgttggacagtccaaagaaaagctttaggggtgaggcacacttgctaatttatcacagggaatgggaacttgagagaactagaaaagaatgtaaagtaaattacaag

SEQ ID NO: 271754 - DNA, 593 bp, Homo sapiens
tggaattaggaaaataacaataatgaaatgataaataatactcctggcaattaacatgtattgactctttgtttcaggctaggtgttctactaactgcttttaagacatattccatttattcttccaaaacagcaaaatgaaatatatattactattagygatatattacagatgatggaacagatttatagacatttaggcccccaaaggccatgtgaataacatgaggcacagttgagatttgaacccaggtgttctgtatctcaaatgctatgctcttcatcactgtattacatactctgccaaagtcatgtagcagaaatgttttaagatcaaaagtaagacctggatctccatggttccatcctttgtcttaaaaagttgtagtaaccttcttagaatatactctagctgttttcttcatggataattcataatacaaaaggtaggaatagatatgtcagggcatgtgagtcactatccagtgttggacagtccaaagaaaagctttaggggtgaggcacacttgctaatttatcacagggaatgggaacttgagagaactagaaaagaatgtaaagtaaattacaag

SEQ ID NO: 271755 - DNA, 593 bp, Homo sapiens
tggaattaggaaaataacaataatgaaatgataaataatactcctggcaattaacatgtattgactctttgtttcaggctaggtgttctactaactgcttttaagacatattccatttattcttccaaaacagcaaaatgaaatatatattactattagtgatatattacagatgatggaacagatttatagacatttaggcccccaaaggccatgtgaataacatgaggcacagttgagatttgaacccaggtgttctgtatctcaaatgctatgctcttcatcactgtattacatactctgccaaagtcatgtagcagaaatgttttaagatcaaaagtaagacctggatctccatggttccatcctttgtcttaaaaagttgtagtaaccttcttagaatatactctagctgttttcttcatggataattcataatacaaaaggtaggaatagatatgtcakggcatgtgagtcactatccagtgttggacagtccaaagaaaagctttaggggtgaggcacacttgctaatttatcacagggaatgggaacttgagagaactagaaaagaatgtaaagtaaattacaag

SEQ ID NO: 271756 - DNA, 406 bp, Homo sapiens
atgttctatgttcatcactgaataccagagtgattctaatggactaagcagtccggatagatttctcaaaaaagttattaaaaaatgacatacaacagaaaactactcaacaataaaaaggaataaactaccaatacatgcaataacataggtgaatctcaaaagcattttactaagaagctagacacaaaagactgcataatgcaaggtttcatttgcatgccactctggaaaaacaatcattatagggaaggattgccaatcaatgcttgccagtcaatgtttgccytctgttgggtgataatagagtagttgaccacagatgggaagcataaagaaatttggggaagtgataaaattgttctgtatctttgtttcagtggtgggaacacaacgcatttgtcaa

SEQ ID NO: 271757 - DNA, 526 bp, Homo sapiens
gtggcagctaacatggctagaaaaatacatgggctcatggagactttgctcaactttgatgacaacaaggatggtgacatttcccaagatcgtggtgctataaagaagacagaggggcaaggccatccataagtctttctctggcattcctggaatcccagtcagggtgaagaagctctggtggttctcagtagtttggttgagtggtgacatggtggaatagaggtttgagtaggaaaatagagaagagctcattaagtcaaacwgacttcaactggaatcagtaacaataagtattgagatggtagctgtaagaggaagtaacttaaatattattcttgcacattcatgctcagtttgatacagaaaccagtagcccctgcttcatgaagcgagaatgctgctactaaccataaaattttaaaatatctaggagaaagagaaacaaacaaaaaacctccagttaacatctgcacctactagggacatatgcaattcagaaatatcaagaagttacctgtcttgc

SEQ ID NO: 271758 - DNA, 609 bp, Homo sapiens
tgtgttcctagaagtagttaatgcaggtcacatgaaagaagggcaatattaaatacagcagccacaacaacagctgataaagcacaggaaacggatccagaattgggaaatctgccaccctggaaagacacaagaagcaggtgtgtgttgtgtggggtgggggctttagaccccaatggtggtatcagaggatgactgctgccctaacatttgggggagaaacctatcctctgaagagaccaaccaagtaataaacacatattatttccgaaaagattgggaattatgagggccaagtgattagaaaattgtctgaacaggaaactacktatcatatgtaaatcaacacacattttttactcaattaaacctaacaaaattgggctacatccagtttcaataatgtttatcaatcacaagccgaaatttatagaatgaagaataagcatttcaaaggttaaatgtccaaatggaaatgagtcacattaaatactacattaaacattaaacataagaacacttgtcctttgtttccacataaaagtcaattacatctaaaaaaattactttattatgcctgtgggcaggtctaaaccttcttttatttta

SEQ ID NO: 271759 - DNA, 609 bp, Homo sapiens
tgtgttcctagaagtagttaatgcaggtcacatgaaagaagggcaatattaaatacagcagccacaacaacagctgataaagcacaggaaacggatccagaattgggaaatctgccaccctggaaagacacaagaagcaggtgtgtgttgtgtggggtgggggctttagaccccaatggtggtatcagaggatgactgctgccctaacatttgggggagaaacctatcctctgaagagaccaaccaagtaataaacacatattatttccgaaaagattgggaattatgagggccaagtgattagaaaattgtctgaacaggaaactacttatcatatgtaaatcaacacacattttttactcaattaaacctaacaaaattgggctacatccagtttcaataatgtttatcaatcacaagccgaaatttatagaatgaagaataagcatttcaaaggttaaatgtccaaatggaaatgagtcacattaaatrctacattaaacattaaacataagaacacttgtcctttgtttccacataaaagtcaattacatctaaaaaaattactttattatgcctgtgggcaggtctaaaccttcttttatttta

SEQ ID NO: 271760 - DNA, 603 bp, Homo sapiens
tgactacattgtaaggactaagtccagtggttagagtctgtcttcaccatgcccaacatagctgcattctggatgtttcaggacattgatcaataaatctttcgtatcaagtaccccttccaagaaggaattcataaatatacagacttttaatayacacatactttctctgtgttgggaggtagacaggtctgataggtgattactgttttactctgagaagagaggaaatagagacaaagttgcttgggcagggaagggtgggaatttctccagtcacacactgaggaaaggcctgagctgggactcctgggagatgccaggtctcctgctgctgccgcagtgcttctcctcctttgctatacctaaggcaatctcagccctaatgtccaggaaccttgggaaaaggataatacctcagggctaacttcttctgtaattgctcctggaagcattgccattgtcagtgagttcataaacaacagtacacttcgggctcctgtactcacctgctcagtgagagtgagcgctcccagagaaccaatacagtgacttgctcactttttaaaatcctatctgagatctctttagaacacagctttc

SEQ ID NO: 271761 - DNA, 603 bp, Homo sapiens
tgactacattgtaaggactaagtccagtggttagagtctgtcttcaccatgcccaacatagctgcattctggatgtttcaggacattgatcaataaatctttcgtatcaagtaccccttccaagaaggaattcataaatatacagacttttaatacacacatactttctctgtgttgggaggtagacaggtctgataggtgattactgttttactctgagaagagaggaaatagagacaaagttgcttgggcagggaagggtgggaatttctccagtcacacactgagkaaaggcctgagctgggactcctgggagatgccaggtctcctgctgctgccgcagtgcttctcctcctttgctatacctaaggcaatctcagccctaatgtccaggaaccttgggaaaaggataatacctcagggctaacttcttctgtaattgctcctggaagcattgccattgtcagtgagttcataaacaacagtacacttcgggctcctgtactcacctgctcagtgagagtgagcgctcccagagaaccaatacagtgacttgctcactttttaaaatcctatctgagatctctttagaacacagctttc

SEQ ID NO: 271762 - DNA, 571 bp, Homo sapiens
gctcagtgagagtgagcgctcccagagaaccaatacagtgacttgctcactttttaaaatcctatctgagatctctttagaacacagctttcatcattcacatatttattcatgtaacaaataaacttgtcatatttaacacttcccctattccaggctgctaagtgctgggcatacagcartaagagtgatttggtggcagctctcaaaaaactcataatcagttgacaaacaattacaaaacatgactgttgagggttagtaagacagaagacacattgaagcattcaatgaagttcctgaagaaatgaaagaatgaatgaatgaattttcatcccatgtgtgtttaataaaaccagcttcataaagttctgctggtaactcgagccacatcccagttggcccacagcctatgttaccacgtgttaggcttctctattcctttcctggagcaacatttactcattcatgagtggactttcccttcctaatgtcttgcccacaccttcctgctgcagagactgtgcactatgattgctctgtttctggtggcaagagaactcctgctgca

SEQ ID NO: 271763 - DNA, 571 bp, Homo sapiens
gctcagtgagagtgagcgctcccagagaaccaatacagtgacttgctcactttttaaaatcctatctgagatctctttagaacacagctttcatcattcacatatttattcatgtaacaaataaacttgtcatatttaacacttcccctattccaggctgctaagtgctgggcatacagcagtaagagtgatttggtggcagctctcaaaaaactcataatcagttgasaaacaattacaaaacatgactgttgagggttagtaagacagaagacacattgaagcattcaatgaagttcctgaagaaatgaaagaatgaatgaatgaattttcatcccatgtgtgtttaataaaaccagcttcataaagttctgctggtaactcgagccacatcccagttggcccacagcctatgttaccacgtgttaggcttctctattcctttcctggagcaacatttactcattcatgagtggactttcccttcctaatgtcttgcccacaccttcctgctgcagagactgtgcactatgattgctctgtttctggtggcaagagaactcctgctgca

SEQ ID NO: 271764 - DNA, 571 bp, Homo sapiens
gctcagtgagagtgagcgctcccagagaaccaatacagtgacttgctcactttttaaaatcctatctgagatctctttagaacacagctttcatcattcacatatttattcatgtaacaaataaacttgtcatatttaacacttcccctattccaggctgctaagtgctgggcatacagcagtaagagtgatttggtggcagctctcaaaaaactcataatcagttgacaaacaattacaaaacatgactgttgagggttagtaagacagaagacacattgaagcattcaatgaagttcctgaagaaatgaaagaatgaatgaatgaattttcatcccatgtgtgtttaataaaaccagcttcataaagttctgytggtaactcgagccacatcccagttggcccacagcctatgttaccacgtgttaggcttctctattcctttcctggagcaacatttactcattcatgagtggactttcccttcctaatgtcttgcccacaccttcctgctgcagagactgtgcactatgattgctctgtttctggtggcaagagaactcctgctgca

SEQ ID NO: 271765 - DNA, 571 bp, Homo sapiens
gctcagtgagagtgagcgctcccagagaaccaatacagtgacttgctcactttttaaaatcctatctgagatctctttagaacacagctttcatcattcacatatttattcatgtaacaaataaacttgtcatatttaacacttcccctattccaggctgctaagtgctgggcatacagcagtaagagtgatttggtggcagctctcaaaaaactcataatcagttgacaaacaattacaaaacatgactgttgagggttagtaagacagaagacacattgaagcattcaatgaagttcctgaagaaatgaaagaatgaatgaatgaattttcatcccatgtgtgtttaataaaaccagcttcataaagttctgctggtaactcgagccacatcccagttggcccacagcctatgttaccacktgttaggcttctctattcctttcctggagcaacatttactcattcatgagtggactttcccttcctaatgtcttgcccacaccttcctgctgcagagactgtgcactatgattgctctgtttctggtggcaagagaactcctgctgca

SEQ ID NO: 271766 - DNA, 404 bp, Homo sapiens
caagttaaatgacctatgtgttttatatatagagagatttatattatgaattcattaattaaagtatattaaaacaataaataaattaataagaattggacaagttgaggtagcaagggcatgtaacacttaacatgctattcttttaaaataagaatataggttgaaggagagtagctattagcaaggaaattgaaaaartagcaaaaatactgaaggtgcagcaaggtctcaaaaaacaggaagatatgaaatttagttttgggtcacttgcattaagttttgatagagagaaatggcatttttcttagaaaggagaatgcaataggttggtagcatacatataggaggctttatgtctggtggcaaataataggaataattctcattttactgccttttaa

SEQ ID NO: 271767 - DNA, 476 bp, Homo sapiens
tattcattcccaacaaatgagccgagtgactgggagtacatggggtagacttggtgggtcactgcctcagaattgacaggcaagacaactgaaaagattcttggatgtaaggagaaataggagtatttcagggaaggatgtgtggtgtttgttttgaaaccctcatctatctagacttagaggaaaaaagaggaactgggaagagatgagctgagaacattccacatggtatgtctgtttagcacaatgaattgtagtcagatttacagctgaaaaataagcttacttcaaatattgatttggatgctggaattaggagatctgtgacccactagctggatcctctctgtaaayattaggtttctcatctgtaatataacatgtactgtgtgcatggagctacagtggtgaggtggggatgatacctactctggctccttgctgaggcatcaagaagcccaatcgagaaaatgcat

SEQ ID NO: 271768 - DNA, 591 bp, Homo sapiens
tttgttgtcagtagcctgacagattatttagatggaacaccattttttaaagctcacctgctcagcatctgtgatatgctcactagttccaagaggtatacctttcagccatcaaagccaggctgaaaagaacttagactgcttttctgcagttttctgagccagcgagtatgttttgtgactcacattatgactgaaactcacatacaaagaacagaatatgatgggcgcagggctgagaggatggggtgtccgtgggatttcatcatttgtgccaacttagtcttacaaacttccttgcctgtcttcatcataggaaacatttatctggattttgctacagataygatactgctcttgcaggatttcctggggcttttcaagtactggtccatatttctttgattcataattgtaatttatttacaatgtccaggagaatggtcggctcagtgtgtttggccagctgcatggaagctcagcaaatgatgctgtgcaaatattaaacactatttagaaattaaactttgaggtgcatattgaattatgcaatttacaaagtcaactccaccaccagaaacttggacatta

SEQ ID NO: 271769 - DNA, 561 bp, Homo sapiens
tgtgaaaaatatgttgcattgcatactgttggtttgagaaatgcatttttatccctccgaaccagtccatacaaactgtggctgccacaggtggccgtgtggtgagctggggctggctttgcaacatcgtcaggcttaccagagccatatcgcatccagtgtgcaccatttgggtctgcacactacatcagccctgctcaggttctaaggtccacaatctggccaacctgctctgagagtttactgtgggtttatgctctccagtgaaacattctctgcttttgtttctattcaaagargcttgaaccatggtggtgactcctaaggcaggatggaattatcatacacaatgtgacatcaagagatcacaactgtattggcttctaatccacttggcaacagaattggctgtaataattcacttgaatgtagaaggtaaggtgggaacatcagtccaccaaccatttaggaaacagtacttctccatccaccacatgccaggcatggtctgagaatgccacttggttcctgagcatctaccgcgtgccaagagcttggccc

SEQ ID NO: 271770 - DNA, 561 bp, Homo sapiens
tgtgaaaaatatgttgcattgcatactgttggtttgagaaatgcatttttatccctccgaaccagtccatacaaactgtggctgccacaggtggccgtgtggtgagctggggctggctttgcaacatcgtcaggcttaccagagccatatcgcatccagtgtgcaccatttgggtctgcacactacatcagccctgctcaggttctaaggtccacaatctggccaacctgctctgagagtttactgtgggtttatgctctccagtgaaacattctctgcttttgtttctattcaaagaagcttgaaccatggtggtgactcctaaggcaggatggaattatcatacacaatgtgacatcaagagatcacaactgtattggcttctaatccacttggcaacagaattggctgtaataattcacttgaatgtagraggtaaggtgggaacatcagtccaccaaccatttaggaaacagtacttctccatccaccacatgccaggcatggtctgagaatgccacttggttcctgagcatctaccgcgtgccaagagcttggccc

SEQ ID NO: 271771 - DNA, 570 bp, Homo sapiens
ggatatttggaagctatggagttttcctggtaacggaagggtttattacataaatgtgaatagagaggaggtatgcctttatataactaaattttaaactattttcacatctgatgtactttttgctccctataacaacccacctaggacttcccagtagcagagcaaaggttacaggtataaaattttggctcaccacaagttaacaagaatgacttagggaccacaggcttgagaactctccaacaaatcctttccttctttaatgtcctaacttttgtaaacagtagcctgttttcaatctgtcctgccttttgctgttctggggaaaagaatgaacccaaacagaatcaaatgggaggtttcagagtggagaaatagttgtgaggcatgtttgcaytgaaagccagggttgcagccatggaggtgtgccattcagataccacttcatacagaactgaccacttggctgcaaggagtgcagttaccaaacatccttgagttgcagcaccatcaggatctgcttccctttttgaaccaagaccactctcttcatacgtagtacccagc

SEQ ID NO: 271772 - DNA, 565 bp, Homo sapiens
tagcaaccacatctctattctccttctgaacttaaacaatgtaagggttcatatcatactttgtgctttttaattcttaaaacagtgccttgcacagtgtgttgataaataactagtatttattgagcgattcctgtatgttagacacagagctaaatgtgctgtaggaaatatttaatcctcatgatagtcctatgacttacttgctattattattcccatttggcagatgtggatactgaggcttggaatagtttaatggcctctcaaaggtcttatcctgaagtatgaagaccaggattaaattcaggtttgtctgacaaggagtatctgctggacttgtgaaggaaataattctatcaattccttatgctgaatctgtggggaaaacaaaaatttgtgaagttctgcatttacaggtctaygttgaagccttttatcaagaaacctggatatacaattcatctgacactccaataaatactggaaattacaaggactgtcttaggaatgtacaaagcgtgtatttaagatgtctgttttacccttctatcaagaaggcttc

SEQ ID NO: 271773 - DNA, 596 bp, Homo sapiens
tcatttttagtgatggagaaagcagcaggaagttcagggttggggtaaaatcgatattattactttatacaggttaaagtccaatgcctgttagacatccagctgtagattttgaaaaggcagttggttataagattatggaattcagtatagaggcatgcgatggaagtcaagaacatttagataatatctgaagtcacacacttggatgaaactgctcagggcatgtgtgtwaataataaagatatctaaaatcttagatggagcagcccaatgtttaaagttaggtcaatgaagacaagttcaaaaaggagtatgagaatgaacagccagtgtgccaggatgaaataagggcattgttgcaaaggacaaaagaagaaaggacttcatagaaaagggagtggttagttgttttaaatgctactgatggaagaggccagatcaaggattaacatacgatcattgaatttagcaacacagaggtcattgttgactttagcaagagttttttcagtggatttatcaaagattttcaaagttgaattactttgtaaaaatatgcatgttacttccttaaacaggtgaatgaaacagag

SEQ ID NO: 271774 - DNA, 622 bp, Homo sapiens
tgtcagcgaccatcagaagctataagaggcaaaggattctttcctagggctttcagaggaagcatagtcctgccagcaccttgatttcaggcttctagcctccaaaactgtgaaagactacattrtatcattgtaagccacacaatttgtgatattttgttatggtagccacagaaaactaatatagtcagccagcaagtgatttgtcttagacagattactcctcccccttaagacagaatatattttagtgtaggagagggtgagacagctgggcagacaggttaccagaggtcagtctctgtcggggacaatgctatatttctgtttactgctgagcacacagctagactacacttcccaatctcccctaacattatgtggtcatataattaattcatggtaaaaggaaaatgggaggaaatagtgttaccacctccaagcttgataggccaaagaggccataatctcccatgctctcttttgtcctcagccttgcagcaggatgttaacaccctatattacctaaggagcaacacactgaaaacggcttctattaacctggatccttgaatgattgcaagcatcagagccccattgtgcatcatactcaccacattga

SEQ ID NO: 271775 - DNA, 576 bp, Homo sapiens
tattgcctgctatgtttcagggattttaaatatgtcagttctaactaatgaacagagccaaagatcagtactaacattcccatattgaagatgagaaaactgagactcagtaagcctaatttgttcagagtcacacaactastaagtagtgaagctaagattcagcccagggtcacctaaccccacgtgtttttatattatagtatcaccctctttacaaagagctttcattttaatcaagactagaagggcacaaatcaacctaagcaagaaagtttacaagagagatatatatcaacaagtggcaaaacaatgagaggaatattattaacctaagtatacaaatgcactttttaaaatgttatgaaagttccttttctttttacaataaatgtgattatacataaaaacattctatacatgttgactattattccaattttaacaataatgagattagagaacactatcaacattaactattcagactagttagcaattaacaaaatacttctctttctttttttttccactccattcaaaacacatagcacatcatcaaaaaaaaaaatgtaa

SEQ ID NO: 271776 - DNA, 649 bp, Homo sapiens
ctattagtaactttattttacaaataaagaaatgaaggttagacaggtgggccacttttctaagcttcacggctaatgtcaggtgctacccaagatgatctccggatgtaccatgtaacccagtagtcctcctccttatcttggctctagaagctccatgtattccatctcctgcttctccccccctcctctcatgacaatgcctttccttccccagtgcctaaaattttctatacctctagaaagctaaaattaggtctataaagttttattaagtaccatctttagattgctttatggaagtaggctttattagcccttctttcctaaattattatagattttttttccagagactatttcttagaaggacagcaatagcatccacagcccactatgttaataataaacacataatattagtatcaatcagccttagtatcaatcagccagtatttaccataacccgtggcaaacactactcatagtcacaggagaaatccaccaggaaaatcaggaatgggtcacacataaaaacacaaagtaaataacaatggaaagaaatacacaawcaagtacatttttaggagaatattttgagagattagtatttgtgcaaattgttctggaaaaaaatttataacaaatc

SEQ ID NO: 271777 - DNA, 520 bp, Homo sapiens
aagaatgttggttttttttcaacttctttttctgcatctattgagattatcactttttggtttttattctattaatataccatattacattgattaattttaatatggtgaactaatgttgcattttgggacaaatactatttggtgataggatacaagcttttttatatgttgctagccttggtttgataacattttgttgagaatttttgtgtctatatttatactggatattgatctatagtattctttttttgcaatatctttggtttagwtatcaagataatactggctttaatttgagttagtatgttttcccttctattctatttttgcaagagtttgtgatggattgcagttaattctactttaaatgtttggtaaaactcaccagtgaagccatctggtcgtgggctttttttttttttttttttgtgggaagctttttgatgactaattcaatttcttaacttgttataggtctattcagattttctatttcatcttaagtcagttttaa

SEQ ID NO: 271778 - DNA, 610 bp, Homo sapiens
gtaagtgatcaattaatatttaatagacactccatgatttttgccatatgggagggataattgtagataaatatttgtccatattgttttcaaagtgggattcctgaaccagcagcatcagcatcatctgggaccttgttagaaaaaattctcaggtttactgaatcagagattctwgaggtgtgaccagctctgtgtttcagtaattcttccagatgatttaaatgcatgtcaatatttgagaatcaccatcacagaccaatttctaagtctcagaagtctatcttcaataaactaaaaacaatacaactttgttacttataacaaatatgcaatgcatttatttgtgtttgcattaattaattcattcattatgttggtagaggtttatttatatgaatgcaatgtttgccacccagcccctcacctgcagtagagtgtacataacagaatcagtaaaggtttttcttcccccaaaagattgctttttataaatgaaaacatgactaacatcatcttgctagaagttaatttttattcactctcctgtcgaatgtggctaaagccaccaagatctaatgctattctataggttactgcatggaaactg

SEQ ID NO: 271779 - DNA, 530 bp, Homo sapiens
aaattaaattttagttcgagatattaaaaataaacacagataaagaagccaacaaacagttgctctagttccacactcaatccgcagacccagagttaggttaagcaaaaccacagacacttaaaagaggaaaacagtcctcaggctggagagatcagaggcagcagtggtggggtgtaagctggaccttcagaaatgaagcctatttagagaagagatcatggcatttgattcagaatagttgaccagtcataacaaaattgctgtattcaaagtgatttgcattcatgggctataagtcactgtggggtttccaaggaaggttaaaaaagccttgagaccttcctcacaccctttggaaatcacagccastgtttcagaggtagacaagtgaattcccagggaataaagaaatcctctttatccgttaggactgattatgctgggaataaaagcagggtgacttcatccctggctttcttacagtcaccactgaactgattgaccaggtgtcccagcaaatatcaaaa

SEQ ID NO: 271780 - DNA, 613 bp, Homo sapiens
gaacaaagagccgagctctcttaccaagacattcttgaagaagaaaaggaaattgggaagaactgtgctaaacctaaatatttgtgtgatactggtacaggaatagacaagagaccaatgaagaagcccatctatgtatgtaaacttgatttatgacttcgtagaaattgcagatcattgagaaaaggcagaatattcaataagtgataccaagtcatttggatactactcagaacacaaaaatgaaattaaaacacaagtagatttaaagatgtaatttaaaatttaaacaaaattaaagaatatttttatgactttgggcttaagaaaggatttttcaaacmtgtcacaaaatgcaccaaccacaggaaaaattgggtaattttgatattaaagattatgttcatcaaaaggtaaaacaaacagcatgaaaaaaatagaaacctctagaagatattttaagtacaaagaatgtgtatctagattaaatgcttatacaaaaaaaaatgtagggggagaagaaaattaggcaaattaggcaaagatagagcaaagaaggagggatccaaatgcccccaaccatatgaaacgtgtaagtattataataaaaaat

SEQ ID NO: 271781 - DNA, 619 bp, Homo sapiens
aaaaggcagaatattcaataagtgataccaagtcatttggatactactcagaacacaaaaatgaaattaaaacacaagtagatttaaagatgtaatttaaaatttaaacaaaattaaagaatatttttatgactttgggcttaagaaaggatttttcaaacatgtcacaaaatgcaccaaccacaggaaaaattgggtaattttgatattaaagattatgttcatcaaaagrtaaaacaaacagcatgaaaaaaatagaaacctctagaagatattttaagtacaaagaatgtgtatctagattaaatgcttatacaaaaaaaaatgtagggggagaagaaaattaggcaaattaggcaaagatagagcaaagaaggagggatccaaatgcccccaaccatatgaaacgtgtaagtattataataaaaaatgcaaattaagacctcaccaaagtaccccttcacacaccagactgacaaaattaagaagtcagataacgccaagagttttctaagatgcaaaatcataactttcatttgatgctgatggttcaataatcacttgggaaatggttggcattaactaatgaagcagaaactgtatatcccaaaacctagtg

SEQ ID NO: 271782 - DNA, 593 bp, Homo sapiens
tgaacacattgttgaaagacagacacaaagatggcaaaaccacaattgacagtgagtgacatgcaacatttagtattaccattactcctggggacaaagcaggaaggaggattcaattacaaagaagtagagaaagaacttcaaaaaatgttcagtttgtaagtggggcagtaggtacacagatgtttcaccttatcatcattctttaaactgcatatatgtgtgcatacatcgttttacaaactcccttgtacatgtgacatattttacatttgctttcccttacagtagatcacgtaccactggaaacactgagtgtgattctgcactggcctaggaatgctttcaaaakccatgatttcagggttcccaagcagccactaccattggcagccgccaatatgaactcttacacgcacatgcacctatgcgcacacacatatctaaattcaagcccccattttgccttatttaaatacagttttaagtacaaatgtcagggtacctcactatgtatgattccacagtagtcaaaggaacatttctttttaaataacgacataaaatcattactgtttgactttgggggagtt

SEQ ID NO: 271783 - DNA, 556 bp, Homo sapiens
tttttttttttcaactaagtttatatttcctaaaatttctgtaatataatgcgctgaaaactaaagttctcttttccaatggttgaacttcctcaaactcagtctcagaaatttagaggctgtacgaatatagtgaaattgttcctgtctgaaaggaagaaaaagagtagcccacattctaaaaatatgagatatatatttttaaaaaccatgcaatcctgaatcaatagatagaaccatgctgtagaatactctttgtattcatcaatttacttggtaaatagcatctgtcatgtaggcggctaaattgttagtcagcagaagggggtaatttggcaatgagtgcggagtcgctgtcagacactggcgtgtctggattactctacgtgcagcagagcataatccagcacaaagcatgtctgctttggccwctttctaaaagttcaagttacagaagcaccaagagaaacttcctataagacaatgtcaactgcaaagtgatcccagggcctaggctctggtcattattacgatgaggtgccagccagatctgact

SEQ ID NO: 271784 - DNA, 500 bp, Homo sapiens
tgcccctcctaccatgtccttgacgatggtcactgcccacttttaccaaaaaatatcaaaaaattctatgctgttttggaggaaaaaaatacattgaattttactagtcatatcttattttcttaaattgcataatttgagttgccaagttgtgaggacctacagtttacgtgcagaaaaatctcaaaattaataataagtaatacctaccatcagagtgcgcaagggaataaacagtgtcaagtagatgttgttactgttagccatgatgaccctgccagttggcgagtgagcccattatacagatacagagccagactccacagggaatcactgtccaagtcccacaattagcagacagtgtgattatcagcaagctcaggatgtgtgaccccagagctgatgttccttccctcccactgaactgcytacacagcttccctgaagagaatttccccagagagtccatctagatttttaactgtaatgttcaattatga

SEQ ID NO: 271785 - DNA, 523 bp, Homo sapiens
ttaaaggtccaaattgatgaaaacaatttaaagaaaaaaacaagacaacactttccttctatcaaattaacaaagatatggctaggcacggtggctaatgcctgtaatcccagcactttgggaggccgaggttgggggggggtggggcggggatcacctgaggtcaagagttcgagaccagcctggccaacagggtgaaacgccatctctactaaaaacacaaaaattagccaggcgtggtggcccatgcctgtaatcccagctactcaggaggctgaggcaggagaattgcttgaacccaggaggcagaagttgtaggaagctgaratcatgccactgcactccagcctgggtgacagagcgagactcagtctcaaaaaaaaaaaaagtaacaataatattccacataacaaggtaggtgagaaacaaaaagtggcccactttcacacaccagtaggtcaacaaataggtctttctcaagagtaaattggcaattttttaatgagaatcttgaaatgctcag

SEQ ID NO: 271786 - DNA, 621 bp, Homo sapiens
gcttaagacagggagttcttagtctcccaccaacttcatttttcattacccataggtttttgtttttttaagtctgcacacatacacacactgagaggccacagctaaagaccctgaggtgtcctggtggcaactatacaacattacccctttcccaacaccattgctaaacctgcccattgttctgaagccagacttccttgtgagtctttctaaagaacaattaacaatggtgtagttcagcartcttcaccaaaactcccagaaaaatctccaaatcccaccttgataacctgcttaacataccagctctgtgtttgaaccagggaagggagtgatttagataaaacctcacagctctttatgccagtgaagcctatttcccagcctctcgctgacggcatcacagcagagacagggaactctggtatctgagaccttttctgcatgtgtttcctcgtgggcaaagtcaccaaaaacttcctatgctcaatcacataccctctaagcactttctaacatcctttcttggggtttgtgagctgtcttttcctaagggagacaccatattcttccactccactgctgagttaaatagcaagaaaatgactttttattacc

SEQ ID NO: 271787 - DNA, 621 bp, Homo sapiens
gcttaagacagggagttcttagtctcccaccaacttcatttttcattacccataggtttttgtttttttaagtctgcacacatacacacactgagaggccacagctaaagaccctgaggtgtcctggtggcaactatacaacattacccctttcccaacaccattgctaaacctgcccattgttctgaagccagacttccttgtgagtctttctaaagaacaattaacaatggtgtagttcagcaatcttcaccaaaactcccagaaaaatctccaaatcccaccttgataacctgcttaacataccagctctgtgtttgaaccagggaagggagtgatttagataaaacctcacagctctttatgccagtgaagcctatttcccagcctctcgctgayggcatcacagcagagacagggaactctggtatctgagaccttttctgcatgtgtttcctcgtgggcaaagtcaccaaaaacttcctatgctcaatcacataccctctaagcactttctaacatcctttcttggggtttgtgagctgtcttttcctaagggagacaccatattcttccactccactgctgagttaaatagcaagaaaatgactttttattacc

SEQ ID NO: 271788 - DNA, 535 bp, Homo sapiens
aaggcatttctgtcaatgtgtacatctgatgaccttatactaaggatgggctcacatttttctcatgaataattaaagtaggattgaggaaacattttcttgaacagttgccataggccaggcgtaaagctatcagagttatctcattccattctaaaacaacttcacgtgatgattcgtatcattarcctaataataaagaaggatagtaaggtttagtgtgtttaaatgattcactgcaaatgtcttatacctggagagacttagatttgagccactgtctatcctaaaccatgctgtgatgtcaaagcctgactgacaatattgatacaaggacagagagaaagaagtttccaggctacacccaccataacagacccaggtcttaccacagcgatctcggacaaccaggttccggccttccttcaggtgtatggtgaggaggtacgcaaaagggctggggaggttactcaagccatcactggcttcccccggtacctgcacagatggagaaggcagttaagacagtatgtct

SEQ ID NO: 271789 - DNA, 535 bp, Homo sapiens
aaggcatttctgtcaatgtgtacatctgatgaccttatactaaggatgggctcacatttttctcatgaataattaaagtaggattgaggaaacattttcttgaacagttgccataggccaggcgtaaagctatcagagttatctcattccattctaaaacaacttcacgtgatgattcgtatcattaacctaataataaagaagratagtaaggtttagtgtgtttaaatgattcactgcaaatgtcttatacctggagagacttagatttgagccactgtctatcctaaaccatgctgtgatgtcaaagcctgactgacaatattgatacaaggacagagagaaagaagtttccaggctacacccaccataacagacccaggtcttaccacagcgatctcggacaaccaggttccggccttccttcaggtgtatggtgaggaggtacgcaaaagggctggggaggttactcaagccatcactggcttcccccggtacctgcacagatggagaaggcagttaagacagtatgtct

SEQ ID NO: 271790 - DNA, 461 bp, Homo sapiens
gtgtctctttcctcccaggtaggactcccttaagcatttcttgccaggccagtctagggtgatgatttctctcagcttttgcttagcttggaaagatgatgatgacgatgatgatgattattattattttcagcactttgaatatatcatctcattctctcctggactgttaaatttctgaggagaaattcaatgttagtttgatgagggttcccttatgaggcacttgatgcttttctcttgctgtttttaagagtactctcttgatcttccacttactacaatttgattataatgtgctgaggagaagacctttttgcattgygttttggaatctctaaacgttctgtatctgaatgtctaaatctcttcctagacttagggtgttttcagctattatttcaataaataggttttctaacttttttattttccctttgtcttgtggaacaccaaaaaat

SEQ ID NO: 271791 - DNA, 620 bp, Homo sapiens
ctcctgtgcaacttttgttagctctatggccttacgtaatttaccccaccactctgtgctttcattttcccatctctaaaacaggaataataactgcatctactttacagagttggtgaggggattccatacatttatacatataaatcatttataaaratatatggcatatagtcactatttaataagtgttagctaccctcatttttctcattgttattgcacaaaacacacaaatatggaaagaaagttattgatatctggtagagttttgaaaataatactagctacaaaaataaatcaaattactttttaaaaaggaatagactttatcattccttttctagcaataccattccacaccgaagagaaagtaaaatactaatatcaacagaaaaaaagccatgactaggctgacatgaaaataaaaatataatacactgtaaaaataaaataaactgcaagaactcttggaggtaactaagctccaatgtcaattttcactctaatattttctgccaaatattgggattctgagctgctttctgttgtctgcatggtacgatgggagattgggggcacgaggggaagcctaggaactctccacggggagattttaa

SEQ ID NO: 271792 - DNA, 620 bp, Homo sapiens
ctcctgtgcaacttttgttagctctatggccttacgtaatttaccccaccactctgtgctttcattttcccatctctaaaacaggaataataactgcatctactttacagagttggtgaggggattccatacatttatacatataaatcatttataaagatatatggcayatagtcactatttaataagtgttagctaccctcatttttctcattgttattgcacaaaacacacaaatatggaaagaaagttattgatatctggtagagttttgaaaataatactagctacaaaaataaatcaaattactttttaaaaaggaatagactttatcattccttttctagcaataccattccacaccgaagagaaagtaaaatactaatatcaacagaaaaaaagccatgactaggctgacatgaaaataaaaatataatacactgtaaaaataaaataaactgcaagaactcttggaggtaactaagctccaatgtcaattttcactctaatattttctgccaaatattgggattctgagctgctttctgttgtctgcatggtacgatgggagattgggggcacgaggggaagcctaggaactctccacggggagattttaa

SEQ ID NO: 271793 - DNA, 601 bp, Homo sapiens
agatgcttcagcagctaattctataaatcttaaaggaagtaatgatatcaaactcccataaacttttccagaaaaaagacagagaacctacctgaccttgtattatgagtttagaataaacttctagccacaagaaaatgtcaagaacacaaaataagtcaatctcactgatgatcataactgcaaaaatcctaagcaaaaacaagtaaataaaatccagccagatataaagggactgtagaacaataatgttgggtttattccaagaatgtaagattggtttaccatttgaaaaccaatcaaaataattcgccacataaaccaaaataaagcataaaaataacatcatttcaatgaatgcaggtgaaaatgttagggaaagctcagctcatgttcaaaataaaaactcatagcaaactaggaataaaaagggaacttcctttayctgataaagcatatttacaataacctacagcaaacatcattcttgagggtgaaacgttgaaagctttctttctgagatcccatgagaaaagaatgcctcaaaataccaattctaaaccacactgtatgacagctaatagccagtacagcaagtcaa

SEQ ID NO: 271794 - DNA, 512 bp, Homo sapiens
agaatgatgtgtcacctcctgttaggaatacttcccagaaatkttatatgccacttttgcttatatcacattgccaaaatgtagttgtagccatagatagctgcaagggaggctggggaatgcagacttttttctggggagccactggcctccctaaatatgaaggtttcaattactgatgaagaggaaaaatcagggagaaaatgggcaggaactgacacaactccaagctcctaaaaacaaatttcactgctgatatttcagtatgtatttttttttttaaatacaagttgtgggttgggggggcagtcccctggtctctgatcttatgattacaattgcagactttataataaagatacctgattgtgcactggcactgcaaattactccgtgtgtgagtttggcacacacatggagtgattaaggcacataacacataggggtattggaagagttaagccacattccctggcacatgtgcagtatggaataaatgatggtgtttattg

SEQ ID NO: 271795 - DNA, 584 bp, Homo sapiens
tggctggctagaagctgaaaaactcatgcgccagagcaggcatttgagtgccctcctaggcacagcatgacgctgacagcgcacaaagcattctagccagagactgccctctttcttatttatggccactcagggaatgcactgtgctactctagaggggcctgtttatatatagactccagcagccccgaggaggggaaagactagaagaattactgcatagtggtagatgtcttcttctaaatctatktacagttcatcaattatgattaatttggctaagtttttcttcaagataatttaggtggaggtagtggtagaaataggaggcagtatgctgttttagaaatgacagacctgggttaaaattttggcctttccacttagctgtgcaacttcaagctccttgaggacaaaatctgcctaccttgttctgaatttatctcagtatcatgcacatagaatgtactcaataaatattgggtgataaattttaatcacatatggtgcacttgagagttttcttgtctgtaaaatgaggatgctggcactcatttgacctggtacaataagcatatgagaat

SEQ ID NO: 271796 - DNA, 588 bp, Homo sapiens
ttggaactaatcccctctgcgtataccaaaggatgactctattttctttgtgccatctggagaacaactgatatacccataaacatgctrttctagctactgataatggtatctcagtgaaaatcaaacatttgtatagctccttaagacaatttctagggatagacaaatgaactctaagaagattcagaatgcacagcttaagaaacccagaaaaggtggggagtctataaagggaacatctgtctctctacacagatgagagtagtgtcagtacaaagaaagaaacagaattagaaggcccatactctagactaggttgtcctgttagcctttagctatacttcatctctctgggtctagttcatcatctaaaaatctagatcaaatgtcctcaaaggttctctacagttttaacattctatccgtctaggaatctataacagtagttctccaactctagtgtacagatttgctttttcctccagacccacaggcctataatccttgggccatactctgagaaacaaatctctctctatatttataggttaatggtattgctttacatgcagccaacttaagcct

SEQ ID NO: 271797 - DNA, 557 bp, Homo sapiens
taaaaaattaaagacattttggtaagattctttccttcctagtctgctggtttattttggccttaatttttagtgttccttttttcccctacacttgaattttctttacttgaagaaattagaatttaggatggtggcaaatcacattatattcaaatggaagaggaagatgttttatacattatgtctttttttkgtggagtatttatataatttaattcctttatacttctttctactttgtatagtgattttactcatcttaaattctttgaaatgtgcctattcctgtggttgaaggtgtttgtcaacccttgtttgacaaaagtaagacacagaaattgagagtctaaaattacacaggaaatgtattctgggaattgtgctgtaaggccctgctacccatttgtgtggtaatgtttttagtattaccatgttactttacagcatgccattatgcttgtcatcatttatgattttgtgtggcacacactggtatattattaaattttatacttcattattgttgtggaaccacataagactcactgtgtttt

SEQ ID NO: 271798 - DNA, 587 bp, Homo sapiens
tattcatttatttagcaaatagcaattggatgtcctgcttcaaaaattattttatcttacttgttatcattccaacaatcagcaaatgtttttaagagtatatgctgtgctagagagtgtcccctgttagctggaatgaaaagatggttgatgtcttaatgaactttatttattcattaaaaaaactgctctatattagtctgattttacaccatcaaggacmcaacctgatagggaaatcagacaagtaagcaatcagcagtcacatgtgataattgatacaatggaaatatatatgattccctaggggaatgcaaagtgtagtcatctctcaatatccatgggggattggttccaggaccccctttttgtataccaaaatctataaatgttgaagttctttatataaatgttatataatatttgcatataacctattcacattctctcatatacttttaaatcatctctagattacttatactacctaatacaatgtaaatgccatatatatcattgttaatactatactgtttagaaagaatgacaaggaaaaaagtccatacatgttcagtacagacacaacc

SEQ ID NO: 271799 - DNA, 587 bp, Homo sapiens
tattcatttatttagcaaatagcaattggatgtcctgcttcaaaaattattttatcttacttgttatcattccaacaatcagcaaatgtttttaagagtatatgctgtgctagagagtgtcccctgttagctggaatgaaaagatggttgatgtcttaatgaactttatttattcattaaaaaaactgctctatattagtctgattttacaccatcaaggacacaacctgatagggaaatcagacaagtaagcaatcagcagtcacatgtgataattgatacaatggaaatatatatgattccctaggggaatgcaaagtgtagtcatctctcaatatccatgggggattggttccaggaccccctttttgtataccaaaatctataaatgttgaagttctttatataaatgktatataatatttgcatataacctattcacattctctcatatacttttaaatcatctctagattacttatactacctaatacaatgtaaatgccatatatatcattgttaatactatactgtttagaaagaatgacaaggaaaaaagtccatacatgttcagtacagacacaacc

SEQ ID NO: 271800 - DNA, 447 bp, Homo sapiens
tcttggacttctcagccctccataattacgtgagacaattacttgatctccttttggcatggagaagaacaattagaaggccaatgagtttagagcagtagttctcaaattttttgctatcaggccccctttacacacctaaaaattgttgaagaccttgaagagcattggtcatacggattctattgatatttatcaatattttcttgctctagttaattctgaaggcrtattagaaattaaaactcagaaaattagaaaacagttactgattcacttaaaattactataatagacatactatgtgttaatataagtaatctttttatttaaaataaattatattttccaaaataaaaatgagaagactaacattgtcttgcatttttgcaaacctcttcaatgtctgacttattggaggatagttagattctcatagctgcttct

SEQ ID NO: 271801 - DNA, 592 bp, Homo sapiens
ctttcagcatttgtcacacatatagaccaggaaattggctccatctcattctagctctgtattgaattaaaaacctctactgcaaagaagagcatgatgtggggaaagaataaatttagttctttctttagtaatgcacatatatttccatacatttcacatcctaagggagcctatgaatgcgttcaataaatacaaaactataaagtataattccaagaaaggaacaggttaattttttttctggtttcaatatagcattttaaggttgaagactgaaaattaagtatttttattcatttattttactttccttttaacagacaccttcagtattaaaagtaaayccgtaataatgaatcttagttgttccatccacttggataatgttagcaggtttagatcaaagcaaattaaatatcagcagtggcaaatcgagaaaaatgttttatgccatttgaatcaaggtttacatttagttcactaaagtccatcctggctaatttagtaggtattgtatgcaagcgacatatatgtatacattgaaaagagtgtccattcctatttcatttgtctagggtaacagaaaagg

SEQ ID NO: 271802 - DNA, 592 bp, Homo sapiens
ctttcagcatttgtcacacatatagaccaggaaattggctccatctcattctagctctgtattgaattaaaaacctctactgcaaagaagagcatgatgtggggaaagaataaatttagttctttctttagtaatgcacatatatttccatacatttcacatcctaagggagcctatgaatgcgttcaataaatacaaaactataaagtataattccaagaaaggaacaggttaattttttttctggtttcaatatagcattttaaggttgaagactgaaaattaagtatttttattcatttattttactttccttttaacagacaccttcagtattaaaagtaaatccgtaataatgaatcttagttgttccatccacttggataatgttagcaggtttagatcaaagcaaattaaatatcagcagtggcaaatcgagaaaaatgttttatgccatttgaatcaaggtttacatttagttcactaaagtccatcctggctaatttagtaggtattgtatgcaagcgacatatrtgtatacattgaaaagagtgtccattcctatttcatttgtctagggtaacagaaaagg

SEQ ID NO: 271803 - DNA, 592 bp, Homo sapiens
ctttcagcatttgtcacacatatagaccaggaaattggctccatctcattctagctctgtattgaattaaaaacctctactgcaaagaagagcatgatgtggggaaagaataaatttagttctttctttagtaatgcacatatatttccatacatttcacatcctaagggagcctatgaatgcgttcaataaatacaaaactataaagtataattccaagaaaggaacaggttaattttttttctggtttcaatatagcattttaaggttgaagactgaaaattaagtatttttattcatttattttactttccttttaacagacaccttcagtattaaaagtaaatccgtaataatgaatcttagttgttccatccacttggataatgttagcaggtttagatcaaagcaaattaaatatcagcagtggcaaatcgagaaaaatgttttatgccatttgaatcaaggtttacatttagttcactaaagtccatcctggctaatttagtaggtattgtatgcaagcgacatatatgtakacattgaaaagagtgtccattcctatttcatttgtctagggtaacagaaaagg

SEQ ID NO: 271804 - DNA, 614 bp, Homo sapiens
gcttcgatgaaacaggcaaaaggagggagagagagcagacctaaatcttctaccctactaattcatgagtgaaatgaacttgatgaaaaatggcttcagacttcttgtctaacttcaccttgtatattattacttaggactttctaactgctagatacaaaaaaaattctcctactagattattattgctgaagttaaacccaaatttcactgtctaagctgtatgtagtaaatgttgctttcaagagagatattaggcattatttcctcttctaatttggtattaatgataaaagcaggcctgtctatgatctgttatcataggtgtcttctgatggaaacgctgatttttgagattgactttgatgttctgtctgccaaggcaaataggaagtcaataatctacagtgctgactcttcacactgaactgttgctctctgcatggaacctcatgatagaattaaggcagtatattttccaaatcttttgaaaatcatttgttcctaactcagaaaaccatgastaatgtatgcctacatggtaccaacaagagaaaggaaaaccactacttggaaaaaaaaaaaaaaaaagagagatgaagaacatgagcaaa

SEQ ID NO: 271805 - DNA, 603 bp, Homo sapiens
atctctgtttttccaggattggtccctggtgccttatttagttaatttattgaagtatgttttcctggatggtcttaatacttgtagatggttgtctgtgtctgggcattgaagagttaggtagtattgtagtcttcatagtctgagcttgtttgtatcttttttccttgggagggtgtattagtttgttctcacactgctataaagaactacctgagactggataatttatgaagaaaagaggtttaatttactcacaattccacaggcttaacaggaagcatggctgggaggcctcaggaaacttacaatcatagtggaaggtgaaggggagacaatcatgtctatgacttatcatggtggagtgggagagagagagtgaaggggggagtgctacacactttcaaacgcccagatcttgtgaacactcactcactatcatgagaacagcaaggrgaagtttgcccccatgattcaattacctcccaggagggccctctcccaacacgtggggatttaatttgaaatgaagtttaagtgggaacacatggccaaaccatatcagaggactgtccaagaatttgaagggacttgggcctcaag

SEQ ID NO: 271806 - DNA, 623 bp, Homo sapiens
tgattttattacagttctgtagttttcctcaaataaatattgcacatattttgttagatttatgctcaaatttttaatttttttggggggtgctattgtaaatagcattttgattttatttggaaattccacttattcactgctggtgtatagggaagtggttgactttgtatatgtgccttgtatcctgctaccttcctataattgcttattagttccagaatggtttctttttctggttaattattctggattttctacatagacaatcgcttgcatcatctgcaaattgggacagttttatttgtgtgccatcatgtatggcttttttttttttttaatagagacagsctttctccatgtttttcaggctggtgttgaactcccagactgaagtaatccacctgactcagactcctgaagtgctgggattacagaggtgggccaccatgcctggccatctctgtcttttaactgtgcacttagactatagatatttaaggtgattattaatatacttggattgatatttatcatattttttactcttttctactttttaaccttgtcctttgttcccatttttgtcttccactatttttcttttttttttggttttaatt

SEQ ID NO: 271807 - DNA, 458 bp, Homo sapiens
aaagtttttcaatagtgatttctgagattttggtgcactcgtcacccaagcagtgtacaaggtgcccattgtgtatcattttatccctcactcccctcccaccctttccctggagtccccaacgtccattatatcattcttatgtctttgtgccctcatagcttagctcccacttctaagtgagagcrtatgatatttggttttctattcttgagttacttcagttagaataatggtcttcaaccccatccgggttactgcaaatgccattatttcattcctttttatggctgagtagtattccatcatgtgtgcatacacatactcatacacacacacaaacacacacacgtacacacacaccacattttctttattcactgttgactgatgggcatttaggctggttttatattttttgcaattgcaaattgtgctgctataaacaggcatgtgtg

SEQ ID NO: 271808 - DNA, 458 bp, Homo sapiens
aaagtttttcaatagtgatttctgagattttggtgcactcgtcacccaagcagtgtacaaggtgcccattgtgtatcattttatccctcactcccctcccaccctttccctggagtccccaacgtccattatatcattcttatgtctttgtgccctcatagcttagctcccacttctaagtgagagcgtatgatatttggttttctattcttgagttacttcagttagaataatggtcttcaaccccatccgggttactgcaaatgccattatttcattcctttttatggctgagtagtattycatcatgtgtgcatacacatactcatacacacacacaaacacacacacgtacacacacaccacattttctttattcactgttgactgatgggcatttaggctggttttatattttttgcaattgcaaattgtgctgctataaacaggcatgtgtg

SEQ ID NO: 271809 - DNA, 504 bp, Homo sapiens
gaataattcaattggatcaattagattcaaatawttagatgggatcaattagaaatcaaacacgagatattacaactgataccacacacataaaaagtcattcaaggctactatgaacaactttatgtgcacaaactggaaaatacagagatgtgtaatataaattcctggaaatacaaaatcctcttagattaaatcaggaagaaatagaaactcttaacggatcaataacaagttgcaagattgaaacagtaataaaaaaattgtcaacaaaataagtctaagaccagatggattcacagttgaattctatcagacattcaaagaagaatttgtatcaatcttagtgaaactattccaaaagatagagaaaatgggaattctctctaaatcattctatgaagtcagtatcaccctaattccaaaatcaggaaatgacataacagaaaaagaaaaccacagaccagtgtccatgatgaacatagattcaaaaatctccaaaaa

SEQ ID NO: 271810 - DNA, 531 bp, Homo sapiens
atgaccccagaaatctttaatgtctagaaaggaaacaatatggcaattttttgaagggtacaaaatgaagacatggctttttaaaatcaagattgttttaaagactattgtatttcacttcatctgyctataatcttagtaatgttacagtcaatgacaaatactaaccatagaaataattccattgtatcttaattttatgagtagtcacatttaaaaaataggccagcattttcattgaacactcaaatccatatacctgctttctgtagttagtttccttttgaaggccattcagtaggcctcttagaatgcctgaataacatcggaataaagtaaatgtccattcaagtgtgatttagagttcttgaaatggagaatgaagtcaaaagcagttcttttaatgatcttaaaaatggaaatgactgtacaaaagctacactgatcaattctcatagcattgaccctaaagttatagaaagacctataatagcaacatacacaacacagatgtggaaagtcacattagta

SEQ ID NO: 271811 - DNA, 522 bp, Homo sapiens
atgccttttaagggaaatggcacaatgagatggatgaaatatagatctactgatacatttatatttacttttaacttcaaggagtaaaaggggtttatcaaagaagttgaggagagaaaatcaaatagctgcattctcgggtggtgaaaattgcaacaactcctttttagtatgtatcacaatcttaaattgtctttcctcctctcgtttccttctttgttttttttttttttttgccccattagaatgtcagatccaaggttacagggaatttgtatgttttgtctatcacctaacccatttcctaaagttgtataaggacattgtcggtgcttaaaaaaaattgctcaacaaatgaatgaggartagatttggatgttttctgaaacatctgtccaaaacgaaattaattatgacgttaattttggtgtcgtcattcatgtcttcttttttttcccaattaaaccatgtttttttgtcttataagttctgttttgattgtttagatgcccaaataagata

SEQ ID NO: 271812 - DNA, 574 bp, Homo sapiens
tatatttcaaataaaacaaaggggaattgttaaagaagaacctttttatttcccttattatatatttatttaatccttttaaaagttttgttaacaaaatctttggattcagtgatatttatttgaaaagattgttatccacacattatgawtaagaaagtggggcttaaagaggtgcaatgacatgtccttagtcaaaacatagacaacttgattctaatctatcaggaaagacgacgatatttataagtaaccagaacacaaagtgctaagttcaatactcatattttgaataacacaagaagtaaaatcctttatttaaagaatcaaagggttatcagaagagaagttattggtggatgatcacagagctaatagccataattatacatgacctgctggaagatggaaaaaacataacacaaatcttaccatttcctctggtagttgattcataagaaaactcttaggtcttgattgtttacttgagagtgttgctattgttactcaacttatttaaaaaaaaaatggaaaagttagttttggtggctgttgttgtctggaagaaatagac

SEQ ID NO: 271813 - DNA, 574 bp, Homo sapiens
tatatttcaaataaaacaaaggggaattgttaaagaagaacctttttatttcccttattatatatttatttaatccttttaaaagttttgttaacaaaatctttggattcagtgatatttatttgaaaagattgttatccacacattatgattaagaaagtggggcttaaagaggtgcaatgacatgtccttagtcaaaacatagacaacttgattctaatctatcaggaaagacgacgatatttataagtaaccagaacacaaagtgctaagttcaatactcatattttgaataacacaagaagtaaaatcctttatttaaagaatcaaagggttatcagaagagaagttattggtggatgatcacagagctaatagccataattatacatgacctgctggaagatggaaaaaacataacacaaatcttaccatttcctctggtagttgattcataagaaaactcttaggtcttgattgtttacttgagagtgttgctattrttactcaacttatttaaaaaaaaaatggaaaagttagttttggtggctgttgttgtctggaagaaatagac

SEQ ID NO: 271814 - DNA, 577 bp, Homo sapiens
cattattggctgtgttgaattttgtttttagttctcttttataaggtctgtagtcttactttcagtgaggaagtgttttctcaggttctcaagaaagtaacaaaatgccagcattgtcaaggtcaccattgccactgaattatcttactgtctgattattccatcttcctctgcatcatattagcctgatgactacattctaattatttaaagcgttatgtaaatcaaagcagtaaatgtaatttctagtcttactagatatcatgtacattaggtcgaataactctagaaatgtcgtcataatcatgtcatgcctaatgatgacctactcagcccctgccaacatcattcaattactcatttcagtattgatttttctcatgcctctcttcrtggcatttaaacagccctcacatctccccttttactgaggtgtaatgttgtataatgacagagatgctttgcttcccagattcataatgttacactctgtttcaaatccttttggagacaaattggggaatcaatatataaataatgacacacttatttttaattaaaatcactgctttcacag

SEQ ID NO: 271815 - DNA, 514 bp, Homo sapiens
gtactgacaagacatgagtaatattttccacacataaggaaagctttcatctcagaatcccttttttttcaaagctatttttgcacctcaattaagatctacagaactcagtggagtgttttttctccatttactaatatattaactaaggtacagaaattcttgcaaaaaaaaaacacataaaaagtgagaaagtcagttggacaccttaagatagaaaataccyaaccttgttttaaacttttcttgagttacagaaagatataggcaggtatttgtgtatatttttcactctctttctctgagacattcccctataccctcccaccatgttccatcctcagtatattaataatgggaggatatcaaaaattgatacccacctcattaaagcttattaggctcatcaagtgttcatagacataaatactgaagtaggcagtcaatctttcagttttactgtgttacagactcaagaaagctgatgcagagaatcttttagcatgtgatatgg

SEQ ID NO: 271816 - DNA, 587 bp, Homo sapiens
ataatgggaggatatcaaaaattgatacccacctcattaaagcttattaggctcatcaagtgttcatagacataaatactgaagtaggcagtcaatctttcagttttactgtgttacagactcaagaaagctgatgcagagaatcttttagcatgtgatatggtataggagcttatcatgttttcttgcataatttccccttaactcattttaacagtaaaacagaaagaaaaaattacacaatgataatgttctgacagtaggaacattggtagcccttgattgatctcatcatacccatgtcaatcagccacatgaagatctccagaaattgaaaacttcaagaaacattagtaactgtttgaaacaaataggattaggcctgaaatagcaatagataaaatagtaagactttcaacatcgaatattacatcagatatgagaaagaggcatattcatacttttatactcataaaaagaaaaaaaaatcctgtcagttagcaagaaaagtaccaggaaatatttaggttcatccatayacttactattatgaaaacataaaaatcatacatacggtcacaaacatc

SEQ ID NO: 271817 - DNA, 563 bp, Homo sapiens
tgcttcttaaaactgatgagcttcttgaggacggggagaagctctccagtttttccctttgtgtctgtctcatttgccttggggcccagaacagggcatttttaatcaattaggataaataagcctctctgtattactagaacatcaaacaacatatacttaagtagatttaagctgtcataaatgtaccaattttttcattcctacaaatatagcaaattcagtttgtagatgtttttcaaagaacatagtatgaaccaaataaatgattcacattcagactttataaagaactaaagcctacatactggtatgagtgatttttctaatttgtcagccctcacttctcctccttcaaaagactctaaatctttacctttctcatcattcattcttttcttcctrcctcaggagatacatgtccccctcaaagaccaactattacagttgcacctgtattcccatccccttctgccacaaacagggccttcccttccaggtatcccctctccaggcagcatctcactgtaataaagtgttctatttaacaacgtgggtgctga

SEQ ID NO: 271818 - DNA, 611 bp, Homo sapiens
agattaacgctgtgttttgacaggcataaaaagtagttctgcaaattaagcagaagcgtggccaccagtccaaaaatcatatattattttaatgtcacacctcagaatcatctcctcaataaacatgacttttcaaacccaaatagacaggaatcttgaagaaaaacaaacagcttgcagagattaaagagccttttgtccttyttcatgtgcatttcttttaacagactaaattaagcgagtctggtgtacgttttttaggaaggaacatttcacactgaatggaaaaaatgttctatcacatatgaaattcgtgcagctgtgcggaacttggtccagagggtttaagaccataaaacaccaccaaatgatagacagtaggccttcccaagattatgtgataaagtcacaatcttttattttgacctctctccaaatttctgctctgtattctttccagtcaagtcacatattttgtttcataattttctttctctaagaggataaaaagaaacgttgcacctactaagtgctagaaacaaaatgtaaaaggaattgaagaaggcctcatttaacatagatcagctaagtcattcagccacaaaatgcaa

SEQ ID NO: 271819 - DNA, 593 bp, Homo sapiens
aggctgctgtaatttaaacccagagattccccagcacaaaggtgcaaaatggactaagccaatctgactctttccttgttcagtaaagaaataattttcctttagaaagttttatactattaacattccaaaggtgttatcatctttaaagcaagtggtcttctcttggytttaacatgcattgagtgctcacagacactaaataagtggacatcgttttaaattacaatttatgaatctctaaacaattttctatataagagaaatataaggccattttaaagtaaaatgcataatgatcttcagtgacttgcattttctttgttaaattggtagtttattttattaaatattttcctggagtttgaggttgtatatttactttttttgtaggaaaatgcttatttccaactcaatgaattatccaagtcaatgaaatttaaaactgttaattttccttcaagtaacgaaaataatctctgagcaagaaaaagcccttaattgcagtcatctattttattacatgtggtttaagtccaaatgaaaactcaaagagatctttattcagtcgttgggtcaatctttcattcgag

SEQ ID NO: 271820 - DNA, 357 bp, Homo sapiens
ctttgctgtgaccattgcacacacrttactcatgccctgccagcttcacctgtgaaaatattgcctgccttttaagacccttaccggaattaagctctcctcctgcgtgttcattcataccttttgcttggcctcgtggattgcaggaatttaatctagctttgcctgatacagggtcaatttacccaggacacacccttttcagggggtgaaggatgaaggcaaattatcagaggtctgggaacaatcaaatgagtccccacccagtgaagtcacccacatccagagcctcttccctgaaaacccccaccactccttttccttagccagatccccaggggctcacttgggtgttta

SEQ ID NO: 271821 - DNA, 544 bp, Homo sapiens
gaggccaagatgggtggatcatttgagctcagcagtttcagactagcctgggcaacatggagaaaccccacctctacaaaaaatacaaaagttataagaaattgtacataagattgatttatcatcgatgcctattgaagtaaaaagaggaaaggctggaagtggcagacagaatccctagcttgtttgctgtcattcattataagtagcacattgcaacagcaatcatgcttatgaccaatacagtcactaggttgtagatttttaaaacaaagtaaatgaaagcagtattgtcctggttttaaataaacaaactaacaaaaaaaattgaaattcagaggtggatggcctggaggtacagagagagtggagaaaagatgagataacacgttgttgttgwcattttgggctgaggagctatagacctctttttcatgtttggtgaattcctcatctttcaaaaaaatttacaattttttttatttttagagatggagttttactctgtctcccagactggggtgcagtggcatgattacagctc

SEQ ID NO: 271822 - DNA, 545 bp, Homo sapiens
gtttgtgtgagtatactctgtgatgttcacacagtgaagtcacctaacaatgcatttctcaaaatatgtccctgtcattaagtgatccatgaccgcagttgggagaagtttcctctgttttctgaaggagtttatatatacgtgtatatttttcaaatgtttaataaaatttaccagtgaatccagggctggattttatttgtgggaaaggtttttattgtgaatttgatttaactagagctgttcaaattctctagttcttcttggatcagttttgactgagttgtgtttttaaaactcagtcaaaatttgatctaaattgttgagtttattggcataaacccsttcattatataactttattcttcgagtttgtagaacctgtactcgatacagatttctttactgtttcattcctgattgataatttatatttttctgttttcaaaatgggttttataaaaggcttattaataaaattaatctcccaaaaataacaactttggctttgttaattttctcttattttttatctcactgatttc

SEQ ID NO: 271823 - DNA, 389 bp, Homo sapiens
gtaggcctttgataaattacttgttggttgcatgaggagtgtgatggagtatccattcatccagaggagctaaataatgtcatgatggagtctaggattttttttattattattatgtcattaraatcaccttaaaaggatatctctgcctttgctcatattgttctttctctttaaaatatgtttcccctttctacatgatgaacttctacttagcttttaagttttccaaatatgaattatattccataacattttatttgtccagttaaatctaccacattgccttatagccagtggtgtttgccagagcttcttgaaaacagtattttcttctgtattgttgcattctcaatggctagcaaagagccttgtatgtatgtagtagc

SEQ ID NO: 271824 - DNA, 506 bp, Homo sapiens
acccatgcatgtgggaatccagcatagaycagctaaattggccaagatcaaaactgtgacctgtataaatatactgtaccttagaactgtgaactaaacaaaatgattgttgttttaagccactgtgtttcagggtgggtcattttatagcaaaagctcactgagacagagatccagagcagtaaagctttggagctaagcagtctgagttggaaagacagcttctcccactttctagctatatggccttgggcaagccactcaatttctcagagcttcagtgtcctcatttgaataatgggggtaatggtagtgcccatttcctggggttgcaagaattcaataagatgatagatgtctgacattagcttgtatgaagcttggctcagcctaaagggagctgttgttgccattgctccattgttcagatgagtaaactgaagatgagaaacctaaactcccaggtgtttggtcactttccccaaggtcagtcagccagaaaatga

SEQ ID NO: 271825 - DNA, 589 bp, Homo sapiens
tttaagaacaaccctcccacttttttttttaaacacaactaaaatacagaaaactataaagtcaaaagcaataaactttcaattaaatgtctaccaacataaatttataccgatttcattacttgtttatgcaatttaattatgatagtgactactatatatccccttcttcctttataagtagaactaggttttaggtaggtgcaagggtcacttagtaaaagactatacttccagactcttttgaagctagatgtggtcatgtgacttaagttctgaacatgggaagtgagtacaagtgatacctgccacttctggttgtgcagtaggggatgagctcttcatctttctccctacacacttgtgagagctactactatggacaactccagggggcacattagcactgcagtctgtgcaaaggatgctgtttgtcattgtcaatgtggctgctttgtccctgtgatgcagaccttaaggcaagagctggagtggatgctgaggtgaaagcctgtgtaccagycctgtactctcactgtactaagaagtctctttgttatagcagcttaggctgtactgaagtaataca

SEQ ID NO: 271826 - DNA, 607 bp, Homo sapiens
gctgtggttcagaaaaggccatcaaatccctctggcctctctagactgtagacttggagtttcttaccaagaaacagcattctttaatctctcagccctcaataaattattatctttattttcaataggacacattcttctctataatctctgctttgtttgtcaaccagggtggaaggaaatatctcagctrgcactttgcaccttaataggactcatactagagaagaaacgtgttttctcccaccccaacacagtccaccacacattcttaggacctcaagggctccagacactaagcttgacaccatgagaacagcagtagctcctgcaaaatgacacagcagttatctgaacctcgtgaacatatttgattctcccctaagtatggggtagctcatggaattggagatagtatctgatggagtttattagtggcttgatggtctgctctttccctgtgatatgaggtttctcatttcacagtcaggagatggttaccacaaactcagatatcatgagcacattcatgggaggaagaaggaaaagagttcattggctgaatccactccttttcccagaactccctgatctctcacaagtcaga

SEQ ID NO: 271827 - DNA, 483 bp, Homo sapiens
agatctcaacaacaatttactccacagagggtgttatttaggtgtacagtaaatacatatggcataamctaacaaaaaggacaatcagaaaatcaggataggcattactattcaggggattgggactgggagagagtgcattctattagattgatacaaattattggtagtgttattgttcttaaattgtatggtggatcatgaattttcttttattaagtgaattggccctgcaattctctacctcatcctttgacagtgattcataatctataccaaaacaggatgaggttagtaggcattttcaattctaactgtgcaccataatcacctaagaaagttttaaaaaacaccagtgcctacgtctaatctgcagatattctgatttaatttctctgagttgacacctgaatattggtgctcactagaagatcaccatgcagtggtcatgtgcaatgaggtttgagaaccactatgacatag

SEQ ID NO: 271828 - DNA, 606 bp, Homo sapiens
agaatttaaagctactattgttcaagaagacaaagaaaaagatgaacataatgaatgaaaacacagaaatgcatcagagaagtggaaactataaaaaaagaaccaaatggaaactctagaataatatctggaaaaacaacaataacaaaacactgggtgggtttaatgctagaytgaagattgcagaagcaaggatcaattacttgaagacagaaatattaagttttaaatgtgaagaacacaaaaaatttaaatgaaatgacttaatgacttgcaagaaaacatttagtggtttaacacatgtgtaattgtagacagaccaaaagaagaggtgataaaggggcaaaaacataattgaaaaataatggcaaaaatatgatatatgtgattatttaaaagcattaaattataaatccaagatgaccaaggagctccaagaagaataaatacaaagaaaatccgaacagggtgcatcattatatttgtacatgactacatagacatgaagaggcagtgcatggaagatatacctcccattgttattctcaggaagagtgaagagggtggggaaaaacggaatgcaggataggaaggtcatttatgaat

SEQ ID NO: 271829 - DNA, 558 bp, Homo sapiens
actaaaggcacagagaaattaaacgtcctcatcaactatatttgggctttgcatttgtaatttccagaggtgtttattaaagatatttcaacgctatttatccattctctaactcagctgaaagatcaaggataagatagatgaccaatactcctcatcccaagctttggacaggcatctactgatgataacagcacagtctgctgcagatcycaaatgtgccccgcagttcttcctgacagtgcttgcagaagcctctaccattcgatccaacatggtaatcaagatgaagcctatttggatccctgttctagactccaagtctttgatcatatagtaggtatgttatttgctcaaaatgatacaagacctttctgctttatttcagataatagttgcaatcaaggatgcatgaggaagcaataggatatagtagggttattactggatcaataatcaagcaatttatgctcaaaaactgaaaaaaaaatctgttatgtatcttgaacaaaacaatttgcctcccagatcttctgatttcacattgctaaaataatg

SEQ ID NO: 271830 - DNA, 334 bp, Homo sapiens
aatactgtggacaccacctctccatgcttctaaaataatgcctcagttcttaataccttkctctagcttcatacccctaaagaaatcccttaagctagctaagatctcatttcttcaatcacaaaataagaaattatggtgcttgacatatttgtttaacaggatagctatgatcatcaaattacccaatagttttaagctgtaaagtataaaacaaagaaattattttttttcatcaaagttgtggactgtcaatatgcattcctataactgtcttttgcctgagagaaatgttttaaaattatttttaaagcctattctaatgacttgtcat

SEQ ID NO: 271831 - DNA, 514 bp, Homo sapiens
taaatgactagctacagaacaataatagaaatcatttgtatttctatatattatcaatgaaatggcaaaatacaggtatagatctaaccaaatatatataacttaggtatagatctaaccaaatatatataagaactttgtggagaagattataaaacttgattgaaagatattaatgttcaatgttcatggaaagaaatgctcaatactataaagatagcaattttccccagatagatttataatgcaattctaatacaatttcaacagcattttgagtagaaaatgacccattgattttgtaatttatatggaaactaaaagggtcaagaatagycaaaatactaaaggagaagaacaaggtggaaggacttgctctactagatatcaagttttacgctaaagttgtaatgaataaaactatgtggtattggggttgggatagacaaattgcccaatgaaacaagacagagagcccaaaacacactgatgaatacatatgacctgaaaggct

SEQ ID NO: 271832 - DNA, 568 bp, Homo sapiens
cagccaacaaacatatgaaaaaatgtttattatyactaaccatcagagaaatgcaaatcaaaaccacaatgagatatcatctcataccagtcagaatggctattattaaaaagacaaaaaaataaaatgctggaaaattcgcagagaaaatggaaccctcatacactattatggaaatataaattatttctgccactttggaaaacagtttggagatttctcaaagaacttaaaacagaactaccatttgactcagcaatcccattactagatatatacccaaagaaaaataaattgttctaccaaaaaggcacatgcgctaatatgtgcatcacagcactattcacaatagccaagacatggaatcaacttaggtgcccatcagtggtggactggataacgaaaatgtggtaaatatacaccatggaatactatgccagccacaaaaaagaatgaaattatgtcctttgaagcaacgtgcatgcagctgaaggccatcatcctaagggaattaacacaggaacagaaaaccaaatgttgcatgttctcttataagtgagagctaaac

SEQ ID NO: 271833 - DNA, 469 bp, Homo sapiens
aacatgttaagtatttttaaagaaatgttcactgataatactgcaggtatttagggacttccctacatgctcacaatctcagtctcattcattattatccccaataaccattttttgacacacacagtgaatactcccccagtagcttctcatgaatccctactaccaaagcactatcaacaatgcctaatggataaatcatcctccctgatagggtcatcatttctgaaaaaagaaggtgtattgctattgctgctgcaacaaattagcccaaatgtaattttaacaataaaaatgtattatctctcagcattttgtaaattacaagtctaacacaggtctcactgagatgccctgagagaaagtgtttcctyacttctccagcttctaaagacagctcacattccttgacttgtgaccctctcctccatcttcaaagccagaagctttgatgcctcagacacacttt

SEQ ID NO: 271834 - DNA, 577 bp, Homo sapiens
tgctaagcttgtatagtgcattccagttttcaatgtaccccaccaattcaacccagattctggaagacaaaccctaatgcatttattatatatagtaaactattgtattttgtatagtattacattttataatatgtaaagtacattacataatacatttgttatatgtaatgagttaacttggctcctatacatttagaaaggcattggttgtatcctgcctgagggaaaattgagaaaagggtcacataaatcatttttggcagracttatcttgtgagactctagttgaaaaagaatacatcctttattgcacttgtgcaaaaaaagcaagttaacacagcaggcctgggatcactgtcttaaaaaagataactgattgcatcaaacaaaagtagtggcaatgcattggaggtcttataatttaaataaagtaaatgtatgacaaaaaatcacataaaatgctgggggggtgaaagtatttaagattcttttactatctataaagtgctgtaatattaaggtagactgtggtatgtatatagtaaaccacagagcaatcatttaataataacac

SEQ ID NO: 271835 - DNA, 503 bp, Homo sapiens
catagcacctgtcatctccattagtctgacagtgctgacccatggcctggcccagggcagttgtgacagggggtatttgtgcagaaatgaccactgatcgaccagacgtgaatgcccaccctcccaatgagttgtctggccatagtctgctggttgttctgtgaagtggtctgtggtaagaacttggcccaggagtggacagagctaagctcatcagacttgaactccagaayatggattgtggagtagagagaagattgctcagcaggtagagaaaagaaacggcatgcagggaagaagagagacgtcaggagaaatcacgcaggccctgacatagacctggtttctggtgatatcatttgtccaggggcatagaatatagtcctatctgtgattatctacatatgtgtatatactacacttgcctaatactttattcaccttagtaaacagtgtagaaagactaaggggagtaattatgaatgaggtatgataaattccat

SEQ ID NO: 271836 - DNA, 503 bp, Homo sapiens
catagcacctgtcatctccattagtctgacagtgctgacccatggcctggcccagggcagttgtgacagggggtatttgtgcagaaatgaccactgatcgaccagacgtgaatgcccaccctcccaatgagttgtctggccatagtctgctggttgttctgtgaagtggtctgtggtaagaacttggcccaggagtggacagagctaagctcatcagacttgaactccagaacatggattgtggagtagagagaagattgctcagcaggtagagaaargaaacggcatgcagggaagaagagagacgtcaggagaaatcacgcaggccctgacatagacctggtttctggtgatatcatttgtccaggggcatagaatatagtcctatctgtgattatctacatatgtgtatatactacacttgcctaatactttattcaccttagtaaacagtgtagaaagactaaggggagtaattatgaatgaggtatgataaattccat

SEQ ID NO: 271837 - DNA, 503 bp, Homo sapiens
catagcacctgtcatctccattagtctgacagtgctgacccatggcctggcccagggcagttgtgacagggggtatttgtgcagaaatgaccactgatcgaccagacgtgaatgcccaccctcccaatgagttgtctggccatagtctgctggttgttctgtgaagtggtctgtggtaagaacttggcccaggagtggacagagctaagctcatcagacttgaactccagaacatggattgtggagtagagagaagattgctcagcaggtagagaaaagaaacggcatgcagggaagaagagagacgtcaggagaaatcacgcaggccctgacatagacctggtttctggtgatatcatttgtccaggggcatagaatatagtcctatctgtgattrtctacatatgtgtatatactacacttgcctaatactttattcaccttagtaaacagtgtagaaagactaaggggagtaattatgaatgaggtatgataaattccat

SEQ ID NO: 271838 - DNA, 506 bp, Homo sapiens
ttttaataactgcaacaaagggaagtttggcttattatcttgcaattgatttttaattttgctttttgtggacagagaatattctatatgatatagattatttgttgcttgttgagacttttttgtgccttaacaagaggtcaatttttataaatccrtgggtacctgaaaaaaataaatgtgcattttgtgtaactatatttcagcatctatcactgtgcccagaacatagtagagtttatcctaatgttgagttagctttttcacgtgaaacacagtgccttatatagtaactttggaatatctctaacctttttgctttgtgacatacaaatttatggggacacagatgtcccagaaacgtctaactctataatatcacagaaccacaccataagtggactgcatggaaatcttcctgcaactgtctggaggagtgctcctcagatgcgtagtgctggccacctgcatcagggtcactctgaagcttttaaagactgcaatta

SEQ ID NO: 271839 - DNA, 560 bp, Homo sapiens
ataatttttggattaatgttaattctttataaatttgttttggtagatgtagatttaarggttatcagcataactataatgtttggaaccataagcacctctgagaggatgtgtatcagaaattcaggtagacttggacagaaccctggaacactagcaaaatacctgcttttttaatctctctcatttcattttcctattcccaagagacagtatcccagattcatattgttaatttattttcattagtgttaaatagcttttgttgtctagcttaaaaatgtactttttatttttgggaagatatcttccgtaacctaaaaacaagattatagatataaaatgacaagctactggtaaacttcagagggaccagtctatttctttaacatgcctttaatgtaaagcaaagttaacttggatttaaacacttttattttcttcttaaaggatcagggattataaagatcagtcaatatttcaattgtgaggagttagttaaatagaagtataaagttagcaagatcaatgcaatgatcttatgacatgctataacagtt

SEQ ID NO: 271840 - DNA, 483 bp, Homo sapiens
ccttccctctctctttctcgttctcgtttgcgttctctttcttctctctctctctttctcttctcattctctttcttctctttctctctctgatacacacatgctgacacacacacatgmaaacatatacatacacgcaatatgtatatgtgtgtttcataagtcagagctacctgtactctgcagttcttaaaatggttagtctcaagatgattctcttccctacactcactacacaataagatctagtccacttctgtggtttaaatatcaccgtgtgctgaagattcccagttttgtctttagaacctttttgttctttgaatttcagtcttgtaaagctaatgggctattaatcatctctatacatagatatataatcacatcacaattttaatatgtccagaacaaatcattgatttttctacccatacatactcatacctcagtgttacctagctattcagttgcttatcctggaaa

SEQ ID NO: 271841 - DNA, 560 bp, Homo sapiens
ataatttttggattaatgttaattctttataaatttgttttggtagatgtagatttaaaggttatcagcataactataatgtttggaaccatargcacctctgagaggatgtgtatcagaaattcaggtagacttggacagaaccctggaacactagcaaaatacctgcttttttaatctctctcatttcattttcctattcccaagagacagtatcccagattcatattgttaatttattttcattagtgttaaatagcttttgttgtctagcttaaaaatgtactttttatttttgggaagatatcttccgtaacctaaaaacaagattatagatataaaatgacaagctactggtaaacttcagagggaccagtctatttctttaacatgcctttaatgtaaagcaaagttaacttggatttaaacacttttattttcttcttaaaggatcagggattataaagatcagtcaatatttcaattgtgaggagttagttaaatagaagtataaagttagcaagatcaatgcaatgatcttatgacatgctataacagtt

SEQ ID NO: 271842 - DNA, 422 bp, Homo sapiens
acactaattctcttcttgttmtctgcaattattttggatgtatattgaatttttctacacagtcttccatgccccttatactgtctttaatatgttttttattctctttatttgtgctgcttttctgagcacttagaccagattcatcttccaacatactgatctttctctttagctatgtctaatctattgcttaaccaatttattgtgttaattttaataagtaagtatgttttttatttccacaatatctactttctcttttccaagtccacattactgtggccgcatctttaattttattttctatttcttcttatatgtcttaaacacttcaattactattttacagagctatttttatcattgcaaacctttgggatattttttattatttcaaatgtttgttctttattgttgta

SEQ ID NO: 271843 - DNA, 453 bp, Homo sapiens
tgttaattttaataagtaagtatgttttttatttccacaatatctactttctcttttccaagtccacattactgtggccgcatctttaattttattttctatttcttcttatatgtcttaaacacttcaattactattttacagagctatttttatcattgcaaacctttgggatattttttattatttcaaatgtttgttctttattgttgtacttgttcttccttttcaagataggtcattttyctgtatgctttgtattttttttattgtgagcttctcttcaggagggtgtgtgtgtttgtgtgtatgttttaattggagtcccacgtgccttggttggtggagatttttctagtgagaggtttcatgtttgcttttatgtggtactttaggcattttactactctgggaccaaatttcatattcacatccttgttgtgggttaaattg

SEQ ID NO: 271844 - DNA, 618 bp, Homo sapiens
atggccagggacatactcactagaggggatcaggaatgagttgtgttcaggcaatagtagaagatctcagcaagaacaattgtgacacaggctatacttagtattggggttccaagctcagcagtgggggcatagcaggactgagaggagatcttccttgtgaacacagagcttagtcataggaatgggctgtgcagaaggattccccctcctgggaaartagatggcttttaatgaaaagggaactggattactcagcgccagggagagctttgcatggggtcatccagcagttgaattcacattctggttatcggtcaaagagcccctgggatgaatttgggatcctgttggtcagcacctggcccttcagatcccaggtttgggaatgttgtgtaatcctaagccctactaaatttggcacctgggctgtttaaatgtcttacatgtggttcatccatgcctggagaaagatcaaatcttaagaaaagaagagccatggcagggccatttggaatataggctggtagaggcctagaaaggagttgggggctgacaccagcttccttccaggaatttatcaggaacatcatttttcatgcttaggtagcaagtttt

SEQ ID NO: 271845 - DNA, 595 bp, Homo sapiens
tccaaatataataacgtatcatatttgtaatgacacgagaagtaaatgggctgatggaagcaaatatcaaggacacttgttccagtctggtgggagtataagaatgaggtcacagaattgacatttaaactgagacctggaaagtatttaggataaagattagataaaactgttagccatggtggataaaagccagggaagaaatagttgcagaactctaacataggttcrgagagtcatcaagaacaggtaacaaaaggtatagagactatcccaaggctaatgggaagttactgaagggcttcaagcacttcttcttccctcccttcctctctgcctgcttctctccctcattcccttcatccattctttctttgttttttttttttttttgccttttttaaaaaagatgacactgactgccctatcaaaaatggaagaagagggtagattcaataatattttttaagatggactcaatagatcttggccacaagaaatattgagttaagacgtaagaataaaggataaaacccaggtttttcaatccatctatgagaagatagtgatctcactgacaaatctgcagcagaga

SEQ ID NO: 271846 - DNA, 552 bp, Homo sapiens
attgctttgtggttctatgtagctaaacagtaactctaacctgtcattacccttaccacccctgccgctagagtacttgaaaaatgtcagaggataagttaaacatgattcctttgtacctatgcaagccaaccccttattaccctcttttataaaaagtcttattccaattgtatctataccccargtttcatatcaatcaaaaggaattctaggaggaaaattttctcaagccttttattaaataaaaaattactgaagaacctcctcattgtctcataaatctgtaattagaataacttctccactgtccccagctcctgagttcagattctccaaactccgttcttcataatcatttgcaacacataatgcctatgccttagcctcggaagttcaacgcctcctggttggtggttacggccctgcattactgggactcactctacttgtttaaacctgtttccatcacttcctgccatatgcttgtcagccaatcccccaatgtccctctcccctaaaacaaaaacatatctctgctttttaattttg

SEQ ID NO: 271847 - DNA, 575 bp, Homo sapiens
aacctgacatccatagttcataacctggctacaaattgctttttcaactccatctttctcctctcttagatgttctcgtgtttaaaatttccataacattcttaygtttaaaaaaattgaacatatttataatagcttttctgaactccttctcaattttatctctctattatttctgtgtctgtgcctattgactgatttttttatggttgtgggtcacatttttcatgcttctccatatgtccagtgatgttttaatggaaactggacattgtaacatcacattgctgcaagtatctctctctctctctctctctctatttatatatatgataagagagagagaatatatatataaatatatataacacaatatatatttatatactatattagcatatatattactgaataatatagtatatattagcataatatatttatgtattatactagcatatattatattacttaaaatatataaatatatatacaatatgtctctttggggttttatttttctttaagtagtattaaattttcttttggcagtaagttatttatatgtgagctcc

SEQ ID NO: 271848 - DNA, 575 bp, Homo sapiens
aacctgacatccatagttcataacctggctacaaattgctttttcaactccatctttctcctctcttagatgttctcgtgtttaaaatttccataacattcttacgtttaaaaaaattgaacatatttataatagcttttctgaactccttctyaattttatctctctattatttctgtgtctgtgcctattgactgatttttttatggttgtgggtcacatttttcatgcttctccatatgtccagtgatgttttaatggaaactggacattgtaacatcacattgctgcaagtatctctctctctctctctctctctatttatatatatgataagagagagagaatatatatataaatatatataacacaatatatatttatatactatattagcatatatattactgaataatatagtatatattagcataatatatttatgtattatactagcatatattatattacttaaaatatataaatatatatacaatatgtctctttggggttttatttttctttaagtagtattaaattttcttttggcagtaagttatttatatgtgagctcc

SEQ ID NO: 271849 - DNA, 590 bp, Homo sapiens
ttcactatcaaatgaaatcatttttaaatttacaataatctttctgattctgatatgtgtttattgaatacatattataaaaagttaatagcttatcataaatgtgatctcttttctctctmtatatatgtgtgtgtgtgtgcatgtgtgtatacacacatacacacatagacacatatatatgaaaatttttaattcatacatatatactgtgatatacatattctaatgtaatagtacctggtcataaatatcaccccaagtgcttatgaattatacatatctgattagtatgaacttatacctaatcacaagtacttagaaatataatattatctactttttgaaagtcacagaccttactttagagctgttctatatacactgtaaactttaaaaatcagaaaaatagacattaacttgttgatatgattctagttgtgcttcaactctcttttctcatcaaaactatgtcctgaacttaggtatcacagcaactgaaattaaatgaatgggtagagcattgcaattctctggctagagtttctttaaaatgaaattgctttggagaaggattagctcattgattt

SEQ ID NO: 271850 - DNA, 572 bp, Homo sapiens
tacacttttgcaaggcttttacatctcatatctcatgtggaatagtacaatagtaatgctaagtatatgtaataaattaagaatgtatttcacaatccttacaataccctatattgtaactaaataaatagtgcaaagaaatacactaaaaaccagtagagaaactaaaaatgaatctcacaaaatacagctattcaaaaaaggcaagaaaaagggtaagattttaraaacaatggcataactagaaaaaatacagaaaaaaatagtagacataaatccaactatgtaagtaattatattaaatgaaattgaaacactccgattaaaagacagatattgtaagtggatttaaattggaaaaagacccaactccttggcatatatgaggagcaatttaaatgtagggcacagagaagttgaaaataaaagaatggaaaaatatataccataaaaacagtcagataagaaagctagagtggctataataagatcagacaaaataagctttaagataagaaatattatcagcaataaggaaagatattttaaaatgataaaacagtcgattagga

SEQ ID NO: 271851 - DNA, 560 bp, Homo sapiens
tttactctttgaagaatcaccatactgctttccacaatggttgaatgaattactctctcaccaacagtgtgtaaatattcccttttctctgcaacctcaccagcatgttattcttttactttttaattatagacattctgactagtgtgagatggtatctcattgtgatttttattcgcatttctctaatgaatagtgatattgagcttttttcatatgcttgttgcagcataataacmgaatttttcaatcctaaaataaaaagaaatctaatccagacagaaatgtctggaggaaacttgaccattatctcatagacttaataagaaataaacacaagctaatagtctcttgtctaattcataatattatgaaatccaaaaatagatttaatggagataacataggataaaaatataaatagctagactaacctataaattttgttattatcaaaatatttataggaaaaaatcaaacatcataaaatttagagtagcaaattttgacctcagaaaatcagacttcgtagaataataactataaaagagaaaactgta

SEQ ID NO: 271852 - DNA, 620 bp, Homo sapiens
attattttagttatattcctcagagacctttggatttgccttttatcctttctaaacctttattattattattattattattattattattattattattattattttgagacagaatctcactctgtcatccaggctggagtgcataggcrtgatctcagctcactgcagcctccgcctcctgggttcaagcgattctcctgcctcagcctcacgagtagctgggattacaggcacatgccaccatgcccgggtaatttttgtatttttactagagatggggtttcaccatgttggccaggctggtctcgaactcctgacctcaggtgatctgcccacctcagcctcccaaagtgctgggattacaggcatgagccaccttgcctagcccatatcctttctactccaacactcacctgcactgctcctcaagaatctaggttcttccaattccaattcaatctccatattgctatcagagtaatccctctaaaataaagctccagtcacttcatttcacaactttaaaactttataaaactttctgtgatggggtaaatgcacagcatttagcttagtgctaatcagactgcatagccttatcttccactgtttcctgt

SEQ ID NO: 271853 - DNA, 620 bp, Homo sapiens
attattttagttatattcctcagagacctttggatttgccttttatcctttctaaacctttattattattattattattattattattattattattattattattttgagacagaatctcactctgtcatccaggctggagtgcataggcatgatctcagctcactgcagcctccgcctccygggttcaagcgattctcctgcctcagcctcacgagtagctgggattacaggcacatgccaccatgcccgggtaatttttgtatttttactagagatggggtttcaccatgttggccaggctggtctcgaactcctgacctcaggtgatctgcccacctcagcctcccaaagtgctgggattacaggcatgagccaccttgcctagcccatatcctttctactccaacactcacctgcactgctcctcaagaatctaggttcttccaattccaattcaatctccatattgctatcagagtaatccctctaaaataaagctccagtcacttcatttcacaactttaaaactttataaaactttctgtgatggggtaaatgcacagcatttagcttagtgctaatcagactgcatagccttatcttccactgtttcctgt

SEQ ID NO: 271854 - DNA, 620 bp, Homo sapiens
attattttagttatattcctcagagacctttggatttgccttttatcctttctaaacctttattattattattattattattattattattattattattattattttgagacagaatctcactctgtcatccaggctggagtgcataggcatgatctcagctcactgcagcctccgcctcctgsgttcaagcgattctcctgcctcagcctcacgagtagctgggattacaggcacatgccaccatgcccgggtaatttttgtatttttactagagatggggtttcaccatgttggccaggctggtctcgaactcctgacctcaggtgatctgcccacctcagcctcccaaagtgctgggattacaggcatgagccaccttgcctagcccatatcctttctactccaacactcacctgcactgctcctcaagaatctaggttcttccaattccaattcaatctccatattgctatcagagtaatccctctaaaataaagctccagtcacttcatttcacaactttaaaactttataaaactttctgtgatggggtaaatgcacagcatttagcttagtgctaatcagactgcatagccttatcttccactgtttcctgt

SEQ ID NO: 271855 - DNA, 620 bp, Homo sapiens
attattttagttatattcctcagagacctttggatttgccttttatcctttctaaacctttattattattattattattattattattattattattattattattttgagacagaatctcactctgtcatccaggctggagtgcataggcatgatctcagctcactgcagcctccgcctcctgggttcaagcgattctcctgcctcagcctcacgagtagctgggattacaggcacatgccaccatgcccgggtaatttttgtatttttactagagatggggtttcaccatgttggccaggctggtctcgaactcctgasctcaggtgatctgcccacctcagcctcccaaagtgctgggattacaggcatgagccaccttgcctagcccatatcctttctactccaacactcacctgcactgctcctcaagaatctaggttcttccaattccaattcaatctccatattgctatcagagtaatccctctaaaataaagctccagtcacttcatttcacaactttaaaactttataaaactttctgtgatggggtaaatgcacagcatttagcttagtgctaatcagactgcatagccttatcttccactgtttcctgt

SEQ ID NO: 271856 - DNA, 534 bp, Homo sapiens
tgcacagcatttagcttagtgctaatcagactgcatagccttatcttccactgtttcctgtatacttgctacagccatgttgcactgtttgctgaagtcattgagaaatatgtactctctgaagtcatggatctcaaataatatataagcctgctataacttggggttttgttcattttataaaaagagtctgagtctaaagccaaatgcaaacataaaactcaagaaatagatagaaggagataaagatggaaatggaaatagaggtagagaggtrgggaaaagagggcagtaggagagctaacaggattgagactaggatgcagctgtatctgagctagttcacctctagatataaatatctagatctttatgtaaatttagtttttacaataaattcattctctttgtatagactaacttgagttgagtttttgaggtttgcaactaagactcttaaacaatacaataaacctaataaaaattgaattctggtgctgctgttcattattatacaattggtatctgtggttt

SEQ ID NO: 271857 - DNA, 600 bp, Homo sapiens
tatatgatctatatatgagacatatatgatctatatatgagacacatatatatcatatatatgagacacatatatgatatatatgagacacatacatgatatatatatgagacatatatatatgatggtaaagttacaattctgtaatatattaatttaagaaaattgatgtaaattatttctatctcatagktatgcaaaaagttttttcctgatagtaattcaaattactttggtctattaaagaagataaccacagaggctatgttttattgtactgtggaacattaattggttttgctttaacttataaatattacttgatcattttgtgttttgtgattcaatgacatacatttatttttttttgaagtaatatatgagctcacattcatttcatcttatctacctttgaactagttttctcatcctgctggttctcattaatgagctaaaataaaagtttagcatatgcttactattagtataattgtgtgagatttttagcaacattttgaaaattaaacttttgagagtctacaacagagactgctcaacacagagctgtgaaaattgggtccttgatcactcaacacagga

SEQ ID NO: 271858 - DNA, 582 bp, Homo sapiens
aactgccacatctgtatcccgccaagtccaaaacccaaaatgccaactcacacatcctagacaagtggtatattaaggcactacctttcggagtggtttattgggcagaactttataagtgaggttttcaaagatatcatttataggcaagacaatcctttcttttggtataccgtattatacattctgaaaaatgtaaacaggcatctaaccaccactacaaacaagacataaaacatttttatcacctcaaaggttccttcatttatgtttagcagccagtcccctctactactgccagtgactatcagtccctgatcttctctctgtctctatagttttgcctttaccagattatcatctagatagaatcatacrgtatgtagcattttgtgtctgcccttacttagaataatccatttgggataaattcatattgttgcacttatcagtaatttatgcttacaattgctaaatggtatcccattgtgtggctgcaccacagtttgtttatatattctgcagcttatggatgatgggttgtttccagtttggggcagtatgaataaaggtgctgtaaag

SEQ ID NO: 271859 - DNA, 606 bp, Homo sapiens
ggaaaagagctgcgttttgtgaacacatggaattgtcactgttactgagactctttagtcagcaccttcattttacagatggtcaaacaagtgctgagactggatgactttcagcaagtcacatgatcgttccttggcagactcagaacaagaactctgatttcctatttcctaataccactgtgtacgtgggggagagagagcgagagcaagagcaagagagagagagagagagatggagagaaagagagaatgggagagagagagaaagtagagaaatcaggtaaggggaacgggcgaggaatggggaagaggagggggaagaaggggagggaarggaggaaggtggagcaccctattaggagacctggagaggagtcagaacatccaaactcacgttcctgactctttcatcagcctgactaatcaattacactcctcatttttcccttctataaagtaagaagtgcgagtgattattgagatcctttcaaactctaacaatcttctattaagagacattgggaagcataaaccaaaatacagtcatgcatcatgtaatgatgaggatacattctgagaaatgcatcatcaggcaattttgta

SEQ ID NO: 271860 - DNA, 618 bp, Homo sapiens
atgatttgcccacagtcattcaacgcaaagaagtcaaagccatttccagtacttatagttccctcccctggatgctctgtgaattctagttttacaaccctgtcccatgcccacctttcctgaagtgattatatttttgaaataattagtacattatgtagtgtttcttgtttcctaattgcctgtgcatgtctgtatacaacgttgagtgcaagtagtgtttttccagtttaatttgctattcttttgcaataatctatcacttttctttaatggaaccaggttgtaaaagatactattttctcagcttcccagtaaaatctggccctgaggttttatttaattaaccttagccattgtatgcagataacaayctccattttaataagagaataacaagaagaagtcctttgggaagtgaagataggtaagtggcaaaacatttgccatttttccccctaggaaaaaatagatcttattcttcattggttggaggaaaaaaaattaaaagagagaaaaaaaaatctttgtcgctggaagtcgcatttccattcagcagatgtctctcttctgaataatttcaggaaccggagagggatcccctacaggaagtaatta

SEQ ID NO: 271861 - DNA, 504 bp, Homo sapiens
gaggctgagttcgagactgaaaactactgttctagagttttaattggtcacaatgcacaggactcwctgcattttttaataccacattatctattaagactaacatgtagataaaatctacaaaattccagcatgacatactgaagcagtggacttccaccagggatgactatgtcccagacatttgggaatgtctgaagacatttttgttgatcagaacagggaaaggggatgttactggcatataatggatagaaggcagagatgctaagctccctacgctacacaagtcagcttctagcaagaaagaattatccagcccaaattgtcaattgtcttgaggttgagaaaccttgcctaaaggaaggtgactttttctgtttgtcagtaacctatctgtaagatctactgaactgaattgcaaggctcccaaaaggtaaaaggaggttcagtacagttttctgtaaaaacattagtaaggaactagctgattgttaaaaatca

SEQ ID NO: 271862 - DNA, 578 bp, Homo sapiens
agtcaatgggcaagattgtaatatcgatgttgggaatataaataaggaaactattttggaaaacaatttagcatactctaataaatttgaacatatgcaaaggctataaaaccagcaatctcccctgtagagaaatccttgccacactttacaaggagatgtacaaacatgcataaatgcattgcttataataaaaaccatggaaccaacctaaatctctatagactttagtatgagtaaatatattgtagtttattccacaatggaatattataaagcagtggaaatgaaggcattgtagctacacatatccatatgaatatgtagcaatgtatatcagtacctaatgccacacaaaaaagtcatgggaaaacagtcactgtgatttaatccttttaaaaatgtattataaaacatgtaagtayaaaaacatgtcaaataaaatgagatcttgtttacaggaacttatataaatagaaaactatgaagaaaaacaaaaatgattaatgataatacagatattaactacctccagaaggaggtaggaggaaacagtcaggtactgatacccagagagc

SEQ ID NO: 271863 - DNA, 569 bp, Homo sapiens
gcctttttttcactcttcttaggctgtagttattaaatctgacaccacaaatttaatatataaaaaataaatataaatttatttttctgtgacattaatattctacagttgaaattgatttctagttgagctcacatttcacctaccggcagaagcttaagtttagccaatttactgtatctacagttaaaatattttgttccactcccctatacctttttaacttagatttgcctctattttccatagggtataggtgtgcacagaactgacatttgtgagacgtgcaaatctggtctatggtttaactatgctgatgctactgagatgggtgttttccacctggtctccagctataagccaatgcagctcactctatatcttctttatactatccattagatgccttcaggacctgagccatggaaaaatgttacttttttctcttttctcttctgaggytgtctcactatgtctcagtagatctgtctcaaacctatctgagatacatcaagaacatatttcttatcttccactttcatgctctatagggatataagtggactgct

SEQ ID NO: 271864 - DNA, 617 bp, Homo sapiens
gaaatgcccagtgagggcatttgtgaagaacaatgaagataatattttgactgagaaaaccatctaactttgagagaataaattttttttaaaaaaattatttttctgagtacatcaaaaccagattatgatgggccctacatgcataattaagggatcactatatctccatttacatttataattagggcttcccaaagatctttacattttttgaatctcatgacgtgtttgttttcaaacataccccagatcacattgttttgggggtggtggggggcaggggagatgactttagcggtagtaataaatcacctaacagtattctgcacatagcaagyattcaataagtagtagttgatattattatatttcattaaccattaagaaaagattttagtggtaactgagaaaagtagtaaataagtcacctaacacagtattctacacataacaggcattcaataagtagtagttgacattattattatatttcattaagcattaagaaaagattttagtggcattgtaatcaggcaagcagaaagggttgaaccctatggacatgaaaaaatagtgaaacaagaattacaatttgattaatagctgcacacatg

SEQ ID NO: 271865 - DNA, 617 bp, Homo sapiens
gaaatgcccagtgagggcatttgtgaagaacaatgaagataatattttgactgagaaaaccatctaactttgagagaataaattttttttaaaaaaattatttttctgagtacatcaaaaccagattatgatgggccctacatgcataattaagggatcactatatctccatttacatttataattagggcttcccaaagatctttacattttttgaatctcatgacgtgtttgttttcaaacataccccagatcacattgttttgggggtggtggggggcaggggagatgactttagcggtagtaataaatcacctaacagtattctgcacatagcaagcattcaataagtagtagttgatattattatatttcattaaccattaagaaaagattttagtggtaactgagaaaagtagtaaataagtcacctaacacagtattctacacataacaggcattcaataagtagtagttgacattattattatatttcattaagcattaagaaaagattttagtggcattgtaatcaggcaagcagaaakggttgaaccctatggacatgaaaaaatagtgaaacaagaattacaatttgattaatagctgcacacatg

SEQ ID NO: 271866 - DNA, 529 bp, Homo sapiens
tcagaacctacaaacctgataaagttttctatgtattcctcttttatcaaagctttgggaattcaaaaggcacatcacatgcctgtctcacacagatacatttcttcattatgaagtctttaggactgatgtattagtgaaggttactgtgaaaaacattttacatttttaaatggagtcattcacgtaggctgttctaggtattcgtgaaaatgccgtgctgcatgtggaaattgagcagcaaaagagggatagaaaacgtaaaaataatgaaaggaaggaatgggaagggaaggkaagggaagggaagggaaaggaaaggaaaggaaaggaagacttcatttagcttgagtgaaaatgctaattgttacatgccttcccagcagtctcagtcttacaactgcgatttattgtgggacccctgctagcttggccaggtgccaaatgactgcaaaattatgtagttatcttatcaatttatttctaccttctgcagtccctcttcatcagcagccacactgcactgatt

SEQ ID NO: 271867 - DNA, 617 bp, Homo sapiens
ccctggtgactctaatatgtaatcagggtagagattctattctacgacatctttgttcttaaaccccatgaagctcttttgtctttatttggcctttatttggcccaaactcatcattgcctttgttctttagttctcagctaaggaatattaaggtcatatcttttggctcctatgctattaaaagcataaaatcaaatgtgggcactaaaatcaagtgtctatattcagttcaaggtggtcagtcatattcaaattataattttataaaattttttttkattataatgaaaatgaaaatataatattaaaataaaaattcaatggaaattttagggccagactgtaagtattttaaacttttcctgctatatactctctacttcaactattcaaccccaccactgcagtgcaaaagcagccataggtaacatgttaaaatgaatgggcatagctatattccaattaagttttattaacaaaagcaggccatgtttcatacaatcctgacctaggttattcccttaactgctgtgtagtattccactgtataaatatagcacagtttatttattcgttctcacagtgggagaaatttaagttggttccaacttaac

SEQ ID NO: 271868 - DNA, 484 bp, Homo sapiens
attagtattatggagtgagttcatagatcacaaacaataaaaagctatttctaatggtgcttggtgataattttgttaagagatattcaaaggttgctattaagacttgtttattttaaattgtgaaataaatgarcacatttcccagaagtctttaaatattaacaatgagaatgctttggtggttttaaattatcttctgcttgacagtgccaaagctacttcctgaacatcacatcagataattcctgaccccagggttcacccgtttatactaaaattatcaagtcttacaacttaaagaaacatgaataaatgttaaattcagcgcacttactctaaagaattccttcctaaaatgggaatatttccagtcaattatgtgtagctaaaatgagtagtggctgttagagaaagacctttcaaatatttttctttctgatatcttgattcattcatcaaatatttattgcatgcataccac

SEQ ID NO: 271869 - DNA, 577 bp, Homo sapiens
ccctttgcctggaatgtgccatctccttatctacctaaaaaaagtaaaagaaaaaatctgaatctctgagttaaggagtttttggtgaaaaccttttgttcactttgcaaaggaagattgtttttcactcatgtctakatcttgttcatggtatcactgtgactcttatcacagtgctgcacagtttatttcattgataggatattcagctacactttgagccattagaacatccaggttggttttattcctcttattcccagatgctagcacagtgcctggcacgttggaggcacttcgtcaatgtccattaaatggttgatggattatttagttgatttatgtttttctctctttttttgttctttagctaagtgaagaaagaaatcactcatagggtagaatacaaccatgttggcatgtccacagctatgtgaaataaagatttgggtcattgttagcatcatgaggagaagcagggacatttataaaggaacatctgagcagtgatcttttattttctgtctgacattgctagatagaaaaatttcacttgaccttcaagtattatttattc

SEQ ID NO: 271870 - DNA, 577 bp, Homo sapiens
ccctttgcctggaatgtgccatctccttatctacctaaaaaaagtaaaagaaaaaatctgaatctctgagttaaggagtttttggtgaaaaccttttgttcactttgcaaaggaagattgtttttcactcatgtctagatcttgttcatggtatcactgtgactcttatcacagtgctgcacagtttatttcattgataggatattcagctacactttgagccattagaacatccaggttggttttattcctcttattcccagatgctagcacagtgcctggcacgttggaggcacttcgtcaatgtccattaaatggttgatggattatttagttgatttatgtttttctctctttttttgttctttagctaagtgaagaaagaaatcactcatagggtagaatacaaccatgttgkcatgtccacagctatgtgaaataaagatttgggtcattgttagcatcatgaggagaagcagggacatttataaaggaacatctgagcagtgatcttttattttctgtctgacattgctagatagaaaaatttcacttgaccttcaagtattatttattc

SEQ ID NO: 271871 - DNA, 515 bp, Homo sapiens
tttaatttttttcttagggctttgaacctatatgagtccagagttaattttgttacacaatagattttttttttttaagaatggttcctgcatgcatatccccaccaagttttcttctgagagttgaaatgttgtctggtcgaaagatatgagaagctactaagttattgcttagtcatttcctcatgaagataatttttgcttttattggcattggctgacccttcatgaggaagataaacataagattttcrcaatcagttatactcagaacagaaatactagagaaggtgcaggaagaggacaatgatgactataaaagcagaagaaagtaggacttacaaagaaagatcaaagcaagtggagtccctttatctgatcaggaggcatgtaagggcatgaagacatttcaaagaaaagtcactaaacagacttcttggaaagttaaaatgatgaaggtagaaaatggttccagtctctagaattttaaactctgaagaaaaacagaagtttga

SEQ ID NO: 271872 - DNA, 605 bp, Homo sapiens
ccttttgtcctgcagtgtgatggatttaggccaacccttgggtcactttaggacacttaggtttttaagcattgaattaagtatgtctctagagtttattatcatttggagtaaaacactctgaagtttgagggcaaagtaatattatctttagcctgaattgataaaatatgtcctcaatgacaaaaggtgggaaaaaattttatgacaggtcttcctgcttgatggttttaggtagttggtgaaagcagaatgaagatcccaaattaaacccaagatttgtgcagggttgggtttcacatgaatctgaaaataactagaagtttggttgtaaaggtggcccaaattatatttgcctgtgggaaattagaggagagagagcaagcaagcagacaaatttggtccaccagccaatcctyagttaatagacatgaagagaaaactctatatgagatatgatgattgcctctcctgttcctaggcccagaattaagtctagaaaaggggtttaagtctagaaaagtgaaagggctagcaggtggagaaaagccaaaaaataaaggtcttaacgtttattttaattaaaattccttaagatgttgggc

SEQ ID NO: 271873 - DNA, 517 bp, Homo sapiens
tggagaaaagccaaaaaataaaggtcttaacgtttattttaattaaaattccttaagatgttgggctcttagtaaaactattttgagattcatatgtctaaatgtgacacaaaatagggagaaacatgaagcccacatttgtgcacaaaatagtcgtggctttagcatcctgagtaaccyaccgtgtaccactttgacatgctgagcattccagcagaggtgtttggtacaggcagggccaccagcagaggtggcattgccaagagggaggtgaccatagtgggtaacataggcaattatttcccggctgcttatcagcagctgaggtcttggcagtcgacattgagaagggccaggacttttcgggaagcacacgtgagacactctggaagatgtctcaagatcactggaaaattgttgtcacttttaccagtatgtgggacggaagtgaaactaaataaagtttaggttactctagctgtgcactgggcaatggtggatgaagaaatactggtgc

SEQ ID NO: 271874 - DNA, 638 bp, Homo sapiens
aaaaccagttcagtatcagttgtctcatcatggctgttggcagaaacctccctgggtaccttttgaagtcctgtcaaggagaaccttactaagttgttataggtcatggtaccttctttccagtatatggtaagagaatggttacctcctggtggggtagaatactaaaatgaaaaatcctaagacaaattaataacaagcaagaatcaaagtttatgtctaatttgcttcaaaggagtagattctaagaagayaaactcaaaattttctcctttttataaaaaataaaggaggtagtaaagaaatgtccagttaaaaaaaatttaacttctgtttgtagtatgattgggtaattaactccccaggagaaattgtaatcttattaaatctatcagaaaattgcttattttctctgaaatgctaattactttccagaagaagataataaatgatattagttaacatacttctatctactttacattttgaacagcttttttttttttttgtaattataatcctcacttccttataacaagtgtcatagctctaggaaggaaaatgaagcctggggcaagcaatggtgatacccttcatttcactactaaatcaactctgtggtcatccccagcctcaaa

SEQ ID NO: 271875 - DNA, 638 bp, Homo sapiens
aaaaccagttcagtatcagttgtctcatcatggctgttggcagaaacctccctgggtaccttttgaagtcctgtcaaggagaaccttactaagttgttataggtcatggtaccttctttccagtatatggtaagagaatggttacctcctggtggggtagaatactaaaatgaaaaatcctaagacaaattaataacaagcaagaatcaaagtttatgtctaatttgcttcaaaggagtagattctaagaagataaactcaaaattttctcctttttataaaaaataaaggaggtagtaaagaaatgtccagttaaaaaaaatttaacttctgtttgtagtatgawtgggtaattaactccccaggagaaattgtaatcttattaaatctatcagaaaattgcttattttctctgaaatgctaattactttccagaagaagataataaatgatattagttaacatacttctatctactttacattttgaacagcttttttttttttttgtaattataatcctcacttccttataacaagtgtcatagctctaggaaggaaaatgaagcctggggcaagcaatggtgatacccttcatttcactactaaatcaactctgtggtcatccccagcctcaaa

SEQ ID NO: 271876 - DNA, 588 bp, Homo sapiens
actggactgaatcatgctcaggttctcagtgcaaaggaagctggtaaagtgaataacagcactgtcaatctgttgagtgggagcaaggctctcccaactaagatgggggataggaatggcaattaagtaggtgacagccattttatatgtgggaagaaaacagaggatataaaacttgccccaggtcacagagctcataagcaaccgagctgggtcaaaaactcacattcttcacaatcatgctataatgtactcactccagagagtcagcctgggatctaaccatctcttggaatagcctgcaaatataagacaaccaaagtatgatctggggctcaggggacgacacactggtgtgtcttccatcatgtttctgccttctagcttttcactaggcaggcttatgtagaaggcagagagtgaaattttctgmgtgccctaaattctctttccagctttccatttgacattggagcatcttttttatctctgagtaactggaaaagtccgtcattgccattctaaaacacattttatgtgataagtccctataaaacatcgaggaagcctctttgattttaatacttc

SEQ ID NO: 271877 - DNA, 588 bp, Homo sapiens
actggactgaatcatgctcaggttctcagtgcaaaggaagctggtaaagtgaataacagcactgtcaatctgttgagtgggagcaaggctctcccaactaagatgggggataggaatggcaattaagtaggtgacagccattttatatgtgggaagaaaacagaggatataaaacttgccccaggtcacagagctcataagcaaccgagctgggtcaaaaactcacattcttcacaatcatgctataatgtactcactccagagagtcagcctgggatctaaccatctcttggaatagcctgcaaatataagacaaccaaagtatgatctggggctcaggggacgacacactggtgtgtcttccatcatgtttctgccttctagcttttcactaggcaggcttatgtagaaggcagagagtgaaattttctgaktgccctaaattctctttccagctttccatttgacattggagcatcttttttatctctgagtaactggaaaagtccgtcattgccattctaaaacacattttatgtgataagtccctataaaacatcgaggaagcctctttgattttaatacttc

SEQ ID NO: 271878 - DNA, 561 bp, Homo sapiens
aatcatggtgtcagcatgtttggtttcttctaaggcttctcttcttggcttgcagatggcctctgctgtggactgagtatttgtgtttcccgaaaattcatatgttgaagccaaaattctcaatgtggtcacatttggaggtgtggatttggaaggtaattaggtcatgatggtggagccctcgtgaatgggattagtacccttatacgaaaagacatgagcgatattactctctctctctcagccacatgaagataaaatgagaaagcagctatctgcaagccaggaagaatactcttaccagacaccagatctaacagcaccttgatcttggacttcctggtttctagaaytgtgagaaataaatttctattttttggaacaccaagtttatggtattctgttagcaacctcaacttactgagacaactgctttcttgctatgtcctcacatggccttttctctgtttacacacatacgtggtgactctcactgtgggtgccacagatcggcacatcaaacaaaggcatatgctaaagcacagaacggatcacataaat

SEQ ID NO: 271879 - DNA, 587 bp, Homo sapiens
attttgttgctgttgagttatctagttgtgctggttcttttctagctgttgcctgttgactacttaggttaattttctattcttctctgtcttgctttgcacactagattgatgcaattaacagaccccctcgatagctggcatcagtttgaatttcatcaatgagagacagtggcaggagacaggatggcaaaaggaggtggtttgggtgtttgtccctcactttttaaagtgcctctgatagcagctgcatcccttcatgactgcagcccactagacattttctccatggctccagctcttgctctgatattactgtcttctgcctttatttcttcaaccctcatggtgataacacctttctactgtggctagtctcatcactgcctttttaatttttatttttaaatctcagcacaaactttttaaagtagtccttttattaatgttttycatttgaacaatctggagtgaattctgtttcatgtgtaaatagtgactgataggttaattagcaaattagtttggagaaaaagacaccttttcttcattgagaaaggtgccacaaaaatcacccacgttaaggc

SEQ ID NO: 271880 - DNA, 475 bp, Homo sapiens
ggctgtatggggatcctgaggaaaggtgagtaaaaggtggaccccaaaaaatctctttcactttcgttgctgagccttctcatcctcagacttcttctctaaacagatgtagcaccgggcttctgttagccaattaagaatgaagggcatggctgcagaagctgccatccacccccgtcacactcagaggttgagaatatgggcctcattccaacccagtcttttctatggcatttttcttcttccttttggggctgttacagcacctatcttttcttttacaatattgggggtgttattgcaaactgtagagatattacragatagaaagggtctttggcctagccatcagacagacatgcaatttagaacaacgcaatttccgtgtgttcttaagcatgttcccctccactccaggctgaggcgcatggccatgtctgcctcatgtgcatgcagcgcccaacggccacacagc

SEQ ID NO: 271881 - DNA, 475 bp, Homo sapiens
ggctgtatggggatcctgaggaaaggtgagtaaaaggtggaccccaaaaaatctctttcactttcgttgctgagccttctcatcctcagacttcttctctaaacagatgtagcaccgggcttctgttagccaattaagaatgaagggcatggctgcagaagctgccatccacccccgtcacactcagaggttgagaatatgggcctcattccaacccagtcttttctatggcatttttcttcttccttttggggctgttacagcacctatcttttcttttacaatattgggggtgttattgcaaactgtagagatattacaagatagaaagggtctttggccyagccatcagacagacatgcaatttagaacaacgcaatttccgtgtgttcttaagcatgttcccctccactccaggctgaggcgcatggccatgtctgcctcatgtgcatgcagcgcccaacggccacacagc

SEQ ID NO: 271882 - DNA, 630 bp, Homo sapiens
gaaaagttagtgggatcatggcagtgatctcattagaaataacatttctacagatgattatgtgcaagttggcacatagcctggtacagtgggaaggatgttgctttagaactgaggtaccactgttttgtcttataactgacttttggcaaatcacttaacctccttgatacctccttcatctctttctgcatctccttgatggagaaaataatcgctacctttcagaatttgtatgaagcaaacataaaaagtgatctgaaaatgtctggcacataatggaaatctggcagaagttaattttcttcccaacaggctttatgattytagactagaggatggaatggtgatcagccagggaaagtttagatttggtccaaaaactgttatctgtaatgggtttcctcaagagaaattgctggctcattgtggaagttgactaagtgcagtatttcagatagaaaacaaactgagtgaactatttgaccccttgtcctttacctaacatggagtgatgaaagtattcatacaggcttatagaaagttccttcggaatcactcaagccacaagcagtttttagtaaatgccagtatccattaacctggtctatagcaaacactagtgaccgg

SEQ ID NO: 271883 - DNA, 608 bp, Homo sapiens
agcttgtcacaaagatcccaacaactctgtctaatacacttcccattagctctctttccctgtatactgctgtattgttcttcatagtacctgatatatagttattttttgtttgttttttcctatctcttccaactagaacaaaactttccaaagaaagttatccagtttgttcactactttatctccagtgcctaaagtagtgccagacatatgaatgtgagtagatgagcaaaagtaacacatgtggtgaaaattggctagagatgcacaaaagccatttcttctttgtaggactatggttaatttaacattcaccagcaccttaagtctaggtagtaaccatgacaggttttcaccaatgggaggggtgtattttaccatttaattttattgagaccatattttaaacatgatgaagctgtacaaaggagcctgtgtccttaagctgccatgtggaagacagctcactgaaccccattggctgagatgtgagcaagaaaaacacctcaagttgtattaagtcactaagaattgaggatcacttgttatagcagttarcctttcctaaccttgaaaatcctattaaagctaaaagtatttagatt

SEQ ID NO: 271884 - DNA, 472 bp, Homo sapiens
gctgggtgtgtacaggaaggccaaggtgtctacactttgcaggacagartaccaaataaaagaaatctatatgcagggatccccagacatttatcttcatagggtccctcttaaatcttcagctgactgttggttagcatatttttctgagaaaactatcaaggctgggaatgtagccaccagagaaaattagagaaagtgcccagagttctaaagggccagaaatactgcctcttaccaccaactggtatgtagccccctcataattcatgaggtactggatagcatactcagaagacttttatctcattatgctgctctcagcttgcctagcaaagcttgagaacaagacttaaatagatcaaactgtttttaagtaacttatctacatcttagaacaagatttggaatatgtgcaggaatacaaaaatatccatcccccagaaaggtaaaatgtataatgtctggcatc

SEQ ID NO: 271885 - DNA, 472 bp, Homo sapiens
gctgggtgtgtacaggaaggccaaggtgtctacactttgcaggacagagtaccaaataaaagaaatctatatgcagggatccccagacatttatcttcatagggtccctcttaaatcttcagctgactgttggttagcatatttttctgagaaaactatcaaggctgggaatgtagccaccagagaaaattagagaaagtgcccagagttctaaagggccagaaatactgcctcttaccaccaactggtatgtagccccctcataattcatgaggtactggatagcatactcagaagacttttatctcattatgctgctctcagcttgcctagcaaagcttgagaacaagacttaaatagatcaaactgtttttaagtaacttatctacatcttagaacaagatttggratatgtgcaggaatacaaaaatatccatcccccagaaaggtaaaatgtataatgtctggcatc

SEQ ID NO: 271886 - DNA, 574 bp, Homo sapiens
gatccggaatgacacagaggagacagatgatagttaataagaacactaaaccagttattgtaactatagttcatatgtgcaagaagctagagaaaagatttaagatgttaagcagaattgtgaggatatgtatttttttgaaagacccaaatcaaacttctaaagataaaaactacataaagagaagaaaagattagttaacaccaaaacatagcaatcgaaactatcaaaagggaaacaaacaggaaaaagaaagcactgaaaaagaagagtatcagtgagckgtgggacaattttaatggcctaatatacatgtaattggagtttacaatgggagtagggaaagaaaaaactatctggagacatgagacaaaaaactttctattgataaaaattaaaggtcaacataactgagaagctcaatgaactcaaatgacaagatacataaggaaaattgcagcaccacatattataattgatttccttaaaacaagtggtaaagagaaaatgttaaaagtagtcatagaacaaagaaacattttatgtagaggaaaaaagataaggatgagagcag

SEQ ID NO: 271887 - DNA, 574 bp, Homo sapiens
gatccggaatgacacagaggagacagatgatagttaataagaacactaaaccagttattgtaactatagttcatatgtgcaagaagctagagaaaagatttaagatgttaagcagaattgtgaggatatgtatttttttgaaagacccaaatcaaacttctaaagataaaaactacataaagagaagaaaagattagttaacaccaaaacatagcaatcgaaactatcaaaagggaaacaaacaggaaaaagaaagcactgaaaaagaagagtatcagtgagctgtgggacaattttaatggcctaatatacatgtaattggagtttacaatgggagkagggaaagaaaaaactatctggagacatgagacaaaaaactttctattgataaaaattaaaggtcaacataactgagaagctcaatgaactcaaatgacaagatacataaggaaaattgcagcaccacatattataattgatttccttaaaacaagtggtaaagagaaaatgttaaaagtagtcatagaacaaagaaacattttatgtagaggaaaaaagataaggatgagagcag

SEQ ID NO: 271888 - DNA, 574 bp, Homo sapiens
gatccggaatgacacagaggagacagatgatagttaataagaacactaaaccagttattgtaactatagttcatatgtgcaagaagctagagaaaagatttaagatgttaagcagaattgtgaggatatgtatttttttgaaagacccaaatcaaacttctaaagataaaaactacataaagagaagaaaagattagttaacaccaaaacatagcaatcgaaactatcaaaagggaaacaaacaggaaaaagaaagcactgaaaaagaagagtatcagtgagctgtgggacaattttaatggcctaatatacatgtaattggagtttacaatgggagtagggaaagaaaaaactatctggagacatgagacaaaaaactttctrttgataaaaattaaaggtcaacataactgagaagctcaatgaactcaaatgacaagatacataaggaaaattgcagcaccacatattataattgatttccttaaaacaagtggtaaagagaaaatgttaaaagtagtcatagaacaaagaaacattttatgtagaggaaaaaagataaggatgagagcag

SEQ ID NO: 271889 - DNA, 511 bp, Homo sapiens
tataaatataagaaacatgttcaacataattcgttattcaaaaaatgcaaataaaaccatatgtgacactactacccatctattgggatgtcgaaaatttaaaagaataatcatgtcaagtgttgttgagggtgtaaagaaacaaactcctataatgctgctgaaaatgtaaaatgtcccaatcwgtttggaaaacagtttggaagcttcttaaaaagttaaacatatgcctaccctataacacagctatttcacttccaagtatttacacatgacaagtgaaagcctacctccacacttttacatgcatgttcatagcagttttagttgtcagggttctaaattggaaaatatccatatgcccatcaacagatgaatggataaataaatgatgatacatctaaacaacagattagtactcctcaaaaaagggaatgaactactgatacacaaaaacatggctaaatctctaattatgccgaatgaaaatggccagacaaaaaaagagtac

SEQ ID NO: 271890 - DNA, 511 bp, Homo sapiens
tataaatataagaaacatgttcaacataattcgttattcaaaaaatgcaaataaaaccatatgtgacactactacccatctattgggatgtcgaaaatttaaaagaataatcatgtcaagtgttgttgagggtgtaaagaaacaaactcctataatgctgctgaaaatgtaaaatgtcccaatcagtttggaaaacagtttggaagcttcttaaaaagttaaacatatgcctaccctataacacagctatttcacttccaagtatttacacatgacaagtgaaagcctacctccacacttttacatgcatgttcatagcagttttagttgtcagggktctaaattggaaaatatccatatgcccatcaacagatgaatggataaataaatgatgatacatctaaacaacagattagtactcctcaaaaaagggaatgaactactgatacacaaaaacatggctaaatctctaattatgccgaatgaaaatggccagacaaaaaaagagtac

SEQ ID NO: 271891 - DNA, 511 bp, Homo sapiens
tataaatataagaaacatgttcaacataattcgttattcaaaaaatgcaaataaaaccatatgtgacactactacccatctattgggatgtcgaaaatttaaaagaataatcatgtcaagtgttgttgagggtgtaaagaaacaaactcctataatgctgctgaaaatgtaaaatgtcccaatcagtttggaaaacagtttggaagcttcttaaaaagttaaacatatgcctaccctataacacagctatttcacttccaagtatttacacatgacaagtgaaagcctacctccacacttttacatgcatgttcatagcagttttagttgtcagggttctaaattggaaaatatccatatgcccatcaacagatgaatggataaataaatgatgatacatctaaayaacagattagtactcctcaaaaaagggaatgaactactgatacacaaaaacatggctaaatctctaattatgccgaatgaaaatggccagacaaaaaaagagtac

SEQ ID NO: 271892 - DNA, 576 bp, Homo sapiens
tttttaactctattttaaatattttgtggaattctcctgttaaactgcctgggcctggagatctattttatgggagttgtatattgatttttagtttgaggatttgatataaatgtggtaataaatatggagtgtaacacataagtagcaatttttctcaatagggtggtgtagcaggtgtgttagcaaatcacctcatttcttttggacctttataccatttctctgcacagctgcctgtcttcgaatggccagaacctgcatctttgctagcaggctgyattgaaacccacatagctcacatgtaaggttgacaggaaagactgagaattaaatctcccgttgcccccaagcctttaaccaaaaactgacaagtacaggaatataaataccccagtttccctgcccttcactagataacgctgaggagtatattttgcatcacttctagagtttttctgcaggattaggctccagttatccattacagaaaccagctttataataccccctttattgtttgcctttcctctccctagctctctacccctcacctacttgtgtttcttatgcttg

SEQ ID NO: 271893 - DNA, 574 bp, Homo sapiens
acttttttactctactttttcacttcccttgaaattggatgggggctttgttactgccccagtgaatagaatgaggcagaagtgatgatgtataattctgaggctaggctataaagtgtgatccagtttccatttgtctctttctcttgggatgggacttaacagccatcatactgtgaggaaggccaggctgcatggggctgccarttcagagaactgaaacttcatccctcagctctgctgagtttccagctcacagccagcaacaatttgtcatttatattagaaataaattccccagcttctagttaagagatcccagctaatgccacataaaatagaaatgagccttctccacccaaacctacccaagttacagttttgtgagcaaaatacattattgttattgtctctagttattcagttttagggtggtttgtaacaaacaaaagttgttacaaatctacctaataagcagtctttaggaccagtttggtcaatatgagacaaacatcaaataacaatagtatctgaaagcttgaggaagatctgtgtccagataatatcttcaaag

SEQ ID NO: 271894 - DNA, 537 bp, Homo sapiens
ttgaggcccacaaggaattttcttgtaggcaaattgtgagagaggtatgcagcttttttttttttttttttttaaatctttggagctatcttattaaggaataaaatgggaggcaggtttacctgatgcagttcctagcttgacttttccctttggctcagtgattatggggtcccaaaatttattttcttttcacaatacataagctctatctgatttcttctttaaaactttacttgtggatttattcaatgcaaagtcttgcatactgatgaaatttaragttgagagactgcaggttaacattcagaaaattattctgtataataaaagagacactaaccagttaatttcaaacttggcaagcctatgattgcctagtacttctctggatgcctgtgtgtttctactaattcataacatggtagaacatgggccagaatgtgagaggaaaaaaatgatctattctaacagtttctaactatccaatcttttttgagagaaagtcttcaagaacctagcgtcaattttgtaaat

SEQ ID NO: 271895 - DNA, 585 bp, Homo sapiens
agaggaccgcaagaggagatgagtttaagagggaytttttccactctcagggaaatcctagccttgatttctgtgccaggcaaaattccaatttctttagggaagactcaattttttgagcctgtaatagcactgtggaagaaatcttgatatctgacttctcacctaagatctgctaagaactagttattcaacattttaaaagcatgtgcactttgacataccaattccacttctaggaatttattcctcaagcattctttcacacatgtacaaaatatcatttggacaatattaaatgctacattttaggaagagctagagtttgtaaacaagaaaattttagcattatgggactcgctaaataagttctggtacatccatatactgaaatattatacaaccaataaagtgaataaagctattccatacacaagtgccaggtgtgtcccacaaaccctggccaatggattaaatgagtactcagacacaggtatgcagtgtaagagagctaggtgactgcctggctctagtggccagaaaccagctccaagaagctggagctgcttgcttttattcagtgca

SEQ ID NO: 271896 - DNA, 585 bp, Homo sapiens
agaggaccgcaagaggagatgagtttaagagggattttttccactctcagggaaatcctagccttgatttctrtgccaggcaaaattccaatttctttagggaagactcaattttttgagcctgtaatagcactgtggaagaaatcttgatatctgacttctcacctaagatctgctaagaactagttattcaacattttaaaagcatgtgcactttgacataccaattccacttctaggaatttattcctcaagcattctttcacacatgtacaaaatatcatttggacaatattaaatgctacattttaggaagagctagagtttgtaaacaagaaaattttagcattatgggactcgctaaataagttctggtacatccatatactgaaatattatacaaccaataaagtgaataaagctattccatacacaagtgccaggtgtgtcccacaaaccctggccaatggattaaatgagtactcagacacaggtatgcagtgtaagagagctaggtgactgcctggctctagtggccagaaaccagctccaagaagctggagctgcttgcttttattcagtgca

SEQ ID NO: 271897 - DNA, 585 bp, Homo sapiens
agaggaccgcaagaggagatgagtttaagagggattttttccactctcagggaaatcctagccttgatttctgtgccaggcaaaattccartttctttagggaagactcaattttttgagcctgtaatagcactgtggaagaaatcttgatatctgacttctcacctaagatctgctaagaactagttattcaacattttaaaagcatgtgcactttgacataccaattccacttctaggaatttattcctcaagcattctttcacacatgtacaaaatatcatttggacaatattaaatgctacattttaggaagagctagagtttgtaaacaagaaaattttagcattatgggactcgctaaataagttctggtacatccatatactgaaatattatacaaccaataaagtgaataaagctattccatacacaagtgccaggtgtgtcccacaaaccctggccaatggattaaatgagtactcagacacaggtatgcagtgtaagagagctaggtgactgcctggctctagtggccagaaaccagctccaagaagctggagctgcttgcttttattcagtgca

SEQ ID NO: 271898 - DNA, 585 bp, Homo sapiens
agaggaccgcaagaggagatgagtttaagagggattttttccactctcagggaaatcctagccttgatttctgtgccaggcaaaattccaatttctttagggaagactcaattttttgagcctgtaatagcactgtggaagaaatcttgatatctgacttctcacctaagatctgctaagaactagttattcaacattttaaaagcatgtgcactttgacataccaattccacttctaggaatttattcctcaagcattctttcacacatgtacaaaatatcatttggacaatattaaatgctacattttaggaagagctagagtttgtaaacaagaaaattttagcattatgggactcgctaaataagttctggtacatccatatactgaaatattatacaaccaataaagtgaataaagctattccatacacaagtgccaggtgtgtcccacaaaccctggccaatggattaaatgagtactcagacacaggyatgcagtgtaagagagctaggtgactgcctggctctagtggccagaaaccagctccaagaagctggagctgcttgcttttattcagtgca

SEQ ID NO: 271899 - DNA, 639 bp, Homo sapiens
tttacactttctttggcatctatccagtcaatatgtatgccttgttttcatgcacattctgaaagttaaggttagattcctatttayattttttatactcaacctaatgtctaatccttggtggtcatttttgaacttgtatagtaattttttttaatctaaaatgttgatcaatttcaaaattatctgtaaatttacctctacatataaatcttttattctactcctgacctatactgttatcattactagttaagagcaagactattttgctttattttttcgttgttgttgttctgtatgtgtgctgctttggtttggtttcttccagacattttaggattggcatcatgttaatagtaattaactacttttttgggttttgctcctactgcagtcatagtcgcaaactacattatttgctgtcaatttggcactactgccaccgtactctaaggctgggaattatatttctcagaatcttcctccacgtatggtgtttgacaatgaaaggagctggtgtctgatttgaaaagtgaatgcaaagcagtaatcattattttctggaggcaagtacagccagatgtgtaggaagacaagagtttcacagcagctttctggtaactccaaaatatgacc

SEQ ID NO: 271900 - DNA, 608 bp, Homo sapiens
aaataacatccattctattgaatgtgggcaggaggtagaagacacaaagaataccatttctgccaaatgataaaataacttggatctttcagtgcttatagagtacacatcccaagatgccaaaagctgaagaggtggtaatgaaagggtagcttcaagggctaaaagagttaagagcaaccttagagtgtcagactgatttttccctttaaaggtcttccattttcctatccaacaatataaatttttgtattagtggagagtggaggagaatgaagttggcaaaagactatcaactttggagtcacagastactttatatttcctgtacaaccatgtctagaacatccatttgaggctggccagggacacgaattaccctagctctcataagttcccctcaggcaacataaaatcagacaaattattagacaatgtaaaccagactagtctttaagtgacctaagttaccatggaaacatagtactatggaaatgggtactgaataggaagtcctttaagaggtaatattaggaactcaggatcaatgtgaaaatatatatctctaggtatgtgtacatataatgtgtctgtagggatatgtgtat

SEQ ID NO: 271901 - DNA, 379 bp, Homo sapiens
cagggaaaatgctgagtgtggatcaagtctaagttaccaatcaggaccatggatacacattggctgctattcagaatcccatcctggtgctcttggtggtgtttaaagggaccttctgtattagttttcacactgctttagaactacctgagactgggtaatttataaaggaaagagatttaattgatttactgtaccacatggctggggaggcctgagggaatacaatagtggtagaggatgaaggggaagcaaggcatatcttacatgacagcaggagagagagatagagcgagggggasactgccaaacacttttaaactatcacatctcatgagaactcactatcacaagaacagcatgggggaaactgccccca

SEQ ID NO: 271902 - DNA, 472 bp, Homo sapiens
  misc_feature (1)...(472): n = A,T,C or G
nnnnnaaaaatttattcacatgaaaatatacacaaaayacacacacaagtttgttcagcattgcagatattgccagaaaaattgatttatagggcatcagaattttagttaaagaaagtactgtttattaaatctattatattcagatggagagccagagaatgatgtttttctatttccccttctttatattcaattttttttgaaaaaaataatgcccttcgaattaagaaggaatttatagaatatcagtaggagagagcaaattaccttcatttactcaccaaaaaatcaaaagtatccatccccttattttaaggatagtgaggtcattaaatcaattctgtgcaggccaagacattgttctctgagaaaaggaagacagttatcatcatatgcttaattataacctaccaaggttttatttgtaggccaccataatgctatcttaaaaacagatgtttcataaaat

SEQ ID NO: 271903 - DNA, 591 bp, Homo sapiens
ctggatttcaatatgagttagggcaatcttggatgcctgccagagttatttactaacagtgattragaagcccaaaggaagcatgcataagaaagattcatgtgcagacccaaatggactcctgtaagagtgaagctcagtattgtaaattggacaggaaaacagaggcaattatctaaatgtggtttctttgtgctataagcctgcattcctgagcagcttaagtacaaaggctgaaaagaaaattgtttggcctgggacttgtcatttgaattttccccaaaggtcacattcagatatataaaagtaataaatttaagtattactttaaaatgtctacttatctaatcctcaggtagttctcaagttaaatgttattattcagatctttccaagagccattgactgatttttctttatgttgtttttattaacgtgagtcacctttaacctgaattatgtaacgaaaaggacaaagaagggagagagaaagggagaaagagataaacaataaagaaagcaagaaactgacctttgactgaggtggtcaagtcaaagcatctcttattacataggaggatatatctcaca

SEQ ID NO: 271904 - DNA, 555 bp, Homo sapiens
aaacctcaccactgatttgtgcaatgaaggcatcttgggtcagggctggggaacggtggagggttttattacttttgtttttgttgctttcttttttctttcatgcttttttgttgttattgttctcgatgacgtctgaaaagtcaagggagctcttggtggtgatgtttggagctgtgaaggtgcctggggtcaccgaagaacaactcgtggttgggtgaggagccctggaggaaactgcccctaacctgggagtcagaggaggtctgtgcgaggggggggtgaaagctctgtgaccttgggtgaatgaatttcttcctctctgtgggcctgcttttcagtcagcctctggcccctccacactgggccagagcccataactctaagaataagaaattattacattaacaacatagaggtcaagggagaggggcaagagttgaggycttagatgaagcaggagctttcagaagtagattctggcctttggccaacgtaactgcaggttgttggaaaatggggtgctgataaaagaaaattttaggccaggaatgg

SEQ ID NO: 271905 - DNA, 333 bp, Homo sapiens
gtgcttttacaggctgagtatcccttatccaagatgcttaggaccagaagtgtttcagatttcacatttttttccatattttggaatatttacatattcatratattatcttagggaggggacccaagtctaaatacaaaattcagtggttttgtatataccttatacatatagcctgaaagtaattttatacagcattttaattaattttgtgcatgaaacaaagttttgactgtgacccatcacatgaggccaggggaattttccacttgtggtatcacatcagcattcaataagtctccaattctggaatactttggattttgggttagg

SEQ ID NO: 271906 - DNA, 559 bp, Homo sapiens
gcttcagagtaaaaaagactttgttcatgtcccagctttgccacttagagttttataagctgggaaaattcatcgaattttcasagaaattcaccctgattttcttttaagagacaaggtctcgctctgtcacccaggctggagtgcagtggcacaatcatacccactgtaacctccagctcctgagctcaagcaatcctcccatctcagccttccaagtaagtgggagtacaggtgcatgccactgagcccagttaattttttcatttttttgtaggggtaaggggtcttcctatgttgtttaggctggtttcaaactcctgatctcaagcgatcctcccacctctgcctcctgaagtgctgggatcacaggcatgagccactgtacctggtccccattctgatttttaaaatgggataatacctgccacgcctatctgagacaaggttattgccaagtctaaatgagatagtgcagggaaggcatttgtaaaacactcaatacttaacatgtgtaaagaatgttaagtattaaaaattcatccactgctatgagtct

SEQ ID NO: 271907 - DNA, 559 bp, Homo sapiens
gcttcagagtaaaaaagactttgttcatgtcccagctttgccacttagagttttataagctgggaaaattcatcgaattttcagagaaattcaccctgattttcttttaagagacaaggtctcgctctgtcacccaggctggagtgcagtggcacaatcatacccactgtaacctccagctcctgagctcaagcaatcctcccatctcagccttccaagtaagtgggagtacaggtgcatgccacygagcccagttaattttttcatttttttgtaggggtaaggggtcttcctatgttgtttaggctggtttcaaactcctgatctcaagcgatcctcccacctctgcctcctgaagtgctgggatcacaggcatgagccactgtacctggtccccattctgatttttaaaatgggataatacctgccacgcctatctgagacaaggttattgccaagtctaaatgagatagtgcagggaaggcatttgtaaaacactcaatacttaacatgtgtaaagaatgttaagtattaaaaattcatccactgctatgagtct

SEQ ID NO: 271908 - DNA, 559 bp, Homo sapiens
gcttcagagtaaaaaagactttgttcatgtcccagctttgccacttagagttttataagctgggaaaattcatcgaattttcagagaaattcaccctgattttcttttaagagacaaggtctcgctctgtcacccaggctggagtgcagtggcacaatcatacccactgtaacctccagctcctgagctcaagcaatcctcccatctcagccttccaagtaagtgggagtacaggtgcatgccactgagcccagttaattttttcatttttttgtaggggtaaggggtcttcctatgttgtttaggctggtttcaaactcctgatctcaagcgatcctcccacctctgcctcctgaagtgctgggatcacaggcatgagccactgtacctggtccccattctgatttttaaaatgggataatacctgccacgcctatctgagacaaggttattgccaagtctaaatgagatagtgcagggaaggcatttgtaaaacactcaatayttaacatgtgtaaagaatgttaagtattaaaaattcatccactgctatgagtct

SEQ ID NO: 271909 - DNA, 532 bp, Homo sapiens
cccagaaaaaaagaaagagaaaaactgcaaataattaayatttggaatgacaatggagtcataactacagaagtattaacaatttaaaacatctgaagagaacactgcccacacccccgcctatacatttgaaaacttagataaaatgaaaaaattagaaaatctgagttattagaattgattatagaataagatagaaaacctaaatacttcaatcaccagtcaagaaattcaatcagtagttagaagtttctccccaattgccccagctcacttcctacttccctctaccaactactttcacatattccaagttcagataattttaaaagcacatttttactaaaccttgactgaacaaataatccctacttatccagtggtatgaagatgttattgccttttggtcttttggtctccatatttctcatgatatgtgagcactaattcctattgttattccttagtatgtaatatgtcattttcctctggctgcttttaaggttttctcttccacaaaaagaatacaaca

SEQ ID NO: 271910 - DNA, 532 bp, Homo sapiens
cccagaaaaaaagaaagagaaaaactgcaaataattaatatttggaatgacaatggagycataactacagaagtattaacaatttaaaacatctgaagagaacactgcccacacccccgcctatacatttgaaaacttagataaaatgaaaaaattagaaaatctgagttattagaattgattatagaataagatagaaaacctaaatacttcaatcaccagtcaagaaattcaatcagtagttagaagtttctccccaattgccccagctcacttcctacttccctctaccaactactttcacatattccaagttcagataattttaaaagcacatttttactaaaccttgactgaacaaataatccctacttatccagtggtatgaagatgttattgccttttggtcttttggtctccatatttctcatgatatgtgagcactaattcctattgttattccttagtatgtaatatgtcattttcctctggctgcttttaaggttttctcttccacaaaaagaatacaaca

SEQ ID NO: 271911 - DNA, 500 bp, Homo sapiens
atttctatcagtttatgccttattgttttgaagctgttattaggtacataaagatttgtaactacagtcatgcaccacataaggacattttggtcaatgacagactgcatacacagaatgggcctcatgagattataatggataatataacagagctaaaaaatgtctactgccaagtgacatagccatcataatgttgtagcacaatgcattacctcttctatgtttaaacagattcaaatacacaaataccatcatgttacgattgtctaaagtattcagtacagtaacgtgctgtacaggtttgtagcctaggagcaataggtcataccatatggcctagatgtgaaggagactatascatgtagtttttggaagtacacgccatgatgtttgcatgacaaaatcacctaacagctcatttctggaacgaaccccccttgttaagcaatgcatgactgtattataactccttggcaaactggaacttttataactaa

SEQ ID NO: 271912 - DNA, 542 bp, Homo sapiens
tgtactggatcctttcccagaaagtcaaaaaccattctttttagcagagtctaataggattcatctgtgttagactcactcaggttttcaggctatttttttctacaatttgcattattttgccagcctcaggagaaggcgatggggagggtcagtcctgtgtcgagggccccatagcaaagtgatttatgtagtcaccaattcattcgacaaatatttattgagtgcctattataagtctgacagtgttttaagtcctggggataaatggtgagcaaaagcagatataatctccaacctcgtggagctcacaatttaatggtgaaagcgggcactaaatgcaaggcacatgctgtataaaattgagactgtgacagacgcttcacaggagaaagagcctgtgctgtcataaggagctttgtccccgccagggaacagcttccttgytaagtgatgcatgagtccagatatgaggactgagcaggcactgctaggaatcgaggcaaggctgaaggattctggcaggaggacactgagtgtgc

SEQ ID NO: 271913 - DNA, 581 bp, Homo sapiens
atgtaacctgttgaagagatcagtctaaaggtaggggggtggggaatgtgttaataaccttattttacttcagaaaagcaaatctccccttagtcaaataagcaagactataatatgcaaactctagtatgcagaaatatccaaattaaagcagtgtcatttgaaaactggattatttttatacttaatacatttgtacagcaatacctattagaactagtcatatttttactaagatatgttatyttactaaaatgtatataccaagtatcagcattttacgatgctaagaatatgcttacgttaaaatatttaacaacctctaaagaaaattatttaaccaatcagtagaaaaatgcagctactaagtatcagcaaaggggaactataactgatttatctcctaacttcacgtcaataggttcttgaaaactttgactttgttttctgctcagcatcttttgttatggtatggataaaaaatggttttgttataagttgctttctttgcttaaagtcacagaacctattgacattacattattgacagaacctatacattaagggaggacttaatgtat

SEQ ID NO: 271914 - DNA, 613 bp, Homo sapiens
ccctagcacaacccagctgatctctcacggtgggttccatgattgccatccccattttacagatggaaaactgaggttcaaagattcaggacatttcagggctgcttactcgcccactcatgcactcccaagcgtggatggagaacttacgtctcgggccctgggctgggaacggtgaaacttgcagatgtgaatgagccacrgcctgtgtcctccacgggcttcagagctaacaggggaaatggcatccgaacaaataaagagaatgtaaaacaccacaggggaaagaattgggaaagaggaatgagcagaacacacggaagaggataggaggggtaaagtctgatctggtaggaacagggggcacttcacagaggggtgatatctgaggtgagccttgaagaaaagacagatttctaacaagtgagcgaggcccgcaggggaaaggcaggccccacggagagggcccgggcgctgcggctgcgtcttcccgcctccccgcccacagccacgctcacagcacacggaggctgcgggctcgtgtccagctcatggaatagtcgctgagacaaggcacttgggcaaaaagtacccggctgaggaaattccccca

SEQ ID NO: 271915 - DNA, 383 bp, Homo sapiens
ccaggttctgtttgcaaaatattttcatcagtcaaaaaactgccggggttgtgaatattaaataaaccctgactcatggagacatataccttgctttgctttgctgataggtggggtaacagacagcgttacrttactttagaagtgacagctctaacattctgcagacttctcaaaactgctctggctttttctgaacaaagaacaatccacaaaaacgcccatggtttgcaatgcataggagtctgtttacaggatcacagactcaggccctctcaaaagggaccgggtgagatcatccatttaatcaccttccacctccaggtggggctgggtggcccgaaggtcttccgccagagggtttagtgagagcatggcccaag

SEQ ID NO: 271916 - DNA, 553 bp, Homo sapiens
  misc_feature (1)...(553): n = A,T,C or G
agataaaaactttggtttcacaagagacatgggggaaggatcctggtgaaattccttgcttctcctacagtggttaaagttttctttccccagtctatactacaaaacaaactttctcaagattctttaattttcatctgattcaggtagaaaaattctgcaagaggatatggacttcccctatatacgtggcccttagtgctttactctgcctcagcaaggcacactcagtccccatcaatcaaccagtcacctgtgctgagctcttcgcactggtctcaatctgcccaggtaaaacagtgctggcatttcatctccccctggaggctcctctctcctyagatttcangaccgttggttgtcctgctcagctttctggtgggttccagaaaagttgttaactcaccgtttatttggggttttgctgttgttgtaaggctagaagtgacactcatttcttctgtcttcgtggaaaacactcaacaggtaagaaaaaaagaagcaacatcaacaagcttactgaggctatcactagtttagtcacggtagcaaa

SEQ ID NO: 271917 - DNA, 491 bp, Homo sapiens
atgatcacactttttacataagctttcgtttgattttactttcaaagattatggtcaagttctctcactatgtagactctttttcaatcatatatttctagtttcataaatgacacagcatgtttcttacttcaaaaatagcataaacttgaaattaaattagattcctatttaggtacatttgaataatttaaagtaaatgtcttaaattgcagagctagaaaaatgtttattttttatattttggtttgcttttggttcttttagttctttagtgagctttyttttttaaaataaaacacttcacaaatattctctctcaaatatatgtacaaactaaatgtggtttgctttcagctacagttgacccttgaacacatgtgtacactacacaggtccacttatatgcacatttttttttcaaccaaacgcaataaaaaatgtggtgttttctgtagggttgccttttcctataaacaggttccacaggg

SEQ ID NO: 271918 - DNA, 491 bp, Homo sapiens
atgatcacactttttacataagctttcgtttgattttactttcaaagattatggtcaagttctctcactatgtagactctttttcaatcatatatttctagtttcataaatgacacagcatgtttcttacttcaaaaatagcataaacttgaaattaaattagattcctatttaggtacatttgaataatttaaagtaaatgtcttaaattgcagagctagaaaaatgtttattttttatattttggtttgcttttggttcttttagttctttagtgagctttttttttwaaaataaaacacttcacaaatattctctctcaaatatatgtacaaactaaatgtggtttgctttcagctacagttgacccttgaacacatgtgtacactacacaggtccacttatatgcacatttttttttcaaccaaacgcaataaaaaatgtggtgttttctgtagggttgccttttcctataaacaggttccacaggg

SEQ ID NO: 271919 - DNA, 547 bp, Homo sapiens
gcatgtttcttacttcaaaaatagcataaacttgaaattaaattagattcctatttaggtacatttgaataatttaaagtaaatgtcttaaattgcagagctagaaaaatgtttattttttatattttggtttgcttttggttcttttagttctttagtgagcttttttttttaaaataaaacacttcacaaatattctctctcaaatatatgtacaaactaaatgtggtttgctttcagctacagttgacccttgaacacatgtgtacactacacaggtccacttatatgcacatttttttttcaaccaaackcaataaaaaatgtggtgttttctgtagggttgccttttcctataaacaggttccacagggccaactgggaaacttgagtatatgtggattttggtacatgaaggtgcccctggaattgatccccacctatatggagagataactatatgttgtgtttgctagattcaccagccagagataatatactattatagaatgctttagatttatacaattaactaatatatttggca

SEQ ID NO: 271920 - DNA, 638 bp, Homo sapiens
atatactattatagaatgctttagatttatacaattaactaatatatttggcacatttttatttatggctcacatcaagttacatactcaatacatgtctgacttagcttctttatctgtaatctgagaatactccttttcctgaatacatatcatgatgacaaggatcttacaaaacaaatcatgtcaaagactaggcatgtgctagttagttttaaacattctttaacaaataatctccagggacactaccttcaacactgaatctttgagaaaatctagtttttaaatggtccacattttrcattaattttttaaaacatattgaagaccataggaaagaactggaaagatttctgagacatctgaaaataatagaaaataatctactttatatcaagaaacattgaacaaaaatgaaataaataaaaaaattctgtggaagaagaaattaattcaacctcatatatttctcagtcaatttattcaataatgaggtcacttgatttacttcatgtgtacatttcaatgaatgactgcatgtctaaaatatattttatacttttttactgagattattcacacttcagtcttcctgttttggtacaaaatattttagacaaactattatacttgtt

SEQ ID NO: 271921 - DNA, 581 bp, Homo sapiens
ttacttcatgtgtacatttcaatgaatgactgcatgtctaaaatatattttatacttttttactgagattattcacacttcagtcttcctgttttggtacaaaatattttagacaaactattatacttgttcatgtataactgtcactttagttataaaaaaagatgcttaagttaaaaataaaataattttaataaagaagtgtgagaagtaatatataacctctgagtcagtcagaatctagcaaagctttataggtcacattcattaaacattcttacattcactgtcagtggctctaattaagaatgatcatataaaaagatcttttcatttttcttgkttttttctagtttgcccaaatcgcaccaattatttcttctatactgttggttcatgagtttgtgactgtacatagttagtaattacttaaaatcagattttttttttacattttactgaaacatagtttaattcacctttgcttttctcccactagcttgatatattattgaactataataattttaaaaagaaaaatcacactatgctaaagataaggaagcatttaaatgacagaa

SEQ ID NO: 271922 - DNA, 601 bp, Homo sapiens
ttcttgtttttttctagtttgcccaaatcgcaccaattatttcttctatactgttggttcatgagtttgtgactgtacatagttagtaattacttaaaatcagattttttttttacattttactgaaacatagtttaattcacctttgcttttctcccactagcttgatatattattgaactataataattttaaaaagaaaaatcacactatgcyaaagataaggaagcatttaaatgacagaactattttgtctgaataaagacacaagatcatatatagagaagagaaaatgagctaattcatatatttggatgatatgaagtagattaaatattttatgtttttaaataagtaacatgttaagcaagacagaaaattatttttaataaaataaaaaatatacaaaagctttaaaattcatgcaaatatctaaatgaaagaagaaatcaaacaatgtatatgcctggcattgatcagtcggggattattgcttggacgatatttgctatatttgtatttctctgtcttgttattttttttctattagctgaacataaaaatttcaaacatgaaactaaaataaacgagtaaaatgaca

SEQ ID NO: 271923 - DNA, 510 bp, Homo sapiens
caacttccccacacgatgcaatcggctttctgccgtatttcaatcacactaaccaagagagacatcagrcattcagaatagactctggaccaaaaccgagggtaggggagaggtgggcgggccaggcacagctctgctgaagcactggtttgacatgtcgagttgaagtgtttctactcaaaacacctgtctccctgccaaggtgaaggctagatggtaaaaaagaaagttcccttttttctgataaactaggctgtctccataggaagtaccctgaaggcccccagctccgactccgagagcagagcccagactctcctactttggacggacatgagctctatgcctcttggggtttctctgcctgcccagtcaccctggataacgtgcttgccctagattgtctcctaggccaagtcctctccaagttcttggccctttgtcctaaggttggatctcttcctctcgcttcccttgctccgagctgtgtctctggatacaccccctgca

SEQ ID NO: 271924 - DNA, 510 bp, Homo sapiens
caacttccccacacgatgcaatcggctttctgccgtatttcaatcacactaaccaagagagacatcagacattcagaatagactctggaccaaaaccgagggyaggggagaggtgggcgggccaggcacagctctgctgaagcactggtttgacatgtcgagttgaagtgtttctactcaaaacacctgtctccctgccaaggtgaaggctagatggtaaaaaagaaagttcccttttttctgataaactaggctgtctccataggaagtaccctgaaggcccccagctccgactccgagagcagagcccagactctcctactttggacggacatgagctctatgcctcttggggtttctctgcctgcccagtcaccctggataacgtgcttgccctagattgtctcctaggccaagtcctctccaagttcttggccctttgtcctaaggttggatctcttcctctcgcttcccttgctccgagctgtgtctctggatacaccccctgca

SEQ ID NO: 271925 - DNA, 510 bp, Homo sapiens
caacttccccacacgatgcaatcggctttctgccgtatttcaatcacactaaccaagagagacatcagacattcagaatagactctggaccaaaaccgagggtaggggagaggtgggcgggccaggcacagctctgctgaagcactggtttgacatgtcgagttgaagtgtttctactcaaaacacctgtctccctgccaaggtgaaggctagatggtaaaaaagaaagttcccttttttctgataaactaggctgtctccataggaagtaccctgaaggcccccagctccgactccgagagcagagcccagactctcctactttgracggacatgagctctatgcctcttggggtttctctgcctgcccagtcaccctggataacgtgcttgccctagattgtctcctaggccaagtcctctccaagttcttggccctttgtcctaaggttggatctcttcctctcgcttcccttgctccgagctgtgtctctggatacaccccctgca

SEQ ID NO: 271926 - DNA, 569 bp, Homo sapiens
gcataaataaaccaatttattacttcctattaattcaatatcaatctgtttgaattgaatgtgcatttattaatatagaagatacctttgcaaattactcaattaaaataaaaacaagcctaggtatatgactatctctatattttctaagctttccagatgcatacttgttttcccactggttgcataagaataccaaacattaattgagggttgttatatcaaaaagagtaagaacaactcctgagattcraaagccatgggaagttgctgagctcaagtattcatctcatactagtcaaagttagggatagtagaagaggaggggttggattgaagtgtaggaacccatgttgctgcaatgattggaagctcctaattaacaggaactatggagtggaataaagtgaacttatcatggggaccctagtgttccctgtagtgctttctcctcctctctactggacactctttttcttctttgtctttttccattcaataaaagcaagccatttatatgattcaatagactgtggattgagaatcagaattttggagttgttagtaat

SEQ ID NO: 271927 - DNA, 644 bp, Homo sapiens
gcttccccttttgtcatgatagtaagtttccagaatcctccccagtcctgaggaactatgagtctgttaaatctctttwctttctaaattaccctgtctctagtacatgtttattagcagcatgagaatggactaatacaactagtcttgactttcttggggccctgaatgaaaagcagctttgtatttgtgcttcctcataaagtgcccattgactgtaaagaaaagcatcatgggccacatgaaaaactgcttaatttttcagacatgggcaaaccttttcatttgctccaattttcagaagagtaggacactaaaacatgatgaatacaacatctagacttaattctatattatgtgaaaagtagtaaaaagaatgaaggatagaaaaaaagaagtgctaagggccaaagaaatggaagaaaagagaaaaggagagagaaaaaagaatagagcatgataacagatcaatagagaaaaacacaaagacagaagaagagaaaaaggaaggtacaagacagatgtgggaattggtataagaagatgatgagtagtcaatatgaggtgttaggaaatggcctcttgggttgacttggtccctggccttcagtccattacaaatcctcccaacagacattgaaatg

SEQ ID NO: 271928 - DNA, 644 bp, Homo sapiens
gcttccccttttgtcatgatagtaagtttccagaatcctccccagtcctgaggaactatgagtctgttaaatctcttttctttctaaattaccctgtctctagtacatgtttattagcagcatgagaatggactaatacaactagtcttgactttcttggggccctgaatgaaaagcagctttgtatttgtgcttcctcataaagtgcccattgactgtaaagaaaagcatcatgggccacatgaaaaactgcttaatttttcagacatgggcaaaccttttcrtttgctccaattttcagaagagtaggacactaaaacatgatgaatacaacatctagacttaattctatattatgtgaaaagtagtaaaaagaatgaaggatagaaaaaaagaagtgctaagggccaaagaaatggaagaaaagagaaaaggagagagaaaaaagaatagagcatgataacagatcaatagagaaaaacacaaagacagaagaagagaaaaaggaaggtacaagacagatgtgggaattggtataagaagatgatgagtagtcaatatgaggtgttaggaaatggcctcttgggttgacttggtccctggccttcagtccattacaaatcctcccaacagacattgaaatg

SEQ ID NO: 271929 - DNA, 447 bp, Homo sapiens
tgtctgttagtgcatgaataaaktcatataaaattgtgactttgcattcaggaagagtattcatggcgaatatttagtgcatgccatctgatacagagacactaagttcctccaatatgtttgcaatgctttgggggcaaggattatatctttattcccttctttagttcagtggttggcaataacataggtacaaagcaaaaatgcgttagtgcattatggccacaccgagcagcgtattcacactggtaatgtttattgaaagaaacattaaatatcacacctcgatattattaaggaaactaactggatacactgtttacaaggctcgatgaaaatgtgaggtaccttgttcaaaaattattaagaattctaagactttgaagtagagcataaaaccaagtgcctgtctctgcagccacactgatcgtgtagccgtggagctgg

SEQ ID NO: 271930 - DNA, 447 bp, Homo sapiens
tgtctgttagtgcatgaataaattcatataaaattgtgactttgcattcaggaagagtattcatggcgaatatttagtgcatgccatctgatacagagacactaagttcctccaatatgtttgcaatgctttgggggcaaggattatatctttattcccttctttagttcagtggttggcaataacataggtacaaagcaaaaatgcgttagtgcattatggccacaccgagcagcgtattcacactggtaatgtttattgaaagaaacattaaatatcacacctcgatattatyaaggaaactaactggatacactgtttacaaggctcgatgaaaatgtgaggtaccttgttcaaaaattattaagaattctaagactttgaagtagagcataaaaccaagtgcctgtctctgcagccacactgatcgtgtagccgtggagctgg

SEQ ID NO: 271931 - DNA, 637 bp, Homo sapiens
cattaattattttcaaagtggctactaaaaggaataataagcaatcataaaataattatacaaaattatatagataaataagggcagaaattgtatatttttatataattatttattttattttatttttttgagagggaatctctctctgtcaccctgtcyggagtgcagtggcatgattttggctcactgaaaactccacctcctgggttcacaccattctcctgcctcagcctccctagttgctgggactataggtgcctgccaccacatccagctattttttttttttttttgtatttttagcagagacgggatttcactgtgttagccaggatggtcttcatctcctgacctcatgatccgcccgccttggcctcccaaactgctaggattataggcatgagccactgcgcccaaccagaaattgtatatttttaaatacactaataatcttaataatgcatccggtatatgtatatgagttactgagaaaggtgtattagaatcaccttcaataattttggttttaaaaatttatccaattaagagacactagaccttcttttttcttcctagtgaaaatacaacgagaaggcagctgtctgcaagccaggaagaacccttaccaagaatt

SEQ ID NO: 271932 - DNA, 637 bp, Homo sapiens
cattaattattttcaaagtggctactaaaaggaataataagcaatcataaaataattatacaaaattatatagataaataagggcagaaattgtatatttttatataattatttattttattttatttttttgagagggaatctctctctgtcaccctgtccggagtgcagtggcaygattttggctcactgaaaactccacctcctgggttcacaccattctcctgcctcagcctccctagttgctgggactataggtgcctgccaccacatccagctattttttttttttttttgtatttttagcagagacgggatttcactgtgttagccaggatggtcttcatctcctgacctcatgatccgcccgccttggcctcccaaactgctaggattataggcatgagccactgcgcccaaccagaaattgtatatttttaaatacactaataatcttaataatgcatccggtatatgtatatgagttactgagaaaggtgtattagaatcaccttcaataattttggttttaaaaatttatccaattaagagacactagaccttcttttttcttcctagtgaaaatacaacgagaaggcagctgtctgcaagccaggaagaacccttaccaagaatt

SEQ ID NO: 271933 - DNA, 637 bp, Homo sapiens
cattaattattttcaaagtggctactaaaaggaataataagcaatcataaaataattatacaaaattatatagataaataagggcagaaattgtatatttttatataattatttattttattttatttttttgagagggaatctctctctgtcaccctgtccggagtgcagtggcatgattttggctcactgmaaactccacctcctgggttcacaccattctcctgcctcagcctccctagttgctgggactataggtgcctgccaccacatccagctattttttttttttttttgtatttttagcagagacgggatttcactgtgttagccaggatggtcttcatctcctgacctcatgatccgcccgccttggcctcccaaactgctaggattataggcatgagccactgcgcccaaccagaaattgtatatttttaaatacactaataatcttaataatgcatccggtatatgtatatgagttactgagaaaggtgtattagaatcaccttcaataattttggttttaaaaatttatccaattaagagacactagaccttcttttttcttcctagtgaaaatacaacgagaaggcagctgtctgcaagccaggaagaacccttaccaagaatt

SEQ ID NO: 271934 - DNA, 577 bp, Homo sapiens
aaattaatgtttatttttatacaaacattaattattttcaaagtggctactaaaaggaataataagcaatcataaaataattatacaaaattatatagataaataagggcagaaattgtatatttttatataattatttattttattttatttttttgagagggaatctctctctgtcaccctgtccggagtgcagtggcatgattttggctcactgaaaactccacctcctgggttcayaccattctcctgcctcagcctccctagttgctgggactataggtgcctgccaccacatccagctattttttttttttttttgtatttttagcagagacgggatttcactgtgttagccaggatggtcttcatctcctgacctcatgatccgcccgccttggcctcccaaactgctaggattataggcatgagccactgcgcccaaccagaaattgtatatttttaaatacactaataatcttaataatgcatccggtatatgtatatgagttactgagaaaggtgtattagaatcaccttcaataattttggttttaaaaatttatccaattaagag

SEQ ID NO: 271935 - DNA, 637 bp, Homo sapiens
cattaattattttcaaagtggctactaaaaggaataataagcaatcataaaataattatacaaaattatatagataaataagggcagaaattgtatatttttatataattatttattttattttatttttttgagagggaatctctctctgtcaccctgtccggagtgcagtggcatgattttggctcactgaaaactccacctcctgggttcacaccattctcctgcctcagcctccctagttgctgggactataggtgcctgccaccacatccagctattttttttttttttttgtatttttagcagagacgggatttcactgtgttagccaggatggtcttcatctcctgacctcatgatccgcccgccttggcctcccaaactgctaggattataggcatgagccactgcgcccarccagaaattgtatatttttaaatacactaataatcttaataatgcatccggtatatgtatatgagttactgagaaaggtgtattagaatcaccttcaataattttggttttaaaaatttatccaattaagagacactagaccttcttttttcttcctagtgaaaatacaacgagaaggcagctgtctgcaagccaggaagaacccttaccaagaatt

SEQ ID NO: 271936 - DNA, 623 bp, Homo sapiens
tcatccatgtaagatgtgacttgctcctcttcttgacttctgccatgagtttgaggcctccccagccatgtagaactacaaattgattaaacctctttcttttgtaaattgtccagtgtcaggtatgtctttatcagcagtgtaaaaaagcactaagaaactccccttgggctggggaaagaacaaaatcctggttgcttcactagcaccttcatcatgacacagctgccatatagcgtagagcccagtctctcttccttgtgagctcccaactcctatccttcactaagcagaactccttgcttgggcctgcagagtagctacctcacccaagctgaacatttctattgccagtggctctgtgttatcctgtgatggagctcccagaggcaaatgacagccaactgccactgccaatgcagtggtacctgcccttgctgtcttagactgggaaagaaataaaagagcctgaatgctttactcatgcttccagcacactatgattaccatatgatcaccatatggcatggagcccaatctctattctctgtgagcccctgatcccctgctcttcaccaggcaggggycccagcaaaggctcatagtgcagcagccccactcca

SEQ ID NO: 271937 - DNA, 520 bp, Homo sapiens
agccattttcacttcttttgattcttcacttgtttcaggccatatggatgtatacgtgcaggtcacaggagatacgatggcttagcttgggctcagaggcctgacattcctgtcttcttatattaataagaaaaataaaacaaaatagtgttgaagtgttggggtggtgaaaattttggggggtgctatggagagataatgggtgatgtttctcagggctgcttcgagtgggattaggggaggcatgggaacctagagtgggagagattaagctgaaggaagattttgtggtaagaattgtggggttgttaagaggagcatttgtcatatggaatgattggtaatggcctggatgcggttttgtatgaattgagaaactaaacggaagacacaaggtgtgaataagtgaaggagaaaaacaggtattaaatgactaagaattgggaggacccaggacatccaattagagagtgctcaagggggttcagcakaattacttgtttggttggtgagttttggg

SEQ ID NO: 271938 - DNA, 571 bp, Homo sapiens
aatttcacaaagtaatgtcatcagttaaggcaggaaccagccattttcacttcttttgtgattcttcacttgcttcaggccacctggatgtatacgtgcaggtcacaggggatatgatggtttagcttgggctcagaagcctgacaggcatggtttactgatagctctgccagacaacatgcactggaccaccattcagccactggatggctatcttttgactgagactggacatgggcwttctacccaatgggccaaactaaatgcagtggtgatggccatgcaggctacctctgtcgcatatcttgctatattttcagtgacttatgggccattgccaaaagcctagccatctgatcaggacagtggcaatggaaggattggactgttagaggatatccatgtgaggacaaggactaagaaaaacagcttgttgtctgaaaaagacaaatatatgtcaatcatatgggtgctgaggtaactatagccacacttgagaggaatttctgccatccttttacatagcccatgggattttacttggaccaaggaatattttttgctattcaag

SEQ ID NO: 271939 - DNA, 574 bp, Homo sapiens
gtctcttggttctttcctccagtacaattarcaatgtagtatctttaaatattttctaccacactcttccacatttaaaggatccttgtgattaaattggccccccctagataatcaagtatgatctcttattttaagttctgctgtttagtaagcttaatgtcatgtgcaaccttaatactttcttgacattgtaacatcatatattcttatataacatagcatatccttcctgacatggagaataggacagagactgtcttgtggggggtgggggggcattattctgcttatcccagttagcaaacaaagattttgtgccatgaaaacatggaggagatacccttatccttatttttcttcagtctttctcatcaaatagatctttagatccaaaagagaagactcaacattgcttttaattaaatctcaagatgaacgaagaggcactatgagctctgggccctagtattggagtagaactcactccaaaacaataagaaagtttaggaaagagatttttaagtttctctatatatctttgaggattatggagaatagtaaaagttttaga

SEQ ID NO: 271940 - DNA, 574 bp, Homo sapiens
gtctcttggttctttcctccagtacaattaacaatgtagtatctttaaatattttctaccacactcttccacatttaaaggatccttgtgattaaattggccccccctagataatcaagtatgatctcttattttaagttcygctgtttagtaagcttaatgtcatgtgcaaccttaatactttcttgacattgtaacatcatatattcttatataacatagcatatccttcctgacatggagaataggacagagactgtcttgtggggggtgggggggcattattctgcttatcccagttagcaaacaaagattttgtgccatgaaaacatggaggagatacccttatccttatttttcttcagtctttctcatcaaatagatctttagatccaaaagagaagactcaacattgcttttaattaaatctcaagatgaacgaagaggcactatgagctctgggccctagtattggagtagaactcactccaaaacaataagaaagtttaggaaagagatttttaagtttctctatatatctttgaggattatggagaatagtaaaagttttaga

SEQ ID NO: 271941 - DNA, 574 bp, Homo sapiens
gtctcttggttctttcctccagtacaattaacaatgtagtatctttaaatattttctaccacactcttccacatttaaaggatccttgtgattaaattggccccccctagataatcaagtatgatctcttattttaagttctgctgtttagtaagcttaatgtcatgtgcaaccttaatactttcttgacattgtaacatcatatattcttatataacatagcatatccttcctgacatggagaataggacagagactgtcttgtggggggtgggggggcattattctgcttatcccagttagcaaacaaagattttgtgccatgaaaacatggaggagatacccttatccttatttttcttcagtctttctcatcaaatagatctttagatccaaaagagaagactcaacattgcttttaattaaatctcaagatgaacgaagaggcactatgagctctgggccctagtattggagtagaactcaytccaaaacaataagaaagtttaggaaagagatttttaagtttctctatatatctttgaggattatggagaatagtaaaagttttaga

SEQ ID NO: 271942 - DNA, 587 bp, Homo sapiens
gcctccattcatatctcttacaggggtaccttatagtttcatatcaggtcattcctgttcctctttccttttgtgatgcacctcttcttgctaaagattctggtcactatcttttgttttgtgtttacttattttagcttgtatataagtctgttctacacaacatttctgatttacatggcaggaaatgtgagaaacagcttgccaccttcctgactgatctgggcctaaactgtgcccctatactktgaataaacagttgcattctctaacacatattttatttgatccaaacaatacattagtccaactaccaaacatacatcttagatcctctgtcgctataacattttcaacagtcatatttatggaatccatctccctctgttatgtttttactgttatccaaatagaggagatagatataaatgaactcacactggtcagccagggaccacacagtggcttaaaatatcttaatccaggtatctgcagactaaccctaacctaacagtgagttgctacctttgtttttttttttcctctaagcattaaaatacttctgtcatagctgcttgcttcttgat

SEQ ID NO: 271943 - DNA, 587 bp, Homo sapiens
gcctccattcatatctcttacaggggtaccttatagtttcatatcaggtcattcctgttcctctttccttttgtgatgcacctcttcttgctaaagattctggtcactatcttttgttttgtgtttacttattttagcttgtatataagtctgttctacacaacatttctgatttacatggcaggaaatgtgagaaacagcttgccaccttcctgactgatctgggcctaaactgtgcccctatactgtgaataaacagttgcattctctaacacatattttatttgatccaaacaatacattagtccaactaccaaacatayatcttagatcctctgtcgctataacattttcaacagtcatatttatggaatccatctccctctgttatgtttttactgttatccaaatagaggagatagatataaatgaactcacactggtcagccagggaccacacagtggcttaaaatatcttaatccaggtatctgcagactaaccctaacctaacagtgagttgctacctttgtttttttttttcctctaagcattaaaatacttctgtcatagctgcttgcttcttgat

SEQ ID NO: 271944 - DNA, 587 bp, Homo sapiens
gcctccattcatatctcttacaggggtaccttatagtttcatatcaggtcattcctgttcctctttccttttgtgatgcacctcttcttgctaaagattctggtcactatcttttgttttgtgtttacttattttagcttgtatataagtctgttctacacaacatttctgatttacatggcaggaaatgtgagaaacagcttgccaccttcctgactgatctgggcctaaactgtgcccctatactgtgaataaacagttgcattctctaacacatattttatttgatccaaacaatacattagtccaactaccaaacatacatcttagatcctctgtcgctataacattttcaacagtcatatttatggaatccatctccctctgttatgtttttactgttatccaaatagaggagatagatataaatgaactcacwctggtcagccagggaccacacagtggcttaaaatatcttaatccaggtatctgcagactaaccctaacctaacagtgagttgctacctttgtttttttttttcctctaagcattaaaatacttctgtcatagctgcttgcttcttgat

SEQ ID NO: 271945 - DNA, 587 bp, Homo sapiens
gcctccattcatatctcttacaggggtaccttatagtttcatatcaggtcattcctgttcctctttccttttgtgatgcacctcttcttgctaaagattctggtcactatcttttgttttgtgtttacttattttagcttgtatataagtctgttctacacaacatttctgatttacatggcaggaaatgtgagaaacagcttgccaccttcctgactgatctgggcctaaactgtgcccctatactgtgaataaacagttgcattctctaacacatattttatttgatccaaacaatacattagtccaactaccaaacatacatcttagatcctctgtcgctataacattttcaacagtcatatttatggaatccatctccctctgttatgtttttactgttatccaaatagaggagatagatataaatgaactcacactggtcagccagggaccacacagtggcttaaratatcttaatccaggtatctgcagactaaccctaacctaacagtgagttgctacctttgtttttttttttcctctaagcattaaaatacttctgtcatagctgcttgcttcttgat

SEQ ID NO: 271946 - DNA, 555 bp, Homo sapiens
gacaaaatggaacattggaggagctagcgatctttcctctttagtttcttgcttaaactatctcagttagtaaagatttgactgttactgtcattttggcttattgttttaattagctatttcaactccatggcagcttagctctttacagcattctggaaagtacataggattctagacatttttactgcttttgttatatgaattacatgtcttcataataaggaattaaggctgggagtggtcacttgtaatcacaacactttgggaggccaaggcgggtggatcaactgacttcaggagtttgagaccagcctggccaacgtggtgagwgaaatcccatctctactaaaaacgcaaaaattagccaggcatggtaaagtgcgcctgtagtcccagctactcaggaggctgaggcgggagaatcacttgaacccgggaggcgaaggttgcagtgagccgagatgatagtgccatttcactccagcttggacgacagagcaagactctgtctcaataacaataacaagaataataaggatttaatatccaaac

SEQ ID NO: 271947 - DNA, 564 bp, Homo sapiens
cttgtcacttccattagaataaattataaacactttggatggcctgaagacatttgtaatttatcctaaactcatctctactctcatcgcttgacatctccctcttctacccacacatatatatttaagcccacgtaattactgcaattaccccaaattctgtacttctcaccagtgtcttgcaaaacccactccaactaactaataagacttttcatttaactctccagttgtagttgatattctagtttcaaactctattttctstgtgaaggctgcactgatatcacaattttgtttcttcagtgtgagcattggcagcctgtggcctatggttttggtacagcctgcaaggtaataatggtttttagagatttaaatgattgaaacaattttttaaaataacattttgtagcatataacgattgcataaagtaaaaactgcagtgttttcataaataacaaggttttttttttggacacaagatcattcacttacatgtggtctatagatgttttcaggctattatgtcagagttgagtggttgcaacagaaactgtatg

SEQ ID NO: 271948 - DNA, 589 bp, Homo sapiens
ggacttgccaatgaactgtggaattaagaagctctctgcctacagtcttgtttatctattgtaatctgtttcttgtagtccctattttagatctcattaatgtcttgtcacttccattagaataaattataaacactttggatggcctgaagacatttgtaatttatcctaaactcatctctactctcatcgcttgacatctccctcttctacccacacatatatatttaagcccacgtaattactgcaattaccccaaattctgtacttctcaccagtgtcttgcaaaacccactccaactaactaataagacttttcatttaactctccagttgtagttgatattctagtttcaaactctattttctgtgtgaaggctgyactgatatcacaattttgtttcttcagtgtgagcattggcagcctgtggcctatggttttggtacagcctgcaaggtaataatggtttttagagatttaaatgattgaaacaattttttaaaataacattttgtagcatataacgattgcataaagtaaaaactgcagtgttttcataaataacaaggttttttttttggacacaag

SEQ ID NO: 271949 - DNA, 564 bp, Homo sapiens
cttgtcacttccattagaataaattataaacactttggatggcctgaagacatttgtaatttatcctaaactcatctctactctcatcgcttgacatctccctcttctacccacacatatatatttaagcccacgtaattactgcaattaccccaaattctgtacttctcaccagtgtcttgcaaaacccactccaactaactaataagacttttcatttaactctccagttgtagttgatattctagtttcaaactctattttctgtgtgaaggctgcactgatatcacaattttgtttcttcagtgtgagcattggcagcctgtggcctatggttttggtacagcctgcaaggtaataatggtttttagagatttaaatgattgaaacaattttttaaaataacattttgtagcatataacgattgcakaaagtaaaaactgcagtgttttcataaataacaaggttttttttttggacacaagatcattcacttacatgtggtctatagatgttttcaggctattatgtcagagttgagtggttgcaacagaaactgtatg

SEQ ID NO: 271950 - DNA, 491 bp, Homo sapiens
ttttcaggctattatgtcagagttgagtggttgcaacagaaactgtatgattgtcaaagcctaacatacttaaaatctgacgctttgtagaaaaagctaacatttgatctaaagttttctgtaaagatacatctacattatgtttatcgtaatttatatttatttatctgcctactggttgcagttttgaaaaactataatcttccagaaaatrgaaactataatatttttaattagacctcaagcaaaattattttaaaatgtggtctcaatttttaagaaagtggggaagaatgcttttttttcttttgttaaacttctttgcttccagtccaagaagtgactgtcatttatttttatcttattgcttcctttctcatattagcttgataagaagtaatgaaataatattcaggtttcttagtagagtcatgttgtaaacatagcttttttttctagccactctcgaaaaatggaaagcctctgcttta

SEQ ID NO: 271951 - DNA, 491 bp, Homo sapiens
ttttcaggctattatgtcagagttgagtggttgcaacagaaactgtatgattgtcaaagcctaacatacttaaaatctgacgctttgtagaaaaagctaacatttgatctaaagttttctgtaaagatacatctacattatgtttatcgtaatttatatttatttatctgcctactggttgcagttttgaaaaactataatcttccagaaaatagaaactataatatttttaattagacctcaagcaaaattattttaaaatgtggtctcaatttttaagaaagtggggaagaatgcttttttttcttttgttaaacttctttgcttccagtccaagaagtgactgtcatttatttttatcttattgcttcctttctcatattagcttgataaraagtaatgaaataatattcaggtttcttagtagagtcatgttgtaaacatagcttttttttctagccactctcgaaaaatggaaagcctctgcttta

SEQ ID NO: 271952 - DNA, 579 bp, Homo sapiens
tattacaattcttattcaagtctttctgtggagaagagtttttactccttttgaataagtgcttaggagtgacttgattatagggaagttgggtggatgaataattaattttatagaaaacagccaaattggttttcaaatagttgaaaatttatttaatttaaattgtcattttgtaaaagtatttttaaacatatttttctttggtaggttacaagtgacagtacatgtatagtagttgaatatctgctgacatctatatttttacaaaaataaattctgctttcattcaagtgcacaaatatgacccaataaattttcctaatatctctttctagttaatacctctcattaatgaarcaatcacttttctcatatctgcaccgtagttgtatctgtttttggaattaaaacagtgtgcactaatttctgcctggcatcttttggttcaacatgtgtttgagattaattgtgtcattgtgcgtatcaaaagctcattaattgttaattggtgaaaggtaatctctcttgtgtgattatgtcacacaatgtttatccacttttctttgatagacattt

SEQ ID NO: 271953 - DNA, 533 bp, Homo sapiens
tttttacaaaaataaattctgctttcattcaagtgcacaaatatgacccaataaattttcctaatatctctttctagttaatacctctcattaatgaaacaatcacttttctcatatctgcaccgtagttgtatctgtttttggaattaaaacagtgtgcactaatttctgcctggcatcttttggttcaacatgtgtttgagattaattgtgtcattgtgcgtatcaaaagctcattaattgttaattggtgaaaggtaatctctcttgtgtgattatgtcacacaatgtttatccrcttttctttgatagacatttagaatttttcaaatttttgactatcttaaataaagtttccatatacatgtttatacaacttatgttttggttatgttttttctgatcgagggcctgtaaacaccttataatggagttctttgtcatagtataggtgtatgcttaacattatgagaaaacaagacatttccaaagagttttcagaagtttttaaaacattttacatttctaccatc

SEQ ID NO: 271954 - DNA, 521 bp, Homo sapiens
tacagtaagagattccttgatgaaacccaccatagacaagggagaggacaaggacaggctttgctctcggctaaccaaatgggaacatggaattttgcccactgatggtaagacagagccagcagaagaggccaaaggagatgaggtccacagtgcaaaaacatgggcttgagaatgacatcagcgactggctccagacttcaaatacaggcaggggaagaaaaaaamaggcttttggctaacagttcagcatctatcccagcaagaacacacacacaaaaaaaattcttctaaaagagtaatacaaaatagataggatcagagaagacagagggtggaatgagttcaaacatgaggaattcaccagtggcctgctgaggaccatgtggattttaatgccacttcaggacaataaaaatgaaatgtcccaccatcttaaaggtttgggacttctaatagaataagcatttgattaatgaaaaaacatgtactataaggaacaagggatcataaaaggctgg

SEQ ID NO: 271955 - DNA, 521 bp, Homo sapiens
tacagtaagagattccttgatgaaacccaccatagacaagggagaggacaaggacaggctttgctctcggctaaccaaatgggaacatggaattttgcccactgatggtaagacagagccagcagaagaggccaaaggagatgaggtccacagtgcaaaaacatgggcttgagaatgacatcagcgactggctccagacttcaaatacaggcaggggaagaaaaaaaaaggcttttggctaacagttcagcatctatcccagcaagaacacacacacamaaaaaattcttctaaaagagtaatacaaaatagataggatcagagaagacagagggtggaatgagttcaaacatgaggaattcaccagtggcctgctgaggaccatgtggattttaatgccacttcaggacaataaaaatgaaatgtcccaccatcttaaaggtttgggacttctaatagaataagcatttgattaatgaaaaaacatgtactataaggaacaagggatcataaaaggctgg

SEQ ID NO: 271956 - DNA, 521 bp, Homo sapiens
tacagtaagagattccttgatgaaacccaccatagacaagggagaggacaaggacaggctttgctctcggctaaccaaatgggaacatggaattttgcccactgatggtaagacagagccagcagaagaggccaaaggagatgaggtccacagtgcaaaaacatgggcttgagaatgacatcagcgactggctccagacttcaaatacaggcaggggaagaaaaaaaaaggcttttggctaacagttcagcatctatcccagcaagaacacacacacaaaaaaaattcttctaaamgagtaatacaaaatagataggatcagagaagacagagggtggaatgagttcaaacatgaggaattcaccagtggcctgctgaggaccatgtggattttaatgccacttcaggacaataaaaatgaaatgtcccaccatcttaaaggtttgggacttctaatagaataagcatttgattaatgaaaaaacatgtactataaggaacaagggatcataaaaggctgg

SEQ ID NO: 271957 - DNA, 560 bp, Homo sapiens
aggtccacagtgcaaaaacatgggcttgagaatgacatcagcgactggctccagacttcaaatacaggcaggggaagaaaaaaaaaggcttttggctaacagttcagcatctatcccagcaagaacacacacacaaaaaaaattcttctaaaagagtaatacaaaatagataggatcagagaagacagagggtggaatgagttcraacatgaggaattcaccagtggcctgctgaggaccatgtggattttaatgccacttcaggacaataaaaatgaaatgtcccaccatcttaaaggtttgggacttctaatagaataagcatttgattaatgaaaaaacatgtactataaggaacaagggatcataaaaggctggtttttaacagcctaagtactttttgcatcttgaagtcttttatcaccttgtaaatcacccctggagagaaataaccgcagtgacaaggcagacttccattaccagcctgtccaccttggctctagattctcaagtatatcgtcctggctagcaccctgtggtgtcgtgcctttattatgggg

SEQ ID NO: 271958 - DNA, 560 bp, Homo sapiens
aggtccacagtgcaaaaacatgggcttgagaatgacatcagcgactggctccagacttcaaatacaggcaggggaagaaaaaaaaaggcttttggctaacagttcagcatctatcccagcaagaacacacacacaaaaaaaattcttctaaaagagtaatacaaaatagataggatcagagaagacagagggtggaatgagttcaaacatgaggaattcaccagtggcctgctgaggaccatgtggattttaatgccacttcaggacaataaaaatgaaatgtcccaccatcttaaaggtttgggacttctaatagaataagcatttgattaatgaaaaaacatgtactataaggaacaagggatcataaaaggctggtttttaacagcctaagtactttttgcatcttgaagtcttttatcaccttgtaaatcacccctggagagaaataaccgcagtgacaaggcagacttccattaccagcctgtccaccttggctctagattctcaagtatatygtcctggctagcaccctgtggtgtcgtgcctttattatgggg

SEQ ID NO: 271959 - DNA, 490 bp, Homo sapiens
ttaaatgtttgtgaggaagtagaattgagtatctttctcacaagtaagttcttcttgaggcagaacagacaagaaacaagaactagaagtatttacaaatctatgtcagtggtagaaatttctccagcaggaaaacagagcctcaggctgtgtaatgaaagttgtactgtgagagctaacatttatttagtggatattatgtaaagtcagcattcccctatgcaaagcatattttggggccatgttgyaaacagcaatttctgcattgagttggccaaatgtgttcactaaggtgcccacaagcattggattgctccagatcgggtgtttcttctcctattgaaaggctgtttcctaccttaatgtcatctgttgagctctttctgttttataaacgtatggcttattggatgatcctaaagtcattgagcccttattattgtaattaagatggtaatattaagattatttttacctcaggactgaaatt

SEQ ID NO: 271960 - DNA, 565 bp, Homo sapiens
catagacaagaatttaacttaaagagtgaataggtaataaatgatctctagaatgcttacaaatatctactaactttttaatacaatgctaaagccaaataacaaggcaaggtgcttctgtaagtgttctcgggaccaacccatttaccagtctgagtgcaggcaaccaccatctcatttaaatcacagaagtttagggaaaatcttatccagtattatggggctgtactagtaaactgcacacaaaggaggccacacgaatttgacaaagatttagagatgggattctgacagtcacrttttatattaaccagaaaaagagccaccaaattcaaccagagatgcattttttttgttcttttcaacaaagttgaataaaagttgttgatcaaagagtgaagaaatttgaagatagaatttgccttaatttacagatgagccaccagaggctcagagggatgaagtgttttgttgaaattacacagtgggtgccattccaatgacttgtgactccacacattgccttctgatattcattaggaagtcatttgaaggaggaattcta

SEQ ID NO: 271961 - DNA, 520 bp, Homo sapiens
ctactaactttttaatacaatgctaaagccaaataacaaggcaaggtgcttctgtaagtgttctcgggaccaacccatttaccagtctgagtgcaggcaaccaccatctcatttaaatcacagaagtttagggaaaatcttatccagtattatggggctgtactagtaaactgcacacaaaggaggccacacgaatttgacaaagatttagagatgggattctgacagtcacattttatattaaccagaaaaagagccaccaaattcaaccagagatgcawtttttttgttcttttcaacaaagttgaataaaagttgttgatcaaagagtgaagaaatttgaagatagaatttgccttaatttacagatgagccaccagaggctcagagggatgaagtgttttgttgaaattacacagtgggtgccattccaatgacttgtgactccacacattgccttctgatattcattaggaagtcatttgaaggaggaattctaaactttttggaaacatcactg

SEQ ID NO: 271962 - DNA, 656 bp, Homo sapiens
gatttcgtggcagtcactgcaggagagaacctgtctctcttatcctgatggtacttgcgataaaatacaagaatatgtggcaccactgtccttgataaattgagcactagaaaagccatgaatgtgaaattatctagcacatgataaatctgctgtaataaataaaaaacgaatagtcagaagaagtaggaactgcgtgaagtaamctttgcttcaaatgctgcctatctaactttgggcaggaatcctggctctctgaagactgtagaattgggctctttaggtcatgattaccaccacagaagcccttgcctaaaaagaaaacgttatggagtcacaagtttcaccttaaaaatgtgccaaaggtatgtgtcaggatgaatgtggagttggttgaaaattcgttattaccttctcattgtcaggagtggcatgatcttccagttgacatcctgggaggctgttaaacctaggcacaagatgaatcttttaaacgtgctctcaatttgcctctgcaaaacctactttggtcttcaggcagaaatgaatgtcatattttaaagtatgtcgaaaatttctagaaagcatcatcagaaagccctaatgctccccttcatcattaagcttatcaacaaagatctagtaaacaccccaaa

SEQ ID NO: 271963 - DNA, 656 bp, Homo sapiens
gatttcgtggcagtcactgcaggagagaacctgtctctcttatcctgatggtacttgcgataaaatacaagaatatgtggcaccactgtccttgataaattgagcactagaaaagccatgaatgtgaaattatctagcacatgataaatctgctgtaataaataaaaaacgaatagtcagaagaagtaggaactgcgtgaagtaacctttgcttcaaatgctgcctatctaactttgggcaggaatcctggctctctgaagactgtagaattgggctctttaggtcatgattaccaccacagaagcccttgcctaaaaagaaaacgttatggagtcacaagtttcaccttaaaaatgtgccaaaggkatgtgtcaggatgaatgtggagttggttgaaaattcgttattaccttctcattgtcaggagtggcatgatcttccagttgacatcctgggaggctgttaaacctaggcacaagatgaatcttttaaacgtgctctcaatttgcctctgcaaaacctactttggtcttcaggcagaaatgaatgtcatattttaaagtatgtcgaaaatttctagaaagcatcatcagaaagccctaatgctccccttcatcattaagcttatcaacaaagatctagtaaacaccccaaa

SEQ ID NO: 271964 - DNA, 477 bp, Homo sapiens
tgatacatttcaaatggcccccctcccccagggatctctgttgctctctcctcattttccattggctttggtstttgtgataaaccacagcagaagtgagtacatggaatcatttatttgtagcccttctgctcccccctaatccaagcctgctgaatccaagtctgtggaccattctgtggtccttgcttcagtggcaagatacgacagtgtggaaaatctagaaaagtctggcttccttgagtttattataaacatcaatgccgttagggaatcagaagaggactccaggaagcaaagagaagaaaagggttccttctctcccgtttccaagactggaagagcccctctgtgtggagcagggcacgctagtgttaggtaggggttcctagagaggaaaggcctgctttttgtctatcagccacagctctgggttgtctgcaaatcctgagaaagctttgtgagatctgagagcag

SEQ ID NO: 271965 - DNA, 533 bp, Homo sapiens
acagcagaagtgagtacatggaatcatttatttgtagcccttctgctcccccctaatccaagcctgctgaatccaagyctgtggaccattctgtggtccttgcttcagtggcaagatacgacagtgtggaaaatctagaaaagtctggcttccttgagtttattataaacatcaatgccgttagggaatcagaagaggactccaggaagcaaagagaagaaaagggttccttctctcccgtttccaagactggaagagcccctctgtgtggagcagggcacgctagtgttaggtaggggttcctagagaggaaaggcctgctttttgtctatcagccacagctctgggttgtctgcaaatcctgagaaagctttgtgagatctgagagcagagatgacctctgtctggaaagagtggtgaggaggtggagggagagggctgcagagagcctgggcataaatgccatagaaacagtcatgaagtctcccataatgttgggtggcacagaaatgtaaggccagatcctgtgtctc

SEQ ID NO: 271966 - DNA, 533 bp, Homo sapiens
acagcagaagtgagtacatggaatcatttatttgtagcccttctgctcccccctaatccaagcctgctgaatccaagtctgtggaccattctgtggtccttgcttcagtggcaagatacracagtgtggaaaatctagaaaagtctggcttccttgagtttattataaacatcaatgccgttagggaatcagaagaggactccaggaagcaaagagaagaaaagggttccttctctcccgtttccaagactggaagagcccctctgtgtggagcagggcacgctagtgttaggtaggggttcctagagaggaaaggcctgctttttgtctatcagccacagctctgggttgtctgcaaatcctgagaaagctttgtgagatctgagagcagagatgacctctgtctggaaagagtggtgaggaggtggagggagagggctgcagagagcctgggcataaatgccatagaaacagtcatgaagtctcccataatgttgggtggcacagaaatgtaaggccagatcctgtgtctc

SEQ ID NO: 271967 - DNA, 533 bp, Homo sapiens
acagcagaagtgagtacatggaatcatttatttgtagcccttctgctcccccctaatccaagcctgctgaatccaagtctgtggaccattctgtggtccttgcttcagtggcaagatacgacagtgtggaaaatctagaaaagtctggcttccttgagtttattataaacatcaatgcygttagggaatcagaagaggactccaggaagcaaagagaagaaaagggttccttctctcccgtttccaagactggaagagcccctctgtgtggagcagggcacgctagtgttaggtaggggttcctagagaggaaaggcctgctttttgtctatcagccacagctctgggttgtctgcaaatcctgagaaagctttgtgagatctgagagcagagatgacctctgtctggaaagagtggtgaggaggtggagggagagggctgcagagagcctgggcataaatgccatagaaacagtcatgaagtctcccataatgttgggtggcacagaaatgtaaggccagatcctgtgtctc

SEQ ID NO: 271968 - DNA, 602 bp, Homo sapiens
aaatggcccttaggcactgtctaaggggaccatataggcagtctgataaagtcacatctaagaaaaacatttcagaaagcgtcagctagcacaactttgattatagaggaagccaattatgctcaaacactaatgaattcatttttaaggatgttatgatrcagttatgcatgtgcttctttcccaatgcattaagtaaagggaaacagctgtgactgagatgatctttgtaaatttgaagagctagtgatcataaatgatattttgagataactaaaaattatattaatgtgaaaatatctgtaatttgtattggaacaatatcacatgtacggttagtagtattgtgggttatgacttacattcataattggaggaagtgctatacattttagttaaagattataggaaataaagattcattctttcattaagttcacgatcccctcaactgatttctaagaacccctgatctagctcagtctcccagttctacctgggaacaaagactctgagatataaactggatgccaggatcacactcctgtttgccaggtaggattgactctcggatcccttcacccacgcttctttctgctgtg

SEQ ID NO: 271969 - DNA, 537 bp, Homo sapiens
ttatgacttacattcataattggaggaagtgctatacattttagttaaagattataggaaataaagattcattctttcattaagttcacgrtcccctcaactgatttctaagaacccctgatctagctcagtctcccagttctacctgggaacaaagactctgagatataaactggatgccaggatcacactcctgtttgccaggtaggattgactctcggatcccttcacccacgcttctttctgctgtgctcccctgctcctgctgctgaatcatgagatggactttagtggtgattgtgcttcgtgatcctattatagttccgatgtttttgtgttacatttgatcccagcaattctatacaattccttttctctgacgtgctttaattctgattgaaggtcagtgctgggtgcatgccatactccatttctcctggaatatgatggcaagttccctaataatctttttcattcttattgatcaaagtaccatgctcctacttatttagagggaaataaaaaaaatgatagcag

SEQ ID NO: 271970 - DNA, 537 bp, Homo sapiens
ttatgacttacattcataattggaggaagtgctatacattttagttaaagattataggaaataaagattcattctttcattaagttcacgatcccctcaactgatttctaagaacccctgatctagctcagtctcccagttctacctgggaacaaagactctgagatataaactggatgccaggatcacactcctgtttgccaggtaggattgactctcggatcccttcacccaygcttctttctgctgtgctcccctgctcctgctgctgaatcatgagatggactttagtggtgattgtgcttcgtgatcctattatagttccgatgtttttgtgttacatttgatcccagcaattctatacaattccttttctctgacgtgctttaattctgattgaaggtcagtgctgggtgcatgccatactccatttctcctggaatatgatggcaagttccctaataatctttttcattcttattgatcaaagtaccatgctcctacttatttagagggaaataaaaaaaatgatagcag

SEQ ID NO: 271971 - DNA, 570 bp, Homo sapiens
atctacttctgtcaggtaaaggcaaataatattaatagatatataaatattttataaaatcttcttaaaggaagaaaatggtaagtatgtaaggaactacttgatcaaaaatcaccttgggaggctgagatgggtgtgtcacgaggtcagaagtttgagaccagcctggccaacatagtgaaaccacatgtctactaaaaatacaaaaatttgctgggcatggtggtgcatgcctatagtcccagctacttgggaggctgaggcaggagaatagcttgaacccaggaagtagaggttgtggcaagccaagctcatgccaacacactccagcctgggcaacagagcaagactctgtctcaaaaaaaaaaaagtgtgagaattarttagggctaaagtatctgatatttttcgagaaggttgtttgatccagaagaaactcaatggtggataagtgagaaggcagtagtagaaatgtcaggcaaaaatgggaagttttcttggaaatccacttcctaaaacctgtgctattgttttaaaggcctgaaatatcagagtatgtttaaagcaaac

SEQ ID NO: 271972 - DNA, 536 bp, Homo sapiens
cctgtatttattatgagagactattaatggtagcttcaattttctaaaagccagtaaagaaaaacaaaacaaaagaaaaaacatgcttttcatgatcagctggaggaaaagatactcttccctttttgttaaatatatttttaattcatgtataccataaacacagaaaaattcacaaatgttgtttgactgttaatcaaatgtacacacatgtgtaactagctcaaatcaagccctcaagagtccccatcgtgtccccttcctgttacatactcagagcaaatgctctcgcttttatgtcatgtacaccccgtacctagctcctttcattcagtatcgtgtttgtaagatgagtccatgtcmaggcatgtagttccattgactttgttttcattgctgtatagtattccacagagcatgtggctctttctgaagcacaaactcatccctgttttttcatgggcaggagaggaaggctagcatagctgtgaagagcacaggctctgcaggctgtgtttgctctgccccttaccgtc

SEQ ID NO: 271973 - DNA, 601 bp, Homo sapiens
taaatttctcttgttgataggcttatcatgttatggtattttgttacagcagtccaaacaaactaagattcaaccttattcaaaagcttgctgatataattgggtaactctttggaaaaatgtttaaatatttttgccccttactgaccatcaaaataaatcatgagtgcaattagtagtattttaatgtaatgcaggagatatgggtccaacagtaattttgaacacatgttgtaccagtcatctgtaaatatgtattgactaayctatattcctttgtttattggacataccatattttttattcagtttaaaatatgcttggaatttttaggtattattaagggtaccagattattattttatttgaaatatatcataggtatggtttttgttatatgaataaaactatctctactaagagagataaaggaaaaagaggcaaaagctcaaaaggaaagagactaaaaagaagagcaaaagagacagcggtgtcaagacatcctgacatcctacttcataggtccagttatttttgcaatagaggtatatttctgtcttttgagtattatgagataccagtgtcaagttaataaattct

SEQ ID NO: 271974 - DNA, 496 bp, Homo sapiens
attataaccaaatacgtgctacgtgatataaatcctaacatggcattttaatgccatgaggcgcataagatgcctggacaagtactacatttcctaaagcataataagwgaatacattctccgtatgtgttcatcagtttaaaaactgccatttaaatgcctttgcttaaataggagatttttatataattaaaattatatttaacatttcaaagacttgttttatttcttaaaaaattacctcaaatagaaaattcatgcttaggatatgaattataaatgatatcatgcaccttgtacttcagattacagacagatatttaaggcaagaatacttttcttgtaacaattttcttgtttgctaggagcaaatggacaacacttcaagtgtaaaactaaatctattaatatacacagtgatttccaaatgaactcagatgatttttagtatctttaattagacagaaaacaaatagaagtcaataattataatttc

SEQ ID NO: 271975 - DNA, 496 bp, Homo sapiens
attataaccaaatacgtgctacgtgatataaatcctaacatggcattttaatgccatgaggcgcataagatgcctggacaagtactacatttcctaaagcataataagtgaatacattctccgtatgtgttcatcagtttaaaaactgccatttaaatgcctttgcttaaataggagatttttatataattaaaattatatttaacatttcaaagacttgttttatttcttaaaaaattacctcaaatagaaaattcatgcttaggatatgaattataaatgatatcatgcaccttgtacttcagattacagacagatatttaaggcaagaatacttttcttgtaacaattttcttgtttgctargagcaaatggacaacacttcaagtgtaaaactaaatctattaatatacacagtgatttccaaatgaactcagatgatttttagtatctttaattagacagaaaacaaatagaagtcaataattataatttc

SEQ ID NO: 271976 - DNA, 541 bp, Homo sapiens
attttgtcatagttttattttttaaaataaatatactctattaaggaattcctcttaagggacaggttgcaatagcaatattacaatcatttggcattttgttatgtcttacaggtatattataaaaagaaaatgttggattttgtggatgaatctgagctaaacataatcctattcaaaagatcctttagttcccgtacatatcatggaccatctccctccccacactcagtagaaagaactgcagaatgcacttaaattagcaataaagacgagggaggctttttccttgtggagaggaaagcacagttmggtaaatcataaattccatcaatgccttattacaggttgcaaagtttgaatcattcacatttacccaggttggtctcccgggttatccaggattcttgaaaaagcaatagtgaactgactgagttgattagactaggggtttcaaaactcactgcgattttgagtaagctttaaaataatacaacatcctccttttagatcagtgttactcagactttaatgtgcattc

SEQ ID NO: 271977 - DNA, 541 bp, Homo sapiens
attttgtcatagttttattttttaaaataaatatactctattaaggaattcctcttaagggacaggttgcaatagcaatattacaatcatttggcattttgttatgtcttacaggtatattataaaaagaaaatgttggattttgtggatgaatctgagctaaacataatcctattcaaaagatcctttagttcccgtacatatcatggaccatctccctccccacactcagtagaaagaactgcagaatgcacttaaattagcaataaagacgagggaggctttttccttgtggagaggaaagcacagttcggtaaatcataaattccatcaatgccttattacaggttgcaaagtttgaatcattcacatttacccaggttggtctcccgggttatccaggrttcttgaaaaagcaatagtgaactgactgagttgattagactaggggtttcaaaactcactgcgattttgagtaagctttaaaataatacaacatcctccttttagatcagtgttactcagactttaatgtgcattc

SEQ ID NO: 271978 - DNA, 547 bp, Homo sapiens
taaaaacattttctagaagaaaaatatataccttgatatgccaatcagagctaaaaatgttgtcagtctttccacacatgattggaatgagggagacatgatttcacaaatgaaatgaaaaggctgtctttggaagaagggggaaatggatgttgtgaacaaagtcaacttgatggaataycaaaaataaacttggtgtacttatttttgattggtgccattaaaaatgaccacaactacatgacttaagataatacagtttattatctcacagttctataggtcagaagtctggtatggttctcacagatctaaaatcaaggtgtagatggagctgcgttcctttttgaaggccttggaaacatggagctctgtttcattgcttactcagttattggcagaattaatttccttgctgctgtgggacagaggtccccatttcctagctggctttcagctgtgggcagttcccaacttttagaggcttccttcattccttggctcatggacccctttctccatcttcaaagccaacaagagagagtaa

SEQ ID NO: 271979 - DNA, 469 bp, Homo sapiens
gaagtctggtatggttctcacagatctaaaatcaaggtgtagatggagctgcgttcctttttgaaggccttggaaacatggagctctgtttcattgcttactcagttattggcagaattaatttccttgctgctgtgggacagaggtccccatttcctagctggctttcagctgtgggcagttcccaacttttagaggcttccttcattccttggctcatggacccctttctccatcttcaaagccaacaagagagagtraagtctgtctcacagtttgggtttctcctgcattttcttctcttttctttctctctaacattagccaggaaagatactctgcttttgagggctcgtatgataaactaggaaattctccccatctcataacacctactttaatcacatattaaagtcccttttgcttggtaatgtaacatattgacaagtttttgaaatcagagttcaga

SEQ ID NO: 271980 - DNA, 536 bp, Homo sapiens
gtctcatgacaagagtgcaagtgaaaatgctggtttgcttatcactgcaataatttccctctttaggttttacatttgggagggaatttcaggatcacaaacaagtaacccagatacccaaagaaaatatcaataattacacctccattgtttaaatcactaatatgatttaaagccaggtcccataggctaccaatgttcagtctcatgctttctattagctccagtctttgcctgtgggcttgcaagccaataaggccacagtggtgtataaagtttctctcatgactggaatttstatgacttctgcttcaggtctctgactctagctggagaaagtttgtgtttttaagggctcaagagagtacattggatttacccacttaaactaggataatctcctcattttaagattcgtcttcttaattacatcttcaatgtctcttttgctatataacatattcacaggttctggagatcagagtgtgaatgtctttgcgcctttgggggatttattcagcctatctcagtaacca

SEQ ID NO: 271981 - DNA, 600 bp, Homo sapiens
tggtttgactgatgatgtaaattttctgatttctgcaaatggatctcatatgattctcagacatagggaaaaatgtaatatttctcagccttgcactgtctcaaaattgaccaataactttgtgaccactgtcttcccctgtcttctgggacgccacacactcatatgtatcagtgattctataataagtacctcattcctcttccttactcctgagttttacaaccacatggctaattttatattatatattggttcattaatttattcatgcaacacatattattcagtgtctactgtgtagccatgtcttgctctaaacgctggtgccctctccatccattctgtgcacccatctgcccttttttgtgctcaaggtggctgcccgacgtgcactgaatccctcacgtccccattcagctgacgttctactgggatttagctaagggcagtcaccagcaagacactggaggatgtgaaaagtgagcttatggtatttctttcctgcctcttcccactttggtaccttttttagccccrctggtctatactacagctccagtgaatagccctgttgcactgcttcagctcttatgagac

SEQ ID NO: 271982 - DNA, 509 bp, Homo sapiens
ggtctgtagcctaggagcaataggttgtaccatatgacctaggtgtgtagtagtaggctgtaccatcctaggttcatgtaagtacactctgattttcacacaatgaggaaatggcctaagtatgcatttctcagaacctatcttcatccttaaacaatgtgtgactatgctttctccttccctcaggatatatttatcaattcctggaaaaaatagtggagacaacactgagaaacttactcaacatttccacaagctactcgttcatggaagtcgcataacagcttagggtacktattctggtaccttgtcttttggtaaattcctgtagcgttaagttcttctacattacttccaaaactcatgtggtccagaaccatgatttgactgttttgttactgtaccttgaacatctaccacattagttggcacatagtaaatattcatatatattatctatcatatgtttgctaaatattaaagaccctgtattagtccattctcatgcc

SEQ ID NO: 271983 - DNA, 551 bp, Homo sapiens
tttttttttttttctgtgactccagagatgtttcaaagtaaattgatcaactttcaggtacactttcatgcctgtagtatctttcactttatactactttacacctaatctgaccaccactcagttttcactgaaacactctgttcatgcattcaaactctrttccatgtaccctcctcctgcttagtctgagagtactttcattgacatgttttccctcgaagtattttttctaatatttatgctaatgtcccaatattttatattaaccttccacctctccagtctgtctctgcacctggcttattcattactgagccctttatcttcacacagctgttctcctttccataaattattccattacaatgagatgctctgtaccacagtctagatgagttagatctagaccaactgggcaaaatacatagaaaaatgttgtagctagaactatgaaatgacacacaggacaatacaacacagtaagaaagaattttaattctgggctcagaatgctttaatttataccctggcaatgctacataattaaa

SEQ ID NO: 271984 - DNA, 545 bp, Homo sapiens
ctctttgctattatgcatttttctgccattttattaccatcccttcacttctgaacttagatgaaacagtaaaccatgagaatttcagagcacaatgacacaacctgaaagtagagggatgtcctttcttcacagtggtaactttgactaatgaaaaacagaaaatggaaaggcttcatactgatgaccccctccaccccactgttttctttctccaaaacgatgccatgttttgtttctttcttaaaactctcctgaccccagcactttgggaggctgaggcgggtggatcatgaggtcaggagatcgagacaatcctggctaacatggtgaaaccccgtctctactaaaaaaataaaaaaaagtagccgggcgtggtggcgggcacctgtagtcccagctactctggaggctgaggaaggagaatggtgtgaacccggraggcggagtttgcagtgagccgagatcgcaccactgcactccaccttgggcaacagaacgagactctatctcaaaaaaataaaggcctcctgaaagagtttctg

SEQ ID NO: 271985 - DNA, 591 bp, Homo sapiens
ttattttatatacagagagcctggcccagactgtggcattcattaggcacaactatttttttaaattaagtaggctctgatttactgtgtacacagagaagaaatatattattccatgttctcaggcaaatcacaaataatgctgaccrgaaatcttaagaatccaccagcttcatagtatattagaaaaaagtaacatttaaaaaaataacaaaaaagaaatgtggttaagtgctctttattataacaaagtttatgccattttatagatactcataactggacttgcacttacatctaatcaaaatccaatattattgactacttacaattatcaaacttttagataattatttaagcaagatttaatgtgatccttactcccttaaatcccatccactcaataatattttttctgtatcttatcatttgcataactgaaaagttaaatgtggtgaataatgagataacataatgtatctaatctacatagcaataagtaaacttgataaatttcaaattgaagagacaaagaaatacttctaaaggtttattaataaaaaattacttacaagataaatgaaacagtct

SEQ ID NO: 271986 - DNA, 606 bp, Homo sapiens
cctccatctttgttctttttgcttacggttttcttggctattcagtcatttttttggttccatatgaattaaaaaawtttttttttctaattctgtggagaatatcaatggtagtttaatgggaatggcattaaatctacaaattactttgggcagtatggtctttttcacaacattgattcttcctatccatgagcatgaaatttttcccatttgtctgtgtcctgttggatttcctggagcaatggtttgcaattctctttgaagaggtccttctcgacttttcaatcttgttaaatacctaatgtattttttctcctttctccatctcattttgtccagtttaaatgtcattaaatttcaaatatccaatatgaaagtgatgctgtctaccacaaaataaaaaatataactgttaaagacactagggatacaataagaataaaatgcaattcttgtcattaaagaaatcttctaccttagacaaaggcatgcaaatgggtaattacatgtcagatatggtaagttgtgtaatagtatatgatggcacaatgcacacgtgttacggccgcataagctacctcactgtaggaacatagtgagata

SEQ ID NO: 271987 - DNA, 485 bp, Homo sapiens
atagtctatgcatataaatccgttttagtcattttagtttacaaagccttctccatataactgtcatacttagtaatatccagtgaaaaaaaatgtagtgatttctttgaaaatgtcaaatctgctaaatatcagaaaggctttctgtatataaatatgaaactgcctatataaagcaatacaaggaccctcaacatttgaaatttgttaacaatttattctggttttattttctctttttgaatwttatacaaacaactttttttgacccatgctttgtcagtacttagtaacgtatgcttcctgaaagtaaatatatcatagagtaaaatacattttgatgatactagaaaaattatagaaattagctgcgagcatgcacatttatataagtagtattttgaaagtagtcattaggctatacaaacacttcttccaaaatcatttttatgaatatagtcagttttggcacacttccttttaga

SEQ ID NO: 271988 - DNA, 485 bp, Homo sapiens
atagtctatgcatataaatccgttttagtcattttagtttacaaagccttctccatataactgtcatacttagtaatatccagtgaaaaaaaatgtagtgatttctttgaaaatgtcaaatctgctaaatatcagaaaggctttctgtatataaatatgaaactgcctatataaagcaatacaaggaccctcaacatttgaaatttgttaacaatttattctggttttattttctctttttgaattttatacaaacaactttttttgacccatgctttgtcagtacttagtaacgtatgcttcctgaaagtaaatatatcataragtaaaatacattttgatgatactagaaaaattatagaaattagctgcgagcatgcacatttatataagtagtattttgaaagtagtcattaggctatacaaacacttcttccaaaatcatttttatgaatatagtcagttttggcacacttccttttaga

SEQ ID NO: 271989 - DNA, 485 bp, Homo sapiens
atagtctatgcatataaatccgttttagtcattttagtttacaaagccttctccatataactgtcatacttagtaatatccagtgaaaaaaaatgtagtgatttctttgaaaatgtcaaatctgctaaatatcagaaaggctttctgtatataaatatgaaactgcctatataaagcaatacaaggaccctcaacatttgaaatttgttaacaatttattctggttttattttctctttttgaattttatacaaacaactttttttgacccatgctttgtcagtacttagtaacgtatgcttcctgaaagtaaatatatcatagagtaaaatacattttgatgatactagaaaaattatagaaattagctgcgagcatgcacatttatataagtmgtattttgaaagtagtcattaggctatacaaacacttcttccaaaatcatttttatgaatatagtcagttttggcacacttccttttaga

SEQ ID NO: 271990 - DNA, 618 bp, Homo sapiens
tacacagcttctcgtactgatttaaatattataccatacacttattcttttaaagaataaacctgaaaaagatcataagtcaattaattaattttattatttctgagaaatataatttatgtcacttttgaaaaaattcaccaaatcttatactagaactaaggccatccagacaaactcacctcatctccaattcccatcagtatctgctattcttttattagggcttacaaaatctaaatttcaaatatttaacagaagagtatggacactaaaatttggtagcctaaacattatgcaattcaygtaatacttctctatcattgagtctttcttttgagttcaatgtaccagtagatatgacacgtattaactatttgaagtgcaaacacttatttgggtcatgtgaattgattaagtaaataaacacttatgcaaataataagacatcttgccaaacaaaatgattctcttctctctaaaagagaatattaaaattttgaggggcctataaatcagatcaagatcttctattttgtgtttatgtatgttgttagaaattaccatacacacaaatctagcagattaaacaacccaaatttgttatcttacagtact

SEQ ID NO: 271991 - DNA, 728 bp, Homo sapiens
taaactgtgccaaccggatataatctggtaacattattctcctccttgtttaaaaattgacttaaaacttcaaattctgtatcatggggagatccacatccatcctcaagattttcccagatatgctgggatattttttctcttacttttgtgtcaggttttcttctatgaatactatctctgttttatgtattgtggtagggcccataattgaacttctccattaatttcctcatactgtgattatgtacgtattgtcatgtaagtgttaggctatgttatgttaggatagcawgtcacagacagctaaagaatgccaggagatgctaagaatgtggagattcaggaacttttatatattgttggtggaagggtagactggtgaagcaatgttgaggggcattctggctctaatgaagttgcacctgatcaataagaaaggaaagtggtttaatcagagagagagagagagcaagcatgaaacagagagtgaggcagagagagagagagagagaaaggaaaaataaattagcttattttttcttataaaatcatgtggccatttgtcatagggcagtttccttttagcctttcaacccacaagcttcctggccatgtacctatcctccctccccaccaccatcctttgtctttgtccctttctatattcttctttgctttatagctcattgaaatttcccaaaatttcctattaggagtagtttaag

SEQ ID NO: 271992 - DNA, 728 bp, Homo sapiens
taaactgtgccaaccggatataatctggtaacattattctcctccttgtttaaaaattgacttaaaacttcaaattctgtatcatggggagatccacatccatcctcaagattttcccagatatgctgggatattttttctcttacttttgtgtcaggttttcttctatgaatactatctctgttttatgtattgtggtagggcccataattgaacttctccattaatttcctcatactgtgattatgtacgtattgtcatgtaagtgttaggctatgttatgttaggatagcaagtcacagacagctaaagaatgccaggagatgctaagaatgtggagattcaggaacttttatatattgttggtggaagggtagactggtgaagcaatgttgaggggcattctggctctaatgaagttgcacctgatsaataagaaaggaaagtggtttaatcagagagagagagagagcaagcatgaaacagagagtgaggcagagagagagagagagagaaaggaaaaataaattagcttattttttcttataaaatcatgtggccatttgtcatagggcagtttccttttagcctttcaacccacaagcttcctggccatgtacctatcctccctccccaccaccatcctttgtctttgtccctttctatattcttctttgctttatagctcattgaaatttcccaaaatttcctattaggagtagtttaag

SEQ ID NO: 271993 - DNA, 728 bp, Homo sapiens
taaactgtgccaaccggatataatctggtaacattattctcctccttgtttaaaaattgacttaaaacttcaaattctgtatcatggggagatccacatccatcctcaagattttcccagatatgctgggatattttttctcttacttttgtgtcaggttttcttctatgaatactatctctgttttatgtattgtggtagggcccataattgaacttctccattaatttcctcatactgtgattatgtacgtattgtcatgtaagtgttaggctatgttatgttaggatagcaagtcacagacagctaaagaatgccaggagatgctaagaatgtggagattcaggaacttttatatattgttggtggaagggtagactggtgaagcaatgttgaggggcattctggctctaatgaagttgcacctgatcrataagaaaggaaagtggtttaatcagagagagagagagagcaagcatgaaacagagagtgaggcagagagagagagagagagaaaggaaaaataaattagcttattttttcttataaaatcatgtggccatttgtcatagggcagtttccttttagcctttcaacccacaagcttcctggccatgtacctatcctccctccccaccaccatcctttgtctttgtccctttctatattcttctttgctttatagctcattgaaatttcccaaaatttcctattaggagtagtttaag

SEQ ID NO: 271994 - DNA, 574 bp, Homo sapiens
tggagattcaggaacttttatatattgttggtggaagggtagactggtgaagcaatgttgaggggcattctggctctaatgaagttgcacctgatcaataagaaaggaaagtggtttaatcagagagagagagagagcaagcatgaaacagagagtgaggcagagagagagagagagagaaaggaaaaataaattagcttattttttcttataaaatcatgtggccatttgtcatagggcagtttccttttagcctttcaacccacaagcttcctggccatgtacctatcctcccwccccaccaccatcctttgtctttgtccctttctatattcttctttgctttatagctcattgaaatttcccaaaatttcctattaggagtagtttaagtctcttaattttttaattttctttttttgactagttccatagcccttaccttcaggctaaacctttgtattagtttgttctcacagtgctatacagatactaccagagactgggtaatttataaagaaaagatgtttagttgactcacagatctgtgtggctgtggaggcctcagaaaact

SEQ ID NO: 271995 - DNA, 669 bp, Homo sapiens
acccctgatgaaaccatcagatctcatgagacttattcactaccacaagaacaatatggggaaaaccacccccgtgattcaaattatctactactgcatccctcctacaawgcgtgggaattataggagtataattcatgatgagatttggctgggtcacagggccaaaccatgtcagccctgtggttgctttcatgggctggcattgagtgcctgaagcgtttccaggcacatggtgcaagattttggtggagctacaattctaggggctggagcacagtgactctcttctcatactcatagcttcactggacagtgccacctcaccatcagctccaggcagctcagcacagagagagtgactctgtttgtttgggagaaagtaagggaagagaacaagagtctttgcctggtaatccagagaattcttccaaatcatatccaagactataaaggtggcacctctatgattctgcaagaaccacagtgttactgggcttcgggtgtcctcaatgcagatatagcttagaccacaacatctgattcctttctaatacctggaaagccttcagaagaaggactgcaaagactgcagtaaatacctaacgcttatgcccagacacagaaaacttccaaaagagcactcaggacaaacaggacatcaccaca

SEQ ID NO: 271996 - DNA, 669 bp, Homo sapiens
acccctgatgaaaccatcagatctcatgagacttattcactaccacaagaacaatatggggaaaaccacccccgtgattcaaattatctactactgcatccctcctacaatgcgtgggaattataggagtataattcatgatgagatttggctgggtcacagggccaaaccatgtcagccctgtggttgctttcatgggctggcattgagtgcctgaagcgtttccaggcacatrgtgcaagattttggtggagctacaattctaggggctggagcacagtgactctcttctcatactcatagcttcactggacagtgccacctcaccatcagctccaggcagctcagcacagagagagtgactctgtttgtttgggagaaagtaagggaagagaacaagagtctttgcctggtaatccagagaattcttccaaatcatatccaagactataaaggtggcacctctatgattctgcaagaaccacagtgttactgggcttcgggtgtcctcaatgcagatatagcttagaccacaacatctgattcctttctaatacctggaaagccttcagaagaaggactgcaaagactgcagtaaatacctaacgcttatgcccagacacagaaaacttccaaaagagcactcaggacaaacaggacatcaccaca

SEQ ID NO: 271997 - DNA, 669 bp, Homo sapiens
acccctgatgaaaccatcagatctcatgagacttattcactaccacaagaacaatatggggaaaaccacccccgtgattcaaattatctactactgcatccctcctacaatgcgtgggaattataggagtataattcatgatgagatttggctgggtcacagggccaaaccatgtcagccctgtggttgctttcatgggctggcattgagtgcctgaagcgtttccaggcacatggtgcaagattttggtggagctacaattctaggggctggagcacagtgactctcttctyatactcatagcttcactggacagtgccacctcaccatcagctccaggcagctcagcacagagagagtgactctgtttgtttgggagaaagtaagggaagagaacaagagtctttgcctggtaatccagagaattcttccaaatcatatccaagactataaaggtggcacctctatgattctgcaagaaccacagtgttactgggcttcgggtgtcctcaatgcagatatagcttagaccacaacatctgattcctttctaatacctggaaagccttcagaagaaggactgcaaagactgcagtaaatacctaacgcttatgcccagacacagaaaacttccaaaagagcactcaggacaaacaggacatcaccaca

SEQ ID NO: 271998 - DNA, 445 bp, Homo sapiens
cattttgaaatgtaaccatcaaggaagacagagcccctatcttccagtctgtagtaagataagagtcagacttaaataagtgccaatgaggctatacaagtggaccaatcctgtcagctccctctccctaatgtcgtctaatgctttttcattagcccaccccagtgcttaaatctctcccaccttttgcttcagtagagttgagtttgatttgtctcycttactgcaatagtcttgacctttattgcaatagccttaaagtcttcttgtctttttaactctgtccagtgcaatttggggagtgtgggggtggctccattactttgtactgttgaaattgctggaagaaaacatgccacaaaagtatcccagtgattttattttttttcagtgcttctgagacagaagaaactaaagctcatcttttcttcttcgtgtttttttc

SEQ ID NO: 271999 - DNA, 569 bp, Homo sapiens
ggtccagtttcagtcttctgcatatgactagccagttwtctcagcactgcttattgaatagggagtcttttccccattgcttcttgttgttggttttgtcaaaggtcagatggttgtaggtgtgtggctttatttcttggttctctatcctactccattaatctatgtgtctgattttgtaccagtaccgtgctgttttagttactgtagcattgtagtatagtttgaagtcaggtagtgtcatgcctgtaactttgttcttttctttttgctcaggattaccttggttattcaggttcttttacagttttgctgaatttttgaaaagaattttctaaatctgtctatggacataccaccctgaacacacctgatctcatcttaaaactatttcatcacttatccaaatataattactgtgatcatttttttacaaacttattttcttatattatatctcttttcattgatttcttctactaacatgttatttaaattctacctcataacaacactgtcatttttaaaaatatatgagtgtgtgtatgtatatatgttatatgtgtata

SEQ ID NO: 272000 - DNA, 569 bp, Homo sapiens
ggtccagtttcagtcttctgcatatgactagccagttttctcagcactgcttattgaatagggagtcttttccccattgcttcttgttgttggttttgtcaaaggtcagatggttgtaggtgtgtggctttatttcttggttctctatcctactccattaatctatgtgtctgattttgtaccagtaccgtgctgttttagttacwgtagcattgtagtatagtttgaagtcaggtagtgtcatgcctgtaactttgttcttttctttttgctcaggattaccttggttattcaggttcttttacagttttgctgaatttttgaaaagaattttctaaatctgtctatggacataccaccctgaacacacctgatctcatcttaaaactatttcatcacttatccaaatataattactgtgatcatttttttacaaacttattttcttatattatatctcttttcattgatttcttctactaacatgttatttaaattctacctcataacaacactgtcatttttaaaaatatatgagtgtgtgtatgtatatatgttatatgtgtata

SEQ ID NO: 272001 - DNA, 547 bp, Homo sapiens
caattcatttctattttattyatttatttatttttattttttgatccacatttcagttagaaaagaaaaaaagttctattgacttttatgtccatcttgtatttaaggagacttgttgagatgtaaattaatgtataatgtaaaaaatataatgaaatcccttttgcttttcaaacatgtttattattattctaaaacgaaaatatctgaatttccctattggaaaaaagaagtcatctttgttaaaatcttactttacagtaattagaaagttacacattgttaaagaaaagacctgaggcaagttaaatttagcagagtttaagcagaagaaaagattcatgaagcaggttgcactcaggaccaaaagcagttcagagagttctgtcctccaatatgtgcaggcaatatttagagtcagagaagtgaaaacgatgtacagaaatagcctgattggatgcagtatgacatttgcttaatttgaacatattttgacagctttcagtctatgattggctgaagtttcagctgttctgattggctgaga

SEQ ID NO: 272002 - DNA, 547 bp, Homo sapiens
caattcatttctattttatttatttatttatttttattttttgatccacayttcagttagaaaagaaaaaaagttctattgacttttatgtccatcttgtatttaaggagacttgttgagatgtaaattaatgtataatgtaaaaaatataatgaaatcccttttgcttttcaaacatgtttattattattctaaaacgaaaatatctgaatttccctattggaaaaaagaagtcatctttgttaaaatcttactttacagtaattagaaagttacacattgttaaagaaaagacctgaggcaagttaaatttagcagagtttaagcagaagaaaagattcatgaagcaggttgcactcaggaccaaaagcagttcagagagttctgtcctccaatatgtgcaggcaatatttagagtcagagaagtgaaaacgatgtacagaaatagcctgattggatgcagtatgacatttgcttaatttgaacatattttgacagctttcagtctatgattggctgaagtttcagctgttctgattggctgaga

SEQ ID NO: 272003 - DNA, 547 bp, Homo sapiens
caattcatttctattttatttatttatttatttttattttttgatccacatttcagttagaaaagaaaaaaagttctattgacttttatgtccatcttgtatttaaggagacttgttgagatgtaaattaatgtataatgtaaaaaatataatgaaatcccttttgcttttcaaacatgtttattattattctaaaaygaaaatatctgaatttccctattggaaaaaagaagtcatctttgttaaaatcttactttacagtaattagaaagttacacattgttaaagaaaagacctgaggcaagttaaatttagcagagtttaagcagaagaaaagattcatgaagcaggttgcactcaggaccaaaagcagttcagagagttctgtcctccaatatgtgcaggcaatatttagagtcagagaagtgaaaacgatgtacagaaatagcctgattggatgcagtatgacatttgcttaatttgaacatattttgacagctttcagtctatgattggctgaagtttcagctgttctgattggctgaga

SEQ ID NO: 272004 - DNA, 561 bp, Homo sapiens
actattttgttagactcatatttaagtaacatttgggagtaatttttatcatatttttatcatattatatacaatgtttttactgttgatgtatagaaatgctactgcttttgtttttatctactttttttttcattcactcaaccttgtggaactcagtatgtttttaaatagttgctgatagatttgtttgacttttctatatacctaattgtattttctgcaaataataattatgttctttcttttttatgacagttttcttaagttatgttctcaagtatgttctattcttactctactggatgggactttcaagataacattgtggaggaaatcaattatagatatatttggtctgcttttttcaaactccagttattttctaacatcatttatttatttgtgttattttcatctgctaattcagccaaattaattaaattttaaaatygtattttattttttcccagttgtaaatgtttatattttatttatatatttgtttattttctagttaatattttttatttttaatagtggttggtatttgtgaaaatt

SEQ ID NO: 272005 - DNA, 441 bp, Homo sapiens
tggatttatattcagccaaagattaaaaataatgcatctttttggagctatttctttggaacttcccgtaaagctctttccatttctacgccctgtaaattccagttgtgtttcccacccctttctcagctacaatctcttctccttacctaaccaaggcttcaggatccttttgstttctttttgactttattatagtcttgaaagttccttcacacagaaagccagattgttcacaggactcaccttgcttttttttctttttctcctagtgtcatagtcctgttttgtttcttttcaaaatttttagagtttcatatattttgtacgattttttaggctgcttttgtttgtttttatgacagtctggtttcagttgctgtaacatgtcaggacttcaggacatataatttaatgtataaagaagaatttaaggttata

SEQ ID NO: 272006 - DNA, 598 bp, Homo sapiens
tagtattcttccttgtcaaatatctcttcagaattatcaaccctaaaatccttaccattgaggaaaacaccaaaaaagtaaatgaccttgcaggaatgagaaaaagtatatcttctacagcaggagtgcctgaaccccaggtcatagaccagaagtggtctgcagtctgttagaaaatgggctgaatagcaggaggtgagcagcaggcaagagagcaaagcttcattggtatttacagctgccccccatcacttgcactaccacctgagctcctcctcctgtcagatcagtggcctgagctctgccgcctgtcagttcagtgacctgagctccacctcctgtcagatcagtggccacattagattcacacagcagtgagaaccctaccttgaactgtgcatgtgagggatctaggttgagcactccttatgaaaatcyaattcctgatgatctgctactgtagcccatcaccccaagatgggactgtctagttgcaggaaaacaaactcagggctcccacagattctacattatggtgagttgaataattatttcattatatattataatataaaagtaatagaaataaagtgcacaa

SEQ ID NO: 272007 - DNA, 593 bp, Homo sapiens
aaattattgcctctgaactccaaatttactcttcattgtctgctctgtgaaaatggagcttgactctattaatattcgtcctttgccagctagcaggatgttactctttgtagtagaaagcactagagagacattkcgaggggtttctcttacttttttcagtctactcagatttcccacttctgcaatgcacatagttcctctgacatctggcttctgcagtgtgagcagtttttctggggccaggctttcaacacctgcttaaacagatatttggctttatttacttattcacttaatgtttaatttttttttaacatttaagagagaaatgtaatatttatttagttttcttagttatgagtggattttcatggctaaacatgacaagtaaatgtgtaagatgaattaactgtcataagtttccatgtttataattaggaattaattttcctgtacacttcagggctttaaaagatatcagttgattttttttggtatgattattatactttaagttctgggttacatgcgtacaatgcgtaggcttgttatacaggtatacgtgtgccatgttggtttgcggcccccat

SEQ ID NO: 272008 - DNA, 539 bp, Homo sapiens
cattggtttggggatgcgttctggcctagggtagacttatgtagaaaacaaaggcctgggggagttgccattcagcagctggggttgggcaaagccagatacttccttcacagataatcactcaccttcagttccttcccagacttgggaggactaagcaagagcactggggttgtgtagaaaagatggctaaggcctcaagcttgggagatctgtggaccatccccccatagtatgatgctgttggctattctctttggtctggcacctccataggccaggctgcagaacaataaccaagatctgcacactgattgctgtgagctccatycccattctttgtgtctaaccaaccccaggtggtctagccctactggtactcccagtatttcctatgagacaatacaggaatgagctctggcaaaggattctagaatggtgaggaagctataataaatatacacctcctattcactttttccactatagaaactgaatccagggaatttttctgtgtgtggcactgtgccagtttgggg

SEQ ID NO: 272009 - DNA, 576 bp, Homo sapiens
cccttctcgatccctcctgctccttcgctctgtgaggtcctcacgtcgctgaagtgcggcagcaggatctgcagcatctccacatagaccgcactgtccatcagcttctggtcccgccccttgaagacagccttgaggttgtggaccgcttccaccaccagcatcccatccatgttcttcaggcccttcaccatggarggcaggagggccttcaccttggcggtctgtggggcaggagcatttgggatgagggctcctatctgagctagcaagtaggaagagacccagcctctgattcactgaaatgaacttggtggcccaatccccacttccaggccttggcctatgccatcccacctgcctggaataccctcacccaacctcttgctgctcctcaaagccttctttggcctcactgactcgttggccaggacccctgaggccctttgctgtctacccccttccttggctctaggtagatgacacgctgtgttgttagttagctttctgagtctatgtcctgtcctttcatagcagctacatcatgagctgcaacagtgcctggtagagaaaaac

SEQ ID NO: 272010 - DNA, 601 bp, Homo sapiens
catcagccatactcatggcttatcctacgcattgttcctctcatcagctgaaactgtttctccccaataagtgagcaatcttaaacattttcatcactctttaacaaaatccattctcaatattctttttgctgaattcgtatattgtatatgctcaacatattatttgttttaaacttgactccatccagagcattgttctatagagttttcctgtatttatcagagtcatgtggtatttttcttgatgaccttaggcaacaatatagtgttatcagtcatcattttaatatgatttaaaatgtggaccacagcctgccttctttagtttaaatctaggccaagcatggtggctcatgcctataatctcagcactttaggaggctgaggcaggaggatcactggagcctaggagctcaagaccagcctgggcagcatagtgggctccacctctacaagacattaaaaaattagccttgtgtgctggcaagcgcctgtagtcctagctgctcgggaggctgaggcaaggggtttgcttgagcctagagatcaaggctgcagtaagctrtgattgcaccactgcacttcagcctaggtggca

SEQ ID NO: 272011 - DNA, 600 bp, Homo sapiens
actctgctgctgtatttgaagtacaacaggaaggccagtatggctggaatgaagtgagtgagaagaggagcagaagatgaggtcagaaagactggagacaggaatgggttttgtatggcttacagaccattgtgtgactaggttgttactatgaggtaggaagccactggcaggttttgagcagagttacmatctgagttatgttacaaaaggatcactttgactggtatgatagactgtatgggtccagagcaaaagcagggaaactagttagaaggctgctgcaataaaccaggcatgagagataatgtggcttggaccaagtggcaggcaacaggaaatatagaacaagaaaaaaaaaaggaggaagaaaataatttggtactttgagggtagacctaccaacactggctgacagattaaaattagggtataagggagagggagacaccaaggtttttggcctagttgcaaaaggaggttgtcgggaaataagatggggaagactatgggaagatccaggatttgggggaaagctcaagagttcagtgtttggtatgcttcagacaaccaagtgcagaggttgagtttgttattaga

SEQ ID NO: 272012 - DNA, 498 bp, Homo sapiens
tataacttataagccccctttgtccaaagctcaggacccctcttctggagtctgacagttagctttgctgtatctctgtgtggtattttagaatgcagtgaagcaagggacgcacatgtgattgttattcttttctagaattttcctcacaaaaacactgctctacaggccaaacgtgcttgccatctgatcattgcctctgtttgcctgacaattatatttcacttgaatttttctctcctgatgctaacactattttggagttgggtgccagtggatgctgacagtggctcaagaccttctttttttttttwaaaaaaaaaaaaaagactcttttttatatttacctgaattaattgcttgattaattcaatcactcaaattgattattgttcttctgaataatgctacaaattagaggactcaatttgtaccaggcagagtgctttaagagactaccacagagaatggtgggggttagttagaaattagttttgt

SEQ ID NO: 272013 - DNA, 614 bp, Homo sapiens
tatctgctttctatttcgtctttggattccacattctgacctgtgaaataattacaccagatttaaaaaaattctagtagacttaactaagaaattctttttaaaaattattttttattatgataaaaaggatataacattaaatttaccatcttaaccattttaaagcatgcaattcagtagtgttaaacatatttacattgttgtgcaaatgatctccagaactatttcatcttgcaaaagtgaaactctatgttcaataaacaataactcctcatttatccctcccccagcccccagcaatkaccatgcttctttctttttctacaaatttgactatttaaaataactcataggaatggaaccatacagtatttatctttttgtgtctgacttatttcacttaacataatgcactcaaggtttatttaggttgtggcatatgtcaaaatttccttccttttgaaggctgaataatattccatacacacacactcacacacacacacacaccacattgtagaattctgttcatctgttaatggacaggcaaatttaggttgtttctatctcggctattgggaatggtgttgctatgaaaatgactgtacaaa

SEQ ID NO: 272014 - DNA, 453 bp, Homo sapiens
gcctcacagaatttacaaaactgatctggaaggactagctggaacattgctcattggttgtttttaactatattttaactgaattatatatatgtatatattaatatgtatatacacacatayatatatacacatactatattttactaaattatatatgcatgtgtgtatttatgcatacacacaaacatggattcagagtacataaatactaggaatctcaatattagaaacctagaaatctgacagtgaaggttttttcttgtaagagagctccaatgggaaacatgttttcatattattacccaaagggaacaatttcaggaaggagtgttttgttggcttcttttttgtaataattttatggatttttaaaaggatgtaatcttcttaaagcactctgtgaacatccattgcagtctgttcctcatggcagggaatccatagacaagg

SEQ ID NO: 272015 - DNA, 624 bp, Homo sapiens
aatacaaaattacacacttgttaaaactgcaagggaataaataatgtgttttctctatgccattagagagtgaagcctcccctctatgcctgcttgatttctactttgggcaatcatatgaaagttatgcagatcttgactataatctgagggaaccagccacaagactggattgtattttaattgtgggaaactgatcgtcttcacctaatcagttttcccattgcatataccgtgtgcatgacataattttaaaagaccaactgcgtgatatttatttttcctcaaatgttttcgtaatgaaaacatgattaaagaaacatgtgyccaaagctttgactctggttttatttatggacatttatacttggtcagattgacttcatgttggctgctacaacttctaaaaggccctgtcgtgtgtaagtatcaaacttcaaaacaaaggaagggatattctttaagtcagtggtcctcagaatgttgtcttcaaaccagtggcattagcatcacctgggaacttgacagaaactcaatttcttgggctctaccccagacttactgaattggaaactctaggagtggcacctagcgatctatgtgatgctaccagccctctggctg

SEQ ID NO: 272016 - DNA, 624 bp, Homo sapiens
aatacaaaattacacacttgttaaaactgcaagggaataaataatgtgttttctctatgccattagagagtgaagcctcccctctatgcctgcttgatttctactttgggcaatcatatgaaagttatgcagatcttgactataatctgagggaaccagccacaagactggattgtattttaattgtgggaaactgatcgtcttcacctaatcagttttcccattgcatataccgtgtgcatgacataattttaaaagaccaactgcgtgatatttatttttcctcaaatgttttcgtaatgaaaacatgattaaagaaacatgtgtccaaagctttgactctggttttatttatggacatttatacttggtcagattgacttcatgttggctgctacaacttctaaaaggccctgtcgtgtgtaagtaycaaacttcaaaacaaaggaagggatattctttaagtcagtggtcctcagaatgttgtcttcaaaccagtggcattagcatcacctgggaacttgacagaaactcaatttcttgggctctaccccagacttactgaattggaaactctaggagtggcacctagcgatctatgtgatgctaccagccctctggctg

SEQ ID NO: 272017 - DNA, 591 bp, Homo sapiens
gacactttggtctgaacagttgtttcttggggagagttctggggactgttttgtccattatgggatgcttagaagcatccctggactccacctgctaaatgtttgtagcatctctttcttctacatgccaagttgtaaccaccaagatgtctctagacattgccagatatccttgaaggaagtgggtcctggtgggcaaaataatgtgcactgagcattactgccctaaagtaaagaaataacccaaaatagggacaagttcaaacaggacagattggagcccatgtactgtggacatagtgaaaagggagtggggttgggagtatattacaaagaagaatctgtaaaagggcagaataatcaaacagccttgactgaactggatgttgctgctgaaggtgtttacacacaggcaaacccctgtgtagacagatgaatggctgcatgggtaggtcactgtagggagactcccactttaccacttggctgccctcgctgagtggctggaaaattgagaggtrcccaaagagtgataacacatctgtggtttattttccatgaattattttctttccttagtaaagacagtgc

SEQ ID NO: 272018 - DNA, 583 bp, Homo sapiens
gtacatttgggccaggacaatgcagtagaatgaatccaaggttaggattcagaagaactgttatttgactgctaccaactaactgtgaccttaaacaaatcagttagtgcctctgggacttgggttttttcctgtattgcccaatgttttgtcattcaagaatgggtcggtattaattgygtaatatatgcatcactgtttctggcttcctgcgtgactgcacttggcataagcaattattgcccatgagtcccctgtataaaccctctgcaccatctggacgagggccttcattattctccaggcaaaacatatccatgctgctccctctgtcctccctgcaacgttcttcatctcctcctcctcctgctttacatctgtttattgagattcacctttaaaatatagctctagtctcagttggagaccacagaaaactattagtcttttgacatttagtatggtatgtcctcttcagtgtaaatgactgcttacaacaggattgtctgtttttagaggcaagtgtttctataggtacccacagcctagaatggtgttttcagtaacacatttaatacgtaag

SEQ ID NO: 272019 - DNA, 583 bp, Homo sapiens
gtacatttgggccaggacaatgcagtagaatgaatccaaggttaggattcagaagaactgttatttgactgctaccaactaactgtgaccttaaacaaatcagttagtgcctctgggacttgggttttttcctgtattgcccaatgttttgtcattcaagaatgggtcggtattaattgcgtaatatatgcatcactgtttctggcttcctgcgtgactgcacttggcataagcaattattgcccatgagtccyctgtataaaccctctgcaccatctggacgagggccttcattattctccaggcaaaacatatccatgctgctccctctgtcctccctgcaacgttcttcatctcctcctcctcctgctttacatctgtttattgagattcacctttaaaatatagctctagtctcagttggagaccacagaaaactattagtcttttgacatttagtatggtatgtcctcttcagtgtaaatgactgcttacaacaggattgtctgtttttagaggcaagtgtttctataggtacccacagcctagaatggtgttttcagtaacacatttaatacgtaag

SEQ ID NO: 272020 - DNA, 588 bp, Homo sapiens
agctctctcagcataagaggctgaagaaccacctcagaaaatacgaccataaccagatagcttacaatatagaaatgtaaatgattcctyctcaaaagaaaagttgcttgaactctctcataagataaatgcaaattaaaaactacgctgagaaaccattacccatcagaatggcaaaaatccaaaagttctataatatatatactctgttaaggattaggaaaagtcatcttatattttgcttgtagatgtgcaaaatggaggaaatttgacatcttctgtcaacagaacatatttaacatttggaaagcaatctcacttttaaaaatctgttcttcagatgtactggcaaaaaatataaaaacgtatgcacaagattatttattacaagactgtaggctagaaacaacacaaatatctagctttagggcactggttgaataaattatggtctaatcacacagtggagtagtatgcagctataaaacagaatggggaataactatacaatctctgactatatttttaggttaaaaaatgaggtggaaaaagtatgtataacatgttccatttattttcaaaaaaggt

SEQ ID NO: 272021 - DNA, 496 bp, Homo sapiens
tatagaaatgtaaatgattcctcctcaaaagaaaagttgcttgaactctctcataagataaatgcaaattaaaaactacgctgagaaaccattacccatcagaatggcaaaaatccaaaagttctataatatatatactctgttaaggattaggaaaagtcatcttatattttgcttgtagatgtgcaaaatggaggaaatttgacatcttctgtcaacagaacatatttaacatttggaaagcaatctcacttttaaaaatctgttcttcagatgtactggcaaaaaatataaaaacgtatgcacaagattatttattayaagactgtaggctagaaacaacacaaatatctagctttagggcactggttgaataaattatggtctaatcacacagtggagtagtatgcagctataaaacagaatggggaataactatacaatctctgactatatttttaggttaaaaaatgaggtggaaaaagtatgtataaca

SEQ ID NO: 272022 - DNA, 564 bp, Homo sapiens
atttggaacctaccatatactgccaagtatttcatactccttgttacccacttttctacttaygtttatatctgtcctagtgtttatatctgtcttctgtccatcttagtacctgaggcatgtgtgtatgtattgactttttgcatgtttttgttaaattttaacctcttaagatctgagtctacctctccattacctgcagctttaactaagagttgaaactcaaagatgtcattaatataaatgagtaacataatgacacagttaccttattctgggggattaaaccctccttaaatcgcatacttaatgatcaagataagaatcttttaagttatgtgcaataaatttttagcaagcactttattacatcttaatgcaatctaagtatttaaacatcacagatgccaaattagactgtatttattaagctaggttttgacaaacactaagctaaataaggcatcatgctcatgctcaatactttattcgttccttaagtttcagaattaaatgtgccatccttttaagttataaaccatttgtgattatttttgaaatgct

SEQ ID NO: 272023 - DNA, 551 bp, Homo sapiens
tgactgtcccctgactcacatccctaagtctgttttatcccacccagatgtactgtctgtggatctgcagttagcatatcaaagtgsttcctgagttggaggattcagaatagggctggggtagagcctgtagacagagctcccttaaagcaattattttcattctcaggttttgtataattttcttcttaactctttgaatatataacctagcaggaaacaactgtctctatggttatagagacacaaaaacatttttgtgactccaatgtacaattacttacccctcctaatcagcatttctttagaagttaatatttggccaagcccctagagaatgccccaaatcacagggagtggattttactagattttgtcaaagcacttgccgaaatgatgtgtaaccattgttctcccatctgtagtagaagggtaccattgtgtctgcatgctcaatatgattaatattattatgctttaatttgtttacctatgcctataagtatgaaattacatctcattgtttgcattatttctctgattatgggtga

SEQ ID NO: 272024 - DNA, 551 bp, Homo sapiens
tgactgtcccctgactcacatccctaagtctgttttatcccacccagatgtactgtctgtggatctgcagttagcatatcaaagtggttcctgagttggaggattcagaatagggctggggtagagcctgtagacagagctcccttaaagcaattattttcattctcaggttttgtataattttcttcttaactctttgaatatataacctagcaggaaacaactgtctctatggttatagagacacaaaaacatttttgtgactccaatgtacaattacttacccctcctaatcagcatytctttagaagttaatatttggccaagcccctagagaatgccccaaatcacagggagtggattttactagattttgtcaaagcacttgccgaaatgatgtgtaaccattgttctcccatctgtagtagaagggtaccattgtgtctgcatgctcaatatgattaatattattatgctttaatttgtttacctatgcctataagtatgaaattacatctcattgtttgcattatttctctgattatgggtga

SEQ ID NO: 272025 - DNA, 609 bp, Homo sapiens
gtatctttgtcacataaagtgtcatttctctatctcgacatttcaagtagtttgattagacggatttcacaccacttaaaatttaggaggagagaaatgtacagtatgtacaaattgttatttttaaaatccttctccattcagcacccaaatggcttcattttgcacttaaataatttcttggttttctttctgaatgtaatgattgagtctactttaaaaaatcccttgtgctaaggaagataaacaataagacaagtagaattgtttctttcccaaaamatttgaccatacctccttccctcccaaaggctgcaaagaaagatttttcttttcccaaaaacaatacagaaaggatcctgaagggtcaaattctttatcatcttgtctcttggcagtcaatacatatttaatggtgatgttggtatccaagtgcttgaggccagctccaggcaaccctctgaagtagacaaagcttgttcttactgtattccagcctcagctgtcaggacctcccttttctgttggagcaatctacccctcttccatgaaaccattttttttttttttgcttcttcctgaggcttgtccattgggatctgttaggca

SEQ ID NO: 272026 - DNA, 609 bp, Homo sapiens
gtatctttgtcacataaagtgtcatttctctatctcgacatttcaagtagtttgattagacggatttcacaccacttaaaatttaggaggagagaaatgtacagtatgtacaaattgttatttttaaaatccttctccattcagcacccaaatggcttcattttgcacttaaataatttcttggttttctttctgaatgtaatgattgagtctactttaaaaaatcccttgtgctaaggaagataaacaataagacaagtagaattgtttctttcccaaaacatttgaccatacctccttccctcccaaaggctgcaaagaaagatttttcttttcccaaaaacaatacagaaaggatcctgaagggtcaaattctttatcatcttgtctcttggcagtcaatacatatttaatggtgatgttggtatccragtgcttgaggccagctccaggcaaccctctgaagtagacaaagcttgttcttactgtattccagcctcagctgtcaggacctcccttttctgttggagcaatctacccctcttccatgaaaccattttttttttttttgcttcttcctgaggcttgtccattgggatctgttaggca

SEQ ID NO: 272027 - DNA, 551 bp, Homo sapiens
tcccaatattttaaaattgttttttttacttcagtggaatgattttactgttatgaaggagccctttgagacttttaaatgtcattgtattcattagaagttcawatttgtacatttggttagtctttgtggacttcacacatttatttcacaaagcgtaacagcaggaaaaaagtctgagccattatttcagcctgaaacttctacaaatcagacgattatggcagcctcagtcactgtttctcaaggcctgtgatgacttaatttgcttgctttcaacattttattagtactttacctgatggttattatccagtccattaatagcatcacttgaacaaataatctcagtaaagtgaataatgactctggtcatgttactagttttgatcaggagcacattttataattctctagattatataactgtggtcaaggcacagttatgaaagatatatttgaggggtcttgttacatggtgttaaataagacacatgtctgttagtcaaagtatagttttaaaagtgagaagaaggtgtcttcagtttcat

SEQ ID NO: 272028 - DNA, 622 bp, Homo sapiens
tttttagggtacacgtgcacaatgtgccgattagttacatatgtatacatgtgccatgctggtgtgctgcacccattaactcgtcatttagcattaggtatatctcctaatgctatccctccccmctccccccaccccaagtagttcaaatttttatgaatatttagacaatagaatttggtagttgacaatttttctcatgttatttttctgggtatttttgcattctgtgtttatattttatagtaatacatttacttatacagaatttaaagataaaaggtaataaaatttaaaaataaaattgttcgggaaaggattaacttttcaatgtattgtccagggacaattggttactggttggaaaaataaagagtgtgattcctatctcaccctatacaaaaggcataaactgtaggtggatttaatatctaaatataaaaaggaaactttaaaattttagaataaaatggaaggatattttcaattaccttgggataaggaagagcttcttaaaggaatgtatgaaaagcacaaacggtagtgtaaatgatgaatacatttgactacaataaaattaaaatttgtattttaaaaactgtaaaaaaaagaaacctaacat

SEQ ID NO: 272029 - DNA, 622 bp, Homo sapiens
tttttagggtacacgtgcacaatgtgccgattagttacatatgtatacatgtgccatgctggtgtgctgcacccattaactcgtcatttagcattaggtatatctcctaatgctatccctcccccctccccccaccccaagtagttcaaatttttatgaatatttagacaatagaatttggtagttgacaatttttctcatgttatttttctgggtatttttgcattctgtgtttatattttatagtaatacatttacttatacagaatttaaagataaaaggkaataaaatttaaaaataaaattgttcgggaaaggattaacttttcaatgtattgtccagggacaattggttactggttggaaaaataaagagtgtgattcctatctcaccctatacaaaaggcataaactgtaggtggatttaatatctaaatataaaaaggaaactttaaaattttagaataaaatggaaggatattttcaattaccttgggataaggaagagcttcttaaaggaatgtatgaaaagcacaaacggtagtgtaaatgatgaatacatttgactacaataaaattaaaatttgtattttaaaaactgtaaaaaaaagaaacctaacat

SEQ ID NO: 272030 - DNA, 622 bp, Homo sapiens
tttttagggtacacgtgcacaatgtgccgattagttacatatgtatacatgtgccatgctggtgtgctgcacccattaactcgtcatttagcattaggtatatctcctaatgctatccctcccccctccccccaccccaagtagttcaaatttttatgaatatttagacaatagaatttggtagttgacaatttttctcatgttatttttctgggtatttttgcattctgtgtttatattttatagtaatacatttacttatacagaatttaaagataaaaggtaataaaatttaaaaataaaattgttcgggaaaggattaacttttcaatgtattgtccagggacaattggttactggttggaaaaataaagagtgtgattcctatctcaccctatacaaaaggcataaactgtaggtggatttaatatctaaatataaaaaggaaactttaaaattttagaataaaatggaaggatattttcaattaccttgggataaggaagagcttcttaaaggaatgtatgaaaagcacaaacrgtagtgtaaatgatgaatacatttgactacaataaaattaaaatttgtattttaaaaactgtaaaaaaaagaaacctaacat

SEQ ID NO: 272031 - DNA, 622 bp, Homo sapiens
tttttagggtacacgtgcacaatgtgccgattagttacatatgtatacatgtgccatgctggtgtgctgcacccattaactcgtcatttagcattaggtatatctcctaatgctatccctcccccctccccccaccccaagtagttcaaatttttatgaatatttagacaatagaatttggtagttgacaatttttctcatgttatttttctgggtatttttgcattctgtgtttatattttatagtaatacatttacttatacagaatttaaagataaaaggtaataaaatttaaaaataaaattgttcgggaaaggattaacttttcaatgtattgtccagggacaattggttactggttggaaaaataaagagtgtgattcctatctcaccctatacaaaaggcataaactgtaggtggatttaatatctaaatataaaaaggaaactttaaaattttagaataaaatggaaggatattttcaattaccttgggataaggaagagcttcttaaaggaatgtatgaaaagcacaaacggtagtgtaaatgatgaatacatttgactacaataaaattaaaatttrtattttaaaaactgtaaaaaaaagaaacctaacat

SEQ ID NO: 272032 - DNA, 600 bp, Homo sapiens
tgtgcgtagcagtgtcatttgggcatgttactttgtcttcctccctagatttcagcttccccaactggaaaatgagaaaatatttgatctcagaacttctattttgctctctaattttatgaaatataccctcatacccatgttgcgactccagtaatttgaattgagtctacaacatgaattctaaagtctcaaactttttttttcctaacatactagtaagtctatgaactgtagtctctggtgtaatcaaaaagacatgcttcttttcattctttgtctacaatatgggggcctgagcatcaagcagattcaggatctatatagacattcttcattaacttggaacattttgtcagaatcaatcagctggtggaagttattatggaacgttcatgaggaagcattttccaagrtcctttgaaattcttgaaatacacaattgttagcaatgcagaatcaaacagaatgcagtcttattgaatgggttaagatgaagttacaacaaatattgtgtcagagtaaacatcagaaaatagattttctaaggtctagaagttacaaagaaatatgcaataatgagaatattattaaacattg

SEQ ID NO: 272033 - DNA, 598 bp, Homo sapiens
ctagatcattttgggctcattttattttctaaatgrgagtgatgatacctactttgtagagttgttataaagtcagaatgaggtagtctgtacaacagcttttggtacacggtaagcaactataaaattttcatttctcttgtgatgatcttttataactggccattgtttagaaatatagaacttaatgtaaaagataaaatgtgaacatgcacataaaaatgtgggaaaatatttccaaaaacgactactaatatagaaactggagttaagcaggaaaatattcaaaattcgactaatgtggccagtgccaaataaaatacaacactagactcctggacaaaggatatggtaggttggtctctttcccgtcattaagtggatttctaattatgttgtatatgttgtttcagaggcaaaggcccattgaaaaatacatctgatgtcattaatgctgccaagaaaattgccgaagcaggttctcgaatggacaaattagctcgtgctgtggctgatcaggtaatagaagagggaagggtgggcacatgctgagtggagtcactaattagcacttgggttttgtaactagttttatgca

SEQ ID NO: 272034 - DNA, 598 bp, Homo sapiens
ctagatcattttgggctcattttattttctaaatgagagtgatgatacctactttgtagagttgttataaagtcagaatgaggtagtctgtacaacagcttttggtacacggtaagcaactataaaattttcatttctcttgtgatgatcttttataactggccattgtttagaaatatagaacttaatgtaaaagataaaatgtgaacatgcacataaaaatrtgggaaaatatttccaaaaacgactactaatatagaaactggagttaagcaggaaaatattcaaaattcgactaatgtggccagtgccaaataaaatacaacactagactcctggacaaaggatatggtaggttggtctctttcccgtcattaagtggatttctaattatgttgtatatgttgtttcagaggcaaaggcccattgaaaaatacatctgatgtcattaatgctgccaagaaaattgccgaagcaggttctcgaatggacaaattagctcgtgctgtggctgatcaggtaatagaagagggaagggtgggcacatgctgagtggagtcactaattagcacttgggttttgtaactagttttatgca

SEQ ID NO: 272035 - DNA, 576 bp, Homo sapiens
atctttgtggatctcagactccacaacctcatctgggcaatttttactagcagagccgctctccatcatcctctcagtacccattgtttgtcactgcctccaaagcttcatttccattgtctttttctcatttagatgtagtccaaaccatcactggcttttatcacttgcactgttggcttttatagaggtgtttgagattgggaacaccatcaagaagcctgttcccttctttgagtcttgttggyaaagttcataaatccttgcatgggagaaggcttcttttagaagaatgttgttcaacttgataattattctgaggcaaatgcattataaatatttgctatatatgctctgtcatgggcctgctcttggcttcctcatgatttattccaagcttgattgctgtttggtgccacacctacatctatagtctgctgtctttgccaattctgcctccatcttattcttcatgctccttcactgatggccaatggagaaaaaaaatgaatatgcttactgtgcaaaatagccacaaatgactgctttcaaagttctgaaagagtcaagaatgtg

SEQ ID NO: 272036 - DNA, 576 bp, Homo sapiens
atctttgtggatctcagactccacaacctcatctgggcaatttttactagcagagccgctctccatcatcctctcagtacccattgtttgtcactgcctccaaagcttcatttccattgtctttttctcatttagatgtagtccaaaccatcactggcttttatcacttgcactgttggcttttatagaggtgtttgagattgggaacaccatcaagaagcctgttcccttctttgagtcttgttggcaaagttcataaatccttgcatgggagaaggcttcttttagaagaatgttgttcaacttgataattattctgaggcaaatgcattataaatatttgctatatatgctctgtcatgggcctgctcttggcttcctcatgatttattccaagcttgattgctgtttggtgccacacctacatctatagtctgctgtctttgccaattctgcctccatcttwttcttcatgctccttcactgatggccaatggagaaaaaaaatgaatatgcttactgtgcaaaatagccacaaatgactgctttcaaagttctgaaagagtcaagaatgtg

SEQ ID NO: 272037 - DNA, 501 bp, Homo sapiens
atattcaaatcaactctacctgacactgtcatatattcaaagatgcatatgtgcatacaaacatacaaacacagagcacaattgatttgatatttactcttataccctcaataaaccttagtgaagtggtcaggaactgaacaagattgataagtataaactatctgatccaatacaaattagggaaaagaaaatgtgggatatattttgtacaataatatatatatggtttgttgagatgagaattayattgtatttgaagagcgttgtgttccttttatttttaaaaagtgccagtattttgtaatgagctaaaacagccattgaaacaagaattgcatctaattgtgtagacctgtacattaagcaacctttttttcttaatttttatatcttctattttgtctatagtcaattcttcatgatctccatggatcaaagtgtaacagtaatgaaaaaaatctaaagtgctagctatttcaatttgggtttggaatgcat

SEQ ID NO: 272038 - DNA, 578 bp, Homo sapiens
ttcaggtaaaactgatctaacacaagtccagcagcatcagcatcacctgggaacttatcaggcatgcgaattctcaggcctcaccccggatacacagaaatcagaaactatgggggtggggcccagtcatctgtgtttttagcccttctggtggctccaaagcatgctcaagtctgagactcacaggcctaccacaaacgcttcactttttgacaaatagtgccctgttttctaaagtccagccaacaggaattcccccatactacacttgctttgctttctttttaaaaaattatcctcatgtcatcacttcttacaactctatgaaagtgagttatctgagaattttttctgacacttttaattagaaagtcctaattactatcatctttcatgaatattctgggtaagagtgagaccttgtgttttgacacaaaaagcacattctcctgagcactcagggtggtgccatcaactgtgtcatagtgctcaaattttttcccckgaaatgcagacatgtccatagacaatttgtacaatgaccatattctactacctcccaaatttcaaaaaatgtt

SEQ ID NO: 272039 - DNA, 531 bp, Homo sapiens
ggatggcacaggccaccaacagctttctccaaaaatgtgtcccatctagtatatgcttattgatccctttatgtctctagtgtgggtgagtatattcagagttcattcaccatcttttagccagctgcttagaaacacacaccctcttggtctcacacctcactttggaaagtgactcagctgaaatttctattttaacagcattcctggaggaggagggatgaggaaatcagggaaacacagggggtgttccactctgtggggtgaaaggaaagaggcttctaagcaacagtggatcaatgatgtgaccccatcttagaaagatgaaggacaatgcaccatgtggtgaaggtgtgacaggcgtgaccagtctcctgatgtggtccactgcatgttgttccagaggatggtctctggtgtcacttccccaaagtgaggacacctggccattatgggtctgcatctgatgagcagctgagcctcttaggacttagytatttcaataagttcagtagagctattcccaaacta

SEQ ID NO: 272040 - DNA, 536 bp, Homo sapiens
ttttgtcacaatataatggcatttgaaatctgaaaaaatgttattccttaaatggactgtctgaccttttcattcattattccattcacaagttgtttaacaggttgtcaggctggatgtcctcattccaggctccagggtgaatacaacttgaccactaaataaaatcccaaattgttaggaatgcaaatgaacagagaggttcggagaaaccctgtatggagttatcagaaaagtaattcttggaatagtcaatgtaagagtaaaggtattttttttccttcctggcacagggatgctgattatatttggctcaaaaggatgaatgatgtcacttaacttccaaaaacaaatattctgatcaaagtttcctagaatatttcacagaagttagtttgacagtggawgaaaataagagtagaatttatatacacattctttgcctgatttaaaggacttggaaaacacccacaaacaacacacacgtacacttacaaactattctgcaaaacaaatgagtaaagcatttttaagat

SEQ ID NO: 272041 - DNA, 563 bp, Homo sapiens
cacacacgtacacttacaaactattctgcaaaacaaatgagtaaagcatttttaagattcattcatagacccattattattattattgttattattattatttaagacggagtctcgctctgtcacacaggctggaatgcagtggcacagtctcggctcactgcaagctccacctcccaggttcacgccattctcctgcctcagcctcccgagtagctgggactacaggtgcccaccaccttgcccggctaattttttgtattttcagtagagacaaggtttcaccgtggtagccaggatggtctcgatctccggacctagtgatccgcccgccttggcctcccaaagtgctgggattacaggtgtgagtcactgcgcccagccagacccattattttgtttaacaaaaactttctgcctttgaattataagtatgtacattatcacagaatgagttccatgtttattatttggtatcaaawcaatgatagctgtcctacagcaatttctcaggtttgcattcctttcttggaaactgctccccttctccctcccattcatgt

SEQ ID NO: 272042 - DNA, 517 bp, Homo sapiens
atttgaggtgctttgaggaccagatggggagcattaatggggagaggcagagctgtgtagggtgagacaagtaggaagctcatttgcagccagtcaccctggcctgcacaggtacccagctgaggcaaaacggtaaggaccgcatggaaatcacatagcttctgcggcttttatgtaaatagcatcctacatatgggtaacaaacaccattctgttatcttccatctctctgcttctgccctgagaaaaaaacccaatgttgcttagatattcatggcatgaggtggccaaaggcaagatgcatattagccaatcagctcagtctggacacaaaggctttcctgagcacatccccttcctgccccagagatgttaagcttgggtggcttcacacactctgcctcagggagatatgttctgcataatgaatcccaytgttgtccgtaatgagaaggaggtcatctatacacttgacctgaaaggagtagagaaagagagagagaagagacagaatagt

SEQ ID NO: 272043 - DNA, 551 bp, Homo sapiens
tagacctgcttatgacttcctcattgctagcctgaattacttcaacagcctcctcactggcctcctgccttcagagttgtcccacttaatctatttcctccacacagcatttaagatagactctaataagaacccacctgaaaagcagttctatctttaactctgccctgactaaaacccttcagttgtttgccactgcccacagcaaactcctttaaactgcccaatttaaattcctttaaattgcccaacaagccattgtgacctatgtagaccttattccctctttgacctgacctcccttacactccctttctcacttccccacaggtcagcctccaacagctctgaattgtttgaagtcccccactaacattattttttgcctgcccagccttgttttctcaccggtcttcctgtgtggaacctatytccccacgaccaccttccattttatctcacttctaccaatcgtttaacgagtcagcccaagtgctgcctcctccaggaagcctcctcgactcctctaaccagtaactgttactaacagt

SEQ ID NO: 272044 - DNA, 570 bp, Homo sapiens
taggtcaggcagtgatgaagaacttttgtgtatacctccattgaatctccatcacaayccccggagctaagtatgattacaattccattttactggtaaggcgtaaaggagacctagagagagttccccacccaaggcccttcaggttccatgtggtagagtctgtatttgaagccagaaagactgtccttgctctctctggcttcattcatgttgtagacaaaattctaagaccaccccaaggttcccgcactctggtgtacattccctgtataatcccctcccctagagtatggaaaggattcatgaatactacgggattgtcattcccatgttgaggttactaatcaatttactttggtcaagcaaaagagatgatcctgggagagcccagccttatctatggagccctttcaaaagatggtcaagcattaaagtcatgctctcctaataaattaaaaaactcgctctacagtggagagaaccatgtggcaaggaacatcgggtgggaacaaagagtagcccctggctaacggctggcaagaaagtgaaaatatccattctataatc

SEQ ID NO: 272045 - DNA, 563 bp, Homo sapiens
ttctaacctcattggcaagttcagtccagtatagagcaagaccctggccaggaggagagctgggtgtaggggacactgctgttttccgcaggcttactcatgacatttttgggacatagaacaaaaatccaaatttggaattcaaatttggatgactctgatgccttgaaattctgtactggcatgtgaaggcagggggccagctgacctgtggctcccaaatccttatctggccctttatctcctttccatccccagccctgtgttgccctataagggggcaactccaacctcttcccaacagctgccctttgaccactgctttgccaagaagtatgttcaacagcagctcaatctgcctcaagagaaagtggtagacaaagtggtaggcaagagatctaagaaggycccagaattagatctagactatttgtcagggatttctgagtagtctatgtctaaatggcactggatgtgggctctgaatgagcatgctcccttggccccaatgcttctctcccccgcacgggtaaaggaatgctgaaggagggctggagcagagt

SEQ ID NO: 272046 - DNA, 518 bp, Homo sapiens
atattaaatatatatagccatactggagaaaacaatccagaaaaacacaaggaacatggcattagagatacagctaataaaggcacatgaaaatgcacaaagaatgattctacctgggtcatgttttttttttctttttctttttttctttcttcttagagtcatgtttttaacaagcactgctgtttggtcagtcaacaaacacactgaatactcactatgggcacaatgaaaaactgagaatgcctaatggctggaatgaccatgtgacttattatccaaactgaaacactcttttaaagagccagcgtcttgctctgtcacccaggctacagagcctgcagtggcgcgatcagagctcactgcagcctctaactcctgggctgaagwgatcctcctgcctcagcctcctgagtggctgggattacaggtacacaccaccatacccagctaagacagtgagtgtgtgcgcacatgtgtggagacaggagtcttgctaggttgactacactggtctc

SEQ ID NO: 272047 - DNA, 545 bp, Homo sapiens
tcctagaaccatcaactgttcatggtaagagactttgctgtttcagcaggttcctttaaaagcatatgatgtttagcctgggcaacaaactgaggccctgcctgtataaaaaaaaattagccagctacattggaggctgaggcaggaggagcacttgagcccaggaggtcaaggctgcagtgacccgaaatcgtagcactgtactccagcstgagtgacagcgtgacattctgtctcaaaaacaagggggggtggggtggggagcagatatgaagtgaagagagatgactacttaaaattactgttaagcgagaaaaataagactggggacaatgactcacacctataattaccgccctttgggaggccaaggcaggaggattaatggaaggtaggagttcgagaccagcctgggaaacctaacaagaccctgtctctaccaaaaaaaaaattttttttaattagtcaggcatggtggcatgcacctgtaatattagctacatgggcagccaacacggctgtggtggcctattactgtgccactg

SEQ ID NO: 272048 - DNA, 535 bp, Homo sapiens
ggtgtttcttccatcaggatcaggatgcacataatgtcaggttgtttctcttcttgtgatgtcagcgatctgttgatcattggttatgctttcctttaaagctgtctagctggggccaggcatggtggctcatgcctataatcccagcactttgggaggccgaggcaggtggatcacctgaggtcaggagttcgagaccagcctggccaacatggtgaaaccccatctctactaaaaatacaaaaaattagctgggcatggtggcgggtgcctataatcccagctacttgggaggctaaggcaggagaatygcttgaacctgggaggtagaggttccagtgagctgagattacaccattgcactccagcctggacagcaagagtgaaactccatctcaaaaaaaaaaaaaaaaaaaaaaaaaaaagctgtctagccaggcatggtgactcacgcctgaaatcccagcactttgggaggctgagcgggttgatcacttgagcccaagagtttgagaccagcctgggcaacatggta

SEQ ID NO: 272049 - DNA, 582 bp, Homo sapiens
atagggactcaagcacattatccatgacagaaaattccactgttgtacaaaataaaattgttaattctaactttattcttatacaatttgcagaatagatttgaaatgattgctataggttttaatgttgataagaactggactataatacaactgaaatgcagttgagctgagcaagtacatttaaaaatgaastcacagacatgatttttctatacatttttttgtttgaagaaaattatgataaagtcagcaagcagtcacagatgaaagaacaaataaaataggtggcttggatagttaagatgagaaacaaaaatatctgtttagagttaaaaatggacagagtggtttattttgcagcaagaagagaaaacggggtagtggatggcaactgatggaacaggagaatgctcagcagcatttgctcttccagcctgtcacgcctcctccactgctgatatctacattttcactgttgggctcttttacaggggtctgcaacaaacacacaaggaaaataactcatgaaaaaacactgccatggataaaatcacgattcaacaggaatattcttatgtc

SEQ ID NO: 272050 - DNA, 525 bp, Homo sapiens
cactattatttttagtcattcaaaatttctgtatgaagacagaagatgaatttttctccccaactccatttttagtattaatgttgatatgtttcttggcagtgataktcagtctattaaatctttagttcaccagattatctgagttatttgcaactcactgcatcatacgcaggtgttccaggagtgacagtgggatgattgtacattttggatggtagatcagtgtgtgccatattgaatggctttgttagtgtccactgttcatcatcatgcaggtccagaaacaaaggaaagataaacactctaaataaagcagagagactgaaggtgttccagtgtttttattttattgcttcttctttttattgcttccttttatttgataaatggatacttacggtacttgttttggaatggttttctcttctttggtttgtcaagtgaccaagtgcattgtttcctggacacattttgttatatctgacccgtggagaatgttagtgttcatagaaaatataggaa

SEQ ID NO: 272051 - DNA, 508 bp, Homo sapiens
atccattcatccttgatgtctttttcctacaaccagttaattccttgaacctgaatctcagaggtaggcaatggaagggaagatggagatctagaccattcccccttttgtcttttaaactttcatttttgacttttattttaggttcaggggtacatatacaggttttttatataggtaaactcatgtcatgggggtttgttgtacagattatttcatcacccagattaagcctagtaccccttagtcatttttcctgatcctctccctcctcctcccatcccccaccctccagtaaacttttttttccccgaaactcaatgattggyacaggaccttccagtaaacttttaacccgtcttctcaaaatatcttgttcccaaatgaccataaaattgaaatccaacatttgtgaattatttttcaaatatgttttacatacagaagaatgattaatattttaataagtctaactttgatggtaatttaaaattttactttattcact

SEQ ID NO: 272052 - DNA, 396 bp, Homo sapiens
caactcttcccatttcctcctccttacagaccctgataaccaccattctaccttctgtctttatacatttgactactttgcatacctcatatctcatataagtgaaatcatacagtatttgttttttgttcttttgtgcctagcttatttcactttaaaatgatgccttcagggtccatctgtgtcattacatgtgtcagaatttccttcctttttaargctgaataatattccattgtatggatataacccttttttaaatatattcattcattcattgatggacacttgggttgcttccgcattttggctacatgctgctatggacatggttgtacagtatcttagcctgtgattttagttcttttggggcatatacctaaaagtggaattgtt

SEQ ID NO: 272053 - DNA, 416 bp, Homo sapiens
tgtaagcagcatgaccttcctgactgctgggaagaaggaagcagttgacccggctcaccctggagaattgtggcaaatggtaaagacggatgactcctgtagaaacatctatcatgcgttgttattctgcctgttgcaccygagctccaggacgggcacgcaaagcaatagggaaacactgagaccctggtgtgccggagggagcatgaaggtggaatgtgtgactcctcactggcttgtgaatgaaaagttttatgatgggaatgaaaggagcatgtctgtacatggataatgagttctagaaaagtaagagacgcttttcaaagggttattattctttaaggagagagtttatttttactcctatttatctcagcaggtggaaacgctcccaaaaactttcttccctggttcct

SEQ ID NO: 272054 - DNA, 416 bp, Homo sapiens
tgtaagcagcatgaccttcctgactgctgggaagaaggaagcagttgacccggctcaccctggagaattgtggcaaatggtaaagacggatgactcctgtagaaacatctatcatgcgttgttattctgcctgttgcacccgagctccaggacgggcacgcaaagcaatagggaaacactgagaccctggtgtgccggagggagcatgaaggtggaatgtgtgactcctcactggcttgtgaatgaaaagttttatgatgggaatgaaaggagcatgtctgtacatkgataatgagttctagaaaagtaagagacgcttttcaaagggttattattctttaaggagagagtttatttttactcctatttatctcagcaggtggaaacgctcccaaaaactttcttccctggttcct

SEQ ID NO: 272055 - DNA, 416 bp, Homo sapiens
tgtaagcagcatgaccttcctgactgctgggaagaaggaagcagttgacccggctcaccctggagaattgtggcaaatggtaaagacggatgactcctgtagaaacatctatcatgcgttgttattctgcctgttgcacccgagctccaggacgggcacgcaaagcaatagggaaacactgagaccctggtgtgccggagggagcatgaaggtggaatgtgtgactcctcactggcttgtgaatgaaaagttttatgatgggaatgaaaggagcatgtctgtacatggataatgagttctagaaaagtaagagacgcttttcaaagggttattattctttaaggagagagtttatttttactcctatttatctcagcaggtggaaacrctcccaaaaactttcttccctggttcct

SEQ ID NO: 272056 - DNA, 562 bp, Homo sapiens
ggaatgcataattttcaggtgatagcatctgttatgggtgaattcttatatgtatctccaccaggttagaccttgtaaatccttaaatgagtcaatttttttgttcaatgaaaaatcaaagaagaaaaagccagccagccctcgtaatgactcaaagtttgctgaagctcagagataataaaataaagaacattttaaggaaaaaatataaataataaaaaataaataagtcataagaggctagaagttcatcttcttaccagtttttaygaaatctatattccgtataatggtccatcttttaacaactatatatttcaattacatgagtatctaaaatgtttcctatgtattatcaacagcaatgcatttcaaaaccaacagtggcctattcattcaaagcccactggtgacatattaaggccatccccagcagtgactcagtgggaccatgtgctggtgtaaccatgggatagtggcatggccattcacagcagatttcagcagcatctgttatacaggaaactcattataagtaaagaaggtgcctggaaaaccagac

SEQ ID NO: 272057 - DNA, 562 bp, Homo sapiens
ggaatgcataattttcaggtgatagcatctgttatgggtgaattcttatatgtatctccaccaggttagaccttgtaaatccttaaatgagtcaatttttttgttcaatgaaaaatcaaagaagaaaaagccagccagccctcgtaatgactcaaagtttgctgaagctcagagataataaaataaagaacattttaaggaaaaaatataaataataaaaaataaataagtcataagaggctagaagttcatcttcttaccagtttttatgaaatctatattcmgtataatggtccatcttttaacaactatatatttcaattacatgagtatctaaaatgtttcctatgtattatcaacagcaatgcatttcaaaaccaacagtggcctattcattcaaagcccactggtgacatattaaggccatccccagcagtgactcagtgggaccatgtgctggtgtaaccatgggatagtggcatggccattcacagcagatttcagcagcatctgttatacaggaaactcattataagtaaagaaggtgcctggaaaaccagac

SEQ ID NO: 272058 - DNA, 562 bp, Homo sapiens
ggaatgcataattttcaggtgatagcatctgttatgggtgaattcttatatgtatctccaccaggttagaccttgtaaatccttaaatgagtcaatttttttgttcaatgaaaaatcaaagaagaaaaagccagccagccctcgtaatgactcaaagtttgctgaagctcagagataataaaataaagaacattttaaggaaaaaatataaataataaaaaataaataagtcataagaggctagaagttcatcttcttaccagtttttatgaaatctatattccgtataatggtccatcttttaacaactatatatttcaattacatgagtatctaaaatgtttcctatgtattatcaacagcaatgcatttcaaaaccaacagtggcctrttcattcaaagcccactggtgacatattaaggccatccccagcagtgactcagtgggaccatgtgctggtgtaaccatgggatagtggcatggccattcacagcagatttcagcagcatctgttatacaggaaactcattataagtaaagaaggtgcctggaaaaccagac

SEQ ID NO: 272059 - DNA, 501 bp, Homo sapiens
tttctcccttcagaatttcccaggtgtgctgtgtagacttttttcagccactgtttctaaaattttctactttcattcattttaagggtgcttatatagagacctactgttaatgcacttctgcatctttcagtgaaggccagataatggagaaagtagtataattgctacttcttcagccatggccttttggctttggtgattttaatattttatgctagtgcaaagaaaaaactgttttgaaggaaaatccacatgcatcttctgctgcaggcattcagaaggatgcaatctatgccgccatcactgctgttgccttcccattagagaatatctaggccatctctctcaactcacgttgacagctctctcaccaaattttgatgtcctgatcaygaggtgatgctgaccatggttactgggtttgctgggtaacgtgatggtcatggaaggcacggcttcctcacttccaaaagggctcccaggtgtcagacaccagca

SEQ ID NO: 272060 - DNA, 601 bp, Homo sapiens
aatttatgttcttttgtctgcaccatacaccatacccccaaagtaaaagctagctgacttgctctcagttctggaaaattacaaattgtctggtttgagtgtgtttttgaaaataaaataaaattagaaattggaaattaacttgagtgtgctgtaagggtaacaaagaaattatccctaagattgtaccatatttaagagtgctataattttttcttttttatttcactcatttctacttctctatatccacagaagattgtggtaaagaatgctttgtgatatgttcatttatcaatttgaaatttctgttatttttgtcatttgacattagctttcatgttaattcagaaggccatatatacaagcttgactcgagtaaaatcttgtcaccttccaactccaacccttagtgactgtgtgcctctcttaatctctatatccctttatctggtcagtcaggcagatcattaaatagtcattattcaaaggcttgtgaagatggaatgcaataattcatgtaaagcatagagataggaatgtaaaaaccagtaamtattaactgccattgtcatcattatcatcaacactatcctacaga

SEQ ID NO: 272061 - DNA, 589 bp, Homo sapiens
tagaagaggaggggaaaatcctgtgccgacatatttttctgtctgttgctgctatctttggtcttttcaggaacttgccatttttaacatagctcactgttttgactgtgttgtgtatgatttcatccccatgcacattcacatgaaaagtgagttgtctaaccctgggctatgttttcatttattttcagagtattcacatactggagaggactgcttcctctagcaccgagccctctgtaagtcggcaattgctagaaccggagccagtccccctctccaaggtcagtgatgaaatgyggtgctttctctgctggcatgatgcctgctctggggccaattgaactgtgaataacgtttacacctgactcccctaaaatacttgtgatgccacttgtaggcaactctttgcactttttctgcttccaaggagtagagtttctctgccctttataagagagaacagagaatgtatactttgctgggatttgtagggttacattcaaaggtccaaaattctgtttaagggaagaaggaaaaagaagctattgccttccctgttggagataaacaaatatttctatgccca

SEQ ID NO: 272062 - DNA, 530 bp, Homo sapiens
tcccaggggcatgtgtatctttgaaagcacgaagttctttggtgtgtctttggtgagcaggtgtcttatgtgcactttggaatgcaagcaaacctccccgagagcagccgtgaccacagcgctgttattccctgttaatagcaggttctgagccacttgagacaacagcagcctttccatttctacacagaaagccaggtmcacacactaattgaacatttgtcatcaaagtagtcttattttgaaactttaaagtgcctctgtgttcagggattcactgtctggaaaaatgaattttaaacattctgagtacaggcaatcgaatttccatcctaccccaaacagacaaggtggctccactgagtctctgatggaccccacttacctctaggtctacctgggaaactctttttaactgaagttaaaagtgcatagctgtgtttgatgttagaatttgctccggaatgttgttcatccttctttctggtgggcctagtactgcttcaaaagcaacttctacttaagaatct

SEQ ID NO: 272063 - DNA, 603 bp, Homo sapiens
actcaagatcaattttctgtttcccatgtatttgtggctttatctgccatctgccaaaatgctctcagttttgaatgttccactatttaattctcttctattttgccctctctctctagaacatgttgtcttgctatttgacattcaaatttattaataaacttcctgtacaatgtatagcatattatattcctgttctttgctctcattttgaaatgtaagcatttgtaagtcaccattcagtctgctttttccttctcaattctatttcagtrttccttttctgaatttcatttactattcatttcacattctgtggccttttgtaattttccccattaccttttcttttctcatcagttttgccctctccagtaaaacaggaaagctccttccctctcagcctgttctcaaaatagacggagaatagccagttaccatcctccattctatggccttttagcaaaagctttctgataatatagaaaaggaacatggctatgacttcacgctcttctcaccctggactctgcagttgtcctgaaaatctcaagttatagaaccctagacagcatagaaaagtcttcaaggccaaaccaccca

SEQ ID NO: 272064 - DNA, 528 bp, Homo sapiens
tagctattaacttttaagagtgagctttgaaatataatgaatggtttttggttctgcaccagaaaagggtctgttttgtttcacctgccagtatcttcatcatataaacatggatctgcctacttatatttgccataatttgcattgacccttttattaccatccccacygctccctacccaattttaacgtatttttatttctgatttcttattagatcttgcacattgccagtcaaaccttgtggaacttagcaaactcctgcaaaatttggaaatacttcagagaactcagtcggcacctaactttactgacatgcaggtaaacatattcctgctgctggtaaaaggacttagggtattaattaatactctttattgggttgttctatgaatatataaggtaacatttaaagataaataactgcaatacagacattcatttatattctggagttatttttaatatttttgaatctcagtgtcagtgtgttaagatgattattttaaaacattttacatttaaata

SEQ ID NO: 272065 - DNA, 528 bp, Homo sapiens
tagctattaacttttaagagtgagctttgaaatataatgaatggtttttggttctgcaccagaaaagggtctgttttgtttcacctgccagtatcttcatcatataaacatggatctgcctacttatatttgccataatttgcattgacccttttattaccatccccaccgctccctacccaattttaacgtatttttatttctgatttcttattagatcttgcacattgccagtcaaaccttgtggaacttagcaaactcctgcaaaatttggaaatacttcagagaactcagtcrgcacctaactttactgacatgcaggtaaacatattcctgctgctggtaaaaggacttagggtattaattaatactctttattgggttgttctatgaatatataaggtaacatttaaagataaataactgcaatacagacattcatttatattctggagttatttttaatatttttgaatctcagtgtcagtgtgttaagatgattattttaaaacattttacatttaaata

SEQ ID NO: 272066 - DNA, 631 bp, Homo sapiens
acctttttgttgatattgatgctattcctttctgtttgttagttttccttctaacagtcaagttcttcagctgcaggtctgttggagtttgctggaggtccacttctgaccatttgactgggtatcaacagtggaggctgcagaacagcaaatattgctgcctgatccttcctctggaagcttcgtctcagagaggcacccacctatatgatgtgtctgttggcccttactgggaggtgtctcccagttaggctacatgggggtcagggacccatgtgaggaggcattctgtccgttctcaaagctcaratgccatgctgggagaaccactgctctcttcagagctatcagacagggacgtttaagtctgcagaagttgtctgctgcctttttttcaactatgccctgaccacagaggtggagtctatagaggcaataggccttactgagctgcagtgggctctgcccagttcgagcttcctgactgctttgtttacctacttgagcctcagcaatggtggatgcccctcccccagccagtctgccgcctcgcagttcgatctcagactgccgtcctagcagtaagcaaggctccatgggcataggacccaccaagccaggcacaggagag

SEQ ID NO: 272067 - DNA, 539 bp, Homo sapiens
tttcccactggctcgatgagtcctgtaagcatagtatctaycttagacctactgtgtagactttcatgtctaccgttgctgaatttcactgtcagcaactccattgtcaattcatttcacttttgacttattcatggacaggacttaagagcatctcctaatgtccccattccaaacttcagttcttactaccagaatattctacgatcaggcttccctcctttcacaggacttcaagaaagccttggatttctttcctgcgcagggtagaaaggcccaaattgagtgttgagggttctcaggtatcaacatggagagctgtaggcagctcccactccaaccatcactgacagagaaaccagttaccacttagatttttgaatcctataatacccaaattgatgaataaaaagctaagtaaataagtccccagtctgaacagatattcaattagggttagattaatacatcccaatttgtattctcaatttcatttcatgaattcctcaattaaaatggcccattccacgtacctcttt

SEQ ID NO: 272068 - DNA, 483 bp, Homo sapiens
ggcctcctatacaagcttcccgccaactctcatgaccccattcctcacccgctagaggaagagactcctcttccaagccatgtgagtcctcagagtgttgagggcacctgaatgcagataaaatccttttccatgatcctcaacatattaccaaagacccgcatttattttttttaatgttgttctagttccttatatcagaaaactgtaccattaattctgaaaactcccagatctacctattttttccactcacagtctctccccatgacatcctaatctccagcaacttttccatggartctgtgtccctcaatgggctgactgctctttctagattgagcatcaccacagttagggtctgaacttcctttctctgtcttctgacattctgccacataaataccattcctttgtaagtatcctaaaaggtcctcagtccttgttattattaagttacctggacaggattccagcagagta

SEQ ID NO: 272069 - DNA, 565 bp, Homo sapiens
gccatgtggaaaaatctatagtaatatgactttttctacttactgcttctcagtattggctggttcatgagccatgtgcatatatgtaatagagttgtgtgtaacatacaaaggtaaaccacagagatttatatcatatatatttcatttactaatatagattttaataagtcagtttccaaaataagtatgagtctctttaagccattactgtatttcctgttaagcctgatttgttttttatttaayggctacagagtaagtgaatcttccagtatatgcatctcttgaattttcacaggtttagtaagatcctgctccaggatcagatagtccagactgtaagagaaggtcagctacatcacagttcagactgctgtttttctgccagttatttttgaggtgcaagtatgagttcagagtttaagcttgcttgggattatgtcttttcttcctgtcattctatagttatttctctctgtagcagtgaaaaattggtgagtctgtggcagttctaaatcaacaatggaaaatgagactccctcttcctaccccaactgcctgc

SEQ ID NO: 272070 - DNA, 631 bp, Homo sapiens
acctttttgttgatattgatgctattcctttctgtttgttagttttccttctaacagtcaagttcttcagctgcaggtctgttggagtttgctggaggtccacttctgaccatttgactgggtatcaacagtggaggctgcagaacagcaaatattgctgcctgatccttcctctggaagcttcgtctcagagaggcacccacctatatgatgtgtctgttggcccttactgggaggtgtctcccagttaggctacatgggggtcagggacccatgtgaggaggcattctgtccgttctcaaagctcagatgccatgctgggagaaccactgctctcttcagagctatcagacagggacgtttaagtctgcagaagttgtctgctgcctttttttcaactatgccctgaccacagaggtggagtctatagaggcaataggccttactgagctgcagtgggctctgcccagttcgagcttcctgrctgctttgtttacctacttgagcctcagcaatggtggatgcccctcccccagccagtctgccgcctcgcagttcgatctcagactgccgtcctagcagtaagcaaggctccatgggcataggacccaccaagccaggcacaggagag

SEQ ID NO: 272071 - DNA, 566 bp, Homo sapiens
ccctcggcgtagtcgcacccccactggccatctattcccgtcacctctaagtgtggactcccttttggaaaccacagcagcctttgcttaaggtatttaagtttactgacagttctttcctttctaacaaattgttattcatggttaggccgttggagaggtgtctggagaatggcaggtagttcatagtggaagaagtaggagatgaagaaggaagaattactcttaagrgtagctgattaagtaggcaagaaccagctcatcagggactccacagagggttttggatttatcctatcagttaacaattttaactggtaaatgataatgccagaaattagaactattacagcatatttctgcatattagaaagattactctggtacagtatggagggtaggtggaattgggaggcaaggctagttggacagattcttatggtatttgagataatttgagaatagcttgtacatttgagatatttctaaactgaggaagtgccatgccagcattggtggaaggagggaatacatttcaaagacacccaggagggagaatcagcatg

SEQ ID NO: 272072 - DNA, 514 bp, Homo sapiens
ctcacccagcctaagataaatcttcacctaggaattacctgccagggttgatgaatggtagttagtagctaaggaggtggcaatttaggtaattgattctggctcaaatctttaagacagtaacttcttttacgcattggaaaggaattgtgtgtttcttggatatattagccttgaaatgtgcataagggacatgaggtgtggggaaatgagcatgcattgtagtttttagtgcagtccgagctcagtaaagcaagtggtgagaatatgcataaaacctgctgcgtgargaatctgtgcccagttcctggcttcaaggtgcttcctccctgttaggcctttggtcctgtatgccactaatagcgatgttattgctgacaagtctccatagctcttcttgctcattggctggttccaggggctggtcctctgcctccttttcccttgcttatgccactgctcactcctcttgggtatatgccctactttatttctgccatcttctaggcccttt

SEQ ID NO: 272073 - DNA, 551 bp, Homo sapiens
cttgctcattggctggttccaggggctggtcctctgcctccttttcccttgcttatgccactgctcactcctcttgggtatatgccctactttatttctgccatcttctaggcccttttctgttgtcatgaagarcatcacttccctgacaatacttctcccaaagtttcaatgatattattatagaaacatggtattattagataaaaataatttttagggcaggaaataataaatgtagacctaagcactacctgagagcactacaccagaaagctcatggcgcttggttgtagcaaactttaaaaacagcctgtacgatcaaggcaaaagggggaggatgcgcagaaaggggctgttgcatgctcagttgccggcttacacttttcaccactggggttgccagagtgggaacagtcttgatttccatgcttcctgtgctatgtaacagcaaactcttttctaccactgcatagatattattaataaaatgatgtctttaaaacttttagctttgaactcaacatgcttaacatctggcttgaaatcat

SEQ ID NO: 272074 - DNA, 551 bp, Homo sapiens
cttgctcattggctggttccaggggctggtcctctgcctccttttcccttgcttatgccactgctcactcctcttgggtatatgccctactttatttctgccatcttctaggcccttttctgttgtcatgaagaacatcacttccctgacaatacttctcccaaagtttcaatgatattattatagaaacatggtattattagataaaaataatttttagggcaggaaataataaatgtagacctaagcactacctgagagcactacaccagaaagctcatggcgcttggttgtagcaaactttaaaaacagcctgtacgatcaaggcaaaagggggaggatgcgcagaaaggggctgttgcatgctcagttgcyggcttacacttttcaccactggggttgccagagtgggaacagtcttgatttccatgcttcctgtgctatgtaacagcaaactcttttctaccactgcatagatattattaataaaatgatgtctttaaaacttttagctttgaactcaacatgcttaacatctggcttgaaatcat

SEQ ID NO: 272075 - DNA, 414 bp, Homo sapiens
gggatgttcattcccagaggattcactgtacctttgtcaayagggtccttgtagggatgccatgcttatgtaaagctgttctcttcttgtaataaatgcagttgctccacatactaaaccgtgttatagcaagtagtgttttactgatgctaacttaaagcatgttggaggtagtgttatgaggagaacttagagctggggtactttcagtgctatgttctttgttatggttgtcagtgtctacactgttgagtgaagacacctttttgtttgcacttaagttagttctgcagcactgtcatatatattaattatgtgctcctggaaaatgaaaatacagatgttttctttaaacacactaaaatataattctataaactaaagccagttcattctatttctaactaattttta

SEQ ID NO: 272076 - DNA, 576 bp, Homo sapiens
atgatcaccaccagtcagtacaygcttatccaaccctgccactgttataattcaaataagttcaacaggaaaaattagcctcattaacaagaaaatatgttgggatagaaacgcccaaaaagcaccattttccctcagtttctctggtctgaagtggaacattcagtatcactgccgtgtttgtttggatgtgctacagaattcaacatagtatagaaaccccacccagctaccatacctgttcaattcatgatcccattctaatatggtaaacaggtaacatattggagtcttaagactctaatattttcttttctcagttaaatccttttaagccatattggaaggttgtatttattttaattgagtgtctttattttagcccaaaatgttttcactaccttttttcttagagactcgtaaggtacctagaactgaagagccaagatcactatgtgctctggctgggtgatgatgtaaatatgtacatttggctttgtaggctatgagaagctgcagtgcagtcctgtctctaacacttgcagagcctgtataattaactaaaatatgtaaatc

SEQ ID NO: 272077 - DNA, 553 bp, Homo sapiens
gtttcaaggaaaatggaaaaaagtaagaacaaactgtgtatctattttttaatgcaagtcacgacccagtaccaggctgtaaaatcaggtagcgaccaacttttttgtagcagaaataattttcagtggactagaataggacagaatggagtggagtcaactacaataaaatttggaagcgtctctgatatagtaaaactaagtattatttcatcaagcatacacacataggtacatgcgtgtttggattacaatgtaaaatctgtctcttgtcgaaggttgcaataaaaaaagatcaaatatatagtataaaatcaactataagtaaatggcacactacaaaaaaataaccaaacgttcacagcatttactgcatttctgggtaagtgttgtggatttttttgcttcacactttgtcatwgttttagtttatgatatgtatatattacttataaaatctgagaaaagcagctgggcgtggtggctcacgcctgtaatcccagcactttggaaggccgaggcgggcggatcacaaggtcaggagactgagacc

SEQ ID NO: 272078 - DNA, 615 bp, Homo sapiens
gctggccattctatgtgacaggagaaattccaaacagattaaattacctcttggtgtaagagtgattcttaacgtgagacctaacaagtccagtgtgaataytaagaatgtaagtttctccattgtgtctatttgggaattcttattgcttaaccagcttctgatgctgtgaatgccatttttagtttcacattaaatatgagatttcttctgctttgttggtctctgaagattgctcagcgagcacctggaataaagaggagcgaatggcagaaagcgggtagggataaagggagaaaagatgacatagactgtggtccctgatgaatccaggaaccacagcctgaagcagtttatcgtattttaaacatgttctgtccaaaagatgctgccaaataatcatgcaatctaagaatgtgcatggtatgcaaatgcagtttgaagacaggtcctgtctccctcccaaccagattgtctcttccccaagtgtcctgtgaaggagtttgaaactgacactgcttgttttccaggtttagtactttcctcactttagcagatcctatgaaaggaccaggaaaacattatttctccatccatctgtttgaaaatctcttg

SEQ ID NO: 272079 - DNA, 615 bp, Homo sapiens
gctggccattctatgtgacaggagaaattccaaacagattaaattacctcttggtgtaagagtgattcttaacgtgagacctaacaagtccagtgtgaatactaagaatgtaagtttctccattgtgtctatttgggaattcttattgcttaaccagcttctgatgctgtgaatgccatttttagtttcacattaaatatgagatttcttctgctttgttggtctctgaagattgctcagcgagcacctggaataaagaggagcgaatggcagaaagcgggtagggataaagggagaaaagatgacatagactgtggtccctgatgaatccaggaaccacagcctgaagcagtttatcgtattttaaacatgttctgtccaaaagatgctgccaaataatcatgcaatctamgaatgtgcatggtatgcaaatgcagtttgaagacaggtcctgtctccctcccaaccagattgtctcttccccaagtgtcctgtgaaggagtttgaaactgacactgcttgttttccaggtttagtactttcctcactttagcagatcctatgaaaggaccaggaaaacattatttctccatccatctgtttgaaaatctcttg

SEQ ID NO: 272080 - DNA, 582 bp, Homo sapiens
cacttgtattttatccccagtaggggaaagaaagagaaagagacaggcagacaaagagacagacagagatctgcataatccattcatttctgaagataactagctactatgatgctgcatttcttttctcataggcccataaaacttcaaaattgagaaagatatttgaggccatccagtatcactttcataatattggaagttcccactgcarcatccataacatctggacttttgtctttgcaggacattattgagaggaaatattggggtggaggcagatgacttgttctaattgttaaaagctctaattgttaaaaataaagaaagagtttcttcttacactgacatttccaaagtaaattaccaaagcactatacccgtccctgattgttagactttaccacattattattatggtcacagacatgtcttatttccatgacgtggctgagaaatccttgatgagaaaatctcatagcaatctctccccagatcacttttcacatatgataggtagtaaaaaaatatttgagaatagttgattgtgccagactgttgtgtctcattatgaaaaaaagc

SEQ ID NO: 272081 - DNA, 541 bp, Homo sapiens
cgccggattgctgagaatcttgaaggccaggcatcttagtcatgaactgagtagaggtgagattatattttttttacacaatgcttgctgaaaatgacatctcaattcaagggctggatgaaaatgcaactcattgctttattcccttatgaattttgatataactcacaaaattaatctaatagaaatgaaattggagaattactaggtaagagtccagcatctgaaacttgtcgggtcctagataataacctattacaggccatggggagccgttgaaggtttgrggccagtggggtagtgtggttaagcaggattttaagactaggctgttaggaaaatatgctttaccgagaaaaaaaaaagataaatttaaagtctcgatgaaggaaatgggagatgatcatgacttgaataaggggggaatatggactgaccatggaaatataaagtattacattaaaaatagctatttgaaatgatttgatgtttaatatctataactccccacatttcatatattgttcaaatctctttacat

SEQ ID NO: 272082 - DNA, 607 bp, Homo sapiens
cagtgatgatcttgaattctccaagcaaggaagaagttctctctctctgtgcatgtcctgagtcaagagggcttttgctgtgctgtgctgcattcctgcctagggatttagggcaaattgttgaaagagaacttaggctgaggttgaagagaaaaggccaacaagsggggaagggtgagtgagcaactgatttggatatctgcccattgagatttcagtatttgccccaaatggcctcattgggatgtgagcaggctgacctcctaggctcagggtagatgcttccagccagtatgggtacacccatttttggaagagacctaaatgaggatgctctagaaggctgtaagcaaaccactgcctttacttgtggcttgttccttgttttgatttgactgcttgatttccatttacacacaacttttttttgtatatttgtttatgtgtgtaaaatatttaaactatcagtaattaattggtggttccttcttccctggagtctgtgtcaccagtggaactctgcattagtttttcgtgcccatacaatcagttaaatgttcagtgaaggtgtccaaagtgaaatatttctctagggttatggccaaac

SEQ ID NO: 272083 - DNA, 559 bp, Homo sapiens
ttctgctatattaaataactcagaatttactcatttgtgaacatacctctctgtacttccaagttatctckttaccacacacagaaatgtaaaagctttaaacaatgtgttttttaagtgcttagtgacaaccctaaaatatttccaaaaggttctatggctcagacagactttgtgatgttattctttaagaaatgcaatggttgataatttgcatttatgatatttcctcataggttcactttcttagttaaggacacactatctcacaagagtgctctttaaagagcaactttttaatgcctaagcattgatttagagttggagctgggctggtaccacgtggaccgctcttactctaaaaggaaaattgagaccaccatgaaagtgttttgattttactaaagccatgtcctcaggcaagagggacttggctcagtcaggtctgagagaagtacatcaaaatgagtttgaccaagtggaaaatggatgctctaaatcgttgtctacagtatttccctgacatctagatcaaatatgtacattattacactttgtg

SEQ ID NO: 272084 - DNA, 535 bp, Homo sapiens
acttaccctccccttcacttgcctatgaaatcttaccgttcttgagtcctatttcatcagcatcatactgaatttttgacaatgcatttgtggctagtaatgtttcaatgttaccctttataaatctggtactttgtaattctctaaatgtggattttcacatctattaccatttgaaatagtggagctagagctatttggaagcctgaattcatatgtcagttccacatctcaattgagcttgttatttagctctctaagcctcagtttgcttctctgtgcagtggggatggttacatctagcttacaggattaccgagaagattgaaggatatgatatacatatagtctaacataatcarttttcaaaaccgagagactgtgttaattgtaaatgaactcaagtgtatccaagtttttccttttccaattccatcaaaactttattactactctaacttgaagatattataaatatccacatatttatccatgagaagaaacaggatatgagtttacatgctttactttaaat

SEQ ID NO: 272085 - DNA, 535 bp, Homo sapiens
acttaccctccccttcacttgcctatgaaatcttaccgttcttgagtcctatttcatcagcatcatactgaatttttgacaatgcatttgtggctagtaatgtttcaatgttaccctttataaatctggtactttgtaattctctaaatgtggattttcacatctattaccatttgaaatagtggagctagagctatttggaagcctgaattcatatgtcagttccacatctcaattgagcttgttatttagctctctaagcctcagtttgcttctctgtgcagtggggatggttacatctagcttacaggattaccgagaagattgaaggatatgatatacatatagtctaacataatcagttttcaaaaccgagagactgtgttaattgtaaatgaactcaagtgtatccaagtttttccttttccaattccatcaaaactttattactactctaacttgaagatattataaatatcyacatatttatccatgagaagaaacaggatatgagtttacatgctttactttaaat

SEQ ID NO: 272086 - DNA, 526 bp, Homo sapiens
aagtcaatatagaatcttttctttttataaattagatagtgttagaatatactttgtattgttttagtatttaggagcaggagcttataaaatccaagaacaaatttatttaccaagaaaataaagaagaaagtgaaaagacaagcttttaaagaaattttctacarattttctgaaattttctgatggaaaggttttgttttgttgtgtttttaaagataattgcaaaatgcttattatacatgtgaaattgcagataaataccgatttgatctttggcattattttttgcttggggaatactcattgctgctattataaatctttcaccccatcctcacttcttctatccctgtgcttcctctgcctagcaacctgaaaaaagcaagccttctagcaggcagcagatgaaggttgccatgaaaactgtgaatcagtcaggacccaggcatccatgtgtgtggggagctgtcagcaacctctctttctgatgttgtgcctttttcctctggcacatttctgttgg

SEQ ID NO: 272087 - DNA, 541 bp, Homo sapiens
ttttcaagtggtatttttcttaaggttgaatatcraagtatatatctaaatgatataaatagaaatgtctggtgtagtccaatattaaacacagcaaaatttcaattagccaaataaaaatttcacagccctccattataatttaatcttgcttttcctttcagagaggaaatcatatgaaagaggtgtgttatcagacaacaagctgaagatatgtcaggcactgtgttctgagcccccacagtgggctacctgatatgttgaaagctctttgttactttcagtaagaggggtgcccattgggagcatatagttgaagtgaattgacagagatttatttcagaaagtcactttcagggtcagcacaatgagccaaagcttctgttgttctgcaaaagcaccaaaaactgttcacagcaatggccttcaggcgtggaagagaccagtctccaagaaggagacagacatcgttatgttctgctgatccaaagataaagggactaatttaggtgaaaataatcaaatatccagaattatacac

SEQ ID NO: 272088 - DNA, 541 bp, Homo sapiens
ttttcaagtggtatttttcttaaggttgaatatcgaagtatatatctaaatgatataaatagaaatgtctggtgtagtccaatattaaacacagcaaaatttcaattagccaaataaaaatttcacagccctccattataatttaatcttgcttttcctttcagagaggaaatcatatgaaagaggtgtgttatcagacaacaagctgaagatatgtcaggcactgtgttctgagcccccacagtgggctacctgatatgttgaaagctctttgttactttcagtaagaggggtgcccattgggagcatatagttgaagtgaattgacagagatttatttcagaaagtcactttcagggtcagcacaatgagccaaagcttctgttgttctgcaaaagcaccaaaaactgttcacagcaatggccttcaggcgtggaagagaccagtctccaagaaggagacagacatcgttatgttctgctgatccaaagataaagggactaawttaggtgaaaataatcaaatatccagaattatacac

SEQ ID NO: 272089 - DNA, 421 bp, Homo sapiens
tgcaaaagcaccaaaaactgttcacagcaatggccttcaggcgtggaagagaccagtctccaagaaggagacagacatcgttatgttctgctgatccaaagataaagggactaatttaggtgaaaataatcaaatatccagaattatacacactaaaaattctggtgtattaagtctctggcatatataaattatattttcacagtggttatattatctcaggtctaaaagtactgccttgttacactttaaatcctacataagaagagataactttcaaaattctgggatcatatttagtatgttaaaataaattgcaataattcaggaaaacwtttattatcaatttcagtggaaaatctgactccttaatgagcacatttttttcactaaagccctttattcatgtttattagagagg

SEQ ID NO: 272090 - DNA, 608 bp, Homo sapiens
cctgcaagaaaggtctggctaggtcatgtggtaatgtctgcagtcccctcatcacacagcagagtgccttatgcacactagcagctcaatgcatatgtgctaggygaataaaaggaagaggacttatagttatttccatagccattaaggagttgtttcttcaacaagagagtgagatccctatggaaagcagtcctgccctgcattgcattcatcttccctagcacagagctgcataccaaaggatgctcacagtacatccatggttgccggctggtatatctcagtgtatcacatcaaattcacctaaatcatgaaattaaaatgttggtatttcttgcattgaagtgtgactaagaggaataccacgtcattatgatggcagtataaactaattgctaacaatagccttcatgacttagattccttatctataaaatgggaataatgatagtacctacctcgtagttgtgataattaaatggattaatgacagtgaagtgctgcaaacagtgcatggcgcatagcgttatgatttttgttttgttaaaagagaagatattgatgtgagagagctaagctctgacaattagttagaagaaagagga

SEQ ID NO: 272091 - DNA, 608 bp, Homo sapiens
cctgcaagaaaggtctggctaggtcatgtggtaatgtctgcagtcccctcatcacacagcagagtgccttatgcacactagcagctcaatgcatatgtgctaggtgaataaaaggaagaggacttayagttatttccatagccattaaggagttgtttcttcaacaagagagtgagatccctatggaaagcagtcctgccctgcattgcattcatcttccctagcacagagctgcataccaaaggatgctcacagtacatccatggttgccggctggtatatctcagtgtatcacatcaaattcacctaaatcatgaaattaaaatgttggtatttcttgcattgaagtgtgactaagaggaataccacgtcattatgatggcagtataaactaattgctaacaatagccttcatgacttagattccttatctataaaatgggaataatgatagtacctacctcgtagttgtgataattaaatggattaatgacagtgaagtgctgcaaacagtgcatggcgcatagcgttatgatttttgttttgttaaaagagaagatattgatgtgagagagctaagctctgacaattagttagaagaaagagga

SEQ ID NO: 272092 - DNA, 578 bp, Homo sapiens
catatgtgctaggtgaataaaaggaagaggacttatagttatttccatagccattaaggagttgtttcttcaacaagagagtgagatccctatggaaagcagtcctgccctgcattgcattcatcttccctagcacagagctgcataccaaaggatgctcacagtacatccatggttgccggctggtatatctcagtgtatcacatcaaattcacctaaatcatgaaattaaaatgttggtatttcttgcattgaagtgtgactaagaggaataccacgtcattatgatggcaktataaactaattgctaacaatagccttcatgacttagattccttatctataaaatgggaataatgatagtacctacctcgtagttgtgataattaaatggattaatgacagtgaagtgctgcaaacagtgcatggcgcatagcgttatgatttttgttttgttaaaagagaagatattgatgtgagagagctaagctctgacaattagttagaagaaagaggagacaatttatccaagaggacagtccatgtctattccaggaaaatattaatgactgttcaac

SEQ ID NO: 272093 - DNA, 578 bp, Homo sapiens
catatgtgctaggtgaataaaaggaagaggacttatagttatttccatagccattaaggagttgtttcttcaacaagagagtgagatccctatggaaagcagtcctgccctgcattgcattcatcttccctagcacagagctgcataccaaaggatgctcacagtacatccatggttgccggctggtatatctcagtgtatcacatcaaattcacctaaatcatgaaattaaaatgttggtatttcttgcattgaagtgtgactaagaggaataccacgtcattatgatggcagtataaactaattgctaacaatagccttcatgacttagattccttatctataaaatgggaataatgatagtacctacctcgtagttgtgakaattaaatggattaatgacagtgaagtgctgcaaacagtgcatggcgcatagcgttatgatttttgttttgttaaaagagaagatattgatgtgagagagctaagctctgacaattagttagaagaaagaggagacaatttatccaagaggacagtccatgtctattccaggaaaatattaatgactgttcaac

SEQ ID NO: 272094 - DNA, 428 bp, Homo sapiens
gaactgttggtgggaccactgatagtcttatcagtgaattccctaagctgtaatagtctcaacaaaggatccattctgcagcattatataatgctgcacytttcgttgttctgctctcgtgtgaccctaaatgttgcttctgcaggaagttttatgcaggtggaggggctaacttaccacttacacacttccaaaatcactgccatcatcttctccctgcctaggcctcatgacatttctgctcaccaaaagcatacactactattccgttcaccttttcctccatgacattgttgaggaaggttgagtggaaataaagaagatggagattctaggaagatgaggttagatggataagatggggtaggagtcccagagttccaacatgaagagtagcccaaactgcttctcaaagaagctacttccag

SEQ ID NO: 272095 - DNA, 428 bp, Homo sapiens
gaactgttggtgggaccactgatagtcttatcagtgaattccctaagctgtaatagtctcaacaaaggatccattctgcagcattatataatgctgcacttttcgttgttctgctctcgtgtgacccyaaatgttgcttctgcaggaagttttatgcaggtggaggggctaacttaccacttacacacttccaaaatcactgccatcatcttctccctgcctaggcctcatgacatttctgctcaccaaaagcatacactactattccgttcaccttttcctccatgacattgttgaggaaggttgagtggaaataaagaagatggagattctaggaagatgaggttagatggataagatggggtaggagtcccagagttccaacatgaagagtagcccaaactgcttctcaaagaagctacttccag

SEQ ID NO: 272096 - DNA, 521 bp, Homo sapiens
atattaatagtcacgagtgtgtcaaacccagttttatgggaggctggatgcagaagtgtcttaacattttatagttgatgagaacaagataaaaatagtattttcacatttatttgtctaaaattacaggattgatttctatctgagtagttataattgtggctaaatgcttggtgacctattttctggcatctacatgaatagttgatgtagtgatttatgaagcaaaagaatgaggaaaaaagcagtattttaacaacttgcaactgtcaagagagtttccaatgatataacagtaaaaagtaaaataattgataatcaatggaaaactcagcctctgtttaratgtggcagcttgagatggtcaattttaatctagtaaaactatctacaaaggaatattcaaaagatttaagaaaaatatagtgactgctcagaagtaaaacataatgtcgattttgactgccagaaaacaaactttcaatagtgggagagaggaatgttaaaagcaattcctacag

SEQ ID NO: 272097 - DNA, 599 bp, Homo sapiens
aagtaaaatgttgaccattagataacgctttaygtaattctcatagcttgagaaacagtatacatttaataagaatatattacctcattaatatacttagctaatataaaatataattttttcattcatatataatatactgagttaatattataagtaatataattagttaatatagaagtttaaagttaataaaatatagttagtgacttatttaccatattatactttatattttaatttttccaactgtttcaaatatatcatgttttataaaaaacatgtttgatggttatattcatgtgttaaatttccaaagccttatttgtccagcatgaggagatatcacttcaggaaaaacaacaacaacaaaaaaaaaaccttgaacattcaacatgttgacatactttgctaatagattttccccacatgacctcaagtttgatttttatgaatgaaagccttttgcactgttgcactgacgcatcggttgttacattaattggggataaaaggtgcttttaatgaaaatcgtctggaaacaaaaggcagcatggggaagcagcagttgtcacactcttggacagaaggtggcagca

SEQ ID NO: 272098 - DNA, 599 bp, Homo sapiens
aagtaaaatgttgaccattagataacgctttatgtaattctcatagcttgagaaacagtatacatttaataagaatatattacctcattaatatacttagctaatataaaatataattttttcattcatatataatatactgagttaatattataagtaatataattagttaatatagaagtttaaagttaataaaatatagttagtgayttatttaccatattatactttatattttaatttttccaactgtttcaaatatatcatgttttataaaaaacatgtttgatggttatattcatgtgttaaatttccaaagccttatttgtccagcatgaggagatatcacttcaggaaaaacaacaacaacaaaaaaaaaaccttgaacattcaacatgttgacatactttgctaatagattttccccacatgacctcaagtttgatttttatgaatgaaagccttttgcactgttgcactgacgcatcggttgttacattaattggggataaaaggtgcttttaatgaaaatcgtctggaaacaaaaggcagcatggggaagcagcagttgtcacactcttggacagaaggtggcagca

SEQ ID NO: 272099 - DNA, 599 bp, Homo sapiens
aagtaaaatgttgaccattagataacgctttatgtaattctcatagcttgagaaacagtatacatttaataagaatatattacctcattaatatacttagctaatataaaatataattttttcattcatatataatatactgagttaatattataagtaatataattagttaatatagaagtttaaagttaataaaatatagttagtgacttatttaccatattatactttatattttaatttttccaactgtttcaaatatatcatgttttataaaaaacatgtttgatggttatattcatgtgttaaatttccaaagccttatttgtccagcatgaggagatatcacttcaggaaaaacaacaacaacaamaaaaaaaccttgaacattcaacatgttgacatactttgctaatagattttccccacatgacctcaagtttgatttttatgaatgaaagccttttgcactgttgcactgacgcatcggttgttacattaattggggataaaaggtgcttttaatgaaaatcgtctggaaacaaaaggcagcatggggaagcagcagttgtcacactcttggacagaaggtggcagca

SEQ ID NO: 272100 - DNA, 599 bp, Homo sapiens
aagtaaaatgttgaccattagataacgctttatgtaattctcatagcttgagaaacagtatacatttaataagaatatattacctcattaatatacttagctaatataaaatataattttttcattcatatataatatactgagttaatattataagtaatataattagttaatatagaagtttaaagttaataaaatatagttagtgacttatttaccatattatactttatattttaatttttccaactgtttcaaatatatcatgttttataaaaaacatgtttgatggttatattcatgtgttaaatttccaaagccttatttgtccagcatgaggagatatcacttcaggaaaaacaacaacaacaaaaaaaaaaccttgaacattcaacatgttgacatactttgctaatagattttccccacatgacctcaagtttgatttttatgaatgaaagccttttgcactgttgcastgacgcatcggttgttacattaattggggataaaaggtgcttttaatgaaaatcgtctggaaacaaaaggcagcatggggaagcagcagttgtcacactcttggacagaaggtggcagca

SEQ ID NO: 272101 - DNA, 499 bp, Homo sapiens
ctgcaacttctgcctcccaggttcaagcaattctcctgcctcagcctcccaagttgttgggattacaggtgtgtgccaccatgcccggctaatttttgtatttttagtagaggcggggtttcaccatattggccaggctggtctcgcactcctgaccttgtgatctgcctgcctcagcctcccaaagtgctgggattacgggcatgagccacygcgcccggtcagcaaatgttttcttgaagggccaagagtaaatattccaaggtttgtgtgccatacagtttctgtcctaaccattcccctctaacattgcagtgtaaaaataggcatagacagtatgtaaatgaatgagcctgactgtgttctaataaaactttatttgcaaagtaggagtttgactcctaggatgtagtttgctgatatctgcattattggtgttgttagtgttagaggtctaggttttatctttgtctccttctccctcattgtcatagcctat

SEQ ID NO: 272102 - DNA, 612 bp, Homo sapiens
ataatctgtgggacttactaaaaaastacagatatcaaaacatatacacagccaccccgcccaaagataaagtgcttcaggtgattctaatgtacagccagggttagtaatcttttcccaataattaaatttacccctgcatttaaaatatgtacacattgccaggagtggtgactcacggctgtaatgccagcactttcggtggctgaggtggacggatcacttgaggtcaggattcgagaccagcctggccagcatggtgaaaccccatctctactaaaaatacaaaaatagctgggcatggtggtgtgcacttgtaatcccagctacatgggaaacggaggcaggagaatcacttgaacctgggaggcagaggttgcagtgagccgagattgtgccatagtactctagcctggatgacagagtgagaccctgtctcaaaaattaaaaaataagataagttaaaataaaataaaataaaataaaataagtacccataaaagcatctttgtttctaggtttctccattcaaactatcctacccacaactatcaactttccaaaagcactccttgaatcgtctttcatttccccaggaacctctgatgatcc

SEQ ID NO: 272103 - DNA, 612 bp, Homo sapiens
ataatctgtgggacttactaaaaaagtacagatatcaaaacatatacacagccaccccgcccaaagataaagtgcttcaggtgattctaatgtacagccagggttagtaatcttttcccaataattaaatttacccctgcatttaaaatatgtacacattgcyaggagtggtgactcacggctgtaatgccagcactttcggtggctgaggtggacggatcacttgaggtcaggattcgagaccagcctggccagcatggtgaaaccccatctctactaaaaatacaaaaatagctgggcatggtggtgtgcacttgtaatcccagctacatgggaaacggaggcaggagaatcacttgaacctgggaggcagaggttgcagtgagccgagattgtgccatagtactctagcctggatgacagagtgagaccctgtctcaaaaattaaaaaataagataagttaaaataaaataaaataaaataaaataagtacccataaaagcatctttgtttctaggtttctccattcaaactatcctacccacaactatcaactttccaaaagcactccttgaatcgtctttcatttccccaggaacctctgatgatcc

SEQ ID NO: 272104 - DNA, 515 bp, Homo sapiens
gaaaggcctcaaattccaacacctgcagcctgagctccgaggtcataaacataaaggtagtgtatctgtttagggcttctatacaggtccctgagcagcaggggacaccaagaaactgcttggaagttttttttatttttatttttwttttttcctctcctccttaggaatgtttcagggaatgggttctgaaaggccaggaaaggctcttgaaattggataagctgagcaatttgaggagagtctttacctgtttcagaggctggtgaagggcagtacagtactataattaaccatttagctgctggagtcagagtaactgggtttcatcttggtttggtatctacttgccatctgtctggtaacctaccagataaatctcagatatctcatctgttaaagtggggctaatggcagtggagccctcagggtggtggggaggtttgaatggggacgattcctgtggagcacttatcccagagaatggcacaaagtgagtgtcctgtcagtggcag

SEQ ID NO: 272105 - DNA, 614 bp, Homo sapiens
ctctgccacagttattcatcaggagagccctggctttcgacatcggccacccttcccatttcctttgtttgggatgtgtgttccatcaagaatttaagccttgttcatctgtcatctctggcagttagaagtttgcatctaacctgtgctgtgagaactaaattgttctctggccacgggtaccatataataatgactatcatcaagggacactactcccccttccccaccaatagytctgaagatcaagtcatgtaaagcgttagtcaccagttgccttcatcttttagtccagaatcaatagacaatccattgttaccagtctagaagccttaagtaggatgctaggggagaaaagagtttgattcatatctgtccatttgcttcccagtctacacagttgctcataagtgctgtaagagccaccaactactgatgaggagcagttggaaacacgcctctaggcttttcctagagcaaaatagtattaattctggggtcactaattcttcatcttttcatggtgcttcataatcttccattaacaataagagctaacagtgaaacaggaacaattttaaatagtttgtgtattatctcatttataccctgcc

SEQ ID NO: 272106 - DNA, 527 bp, Homo sapiens
ctttggaacatagttctttttcagatagggacaacctatactggagtgattaaaaaaaataaaagcaggtcctcatttwtcataaagcctcattactccaaaacctcggtttctactcaagctgtgccgaagattacctttgtcctattatgaagacttgctacacaattccccataataattgatttagaattggcatgttcaatttaattctgggtttgcagaaacttcaacacattaatgcagatggattttgttaattgccacggaattttcatgtgttcataaaagtagtgctggcaaccagggcctctgtttggaaaccctcttcagaaaaatgcctaagaaaggatttttttccccactgtctccacattgagcaagttagtgttgttctgagaagagagaaaagagttagttattgatgggggcattgatccaagtccttcttctcacttcaatattaaaagataaaagggctgattgtgctcagtttatcatgctggtctctgttttaccttaaaccc

SEQ ID NO: 272107 - DNA, 655 bp, Homo sapiens
gttctgtgacaaccctaattcagtggcaagagcagctccaaatgtgtcctcatttggtcagtgttctttcccaaggtasataattaagtcttttccaatgtaatatttgccctatcaagatatgttcagtatgcaaaagtactagaaatgtcagtaactaatgattaagtgtattgaatgttatgagctattaaacatcgttagagacagtaatgcgccaccttgcagaaggcacagatcattaaccgtatggattttaattatttcagctgtagccttttcctgggttgggagaagagggtgtagggtaattttacattgttgtagccagaaagattatgaagccgcaatatggcatacttcacaaatgagaaccttgcaaagacctgttaaatgtagcaatagccacattccataaaaaggtgattattgttttggccttgaatgcaagagaagaccataaattaggaaacgttaaacagtgatgatctaagcttaagagaaaaatggcatatagaggaccaatagtgaactcaattttgttcaatatttttacacataaagggaagatacactgatggaatgtaaatttcattgtgcaacacatatatttctgaaataaggacactatatcgtatatatactaaagaaaacc

SEQ ID NO: 272108 - DNA, 655 bp, Homo sapiens
gttctgtgacaaccctaattcagtggcaagagcagctccaaatgtgtcctcatttggtcagtgttctttcccaaggtacataattaagtcttttccaatgtaatwtttgccctatcaagatatgttcagtatgcaaaagtactagaaatgtcagtaactaatgattaagtgtattgaatgttatgagctattaaacatcgttagagacagtaatgcgccaccttgcagaaggcacagatcattaaccgtatggattttaattatttcagctgtagccttttcctgggttgggagaagagggtgtagggtaattttacattgttgtagccagaaagattatgaagccgcaatatggcatacttcacaaatgagaaccttgcaaagacctgttaaatgtagcaatagccacattccataaaaaggtgattattgttttggccttgaatgcaagagaagaccataaattaggaaacgttaaacagtgatgatctaagcttaagagaaaaatggcatatagaggaccaatagtgaactcaattttgttcaatatttttacacataaagggaagatacactgatggaatgtaaatttcattgtgcaacacatatatttctgaaataaggacactatatcgtatatatactaaagaaaacc

SEQ ID NO: 272109 - DNA, 655 bp, Homo sapiens
gttctgtgacaaccctaattcagtggcaagagcagctccaaatgtgtcctcatttggtcagtgttctttcccaaggtacataattaagtcttttccaatgtaatatttgccctatcaagatatgttcagtatgcaaaagtactagaaatgtcagtaactaatgattaagtgtattgaatgttatgagctattaaacatcgttagagacagtaatgcgccaccttgcagaaggcacagatcattaaccgtatggattttaattatttcagctgtagccttttcctgggttgggagaagagggtgtagggtaattttacattgttgtagccagaaagattatgaagccgcaatatggcatacttcacaaatgagaaccttgcaaagacctgttaaatgtagcaatagccacattccayaaaaaggtgattattgttttggccttgaatgcaagagaagaccataaattaggaaacgttaaacagtgatgatctaagcttaagagaaaaatggcatatagaggaccaatagtgaactcaattttgttcaatatttttacacataaagggaagatacactgatggaatgtaaatttcattgtgcaacacatatatttctgaaataaggacactatatcgtatatatactaaagaaaacc

SEQ ID NO: 272110 - DNA, 478 bp, Homo sapiens
aaatcatgctgctgacttatttatattcttaagtcaataaatgtttctattgatcagtacctgtattctcctacaaccatgacacaaatcaaaacgcactgaaatgtcagtaccctgctacagtacttggtagttgaagtgtgacttcaaaaaccttctaatgttattaggaaaacaagaatcaatgccacaacttccatctagattggacaagcagagataacgcgagcatcaaacatgctagcatctaattctgaatcaaagagacggcagcattcagaatcaacatcttgacatggatatgtaaaggacatcttgatttcctcatgctccttaagatactgtacaaggaaatgcagagtacagaggatggatttaatgtccaaattccagactttaacaataccttggagggcatcatgcagatgaaatttkaacagatgcaaaatccaggtgtgacctctaggacaaaaaacgc

SEQ ID NO: 272111 - DNA, 550 bp, Homo sapiens
gtttggtttgaaatgatgtccaagaaattacaactaatgttaagtttgaggcagcattcctaggaacaaaagggcatcattttaattttcattttgttcaaagagaagggtatttcttctgaagttggtatgtactgctcccaaccaactctgaaacagcagattttaggtaaaatatatcacaagtattcatgcctttgtctacctcataactcatttatgttctctgaataacaacgatattgaaaagaaaaaaacccacaggtctaatcaaaataagatccttgaaaacctggcatatactttgcatctctgcatgatcaccacagattttagtcttagactcatatgacttasaattcatgggaccagtgtgcacagtgtagttgactcacagattctttttgttccatttgtattgctgcttgaaccttacagtgaaaaacacacaaagataaacagtttgctgagtctaattatgctcttggaagggtttaggtaatttgtgcagccaaaaattatacgtaacaatcaggtgaggtcaatggct

SEQ ID NO: 272112 - DNA, 538 bp, Homo sapiens
acttgtttctatccttctacctaaggctgtctgataaggactgtgaattttacctcactatgtctttgttcaatgtttcttgtaaactcaaaagcaaatgtacagacatagtcagctatttcctcccctcaccttccactcaaaaatatactttctttgaactaatttattttcccttcctcaagacacgcatataacatattatcatcactattatcatcatatttccttatatcgtttattaatagtttcatatatrcatctcatttcctgaattaatggtgtttttctctgaggcgggtctttatctccacagtgcctcgataaagaatatgaacgctagctcttatgtggtacctacttatcctaaggcaggtgctatgttaagcactttgcatggatgacctcatttactgctttcaaaccctgatacatttggtatttataattatcccccttttcagaagtgggaaatatggctttaacgtattgtcttacatcacaaaaatgtgagagcagagggatttgaactcaggtt

SEQ ID NO: 272113 - DNA, 538 bp, Homo sapiens
acttgtttctatccttctacctaaggctgtctgataaggactgtgaattttacctcactatgtctttgttcaatgtttcttgtaaactcaaaagcaaatgtacagacatagtcagctatttcctcccctcaccttccactcaaaaatatactttctttgaactaatttattttcccttcctcaagacacgcatataacatattatcatcactattatcatcatatttccttatatcgtttattaatagtttcatatatacatctcatttcctgaattaatggtgtttttctctgaggcgggtctttatctccacagtgcctcgataaagaatatgaacgctagctcttatgtggtrcctacttatcctaaggcaggtgctatgttaagcactttgcatggatgacctcatttactgctttcaaaccctgatacatttggtatttataattatcccccttttcagaagtgggaaatatggctttaacgtattgtcttacatcacaaaaatgtgagagcagagggatttgaactcaggtt

SEQ ID NO: 272114 - DNA, 617 bp, Homo sapiens
acccattttattaccatttatgcagcgctacaataaggatagagaagaagatacagcttctacttgtgctctataatagtacctgataccccagaaattcaaacagaaaccaaaacaaagccaatcaaaatgacaagcaagagtggtgagtataaacatrctgcacattggaaaatttggcattttcattctggagatatttttaagagcaacaacatccaaaatagtattttattctaattcgtggtatgtgtgctcctttattttaggcactttgactggcatgatcttcacaagacagggaaaagacactcaaacacatgcacgtctttacgtctaggtgcaaatggagtaaaaattagatatgctggagttaggttacaagtggagtaagagctgcgggtgtctggattaatgtggtggtttattccaagagcagtaataaagagtcatatcactttctattgcagcagggcatccatttagggaagtggatcttcaggttttgtttccaaaatagagcacatattttcagtgctcaatgaaagaaacaagggagagtgggtgacagggtgctatggcagccctcgttatttatagtttggcaatactgttag

SEQ ID NO: 272115 - DNA, 547 bp, Homo sapiens
ccatatgaactcatgattgatctaaaattatttgggaaactttcccatttcaaatttccattgagagagagaaagaggccatgcagcaacttcattcaaaagagaaaaaacaatccgtttttttttaattgccctgaaataaattctctattttcctttctatgtaatgctaaaaagattactgtctttctgatgtctttggcattttctttcaaaatcagatattttaatttccctttctcttggttatttttttccctattctaatcaaaatcaatggctgatgttagcacgtttttcatgctgcaagtacaaagcagggtagrcatgcaggctgatggatggcctctgggattctcaggtctttcctgaagcgaagttggccctgaggaaatgttgagggttggcagagaggccggtactatctgttgggtacttgcaagctagagatattattatcacttccatgtagaggagagaaaaacagagggtcacacagatgaggtaagttgcctgaagccagaaaatggtggaacagagaagattt

SEQ ID NO: 272116 - DNA, 584 bp, Homo sapiens
agaggagagaaaaacagagggtcacacagatgaggtaagttgcctgaagccagaaaatggtggaacagagaagatttattggaaaaaaatattgaagcctgttaacaggaggaataggttttgcccaggtgaaaataagtagaaaacatactcctaaggtgtgtcaacctaaaaaacaaacagagcctcaccaaaatctgatatttattcaggaatagggcattgcaatggacaacctgtggcatagtaaactatgtatgtattcacagaggtaagggaagccaaaggattttaaggaaaaactgaggagtgttacataattgttttgaggtaattatccttagctacaaggatcagtaccaagggcgamaccagtgtaaggttggacaggcagttgctgggcttgtgtcttcacagaagtacctgatagtccagaagttcaaacagaaaccaaaacaaagtatttgtcaatcaaagtgacaagcaagagtggagtttctttagttttgtttgtttgtttgttttgttttgtttttgagtaatgttgcagtggcctttgtccaaggttggggttttcagagact

SEQ ID NO: 272117 - DNA, 584 bp, Homo sapiens
agaggagagaaaaacagagggtcacacagatgaggtaagttgcctgaagccagaaaatggtggaacagagaagatttattggaaaaaaatattgaagcctgttaacaggaggaataggttttgcccaggtgaaaataagtagaaaacatactcctaaggtgtgtcaacctaaaaaacaaacagagcctcaccaaaatctgatatttattcaggaatagggcattgcaatggacaacctgtggcatagtaaactatgtatgtattcacagaggtaagggaagccaaaggattttaaggaaaaactgaggagtgttacataattgttttgaggtaattatccttagctacaaggatcagtaccaagggcgaaaccagtgtaaggttggacaggcarttgctgggcttgtgtcttcacagaagtacctgatagtccagaagttcaaacagaaaccaaaacaaagtatttgtcaatcaaagtgacaagcaagagtggagtttctttagttttgtttgtttgtttgttttgttttgtttttgagtaatgttgcagtggcctttgtccaaggttggggttttcagagact

SEQ ID NO: 272118 - DNA, 607 bp, Homo sapiens
agaaatttaatacgttcttccaaaatgtatatagtacagaagagccactgtttccttggtgaaggtgtttgcttgtaggtgtagagtgtttggccagttccttccccacttggggcacagccacgataatgcagagaacagcaatcatacttgccctcttaaagaaaaagggaaagcctcatatttytgcagtgcatttaggcacatcatggcttcctgcctttcagtgatcaaattgtttcttaaatatgagacttgttctcagagttatacaatgaatcctatgctaatccactgtagaactgccattttgttctttcctccctgtggtttagactttctgattcacacagagcttgaaacttaaatgttctacatatatttaaaatagtgtttcacagaaatgtattaataggatagtcttactaaataattgggggtaatttatccctaatttatgtgaatcaataaatgcatgagtgatgtaattgcaaacgtacacacacacgtgcacatgcatatgcatgcacacacacacacacacacacacacacacacacactggttctcactcttctttgatatgagagatgtaattatcatgtag

SEQ ID NO: 272119 - DNA, 632 bp, Homo sapiens
tgtccctcattctttacccttatctctgtccttctctttgccctaggaggcttgacctctacagaaagcatcttccatgtctctttgcttaccagcatcctgttgggttgtgtccatggaaggcaccagcaggagatggaggagggcgcaaggagagagaacacagtacttctttactggtctctgactgctctgggctgtgtattctggctgtatccttccctgtctacagctgctttggttttatgtcaacagggtctttcctggctcctgtaaagttagttctttcccatacctcttcagggccaggagtaataaagtcttctccttccttcctgctgttgcaatctctgagaatctctatgtctcttgttctctttgctctgacctctgtgtcaaccaytcaaagtgtcttgaaccacctgcactggattctcattcctgtcaggaccctgtctcatcccagtaactagtctttctcagatttgttgagaagttctaatgcagtactatatgaaggctttttaagaattttacagctgttacttttcaaccttattgtaccaaactagccatttctttttcattgagctctcatacttattatcttaaacttgcttgtacattaatat

SEQ ID NO: 272120 - DNA, 339 bp, Homo sapiens
aataaataggtgaactgcttttccatccctgtttctcatttaatttaatttaatggagaatattcaaattggctacatgatgctaattcatgtttaaaagtgtctgagtttggaattcaagtccttagagtatgtcaggacaaagagktttatgagagaaggtgtatttattgttgagatgagtagaagaacttaattttagttttattttaatatttagcatcttcatagctacttttaaaatccactagagaaaatctgctcaggtcatatttctaagatcctgacaaaagaaaaagccattctcttgaaggttggggaaagattgtcttgcaattc

SEQ ID NO: 272121 - DNA, 339 bp, Homo sapiens
aataaataggtgaactgcttttccatccctgtttctcatttaatttaatttaatggagaatattcaaattggctacatgatgctaattcatgtttaaaagtgtctgagtttggaattcaagtccttagagtatgtcaggacaaagaggtttatgagagaaggtgtatttattgttgagatgagtagaagaacttaattttagttttattttaatatttagcatcttcatagctacttttaaaatccactagagaaaatctgctcaggtcatatttctaagatcctgacawaagaaaaagccattctcttgaaggttggggaaagattgtcttgcaattc

SEQ ID NO: 272122 - DNA, 631 bp, Homo sapiens
attcccactgctccacatcctcaccagattaccagattttctgttgtcagactttttaatttttgccaatctcatggatgtgttgcgccatggtaaaccaagtcctaacaagggccaagaggccttaggccaacaccatctggctgccacaattccacccccacaccaccccactgtacaccttcctacacttagttcctattcccttcctggactcaccgcgtttctgccaccctggcctcgatgttccatgtatgtaccaggcactcatgccttggaacttttacactggctgttccctcttccacaaatgctgttacccaggtacagtcatgttctctccttsctttcttcaagtctctgtgcaaatgtcaccttctcagtgcaacctattggggccaccttattcacaactgtacccaatccttgctcctggcacttctcctttatcacctacacctttatcaccttctaataacctatgtgattcactcaccaattttatttctttgtctcttcccaccaaaatgtaatatccaggtggtgagggattgttgttgattttgtttcctggtatttcctaagttctgaggagagtgcttggcacataataggcattcagtaaatactt

SEQ ID NO: 272123 - DNA, 534 bp, Homo sapiens
ggcgtgggcttagattctggttccaccatctcctggcmgttctggcatgggcaggttacctgggcatccttcacactggcagtttgctggcctgcaagatatgaaagcagcagtctccgtctgagggctctgtaagggcttagtgcagaagcaggtgagggagcgctgcccatcctttacacatgggaacctggggctcatggtgactcaccctaggacacgctgcaaaccaggggtgcaggtgctcccagagacgaaagaaacaaaggactgggtgggaaccaagagctcaggctcagggagggacagactgggggagccctcagcctcaccccccaggccccaacatgcaccccacccccgtaacggcagcaaccaaagaacctcatcccaccttattgcaaggattgcctgcttctgcatttctttagtggctcctcctggagaattcaggactcatgacttgaactagcaggacttgatgaactgtaactgcatccacccactcctgactgctttctcgggatcagaaat

SEQ ID NO: 272124 - DNA, 585 bp, Homo sapiens
cacaaatcggggcacttcacagcatttgtaacaaaatatttgcagtgcccgtagttaagtcggcccctccgccaaacttcccaaactttgctttctttgaaccaagctgaaaagtgatctccctaaaaggggatcagaagattgcaagcaattggatttagcacggagttctacctggtgctctagagagctctgggcacacaggatggtgcgggaatcctggaaggaattacagcctgaatggtggcagggcaggggaggagccactgtgaagccgtggtagtcgctgaaacgctttgttaatgccatttattagctgtatgcgacaagaagtgtaagaggttaggcaggtcttcaaaaatatccaaaaagagaaaaataaacattcccttgtttgctttttgtggctttgctcattttcttcccctygagtggcccttcatctaaggctgttttaaacccaaaatcggttatctggtttcagggtaagggctccctcttgccaaggtattaaataaacaagtacagcaaaaacttgaatccttatgtaatccaaatgccgtttcctcgaaaaccacaacaaat

SEQ ID NO: 272125 - DNA, 561 bp, Homo sapiens
ctcgcctccgggagaggccagacgccggcgcgcacgctcgccccccagccacggggacccgcgcgtagtccgctcggacggccctggggagcgtccccggacggaagcagtgcgggcgggactgtggggcggcccgggcctttcgagcgcctgccgggcaccgctggcgacgttggccccgggacccctggagccgcagccgagggcacagcccctytcggaggcgacttcccgcggcgccagctgcgccgactccggccgtggagcccgggcgccacctgctggccgacacgaggacggcggctctcgcgcggggcctggtgggctggggcgggcactgggaacccgaggagcaatccgtggggtggaggaggtcccgggagaaaacgccagggagtgcggcctttccaaatgagtgctgctccagcatgtgtacagccgtttccacgtgtggatctcatgtaatctttgctactgcatagcatagacaggatccccttttgcaaattagtagttgctgccaacctctatgctaggtgctgtcccagagatttttaaaaa

SEQ ID NO: 272126 - DNA, 459 bp, Homo sapiens
caacttgaatgttagatatatcttctcttaaaggcttttagtcaagctaatattctgcacatatacatgttttgtttggtttcagacagggtctctctgtcacccaggctggagtgcagtggcattgatcacagctcactgcagcctcagcctccctgggctcagttgatcctctcacctcagcctcctaagtagctgggactacaggtgtgcaccaccacgcctggctaattttttctattttttttttgtagagacaggatttcaccatgttacccaggtggtctcaaactcctgggctcaagcattcctcctgccttggcctcccaaaatgctggaattacaggtttgagtcactgcacycagcccacatatacatgttttaaaaattaagatgaaaaaatccaacacaattagaaataggaaaacagtagcaatagagttcacagataaagtaat

SEQ ID NO: 272127 - DNA, 641 bp, Homo sapiens
attattctttatcatcatcatcaaatattcagccaatgttcacatctcctcatctgccttgtaattatttttgcaatstgtttgcattgggatcaagataatgtccatatatcgctgatatgtctttcaagggtctttttaaaaataaactttttatttgaaagtgattctaggtatacagaagagctgcaaagctagtacagagagttttggtatatccttgtgaaagttgcagatgccagcatgaaatcactttttgtcagacccaaacaaattagagccaggaaagcatgaagagggagagctcgtgcttgcatatctgagataaagactgtctcaaggactttctaaaataacccgacaaaaaaaattattccttctttaggactgcagcaataagatgctgtagataagatgctcttggaagaacatctgcccagtaatggcatctccaccaatgaactgatgctatctctggctttgagcctctgaaatcaatgaactctgtttccaagtagtttatgtgaacttctccttgtgtcaacaaaagcttgtttaccctcctttttcaggtgcatatatggcttgccatacccatggatctgagattatagtcctcttttgtaattcccaaataaact

SEQ ID NO: 272128 - DNA, 600 bp, Homo sapiens
gtgatgaaactgccttctgcaagacacatttttttaaattcagtatcaggcaaacataccgtagctgtattactttcctataagtaagtaattttgaaaagaaaaatttcacaaagttgctgtggccatcatgaatatgggacaaaagaagatgcaaagaaagaccagttcagtgctaaattgctgagtctgggtgaggaataatgatgactggaagagtgtagtagtcttgaagatcatgataagtataaggatttgggaaaayacagccaaaggatttgctggtgaactggatatggggcttgagggaagaaaagcagaaacataatgtctactcttaagttgttaacaaattgtgcaatttcaatggaagatatcaggttggccattggctctatggcgttggaactcctgcgaagaggtgggaattgtgcaatattgatggtatgttaccaaagtcattggctaggtcacacagaattagtgaagaaatggagatgacagagctaagtactgagcagaaggaggtagacaagatccgtgaataataaaatttagaatgagaatgtattttggagggaggaaatggtcagctgtgcc

SEQ ID NO: 272129 - DNA, 532 bp, Homo sapiens
ccttcctatacattttaatatgttggtgaaaacaataatcaagtagaggaaaagagaccaatgatggaaaaaagaatgataattctaggagagaagagcttgagtagggaagaaaggatggagtctgcaatgcatatggatgtgytgattattgataggaccagagccactttatccatttgaacagcagacaaatgggaaacgtgggtgaatatgcagaagggtgggaaatgtaatggaagaaatagggaagccttcacatctgattccatccgtgttttctgtgagatatgagactacgtcatcacatgaaattgagaagagagagtgccagagaatttcactctaaagaaaagatgataaatattttataattttacctcatttcctgtgtaagacatttctcccacttgaaatgttggatatttcttaactttttcacaaccttgcctgttttatgactaatgtcaaaacctcaataattttttaaataaatgtttaactgttctagtcattaaaaaatacgaaacaa

SEQ ID NO: 272130 - DNA, 608 bp, Homo sapiens
acagggactgattgattttctaaactttgtaggtgaattcacatctccctaatctaattttcctgggaattacagtgacacagacctttccatttgtctccttcttatggacagrcctctgttcattctcctctaatattttgaatttaggcatatcattaagttctactgagtgaggacactgggcttggacagtaaatttctctctttactccttgcttgtcctaaaccaatggttgcctgagcacatttaccacctgtgtcagttcgtgggggagaggtggagaagggtaggccaccgtgtttcaattccttatcatttcactcacacatttcttactttatcttttatacacatatatacctcagtacacaaatacatactatttgtaattatgagaatcgttgagacttgatcatagcagttttttcatatctataagcatgtgcaaactataaattatcttggtgtataggttttgataggatattgctcttatcctcaattttttacacgatttctcttatgtttcttatgtagtctctttctggtcctaatgaataaactggcaatttttattggtatttgttctttctgtcaaagatag

SEQ ID NO: 272131 - DNA, 579 bp, Homo sapiens
ggcttcactcctgaagtcaagcgagaccacgaacccacctgaaggaagaaacgccagacacatctgaacatctgaaggaaaaaactccggacacaccatctttaagaactgtaacactcacygtgagtgtctgcggcttcattcttgaagttagaccaagaacccactggaaggaacaaatttcggacacaccaccacatttgactaatttttgtatttttagtagagttggggtttcaccatgttggccaggctggacttgaactcctggcctcaagtgatccacccacatcagtctcccaaacaactgggattacaggtgtgagccaccacacttacccacagagtgggtgctttttgatggacattgatgtgtgatataaagatcatcctcttcgtacccactcatatttgtcagttcatgtgtctctagcccagaattttttgtctctgatcttttggtccttttccttttatgatccttaccagagcagagagccagggcattggccactgcctaggaatctctatctgtattcccacttgcggccactttcctttctacagacccgctcttta

SEQ ID NO: 272132 - DNA, 579 bp, Homo sapiens
ggcttcactcctgaagtcaagcgagaccacgaacccacctgaaggaagaaacgccagacacatctgaacatctgaaggaaaaaactccggacacaccatctttaagaactgtaacactcaccgtgagtgtctgcggcttcattcttgaagttagaccaagaacccactggaaggaacaaatttcggacacaccaccacatttgactaatttttgtatttttagtagagttggggtttcaccatgttggccaggctggwcttgaactcctggcctcaagtgatccacccacatcagtctcccaaacaactgggattacaggtgtgagccaccacacttacccacagagtgggtgctttttgatggacattgatgtgtgatataaagatcatcctcttcgtacccactcatatttgtcagttcatgtgtctctagcccagaattttttgtctctgatcttttggtccttttccttttatgatccttaccagagcagagagccagggcattggccactgcctaggaatctctatctgtattcccacttgcggccactttcctttctacagacccgctcttta

SEQ ID NO: 272133 - DNA, 559 bp, Homo sapiens
ttttcaacttcaataaagtgattctaaatcagaccatcatcaaaaatctgattaacctttataawtttttttaaattttaagagcctttttaccctcacataattatacattctaacttttgtttttctaaaatgggaagttctaatcattaaattttgtctttgacagcagctaatttatacaaatcttctactcctgttaatcattttctttcacattctttgactacatgccactcgagttagtttgattctagagtgatgtgaaaaaaaaatgtctgcatgcattccttaaatattccaagggagagaatatcacaattttatataagtaaaggatgacatatttatttgccacatttgaacaaatgcttcagaatctcattttgtgattcaaaagagtcacgttttgtgtttcactaatcagcatgaatatgatcctggcctctttttcaggtctatagacttcattttaatgttacttttagtttgaagtcgggtattagggtttccattcaaatgacaattccttttaaagtaaaatctattattttctcaa

SEQ ID NO: 272134 - DNA, 672 bp, Homo sapiens
gaaagggagaggaagagttgaatttacataaggccatctctgtaaaataaaatattaatgtccataatattatgcaattcccagtgtacattggtgtgttcttgtggttttgttttgactgctcccctgttttacatttcaaataataggaactaagtaggattttgcctatctgcagtctcacatatagctagactctgtttacacaactggaatactagccctcaaacattcttcrttatgatcctcatgtagacaaagcattttttaaagttcaggtcaagtatgccctcacgctttattatcatgtggaaggtgaactactagttttacagatagttacacatagcttttcttcatttctagagaggcatactatattccaaatgtaaagtccaagagaaagcttccctttcaccttctaaaggttcactgaaaatgaacttacaataggtagatgaataggagaaaaagacatacagagttatttaatgtgtataagcacaagagaatcacaagaatgaccaaaggggtccagatcctttacactcttttcttcacagaatttaaaattgcaatttaaaatttcaaatggcagtaagtgattcttaggagaataaattgggccaatgttcagacagttgttagtaaataattctctttggaaattga

SEQ ID NO: 272135 - DNA, 498 bp, Homo sapiens
aagcattttttaaagttcaggtcaagtatgccctcacgctttattatcatgtggaaggtgaactactagttttacagatagttacacatagcttttcttcatttctagagaggcatactatattccaaatgtaaagtccaagagaaagcttccctttcaccttctaaaggttcactgaaaatgaacttacaataggtagatgaataggagaaaaagacatacagagttatttaatgtgtataagcacaagagaatcacragaatgaccaaaggggtccagatcctttacactcttttcttcacagaatttaaaattgcaatttaaaatttcaaatggcagtaagtgattcttaggagaataaattgggccaatgttcagacagttgttagtaaataattctctttggaaattgaatgggaccagataatagaccgtggtttaggttaaagtttctctgggcgctaagtatggtgtttaattttcagtcttttcctctg

SEQ ID NO: 272136 - DNA, 672 bp, Homo sapiens
gaaagggagaggaagagttgaatttacataaggccatctctgtaaaataaaatattaatgtccataatattatgcaattcccagtgtacattggtgtgttcttgtggttttgttttgactgctcccctgttttacatttcaaataataggaactaagtaggattttgcctatctgcagtctcacatatagctagactctgtttacacaactggaatactagccctcaaacattcttcattatgatcctcatgtagacaaagcattttttaaagttcaggtcaagtatgccctcacgctttattatcatgtggaaggtgaactactagttttacagatagttacacatagcttttcttcatttctagagaggcatactatattccaaatgtaaagtccaagagaaagcttccctttcaccttctaaaggttcactgaaaatgaacttacaataggtagatgaataggagaaaaagacatacagagttatttaatgtgtataagcacaagagaatcacaaraatgaccaaaggggtccagatcctttacactcttttcttcacagaatttaaaattgcaatttaaaatttcaaatggcagtaagtgattcttaggagaataaattgggccaatgttcagacagttgttagtaaataattctctttggaaattga

SEQ ID NO: 272137 - DNA, 575 bp, Homo sapiens
catttttcaaagcagtagaatggattttaagacagaaatacgtgaattcaaatcctggcttcacacttacttgactatgaccttgggtaaattatttagcatttctaagattccatttccttacttgtgaaatgagaacrctactcacttccaagggttattattcgtctaaattagaaaataaatgtaaaatcctggttcctaacactgcattttaaaaaattaattctcttccgttccttcttctttatcaccagtcagcagagcaacctaattcttctttgctagtaacctccctgaatcactacctatctaccttctaccaactgaggaagcttccaataccccttacttggaaaagtcacttcagttactatttacaatctagaaatgcctcgttttgtgactaaactcacacttaaacacacacatatatacacacacacacaatgcacacacactcatgttgtgtcacttcacatatgtgtgagatatttctaagctaacatgtccttagtatgaaaaacattttacgtgaaatgtataatagcagtaattttgagatgctagtatct

SEQ ID NO: 272138 - DNA, 575 bp, Homo sapiens
catttttcaaagcagtagaatggattttaagacagaaatacgtgaattcaaatcctggcttcacacttacttgactatgaccttgggtaaattatttagcatttctaagattccatttccttacttgtgaaatgagaacgctactcacttccaagggttattattcgtctaaattagaaaataaatgtaaaatcctggttcctaacactgcattttaaaaaattaattctcttccgttccttcttctttatcaccagtcagcagagcaacctaattcttctttgctagtaacctccctgaatcactacctatctaccttctaccaactgaggaagcttccaataccccttacttggaaaagtcacttcagttactatttacaatctagaaatgcctcgttttgtgactaaactcacacttaaacacacacatatatacacacacacacaatgcacacacactcatgttgtgtcacttcacatatgtgtgagatatttctaagctaacatgtccttagtatgaaaaacattttacrtgaaatgtataatagcagtaattttgagatgctagtatct

SEQ ID NO: 272139 - DNA, 561 bp, Homo sapiens
aactgctcaggaatcattaatctgctcctcacttaccttgcgtgtcccccaaaaaaacaccattttgctccaccaaagctgtcatttttaaacttttcctgctcactgttttagggagcagcattttccaattctttacagctttcacagaagggaggtatttatttccttttccaaaggcattaactgtggttaccatggtctgcttgtttccttackggacttttttcatttaaatattttctttcctccgatcttctttctctttccttctcctccttttccccatctttcactcttacaccctctctctctctcgctcacacacacacacacacacacacccctctagttgttaatgagggtagttacaattttcacttttacattgttaaatgactctagatggccgggggaggggtcggcagaaagaatcattagccatttgtaattcaacaaacttggcatgagtcctggagttgcccacaaatgaaatattgagtaatgagaatttaattttctccattcctattctcttttgtacattcttagcaaccctaa

SEQ ID NO: 272140 - DNA, 561 bp, Homo sapiens
aactgctcaggaatcattaatctgctcctcacttaccttgcgtgtcccccaaaaaaacaccattttgctccaccaaagctgtcatttttaaacttttcctgctcactgttttagggagcagcattttccaattctttacagctttcacagaagggaggtatttatttccttttccaaaggcattaactgtggttaccatggtctgcttgtttccttacgggacttttttcatttaaatattttctttcctccratcttctttctctttccttctcctccttttccccatctttcactcttacaccctctctctctctcgctcacacacacacacacacacacacccctctagttgttaatgagggtagttacaattttcacttttacattgttaaatgactctagatggccgggggaggggtcggcagaaagaatcattagccatttgtaattcaacaaacttggcatgagtcctggagttgcccacaaatgaaatattgagtaatgagaatttaattttctccattcctattctcttttgtacattcttagcaaccctaa

SEQ ID NO: 272141 - DNA, 561 bp, Homo sapiens
aactgctcaggaatcattaatctgctcctcacttaccttgcgtgtcccccaaaaaaacaccattttgctccaccaaagctgtcatttttaaacttttcctgctcactgttttagggagcagcattttccaattctttacagctttcacagaagggaggtatttatttccttttccaaaggcattaactgtggttaccatggtctgcttgtttccttacgggacttttttcatttaaatattttctttcctccgatcttctttctctttccttctcctccttttccccatctttcactcttacaccctctctctctctcgctcacacacacacacacacacacacccctctagttgttaatgagggtagttacaattttcacttttacattgttaaatgaytctagatggccgggggaggggtcggcagaaagaatcattagccatttgtaattcaacaaacttggcatgagtcctggagttgcccacaaatgaaatattgagtaatgagaatttaattttctccattcctattctcttttgtacattcttagcaaccctaa

SEQ ID NO: 272142 - DNA, 602 bp, Homo sapiens
tactttattaaactttgcatttctgaggagtttaaacagatctaaatgttttcctacctgattctaatagccttataatttgatgaaatcctaggttatgtgtagtttggttattttttttttctttaagttaaacaccatgattgagtcttagaagcctgcattcctgtgtgcttaagactatacaaatcttttgtacatttgaaataattcccagtaaattttggatatttcacagttttatctgactgtggacacaatttacaaagttcctttacagacaaataaaagttataatgtactatttcacactaagaatcagttcttgattttctgaagatcttgttcctacaaatttttccaaccatccatccatccattcatcccctgaacatttaccaatgtcctcactgccgtgaaatgmcttttctgtggaggaaattaagtaattgagaatttattgcctcatgttgaagcgaaacatgtcagagaagaagcagccctccttatttcatctccacaatgagaataatgatgaatataacactttttttgcacaaggctgaggatacagtcaactttgaataaatggcagtgtaggt

SEQ ID NO: 272143 - DNA, 549 bp, Homo sapiens
gtagaaggagatttgcactaatctctgagtttcttgaattaaaaagcctagctgaagccaaaatacatcacattgttaggttgtgagccataacagacaatggaaactatgcatattaaaaaattatgakcttcagtcttttcttcaaactctgttcactacaggataatagtgttgtctgcctgaagtagcctacagataagtggaaagttgctaagttcatctcgaaaatatgcacaaatacatacattctgtaccactttcattctcacagaaaactctgaaggttggcactgttaccgctattttcaagtgattcaaaaagattaagtggtttacccagaatcatatagcaagaaagtgacgaaagcagaatttgaacccagaattttataactctgaagcttttggtttgtctcaccctgtttgctaatgaggtaattcattattagataacatagctacaattataatcaatcagcctttattatatggcaaggccttgaccttgaagtatcaactgacagtcaggtagagagaggtaggtaa

SEQ ID NO: 272144 - DNA, 549 bp, Homo sapiens
gtagaaggagatttgcactaatctctgagtttcttgaattaaaaagcctagctgaagccaaaatacatcacattgttaggttgtgagccataacagacaatggaaactatgcatattaaaaaattatgagcttcagtcttttcttcaaactctgttcactacaggataatagtgttgtctgcctgaagtagcctacagataagtggaaagttgctaagttcatctcgaaaatatgcacaaatacatacattctgtaccactttcattctcacagaaaactctgaaggttggcactgttaccgctattttcaagtgattcaaaaagattaagtggtttacccagaatcatatagcaagaaagtgacgaaagcagaatttgaacccagaattttataactctgaagcttttgstttgtctcaccctgtttgctaatgaggtaattcattattagataacatagctacaattataatcaatcagcctttattatatggcaaggccttgaccttgaagtatcaactgacagtcaggtagagagaggtaggtaa

SEQ ID NO: 272145 - DNA, 535 bp, Homo sapiens
actctgttattccatttctatggaggtctaaagytggcaaatctaatcattggtgacagaaaccagatcaatggttgtttggaacaaaaggtgagtttgagtattgatggtgaagaggtgaagcatattatctatcttgattatgtaggtagctattcagcatatgcatttgtcaaagcttatcaaacagcacatttaaaattctttccattttattgggtatatattaaagttcataaaagtagaaaaatagagtttagaatgttagcaagatggcagcataggactctccatcagaaacgtcaatttcaattaactatccacacacaaaaatacctttgcaagaactgaagaaaccaggtgagattacagcaccagggaatagcacagaagtaagaagagatgcattgaagagtgtaggaagaacagttttactttactctggtcaccctgctctaaccccaggcagcactacccagggagagatactctctagaatgataccgagtgggtacatccataaaaattaaattat

SEQ ID NO: 272146 - DNA, 465 bp, Homo sapiens
atggttgtttggaacaaaaggtgagtttgagtattgatggtgaagaggtgaagcatattatctatcttgattatgtaggtagctattcagcatatgcatttgtcaaagcttatcaaacagcacatttaaaattctttccattttattgggtatatattaaagttcataaaagtagaaaaatagagtttagratgttagcaagatggcagcataggactctccatcagaaacgtcaatttcaattaactatccacacacaaaaatacctttgcaagaactgaagaaaccaggtgagattacagcaccagggaatagcacagaagtaagaagagatgcattgaagagtgtaggaagaacagttttactttactctggtcaccctgctctaaccccaggcagcactacccagggagagatactctctagaatgataccgagtgggtacatccataaaaattaaattat

SEQ ID NO: 272147 - DNA, 465 bp, Homo sapiens
atggttgtttggaacaaaaggtgagtttgagtattgatggtgaagaggtgaagcatattatctatcttgattatgtaggtagctattcagcatatgcatttgtcaaagcttatcaaacagcacatttaaaattctttccattttattgggtatatattaaagttcataaaagtagaaaaatagagtttagaatgttagcaagatggcagcataggactctccatcagaaacgtcaatttcaattaactrtccacacacaaaaatacctttgcaagaactgaagaaaccaggtgagattacagcaccagggaatagcacagaagtaagaagagatgcattgaagagtgtaggaagaacagttttactttactctggtcaccctgctctaaccccaggcagcactacccagggagagatactctctagaatgataccgagtgggtacatccataaaaattaaattat

SEQ ID NO: 272148 - DNA, 589 bp, Homo sapiens
aaaaacatgaaagcacttagtaaactgtgaagtaccatataaatctataaaatgtgaattgtctttatctttgaaaaatcccttrttttttatgtgacagaacagagagatggggaaattaaaaatgttcttcaaaagcttttccattgccttcgcaaaatcattagaaccatcaccaccgacctctagacaaattttcgctaactttaatctgcaattattagctgaatttcagccgtttttttttttttctggtcattctcatttaacccaacatctgcatataccactaaactagcccagagtctgtaagactgtatacataacaagcattttccaaattccccacaaccacatatttttttagaaaagaaatgaatatttgaggcatactttgtttttttaaaaatcaagctgaccaaatacttttaggtcctaatatattgttttcttttataacgaataacatttaactatttaagcatatagattcaggatgaacttctcacattacaagctgttaagaatggctggttaaagagagaaaaagagggaacacattttaccttacgagtttatcggaagatta

SEQ ID NO: 272149 - DNA, 589 bp, Homo sapiens
aaaaacatgaaagcacttagtaaactgtgaagtaccatataaatctataaaatgtgaattgtctttatctttgaaaaatcccttattttttatgtgacagaacagagagatggggaaattaaaaatgttcttcaaaagcttttccattgccttcgcaaaatcattagaaccatcaccaccgamctctagacaaattttcgctaactttaatctgcaattattagctgaatttcagccgtttttttttttttctggtcattctcatttaacccaacatctgcatataccactaaactagcccagagtctgtaagactgtatacataacaagcattttccaaattccccacaaccacatatttttttagaaaagaaatgaatatttgaggcatactttgtttttttaaaaatcaagctgaccaaatacttttaggtcctaatatattgttttcttttataacgaataacatttaactatttaagcatatagattcaggatgaacttctcacattacaagctgttaagaatggctggttaaagagagaaaaagagggaacacattttaccttacgagtttatcggaagatta

SEQ ID NO: 272150 - DNA, 589 bp, Homo sapiens
aaaaacatgaaagcacttagtaaactgtgaagtaccatataaatctataaaatgtgaattgtctttatctttgaaaaatcccttattttttatgtgacagaacagagagatggggaaattaaaaatgttcttcaaaagcttttccattgccttcgcaaaatcattagaaccatcaccaccgacctctagacaaattttcgctaactttaatctgcaattattagctgaatttcagccgtttttttttttttctggtcattctcatttaacycaacatctgcatataccactaaactagcccagagtctgtaagactgtatacataacaagcattttccaaattccccacaaccacatatttttttagaaaagaaatgaatatttgaggcatactttgtttttttaaaaatcaagctgaccaaatacttttaggtcctaatatattgttttcttttataacgaataacatttaactatttaagcatatagattcaggatgaacttctcacattacaagctgttaagaatggctggttaaagagagaaaaagagggaacacattttaccttacgagtttatcggaagatta

SEQ ID NO: 272151 - DNA, 536 bp, Homo sapiens
caaattctatgtgttctaatttatacatatatatgcataatggatcacatatgcatatatatgtgtgtgtgtattagattatagagcaattgtgtagagattaggactttatatctttcagatgttaaaagcaaaaatakacattgaaactagtatatgttttagacacttgtgactttaagacaaccaagaggtattattaaaatctatctactcattaaaatgtcaatataacattaattagttacataaatattttgttggaatgtgatatagatttgattattcatttcaaccagaaaattatgaatttctaaatattactgctaaatacagttatcttggaagctaaaatgtggtcatctacagggaagtgataaagaaagaaaaaaattattattttaaaagtagcattggcgctattaaagcagctttaaaagatatgaaaaatcaaagcaaattgctgaagctttagggagtttctacaatcctggataaacaatggatagggaaaagagaatgattatatagtcata

SEQ ID NO: 272152 - DNA, 557 bp, Homo sapiens
aatgcttaatagatgtgtaataatgtggatcagaacaaacttcttcttgtcttttttttcttttttgagacgaaatttcgctcttgtccaggttggagtgcagtggcacaatctcggctcactgcaacctctgcctcccaggttcaagcgattctcccgcctcagccttccaagtagctgggattacaggcatgcaccaccgcgcccagctaattttgtatttttagtagagacggggttttgccatgttggtcaggctggtttcgaacccctgacctcaggtgatccacccgcctcagcctcccaaagtggtggcgccagccaccgcacccagccttcttgtctttttaacatacagtctgtctgctcacrttagttagtgttaggtagttatgtttacaggaccctgaaccaaaggccactgaactgaacttagaattcccgtgtcctgaacagctcttccatgtctacagaaagctgacctcactttggattataccatacctcatcaaagatcagaatgctgggtcaactagaaggtcaatttgaaattcaga

SEQ ID NO: 272153 - DNA, 556 bp, Homo sapiens
ttcccaggacctagagcaatgactagtgcgcaataaatacgtattaagtatatgagtgaaataacaaatattgctagtcatgcaaaattgttagattcccaagacacacctgtgtaagggatggttcttgcaaactagttgctccttggtcaaagtgatctgacaacataattcatcaacattctggtcaccttggtctctgtgtgtggctacagtgtgtgtgtttgtgtgtgtgtgtgtgtgtaattgttgagattttacatatctcaggtatatgctataaaattatcagtaaagctaaaaccagagtagtgtttttccctagtgattaaagggaattgtattatctttgagaatgcttgccatatttaagtagaccgaaaggtttttgaagaataagagccagtgggaatttgtaagcacattcaatacataaatgtrtgaggcccattagggaggttaggaaggctttctgtagatgggttgatgacagatggctgagaaagtatcttggtttaggaatgtctaggatggttgtcagcctcattaagtaaaa

SEQ ID NO: 272154 - DNA, 606 bp, Homo sapiens
catctgggcttatttatgcatcgctcaacatctgtgtctttctgaaccccatcaactgtaaggctaaatggtagatactggtgaatgaaaccagaaagttttagctaaatttaactcgtcagtttaatctggatttgttatgttcaagaatgtatatatttgactttggaaaagcttagtggaattaaaaatagactgatttgatcatatgactagtcaataccccaaatacggaatcagaagggctgttagaagcatcatcagatgaattttttactatactatttcttctgtttaacactcacttcctttcaatcctcagctaaatttccaaggtcaataaaaaacaaaatctgtaagggctccatttgcctggttgaaaagagtcctagcaggactcaggacacctctgtttcctacgtgctcccctgcagttagatactacacacaggccagctgactatacacacaagtgacagagttctcacctgagctacctttcagacagaatkactaactgtcttaattctatgaattcatctagaagccatgaattctggcctcaaaagtagtaacaacaggaatgatgacaatttaatagtaatc

SEQ ID NO: 272155 - DNA, 606 bp, Homo sapiens
catctgggcttatttatgcatcgctcaacatctgtgtctttctgaaccccatcaactgtaaggctaaatggtagatactggtgaatgaaaccagaaagttttagctaaatttaactcgtcagtttaatctggatttgttatgttcaagaatgtatatatttgactttggaaaagcttagtggaattaaaaatagactgatttgatcatatgactagtcaataccccaaatacggaatcagaagggctgttagaagcatcatcagatgaattttttactatactatttcttctgtttaacactcacttcctttcaatcctcagctaaatttccaaggtcaataaaaaacaaaatctgtaagggctccatttgcctggttgaaaagagtcctagcaggactcaggacacctctgtttcctacgtgctcccctgcagttagatactacacacaggccagctgactatacacacaagtgacagagttctcacctgagctacctttcagacagaatgactaaytgtcttaattctatgaattcatctagaagccatgaattctggcctcaaaagtagtaacaacaggaatgatgacaatttaatagtaatc

SEQ ID NO: 272156 - DNA, 455 bp, Homo sapiens
ctctggcctaattttcagaaatgcagactctgggtatgtgttagaagaaagggagcttggtggctgaattcctatcaagtcctttcacatccttggctgaatgacatctccagttttctctgggcaaagaagttagtttttagaatacttgttcacaggcttatttgggaaataggcatgaaggatcttctgktgcctatagtcaataataatttaaaatgttatatttcacatattttgagcaaaatattgaatgccagtttcacctaatggattcattttcttttcagaagtttagactttttggaagtaaaccttatgaacatgaatagaggattttcctgtccctatattccagagatttggtaattttaagatttcaaatgaacagctttgaaattacatgttgtttgtgcactgaaaacagctgggtatcatgtcctctagctctaagt

SEQ ID NO: 272157 - DNA, 455 bp, Homo sapiens
ctctggcctaattttcagaaatgcagactctgggtatgtgttagaagaaagggagcttggtggctgaattcctatcaagtcctttcacatccttggctgaatgacatctccagttttctctgggcaaagaagttagtttttagaatacttgttcacaggcttatttgggaaataggcatgaaggatcttctggtgcctatagtcaataataatttaaaatgttatatttcacatattttgagcaaaatattgaatgccagtttcacctaatggattcattttcttttcagaagtttagactttttggaagtaaaccttatgaacatgaatagaggattttcctgtccctatattccagagatttggtaattttaagatttcaaatgaacagctttgaaattacatgttgtttgtgcactraaaacagctgggtatcatgtcctctagctctaagt

SEQ ID NO: 272158 - DNA, 576 bp, Homo sapiens
aaataaaatcaatgaaagaatgaacatattgcatttatacataactcatgttttacggcattctagtctcaacactgtatttttgttattccaaatgattaaggacccactgtagcccattaagtttttcgtgagatgatgatatggtagaatgacaatgaatattttgctgctattcatgttgagaggcttggagagtatactggttgcatgcttccagaaaagaacaataaatactccttgcaggttttatgaatttactttttctttaargtggcttaaacatgtatttttaaaagaatgggggtcagacctggctgatactcagctgtaggtccagtacagctgaacagtttgttgatagccagcatcctttctcattggtcagtgcctagaaagaatcagctaaatatttagaatataactctgagacagggcatatagtgaatttatgcctcctttatttataatgtgatataatatgaattattacagcatgttttggtcacagatcataagagtagcacattctagcttcacatgaaatattgcttacttcagatagaaaaaagatat

SEQ ID NO: 272159 - DNA, 576 bp, Homo sapiens
aaataaaatcaatgaaagaatgaacatattgcatttatacataactcatgttttacggcattctagtctcaacactgtatttttgttattccaaatgattaaggacccactgtagcccattaagtttttcgtgagatgatgatatggtagaatgacaatgaatattttgctgctattcatgttgagaggcttggagagtatactggttgcatgcttccagaaaagaacaataaatactccttgcaggttttatgaatttactttttctttaaggkggcttaaacatgtatttttaaaagaatgggggtcagacctggctgatactcagctgtaggtccagtacagctgaacagtttgttgatagccagcatcctttctcattggtcagtgcctagaaagaatcagctaaatatttagaatataactctgagacagggcatatagtgaatttatgcctcctttatttataatgtgatataatatgaattattacagcatgttttggtcacagatcataagagtagcacattctagcttcacatgaaatattgcttacttcagatagaaaaaagatat

SEQ ID NO: 272160 - DNA, 651 bp, Homo sapiens
ttttattgttgttttaatggaatggttgaagggaagcaaaagtaaattcatgcatttggttcaccaccattatgcaaaatgagctcaaaattggcactgtgataaatacccaagaatataaaaaatgtgtacctttacaaattatatatttttttgccattttgaggacaaagactccacatctttgaaacatttattattctaccttctgtattataattgtcgcaagatctggaacttctgttatgtctcaagttcctctgcaaagaaataatctgttttcctataggaaagatgctatcccttactatattacaaatctaatttatagaaaaatggctgccataggtttttttaatcttctgaaaaatcactaccttatatcaacactataaaactaaatctctaacagtatttttctaaaccactaaatgaggggtattaattacaaatgcctragattaagttttaattataactaatgtgtttccactttgaaaaagtttgttcacccccttccttctaaccaaagttctcttattggctttagtttactaattattacagagagacaacctgttatttttaaaaacaaatctcattatctgattattttagcatgtattttttaggtatctatggttgtaaagc

SEQ ID NO: 272161 - DNA, 651 bp, Homo sapiens
ttttattgttgttttaatggaatggttgaagggaagcaaaagtaaattcatgcatttggttcaccaccattatgcaaaatgagctcaaaattggcactgtgataaatacccaagaatataaaaaatgtgtacctttacaaattatatatttttttgccattttgaggacaaagactccacatctttgaaacatttattattctaccttctgtattataattgtcgcaagatctggaacttctgttatgtctcaagttcctctgcaaagaaataatctgttttcctataggaaagatgctatcccttactatattacaaatctaatttatagaaaaatggctgccataggtttttttaatcttctgaaaaatcactaccttatatcaacactataaaactaaatctctaacagtatttttctaaaccactaaatgaggggtattaattacaaatgcctaagattaagttttaattataactaatgtgtttccactttgaaaaagtttgttcacccccttccttctaaccaaagttctcttattggctttagtttactaattattacagagagacaacctgttatttttaaaaacaaatstcattatctgattattttagcatgtattttttaggtatctatggttgtaaagc

SEQ ID NO: 272162 - DNA, 536 bp, Homo sapiens
gagtgagaagattacaatatatctgacaaattaataaacactggagttgtgaaaaacaactgtagaattttgcatgaaattgtgaagttgtaaaaacagaaacaaagtgagacattctgttgacgacaacagtagtgataaaacacacacaaaaaaagctttttgtttccatagaataatttcacatggccataaagatatcctgaccyaatatataatttaaaccctaaatacgtattttttatttcattctgtgctatggtttggttctagtttgtttgttaccatcaaaagtcatgttgaaatttggtccccagtgtagccgtgttgggaagtggggcctagtgggaggtgtttgaatcatgggggtggattcctcaagagtggcttggtgctgttctggtggtagtaactgagttctctctctggtgagaatagattagttcctgcaagaatggattagttcccaagagagtgggtagttataaagccaggatgcccaatggattttctctctctttgcattttttgcttct

SEQ ID NO: 272163 - DNA, 555 bp, Homo sapiens
tgggtagttataaagccaggatgcccaatggattttctctctctttgcattttttgcttctgctttaaccttccctgccatgttgtgatgcagcacagaagcccttgccagaagccaggccatgcccatgaactttgcagcctgcagaaccacatgctaaataaatattttaataaattacccaatctcagatactccattataggaacacaaaatggactaagacggcccccatttattcatacttattattatcagcctcattgaacaggtagacaaaacaaccacaaaaacaacaaaaccttaccatctccataggtaagggaattttgtctcatataggacacagaargaataatttaggacacagactctctcgggtctgggaaagttaatgtatctcatgtaactaactgacattcaccaaacgtaagaacagataaagtttcccccgacagaccctgtgcatattttctgctctcaatttggctgaggtactaatcttaatctgattgtgttgaacagaacaacccacccttttagcatttctttgtc

SEQ ID NO: 272164 - DNA, 521 bp, Homo sapiens
tttgtttttcagagaaagggtctcactctgtcactcagactggagtgcaatgctgcaatcctagctcactgtaagaaactcaaattcctgggtccaagcagtcctgcctcagctcctcagtagctaagactacatgagcatgtcaccatacctggctaattaaaaaaatttttttgtagagatagaggtttcactaggttgcataggctggcctcaaactcctggcckcaaaccatcctcctgtcttggccttccaaagctctgggatttcaggtgtgagccacgatacccagcctataattgtttctttaattttaatttgtgttacagataaattttaaatttcagtgtttatgcttatcaattttcttttattattatagtgtatatgtttaaagaaaatttctaaaatgaattacaatattttccaatgttttaagttggaatttaagcctttaatttacctataaattttttaagtggtatgtgtgtgggtctatttttattttaatatttggcat

SEQ ID NO: 272165 - DNA, 582 bp, Homo sapiens
tactgtttctgtatgcatgtacttcagtctttaagaaagaatgaaaaccaggtttttttctttattgtcatatctgtaatttgctcctttctcagaggaaggtcatccacagaaaattaaccaatatgtttgattctatagaactatcatttttgcgtccagttgccattccttctgaagagctgttaaatgcagtgattttaatctgctttgattgcctcacaagtgaagaggtgatttgctgtattttgtagaggtgcatcaacggagtaccctcagytacagaattatttcccttgtaacaagaagagaagagcaaggtttacatcaccactgtgcttaaaaactcttatctgtcaggaagcatgtgcttttctgtgcaaccctgggagttcattaaaagtgtgaggttgcctcactaattagatatggcggagtgattgggcatagtgctgtgggagaaaccttaatgtaactggagtgaaatgaaaatctctgttttgttcataccaagggaaggtttgattaaaaagatttcctctttttcatttgggacactgttttgttgtgtcatgtggcatt

SEQ ID NO: 272166 - DNA, 471 bp, Homo sapiens
gagtatggtgctgcagtcagcttcacaatcagatggcaggttgggtaagttggtttactcactcagtcagttaatatgagtatccactataaactaagccaataaaactcaggcagacaaccggaggtgtttttacatggctttctttcttccaactttgtaagctagaagccaggtcagtcttcatgaggatttactgagtgtagayactgtgctcttggagcctcttgggagtggaagtggagagagacgggcagtgatgcacatgctatgggaaaagattggcccattagtgtggggaagttctttatgaagctggtttgtagctcttaggcaaaagcaatcagaatgtgtaaacagtcggccaatttcatcctctaccagttttcattgcataggattttggccccaaacaattgctcaactaactacccatttggtgagtctgaatgggattcaaggattaatcca

SEQ ID NO: 272167 - DNA, 622 bp, Homo sapiens
ccagtcatttattaatgcatgcctattatgtttccacctttagacagatgcagtgcaccctttacttatcctttgttgtttggccttgtcttcagtgtatctttttgctgtcagattaatcttgccaaagtasagatgtgatgtcgtatctttcatttttgcattcaaggctttgtaataaatttttaaggtgattctgtgtctgattcatttttctatattcaaaacacccaaatctgtgtcttacacacagctggatcatttgtacaaaaaatacaactgaggcatttaaataaaaaacctgattgataagcacactgaagtatttttgtacctactagtcaatgtattttattcccagaatagaattcttataggtgaatgaaattttgatcagagaatctttccagaataattttcatatcctaaatgatgatacattatttgtttttgaaagaccttaatagtttttctaaaactaccttttgaccataaattctctattaattcagacaagaatctataagatcttggtttcttttgagttgtcttgaaaaacacagaatttcagaaggttgcaatgggggaaggtaatataaagcagaggttacaaaatgaacaa

SEQ ID NO: 272168 - DNA, 511 bp, Homo sapiens
ttaagttacctaagtatacacttaaatctattctttgatacaattaaatgaarggagaattaactaaattagccttaatgcatttctcttaaccaattttacatgttacaataatagaatgctattaggcataatttaataattacctttctttaggtcaatcttaattttctttgcatttttattgctgccaaatcccatgagaggcgagagtgagggagaggatggttttcctcccagccttggtactcggggactcttgttttgttgcagggaagctgatgcatctgtttcaggactatcggttcctgtgagatttgctgtctttagtcccgattttccatggacaggaggcggcactttggttttcaaaacgccatcattattaccaaaaatgttaagagagccaatgactgacttttcatactgttcacggttttgtggaggaagcacgtggaggagcacacttggagatttcattgcctggcggaagacatcttgagccctggaa

SEQ ID NO: 272169 - DNA, 601 bp, Homo sapiens
cacattccaagtcttctgggctgtaaacatggcgtttatttgctgtgcacctcagtttcctcatctgtggaatggacatgacaataaacctcacaggtttgttgtgaagcataagtgtattaatatgtgtaaagtactcagaaatgaagtagtcaatcattgttagcctctagtatattgtttctgttgtattcttgaatctcagatgtcagagacttaraaaaaattttcaaaagaaaagataatgataatgcaacctgatttctattttgcttctaccacttaaataataaatgataagtgttagtgcaaagagtggttgtcagtcttgctaagaattaaatataattgccaaaagaggaatgatttaatcataaaatgaagtgatttgaaggtattactaaagcaaaattagttcttgtctctttgtctctgatagacaaaagccagagaacctttctagtttttctcttgaaatggtgttcacaaacttacagtaggatggtttttctttaatttgcactttaattcagtggaactttattagactgaaattaagcaaatcccagagaggcctggaaacataaatggttttgaaatg

SEQ ID NO: 272170 - DNA, 559 bp, Homo sapiens
tgcaagaatgaaagctcagtggagcctgagagtgattgtagtataaattaaaggccatttatcacattttatacacttgaagaaaaccatggtgcccagaatgcatatttccttttgtatacttagagaagcttagttttctaggtttccagaaaaagaaggaagatcatgcttcagtcctttcacgttgaggtgagtatagtgtactggttagctagatggccggtgttcaagtccagctcagtccttgctagctgtatggaaatgtaggcaagggtcttgaccagctgtctcccatttcctcaccggtagaatggtgataataaataataactacttcataggyttccaggattaaatcacacaatgtgatgaaaacaataaagtgatgatagaggaaggatacacgtttgcacctcttgccaccctcattattatctcacaccgtgcaaggagacttcttgagtttgaattctgccttacctactctctccctgtgcatgtaggtaagctgctcagccttgacatgcctcagtttcctcatttgtgaaattagcag

SEQ ID NO: 272171 - DNA, 603 bp, Homo sapiens
gtatacagaacgtaatcaaactttttttttcttttttggaattctgaaggttctctgaatatgccctggcatattcaagacagcttaggttcgtgactctctcatagttacaatttgtagatgaaacttaacaccaggaccaaaacacctgaytgacttaatttagcaagcacttcttgaacatttagagtgagttagacaacagtgtatagtggactagacaccgcatacttaaaattacccattctataatctaggaaggtagtaacacaatacattaaatatataaaaaacactaatatgataagagctatgataggcaaatgtgagaagtatcgtgggtgttgagatgatgaagcatttaattctgtctggggagaaaactatgaaaggaaggcaattgcaaggcttgcttggggtgaggagtaagtagactttgaagaggtgagcaggaatgcaaagggcattttgggtagaagaaagaatatgggcaaagtcaccaaggtatgtacaccaaagtacagtctgttgtgcctggaaaatagaggtcttatttgggaagaatggacctcttcacataagctgaaatgatgtgaaacatgt

SEQ ID NO: 272172 - DNA, 603 bp, Homo sapiens
gtatacagaacgtaatcaaactttttttttcttttttggaattctgaaggttctctgaatatgccctggcatattcaagacagcttaggttcgtgactctctcatagttacaatttgtagatgaaacttaacaccaggaccaaaacacctgactgacttaatttagcaagcacttcttgaacatttagagtgagttagrcaacagtgtatagtggactagacaccgcatacttaaaattacccattctataatctaggaaggtagtaacacaatacattaaatatataaaaaacactaatatgataagagctatgataggcaaatgtgagaagtatcgtgggtgttgagatgatgaagcatttaattctgtctggggagaaaactatgaaaggaaggcaattgcaaggcttgcttggggtgaggagtaagtagactttgaagaggtgagcaggaatgcaaagggcattttgggtagaagaaagaatatgggcaaagtcaccaaggtatgtacaccaaagtacagtctgttgtgcctggaaaatagaggtcttatttgggaagaatggacctcttcacataagctgaaatgatgtgaaacatgt

SEQ ID NO: 272173 - DNA, 603 bp, Homo sapiens
gtatacagaacgtaatcaaactttttttttcttttttggaattctgaaggttctctgaatatgccctggcatattcaagacagcttaggttcgtgactctctcatagttacaatttgtagatgaaacttaacaccaggaccaaaacacctgactgacttaatttagcaagcacttcttgaacatttagagtgagttagacaacagtgtatagtggactagacaccgcatacttaaaattacccattctataatctaggaaggtagtaacacaatacattaaatatatraaaaacactaatatgataagagctatgataggcaaatgtgagaagtatcgtgggtgttgagatgatgaagcatttaattctgtctggggagaaaactatgaaaggaaggcaattgcaaggcttgcttggggtgaggagtaagtagactttgaagaggtgagcaggaatgcaaagggcattttgggtagaagaaagaatatgggcaaagtcaccaaggtatgtacaccaaagtacagtctgttgtgcctggaaaatagaggtcttatttgggaagaatggacctcttcacataagctgaaatgatgtgaaacatgt

SEQ ID NO: 272174 - DNA, 603 bp, Homo sapiens
gtatacagaacgtaatcaaactttttttttcttttttggaattctgaaggttctctgaatatgccctggcatattcaagacagcttaggttcgtgactctctcatagttacaatttgtagatgaaacttaacaccaggaccaaaacacctgactgacttaatttagcaagcacttcttgaacatttagagtgagttagacaacagtgtatagtggactagacaccgcatacttaaaattacccattctataatctaggaaggtagtaacacaatacattaaatatataaaaaacactaatatgataagagctatgataggcaaatgtgagaagtatcgtgggtgttgagatgatgaagcatttaattctgtctggggagaaaactatgaaaggaaggcaattgcraggcttgcttggggtgaggagtaagtagactttgaagaggtgagcaggaatgcaaagggcattttgggtagaagaaagaatatgggcaaagtcaccaaggtatgtacaccaaagtacagtctgttgtgcctggaaaatagaggtcttatttgggaagaatggacctcttcacataagctgaaatgatgtgaaacatgt

SEQ ID NO: 272175 - DNA, 565 bp, Homo sapiens
tagcttgaggatggagttggttatggggggatgccagaagcggggmacataattgaagtatttttgcttaggagtctgatgggagtaatagaggaagaaaaaggggtgagaaagggagagagagagagagagagagagagagagagagagagagagagagtgtgtgtgtgtgaatattgcaagcataacccaggtgaaataaatatcctagaattaccaagcaacatccttgaatatttgaattcatttatgtaaagtcaattgaaagttaatattctcatgcctaaatatttactagaatttaatattaattttaaaaaccataaaaagctgattgtctttgtccaaattattccaaagcaaatgggacatacacaattttgagagagatttgatgagtttttgaataatgagctcctcattgaatcaacttcattttaggtcaagactggacatagacgtgcatgtatggatgtctagctaagtaggtagacagccttttttttttttttttccctcctctgggttgctctgccatgcccctgcacagtttcctgtctccata

SEQ ID NO: 272176 - DNA, 483 bp, Homo sapiens
cctgctgctactccccatacaatttagaacatgtgccttgtaacttttgatgtggggctcttgtttgaagccattgttgttttccctgctgcctgcatcatcatatgttatgtgattcttcaggaccttggtttcaatctctataactgcctatccttcaaaacccccaaacatattattaaatgacgtcacctgtcatttaagccatctccatcccaaacatatcctccaaatgaaaatccactgagagggagagggagartgtgattataacaaagagacagaaacttatagaggtagcaccttacatttttgttggtctttatatcttgcatgattcattggtataccaatttcaccctttaactaatggctgccactttcaaaattgttttcctcaaactgaattagacgaccctcctcttggcttccttagtgacatttaaaggggacatggatcagtacctggaccccatttaatac

SEQ ID NO: 272177 - DNA, 598 bp, Homo sapiens
ctttgttttggagcaaggccagacctctactggaggtaggagaaaagtctccagtctctatgtatgccaagaagcatcatctcagggggttggcaaaagaaccagagagtgttacaagagaatcacttcagcaatgcaatttcctaggcatttagaactgtggggttgtttctttttttcagtctttgcagctgagatcaagcccccatgaatgagccgttraaagaatctaaaagagaattgaaaaacaggctccctattactgagactccattcaaaaacaatttttgtttttgtactactgtgcaaacctactctttggaaatatattacctgggaaatctggaatttattttattgacacatgcttgaaagctaaatctaactgatttttaagctagtcaatgggaagaggtcatgcaggagaccagcaattagatcactgctatctttttgtagatggctcagctccactttggagctcaccttcaggaaaaacaaagcaaccccacaccagtccaaacacataacatgcacacctggtggggaatttggaacctgagcttgctctgatggaacatgaaaatgaaagtttcgg

SEQ ID NO: 272178 - DNA, 569 bp, Homo sapiens
agctgcttccctgggcgcctcagcatcatttcctgcctgttcccctgggcgcctcagcatcatttcctgcctgttmccttcattctgtctgtttttttgttttgttttgttttgttttgttttgttttttgagatggagtctcattctgtcacccaggctggagggcagtagcacgatctcagctcactgcaacctccacctcctggattcaagtgtttctcctgcctcagcctcccgagtagctgggactacaggcgagcaccaccacgtccggctaatctgtgtatttttagtagagacgaggtttttgccatgttggcaggctggtcttgaactcctgacctcaggtgattccacccgccatggcctcccaaagttctgggattacaggtgtgagccaccacgaccgtccctgtctgttctttttaaaatcatgtcttcgttcaaaactttaaaaaaaaattccagtggatgtgccttctatttcccatcaaaaccctgcctaacgtagttcccctcctccaagccatgctgttctccacagagcgcgagtacaatacaaagaagg

SEQ ID NO: 272179 - DNA, 569 bp, Homo sapiens
agctgcttccctgggcgcctcagcatcatttcctgcctgttcccctgggcgcctcagcatcatttcctgcctgttaccttcattctgtctgtttttttgttttgttttgttttgttttgttttgttttttgagatggagtctcattctgtcacccagsctggagggcagtagcacgatctcagctcactgcaacctccacctcctggattcaagtgtttctcctgcctcagcctcccgagtagctgggactacaggcgagcaccaccacgtccggctaatctgtgtatttttagtagagacgaggtttttgccatgttggcaggctggtcttgaactcctgacctcaggtgattccacccgccatggcctcccaaagttctgggattacaggtgtgagccaccacgaccgtccctgtctgttctttttaaaatcatgtcttcgttcaaaactttaaaaaaaaattccagtggatgtgccttctatttcccatcaaaaccctgcctaacgtagttcccctcctccaagccatgctgttctccacagagcgcgagtacaatacaaagaagg

SEQ ID NO: 272180 - DNA, 612 bp, Homo sapiens
gggaggggtgagaggagacctggggaaggatgggctgaaccccccgggcactttagctgtgtcaagtcagcagctttggcatagaaaatgggatggttgatgattcctgagacagcaagatgtgttcataataggaaggggattcagctctgctaaggtggcaaggtaggcagtttatgggacattctctcaggtggagatgcctgtaccctgcactgaggcctcctccctatgccctctctctgcttgcccacatccagtcccagggcttcaaatgctgtctgtaagctggtgacacatttgcgtaggtctgctgagttccagcttcctatctgcccctggggacctgatatctcctcagggacatctgaaaggcagcgcaaccttgacatggccaagtgagaacttcagccgccccggcaagtcccctgcaactgtcttcagcagctccgtccctatgcccagtaacttaggccagcattctctgcccttcttgagcccacttctcctcacaccctrtaaacgtcaccatttccaaacccctcacgcccagccattcctaccattgccaggggtgggatgcagcagaccaccctgcccctcccctgggac

SEQ ID NO: 272181 - DNA, 482 bp, Homo sapiens
tgtctggtcagtatcacactgggctgaacactggcttctagtcagaatcttctagttcaatcacctttgttttcactcataaagtggtagaatgttaaggtccacaatattgcctgcattctgcagccacccatatgtcaccacctacctgctttatctctttgtcacattttcatctctttctacttcaactttcctttgattcatccccaaaagctttcccctaggccacttggcagtattccctcactagtcaaaatctggtgggtctttcttgagtgagctctcagagctgacctccttttttaagacatctatttgcatgcaggtggccatcgatgayatcaatggttttgcagtattgagccacattttggattttacctagaagatgtgcagaatataaatgttttcatgaggtatgtgggccaatttctcattcaggatgagaaatgttgcagttgaaaaaatttggaaacata

SEQ ID NO: 272182 - DNA, 521 bp, Homo sapiens
atgatacatctgctggttgatctgactagtaaagagaaaggttaggtgtggggactcaggctatcttgaaagacacagagcatattctcatccacttctatgacaatgtttttcaaggtatttttatttccattgctycattcaattctcatggtcccttgagaggttgggagggaagacacatttattgtcatttgacaaatggggactgggactaaaataggttcaggacttactcagggtaaaattaagtgaaatggtgaagctgaacttgaacttggtgtttgtctcccagtcaaacggtctttccacctcaccaacctcagctcgcccatttccctgtggctttcactagtgaggcattactcttatggtttgcgagagaagtttccaagtttctatgcctggttatttccctgaaagtatcttctatctctcttaacatctttcatcacaggcattggggtattttcccatgctaggaataagaggagcagtgtagaggataaacaggatttggt

SEQ ID NO: 272183 - DNA, 598 bp, Homo sapiens
tgctgcccagcacactctgtggccaggtcactgtggggacgggggatcagtagttatagcagcatcaccttctccatccaggcagcctccccagaatctcaggttgccctctgggttctttcattgcaccttgttcttgtttcatcacaacacttatcatactgctgaccattgcctcttggcttctctgcaggcactcagtaaaatgttctaaaccagtggcattttggggaggtgtgtctctctaccaaactttgatcatcatatttttgtgacttgcatgtttaggaatgtgggtgtgtgaaatgtttagagagaccagtacctaactttgtataagagtcaattcaagagggtttagagtcagtgtatgmctagaggtggacgtttatgatgataaaacagaataaagctgttgggtttttgtagagactaaacacaggaacttggttacatcagcatttatttgttctttcattagttcatcacccattcattcatcactattgagcatgtattgagcatgattttaccttagtggactacaaaatctatcaatgtctgccttgacattgaacaaataataatgaaggctgtg

SEQ ID NO: 272184 - DNA, 584 bp, Homo sapiens
aaatctgcctttatttatttatttttgttttgcagatgacacatcttgtcctcactctgcatagctcttaggtaagctaaatgtttgtttcattaycaaagggaagctcctccttagccctgcacgtgacacacactcatgacctactgtgtgtgatctcttgccttttagcagagaacaacgaggcttcttttaagagcacagactatgttctctaattttttgttaatgctgcagaataactaatagagattttctcttccgcctcataagtctggtggatgaactgaacattaaccctcaccgggtaaccttgagaagccctcatgaatgtgcagcaattacaatccatcgcacttgccagcgacctggtaaaaatcaaggtgtgagttacagtgaccgttacagaaacatttcatacgatccaggagacattaccttccctgggctctcttggcaggagacagagtgtacaaagcaaagttgctgcggctgaaagaaccacaaagaaggagtcacattcatattttccttctcgtctctaatcataaaacaaaaaaacaaaaaacaaaaaacctggaatc

SEQ ID NO: 272185 - DNA, 596 bp, Homo sapiens
tcaccacagtctgaaactcctgggcttgggccatcctcctgcctcagactcctgagtagctatgactacaggcatgcaccaccacacctggctaatttaaaaaaaaaatttgtagagatggagttccsactatgttgctttggctggtttcaaactcctgggctcaagcaatcctcctgccttggcctcccagagtgctgggattacaggtgtgagacaccacccttggctattatcttgtcactttctgaattctcatttgcaggtttaatttattctttttttttttatttttgagatggagtctcgctctgttgcccaggctggagtgcagtgacatgatctcgactcactgcaacctctgcctcctgggttcgagcaattctcctgcctcagtctcctgagtagctgggactacaggcacccgccaccatgctcagctaatttttttgtatttttagtagaggcggggtttcagcatgttggccaggctggtctcaaactcctgacctcaggtgatccacccacctcacctcccaaagtattgaattacaggcataagccactgtgcccagcctattcaaatattttacaca

SEQ ID NO: 272186 - DNA, 596 bp, Homo sapiens
tcaccacagtctgaaactcctgggcttgggccatcctcctgcctcagactcctgagtagctatgactacaggcatgcaccaccacacctggctaatttaaaaaaaaaatttgtagagatggagttcccactatgttgctttggctggtttcaaactcctgggctcaagcaatcctcctgccttggcctcccagagtgctgggattacaggtgtgagacaccaccyttggctattatcttgtcactttctgaattctcatttgcaggtttaatttattctttttttttttatttttgagatggagtctcgctctgttgcccaggctggagtgcagtgacatgatctcgactcactgcaacctctgcctcctgggttcgagcaattctcctgcctcagtctcctgagtagctgggactacaggcacccgccaccatgctcagctaatttttttgtatttttagtagaggcggggtttcagcatgttggccaggctggtctcaaactcctgacctcaggtgatccacccacctcacctcccaaagtattgaattacaggcataagccactgtgcccagcctattcaaatattttacaca

SEQ ID NO: 272187 - DNA, 599 bp, Homo sapiens
gtttacttatctgtaaaatgaagatatttagagttaaaaacctaggatatttagacttaaatttagacttaaattggctgctgctttggtttcttgaaagaaatactttggtccttggcctccaaagcctctgcttagctgctttaccgattctatgtggtatgtcctcctttttaggttctttgttgctgttttaagagaaaatttccaactaaatgcttgtttctttacagataaaaataaaccgtatgttgactaagatcccacttggccaggcgcagtggctcatgcctgtactcccagcactttgggaggccgaggcagatgaatcacctgaggtcaggagttcgagaycagcctggccaacatggtgaaaccccatctctactaaaaatacaagaattagccaggtgtggtggctgacgcctataaccccagctacttgggaggctgaggcaggagaatcacttgaacccaggagaaagaggtggcagtgagctgaaattgtgccattgtactccagcctgggtgactagagcaaaactccatctaaaaaaaaaaaaagaagaataagaaaagacaaaaattccattcaaggc

SEQ ID NO: 272188 - DNA, 550 bp, Homo sapiens
ccataatgtccaaagcaagctacatattcaatgtattccctatcaaatcaccaaygtcatttttcacagaattagaaaacaagcttaacattcatatggaacccaaaaagagcccaaatagccaaaccaaccttaagcaaaagaacaaagctggaggtgtcacattacctgacttaaaattatactacaaggttatggtacctaaaacagcatggtactggtacaaaaatgaacacatagattaacagagcaggatagagagccctaaaatagaatcacatacctacaaccagctgatctttaacaaagtcgatataactaatagagacagatagcaggacaagatggatgactagaagagccaagagagcctctcctaccaagtgagatcaaaatgtggggtaagtcatcatactttaaacagctctttttagagaaaacactctaaatcaagagagaggcactgacattgaagaggaaggaagcttggaatcctacatgggattgctgactaccaggactcattcctagctctgaacagctcctaagg

SEQ ID NO: 272189 - DNA, 550 bp, Homo sapiens
ccataatgtccaaagcaagctacatattcaatgtattccctatcaaatcaccaacgtcatttttcacagaattagaaaacaagcttaacattcatatggaacccaaaaagagcccaaatagccaaaccaaccttaagcaaaagaacaaagctggaggtgtcacattacctgacttaaaattatactacaaggttatggtacctaaaacagcatggtactrgtacaaaaatgaacacatagattaacagagcaggatagagagccctaaaatagaatcacatacctacaaccagctgatctttaacaaagtcgatataactaatagagacagatagcaggacaagatggatgactagaagagccaagagagcctctcctaccaagtgagatcaaaatgtggggtaagtcatcatactttaaacagctctttttagagaaaacactctaaatcaagagagaggcactgacattgaagaggaaggaagcttggaatcctacatgggattgctgactaccaggactcattcctagctctgaacagctcctaagg

SEQ ID NO: 272190 - DNA, 550 bp, Homo sapiens
ccataatgtccaaagcaagctacatattcaatgtattccctatcaaatcaccaacgtcatttttcacagaattagaaaacaagcttaacattcatatggaacccaaaaagagcccaaatagccaaaccaaccttaagcaaaagaacaaagctggaggtgtcacattacctgacttaaaattatactacaaggttatggtacctaaaacagcatggtactggtacaaaaatgaacacatagattaacagagcaggatagagagccctaaaatagaatcacatacctacaaccagctgatctttaacaaagtcratataactaatagagacagatagcaggacaagatggatgactagaagagccaagagagcctctcctaccaagtgagatcaaaatgtggggtaagtcatcatactttaaacagctctttttagagaaaacactctaaatcaagagagaggcactgacattgaagaggaaggaagcttggaatcctacatgggattgctgactaccaggactcattcctagctctgaacagctcctaagg

SEQ ID NO: 272191 - DNA, 626 bp, Homo sapiens
tatctgccaccacaaaaacacacttaagcacatagctcacagacacaatatagcaactacacaatcaagtctataaaacaacaagctaacgacacaatgacaggatcaaaattttacgtatcaatattaatcttgaatgtaatgttccaaatatcccacttaaattggcatagaatgacaagtggaataaagaaacaagaccccaccgtatgctgtcttcaagaaacccattccacatgcaatgacactcacaggctcaaagtaaaggaacrgagaaagatcttatatgcaaatggtaaacaaaaaagaggggttgttgctattctgataaaacagactttaaacaaaaaacaattctctcctgcacacagtacgtactctaacattgtccgcatccttggccataaagcaagtctcaataaattcaaaaaattgaaatcatgccaagcacactttctgaccacagtgcaataaaaatagaactcaatgtcaagaagatatctcaaaatcataccatcacatggaaattagacaacttgctgctaaatgacttttgggtaaacaaaattaagccagaaactaaaaaattcttcaaatgtaatgaaatcagacacaacataccaaaa

SEQ ID NO: 272192 - DNA, 627 bp, Homo sapiens
tacatgctttttgttgttatatcttacccatatttgatgctttcctgaaacagtcaaactcatgctattcttcctctgacttccaagctattgttggctattatactataactacattgtaatatatctaatctataggtgtatctaatctatagaatgttaattatctttccatttatatttggctggatcttcaaccagcttatattctccttcacaatcagaatagtttgtgtttctaacctccagtacatagcataatagtcttcaaaggytagagcaaatcagaatcacttggggcaatttattagccctaaccctagagattctcaataaaaattctgggatgaaaccaagaaaaatatatttagtaaacacagatgtctgaaacccatgagttagaatttcaaagaaacactgctcaataaccttaatataagagatacctaataactatttgttgcaagaatagcacgcttgattgaatataaactgctttaaaatgttcttcccaatctcattacctactgatgctgcaataccctatccacaaacttacatttcactcttgcctgcatatcacccactgtgcaatcagaatatgcaaagaagcctataccatcagta

SEQ ID NO: 272193 - DNA, 627 bp, Homo sapiens
tacatgctttttgttgttatatcttacccatatttgatgctttcctgaaacagtcaaactcatgctattcttcctctgacttccaagctattgttggctattatactataactacattgtaatatatctaatctataggtgtatctaatctatagaatgttaattatctttccatttatatttggctggatcttcaaccagcttatattctccttcacaatcagaatagtttgtgtttctaacctccagtacatagcataatagtcttcaaaggctagagcaaatcagaatcacttggggcaatttattagccctaaccctagagattctcaataaaaattctgggatgaaaccaagaaaaatatatttagtaaacacagatgtctgaaacccatgagttagaatttcaaagaaacactgctcaataaccttaatataagagatamctaataactatttgttgcaagaatagcacgcttgattgaatataaactgctttaaaatgttcttcccaatctcattacctactgatgctgcaataccctatccacaaacttacatttcactcttgcctgcatatcacccactgtgcaatcagaatatgcaaagaagcctataccatcagta

SEQ ID NO: 272194 - DNA, 478 bp, Homo sapiens
ctcttgcctgcatatcacccactgtgcaatcagaatatgcaaagaagcctataccatcagtatgcatgatatatcaaattgtggacaaggtgagtcagttaatgttgctaagaggaatttccactttgcatatcatgacttctatcttaatattgtattgatattccatgatctttgacaagtaattttactctgccgattgcaatttgttctytggcctacaaaaaggctgatatatcaggcatcatgagtagtggcagagataaatgcaatgaactgctttgtatttaaccatgatcaaagtaaagaaagggtacagggggatgaggggcaaataagacaccaagtggtgtagagattgtcctggaaaagacctagtaaagactgctgtgtctagacaaggggaagatggaggcaaatataaatcattttcatagtattcatgctgaagtactattgccttgattacctcaataga

SEQ ID NO: 272195 - DNA, 516 bp, Homo sapiens
ccttcccatccatactcccagtctcaccaacacttataattattcaccagaaattcaacaatagggagaaaagcaactggataatacacgttgcacaataaaaatatgagattatcaacaggctacgtggagaccctgggacacacatctcactataggaagtgagggtagtaatagctggagtgggaatcttgaagcctgcatcacatattaagatgcaaagttggtgtattcatctgctatatgaagatatcacagactgtgtggcttaaataactatttttcatagttctggaggctagaagtccaagatcaaggtgccaggaggcttggtttctggcgagacctccttcctcaccttgsagacagcaccttcccattgtgtccacacatggccttgtctttgtgcctgcacacagagagggcaaggagctctggtgtgtcttcctattcttataggacaccagatcttttggattagggccccatccttatgatctcatttaatcttaatta

SEQ ID NO: 272196 - DNA, 564 bp, Homo sapiens
ttacccagtctgtggtattctattatagaaacacaaaatagaaaaatgcatataagggatctatacttttcaaaatcagaacatcaaaatgctcagattggataaaaacaagagtcaacattttgccacttaagaaagacacatgcaaatctttattattgttgaagattagccaggcaaatgtaaagaaatrtaagtgagtggaacaatgtttgtttcagagaaaatacaactcaggacgaaaataatataactggaatgaaggagggaaacataagtaccacttgtgagaggcagtgctgtccagacctggttttaaaaggcctcctagtgtgctatgtggtagggtgagagccagttgtatctaaagggctaagggtatggtaagcacaactaaattctctttctttcataccactggtagtagagatgatgctttaagccatacatgtaaagtactttaaaatacgcattttttaatagaaattatatttagcttagcaaacctacagttttaagggtattattgtttaggacatggctaatttttttataaaaagttaa

SEQ ID NO: 272197 - DNA, 564 bp, Homo sapiens
ttacccagtctgtggtattctattatagaaacacaaaatagaaaaatgcatataagggatctatacttttcaaaatcagaacatcaaaatgctcagattggataaaaacaagagtcaacattttgccacttaagaaagacacatgcaaatctttattattgttgaagattagccaggcaaatgtaaagaaatgtaagtgagtggaacaatgtttgtttcagagaaaatacaactcaggacgaaaataatatawctggaatgaaggagggaaacataagtaccacttgtgagaggcagtgctgtccagacctggttttaaaaggcctcctagtgtgctatgtggtagggtgagagccagttgtatctaaagggctaagggtatggtaagcacaactaaattctctttctttcataccactggtagtagagatgatgctttaagccatacatgtaaagtactttaaaatacgcattttttaatagaaattatatttagcttagcaaacctacagttttaagggtattattgtttaggacatggctaatttttttataaaaagttaa

SEQ ID NO: 272198 - DNA, 564 bp, Homo sapiens
ttacccagtctgtggtattctattatagaaacacaaaatagaaaaatgcatataagggatctatacttttcaaaatcagaacatcaaaatgctcagattggataaaaacaagagtcaacattttgccacttaagaaagacacatgcaaatctttattattgttgaagattagccaggcaaatgtaaagaaatgtaagtgagtggaacaatgtttgtttcagagaaaatacaactcaggacgaaaataatataactggaatgaaggagggaaacataagtaccacttgtgagaggcagtgctgtccagacctggttttaaaaggcytcctagtgtgctatgtggtagggtgagagccagttgtatctaaagggctaagggtatggtaagcacaactaaattctctttctttcataccactggtagtagagatgatgctttaagccatacatgtaaagtactttaaaatacgcattttttaatagaaattatatttagcttagcaaacctacagttttaagggtattattgtttaggacatggctaatttttttataaaaagttaa

SEQ ID NO: 272199 - DNA, 564 bp, Homo sapiens
ttacccagtctgtggtattctattatagaaacacaaaatagaaaaatgcatataagggatctatacttttcaaaatcagaacatcaaaatgctcagattggataaaaacaagagtcaacattttgccacttaagaaagacacatgcaaatctttattattgttgaagattagccaggcaaatgtaaagaaatgtaagtgagtggaacaatgtttgtttcagagaaaatacaactcaggacgaaaataatataactggaatgaaggagggaaacataagtaccacttgtgagaggcagtgctgtccagacctggttttaaaaggcctcctagtgtgctatgtggtagggtgagagccagttgtatctaaagggctaagggtatggtaagcacaactaaattctctttctttcataccactggtagtagagatgatgmtttaagccatacatgtaaagtactttaaaatacgcattttttaatagaaattatatttagcttagcaaacctacagttttaagggtattattgtttaggacatggctaatttttttataaaaagttaa

SEQ ID NO: 272200 - DNA, 572 bp, Homo sapiens
agaaaactgaagtttaagcaatgctgtgataattaaggcagttgaaatgaccagactgagtgaaattaatccattgttcaccatgaagtccttcaaagccgtagaacaaaatctgccattataatctcaggagtcaggatggtgacttttttcaaaagccattaagaccaaaggtaccctcgtcctcatactttttatcttgctgcaacctattttttttttttaaacagcaatatgttgtgttctatagtctctcacatagtaacacagctgtgaagagaaggtagttctcaggaacctatttgaagctactctagcaactaaagttcaatgttcttaagctamggagaggaagtcctaatagctttacattcgagactgcctcaccttgtgaaagattatcttctgcatacaacacagaagttctgttcctgcttccctggcccatctgctctgcttctgtacagacctcccactgcatttttcattagctttttagaggatctataataataagataaggaagatttagcctctcatccatattaacatgcttccagtgtaacagtatt

SEQ ID NO: 272201 - DNA, 505 bp, Homo sapiens
gtggtaatgtgtctggttacaaattcttgttgattccttttcctcatacatctcaattccttacttatctactgatatttcctgagataatatcccatgtaaaacacctgactcaaatatttctctcacttctgggagtacccaaactaagaaaactggtactgaatgtaattccaggaagggattttcagaatgctatcttgaaatggggttgctttcatgatggttggcagcaagatctcggtggtggtggtaagtgaagataaagataaccactggcatgctgccacatcaaaattagtaagactcttcctgtaatgaattgagtgataggggatacattgacttacctagtatcaccagcatttgagagatatgaatacaagctttctgggtgatgctcggtgccctcagtgctccagaggaagaaaacataggcttagggcaggcaactcatrtattttcatgtatttcatgaaagcaatagggcttcattgcaggcagc

SEQ ID NO: 272202 - DNA, 575 bp, Homo sapiens
ggaagctctgtgcctctacctgcatacctcaccccatgcacctcttcatctgtattctttgtaacrttctttgtagtaagccatacaatgtaaagcagtgtttccctgagttctgtgagctgctcacactaattaattataactcaagagggggtgaggggaaccccaatttatagccggttagaggcacaggtaaaacaacctggggcttgtgattggcgtctgaagccaggggcagtcttgaggaacagaggcctcaacctgtgggatctgatgttatctccagcagctagtgtcagttgaactgtgttgggaggacacctggctggtgcctactacagaactgattgcgtgggtggtgtgtggggaaaaaacccacacatgtgtacagaaaagtcttctgtgtttattcttttggtgtgacaacagaggagaaactgttttttctacacagcagtagatatgcagctaaaaattccaaggtttcgatgtgtccattttttggaccagtcattttttccaagcagattgaatacagttatccatgttggaaataagtgtttgacacaaccagg

SEQ ID NO: 272203 - DNA, 533 bp, Homo sapiens
tggcacaccccatggagaaggcatggaagctctgtgcctctacctgcatacctcaccccatgcacctcttcatctgtattctttgtaacattctttgtagtaagccatacaatgtaaagcagtgtttccctgagttctgtgagctgctcacactaattaattataactcaagagggggtgaggggaaccccaatttatagccggttagaggcacaggtaaaacaacctggggcttgtgattggcgtctgaagccaggggcagtcttgaggaacagaggcctcaacctgtgggatctgatgttatctccagcagctagtgtcagttgaactgtgttgggagracacctggctggtgcctactacagaactgattgcgtgggtggtgtgtggggaaaaaacccacacatgtgtacagaaaagtcttctgtgtttattcttttggtgtgacaacagaggagaaactgttttttctacacagcagtagatatgcagctaaaaattccaaggtttcgatgtgtccattttttggacca

SEQ ID NO: 272204 - DNA, 658 bp, Homo sapiens
tttgaattatatcaaggtttcatttgttgtttagcctatgttcattcatttatttgaggaaatataaaattaacttttatttactcagcaataattttatygcattcctcctatgcattgggcattgtgttagtccagcagtaaacaaattagataaaaatccctgccctcagataatttatattcagaggggaggggcagacatcaaaaaaaaagataagaaggaaaatgcatagaatgttagatgttaaacagtgttacagaagaaaggagcatagaattaggctagggagcatcagagtggatggcagacttcagtttagatgggataaagtgaaggtcaggcaggataaagacctaaaggaggtgagggaatgagatatgcagacacctgggaagactattccaggaaaagggaacagaatacgcaaataaactgaggcgcaaatatgcaagaatgttaaatacaaagaaagaaggtcacagaagtaagtgaagggcagattaagaagagcattctaggttattgtaagaacttggttttcaaatagttgatgtttgtaattattacgcataagtcctctgcattcttgcttatgtatttgtttttatatattattctatccccttagtctgtttgagctatccaagtttgaaa

SEQ ID NO: 272205 - DNA, 529 bp, Homo sapiens
aataaatgaaattcttcccttcatatgacaacccattaattaagcaaaaatagacacctattttttttccaaaatcctccaggttcactattctcagctcctaaaattttgtctcatcaattgtttttcagatctttttactgacttaatgcttctctcaggaattcactccaatttgacagcattctgcctagtgaattaactgttgcagtatctttggattcctcactctgttttcaagcttaatcataatctctttagtgttatgtcattctcactttgccactgtgatatcattttcatcactacttttatttcttcaattgccatatgaggtttattagtatttgtttcaggactattgtgaaaaaaatrcacttgtttataaaaagctgaacataaatcctgctatttagttagtacccaataatggtaactattatgataaataatgaatacaatggatcaatttgagttttctatgagattagtttacagtgtgtgaaacttttaaaatcctattgagaat

SEQ ID NO: 272206 - DNA, 578 bp, Homo sapiens
agcaagcactaagggatatgttattaacagaccactcttacaagaggtcctgaaaggagcattaacatggaaacaaaagaccaaaacctacctcaaaaatactctcaagcacaaagcccaccaacaataaaaagaaactacaccatcaagtctacaaaaccaagttagctaacaacatgatgacaggatcaaaatcttgtatatcaatactaaccctgaatgtaatctaagcaccccacttaaaagacacagagtggcaaactagataaaaaagacaagatccaacagtctactcttttcatgagatgcatctcacatgtaatgacaccacaggctcaaagtaaaggaacggagaataatctaccaagcaaagagaaaacaaaaaggagcattattcttataccatataaaatagattttaaaccaacaataatcagaaagaagaaacaatggctgtacataatgataaagggttcatttcaataagaaggtttaacatcttaaacatatatgtttatgctcaacataggagsaaacagagtcataaaacaaggtcttcttgacttataaaaaaactt

SEQ ID NO: 272207 - DNA, 473 bp, Homo sapiens
agacacaccttaccaaaacatttgggatgcagctaaaacaatgttaaaaggaaagtttatgtgctaaacacctttatcaagaggttagaaagttctcaaattaactacttaaaagcataactggagaaactaaagaataaaaatacaacattccagcttcaaagctagtagaaaagaaataactaatatcagagaacaactaaaagaaactgagactcaaaagtccacacaaatgatcagtaaaactaaaaatttaaaagaataaacaagtttgatggactgttagcygatttaacagctgttagctgaattaacaattaagaagatgaaaaaaagatccaaataagtgcaatcagaaatgacaaagacaacattacaaccaattccatgcaaatacgaaatatcctcggggattatttatgaacacctccacgcataaaaatttaaaaatctagagaaaatgggtaaattcc

SEQ ID NO: 272208 - DNA, 473 bp, Homo sapiens
agacacaccttaccaaaacatttgggatgcagctaaaacaatgttaaaaggaaagtttatgtgctaaacacctttatcaagaggttagaaagttctcaaattaactacttaaaagcataactggagaaactaaagaataaaaatacaacattccagcttcaaagctagtagaaaagaaataactaatatcagagaacaactaaaagaaactgagactcaaaagtccacacaaatgatcagtaaaactaaaaatttaaaagaataaacaagtttgatggactgttagctgatttaacagctgttagctgaattaacaattaagaagatgaaaaaaagatccaaataagtgcaatcagaaatgacaaagacaacattacaaccaattccatgcaaataygaaatatcctcggggattatttatgaacacctccacgcataaaaatttaaaaatctagagaaaatgggtaaattcc

SEQ ID NO: 272209 - DNA, 566 bp, Homo sapiens
gaaaatttctgacatttttaaataaaactaaaaacacatctattttgtgacctagcagttccactactagatatttactcaagacaaataaaaatatatatccgcaaaaagacctgtggccgaatgcttatagcagttttactcatagtagtcaaaaaccagaaacagcttggttattcaccacatataatagataaacaaactggagtatatttgtagactgtcatattatccaacaataagaaagaaaaaaaatacttaaatacacaaccacatggatgtgtcttgaaaaccttatgtgattaaaaatatatgagtccatatatatataaagcttaatatataagtccatatatatacagcccgagaacagkcaaacttaatttataaatatttatttaaatatttataatttattaaaaataattataataatgattggctctgggagatggtggtggagagctattgaaaaagcatatgaggagactcgttgggttgacagtaatattctgtatcttgacaaggatttggcttgcacaggtgtatatgtttgtgtgaactca

SEQ ID NO: 272210 - DNA, 596 bp, Homo sapiens
ggttgatggataatagagtgatgcacaggtatataggtaactgatraatcaaagagagtaaacttaattgtggaacctgggtgatagatatttgaatgttcatggtaaaattccttcagttttcaatatgattgaaatgtcaagataaagcgttgaaaataatgttaatacacacatatacaaacatcttggtgattcattggtttggtaaaattaacagattcattttgatcttactcattaatgggaaaggaatcattaaaatatttgaggctgttctgacaatcaacagacataaccctttatgcaccagcagatatacacacacaaatacatatacatatatttatatttgtatgtcttaaaagctattagaaatttgaaaagaaattgatagaagtgcaattgtcattgaagactttggcaaaactttcagatcagaaatgtacaacggaagaatgcttttatctcaacctattactgatttcaaagtctgtcccactcttctgtcttcacttcaaaattatgttcctgtaattcatgggccacctgaattagaatcatttggaatattaattaaatctgcagattgcaag

SEQ ID NO: 272211 - DNA, 596 bp, Homo sapiens
ggttgatggataatagagtgatgcacaggtatataggtaactgataaatcaaagagagtaaacttaattgtggaacctgggtgatagatatttgaatgttcatggtaaaattccttcagttttcaatatgattgaaatgtcaagataaagcgttgaaaataatgttaatacacacatatacaaacatcttggtgattcattggtttggtaaaattaacagattcattttgatcttactcattaatgggaaaggaatcattaaaatatttgaggctgttctgacaatcaacagacataaccctttatgcaccagcagatatacacacacaaatacatatacatatatttatatttgtatgtcttaaaagctattagaaatttgaaaagaaattgatagaagtgcaattgtcattgaagactttggcaaaactttcagatcagaaatgtacaacggaagaatgcttttatctcaacctattactgatttcaaagtctgtcccactcttctgtcttcacttcaaaattatgttcctgtaattcatgggccacctraattagaatcatttggaatattaattaaatctgcagattgcaag

SEQ ID NO: 272212 - DNA, 556 bp, Homo sapiens
tagaataccttgtcatgtagagaatgtacaatgcccatctgcttactctaaacaatcttgtatcgccctccttgcctcctccatctggcccttctcacttgggccacctgcccacaacatgcactcctgtggcctgtctctgtggcctgtaattcttacagggacccaccccagaggaggcytgaggcttcctggagctgctcgttgaggtggtagaaagtctacttctgggattcagtgttagaatttctatcattcctgcaccacaaagccacacttgtaaacagttctgccagtaataaagtggatgtttttgtcttcatctgccttccaccattagcaatctcttaattagttccaaacttagttggaataagagatcttaattttcccaccctttgaatcactcagaactcatctattcaatatacatttacatatatatacacacacacacacatatatatatacacacacacacatacatatatatacggccaattttgagaattgtgggttagatttgggggaagcgctgattaagagttgaatcagt

SEQ ID NO: 272213 - DNA, 562 bp, Homo sapiens
gagacttcccttcttccttctgggtagcagcaacatatcattcctgtggggtgtcctttctcactgcactgaatcattaaatctgattttgtccaacctaaagcttgtctctggtagtctttagctgattaggctttaacagcaagatcgcttttacaaccacaccctcccaccagatcatcctgaccagtctcagtttagtcctactaaccaaaagaaatgtatttgctgcctgcttcagaccaggaaaccaaccctgttgtactcacagaatcagaagaatgaaaatcagacattataatgccagcaggcctctgcagtgctttcacagcccagggaccttaatacatttatcccttccatccactacttctgacacacatacctgagtgagacacagagggatgtgtcatatcatctgaaaaaggagcaagttttatcatctcagaatcctcctcacacaaagcaaggcccggcatagggagctgaatcaatacatatcactsaatgaaagttctagaccttcaaatataaaaggtaaataagaaattagggggcagag

SEQ ID NO: 272214 - DNA, 556 bp, Homo sapiens
tagaataccttgtcatgtagagaatgtacaatgcccatctgcttactctaaacaatcttgtatcgccctccttgcctcctccatctggcccttctcacttgggccacctgcccacaacatgcactcctgtggcctgtctctgtggcctgtaattcttacagggacccaccccagaggaggcctgaggcttcctggagctgctcgttgaggtggtagaaagtctacttctgggattcagtgttagaatttctatcattcctgcaccacaaagccacacttgtaaacagttctgccagtaataaagtggatgtttttgtcttcatctgccttccaccattagcaatctcttaattagttccaaacttagttggaataagagatcttaattttcccaccctttgaatcactcagaactcatctattcaatatacatttacatatatatacacacacacacacatatatatatacacacacacacatacatatatatayggccaattttgagaattgtgggttagatttgggggaagcgctgattaagagttgaatcagt

SEQ ID NO: 272215 - DNA, 528 bp, Homo sapiens
ttacatatgtataaatacaaatatgaaatatatcattcaaaatgtggcaattttgtactatacatacatacacacacccttgcatagaaagaaagacatcataatattaccagagattaactatgagtggtaaaattatggaggattttattttccttttagaactttcctttattttccatttttctcccaagattagaaaasaagtatcaatcaaaaattgccataaaaacagtataagtttttgaactttagcaaaaagttacacaatgtctgaaagattctggtaattcactttttgaaaaactttaaagcagaatacactcataattatgcataattattatcaccaacgcagtttccaagatccgtgatttgtaccatgttgctcaggcctgcgatggtggtctctgatcctccctatagtgctacagtagtttaatacctgaacccagtgttccattctccatgcaaacattaggaagcaaactggcaacacttatattgtcaaaactgtcctaaatgaga

SEQ ID NO: 272216 - DNA, 528 bp, Homo sapiens
ttacatatgtataaatacaaatatgaaatatatcattcaaaatgtggcaattttgtactatacatacatacacacacccttgcatagaaagaaagacatcataatattaccagagattaactatgagtggtaaaattatggaggattttattttccttttagaactttcctttattttccatttttctcccaagattagaaaacaagtatcaatcaaaaattgccataaaaacagtataagtttttgaactttagcaaaawgttacacaatgtctgaaagattctggtaattcactttttgaaaaactttaaagcagaatacactcataattatgcataattattatcaccaacgcagtttccaagatccgtgatttgtaccatgttgctcaggcctgcgatggtggtctctgatcctccctatagtgctacagtagtttaatacctgaacccagtgttccattctccatgcaaacattaggaagcaaactggcaacacttatattgtcaaaactgtcctaaatgaga

SEQ ID NO: 272217 - DNA, 571 bp, Homo sapiens
atatatatttatgtgtgtgtatgtatatatatatatatacacatagttttttgaactatgggaatgtactatctactcaaaagttaaaataatagtcttaagggcctgagcctctataaaggcaatattccctttttaaacatggttacatttggccacagaaattcacagaaaatgtcccaatttctagtcaatttcctagacagtagttaacaacctttaagaaaaaaaaactttaacccacccctctcattttaaaagatatgacgagaaaastgagacacagaagagtgaggtatccaccagctcttagcaatgtagtccttccagagcagccgccgccatccctggggaatgctcaagttctctttctaaaataaaggtggctagaggcatagctgtttcataatgaaaaacacacacacacacacaagtgagtgaagcactttttaaaactataatttacttaaaaatatccttattttatttaagattctaaaggaaaaacaaaattctgaatccagttttttctgattcaaaaccatggcacctgcacccaagctgaaatttc

SEQ ID NO: 272218 - DNA, 476 bp, Homo sapiens
aacaaaattctgaatccagttttttctgattcaaaaccatggcacctgcacccaagctgaaatttcatgaaaggaaagttagcaaactatctgtaagacccggtgtatattattcaaatgggaaacagtacaaatctgagaaatcaagagttgtctctccagaggccaaaatagtgaacatttttattttctcataatacagctcctaaggcagcctggccttctgagagcagcagccttgtggctatgctcagctggctgatgctgctggacttcccacgacaccacctttcctcatctcttttggctctgttgagctgaaaagcacagagatatagagccacctactttactcacacataaagccaaaaracattatgagtgtgaaagtgacttaccaatttctggccccaagtcaaagctcagtaaaagcttgtacttactcctcctttccaatcacagtcataaatctggct

SEQ ID NO: 272219 - DNA, 595 bp, Homo sapiens
ttaaaaagagtctacatgtctcccttatgaccaaaaactctgacaatgtctatctctggttacccaaagtttactcccaatttggctttgctcaatttttcatctttataaccacaatagatasctattgagttcttagcagacgtttattgagttcttacaatagtgccatgtattttaacagaaaaagaaccattgagggagatcttttccctcattctatgaggtacgcttaatccttcggtttatgagtctgcaatcaaggtatatttggccacctgggatatcctatttgtctgacaagtgacttctcctggggacattagtctgcctcacctgggtgagccttggaaattcaatcccttaatgtaagtggaaacaccagagtggaaattgcattaaaatccaatgtatttttctgtgattcaaccagttttagaatactaagatactgttctgggatggatacaccagtttctttgttccttctctagagttacatgtactgtgaataaataaatgtagtgaattcttataactttatgttgccttggcatccattttcaatataaatttaagtttttcgtaccagaag

SEQ ID NO: 272220 - DNA, 607 bp, Homo sapiens
atgtatatagagaaaagaagagtgaattaaggaaagaacttaaggaatgtggaattgggaatttaattaaagaagagcaggaaggagactcctgaagagaggttgagatggaaccatcagagttagaagaatcaatgaatgacatcaaataacccagatttttggggggtgatgcgcaaatgttgtagcggtgatgtataatttggatgcttgtcccttccaaatctcatgttgaaatttgatcctgaacattggaggtggacctggtgggaggtgtttgggtcawgggtctgattcctcataagtggcttgatgctgccttgcagtaataaatgaactctttctctattcgttcctgagagatctgattgttaaaaggagcctggcatctccacctatctctcttgctcccactctctccatttgacatgactgcaccccctttgccttttgccatgaataaaagcttcctgagatccttaccagaaacagatgcccatgccatgcctatgaagcctacagaactgtgagccaaataaaagtctttttaaaataaatcactcagcctcaggtatttcctttatagcaatgcaaaatgggccaagac

SEQ ID NO: 272221 - DNA, 607 bp, Homo sapiens
atgtatatagagaaaagaagagtgaattaaggaaagaacttaaggaatgtggaattgggaatttaattaaagaagagcaggaaggagactcctgaagagaggttgagatggaaccatcagagttagaagaatcaatgaatgacatcaaataacccagatttttggggggtgatgcgcaaatgttgtagcggtgatgtataatttggatgcttgtcccttccaaatctcatgttgaaatttgatcctgaacattggaggtggacctggtgggaggtgtttgggtcaagggtctgattcctcataagtggcttgatgctgccttgcagtaataaatgaactctttctctrttcgttcctgagagatctgattgttaaaaggagcctggcatctccacctatctctcttgctcccactctctccatttgacatgactgcaccccctttgccttttgccatgaataaaagcttcctgagatccttaccagaaacagatgcccatgccatgcctatgaagcctacagaactgtgagccaaataaaagtctttttaaaataaatcactcagcctcaggtatttcctttatagcaatgcaaaatgggccaagac

SEQ ID NO: 272222 - DNA, 506 bp, Homo sapiens
ctagcatattttcatagtgttaaatgataacgataactctaaagagatgcaaaggaacaggctatttgaaatccttgagaaatttgagtctcatcccgttttatgttactattaatttttcttgatcatccatgcatccatgattacctagcctctgtgccgtgggttttacttatgtgatccttgtcaggtactttttttgttgtgtatgttgttgttgagacggagtctcgctttgtcgccaggtggtagtgtagtggtgcaacctcagctcactgcaacctccgcctcctgggttcaggmgattctcctgcctcagcctccaaagtagctgagactacaggcgcatgccaccgcgcccagctaatttttgtattttttgtagagacgggatctcagcatgtttgccaggatggtctcagtctcttgacctcgtgatccgcctaccttggcctcccaaagtgttggaattacaggtgtgagccactgcgcccagccatcaggta

SEQ ID NO: 272223 - DNA, 578 bp, Homo sapiens
ctttcttctcagctgatacaacacacttgtctggaaaattaatttgctcttgactttgaggagcgttaggtcccaaacccttagtagaatgtggaataaagctaagaaactttcctcatttaattatgtgaacgttatcaattgtcaaatcccatatttatgtatgtctgattttaagctacacaaggtgaatttaaataaacttatgcatacaatattacaagagttaggctactgtatgagtcctgaatgcaccaagctattccagcttccttctggaactccctctgccatttagcctttccaccactcttcttttgctatgttccagtcttttatacctcaatcccctgattcttccaygaccacctctccagctacgatactatcctttctttgtgccattacccaatatacacatgcctcagttgtaactctgccatgctgtacttgtcttatttgtttcacttttgctctctattcgaaagattgagagctgatgtcttattttcatcatgcaaagtaccagtaatgtaccatgtataatttaccttctacttagtaaatttgggagctct

SEQ ID NO: 272224 - DNA, 578 bp, Homo sapiens
ctttcttctcagctgatacaacacacttgtctggaaaattaatttgctcttgactttgaggagcgttaggtcccaaacccttagtagaatgtggaataaagctaagaaactttcctcatttaattatgtgaacgttatcaattgtcaaatcccatatttatgtatgtctgattttaagctacacaaggtgaatttaaataaacttatgcatacaatattacaagagttaggctactgtatgagtcctgaatgcaccaagctattccagcttccttctggaactccctctgccatttagcctttccaccactcttcttttgctatgttccagtcttttatacctcaatcccctgattcttccacgaccacctctccagctaygatactatcctttctttgtgccattacccaatatacacatgcctcagttgtaactctgccatgctgtacttgtcttatttgtttcacttttgctctctattcgaaagattgagagctgatgtcttattttcatcatgcaaagtaccagtaatgtaccatgtataatttaccttctacttagtaaatttgggagctct

SEQ ID NO: 272225 - DNA, 501 bp, Homo sapiens
accatatcactgccaatatttattttgcagacattccactttgatctgggaaactgaaatataagtaatagaattagtcccagtacaatttactttctgccctacagagggtaataggatccaatagttcctggtttgcaaggtaccattgtgatccccaaataaatcttgagcatttgcaacaagtggttatccagagagtgcttgatcttacttaaaaagtccgtgggagacggttccatctgaggccaactctaattattagaaagttcctctttgagataatctaygagctgtcttccaaaacttctgtatcttggtcccagtcattctcccaaaggagccacaaactatacatgtactgtttttcttacaggacagccaagccattcaggcactgatgacagctaacacactctgttggctccagtcataaactctatcaccgacaaatacacatgctcttcttttattcccagtaaaacaagtagcaaaatgatc

SEQ ID NO: 272226 - DNA, 501 bp, Homo sapiens
accatatcactgccaatatttattttgcagacattccactttgatctgggaaactgaaatataagtaatagaattagtcccagtacaatttactttctgccctacagagggtaataggatccaatagttcctggtttgcaaggtaccattgtgatccccaaataaatcttgagcatttgcaacaagtggttatccagagagtgcttgatcttacttaaaaagtccgtgggagacggttccatctgaggccaactctaattattagaaagttcctctttgagataatctatgagctgtcttccaaaacttctgtatcttggtcccagtcattctcccaaaggagccacaaactatacatgtrctgtttttcttacaggacagccaagccattcaggcactgatgacagctaacacactctgttggctccagtcataaactctatcaccgacaaatacacatgctcttcttttattcccagtaaaacaagtagcaaaatgatc

SEQ ID NO: 272227 - DNA, 438 bp, Homo sapiens
ggaaaaagatccaagcataaaattattaaacaaattaacaaaataaatgaaatattttattacagagaaactatacctactgtatgaaaaaaaaaaatctcttccaaacatgctcttttaacttgagggactgtttcaaacttgatcagaagtcaagcagtcttttttgtaaacacactctttatccctcaagatgttcccatttttacctctatattcttgcagagctgataagytgaatgcatttcaggcataaagataaggtgtaaagggtcagtctgggtagagaagaatgtaaagatctgatctccacctgtgcagagcccctttctggtgtgtttgatctgtgttgaattcttgatatctattctctggcctctgacagctgaccaactgagagctgagactgtgtattattcctgccccagaccacttcca

SEQ ID NO: 272228 - DNA, 601 bp, Homo sapiens
tgcaaagggagcatgagaggtttagtagacatgctgggaaatattctccctgaatcaactaaggataacatactcgtatataatttgtaaagcaatattttgtgaaagacaaatgtcagagaataaatagcttccactattggaaaaaaagtttgaaatctctgttcttttttatcaattaggaaatatcttcctaatcacatagggatctctgggctgaagacctacagatgtgggtttcttccaatgggcttcaaggagggatcttggacttctgagtataaaatcatgctattccatagtgtctagttattgacatcaataggacatacagggttgactgggtctttaatgcaggactatgtgccttattgagtgtctaggataagaatgatgtacttacaataagcatacttattagaaggttaaattrtaggtcaagaatgaatagctgaagagttaggttcagaaaaatgaggacaaaatagcaacagggttctttgtagcaaaataatactaataacactaataataatagtctgtctcttcaggcaactgtgacaggggttaggtcaatattaatttttcattcctgttccct

SEQ ID NO: 272229 - DNA, 618 bp, Homo sapiens
actaataattcctcagaacaggatttcagaagagtagaaagcaagaggaaactctggacaagtgtgagtgagtgtatgaaaggagtaaaggagaggtcattgtctttgcgttatttttgtccttggtgggaccatgaataatcacactgttactgcaatttttatacattatgaaatggaagttagccatcaatgtagcctatgagagaacaaaccacaagaacacaatcaaatgtagcaatgaatatgaaacactgaaaaatagtgtaatgctatataaacatatgctatttattactgtctcttaagggaaaattgaacaactggtcagtgtatgtagaaacaacatgtaatagtatttgtggagaaacagaagaaaaatgtgaggagattttatttctyttctggaaagatatcatcatactataatgttttatttgttgatttgttacattttgcttttttttttaaaaaaaaacacattccataataaaatattaacaacaacaaatcagctccatataaataaagtgcataagttacgggaatacatacactcaaatacagaaaacaaagttaaaatactacaagtacaaaggatttaacacttagtgtata

SEQ ID NO: 272230 - DNA, 416 bp, Homo sapiens
tcaatgtagcctatgagagaacaaaccacaagaacacaatcaaatgtagcaatgaatatgaaacactgaaaaatagtgtaatgctatataaacatatgctatttattactgtctcttaagggaaaattgaacaactggtcagtgtatgtagaaacaacatgtaatagtatttgtggagaaacagaagaaaaatgtgaggagattttatttctcttctggaaagatatcatcatactataatgttttatttgttgatttgttacattttgcttttttttttaaaaaaaaacacattccataataaaatattaacaacaacaaatcagctccatataaataaagtgcataagttacgggaatacatacastcaaatacagaaaacaaagttaaaatactacaagtacaaaggatttaa

SEQ ID NO: 272231 - DNA, 597 bp, Homo sapiens
caatgcctgcccctctggttagtgtgccagttgaaaacaagtggaaaggagctgagttctgaaagtggctgcccaggactggcaacctacaagagagcatgaaggcagggctcggcgtcctacatacaaaggaggtcatagactggggtgtggccaggagcctcattggttttggatcttagatccgtaccacatgaayagcacatgtatacatatatttttattttattatcttatgtctctgtagttataagacacaaagtccaattctgggtaactttaacgaaagcatacttattagcaggttagtttgtaggtcaaggatgaatagctgaagagttaggttcagaaagatgaggacaaaatagcaataggattctttgtagcaaataataataataataataataataataataataatcgtccgtgtcttcaggccattgttacagggttaggtcaatatcaattttcattcctgttcctgcaatccaaatccctgagattgtccattatcctagactgggtcatgtgtgtgccaccttggccaggaagaagagggcagacaccctgatcaatagtcctaccaagacttcc

SEQ ID NO: 272232 - DNA, 621 bp, Homo sapiens
tggtattcttctttttcctaaccttagtttactgcacctgccaactgcctgagaggaatagcctctgttgtctatggtcagaataagtgatacatatgtgcgtttaatttctccttaatcacctttactgatggggaccacatgacctttaaagtcttatgagccattaagtagctctcatgcctagaaagtgtttttttgttgttgttacatgcacacagagatacacacaccacacacattgaaatattttcycatcagcatctactcatgataaacagcatcctctgtttattatatctttcaggtaaaataacaatatggacctctcagtcttttctctataaatggcaccctccctattcctgtcggtgtcctttgcttaccctttagttgaatccatgttaccattaaaatgtaatgtccagaattgcgcactaatctttagaagagatctgacggagcagcataaagcaagcctatctgcagactcagatgacccctgggtaagagacaacaaatgccaatgagttgatagaaacatcttatttgaacagaaggtctttctaaaacctgtaaaatcaccttgtatgagtttgagctctgtcttcaacccaggaa

SEQ ID NO: 272233 - DNA, 606 bp, Homo sapiens
ctcctgctccttcagttctcctcactgttacagaaaaagctattatgtgtagatggtgttgcttgaatatgtcttattatcttttctaataggagtttcatttctaaatgtttgctccctgtataacaacttacatttctgatgattcaaaacatccatcttgatttttaaaatttgtctgttgcgtttctttcaaaattctgatagttattctttcccttggccttccctcttaagtctgcctgctgttgttcccagagcaaatgttgtcataaaacttgttgaaataaaactttgatttttttttccatttagagcagtaaatcaatttttgaaagagaaatacyctgcacaccattggagcattagtgaatttttgttcttgagctgtagaaatgcttttgagtgctacacatcagtttggctctgtttctccccacagtccaggatctatactattccgaaggaaatgtacataatcaagttggaaatggacagggtgtgggttttgactaaatttttccaaggtcatgcctttaacgccaatccctgatcaagggcaaatgaattaaaaaacaaaacaaaatacaacactctaattgttta

SEQ ID NO: 272234 - DNA, 582 bp, Homo sapiens
tatatttagataaaacagaacctatggtcagacaattctaatctgctgttccattatgactatgtgtctcagcataactagtacatcccaatcaaatcmatctttctaatcaagcacctacgtattttgttctcgaatcaataatctactagttcactctttgttatttgctttcccccctttttgctgaatccttttgataattagccttcagaactatggagttcataatgcttttatatgtagggttgtggatgaaattgaaaaatttctctacagcctggaatagcagaagctgaggacagcacaggagaggtccctatgcacagggaccaaggatcctgggagccaggaagaaggcacaaagacaaaacaaagccgctctccattctccagtggagacccactgtgaggatctgggtccgtgtaagagaatccactgggattagaagcagaataagaaaagttgaaggaattttctggaaggcataagaagtgagaggacagagggctttagggaaagagattttcaaagttagacttaaagtagagcaattaaatgatggtagggtataagttagg

SEQ ID NO: 272235 - DNA, 582 bp, Homo sapiens
tatatttagataaaacagaacctatggtcagacaattctaatctgctgttccattatgactatgtgtctcagcataactagtacatcccaatcaaatccatctttctaatcaagcacctacgtattttgttctcgaatcaataatctactagttcactctttgttatttgctttcccccctttttgctgaatccttttgataattagccttcagaactatggagttcataatgcttttatatgtagggttgtggatgaaattgaaaaatttctctacagcctggaatagcagaagctgaggacagcacaggagaggtccctatgcacagggaccaaggatcctgggagccaggaagaaggcacaaagacaaaacaaagccgctctccattctccagtggagacccactgtgaggatctgggtccgtgtaagagaatccactgggattagaagcagaataagaaaagttgarggaattttctggaaggcataagaagtgagaggacagagggctttagggaaagagattttcaaagttagacttaaagtagagcaattaaatgatggtagggtataagttagg

SEQ ID NO: 272236 - DNA, 510 bp, Homo sapiens
acccactgtgaggatctgggtccgtgtaagagaatccactgggattagaagcagaataagaaaagttgaaggaattttctggaaggcataagaagtgagaggacagagggctttagggaaagagattttcaaagttagacttaaagtagagcaattaaatgatggtagggtataagttagggctgtgtgaggatctgactgaagtgaagggaggggaccaggacctaagttgacctttctgtctcattcaggttttatacaatgctggataaayatcccatagacaccataatggaggactccacaagagaagggcatgttggttttgttttctcaggcacttctaggtaagtgggatccaagaggaatgaagactggcagggagtgtgggtagctgagccatttgagatgagcagatgaaacatccaccaaaagagatggcaggcagagggcagaatggtgaaattgtggtctaaatgaagggtatgacatcaaaagagaaaaaaatct

SEQ ID NO: 272237 - DNA, 510 bp, Homo sapiens
acccactgtgaggatctgggtccgtgtaagagaatccactgggattagaagcagaataagaaaagttgaaggaattttctggaaggcataagaagtgagaggacagagggctttagggaaagagattttcaaagttagacttaaagtagagcaattaaatgatggtagggtataagttagggctgtgtgaggatctgactgaagtgaagggaggggaccaggacctaagttgacctttctgtctcattcaggttttatacaatgctggataaacatcccatagacaccataatggaggactccacaagagaagggcatgttggttttgttttctcaggcacttctaggtwagtgggatccaagaggaatgaagactggcagggagtgtgggtagctgagccatttgagatgagcagatgaaacatccaccaaaagagatggcaggcagagggcagaatggtgaaattgtggtctaaatgaagggtatgacatcaaaagagaaaaaaatct

SEQ ID NO: 272238 - DNA, 611 bp, Homo sapiens
aataggactttctttccaacctcttctcccttttatatcttcctaacatgctgtactcaaaccacactctaccttcatggatgcctcattgaatagtgtttttcgttatcatcctcatcatcatcatgatcaacatcataaaagctaacacactaccagcccttaatacctcctaggtccttaaaatcatctctgcaatagcaaatgtgaatactcatcttataaatgaggaaattaagctgcagatatatgatccccaaattcatatgtctagccagacaaggagccagttttgaaacttgacaatctgttatgaatatcttagtcatttctcaattctactgccttcaactttcttctctagcttacaaactccttcttatgcttctgtatgctcttccacagtcttcccagatgctctctctcttttgctccttgaaaacatgcttcctctccttcccttctctgagatcctacaggcttacatttttctcccygtaccattgtcttccacctttaccttttatgaggtatttgtatattgtgctctcttctgaacaatgagggatcttttaaggcctactctggatctaatttaaggagatacatag

SEQ ID NO: 272239 - DNA, 579 bp, Homo sapiens
ttaaccactttgaggccatttacagactagtgaggaggagatttttgatatgaggtgcaggagtcctttccctggtacttccatataaatgcacctagtgtcccttttagcattatctgttggtgcctgttgagacctggtagccttgacaaatgatcagcagccccaaggcaatagcagaatcctttgttatgaccataaagttgaaaccagctgagcttaagtatgttggatatctaatgaaattaaatttttctttcatttttcaatagccttagtctcacaggtgaacaggagaatgaagaccagtattcaggctcaatcctrtattcctgagcaaatatgaattgttagtctgccatcaattctgaagaaatttagccattatacctcttggatccaagggttatggcaactgatttaattccaaagtttatgcttcgggcaaaataatactcaagcaagatttatcgtcactcttctccatctaagagacaccaataatataaaatactggcaccagcgttactttttaaaagtattccatacatgttatgcattagacaatgtttctgaaaa

SEQ ID NO: 272240 - DNA, 579 bp, Homo sapiens
ttaaccactttgaggccatttacagactagtgaggaggagatttttgatatgaggtgcaggagtcctttccctggtacttccatataaatgcacctagtgtcccttttagcattatctgttggtgcctgttgagacctggtagccttgacaaatgatcagcagccccaaggcaatagcagaatcctttgttatgaccataaagttgaaaccagctgagcttaagtatgttggatatctaatgaaattaaatttttctttcatttttcaatagccttagtctcacaggtgaacaggagaatgaagaccagtattcaggctcaatcctgyattcctgagcaaatatgaattgttagtctgccatcaattctgaagaaatttagccattatacctcttggatccaagggttatggcaactgatttaattccaaagtttatgcttcgggcaaaataatactcaagcaagatttatcgtcactcttctccatctaagagacaccaataatataaaatactggcaccagcgttactttttaaaagtattccatacatgttatgcattagacaatgtttctgaaaa

SEQ ID NO: 272241 - DNA, 579 bp, Homo sapiens
ttaaccactttgaggccatttacagactagtgaggaggagatttttgatatgaggtgcaggagtcctttccctggtacttccatataaatgcacctagtgtcccttttagcattatctgttggtgcctgttgagacctggtagccttgacaaatgatcagcagccccaaggcaatagcagaatcctttgttatgaccataaagttgaaaccagctgagcttaagtatgttggatatctaatgaaattaaatttttctttcatttttcaatagccttagtctcacaggtgaacaggagaatgaagaccagtattcaggctcaatcctgtattcctgagcaaatatgaattgttagtctgccatyaattctgaagaaatttagccattatacctcttggatccaagggttatggcaactgatttaattccaaagtttatgcttcgggcaaaataatactcaagcaagatttatcgtcactcttctccatctaagagacaccaataatataaaatactggcaccagcgttactttttaaaagtattccatacatgttatgcattagacaatgtttctgaaaa

SEQ ID NO: 272242 - DNA, 554 bp, Homo sapiens
tttgttcaagaaattattttccttctctattgcatattttcttcaaatgattttgaagttttacctttaatatttttatttttaatctaccaggaaattatttttatttactctttcagatacaatctaattttagttttctccatattgaaaacagccttctggatcttgcctatcaatctccttcctgctgccctatattgtctcctttatcaaacaggaagttttatatatatgagtatatttttgtattctccagactgttctcttggtctatttctctctctgtgacccatttctacactgttttaattaccttggctttgcaatatgttttaacatatcacaactttttttgagaatttttttcttctcttcttgaatctttgcttttttatgtgcattttataatcatattgtgtgattccacctacccactccctcaagtttcaactggagttgtactacatatttggattaacttgggaagaactgakagatttttaatattaaatcctcagtcaaaaaacaaaattacacaaatttagtttaaa

SEQ ID NO: 272243 - DNA, 601 bp, Homo sapiens
tctagtgccatctttatgtctctgaaccttcacaataatgcattttctcacatggaaaaaaataacgtatgactgtttggggatcttactcttgaaaagcactttgtttacaaacacacagttattttaactgcagaaagtaatttaagagtagccacaagtggctttgaaagctctcagtttcctgaattgtcttcttataagactatgtattgtggagatgtaaagacttgaacatttcctaaattaaaaaaaaagaaacaaaaaaaaacaatgttgcaycaagaagtcaattaaatttttccttaagagtaaaaatggattatagaatgtgaagattgatccaagtaataggtgacggtctcaagggtgttcatgaaagaatttagggcttctgtagattatgctgattttttttctctcatagtaacactctatatttacagggatgaataaatgttcaacttcttttttcaaaaacaaatatgtttctgcagctttaagtatgtatttatacttctactttccatagatcaatcccttttcaacttaagatgctacaactcttgtaaatgttggtacagtactttttaaattcaaa

SEQ ID NO: 272244 - DNA, 619 bp, Homo sapiens
tgggcaagttactgtggttytttgaactagctattctaagtcccaagagtaattttgcaaatgaatgaaaaatgtaaataatttaagacagtaagagtatatagaaaaaggagctctgagctcataatactaatacagtaacaagttcaaattttgtattcatctctgatttacccagtggtctccacggaatttgttttctgcacctgaatttgattattttttgtccagggtagtttcccaggtcaaaataatgtaaggaagataaatgagataatactgagaaaacattttaactattcaaaataaagctaatttatttcctcctgtgtttatcactgtgcttcaaaaccctgtcctgatattctcagaaactcaggtataaaatgaagagatatttaagtacatattggggtcactgccactaactagctgttgatctctgctaaatttgccccatgtagcttctaaaaacacaggtgatttctcaaacatctttgtttttgtggcccctaaaatgcctaccaaatgatcagatagatagtactatattctcaaaaaaacccttttcaggcttccagcaattctggtagtcttcatcccacactcccctattgaa

SEQ ID NO: 272245 - DNA, 568 bp, Homo sapiens
ctcacactgcaaaggtaggttgggcattcttccactgcccaagatgcaagcgaatgatgcaggcagattccaagctgagtttgctgagataagggcctccaaggaactgagttccggcaacatgcattgtgagtacccataccatcaggtctgtctttgtattctgttctctgaacctaaaatgccccttcttcagttctctattaaaccctcttcacctgcacatgcttcaatactcatctcaaatgaatccatttctggctggcagagtttttcatctatcatttttttctccctgtcttatagcaaatattggatcctaaccttagttattttcacatgtaactcttttttttaccctacgatccttggcaacaggggatatggcttacttatttctgtgtctccacaccttgcttagcatagagccaaaccaattttttttttaattatcatacttcaggtttagtagtatctgcaaaaaaaaagtattctttatacagtattatctaagtggaaattttattttaaaaytcaatagaaataatataaattagattttttttaa

SEQ ID NO: 272246 - DNA, 566 bp, Homo sapiens
tacattaaatggctacacagtccatgtcataaatgcaattataasttgatggtggtctatgtatttggaaacactgactcaatcttcagcaaaagtggtttgaaaatgaaatgggaaaatacactaagcaagcagagaccataaaagaggcactaatgacataaacattcaaccttccttacaaactttgaaacagaaaaatggtggttgcccagttttttgttgttgtttgtttgtttttgagacggagtttccctctgttgcccaggctggagtgcaatggtgcaatctcagctcactgcaacctctgcctcctgggttcaagtgattcttctcctgcctcggcctcctgagtagctggaattacaggtgactgccactatgccagctaatttttgtagtttttagtagagatggggtttcaccatgttggtcaggctagtctcaaactcctgacctcaggtaatccacttgtttcagcctcccaaagtgctgggattacagacgtgagccaccatgcctggcccagttttccttttaatttgctataattgtatctatcccac

SEQ ID NO: 272247 - DNA, 622 bp, Homo sapiens
tgggttggggtccacatagccatgtgatcataagcaagttacctcattttttaagcttcaatataatatttattattattaatatatatgattcgatatcatataatakgctctccctatcatatgtaaggttataatgagaaatgaatgaaataacatagggaatgattttggaaatgataaaacataaaagtaaaaagtactgtcatttctgtaaccatggggatatcaatattaattaaaatgcttattataaaacacaactgctaaagcggttacagaaaataaacaaggaaaaagaaacgtatatttctgtcttgagaaaatgcatgctgtcagttgttactcctgcaaatgacaggtgaaaacctttggtcaggagaaatgtgcaaagaattctgaaacacagtttaatgaaaactacaacacatttcttttgtcagaaccccatagcttcagcatagctaattctctgcttcattcttaagaaacattcttaaaagcttgaggctgtttgttagcaacagatgtagacatttataaacaaggaccatcttaacagaattatttctcacgaattaaataaaggatcccaaagaatggttccaactgtttacagtta

SEQ ID NO: 272248 - DNA, 622 bp, Homo sapiens
tgggttggggtccacatagccatgtgatcataagcaagttacctcattttttaagcttcaatataatatttattattattaatatatatgattcgatatcatataataggctctccctatcatatgtaaggttataatgagaaatgaatgaaataacatagggaatgattttggaaatgataaaacataaaagtaaaaagtactgtcatttctgtaaccatggggatatcaatattaattaaaatgcttattataaaacacaactgctaaagcggttacagaaaataaacaaggaaaaagaaaygtatatttctgtcttgagaaaatgcatgctgtcagttgttactcctgcaaatgacaggtgaaaacctttggtcaggagaaatgtgcaaagaattctgaaacacagtttaatgaaaactacaacacatttcttttgtcagaaccccatagcttcagcatagctaattctctgcttcattcttaagaaacattcttaaaagcttgaggctgtttgttagcaacagatgtagacatttataaacaaggaccatcttaacagaattatttctcacgaattaaataaaggatcccaaagaatggttccaactgtttacagtta

SEQ ID NO: 272249 - DNA, 596 bp, Homo sapiens
ttaattgtggtggtagttacatgagggtcaatgattgtccaaacttatctaaactataaacgtaagaaaagtggattttctataaaccacaccaaaaaataaaacatttattattgaaagtagaaatcaattcagttttcagttttaaaacattattctgtatctcacacattttcttaaaggaaaaaatgtgttggagtaggracagtaatgtatcagaagttataatatgttattaaaacatatttagaggagagactaaatcattggtatttttattgatggctctttcttcagagaaattgttaaaaagtgaaaacaattctggttgtcataaagttatctctgtttagactttttaccaaaccagttcaaataaatcctaaagtggacaacatcagagccaagagcaatcttggttatatgttcacagcagagtatcttaacttccttttgccagccaagttccccagtatttaattttggctgttcccaacagaaatttttcatctaggctcggcagttttctaatctcaacttctccagagtcaagtaaccaaaatagacatggccaaaacccagtcccacagagcctc

SEQ ID NO: 272250 - DNA, 537 bp, Homo sapiens
cccttgcaagaattaatcctaatttgcaccattttgggccacgtctactgtatccttcagtgtcttctataaagtgttctatgtgatacattctattatgaatttattaacagagataatattcctctctttaaggagtagtagcctttggccatgagataataattacatattacttgtttytttttttcttttgatcttgtctgccaggaatcttagagctaaattacatgctcatactcagaaaacttgttgggctatgtgaaggtgataacttgccacattctcctttcatgacctttattttgtttttattttatcagccctattgtaaatctaccttttattgtaagccataccacattctttgagaaagtggttattagcttagtttttaaaagtaacctcagcccatgaacaatgttcaaaagtaatttcacatcccagatatcatcatgcacaaaatgaactcattggcccaagagaaaaaaagaaaaaaattatgaatataaaggtttctaattcaacagaataatt

SEQ ID NO: 272251 - DNA, 576 bp, Homo sapiens
taaaaaataaacactttttattacagaaaaattgcaaatatagtctagagtgtttttgtgtatcttctacccagttttctctattatgaatactttgcattagcatggtacacttgtcatagttgatgagctaatattgatacactattaatgaagtccatgctttatccagatttctgtagtgtcctttttctgctccaggatccaatccaagaaacrcattaaatttacttatcatactcctaaagcttctcttggttttgacagtttctcaggctttccttgtttttgacaacttggtagttttaagaagtactggttaggttttttgtggcatttgtctcattgggatttgtctgatgtttttctgacgattagatttgggtatatttttgggaagtaaaccatgagttaaattgccattttttatcacaccatatcaaaagtatatattatcaacatgacttgtcactgtttttttgttttgagatagggtctcgctctgttgcccaggccagaatgcagcggtacagtgtcagctctctgcagcctctcctgccgggctcaagagtttct

SEQ ID NO: 272252 - DNA, 576 bp, Homo sapiens
taaaaaataaacactttttattacagaaaaattgcaaatatagtctagagtgtttttgtgtatcttctacccagttttctctattatgaatactttgcattagcatggtacacttgtcatagttgatgagctaatattgatacactattaatgaagtccatgctttatccagatttctgtagtgtcctttttctgctccaggatccaatccaagaaacgcattaaatttacttatcatactcctaaagcttctcttggttttgacagtttctcaggctttccttgtttttgayaacttggtagttttaagaagtactggttaggttttttgtggcatttgtctcattgggatttgtctgatgtttttctgacgattagatttgggtatatttttgggaagtaaaccatgagttaaattgccattttttatcacaccatatcaaaagtatatattatcaacatgacttgtcactgtttttttgttttgagatagggtctcgctctgttgcccaggccagaatgcagcggtacagtgtcagctctctgcagcctctcctgccgggctcaagagtttct

SEQ ID NO: 272253 - DNA, 521 bp, Homo sapiens
aacatcactgggttagcaccccatgcccatttatttgggaaaactttagaagtctgaaaacatcagtaggcaaggatatgtagaaatggaaattctacattgtcagtgggagttttaatttctgtttcccagtaaacttgaagccaaaacacagcctgtgacccagcaatcccacttacatgtttcagtcctagaaaatcactaacatatgcgaaacgtggctcatataaagatttactctttagcactgtttctaaaaatgaraaagtcaaacaatttcaaggcccctcaggaggacaaatgaataaactgatttcttcaaacagtgaaataatatccagcagttaaaatgaagtcgatctgtgtgtgtgaacttggcggatgtgaaaaacaacataaaaaaatctaacatgtatggaaataacacacgccaaatttggatacctctgatgggggggagtcttcagttatgtccatttatttaatgttttgatgaagcagatatcctaaaactgtttaaa

SEQ ID NO: 272254 - DNA, 521 bp, Homo sapiens
aacatcactgggttagcaccccatgcccatttatttgggaaaactttagaagtctgaaaacatcagtaggcaaggatatgtagaaatggaaattctacattgtcagtgggagttttaatttctgtttcccagtaaacttgaagccaaaacacagcctgtgacccagcaatcccacttacatgtttcagtcctagaaaatcactaacatatgcgaaacgtggctcatataaagatttactctttagcactgtttctaaaaatgagaaagtcaaacaatttcaaggcccctcaggaggacaaatgaataaactgatttcttcaaacagtgaaataatatccagcagttaaaatgaagtcgatctgtgtgtgtgaacttggcggatgtkaaaaacaacataaaaaaatctaacatgtatggaaataacacacgccaaatttggatacctctgatgggggggagtcttcagttatgtccatttatttaatgttttgatgaagcagatatcctaaaactgtttaaa

SEQ ID NO: 272255 - DNA, 633 bp, Homo sapiens
attgtgatcaattaacatgacaacaaagaaagatctgtgaccaggggagaagaatgagtcattgactttttatgaaaggacccactggttgagtaaataaagctcttttctaagtcaagctgagaattgagccttttgactgaataaactcaaggaaaagattcgggtaagggaaagagagtctgaattaggcagttgactattgataacaagcttactacctacctgggttattactcaatgtcttgctttccttggtcagcctctgtaaacatcagatattcaaagacttgagaagaattagttttctgagaagcttatagaagtcataaagtcagtgaggtagaaaaccctgtggaaaggccttttccaacccaaggaaccattgctaatgaatgacagtraggaaattgttccttttatggtagtatctcacctctagagtccactctgaggaagaattatcatcctttagatttagattaaacatcatttagattctgtcattctcctcaaaatctactgatactcccaatcatttcagaatcaaattaaaaccaatgcctttggtgtgtctattttatcactcctcttcctaattgtgtaatgtgcaatatcattgttttaacattg

SEQ ID NO: 272256 - DNA, 559 bp, Homo sapiens
cctgttatttttgttactttttgctttcttttgttttttggggttttgttttaaagacagggtctgtgtggctttgccacccagcctagagtgcagtggcatcctcccacctcagcctcctgagtagctaggtttacatgctgacaccaccaagctcagataatttttaaatattttttgtagagataaggtctccctatgttacgcaggctggttttgaattcctggcctcaagtgatccacctgccttagcctctcaaagtgttgggattaaaggaatgagctaccatgcttaggccctgctggtttatattaggagagacctgggktttttttttttttttttttttttgagacggagtcttgccttgctctgttgcccaggctggagtgcagtggcgctatctcggctcactgcaagctccgcctcctgggtttatgccattctcctgcctcagcctcccgagtagctgggactacaggtgcccgccaccgcgcctggctaattttttatatttttagtagagacaggttttcaccgtgttagccaggatggtct

SEQ ID NO: 272257 - DNA, 560 bp, Homo sapiens
ttggttcaacataagcaaatcaataagcatgattcatcacataaaaacaaaaagcaaaaactwtatgattatcttaatcacctaaaaagccttaaacaaaatccaacatcacttcatgataaaaaccctcaacagactaggcatcgaaggaacatacctcaatataataagagccatttatgacaaacctacagccaacatcatactgaacaagcaagagctggatgcattctccttgaggaacggaacaagacaaggatgcttactcttaccactcctattcaatataggactggaagtcctagccagaggaatcaggcaagagaaagaaataaaaaggcatccagataggaaaagaagaagtcaaactatctctcttcactgacgatatggttctatacctagaaagccctaaagattctaccaaaaggctcccagaactgataaattacatcaatagagtttcagggtacaaaattagtgtaaaaaattgctggcatttctttacactaataatattctagctgagaaccaaatcaagaatacaaccccatttacaa

SEQ ID NO: 272258 - DNA, 565 bp, Homo sapiens
aacagtgtgatctcggctcaacgcaaacctctgcctcccggtttcaaatgattctcctgcctcagccttctgagtagctgggattacaggsacccgccaccatgcccagctaatttttgtatttttagtagagatggagttttaccatgttggccaggctggtctcgaactccttacctcaaggtccaaccacctcggcctctcaaagtgctgggattacaggtgtgagccaccgtgcccggctatttttacttttaatatgcaaaatatccctacatgcatatcacccatctcattctgaaattcatatatctgagagacaagcctggagaaggcctagtggacaaaccacgttcctgggatatgtgaaagaaggagggcttgtccccctgcagatgccactggtgaggaagagttatgtggcagagtagatgaaaatagaagaggagaggaaatgccgtttactcctcagaatcaaaggaggaaggttaccatagacagtcatatcttacatctctgggaagttcagttggaaccacagttggaaatgaatgtcagtgccagg

SEQ ID NO: 272259 - DNA, 642 bp, Homo sapiens
tggaatccttatattccttccttcagtgaatgggtataattaygtgtattggaaattagagtattcgctataattatgcactcttttaaagtgggagaataattataatgtctacaaccaactgtacaaggtactactgaagcttttgttttaaatctgccagggaggacctcagtaatgattaatttcttacaactactttttattcatttggagaacatactaggaatgccttcacacttcccgtttcattgtggaaagtttctttaaacaagaatatttctttaaacgaagacttgagaacaagtgggttggtttttacatagccagcttccattatttcatcgtagattatatgagaaacctaaaaattttaaaacaggacttttagcagcttcccttatccttgttagcaaatgcaaacttttacattttatcatgctgctaaaaggtcagctacaacatttaaaaactcaatgtggaactaatcacaagctttggttcaatgctttagtattttatttcatacaattaccaaagttagaagaaattgaaagcaccaaatattaaagaattagagattgtgttatttctgggaggtaaggttaaacagaaatatcatttttatgaggaaatcattaa

SEQ ID NO: 272260 - DNA, 642 bp, Homo sapiens
tggaatccttatattccttccttcagtgaatgggtataattatgtgtattggaaattagagtattcgctataattatgcactcttttaaagtgggagaataattataatgtctacaaccaactgtacaaggtactactgaagcttttgttttaaatctgccagggaggacctcagtaatgattaatttcttacaactactttttattcatttggagaacatactaggaatgccttcacacttcccgtttcattgtggaaagtttctttaaacaagaatatttctttaaacgaagacttgagaacaagtgggttggtttttacatagccagcttccattatttcatcgtagattataygagaaacctaaaaattttaaaacaggacttttagcagcttcccttatccttgttagcaaatgcaaacttttacattttatcatgctgctaaaaggtcagctacaacatttaaaaactcaatgtggaactaatcacaagctttggttcaatgctttagtattttatttcatacaattaccaaagttagaagaaattgaaagcaccaaatattaaagaattagagattgtgttatttctgggaggtaaggttaaacagaaatatcatttttatgaggaaatcattaa

SEQ ID NO: 272261 - DNA, 642 bp, Homo sapiens
tggaatccttatattccttccttcagtgaatgggtataattatgtgtattggaaattagagtattcgctataattatgcactcttttaaagtgggagaataattataatgtctacaaccaactgtacaaggtactactgaagcttttgttttaaatctgccagggaggacctcagtaatgattaatttcttacaactactttttattcatttggagaacatactaggaatgccttcacacttcccgtttcattgtggaaagtttctttaaacaagaatatttctttaaacgaagacttgagaacaagtgggttggtttttacatagccagcttccattatttcatcgtagattatatgagaaacctaaaaattttaaaacaggacttttagcagcttcccttatccttgttagcaaatgcaaacttttacattttatcatgctgctaaaaggtcagctacaacatttaaaaactcaatgtggaactaatcacaagctttggttcaatgctttagtattttatttcatacaattaccraagttagaagaaattgaaagcaccaaatattaaagaattagagattgtgttatttctgggaggtaaggttaaacagaaatatcatttttatgaggaaatcattaa

SEQ ID NO: 272262 - DNA, 571 bp, Homo sapiens
acaggtagatgataatttagccatacagattaacattttgttcttttctaacactttgagagcctatgagatttaatgttgacagatgctaacacctttaaatgcttttctattttctcagatgctgaaataaaaktttaattttattatttaaatacatttaatttattaaaaacaagttggaatatacagtaaggctctgtagtgcatggattatacaggttgtagcagaaaaaaaaatctatctccctctctctaccaaaagttttatatttactatgtgctatttaataaataagttaattttccaatgagaacacatggacacaggaaggggaacatcacataccggggcctgtcgggaagtaggggttaagaggagggagagcattaggacaaacacctaatgcatgcggggcttaaaacctagatgatggattgatgggtgcagcaaaccatcatggcgcatgcatacctaggtaacaaacttgcatgttctgcacatgtatctcagaacttaaagtaaaataaaataaataaataagttaatttccctgcacaatcaatcatt

SEQ ID NO: 272263 - DNA, 573 bp, Homo sapiens
tccatttaccaaataacctgtttggttttgagagtctgtataatgaaaggaaccccagaaacagtgcggacacctctgtcaggaatgagcagggaatagtccattagggaaagtgttggytgggggctttatatatggtcatatgctactgttccagaaagtgagattcaggcaacatctgtggtcaaaaaaaaaaaaaaaaaaaatgttatcagttgaaattcactcttagaaagtatgtgaaattgttaagtcaaggaatgtggattcgtaaggtagtgattaagtgcgtgggctcaagagccaggctgtctgagttggaatcccagctctggcattgtgactttgaacacattccttgacctcttcaggcctgcattttctaatctggaggagtgggaataataatttcagcttgttctagggccattgtaaggattaaaagaattatcatataaagcgcttaaaatagtaccttgcaaacagtaaacacacacttaaaattagctattaatattaccttatcactgttatgatgataatgttatagcattgaagctgacttaatgaatc

SEQ ID NO: 272264 - DNA, 504 bp, Homo sapiens
agactgacagatgctgctcctcagttccctccaagccagtggcacacgtaagtgctcggcacagggtctttctgagcgctcgaagttgctagagacrctagacttcaggtataggttttcaacagctgaaacagaggctgtggcaatttcctaaaattggttgcttttactacaaataacagtgattgtgctctgctaatagctgtgctccacaattcttaaacttagccttccacctttccttctctccttcctttccttccttccttcttaccactgcctgcaattctcagacaagggctttgacatgcagagtggtggggagagaggtgctctttaaggtgatgcaaacactcttttcatttctgctgtggctggactcatagttgagttctctgcttgacattttgagggtaacaatagcattggaatgggtaagggctgggcagtctgagctgagtcttctgtgcctcaggaggctcaatttctggaagggtgggagcc

SEQ ID NO: 272265 - DNA, 541 bp, Homo sapiens
atggcactcctctacttcaaaagttttttatggctccccaatgctctccggacagtttccaaaatccttgacatagtctacaaatcattacttacctctctagtctcaattctaaccacccacgctctgtccccattccttcagccccgtcccgcccgcaaactcctagcctttgtacrggcacaccctctcccaagagcactctgcctcctctgcctggctgagtcacgcatgttccttcctgtccgagctgagacacagcccttgacacaactgcagcagcttatccctagagctgtgtgtcttgtgccttccccccaggcttcactgctgactgcactcctgcatttccagtgcctggcacagtgcctgccacacagcagctgcctgataaatatttgctgaatagatgtggaaataagttaaaaacaacatggtaaacttcaaacagagtaagtgttacgagaaagagaagaaagataaagtcggtcaaaaggtggcatgagactgacgctaagcgactgatgattttgagagcctg

SEQ ID NO: 272266 - DNA, 598 bp, Homo sapiens
ggatagtagggggccagaaacacaagaaaatactaatctaccagtagacacagtgctagcaccaacaatwtatgacaatccccgatagcttaggacaaagaatagcaaacttctgtcaaacaccacagagtaaatattttaggctttgtgggccacagtctatggcacatagaattcttcttttttgacaatgctctaaaaaagataaaaattatccttaactagtgaaccacacaaaagtaggccacaagcctgcactggcccaccatccatagttcaccagctgtgtagttcaccattgacttgcattgtgaatttagaacatgaaaagtcaacaagaaacataggtagggacaataaaaggtgagaggtcagatcaaaagcactctccacactcaaactggtatacttccaaatagatgattctcagtggatgaatttttaaaacagaaaactgccctacagaagaaaacatgcctgtctggaccttggctctaaagaaaaaagaaaaaaaaaaaagaagtattatctgagattcctgatcaaaagcctgaacttgggactagaaaccacactatttgtgtgacacaaagtccta

SEQ ID NO: 272267 - DNA, 351 bp, Homo sapiens
tctgtcattcatatttcacctattattactcattagacttttttaaaccaggtctttgtactttttaagaaaaacaccattgtgcaaaaggagcttcaggcagtattttataaatagttcattttctatcagaatccatgaaacactttctacttcagaaacaatcctaagaaaatggtrgcatcatgactcacccagttctatatccaattttctcaaaaaagaaattcacattagaagttttaccatgtgaaatatgcaaaattatggtctggaatcttaaatccactgtcactacttgatccaaaactatttcaaaagcagccaaaaaagcaactggcattcaaatgt

SEQ ID NO: 272268 - DNA, 586 bp, Homo sapiens
gctgcatacatttgcataagtaatgaggaaccaaatgttaatcagcaagacaatggggaaaatgtctccagggcatgtcagagaccttcacagcagcccccccacccatcacaggtctggaggcctaggaagggaaaatgrtttcctgggctgggtccagggcccccctgctgtgtgcagcctctaggacttgttggtgccctccatcccagccactccagccatggcttaaagagaccaaggtacagctcaagttgttacttcagaggttgtaagccccaagccttggcagcttccacatggttttgagcctaccagtgcacagaagtcaagaattgacgtttgggaacgtccacctagatttcagaggatgtgtggaaatgcctgatgtctaggcagaagttttctgcaggggtgggactctcatggagaacctctgctagggcagtgcagaagggaactgtggggttggagaccccacacccagtccccactggggcactgcctagtggagctgtgagaagagggctactatcctccagaccccagaatggtagatccaccaacacttgcactgtgtgcctgg

SEQ ID NO: 272269 - DNA, 599 bp, Homo sapiens
cctggggatgaggatcctggttttatcatcacttagcagccaccgagcctaattttctatgtaataataggtcaagaggttttcacgatttcataaattggttgcaaatgactgagaactaaatgtatagtagtttttatgtatatagatgtatatgttatataatatatatagtatagtacactacagaatatatagattctatattttgtttttattttattcatgtatttgtttcttgagacaaggtctggctctatcacccaggcttgagtgcagtggggcaatctcctctcaccgcaacctctgcctcccagtctcaagccattctcccacctcagcctctcaagtagctgggactacttggcatgcaccactacacctagctaatttttgtattttctgtagagatagggttttgccacrtagcccaggctggtctcaaacttgtgagcttaagtgatccgcctgactcagcctcccaaagtgctgggattacaagtgtgagccactgcacgcccagccttattttaaatagatagtgcatgcatgtgtctatgctactcctcttcactaagcttagacattgttaggcactt

SEQ ID NO: 272270 - DNA, 599 bp, Homo sapiens
cctggggatgaggatcctggttttatcatcacttagcagccaccgagcctaattttctatgtaataataggtcaagaggttttcacgatttcataaattggttgcaaatgactgagaactaaatgtatagtagtttttatgtatatagatgtatatgttatataatatatatagtatagtacactacagaatatatagattctatattttgtttttattttattcatgtatttgtttcttgagacaaggtctggctctatcacccaggcttgagtgcagtggggcaatctcctctcaccgcaacctctgcctcccagtctcaagccattctcccacctcagcctctcaagtagctgggactacttggcatgcaccactacacctagctaatttttgtattttctgtagagatagggttttgccacgtrgcccaggctggtctcaaacttgtgagcttaagtgatccgcctgactcagcctcccaaagtgctgggattacaagtgtgagccactgcacgcccagccttattttaaatagatagtgcatgcatgtgtctatgctactcctcttcactaagcttagacattgttaggcactt

SEQ ID NO: 272271 - DNA, 515 bp, Homo sapiens
gtcttctaaagaatgctccttctcagaaattctctcatggatggttaggccaggtgacacaattttgcttttgggttcaaagttgtgattataacgaagggtttctgagtctgtgctactggaactggagttgcgcttgaggatccctctcggagcccctctcgctttcagggagtctgtcctttgtctaggaaaagactggttatcatctttgtttaaatcagttgatttgtagatcatcttcctggctttggggawtggagccttgatttgggacccatttgaaaggcctggcaaagtctgctttgatttctctaacttttggattgaagtatctgcgacagttgacttttcttttgactctgacaattcatctgaaaattaaaacacagtaggtgatatatcatatagagagtaatatataatttaaaatacctgtcataaacttaacctacacttagtgaaactattaaaatattaaagacagtaaagtatgtggcacaactacaggccta

SEQ ID NO: 272272 - DNA, 528 bp, Homo sapiens
cactcttcctcaattagcaaatcaaagtgcttcaggcagagaatgtgaatgggccaaggtggtagcagcgctgcatgtaagggttgcacacaggcatacctgggagtgggaaaaagagggggagcagttatcccaggtctagcaagaatgtctcctctctcccaagcgtgcctggagagtgtccttccacccagagtaaactcttacaggaacttcctctctttgtcatgacagccccatctataaaccctaacagggagagcatcattgcttcatagttctcagtcagcaacgatatcatggtttttattaaatgttcctaatggtttgacactgctttcaacactgttttcagcagagcaaacaactgctggactgttggtgaacctttgccttctcctcccaaaaggaccaagtttgagttcaattccagaatggagaagttcttctacttctccctggtgagttcctsggggcagggtctgtactcaatacatctttgtttagtgtctggaaaatacggggtat

SEQ ID NO: 272273 - DNA, 622 bp, Homo sapiens
attccagcctggataacagagcaaaaaccctgtctcaaaaacaaaaaaaaaaaagaaaagaaaaagaaaaagaaaaagaaaacagtgctctacatcgttagtcatcaggtaaatgcaaattaaaaccacaatggactaccattaccaccaacctactgactggatcaacttaaagactgacactacaaaacatcagagagcrggaggagcaaccagagctcacatgtatacactgccagtgggaatctgtgtgtgtgtgtagagacagggcctcactgttactcaggctacagtgcagtagcgtgatcacaggtcaccgcagcctcgagcttcagggatcaatagatcctctcacctcactttgaaacctttgaaaacgcccattctactcacagctactctactcttagcacaaccaatactaattttcaggtttttaaaatatcactctccacgaaaacaaaccaaggctccctggagaaacaactgattacgggactgaggctcatttaaaaggttaaaatgagcctggaacatcttgatataccaaaaaataacgaattgctctgagaataatggagacatgtcaagggaaaaataagagtaacagattatataaacc

SEQ ID NO: 272274 - DNA, 652 bp, Homo sapiens
atgcctgtgacttactgtgttttggtgaatgtgggtaaatcaaagtaactgtctagtaaaattgactgttaggttggctggtaactacatgcttcctggactctgactggcttgccaggtttctcatctgtctttttgtttcttgtgttcccttcaggttgttcctccaaaagagtggaagccacgagcatcctatgatgacattgatgatttggtcattcctgcccccattcaacagctggtgackgggcagtctggcctctttactcagtacaacatacagaagaaagccatgactgttcgagagttccgcaagatagccaatagcgataagtgagtggaaaccctttcttacctgacatagcacctaggaccctggtgtctcatcctcctagcatctccaggactgctgctgtcctgatgaacagtgtcttcagcaggatggctctgttctagctgtctccctttctgctttttttatggaagcattccctcctctcaggactgtgtcccagtctaaacctgttcctgttcttataacaacaaatcccattgtttttccatcagaagtagaatcattttctgactttaaagttgcaaggagaaagttggatgtggtgcacaaggagcttttgctgggtattatcaacca

SEQ ID NO: 272275 - DNA, 510 bp, Homo sapiens
aaacaaacaaaaagtgtgcaaagggaaaggtgagcttaaaaaggaaacaggaaaactggtcagaaaaatgggagcatatcacgagaacttgatttaggctccacctatcacatgcacataccaattggaagctagtgatacacagtagagggcccttggaaatcatctggcagcaccaggaaatacagcaaaatccagtttayggaacacagtaacagtaactagcgactgtatccatgtccaggacagtggagtctgtgaagcaacctgcagtatcttgtgcttagtggcagcaggaaagacagtggtggatgaattctaccgcatgatttgggttttctttatgtgtcctgcaagttggattcttcagactcggcacttttgtgagccactcagtataatctattatctaatactgtcgattaccttactgggtaagggcaaaaacccctattgtgaaagacttgtggctgcgtagccaacggccattctttttgaaacagtcatttc

SEQ ID NO: 272276 - DNA, 601 bp, Homo sapiens
ttgcaggtgtgccaacacagcctagcttaagttacttgtctgcactattcctttcctttccttttttttttttttttttaagacagtcttgctctgtcgcccaggctggagtgcagtggtacgatcttggctcaccacaacctctacctcccaggttcaagcgattctcctgcctcagcctccctagtagctgggattacaggtacctgccaccaagcctggctaatttttgtatttttagtagagacggagtttcaccakgttgaccaggctggtctcgaactcctgacctcatgtgatccatccacctcagcctcccaaagtgctgggattacaggcatgagccaccgcacccggccttcctttcctttttctttgcacattcatctccttttttttaggggttaaaagaaactttcccctggcctcatctcccactccctcttgctgcgaggcacccgaaccatgagcgctccctccctcgaggcatcagcacatgctgttccttctacatgcaacactctctcaaagtccattcgtttgcctaacctattcctacccacatttcagggatcggattgtcaccccaggaagcctgccc

SEQ ID NO: 272277 - DNA, 601 bp, Homo sapiens
ttgcaggtgtgccaacacagcctagcttaagttacttgtctgcactattcctttcctttccttttttttttttttttttaagacagtcttgctctgtcgcccaggctggagtgcagtggtacgatcttggctcaccacaacctctacctcccaggttcaagcgattctcctgcctcagcctccctagtagctgggattacaggtacctgccaccaagcctggctaatttttgtatttttagtagagacggagtttcaccatgttgaccaggctggtctcgaactcctgacctcatgtgatccatccacctcagcctcccaaagtgctgggattacaggcatgagccaccgcacccggccttcctttcctttttctttgcacattcatctccttttttttaggggttaaaagaaacttycccctggcctcatctcccactccctcttgctgcgaggcacccgaaccatgagcgctccctccctcgaggcatcagcacatgctgttccttctacatgcaacactctctcaaagtccattcgtttgcctaacctattcctacccacatttcagggatcggattgtcaccccaggaagcctgccc

SEQ ID NO: 272278 - DNA, 575 bp, Homo sapiens
tgtatttactatgctatacttkttattgttattttagagtgtactccttctacttatgaaaaaaagaggttaactgtaaaacagcttcaggcaggtccttcaggagatattccagaagaaggcattgttatcataggaaatgacagcttcaaatgtgttattgcccctgaagacctcccagtgggacaagacgtggaggtggaagacagtgaaactgatgatcctgaccccgtgtaggccaaggctaatgtgtgtgttcgtgtcttagtttataacaaaaaattgaaacagtaaaaatataaataatagaaaaaagcttacagaataaggatataaagaaactattttttgtatagctatccaatatatttgtgtcctaagtgttattatgaacgtgtcaaaagtttcttaaaatttatttttaaagttacagtaagttaaggtttattattaaagaaaaaattttaaatgaatatagtgtagtcttagtatacagcgtttaaagtttacacttgtgtgagtggtcacattcacttaccactcactgattcacccagggcaacttccagtcctat

SEQ ID NO: 272279 - DNA, 551 bp, Homo sapiens
tcacagtcatgaaagagcccgctgtctctgcagacacttggctttgatttcagtaggccaagttgaaatcraaaccactgttaaagaattcaagagattgacagatccttttcaacccagcaagatccaaatgtgaaatagaaatgatggacatgaagtacaaagggtaagcaggagaacagtggatggggtcattagggacaccggaatctcacctgtgtttagagtggcaagactagcagaggtgctctagagtcagaaagacaaaggattcaaatcctagtttggttctgtattaccagaaaaatgacttaacctctccaaggatcatttctttcatctgtaaaatggggataagaacatctgcctctccatggataaaccactttgatacagtttccaagaaactgggagacaggcactcacgctggtagatgtgtaaactggttcaatctctatggatgcagtctggtaatactgctcttttttcaaacttgacaaacttatatagcgcttaaaatgtgccaggcactacaccaggcactttacaa

SEQ ID NO: 272280 - DNA, 551 bp, Homo sapiens
tcacagtcatgaaagagcccgctgtctctgcagacacttggctttgatttcagtaggccaagttgaaatcaaaaccactgttaaagaattcaaragattgacagatccttttcaacccagcaagatccaaatgtgaaatagaaatgatggacatgaagtacaaagggtaagcaggagaacagtggatggggtcattagggacaccggaatctcacctgtgtttagagtggcaagactagcagaggtgctctagagtcagaaagacaaaggattcaaatcctagtttggttctgtattaccagaaaaatgacttaacctctccaaggatcatttctttcatctgtaaaatggggataagaacatctgcctctccatggataaaccactttgatacagtttccaagaaactgggagacaggcactcacgctggtagatgtgtaaactggttcaatctctatggatgcagtctggtaatactgctcttttttcaaacttgacaaacttatatagcgcttaaaatgtgccaggcactacaccaggcactttacaa

SEQ ID NO: 272281 - DNA, 638 bp, Homo sapiens
ttccaggcactgtgaaaagccatgtatcaatctgtttcatcctcacaaaactctgcaggattgttgttagtatcttctccatatgatagactatgaaactaagatttatcgagatgaaacaccttgccaaaggctgcatgtttaattagtgacacacttctggcccaaatctgactccagaacccaagagattgaccagtgataggtggatgttaatgtatcacacagacttctctctccggaatttcttcaaagtggtgaaaacgtgagccaagaattttatatccrctaaaactgactttcaagtatttatactagaataaagtgacattagttaagaaagaattcttaaaggagatgagttcttagcttgaaaaaatataagatttgaatgggaagagtgaagaatattcttttttcagcctctcaagtagctgggactacaggtgcatgctcccacacccatctctacaattctttttgttcgttttgtagagatggggtcttgctatgttgcacaggttggtctcaaactcctagcctcaagtgatcccccaacctagccctcccaaagtgctgagattacggcatgagccaccatgcccagcaagaatattcttcaaagggtacagtggaat

SEQ ID NO: 272282 - DNA, 638 bp, Homo sapiens
ttccaggcactgtgaaaagccatgtatcaatctgtttcatcctcacaaaactctgcaggattgttgttagtatcttctccatatgatagactatgaaactaagatttatcgagatgaaacaccttgccaaaggctgcatgtttaattagtgacacacttctggcccaaatctgactccagaacccaagagattgaccagtgataggtggatgttaatgtatcacacagacttctctctccggaatttcttcaaagtggtgaaaacgtgagccaagaattttatatccactaaaactgactttcaagtatttatactagaataaagtgacattagttaagaaagaattcttaaaggagatgagttcttagcttgaaaaaatataagatttgaatgggaagagtgaagaatattcttttttcagcctctcaagtagctgggactacaggtgcatgctsccacacccatctctacaattctttttgttcgttttgtagagatggggtcttgctatgttgcacaggttggtctcaaactcctagcctcaagtgatcccccaacctagccctcccaaagtgctgagattacggcatgagccaccatgcccagcaagaatattcttcaaagggtacagtggaat

SEQ ID NO: 272283 - DNA, 614 bp, Homo sapiens
ctggtagatagcggaggcaggactgataaacagagcctccccagagtaagccacattacaacacatgacagtgtgtgctgytctgaaacaatcacacctggtcgtcttcttaaaaatttaaagaaataattacagaggcttcaactcagcagcaaactacaactggatctgaaatttaaaacttagaaaagagaaaaagcagaaaagccccagagcaaaactgttaaaaaaaaattacccgcgatggcagaaatcctaaataaaatgagaacaagaggtttttctaggctgcttttgaactaactgttcttgtgtgcatgtgtatatatactatattttgtttaaaatatttttattttactagatcctgagtggaaaattttatttctctcaggacagtgcaaacagagcatcagagccaaaagctggcagctgtgtcctcagaagcagaaccagaatagggaaggggtggcaggaaactgggaaaattctggaaacctctggaaaattccaggctagtcaatcttcagtggtgacagaagccctcttaccctccctctggtttcctaacaggggccaagtgaaggcaatacagtaacagtcctgcaaactac

SEQ ID NO: 272284 - DNA, 388 bp, Homo sapiens
atcagggctgtgttcatctgaaggcttgactggggctgcayaatctacttccaagataccccactcacatagctgttggcagaaagcctcagtttccttgccatgtgggcctctccatagggttgagtgtgaagccgtatggcaggtggcttccccaagagctagtaatctaagagagggcaaaatagaagccacaatgccttttacaatctagtctccaaagtctagcaatatcactcctttaactttctattaattagaaatgagtcttcaagtacagcccatgttaaggggaagagaattaggctccatctttcaaatggtggagaatttgtggtcatgtgctaaaaccatcactctagctcagactggaaactagaattgagta

SEQ ID NO: 272285 - DNA, 388 bp, Homo sapiens
atcagggctgtgttcatctgaaggcttgactggggctgcacaatctacttccaagataccccactcacatagctgttggcagaaagcctcagtttccttgccatgtgggcctctccatagggttgagtgtgaagccgtatggcaggtggcttccccaagagctagtaatctaagagagggcaaaatagaagccacaatgccttttacaatctagtctccaaagtctagcaatatcactcctttaactttctattaattagaaatgagtcttcaagtacagcccatgttaaggggaagagaattaggctccatctttcaaatggtggagaatttgtggtcatgtgytaaaaccatcactctagctcagactggaaactagaattgagta

SEQ ID NO: 272286 - DNA, 559 bp, Homo sapiens
aaaaacactggcaaagaggactgaattatgtgtagtttgaaagatgagtgaaaatactctaacagttgacccaacaatccatgtgtgtagcaaagccacaaattaaartgtttacttgcaatgttaataatgaaccgctttggttactttcattctaaaccattatgcttattatttagctttccagggtacttacaaatgttaatttcctgatagagaatattttcttattctcacccccaagcaagctgtgacatggaatagtccaacagtcaattcataagagcaaggctctccctctctttcccatccaaattatggggtttgaaatgttctgacaattgaattagttgactggtacaacagtagcgaatgctttgtaatttgtgttgccttcagagatggcaaaaattaggctgctgctaatagaccagaactgtctggactctgacaagcttccctcctgccttcagcagaagggaggacagcggctcctgctattcaactctgaattatgttttacatgccacagttctgatttttttttttttttgagaca

SEQ ID NO: 272287 - DNA, 559 bp, Homo sapiens
aaaaacactggcaaagaggactgaattatgtgtagtttgaaagatgagtgaaaatactctaacagttgacccaacaatccatgtgtgtagcaaagccacaaattaaaatgtttacttgcaatgttaataatgaaccgctttggttactttcattctaaaccattatgcttattatttagctttccagggtacttacaaatgttaatttcctgatagagaatattttcttattctcacccccaagcaagctgtgacatggaatagtccaacagtcaattcataagagcaaggctctccctctctttcccatccaaattatggggtttgaaatgttctgacaattgaattagttgactggtacaacagtagcgaatgctttgtaatttgtgttgccttcagagatggcaaaaattaggctgctgctaatagaccagaactgtctggactctgacaagcttccctcctgccttcagcrgaagggaggacagcggctcctgctattcaactctgaattatgttttacatgccacagttctgatttttttttttttttgagaca

SEQ ID NO: 272288 - DNA, 556 bp, Homo sapiens
tctccacttatatccttctggactgggcraaggcatattgaaacgaacaggtttgcctatgtgtgttttggggtaggaagtggaatgggtaaatcccttctggaagacaatctggccatatataccaagagcccagaaaatgtttgtacccagtaattccatttaggaatctaccctaaggagataagacaagtaaaagagatttatgtgctgcaatgctgttacttatgttatttatgtaccattgcatgttatttataaaagtgaaaaactagaaacatttattatatcaggaaatagtcaataaaataatggtgatgagcacttttaatgacatgaaaagttgaatatgaaagagatctaactataccaatttttaaaataataaatacatataaagaagattagaggaaactaaaccaaaatttcagctaattatctctgggtggtaggattataggaatttaagttttcttccttatactcttctgtatttttcaatattcttctctgagtatatattacccttaataatgacagatataaatgttaaaga

SEQ ID NO: 272289 - DNA, 556 bp, Homo sapiens
tctccacttatatccttctggactgggcaaaggcatattgaaacgaacaggtttgcctatstgtgttttggggtaggaagtggaatgggtaaatcccttctggaagacaatctggccatatataccaagagcccagaaaatgtttgtacccagtaattccatttaggaatctaccctaaggagataagacaagtaaaagagatttatgtgctgcaatgctgttacttatgttatttatgtaccattgcatgttatttataaaagtgaaaaactagaaacatttattatatcaggaaatagtcaataaaataatggtgatgagcacttttaatgacatgaaaagttgaatatgaaagagatctaactataccaatttttaaaataataaatacatataaagaagattagaggaaactaaaccaaaatttcagctaattatctctgggtggtaggattataggaatttaagttttcttccttatactcttctgtatttttcaatattcttctctgagtatatattacccttaataatgacagatataaatgttaaaga

SEQ ID NO: 272290 - DNA, 555 bp, Homo sapiens
tagtgttctttcattctagcccagaggactacctttatcatttcatgtatggcaggtctactggtaatgatttcctttaccttctaattatatagaaatgtcataatttctcctttattcttgaatgatagttttgtgggatatagacttgctggatatagaattactggatatagaattgccagatataaaattcttggttcaaagttttttttctttgaggactttgaatgtcatcccactgtcttctggcctccatagtttctcataataaatcagctgttaatcttcattaagtttcctctgtacacgaagagtcacttgtctcttgctgctttcaaatttttctcatttgctttgggttttcacactttaattatatgcctttctatgtggatctctttgagtttatcctgcttggagttcatygagctttttgcatctgtatattaatttctttcatcagatttggagatgtttttggcatttatttcctcaaagttctttctgcttctttctctccttctccttctgggtcaccacaatgcatatgtt

SEQ ID NO: 272291 - DNA, 582 bp, Homo sapiens
attgatttttgtgtatggcataagataaagtttcaatttcacttttttggtacatggatatacagttttttcggcaccacttattgaagagactattctttccccattgtgtgttcttggcacctttgtccacatggtcattatttgacygtacatgtgtgggtttatttctgggctctctattctgctccattggcctatgtgtctgtttttatgccactactatactgtcttgttactatagctttgtagtataatttttaatcagtgagcgtgatgccaccagcttcattcttcctgcttaagatcgtgttagctatttgggggtcttttatggctccaaacaaattttgggattgtgttttctgtttctgtgaaaaatgccactgtaattttgatagggattgcattgaatctacatatcactttgggcatatggacattttgacaatattgattcttctgatccatgaacacagaatacttttctgtttgtgtcatcttcaatttctttcatcaatgttttataattttcaccacacagatctcaaagtcttgtttgtaaagggataaaacttgttt

SEQ ID NO: 272292 - DNA, 590 bp, Homo sapiens
tgggctagctatagaaataaagctatcctttctttgcactaagtgtaacgtgaatacattttctgccctgttacaggattaataattactgartgcctactacatactgggtcctttcatacatatcctcatttcatcatcaaaataaccccatgtaggaaacactattattttcccatttttagattaggaaacttaggcatagacaggttaaggttgagcagcattcccaaggttccacaggtagcaagtgtctgaatccttacaggaacttacagactaaaagagcacagaacccataaaaaggagacacttacaatgcagtgtactaaatgcaaggacagaaatgagtgcacggagttggggacataaagagaggctaaatttcacctgggaaagctttctggagaagattatgtacatgacttattttttgaaaggtattattaatatacaacaaaatgcacagatgttaagtattcagtttcataagtttcaacaactgcatatgtttgtgtagccaccatcaaaaacaaggtttaaaacacttccatcacccccagaaagttccagcatatccctttcctatc

SEQ ID NO: 272293 - DNA, 590 bp, Homo sapiens
cactgcaatgggaatgtgcatggatatattcagggaggtcaaaggaagacaagggcttttaaaggaaaaatgaagaagattccataatttttttgagacaattatctttggctacaaggatcattaacaaaggtgacatcagtccagggttagacaggggtttgctgggcagatgtyctcacagaagtattttttgtatatgtcaagttgcaagggcctttgtgcaaggttgtgtttttgcagagtcttttgtgacagttctcatgcatgagaacccttcattcatggccttctctggctccatcttttagaattttgacataaatgactccattttgattctgacagctttcacagccaatataccttaaatgtcaatagtttgaatgggagaagacatttatcatctgtcagggaacgccaagcacaacacagaaggaagaggaggaagtttggacatggctggttaggaggacttaaaaggccatgctcaatttggaatgggtcccaaagtaaagaaatcgtatttgaaaaaaaaaaaaagtatagcaggaatccctttactgggaactgagacacctggggcctgg

SEQ ID NO: 272294 - DNA, 590 bp, Homo sapiens
cactgcaatgggaatgtgcatggatatattcagggaggtcaaaggaagacaagggcttttaaaggaaaaatgaagaagattccataatttttttgagacaattatctttggctacaaggatcattaacaaaggtgacatcagtccagggttagacaggggtttgctgggcagatgttctcacagaagtattttttgtatatgtcaagttgcaagggcctttgtgcaaggttgtgtttttgcagagtcttttgtgacagttctcatgcatgagaacccttcattcatggccttctctggctccatcttttagaattttgacataaatgactccattttgattctgacagctttcacagycaatataccttaaatgtcaatagtttgaatgggagaagacatttatcatctgtcagggaacgccaagcacaacacagaaggaagaggaggaagtttggacatggctggttaggaggacttaaaaggccatgctcaatttggaatgggtcccaaagtaaagaaatcgtatttgaaaaaaaaaaaaagtatagcaggaatccctttactgggaactgagacacctggggcctgg

SEQ ID NO: 272295 - DNA, 590 bp, Homo sapiens
cactgcaatgggaatgtgcatggatatattcagggaggtcaaaggaagacaagggcttttaaaggaaaaatgaagaagattccataatttttttgagacaattatctttggctacaaggatcattaacaaaggtgacatcagtccagggttagacaggggtttgctgggcagatgttctcacagaagtattttttgtatatgtcaagttgcaagggcctttgtgcaaggttgtgtttttgcagagtcttttgtgacagttctcatgcatgagaacccttcattcatggccttctctggctccatcttttagaattttgacataaatgactccattttgattctgacagctttcacagccaatataccttaratgtcaatagtttgaatgggagaagacatttatcatctgtcagggaacgccaagcacaacacagaaggaagaggaggaagtttggacatggctggttaggaggacttaaaaggccatgctcaatttggaatgggtcccaaagtaaagaaatcgtatttgaaaaaaaaaaaaagtatagcaggaatccctttactgggaactgagacacctggggcctgg

SEQ ID NO: 272296 - DNA, 591 bp, Homo sapiens
ctatcagtattcatttgcaaaatgaaactgcatacctttaatttttaaaactgaaatatttgaaacatatacaaaatttttgacaggaaatactagagatatccagcaataacctaatccactaaaataacttgtactttaaaaagaattataatgcagataccatagtatgtcatttctgaaactcagcttaagcatgagaacaaaaattgttttaaagatattaccttttttattastattcataagcggtttgaatgcaggaaagataaaactaaaaaggagaggaatcactctaccattctattagatagtctcctttttttttttttaaacagtgggttggcatgaagaagcaagtggtacagtggaaaacttcttgaatccagaagctggccagctgttccaaatcagctattgttatcaatcgcctctgaaaatcaacttatcaagcagttcacagctatcagatgttaaaaatctcaaaagttcattggaaaagtgctaaaggaatcagctctcccctccccattcccctcctcccgctttcactgctcccatcctcatgccagcatttcaaatgacagcaaa

SEQ ID NO: 272297 - DNA, 591 bp, Homo sapiens
ctatcagtattcatttgcaaaatgaaactgcatacctttaatttttaaaactgaaatatttgaaacatatacaaaatttttgacaggaaatactagagatatccagcaataacctaatccactaaaataacttgtactttaaaaagaattataatgcagataccatagtatgtcatttctgaaactcagcttaagcatgagaacaaaaattgttttaaagatattaccttttttattagtattcataagcggtttgaatgcaggaaagataaaactaaaaaggagaggaatcactctaccattctattagatagtctcctttttttttttttaaacagtgggttggcatgaagaagcaagtggtacastggaaaacttcttgaatccagaagctggccagctgttccaaatcagctattgttatcaatcgcctctgaaaatcaacttatcaagcagttcacagctatcagatgttaaaaatctcaaaagttcattggaaaagtgctaaaggaatcagctctcccctccccattcccctcctcccgctttcactgctcccatcctcatgccagcatttcaaatgacagcaaa

SEQ ID NO: 272298 - DNA, 591 bp, Homo sapiens
ctatcagtattcatttgcaaaatgaaactgcatacctttaatttttaaaactgaaatatttgaaacatatacaaaatttttgacaggaaatactagagatatccagcaataacctaatccactaaaataacttgtactttaaaaagaattataatgcagataccatagtatgtcatttctgaaactcagcttaagcatgagaacaaaaattgttttaaagatattaccttttttattagtattcataagcggtttgaatgcaggaaagataaaactaaaaaggagaggaatcactctaccattctattagatagtctcctttttttttttttaaacagtgggttggcatgaagaagcaagtggtacagtggaaaacttcttgaatccagaagctggccagctgttccaaatcagctattgttatcaatckcctctgaaaatcaacttatcaagcagttcacagctatcagatgttaaaaatctcaaaagttcattggaaaagtgctaaaggaatcagctctcccctccccattcccctcctcccgctttcactgctcccatcctcatgccagcatttcaaatgacagcaaa

SEQ ID NO: 272299 - DNA, 591 bp, Homo sapiens
ctatcagtattcatttgcaaaatgaaactgcatacctttaatttttaaaactgaaatatttgaaacatatacaaaatttttgacaggaaatactagagatatccagcaataacctaatccactaaaataacttgtactttaaaaagaattataatgcagataccatagtatgtcatttctgaaactcagcttaagcatgagaacaaaaattgttttaaagatattaccttttttattagtattcataagcggtttgaatgcaggaaagataaaactaaaaaggagaggaatcactctaccattctattagatagtctcctttttttttttttaaacagtgggttggcatgaagaagcaagtggtacagtggaaaacttcttgaatccagaagctggccagctgttccaaatcagctattgttatcaatcgcctctgaaaawcaacttatcaagcagttcacagctatcagatgttaaaaatctcaaaagttcattggaaaagtgctaaaggaatcagctctcccctccccattcccctcctcccgctttcactgctcccatcctcatgccagcatttcaaatgacagcaaa

SEQ ID NO: 272300 - DNA, 610 bp, Homo sapiens
tggtgataaattaaacaccaagcacttactctgtgtcttgagtattccattattaagtggaaacaattactattatcaaagtttgtgacttacttgacatgcttgaataaataaaacatataaactatataaaagctcattctaatacaacatatgtgaggtagactgatmtgtttcatattcatatattaacttatattttattttattatatttctctaatataaaagctctttggggcccagcacagtggctcacacctgtaatcccagcactttgggaggctgaagcaggcagatcacctgaggtcaggattcaagatcagcctggccaacatggcgaaacccgtctctaataaaaatacaaaaattaaccaggcgaggtggcacatgcctgtagtcccagctacttgagaggctgaggcaagagaatcacttgaaccttggaggcagaggttgcagtgagccaagattgagccactgcactccagcctgggcaacagagcaagactctggatcaaaaaaaaagctctttgtgaaacttggggcaattattaactttctacattacattttaggcactttcaataaaatgtgggagattgttagtt

SEQ ID NO: 272301 - DNA, 610 bp, Homo sapiens
tggtgataaattaaacaccaagcacttactctgtgtcttgagtattccattattaagtggaaacaattactattatcaaagtttgtgacttacttgacatgcttgaataaataaaacatataaactatataaaagctcattctaatacaacatatgtgaggtagactgatctgtttcatattcatatattaacttatattttattttattatatttctctaatataaaagctctttggggcccagcrcagtggctcacacctgtaatcccagcactttgggaggctgaagcaggcagatcacctgaggtcaggattcaagatcagcctggccaacatggcgaaacccgtctctaataaaaatacaaaaattaaccaggcgaggtggcacatgcctgtagtcccagctacttgagaggctgaggcaagagaatcacttgaaccttggaggcagaggttgcagtgagccaagattgagccactgcactccagcctgggcaacagagcaagactctggatcaaaaaaaaagctctttgtgaaacttggggcaattattaactttctacattacattttaggcactttcaataaaatgtgggagattgttagtt

SEQ ID NO: 272302 - DNA, 610 bp, Homo sapiens
tggtgataaattaaacaccaagcacttactctgtgtcttgagtattccattattaagtggaaacaattactattatcaaagtttgtgacttacttgacatgcttgaataaataaaacatataaactatataaaagctcattctaatacaacatatgtgaggtagactgatctgtttcatattcatatattaacttatattttattttattatatttctctaatataaaagctctttggggcccagcacagtggctcacacctgtaatcccagcactttgggaggctgaagcaggcagatcacctgaggtcasgattcaagatcagcctggccaacatggcgaaacccgtctctaataaaaatacaaaaattaaccaggcgaggtggcacatgcctgtagtcccagctacttgagaggctgaggcaagagaatcacttgaaccttggaggcagaggttgcagtgagccaagattgagccactgcactccagcctgggcaacagagcaagactctggatcaaaaaaaaagctctttgtgaaacttggggcaattattaactttctacattacattttaggcactttcaataaaatgtgggagattgttagtt

SEQ ID NO: 272303 - DNA, 610 bp, Homo sapiens
tggtgataaattaaacaccaagcacttactctgtgtcttgagtattccattattaagtggaaacaattactattatcaaagtttgtgacttacttgacatgcttgaataaataaaacatataaactatataaaagctcattctaatacaacatatgtgaggtagactgatctgtttcatattcatatattaacttatattttattttattatatttctctaatataaaagctctttggggcccagcacagtggctcacacctgtaatcccagcactttgggaggctgaagcaggcagatcacctgaggtcaggattcaagatcagcctggccaacatggcgaaacccgtctctaataaaaatacaaaaattaaccaggcgaggtggcacrtgcctgtagtcccagctacttgagaggctgaggcaagagaatcacttgaaccttggaggcagaggttgcagtgagccaagattgagccactgcactccagcctgggcaacagagcaagactctggatcaaaaaaaaagctctttgtgaaacttggggcaattattaactttctacattacattttaggcactttcaataaaatgtgggagattgttagtt

SEQ ID NO: 272304 - DNA, 573 bp, Homo sapiens
gtactaggcaatctagctccataagccatcttttcaacctaaatttaatatgaggaagagagtctctgctctcataacagctttttattgaagagagtatatttaaatatacagaatatatttataattttaataaagcctgatcatattcattagttaattataaaatgtcagaaaaaatattaagaaagtaagtgtttggtgtttcatttaccatcaaagacagtgatttcctttaatcctatcaaggttaaggatacrtttttatgtttttagttttgaaagttcaactcttgttaaaccatcattttctagcattttatgcctttttctggcatggtaatattttgtatttaaagaaatcaatttctcagcgaacgcctccttgaaattaaaatatatacatactacacaccacacacacacacacactttttgtgtatgtatatatgtctctggactcacacaagactcaaagagtagagtcacagaatacctctatattatgttccactatccctttacaattgcttaatggtgaaagttcttttctactccctacacgacaagtca

SEQ ID NO: 272305 - DNA, 571 bp, Homo sapiens
tagaaatccccctttcccctaagagtggaggccaatcccaatgcagtcacctcttctttcctccactttgtgagaaacaactaactggcctggctcttgactgttttagactttctaagtagaaataacaacatccatccaataagttccttcaacttcaggaaacagagtctcrctctgttgcccaggctggattgcagtggcacaatctcggctcacggcaacctccgcctcccaggttcaagcaattctctgcctcagcctcccgagtagctgggattacaggcaactgccaccatgccccactaatttttgtatttttagtagagacggggtttcaccatcttggccaggctggtatcgaactcctgacctcgtgatccacccacctcggtctctcaaagcactgggattacaggcgtgagccacccatctggcctgaaaactaactctttaacaaggcaaaagtctttaaatattctgtgatcatagacagttacaggatttgttgccaccactttggcaaacatgaaagtcactgtgaaagcagaaaacacatttttagtggttt

SEQ ID NO: 272306 - DNA, 571 bp, Homo sapiens
tagaaatccccctttcccctaagagtggaggccaatcccaatgcagtcacctcttctttcctccactttgtgagaaacaactaactggcctggctcttgactgttttagactttctaagtagaaataacaacatccatccaataagttccttcaacttcaggaaacagagtctcgctctgttgcccaggctggattgcagtggcacaatctcggctcacggcaacctccgcctcccaggttcaagcaattctctgcctcagcctcccgagtagctgggattacaggcaactgccaccatgccccactaatttttgtatttttagtagagacggggtttcaccatcttggccaggctggtaycgaactcctgacctcgtgatccacccacctcggtctctcaaagcactgggattacaggcgtgagccacccatctggcctgaaaactaactctttaacaaggcaaaagtctttaaatattctgtgatcatagacagttacaggatttgttgccaccactttggcaaacatgaaagtcactgtgaaagcagaaaacacatttttagtggttt

SEQ ID NO: 272307 - DNA, 571 bp, Homo sapiens
tagaaatccccctttcccctaagagtggaggccaatcccaatgcagtcacctcttctttcctccactttgtgagaaacaactaactggcctggctcttgactgttttagactttctaagtagaaataacaacatccatccaataagttccttcaacttcaggaaacagagtctcgctctgttgcccaggctggattgcagtggcacaatctcggctcacggcaacctccgcctcccaggttcaagcaattctctgcctcagcctcccgagtagctgggattacaggcaactgccaccatgccccactaatttttgtatttttagtagagacggggtttcaccatcttggccaggctggtatcgaactcctgacctcgtgatccacccacctcggtctctcaaagcactgggattacaggcgtgagccacccatctggcctgaaaactaactctttaacaaggcaaaagtctttaaatattctgtgatcatagacagttacaggatttgttgccaccactttggcaaacatgaaagtcactgtgaaarcagaaaacacatttttagtggttt

SEQ ID NO: 272308 - DNA, 187 bp, Homo sapiens
ctgtcctcaatttcttcccaatcttcctcctcctccacacccttaactcaatcagttggaaatcctgtagtcattgccaccaccatctctcatccagactacctataatagcttcctaaatggccttcctatttctactcttgttacctcccaatctattcyttacaaagcatccagaataatttat

SEQ ID NO: 272309 - DNA, 551 bp, Homo sapiens
aagaaaggaaagtggagaatgggcttcagtcatcgaatcatsgacagatgagaggtttcaagcacaattaagtgctctgtgaccaaacagaaaagtgaggaccatgatcatctcaaaactccttcaactccccccagtgaggagtgtgcagcgacacagtgtccaccctatcatgagggggcatgttcctcccagtcaatacccagcaaaggggaagcagacactacttcgctgaaaggaagactttttaaaaagagaaaacaagtgcaaatggtcattcgcacgcaaggatattcacaatcaaatccgtaatttggggaaagggcatacgtgatggtgaaatcattgcttaaagaaatcccaaaaccctactagagtgtaaactgttgcctcatttttctaacaattctcttcaattgattaattattagtgaaaccattataaggcttaatcagcaagtgatatatcagcatttagtatgaagtttatatttttaataacaaatatgctttagaatactcaaggactagtttttctgaggaattttgat

SEQ ID NO: 272310 - DNA, 551 bp, Homo sapiens
aagaaaggaaagtggagaatgggcttcagtcatcgaatcatggacagatgagaggtttcaagcacaattaagtgctctgtgaccaaacagaaaagtgaggaccatgatcatctcaaaactccttcaactccccccagtgaggagtgtgcagcgacacagtgtccaccctatcatgagggggcatgttcctcccagtcaatacccagcaaaggggaagcagacactacttcgctgaaaggaagactttttaaaaagagaaaacaagtgcaaatggtcattcgcacgcaaggatattcacaatcaaatccgtaatttggggaaagggcataygtgatggtgaaatcattgcttaaagaaatcccaaaaccctactagagtgtaaactgttgcctcatttttctaacaattctcttcaattgattaattattagtgaaaccattataaggcttaatcagcaagtgatatatcagcatttagtatgaagtttatatttttaataacaaatatgctttagaatactcaaggactagtttttctgaggaattttgat

SEQ ID NO: 272311 - DNA, 551 bp, Homo sapiens
aagaaaggaaagtggagaatgggcttcagtcatcgaatcatggacagatgagaggtttcaagcacaattaagtgctctgtgaccaaacagaaaagtgaggaccatgatcatctcaaaactccttcaactccccccagtgaggagtgtgcagcgacacagtgtccaccctatcatgagggggcatgttcctcccagtcaatacccagcaaaggggaagcagacactacttcgctgaaaggaagactttttaaaaagagaaaacaagtgcaaatggtcattcgcacgcaaggatattcacaatcaaatccgtaatttggggaaagggcatacgtgatggtgaaatcattgcttaaagaaatcccaaaaccctactagrgtgtaaactgttgcctcatttttctaacaattctcttcaattgattaattattagtgaaaccattataaggcttaatcagcaagtgatatatcagcatttagtatgaagtttatatttttaataacaaatatgctttagaatactcaaggactagtttttctgaggaattttgat

SEQ ID NO: 272312 - DNA, 583 bp, Homo sapiens
aagaaaggaaagtggagaatgggcttcagtcatcgaatcatggacagatgagaggtttcaagcacaattaagtgctctgtgaccaaacagaaaagtgaggaccatgatcatctcaaaactccttcaactccccccagtgaggagtgtgcagcgacacagtgtccaccctatcatgagggggcatgttcctcccagtcaatacccagcaaaggggaagcagacactacttcgctgaaaggaagactttttaaaaagagaaaacaagtgcaaatggtcattcgcacgcaaggatattcacaatcaaatccgtaatttggggaaagggcatacgtgatggtgaaatcattgcttaaagaaatcccaaaaccctactagagtgtaaactgttgcytcatttttctaacaattctcttcaattgattaattattagtgaaaccattataaggcttaatcagcaagtgatatatcagcatttagtatgaagtttatatttttaataacaaatatgctttagaatactcaaggactagtttttctgaggaattttgatgatccagcttcacctaagataggcacttagaa

SEQ ID NO: 272313 - DNA, 477 bp, Homo sapiens
aaacaatctcgcttactctgtatcaaaatacacttggcttgcttccattacaccattatgaaactgcattaggagaccggactacacattatacagtctacatacaattaaatacattatataacatgctcagagaccagactacacattatacagtctacatacaattaaaaagcaaatcccaatccaattcaataaaaccagtcatttcaaatagaaagagaaacaactgggtgagcaatattaaagcttgttaaactttcctacaaatgtataataaaycctttaaaatgtaatgtcctgaatgaaacatatcatcttcaaatattaaaaaagaactcacatacaatctgtctctttcagccacagttagaatgaattttatcattctgaaaattctctgctattggtttcaacactgtatcacttttgtgagtcaactacattgtaaacactgcaaaacctcagagaaagttt

SEQ ID NO: 272314 - DNA, 404 bp, Homo sapiens
ctcctgttgcttccaggaagcctgacctccagatagcttggtgcgcagtagaatacctccccattataggatctctgtacaaggtttttctcctaatcctttacattttctccattcattccccttgctattcctagaacctgctagtcaaggtcctgccctagggtctttggactggctgttttcctggcctggaatactcctccccatggctaacttccctacctccttcaaatctttgcttaaatgtcactttctcactgacctgactacccaattttaaatcacatctgaacccctacccacccccatcatgcaccctcctgatttcccttactctrgtctttctcccaccataatacttaggtcacctttgaacacataatatactttcctatttatca

SEQ ID NO: 272315 - DNA, 479 bp, Homo sapiens
tactgttcacctgctctttagccttaacaggtctgtggcttcacattgggtagccacagcagtccctaagagaaaaaaggagctccagcaaccaagctatttaattgcgaaaaccgcaattacytttgcaccaacctaataacctaataacttgactccagaggatggatgaaaccaggagaagagagggggagcctctctccccacccttgggctaggagacacctaaggtctgtaaacctggcattgttagaacctacaaggagaaccaaaggatttaaatgaataattcatcatcccaaattcacattcactagaagtatctatgtaattgtggttaaagtacttcaaatgtgtccttctgcttcatattttagtgtaagatactaggtaatagaatccattctctaattcactttacacaaacagaatcagcccaaatgtttgctgccaattcttacatttcctattgttaagca

SEQ ID NO: 272316 - DNA, 557 bp, Homo sapiens
agaatcatgagctcggtttgggacatattgaattttatctgtctgttaaataaccttctggagatgccaaataagcaatttgatacttgaatccagaactcagaaaactgggctggggatattctcttggaagtcgctagcatataaatggtracagagccacgggattagacaaaatcaacaaaaaagagaataacaatgccgtagggttcaagacccaagctttgggttccccagttaatagaattaatagaggtgaggatgagaagtcgaggggaaacaggagaaaagagaaagaaaaacaatagagttggaggaaaatccagggaaggttgtgtcctagaggccgcatgcatagaggtttggaggaaagctgctctcaaatgctgttgatggatctgaacatgtccattggacttggtaatagcagggacattaatgacatcagggagactgaggtggtggaatggtggaactgaaagggtaaagaggaataatttttaagggagaagtggaacagagaattctgaatctgggaatattcatttaactcagac

SEQ ID NO: 272317 - DNA, 500 bp, Homo sapiens
acatgcaaatgtatgcaaagcagtttcaggacttgctctgtagaaacagctcacttaccttgattaacacgctacatttcctcgtaaccagagarcgatttctcagacttctgtcacttacatcgaatatggacagttgattgatgtacacccctcgtagaatatgagctcctggaggaagcttaaccaccttattttctaagtactgataaagtgcttgcaaagaataagactttagggaaatgaaaaaacatagtgaatgctaataatttaagcaccttaatgcctatatttggccatgagttgctaggatacagtttctttccatgttttctctgatatcccagtttattttcattggcgtacgtcaacatggagaagaaggatatgtttgtcatgagaggaaagtgaatgatcccgtgtgggagtttctttcaagtccataggagacaagaagatgaggtgttccactactcaactgagtaaggtttcaggaagta

SEQ ID NO: 272318 - DNA, 500 bp, Homo sapiens
acatgcaaatgtatgcaaagcagtttcaggacttgctctgtagaaacagctcacttaccttgattaacacgctacatttcctcgtaaccagagagcgatttctcagacttctgtcacttacatcgaatatggacagttgattgatgtacacccctcgtagaatatgagctcctggaggaagcttaaccaccttattttctaagtactgataaagtgcttgyaaagaataagactttagggaaatgaaaaaacatagtgaatgctaataatttaagcaccttaatgcctatatttggccatgagttgctaggatacagtttctttccatgttttctctgatatcccagtttattttcattggcgtacgtcaacatggagaagaaggatatgtttgtcatgagaggaaagtgaatgatcccgtgtgggagtttctttcaagtccataggagacaagaagatgaggtgttccactactcaactgagtaaggtttcaggaagta

SEQ ID NO: 272319 - DNA, 500 bp, Homo sapiens
acatgcaaatgtatgcaaagcagtttcaggacttgctctgtagaaacagctcacttaccttgattaacacgctacatttcctcgtaaccagagagcgatttctcagacttctgtcacttacatcgaatatggacagttgattgatgtacacccctcgtagaatatgagctcctggaggaagcttaaccaccttattttctaagtactgataaagtgcttgcaaagaataagactttagggaaatgaaaaaacatagtgaatgctaataatttaagcaccttaatgcctatatttggccatgagttrctaggatacagtttctttccatgttttctctgatatcccagtttattttcattggcgtacgtcaacatggagaagaaggatatgtttgtcatgagaggaaagtgaatgatcccgtgtgggagtttctttcaagtccataggagacaagaagatgaggtgttccactactcaactgagtaaggtttcaggaagta

SEQ ID NO: 272320 - DNA, 450 bp, Homo sapiens
gagttaccatttacaattttgactgtttttaataacatacctcagagtgtcaggacatgcagtctgtatacattttgctaatctttggagcttggatttgaatsacactggcgttaagcctggtgtgatgaatggaacccaaaactgagtagtgaatttagtttactgccaaacattgatgttttgatttaggtttattctattgtcttgtggattaagttgacagtaactcttgacacatgttaaaaactgtgtttctttttgaaaatttatgaatttgggggttcttaaaagtctggaaaataatcttttgtggaagtatagaagtgaaggtatcaaaaggaggcgtaggtcagtgtgccatatcattacacagcacttaacaattttaaaagtatttcacgttcctgacttacttgattttcatgacagctttttgagacagatagg

SEQ ID NO: 272321 - DNA, 612 bp, Homo sapiens
cctaccatgattctgaggccttcccagccatgtggaattataagtccagttaaacctctttttcttcccagtcttgggtgtgtcttcatcagcagtgtaaaaacactactacactgtggtgccacagattaacccagtaagtcttcaggtagcaagaaatgaactaattagtacagagggaaaatattcccttctctgtagtcatatactcttactctgattttgttttcatctttctatccacacagtttattttttatttttattttttaataatgatattggtatcaattagaggtggaatcatattgctgtattttaacaagaaagtttttttgtaaggatgattctcagagtcactttagtgattgcccagcctgatttagacatctccatttctcaggaggagtgaaattaaaaacattaatgaatccatcctgcttctaatccataattttgaagagcctcttttttgcccctgtattagtttctcatgccctgatttataaaatttagaacattcttcaaatgcattcatgtgtgttgatggtactaatgatatgaatacaggcataratgtttagagtgataaagtcataggcctgcaaggga

SEQ ID NO: 272322 - DNA, 352 bp, Homo sapiens
aagtcttatgctggtcttacgtggaattctaccctatatgctttatagaatggaattctctccttttttacttcattatatgataattagaacattttatatgactaagtatacatctatggatcaaattttcttttttcttctttggtgtctcttttcccaatcaagtcttaatacattagatctttaaataaaataactaaacaacctgatcatatagggkaaatcctaggatcattaagtccagttctccagcaactctttaagaaataatcaagataatcatcactttaaaaattttttaacagtttaaatcataccaaagtgccaagaatgcagataatactgcttt

SEQ ID NO: 272323 - DNA, 548 bp, Homo sapiens
ctgtttagtctcaatattaacccttaatggtattaccacagttatttgcatactgtacaaactgaaaagcagtttttaaaaaagaaagaaagggaaggggaggagatgggagaggagggaaatgtgaactgagataattcccacttactttacctctcaatgaggtaagggtaaagattttgaaaatcctaaaatattatttattatcgccaatctgaaacttttatatcaccacataactggagtcagactgtataatgattaaattgctctcttaatatactctttaaatgtaggctttttcagagccctggtccttccatccmcccatagtcacagattaataaactctaactagagaaagaaatacagggattatctgagtaatgttcccccacaccctgttatagatgcatccattaaagtgaaatggtgaagggttttttggtacaagtctgagtgtagaaagcaatacagaaatctctacttcagacaccatgtatcacagggatcctgaggttgcttccctgactctcacgccattaata

SEQ ID NO: 272324 - DNA, 593 bp, Homo sapiens
ctgtcttggcatttttcaagaatacatggatatgaaactatcatttctacatcaatataactgattttgtcatctttaaaaatcaaaacaggttttcttaatgaatgcaaaatatctgtaaaatacatttacttttcaaatgttatgggtaataggttttatttattattgtatctattttatttgttttagccctatcaatacatagtacggaaaagtctggcaatacatattttacttctttactatgaaaagcaattttaaaaattcactttgaggagaatttaccactctctaaagggaataatctacattgatctcttttccttaggattattttaagaataaagtgaaggaccttttaattgttttttaaatagttcattatgatagctcaaagaaaactaatttagcgcctcgcaggtgtaatatttattggtagctccatcctcagggtgatcaaatctctgggccagctgtaaaagtgactttgccctctccctcagggaatgcctagagacaatttttgttstcacagcgcaagaagggtgacccatggcacctaagggtagaggccacagatactgccaaat

SEQ ID NO: 272325 - DNA, 553 bp, Homo sapiens
ttggcacagaggaaaaattccaaattaaaaaaaaaaggggggggggacttttaagacataatctaatacattgctttctaaacccaccaattttaggtgttttcatacataaactcaaaacagatttgaatttctgggcatgggaatatggatgacacccaaatttccctttttgtcctaagttagaaccaaagttggcttgcctyaaaagtttagttcacaggcttaggcagcataaatattgtcaccaattaaaagaatgaagctgttaaatggaacagacattgcactgatgtcagtcagtgaatagatatggttcccatgtctcatgatgggagcttagctcttctctaagggaacagtctcaggaaagaaatactcagtttcaaggactgttttctcatatcactgctagcaatagagatcaatagtggaacggtgaaaggctgtcataaatggctaaggaaagtggaattaaagaatattctcttcatacctctctcaccttatacacaaatcgactgaagatgaatcaaagagttatatctatgac

SEQ ID NO: 272326 - DNA, 481 bp, Homo sapiens
tgctttctctaatatggatttggttagagctcacctcatatcttaatcatcacccttttagatataagtttatgaaataaaacacaaaacgtctttcatggttattcagaacttgatcttactaacagttccaacgagtgtggtctgctcctttcctgaaatttgtttcatatccacagtccttccatttcamcttagagatgaacctttaataaaatatacaatgaaggtgggcaacagtggtatgtatggcgagacaaggcaaaatgggtctaaagagaatctgtattccactgaatgcactaattcagtctagtgtactcactcttgtatgttaagttctacataaattagaaacctaaatttcaaacactgcttggggacatgtatgctctacaaaatgaaaatgctatgcattttgcacaaggtcatgaaagtccccaattgatttccccctgctcttcatcattgacaccacttt

SEQ ID NO: 272327 - DNA, 618 bp, Homo sapiens
gcaaataaatgaaatcagcttctgtctttttaaatttttctacctgtagcttcatcccacagtcatctgctgacacatgagatgtaaaaagcttggtgtccttcttgccccaaattataaaccttttagtgaaaaaagggactaaagattaaatgattcattcatgaaatcatatattttaaaaatgttattcctattatgcagtaggcactagaaatagaagtggaactactcacatcttcactaatcccaaaattatttcagcaaggaaccatagtacaatttcctacctcaatttactttctactttacttgtacgagataaaaccttttgtttttttcttgtgggaagccagatctcctagaataakcactagaaaggccattgcattcttcagacccacagaaacatcaaagggagatatacattcccattaagaatcaaagtgatagctctgctagccagactaggcacctccataaaacatgcatacatccccccaccgccacacacacacacacacacacacacacacagacagagagagggagcaagggagagagaaaatgcacactgagttctccatttccacattttgtaatgctgacattcaaaaa

SEQ ID NO: 272328 - DNA, 609 bp, Homo sapiens
tcagtctttttacataaacaaaagcctcttgaagtctcttctttaggaatagaagaagaaagggaattttacctagcagtacaagccctttccaaaaatagattctttcctcaccttctaaggaatacaacaacagaattcttgcatcttgctgaatcttttattgtcatttctttgcaaacctgtgcttcagatacatctgtgttataagtgtaacttacacggaagaaatcctagcatttaccactcagcatttttaaggcaagtagaataagtgaatcaacaatatgaacccctttgattaaagaayatttttccttcggtatagcatgatgaagctgtaatatcaattacggccttaaatttgaaggccattttatgttactgacatagtttcacactagggcaactccatttctatgacatttctcatgctagttaaattcacttcttaaaagcaaaacaacagctatgagcaagagctttaatgaaccttagtaatctgacactcagctccagagccaatggattttataagaaatggacaccatatcatgttgaataaatctttcatattcctatctttaattttatttagaaatagtaaaa

SEQ ID NO: 272329 - DNA, 609 bp, Homo sapiens
tcagtctttttacataaacaaaagcctcttgaagtctcttctttaggaatagaagaagaaagggaattttacctagcagtacaagccctttccaaaaatagattctttcctcaccttctaaggaatacaacaacagaattcttgcatcttgctgaatcttttattgtcatttctttgcaaacctgtgcttcagatacatctgtgttataagtgtaacttacacggaagaaatcctagcatttaccactcagcatttttaaggcaagtagaataagtgaatcaacaatatgaacccctttgattaaagaatatttttccttcggtatagcatgatgaagctgtaatatcaattacggccttaaatttgaaggccattttatgttactgacatagtttcacactagggcaactccatttctatgacatttctcatgctagttaaattcacttcttaaaagcaaaacaacagctatgagcaagagctttaatgaacyttagtaatctgacactcagctccagagccaatggattttataagaaatggacaccatatcatgttgaataaatctttcatattcctatctttaattttatttagaaatagtaaaa

SEQ ID NO: 272330 - DNA, 619 bp, Homo sapiens
cctgaccctcagaaaatatgagataataagtatatactgttgtaagctgtcagstttgggataatttgtcataaagcaataaatatgacaatgtctaagtcttctcattctgagtccagtgctcttcctactctacacagttacacctgcattcagaacacttttgtttgcagaggtttgccaaataaccataatattctgttagacatcatttttaaaaagacagacaagactgacaacatttgcgcatgtaatttaaaataacgcaagtgctttatttggatattagaacagaaaaaaaaacctatactgaaagtgtgctatagatacactatgtatctaggtttgtatttttgagttcatttataaatccataaccacctgtctaaaatcagtctcaaaactgaaggctatcagaggaagaggtctggctggattaacttttacccaaaggagaattaccaagagctgaagaagttcttcgattccctgcagcacagctgtgatattgatatagagtactaggaaactaaagaaacgtcttacttgactgcagttgtcacattatcatgcattacagtgcagcagcctgaatcaaagagatatgcaaaattcacca

SEQ ID NO: 272331 - DNA, 587 bp, Homo sapiens
aaactcttccaccatcaattcattttccaaagctatcaaatagattgcttaactttgatttgtttattcggtgctagcacacagaatcttgatgatatgcaaaaaggatgtctaagckatatatgatgcagttaggaaaagttctttctgcaccatcacacactatgaagatcgccttgcccttgagatcccttaccacagggttctatcttgcttatcaaacatcccactatccagcagaaactctctggaactgtctcaaacactatcacatctgtgaagctctatctcatccaccaactacatgtgattttcctgtcactgatctcaccaggagcaaaagctgaaccatttatcccactatgctttgtattaaagatatttgcatatttgtctttggctctctgttggactccaaggtcctcaagagtagagaatgtgtcttctcatatttgtatttattcactttagtgtctagaacaggacagactctcagaaaataaatttaacagaattttttttttttttcatttttagagagtcttgatatgtcaccgaagctggagtgcagtggcaaagatcatagc

SEQ ID NO: 272332 - DNA, 587 bp, Homo sapiens
aaactcttccaccatcaattcattttccaaagctatcaaatagattgcttaactttgatttgtttattcggtgctagcacacagaatcttgatgatatgcaaaaaggatgtctaagcgatatatgatgcagttaggaaaagttctttctgcaccatcacacactatgaagatcgcctygcccttgagatcccttaccacagggttctatcttgcttatcaaacatcccactatccagcagaaactctctggaactgtctcaaacactatcacatctgtgaagctctatctcatccaccaactacatgtgattttcctgtcactgatctcaccaggagcaaaagctgaaccatttatcccactatgctttgtattaaagatatttgcatatttgtctttggctctctgttggactccaaggtcctcaagagtagagaatgtgtcttctcatatttgtatttattcactttagtgtctagaacaggacagactctcagaaaataaatttaacagaattttttttttttttcatttttagagagtcttgatatgtcaccgaagctggagtgcagtggcaaagatcatagc

SEQ ID NO: 272333 - DNA, 587 bp, Homo sapiens
aaactcttccaccatcaattcattttccaaagctatcaaatagattgcttaactttgatttgtttattcggtgctagcacacagaatcttgatgatatgcaaaaaggatgtctaagcgatatatgatgcagttaggaaaagttctttctgcaccatcacacactatgaagatcgccttgcccttgagatcccttaccacagggttctatcttgcttatcaaacatcccactatccagcagaaactctctggaactgtctcaaacactatcacatctgtgaagctctatctcatccaccaactacatgtgattttcctgtcactgatctcaccaggagcaaaagctgaaccatttatcccactatgctttgtattaaagatatttgcatatttgtctttggctctctgttggactccaaggtcctcaagagtagagaatgtgtsttctcatatttgtatttattcactttagtgtctagaacaggacagactctcagaaaataaatttaacagaattttttttttttttcatttttagagagtcttgatatgtcaccgaagctggagtgcagtggcaaagatcatagc

SEQ ID NO: 272334 - DNA, 556 bp, Homo sapiens
atcactatttttgtttatggggaggcatgaataccaagccaaaatatcaacaagtgaagtagaaattgagttgtaaataartgataccaagtttatccaactcaagcaaccaataaaccaactacttgactgggagaaaaacatttttctcccagtcaaatggaaaaggcaaaaagatggctttgtttgtatgctgtgatgccacttttatttatttatttatttgtttttagagacaggctcttgctctgttgcccaaggtagagtgcattggcacaatcataattcactgtagccttgaactcttgggctcaagtgatcctccgcttcagcctcctgcgtagctaggactataggatgtgcacctaatttctttttttttttttttgtagagatggggtcttgctatattgcccaggctggtctcaaactcctggtctgaagcgatcctcctggccctgcctcccaaagcactgggattacaggcacaaggcaatgcacccagtcaatgccactttaaaatgggagtttggtgtgtacccaaatgtctggggac

SEQ ID NO: 272335 - DNA, 560 bp, Homo sapiens
ggcatctgagattgggcactttatcatgaatgaatgaactaaattcagacttggagaattccctcaagctgggatcattataaagagaacaaagggatttcagtaaattgacgaactcagttcatacattggaggcttctatggtaactctacccaaatgtatgctttctaattaaatgatgagtactcatgctctagctttcctcagcaaatggccatgttttcatgctttgtgctttccttcccattagattggcctcgctgcaatgagatttactgtaaatgggttacccaaataattaccatacataggtagaaatgtgggcactctgggtatcaaaattctctaatcatccagttctaggtggcttcccttttttagaattggcagccaccctcagtgggcattctaaagcatccactgccatgcgtgtgttcctggacacgggtgctgcwatggtgccagcaaacatcgaatgcactatagtttccaggggcttttgtgtacaaaaccttatttgaacttgtcagtagcttgataagctgagtagggcaggtgc

SEQ ID NO: 272336 - DNA, 586 bp, Homo sapiens
atgtctttacattaatttctggatctcggaaatgataactccaagtccattgtagaaatgacatcaggcttgtcctctttatctcttccaattcacaccaccttgtgaaattctatgctctatttctgacaacttgacatttcactctccagaagggcttagtgtcacttgcaaacctaaatattcaattttcctgaatatgggtgaaaatgttaaaccctgattctagcctcagtcccagaaggcccccartgtagtattttttcttctagtgcagtgccttttattcttatctctaagctagcgcctgatccataactaaatagatgcagaaatatcatgttgattcaattttttaaaacaatctttggtgtgaaagcttgcccaaggctttttgagtttagaattcatattcacatgaccttcctcccctttaaagaatgcaagggggttggttagttatgacatatcctttcagatggcaggctgtgttgtccagaaggttctttgcccaatatgaagtaaagactctctagtctatagttgccttggcccccttgaaactgtttttctgtgtcacagtcaa

SEQ ID NO: 272337 - DNA, 586 bp, Homo sapiens
atgtctttacattaatttctggatctcggaaatgataactccaagtccattgtagaaatgacatcaggcttgtcctctttatctcttccaattcacaccaccttgtgaaattctatgctctatttctgacaacttgacatttcactctccagaagggcttagtgtcacttgcaaacctaaatattcaattttcctgaatatgggtgaaaatgttaaaccctgattctagcctcagtcccagaaggcccccaatgtagtattttttcttctagtgcagtgccttttattcttatctctaagctagcgcctgatccataactaaatagatgcagaaatatcatgttgattcaattttttaaaacaatctttggtgtgaaagcttgcccaaggctttttgagtttagaattcatattcacatgaccttcctcccctttaaagaatgcaagggggttggttagttatgacatatcctttcagatggcaggctgtgttgtccagaaggttctttgcccaatatgaagtaaagactctmtagtctatagttgccttggcccccttgaaactgtttttctgtgtcacagtcaa

SEQ ID NO: 272338 - DNA, 552 bp, Homo sapiens
atccccatttcaaaccatgacctataacttcctcagtagtctagctcctccygctttactttccagcctcatcccctcccactctccctgacaccctctgcacctccagccacattgcatcccatggggccaggtccttcctgctgtaagactgccttagctgctccctctacttaggtgcacttgcccgggatcctcctatcctctcatgaggttttcagcttaaacatctccttggagcaagcttctcctatatctcataccaaaccagttgcccagtcacaatcttaccaccctgttacaatttggtgcactgtaagtgaacttacctaccttaatggtgcttttgtgtgtgtgtgcgtgtgtgtgtgtgtgtattcgacgtgtacttatctttgcctcccctggcctgtcttgttcactgctactgtccctggaacagtgcctagaacacatagtagatgctcaacaaatagttgtcgaatggagtggataaacgaacaaaggcatgtgcaacatagtgtttcctgaatgaggatgtggctcggagac

SEQ ID NO: 272339 - DNA, 543 bp, Homo sapiens
gatgttcaggtttttactggagtatcaagtgttaacagtctttctcaacttcaactgtaggaaaacacttgtataaatgaacactacttaatataatccttttcttctatattgaattatatttcagttaaaacttaaaagttggtataactgaaagaagaaaaaggaaataaatacatttcaaactaatttaaaaaattatttgaatcatttttgatattaaaatatcttatttttrtagaccaaattataatacgtgggagatctggaaatctattgggaaaaataatacatgttaaaataaagcataagataaaattcctgcacatgaaccataccattttagaataaagctatgcaatttacaaggtaccctttataaaggcagatgtatattaagtaaatgttcagttgatttgtttgcaggtgacattctacctaattgtcttctagctgtccagatgcctagaaaactttcaatacaacctgtacttttttcccataggttattggggtacaggtggtgtctggttacacgagtaa

SEQ ID NO: 272340 - DNA, 586 bp, Homo sapiens
ctttggctttcagcttggatcttgttggtgtatagaaatgctactgatttttgttgtacattgatttcatatcctgaaaatttcctctatttgtttatcagatctaggaactttgaggccgaaactatgggtttttctaggtatagaatcatatcatctgcaaacagagatagtttgacttatactgtctttctatttgaatgccttttatttctttttcttgccttactgctctggctaggaattccagtacaatgtggcatccttgtcttgttctggttcccaaggggaatgcttctagcttttgcccattcaggatgatgttggctataggcttataatagatggctcttattattttgaggtgtgttccttcaatgcctactttgttaagggttttttagttgaagggatgctgaattttattgaamgtcttttctgcatctgttgagagcttctgcacagcaaaagaaactatcaacacagtacactgacaagttacagcagggagaaaatatatgcagactgtgtatctgacaaaggtctaatatcccaaatctgtaaggaacttaaacaaatttacaag

SEQ ID NO: 272341 - DNA, 624 bp, Homo sapiens
atggctattttaacaattgattttccctttcgatgagcatggaatgttttccatttatttgtgttgtctctgatttctttcagcaatgttttgtagtctccttgtagacatctttcacctccttagttatctgtattcctgagtattttatattttttcttgtggctactataaatggaattgggttcttgatttgactaacagcctggacattattggtgtatagaaatgctactgacatttatacactgcttttgcatcttgawcctttttaaaatcatttattgccctagtagccttttgatggagtctttagagtttttgaaatatggaataatattgtcagcaaagagatagtttgatttcctgtctttctatttggatgccttttctttctttctcttgcctgattactctgtctaggaattccagtagtatgttgaataggagaggtgagagtggtcctcttgtgttgttcaggttctcaaggataatggtcctagcttttgcccgttcagtatttatactggctgtgggtttgtcacttgtggctcttattattttgaagtatgttgctttgatgcctagtctcttaaagggatgttggattttatcaaaaacttt

SEQ ID NO: 272342 - DNA, 518 bp, Homo sapiens
acttgttcactgggctgttcagactgataacrtctcttgggacttgaacattgatgcacaattctcatctggaaaaaaaattcaactgtcaaacattggcaaagaataccagaaatgaaaacaaactcttttctgtcttagtgtcaccataagataatttgttttgctctcttagagaataaaattctttaccttttttctaaaaatcaaagtaaaaacatttcattatttgtctattttgcttactttagcaaaaattttaatacatttggattctaagcatgtgttttactgataaatgcattaaattgttattagaaactttagacctaagaatagaaaatcaaatgagattgacaaacatggtaacataggcttaattttttaataaggaatgagagaattctagtactttattctaatacaataaataatgtcaagacttttctttacatgttcaagatttttcatctaaaaaaagacccatgttaattattaactgcagaaacaaattataa

SEQ ID NO: 272343 - DNA, 615 bp, Homo sapiens
agtctcaaaaaaaaaaaaaaaaaaaccacaacagagtgaaataccactcacctgtacacccacaagggtggcaattaaaaacaaaagaaaacagaaaatcacaagygttggagagaatgcagaaaactgaaaccctcataaactgctggtggggatgtaaaatggtgtgacctctggaaaacaatttggcagttctcaaaaagttaaacatatggtaaatatgactcagcgattccacccaggtacttacccaggagaactaaaaacatatataaaaacttatacacaaagcagcattattcataatagccaaaaagtattaataatccatatgtccatcaactatgacataaatgtgatatagtcacacaacggaatattttttcaccataaaaagaaatgaagggccaggcgaagtggctcacgcctgtaatcccagcatttttggaggcctaggtgggcagatcacttgagcctaggagctcaagaccagcctgggtaacatggagaaaccctgtctctacaaaaaatacaaaaaaattagccaggcctggtggcatgtgctgtggtcccacctattcaggaggctgaggtgggaggatcacctgagccaga

SEQ ID NO: 272344 - DNA, 412 bp, Homo sapiens
gctcaggcaatcctctctctccctggcccagaagtagtcctgtgctagttctcagcaggggactcttacagagccaagaaaggggtcatgtaaggaggcaagtttctggaaggaaccttgcagttaagatgggaactcccccgaaatttccagtaaaactctaccttcccctcagctgctccccaacccaccccactcatctaccctgcccagacatggtgaccatgtattcccaagtgtctccagggccctttaggtcacaactgcaatatatgtagttcttctctttctggtagccaaaccactaggcagatcagcttcattctgcctctggaaagtgcaggcccagagtggccaagataaggttrgaatcacccattctcaggctttattgggctttccaatgagacag

SEQ ID NO: 272345 - DNA, 476 bp, Homo sapiens
tccgggctcttgagcccctatgcttggcctgctcccaccctgtggagtgtactttcattttcaataaatgaaaatttgtttgctccttgttttgtttgtgcgttctgtccagttctttgttcaaaatgcgaagaacctgaacgccctccactggtaacaagcagatctcattttaagtgtttttattacaacttaaaaaagaaagctttaatttgttacctatttgtatatttatatatctgtgtatgcctaaatgcatacaaataaaggaatattaatagagcctttattataatctattagaaaattatgtaccaaaggagtaaaattaggatttggctctgtcatgtaaaatgactcagttgttttgcacccagattactagaggttatttttttcaccaaattattctgttaactctcagtgtttttcacatgctcttaaaacrtcttgttagaaattcccttggatagccc

SEQ ID NO: 272346 - DNA, 528 bp, Homo sapiens
tttctgtccttaatgccgtgatatagtgaaggaaaccaataacagatggccacaatgaatggtgmcaggtaatataagagcccatgtgtaaagagtttaggaagacagagaagggagcaagcttgtggaggagtcctgcatagggccagaagttgaccagatgaccacttccaactctagtaccacatgcagcagtggggccaaggggtagctgggggcatgaggtgggctttagccatgccactccaaacagatgcataatctatgttttttaaaaaatgtacttgatacacaaatacagcttcaggaggagtcttccagctccccctacctcctcctgccttctgcctttcaaccacatggcagcttcttagactgtcctatatgcgcattctagaagtgctactgatctaattttttgttttgtttggtttttagatacagggtctcactatgttgcccagaccagactcactcaaactcctaggctcaagtgatcgtcccgcttcaatctcctgagtctgggac

SEQ ID NO: 272347 - DNA, 617 bp, Homo sapiens
tactgtcctcagcctctttcagttactcacagttaaaatcctacycctcctttaagacccgtgccacttccttcatgaagtcttcctagatttcatgaggaagtaagttcactttttcctttgaatctccccagcaatttcaccatcccttgacacttacagcctgcattgtccccatcctagacataagcaccaagaaggcaagtctgtatttgtttaatctttgtaaccctcttcctcacttcctatacagagctttgcatatagtagttgctcaataaacatgtcttgaatggagtgacatagagcctgcagtttgggctgctaggagctgaaggaggtgggaatagggtgctcccaggcttcaggagaccataggaatgtactcaaaatggggagacaaggacagtacagaggtaagtggggtgtctgggccttctcagaaccttgctggggagcaggagctgaagaaaacagacagctgggaggtcctagggatatggtgggttgaggaagggccccaggaacccaaatgtgcgccattaatgacaagctgaaaaaaggagcaggactccggaggcttgggttctggttgcacctcctttaccctctagctg

SEQ ID NO: 272348 - DNA, 617 bp, Homo sapiens
tactgtcctcagcctctttcagttactcacagttaaaatcctactcctcctttaagacccgtgccacttccttcatgaagtcttcctagatttcatgaggaagtaagttcactttttcctttgaatctccccagcaatttcaccatcccttgacacttacagcctgcattgtccccatcctagacataagcaccaagaaggcaagtctgtatttgtttaatctttgtaaccctcttcctcacttcctatacagagctttgcatatagtagttgctcaataaacatgtcttgaatggagtgacatagagcctgcagtttgggctgctaggagctgaaggaggtgggaatagggtgctcccaggcttcaggagaccataggaatgtactcaaaatggggagacaaggacagtacagaggtaagtggggtgtctgggccttctcagaaccttgctggggagsaggagctgaagaaaacagacagctgggaggtcctagggatatggtgggttgaggaagggccccaggaacccaaatgtgcgccattaatgacaagctgaaaaaaggagcaggactccggaggcttgggttctggttgcacctcctttaccctctagctg

SEQ ID NO: 272349 - DNA, 605 bp, Homo sapiens
agctggaacatgctgcctctttggtactgcctttcccaatagctctctgggaggggcttcaggacacggacgccttgcctgctggccaccacatgagctgtgattacctgtgctagctccctgaagctggagaggcaggctatgtttgttttgcaggctccctaccactattagataagcttggaagtgaagaattttgcccattttcacagacagccaactcacaggccaaggtcttaccaccaaccaatagaatggcgccaaactggaaccaaggttttctgactccagtctagcgctctttctaaaatcctgttccagtgggcccaggtctgctccagttcttattgaatccctcggaaggggccatgccagtctgggctggggccctgcaggaagaatgtgggtgctgagcagggacaggctttacctaatcccagacaatctgcttgatgccaaattaatcttgccaacacaacagcacagggcttcctaaaaatcactttgctgtctacaggttttcaatttggtatttccatttgaatttcttgtackcaggtatgcctaattttgaggtctgttttaggctttctggaaggcagtga

SEQ ID NO: 272350 - DNA, 303 bp, Homo sapiens
acatgggagagagaagggcaaaggtcagtttttcaactgtcagtgtaaaagggactaagaatacaccmccccccacacacacacacacacacactcacacactcattcactgtactagctaaaaccagcgtccctcacctgccaatctgcttagtaaatggctctatcttgttgttgttgtttgagacagggtctcactctgtcacacaggccgatgtgcagaggtgcaatcatgtctcactgcagcctcaccctccaagactcaagcgactctctcctcagcctcccaagaagctgagacta

SEQ ID NO: 272351 - DNA, 303 bp, Homo sapiens
acatgggagagagaagggcaaaggtcagtttttcaactgtcagtgtaaaagggactaagaatacaccaccccccmcacacacacacacacacactcacacactcattcactgtactagctaaaaccagcgtccctcacctgccaatctgcttagtaaatggctctatcttgttgttgttgtttgagacagggtctcactctgtcacacaggccgatgtgcagaggtgcaatcatgtctcactgcagcctcaccctccaagactcaagcgactctctcctcagcctcccaagaagctgagacta

SEQ ID NO: 272352 - DNA, 656 bp, Homo sapiens
ttgatttcgcagctctaagagaatctctgcttttgccaataggcacacataagaatgttcttaatgctttagtaataacatagttatccaaaatgttaaactttattccgcaaaattttaactcaaaaaatatttttcagcaagtttacatgtattccctgggcaacactggtcaggcattcattcaacagtagacatttaagtatatattatatactgttcttgattgtgtgggaatttcaaagataaatgagattctatctttgccacttaagacttacaattattggctcccaggcaagatggctgaataggaacagctctggtctgcagctcccagtgagaccaacacagaaggcgggtgatttttgcatttccaactgaagcacccggttcatctcactgggattggttagacagtgggtgcagcccatggagggcgagcagaagcagggtggggcattgcctcacccgggaagtgcaaggggttggggaactcccttcctakccaagggaagccaagagggaccctgccatgagggacagtgctatcaggaccagatactacgcttttcccacagtcttcgcaacctacagaccaggagattccctcaggtgcctacaccacaaaggccctgggtttcaagcacaaaact

SEQ ID NO: 272353 - DNA, 529 bp, Homo sapiens
gctttaataatatttattttgggatgcattatgatgcaccgtgactgcagaaatgacttatttgttatacacgcttgagatgggaagataatcaatgcctcttcactaaggaagcaaaatatggattatgtttaaagggctttgctatgctgcattattggaagtttttgtayggctaggcactggaataagctaaaagaatggggatagatagaaaatatcaaattaggcattgctaactggaacacacacacatacacacgtgcacgcacatacatacatgcacaccatcaacagcaaaacagtagacatcatagaataataaacagccactgtgcatgctcaagcactaaagcagaagggtttattttcagccatcttaactgtgaaatttgccatggagataaaagctgtattcagtggtgtcttgtcaccaagtgtctgtgctgttagggatattagcaagggtcaccagggtatgactgtttttctgcatctgagccctcattcttttgtcccatttttctat

SEQ ID NO: 272354 - DNA, 529 bp, Homo sapiens
gctttaataatatttattttgggatgcattatgatgcaccgtgactgcagaaatgacttatttgttatacacgcttgagatgggaagataatcaatgcctcttcactaaggaagcaaaatatggattatgtttaaagggctttgctatgctgcattattggaagtttttgtacggctaggcactggaataagctaaaagaatggggatagatagaaaatatcaaattaggcattgctaactggaacacacacacatacacacgtgcacgcacatacatacatgcacaccatcaacagcaaaacagtagacatcatagaataataaacagccactgtgcatgctcaagcactaaagcagaagggtttattttcagccatcttaactgtgaaatttgccatggagataaaagctgtattcagtggtgtcttgtcaccaagtgtctgtgctgttagggatattagcaagggtcaccagggtatgactgtttttctgcatctgagccctcwttcttttgtcccatttttctat

SEQ ID NO: 272355 - DNA, 567 bp, Homo sapiens
gctttctggcttgcagaaaagaaattgacttttgagagcctatgatgtgccaagcatcaaacagttctcacagctactctataaaggtaggtataatcaccagtttttaccgacaaattttagatttgaagaggtttaacttgccaagcagctcatttagatgatgggaaagtcaggatttaagtccaggtcatcttgttgtttctattgtmtcaattgccttctgattatgtctagaaagaataggcaaggaagcaggaaaagagtcatggaaaaaaaatactgtgctcaaaatgaggggagatgggaggttcttcatgcttatatgaacttcatttagtgagggttagataccgggctagtctgaatacgaggcagagatgtaactgtttaacttgtgtgacttgagaatccctggaggactcctaaacaacctgaaaatgtttctctcaccaacatgcaggaaactatatcttgtagtcctttttaaacaatcaaaatgctcctgcaaggatcatatacattagggttaatttgtttaactagagattgatataagattcagta

SEQ ID NO: 272356 - DNA, 549 bp, Homo sapiens
tgacaaggcttggaaaccttgggcagcacatgaaagggacaaaagataaattagtgaagttgatctgtctgtaattagaggacctaatttcttttctcttgtcttgtgttyacagctagtgaaaatggtcaagagaccacatttatattttgcacactgatttgttttggcatgtgttttttaatgataaatgaacatagtataattatctcaagtcaccctgagtctacagagaccctgtgatccagatgacagcatctagccattagctccttcagggtccaccttagctgcagaagggtactcagtctatgctgaccctttcctggtcagccgcatgtagtgagtcagtgtggcaggggtacaaagaaccaactgtctggtactcacttgggatgtacttgccagggacacctcagagttcccctccaagttgaccaaggctttgctgaccttggccacagtttgattatccttctgccaccctatttcggtcctgtccctttctttcacaggctggttcctcataaatgtcttgcccccaactca

SEQ ID NO: 272357 - DNA, 549 bp, Homo sapiens
tgacaaggcttggaaaccttgggcagcacatgaaagggacaaaagataaattagtgaagttgatctgtctgtaattagaggacctaatttcttttctcttgtcttgtgtttacagctagtgaaaatggtcaagagaccacatttatattttgcacactgatttgttttggcatgtgttttttaatgataaatgaacatagtataattatctcaagtcaccctgagtctacagagaccctgtgatccagatgacagcatctagccattagctccttcagggtccaccttagctgcagaagggtactcagtctatgctgaccctttcctggtcagccgcatgtagtgagtcagtgtggcaggggtacaaagaaccaactgtctggtwctcacttgggatgtacttgccagggacacctcagagttcccctccaagttgaccaaggctttgctgaccttggccacagtttgattatccttctgccaccctatttcggtcctgtccctttctttcacaggctggttcctcataaatgtcttgcccccaactca

SEQ ID NO: 272358 - DNA, 531 bp, Homo sapiens
agaccaacaataaatgagtgaatggataggatataaacagagcaggacactggtagtccatggtgattgtcatttttgctgccactctctttgcaaccccacacggctgtgctgtgcctggcctggccctatcccttgagtgtgctgtctgagtacacttataggcacccctttctacagctgtctactcaacctcakgcatggccacagagaccctcactgatgctctcaaggcacttggtgtccagtgccacagccattgtccagccatcccttatctgcccactgcacgcaagttgggcctggtgctgccactgaaggaaaccctcagtccccatcatcctccctttttctgaagatgactttctgtctcttgggtttgtccacccttgctttatctaaccgtcagccatttacctttgggacaatccacgctaatccaaatcagtgatctagaaaccctttaactgctccacccagaaggctgacaggtaaggatggcaggagggaaaggaggcctgcctccaggaa

SEQ ID NO: 272359 - DNA, 558 bp, Homo sapiens
ttaacagaaactgacagcaatttaaaaggggtcatttccagaggtataatcattcaaccatagctttttgtaatatagaaagagcaaaataatatgagttacgattgattgttccatcatgaagggaacatatccacagggaagttcactggagttggagtcagaagccatggcacttggcattgcaaacatcacctgggggagcggaggcaagttgctggcccaggagctcctttcctcacccctgcatggaagatactatcacccacactgcctgccacccaggggctcaaatgggaaatatgtgaaaaatatgtgcaatctcttttcaatatataaatgctaactaccattgtggttattgttgtcaaagccagttttgatagtacttgagatatgstgcttaaaaaatcttaagaaatgttaaatttctgtactataaatatagaaataatagttgacgtttgagtcctaaaaattttttttatggatctatttgttttgctgttgtgaattatgtagaaggagacaaatgctaattgagatggaagaccaacc

SEQ ID NO: 272360 - DNA, 572 bp, Homo sapiens
tgtatgtgtctatttagatctctcttccatctggaatgtgattttgcatatggaatgcagtgaatctaactctgtttccagaaagtcattatgcacattccatttattacatactyctttcccaccaccttgaaatgtcacatttatgattaattaggcttctatatatacttggatctattccattaatcttggctctattccattaatcttggctctatttatctctgtcaatttcctttgccagcattatattattttaataacagtatttatagtaagggttcatactgataatatatgcattagtttcccttttcaaaaatgtgttagaaattataacatacttactcttccacatggactttaaaaattattggtttccatctgcacctcccaaatcaaaatcaaacaaggaaaaaacactatagaaatacctattagaatggcaatacctccatagattaatttgagaatggtggacatttttatgatatgaagtcttcccgctgaagatatgtttattccaatcttcaattatttttttaaattatagttatgactgtagaggt

SEQ ID NO: 272361 - DNA, 594 bp, Homo sapiens
gagtcccacactctcaggaaagctacccccttttccacgggtccaggactgcctgctcagagcccatgagaagtatcctcagagaaagtgccttcatttggaaaattaatgatgctctcacatttgctagtgtgagggttaattttatgtgtcagcttggctaggccatgggacccagatatttggtcaaacatgcctggatattgttgtgaaggtattttttagatgagattaatatttaaatcaggagactttgagaaaagcagattatctccatcatgtgggtgggcctcttccaatcaactgaaagccttgtgaaaaagrttgacctccccatgaagaagagggaattctgccagaagttggccttcagattcgaactgctgtaccaactcttgcctggatctccagcttgctgaactcacctgcagattttggacttgccagcccccacaatcacataaggcaattccttaaaataaatcactcatatatgtacacacacacacacacacacacacacacacacacacacaaaggaagtgggtgattttccagaaaaatatgtcatagatagatgatagatagatagat

SEQ ID NO: 272362 - DNA, 594 bp, Homo sapiens
gagtcccacactctcaggaaagctacccccttttccacgggtccaggactgcctgctcagagcccatgagaagtatcctcagagaaagtgccttcatttggaaaattaatgatgctctcacatttgctagtgtgagggttaattttatgtgtcagcttggctaggccatgggacccagatatttggtcaaacatgcctggatattgttgtgaaggtattttttagatgagattaatatttaaatcaggagactttgagaaaagcagattatctccatcatgtgggtgggcctcttccaatcaactgaaagccttgtgaaaaaggttgacctccccatgaagaagagggaattctgccagaagttggccttcagattcgaactgctgtaccaactcttgcctggatctccagcttgctgaactcacctgcagattttggacttgccagcccccacaatcacataaggcaattccttaaaataaatcactcatatatgtayacacacacacacacacacacacacacacacacacacaaaggaagtgggtgattttccagaaaaatatgtcatagatagatgatagatagatagat

SEQ ID NO: 272363 - DNA, 590 bp, Homo sapiens
cctgagcacgtgtatccccggcacgggggggtgggtggggcctgctgtgtggaatgactgaggggccgctccccacttcggggaccttttggatggaaggctgagtttccaggggccgagtggcatttgggagtggccactgctgtggttacactaatggcattatctcctggcccagtggagggggctgagcccagacccaggccacctgctttgtaggaactcggggaggcagggcaatggccaccagcagggttcccattttatgggtcaggaaatggaagcccagcgaagtgaagggatttgctcttccctctcacccaggggcagtttaaccccgcctgcagccccacccaagccgggccctatctcgagcagtgacattcagagaggacagagagccacagcatgtgtggggatgctgacttcaggccacgtggcactttctcatggatgacatgtcctgaccccacaagggttttacctcccggggrtaatgctccgaggccgggcaccctacactccgaggccaagagccaaagcagctgagtcagtcacgagacacaggcccagatgcaccattcagctca

SEQ ID NO: 272364 - DNA, 634 bp, Homo sapiens
aagtgaggggcgtgtttcagatctgtttgtgttacacctctttcagtcctgctattcagaaggtcccaagttgtcccacatccaggaagaatgaggcacacagacaactggagggtgaataaggtgaagaggtgctttattgagcaacagtacaactctcaggagacaggagacccgaagtgggaagctcctttccacaggcatgtcatcctaatgagttcagctctcagtggaaaggagatccagagtaggtarctcctatctgcaagcagattgtcccatcaagtatgcagctctcagcagagaggagaccaggagtgggtagctcctatttataggcaggtcgtccccacatctgctcagctatcagctgctgagaggagacccacaatgggtagctcctttctgcaggctggtggtcccaacatctaccccagtctagctgagtccaggggtttttacatgcttcagaggggaggaagtgtgtgctgattggcccatgggcagccatgggcagggttggataaagtaccataagttctcactttggtctgcgtacgtggcagtccgcccccaaggctttaggccatcccaggcttgaaggtggatcttcactgggatctacctctttttt

SEQ ID NO: 272365 - DNA, 605 bp, Homo sapiens
actgacagtttgacagtgaaaaaatattcgttccaactctacatgactaaagggctgtccctgtcccctgagttggaacagattgataacaacacctgtgataataatggctccacattttgaatgcttgtaggatttattcctcatattaactctacaaggtaagtaatattattactccatttttcacatgaggaaactgaggctcrgaaatgtaagtttgtaacactaagttattaattaggtctctgtgcctacaaacactgtgcaacaaggtttcttcattatttcacattcctgaacacttattaaggatgaaaaagacatctctgataaaactgttggaaatgaatggagattgtcatgccttcttcaggcacagaaatgagatcttaaagtcaaggagaaataatgtgtggattgtataaaggtggatgctctaaagtccccaccaaatgtaaactcattggtcattctaagcaacttctaaagcatgccaggaatacagatccagatacacagaaaggctaagaataacttttttgggatagtcacaggccctcacatcctctgctctttcattttcactcttccaaattaacaca

SEQ ID NO: 272366 - DNA, 588 bp, Homo sapiens
tgtttgtacctgtccttcttaggaaagcttttcagatattcataaggacttgcatgttgtggtctaagctgtttttgctttagggggcaccccaagcscagtaatgctgtggttcttgcagactcataaaggtactgctttgatggtcttccaaaagattcgggagagttctctggattaccaggtagagactcttgttctcttcccttactttcttccaaacaaacagtctctctctctggtctgagcaacctaaagctgggggtggagtgacacaagcacccttgtggctaccaccactatgactgtactaggttagatctgaagctaccacagcactggggctcacccaaggcctgctgtaaccattctctggctattgcctatgttcactcaaggtcctggagctctacaactggcaggtggcaaaggtggccaggcctatgtccttacattcagggcaccaagttccgctaggcccctggttagtccagaggtgccatctgagtgtcaaggactagagtcaaaaactttagaagtctacctggtgttctattgtaaattgcagctgagctggcagcattcaaa

SEQ ID NO: 272367 - DNA, 572 bp, Homo sapiens
ctgtggttcttgcagactcataaaggtactgctttgatggtcttccaaaagattcgggagagttctctggattaccaggtagagactcttgttctcttcccttactttcttccaaacaaacagtctctctctctggtctgagcaacctaaagctgggggtggagtgacacaagcacccttgtggctaccaccactatgactgtactaggttagatctgaagctaccacagcactggggctcacccaaggcctgctgtaaccattctctggctaytgcctatgttcactcaaggtcctggagctctacaactggcaggtggcaaaggtggccaggcctatgtccttacattcagggcaccaagttccgctaggcccctggttagtccagaggtgccatctgagtgtcaaggactagagtcaaaaactttagaagtctacctggtgttctattgtaaattgcagctgagctggcagcattcaaaccacaagatgcagtctcccactctttctcctgcctttcaaaaggcagaggagccacaccctatggccaccaccacaataggcccacagag

SEQ ID NO: 272368 - DNA, 506 bp, Homo sapiens
caagcatgtataaatttttaattaatagaaaggtagaggtgcataaagcattttgaaacatttcttatagtatctgctatcactacttgagatataatcaggattgaatatacttaaattctttgaaaatgaagtggaatttttattaaatacttcaacagaaatcttttttctaaaaaaataatttaagttttaaacattttcctcattgtagcactagcatagggcgtatttgtccaaatcaaaactaatttaaaactatttaaggaacagtattgtgtaataatattcaatagggtagtatgactcagaatagaaacttgagtatctgacaaaattaaagtcaatacagttatcattgctgtttcttatgccaagtaataaaatcttttgtgttggtataatcatwttcaataagagtatgtcaagagaaattgtctttttaattatgtcattatcattgcttttatttacatgttaagttgcttttgattttaagttgtgta

SEQ ID NO: 272369 - DNA, 459 bp, Homo sapiens
acctactctaccctttagaaaacttttaataaatgttctctgagttgctgattatttatttatttacaaatacatttcatatactagtcagttgattttgttagctgctgaagattttctaggtgtggaaaaaagaaaaacaggatggcgcctctgcctagaggatgcttattccttggataaagtggtgatctactcttatttgattaggctatttcaaggattcttgactgtcaattggaattttaattggagactttaacagcaaataacctttatagcatatgatttacataaatagatattcaacaattttaatatagccacataatgaggaggttattcagtggggtctacttccttccccagccctagtagagattaaagagagaatgtcccattgtcctccaaactcctctgccmtacaagtaactgactctgggtccatttggagaaact

SEQ ID NO: 272370 - DNA, 498 bp, Homo sapiens
tccactgttgtcagttcctccaagttctgagtataagtttaagttctaaacaaggaagtaatgttgaaaatgcaaaataattcagttaggcaagggttaacttgtccactcaacatggatgtcagtaggtttacttgaggtgttgaatcccaccaagggaagcatctctaatagtcctgatyttatctttgtaaactcagcagacattctacaagacataaattattcaatgaaatgaatggtgccagtgcttatgtgaaagataatttatagaccttgcaggaaaggaaaaaattaaaaatcatatgtattcccttaaactttttttcttggttgtatctaatcaggagtttaagtatataaatgttgagattgttatctaatttttttctgagaaaatattttctctgttcatgttcatgtgtaacatcaacttatgtaattagtctttttatatttcaggattgttcaatggaccacatttagcatcagcattga

SEQ ID NO: 272371 - DNA, 610 bp, Homo sapiens
ctcggcatgtctattttctgtaagtctaaaagatctgtttaattatttatcaattttgtaccgatgtctgtgatctgtggctcatctgttaaatgttgcaaattttgttctagttttataacattcttagtgatttcattagtccattataaagttcagataaaagtatgactgaaaagtctacttcagggtgtcaaataatataaacttaaaagttcaatccaatgttcaatttggtgtgcaagacttcattaatatatgtatgttatttgaataaaacaaagtagtacttacttaatattagggttttgataaaacttccttaaagcttcttatgaaaacttatttgaaaatgatcaagaagttgcataaatcttctctgtcttctctctttctctttctcgctctctgctagaggtraaagagaagaaatagattgtatgctatacatcttacagttttagtgatattaaaaacacctgttcccttcctgtctatcagaaatacatcctaaccttgtctgacaagactatgttgatgaattataacatttttcccttagatatctagagtcaactcagactaatggtcaatcttgttgccaggggga

SEQ ID NO: 272372 - DNA, 603 bp, Homo sapiens
aatctgaatgcaagaaaacttcatgcaagtccctctttagacagcattcagctaatttagaaaattttcccacattttctgtcaaatatgctctctattttatataagtagataaatgatatgcactgagaatgaaatgttctggttgaactaattttccggtgcactgattattagaaaacaccattttttcaaactcttgcactatttaacttcaaaaataggcagttattttataatgaattaccatattgaatgctttattgtatttttttaaggttatccagaacccytgtgtcattttctacttgtggtcaacatctctgttaataaccgtgcatcagttattccatctatgcttgtgatttgaaaaataaggtccctaaccccaaaggaattcagagtaccacggggcatacaaagtgattctgaatctgcaattaggaactatagcataaaccctataatcaatgctatgaaaggaatattttccaagttctaaggctgcagagaggaggaaggccaacacccagggcacccagggcagagaagaagggtggtgtgaattagacttaagtgctacacaatatggtacattgcagg

SEQ ID NO: 272373 - DNA, 513 bp, Homo sapiens
tgaaggcaaattctagattcaaagcctggttccaccactgaagattttatggattttgcctaatgtacttaatctcactgtgccctagttttgaagtatataaaatagaaatgaaaaatatatgattttgttatatataaatataaatttccccttaatgtactttatataattacagtacaaatcaaaaaataatacatgtaatacacttaaaaacagtgctcgatagttaacaaatgtttggtaaattttagttattttaaagatgagtaaagtgtttttcttccattatttgctttaatttattttgatttttttaatctsataatatccttatcacttacacagtgagatatatcacttacgtagaaccactgagtacatagaccagatgtactcaaattaatggccaatattggttttctgtgaactggtccaaatattggcttttaaaagtaaacaatggtaattccttgattttcagaaagaaataaaaagctaataatggctaga

SEQ ID NO: 272374 - DNA, 508 bp, Homo sapiens
gcaaaattatctatgacatccaacccactggggctcatatacaacttatggtttcattatgcagaattataatgggtcttaatattctattactccttggctctaataccttttcatcaacgtaaggaccttaagattaggkctttgcttagattggctagcattgtcaccctggaaactctagtgtcctatggaattacacaaattgataatctaaagatagcaagcatgtcagaaatttcagaagtagttacaatgtatttgttaataattcatggttagcaacagggatatgaaattacaaatgactgaacttcagtttcctgatcatatatgattacttaagtaactgtaagtcttcagcactcactgtatcaattatgcaacatcttaggtgattgatttttattggtctctgcctgagttaacttaatttttcagttgtctttcttccagattcttcttagaattgttgtcaaacaagaaattaaattatatttttctccca

SEQ ID NO: 272375 - DNA, 508 bp, Homo sapiens
gcaaaattatctatgacatccaacccactggggctcatatacaacttatggtttcattatgcagaattataatgggtcttaatattctattactccttggctctaataccttttcatcaacgtaaggaccttaagattaggtctttgcttagattggctagcattgtcaccctggaaactctagtgtcctatggaattacacaaattgataatctaaagatagcaagcatgtcagaaatttcagaagtagttayaatgtatttgttaataattcatggttagcaacagggatatgaaattacaaatgactgaacttcagtttcctgatcatatatgattacttaagtaactgtaagtcttcagcactcactgtatcaattatgcaacatcttaggtgattgatttttattggtctctgcctgagttaacttaatttttcagttgtctttcttccagattcttcttagaattgttgtcaaacaagaaattaaattatatttttctccca

SEQ ID NO: 272376 - DNA, 549 bp, Homo sapiens
tttaattgactatgattgacaagtacattaataacttttatgtcaagggcttatgtcttttccattctgtcacaagctgtaaacaatttcatgctgagtatgataaaaatgaaactttcttgattgcagtaaaggaaatactttcaatccctaaaaaaatcaggtatcttttattccagatatttctatttggtaggtcaatgtacagtttcacacatttaagaaaccttcaatatctttgctctttgcagcaaaaaaagggataaaaaagttaaaacaataaaacaacgaaagtaagacaayagagagctccatttattttgaattcaattttaagtttatagcatgatatttgtatgtcttaatctaaaattgcttcaatttcctcaattttgtacaaagggtgattcaatttgggaggaattcagattgccttggtaatacagccattgtctgctgaatacatacatcattataacagtgctgtccatttaaattgcagtattctctgttttctgatatcctgaggtttgatgcttgtttgatttt

SEQ ID NO: 272377 - DNA, 600 bp, Homo sapiens
aaatcaggtatcttttattccagatatttctatttggtaggtcaatgtacagtttcacacatttaagaaaccttcaatatctttgctctttgcagcaaaaaaagggataaaaaagttaaaacaataaaacaacgaaagtaagacaatagagagctccatttattttgaattcaattttaagtttatagcatgatatttgtatgtcttaatctaaaattgcttcaatttcctcaattttgtacaaagggtgattcaatttgggaggaattcagattgccttggtaatacagccattgtctgctgaatacatacatcattataacartgctgtccatttaaattgcagtattctctgttttctgatatcctgaggtttgatgcttgtttgattttgctaaagaattatactatggcttgataatcaatttctttaaaagaaaccacgtcaaaatccaagagaatgatactcatcaatactggtctttagtttttgtttttaaaaattgtttttcaagattaatcacaaaaaatacaaaaaaaaggatatatatacttgtaacctacaaattcctgggagacattttctgcaattaacaataa

SEQ ID NO: 272378 - DNA, 600 bp, Homo sapiens
aaatcaggtatcttttattccagatatttctatttggtaggtcaatgtacagtttcacacatttaagaaaccttcaatatctttgctctttgcagcaaaaaaagggataaaaaagttaaaacaataaaacaacgaaagtaagacaatagagagctccatttattttgaattcaattttaagtttatagcatgatatttgtatgtcttaatctaaaattgcttcaatttcctcaattttgtacaaagggtgattcaatttgggaggaattcagattgccttggtaatacagccattgtctgctgaatacatacatcattataacagtgctgtccatttaaattgcagtattctctgttttctgatatcctgaggtttgatgcttgtttgattttgctaaagaattatactatggcttgataatcaatttctttaaaagaaaccaygtcaaaatccaagagaatgatactcatcaatactggtctttagtttttgtttttaaaaattgtttttcaagattaatcacaaaaaatacaaaaaaaaggatatatatacttgtaacctacaaattcctgggagacattttctgcaattaacaataa

SEQ ID NO: 272379 - DNA, 559 bp, Homo sapiens
ttaatacaatattaagatagtaagggaaatttattttgtgggccaatacccttaattattcacaaacaaattttcacaatcattatctattattaacttccatgtgcaaactcaatgaagtcataaggagactatttttcaccatctgaaaagaatgctattcaaggaatcttatgatcatatcttttctttaaattaatagtcagaacaaaagcctgtacacaaaaagttgaaagaaaactattttgaaagggtgttgtggtgtcttgccatcacagtcctgtgaaaagtccatgatctgagcaggaacagaaggtcaccaaaaaatggtagtggtgatgataaagatattcctgactcaaatggatayaatggtttcccttaaatcatcttatttaaaccacacaaataaccatctgaagaggccagcaaacatatcattatcacttaatggacaataaaactgaagcccagagaagctaagctctttgtggagagtcacatgcaaccgaactacattagaatgacactgagttctccactgcttggaaaaccagta

SEQ ID NO: 272380 - DNA, 611 bp, Homo sapiens
attggtattatttcttaattaagtgttagatagggccaagcatggtggctcatatctgtaatcccagtgctctgataagtctaaggcaggaggatagcttgagcctaacagtttgagaccagtctaggcaatatagcaagaccccacctctacaaaaacaaataaattagccaagcatggtagcaggaggcacctgtagtcccagctactccagagactgaagtaggaggattccttgagcccaggagtttgaggctacagtgagctttgattgcactaccacactctaacctacgtgacagagggagaccctgtctctataaatgaatgaatgaatggatggatgaatgaatgaataatgaatgaatgttagatagaattcatcagtgaagcygttatgtcctgggctgttctatgatggaagactttgtatttctgattcaatctcctttctcattattggtctgttcatattttctatttcttcatgagtcagccttggtaggtagaaatttatgtctagaaatttattcatttcttctaggttgtccaatttgttggcttatacttgttcctattagtctcttatgattctttgtatttctatggta

SEQ ID NO: 272381 - DNA, 597 bp, Homo sapiens
tctgttggtgccactttctttcatacccttcagctgccttattttttcatatacttgaccatgggtttcatataccttgactactccttaaaatgggtagctttaaactctttctgctgcctaaaaatacttattcttctagacccagattaaatggcatctcttctatatgatatttcctaatatctctggaagatgtgatcacttctttcatactttcayagaactgtaactataatactataattacttattggtttaaaggtttgtttcttccacttagatgcaaggtcttgagagcagaggtgctatcttactaatttatctatcttcaaggtaaatacagcaactggaatatagaaggtacttaaaaaatgtgcatgggatgagtgaatgaatgactgcagtgcatttctaccccacctttctgaattccctctgagccaaaaggtggtctttacctttattaagacctgtagtcctctattacccactctagattaaaaagtagaataaatcttgagagaattaagttctctttattactggggcccagcattgtctgtggctgtttaatttgtcaatacttacgaaact

SEQ ID NO: 272382 - DNA, 597 bp, Homo sapiens
tctgttggtgccactttctttcatacccttcagctgccttattttttcatatacttgaccatgggtttcatataccttgactactccttaaaatgggtagctttaaactctttctgctgcctaaaaatacttattcttctagacccagattaaatggcatctcttctatatgatatttcctaatatctctggaagatgtgatcacttctttcatactttcatagaactgtaactataatactataattacttattggtttaaaggtttgtttcttccacttagatgcaaggtcttgagagcagaggtgctatcttactaatttatctatcttcaaggtaaatacagcaactggaatatagaaggtacttaaaaaatgtgcatgggatgagtgaatgaatgactgcagtgcatttctaccccacctttctgaattccctctgagccaaaaggtggtstttacctttattaagacctgtagtcctctattacccactctagattaaaaagtagaataaatcttgagagaattaagttctctttattactggggcccagcattgtctgtggctgtttaatttgtcaatacttacgaaact

SEQ ID NO: 272383 - DNA, 524 bp, Homo sapiens
agcttttgaggcctcattaatatttctatatttgacaaaattaagaaataagcatgttatatcaggaaagacaatacgttaccattttgaatagcacatgttattaatttctacttaatatcctttgctccagagaaacttttcagaaaagtccccataccagatgttaagtgattcctgtaaattcctcttgctttgggtcagatattatatatatcaagaatcttttgtttcctaaatctggttctctgtgcaaatatttaatgcctttttgagttcatgacttcagagatgccaactctcacctggccagtgttgtctgctgcctattctcagcacctccttcctcatggagagcaggtctaagccccagaactactcttgctttgctttcttaacctttactgcaaaattctacctgtttggctatgccttamcttgttcatttattcattcatttaaaaagacatttattgagtatatatttactagggattgtatgaagtactggatataaaatagta

SEQ ID NO: 272384 - DNA, 534 bp, Homo sapiens
agtgtagtctctgattccaagcattttgccaattactttctgaatttaaacctctctctgataagagatcaaacttgttagtgctgaaatgttttctctaaatctacctaatcaattaattagtcatctaccatgcactaagtagagtaggcacattaggagatccaaaaggaacaagaaaaaaaaaaaaagaaacaagaaacagtttctacatccaggagcttcaaattgtgcaggctaaaaaagtgtaaaatgaaccataaattatgacatgcaatctatgagtgcgatataaagaaggagagccagtgaaaattggatcaggcagaccttgggctgggattggaaagatggaagaaatgtttgaagatgctgattccctgtaactaccaatatccttcttatcagtacccttgtcttaaatagaaacgtgctttctytctattctttttatatgctgttgctaagccttgattttattcattcatctccagaggtctacattttaataatcctacaaactctagaaaactg

SEQ ID NO: 272385 - DNA, 476 bp, Homo sapiens
ggagccacaggggtggccttggacgatggggcaacagggamcagcctggccctgagcaggccaggagtccatgtcagtggatatggcatgatatcttcagccaggaatgctagcctggcactaggcaggcctgaagcctggggctatgtgtgccagactggctctgggctgatctagaacctagggagggccaggaacctatagtttctgtgcccagtctggcacttgggcaggcctagagcttgtatcttcagggcatggcatggcagctgggtccatgggtgttggcctgatggctagggatgcaagggctagcaaaggctagcaagttgcttgtgtaagcctgaagtctggagggagccactggggtcagcctggtgctgtggtcagtctggagcctggggccactggggccagcctaaccctggagaaggcctggagactgagtctgtggggtcagactaatgccagagttt

SEQ ID NO: 272386 - DNA, 579 bp, Homo sapiens
gcagcaatgcaaaggaagggtggaaggcagtccttaggataggatttagaatataggtaaatggatttttaaaaacagctaccctaatacagtgctagaacctgctgtaatgaaagaagtggcagcagagtaatgcattcgtaaccagaagccatctgtttaggtgtattttgcttttatcatcaatatgtctagatcttagtctttataaaatgcagacaccccacatttacccttaagctgcatgaatgtttaaagatcaggtaggttttataatatacctaaattaattgcatgtatgctattcatttttatacattttagctattcaaatattttctcttactaatgcaaggtcaatgattgatacacatgccaaagaaaayataagataggtgccccagacatacacacacacacatacacacacacaagcaattcctttaaattttatcccttcatgagagtaaaacattcaatgggttattttaccctagatgcctgcagctgtgccaggcactatctgtcccaaaagcaatctattgagtctccaggtcccagaccggttaaggcaattcc

SEQ ID NO: 272387 - DNA, 631 bp, Homo sapiens
ccaggaaacattttctaatctttgccatttctctccttccagtgaaactgagcaattttcttatttgctccttgttcttagaatgaagttttatgctattactgtatacttaaaagtttttttgggagggtttctgtttttgtttttgtatttttacacttatttgtcttccctatgagagagtgagcaaatggggggctacttgctatctccctctcccttscctaaaataataggtgacacaaaagaaatgctaaataaatgtttgttgagttggtgactaaaatgtgatcattacatttatctaagaggcttaagggaattaagtgagatactgtgtgttgaacattgagttggaagtgacagcatgtatgcttaggaataggagatgcattaaagcagtgacagacagaatgataaaatatggcaattgtagtaagcaaccagctatgagatatattaaggcatataataagcttgcattctgctagtcagaaaatgcacaaactgtcgtattaagggctaaggtaaagacgcaatctcaggctgggtcccagaatgctagtgtcatagtcaaaacagtcattttagtagggagcattctttgtagaataattgccacttaaagata

SEQ ID NO: 272388 - DNA, 717 bp, Homo sapiens
tcagccctaaccttaaaccaatctgcaatattaatttctctttgccatgtaaagtaacatattcacagaatccagggattaggacataacatctatgaggagccatgattctgcctatcaccttgagtttaatctatgatcttactgcaggacatgtacaacttctcagtatcatatttgaggtaatacagtagccattatttaatataactttatttaatatagtccacaagcattccctttgagataggttattataaccctcattgaarggataagaaacacactgaaaacagccctagccatgcctacttcttcagacccctagaagagtaaatcatgagaagttatactacttttaattatttgcactgaattaataattttagtcaaacaaatgtatgtgtatatatataatcacatttggagataacactaaaaatccaaaaactcaagaggtgacaatactagtcctcctctactagatacagcagaaagtatcagtatttttccataaatcattaagatccctgtcccctaaatctgacttccagttgcactcaggaaattatcaaaagattgataaaagtacctgtacaacatcattcctcaagagcacaaagcagaggtaaagagcatatgctggatccattttatttgttttaactttaatggataggggaagagggtattgaaaatgaactgacccagtctaag

SEQ ID NO: 272389 - DNA, 717 bp, Homo sapiens
tcagccctaaccttaaaccaatctgcaatattaatttctctttgccatgtaaagtaacatattcacagaatccagggattaggacataacatctatgaggagccatgattctgcctatcaccttgagtttaatctatgatcttactgcaggacatgtacaacttctcagtatcatatttgaggtaatacagtagccattatttaatataactttatttaatatagtccacaagcattccctttgagataggttattataaccctcattgaaaggataagaaacacactgaaaacagccctagccatgcctacttcttcagacccctagaagagtaaatcatgagaagttatactacttttaattatttgcactgaattaataattttagtcaaacaaatgtatgtgtatatatataatcacatttggagayaacactaaaaatccaaaaactcaagaggtgacaatactagtcctcctctactagatacagcagaaagtatcagtatttttccataaatcattaagatccctgtcccctaaatctgacttccagttgcactcaggaaattatcaaaagattgataaaagtacctgtacaacatcattcctcaagagcacaaagcagaggtaaagagcatatgctggatccattttatttgttttaactttaatggataggggaagagggtattgaaaatgaactgacccagtctaag

SEQ ID NO: 272390 - DNA, 506 bp, Homo sapiens
caggtaagaaccatgattagacagtgacaggaagatgtccacccatggatctctctagtgtaccatatggtggctttcaaagtagctatgggtggtagaaaaggtaaaaagggatatttccaaaaagagagctgatgctgggttaacaaaacaaaaaatgtccacttcaatatacactcatgtccaaatatatcacatatataggaatatatgttttgtatacatatattttattttacacacacacacagacccacacacacacgtggccttgaaatactcaaggccccgtatattccaaatgggacctttggctatttcaatagatttgtatgctgatgtctagattgaatactatacattgtttattatacatatgygggactatgccatactcatatgaaaaatgaaaaatctatacattgatgctacaaagtaaaaaaagaaatctcaaatccactaattataacagttttcttcacattatggatttgtccattgaatcg

SEQ ID NO: 272391 - DNA, 548 bp, Homo sapiens
ttgttaatttcctcttctctcctttgcttactccatttcagccacatcagtttattttatctcaaaaacactagaaacacatgcgcctccaggccttaagacttgctatgctctgtctggactgctcccgccrtctccaaatggccctgtctctcttctctttaactatttgctcaaaggtcgcctgctcagggagtcctctgagtccactccatttaaaatttgagacctctcgctccttatccttcttctctgcttcatttcctatatcttgtttattaccatctggcatactctgtattttattattttatttttttatcatcaatatccccctaccctatatgaagaatgtaaactccataagaatggcaatttttgactgttctgataactgttgtaccataattgcctaggtttgtgcctggcatatactggatgatcaatagatgtttcagttgaataaagtaattattgaggaaggaggggtgaaaccgtaccttactggtaatacacagccactagcattatgaaccatatttctccta

SEQ ID NO: 272392 - DNA, 548 bp, Homo sapiens
ttgttaatttcctcttctctcctttgcttactccatttcagccacatcagtttattttatctcaaaaacactagaaacacatgcgcctccaggccttaagacttgctatgctctgtctggactgctcccgccatctccaaatggccctgtctctcttctctttaactatttgctcaaaggtcgcctgctcagggagtcctctgagtccactccatttaaaatttgagacctctcgctccttatccttcttctctgcttcatttcctatatcttgtttattaccatctggcatactctgtattttattmttttatttttttatcatcaatatccccctaccctatatgaagaatgtaaactccataagaatggcaatttttgactgttctgataactgttgtaccataattgcctaggtttgtgcctggcatatactggatgatcaatagatgtttcagttgaataaagtaattattgaggaaggaggggtgaaaccgtaccttactggtaatacacagccactagcattatgaaccatatttctccta

SEQ ID NO: 272393 - DNA, 548 bp, Homo sapiens
ttgttaatttcctcttctctcctttgcttactccatttcagccacatcagtttattttatctcaaaaacactagaaacacatgcgcctccaggccttaagacttgctatgctctgtctggactgctcccgccatctccaaatggccctgtctctcttctctttaactatttgctcaaaggtcgcctgctcagggagtcctctgagtccactccatttaaaatttgagacctctcgctccttatccttcttctctgcttcatttcctatatcttgtttattaccatctggcatactctgtattttattattttatttttttatcatcaatatccccctaccctatatgaagaatgtaaactccataagaatggcaatttttgactgttctgataactgttgtaccataattgcctaggwttgtgcctggcatatactggatgatcaatagatgtttcagttgaataaagtaattattgaggaaggaggggtgaaaccgtaccttactggtaatacacagccactagcattatgaaccatatttctccta

SEQ ID NO: 272394 - DNA, 607 bp, Homo sapiens
ttgcaaagctaaaatatctttctccatctcttaaatctacgcttgcctagcgacttgtttgcccactaaaatgtacaggaatgtgacttatgagcctacaaactgcgaggacttgcatgttgtcctcttgccctcttagaactcttccaccaccacaagagaaaaccacactggccttttcgagacctatggccccctgacaggtagcaccaactgtcagacagagaagtagccacgttagaccatccagactcagtggaactgctagatgattgtagctgcatgaatgtcccagcagagataagtagaagtgccaccaagctgagcctcagatcaaaacgcatgcccatagaattaaaagcaaataaaataatacttgttttaagtcattaagttttgaagtggtttgttatgcagtgataagttacccataactgattcaaatcactaccttcatagtattcttttaaggattaaaataaaagatgtaagtgaaatgtatgcacaatgtctggyattggcatagaataactctccaaatgtttactgggtatagaaattacattcccagcatcaacatgggataaacaatgactggccataatga

SEQ ID NO: 272395 - DNA, 438 bp, Homo sapiens
attctgccttcctcaagatcacactttgattcaactgccggcataagtgttacagcagagaaatagaagtctagagtaaaaagagtctaattttatttcagtaaccagatatataagtatgatatggtttatgagtgtgtttctcaaaatgcagtgccatgaattatctacatgagaactggcatatatactttaaaaattcaaatttctaaacatcatcctacaactastaaattggtgtctgtgggataggggaaggatttggggatatacatattaataaagcctcctaggtgattcatatgcattgtaaactttagcaactaagctaaggaaaaaataggatgattaaactaaaataaaccatcatttaagtcttttactaataattgaaaaagtcttttggcggtagaaaatggagggagatgctcagggtga

SEQ ID NO: 272396 - DNA, 608 bp, Homo sapiens
tgaagtctggtaccaataaataatttgatttcataatacagttgcatctttatagaggactagtataatatatatatataataaaatttttaagttcagaagctcagctttgctattaatataactggatttcctcttttgaacagggaaatatctctgttctcacttttccttgtatcctttgttcacaaaaagtctgtgccttatgtcacattccctcaggatttcatttttattaggaaataatcagtcttataaattggttaatacaaatgtggctagaaactatcattaccctttcctagttaatacttttctattttactcaaatgtacatatctacaaaacattctcaaagaaattgctactaaataatgytttggaattttcttatgtagtaatgggtcatgaaggagcatattttgcaaaaaagaatgtagtaagtccttgtgaaatcacaaatgtcagagccggtggcctttgttatatccagatacacacacacacacacgcacacaaatctacataaccgaatcttaaattgtttctatacacatacttgtctaggatcagaaaagccttagtttaaacccctggccacacactta

SEQ ID NO: 272397 - DNA, 608 bp, Homo sapiens
tgaagtctggtaccaataaataatttgatttcataatacagttgcatctttatagaggactagtataatatatatatataataaaatttttaagttcagaagctcagctttgctattaatataactggatttcctcttttgaacagggaaatatctctgttctcacttttccttgtatcctttgttcacaaaaagtctgtgccttatgtcacattccctcaggatttcatttttattaggaaataatcagtcttataaattggttaatacaaatgtggctagaaactatcattaccctttcctagttaatacttttctattttactcaaatgtacatatctacaaaacattctcaaagaaattgctactaaataatgctttggaattttcttatgtagtaatgggtcatgaaggagcatattttgcaaaaaagaatgtagtaagtccttgtgaaatcacaaatgtcagagccrgtggcctttgttatatccagatacacacacacacacacgcacacaaatctacataaccgaatcttaaattgtttctatacacatacttgtctaggatcagaaaagccttagtttaaacccctggccacacactta

SEQ ID NO: 272398 - DNA, 608 bp, Homo sapiens
tgaagtctggtaccaataaataatttgatttcataatacagttgcatctttatagaggactagtataatatatatatataataaaatttttaagttcagaagctcagctttgctattaatataactggatttcctcttttgaacagggaaatatctctgttctcacttttccttgtatcctttgttcacaaaaagtctgtgccttatgtcacattccctcaggatttcatttttattaggaaataatcagtcttataaattggttaatacaaatgtggctagaaactatcattaccctttcctagttaatacttttctattttactcaaatgtacatatctacaaaacattctcaaagaaattgctactaaataatgctttggaattttcttatgtagtaatgggtcatgaaggagcatattttgcaaaaaagaatgtagtaagtccttgtgaaatcacaaatgtcagagccggtggcctttgttatrtccagatacacacacacacacacgcacacaaatctacataaccgaatcttaaattgtttctatacacatacttgtctaggatcagaaaagccttagtttaaacccctggccacacactta

SEQ ID NO: 272399 - DNA, 626 bp, Homo sapiens
tgaacattgcaattatctgagtaggtaacacactattttgtcgtgttcaaactagtgcatgttgtgttttgtatcacttgtgacagaaagaattctaatagatgaaagcaccattgtctccgcatgcattgataaattcggaagggtacagtkactctgcaaagagtcagatttttttttttaaataaaacaaggggacattcaaacttttagatgataagtttcaatgagttatttaaggaagcaaaaatatgttcttgctcaatggatatccactgtaagtaaaaggagcagttaaccacaggaaataattaaactgtgtaataaccttattgtaaatcatggctaaattaaaatcatatctcagttatttattttcacagtaactcctggggttaaaacagtaaatgggatcaagaatgaataaataagtgaatgaatgaacaaacaagcatttattgatattaagtatttaaagcctataaaaccctttaaacactttttgttaattaagtgtcactactttgcgacacgggttagaaaaggatcttgagctgtgcatagcttatggtaggctgaataatgattttcaaacatatgcccgtcttaataaccagaagctgcga

SEQ ID NO: 272400 - DNA, 626 bp, Homo sapiens
tgaacattgcaattatctgagtaggtaacacactattttgtcgtgttcaaactagtgcatgttgtgttttgtatcacttgtgacagaaagaattctaatagatgaaagcaccattgtctccgcatgcattgataaattcggaagggtacagttactctgcaaagagtcagatttttttttttaaataaaacaaggggacattcaaacttttagatgataagtttcaatgagttatttaaggaagcaaaaatatgttcttgctcaatggatatccactgtaagtaaaaggagcagttaaccacaggaaataattaaactgygtaataaccttattgtaaatcatggctaaattaaaatcatatctcagttatttattttcacagtaactcctggggttaaaacagtaaatgggatcaagaatgaataaataagtgaatgaatgaacaaacaagcatttattgatattaagtatttaaagcctataaaaccctttaaacactttttgttaattaagtgtcactactttgcgacacgggttagaaaaggatcttgagctgtgcatagcttatggtaggctgaataatgattttcaaacatatgcccgtcttaataaccagaagctgcga

SEQ ID NO: 272401 - DNA, 626 bp, Homo sapiens
tgaacattgcaattatctgagtaggtaacacactattttgtcgtgttcaaactagtgcatgttgtgttttgtatcacttgtgacagaaagaattctaatagatgaaagcaccattgtctccgcatgcattgataaattcggaagggtacagttactctgcaaagagtcagatttttttttttaaataaaacaaggggacattcaaacttttagatgataagtttcaatgagttatttaaggaagcaaaaatatgttcttgctcaatggatatccactgtaagtaaaaggagcagttaaccacaggaaataattaaactgtrtaataaccttattgtaaatcatggctaaattaaaatcatatctcagttatttattttcacagtaactcctggggttaaaacagtaaatgggatcaagaatgaataaataagtgaatgaatgaacaaacaagcatttattgatattaagtatttaaagcctataaaaccctttaaacactttttgttaattaagtgtcactactttgcgacacgggttagaaaaggatcttgagctgtgcatagcttatggtaggctgaataatgattttcaaacatatgcccgtcttaataaccagaagctgcga

SEQ ID NO: 272402 - DNA, 534 bp, Homo sapiens
cctcttttgagatacttgaaaacctgtcaatcaaaatacaaaataccaattatttgaatcagagggcacaggaatttaactggatcatacagagcttgaaaggccataaattactattgtactgtttggatgctttccaggataggggaaataaaatgaatgacagatactttttaaatcattaaaatagaaaagatcacctaaaatttaaamagcagttaagaaataaaaatgaaaaagagggcttcctaatacaaagttgactcgtataaatattttctctttttaactttattgtaaattgacaatttttaattacatattcacgggatacaaaatgaagttatcattcatgaatacaatgtggaataattaaatctaactaatttacatacccatcacttcaagtatttattatttttgtagtgagaacattttaaatttattctcctagcaattttgaaatgtacaatacattaccatcactatattcaccacattatgtgacatacctcaaaaagaaacccaccttag

SEQ ID NO: 272403 - DNA, 579 bp, Homo sapiens
tattctttttatgtgttgtacacacctttgttaaaaatcaattgactgtatatgccttggttcatttctgagctctctattctgttccactggctgatgtgtgtgtgtgtgtttaattaattaatttaattttccagtaccatgttattttaattactatagcattataatastttaaattcaggtagtgtgatgcctacagctttgttctttttgtttatgattgccttggctattcaaggtttttgagaattccaaatgaattttacaacttttgtctctttctatgaacaataacaatggaatttcaacaaaaactacattcaatctgtagttcattttaggtagtatggacattttaaaaatactaatacttccaatatataaacacaaaccatctttccatttatttgtgtcttcttcagtttctttcatcaatgttttatagttttcaatatacaagtcctttatctccctggtcaaatttattcctaagaacagatgttcttcgacatacaatggggttatgtacctataaacccattgttaattgaaaatatcataagtcaaaaaggcatt

SEQ ID NO: 272404 - DNA, 479 bp, Homo sapiens
ggggggtcaaataaaaaaagttactgcccagaccaatgttgtgtttctcctatgttttcttctagtagtttttacagattctggtattacaattaagtctttaatccatcttgagtagatttttgtgtatgttgtgagatgagtccactttcatttttctgcatgcatatatctagctttcccaacaccatttattgaagaggctatattattctttttatgtgttgtacacacctttgttaaaaatcaattgactgtatatgccttggttcatttctgagctctctattctgttccactggctgatgtgtgtgtgtgtgtttaattaattaatttaattttccagtaccatgttattttaattactatagcattataatagtttaaattcaggtagtgtgatgcctacagctttgttctttttgtttwtgattgccttggctattcaaggtttttgagaattccaaatgaattttaca

SEQ ID NO: 272405 - DNA, 579 bp, Homo sapiens
tattctttttatgtgttgtacacacctttgttaaaaatcaattgactgtatatgccttggttcatttctgagctctctattctgttccactggctgatgtgtgtgtgtgtgtttaattaattaatttaattttccagtaccatgttattttaattactatagcattataatagtttaaattcaggtagtgtgatgcctacagctttgttctttttgtttatgattgccttggctattcaaggtttttgagaattccaaatgaattttacaacttttgtctctttctatgaacaataacaatggaatttcaacaaaaactacattcaatctgtagttcattttaggtagtatggacattttaaaaatactaatacttccartatataaacacaaaccatctttccatttatttgtgtcttcttcagtttctttcatcaatgttttatagttttcaatatacaagtcctttatctccctggtcaaatttattcctaagaacagatgttcttcgacatacaatggggttatgtacctataaacccattgttaattgaaaatatcataagtcaaaaaggcatt

SEQ ID NO: 272406 - DNA, 579 bp, Homo sapiens
tattctttttatgtgttgtacacacctttgttaaaaatcaattgactgtatatgccttggttcatttctgagctctctattctgttccactggctgatgtgtgtgtgtgtgtttaattaattaatttaattttccagtaccatgttattttaattactatagcattataatagtttaaattcaggtagtgtgatgcctacagctttgttctttttgtttatgattgccttggctattcaaggtttttgagaattccaaatgaattttacaacttttgtctctttctatgaacaataacaatggaatttcaacaaaaactacattcaatctgtagttcattttaggtagtatggacattttaaaaatactaatacttccaatatataaacasaaaccatctttccatttatttgtgtcttcttcagtttctttcatcaatgttttatagttttcaatatacaagtcctttatctccctggtcaaatttattcctaagaacagatgttcttcgacatacaatggggttatgtacctataaacccattgttaattgaaaatatcataagtcaaaaaggcatt

SEQ ID NO: 272407 - DNA, 603 bp, Homo sapiens
ccatgttgggtgcatatatatttacaattgttayactttcctgattacttcatcttttcatacaatataatagctttcttggtctcattttacagttttcgacttaaagtttattttgtctgtgataagaatagctacccctgctttcttttgctttccatttgcatagaaaatattttcaacttctttgctttcagtctatgtgtgtccctgaaagtaaggtgagactgtattaggcagcatatagtggagtctttaaaaaaaaaatccatttggtcactctatgtcttttattggtgaatttaatccatctacactcacagcaattactgatatgtaaggctgtaatactgacattttgttcactgttttctggttgttgtattgatacattaccccaggtgatctagccatacagttacccacaatattccccatggggtaagaccaacacgggcttcttgggaagcatctcaaaatgctaaagaaactagataagtgcttctggctctctttttctcctgtagaaaccatgagcccagggaaatcctcttcatctggcatcgtgcctacctgggggagtgggactggtggcacagttga

SEQ ID NO: 272408 - DNA, 603 bp, Homo sapiens
ccatgttgggtgcatatatatttacaattgttatactttcctgattacttcatcttttcatacaatataatagctttcttggtctcattttacagttttcgacttaaagtttattttgtctgtgataagaatagctacccctgctttcttttgctttccatttgcatagaaaatattttcaacttcttygctttcagtctatgtgtgtccctgaaagtaaggtgagactgtattaggcagcatatagtggagtctttaaaaaaaaaatccatttggtcactctatgtcttttattggtgaatttaatccatctacactcacagcaattactgatatgtaaggctgtaatactgacattttgttcactgttttctggttgttgtattgatacattaccccaggtgatctagccatacagttacccacaatattccccatggggtaagaccaacacgggcttcttgggaagcatctcaaaatgctaaagaaactagataagtgcttctggctctctttttctcctgtagaaaccatgagcccagggaaatcctcttcatctggcatcgtgcctacctgggggagtgggactggtggcacagttga

SEQ ID NO: 272409 - DNA, 603 bp, Homo sapiens
ccatgttgggtgcatatatatttacaattgttatactttcctgattacttcatcttttcatacaatataatagctttcttggtctcattttacagttttcgacttaaagtttattttgtctgtgataagaatagctacccctgctttcttttgctttccatttgcatagaaaatattttcaacttctttgctttcagtctatgtgtgtccctgaaagtaaggtgagactgtattaggcagcatatagtggagtctttaaaaaaaaaatccatttggtcactctatgtcttttattggtgaatttaatccatctacactcacagcaattactgatatgtaaggctgtaatactgacattttgttcactgttttctggttgttgtattgatacrttaccccaggtgatctagccatacagttacccacaatattccccatggggtaagaccaacacgggcttcttgggaagcatctcaaaatgctaaagaaactagataagtgcttctggctctctttttctcctgtagaaaccatgagcccagggaaatcctcttcatctggcatcgtgcctacctgggggagtgggactggtggcacagttga

SEQ ID NO: 272410 - DNA, 603 bp, Homo sapiens
ccatgttgggtgcatatatatttacaattgttatactttcctgattacttcatcttttcatacaatataatagctttcttggtctcattttacagttttcgacttaaagtttattttgtctgtgataagaatagctacccctgctttcttttgctttccatttgcatagaaaatattttcaacttctttgctttcagtctatgtgtgtccctgaaagtaaggtgagactgtattaggcagcatatagtggagtctttaaaaaaaaaatccatttggtcactctatgtcttttattggtgaatttaatccatctacactcacagcaattactgatatgtaaggctgtaatactgacattttgttcactgttttctggttgttgtattgatacattaccccaggtgrtctagccatacagttacccacaatattccccatggggtaagaccaacacgggcttcttgggaagcatctcaaaatgctaaagaaactagataagtgcttctggctctctttttctcctgtagaaaccatgagcccagggaaatcctcttcatctggcatcgtgcctacctgggggagtgggactggtggcacagttga

SEQ ID NO: 272411 - DNA, 522 bp, Homo sapiens
acaacgggcaaagaacagtctcttcactaaatggtttagggaaaacccagtgtacacaagcagaaaaaatgaaactggagctatatctcacatgatatataaaaatcaactcaaaatggagtaaagattttaatttaagatcttaaatataaaactgttagaagaaaataacagggaagctccacgccattggtctaggaaataatattttggatacaacaaatattcataccctttgagtatgaagcacagacaacaaaagcaaaaaaaaaaaaaaaactgaattacattaaactaaaaaacttctaaacaccaaagaaacaatcaaaagaataaagagtaaacctatagagtgggataaaacatttgcaaactatactctgataaggggttcacattcaaaatrtatccaaacttcaaacaacttaatagcaagaaaaaaaataatgtgactaaaaataggcaaaatacctacacaaataattgtcaaaagaagatatagaaatggacaaattttcttaa

SEQ ID NO: 272412 - DNA, 581 bp, Homo sapiens
tataaaataatttctcaatcctaaggaagttttcccacttgagaaacaatatatacacaaaaggcaaaacaatacaaggtactctctgaatcaaaaagctttcattttctaattcatgcaaggtgtgtggtcctcattataaaaagttctgtcrtatttgttttcttttacctaacccactttggaaactaatacagagcagaacaaaactcacctaaagcaaattttataagtgctgactcacatgcgttaaagctaagagagcctgattaataattattttattgcaatcaacatcatcaaatatcttttttcatgacttccatttctggtggaatggctgattttatggagctcttgattttctatgatctgtatatcatggtaatcagacctgtaaagttaatctgcatgattaaatgtccacatgagttaaagacaaaagccatagaaatagacgaaatggcaatgtcaacattaagtgaaatggtcaaggaagactttatgaaagagatgaaaattgatttgtgcctatgagaatgagtgtggctaagcatagtaacagtagcaaaagctattca

SEQ ID NO: 272413 - DNA, 581 bp, Homo sapiens
tataaaataatttctcaatcctaaggaagttttcccacttgagaaacaatatatacacaaaaggcaaaacaatacaaggtactctctgaatcaaaaagctttcattttctaattcatgcaaggtgtgtggtcctcattataaaaagttctgtcatatttgttttcttttacctaacccactttggaaactaatacagagcagaacaaaastcacctaaagcaaattttataagtgctgactcacatgcgttaaagctaagagagcctgattaataattattttattgcaatcaacatcatcaaatatcttttttcatgacttccatttctggtggaatggctgattttatggagctcttgattttctatgatctgtatatcatggtaatcagacctgtaaagttaatctgcatgattaaatgtccacatgagttaaagacaaaagccatagaaatagacgaaatggcaatgtcaacattaagtgaaatggtcaaggaagactttatgaaagagatgaaaattgatttgtgcctatgagaatgagtgtggctaagcatagtaacagtagcaaaagctattca

SEQ ID NO: 272414 - DNA, 623 bp, Homo sapiens
tatataacagcacaacagagtttatctagtatttatacagtaatgcttatatcagcataagtcaaatcaacatagttgtcactaaagttactattctatcactgcaatgatgaaaagaatataaagtaattctataaygtagataatcagttttccctgatttctgcttagcacattagtaataggttttttaaaaatatacaatatagtgattactgagtgttaagtgtgtgattgcctattgcctacatttgcaaagaacaaatggaatacttaaactttcatgttccactgactcttgatttcagaacaaaattagggataactgtaaacgtatgtcaatgtcttgggcttcaatatcaagattcacaaacatattgcatctgctgaattcagtctcatacagttaatttacattcatttcctgtcaacttttttctcctggtgtgagcaactgcatcacctgatgagatcaccatcagtggcaaggaattggaagttgctaaagagaggtacaactccaagtgaatgtaaaactccaattcaggaaagtaagacatataatattaaagagtgaaaaacatgtatagttgttttattttgtttcaaaattctgagagctt

SEQ ID NO: 272415 - DNA, 623 bp, Homo sapiens
tatataacagcacaacagagtttatctagtatttatacagtaatgcttatatcagcataagtcaaatcaacatagttgtcactaaagttactattctatcactgcaatgatgaaaagaatataaagtaattctataatgtagataatcagttttccctgatttctgcttagcacattagtaataggttttttaaaaatatacaatatagtgattactgagtgttaagtgtgtgattgcctattgcctacatttgcaaagaacaaatggaatacttaaactktcatgttccactgactcttgatttcagaacaaaattagggataactgtaaacgtatgtcaatgtcttgggcttcaatatcaagattcacaaacatattgcatctgctgaattcagtctcatacagttaatttacattcatttcctgtcaacttttttctcctggtgtgagcaactgcatcacctgatgagatcaccatcagtggcaaggaattggaagttgctaaagagaggtacaactccaagtgaatgtaaaactccaattcaggaaagtaagacatataatattaaagagtgaaaaacatgtatagttgttttattttgtttcaaaattctgagagctt

SEQ ID NO: 272416 - DNA, 623 bp, Homo sapiens
tatataacagcacaacagagtttatctagtatttatacagtaatgcttatatcagcataagtcaaatcaacatagttgtcactaaagttactattctatcactgcaatgatgaaaagaatataaagtaattctataatgtagataatcagttttccctgatttctgcttagcacattagtaataggttttttaaaaatatacaatatagtgattactgagtgttaagtgtgtgattgcctattgcctacatttgcaaagaacaaatggaatacttaaactttcatgttccactgactcttgatttcagaacaaaattagggataactgtaaacgtatgtcaatgtcttgggcttcaatatcaagattcacaaacatattgcatctgctgaattcagtctcatacagttaatttacattcatttcctgtcaacttttttctcctggtgtgagcaactgcatcacctgatgagatcaccatcagtggcaaggaattggaagttgctaaagagaggtacaactccaagtgaatgtaaaactccaattcaggaaagtaagacatatamtattaaagagtgaaaaacatgtatagttgttttattttgtttcaaaattctgagagctt

SEQ ID NO: 272417 - DNA, 533 bp, Homo sapiens
gggaatatatgatctgggtcgattatgtcaataaaagaggcagtaatgttcaggggtagaatataaaaaggtaaagcatataagaggtaacaaaatgcatacgtatttcacattatattagatcacttatacaatttttttaaattctccatattcttcatatatttgtataaatctaacattcaatcttattttagaaaaatttttctataaataaaactcatattggtaagcatattgtcttttctttatttaaagaagcacgtttgacattcmttgatatatgtttagacatttccactacaggtacatataaaaaattttctataatctgaaccatattcatatctttgatcaacatccatttttttcctactatctagaaagaaggagattatggacaaaatgcaagtctgaaaataacagaattgtaaatgaaattctccttgatcattatttatcattatttatacatcaaacagcaataatatgaaagtgcctcagccttattcaatttaatatagagttaagta

SEQ ID NO: 272418 - DNA, 533 bp, Homo sapiens
gggaatatatgatctgggtcgattatgtcaataaaagaggcagtaatgttcaggggtagaatataaaaaggtaaagcatataagaggtaacaaaatgcatacgtatttcacattatattagatcacttatacaatttttttaaattctccatattcttcatatatttgtataaatctaacattcaatcttattttagaaaaatttttctataaataaaactcatattggtaagcatattgtcttttctttatttaaagaagcacgtttgacattccttgatatatrtttagacatttccactacaggtacatataaaaaattttctataatctgaaccatattcatatctttgatcaacatccatttttttcctactatctagaaagaaggagattatggacaaaatgcaagtctgaaaataacagaattgtaaatgaaattctccttgatcattatttatcattatttatacatcaaacagcaataatatgaaagtgcctcagccttattcaatttaatatagagttaagta

SEQ ID NO: 272419 - DNA, 533 bp, Homo sapiens
gggaatatatgatctgggtcgattatgtcaataaaagaggcagtaatgttcaggggtagaatataaaaaggtaaagcatataagaggtaacaaaatgcatacgtatttcacattatattagatcacttatacaatttttttaaattctccatattcttcatatatttgtataaatctaacattcaatcttattttagaaaaatttttctataaataaaactcatattggtaagcatattgtcttttctttatttaaagaagcacgtttgacattccttgatatatgtttagacatttccactacaggtwcatataaaaaattttctataatctgaaccatattcatatctttgatcaacatccatttttttcctactatctagaaagaaggagattatggacaaaatgcaagtctgaaaataacagaattgtaaatgaaattctccttgatcattatttatcattatttatacatcaaacagcaataatatgaaagtgcctcagccttattcaatttaatatagagttaagta

SEQ ID NO: 272420 - DNA, 533 bp, Homo sapiens
gggaatatatgatctgggtcgattatgtcaataaaagaggcagtaatgttcaggggtagaatataaaaaggtaaagcatataagaggtaacaaaatgcatacgtatttcacattatattagatcacttatacaatttttttaaattctccatattcttcatatatttgtataaatctaacattcaatcttattttagaaaaatttttctataaataaaactcatattggtaagcatattgtcttttctttatttaaagaagcacgtttgacattccttgatatatgtttagacatttccactacaggtacatataaaaaattttctataatctgaaccatattcatatctttgatcaayatccatttttttcctactatctagaaagaaggagattatggacaaaatgcaagtctgaaaataacagaattgtaaatgaaattctccttgatcattatttatcattatttatacatcaaacagcaataatatgaaagtgcctcagccttattcaatttaatatagagttaagta

SEQ ID NO: 272421 - DNA, 549 bp, Homo sapiens
tgttacatatttgagagtcattttgaaaacttactgaaaaggatctgacatcataccatggagtatatggctagggacattgtggcagtttatttgccacggcaagtttaatctaaatcagcaaatatctaatttctcatgaaaagtgaaattccaggaggttttttcctccacagtgttattaaataatctgagttctgccagaagaaggaatggctcatgtggaaaatatttaattgcctgcattcrtatgacaggagtgttctgaatttaaataacatataatgaaaagcagtagagtaatattgccaagaaataccttctcacaggtgattgactaatccctagaggattctgtgtgccgtacattagcctggtaaaagggaactgggctaatggtcagtcttaaatccggactgtgaagcctaatcctgaatttgccattggttgaccacagaaatttaaattcctccctccattttaattttctctcccttcctccttgtatccttcccttcttccctatctcgataatttctaaagaatcta

SEQ ID NO: 272422 - DNA, 590 bp, Homo sapiens
ggaataaggtgtggagcaggcaacccacgtgaagtgggctaaaagtcatgtgagagagaaacagaggtagaaaaacgcaaactaaaacaagtaaatatctcaaaatatcatctagcttcacctgctttgtatgctatttcccctctgcttttgttgaatttgaaattgcttytgttgaattccctagtttacagtctccactctcagttatttcatgaacattttcttttgtgcagcccactgcactgacctattcacatgctgtttccgttttgcagtcttctcttggtaccaccacaagctgcctcctgaaacccctgggcaggagtgcagaagctcacttgagctcacatacggggccgattgcgctgcctagaactcactaccctgaaaggctattcttagattcctcatctagtgagggaattgcactatttcatgtcagaagtgtaccagttaaaaacaaacaaacaaaaaaaagaattaggaatctaggacccttttaaattattctcctgctaccattagaaatccttttatcctatccactgtgtttttcatgtcctggccaaagcaaaactatagagaat

SEQ ID NO: 272423 - DNA, 590 bp, Homo sapiens
ggaataaggtgtggagcaggcaacccacgtgaagtgggctaaaagtcatgtgagagagaaacagaggtagaaaaacgcaaactaaaacaagtaaatatctcaaaatatcatctagcttcacctgctttgtatgctatttcccctctgcttttgttgaatttgaaattgcttttgttgaattccctagtttacagtctccactctcagttatttcatgaacattttcttttgtgcagcccactgcactgacctwttcacatgctgtttccgttttgcagtcttctcttggtaccaccacaagctgcctcctgaaacccctgggcaggagtgcagaagctcacttgagctcacatacggggccgattgcgctgcctagaactcactaccctgaaaggctattcttagattcctcatctagtgagggaattgcactatttcatgtcagaagtgtaccagttaaaaacaaacaaacaaaaaaaagaattaggaatctaggacccttttaaattattctcctgctaccattagaaatccttttatcctatccactgtgtttttcatgtcctggccaaagcaaaactatagagaat

SEQ ID NO: 272424 - DNA, 590 bp, Homo sapiens
ggaataaggtgtggagcaggcaacccacgtgaagtgggctaaaagtcatgtgagagagaaacagaggtagaaaaacgcaaactaaaacaagtaaatatctcaaaatatcatctagcttcacctgctttgtatgctatttcccctctgcttttgttgaatttgaaattgcttttgttgaattccctagtttacagtctccactctcagttatttcatgaacattttcttttgtgcagcccactgcactgacctattcacatgctgtttccgttttgcagtcttctcttggtaccaccacaagctgcctcctgaaacccctgggcaggagtgcagaagctcacttgagcwcacatacggggccgattgcgctgcctagaactcactaccctgaaaggctattcttagattcctcatctagtgagggaattgcactatttcatgtcagaagtgtaccagttaaaaacaaacaaacaaaaaaaagaattaggaatctaggacccttttaaattattctcctgctaccattagaaatccttttatcctatccactgtgtttttcatgtcctggccaaagcaaaactatagagaat

SEQ ID NO: 272425 - DNA, 590 bp, Homo sapiens
ggaataaggtgtggagcaggcaacccacgtgaagtgggctaaaagtcatgtgagagagaaacagaggtagaaaaacgcaaactaaaacaagtaaatatctcaaaatatcatctagcttcacctgctttgtatgctatttcccctctgcttttgttgaatttgaaattgcttttgttgaattccctagtttacagtctccactctcagttatttcatgaacattttcttttgtgcagcccactgcactgacctattcacatgctgtttccgttttgcagtcttctcttggtaccaccacaagctgcctcctgaaacccctgggcaggagtgcagaagctcacttgagctcacatayggggccgattgcgctgcctagaactcactaccctgaaaggctattcttagattcctcatctagtgagggaattgcactatttcatgtcagaagtgtaccagttaaaaacaaacaaacaaaaaaaagaattaggaatctaggacccttttaaattattctcctgctaccattagaaatccttttatcctatccactgtgtttttcatgtcctggccaaagcaaaactatagagaat

SEQ ID NO: 272426 - DNA, 601 bp, Homo sapiens
gatactaatttaaagttcacatacttagatagctataaaagaatttattccatgagaatattacctttgcatgtgtatataraagtctctgtagctatgtgcaaacttggaaacataataattagttatataaaagggttttgatataaaaaggcttcagtaaagttttctaaggcaacagaatacttttttaagtttaacagaaattaattcaaatactaattctgtggcttgtgaaacaagaaatcttggataaatgactaaatctttgtgaatgtcaacttattcaaaaatagagaatacctactctgttttgcaaagactaaataagacaatgactactttctggcacattgtagtgtttaacaaacagttgttaatttatttattgaaatgaccgcagggcatgttggttaagagcacagacaatttacctgggctgcttgtctctgaatcacaactctgtcacttatgagctatgtggccttaggcagatgacttaacttcaatgaatgtcagtttcttcatctgtaaaatgtggatgataaagagcactggcctcatagagttgtgaaaaagaaatgaattaacatatataaat

SEQ ID NO: 272427 - DNA, 584 bp, Homo sapiens
cacatacttagatagctataaaagaatttattccatgagaatattacctttgcatgtgtatataaaagtctctgtagctatgtgcaaacttggaaacataataattagttatataaaagggttttgatataaaaaggcttcagtaaagttttctaaggcaacaraatacttttttaagtttaacagaaattaattcaaatactaattctgtggcttgtgaaacaagaaatcttggataaatgactaaatctttgtgaatgtcaacttattcaaaaatagagaatacctactctgttttgcaaagactaaataagacaatgactactttctggcacattgtagtgtttaacaaacagttgttaatttatttattgaaatgaccgcagggcatgttggttaagagcacagacaatttacctgggctgcttgtctctgaatcacaactctgtcacttatgagctatgtggccttaggcagatgacttaacttcaatgaatgtcagtttcttcatctgtaaaatgtggatgataaagagcactggcctcatagagttgtgaaaaagaaatgaattaacatatataaat

SEQ ID NO: 272428 - DNA, 584 bp, Homo sapiens
ttcaaatgtgtccctttatggtttggggcactatttaccaggcacagtactttttatacctgatgatataagccaaaaagatatgttctctttttcaggagatgtacaatccagtttgaaagacaaatgcaaaagaaactaaacaacaataaaatataaatcaataatttgggatatatgctgtaagaagaaaaaacagcaggtgctagagaaagaatatctatgtggacagaggacagaataattttgacagacagtaagtaaagagttctcagtggaggtgacatttcagtggaagcctgagggatgaggagaagacagccatgaaaaggtgggcagggagtgtaagtgaaaaagtgtatctgagttgcctagacaattagaataactgagaatacagttcacttccattctacttcaactgartttaaagcaggtgaactaaattactcttagaagtttgttaaatagagcatgaagtagaacaccacatatatagttaagcacagtaacttacgtacacattaaaaatagacgttaaccatattaaaaaaagcaagcccatatccaggtgtcccagcatt

SEQ ID NO: 272429 - DNA, 528 bp, Homo sapiens
agtttatcacagcaaaaagatacagattaaaattatccaagggaagagatacaaagagagcagagtccaggagagttccaaatgcaaagcttccagttatccttccccagggaagtcatgaagaatgcttgtttttctgcaatgatgtatcacagtttgcatggggtattacccaccaaggaaaccaccacgmcccagtgttgagtttttactggcacttggtcacatagacatattagactgactgtgtggctgacctttagtctctagaccctctgggcagggagctgatacctggcccaaaactcctatcgttagtcatgtagttacatcactggctctggttcaagatccccaggtaaacaaagatattcttagcagaaaggacattccaaagacttagagatcacctctcaggagccaagaacaaaggcaagacttttctctggggaagggttattctattttaaaaagcgtttaaattttattttttaaccaataacaattgtatatacttatggggtacaa

SEQ ID NO: 272430 - DNA, 605 bp, Homo sapiens
atagagttatcattatgctgacagcaaactcctggctttgtatttatttatttcctgagtaatgtcattaaaaccatgtgtacactgacaacactgtatatcataattaagaatcttgttcaaaagtataatcccatctatggcaccctcaggaataaatgatcactaaacttcatttaccctgaaataaaattctattaagagtgtatgagtctatgtgtatcacaataactagctctgtgcctgactcayggtttgcttgactagtatttgtttcattttatttaaaactggcctgtgattaaagtattttaaatacattctaaaattacggaagcggaagaaaattttaacttcattgaacttagagcttctcatgtactgtccctagacctgtgctatatatataatggtaacctgagtgtgaatgtagttggccttaagaattcctgtttttaaaagcaggtggctatgatgcatctgtttataactaagaggcctttaactgtaatgagaagttagctaacctcatgacacaagatcatgttgagttctcttttccatcacattttcttctgcctgcaatccttaaccttgactaggaa

SEQ ID NO: 272431 - DNA, 605 bp, Homo sapiens
atagagttatcattatgctgacagcaaactcctggctttgtatttatttatttcctgagtaatgtcattaaaaccatgtgtacactgacaacactgtatatcataattaagaatcttgttcaaaagtataatcccatctatggcaccctcaggaataaatgatcactaaacttcatttaccctgaaataaaattctattaagagtgtatgagtctatgtgtatcacaataactagctctgtgcctgactcatggtttgcttgactagtatttgtttcattttatttaaaactggcctgtgattaaagtattttaaatacattctaaaattacggaagcggaagaaaattttaacttcattgaacttagagcttctcatgtactgtccctagacctgtgctatatatataatggtaacctgagtgtgaatgtagttggccttaagaattcctrtttttaaaagcaggtggctatgatgcatctgtttataactaagaggcctttaactgtaatgagaagttagctaacctcatgacacaagatcatgttgagttctcttttccatcacattttcttctgcctgcaatccttaaccttgactaggaa

SEQ ID NO: 272432 - DNA, 539 bp, Homo sapiens
agctcactgcagtctcaaccatctgggcttaagcgatcctcccacttcagcctccagagtagttgggactacaggtgcatgccaccaagcctggctaattttaatgtttttgtagcaaagggatctggagatgctgcctaggctgatctcaaactcctggactcaagggattttcccaccccggcctctcaaagttgttgggattacaggygtgagtcacctttaattccctgcaccgtgctagacagagattgctgaagactgtgttcccggggccacatagcaaatctgccaaatggcagaggaaaggggagataggggcccggggtctggagaaatgaggctgggtctggggaagacaggtcagaggcagcgtggctgggagatgcagctgggagaagtggaaggagagggtgggcgtggaggcttccggagaggggtgggcatgtatcatccctcaggagtggagagacttgggttgggttcagagaaaaccaggctggggagaacttgagagcccaggcgtgaaggctgatgtg

SEQ ID NO: 272433 - DNA, 578 bp, Homo sapiens
acagaaggtggaggaaggctgacttctctctctctccttctcctgcccttggtcatgagagctgctggttcttgggcttctggatctgggactttccccagttcccccttgggccttcatcctcagactaggatttccaccatcrcctcccctggctctcaggcctttgtgcgcaggggagtttcatcagcagcgttctgggatctccgggttgcggacggactgcatgaagcgattcctcataatacgtctccccacatccctctctctgcgtcctcttgcgtctgtttttctggagacctctgactcatgcagttggtgttttgaaaaaacaaacaattgcctttcatggacccaaccctggacgtcccatgacatcaccgtcattgtcccctgctggccaaggctgtcgtaagtcggcccaggttcacggggtgagggccctactcggcctcttgctggaagagtggtgaggtcaccgtaatgagaacgtgaggacaggagagattgctacagccctctctggaaaatgccatgtgtgacatcatgaaaggtgacgtggctgttgcccaggctgt

SEQ ID NO: 272434 - DNA, 610 bp, Homo sapiens
tctctttttaagggcatcaaactggaaggaaaagataaagtaatgtaaaatttaagaacttcatccatagcagtgtgattctgtatttaaaggcattttaccaatttaaagtaagtatttaagggaatgtacaatttgtacatagatattttataattaaaaatttgcattttttcagtattaatagtaatgcttttacttgcatacatttttaatttcaaaaagtattcctaagtgtgacttaattttatctcataataactatgcaagatgcccaacacaagtcttattatttctaatgtacatcagttttctaatgtcaactcttcacattttttgatgttttaatttctgtttgtgccatcatcttgattcctcaaaccatgctttgctttttctaactgcctctcttggatgagagctttcaaaggaactctgttacatttggctattacacactgctgtaaattgatacgtgtggctatgctattcacagtcatggttcccagggacagggacccagagccaggtaagtgcccygcttctgttccaacctacttacttggggagacagaaccaggttccactgcacacaagatgggcgagctgg

SEQ ID NO: 272435 - DNA, 581 bp, Homo sapiens
cactggccaataaggctaataaaatgagcccagtcttccccccgaacacagtggatttccatctatgcgataacgtcgtcggagcattgtccctgcatgaacttgaccttgtcttctgattctacttctcagattcagcaagagaaaagaagggcctgtaaaggaaagagaaagagagaggctgtcaaaggtgcgtagctgccatcttgcttcagtgagtgaggccgtggcacctccaaaygtcccctcaggaaaaaaattctgaaaaagccacgaggaaatattagaaaagcaatgagcattgggattttgacatggctttgggatgcaatatagctagtagttcattgaatcgcagacagtattgtggaggggcaatagaaaacgcaaacgttgatgagagcaggtgttctctaagctcttgttgtcttaaccaggatttagatgatgctcagagaaaggtgagagctctgggaatttggaagttgagcctagagaaaattgaactggagcaataaaatctagaatctacatagatttatttaaatttatattcatgtactaataaatattaaggacat

SEQ ID NO: 272436 - DNA, 581 bp, Homo sapiens
cactggccaataaggctaataaaatgagcccagtcttccccccgaacacagtggatttccatctatgcgataacgtcgtcggagcattgtccctgcatgaacttgaccttgtcttctgattctacttctcagattcagcaagagaaaagaagggcctgtaaaggaaagagaaagagagaggctgtcaaaggtgcgtagctgccatcttgcttcagtgagtgaggccgtggcacctccaaatgtcccctcaggaaaaaaattctgaaaaagccacgaggaaatattagaaaagcaatgagcattgggattttgacatggcttygggatgcaatatagctagtagttcattgaatcgcagacagtattgtggaggggcaatagaaaacgcaaacgttgatgagagcaggtgttctctaagctcttgttgtcttaaccaggatttagatgatgctcagagaaaggtgagagctctgggaatttggaagttgagcctagagaaaattgaactggagcaataaaatctagaatctacatagatttatttaaatttatattcatgtactaataaatattaaggacat

SEQ ID NO: 272437 - DNA, 300 bp, Homo sapiens
catccttcaccagcacagaatgttcaacgctctcgtcccccatacaggtaatcctttattatcttcacctgtcttgcaggtacgattctgactgagctatccccttcacaccttgctcaggacacggggaactttaaccactttaaccactctctgcctgcaaatggcaggacactaggccacagaacctgtctcaggcagggcccatctacctaaaactcctcccccaccattgagcctctacctcctagaagccatgctgracgtggggcatctagaagtaacttggaaggtggttag

SEQ ID NO: 272438 - DNA, 510 bp, Homo sapiens
atccaaactactaaatcaggatagccagaagtagcaccttaaggaagcacctaaataaatatttttaatgataaacttgagacaaattaactgagaaggccaggtttttggctttattgactttttcacactcattcctgattcattgtgtgtgtgtatatgtatgtgtgtatctatatataatatatatataatatacatgtatatgaatatataatatatataccaaaaataattgtaccggtttcaagtgtgaawgtgtgtgtgtatgtgtgtgtgtgtgtgtgtgtgtgtatatatatatatctctccaatatatatccattatctaatagattccattatctaatggattcttcccctacacccacagaaaaaccatagaagtgcatgcaaattacagttaccaaaaaaagtacttaatgttgcatgacatgagttgcagtggcagaataatcacttaccacaataattgtatatattcccattattgatatatttccattatta

SEQ ID NO: 272439 - DNA, 431 bp, Homo sapiens
ggtctttatagaaattgaaatgaaccccacaccgagcagcyggggaggattaacaaaagccaagctggagaagaagctgttgtctgctctgagattcagcataagaagagagccagccagcagggacacaaagggaggtcactgcatgtctggtgcaaagtgatcacttttaaaagattgtatttgttcatttggggtaatccttttaagcatcaaatgtcatgtaggtaaaaataaatcaggcagtttaaaaaagggtggaataaagcaaccccaaattcatgtaagagatactggttattaaaattcaacaagtggcagtgaggcaggagaatagggtttggaggcagggaacctgaggctgattcatgctgaatttctagaactgaatcaatagggaaaacccacctctccacatcaaagtaacaaaa

SEQ ID NO: 272440 - DNA, 515 bp, Homo sapiens
ttttattacaataaatctatgctttcattgtttcattctttcattgctttgtttgtgtgttttgtccaattmtttgttgaaaacaccaagaacctggatgatgcatggtcaagaccctccaccagtgacagcaggatttgctgactgaatatgagggaaacagagaaggcggtagactaagatggggcctatgctttcagttgttcaccatgatagatagtgatacaaattagtgcaaggaggatcacctgggatacagtttaagagaggatgatgagtttggttttcaaagtattgtgtggctattaggtggatacaacccccttggggcttactcttggatttatttcccttcttgttggagtattagttctccaatttttattccaaatgtagtctttatgtttaaaagtctgattattctatgctgaaacagatctttattttaccttttcctttaaatataaatttagctggttataaaacgttgagctccacattctttctcttcagta

SEQ ID NO: 272441 - DNA, 642 bp, Homo sapiens
cttggcctaattttgttatttatcccatctattgagttttttatttgaagttacatatgtatcattcccttttgttggttcttcaagaatacttattgtttcacattgtcaatctcaatctctatttattcaaatatattgttgggttttactacttaatttgtaatttatcatgtccattagttatgctttctctcctataggttgtctattttgggtttctcttttatgttgcatatatgccatagatgcctcatacatttttcttttaaggtcatattcttttgaagtatctactgctatttatgctgttgggcacacacaggggtgatcaaaatcaggatccagttacagactggccagaatggaagtgtagaaatgtccattgtgaaagaaagcttctggtgtgacatttaagggcttggctattttgtatyctgtctccccacaaagatacatatgggtttcctgtgtccctcaggatcctactgtctaatctccatcctgagctttctaaagaaaaggctcctgcaatttaggaaagaaggatggtggatgttgtcttttttttccattcattccctatccaaatggggtttccagactgacttattatgctgtcacttgtgccactatctctgg

SEQ ID NO: 272442 - DNA, 553 bp, Homo sapiens
aaatggcattggtaagaatccaagatagtatgtagacttttaccttgaagaaatttagttttatctctcccaccacaggaatgaaagagaaattatttcatatttaaggacaacacaattaagtcgtttgttttttcttccagtgagtcactatttatttattattatggaaaccataaatgtttcttagtgaaaatgtgatgtgctgtggagtgcagttttgcctcactgttgtccttattgttatttactttagttmagaatggacttattatacatcaaagtagccaaaaattacgttccatctctatgttgaatctttgtcaattattggtgtagtacgtctgagaaactaagtactgaagagggaatgacttatctcagtcaaatgtacagaagtagagggcacatgttcagttttcagttatgctactgtactgtgctgagtaacatgtaaagatatataagataagtaagtctggtgtattatattttgcaatgtcttccagttatttaaaaataacacgtattttagctattgaattagtgtgct

SEQ ID NO: 272443 - DNA, 538 bp, Homo sapiens
tgggtgggtggccttggagggcatattttaaacaagtttttcaacccaatttcctttgcttttcctttaaaaataaatttaaacttaaaatgaaaaatatgacagcttttatttactatggaaagttttatagtgactgttcatygtacttgtttttttttttccttccagatgccctgaaaaaggatatattattattttaatttattttttaaaaatactcatttatacaaatattccagagtccatagcttcatacatggctatcttgtggtttcagggtagttaatcatgagtaagatatttttcattaatcctataaggatttatcaaatgggtactatgtggggaaaaaattagtcttttaaattgtgtttctctatctttagcaaaactagaaaatttagcacgttcagagaaggcagcccttgattaagtctttggggatacaaagggcatccatatggctgttgaaagtaggacatttagggtagaagaaaaagaaaataagatatgtgaagttgcagatgtgaaaatg

SEQ ID NO: 272444 - DNA, 538 bp, Homo sapiens
tgggtgggtggccttggagggcatattttaaacaagtttttcaacccaatttcctttgcttttcctttaaaaataaatttaaacttaaaatgaaaaatatgacagcttttatttactatggaaagttttatagtgactgttcatcgtacttgtttttttttttccttccagatgccctgaaaaaggatatattattattttaatttattttttaaaaatacycatttatacaaatattccagagtccatagcttcatacatggctatcttgtggtttcagggtagttaatcatgagtaagatatttttcattaatcctataaggatttatcaaatgggtactatgtggggaaaaaattagtcttttaaattgtgtttctctatctttagcaaaactagaaaatttagcacgttcagagaaggcagcccttgattaagtctttggggatacaaagggcatccatatggctgttgaaagtaggacatttagggtagaagaaaaagaaaataagatatgtgaagttgcagatgtgaaaatg

SEQ ID NO: 272445 - DNA, 624 bp, Homo sapiens
taactttttattctcttcttgggctcagctggaagaaatgtttgccacaaaagaagcctgattttatgcatgtttgacttaattcagagggatttatgaataccacagtagcctgtttggtttggctgtgaataatgtgaggcatatagcttttatttctttcaagcagaaatatctgatgtcttcttggtaaccctctttagtgaaacagacaactttttaaaatactagagtccaaacatcaaacattcttatttgttcattgtytcacacactttctgaaatatgtgagaaaatatgacttttacaaaagcaagagcctaaatgtataaaataaatgtagctaagtcagaaatatggtgccaactcagacttaatattttattttacagaataactaaaaggaaacagatgtagaaataactctgttagagtaacacacacacacacacacacacacacgtacaactggcattgcgatatttgattacaattaaaacgtagtctgtatgtggctttgaagcagagattgacgtggatcaatataatttagggggtatttattggctcaaatcatgattatagagattttggtaattatagcttgctttttcattatttgca

SEQ ID NO: 272446 - DNA, 624 bp, Homo sapiens
taactttttattctcttcttgggctcagctggaagaaatgtttgccacaaaagaagcctgattttatgcatgtttgacttaattcagagggatttatgaataccacagtagcctgtttggtttggctgtgaataatgtgaggcatatagcttttatttctttcaagcagaaatatctgatgtcttcttggtaaccctctttagtgaaacagacaactttttaaaatactagagtccaaacatcaaacattcttatttgttcattgtctcacacactttctgaaatatgtgagaaaatatgacttttacaaaagcaagagcctaaatgtataaaataaatgtagctaagtcaraaatatggtgccaactcagacttaatattttattttacagaataactaaaaggaaacagatgtagaaataactctgttagagtaacacacacacacacacacacacacacgtacaactggcattgcgatatttgattacaattaaaacgtagtctgtatgtggctttgaagcagagattgacgtggatcaatataatttagggggtatttattggctcaaatcatgattatagagattttggtaattatagcttgctttttcattatttgca

SEQ ID NO: 272447 - DNA, 572 bp, Homo sapiens
cagcaggctgccatgatgccggctgcaatggggaggtgcagctgggggctgtgcgctccattgagtgggaaggagcttggaacaggtggaagccctgtccacctccgaatttactgtgtgggagccttgtgctacctgggcgcagctgcagccaccgagactgccgcggatctggacccggtcatctctgtgctctctgaggcttgggaagtcccctgcacccacaggtgtggaagtgcctgttctcactgcctggcctcttccagctccccagtgtctgctctgatcttggagcaaatttgaggccgagmctgggagctactgcaacccagccagatgtgcgcatgctcagggcagtggttacacgccagccccctactgccttggcattctctggactttgggcaactgaggagcaccaaagggagggcaatgggttgggagctgagggcagcttggcactggcctgcaggcgcccctcagcacaaacatcctgggccaggcaggaggcatacatgttcctgggcgaaaagggacaggttcctggagaagccctaccttcaagccaggga

SEQ ID NO: 272448 - DNA, 587 bp, Homo sapiens
ctctaactcactggttctaaaactggaaaaagcgaggttgaggtggacaaccagcatcgccatcatcttgaaatctgaggcaggagacatgtctctgttttaaatcacggaaagcatyacacgttccccaaaggagaaataacccttaggataggcagagaaaaagagggaaggtgggacaaccatcctcaggaccggaagcgctgtactgtaactcaatcaaagaaaacacaaaatcagagtgaccatctgcggtaccacacagaaggatgtttgtcccacaagtcccctgggcatgaaccctgagctagcctttccacactactaagatatccctgtaggaatgtcctccatttgggaaggtgatatggttttgatttcgtgtctctgaccaaatttcagagctaattgtaattccccatgttagatggaggaagggccaagtgggaggtgattggatcatgggggcggatttctcttttgctgtcctagtgatagtgacttctcacaagatctggatttttaaaagtgtgtagcacctcccccttcactctcttgctcctgctctatgcatgtaagacgtggcc

SEQ ID NO: 272449 - DNA, 587 bp, Homo sapiens
ctctaactcactggttctaaaactggaaaaagcgaggttgaggtggacaaccagcatcgccatcatcttgaaatctgaggcaggagacatgtctctgttttaaatcacggaaagcatcacacgttccccaaagragaaataacccttaggataggcagagaaaaagagggaaggtgggacaaccatcctcaggaccggaagcgctgtactgtaactcaatcaaagaaaacacaaaatcagagtgaccatctgcggtaccacacagaaggatgtttgtcccacaagtcccctgggcatgaaccctgagctagcctttccacactactaagatatccctgtaggaatgtcctccatttgggaaggtgatatggttttgatttcgtgtctctgaccaaatttcagagctaattgtaattccccatgttagatggaggaagggccaagtgggaggtgattggatcatgggggcggatttctcttttgctgtcctagtgatagtgacttctcacaagatctggatttttaaaagtgtgtagcacctcccccttcactctcttgctcctgctctatgcatgtaagacgtggcc

SEQ ID NO: 272450 - DNA, 535 bp, Homo sapiens
tttactaggtctcagcctttagggcttggctgtaaaaacaacagtgctactctcttaaaagcaatgcaagcatgcaggtttctctgacagctaaacgcaacctgaattcaggtgggtgggtggggcatggagctccttttccaaggacttctgttccctgcactgttcaaaggtctcaggatcttgtccccaggttctctttccctttctgccccactctgyttccctttcactctccccttgttctgccttctcttctcctctttctctttcctggtgcccttgctgtttccgttccttaaataagaccaccttagcaaaggaagtcattcaggtccaggctccctctgcaatctttgagatttcccagtttttactgtgttcaggacttactggggaaaaattataaaccaaggtaaacatttcatcctctcttaaaatgccacagctcaagtacaccacacactgtgataattatttctctacttcgacaccccaattttatttgcttgaggaatttctattaccctaattt

SEQ ID NO: 272451 - DNA, 629 bp, Homo sapiens
ctcagcaacagagtaacagaatgactaacatttaaaacagagtaacagaatgactaacatttaaaaataattcttcagggtgggcctggtggcccagcagtttaggaggcaaaggcgggcggatcacctgacgtcaggagtggaagatcagcctggccaacatggtgaaacsccatctctactaaaaataccaaaatcagctgggcgtgatggcaggcacctgtaatcccagctactcagaaggctgaggcaagagaatcgcttgaacccggcaggcggaggttgcagtaagcagagaccgcaccagcgcactccaacctgggggataagagtgaaagttcgtctcaaaataaataaataaataaataaataaataaataaataaataaataaatagaatccctcttggctagcaaatatttattaagcacctattaggaaaagaatcattcccatttcaaggtattttataaattattttctaagaaatattcatgtcttgaaaaaataattttaatattaaatattttaaccaagagtttggttactattattaagaaaagaaagttgttattcaaactcaacaatgtcaataatagtttaaaaacttgatctttcaaaaatactga

SEQ ID NO: 272452 - DNA, 620 bp, Homo sapiens
atacctttttactttaaattaaaattagaaaagataattttttactttaaataaatactttaaataaacatttcagtacaaattttaatgtataggtaggaaaaatgattttactatgttgatgaacccatagttagggaaccrcttccaaacatactaatcagcaatataagtacaaaagactactaatatacacaataatgtattatgaataatgactgtcaaaaccattatgctaaatggtataatggtcttgagattcattataagtcaatataagcttttttgtttgttatcgtgcaaaaaatggtaacagcttatactctgtgtgattacatatatacagaaatttagaagagacacaactataaggaaaatgaaggttgatacagaatgagatggggcaaagtactgaatgaaaactgttataagaaatcatattattcactgataaaaatgctatattttgtgtactgtggtggtagaatgattacatgtattcattagaactcatcaaaaacacttagattagtgaatattattacatgtaatttttacctcaataaagctaactttttaaactttgcaggaacgttaaaaacaaaaacaatcatagtaga

SEQ ID NO: 272453 - DNA, 594 bp, Homo sapiens
atttgttataattgatgagccaatgttcacatattattgttcactaatgtccatagtttccatcaggtttcactctgcattttgtacattctgtgagatttgacaaatgtataacgaaatgtgcccactagtactgtagtgtagttggaatcatatgggatgtcgccttcacagggtggcttctttcacatagcaatatgcatttaatgtttctctgtatcatttcatggctaaatagttcatttcttcttatcattgaataatattccattgtttggatgtatcacagccacagtttacttattcacctatcaaaggacaccttggttgcttgcaaggattagcaattattaataagctggtaatgctaattttccaatgagytgaatcagtgcttttaaaactctgggatggcattcctgatttccaggatctgttattcaaccaattttttcaactcaaaaccaaatttggactattttaatttaaagtttattacatatgtaggcatgacagattaaaaaatatattttaacaagtgaagatatcacaaatacaaaactaaaatactgaaaaacccacaaacaagaacaa

SEQ ID NO: 272454 - DNA, 587 bp, Homo sapiens
tcataattaaaaatgagctgctcaagttaggacccaaattataatttttaaaatgtaattttctttgtgtctaacaatttgcaatttttcatagcataagcacattcattaatatgacccattcacagcaatatttagctgtcttttatgtaagtttatatgtgtgtgtatatatatgacgaaggtttatatatacacacacacmcatatggcatgatttactcacaagttaacattttaacaattcaatatgaaatgtaattatataagatgctattttaaatcattttctcttttattctatgctgtcctttattttgccatatcttatccgttttccaaatgaacatagttctctttagcacagattttatgcttagtagtgattagtttcccagctttgtgtttcaacttctgattagatgtgaggcacctcacaaatattgcctgttaactccacagaatgacggtttgtgagcgtgttagagttcgaaaactacaagattcagtttgctacagctcgagactatgaatcccccccaaaaaaagcatgttaaaatttttatacctgccatggattttaacat

SEQ ID NO: 272455 - DNA, 587 bp, Homo sapiens
tcataattaaaaatgagctgctcaagttaggacccaaattataatttttaaaatgtaattttctttgtgtctaacaatttgcaatttttcatagcataagcacattcattaatatgacccattcacagcaatatttagctgtcttttatgtaagtttatatgtgtgtgtatatatatgacgaaggtttatatatacacacacacacatatggcatgatttactcacaagttaacattttaacaattcaatatgaaatgtaattatataagatgctattttaaatcattttctcttttattctatgctgwcctttattttgccatatcttatccgttttccaaatgaacatagttctctttagcacagattttatgcttagtagtgattagtttcccagctttgtgtttcaacttctgattagatgtgaggcacctcacaaatattgcctgttaactccacagaatgacggtttgtgagcgtgttagagttcgaaaactacaagattcagtttgctacagctcgagactatgaatcccccccaaaaaaagcatgttaaaatttttatacctgccatggattttaacat

SEQ ID NO: 272456 - DNA, 643 bp, Homo sapiens
gtatacagcttacaatatgcacatttaaaggttacatatactaatttgctttcaatcacaaatgtttttcaacttttcatatataaaaattgtgatttttaataacataaattggacaaattaagaactagctttttaaaaaacagcaaaaaatagaattcaatagaaagaagagaaagaaatagagacagaaagaaaaagaaagaagggagggaggaaggaaggaaggaaggaaggaaaggaggaaggaaaggagggaaagacaaaaggagaaaagattgggatgatccattctagaacatgctatttatacctcaaattatatcaacataaaataaactgatcggctattcagaaccagaggtcttcataagaaagttatatttttaaatgacagtagatacatatcagtaaaaagagataaactgatmaactaatatttccatgagattttcttaggaaacataatttattttaatatttcatcctaaattgattaattgttggtaacatttactgtaacatttttccaagtgcatcattacaaataaaccaaaatgggataggtacattattaggtatcatatgagaaacatattacagttttagaattttgtaataaaattattttatgttttatgaa

SEQ ID NO: 272457 - DNA, 577 bp, Homo sapiens
agagcatttaataaaattcaaacctattttagttcataaaaaaatagataacatgaatatagaaatatattagtatctcagtttgggttcctgccaaaggatcctgacacaaggattcaggtacaattctgttgyattacagatgatttcagaaaacgctaatagggaagtgaggaagtgaggcagaggaaaaaaaggcaatgaagcatatgttggcaaaaaatttattaccataggtaatttgaatttaatttcaccaagaaactctagggggcattgtagagcacacatctcaaagtcagtccattgaaggcacaagaaatctaggtatttatctaccaactcctatcagtctcattggtatgttgcaaaattagagaaattaaaacagtgtctttttgacacaagagtatgtagatagattagtagaaaagaatagagaacccagaaagggatacaaccagtttggaaacctggtgtaacatgtaatgttgcaaattaattaagaaaatattatattccattaaaagcattgactcaattgaccttttctatggaaacagtgatgaaatcatag

SEQ ID NO: 272458 - DNA, 553 bp, Homo sapiens
ttgagagctgaccaagtactcaattctaagcaaaacaatgggtacagtacttgtctccttctaagggacaaggtacagaatcataacattgaaaagacagtggacaaaggttttgtgtgaaagtgtgtgtatgtgtgtgtgattttacttgtttttgataagttgaaaattagtccaccttaggttttccctggccaataaagcactatattttaaaaactttgcatttgagaatgtttctttgtggtgaattaaaagtttttttaaaaacaagaagtctcgcaaaaataacaatatatagtaaagtggtttttaaaaaatgttcttctaggattgcaaattagtctttgtttggaaggctgctttttctcttcaaatgtctgatgaaaagcaggacttctgaaaggaaggaaatatgaatattaggaatgttttttcgaagtgtactctatagtagctagcayaaaattcagatgtattcttagtccaaatgaatgtttaaatttactatcacatagtcttaatttaccccaataagtcgtctgtcacatga

SEQ ID NO: 272459 - DNA, 574 bp, Homo sapiens
acctcatggtactttgtaggagctactgactgagcagtttactcctagggagaatgtaactcaccctggttcmctgcagaaacagcctcctgttataatcaggattattatcctctgtttactccctttctctgcctgagtctctcagtaacagctgggggcctcatttataaacaacctgtgctataaaatgcccatgatatacacagtatgaaaacataggaacatggtttatccttgggcatattattattttattattgttttatatgtattcagtgcattttctccagagagctgaaggcatttcataaactttaaataaccagtaggtataaatctatgccactgtaagttatagttatttaatagtaataaaacaacttgagggtgaagaattggtattatttatttataattagcacatgagaaggaaaggacgtttcaataatcatagaaaaatgctaatgtaaatttttcccctgattttgttttttactatggaattgactaagtttatgagttcaagactttcattgcctagagtacgacagtctgcttataaagtatactc

SEQ ID NO: 272460 - DNA, 627 bp, Homo sapiens
cctcattatgtacaatcatagcagaatacatttatcttatatagcatagttgtaattttaagtggttctgcttattatttgacaagaagattgatgatacagtctttggaattgaacaaagatgaaagcaaataagttcaatggaagaagtggaagtttgcaagtaactgtggagtgaaggttttagaagaaatgacaagaacactgatgtaaaaaaggatactataggttgggcatggtggcttatacttgtaatcctacactttgggaggccaaggccagaaaattgcttgagtccaggagtttgagacaagcctgggcaatatagtgagactctttgtctctacaaaaactttaaaaattagttgggcattgtgatgcatgccttgtagtcccagctactcaggaggttcaggcagaaaaatcacttgagcccagaagttctaggctgcagtgagctgcgattatgccactgcactgsgcagcagagcaagaccctgtctcaaaaaaaaaaaaaaaaaaaaaaaaagaagaagaagaaaaaaaggattatgttagtagatgcgttggacagagaaactgaattagatgctaatgtcaacccaggtagaaactggaaaggcctca

SEQ ID NO: 272461 - DNA, 603 bp, Homo sapiens
ggaggtgggtgttagaaaaaaattctatctattcaatagtggcccatgagatgacattgcttcaggcccagagagaaagcaaaggcataaagagaggagtaaaagaaaacagaaagtgccatcaagatggggagaagagaatgtggaaatggtgttacaggaaaaactgagaatgaaaaagaaataatattttattgagtcaaagaaatggtaaaagaattaccataatttgagtaaactttgggtgctaagcactttctatatattctctcatytaattctcacaaaactcttggaaagaagttttatgaacatgtatttttcctagtggaggaaactggggctcaaagagttcaggtaacatgttcaaggtaccctttgctcctaagtggaaaaggctgtttaaattccaaagcactttccaaggctattagaccatctcctctccctgtgctttacagacagagcaaacaggactccaatttccatatccctgcaattaaggcctgataaataccatgtttggaaattttacttgaacacttagagtgcattttcctctaggaataaaatatttaatgctagctagtgtttcaacctaac

SEQ ID NO: 272462 - DNA, 579 bp, Homo sapiens
caccctaatcaagaatgtcaggtgaccatcagttgatggtcaggctgttgttaaactgtctctctgaaataataattgatcacagccagcaccaggaaaaggcagtctcccagtagatagaaaatacctgaaactggtgatcagcagcttcccaataagatctcaggagatgggtgaatgggatcaaggaggtgcactaagtggcaaaatggtggagtttaactggtatatgacattggaatggtaagggaagaatgcctcaagtgagcatgcatacaactccagtaaacacactgcacatgctcacctcccaagtgctagcaggccactgtgcgtgtggacagcccaccttaagggaagaatcagggagaagggacacaagactctggaagcatgccaacatctaaaaccccaggtcaaaaggtcaaactgtacacttartctctcaaatcacccgcttggccctcttctaagtgtactttgcctcctttcattcctgctccaaagctttttaataaacgttcactcctgctccaaaactttgagtctatgtcaggtctctccttctgccttaagctc

SEQ ID NO: 272463 - DNA, 610 bp, Homo sapiens
atcaaggaggtgcactaagtggcaaaatggtggagtttaactggtatatgacattggaatggtaagggaagaatgcctcaagtgagcatgcatacaactccagtaaacacactgcacatgctcacctcccaagtgctagcaggccactgtgcgtgtggacagcccaccttaagggaagaatcagggagaagggacacaagactctggaagcatgccaacatctaaaaccccaggtcaaaaggtcaaactgtacacttaatctctcaaatcacccgcttggccctcttctaagtgtactttgcctcctttcattcctgctccaaagctttttaataaacgttcactcctgctcyaaaactttgagtctatgtcaggtctctccttctgccttaagctcccttgcccaaattctttcttctgaggaggcaagaattgaggttactgcagacctttatggattcaccaccgctaacacttttgggattacatcaaattctggactccttcacaaatctccccattaccatttactttttagtcttcagatgtcttctctattccttctgttcagaggttatatttatgttcagttggagagccagggtagtgg

SEQ ID NO: 272464 - DNA, 610 bp, Homo sapiens
atcaaggaggtgcactaagtggcaaaatggtggagtttaactggtatatgacattggaatggtaagggaagaatgcctcaagtgagcatgcatacaactccagtaaacacactgcacatgctcacctcccaagtgctagcaggccactgtgcgtgtggacagcccaccttaagggaagaatcagggagaagggacacaagactctggaagcatgccaacatctaaaaccccaggtcaaaaggtcaaactgtacacttaatctctcaaatcacccgcttggccctcttctaagtgtactttgcctcctttcattcctgctccaaagctttttaataaacgttcactcctgctccaaaactttgagtctrtgtcaggtctctccttctgccttaagctcccttgcccaaattctttcttctgaggaggcaagaattgaggttactgcagacctttatggattcaccaccgctaacacttttgggattacatcaaattctggactccttcacaaatctccccattaccatttactttttagtcttcagatgtcttctctattccttctgttcagaggttatatttatgttcagttggagagccagggtagtgg

SEQ ID NO: 272465 - DNA, 615 bp, Homo sapiens
tgtcacctctgggactgcccccatttaagaagggcagcttttccatcatctactagagctgaggcaaacttgggcttgaggcatcayctagagctgaaaaagacacagtgaccaaatggtagagaagctataaacaaatatatccaataaaaacccaaacaagccagatagagaagactagaataaattactaatccttcaatggaaagacatcaatggacatctgcaagaaacaacaacagagaacaatgatctccccaagtggacaaaataagaaacaagtaactgaccctaacaggatggcaatatgtgagttctctgccaagaattcagaatggtagtttgaaggaaatttgggatctcaaggataatacagaaaagcaattcagaaacttgtcagtgaagttcaacaaagatattgaaatgttaatttaaaaaacagcaaaaaccttgggactaagaaatatatttgctaaactaaaaaattcattagaggctctcaacatcagaatgggtcaaacagaagaaagatacagtgaattagaagtcaggctatttgaaattacacaatcataggagaaaaaagaagacagaatgaaaagcaatgaagatttc

SEQ ID NO: 272466 - DNA, 615 bp, Homo sapiens
tgtcacctctgggactgcccccatttaagaagggcagcttttccatcatctactagagctgaggcaaacttgggcttgaggcatcacctagagctgaaaaagacacagtgaccaaatggtagagaagctataaacaaatatatccaataaaaacccaaacaagccagatagagaagactagaataaattactaatccttcaatggaaagacatcaatggacatctgcaagaaacaacaacagagaacaatgatctccccaagtggacaaaataagaaacaagtaactgaccctaacaggatggcaatatgtgagttctctgccaagaattcagaatggtagtttgaaggaaatttgggatctcaaggataatacagaaaagcaattcagaaacttgtcagtgaagttcaacaaagatattgaaatgttaatttaaaaaacagcaaaaaccttgggactaagaaatatatttgctaaactaaaaaattcattagaggctctcaacatcagaatgggtcaaacagaagaaagatacagtgaattagawgtcaggctatttgaaattacacaatcataggagaaaaaagaagacagaatgaaaagcaatgaagatttc

SEQ ID NO: 272467 - DNA, 570 bp, Homo sapiens
acctatcttacaagaaatgctaaaaggagttcttcaatctgaaagaaacaaaaaccaaaacactaatacgcaaaacacacacacacacaaacaccacagatttgaaggtatacaacccactggtaaaattaagtatacagacaaattcagatacactcttactgtagttgcgtgcaatcaattcataacttgaatatgcagccctcaaaataaatctatcagtagctagagaaacctgctgagagacaggtaataataaaatatgtaaattgagaagactaaaagtcaaaatatggagaaatagttaagtgtagaaatttttttatttctatttttctttgtgatctaagataagttgttaactctttgaaataattttttatatctatgttttcttgtaagcctcatggtagccatgatgcaaaagcctataatagattcacttaaaataaaaactaaggcattaaaacttactacctgagaaagtcacttaaccrcagaggaagatagcaagaaactaagaataaaagagaggagttacaaaaccaccagcaaacaagcaacaaaacg

SEQ ID NO: 272468 - DNA, 570 bp, Homo sapiens
acctatcttacaagaaatgctaaaaggagttcttcaatctgaaagaaacaaaaaccaaaacactaatacgcaaaacacacacacacacaaacaccacagatttgaaggtatacaacccactggtaaaattaagtatacagacaaattcagatacactcttactgtagttgcgtgcaatcaattcataacttgaatatgcagccctcaaaataaatctatcagtagctagagaaacctgctgagagacaggtaataataaaatatgtaaattgagaagactaaaagtcaaaatatggagaaatagttaagtgtagaaatttttttatttctatttttctttgtgatctaagataagttgttaactctttgaaataattttttatatctatgttttcttgtaagcctcatggtagccatgatgcaaaagcctataatagattcacttaaaataaaaactaaggcattaaaacttactacctgagaaagtcacttaaccacagaggaagatagcaagaaactaagaataaaagagagkagttacaaaaccaccagcaaacaagcaacaaaacg

SEQ ID NO: 272469 - DNA, 594 bp, Homo sapiens
gtcaataaatgtgatatatcatattaatagaatcaagaataaaaaccatatgatgatttcaattgctgccaaaaaaagtatttaataaaatttaacatcaattggtgataaaaacccttatcaaactggatatagaaggaatattcctcaaaataataaaggctgtatatgacaaacccacaactaaaatcatactgaatgcggaaaaaactgaaggaatttcctctaagatctggaaccagtcaatgatgcgtgctttcaccatttttattcaatatagtattagaagtcctggccatagcaattaggmaagagaaagaaataaagggcatccaaattggaaaggaagaagtcaaattagccttgttaattcatgacatgatcctctacttagagtaatctgaagactccaccaaaaatctgatagaactaataaattcggtaaatttacagaatataagattgacatataaaaattagtagcatagcatttatatacatcaacagtgaacaattgaaaaaagaaatcaagaaagtagtctcatttacaatagctacaaaaatataaaatatctagaaattaatctaaccaaa

SEQ ID NO: 272470 - DNA, 572 bp, Homo sapiens
attccaagtaaggtctatttctaatctttattttcaagcatacatgaaaagtatctgtgtgtgtgtgtgtgagtgtgtgtgtgtgtgtgtgtgcgtgtgtgtgtatttacatatcagcctaaaagttaacatcagactgattcttgctctaatataaacattaatatcaaaactagaaatamgaaaaatgctcatgattggtgctcttattaataaggcagctctaaccaaggtaaatagcaaggaaaagaagtggcataaactttaaaaggataatgcaatattatcattaattgcagatcctattattatatacttagaatattcaagagattgagttgtttagctattagacataagataatttacttagttttctagatataaaagagattattgcctttctaaccaattagaaaatataatggaaataaaagttaaacttacaaaagaaacctctatgagacatcaaagaaaaaacttagtaagaaaaatgttcactatgtataatagaaactttaactgctattgagagatgtcaaaaattttggaataaacgccaatatttatca

SEQ ID NO: 272471 - DNA, 469 bp, Homo sapiens
tacccattctttacttttacctcctttatatattgaaattctgaataagatttttttttttttttttttacaatttgaaaaccactgcatcaggtcatgctattgtccaaaatgggctagggtacaatagttataaatcagctcttcagtaatgtcacatacacaagaatcagaagaactaaaagatctgaagctaattgtataacaaagaataatttctcatcaagagaagtggagcccattatactcttgaaataatttgagattgaagcttttttttaactatctagcctcatcttgcattgactgaaaaaggagttttaattcatagtatgtattaatattttgtctaggaggtagatacttttgatttcatattatattctatcacaaaaaataacacyatattcaactaacagtctcagcttggattggactgaaggccttcaaatcctctcttaacatctaa

SEQ ID NO: 272472 - DNA, 534 bp, Homo sapiens
agggttttatctctttagcggcatccctggggttgccatccatcgtctgtgtactgaagatcatagctcctgttaaacagttttctccatccagctctttctgttccaggatccaggaattactgtctcccctgctcttccccttcactccttgaagcctggagtataatttccaacgtattgcacaatcttgtttccctacacttgcccacacctttgtaaatggtcactgtaaaagcctttcctctgttgcctaatttgagtgtgccawgtgttttttgtcaggactctaactgggacactttcccgtacctccatttctgaatcagagtgaatcgctggttccactgtacttccacaacttgcgtatgagtgacacatatcacgttacaatgatctgtttataagtctatctcccttcccagagttcgaggatattcttgaatccttgcaatgtctggcacattgtagacttgaagttaaagtctgcatagacattttcagccactgcttactttattggtctacagacat

SEQ ID NO: 272473 - DNA, 534 bp, Homo sapiens
agggttttatctctttagcggcatccctggggttgccatccatcgtctgtgtactgaagatcatagctcctgttaaacagttttctccatccagctctttctgttccaggatccaggaattactgtctcccctgctcttccccttcactccttgaagcctggagtataatttccaacgtattgcacaatcttgtttccctacacttgcccacacctttgtaaatggtcactgtaaaagcctttcctctgttgcctaatttgagtgtgccatgtgttttttgtcaggactctaactgggacactttcccgtacytccatttctgaatcagagtgaatcgctggttccactgtacttccacaacttgcgtatgagtgacacatatcacgttacaatgatctgtttataagtctatctcccttcccagagttcgaggatattcttgaatccttgcaatgtctggcacattgtagacttgaagttaaagtctgcatagacattttcagccactgcttactttattggtctacagacat

SEQ ID NO: 272474 - DNA, 608 bp, Homo sapiens
ttatttctgactttgtttcttaaacatagtttcatcctgaatatgtaaaatactatggaaatagcaataatattctgtatttgttactgctttgccctttaaaaaacattttcacatattttctaatgcctcttaatcttcagagtaacttccaaaataataacatctttataaatgaagagaccaaacctgagatgttaagttagtgcttttggcactttgaattatatactgaagagatgtaaaaaaatctgtatacataccaatgtgtttgctctgaaaagtcagcctgttacaggtctagtaaggaacaggtagctataatctatttttctattgatttgatccttataatcaacwtttgaccttgtctttctagaatgctagtttaataagagcaatttatagtgctatacagttttggctgatcattgagaataaacttcctaatctttttcatcctgttcaaactaacattcctattgccaagaaattataaatttgcgtatgaaagaaaaagaaatagctttagattctaaagtgttttcgtttttaaaaatgtttgtcatccataggttttggggacatataaatctctagatgctcat

SEQ ID NO: 272475 - DNA, 544 bp, Homo sapiens
gtgtagcaggcattgtcagtgtcccctctgtatcttctgggcattcatcattcctataaatgcagaaggattttgctgtaagcacctctaactctgcctaggagatttcactggagtgtacaaggtaaggcagaagaactgttttttcttttaaagtattgtttaaaataattyaattttctatgcacacacgtatgcacacatacaaacacacatatacatgcctcttagcaacatgcagttgtttcacatgcctttagctttgtggtataataaatatgatatcacaccttatgtgattttctggaacttgctgttttcattaaacattgttgctaaaactctttgtatttttgagtatacctgcagttctttcatttttttttttgctgtgtatacagttttatgctatacatcaatcatttgattttcccatctattctctagattgctggcaatttgaattgtttccttgttctttctattataaacagtgttgctatgaacatacttatacaagactctcagggcacctgtgcaaaac

SEQ ID NO: 272476 - DNA, 582 bp, Homo sapiens
attttgagttttaaagttttgtccatagaggtcttttgtattttataaaatttatttctaaacaatgcattattttcattgctattgacaatgttattcttttaaaattattgtctctttggttattgttgttgtagagagtcaaatctctcataagaagatattcactttacctgcaaattatgacagttttacatcttaccttctaatgyttttcttatttcttgttttttctttatagcctttgccaaaacttctaatagtgtgttttaacagtagcagtattggtgtacctttttgtcttattctgggtctcaaagggaatgcattaatagtttttccattaggtacaaagtttgttataggttttgctatacagtatatcttttaccaagttaaagatagcccctttgtattcttaatttgctaacacattttatgaaaaaagacttgccttttatcaaatgcctttctagcccctattgtgaaaattacatattttatctctttattctattaatgcagtgaattacaattgacatatgaaattaatttattttataaatatagaagtactcacag

SEQ ID NO: 272477 - DNA, 569 bp, Homo sapiens
tgaagttttttgctcaataaaatttctttacatttcatgtgagatatgaggaatgttctgggggttgacagaatcgtatttctaaatggttgcatttgtcatatattcttgttactcacttttaattttaaccataatagatagtctagctattaaggtacattttatgatagagaagtaatatgcattttgaatgtttgccagcatttgcctggcaaaagtgacagcaacaacagataattaagatttgagcatacactgtgattcagcaaatactcttgtatatttttccaggaaagattgtccagaataagctagcctatattttaaatttttattttcaatgtattttaaagtacattagtttaagacaatgcttattaaaacaaaaaccttaccttatttcgtctctctcttcattttcwctgtaagatagcattctaacacagtaattaagagaggactctgagccaaactgtctgactttatcacttcctaattctgagaccttactcaagttacttgggttctttgtacctctggttccttatatataaaaagggaatgat

SEQ ID NO: 272478 - DNA, 612 bp, Homo sapiens
caatgctcccttaatgacttcagagtttatcctgagggtgaaaaaagaactattacaggatttcaagcaccagaatgtcaagataagatgctagaaaagtggttctagaaacgtactggagaaaaactmaatgccaggcatatgagaacatattattaaagatgctgagataggatactggaaatacagttggaaactacagcaaggatctcgacaagagatggtagtggtctaaatgtaaacagtgattggaggaatgggagaagagatgacaaatataatggttatcaaacttaattccctagcgcagttactacagcactattaacattttcacatgctaaacctcattcctggatattctaatacaatggacctgagtgtgaactaaacacctgcatttttaaaagtttttatgattaattctgtcagccagggtagagaggtactaggaaaaactcaggaagtagagtgagggtaaggtatattgtaatacacttactacgattcagaataaaggagggagaatatgatgagtttcatactgaacaagctgtagttgagtcatcttggatgcattcaggtggagatgtctaacagatgctgcataga

SEQ ID NO: 272479 - DNA, 464 bp, Homo sapiens
aactttctaaatccctttcctgttgagggttctctcatgtgttgactggcagtggacatttcagtgaggagggctgaaacgcgtagctgtctttgtcttctttttctcagaatgagtkatttggcaatgagcttctgtccatttcttttaattggcattttgtgacttccagtaaggctctcccctactttaaaaacccataattgtatgtgaaagacagagggcaagatgtaaagaacagattcactagaaagcaaatatgttcatgcctcttcttagttactttattcctacattgatagaaaatgacttaatatatacaaagaaatgggtatcagcccactgaatttgcaagggagctgaatgaacaaaatgctctgctgggtcagtcagctggaaaaaagtggtttagtactgtgtgtaaacagaataatgaagctatgtaattttaattgtgcatttta

SEQ ID NO: 272480 - DNA, 464 bp, Homo sapiens
aactttctaaatccctttcctgttgagggttctctcatgtgttgactggcagtggacatttcagtgaggagggctgaaacgcgtagctgtctttgtcttctttttctcagaatgagttatttggcamtgagcttctgtccatttcttttaattggcattttgtgacttccagtaaggctctcccctactttaaaaacccataattgtatgtgaaagacagagggcaagatgtaaagaacagattcactagaaagcaaatatgttcatgcctcttcttagttactttattcctacattgatagaaaatgacttaatatatacaaagaaatgggtatcagcccactgaatttgcaagggagctgaatgaacaaaatgctctgctgggtcagtcagctggaaaaaagtggtttagtactgtgtgtaaacagaataatgaagctatgtaattttaattgtgcatttta

SEQ ID NO: 272481 - DNA, 638 bp, Homo sapiens
aaacagtatggagatctcccaaagaaataaraaacagaaggccattctagccagcaatcccactactgggtatatactcaagtagaaagaaattattatatcaaatagatacttgcactcatatgtttatcacaagactactcacaatagcaaaaatatggaatcagcctaaagtgtccattaatggatgactggataaagaaaatatataatattttataataaaatatataactatatgtaataccatggaatactactcagccataaaaaagagaatgaaactatgtcttttgcagcaacatgaatggcactggaggccattattctaagtgaaataactcagaaacagaaagtcaaatacaacattttcttacttaaaagtgtgagctaaacaagagtgtatggacttccagggtggaataatagacaatgcagactccaaaaggtgggagaggtagatgaggattgataaattacctattgagtacaatattcattgtttgggtgatgactacactaaaacttcagacttcattactgatcaatatgtacatgtaagaaatctgcacttgtaccccctaaatatataaaaattcaaaaatttaagaaattgttgcaaatctccaaacactttc

SEQ ID NO: 272482 - DNA, 543 bp, Homo sapiens
tgggtggggatacagatccaaaccatataaagggagagttaaattttatcttccctttggagttggttggaagctggtgtggagacggcagacatgctgcttctgctacctgctctctctttgctctcctcttttcttttagctgcaaatattttgattgaagctaggaggcaagggaaagaggtaaagaggataggacaatttttaccragctgtttggcttcatgttctctgggattggaatgttgttaaagtcagtgagcctaagtggatccctagaagattaaagctgagtaccttttggagcgttttcataggctatttagaaagttttctcatgccttcgattctggaatctagtttacccgagaggatgcatatatcttctttgtgattactggtcttccttgcccatctactgagcatcctgcagtccacttctcacctcattctgctgaaaccttttaaccaacaagaggacctattagacaggaagagagcttgtgatgctctgccatgtactccatatttgggtcatagcaa

SEQ ID NO: 272483 - DNA, 543 bp, Homo sapiens
tgggtggggatacagatccaaaccatataaagggagagttaaattttatcttccctttggagttggttggaagctggtgtggagacggcagacatgctgcttctgctacctgctctctctttgctctcctcttttcttttagctgcaaatattttgattgaagctaggaggcaagggaaagaggtaaagaggataggacaatttttaccaagctgtttggcttcatgttctctgggattggaatgttgttaaagtcagtgagcctaagtggatccctagaagattaaagytgagtaccttttggagcgttttcataggctatttagaaagttttctcatgccttcgattctggaatctagtttacccgagaggatgcatatatcttctttgtgattactggtcttccttgcccatctactgagcatcctgcagtccacttctcacctcattctgctgaaaccttttaaccaacaagaggacctattagacaggaagagagcttgtgatgctctgccatgtactccatatttgggtcatagcaa

SEQ ID NO: 272484 - DNA, 501 bp, Homo sapiens
atttcatgggcatttatcagttcccaaatacttttataatttcttatgcctgtctttaatctcttaatcctgttatctttgtaggctgaggatgtatgtcacctcagaaccactgtgataattgtgttaactgyacaaattgattgtaaaatgtgtgttttgaacaatatgaaatcagtgcaccttgaaaaagaacagaataacagtgatttttagggaacaagggaagataaccataagatctgactgcctgtggggttgggcaaaaaaagccatatttttcttcttccagagagcctataaatggacatgtaagtaggagagacattgtgaaattcttttcctagcaaggaatattaatattaataccctgggaaaggaatacattcctggggggaggtctataaacagccactctgggaatgtctgtcttatgcggttgagataaggactgagatacaccctggtctcctgcagtaccctcaggcttactagggtggg

SEQ ID NO: 272485 - DNA, 501 bp, Homo sapiens
atttcatgggcatttatcagttcccaaatacttttataatttcttatgcctgtctttaatctcttaatcctgttatctttgtaggctgaggatgtatgtcacctcagaaccactgtgataattgtgttaactgtacaaattgattgtaaaatgtgtgttttgaacaatatgaaatcagtgcaccttgaaaaagaacagaataacagtgatttttagggaacaagggaagataaccataagatctgactgcctgtggggttgggcaaaaaaagccatatttttcttcttscagagagcctataaatggacatgtaagtaggagagacattgtgaaattcttttcctagcaaggaatattaatattaataccctgggaaaggaatacattcctggggggaggtctataaacagccactctgggaatgtctgtcttatgcggttgagataaggactgagatacaccctggtctcctgcagtaccctcaggcttactagggtggg

SEQ ID NO: 272486 - DNA, 515 bp, Homo sapiens
gcttactagggtggggaaaaactctgccctggtaaatttgtggtcagaccagttctctgctgtygaaccctgttttctgttatttaagatgtttatcaagacaatacatgcacccctgaacatagacgtctccttatcagtggttctgcttttgccctttgccttgtgatctttgttggacccttatcagtagttctgcttttgccttttgtcctgttctctcagaagcatgtgatctttgttagacccttattagtagttctgctttttgccctttgaagcatgtgatctttgtacctactccctgttcttacaccccctccccttttgaaacccttaataaaaacttgctggtctgagactcaggcaggcatcatggtcctaccaatatgtgatgtcacccccagctgtccagctgtaaaattcctctctttatactgtctctttatttctcagctggctgacacttatggaaaagagaaagaacctacgttgaaatattgggggtgggttcc

SEQ ID NO: 272487 - DNA, 515 bp, Homo sapiens
gcttactagggtggggaaaaactctgccctggtaaatttgtggtcagaccagttctctgctgtcgaaccctgttttctgttatttaagatgtttatcaagacaatacatgcacccctgaacatagacgtctccttatcagtggttctgcttttgccctttgccttgtgatctttgttggacccttatcagtagttctgcttttgccttttgtcctgttcyctcagaagcatgtgatctttgttagacccttattagtagttctgctttttgccctttgaagcatgtgatctttgtacctactccctgttcttacaccccctccccttttgaaacccttaataaaaacttgctggtctgagactcaggcaggcatcatggtcctaccaatatgtgatgtcacccccagctgtccagctgtaaaattcctctctttatactgtctctttatttctcagctggctgacacttatggaaaagagaaagaacctacgttgaaatattgggggtgggttcc

SEQ ID NO: 272488 - DNA, 561 bp, Homo sapiens
actattccatccaacatccactccttactgcaatcatctataaataatgccaaaataagtgattcgctctcattctttgaatattttagcttccggttcactgtcattttctctaacactacttctgccttagttctcakaaatttcaaagttgcataagtaatcctttctatactatggactctcagttctttgacatctctctccagctaccttgccctcacccaatctcagccaattcttgtcattaccaataactgcactccctctctagtcacagtttaaaatttccactcttgaaccaccatcttctatctttcaggcttacactatcagtatggtgactgtaataatttcacagcgaaacaaaagaaaacttgaagacaccactataattaataacacccaaaaagataaactttattgcatttctaagattaaaaaaatgcgatgataaaaggacaataaaaagcatttagaatactacaaccaaaattttagaaattcagtggaatggtaaaagacacttccaaataaacaagaccgaaaaatatgcttttc

SEQ ID NO: 272489 - DNA, 583 bp, Homo sapiens
gtgtgaggtctgagatttaaggctccaatctattttgatttgactttcttatatggtgagagatagaggtctatttcattcttttgcatgcagatatccagtttacttarcatcatttattgaagaaactatctttcccctagtatatgttcttggcatccttgtcaaaaatgagctcaccgtagatgtatgaatttatctctgggttttctatttttgttccactgattgttgtgtctgttctgatgccagtaccatgcctttttggttaccataactctgcagtgcaatttaaagtcaggtaatgttattctcccagttttgttctttttttttgcttgggatagctttggctatcctgggtctttagtgcttccatataaattttaggatttttaaaatttttgtctagtcattggtattttgatagggtttgcattaaatctgtaaattactttggatagtatggactttctaacaattttgattctttaaatccatgaatatgaaatatctcttatatttttgtgtcctcttccatttcttgcatcaatgttctatagttttcattgtagaggtcttt

SEQ ID NO: 272490 - DNA, 583 bp, Homo sapiens
gtgtgaggtctgagatttaaggctccaatctattttgatttgactttcttatatggtgagagatagaggtctatttcattcttttgcatgcagatatccagtttacttaacatcatttattgaagaaactatctttcccctagtatatgttcttggcatccttgtcaaaaatgagctcaccgtagatgtatgaatttatctctgggttttctatttttgttccactgattgttgtgtctgttctgatgccagtaccatgcctttttggttaccataactctgcagtgcaatttaaagtcaggtaatgttattcycccagttttgttctttttttttgcttgggatagctttggctatcctgggtctttagtgcttccatataaattttaggatttttaaaatttttgtctagtcattggtattttgatagggtttgcattaaatctgtaaattactttggatagtatggactttctaacaattttgattctttaaatccatgaatatgaaatatctcttatatttttgtgtcctcttccatttcttgcatcaatgttctatagttttcattgtagaggtcttt

SEQ ID NO: 272491 - DNA, 583 bp, Homo sapiens
gtgtgaggtctgagatttaaggctccaatctattttgatttgactttcttatatggtgagagatagaggtctatttcattcttttgcatgcagatatccagtttacttaacatcatttattgaagaaactatctttcccctagtatatgttcttggcatccttgtcaaaaatgagctcaccgtagatgtatgaatttatctctgggttttctatttttgttccactgattgttgtgtctgttctgatgccagtaccatgcctttttggttaccataactctgcagtgcaatttaaagtcaggtaatgttattctcccagttttgttctttttttttgcttgggatagctttggctatcctgggtctttagtgcttccatataaattttaggatttttaaaatttttgtctagtcrttggtattttgatagggtttgcattaaatctgtaaattactttggatagtatggactttctaacaattttgattctttaaatccatgaatatgaaatatctcttatatttttgtgtcctcttccatttcttgcatcaatgttctatagttttcattgtagaggtcttt

SEQ ID NO: 272492 - DNA, 555 bp, Homo sapiens
ggtgggaaagatgcttgatattatttcaattttttgaatgttttaagacttgtttggtgacctaacctatggcctatccttaagaataatccatgtgctgaggaaaagaatgcatattctgcagctattcgttgaaataatctgtaaacatctattagatacaattggtcttatagtgcagattaaatctgatgtttctttgttgattttctgtctacgtgatctgtccaaggctgaaattggggcattgaagyctccagttattcttttattctggcctatctctctctttagcgctaataattgctttttatatgtgggtgctccactgttgggtgtatatatacttagaattgttacatcttcttgctgatttgactcctttatcattacatactgaccttctttgtcttttcttagtttttgtcttgaaatctattttgtctgatataagtggagtgcctcctactctcttttggcttccattggcatggaatgtcttttttcattccttttcagtgcacttgtgtctttatatgttacatgtgtttcctg

SEQ ID NO: 272493 - DNA, 597 bp, Homo sapiens
gctaataattgctttttatatgtgggtgctccactgttgggtgtatatatacttagaattgttacatcttcttgctgatttgactcctttatcattacatactgaccttctttgtcttttcttagtttttgtcttgaaatctattttgtctgatataagtggagtgcctcctactctcttttgkcttccattggcatggaatgtcttttttcattccttttcagtgcacttgtgtctttatatgttacatgtgtttcctgtagacaacagatcattgcatcttgtttgtttgttttttttttaattcattcagccactctatgtcttttgattagagagtttagtccatttacattcaatgttattattgataagtacagacttactcctgccattttgtgatttgttttctggttgctttgtggtcttctcttccttccttctttccttcctttgtgtcttcctcttagagaaggtgattttctctagtgatatggtttaattgatttctttttattttttgtgtatctgttgtatgttttttgatttcagattaccatgaggcttgcaaatattgtcttataacccatcatttta

SEQ ID NO: 272494 - DNA, 593 bp, Homo sapiens
tggagcaccatcgtatgttatttgtttctttttctcttgctccttttagaatgctttctttatccttgacctttggattttgattattgaatactttgaggtagtcttccttgggttaaatctgctcagtgctgtataaccttcttgttcttgagtactggtatctttcactaggtttggagagttctctgttattaccctttgaatacattttctacctttgtctctttctctaccatctctttaaggtcaataactctgagatttgccagtttgaggggtttttttatatctygcagacatgcttcattcttttttatttttattatgtctcatctgtgtattttcaaataacctgtcttcaagctcactgattctttcttctgctggatcaattatgctattaaaagattctattacattattcaatgtgtagctgcattttcaattccataattgctacttgattctttctaattattttgatatctttgttaaatttatctgatagaattctaaatttcttctctgtgttatcttgaattccttagagtttccttaaaacagctatcttgacttctctgtctgaaaag

SEQ ID NO: 272495 - DNA, 593 bp, Homo sapiens
tggagcaccatcgtatgttatttgtttctttttctcttgctccttttagaatgctttctttatccttgacctttggattttgattattgaatactttgaggtagtcttccttgggttaaatctgctcagtgctgtataaccttcttgttcttgagtactggtatctttcactaggtttggagagttctctgttattaccctttgaatacattttctacctttgtctctttctctaccatctctttaaggtcaataactctgagatttgccagtttgaggggtttttttatatcttgcagrcatgcttcattcttttttatttttattatgtctcatctgtgtattttcaaataacctgtcttcaagctcactgattctttcttctgctggatcaattatgctattaaaagattctattacattattcaatgtgtagctgcattttcaattccataattgctacttgattctttctaattattttgatatctttgttaaatttatctgatagaattctaaatttcttctctgtgttatcttgaattccttagagtttccttaaaacagctatcttgacttctctgtctgaaaag

SEQ ID NO: 272496 - DNA, 593 bp, Homo sapiens
tggagcaccatcgtatgttatttgtttctttttctcttgctccttttagaatgctttctttatccttgacctttggattttgattattgaatactttgaggtagtcttccttgggttaaatctgctcagtgctgtataaccttcttgttcttgagtactggtatctttcactaggtttggagagttctctgttattaccctttgaatacattttctacctttgtctctttctctaccatctctttaaggtcaataactctgagatttgccagtttgaggggtttttttatatcttgcagacatgcttcattcttttttatttttattatgtctcatctgtgtattttcaaataacctgtcttcaagctcactgattctttcttctgctggatcaattatgctattaaaagattctattacattattcaatgtgtagctgcattttcaattccataattgctacttgattctttytaattattttgatatctttgttaaatttatctgatagaattctaaatttcttctctgtgttatcttgaattccttagagtttccttaaaacagctatcttgacttctctgtctgaaaag

SEQ ID NO: 272497 - DNA, 593 bp, Homo sapiens
tggagcaccatcgtatgttatttgtttctttttctcttgctccttttagaatgctttctttatccttgacctttggattttgattattgaatactttgaggtagtcttccttgggttaaatctgctcagtgctgtataaccttcttgttcttgagtactggtatctttcactaggtttggagagttctctgttattaccctttgaatacattttctacctttgtctctttctctaccatctctttaaggtcaataactctgagatttgccagtttgaggggtttttttatatcttgcagacatgcttcattcttttttatttttattatgtctcatctgtgtattttcaaataacctgtcttcaagctcactgattctttcttctgctggatcaattatgctattaaaagattctattacattattcaatgtgtagctgcattttcaattccataattgctacttgattctttctaattattttgatatctttgttaaatttatctgatagaattctaaatttcttcyctgtgttatcttgaattccttagagtttccttaaaacagctatcttgacttctctgtctgaaaag

SEQ ID NO: 272498 - DNA, 555 bp, Homo sapiens
cctgggacttaaccctgagtgaatttggatgtcattataaagctctgagctgaagagagacatgatttgacttatactttaaaagaatttccctgacacatgagttactgtaaggagacaaagataaaagcaggaagccttgttggtggactatgcagtcacctaaaagagacattatgtagggcaaagagtgagttggctataactaatgtcctaacagattagatatggagtgtgaaagaaaaagggttaaggatgactccaactttgaaactgaacatctrttgggagggattagaaattaactatgaaagaaacagtttctttggaaactgtttcttatggaaacagtctatggaagtagacaatcagaaattcattttgaatgtgtaaaatgcaagattttacagacatttataataggttgaattatgcacccttcagatcaacacagcatggcacacttaccttttgatggtagtacaccaagaactacttgaactatttctacagtcttggtgccaggtcaccataccactgatattattacagacc

SEQ ID NO: 272499 - DNA, 520 bp, Homo sapiens
gatcaacacagcatggcacacttaccttttgatggtagtacaccaagaactacttgaactatttctacagtcttggtgccaggtcaccataccactgatattattacagacccaaccttacwgcagcagactgttcagggtcttccaaattatcaactagcatgtctccacagagtgtcacttaccacccttgcctcaagtattttgtctccttccctggtacttctctgtagacaacattataaaggatgccagaggccccacacattgctcacacatatgatatatgtaagaggggaggaatgatagcccatttgttgaatccttgaccaacgagagacaggaactgattattttcttcccccattctccatggacacatgattctgaaatgcagcagtgttccaaagtgttgaagaactagtcacacttagtggttagctccatgatacatccttattttggctctccctaatttccttcttcactttctttatcccttatttttttatccctgata

SEQ ID NO: 272500 - DNA, 520 bp, Homo sapiens
gatcaacacagcatggcacacttaccttttgatggtagtacaccaagaactacttgaactatttctacagtcttggtgccaggtcaccataccactgatattattacagacccaaccttacagcagcagactgttcagggtcttccaaattatcaactagcatgtctccacagagtgtcacttaccacccttgcctcaagtattttgtctccttccctggtacttctctgtagacaacattataaaggatgccagaggccccacacattgctcacacatatgatatatgtaagaggggaggaatgatagcccatwtgttgaatccttgaccaacgagagacaggaactgattattttcttcccccattctccatggacacatgattctgaaatgcagcagtgttccaaagtgttgaagaactagtcacacttagtggttagctccatgatacatccttattttggctctccctaatttccttcttcactttctttatcccttatttttttatccctgata

SEQ ID NO: 272501 - DNA, 520 bp, Homo sapiens
gatcaacacagcatggcacacttaccttttgatggtagtacaccaagaactacttgaactatttctacagtcttggtgccaggtcaccataccactgatattattacagacccaaccttacagcagcagactgttcagggtcttccaaattatcaactagcatgtctccacagagtgtcacttaccacccttgcctcaagtattttgtctccttccctggtacttctctgtagacaacattataaaggatgccagaggccccacacattgctcacacatatgatatatgtaagaggggaggaatgatagcccatttgttgaatccttgaccaacragagacaggaactgattattttcttcccccattctccatggacacatgattctgaaatgcagcagtgttccaaagtgttgaagaactagtcacacttagtggttagctccatgatacatccttattttggctctccctaatttccttcttcactttctttatcccttatttttttatccctgata

SEQ ID NO: 272502 - DNA, 594 bp, Homo sapiens
tccagaaggatgactggatcagactttgcttctactttttacttcccctctgactctctaggggaaaaaaatagttctgggaagctaaagtggataaaggaaggaagagcatgcaaataggtaaaaattctagaaaatggctcatttgtttgtgcacagcaaaggcctaccttttcatctacccaactttcccttcctagggaacattttgaagtaaagttccaaaattattatttttatatttctcgattttgtttccattttaattaatgtatttgtctcaatttatttgtctgctaaaccaggtaactccaagtctcgatcctcttmggttctttgtggcaaggcatcttgctcctctttggcaacctgctctgtaggaacacaacattgcagcctcttctgctcagttcattcagttaccatccacctgtttcttagcctgtaaacttttcttgaaatcagtcatccattaaagcatcctttcttattccttgtctttatgagtttatgcagttttttgtttccttttagtggaaaaggaagaggatcaggaggaaaatgcacataattagctcacattatttagccaga

SEQ ID NO: 272503 - DNA, 487 bp, Homo sapiens
ctctctctctcctgcctggcatgtaagatgtactgacttccccttcatcttccaccatgattgtaagttccctgaggcctccccagccatgtgtcctgtacagcctgcagaactgtgaatcaattaaacctcttttttttttaaatgaattacccagtctcaggtagttctttatagcagtgtgaggacagactaatacactatttttgctttaattgcctgttcttytgaagtcttacacacaaaaatttgcccagactaatgttgtggagtatttctccaatatcttcttctattagttttatagttttaaatcttaaatttaaatctttgatattttttattggatttatatggatttgagagacgggtctagtttcatttctctgcatatagttatctagttttcccagcaccatttattgaagatactgtcctgtccccattgtatgttattggtatctttgtcaaaggtaagtggctctaa

SEQ ID NO: 272504 - DNA, 487 bp, Homo sapiens
ctctctctctcctgcctggcatgtaagatgtactgacttccccttcatcttccaccatgattgtaagttccctgaggcctccccagccatgtgtcctgtacagcctgcagaactgtgaatcaattaaacctcttttttttttaaatgaattacccagtctcaggtagttctttatagcagtgtgaggacagactaatacactatttttgctttaattgcctgttcttctgaagtcttacacacaaaaatttgcccagactaatgttgtggagtatttctccaatatcttcttctattagttttatagttttaaatcttaaatttaaatctttgatattttttattggatttatatggatttgagrgacgggtctagtttcatttctctgcatatagttatctagttttcccagcaccatttattgaagatactgtcctgtccccattgtatgttattggtatctttgtcaaaggtaagtggctctaa

SEQ ID NO: 272505 - DNA, 487 bp, Homo sapiens
ctctctctctcctgcctggcatgtaagatgtactgacttccccttcatcttccaccatgattgtaagttccctgaggcctccccagccatgtgtcctgtacagcctgcagaactgtgaatcaattaaacctcttttttttttaaatgaattacccagtctcaggtagttctttatagcagtgtgaggacagactaatacactatttttgctttaattgcctgttcttctgaagtcttacacacaaaaatttgcccagactaatgttgtggagtatttctccaatatcttcttctattagttttatagttttaaatcttaaatttaaatctttgatattttttattggatttatatggatttgagagacgggtctagtttcatttctctgcatatagtyatctagttttcccagcaccatttattgaagatactgtcctgtccccattgtatgttattggtatctttgtcaaaggtaagtggctctaa

SEQ ID NO: 272506 - DNA, 568 bp, Homo sapiens
ggtctagtttcatttctctgcatatagttatctagttttcccagcaccatttattgaagatactgtcctgtccccattgtatgttattggtatctttgtcaaaggtaagtggctctaaatacatgggtttatttctgggttctctattctgttccactggwctttgtgtctattttcataccagtgacatgctgatttggatactgtagttctgtagtaaattttgaagtcaggtagtgtgatccttctagcattgttctgttctttttgctcaggattgcttttgctattcaggacattttgtgaatccttttaatttttacaattatttttatatttttgtgaagaatgtcattggtattttgataataattgcatttcatctgtaaattgctttgggtagtactgccattttaacaatattaattcttccaattcatgagcgtggaatattttccattttttgtgtcatcctcatcctcaattattttcatcaatgttttatagttttccttgtatagatcttttacttgtttggctaaactgattcctaggtattttatatttt

SEQ ID NO: 272507 - DNA, 559 bp, Homo sapiens
tgccacgttattgttgatgataatcttggctctgtgtatttgtttttggatttctgtgaaaagaagtgaaaccaaccttctacatcaccgtttctactcttgtgttaatctctccttttatgtcctcatttctatcarttttactttgcagtttattaacttcatagtttctgctgtcactttcttgtagtctgcattcttctctccatttaaactattcaatgtagtacttaaagatagacatgactttcagacaggctaatatttgcttatgagtgtcaaagttcttaaaactgcatactgcatcaagaagtgaagcaatgtatctttctggacatttctatttaaaaaaaatcagtgggccaggtgcagtggctcatgcctgtagtcccagcactttgggaggccaaggtggtggatcacctgaggtcaggagtttgagaccagcctggccaacatggtgaaaccctgtctctactaaacacagaaaaatcagccgggtgtgatggtgcgcacctgtagtcccagctactcgggaggctgaggcaggagaatcact

SEQ ID NO: 272508 - DNA, 559 bp, Homo sapiens
tgccacgttattgttgatgataatcttggctctgtgtatttgtttttggatttctgtgaaaagaagtgaaaccaaccttctacatcaccgtttctactcttgtgttaatctctccttttatgtcctcatttctatcaattttactttgcagtttattaacttcatagtttctgctgtcactttcttgtagtctgcattcttctctccatttaaactattcaatgtagtacttaaagatagayatgactttcagacaggctaatatttgcttatgagtgtcaaagttcttaaaactgcatactgcatcaagaagtgaagcaatgtatctttctggacatttctatttaaaaaaaatcagtgggccaggtgcagtggctcatgcctgtagtcccagcactttgggaggccaaggtggtggatcacctgaggtcaggagtttgagaccagcctggccaacatggtgaaaccctgtctctactaaacacagaaaaatcagccgggtgtgatggtgcgcacctgtagtcccagctactcgggaggctgaggcaggagaatcact

SEQ ID NO: 272509 - DNA, 559 bp, Homo sapiens
tgccacgttattgttgatgataatcttggctctgtgtatttgtttttggatttctgtgaaaagaagtgaaaccaaccttctacatcaccgtttctactcttgtgttaatctctccttttatgtcctcatttctatcaattttactttgcagtttattaacttcatagtttctgctgtcactttcttgtagtctgcattcttctctccatttaaactattcaatgtagtacttaaagatagacatgactttcagacaggctaatatttgcttatgagtgtcaaagttcttaaaactgcatactgcatcaagaagtgaagcaatgtatctttctggacatttctatttaaaaaaaatcagtgggccaggtgcagtggctcatgcctgtartcccagcactttgggaggccaaggtggtggatcacctgaggtcaggagtttgagaccagcctggccaacatggtgaaaccctgtctctactaaacacagaaaaatcagccgggtgtgatggtgcgcacctgtagtcccagctactcgggaggctgaggcaggagaatcact

SEQ ID NO: 272510 - DNA, 441 bp, Homo sapiens
aaacaaaaaaaccccaagactattcattttaacgttgtacatcattgcaaagtattgaaaaagcttaatgtccatacatggggagtgggcctctcacctacgatatatccaccatggagtactataaagctataacaaagaataatgaaacagtctattacttgatatgaagtgaactccaagatatattaggaaaagaacgccaagcaatatcacttctatgctatcccattatataagaaagaagaggataaaaggaaatagatatgtgcacatttgcagaaaacacatgcagaaaatataaaccagacactaacagattakttacaggagtgcaaaagaataaagtggagcaaattgagaaataagaatggatttatggggatgaccattaaccacatttctctgaatatacatttttgtatagttctttcacttaga

SEQ ID NO: 272511 - DNA, 588 bp, Homo sapiens
aaagtactaaccttagcaattttggaaaataatatttgaatgtgaatttggaaaataatatttggggtagaatgctaaggataagaagaattgcactttgatactgtatttttattaataaatgtgtttcaaacaggggcttagctagcaattctgaaactattttatgtgtttaccaaaactgaacaaacaagtatatatttwttgtggatgttgagtgccagatttatcacagtgagagaaagaatttgtaaataaggaaagaaagaagactagaatggaccttgtggtgttgaattagaatttgaaatgccagaatgaattcatggttttaattatgtatacagataacggatagactgatatgataatacatatagatttatggataggtttctgtaaatatccatagctttgtttcctagcttagtttgctgacagggcttagaagcaacgacagaataacagcaatgagcatgtttagcctcccatcttggtttggagaaattgttgattcaaggactgggacagtgaacatacacaacaggaccagaatgttttgatatcagagtaaggaaatgttcaaaa

SEQ ID NO: 272512 - DNA, 506 bp, Homo sapiens
aaagaaagaagactagaatggaccttgtggtgttgaattagaatttgaaatgccagaatgaattcatggttttaattatgtatacagataacggatagactgatatgataatacatatagatttatggataggtttctgtaaatatccatagctttgtttcctagcttagtttgctgacagggcttagaagcaacgacagaataacagcaatgagcatgtttagcctcccatcttggtttggagaaattgttgattcaaggactgggacagtgaacatacacaacaggwccagaatgttttgatatcagagtaaggaaatgttcaaaacatgataaagaattattgaaaaggcacagaagtcacttgaagtaactcccaatgggataaagctgggataattttgtcaacaaaatcgatatgttagtattggattataaccaataaaataatatccatgaatctgtactcatggatatttatgagcccataagtaaataattgaatg

SEQ ID NO: 272513 - DNA, 569 bp, Homo sapiens
ttcctgaatcccccagaacaccagcctaagtgacctaattatgcaaacaatgtgaaatcccaagcaaatttgcatgagcactragatctctgcatatcaacatgctaaagggataatacctaactgatggtaaggaaacaactgctttctctcagaagcaggcaatactagctctactgagtatgactctcaatccctcagaggtggactgggagcccttgaaatgagagtggctgccttaagagtttgtcctcttgccacccagaaagccagaaggatggacaactgaccagaaactgaatttaaaccctgaaagtttagtggttgtaaataattttgttcctcccatctgaacagtgcctatgcatcttgccttccctggaaaataaaatccaaactcatcacccagtcccttggatatttatagacatccaacttacacataggtttaaatgaactagtctttcatgcattcatgatcggtaactggtggatttaccatacacctacttctatagatcacatgacatactgcactttcatccaactgatatctttcctggagatgg

SEQ ID NO: 272514 - DNA, 599 bp, Homo sapiens
ataagccagtattactttgattccaaagccaaggaaattacaagaaaagaaaacaaaaggcctacattgtagaagaatataggtataaaaatcctcagcaaaggactagcaaactgaatctatcagcatattagattatacactatgaccaagtgggatttattccagaaatgcaacagaggccaaataaatacaaatcaataaatgtgatacatcatattaatagaataaaggggaaaacacatggtcacctcaactgatgtaaaaaaatatgtttgacatgttttcatggaaaaacactcaacaaacaaagaacacagggaatttccagaacctgataaagggaatgtataaaaaaacccacaactaacataatactcaaaggttcaacttggaatgatttcccctaagatgatgaataagacaaagatgtccatcctctccacatatattcatcattttcccrgaatttcatagaatttactggctatagtaagcagactagaaaaagaaagggcatccaatctggaatagatgtgaaattatctctgttcacaaatataacatgatagtatatgtagaaaatcctaaataatcca

SEQ ID NO: 272515 - DNA, 622 bp, Homo sapiens
attttccctcaggcattttccctgccctgcacttaagctgttttattttcttttctccacatgtgaggagttaacatagccatgtgaacacagggagcttttstatgcaagagtttgtttttgtttttttttaatttccttttgaaaggcatcttattaggccaggacccccagttcaccagttcactagactccctaacttaatgagtccttgcacctttctgaggtacccctttgtcccaaactcaattccaagctttggattgaagccttaggaaaaaaaaaaagaaaagaaaaaactggatctgagggatccagagacagatgaccatggaagtcaaggggcacagtgcagatgagcatgactaattcttgctgattaccaccccaacaccatttcatggacagaggtcatgctagcatccatggcacacatgagactaccaatagcggggaggataggcaatgtataggtgaatggggataattcctaccctctagaccctctagaccctctagacctccctgtttcacatggatgaaggccacattgacacccattgacagcaaccagccgaggtcaccaggcctctgggatataaagagggaagaaagaaagaaa

SEQ ID NO: 272516 - DNA, 581 bp, Homo sapiens
cagaatagttatttttaaaagtgcaaaaaataacagatgctggcaagattgtggagaaaaaggaatgcttatacactgttggtgggartgtaaattaattcaaccattgtgggagacagtgtggcaattcctcaaagacctagagacagaaatactattcaacccaactatcccattacttggtatatacccaaaggaatataaattgttttattatagagacacatgcacatgtatgttcattgcagcactattcacaatagcaaacacatggaatcaacctaaatgctcatcagtgaatgactggataaagaaaatatggtatatgtacaccttggaatattacagagccagaaaaaggaatggtattatgtctttgcaaggacgtggatggagctggaggccattatcctttagcaaactaattcagaaacagaagacaaaatgccatattttctcatattttaatatactttcagattacagctgagaagtcaactctgaaatatcacatgccataatatggtcctacttactgcaagcaactggactcagttcatgtaagttactgcaaattgtat

SEQ ID NO: 272517 - DNA, 581 bp, Homo sapiens
cagaatagttatttttaaaagtgcaaaaaataacagatgctggcaagattgtggagaaaaaggaatgcttatacactgttggtgggaatgtaaattaattcaaccattgtgggagacagtgtggcaattcctcaaagacctagagacagaaatactattcaacccaactatcccattacttggtatatacccaaaggaatataaattgttttattatagagacacatgcacatgtatgttcattgcagcactattcacaatagcaaacacatggaatcaacctaaatgctcatcagtgaatgactggataaagaaaatatggtatatgtacaccttggaatattacagagccagaaaaaggaayggtattatgtctttgcaaggacgtggatggagctggaggccattatcctttagcaaactaattcagaaacagaagacaaaatgccatattttctcatattttaatatactttcagattacagctgagaagtcaactctgaaatatcacatgccataatatggtcctacttactgcaagcaactggactcagttcatgtaagttactgcaaattgtat

SEQ ID NO: 272518 - DNA, 524 bp, Homo sapiens
atgtcagcagccccagcattttaaatctttccttgctgccttgttgcattttgatacatgtcttcatgtaccaaacccagtttgtctcttctcaccttcatgccatcaaatgccaaacggtcatgcaactggagcctcaaacaatggctcccttttactggggacccttagacaggcctttgagggagatctgactgccatttttccaaagcagtgccccctktcagcaggaagcagttaagattggtcttcatccctaaactaatggcagttagatgtacctcttcagaggggggaagtaggacaggaggcagctaaatgcctaggtagttaggaacaggttcctgacaaaaccccatcttcaagccaaaaaaacgcttgaaggctggcagagcagactgctggtcacagattaaacctgcaacccagagtgagaactttactcaataaactccgcaacttgctcacttttagattgtcagcatatccttatttttcttcggcatgggacaagaactcaggtg

SEQ ID NO: 272519 - DNA, 524 bp, Homo sapiens
atgtcagcagccccagcattttaaatctttccttgctgccttgttgcattttgatacatgtcttcatgtaccaaacccagtttgtctcttctcaccttcatgccatcaaatgccaaacggtcatgcaactggagcctcaaacaatggctcccttttactggggacccttagacaggcctttgagggagatctgactgccatttttccaaagcagtgccccctgtcagcaggaagcagttaagaytggtcttcatccctaaactaatggcagttagatgtacctcttcagaggggggaagtaggacaggaggcagctaaatgcctaggtagttaggaacaggttcctgacaaaaccccatcttcaagccaaaaaaacgcttgaaggctggcagagcagactgctggtcacagattaaacctgcaacccagagtgagaactttactcaataaactccgcaacttgctcacttttagattgtcagcatatccttatttttcttcggcatgggacaagaactcaggtg

SEQ ID NO: 272520 - DNA, 608 bp, Homo sapiens
ctggctaacatggtgaagccacgtctgtactaaaaatacaaaaacaaaattagccgggcgtggtggcaggcgcctgtagtcccagctactcgagaggctgaggcgggagaatggcgtgaacccggcaggcggtgcttgcagtgagccgagatcacgccactgcmctccagcctgggtgacagagtgagactccgtctcaaaaaaaaaaaaaaaaagtatatgggagggaataaaatttaaaagatccatgaagctaggatagagaaaatgggaaggtatccctctccccaggccagctcaaattgtacttatcctctgatataaattagagatttaagaaaatagtaaaataatagagaaaatttaagaagaagacataattgaacataccatgtcactatataattcaaaattatagcttatttataaaaaacttctgtgaaatggagatctgtcatagactatagaaatctaaaaaaaggtaacataaagagcaagatctatatgaaatatgaaaaagaaatttgtgagatttttattagtacaagaaatacatgtcagtaatgtacttgtcacgttctttgcaattttatatttgaaggctagca

SEQ ID NO: 272521 - DNA, 517 bp, Homo sapiens
ccaggctagtggtccttcccttgtgatctgcagtccttcagctccttagcaccgtaaatgtcgcccatctcttgttccagagagctcgcctcctcttgttgacgtggctatggcaactggcaccaggatgcacagggatccaaggcccatagggcccacatgggcttgagcagtggccctgcccagactccaggaagttctctgtgtcaatcaggagatgggggctaaggaggatttcccgtgcccagggttgcaaaggtcygtgacagaagtgtgagtccccaagggctctggctcacttatcctttccccatagtagggaccctcctctggctctgtgcccatcctgggtgggcagctgtcctacctagctcctctctgctctccatggtggccattgctctcttgatgaaccccagcttggttccctggacgttccacttgaagagctggagtttacttgccgctctctctcctctttgagggagcaatgcttacagccaccttggtgcttctc

SEQ ID NO: 272522 - DNA, 517 bp, Homo sapiens
ccaggctagtggtccttcccttgtgatctgcagtccttcagctccttagcaccgtaaatgtcgcccatctcttgttccagagagctcgcctcctcttgttgacgtggctatggcaactggcaccaggatgcacagggatccaaggcccatagggcccacatgggcttgagcagtggccctgcccagactccaggaagttctctgtgtcaatcaggagatgggggctaaggaggatttcccgtgcccagggttgcaaaggtctgtgacagaagtgtgagtccccaagggctctggctcactyatcctttccccatagtagggaccctcctctggctctgtgcccatcctgggtgggcagctgtcctacctagctcctctctgctctccatggtggccattgctctcttgatgaaccccagcttggttccctggacgttccacttgaagagctggagtttacttgccgctctctctcctctttgagggagcaatgcttacagccaccttggtgcttctc

SEQ ID NO: 272523 - DNA, 588 bp, Homo sapiens
aaactgattattatagattaaattaataccattatgaatttytatttttctgactatcttgaagagactaatttgaatatagttttcagattcttcaataaaattgatattatcaggagttcctgcctggctgttgacttcttttttataataacctcaatgtgttagcatgtttttggatatgggtgggtggctcactttggttgacaagtattttgtttgtatcttctctatctctgtccctactgctttgctcattcctttccatcttcgagttttgtatttgcttccactgacccctagttttgaataagaacttatggcgatttggagtcttgctccacataatatcagagatattacaaagccaatcacgaggtcagaagctgcctttactcagatcttgaatcctctcttcctagatgtgcagccatcatgggatatctactggggccgtgtgttttgctggtatagttgttccccttattcatcgtttcactttctacagtttcagttacctgcagtcaaccaggggtctgaaaatattaaatgaaaaattccagtgataaacaatttatgttttaaatt

SEQ ID NO: 272524 - DNA, 623 bp, Homo sapiens
tatttgcatatgatatttttcttaattcattcaattagattgcatcatcttcatatatttaaatccacaagttcatctttctgagaaaattaggaaaaacatttttcttataattggtgactaaaaattatctttcttatctaaaatattatcttgtttgtgtcttcttagcttaataaaagtcaatataagtgaatattttctacactattggacaatactaattaagtattaattaccatagtgagttataaattgcatttatatatttgtttaatgaagtgtctgctatatatgtcaacaagaacaaaggaaaattaaggagtgtaatatccagagtaactggaagtttaaagagatataaattaagggaaacatcccttataaaaaaaagtagtagtaaagtacatatgctaatatgctttttattaattttttgaaagcatggattaaaggagaacataaaatgaattaaaacgtgattatatttttgatgttagtgaataggccatacagccaaatatagcacttgggctcacacaggtgaaaaatastcaaatcaagattcctaccaataaaagcctgcctttgcctgtgtaggtaaaagtaaattgaaatttgcc

SEQ ID NO: 272525 - DNA, 547 bp, Homo sapiens
gtggatacacctcattatttatagtggcttttctcgtggcttaatttatggtcagttttacgattatgttgtatatagaataggcagtttaaaataaaatgtagttttctttcattttatattttaaatatgtatcaactagatatattcataatttatgttaatttttccatctctaaatattttgtatccacttgacctgttataaaacagagataactagaaacctattgcttgtatgatattgcaagcatcattcaagcaatagcaatatgcattgctttttctctttgcatttctattgtattgctatttctctttgtatttcctgtaatttttgtgttaaaaatgtttatgctctgttttgggtacagagatattagttcttcactgtggattatatagtatgccattgtaaaatttaattttttgctttgtggatgctttactgttgattctggacctgcttgatattaaattcaygaccctgttttctcattgttttcacttgcttgggatgtccttgcccatttttttagaagttgtc

SEQ ID NO: 272526 - DNA, 548 bp, Homo sapiens
cccacaaacaccatgtagcttggtgtttgtccctctctgccagttctgctgaagatctctgctaactgtgcatcttgtcttggagatgtcattgcccatgactggaatgccggtgtctatgaagacagtgatattggtgtattactcaagtgaattatcattttggttctgaattgagttgtattctactcagtgagacacaagaagaacctccttcttaattctgtgccacattttgcaaatacacacatgtacacaaacataaagaacatttatttttaaaatatctactttttacttttcttgggggttcaataccagcttaaaggatcaagtgaaggaccaaagacctcccatataatttaytcctttcttgttcatttttctcttctgctcaccttcattacctacaataattcaatattaccaaatcctaatttccttcttcacctgaacttactaaatatattctttcatgcatgcaataggagacctacctactgatagaacccttgagtgctggagtatatttgtgcatgcaaggacac

SEQ ID NO: 272527 - DNA, 548 bp, Homo sapiens
cccacaaacaccatgtagcttggtgtttgtccctctctgccagttctgctgaagatctctgctaactgtgcatcttgtcttggagatgtcattgcccatgactggaatgccggtgtctatgaagacagtgatattggtgtattactcaagtgaattatcattttggttctgaattgagttgtattctactcagtgagacacaagaagaacctccttcttaattctgtgccacattttgcaaatacacacatgtacacaaacataaagaacatttatttttaaaatatctactttttacttttcttgggggttcaataccagcttaaaggatcaagtgaaggaccaaagacctcccatataatttattcctttcttgttcmtttttctcttctgctcaccttcattacctacaataattcaatattaccaaatcctaatttccttcttcacctgaacttactaaatatattctttcatgcatgcaataggagacctacctactgatagaacccttgagtgctggagtatatttgtgcatgcaaggacac

SEQ ID NO: 272528 - DNA, 614 bp, Homo sapiens
tcaaaatgtttttctgttttctttaaaaaataattttcaatcatttatcctatggttttgtgtgtgtttcataatacattgaattaattaattttgcgctatttttcaaaatagagaaatgagcttaaggaaaactttctaatttggggaaaaataaatttttcaaacttaaagttgttctctgaaaaagaaattcagtttctcgaaagttgaattaaaasattgttttcctcagttatcttgaatgtctctgtttttaacaacattttacccagccaacactcacttcaactgaaatattctctttggtcctaaattagacctaagttaaagagaaataaccattcacaccttatcatggaattgcagaggattcttttgcatctaaacaccccacccagcatgctgttgtactaaaaattgttgtactaaaattaaattacatttaattgcttttcttgttccaaattcttctcattgtcctcagaattactctgtcccctaaccccaataaaatatattccctatttaatagcttttaagtttcttcagagactgtctactatgtatgtatcaactgaaaaagaaaaacttttagttctttcatatcacct

SEQ ID NO: 272529 - DNA, 600 bp, Homo sapiens
ttctaattaatcattagagaggcagatagaataagttctactatttgatagtacagtagggaaattgtagttaacaatgatttattgtatatttcagatagctagaggaaaagatttgtagtattcccaacacaaagaaaagataaatgtttgaagtgatgaatatcccaactgcccttatttgatcattatacattgtayacacccatcaaaatatctcatgtaccccccaaattatgtacaacaattctatatcagttaattaactaattaatttttaaaaggacactatccgttctgtcaccaaacttatttccaagaaaactgtggagacttgtcagaagcccctgtctccctaagcctaccttctttctgtttcattcaggtttgccataagtgttcttgctgcgaatgggatgagaatggatttggttgtatgtgtggttgcagacaatctacaggctgtgaacaaaggtgggaagtcacatggggagatggggcggggggcgctgttctggagaaagaaggcagagaaaaggctccaaaacccttcagggaataggtgtttcagtggtgttgtgtggatgagaagcaggaaca

SEQ ID NO: 272530 - DNA, 572 bp, Homo sapiens
cattgaattatctgtcacattttcttaygtaaaaggctgcctctgctttcaaatgagtggtcttccaaacgtcattttgtgaagaagttcacttatttcaaaattataatctttacttaaaacatttgaataaggatgtagcaaatggcaaatgccattttatgcttcacaaaacaagttatcatataactttataatcacatcttattcttgtatatatttgagaaatatttccacaggaaattttaaagttagaagatatttcagaattacactaaaaattcaggcttatgttcttggagatgttgaggtttttgttcctgtttataaaagtactttttctttcacctaactctcctgcccttggtaatataactcttcaaactacatggaatattttcataaaagatgccatacttcttggagacttaactggtcttttgattggcctcattttagtaacatgctttatcctttttggtctatttcataaaacctttatcttttttaatttatacaaaagacaatctatttgcatctcacaggattttaaatccagggtttaaaaaata

SEQ ID NO: 272531 - DNA, 591 bp, Homo sapiens
ccaaattttggatgctatacagggcccctggaacattcaaaagagaggtgaacaggattatttgaygtgtttagttacatgggattgctaaaacaaaagtaaagcttaatcttcttcaggttatattctagtgagtaatatcaatttatgttcccaaactgtatgggatttctaaaattttaatgtctgagtatatgctatcgatcataattaaggttatcatgttaagttattgtaaaccacagaaataatcaaatttctttgtcaacttttatttttttgatggtaactaccctggacattttgtcattcacagacaattattgccttgcattgattcttttccaaacatggtttataatcagctataggactttgacaggtacttttaaatgcaggtgtctgatatctttaaagattatgacattggaataaaggaaaaatgtataggacttatgaagagctgaaatgcccataaatatctagtagaacaagagttaactgaatggtgtgaacaacagaaaactgaagtaatcttttgtaactctgcttaaaacattgctgatcctttttttgttttccagagtcagt

SEQ ID NO: 272532 - DNA, 572 bp, Homo sapiens
cattgaattatctgtcacattttcttacgtaaaaggctgcctctgctttcaaatgagtggtcttccaaacgtcattttgtgaagaagttcacttatttcaaaattataatctttacttaaaacatttgaataaggatgtagcaaatggcaaatgccattttatgcttcacaaaacaagttatcatataactttataatcacatcttattcttgtatatatttgagaaatatttccacaggaaattttaaagttagaagatatttcagaattacactaaaaattcaggcttatgttcttggagatgttgaggtttttgttcctgtttataaaagtactttttctttcacctaactctcctgcccttggtaatataactcttcaaactayatggaatattttcataaaagatgccatacttcttggagacttaactggtcttttgattggcctcattttagtaacatgctttatcctttttggtctatttcataaaacctttatcttttttaatttatacaaaagacaatctatttgcatctcacaggattttaaatccagggtttaaaaaata

SEQ ID NO: 272533 - DNA, 572 bp, Homo sapiens
cattgaattatctgtcacattttcttacgtaaaaggctgcctctgctttcaaatgagtggtcttccaaacgtcattttgtgaagaagttcacttatttcaaaattataatctttacttaaaacatttgaataaggatgtagcaaatggcaaatgccattttatgcttcacaaaacaagttatcatataactttataatcacatcttattcttgtatatatttgagaaatatttccacaggaaattttaaagttagaagatatttcagaattacactaaaaattcaggcttatgttcttggagatgttgaggtttttgttcctgtttataaaagtactttttctttcacctaactctcctgcccttggtaatataactcttcaaactacatggaatattttcataaaagatgccatacttcttggagacttaactggtcttttgattggcctcattttagtaacatgctytatcctttttggtctatttcataaaacctttatcttttttaatttatacaaaagacaatctatttgcatctcacaggattttaaatccagggtttaaaaaata

SEQ ID NO: 272534 - DNA, 577 bp, Homo sapiens
gccttacccacagtaggagatcaaattattgaattgctgatttaacaatttattgattgtttcrttgaagatttgtcaataggttgattagtttgtatggaattaatacaagactctaatttctcataacatcccttatcttagtaaaaattgcttatgataaatggtgggaagggaagccagaaaggagctgataactgcagtaatgtaacaaaccataacgtacctactctacttttcatggattcattttttatctttcctgccttcttccatcccagtctcagttcctactctgccatgacattcttgtgcctttgataatagtaaaacccttgttcttaccctgtctcttacagagaagcacattctttttgcttttaaatgatgtaggagctctttgttttactagcaactcattgtagcttattatgaaagttgtgaaaaataaaacttgttagctctaaaaatatgatcctttcaattcaggtatttcattctttcaataataatggaatggtttatttttataatgaagagtacatatttaaggtgcaacacattaatgattctaatg

SEQ ID NO: 272535 - DNA, 615 bp, Homo sapiens
gccaccacggcattttaaatattcaatctctctctatgtatgtatgtttccactttagagaactgctctaaatgcctttataaatacatataacatatgatatgtgttctgattattatttttaaagcaaaaagaaagaaaaggttgtaaaatcaaaactacaatttttttaagttctacaagctactatataattggcacaccagataatatgcttgaatcattcagatggaaataatttggcataattgagtgctagytatgataatgtgttattgaaacagcttgtttatactactgctaattatcaccaatatccattttagaatattttcccaagaattgcagaaaaagatgaacctagaaatagagtccaaaatttttaagagattttacaagtggtctacaccaactcacaaaagtcatgaaatacttgactttcttcattccccaaactatacacatttagtgatggacagccttctacttccctagcaaggccgtttcactattgatgggtctagtccaagctcttacaatcattcagtctatgaagactttatggattcatcatcaataaattgttctccatatttgcaacttttgtaagatatg

SEQ ID NO: 272536 - DNA, 551 bp, Homo sapiens
ggcagcaaccacgttaaaaaaatgtgtgacatattgctcgtaagttttcatttttcattctacttttacaaattttaaccacttggtcctatggctaaataaattgaatgytcatgctcatgtatgtgtcatagtcgtagtgtcatgtttcatgtcttgttgcttacagttcatcctctctcttccaaaaagtcttatgagattctgccttactgtgaataaaaatgccatttttatatataataaaattaaaattttgctgcttctaaaattgttttgtcagaaattatttcccaggctaatctgtagccagtcatttgctgtcttttagaatagagttttactgtggtcaatcttgaggtcaaactatttttgttctttttattaacaagtgactggtcagtatttctaaaagtttctatattttcaaaatctaggaactttgttaggatttatattagtttagccgtctaaatctaatttttattaggaaacaatctgccccttatatttttagtttcaaagctaataatatttgtgaaaataaattc

SEQ ID NO: 272537 - DNA, 551 bp, Homo sapiens
ggcagcaaccacgttaaaaaaatgtgtgacatattgctcgtaagttttcatttttcattctacttttacaaattttaaccacttggtcctatggctaaataaattgaatgttcatgctcatgtatgtgtcatagtcgtagtgtcatgtttcatgtcttgttgcttacagttsatcctctctcttccaaaaagtcttatgagattctgccttactgtgaataaaaatgccatttttatatataataaaattaaaattttgctgcttctaaaattgttttgtcagaaattatttcccaggctaatctgtagccagtcatttgctgtcttttagaatagagttttactgtggtcaatcttgaggtcaaactatttttgttctttttattaacaagtgactggtcagtatttctaaaagtttctatattttcaaaatctaggaactttgttaggatttatattagtttagccgtctaaatctaatttttattaggaaacaatctgccccttatatttttagtttcaaagctaataatatttgtgaaaataaattc

SEQ ID NO: 272538 - DNA, 615 bp, Homo sapiens
gccaccacggcattttaaatattcaatctctctctatgtatgtatgtttccactttagagaactgctctaaatgcctttataaatacatataacatatgatatgtgttctgattattatttttaaagcaaaaagaaagaaaaggttgtaaaatcaaaactacaatttttttaagttctacaagctactatataattggcacaccagataatatgcttgaatcattcagatggaaataatttggcataattgagtgctagctatgataatgtgttattgaaacagcttgtttatactactgctaattatcaccaatatccattttagaatattttcccaagaattgcagaaaaagatgaacctagaaatagagtccaaaatttttaagagattttacaagtggtctacaccaactcacraaagtcatgaaatacttgactttcttcattccccaaactatacacatttagtgatggacagccttctacttccctagcaaggccgtttcactattgatgggtctagtccaagctcttacaatcattcagtctatgaagactttatggattcatcatcaataaattgttctccatatttgcaacttttgtaagatatg

SEQ ID NO: 272539 - DNA, 602 bp, Homo sapiens
tattcttattagaattatttaggtattgccattttttatttgtagaatataacttgataccttttttccacttttccctttctgcattttatttttaaggatactttttaaactctttgaatcaattgtattttcctatatttgtctgattttcaattttgtgtttattaaaacaacataatattcttgtatacttcctaatctcagtggaaatcagctcttagcaacatctcttagcaatataaaaagaaatgacagggagsgaaaggaagacaggagacaggtttgtggatgacatattttatcacagcttctctaactaaataaaagtgtatatatttctcagcaaatacatgttaaatatccatttttaagacaccagtctaggggactgcaatggacaaatgtttatgataagtctctatcatcaagacgtaattgaaaagttgacataatataagtattatccaggctaattagtagcattatatacactgtgatgtagttcatatttattctatgacagtaaccagtgtgtgtgaccaagtttattaaaaatgctttagaattgttcccacggtattactgtatataataacaat

SEQ ID NO: 272540 - DNA, 602 bp, Homo sapiens
tattcttattagaattatttaggtattgccattttttatttgtagaatataacttgataccttttttccacttttccctttctgcattttatttttaaggatactttttaaactctttgaatcaattgtattttcctatatttgtctgattttcaattttgtgtttattaaaacaacataatattcttgtatacttcctaatctcagtggaaatcagctcttagcaacatctcttagcaatataaaaagaaatgacagggagggaaaggaagacaggagacaggtttgtggatgacatattttatcacagcttctctaactaaataaaagtgtatatatttctcagcaaatacatgttaaatatccatttttaagacaccagtctaggggactgcaatggacaaatgtwtatgataagtctctatcatcaagacgtaattgaaaagttgacataatataagtattatccaggctaattagtagcattatatacactgtgatgtagttcatatttattctatgacagtaaccagtgtgtgtgaccaagtttattaaaaatgctttagaattgttcccacggtattactgtatataataacaat

SEQ ID NO: 272541 - DNA, 602 bp, Homo sapiens
tattcttattagaattatttaggtattgccattttttatttgtagaatataacttgataccttttttccacttttccctttctgcattttatttttaaggatactttttaaactctttgaatcaattgtattttcctatatttgtctgattttcaattttgtgtttattaaaacaacataatattcttgtatacttcctaatctcagtggaaatcagctcttagcaacatctcttagcaatataaaaagaaatgacagggagggaaaggaagacaggagacaggtttgtggatgacatattttatcacagcttctctaactaaataaaagtgtatatatttctcagcaaatacatgttaaatatccatttttaagacaccagtctaggggactgcaatggacaaatgtttatgataagtctctatcatcaagacgtaattgaaaagttgacataatataagtattawccaggctaattagtagcattatatacactgtgatgtagttcatatttattctatgacagtaaccagtgtgtgtgaccaagtttattaaaaatgctttagaattgttcccacggtattactgtatataataacaat

SEQ ID NO: 272542 - DNA, 546 bp, Homo sapiens
gtaatatgtcaattagcatatgtactatgtatgctttttcctgtcatcagaaaatttgatatgcagtycatcaatgtcctttttcaagctatcaataacaacatgtggtgaaatatattattaatatatgataatacactattattaacagaactcaacttatgtctttcttactgacattgatctatttttagtacttattaagtagagttaaatcactagttagttaaactaatcctatagcctctcctctttccttatttataactcctttccctggcagtgagaaatctggcccgcatcatccacaatatatttacctattggcataatgtagtttgatatttgcttgctcatattcccataaaaaatgctaactagattataaaacttgtgtacaggtttgtttttctttttgtctttagccttacaatatgaaaatctagatactgtttaccaaagtcatttaagttagtccttttgttctccatttctctcagaatggttatgtaatttgtttgtgatacagttaggcttaattttact

SEQ ID NO: 272543 - DNA, 578 bp, Homo sapiens
ttggcaggggaaaaaaatggacttttaagcaaatgtaactaggagcattggacaatgtattaattagcattttctgttaacaaaccagctccaaacttattttaaaatgtggtggtttaattgaaaaatttattattactccaaagcccaagtttcaagtggaaagctttattgatcaattaaagtcagataagaaagatcatgggtctgaagtcattagtgggtcattagaaaatcatgggaggaaatggccccagtytcatatctgacagagtgtggaaaactcgtaactatgactcaaaatccataaacaataaaaaagagtgacaaacttgactgtatggttgaaacacagaaataaataaaatgtttgaaaatccaacttttcacaagcaacatcaaaaggtaaattgaaaactggggaaatatttatacatattgtatagataaagtgctatcacttaatatgtctataaggttttattaaaaaacaggaagataaaaccaacaatggaatagaaaaatgaacaaaagctctgactaaactgctcacagaaaagaaaatacaaacaacattt

SEQ ID NO: 272544 - DNA, 578 bp, Homo sapiens
ttggcaggggaaaaaaatggacttttaagcaaatgtaactaggagcattggacaatgtattaattagcattttctgttaacaaaccagctccaaacttattttaaaatgtggtggtttaattgaaaaatttattattactccaaagcccaagtttcaagtggaaagctttattgatcaattaaagtcagataagaaagatcatgggtctgaagtcattagtgggtcattagaaaatcatgggaggaaatggccccagtctcatatctgacagagtgtggaaaactcgtaactatgactcaaaatccataaacaataaaaaagagtgacaaacttgactgtatggttgaaacacagaaataaataaaatgtttgaaaatccaacttttcacaagcaacatcaaaaggtaaattgaaaactggggaaatatttatacatattgtatagataaagtgctatcacttaatatrtctataaggttttattaaaaaacaggaagataaaaccaacaatggaatagaaaaatgaacaaaagctctgactaaactgctcacagaaaagaaaatacaaacaacattt

SEQ ID NO: 272545 - DNA, 544 bp, Homo sapiens
aaaaaagagtgacaaacttgactgtatggttgaaacacagaaataaataaaatgtttgaaaatccaacttttcacaagcaacatcaaaaggtaaattgaaaactggggaaatatttatacatattgtatagataaagtgctatcacttaatatgtctataaggttttattaaaaaacaggaagataaaaccaacartggaatagaaaaatgaacaaaagctctgactaaactgctcacagaaaagaaaatacaaacaacatttgcacttataaattctgcttcactttactcctaaagaaaatgcaagttaaaactatactctgctgctataactcatatctcggatgcttggaaaaaatccaaaactttggaaacatactccattcacaaagctgtagggaaaaggaactcttacatattgttgtactttatttagttaactttctatttattttgatctgatgtcttcaattctttttcttttataaagaattttataataaataagtttatggacaaattattagttatttttgcagcgtt

SEQ ID NO: 272546 - DNA, 544 bp, Homo sapiens
aaaaaagagtgacaaacttgactgtatggttgaaacacagaaataaataaaatgtttgaaaatccaacttttcacaagcaacatcaaaaggtaaattgaaaactggggaaatatttatacatattgtatagataaagtgctatcacttaatatgtctataaggttttattaaaaaacaggaagataaaaccaacaatggaatagaaaaatgaacaaaagctctgactaaactgctcacagaaaagaaaatacaaacaacatttgcacttataaattctgcttcactttactcctaaagaaaatgcaagttaaaactatactctgctgctataactcatatctcggatgcttggaaaaaatccaaaactttggaaacatactccattcacaaagctgtagggaaaaggaactcttacatattgttgtactttatttagttaactttctatttattttratctgatgtcttcaattctttttcttttataaagaattttataataaataagtttatggacaaattattagttatttttgcagcgtt

SEQ ID NO: 272547 - DNA, 480 bp, Homo sapiens
ctccatctttcctagatatgacttagagaattaacttaatctctctaattccctgttgtataaaatggagataatgaaaaaaaaaatctgcctgacaggactgattcctgaagggattgaccaggctgtggaaacaatgatttcttaccagcaagctcttcatgacgttgtccagmcaaaaatcctcccataagaatcaaatttataagtagtattgtgatttgagggtattctggcacatcatccatttagaaaacatcgacaccctcaggagtaagagactatgtttcattaacatttgcacagcatgcatagtgcctgccaccaagctctttctagatacaaaaaaggacatgtgaacatggtttgtaaactgcaaagcaccatgtaaagttggttgttagtaatattaatgtgagccatttcgattttgtatagttgtaattgctgtaactcttccttggtttgacctgaaatcta

SEQ ID NO: 272548 - DNA, 480 bp, Homo sapiens
ctccatctttcctagatatgacttagagaattaacttaatctctctaattccctgttgtataaaatggagataatgaaaaaaaaaatctgcctgacaggactgattcctgaagggattgaccaggctgtggaaacaatgatttcttaccagcaagctcttcatgacgttgtccagacaaaaatcctcccataagaatcaaatttataagtagtattgtgatttgagggtattctggcacatcatccatttagaaaacatcgacaccctcaggagtaagagactatgtttcattaacatttgcacagcrtgcatagtgcctgccaccaagctctttctagatacaaaaaaggacatgtgaacatggtttgtaaactgcaaagcaccatgtaaagttggttgttagtaatattaatgtgagccatttcgattttgtatagttgtaattgctgtaactcttccttggtttgacctgaaatcta

SEQ ID NO: 272549 - DNA, 480 bp, Homo sapiens
ctccatctttcctagatatgacttagagaattaacttaatctctctaattccctgttgtataaaatggagataatgaaaaaaaaaatctgcctgacaggactgattcctgaagggattgaccaggctgtggaaacaatgatttcttaccagcaagctcttcatgacgttgtccagacaaaaatcctcccataagaatcaaatttataagtagtattgtgatttgagggtattctggcacatcatccatttagaaaacatcgacaccctcaggagtaagagactatgtttcattaacatttgcacagcatgcatagtgcctgccaccaagctstttctagatacaaaaaaggacatgtgaacatggtttgtaaactgcaaagcaccatgtaaagttggttgttagtaatattaatgtgagccatttcgattttgtatagttgtaattgctgtaactcttccttggtttgacctgaaatcta

SEQ ID NO: 272550 - DNA, 480 bp, Homo sapiens
ctccatctttcctagatatgacttagagaattaacttaatctctctaattccctgttgtataaaatggagataatgaaaaaaaaaatctgcctgacaggactgattcctgaagggattgaccaggctgtggaaacaatgatttcttaccagcaagctcttcatgacgttgtccagacaaaaatcctcccataagaatcaaatttataagtagtattgtgatttgagggtattctggcacatcatccatttagaaaacatcgacaccctcaggagtaagagactatgtttcattaacatttgcacagcatgcatagtgcctgccaccaagctctttctagatacaaaaaaggacatrtgaacatggtttgtaaactgcaaagcaccatgtaaagttggttgttagtaatattaatgtgagccatttcgattttgtatagttgtaattgctgtaactcttccttggtttgacctgaaatcta

SEQ ID NO: 272551 - DNA, 489 bp, Homo sapiens
gattaaatagctttcttagatgtacatttctattgtcctctgatacatagcttttttaattttaaaatgttagacagaaggctgcaagtaggaaatactttgcttggagaatgacattcacaagtaagatgctgcagtcttttgtgtaaacttcagtgggattcagtaggtacttggtctgaagtggccaggaataagatataaatatccttgtttttgtttctcaaacaacaaacyacactggcagagacacttctcatgagtccagagatcaatgagtattaggggatactgctggaaaatgaacaggttaccagttctttgggacatgacttcaaatccttacccagtctcaaactttataattcataaaaaatgcctttccctaagaacaggcttgtctcgtgcttccttttctaagacttcatggtaattttgttttgctttttgaaagagagtttctgtttgtagtagatggatgggaactag

SEQ ID NO: 272552 - DNA, 489 bp, Homo sapiens
gattaaatagctttcttagatgtacatttctattgtcctctgatacatagcttttttaattttaaaatgttagacagaaggctgcaagtaggaaatactttgcttggagaatgacattcacaagtaagatgctgcagtcttttgtgtaaacttcagtgggattcagtaggtacttggtctgaagtggccaggaataagatataaatatccttgtttttgtttctcaaacaacaaactacactggcagagacacttctcatgagtccagagatcaatgagtattaggggatactgctggaaaatgaacaggttaccagttctttgggacatgacttcaaatccttacccagtctcaaactttatrattcataaaaaatgcctttccctaagaacaggcttgtctcgtgcttccttttctaagacttcatggtaattttgttttgctttttgaaagagagtttctgtttgtagtagatggatgggaactag

SEQ ID NO: 272553 - DNA, 600 bp, Homo sapiens
tatgccactggcagtataattaggtcattatagataccaattttaaagtcaaacgaaactaattttgaattttgaccctattacttattgctggaagaccctgagtaaagttcttaatttacctagctaaccctgcttactttaatttaatgggttcacaatagcttaatttaatttctagggttrgtgtgaggattcatgaggtgatgtccggaaagtgattaggacagtgcctgcatatttaaaatgcagaataaatgatattagtaatgttgtcatattattattatgtctttttgaaatagccttatatatctctttttatgtgaatcatgaaggttggaagacaaaacaatttacttttaatgttgaatttctacatagtatgtttttagtatagaaaagtatttatgatgtaggatttttcttcttggtcactttgcaatccagggatccccagccagcaacaccctgcccggcccattctcagccatgctggtgtgccccagctggcctgtgttgtagtgagtacctgcattcatcagttgccaggctcttgtattgctcccaagaacaatgagtacacactggacattgaat

SEQ ID NO: 272554 - DNA, 600 bp, Homo sapiens
tatgccactggcagtataattaggtcattatagataccaattttaaagtcaaacgaaactaattttgaattttgaccctattacttattgctggaagaccctgagtaaagttcttaatttacctagctaaccctgcttactttaatttaatgggttcacaatagcttaatttaatttctagggttagtgtgaggattcatgaggtgatgtcyggaaagtgattaggacagtgcctgcatatttaaaatgcagaataaatgatattagtaatgttgtcatattattattatgtctttttgaaatagccttatatatctctttttatgtgaatcatgaaggttggaagacaaaacaatttacttttaatgttgaatttctacatagtatgtttttagtatagaaaagtatttatgatgtaggatttttcttcttggtcactttgcaatccagggatccccagccagcaacaccctgcccggcccattctcagccatgctggtgtgccccagctggcctgtgttgtagtgagtacctgcattcatcagttgccaggctcttgtattgctcccaagaacaatgagtacacactggacattgaat

SEQ ID NO: 272555 - DNA, 600 bp, Homo sapiens
tatgccactggcagtataattaggtcattatagataccaattttaaagtcaaacgaaactaattttgaattttgaccctattacttattgctggaagaccctgagtaaagttcttaatttacctagctaaccctgcttactttaatttaatgggttcacaatagcttaatttaatttctagggttagtgtgaggattcatgaggtgatgtccggaaagtgattaggacagtgcctgcatatttaaaatgcagaataaatgatattagtaatgttgtcatattattattatgtctttttgaaatagccttatatatctctttttatgtgaatcatgaaggttggaagacaaaacaatttacttttaatgttgaatttctacatagtatgtttttagtatagaaaagtatttatgatgtaggatttttcttcttggtcactttgcaatccagggatccccagccagcaayaccctgcccggcccattctcagccatgctggtgtgccccagctggcctgtgttgtagtgagtacctgcattcatcagttgccaggctcttgtattgctcccaagaacaatgagtacacactggacattgaat

SEQ ID NO: 272556 - DNA, 600 bp, Homo sapiens
tatgccactggcagtataattaggtcattatagataccaattttaaagtcaaacgaaactaattttgaattttgaccctattacttattgctggaagaccctgagtaaagttcttaatttacctagctaaccctgcttactttaatttaatgggttcacaatagcttaatttaatttctagggttagtgtgaggattcatgaggtgatgtccggaaagtgattaggacagtgcctgcatatttaaaatgcagaataaatgatattagtaatgttgtcatattattattatgtctttttgaaatagccttatatatctctttttatgtgaatcatgaaggttggaagacaaaacaatttacttttaatgttgaatttctacatagtatgtttttagtatagaaaagtatttatgatgtaggatttttcttcttggtcactttgcaatccagggatccccagccagcaacaccctgcccrgcccattctcagccatgctggtgtgccccagctggcctgtgttgtagtgagtacctgcattcatcagttgccaggctcttgtattgctcccaagaacaatgagtacacactggacattgaat

SEQ ID NO: 272557 - DNA, 563 bp, Homo sapiens
cctctttattccagtcacctggtaggttttgcaggataattgcccagaactagaatattgatccagatttttacattacctatcccttttgtttctcttgaactgaaggtggagatcactggttagttcacaggaataagcagggttagtctaaaatgcaggcaaaaactttgaaagaactaatgagtgtagaattcaatgacaagkgtatgataagttttgaaacataatttttctctctcccgtcctcatttttgtaaaaacaaatcatgataggactgtgttgtttgcaaagtagactttagccttacacatggcctgataatttgcataaagtgcagcaagaataatcatctttcacataggctttttaaattggctttagtgggactccgttcaacaaggaacctcataaaactttttaaagctgagcccagctatgggtttgtaccctcaaatacctgtgagttaggtaaattcctctcttcttgaggtcccaataacaagggcgtcctgggtctgttagaaagtgacattttttactcaccacaggttaggaaacc

SEQ ID NO: 272558 - DNA, 563 bp, Homo sapiens
cctctttattccagtcacctggtaggttttgcaggataattgcccagaactagaatattgatccagatttttacattacctatcccttttgtttctcttgaactgaaggtggagatcactggttagttcacaggaataagcagggttagtctaaaatgcaggcaaaaactttgaaagaactaatgagtgtagaattcaatgacaagtgtatgataagttttgaaacataatttttctctctcccgtcctcattttkgtaaaaacaaatcatgataggactgtgttgtttgcaaagtagactttagccttacacatggcctgataatttgcataaagtgcagcaagaataatcatctttcacataggctttttaaattggctttagtgggactccgttcaacaaggaacctcataaaactttttaaagctgagcccagctatgggtttgtaccctcaaatacctgtgagttaggtaaattcctctcttcttgaggtcccaataacaagggcgtcctgggtctgttagaaagtgacattttttactcaccacaggttaggaaacc

SEQ ID NO: 272559 - DNA, 563 bp, Homo sapiens
cctctttattccagtcacctggtaggttttgcaggataattgcccagaactagaatattgatccagatttttacattacctatcccttttgtttctcttgaactgaaggtggagatcactggttagttcacaggaataagcagggttagtctaaaatgcaggcaaaaactttgaaagaactaatgagtgtagaattcaatgacaagtgtatgataagttttgaaacataatttttctctctcccgtcctcatttttgtaaaaacaaatcatgataggactgtgttgtttgcaaagtagactttagccttayacatggcctgataatttgcataaagtgcagcaagaataatcatctttcacataggctttttaaattggctttagtgggactccgttcaacaaggaacctcataaaactttttaaagctgagcccagctatgggtttgtaccctcaaatacctgtgagttaggtaaattcctctcttcttgaggtcccaataacaagggcgtcctgggtctgttagaaagtgacattttttactcaccacaggttaggaaacc

SEQ ID NO: 272560 - DNA, 563 bp, Homo sapiens
cctctttattccagtcacctggtaggttttgcaggataattgcccagaactagaatattgatccagatttttacattacctatcccttttgtttctcttgaactgaaggtggagatcactggttagttcacaggaataagcagggttagtctaaaatgcaggcaaaaactttgaaagaactaatgagtgtagaattcaatgacaagtgtatgataagttttgaaacataatttttctctctcccgtcctcatttttgtaaaaacaaatcatgataggactgtgttgtttgcaaagtagactttagccttacacatggcctgataatttgcataaagtgcagcaagaataatcatctttcacataggctttttaaattggctttagtgggactccgttcaacaaggaacctcataaaactttttaaagctgagcccagctatgggtttgtaccctcaaatacctgtgagttaggtamattcctctcttcttgaggtcccaataacaagggcgtcctgggtctgttagaaagtgacattttttactcaccacaggttaggaaacc

SEQ ID NO: 272561 - DNA, 641 bp, Homo sapiens
gacttttagccatggtgctctttaagaaaatccttttaaattctgtgttaccttactttagtcatactaagctgccaatatttctgacttttgaacttcaccaaaagtaatctcacaggtgaaaccaacaagcctcaactaaggttatgacttaactgcaagtgtacaaggtattttcaaagaggtggtaagcagtttttacaaagtctacactctttaaaggtagctcagaaaaaggaagatttaagaaaggaagctagaatttgttcatggaggggaagagactcagcaaatgaaaaaagtaacacagatattaaccagaaagtactaattttytaagctaggaatgaatctgaactgccattgtaaaatggcagagaccaaagaaaatattgccctgttgttacagggtcaagcttcaagcatgtaatacaagatggagtcctgcggcaaagtttgttactaaccagtttgctggtctggcttgaacagtgggattatggggtccttgacccatgtgctatcctaagatatttttccttatgacagaaccatgcagaaagacacacaaagcacaaagtacaacagattcaacacagcttaagactagcctaacaaatcttttttttccattaattaaa

SEQ ID NO: 272562 - DNA, 528 bp, Homo sapiens
agcctcaacctcccacttctctttagatagkttgactcttgtagtgatacctagagcttgaaggatatccaaatttgattgaaacattccagtttaggcaatgctatatttcaacagcaccaatcaaagatatcctgtgcagtctattttattgttttaccaacaaacaagtttcttagcattcaattctatttatatagaattatagaaaaagtgatttgctacaatttagaatcctcctatccaatgaaaatagatataaggtattttcaaaaatagttgtattagtcaaatcaatgaaattagcacagaatatgtttacttaggagatcatatctcaaatcacaatattagccttagaggctaaaataccatggggaaaagaagtgtttagatgagaacatgaggatgaatgcttccaaaatgggagcaaaaattttattggtagatttttattgtgttggggagatgcttagagcagaggcaattgtgaaacactttgcactgtggacagctatgcacatttct

SEQ ID NO: 272563 - DNA, 528 bp, Homo sapiens
agcctcaacctcccacttctctttagatagtytgactcttgtagtgatacctagagcttgaaggatatccaaatttgattgaaacattccagtttaggcaatgctatatttcaacagcaccaatcaaagatatcctgtgcagtctattttattgttttaccaacaaacaagtttcttagcattcaattctatttatatagaattatagaaaaagtgatttgctacaatttagaatcctcctatccaatgaaaatagatataaggtattttcaaaaatagttgtattagtcaaatcaatgaaattagcacagaatatgtttacttaggagatcatatctcaaatcacaatattagccttagaggctaaaataccatggggaaaagaagtgtttagatgagaacatgaggatgaatgcttccaaaatgggagcaaaaattttattggtagatttttattgtgttggggagatgcttagagcagaggcaattgtgaaacactttgcactgtggacagctatgcacatttct

SEQ ID NO: 272564 - DNA, 528 bp, Homo sapiens
agcctcaacctcccacttctctttagatagtttgactcttgtagtgatacctagagcttgaagratatccaaatttgattgaaacattccagtttaggcaatgctatatttcaacagcaccaatcaaagatatcctgtgcagtctattttattgttttaccaacaaacaagtttcttagcattcaattctatttatatagaattatagaaaaagtgatttgctacaatttagaatcctcctatccaatgaaaatagatataaggtattttcaaaaatagttgtattagtcaaatcaatgaaattagcacagaatatgtttacttaggagatcatatctcaaatcacaatattagccttagaggctaaaataccatggggaaaagaagtgtttagatgagaacatgaggatgaatgcttccaaaatgggagcaaaaattttattggtagatttttattgtgttggggagatgcttagagcagaggcaattgtgaaacactttgcactgtggacagctatgcacatttct

SEQ ID NO: 272565 - DNA, 565 bp, Homo sapiens
tcaagaatctttagcctggcaggaagtagaaatctgataaagtttagttgttacataaccctgtttggtcaaaaaatgtgttttgagttgattggtatcaaattaacatttgtaagctgctggtccttttaactagtgttaaattaagaaaaattttccattaagcagaatttctaaataattttcttaatttggatcttctaaagagaaattttaagccaccagcacttggactgactagatagccctttgctttgatgcctggccaatttttcctccatctgtgagtcagcgtaagtatgcctactcttttttcaaacctcccctgactcactcrtgcagaatagaagtcctgctttctgttttctccttatgtacttactgtgcacttgtgtaacaagagttcttttaagtataatcttcaatttgataagggcctacctctggagttggcatgatgttacaccatgtgtaagagtaggaattaccccagtttatcttttcctatccagtgctgcacacaatgccaggcatatagtaggtactctctaaatacatgataagg

SEQ ID NO: 272566 - DNA, 557 bp, Homo sapiens
ttatggatggataacccttatgataagatgttggttttccctctactttgagcttagtgtcaggataccaatatagcaacctaagtaattttctcaggtggagtttaagatgtgattgtaacctatcaaattatctccactgaaatgttactgcagtatgtgtgggtgactcctttaagttagaagggaaaatatacaagtgaacagatgtagaaaggaaattaaaatggtaacattacaggaagtctgagtaagctaaacaccttcatttatgtaatattcatagaagtcaaccatgttgtgtttataccttaaaatctatctttttttactcataatgtcaaagctgtgtagaaagcaacagytcagtttgaattataagaatctcaggtatttaaatacatatttatgaaaggtgagttacttataatttgaatggttatttaaaatggtcctgtatgtttactttttataattctttttattatattttttaattgaaaacatgattaaaatgtaagtgggtaagttttttgctgttgcttttcccattttcc

SEQ ID NO: 272567 - DNA, 557 bp, Homo sapiens
ttatggatggataacccttatgataagatgttggttttccctctactttgagcttagtgtcaggataccaatatagcaacctaagtaattttctcaggtggagtttaagatgtgattgtaacctatcaaattatctccactgaaatgttactgcagtatgtgtgggtgactcctttaagttagaagggaaaatatacaagtgaacagatgtagaaaggaaattaaaatggtaacattacaggaagtctgagtaagctaaacaccttcatttatgtaatattcatagaagtcaaccatgttgtgtttataccttaaaatctatctttttttactcataatgtcaaagctgtgtagaaagcaacagctcagtttgaattataagaatctcaggtatttaaatacatatttatgaaaggtgagttacttataatttgaatrgttatttaaaatggtcctgtatgtttactttttataattctttttattatattttttaattgaaaacatgattaaaatgtaagtgggtaagttttttgctgttgcttttcccattttcc

SEQ ID NO: 272568 - DNA, 557 bp, Homo sapiens
ttatggatggataacccttatgataagatgttggttttccctctactttgagcttagtgtcaggataccaatatagcaacctaagtaattttctcaggtggagtttaagatgtgattgtaacctatcaaattatctccactgaaatgttactgcagtatgtgtgggtgactcctttaagttagaagggaaaatatacaagtgaacagatgtagaaaggaaattaaaatggtaacattacaggaagtctgagtaagctaaacaccttcatttatgtaatattcatagaagtcaaccatgttgtgtttataccttaaaatctatctttttttactcataatgtcaaagctgtgtagaaagcaacagctcagtttgaattataagaatctcaggtatttaaatacatatttatgaaaggtgagttacttataatttgaatggttatttaaaatggtcctgtatgtttactttttataatkctttttattatattttttaattgaaaacatgattaaaatgtaagtgggtaagttttttgctgttgcttttcccattttcc

SEQ ID NO: 272569 - DNA, 548 bp, Homo sapiens
caaaacttaactaataatataataatagcctgtgtttgtgtgcataaattttgataaattttaactttttataatagacttgtgtatatcttatrgcagtaaatgatggactagtatctacgtatattttatgtatttatgacacatctaactttaaaaaaagttattcaatatatctaggctatgaagtttgtctgcctgtttttttaaattgttgcaaatctccaaaaaattttccaatgtatttattgaaaaaaaaaaactgtgtataagtagacctgcacagttcaaacttgtgttgttcaagggtcaactaatcttacttgttttgaaataaataaataaaaagctggcctggagcagtggctcacgcctgtaaccccagcactttgggaggccaaagtgggcagatcatgaggtcaggagttcgagaccagcctgggcaatatggtgaaaccccatccctattaaaaatacaaaaattagccaggcgtggtggcatgcacctgtagtctcaggtattcgggaggctgaggcagaagaatcgc

SEQ ID NO: 272570 - DNA, 292 bp, Homo sapiens
ccgcacatctattgagcctgaatactgctgttatcatctcaaattgcagattcaacttggcagctgctgaggtctgtgaaaggctggtaaaagggaggtcagagaaaagagaagactactaataaaaacttattctgttaagcattttaaaatacattatttaatgagcatcttggtaaaatatttaaaattaaagaatgctcacttgtgtcaaaagcatatattaaaaacttcattatttctcatagttgctamaaagtcatctgaataaagaattcccaaacacaataag

SEQ ID NO: 272571 - DNA, 485 bp, Homo sapiens
ctcacttgtgtcaaaagcatatattaaaaacttcattatttctcatagttgctacaaagtcatctgaataaagaattcccaaacacaataagatcactttcacatatatatatatatatatatatatatatatatatatatatatatatatatatatatrtgaaaatctggacaacagttaatctgatcatgaaattaatatgctgtgctgtgaagtgttcttgtctgctgctaggaacaagagagaataaagcttcctgcagtagttaagcatttgtggaaatggtcagttttattcaaacatgggtaaaattgataaagaggatgaaaaaatttttaaaaaggaataatactctttatgacaataattttattgacataatgctctcccattaattaaactcatacatattagctaacttgtgaaacttttctacaaccttaaatgtcttcatggctttgctttaaaattcagataaagaaaa

SEQ ID NO: 272572 - DNA, 485 bp, Homo sapiens
ctcacttgtgtcaaaagcatatattaaaaacttcattatttctcatagttgctacaaagtcatctgaataaagaattcccaaacacaataagatcactttcacatatatatatatatatatatatatatatatatatatatatatatatatatatatatatgaaaatctggacaacagttaatctgatcatgaaattaatatgctgtgctgtgaagtgttcttgtctgctgctaggaacaagagagaataaagcttcctgcagtagttaagcatttgtggaaatggtcagttttattcaaacatgggtaaaattgataaagaggatgaaaaaatttttaaaaaggaataatactctttatgacaataattttattgacataatgctytcccattaattaaactcatacatattagctaacttgtgaaacttttctacaaccttaaatgtcttcatggctttgctttaaaattcagataaagaaaa

SEQ ID NO: 272573 - DNA, 485 bp, Homo sapiens
ctcacttgtgtcaaaagcatatattaaaaacttcattatttctcatagttgctacaaagtcatctgaataaagaattcccaaacacaataagatcactttcacatatatatatatatatatatatatatatatatatatatatatatatatatatatatatgaaaatctggacaacagttaatctgatcatgaaattaatatgctgtgctgtgaagtgttcttgtctgctgctaggaacaagagagaataaagcttcctgcagtagttaagcatttgtggaaatggtcagttttattcaaacatgggtaaaattgataaagaggatgaaaaaatttttaaaaaggaataatactctttatgacaataattttattgacataatgctctcccattaattaaactcatacatattagctaacttstgaaacttttctacaaccttaaatgtcttcatggctttgctttaaaattcagataaagaaaa

SEQ ID NO: 272574 - DNA, 547 bp, Homo sapiens
ctggctaacacagtgaaacaccatctctaataaaaatacaaaaaattagctgggcatggtggcgggcacctgtagtcccagctacttgggaggctgaggcaggagaatggcgtgaacccgggaggcagagcttgcagtgagccgagatcacgccactgcactccagcctgggcgacaaagcgagactccatctcaaaaaaacaaaaaaaacaaaaaaaaaaacaaaaaaaaaaaccatgaaattttggcttttctctttccctcatatcccacatcaaacttaagccacccaatactgcagactccagcttaaacacatggacacatgcacacacacaattctccaacctcttgaataattcccttstaagcttccccaactggcactaatgtgccatgttttttaagtgtttgtagatcacagaatttcctagtatctctttatgaactttatgtttagagcatctattttaagtgttctgagttctatccggtgactttaaaaagtaggctttctttgtatctccatccccgaaccctcctctaa

SEQ ID NO: 272575 - DNA, 562 bp, Homo sapiens
gtgaatctattatccagagtctctctggctctacagcttctcctcttaacccctgcactctaatggctgcttatttaagcttccttggtggagtcccatcacccacaccatgaggtccctccttaatttggcttctgcctgcctctcaagcctcattgtgcaccatttatccaatttagaaccatgcccccaactatgtgtcgttttctcaacaggaagtgctgcttcatagctttacaacatttctctgtatctacccagatcattcctattcttcaagagtcagctcatgtactcattctgccatgtttaccctgacctctacaccaccaggcagttagataatttcttcattgtgtttccatattcacatatgtgcctataccacttgcgagctatgactcttccaggttttcttcctayggatagcatctccaggacccagcacaatgcctgatgcatagtaggatctcagtaagactttgttggctgaatatatgattctgtagcataaagatcgaagtactgactccagcaacctttaaagttcaaaagagggtta

SEQ ID NO: 272576 - DNA, 608 bp, Homo sapiens
gttaaattttccaagggagagccatacatttcaaatattctaggtctgcaaatattttcaatgaaatcaaatgaaaacatatcatttgagaccacagatattttccacatttttctttgttcctcttggatacttttctaacttatgtttggtttcatcactttttaagacaagaaaacatatcagtgggacagttagagcaccagcccaacagaacactcagaaacaagcaacagaagcacattgtttaggctgcagatcctttttttacttttccatatgttggtctacatggagctagtgataaggcagagtgtctgtcaccccgacagctagtctggaggctcttgtaggaaaaaaaaaatacagcacaacacattggttggaaatggaaatggacgtttggatgaaatgttttgtaggtaagaggcttgctttccaactagtctgcaaaatycttgagacagagccatgtacctatcatccataatgcatggcttatttttagtatacatttacatacaaagttgatttgaagtcctcgatgaacacttctttccaaaaaaagtttactggctgttgcagagatacaatctccatttaaacgg

SEQ ID NO: 272577 - DNA, 560 bp, Homo sapiens
gttcagtcagcagaggccagttctttatccctaggagcttgtctataattttgcattataattttgaattatgttctcaaagtggcacctttaattctattttgggcctccaaagagccagatgcaccttgactatggaaagcaactgctcaaaaagtcatagagggatagacaatggcaggtggagaatacmtcatgctgcctctgaaattgagggtccacaaaaggaacataaaagacaaaacaggaatgaagtggaggtcaaaaagtactaaactctcttaagtaggaatgaggaagagaaaaatagtcataacaaaagagatataaaacagaaaaagtccgtactgaagatcaaaaactaatgaaaagaacaaggtaagattccttcaacaaatttgcattgagcacctactgtcttctagaactggaatatagaaataaacaagagaggcaaactccttgtcctcctgtggagtctatagtttattgggaaaaatagatatggaccaattgtctgtaaagcttgaagagtgtttagggtgtttttaagctctgcg

SEQ ID NO: 272578 - DNA, 576 bp, Homo sapiens
tcaaagagtaacagcctaatgtaacaaaattatcctataaggtgggtagcaatcctgtccactaggcctatgcttataaaggggtatgtgcagggtcttatatccattggagcacacacatagatgtgtgcacagatccactgagctgtaatatttgatattttagaatcaggtgatcacaattccaaaatattgtggccaaaactgttgtctaggatacagaattttttaacacaagtctctgggataaatagtctctgagaattccctggtggcatctattttctatggccttaaattctgtatgtgtctgtttgcatggtgaggaaggttaactaggtggctcgtgattaaggatcaaccttagcttatcgccactctgcctaatgggtaggcaggatggactggggaaattttccaagcctcacctgaggttggggaagagacaccagtgccctgaattgggtgtttgtggttgcctagattcagtgaatgttygtagacctctcagtctcactttcttactcacagcagtgagtaaacatctggttctcccagggactccatggttttgtc

SEQ ID NO: 272579 - DNA, 596 bp, Homo sapiens
attcacaactaacatggtgtaaacagtaaaaaatgctgggttcaaggtctggcttcgctaatgtctggttgtgtgaccttagcaaagtcatttaaccttgccaatgctctacaccttatctataaatgtgttaaatagtaaatagcttatatcattggcaagtcttagacattaagtgttttgtaaattgaaaaggtgaatctaaaggtaaaatgttatcaactttgtttgcaatgttgcaagaggctaaatgaaaattagaaaataatgagcaacaattttgaaaattccttatatcagtattttatcctggaattaatatcatctccatgataaaatataaaatcaaaagaaaccaactaagaaaatcaataattcctgaaagaatttgatgagggagttaaaaagatctctatttgaaaggcaagtgagtgaacacctataccgaccagttgaatgatgttagctaagtcatttactctctaggcttcaatttcctcatttaccaagctatmggtttgggctaaataatctctaaatgcccttgcaagtctaacagtttatcataggagaccctcaggatcctctggctggga

SEQ ID NO: 272580 - DNA, 272 bp, Homo sapiens
ggatatagatagcaagatagataaacagatacacacacatatatctcaatgagacagagagaaagaagttacaaagatttgttcttacacaattataggagcaagctaaacagtctctgtaaggctgtttcctttacattttatactagagyttgaaatcctcaaggcagggagttgagtgggaagatggagttatggacaggagaacaaaaacaagctggaacccaccaacacaagttggaagccacaagcacaaactggaaactgtcagt

SEQ ID NO: 272581 - DNA, 539 bp, Homo sapiens
gcatttctgaaatatattgtccaatttttaactagctatttttaacattagtctttgaaacagtcttctataggtataggaaattagtcccaaatcatataaagcatcatttttcacagagttcctatctttaaccctcactgcatagtactcttggatatacagactaagcattgttttccaagtactatctaaaggtatatatatagaattattattgaygattatcagtattatatcactgatggatagttctaaatggagctggaatgaataccaagataattgcaataatgctagacttccagtatgccaaacaagaaatgacttcctaatgtttaaaacttcttgaaaatagatatcttgagtggtagtgagttctctattacgagaactattcaagcagagataatatctgagggaggatgtggaaagatgaaagcattgggtaggaaatcagcctatatgatctctaaattccattctaatcctggggttcattctagactggttttttatttttgtttcattcagcaaat

SEQ ID NO: 272582 - DNA, 579 bp, Homo sapiens
tttatttccgctcataaaggattcttctgttctactattagaaataaaatcacaataaaatcctaataggatccaatcccttccttgccctttgtatgtttggaaatctctccgaagtcagccttatgaagtcagatttggaggtttgaagtccagagatgtgtctctggtgttctgaggagcaggcacttgtatagggarcaactcacaaccaagctgcgcgcatccagaatgatattttctgaatatgctagaagatggtatatttgaaactttaaattatttctatcttatagtaaccaattaacttttaatgaataatacatattattacacacatttatattatagtagcatacctatatatgtgcatcaataataaataagatttaagctgccaatgttgaacagcaataaggaacttaaaatttctgccctacaaaataaatgaagagtttgaaatttaatcagtcctattttatgttgaggcaaatgtacttcagcttttttctgagaatcatcccttctgctctggtttacataagaaattggttgaaatcctctaaagcattcgttttc

SEQ ID NO: 272583 - DNA, 545 bp, Homo sapiens
atgccaggccactgaaactgtcttactagttgtgtgtcttgagctacttgagccttttgcttcaactgaaaaaaaactgaaatatttaggaaggagtgcacacatgaacttataaaaagcacccagctcaacaagtttcgttctgcaagtgatagttattattatcttaaaataaaaatattattttcaagatcggctttagcaccagggaggtaaaattcattcaccttcctgaccattatgaatttgaaatttctttttacaaaaaggtgatkgttggttaaaaaaaaaaaacaagcaatagcagatgtgagaagctgaaaatccatactacttatgtggttttggtttttgcatatcaattagaaaatattttaatgctacttttaaaaaataatcaaaggactgtacagaaaagataactcaattttatgtgctatattatactttaaattccctctcttgtgttttcctatctcttttcaaaggagctagttcattttcagccattctttcataaatgccattgctcaaaaatgtatgaa

SEQ ID NO: 272584 - DNA, 448 bp, Homo sapiens
catgaaagccaaatgtatgcattagtcaatcagtttttaaacactgtatataaacttagtcaatcaaactgtccttaagtatttaaaattaaaatgtcaagattactactagtgaatcgctctaaatattttaaataaaaactacaagccttaagtcgatttcccaatgtgtcagattctcttaaacatttcatacacttgaaataacaaatgaaatatccacagccctaacaaaattatgaaaattattttcaccaatttttttttaatgtattctctccccttttctgwttgtagagtcacctacctatagggcagagaattaccctctcagtcctgccaaagctgaggatacaaggctgctggccagattgggaattaaatacctgggtgttaatcccaggatggatctatctgagctgtttttttgagtgataagaaatttttg

SEQ ID NO: 272585 - DNA, 603 bp, Homo sapiens
tcatttaatcttgtgccttcttctcctctgtggaaactagggttctaaataggaaactactttcaaatggtaaactgtttacaaatttgataaaaagagcccattaattaaaatctgattcccacattcaagtgacaattttctttatgaatacatgcattaattcataggtttttctgttttgtatgacatagctgtgatgtaccgcaattatttccattaatatctagttaagaaatttcagaaattctatttttagaaatatgtactttagtctatttcagttgttaatataaataaatagactatattactgatgaatttctttcaaattaaacttgaagagaggatcttataagagattaattcaaaattatgctcaggttctgcttgggtgttcttgaacccagtaaaccactggattttaaaacaagtgagtgagaatgagtactgacagarcagtgagagttttgcttggctggccaaggaggaggtgtgagctacgggcacacccttcccatttagaagctgtgtggtaccaataggctatgatcttaatcacttatttacctgtaacctagaagagaatgaaggtatgtgact

SEQ ID NO: 272586 - DNA, 557 bp, Homo sapiens
gaaaatatcgtgtcaactaaaagtaaaagcaaaaataaaagaaaaaatctcagtactcactgaatactactataaacatcaaaaaatttccatttaaagtcaccagaaacccttgggttcctaatacaatttcatccaattcaaatcagactatatttacttcagattaaacatgattttattaacattcttgttgtttatgtgtatgttttgttttttagtttgcttgtgcaaacaagaataaggagaaagatatgcacatgaaattttctaaagccagttttgtctaagaaagtaattataaatttggaagacaccaacacttaygtctttgtagaagtgctttcaaattgcctatcatcctcactatagtagaaattaaggctatgatgaggcccacagtgataaattctgatactcaagaactacaatgatgattaacatcaaaccactgtcattgtcctgttcaaaacatagtaagaaagaaaacagtgtagaaaagctgtgctggcacaaggggcttatgcattttttattccctttatgaaattaccatt

SEQ ID NO: 272587 - DNA, 594 bp, Homo sapiens
aatcatctcattggtactaagagaaatgtggataattatttgtaagagcttgagtaagagattaataggaaataaggaattttttttttcttttttttgtatggggtttggctcttgttacccaggctagggtgcaatggcatgatctcagctcactgcaacctcagcctcccaggttcaagtgattctcctgccttagcctcccgagtagctgggattacaggcatgcaccactatgcctggctaatttttgtatttttagtagaracggggtttctccatgttgatcaggctggccttgaactcctgacctcaggtgatctgcccactttgccctcccaaagtgctgggattacaggcatgagccaccatgcctggtcaggaaaatttttttgaattaaaaaacccagatcatcttgctggcaagatgtctggttgttggcctgtggttctccccctgcattacactgcatctgtggggaagggccccagggatgtagaaaatcaaaggaatggggactaagaacgtcttttttccactttcccttttggtggtggtgtgcggattgatgtaatacatgcatatggaggtgg

SEQ ID NO: 272588 - DNA, 592 bp, Homo sapiens
tacttaaatttttacaaaccaaaggtaggaataaacttcctttgcttatagtttatatataatgggaaacaaaaacatcattccagatataaaaataagccataaaaccagcaaaagcaaattaacatcaatttaatgcaaaatatttaatgctgctttgctgcaccaaatttgcacctgtgacctgggtatgaagccattgccacagagccaatctctgtgtgtttttcatggtgtgtcactgtggcagtttgatcagggcaatttcttgtcacccctctcttctgtctcctggaacttctgttcaygtggcatgcctggagagggaggtttcaaagagcctgtcttgactctttcctcatgagtctgcagcagctcatctggtgccagcatgactgtaacacaaacaggacatgaatgtgtaaggggacactttgggggcaaggtgtcctttagatgagtggctctcagactccgtagtacagtggaatcacttggagagactttaaaaatgcccgtgctcagccatactccgaccaagtaagttggaatcttttaaaacactccctgggtaattctgaggggcagccaa

SEQ ID NO: 272589 - DNA, 593 bp, Homo sapiens
acacaataatgagtggaaatttgaagccttttgaagccttggctcagaactagcatgttatcacttcyacctacactctgttggtcaaataaagtcatcccaatgatatggatcagaggaatagactccatctctagtaggaactgcagaagtctcatgacaaagagcatggatatgtgttcttatacacagaagcgaggaagacttgagagcaaacatctaatctaccatgtgaagtttcaatctccccacattgtcccatctccattcttgagtcaatgtgctgccatcatcctacatctttgcctccacctcccttcattagagatgcacaaagttgcttcttgtgagtgagtctcagttaaactcctgcatgtgccatttaatgctccttctagaacacagccaatgaaagggctcctccctgctttcagtttttctcagctccagcccatcatggctaaagagccagatgaatctttctgaggtctagatttttatcagtccataccagtgtgaaaggctttaatggcttccaccacccacgacattgagctttaaccccccagcctggcattctaatcctaaagcat

SEQ ID NO: 272590 - DNA, 618 bp, Homo sapiens
ctcattgtggttttgatttgcatttctgtaatgatcagtgatgagcttttttcatgtttgttggctgtatgaatgtcttcttttgagaagtgtctgttcatgtcatttgcccacttttttatggggttgtttatttcttgtaaattttgttttaagtttaagggaacaattcaaagtgtttgcaagaactgatggattttgaattagttataacctttgagggaaaaaaagagaaaagatcttgatgtcactttggacaactcacaactcaatgaaaaagccagaacacagtggccaatttcataattaaaatgttcagcctgattgaggaagggagaaaggagatggaaattattttaacatcagcatgacaagyccattgagagaaggactctgatcatctcctcctaaagataccgggacccaaaccaaaaggggagagagtcaagtcccaggtttgtgaacagcagcaggttcaaagagtttccccctttttagaaaactgagaaataacagctgggaacagaggggaatccgaatcaggagctcccatttatcttattccattgggcagaagccaacagtcactcagcatgaaaatcctaaaatttaaggcag

SEQ ID NO: 272591 - DNA, 618 bp, Homo sapiens
ctcattgtggttttgatttgcatttctgtaatgatcagtgatgagcttttttcatgtttgttggctgtatgaatgtcttcttttgagaagtgtctgttcatgtcatttgcccacttttttatggggttgtttatttcttgtaaattttgttttaagtttaagggaacaattcaaagtgtttgcaagaactgatggattttgaattagttataacctttgagggaaaaaaagagaaaagatcttgatgtcactttggacaactcacaactcaatgaaaaagccagaacacagtggccaatttcataattaaaatgttcagcctgattgaggaagggagaaaggagatggaaattattttaacatcagcatgacaagtccattgagagarggactctgatcatctcctcctaaagataccgggacccaaaccaaaaggggagagagtcaagtcccaggtttgtgaacagcagcaggttcaaagagtttccccctttttagaaaactgagaaataacagctgggaacagaggggaatccgaatcaggagctcccatttatcttattccattgggcagaagccaacagtcactcagcatgaaaatcctaaaatttaaggcag

SEQ ID NO: 272592 - DNA, 621 bp, Homo sapiens
tctctaattgatgagtgggcctttgataaattgctgtagaaccaagagcatctgatcacaagaaattctgtcttgttcctccttgacagatgtttgtttgacttaaagggggtgcaagatccaaggaactacttctccctcctggaactttcattgtaaacagaaaattctatggttttgtttttaaagccaaacaaagacagttctctgagatctgaagtctggtgcctgccctcattcagatgaagaacttggggacagagagctgaagtgcaaggtcttatccaccctgaattcttgctttatcccccatgtcttcctccctgctgcttaagggtactttctaaacctcagctccatggagagagacaaaatatttaataaccaggatatccaggcaccaactagccagaacatcagaacgaacaccagccacaggccaacaccagggcttgctgggtcaggcactaacctttacttgctgggaccccaggtcggggaaccacagtgctgaaatgtgtgaggaagatgggcagtgactcagaggcgcttgaacagtgtctttttccyaattggtatggaaatatttcaatattttcaaaattagtatgcctatcccag

SEQ ID NO: 272593 - DNA, 541 bp, Homo sapiens
tgccatccgagcaaagagctgcattagcactggtgtgcaacagagctcggggctacctggaccctagagcttggtgggcttggtggtcccwctgtttacatggagatggagtgaaggcaaaacaggttacttggagaaatggattgcaagagctgatctttagtggttcatattttgctaactccacagggagtaagccatgaatttggggacacgcagtctggtgcccatcactgtgtgaaactgaccagggcccttgcccttgctgtctgagccttacttccccacctgtagagctatctgggctggctagaccctgaggtcccttccagttctcctactctgtgaaggttgaggctgagctctggggtccaatggcctgtgctcaaatgccagcactgaggtgggggaagtgtccgctcagcttccctgggctttggcttctgcatttgtcaaataagggcaataaaagcaatagctacctcaaccaaacattacacttaaagtggtaaagtgcttagaatagccctgtcacgtggca

SEQ ID NO: 272594 - DNA, 541 bp, Homo sapiens
tgccatccgagcaaagagctgcattagcactggtgtgcaacagagctcggggctacctggaccctagagcttggtgggcttggtggtcccactgtttacatggagatggagtgaaggcaaaacaggttacttggagaaatggattgcaagagctgatctttartggttcatattttgctaactccacagggagtaagccatgaatttggggacacgcagtctggtgcccatcactgtgtgaaactgaccagggcccttgcccttgctgtctgagccttacttccccacctgtagagctatctgggctggctagaccctgaggtcccttccagttctcctactctgtgaaggttgaggctgagctctggggtccaatggcctgtgctcaaatgccagcactgaggtgggggaagtgtccgctcagcttccctgggctttggcttctgcatttgtcaaataagggcaataaaagcaatagctacctcaaccaaacattacacttaaagtggtaaagtgcttagaatagccctgtcacgtggca

SEQ ID NO: 272595 - DNA, 541 bp, Homo sapiens
tgccatccgagcaaagagctgcattagcactggtgtgcaacagagctcggggctacctggaccctagagcttggtgggcttggtggtcccactgtttacatggagatggagtgaaggcaaaacaggttacttggagaaatggattgcaagagctgatctttagtggttcatattttgctaactccacagggagtaagccatgaatttggggacacgcagtctkgtgcccatcactgtgtgaaactgaccagggcccttgcccttgctgtctgagccttacttccccacctgtagagctatctgggctggctagaccctgaggtcccttccagttctcctactctgtgaaggttgaggctgagctctggggtccaatggcctgtgctcaaatgccagcactgaggtgggggaagtgtccgctcagcttccctgggctttggcttctgcatttgtcaaataagggcaataaaagcaatagctacctcaaccaaacattacacttaaagtggtaaagtgcttagaatagccctgtcacgtggca

SEQ ID NO: 272596 - DNA, 531 bp, Homo sapiens
gaacttacactcgctcattactgcctggccctgcacgaggaacaagggatacaggtgtacagtgagctgaggtcagggccctctcagcccttgccaggactattcaaaaacctctgaacgagtgtcacagactctgttcctacatgcctgtccaacactccccacatccattctcagggctgccacgaaggcttctctctcactctgtgtgtgtgcacacgtatattatctgtgtgtgtgcacaggggactttgccatcttctgctgaattgtgcttcctttcttgagactgcagttcaagccattaacagataccaggagcggcatgcaaagatgaagaaaatacagtccctgcatttgaggcaacttcaggaagaaactttcagagttttttccttaaaactctacacccacttaaaactcacttctcatttcagccsctggcaaccaccattctactttctatttctttttctttgttctttttttgagacggagcttcactcttgttgcccaggctggagtgcaatg

SEQ ID NO: 272597 - DNA, 557 bp, Homo sapiens
tcccacacttttaaacaaccagatctcaatatcaagagaatagcaccaaggggatggtactaaaccagtcatgagaaatccttctccatgatccaatcatctcccatcaggccccatgcacaacactggagattatgattcgacatgagatttgggtggggacacagatccaaaccatatccgaagtaaagggggaacaaaataaagaaaaaaagaaggaaaggaaataagaaaggtaggtagtgagagagagaggaaggaagggataaacacagaggaaaagaaaaaagaaggaaagaaagaaggaaggaagcaaaaaagaaagggaggaagaaataaggaaggacaaatagaaaactttctttttaacaaaagccatgagattcatctggtttttctgcatttgttgggagtggcagatatttttgtcagtaaagcctggtatatataactggtagtcacttaatgtttgctgagagaatggatgactgttatggagatttctgatttgtttacttaargggagttctccttatggaatcataatggccacgatt

SEQ ID NO: 272598 - DNA, 398 bp, Homo sapiens
atgatggaagaaaagttaagtgcaagattttataacaggagtctgataaatgccagagacacttgtgtgaactagtgtagcctggggaggtttcttggaggaggtacagcatgatcgatctaaagggtaaataggacataattatttgaaaaaaggagacatgcatttcakgttgaagggagaggaagacaacatcttaaccaacaagacaatgtccccagtgcccctgtgacacatccacatgccatgccctcattgctaacctgggacattgctgaggaggggaccctgttagaaggctgagcttcttgcgccaaaggagcagatgtgggctcttctttgcaatgggtttgttgtttcctgctttcagcaggcctgcgtcctccagccccattagg

SEQ ID NO: 272599 - DNA, 587 bp, Homo sapiens
gctgtcccacactggcatcattctcagaatggactcgcaggaaaagtccattctggagtcagggaattcctggcagggtgcggaggctcactcactgagagaagcccagagcgcattcagtaaggtaaggaggcagctccctgctacacaaatctgcagagaatggagggttcctttcggtggatgtgtttcccacttgaacctgtttcctctccagccttgcaaagtgtttctacatctggaacacatgctctgaggatgaaggatacatttggaaaatgctgcaggacttctcagtgcctgcatcattgaagtgtacgctgggaacctgtgagacccgggcagagtatgcaacatctcccaaaattgctgcaccatggaacacttttttttttttttttttgcaggacatctctcagggccaacgttttggaaattatattttgaaacaaaaatgctgttttcaaaaattctcagagctttccctgttcttgctcaaaaaagaaaggaattctatcctggtggaggtgtgcagcggatattaagaggatactggggagtgcaggargtgggggaaggagggggag

SEQ ID NO: 272600 - DNA, 613 bp, Homo sapiens
tctatctaaatatatcctattggttctgtttctccaaagaactttaatacagagatggagggaaaagtgaaacaggtaaaaatgccactcagaaatactgcattatagggwgcttgcaagaattcaacaagagattggatctgtaaaaacatggttcatagtaggtgttcaataaatgtcacattcctttccacttttcttctcaaatttgttagcaaaatggagctttatttaaagtctctttttgtaaaaaaaaataaaaaaaatacaagctgttttccaagacagttaaaggaaatgtaatcaattgcacagtgtcaagtgacagatggaaaaggaaacgaggaaagaacatagattggaaaggctcacgggaaaatgtcaccactgaaaggaagtgaagcaattaccttctccaaagcttctggtcagcaacaaggaaactgaggtccgggggaatgaaaaggacttggccaaggtcagcccaagaataagcattacaggaaactgtctcctgttggccgaaaggagcccagggaaagggagattccccatgttcagaagtggacaggtccctttatgccaaagggcatgaaggagcaccagacagatg

SEQ ID NO: 272601 - DNA, 501 bp, Homo sapiens
gcgtgtttgttacagaatttgcatgcatatatgmacagagagatggatgaaagaatgcttgataaaatgtgactctcctaagtaggctgctaataatgcctgtcttacagggttgtcatgagggtcagatgatgtcatcatatgtcaggatgagagaactgtccaaagtcacatcgtgagaggacatgaaagacttaaattctagtctgccgacatccaagttgatgtttttccttcacgctgccactgccttgctaaataatcatgaaccagacatagctcagtgattgacttgttgaacaagggacattgattattagtcatcctctcaggctaagagcgtgaatcaaaacagatgacaatcccctcactttaggtgggagagtttcacccaatcaaccacgagcactataatcatgatgtcaatgcagcaatcacatttcagcttaaaaataactgggaatgcccacttgaagtaaacatatgacaagtgtgaagcta

SEQ ID NO: 272602 - DNA, 501 bp, Homo sapiens
gcgtgtttgttacagaatttgcatgcatatatgaacagagagatggatgaaagaatgcttgataaaatgtgactctcctaagtaggctgctaataatgcctgtcttacagggttgtcatgagggtcagatgatgtcatcatatgtcaggatgagagaactgtccaaagtcacatcgtgagaggacatgaaagacttaaattctagtctgccracatccaagttgatgtttttccttcacgctgccactgccttgctaaataatcatgaaccagacatagctcagtgattgacttgttgaacaagggacattgattattagtcatcctctcaggctaagagcgtgaatcaaaacagatgacaatcccctcactttaggtgggagagtttcacccaatcaaccacgagcactataatcatgatgtcaatgcagcaatcacatttcagcttaaaaataactgggaatgcccacttgaagtaaacatatgacaagtgtgaagcta

SEQ ID NO: 272603 - DNA, 501 bp, Homo sapiens
gcgtgtttgttacagaatttgcatgcatatatgaacagagagatggatgaaagaatgcttgataaaatgtgactctcctaagtaggctgctaataatgcctgtcttacagggttgtcatgagggtcagatgatgtcatcatatgtcaggatgagagaactgtccaaagtcacatcgtgagaggacatgaaagacttaaattctagtctgccgacatccaagttgatgtttttccttcacgctgccactgccttgctaaataatcatgaaccagacatagctcagtgattgacttgttgaacaagggacattgattattagtcatcctctcaggctaagagcgtgaatcaaaacagatgacaatcccctcactttaggtgggagagtttcacccaatcaaccacgagcactataatcatgatgtcaatgcagcaatcacatttcagcttaaaaataactrggaatgcccacttgaagtaaacatatgacaagtgtgaagcta

SEQ ID NO: 272604 - DNA, 540 bp, Homo sapiens
agggacctgctctctacctggcactgggccagcagccagggttcggaggaaagagaattcatgggcctgcatcgtgatactcagtgtcttcctttctctctcatttcacaactccttcaacatctccagccaaggatgagtgactccatgttcaagctctccttttgcccagtggatggaggtctcgaattaacatcaggctgtcagttgggtgcctcttacctctccagaatcctgagctctcctttcagttcaaacggtatcatctggactggaaagacaaaggtcatttccatcatcgcgattgcattatcttattgatctagaaaagcaggttaatttcttcttcatccttcttgctctgagtataaatttaaacattatttctggctgggmgcagtggtcatgcctgtaatgccagcattttgaggggccgatgctggtggatcatttgagcccagtagttcaagaccagcttggccaacatagtgagaccccatctctacaaaaagtacaaaagattggctcagtgtggtggtg

SEQ ID NO: 272605 - DNA, 579 bp, Homo sapiens
atagatagatgtagtgccagcagcctgtaaatagccactgggaggcagagatgtttgaaagaccaagaaaggggtgaaaagaaagaagaggacacagaacaaagcagcagtggttaagcagcaataaagcaaaccgtagagtgtatattgtgcctatgaggatggcttcagctacaagcagcagaaaacaagttctgaatgggcttgaacaataaggcacagtcattgcctcccatgctaagtccgtgggctggggtttgcagggttggctgatttcatgtctctatgccaccatcaaggatccaggtgctttccagattttttgctcagtgagctgacttagtcctgcttgttcccctcacagctgcaagatggctttagcagttccaggtatcatatcagacatgaaaatctccagcrgggagaaagcaccatctcctcctgggttctcttctttaatactgagagatcctttccagaagcctgcagcagacttccctcattgcatgtgcccatcctaatctcatcactggtaagcggagtgggaattccatgtagtattctccaagagtggccaca

SEQ ID NO: 272606 - DNA, 555 bp, Homo sapiens
tccataacgttaaggcgggcttggaaatgacatctctatggtgaagacctattagggcacagcagctgctcccctgaggccagttcttggccactccatacaccacacgttttctattacttagtccagcaaggctttaaatacctcagggcaccccctctgccatttcctgtggaatactatttcacagtctaatagctcttcctaagggaatttccctgttacttagcccacatttccttttaagtttaagtccattgcttcctcaggaccatgccattccrgactgatctgcctacttgggattcccatatttcatcgccccagaggtcatattatttccaggttgttgggtaaactctgagtttcatagacgtgggcttgaagaggaggtctctggtgaaggctgacatggggctcccttaggctcatgaagccaagagcaaatgtggccaatccagagaaacccaggagccaaggccctcctggccaaaaactggaagagccctctctgcagattagggaagaatgatgtgccccaacttttgttgtgtg

SEQ ID NO: 272607 - DNA, 525 bp, Homo sapiens
tgtaggtgtgtctgtgttggaagcacaagcatgtgtgagtatacatgtgtgttacctaaatgtgttgatgtgcgtgtgtgtgcatgtgcatttgtttctgtttccactaaatgccagatgtgggtcccaggaatgcccatcgagatgccccactcaaccagttacctcaacctcccttgaaaagcagtgggtgcccgggaagccacctactctgagtcttattctgcctcataccagtcatgtgtcccgccaaggccttctgtaccctcacccctgatcccacaagttcactcactcattcttaaaggttcaactcatgtcattctctacctcctcctggaagccctctcattctgactctctccccatacmtgggttgaaatcctttctctgagtgtccatctgtatcagcactgaaatctactgtcttcagcagattctaccctgggtagcacatgactctctacacatcagcttcccaccctggactgtgagctccctaggaaggggctagtggttggttct

SEQ ID NO: 272608 - DNA, 414 bp, Homo sapiens
ctgaagcggggtggcggggcatctgatagcatttgccacaacatcccttctgattcatcaggttgctttctctgggagagaaatctgccttgaatggagttatcctaaactccgacgcccaatgcaagtaaactcttcaraaagtgggtgccgctcctggaaagccaggcttttttgtgctgggaaacacactttgtgagaagaaaatggctgcagaacaaagacaagaaagcaagaaaaagaaaagctaaaggaattctacttcctgtgctcaggggttggggaagcctgtggaaatgctctgtaggtttctcgtcgaggcgattttatgtcagggcaaatacataattgttgggctctcctaggcccaggcttgacgctatttctaccacctattagctgtgtgaccttaca

SEQ ID NO: 272609 - DNA, 414 bp, Homo sapiens
ctgaagcggggtggcggggcatctgatagcatttgccacaacatcccttctgattcatcaggttgctttctctgggagagaaatctgccttgaatggagttatcctaaactccgacgcccaatgcaagtaaactcttcagaaagtgggtgccgctcctggaaagccaggcttttttgtgctgggaaacacactttgtgagaagaaaatggctgcagaacaaagacaagaaagcaagaaaaagaaaagctaaaggaattctacttcctgtgctcaggggttggggaagcctgtggaaatgctctgtaggtttctcgtcgaggmgattttatgtcagggcaaatacataattgttgggctctcctaggcccaggcttgacgctatttctaccacctattagctgtgtgaccttaca

SEQ ID NO: 272610 - DNA, 574 bp, Homo sapiens
agtggatgcttgataaagagaatgttccctgtttatacaaaaatccccttcattccaggcaccactatagctttctgatccaccctagacacgccagggcagcattagaggctgtagcccacctgagtgactgacagatgcttatgccttcagagggatgctctttcctcaccacccaccatctcatctgcaggatcctttatgactgctcttaacaggctagcctgccaaagatgctcccttccccagtgattcctgggctcctaccacccattccccggccgcagtcgtaacaagctactgtgatagcagaattgtttgcctcagaaaaaaaaaacaaaacaaaactataatgtcacaacaaacagaagctcatgggtttggcaggtagagtgcaggctgtgcagmagcaaactagatggaggagaggttgctgggatcttctgtcacaaacacccctggggatggggtagaggatcagaaccagggacacttaagttttgctggtagcaaatcctaaagtacgggctctgggattgatcagtcaaccttgccacttacttgagcaggagct

SEQ ID NO: 272611 - DNA, 476 bp, Homo sapiens
gcagtttcctggaacaaaaaaaaagagagagagaggagtgtctctgaaaattagacttagcatatcgcacaaggggcaaagaatagagagactggatttgttggaaagaatgccagctgcctgcctaatgcatctcgctgcatctcagtcttttcgcccataaaacagaggccatggcacccaccttgcaaagtgcttgtgaggaggaagcaagatttcacatgtgaactggtgtctcttcagaatggcctggcctcagggtcagctgcacctgggctccaaccctggtcccatcgcctattatagaagcagttyttaaacatctgtataaacttctctgggccacttatcaaataaggatagcaaaagtcaccacacaggggtgtgacaatgacaaaatgagtccagtccacaaagtacctagcacaacatctacgcataacaggagcacaatttgtgctagttgcttcctccac

SEQ ID NO: 272612 - DNA, 476 bp, Homo sapiens
gcagtttcctggaacaaaaaaaaagagagagagaggagtgtctctgaaaattagacttagcatatcgcacaaggggcaaagaatagagagactggatttgttggaaagaatgccagctgcctgcctaatgcatctcgctgcatctcagtcttttcgcccataaaacagaggccatggcacccaccttgcaaagtgcttgtgaggaggaagcaagatttcacatgtgaactggtgtctcttcagaatggcctggcctcagggtcagctgcacctgggctccaaccctggtcccatcgcctattatagaagcagttcttaaacatctgtataaacttctctgggccacttatcaaataaggatagcaaaagtcaccacacaggggtgtgacaatgacaaaatgagtccagtccacaaagtacctagcacaacatctacrcataacaggagcacaatttgtgctagttgcttcctccac

SEQ ID NO: 272613 - DNA, 350 bp, Homo sapiens
agcctgaagaggctgcacaaaagctcaggcatggccagacagtgcttggttggagggccttctccttcctggaaaccaccctgtgtgtaatgtttgcgtgacatttyttggttcttcatagcttcacaggacagggtgtagcatcctggtgaatgaaaaaagcaagttgcagaatgatacataaaataaaatgcaatcgtgttaagcacacttgcaataggtctgtatttttttttctggatacatatttatatatgtaaatactaggaaaatgtctagaaggacacaccccaatcaatacttctagttgtctcccaggtgaccattggatgggaggagcagtggtcaaa

SEQ ID NO: 272614 - DNA, 597 bp, Homo sapiens
cccaccttactttctcatacctttttccttccattgcctcccatgaactccatgaccctctttgtccctctctcctggtgccaataatgtggatcgaatttaatcaggttctcccttcacctcccctactgtgcattgagctctgtgtaaacaggcatcatgtcttgtacttttttctccttggggccaaacagttcctggcacatagtaggcttggcataaactttgaattattagatactgtaagccactcagctttctttgttttaaatcaataatcttacagttacgaagtaataagctgataaatggaacttcagcaaaattaaaaacttctgctctttttcttaagaaaatgaaaaaaaggaaaacaaggcactcacttggaggaaatatagaacttgtgtccaaatatttgaagaacttccaaaaatcaataataagaaaacaacccaataaaaaaaactgagcaaactatttgaatagaggctttaccaaagaagatgtatggacggaaaacaaayacatgaaaagatgctcatcatcattagtaactagggaaatgcaaattaaaaccataataagatactactgttt

SEQ ID NO: 272615 - DNA, 554 bp, Homo sapiens
cagtgtccagggagagggcagggacagccctttgctgttctgctctgatggatgcacctgtgctattttgtttttctctgggcttgtgaagcaggagaaagatggagccgacccagtttggtggagctgcaggaatggcccagggctgagctttktaacaggggtgagagatggccagcgacaaggggatgtttagcactaacagtaaatatatgggagaatgtgagagcacttttcacacctctgaacagctgtcaggaagaaaagaggagtattcaattctgtgtggccctgggggccaaaaagcagaagttaagagagagtgagttgacttcttatgaagaagttcagcagttatatttccaaatgtgcagctgcctcaggaaacagtgagctcctcacacttgcaggcatgcgaagtgtggccaacagacagaattacatgttagattggtgatgtgggggaggtattgccaagatcaacactaaagctcatctggatgtgaggggctggattataaatacctttctaggtgtccatttcagtgagctac

SEQ ID NO: 272616 - DNA, 556 bp, Homo sapiens
cagtgattgcatttttagcatccagtcttcttaagatgaatacattaaatagctaccagtgttgtgatacctcatccttgaaaggcctagttcatttgtgttttatgcttcagtttttccagcacagcagaaaatggcatttataatttttgtgcacacaaaccttggattcccctataaagtttctattgtttcatagcatgcagcactggtattttttcatcctaccgcgttacaggcaaaamtcatgtcttatttataaggattttatagatcattttatataacaggtgaaaaaagcagaatagaaagaagaggctgaactatggactacccttggagcccagatacatgatatcaaggcactttcttttgtatgttaatcggttaataatactacccacttgatgttttctgatctgatgtgatctcatgttacacaaacttttagtaagtaacccatgactagaatataaactggttacttaggaaaaacaaaaaacaaacaaacaaaaaccctactatttattcagtgcctcctatgtgctgcccctgc

SEQ ID NO: 272617 - DNA, 556 bp, Homo sapiens
cagtgattgcatttttagcatccagtcttcttaagatgaatacattaaatagctaccagtgttgtgatacctcatccttgaaaggcctagttcatttgtgttttatgcttcagtttttccagcacagcagaaaatggcatttataatttttgtgcacacaaaccttggattcccctataaagtttctattgtttcatagcatgcagcactggtattttttcatcctaccgcgttacaggcaaaactcatgtcttatttataaggattttatagatcattttatataacaggtgaaaaaagcagaatagaaagaagaggctgaactatggactacccttggagcccagatacatgatatcaaggcactttcttttgtatgttaatcrgttaataatactacccacttgatgttttctgatctgatgtgatctcatgttacacaaacttttagtaagtaacccatgactagaatataaactggttacttaggaaaaacaaaaaacaaacaaacaaaaaccctactatttattcagtgcctcctatgtgctgcccctgc

SEQ ID NO: 272618 - DNA, 565 bp, Homo sapiens
tttttagcatccagtcttcttaagatgaatacattaaatagctaccagtgttgtgatacctcatccttgaaaggcctagttcatttgtgttttatgcttcagtttttccagcacagcagaaaatggcatttataatttttgtgcacacaaaccttggattcccctataaagtttctattgtttcatagcatgcagcactggtattttttcatcctaccgcgttacaggcaaaactcatgtcttatttataaggattttatagatcattttatataacaggtgaaaaaagcagaatagaaagaagaggctgaactatggactacccttggagcccagatacatgatatcaaggcactttcttttgtatgttaatcggttaataatactacccacttgatgttttctgatctgatgtgatctcatgttacacaaacttttagtaagtaacccatgactagaatataaactggwtacttaggaaaaacaaaaaacaaacaaacaaaaaccctactatttattcagtgcctcctatgtgctgcccctgcattatccataatccccatgg

SEQ ID NO: 272619 - DNA, 563 bp, Homo sapiens
gttcatttgtgttttatgcttcagtttttccagcacagcagaaaatggcatttataatttttgtgcacacaaaccttggattcccctataaagtttctattgtttcatagcatgcagcactggtattttttcatcctaccgcgttacaggcaaaactcatgtcttatttataaggattttatagatcattttatataacaggtgaaaaaagcagaatagaaagaagaggctgaactatggactacccttggagcccagatacatgatatcaaggcactttcttttgtatgttaatcggttaataatactacccacttgatgttttctgatctgatgtgatctcatgttacacaaacttttagtaagtaacccatgactagaatataaactggttacttaggaaaaacaaaaaacaaacaaacaaaaaccctactatttattcagtgcctcctatgtgctgcccctgcattatccataatccccatggcatcttgcratactattactattattccctttgtattgatgatggaacggaagattggagagtgacatcttacaca

SEQ ID NO: 272620 - DNA, 624 bp, Homo sapiens
gaccctgattatagtagctgttcagtgaatgtttcttgaatgaatgtctggataggtaatagaatgactgaacaaacagatgaatgaatgaatgagtggatggatgaattaaccctttagaatataaaaagtattttactctatcacattcctaccatacaaatgtgtccaggctctcaactgaggcctcgaagaataggagacrtctttgtatgaagtatctgtgatctttagtatatgactgagctaatgacaggcctggctaaagtaaactgtgccctccagaatatcacaaaatcaaagtttcaagtgtccaccctctagtgtccaattgctagactgcaccactgctttttaacttttataagcacagctgttttccagaaagatgacgcagggcttttgggacacaagggatttgcttggagtcgttccacttttctgtccctggaggaaaacacattgatttgcacgtcatatgtccccagcaaggggcttgtgtggcattcccgctatcttcagggtgactgttctaccaaggtatacacatgtgcaaagtagaggcttacgattattttctaaaacttgataaagaaaagttgactggattcaaaagtcattcac

SEQ ID NO: 272621 - DNA, 624 bp, Homo sapiens
gaccctgattatagtagctgttcagtgaatgtttcttgaatgaatgtctggataggtaatagaatgactgaacaaacagatgaatgaatgaatgagtggatggatgaattaaccctttagaatataaaaagtattttactctatcacattcctaccatacaaatgtgtccaggctctcaactgaggcctcgaagaataggagacatctttgtatgaagtatctgtgatctttagtatatgactgagctaatgacaggcctggctaaagtaaactgtgccctccagaatatcacaaaatcaaagtttcaagtgtccaccctctagtgtccaattgctagactgcaccactgctttttaacttttataagcacagctgttttccagaaagatgacgcagggcttttgggacacaagggatttgcttggagtcgttccacttttctgtccctggaggaaaasacattgatttgcacgtcatatgtccccagcaaggggcttgtgtggcattcccgctatcttcagggtgactgttctaccaaggtatacacatgtgcaaagtagaggcttacgattattttctaaaacttgataaagaaaagttgactggattcaaaagtcattcac

SEQ ID NO: 272622 - DNA, 624 bp, Homo sapiens
gaccctgattatagtagctgttcagtgaatgtttcttgaatgaatgtctggataggtaatagaatgactgaacaaacagatgaatgaatgaatgagtggatggatgaattaaccctttagaatataaaaagtattttactctatcacattcctaccatacaaatgtgtccaggctctcaactgaggcctcgaagaataggagacatctttgtatgaagtatctgtgatctttagtatatgactgagctaatgacaggcctggctaaagtaaactgtgccctccagaatatcacaaaatcaaagtttcaagtgtccaccctctagtgtccaattgctagactgcaccactgctttttaacttttataagcacagctgttttccagaaagatgacgcagggcttttgggacacaagggatttgcttggagtcgttccacttttctgtccctggaggaaaacacattgatttgcacgtcmtatgtccccagcaaggggcttgtgtggcattcccgctatcttcagggtgactgttctaccaaggtatacacatgtgcaaagtagaggcttacgattattttctaaaacttgataaagaaaagttgactggattcaaaagtcattcac

SEQ ID NO: 272623 - DNA, 536 bp, Homo sapiens
taccacgtaagtggggaaactgaggctgggcctagcaccagatcactcatgttgaaacctaggtttgaactgggtctctgaatccccatccagagctcactgtcttaaagtctgaggtgcctgtgagtgtctgaggacccttactatgagacagtgttatcgctgacttacagtctgggtaaagaaggtgaatgcagtcagaggagtagattcaggtgtcagacatttgcataaaataccaattgctcctcatgttggggaggtaattcacaagcttgaatctctaaaaggctgcatctggtggagggcggggctatgtgtctgtgcacgtctggtctttggagttcttattcagsaaatattgattgcaagcccaccatgtgccaggcatcatgcctggggcttgggatccagagatgaagagacagtcaaccaagtccatcaggctctgccaacccctgtagtgtgagtggtggttggagcacgtgttatacccccaaaaggtgggcttggccaagcccttccacttaccagcc

SEQ ID NO: 272624 - DNA, 539 bp, Homo sapiens
tgtgggagctaaaaatcaaaacaattgaactcatggagatagacagtagaagaatggttaccagaggctggraagggtagtgaaggggctggggggagttggagatggtgaattggtacaaaaaattaaaagaatgaataagatctactattccatagcaaaacagggtgaccatagccaacgataatttaatggtacattttaaaatcactaaaaaagtataactggactgtttgtaacacaaaggatcaatgcttgaggagaaggataccccattctccatgatgtcattattacgcattgcatgccttataaaaacatctcatgtaacccataaatatatacacttactatgtaccctcaaaaactaaaaattaaaaaaaaaaagagcccacagattctttgacactcactccattaagaggtggagtccatgtcccctctccttgagtctggatgagcctctgtggatgcctcaatgaataaaatgaggtggaagtcatactgtgtgactcccagggctgggataaaaaaggcca

SEQ ID NO: 272625 - DNA, 539 bp, Homo sapiens
tgtgggagctaaaaatcaaaacaattgaactcatggagatagacagtagaagaatggttaccagaggctggaaagggtagtgaaggggctggrgggagttggagatggtgaattggtacaaaaaattaaaagaatgaataagatctactattccatagcaaaacagggtgaccatagccaacgataatttaatggtacattttaaaatcactaaaaaagtataactggactgtttgtaacacaaaggatcaatgcttgaggagaaggataccccattctccatgatgtcattattacgcattgcatgccttataaaaacatctcatgtaacccataaatatatacacttactatgtaccctcaaaaactaaaaattaaaaaaaaaaagagcccacagattctttgacactcactccattaagaggtggagtccatgtcccctctccttgagtctggatgagcctctgtggatgcctcaatgaataaaatgaggtggaagtcatactgtgtgactcccagggctgggataaaaaaggcca

SEQ ID NO: 272626 - DNA, 656 bp, Homo sapiens
gaggggctgcaaaacactttacaggttttgggtcatgcctgtcatcaggtgcagctgatgtgagtttggagagatgatgggatgggagactggacaagtcagtttggagtccatctttaaaaagtcttgaatgtgaagccaagagttgtctttattcctcaaggattaaatacaatgatttttttttaatttttactattacatcaaccggaccataaaaaggatataaaagaaaaaggcaaaaaaaaagcacacatcatatcaatagatggcaaaaagtatttcataaaatctaatatttactrctaatgatgaaaaaaatactgtggggactaagattagaagaatgctttcgtgagatactaaaatatctatccaaaaatagcaatcaacaggaaacactgcagttgttaccattaaaataaggactaagacaagaacacagccggtcctattgttgtgaaacattgttctgaagggcttggtcaatgccataaggcctggtaacaaatcggatgcaaaattataagagagaagatgacaaaactatactcattttcaggcaatatgattttctacctggaaaaaaaatccattcaagtttaataaagttgattgttctataaagaatatataaatatcaataacattcctaa

SEQ ID NO: 272627 - DNA, 656 bp, Homo sapiens
gaggggctgcaaaacactttacaggttttgggtcatgcctgtcatcaggtgcagctgatgtgagtttggagagatgatgggatgggagactggacaagtcagtttggagtccatctttaaaaagtcttgaatgtgaagccaagagttgtctttattcctcaaggattaaatacaatgatttttttttaatttttactattacatcaaccggaccataaaaaggatataaaagaaaaaggcaaaaaaaaagcacacatcatatcaatagatggcaaaaagtatttcataaaatctaatatttactactaatgatgaaaaaaatactgtggggactaagattagaagaatrctttcgtgagatactaaaatatctatccaaaaatagcaatcaacaggaaacactgcagttgttaccattaaaataaggactaagacaagaacacagccggtcctattgttgtgaaacattgttctgaagggcttggtcaatgccataaggcctggtaacaaatcggatgcaaaattataagagagaagatgacaaaactatactcattttcaggcaatatgattttctacctggaaaaaaaatccattcaagtttaataaagttgattgttctataaagaatatataaatatcaataacattcctaa

SEQ ID NO: 272628 - DNA, 656 bp, Homo sapiens
gaggggctgcaaaacactttacaggttttgggtcatgcctgtcatcaggtgcagctgatgtgagtttggagagatgatgggatgggagactggacaagtcagtttggagtccatctttaaaaagtcttgaatgtgaagccaagagttgtctttattcctcaaggattaaatacaatgatttttttttaatttttactattacatcaaccggaccataaaaaggatataaaagaaaaaggcaaaaaaaaagcacacatcatatcaatagatggcaaaaagtatttcataaaatctaatatttactactaatgatgaaaaaaatactgtggggactaagattagaagaatgctttcgtgagatactaaaatatctatccaaaaatagcaatcaacaggaaacactgcagttgttaccattaaaataaggactaagacaagaacacagcyggtcctattgttgtgaaacattgttctgaagggcttggtcaatgccataaggcctggtaacaaatcggatgcaaaattataagagagaagatgacaaaactatactcattttcaggcaatatgattttctacctggaaaaaaaatccattcaagtttaataaagttgattgttctataaagaatatataaatatcaataacattcctaa

SEQ ID NO: 272629 - DNA, 650 bp, Homo sapiens
ggcaggcaccaggcttgtgcaaactccagctctcaggcaggtgtgatcctgttgtaccgtgtagggaggggtccctgaaaactgtcagtctgaaggccctggaggggaggtgtggacttccgcatgggtgattcccaagcccagcaacagagcagagcagggtgtggtccagggagtgtcagggtcagattctgggtcaccatcmccaccccaggaaaagagaaatccaaatagcaaaaataaagaagaaatgggcaattttagctgatggggggcaaatggaggtttcttgggggaagacaaagaggctgtcttcagacctccaaaccgagtctgaaggccagctggggcaatcgctggggcaatcgctggggcaatcgctaaatctgcctgcttggaagcagcatcagcatccgagagctaccgtgcctccagcccaggtctgaggtgtgaaggcctcctgaagccctgagagccacttttgggaaacctctccaaatcctgcacatgctgcaagacatgattaaaacccagcccagccatctacaggttttatgatttggggcaagtcagtaaatgtctctgagcctcaaagtctgcaaatatctaatgggagtaatccaacttcccagggttattgtgaggatcag

SEQ ID NO: 272630 - DNA, 610 bp, Homo sapiens
ggggaatctagaaataagcaggaaaactatgggtacccccagagcacccctgacccaggcctctccttgtggtccactcactgcctctgtctcttgggtacacatctccatcccttcattcatactcagctcctccctccctctttcccactatagactccctggacatccccagcctgatctccttgacaccagtcaaccttccacagaccccargaagcctgacacctggattaggcaggaggctgcctgggacccaaacccctccccaattcaccatgtgtgcaagctcaccactaagagtgtcaatatttggggctgaagacttttcccatggtaaaactaaaacctctgggaagccacatattttaatctaaaattagacatttgaatcccagagcgagtgagtatctgatcttttccagagagcaaggagagaagaaaaaaattacacaaagtctgggaattgcggcttacaccttcaatcccagtactttgggagatgaggtgggaggattgcttgagcccaggagcttgagaccagcctgggcaacatagtgagaccccatctctacaaaaaaatttttgaagaatatcctggcatggtggc

SEQ ID NO: 272631 - DNA, 610 bp, Homo sapiens
ggggaatctagaaataagcaggaaaactatgggtacccccagagcacccctgacccaggcctctccttgtggtccactcactgcctctgtctcttgggtacacatctccatcccttcattcatactcagctcctccctccctctttcccactatagactccctggacatccccagcctgatctccttgacaccagtcaaccttccacagaccccaggaagcctgacacctggattaggcaggaggctgcctgggacccaaacccctccccaattcaccatgtstgcaagctcaccactaagagtgtcaatatttggggctgaagacttttcccatggtaaaactaaaacctctgggaagccacatattttaatctaaaattagacatttgaatcccagagcgagtgagtatctgatcttttccagagagcaaggagagaagaaaaaaattacacaaagtctgggaattgcggcttacaccttcaatcccagtactttgggagatgaggtgggaggattgcttgagcccaggagcttgagaccagcctgggcaacatagtgagaccccatctctacaaaaaaatttttgaagaatatcctggcatggtggc

SEQ ID NO: 272632 - DNA, 525 bp, Homo sapiens
aaccacccaggccaggcactaagactgctcagtgagtttaaatgcctgcatctcctagcagccacacctggggtgacttgacgaagagacacccaattcatagagccagctgtcagtcacttagaaacacmtagagacccagggtatgggagagccctggacagggagtcaggagacctttgtccactgctgatgacactgtgttctcaccacagactccccgcaggctcctgatgacattgtgttctcaccactaactctcagcccctgccactgccctgtgctgcccaccttggggcttagcatccacatgctcaaatgcagctttgtgggggggaaagcaggcaaagggatgttttacaccctttttattgggtatgtaagggctcacctttgagccagtcatgctgccctcagcacaccctaagaagcagtcctcatccccatcccgtgtcctggcctccaggctgtgtgatgccatatgggcttggatgcaaaccctagcagaaaatgtggcctctgagc

SEQ ID NO: 272633 - DNA, 527 bp, Homo sapiens
gctggacctggagggtggctctcaatcctgaagagctgcagggatgcatgtggagggcaaatctgtgtgactaaggccagcctggagtgagtgcagccaagccaaggacagcggctaggagaggggccagtggattcttgtgtcgccacgtctgtgctgtgcagcactgcaggctctgggtcagggtgcaacttaggggaaaggcaagtaaagcccatagcaccgcagagccagtgggatgtgggggcaggggagactcatctttagaaagggaacagctgatccactccacggcagtgcctrgagaggggccacctgccagtccagggtggtgtcaggggaagcataatcatctctgccttgctccagaagaaattgctgggatgtccccaggagcccagcagagggctggtagaagagggtgggcgctttggggtccagagccagatctaatcccagaagagccaggcatgatgatccaaactgaaacaggggcttctaaccagggcctaaagcctgtgagagtg

SEQ ID NO: 272634 - DNA, 355 bp, Homo sapiens
gtaaaagttatgttaaaatttacaatattctggcacacatctaatcacacaatgctggtctcaagagaccaggcaggccttgtattgaatttgccatgtgattctagggacrcacctcctcctcctggaacttaacctcccaatctctgtgaattcagtgaatcagatgactcttgctgacagctctaaggagctcagtgctcacctctgaatctgactttctcttccctatggataatgactgactggtaatatactctggagagggaaactgctcaagaggtcaataaagactttactttcactgacttaaaacagagtgcacagggaaccatggcacctgggatcacatcat

SEQ ID NO: 272635 - DNA, 641 bp, Homo sapiens
tgttccatctgccatttttctcatatcagttaacggcaactccgttcttgtaactgttcaggccaaaacacttggagttatccttaacttctgtccttcacccagtgcatccaactctggccacactggctttcttgttattcctgggaaatgccaagcacattctggtcttattgctttgtactgcctgtgctgtcctgccaagaaggcccttcccccgaatcygcatgcttctccctcttcttgtccaagtctctgtccatatttcaccttgctgagaactaaccagccctctacccagcgcttctgacccattttcactttacttaaaaaaaattacagggtattcattaccttttagcataatatctaatttccttccttttatattgtctgtctctttccacttaaccaagcttcatgagggcattgatttttattttttttccattgttgttttcccagtgagagtgtctggcacataataagcccacaataaacgttttctaagtgaattaatgaatgaataaatgaaggaatataaagtttatagaccacaacataaaatagcatctacagtattagttttgtaaaaaatgcacataaagtatttatagattgttttttataaaacatgttac

SEQ ID NO: 272636 - DNA, 580 bp, Homo sapiens
tttgtttttaattttaattttataaaatttcatcatgatacctcagctgaggctactcttccaggcctcaggagaggtagctctgggctgtcacctcaggtgaccgatttttgtgtttactcaggactgggagggttcttggggaatggtgctttttggtgctaaaactgtgaaagtgcccagcaaatcggggtgagtggatcactgctgtcgctccaggagttttagtcatctgctgagttcagccgcaagaaggacactctcctccctctgttgcaagggtgcgctttccacaacaggtgaaagacatgcccgtttctttcctggatcatggcagaaatcagcctaaagtgcaggaactgtcttccacagctcttgctmtaaagggagtgacaagaatgcagggcagggacaagggtccttggagtacagtggtacagctgaccccatcgtgcccatgccgccagcagagactcatagcccaaagaaagcatcgtggaggggcttcagaggggcctgtgttcagacactgcccgtgatataagctcacacagcactccctgtggggcctgcaaacaag

SEQ ID NO: 272637 - DNA, 580 bp, Homo sapiens
tttgtttttaattttaattttataaaatttcatcatgatacctcagctgaggctactcttccaggcctcaggagaggtagctctgggctgtcacctcaggtgaccgatttttgtgtttactcaggactgggagggttcttggggaatggtgctttttggtgctaaaactgtgaaagtgcccagcaaatcggggtgagtggatcactgctgtcgctccaggagttttagtcatctgctgagttcagccgcaagaaggacactctcctccctctgttgcaagggtgcgctttccacaacaggtgaaagacatgcccgtttctttcctggatcatggcagaaatcagcctaaagtgcaggaactgtcttccacagctcttgctataaagggagtgacaagaatgcagggcagggacaagggtccttggagtacastggtacagctgaccccatcgtgcccatgccgccagcagagactcatagcccaaagaaagcatcgtggaggggcttcagaggggcctgtgttcagacactgcccgtgatataagctcacacagcactccctgtggggcctgcaaacaag

SEQ ID NO: 272638 - DNA, 589 bp, Homo sapiens
actcccatcccctaatggggtttggttaataactgtatccatctgattcatgcacatgaaatctttgttttgtttttaattttaattttataaaatttcatcatgatacctcagctgaggctactcttccaggcctcaggagaggtagctctgggctgtcacctcaggtgaccgatttttgtgtttactcaggactgggagggttcttggggaatggtgctttttggtgctaaaactgtgaaagtgcccagcaaatcggggtgagtggatcactgctgtcgctccaggagttttagtcatctgctgagttcagccgcaagaaggacactctcctccctctgttgcaagggtgcgctttccacaacaggtgaaagacatgcccgtttctttcctggatcatggcagaaatcagcctaaagtgcaggaactgtcttccacagctcttgctataaagggagtgacaagaatgcagggcagggacaagggtccttggagtacagtggtacagctgaccccatcstgcccatgccgccagcagagactcatagcccaaagaaagcatcgtggaggggcttcagaggggcctgtg

SEQ ID NO: 272639 - DNA, 580 bp, Homo sapiens
tttgtttttaattttaattttataaaatttcatcatgatacctcagctgaggctactcttccaggcctcaggagaggtagctctgggctgtcacctcaggtgaccgatttttgtgtttactcaggactgggagggttcttggggaatggtgctttttggtgctaaaactgtgaaagtgcccagcaaatcggggtgagtggatcactgctgtcgctccaggagttttagtcatctgctgagttcagccgcaagaaggacactctcctccctctgttgcaagggtgcgctttccacaacaggtgaaagacatgcccgtttctttcctggatcatggcagaaatcagcctaaagtgcaggaactgtcttccacagctcttgctataaagggagtgacaagaatgcagggcagggacaagggtccttggagtacagtggtacagctgaccccatcgtgcccatgccgccagcagagactcatagcccaaagraagcatcgtggaggggcttcagaggggcctgtgttcagacactgcccgtgatataagctcacacagcactccctgtggggcctgcaaacaag

SEQ ID NO: 272640 - DNA, 588 bp, Homo sapiens
ccaaagaaagcatcgtggaggggcttcagaggggcctgtgttcagacactgcccgtgatataagctcacacagcactcccwgtggggcctgcaaacaaggcgtgtatatacacaaacagggccactgtgtgctcccagttcttggaaatttgcatatcctgcacctcctttgggagaagagagggtttttagacaagattattttaaaaacacaaggctctcacaggacccaaaagcacaagctcacagtttctaaataggttagctaaacaagcacgttccttggagggaactgcgagcatggactctattttaggcattttggaggagcactggtgatgatgacttatactggatagagtggctatttagggacatttatttttgctgaaatatttgctgactatttttataaagaaatttaattctgaaaagacaaaagcaatttctgtaggagcctttagcagagggtgggaagaagagggcagtcataatattgttgcgtttatgttgcaatgacaccttcgatacagtctctttagagtgaagagataaagagcccaagtggagatggcagcacacatttgg

SEQ ID NO: 272641 - DNA, 588 bp, Homo sapiens
ccaaagaaagcatcgtggaggggcttcagaggggcctgtgttcagacactgcccgtgatataagctcacacagcactccctstggggcctgcaaacaaggcgtgtatatacacaaacagggccactgtgtgctcccagttcttggaaatttgcatatcctgcacctcctttgggagaagagagggtttttagacaagattattttaaaaacacaaggctctcacaggacccaaaagcacaagctcacagtttctaaataggttagctaaacaagcacgttccttggagggaactgcgagcatggactctattttaggcattttggaggagcactggtgatgatgacttatactggatagagtggctatttagggacatttatttttgctgaaatatttgctgactatttttataaagaaatttaattctgaaaagacaaaagcaatttctgtaggagcctttagcagagggtgggaagaagagggcagtcataatattgttgcgtttatgttgcaatgacaccttcgatacagtctctttagagtgaagagataaagagcccaagtggagatggcagcacacatttgg

SEQ ID NO: 272642 - DNA, 642 bp, Homo sapiens
gcttgtaacagcttgtgagaactgattgttaagtttcctggaattttgcctgcctgttgtaaaacacagccattatttacagttgatgcaaacttacaactaaatacattttattaaaaacacagtaataagtactcaaaattcactccttccacatcattgagtacattttacgattgtatatgttcttgaagctctttaggtgtgttttgttcatatggtggaaatactgtataatggtttgcaactctttccaactctgcatttactaatattccattggtagcttgtaatcatccatgacagacgaatctacgctagggaatcagcctatccttaagaaagtaagcaatggagaaaaatgttaataatgcagattaagcttaaaattaatgctaaagctgaaacaggatttagttaatgagtataatttgcatgagagtgagaaatagtttaacaccaggtcatatatcgactgtgatgacagtagatttactagcaaaagagttagtggattgggatgtaactccatttgtcaaattatggttgaattgcttcataggttgaccagagatacaagagtttgtcmacattcaatgaaaccattccgtgataatcaattgattatagagaatttatgaa

SEQ ID NO: 272643 - DNA, 568 bp, Homo sapiens
tcaacccctctgcaaacatcaccagtcctgagaggtggattattctgtgtgagtgtgccacgtatatttagtcctttccattctgcatcctagcaggaggatggggcactttggcaacctctgcctctctgactagtcttctctctggtcccccttccccctgccccacggactgtgattcccaccagccctaggacctgcaggagcccagccagccctaaatgccttctctttaatgacctgcagtgttgccatggcaacaagagattgttttaaccccaaaattgtcttcattaagcttcatttggaaactgcttgagctggagtctgcaagctgcatctttaggcaagtcctataacatcaaagagtctctttgggtgggactcaaaattgaaaaccgtcagccagagcttctaagaaaatccacctagacagagggcccttattttgggggagggaaatttgggaacatttctgttgtcgaagcagcttctctaggcaacatttcatgactctgcatacagcargtgccctattgatgctggttgacttgagtgggctggcctt

SEQ ID NO: 272644 - DNA, 614 bp, Homo sapiens
tcaccattctagctgtggtaattgacttcgattaggcaaaactaaggctgctgtcatccaaaggggagcagagaaaaatgtgtttgagaccaaagtgatccactggggcttctgtcagtactcccctgtccaatcttcatgggaaatggtcaagtattgctgccacagcttgagaaagacataatgacttggggtttagaccacaggtaacccacaaaaggcaaaatgcctagatcagaagtgctcaccaagagtaaggggactctcagatgcataatagagaaagaagataataaggaccagtcatgtcatgatcttgaggccagtggcaatggcaamgctacagtccagccaattactttatttttgtgcctttcccccaggaaaagaggcccaccagaatcctgaaggagctgctctcaagacttttacaaaacaagtggatctgagtggcacaacgggtagactgtagtggatgctgtcatttgccacccagatttcttccacctttgagactgaagcacttaagtcttctggctacagggaatgttgaatgttagcagctttcagctaagtccctcttcccagtgattgtccttggctaatcataatta

SEQ ID NO: 272645 - DNA, 614 bp, Homo sapiens
tcaccattctagctgtggtaattgacttcgattaggcaaaactaaggctgctgtcatccaaaggggagcagagaaaaatgtgtttgagaccaaagtgatccactggggcttctgtcagtactcccctgtccaatcttcatgggaaatggtcaagtattgctgccacagcttgagaaagacataatgacttggggtttagaccacaggtaacccacaaaaggcaaaatgcctagatcagaagtgctcaccaagagtaaggggactctcagatgcataatagagaaagaagataataaggaccagtcatgtcatgatcttgaggccagtggcaatggcaacgctacagtccagccaattactttatttttgtgcctttcccccargaaaagaggcccaccagaatcctgaaggagctgctctcaagacttttacaaaacaagtggatctgagtggcacaacgggtagactgtagtggatgctgtcatttgccacccagatttcttccacctttgagactgaagcacttaagtcttctggctacagggaatgttgaatgttagcagctttcagctaagtccctcttcccagtgattgtccttggctaatcataatta

SEQ ID NO: 272646 - DNA, 617 bp, Homo sapiens
cagctggaaaactatgtaaaatgtgttctctctctctctttgcgtgtgtgtatttgcatttaatgagctgctgagaatgatggttgtccgtatgattctctcttgaatgcattggaaagttgtttctttgcctgggatcacttctacttggtaagaactattaatgattaaatagttctgaaaagaacagggttgtccacactaaaccaagttcatgagctatagatttttgctagtttatgtgctttccttattttcttcccttcctacaaagtatgagaccattagcacacatgttggagtgtgtttgccaagaatcctgaaggcccaacactagtattgattagtcctcttactaaagcacaatttgaattgtcttaagttaacaggagggcatagctgtccagtcagcactcacatttccatacagctttgttgttcttgacatatacgataggtctagcagtagagatcaacsaaggtgatgcacccaggagacatctggccacgtctagagacatttttggttgtcacaactggggagagggtgttactgccatctagtgagtggaggccagagatgctgctaaacatcctacaacacacaggacagacag

SEQ ID NO: 272647 - DNA, 556 bp, Homo sapiens
ataattagaagtaatatcttactggcaaagaagtagactcatgaataataaaactaagtatatatagaaagtcaatgcatgatgaatatgtaatcataaactattggtgatagaatggatattcaagacatgcataagtcacttcrgggaatgaattaattcttcatttctgacaccaaatgctagatggtttaaagtttacactgtaaaataaaatcataaatgtgttaccaaaaaaattagaaaaaattttgtaatcttgctagcaggaagaacttttaaagcataaaataaaagttagatgctataaaagacatgattgatagatcttcaactaaagacaccataaataaaatgaaatgacagatgatgtactgggggaaatattcccaacttatatgacaaatggttgaattaaaaaaagatgaacactctagtaggaaaataaacaaaggacataagtagacaagtcacaaaagaagaaataaagatggacaataaatgtataactaaatgcttaattctattagtaatcagagaaatgagtgtcaaatca

SEQ ID NO: 272648 - DNA, 556 bp, Homo sapiens
ataattagaagtaatatcttactggcaaagaagtagactcatgaataataaaactaagtatatatagaaagtcaatgcatgatgaatatgtaatcataaactattggtgatagaatggatattcaagacatgcataagtcacttcggggaatgaattaattcttcatttctgacaccaaatgctagatggtttaaagtttacactgtaaaataaaatcataaatgtgttaccaaaaaaattagaaaaaattttgtaatcttgctagcaggaagaacttttaaagcataaaataaaagttagatgctataaaagacatgattgatagatcttcaactaaagacaccataaataaaatgaaatgacagatgatgtactgggggaaatattcccaacttatatgacaaatggttgaattaaaaaaagatgaacactctagtaggaaaataaacaaaggacataagtagacaagtcacaaaagaagaaataaagatggacaataaatgtataactmaatgcttaattctattagtaatcagagaaatgagtgtcaaatca

SEQ ID NO: 272649 - DNA, 585 bp, Homo sapiens
gcaagattcctctgaattctaaaagctagacttctcttggttttagttttgaatttggaaacaagaaaatgtttcatgtaattaaaaatacaaaataaagcaaatttccaatttcctaaactggaaacaaactgaaacaaactatatatcaagtttgttatacacctataagaggagtatttcaactgactttgaaactcactatttggagtatgcatgtccagtgaaatagatgctaaaacacccatgcatagcagaagaagcagtacagcaagcctgacatgggagttgaggctaaacacggtraggagggtgtttgggggtggagggggatggtggcactggtagctactcagtgcagggtgtcaggcaatggctgttcatagcagatacacactatggtccttgtgcatagcagatacacgctaaagtatggaggaatgaaagggcatcatgtcagcaactcactctaagatggttcagcggggaaaagctttttgaactattcctatagtttttctgtaagtctgaaattatttcaaagtagaaagaaaaaataatggaagaatgaacggggcacaaact

SEQ ID NO: 272650 - DNA, 585 bp, Homo sapiens
gcaagattcctctgaattctaaaagctagacttctcttggttttagttttgaatttggaaacaagaaaatgtttcatgtaattaaaaatacaaaataaagcaaatttccaatttcctaaactggaaacaaactgaaacaaactatatatcaagtttgttatacacctataagaggagtatttcaactgactttgaaactcactatttggagtatgcatgtccagtgaaatagatgctaaaacacccatgcatagcagaagaagcagtacagcaagcctgacatgggagttgaggctaaacacggtgaggagggtgtttgggggtggagggggatggtggcastggtagctactcagtgcagggtgtcaggcaatggctgttcatagcagatacacactatggtccttgtgcatagcagatacacgctaaagtatggaggaatgaaagggcatcatgtcagcaactcactctaagatggttcagcggggaaaagctttttgaactattcctatagtttttctgtaagtctgaaattatttcaaagtagaaagaaaaaataatggaagaatgaacggggcacaaact

SEQ ID NO: 272651 - DNA, 412 bp, Homo sapiens
ttcattcacattatgttcaaattaaggttctgtgtgtgaggatgacttagagtgcacatcaatagaacaaaaaaaatcatacttaccatkggaaaacagtgaatgatcaaagaaggttataacacagtgactcaaaattaattaaagtaataataatggtacaggtaaatggctaaggaagcaaacccagataggtatttaggtttattccctggatagatctacctccctggcaatatttttatatttgtcaccaccctgaaaaacaagattagagaataagatcttcagtgttaaataaacttccaaactgatttagggagaaaagggacgtatgcacacatgcacacacattagcgtgcatgtccacatacacccctaatgcacaagaagtcccatgaaaagaagtggc

SEQ ID NO: 272652 - DNA, 600 bp, Homo sapiens
tataactatcagtgagttctttccctgaaattgaccacagttttgcatgaggtttccaagggtctgcactatgcagtccacttctcagacctttctggctctgacattttagaatctaagaagagaatactacgagctgtggaaggarggctcgattctctccaataagtaatgtagaagagaatgttccagaagggaaggaaggtatctagatggtcttaggctgctgcttttcttcccttttgctggctttagttctcagttgtacacagtgcttggcatagatcagacaattaacaaatgctagtatgtgaatttgaatctcactttgcacaacacattaaatcttctaaaatgcacaaagtgcatccttctgagggatttacagtttaatttcacaggggacaaaatcctgttataaactcagtggagtgataatcaccagtaagagatcaatttgctaaagttatttatgaaatgtaaatatgcaaaggcaaagactaattacagttggtctcataaatttaagaagttttctatcttttatatgaacttttctctctaaaaatataaagccatgaaaaattaatgactgccaga

SEQ ID NO: 272653 - DNA, 492 bp, Homo sapiens
aaaaaaaaaaaaaaaaaaaaaaaaaaaaaaaaaaaaaaaaaagaactaattaaagacatgttattctttctgtagtggttgcgcacacagcatagtcactgagcagctttttttgttttgcatttaatgtcattaggacccagacaagcctgaacaaaracagtggtcagcagcatgcaacatcttctgtctgtgtttggacccagctgtaacttggatgtttgtgctgacctcatcggggaaggctggctgcttagcaaatttagccaactctaacccaaaccaaatgagtttgtatacagtatttcagctgtatgtcaggagaccagatgatggctttgcttaggaggaggggtttgtcagtgatgatgacctcttgttttccaaaaaagcaggatgatctgatctcacccactgataccctctaggaggcaggccacatctggttcatctaattactctgtttaaagcaacaaggcttatgaatgatca

SEQ ID NO: 272654 - DNA, 463 bp, Homo sapiens
tttatataaggttttcaaagaacaattcttcatatacaattgtttacataagaaatttcataaagtagatttgaaaatcaccttcaaataagaattctgtcagaaataatatgtcatttttattttaagacagataaatcacttaagcccagaataatatactaaatcatgttctgaagtgtagattctagaaatgtattagattaaaacaatgaaaataatgtcatagtatttacatttttgagtaagttttatatctgatgtcttattttcctgagtaaaaacatgagatttttatttttwtttatttatttatttatttatttatttatttatttatttattttgagacagagtcttgctctgtcgctcaggctggagttcagtggtgcgataccagctcactggaacctctgcctcctgggttcaaatgattcttgtgcctcagccttctgagtagctg

SEQ ID NO: 272655 - DNA, 593 bp, Homo sapiens
atgggacaattgcaccctgtgtaccatccttagaatccaggccatgctgagcacacaactgcttcttaataaacagctaattaagtgcagtcttatgaaggcacctctttatccttctgtttcatagttatcaacagaaagtattattcatcagtcaagcaaatattcacaaaaattaactttgttcccctcatattttaatgtgtgctgtttctctagtctagatataaccctgaaggaaaaaatggcacatattttttgtcctttttatcctaatgtaaaggaayatatgacatgtttgctaattgtttgcaaagtttcatgtaagctttttttggttttgcaaaatatgtttttctaattattcttcctatcatgcatgtagaaagtcagtattatttgctataaattgttactatttgtggaaatttgagaaatagcatcacttagacaatttctcaatttatcatgccaaaactgaatctcaaactcaagtgggctatatgctgcctgctgtttagagtttttcttaaactgctctacagagttacttcaggcttggggctgggcctggtggctcatgcctataatct

SEQ ID NO: 272656 - DNA, 493 bp, Homo sapiens
attttcaataccaccagaattttattttaacttttctctcacmtcctgcccccatctttatgaacattgacctacatctttcctctcagaaacataaatgaagtgttaataagttaaaaggggttaaaggtagagatgatctctccttttccacagagggggcagctcggctttcatgggtaagttctgtggtccatccaaaatgacagctatgcacattctggagcaacagaaaaagcagcaaaaattgtcctcatattgtgattacaaccatacgtacaaatatgcctcggggaaaaaatactcaaaagaagtgcagtaattttgttttggtggcaaggttaagttctttaaaaataatggatcatatcacctttataattatattttgttaaacaataaaaataattgttttatttgataaacaatctcatctagatgtcttatctgtaaatttttactctagttaaagaaacatttctttgtcataaat

SEQ ID NO: 272657 - DNA, 596 bp, Homo sapiens
tgtgtggctagagtaggatgcacaatgggatgaaacagcagagggatcagaaagcatgaggtcttttgactttgctgaggttctgcctgccagatcttcaacctctcagaaacacaaacactatgataattactccaaagacaggaaatagcagaaaaagcaaatggaagaaatacctagtgtggagtatagaaattagttatcttaagaattttctctttcttcttaataaaaatctaattttctgtcattttaaaagttgatttatataagggamatccttgaaagtttctatgtattaaaacagtgtgggtaggaagcaaatcatatctatattcatttcgttagttggaaagcttgctggaagttgtaataccctttagaggtattatcagtggtagtcattagaatctcctgggaagctttaaacaacagttcatatcaagctctacctcctacctctctacagccctgggattttgatttaatttttctggggtgggaactgggcatctgtatttaaaaacactcctcaggcaattttaatgtgtaaccagagttgaggatcatcgcgttccaaaaatattctgaaaaga

SEQ ID NO: 272658 - DNA, 595 bp, Homo sapiens
tattgactgccttcccatcctctcattagctcagtgagctcagggatttttatgtgttttgtttactgcctatctccagtgccaggtacggcatgcagcccattggatattcattagctattttgtgttgaagtagtgaaaggtgaggtgatgggtataatgtatgtcttctgattcttatttacccttttttactgtactgtagctcattattccctcctcactccagtgtaaaaatataaaggtaggtggttttgctgttttctctatagaatacatcattattcaaagagattaacaaataaaataagttaatgaaggttaggtattattacctaagctgacaaactctgcctggattccagcaccactacttactmtatttgtgacctaaactcctgagacctcagcatccttatctgtaaaatgaaaataataatagctaccttgtggcgtggttgtgagaattacatgagatgatgtgtataaagtgcttgccatgttgcctggagcatcagaaacattggataagtgttaggctactcttatatattatttattattatttaatgaaaaaaataaaatttccacatct

SEQ ID NO: 272659 - DNA, 453 bp, Homo sapiens
aggagcgtctctacccagacgccaccccgtctgggaggtgaggagcgtctctgccccgccgcctcgtctgggatgtgaggagcgcctctgcccggccgcgaccccgtctgggaaccgaggagcgtctctgcccggccgccccgtctgagaagtgaggagcccctccgcccggcagcagccccatctgggaagtgaggagcgtctccacccagccgccccatctgggaggtgggcagcgcccccgccyggcagccgccccatctgagaggtgggggggcgcccccgccaggcagccgccccctctgggaggtggggggcgcctctgcccggccgccccgtctggggggtgggaggcccctctgcttggccgccacatctgggaagtgagaagcccctctgcccggcagccaccccatctgggaggtctacccaacagctcattgagaacgggcc

SEQ ID NO: 272660 - DNA, 612 bp, Homo sapiens
ttaattttattcatgaccgttttttatatttatttgacctagctaaattaattgccatttactttaagggtttatttaatttttaaaggagacctagatgatagtaacctttgaaacactgaatttactgaaatgtttcaggaaattctacttcagtttttcttgaaaatctaccaggtttggtctgggtagactttgcaaatcatgaaagcaatccctctatgcatgagtgtagttgttgccttcctgaaagatgctcattgggtatatcctctcatctgatcttactggcaccwctgggctgagtggatctaagatcatacctgtggactgacattcaccattgttttcccacagtggcaacagcaataacagtttaaacacagtgccttgcaaagtgatatgtatttaatagaaatgggatacagcattgatcaatggaaaacctcatttaatatttcccgctgctgcctggcttttggtagttctattttgtcttgatttgctccatgtgggattgatgagaaaaaatatgacttcacttgtatattttagtaaatatttattgaacacttattatatgcctggtggtttctaggtactagacacaca

SEQ ID NO: 272661 - DNA, 612 bp, Homo sapiens
ttaattttattcatgaccgttttttatatttatttgacctagctaaattaattgccatttactttaagggtttatttaatttttaaaggagacctagatgatagtaacctttgaaacactgaatttactgaaatgtttcaggaaattctacttcagtttttcttgaaaatctaccaggtttggtctgggtagactttgcaaatcatgaaagcaatccctctatgcatgagtgtagttgttgccttcctgaaagatgctcattgggtatatcctctcatctgatcttactggcaccactgggctgagtggatctaagatcatacctgtggactgacattcaccattgttttcccacagtggcaacagcaataacagtttaaacacagtgccttgcaaagtgatatgtatttaatagaaatgggatacagcattgatcaatggaaaacctcatttaatatttcccgctgctgmctggcttttggtagttctattttgtcttgatttgctccatgtgggattgatgagaaaaaatatgacttcacttgtatattttagtaaatatttattgaacacttattatatgcctggtggtttctaggtactagacacaca

SEQ ID NO: 272662 - DNA, 559 bp, Homo sapiens
tccacagtgggtgggtctatgcaaacctacccccaaagtctgaggaaactgagaggctgaagaaagacattgacatatctacttccttagaaacatttaacagggacaaaagccatgtctgtgtctcaggcagtggtgagacaggatggcacgccattaccccctagacccagggctagtgtactatagggaaggggtgattcagaggaatgtgcaggacaattgaagtacaataacatcaaggttctttgacccaagggcaggatttaytctaagtatctgctcttacacagaaacaataggtaaactgaaactcttagaggtctttctggaactggggttaatcagaagtcagcatggtggattagcttccaagatagagttgctttaacttccacagggttgtgagggggcagatctctcatgaatagatttatgctctcccttggggtgggtatgaattcattctctattagctccagcaagagctggttgttaaaaagaccctggcacctcctccctctctcctgcttccttgcttaccatgtgatttccgcgc

SEQ ID NO: 272663 - DNA, 559 bp, Homo sapiens
tccacagtgggtgggtctatgcaaacctacccccaaagtctgaggaaactgagaggctgaagaaagacattgacatatctacttccttagaaacatttaacagggacaaaagccatgtctgtgtctcaggcagtggtgagacaggatggcacgccattaccccctagacccagggctagtgtactatagggaaggggtgattcagaggaatgtgcaggacaattgaagtacaataacatcaaggttctttgacccaagggcaggatttactctaagtatctgctcttacacagaaacaataggtaaactgaaactcttagaggtctttctggaactggggttaatcagaagtcagcatggyggattagcttccaagatagagttgctttaacttccacagggttgtgagggggcagatctctcatgaatagatttatgctctcccttggggtgggtatgaattcattctctattagctccagcaagagctggttgttaaaaagaccctggcacctcctccctctctcctgcttccttgcttaccatgtgatttccgcgc

SEQ ID NO: 272664 - DNA, 559 bp, Homo sapiens
tccacagtgggtgggtctatgcaaacctacccccaaagtctgaggaaactgagaggctgaagaaagacattgacatatctacttccttagaaacatttaacagggacaaaagccatgtctgtgtctcaggcagtggtgagacaggatggcacgccattaccccctagacccagggctagtgtactatagggaaggggtgattcagaggaatgtgcaggacaattgaagtacaataacatcaaggttctttgacccaagggcaggatttactctaagtatctgctcttacacagaaacaataggtaaactgaaactcttagaggtctttctggaactggggttaatcagaagtcagcatggtggattagcttccaagatagagttgctttaacytccacagggttgtgagggggcagatctctcatgaatagatttatgctctcccttggggtgggtatgaattcattctctattagctccagcaagagctggttgttaaaaagaccctggcacctcctccctctctcctgcttccttgcttaccatgtgatttccgcgc

SEQ ID NO: 272665 - DNA, 541 bp, Homo sapiens
acaatgaccaaactgtttctagtactgttaaagtaataaatatgttcccctaaatgttgtatgcacattaattcatattttaaatatgctagtgtacttttaggaaatgtgcagtgaatctttttgtaaaaggaagaatctcttttttagaaaatgtggttactttcatatctttgtaggagaattaaaagtcagctagaaatcaggttatctagtaggatggactggtagattctaaaccccttgagggcaaagttcttttgcatcttaatatcatttacaattcctaatgtggtggttcacccatagtaggtatttaatgaatattgattgcctattgtgtgagacagcttgggrggaaattaaagaaactctgctttatgcacttttctctgaaatggggacaaagaaacacactgtattcatcagggttttccagagagacagaatgaggaggttggatgggagaggatttagtaagaagaattggctcacatggtcacagaggtggagaagtcccaggttaggacaactgcaggcc

SEQ ID NO: 272666 - DNA, 544 bp, Homo sapiens
gttaaatcacttaattctcacagcaactttctgagggacctatcagtatcttcatcttacagaaaagatattaagcttaacatcagagatgttaagtaacttgcccaaggtgacccagctaataaggcagaacttggatttgaacatagaactctctggctccaccattcattccagcaagagcaatttattccatattaagcacttctcatgagttagactttatttagttagctcatgcccatttctctttgacatttggcattttaccttttttgtgacccggagcataacggctaagagccaagaccttggcagacccagctgagaaaggcatttatctgttggaaataacagaagacaccacaaagaagatctgtaggagctacttcactagggatttaagagtaaatgttttactaagaaaagagaagtttagagcttgtgagcatcttgcaaayaggaagctaatttgctttatcaatttttgtctgctgtgcttgatccttgggataatttgtgagccactgtatcagcctcactt

SEQ ID NO: 272667 - DNA, 565 bp, Homo sapiens
caagttggcaagttacttataactgaatctcagcttcttcatgtctgaaacccattaacaatacctatctcaaagggttatataaattaagtgagataatctttatacataraggacctagtgtggcacaaaacaagccctcaataggtgatagctaccaagtctgtagaaagctacagttctaggaaaacaaagagtaatttttcatcctaatagtaatggagctatttcaggattgtggtatgacgaactatctaatgcataaggagatcatagaaatggccttcccgcaaaagcataagccctgtctgcacatgtctttgtagtccatatccttgcatggatatgaaggtccccctagcatttccctccattttatttatcagatttaatgtgtcaaggacaccaccctgtgtgcctcaatggccaggcttaagaatgctttttctttttataatgtaaggcctttaaaaaagagtattggtgatctataatctggagctgtttcatgaagtcctagatcacttgcagtgagataaattggacccacatagtaacacattaa

SEQ ID NO: 272668 - DNA, 479 bp, Homo sapiens
ggctcaaattaagggactctaatggtttgagtgtattcagatgtgtgagcagggttaaaaacgttgaggcacgcagacacagcaatgatgagaaattggttatatctaggtagaagccagttgactgggaaacccagctgatgggattcatcaagtgatgagtcaataaggatcaacctcctgggatgcagaacagaaaaagttagagagtagactggggacgggaggasttgacaaaggatatccagcacaattgttccttagcatcgaccaaatattttttcttccatttgcttctcatcaggtaacatctttttataatgcaacactttgagttattagtgattcttaagttaaagtactttcggctataatgtgtgagcatagtgattggccagagaaatattagctgatccattttttttcacatgaataaggtggatttggaaatgttctaaatgacatgaaacaatttgtat

SEQ ID NO: 272669 - DNA, 517 bp, Homo sapiens
gcatgttctctccattttacagatgaaacgaatgaggcttagggagtcacactggtacatgggtccaggcaggatttggattcacctgcctactggaacctacatcttaaccatgatggtcaggtttctgtcaatgtggaatttaagtcaattttcctttttctacttggaaaaccaagtagatatattctttttaaaacctgttcagtttattggagaagaataagaattgtcttctaagaggaatggaaaccatatggaaagtatccattttcttttgacttagacagtatttatttgaatgaagagactgaacttggggttagaagtcccaaatgctagtttgggttctgcaattttccaaccatgtgrtcatgacttggtctcttaatcctcagaggcttggaggtttagaggttgattttcctcatctgccaaatagagaaaaaaatcttccatacccatttttagtaacaaatctgtaaagattaagcattcttagtaaccctttactgaa

SEQ ID NO: 272670 - DNA, 243 bp, Homo sapiens
tatgttcatttattcaacagacatgtattcagtatttctgtgtgccaggtattgcaaaaacaagcatccaaaaataataaaatagttctaaaaccattttttttcattttaccttgaaacactttgctatcgtatgcatgaacatagacatgaactcccataatatgaaactggccacttttctaagaaaaatgacccamaatgggcttttaggctcattgtgatctttttctccgtccctgg

SEQ ID NO: 272671 - DNA, 541 bp, Homo sapiens
tagtgtcctggaaaatttatattatcttagctttcttgcctagttttaaacgattttctaggaggaggggtatttttcaatttagcttttatttattttttttttttgatgtcacatttcaaatagagaagaggatgaattctggaaattagtgtgacagagcaaggactctggaatccaattgcctatgtgtgaatattttctctaccttttattagctctgagtctttggcaaagttttctaacctattatagctcattttctttacttgtaaattgtgggtgataattcctacctcatagggttatgagagattaaatgaggtaaaacttgtaaaacacttggatgaatgcctagcacatagtaagtacacaataaacaaaaactgtaattacaaactggtaaatttaaatgtaattcctaatggtaaataaaaagctttggatgatttrcaaatatttagaaaaattcatgaataccaagaacaatgaatagattaagaacaaatttggcaaacaaatctcgtttcattgtatgata

SEQ ID NO: 272672 - DNA, 573 bp, Homo sapiens
gtagaaagtacagccatatccaggctttggaggacctcagggctacaagcaccctgtgattgaccaagagaagaccttgcagatactgagaataaacgccatggggagaagcgagaactgctgcataggactaaaaaaagcaaataaatgctttctgtattgggataagtgaggcaaaagttggggtaattctagaaagagtatcatatagtgaagagaaatgaaatcatgtatgtaacacggttagtacaatgttggacacagagtaagtactgaatacaattgtgatgacaatgatactataccttatagactatgaggtcttcaagaacttccaagtgtaaggactatattttactcattttcctgtccctagtatccagctcagtgaccgggagacagatctcaattatcgttttttgagcaaaattgactaaaaccgaacagagaattgccactgttaagaaaagagamaggccaagagaagaaaaatcagagagctcatgatgaaaaaccaaagtgtgtaaaaagacagtggaagaggtaagcatcagggtcattgttgaggaatat

SEQ ID NO: 272673 - DNA, 600 bp, Homo sapiens
atgagggggaacctgcttacatagggagatccaaggagggttccctgaggcagttatatacatttaaggtgagactcaaaggatcagaaggagacagccatgcagagaacagggaggtaggtgaatgaagcaaaccaaaccaaagttcctgaggctggaaaataaaaatgtggagtggtgccaagttgcataaccatgtgatttctctccagtaaagctcagcagcccaggtaaagaatagaaaaggaatattttggattgacatagaactgggaattggctgtaggtgtcatttagggtccaagagatggaaaaaatgaaaacattactggaagagatcagtgagatccaatatttacataggcaaaccctctctttttttaaaaaaaaaacttttatgctatccttctagagaactgactgtttttcatccatcctggagacatgaaagcacccagaactgtcactaaaatctgaaagtatctggaatggagtgaaagttcacatcatcaagattatatcatttcttagaagacagccatcatctatacattaacaaatggagactaasgcagcactttcttcagtaattttctctga

SEQ ID NO: 272674 - DNA, 634 bp, Homo sapiens
aagtacagctctgggttctgagccactgttgactatctctagggtaataagtgttaaccttgagtggtttactccatctagaaagtcactggataatgtgaaatcctttctgggaggagattttttaccattcttgattagacttcaggaccaggtctgtaaccattttttctttcttcttccacctcaccttcaaatatcctaaagggttagtttttctgtaaaaccgaaatgactgcaagtcattgtgcagagctggggtgtgtggataggcttttgatggatggagttgagctgtggagcttggatcacttgcgacgttgctgatgcaacctctgaatgggatggaacttttgagaggagatggggacttggcacttatgatgttacctggaagaaaaatgacagttgggtggaccagagcacgggggctatgcataaggagtgggacgctggcaattagggggcgtgtcaagcatcatatctgacaagaaaaaggggttggtgtaaggactttcctggagctgccagggacagtgactagattgttggaaattttactgcttgggagatgaaattagaaagctwgcttgatataagtaaaatatattatagacttgaaggggagggcatc

SEQ ID NO: 272675 - DNA, 560 bp, Homo sapiens
atttccgctatcatcttaaatatgaaataaatcaaggcctataattctgttccatttgtaatgtctctcaaattttccttcatctccacttctactgctgtcatcctttcccagtcttcagcatacgtcagcaattctggagtagcttcagactgcacgttctccttctccaatttctcccctactgtttccagcttactgtttcccaaatgccacttaactgtttctctcagagaacctgaagctactgcaaataaccacagactatgagccttttcaaaactggggctttatcatactcacttttgtagctccagtgtttaggaaagtggctgacacctaacccaattttagccttgcaacaactccatgaagtttttgaatgggaaattgaggctcagggagggaaagtgactgccaaagcctgcatagctagtaagcattagagcaagactctgtcataggcaggtctttttttttcytaaaccacatgaactcagctgcaccttgctacctccactgtcaggaattggagactttctcaatcaaattcacttatt

SEQ ID NO: 272676 - DNA, 584 bp, Homo sapiens
tgcattttgaatacatctaggaggtaatttaaaactactgctgatattgacaaaatacatagctagaggatgtgcattttcgtgaatatgcccacaggaaggatcaatgcgtctgtatgggagggttggtatgaatgtgtctctcctctttagcctttttgctwaattcaaaatctggaattgggattttctgccctttactgtattgacagaatagctgattagggtgtctgaagctacacatttccagtatgtgctttatttcctgtcatttacatcatggtataactgcaaatgtggagtgcatttttcttggttgatggaagaattgctttttaggccctctagaagtagatcttctcctttatgctttcagggtgatctctaagatgcaaaatcactactgctatgttggcgttaatggtggctacgctgcagaggaaggttaattaattggtccactgttgctaacttacctaccagtggacccatgcagctttactgctgtgcagactacttcaggcagaaatcacccttttaaaatctagatgtgcatatgatcatttttctggtacgtaagtttg

SEQ ID NO: 272677 - DNA, 617 bp, Homo sapiens
tttttcgtttaaaaaaaaaatatgtgtttcttggtaaatcacacaactctagtgccgaattttcccctgctcattttttcacatctttcaattacctgctgatctactactgtgtaagtgtttttctcctcatttactgaggatactactttttcttattttttccccttatgctcacctaattaacagtcaagcagcttttcatacaaaatctcccagctttaaatttttccttctgattaggagttttaaaaaagagctttggggttttcaaaaatgctttttccaagagatttatgtgctcaamcatcagactatccatcttaaaccaggccagtgtgagcagcagcctctaaaactccaggagacagggaggcctgtgtcccctgacacaatcgttagatgtttcaagggcagggtcctttgaggccatgctatggccatctgagcttgatcacaggtaagacacaagagccatcttcaaaagatctaatttctttaatccctttttattgtgctgtacttttaagagttagaagaagccatgcttttaaacttctgttaattcatttaacaatcatttattaaccacctactaggtgccaggcactaaatta

SEQ ID NO: 272678 - DNA, 617 bp, Homo sapiens
tttttcgtttaaaaaaaaaatatgtgtttcttggtaaatcacacaactctagtgccgaattttcccctgctcattttttcacatctttcaattacctgctgatctactactgtgtaagtgtttttctcctcatttactgaggatactactttttcttattttttccccttatgctcacctaattaacagtcaagcagcttttcatacaaaatctcccagctttaaatttttccttctgattaggagttttaaaaaagagctttggggttttcaaaaatgctttttccaagagatttatgtgctcaaccatcagactatccatcttaaaccaggccagtgtgagcagcagcctctaaaactccaggagacagggaggcctgtgtcccctgacacratcgttagatgtttcaagggcagggtcctttgaggccatgctatggccatctgagcttgatcacaggtaagacacaagagccatcttcaaaagatctaatttctttaatccctttttattgtgctgtacttttaagagttagaagaagccatgcttttaaacttctgttaattcatttaacaatcatttattaaccacctactaggtgccaggcactaaatta

SEQ ID NO: 272679 - DNA, 616 bp, Homo sapiens
acactgcgaagttaccagctctttccggatgctatatcatttgtctgtaccatgaaggattagactctaagtatgatttctgaggtctgatgtaaagtggaacccagaagctttgcatgatcacactgttagtcaagactcaccattcaaaaaatctcttaatttacagtttaataaacaaatgtggaaactgagccaaaaggaaaacaagatgaatctgtgaatatgatgaatgcccaaagctcatgctataagtttctatatgaaaggtagagcctttggctcagagctttctaggaattagccaaatccataacataatgctcggtagtctcctcaggccrttgaagccctatctgttctgctaaagagtgtgaagaattttcccacgatgccacttaaaatatccctacctatcacaagctcaatgttcagttttgccagcttaaaacagtccaacacaatgttatttattataacaggtagtcagctagatcctgaaccaaaattatatcttccaaaatagaatatgtgtaatatgtagtgtggttaacatgtatcataaataccaagccaatttaccaatccttgtattataacagtgttccattttaac

SEQ ID NO: 272680 - DNA, 611 bp, Homo sapiens
ggaggccagcaaaattcaacaaaaccgaagcccaagaggaccagaaagggctagccatctggccagggatgggttttctgcacaagaaatattaccttccctcctccctcccagatgggcccatttgggtcaggagatcacccaggtccactattttccagtccttgattaggaagaccagatcaatgttcccttcccatttggaaggctttgggacacaattttcttggggcagatgagtgtcaccagagctgctcatggaatcttctgggcacatggacctagggaggggatgttctactcctggatagcccctgcctttgagtctctccctcctagaggcaatgcacatctgccctgtatctgaaacctccgagcagccaatctgagcccttgtctattagagaattaatttttaatgggttttatagcawggtggataaatcagttagggagagacaaggagctggcaatgcctaatgaatatcgattgggccatttaaaagggaaaccttgccaaaagggggacagccaccccacagaatcaaaatcagctgtgtggagtgactaaggggcagcagtgacatcttcctctcttctgtggctgaaaa

SEQ ID NO: 272681 - DNA, 611 bp, Homo sapiens
ggaggccagcaaaattcaacaaaaccgaagcccaagaggaccagaaagggctagccatctggccagggatgggttttctgcacaagaaatattaccttccctcctccctcccagatgggcccatttgggtcaggagatcacccaggtccactattttccagtccttgattaggaagaccagatcaatgttcccttcccatttggaaggctttgggacacaattttcttggggcagatgagtgtcaccagagctgctcatggaatcttctgggcacatggacctagggaggggatgttctactcctggatagcccctgcctttgagtctctccctcctagaggcaatgcacatctgccctgtatctgaaacctccgagcagccaatctgagcccttgtctattagagaattaatttttaatgggttttatagcatggtggataaatcagttagrgagagacaaggagctggcaatgcctaatgaatatcgattgggccatttaaaagggaaaccttgccaaaagggggacagccaccccacagaatcaaaatcagctgtgtggagtgactaaggggcagcagtgacatcttcctctcttctgtggctgaaaa

SEQ ID NO: 272682 - DNA, 568 bp, Homo sapiens
tcaacttgaccggaccacagggtgcccagatatttggctaaacatttctgagtgtgtctctgagggtgtttctggatgagattaacattggaattggtagactgactacagtacatttcccctaacgtagytgggcatgatccaatccatcgaggcccagaaaataacagaaaggcagaagaagactttcctttctctagtggattgcttgagctgcaatattgggggacttaccatcagcaccctggttctcaggcttttgacttggactggaacatccctgactttcctgaatttccagcttgcatatggaagatcagggaattttcagcatccataattgtgagagccagttccttataataaatctgtgtgtgtgtgtgtgtgtatgtgtgtgtgtgtgtgtgtgtagtctcctattgtttctctggagaacactaatatgtcattccagtggggagttagctaggaaagtgatgagacctcttgtgtttcaaatcgtatagcttgccagtatagaactgtgaacaaagtcatttttttctcaaatctgtaggccaaaagaatg

SEQ ID NO: 272683 - DNA, 568 bp, Homo sapiens
tcaacttgaccggaccacagggtgcccagatatttggctaaacatttctgagtgtgtctctgagggtgtttctggatgagattaacattggaattggtagactgactacagtacatttcccctaacgtagctgggcatgatccaatccatcgaggcccagaaaataacagaaaggcagaagaagactttcctttctctagtggattgcttgagctgcaatattgggggacttaccatcagcaccctggttctcaggcttttgacttggactggaacatccctgactttcctgaatttccagcttgcatatggaagatcagggaattttcagcatccataattgtgagagccagttccttataataaatctgtgtgtgtgtgtgtgtgtatgtgtgtgtgtgtgtgtgtgtagtctcctattgtttctctggagaacactaatatgtcattccagtggggagttagctaggaaagtgatgagacctcttgtgtttcaaatcgtatagcttgccagtrtagaactgtgaacaaagtcatttttttctcaaatctgtaggccaaaagaatg

SEQ ID NO: 272684 - DNA, 455 bp, Homo sapiens
agcaaagtacttccagacttcaggaacaaaacattgatggaaccaatataaaaaaaaaagggtcacgattgtccagaccttcttgttgtacaaccgaagactggcaactggtgtttatcttttcttttcaaggctcaggcgttagcagctttaacagggcagtcctaatcagaaactcaactgcatttgcgtaaaacagtagagttagcctatctctcctgctttaaatcctggtactcaattctcttccttattaataaatgtcctttgtggcattttttttcccagaatagggcactttcaactgtgttaaaaacctgttcaggcagatatcctttctcctcaatgattttcttaatggcatttgggaacttgtcttttgcctcctggttgacaaawgctgcttcttctgttatcttgacattttttaagcaaaacctctttctaaaataaac

SEQ ID NO: 272685 - DNA, 588 bp, Homo sapiens
gttaaaaacctgttcaggcagatatcctttctcctcaatgattttcttaatggcatttgggaacttgtcttttgcctcctggttgacaaatgctgcttcttctgttatcttgacattttttaagcaaaacctctttctaaaataaacaractattcttttctggcatgaaattctccattctccagctttagatttttcactttctttttgctttgtcatataatgactttgctctttcttgaatcatatttgagtctatagggatgcctgtcttatagcaatcctgtactcacataaaagctacattttcaatacaagataatgagatattatgcaaaaagtgcaaggttttcacacttgctggtgtagctgtagtgatggcttcacaaatttcctttccttttttttttcttttctttctttctttctttcttttttttttttttttttacaatggttcttacctgaattcatttatcttgaaatggtcgacacctgcagcagcagacctcaatgtgtggtacagatcaagcaattcaactttttcttgtaatgtcatgactttgtttcttggaacacttccagca

SEQ ID NO: 272686 - DNA, 560 bp, Homo sapiens
cccatagaagtaactcagtaagtttgatgaaaaaaaggaatggagacaagaatggaacttctgagcatgagtgaggttctgtgtgctggtagcagggaaggatggagctagcatctttgtgctctgcaggtcttggagaaatgcccagccaggtcccagagtagttcagcatggagccagcttctggaccaagatcagtaacaattaaaacaactaagaaatttttgtatttctactctaccgtgtttcaaaaaggatttattmaaaaaaatacataaaatttttaaaaatgatcaataagggagaaaatttggcttctggataagattattactctaaatgaggttaataccccaaaagaggtgtgtacacttgggcaatgaattggctctgaggtacctggcaggccatgcagagaaggaaatgtgatgggttataggctttatgatgtccatcaaatgaaaataagtcaactggggaggagaagacaaggtttcttggtactgaggccagaaagagacttctcctgtggattcttttaaagaagaagtcaggtaaca

SEQ ID NO: 272687 - DNA, 544 bp, Homo sapiens
aaagtacctaatcatctcaattagatatactaggttgcagatttcttgagaacaggtggcatgctttatacatccttgcatacccaggagcatttggctcaggaccttgaactaagttcttaatacagtttcattaattcacttccaatcttggggtrggagagttatatttcttaagagatggaaaaagtatttacaatatatagtaaaggattattaatgttaatatagtaaaataaggctttacaaatcaataataaaggacaagaaatccaattgggaagtaggccaagaaaattaacatgaaattcactgaacaacccatacttatcaaaagatcaactttagcagttatcaaagagatgcaaattaaaacaattttattaaactgttgcttatcaaattgggtaagattgaaaaatagattctgtagtgttagtaagacaatggtgaaacagctactcatatgatacaaggtgggacagcacatgggtacaactttcctgatgataaatttggcaatttttattaagtctttaaaatg

SEQ ID NO: 272688 - DNA, 592 bp, Homo sapiens
atttccactctttccccatttcctatggaagcccacctcagcattcagctctcctctgtttccttttctcttctagtctgtctcctggagctcttcggaagtagcttcagctcatggctcaaacacagccctgtggccacggcccagcatccccacaatttcctggcccacaaatgggtttcctgacagcaagttctgcagcgtagtctcaggaatgggcaactacagacatttgacccagctgagaagcttcctgaatggagtttatmcttcatttaacaaaatgttgttgagggagggcctgctttgtgctcagcatagagcagggtgctatgcaaaaacaatctcttagatactgattgtattttttattctgctttcaagatccagcttacatggcacctgtcctacaaagtctttcttaagactcctcatccccctgcaaccctgggttcccatggtttaaccctctattccattcaatttcacatcaaattatcagtatttcttcatacatctattccttctgctaggctggaaattccttaggggcaagggacaaacacagtctgctttccccctccagcacatc

SEQ ID NO: 272689 - DNA, 619 bp, Homo sapiens
caaacgtttgctaagattcttgaggggcagaccagaaaacgttcacaggtttaaaaagctggtagctgtagcctgaagctcttaacactctccttagttacctaatttcctccagtgggtctggcctgctccagggaaggcattttgccctgaaaatgtgatgctttcaagactccatagaaagcaaaacagccggctttccgcttgggaaaggggcttgtgcctttaagacctgccttgggaaatcagcctgagcaacgtaattgctgtgaaattaccccagatcacacccacacattcattatgagattccttattgacaccttgacaatttgtttcagaagacatyactgcatattcctccctctggaatagatacagatgcatatagacatacgagcccacacataatgtatatgcatatcagtgtgtttttattatataattatacaaggctatcagtcagttttcatttgaaactctttgcatttatagttcaggaagttatttaaaatcaagagttggagaagatagcctcctagaagaaccaaacatgaagagtagaattgagtaagacagggggcatgtctttgctatttgagaactgtgcctaccccca

SEQ ID NO: 272690 - DNA, 605 bp, Homo sapiens
tcaaagatctaaacctaaagagatcccatgaatcatttacagtggccaggacctgctgcctcttcctttatagggtctctctctgtctcttcatttctggcccccttttcactgccgtactgtttgtaaaagctcaaactcaggcagacattcaaagtctctgtaatctagcttcaactgaatcctgaaagagtagctgacacacagtaggttttcaactgatgttaagtgagtgaatgaatggatggataaatcacgcctcggtctctttcttcttttccccccactgtacatggccctggctctcaccaaccctgttggcttgctgtgcccttaaacaccctgtgcattctatgcccagtcctttgctccttcctagagtgtgtccccaacttctgtcctcatcattaagtcctacctggcctgcaaggcccagctcaccttctctgccaagttctatctgactaatgtggtctcaaaagacctgcctcccttgmactcctagagtctgagccctcaggcagcactgacatcagtgatttgtgatacatttttgaacctaatatgctcttgtccaggctgaagagtgagcacccaagtgcagc

SEQ ID NO: 272691 - DNA, 506 bp, Homo sapiens
tctcagccagactgaggtataaataccaaagggatgttttgtctgacagtaaaagtcaatgagactgtaactgtggaatttaaggccatacaagatccagggggacatatctatgggcaggggacacctctaagaaaccaaggatagaaagttgaatggrgcacccccacccttaccttggacatcaggtactgtgatcgacccttttctgtactttgttttgtttgtttctcacaaccctggaaagtttcattattcacttctttttggtgaagagtcccaaactcagaaaggttaattggtctgaagttacagaaccagaaggaacagaattgagcctgatgctgacacctgctatctcccaaagtcaggatcttttccccctcattaccccacttcctccatctacctgtgcagatcacctactgcgtcccttatcaaggccactgacaaataactgtcattgagggtgatggtgaggggcagggaggcaacccagactcaga

SEQ ID NO: 272692 - DNA, 609 bp, Homo sapiens
agacaaagtaatcagttgacaattattgccatgatccaggtacaagagcctgaactaaggtagtgatcacagagaaatagaggctgcagacttttctgaatgcttagcaaggggagctgaaaaggaaggtagagtctagcaaaaaaaaggtcctgggcttagattcttcactggatggtggtgttcaggtaggcaagggtcagacaggcttcagggagaagtgagaatcctgtttggacaagttgggcttgataggcttggggtacatctgcaggcaggtgagtgataggttggtgctcagtttggactcagagattcaggacctattcaacatatctgtgataactaaggccacaatgtgaaagagataaccaaaggttacatggaaaatggtgcacagagcaccaagaacaagtcttggggaacrccaacagctcaggtgtgagtggaggaagcaaggctgcaaaggaagatgagaatgagctgcctgagaggtagttgggaaacagagagatcgtggaatcacacaaattaagagaggaagagtttcaaaaaggatggaatgcttaaaagggtaggatgacaacagaattcaagcaagtaaagtaa

SEQ ID NO: 272693 - DNA, 581 bp, Homo sapiens
ctggtgctctaaccgctggttctctaaccactgggcaacattgcctcacacacaagaaaggctttagcagcaccttggccttccctctagcactctgcccaaggcccttctggacactctgggtatgaagagtgatgggttttgcttcaggctccacttgctcactcttctctgtatcctcagaagctgtgagagagaacgccctgggtaccacagggattcccttcttgcccctgtaaatagcttcctcaggccaccagggcccaggggcataaagatggccaygatcaaagtcagccagccaggactcccttgccctgtagggatccaggaataattaattggcctagaccttttccaaatcccatgtccaaagccatcccctgatttatgccatgtcatggtgcttccagcatctgagtctgtgtgtgctgtctgtattgagttgaatagtaatcccccatccctgccccctgccaagattcttgttcacttggaacctcagaacgtgacctcatttgaaaataaggtctttgcagatgtaatcaaatgacgatgaggtcatattggattagggtggg

SEQ ID NO: 272694 - DNA, 619 bp, Homo sapiens
ttcgttccttccctgcagcctctagcctctctaggaaccaggcctgggtcttgaggaccaggagggggtcagtctgaaaaccagtcattgtacagaatcacactcctttgacagacctggacctacaatacatgctctacctcagaagggcttcatccccaggagttcctcagtgcccatgcaggtagactaaggacagcccctgtcttccatgcatgcatyaacagacctgaactcacattgcataccagcttaggccagcccaagccccactgcactcagagacaaaaagctacaatttcgtcaactctcctaatggctaatgaacatatagcatgttccatgtgccagctgatgttctaagtgcatgtacccttttgactcctttaatgcttacaacatccctgtgaggtggatgctactattactcccaccttacagacgagaaaactgatgtccaaagtgcttgagtaacttgcccaaggttactagaaagcaagtgacaaaactgtaattcaaatctgggccctctgcctccagcgcccacctatgtgaccacccaagtcatcctgtagttctgtctctccaggggcagaaactgtccaaatcctgccaatgc

SEQ ID NO: 272695 - DNA, 524 bp, Homo sapiens
aggagttcctcagtgcccatgcaggtagactaaggacagcccctgtcttccatgcatgcattaacagacctgaactcacattgcataccagcttaggccagcccaagccccactgcactcagagacaaaaagctacaatttcgtcaactctcctaatggctaatgaacatatagcatgttccatgtgccagctgatgttctaagtgcatgtacccttttgactcmtttaatgcttacaacatccctgtgaggtggatgctactattactcccaccttacagacgagaaaactgatgtccaaagtgcttgagtaacttgcccaaggttactagaaagcaagtgacaaaactgtaattcaaatctgggccctctgcctccagcgcccacctatgtgaccacccaagtcatcctgtagttctgtctctccaggggcagaaactgtccaaatcctgccaatgcagagcaggcactcatttcgggtagaatgtttcttccacagctttgtagaattcacatctgtcaca

SEQ ID NO: 272696 - DNA, 524 bp, Homo sapiens
aggagttcctcagtgcccatgcaggtagactaaggacagcccctgtcttccatgcatgcattaacagacctgaactcacattgcataccagcttaggccagcccaagccccactgcactcagagacaaaaagctacaatttcgtcaactctcctaatggctaatgaacatatagcatgttccatgtgccagctgatgttctaagtgcatgtacccttttgactcctttaatgcttacaacatccctgtgaggtggatgctactattactcccaccttacagacgagaaaactgatgtccaaagtgcttgagtaacttgcccaaggttactagaaagcaagtgacaaaactgtaattcaaatctgggccctctgcctccagcgcycacctatgtgaccacccaagtcatcctgtagttctgtctctccaggggcagaaactgtccaaatcctgccaatgcagagcaggcactcatttcgggtagaatgtttcttccacagctttgtagaattcacatctgtcaca

SEQ ID NO: 272697 - DNA, 577 bp, Homo sapiens
gacttcctagtcctaaaaccagattgcaattggaatctaaaaatcattctgtctttgcagctgtccacctttgcactttcatgggtgaacaatactggctgaggcagcactgcagagcagtggaaagaatgcttggctaattctctattagcctaccagtgaaaaatcccatataataacctccccttctcttctactcccctcaaacaaataaaaaaaaaaaccttgtcattttctcctcccctggggtcccctgtgtttccccttcagaatcaggagtaaattttctccaaagaagtgttcattaagaataaataataatttgcacttctagtgcaccytttgtctaagcatctcaaagcgctttacttaattaattaagagaattaatttgggaaacactcctggagggagggaaggcatacttaatgacacccgatttccagatgagtaaactgaggcccaaagcaatgggctcaaggtcccaacaggaaaagtggccacatgggattgggggatgggggtgagactaacttcaatccaacatattgaggctcaggcaacaaaagggcagggc

SEQ ID NO: 272698 - DNA, 578 bp, Homo sapiens
acacagactgaggaaagtcacccaggagactgcctgggtctgaacgcatccctgcactccctggccctgtctttttgacatctgatgtgtttttgatacttgcaccctcatctcagctcttccctacctgcagtctgctctatgtcactgctcaaatgcctctattccaagagggctcagggacacccccgaggagagaggaagcattggtttccaacatctacacctccagcaaagaagtagtgtgagctggggtgaaygcaactgcagaatcttttgttgaatgaaacacctttcacgtgaagaaaaagcagcaagacgaaatgacactttgctaatgatgtattttatggactgccatctgtctctggaaaggtcagagaaaagtggcaactcagttgcaggtgattgggcagggaccgtggttggggggacaaatgtctctcatcggaacatgacagggagccttggtgacatcatataaatgccctaattgggaagtggtcaatcgagcgggcctgactcctgaatttgatgtgtcaataaacaagctcaaggtgagatgctggatcaatacc

SEQ ID NO: 272699 - DNA, 493 bp, Homo sapiens
cacatcacactggtacaggggtaccatgaaaagagttcgtggaccaggactcagggtatccagtgtccagtgctaactctgccactccctcagtatttgaccttggacaagttgcttcacctctctgtgcctcagtttcctcatctggaaggagtggggactggcctagaaaatctccaaggtccattccagaagcttaacagtgcagatcacttaccaattaaaaagcagtccccccactcactttccaatrggggttctacattaaatgtcacagagacaagttagagaaagatgcctctccagaaattaaaatgcaccttagaaaggtggggagaggtggggctgcttgcaagagacctctgggccatagtcaaccatcttcacctgcatttaactcaagtctgaaaggatgtgaggcaggttctgaggaagcagctggtcacagctcaccaagccatgtgactccctcatgggtcttctcaaggttgag

SEQ ID NO: 272700 - DNA, 507 bp, Homo sapiens
tgagagtaagcatagagctgataacatttaagtttygattcaattcagtatttgcccagcatggaagtctctgtgctcatcattactgcaagggtggtaaagctgaggaagatctgattcctatcctcaaacagttgtctgttcagatctgattcctgtcctcatagacctagtggaagggacacaccaatccatacgggaaagtaaaacaatagtcatttgtgaagcaatacagctcttgggacaggaaactggaagatggcacgtgagtctggggaaatctggacagatttatagagaagatctgctatttgaatttagccctgaagggtagatttaatgttgatcagtggagagacagcagtgtagaagggagtacaagggagaagggagactagagagggtgttccaggaggaggaagcagtaggagaaaaggcatagagatgcaaaagccaaaaagatgttcggagagtaaagagttgccctgtctatctggcatgttggca

SEQ ID NO: 272701 - DNA, 480 bp, Homo sapiens
tttgtatatttgctcactagtttatcccactgcctcttcctctaaactacagtctctgggagtgcacagatctcacctgtctcattcaacaccctatccccagtaccagaaacaggacctgcatgtagacaaagctgaatatatgtttgtgaaggaataaataaaatcatctgaagagagtagagaaaaagcatcacaaagggaggaagacactgaagaccaacctccctcacttyccaatgtccctagggaccagctttgttctacaacatgagtggaggacacaggtgcagactgtgaaaggccaggaactagagacctccagtgcagccacagagcccacagccataagagcaccctccaaagaatcagcaaagacagatgcaggcccatccagggcaaatgaagatttagaagaattgtgccatttcttcacatggccagaggccatggactctgggaagagagagtttgcagagt

SEQ ID NO: 272702 - DNA, 480 bp, Homo sapiens
tttgtatatttgctcactagtttatcccactgcctcttcctctaaactacagtctctgggagtgcacagatctcacctgtctcattcaacaccctatccccagtaccagaaacaggacctgcatgtagacaaagctgaatatatgtttgtgaaggaataaataaaatcatctgaagagagtagagaaaaagcatcacaaagggaggaagacactgaagaccaacctccctcactttccaatgtccctagggaccagctttgttctacaacatgmgtggaggacacaggtgcagactgtgaaaggccaggaactagagacctccagtgcagccacagagcccacagccataagagcaccctccaaagaatcagcaaagacagatgcaggcccatccagggcaaatgaagatttagaagaattgtgccatttcttcacatggccagaggccatggactctgggaagagagagtttgcagagt

SEQ ID NO: 272703 - DNA, 608 bp, Homo sapiens
tccctcactttccaatgtccctagggaccagctttgttctacaacatgagtggaggacacaggtgcagactgtgaaaggccaggaactagagacctccagtgcagccacagagcccacagccataagagcaccctccaaagaatcagcaaagacagatgcaggcccatccagggcaaatgaagatttagaagaattgtgccatttcttcacatggccagaggccatggactctgggaagagagagtttgcagrgttccctgtgccttgcacatgcgcattccctcctgaatactttcctttccttcctcagcaggctgtttccgctcttctgctacaggctgatcaatgaccactcaaaagatatcaaaaactaatccctgggacctatgaatgttatttttacaggaaaaaaaaaagtctttgcagatgtaaggatcttaaaaaaggggagatgatcctggatgatccaggtgggccctaagtacaatcacgtgttcttacacaaaagacacagagggagactttactcaaaccaaagaggagaaggcaatgtgaaggctggggccaagagtggagccacaagccaaggaatgccagcagccaccag

SEQ ID NO: 272704 - DNA, 624 bp, Homo sapiens
gtcattattcatctctgctacagccaaaaaggagcactgcatggcaaaaattttacacaaacgcttatgtatattacctaaataatatagtatttcttgactcaagtgttgccaaaatcaatcaatccatagaagagaaaccctcccagaagcctctgacaggaacaagataggaaaagggcaatggcttccccactcccaaaaagggggatgcagttggaaatattccatgttccygggctcggattaccagccctaatttatcatcaacctcatatattcttatataagtagtaatacagatcaccccagccaattaatcaatctgtaattaggaactgacatgaacatttactaccatcaggcataatttatatgattacaggtgattaaataaaatgtacttgagtgaacaggcaatttgttaagcacatctagacgcagccatatcacctaaggctgggagcgccctgactcccctccgacagtgggtcaggaggcatggtcctgggagcggagccctcagggtggctcaaggtagggtaagatgattcagacttccaagggggcccaggtttggagtgtggtgggaaaccaagccatacagatttgtggggcgggggt

SEQ ID NO: 272705 - DNA, 624 bp, Homo sapiens
gtcattattcatctctgctacagccaaaaaggagcactgcatggcaaaaattttacacaaacgcttatgtatattacctaaataatatagtatttcttgactcaagtgttgccaaaatcaatcaatccatagaagagaaaccctcccagaagcctctgacaggaacaagataggaaaagggcaatggcttccccactcccaaaaagggggatgcagttggaaatattccatgttcccgggctcggattaccagccctaatttatcatcaacctcatatattcttatataagtagtaatacagatcaccccagccaattaatcaatctgtaattaggaactgacatgaacatttactaccatcaggcataatttatatgattacagrtgattaaataaaatgtacttgagtgaacaggcaatttgttaagcacatctagacgcagccatatcacctaaggctgggagcgccctgactcccctccgacagtgggtcaggaggcatggtcctgggagcggagccctcagggtggctcaaggtagggtaagatgattcagacttccaagggggcccaggtttggagtgtggtgggaaaccaagccatacagatttgtggggcgggggt

SEQ ID NO: 272706 - DNA, 577 bp, Homo sapiens
ggtgggaaaccaagccatacagatttgtggggcgggggtagggggtggggggtgcacttcagtgcccaagtgttttctgcaaaagaaatacctggattttcagaactcctgagacaacaaggaagaaagaaggaacatttacatgacatgccctggagcaaaactatgcacaatattttccttctggtcccctggcccygaaactacacccactgctcacatggaaggactccttcatttctttccaggagcatttctaaccatgaagggagacttatttaaagacaaagtttattcttgccaggaaatgccatcaccgctgaaaggaaaattttcaataatatcaagcaccaaattctgccttttctattttattgctcctcttcagattttatctctcagttttatcccttctcttctattccagaggagaacagcttaaagttaaatttaacatatatctttttgggtgccaactatgtatcaggtactgtgctgagtgccatcacgttaggcttgccagatctagcaaataaaaatacaagatgcccagttaaacttgaatttcatataaaca

SEQ ID NO: 272707 - DNA, 543 bp, Homo sapiens
cccactgctcacatggaaggactccttcatttctttccaggagcatttctaaccatgaagggagacttatttaaagacaaagtttattcttgccaggaaatgccatcaccgctgaaaggaaaattttcaataatatcaagcaccaaattctgccttttctattttattgctcctcttcagattttatctctcagttttatcccttctcttctattccagaggagaacagcttaaagttaaatttaacatatatctttttgggtgccaactatgtatcaggtactgtgctgagtgccatcacgttaggcttgccagatctagcaaataaaaatacaagatgcccagttaaayttgaatttcatataaacaatacgtactttttttagtattaatatgtctcaaacagtgcaaccttacgccacgtttgttagctcataatgttctcacaacaactccatgaagtgtaatttgtttgtttccatcaaggaaactcacttcagttcctcggctcttgctgctgtccccaccagggaatccctgtct

SEQ ID NO: 272708 - DNA, 596 bp, Homo sapiens
aactccagggcttctgaattccagggtctttgctgaggtgcgaatcaaagatgtaaaagatgtagcatgtgcaagtggtgagagttggtggagaccacggggcctcctcctgtctgccattcctccccttctcccaaagtggccctctgatggggtagaagtcctttacagctctccttaatccatcttcctctgaccacagcttccaaagctgcatgattgactcttatttgcctctaacttccaactttctggcttcttgtgcagaaatatctgatgagaggaaagagccaggctctgcatgctgacaatgccaagggcctcctccaaatgaatttccactgcagatatttaatgaagtaatggggaaaccaggaaggtagtgatygggccaaacctccacaaccaggactcaaaataaaaaacttttttttttcaacatctacggagagtttctgaacattcagattaccaaggacactaaggtcagattaaccccacctatttcattcacacatggatccttgggtccactgatacgtgaacaccaagaaagtcctcgttctactcattcagcagacatttctgaataactt

SEQ ID NO: 272709 - DNA, 262 bp, Homo sapiens
atacatggataaattacacaggtkacacaggataaacccatgttaaccttcctagctttttttggttctttacattatatcaagagttttctggcatcttgattccttatgagccattagcaggtttcagtaagccatctgagaagatacttagaaatctcagatacttgagccagcatgttgaatctaatatctctgataaatgtacccatatccataaattcggcttcacttaaaattatatttccccaaaatgaaaagc

SEQ ID NO: 272710 - DNA, 562 bp, Homo sapiens
ataccatatattattcacatgtatataataaagtatgaaaccatggacttgaaggatacatgccaaattcaatgtttgcctgcctctggggaggaagaaaggaaggtgaaggggtggggrtggtaaggacagaataataataaagattagcaaatattaaaacttcattctggtgttggacacgttgttttattcatccccactttctatttttttttaaataaaagaaatggcagagacttgagcaggttgttcacttgttggtgagaaggaaccagtagagggagaggagaatgtgagggtgtgcagaaagagggagatgggcagtggggaacaaatgaatgaggccctgaaaagcaagaggctgagttgcactcatttgatgggttggatgtgtcttccactggaggaggatgggtgcagacacatgggtaagcgtgcagatttgctggtcattggtgtggtcctgttggattccaccatggactgtgcagcagagcccattttcaacctgaccttgtgctgtcggcaaagcagaagatgaagccccacccgcatgctc

SEQ ID NO: 272711 - DNA, 562 bp, Homo sapiens
ataccatatattattcacatgtatataataaagtatgaaaccatggacttgaaggatacatgccaaattcaatgtttgcctgcctctggggaggaagaaaggaaggtgaaggggtgggggtggtaaggacagaataataataaagattagcaaatattaaaacttcattctggtgttggacacgttgttttattcatccccactttctatttttttttaaataaaagaaatggcagagacttgagcaggttgttcacttgttggtgagaaggaaccagtagagggagaggagaatgtgagggtgtgcagaaagagggagatgggcagtggggaacaaatgaatgaggccctgaaaagcaagaggctgagttgcactcatttgatgggttggatgtgtcttccactggaggaggatgggtgcagacacatgggtaagcrtgcagatttgctggtcattggtgtggtcctgttggattccaccatggactgtgcagcagagcccattttcaacctgaccttgtgctgtcggcaaagcagaagatgaagccccacccgcatgctc

SEQ ID NO: 272712 - DNA, 593 bp, Homo sapiens
ggtatgatcttggttcactgcaaccttcacctcctgggttcaagtggttctcatgtctcagcttcctgagtaactgggattacaggtgcacaccaccatgcccagctaatttttgtatttttagtagagatggggtttcatcagtgttggccaggctgaaatcctgggctcaagcaatctgcctgcctcagcctcccaaactgctgagattacagatttgagctaccatgctcagccttagtctctattttgtttaattgttctgatttttattatttctttctactaattttgggttttatttgttcttgcttttctccttgaggtgtattgttaggtttttttatttgccatctttctacgtttttgatgtaggtatttattactataaacttctctgttagtactgcttttgctgtatcctataggttttgatatgttgtgctttgattttcgtttgtttcaggaaatkgttgattttctttctaattttttttgactcaattcaggagcctgctgtttaatttccatgtatcttgtaccgtttccagagttcctctcattattgttttctaattttattccactgtggt

SEQ ID NO: 272713 - DNA, 593 bp, Homo sapiens
ggtatgatcttggttcactgcaaccttcacctcctgggttcaagtggttctcatgtctcagcttcctgagtaactgggattacaggtgcacaccaccatgcccagctaatttttgtatttttagtagagatggggtttcatcagtgttggccaggctgaaatcctgggctcaagcaatctgcctgcctcagcctcccaaactgctgagattacagatttgagctaccatgctcagccttagtctctattttgtttaattgttctgatttttattatttctttctactaattttgggttttatttgttcttgcttttctccttgaggtgtattgttaggtttttttatttgccatctttctacgtttttgatgtaggtatttattactataaacttctctgttagtactgcttttgctgtatcctataggttttgatatgttgtgctttgattttcgtttgtttcaggaaattgttgattttctttctaattttttttgactcaattcaggagcctgctgtttaatttccatgtatcttgtaccrtttccagagttcctctcattattgttttctaattttattccactgtggt

SEQ ID NO: 272714 - DNA, 595 bp, Homo sapiens
gacacagctgccaggaacacagttataggtcagccctctgctgtcagcccctccaggatcacttcggctgcagagagccacggggccccaagtcacatccttccaagggcagcccatatctaatgacaaatgaaggtaggactgtaaaggccaggctatttccacctaatatggaacaactctgatgagccattttagccccagagctccccctgggatcagccaggttacagctggtgtgcatcacagaccaacttctatgccacgggaattctaccagtgagctcctttctgaaactaacagtgtcatagatggagtggtgtggccctcagaacaacctcacaatggctccagctgctgggtctacccgagcctgacttttccccatgaccaacctcagaggtgcctgttaccatggctccttagtctatgccccttctccaccctgctccctccctcttagtgggggaaycctcatcctttgttttataagttgcccccaggaagcagaagatattgtttaccagcacaattcattggaatcaattgttcctactgcagagccagttagacaaagaaagggcagggtaataa

SEQ ID NO: 272715 - DNA, 588 bp, Homo sapiens
ccttacaaccaaccaccatcgcgtcactgctgcccagctgaggtaactagctctaatttagggctgctctgcctaccttttgtgcttttctttatttgcatgtgagaaccttcccctccctaccccgcctgccatcttcccttccccctaactagcaaattaaactgtgcagttgcccccagctcttcccaataaaggaggcaacttggacttgacccattaaaggagaaagcccggaaagacttgctacagtatccagcaagtctcattttgataattgaytggtaggagaagcatttgggttgcaaagcaaccttagtagtcaggtttccattttgcagcaaaacccccaaattaaaaatcacctccaggggataattcttttggaaataatatgagctgggctatttctgtttttgtcaggcacactgtcactccaggctggtgtctcacatgttattctggctgcatgagagaggcccagaataatagcactggtaacagaaatgatggcaaaaatgggaaggtcaatttacaaacataaaacaaggagaaagccatactcctccacaaaaagttggtgtccac

SEQ ID NO: 272716 - DNA, 523 bp, Homo sapiens
tcgggggggcatggaatggggtggacacggtgtcaaggggcaggtagagggaactggtctctcttgctctcttcaatgcacacrtttccctccttcccagcatctccccttaacccaggccaggcctctgcagacacttcagtctgctcctgggagttttcctgcagataccactggatggcttcctcaggtcctacctgggcaacaggcccactagcagtgcctataccggcccctgcccctgcagctctcattggaggatcccagaaggttctaggtgagctctaatccttacctccacctctgagggcacgagctggtggcacttcctccagttggctatcctgacccactgctcacagcccgtgtatgaatatccaaacggcacagtaacttctccaactgtgttcaaggggcagggtgggcctgcccaactaacctaagggacctggagaccaaaggttggatgactgccaggctgcaccagtgccaaaccaaaaccccggcattctaagaggccggg

SEQ ID NO: 272717 - DNA, 590 bp, Homo sapiens
ccgtctccacagcggggctttgctgagcttagcacgcagtctcccggcggggaggaggcgcgcagtgccgggcgccactccgtctccagtacgcgttaggcccgcgttcccaggtgcccgtctggccgctggactgttggcctttccggagcgagttttactttaggaagaagcccgggatcccggtagtttagcctgaagaaacgtggggcagatgctgggcagggcggggataccgcgccaacacccgctgcccagcggtcgccctcctatgcagcggcgaagggacgcccgctgtgtctccgccctgcccccaggcgccccagtggctggaggtggcattctccactggacgggcgcgcctcaatccgggggacttccacagtgctgttcccgaggacyacgcgtctcaactctttgtcgggttccctccctcccactgccagtctgtcttcaccgccgcgcagacctggggccgcccttcacagaggaagggctccttgacctcagccaccgtgaccccctcctttgtgtcacattctcagagagttggagggattatgcgtcatcgtaaacagggggacagagcg

SEQ ID NO: 272718 - DNA, 652 bp, Homo sapiens
tcttagaggtgagctcagagagtccatgctagcacatttttccgtggagggggcttccccaaatcattccctcctgactcaaagaggctaaaaaccacaggtttagcgctgaggctcaragtaactctcccttagctagcagccccaaggaaagctggctaaggtggaagaacccctctctccacctgctctgcattgtggggaccagggccctggtgagggcaggtgcagggaggattggaggaagcagccgtgaggtgtgccctgagagccatggaccatctgcaggtgccggcctggaggcagagcccttgggtgccccaggggaggagagctggctccctgcagaggactgagagctacaagaaggaggagtaaggatggcttgggctctacccccgggacgcagatgactagccaatctctcctgggcctgggagagagctggagagcctcaggacagagcctggcacccccaacacaaccccatggtttggcctctgctggacttgcctgtaggtcttgacaacatcccagctcctggggatccacatgcttctgggaacatccatttgaccatgggctgtgttgtgatgacaggtgtcaggcctctgagcccaagctaagccatcatatcccatgtgacctgcac

SEQ ID NO: 272719 - DNA, 576 bp, Homo sapiens
tgtcttccgcccttggattttccatctacagaacttcctcttatggagctctctgaggatattctgaaaggatttatgaataattgaaatagaaggccaccaaaaggggaaaagaggaaataatacagtaatcgttaatccagcaaaaagaaaagggaaaaccacatagaagggtcatcccggaaatgcttcatctggtggactgtgggagcagaggcattgccaggacttgggaaacagtcactgtgaaatgcgcagcatatctcattcactcacttgagctaatgattctgacttggcagacgctaaactcatggaggttcagtttctcctgatccaaaccaaatggctacctggaataatttcttccaagcaacagttatttttcttatcttcaggtttaaaatgtataaaagttatgtgtaattaatctataatgccataaatgataatgcaaaacctaaataatatggtggccrgaggggctgctttatatttgaaacatgctttctatcatgcattaactgtatgcactttgttaatgcacattttgtttgtttaaggtaagatccacac

SEQ ID NO: 272720 - DNA, 606 bp, Homo sapiens
cttcatctggtggactgtgggagcagaggcattgccaggacttgggaaacagtcactgtgaaatgcgcagcatatctcattcactcacttgagctaatgattctgacttggcagacgctaaactcatggaggttcagtttctcctgatccaaaccaaatggctacctggaataatttcttccaagcaacagttatttttcttatcttcaggtttaaaatgtataaaagttatgtgtaattaatctataatgccataaatgataatgcaaaacctaaataatatggtggccggaggggctgctttatatttgaaacatgctttctatcatgcattaactgtatgcactttgttaatgcacattttgtttgtttaaggtaagatccacacmcttctagatgaaactatatgtgccacactttgcactactcataatgataacctcaagactatcagaagaaatatttaaatttccattttatgaagaaaggaaccaaattattatgcttttttaaacaaattaccagtttacataattaatcagggtgcgtttcaagttctaactttgtttattgtataatgcatcatttgaaaataccaaggaggaa

SEQ ID NO: 272721 - DNA, 549 bp, Homo sapiens
aagaccttaggatcaagtttgattctttctcttagctctgtccagttagttaccaggccccactggttctatttttaaagcctccgcaatttattacccacaaaaaaaatcatcagaacaagttttctaatctgcaatcattataatagccttcctttactttttgttcctctccaattcatctccctcacttctgctagaattatcttaaagcaatctctttagttcactgcctactcagtacccttagataataccaagacttcttagcctrgcaggaaacacctttatcagttgcactgcagcctccctttccttcctcaattccaaccacacctcccactaggcacatgctcttcaatggttttcatccagctactgtactgctcttccacgaagtgtttaaaaatgtttggggacatgtttgcttataacagtagtgaagacacaaaggacatttaatgggcagggaccaaggacactaaatgtccagcaatgtaggacaggtcccatgaaacagagaactgcattgccaaaatgccaaataac

SEQ ID NO: 272722 - DNA, 590 bp, Homo sapiens
tggttttttttaaggcatacctaaactttttaaagattttagtacattctgtattttggattattttcttacaatagattgaatagtagaattactgtataaaaggatgtgattttttttgccaacatatttatattgccaaatggctttccaaaaagcttgtgtttgttattatgctaccagcatgagtactagccttacgacatcttgccagaacttaattttgtattgtaaaacataattttataaaacaatacttgatctgttttcagtcatatttatttattaatgaggaggattcctccttcatttctttacaagttgcacttcatttttttrtgaattgtctttggaactcttgcccaccataggcaaagaacatgcattccttaacaggtttaaaaaatatattaaaaatgtggttattttattttttaagatgagtgtccaagacttccacaatgacaaagaactttgaatttttcagagctggacaacttaaaactagattattgggtccaagtacaaagtctttaatttttagatggattgaaataagtccaaagttatactaaaaatgctgaatttat

SEQ ID NO: 272723 - DNA, 566 bp, Homo sapiens
ttactaagcagtttaaaccttaaattttacatcttgtaattggcttaatttcctatcatatgtttttatagcagtaatctatacttctttcactagcaaaatatgttatttttccagcccgggtagaaaaacactggattttatgtattccctgaaacaaattagcacagtttggttaaaacagctgcctaaatgatgagaagcaaattggattataaaatcctgcttgatagtttagcaagtcagttaagtaaggattcgaaccatattatatggtcatgggatgaaaaatgacacacactggttaagccaagtgtctggtaatcgggcaaacctcaatgcctggctctgctgttgatctggyggtggtatgtgtgtgcctttctgacaataatccagtttctccaagtgtgagatcatagttgtatatttaataaggctttatggagtgtccatcatgagttagatgatttatttagggatgaaacaacatactttgaaatcattgcaaaaccatgactatataattttattgcactggtgtgttattcaactttgtggttcag

SEQ ID NO: 272724 - DNA, 566 bp, Homo sapiens
ttactaagcagtttaaaccttaaattttacatcttgtaattggcttaatttcctatcatatgtttttatagcagtaatctatacttctttcactagcaaaatatgttatttttccagcccgggtagaaaaacactggattttatgtattccctgaaacaaattagcacagtttggttaaaacagctgcctaaatgatgagaagcaaattggattataaaatcctgcttgatagtttagcaagtcagttaagtaaggattcgaaccatattatatggtcatgggatgaaaaatgacacacactggttaagccaagtgtctggtaatcgggcaaacctcaatgcctggctctgctgttgatctggcggtggtatgtgtgtgcctttctgacaataatccagtttctccaagtgtgagatcatagttgtatatttaataaggctttatggagtgtccatcatgagttagatgattkatttagggatgaaacaacatactttgaaatcattgcaaaaccatgactatataattttattgcactggtgtgttattcaactttgtggttcag

SEQ ID NO: 272725 - DNA, 583 bp, Homo sapiens
ggagtgtccatcatgagttagatgatttatttagggatgaaacaacatactttgaaatcattgcaaaaccatgactatataattttattgcactggtgtgttattcaactttgtggttcagaatgtatctgcatatcatgaaaaatgctagtggcaatatggtgtaacaaaggtyagatgaatgagtaaacctacaacattcatcagttattcagcagttgaggaagccttgcagcttcagaactggaggtagtgaacattagagtgacagagatctgattaatagagcctgtgaaatttaatttctctttatcttcaaccttattgcaaacctagttccctatattccatttctactttattgctaaccctttcagctcttatataaccaaggaaatacaacacattgttaaagagtgaaatctttggggttcgtaagcttctttacttagtacctctgtgacctttgcgattaagtgacttcaccaatcctttacaaacccaaaagtttcctcatttgtaaaataatacctacgtcaaaacttgtaatgaataccaagtaagtcaatacatgtgaaatgct

SEQ ID NO: 272726 - DNA, 583 bp, Homo sapiens
ggagtgtccatcatgagttagatgatttatttagggatgaaacaacatactttgaaatcattgcaaaaccatgactatataattttattgcactggtgtgttattcaactttgtggttcagaatgtatctgcatatcatgaaaaatgctagtggcaatatggtgtaacaaaggtcagatgaatgagtaaacctacaacattcatcagttattcagcagttgaggaagccttgcagcttcagaactggaggtagtgaacattagagtgacagagatctgattaatagagcctgtgaaatttaatttctctttatcttcaaccttattgcaaacctagttccctatattccatttctactttattgctaaccctttcagctcttatataaccaaggaaatacaacacattgttaaagagtgaaatctttggggttcgtaagcttctttacttagtacctctgtgamctttgcgattaagtgacttcaccaatcctttacaaacccaaaagtttcctcatttgtaaaataatacctacgtcaaaacttgtaatgaataccaagtaagtcaatacatgtgaaatgct

SEQ ID NO: 272727 - DNA, 583 bp, Homo sapiens
ggagtgtccatcatgagttagatgatttatttagggatgaaacaacatactttgaaatcattgcaaaaccatgactatataattttattgcactggtgtgttattcaactttgtggttcagaatgtatctgcatatcatgaaaaatgctagtggcaatatggtgtaacaaaggtcagatgaatgagtaaacctacaacattcatcagttattcagcagttgaggaagccttgcagcttcagaactggaggtagtgaacattagagtgacagagatctgattaatagagcctgtgaaatttaatttctctttatcttcaaccttattgcaaacctagttccctatattccatttctactttattgctaaccctttcagctcttatataaccaaggaaatacaacacattgttaaagagtgaaatctttggggttcgtaagcttctttacttagtacctctgtgacctttgcgattaagtgacttcaccaatcctttacaaacccaaaagtttcctcatttgtaaaataatacctaygtcaaaacttgtaatgaataccaagtaagtcaatacatgtgaaatgct

SEQ ID NO: 272728 - DNA, 435 bp, Homo sapiens
caatagtttttaagcttttatatttcagatctaattacaagtgatgactctgcaaaagaatctgcttactatcatttccatcatagtaggaatgcttttgtattacaggctttttcttagatccatttatgataagttttagtgatatccaacagtagtattcctggatataaagttaattgttattacttaaaatataaaatataaaaatataaaatgctatttctaaaataaaaatataaaatgctattactaaaaatataaaatataaaatataaaatacttgcattcataaagggaaaacaaactttattccctcagtaatcacaaaaagaagaggtcatgaaaagtgtagtcaggacatttaagtacattacaawtttttcagtattaaagatccctgtgcatgaatctttgtccaagtttagattatgt

SEQ ID NO: 272729 - DNA, 565 bp, Homo sapiens
atatgggcagaccagtgcctctcactgagttgttgttcctgcttttatctctctgaggcttgtactaaaaaacatgcaggattttaaagtgacaaaacattaacattctatgtaaacagagcaagtattttaatcaaaacaaacttcccgctacaaattgagtacacttacccttaaggtttaaaagccccatttatcaaggcacttgctgttycataattgctcttatcttccactcttcctcactcacaaactgcctgaggctgtttgcagtttcacagcctttatctgaggctatttaatgcctcttccccatccaatagtaatacaactgtttatttttgttgttttttttgtatactcaggatgttttagccgtgtcctttataagtgtttatttcatttgctccttgcaacagcagtatgtggttgatatggagtatgaagctcataggcaaggggttaaaggagcaaagatgtgaggtgagaagctcttacagctatcatgtgaaggaaggagggtctaaagctgggcctgactccaaacaaagcctttgattcccag

SEQ ID NO: 272730 - DNA, 565 bp, Homo sapiens
atatgggcagaccagtgcctctcactgagttgttgttcctgcttttatctctctgaggcttgtactaaaaaacatgcaggattttaaagtgacaaaacattaacattctatgtaaacagagcaagtattttaatcaaaacaaacttcccgctacaaattgagtacacttacccttaaggtttaaaagccccatttatcaaggcacttgctgttccataattgctcttatcttccactcttcctcactcacaaactgcctgaggctgtttgcagtttcacagcctttatctgaggctatttaatgcctcttccccatccaatagtaatacaactgtttatttttgttgttttttttgtatactcakgatgttttagccgtgtcctttataagtgtttatttcatttgctccttgcaacagcagtatgtggttgatatggagtatgaagctcataggcaaggggttaaaggagcaaagatgtgaggtgagaagctcttacagctatcatgtgaaggaaggagggtctaaagctgggcctgactccaaacaaagcctttgattcccag

SEQ ID NO: 272731 - DNA, 603 bp, Homo sapiens
ttgagtacacttacccttaaggtttaaaagccccatttatcaaggcacttgctgttccataattgctcttatcttccactcttcctcactcacaaactgcctgaggctgtttgcagtttcacagcctttatctgaggctatttaatgcctcttccccatccaatagtaatacaactgtttatttttgttgttttttttgtatactcaggatgttttagccgtgtcctttataagtgtttatttcatttgctccttgcaacagcagtatgtggttgatatggagtatgaagytcataggcaaggggttaaaggagcaaagatgtgaggtgagaagctcttacagctatcatgtgaaggaaggagggtctaaagctgggcctgactccaaacaaagcctttgattcccagtttcccagttttgtgctgcttgctcatctgccagtttcatgcatccttcatctgtgacccttcattgttgggccattgttgccccagccgtaaagccatactgcacttaccattagtgaatcctcctgaagcactcattggctccttacttctccaagctccccactttgtcatttgggttccctagctgtcagc

SEQ ID NO: 272732 - DNA, 560 bp, Homo sapiens
tggacataaatgtcaagctagtttcagcccaaacatatggcttcgtaaaattcttctctcttccttcctttccaaccagcaacttcgttcaaaagtcagtgccacagcaagcaagaaattaaaaacttattaaaatagaatggaatattgacccacagacaactgatsaggagttgtcattcttgatttatcaatacagtgtgaataaagttaaaaatattgaaatgaaagtattcccatgtcaactgaattccagcatcctcatgcttatctgatatttgtcttatgcccacagccagatggtatatggaagacatcactatgcctccccaagcttcaatgctaccatttggtgttttcaaaataaaactctttattttcttttccttttttctatcaaggtaccccagggatttcagtaattctctagcctaggggtcagcaaactatgacccaagggcaaaatttggactgctatctttttgttagggcccttaagctaagaatagcttgcagatttttaagtcattgagattttaagacaaaaaaatgaaagaaca

SEQ ID NO: 272733 - DNA, 566 bp, Homo sapiens
agactctgagcccagacccaccaaaccctgcccccatctgacggtttttctctacctgtcctggtagctgaacacaaaagacaaacactcttgggagctttatgaccccaaccattacctgaataaccagaatactcaccctggccaacttagcacaagcttatatcccccttctattactgcagttggtgctctcttgcaagtgccacctcctggctagaggccaaacacctcaggccattacagtaactcatgacagagtaaccctgctccaaggaaggagaaaacaacagttaatcccaccgcctgcaacattctggctaaccagaggccctgagtctgatcacatggcaacttcactaatyttattaccagcatttaagaaagccagcacacaaaaacatatctacaaccagggcctctcctctgccacctccatcagagcaggtgctggtatccatggctgggagaccagaacatggaccacatcacgggatgctttgcagacccccccccagcactagcctggagcttggtagcccttctgggtggctagatccagaaga

SEQ ID NO: 272734 - DNA, 520 bp, Homo sapiens
gagtggctggtgggcctgcatgtagatccaggctctatagacagaataaggaagactgagtcctttctctacccttcaatccaagaatggattgtaaatatcatgcatgaccaaagtacttttataaatactttctctagaccagatgcagtggctcacacctacaatcctagcactttgggagactgagatgggtagatcacttgaggccaggggtttgagaccagcctggccaacatggcaaaaacctatctctactgaaaatacaaaacattagccaggagttggagaccagcctgggcaacataatgagaccccatttctagagagcattagctggtatatgtgggtttcccaagatcgactgtgggacttgagtatgcacagattttggtatgggggagagtgtcggkgggggaacagggagaggttctggaaccaatctcttccatatgcccagagaccatttctagagaccccattagctaggcatggtggcatgtgctggtagtcctagcta

SEQ ID NO: 272735 - DNA, 579 bp, Homo sapiens
gttgggaggtcatccatggtggacttctgtgcaacccacattaccttagaaatcttggctgcaaagtgttcactatttaactctctcatctgaaaagcagaatttggggcataatatgatcttgtggacttggatttaacatcacagtaagtaggaaggcctacgatgggctctatcagcaacactactggaagacctagcaggaatttagaacattcctttacctatacaaagatcctaaaacaatggaggagttgtccagatgctgacaatgaccaaasgctgggctagcctttaataatcatttttgaaggaattctgttttcaaaaataatttattcaaatatttttataccaaaaaaattttaaaagtatgaatttctcttagttgtcctcaagcaaatgtgcatttaactacatgaacacaaccattacttcatagtttttttattatagacttttttatccacatgaatgttaaagaaactacaacagagttaaatgccatttttgataacatgattatattcttaattacactcaatattaaactgtaaaatatttccaaaggaatacaat

SEQ ID NO: 272736 - DNA, 589 bp, Homo sapiens
catgtataaatgttaactaattcctcactgttttaaatctcacattgagataagtacacattcatttataaagacacaaagmgagtcaatcatttgactctgtagtcatcacaactttacatttaacacgggaaaaagaagcaatggtgcagaaatgacagtcaacagagaatctaaaaatgcaggagccaaagaaattcataagttttctttctatggcaatgatacccaagacgctttcaatataagttttttgaatagaaacactttttaacaacataggataaatgcattgtgggtctttgggaatcattacaaaatatgatggttttaatatatttgaattctccttgactgcaagatagagtgggcttttatgtcatctcaagaaaaaaaaagcctgttttgtaatatatgctctgtaaactttaaatataaaataatttgagtgaactgttctgttttcaggaagcaaagcatgcaaccatattgactgatgaataagatcatccaactaaaatattcagaaagccagtaattgtgatattttacaatttcttgataatctttagatagaattttctaaaga

SEQ ID NO: 272737 - DNA, 562 bp, Homo sapiens
cattttagacttgttgtcttaaagttgcccataggggaggccccattaaataaacacttggaagtaatggatcagatgctctggagacaggttagagctaaagccaagaagggaacatcattgatgggtcaggaagtgaagagggtaaaagtctcctgagcatgatggactcagccgggagaaatggcttctctccattcttccattccacttaatccctgtgagccctgaaaatcttagtttgagatctttaacaagcattatataggacttgctaactgaccggcccacagtaaggttcatgagaataactaaaaatcttacttataaacattccaatccatgttagtctcagctggttagtctgccttgggcctcatggaggaagtttagtaactgaagtttcttaggcttcattttctggctgtyccatttaaagggctatctggtattaatttcaaggatggtgtttgcatcagttttattataatcctgtcctgggccagaaaagggaccatgtgacaccttgggactggaaaggttattagaaaacatccattgt

SEQ ID NO: 272738 - DNA, 457 bp, Homo sapiens
tgaacaatgagtgtggcctctgctctgtgggaaatagagagaactctctcctagctacaggggatatgatcaaactgataggagctctttcatttaagagttaagagttaagacrgtgttggggtggtcagcagtgagagaggttagagaaaaggaacactgtctgagtggtaaggatgtgtaaccactgtcatttaactcccagcactctccatgctacgggcagagggcctttgtctctctctacagagttgagcacacaaagtctgaccatcttacaagattccttataggcaacccaaaccatgtttgtaataacagactcttgtgggggagatgtgtactgtaaactttaggaggacagaagatgtttgtttcagctcactaccctctccctagtgcttagcatagtccctggcaggtagcagcagcacaaaacagttttgttaaatgagtg

SEQ ID NO: 272739 - DNA, 570 bp, Homo sapiens
aagagaagaggtcatggcaacagttttggggaatgctcaaaagatatgactaaaagactttttgaagggccaaaccaagatcaaatatgcttactaacagagtttttgagaaaactagccaaagcatgagcagaaaaaccattaccagagagttctacctaatcatgaaaaagttcttgctgtagcatttcactgaacaaagggcagtttggcaagagtttcaaaaggagatcatgaggcgtccaccttgcagtcatgakgtggaacctgctgacttctatttatttcctcgtattaaaaattctgcaaacggcacccagttttcttcagttaataatggaaaaaagatttcttggaaatagttaaattcccagaaacatcagggcttgagggacaaggcggggtcaagacagtgctcgaactactgtctcgaaattgatggagcagatgttaagaaataaaatctaccggttttatttttgtcttttaatccctgttttgacaaatttgggaagtcccctcacacaacatcagtcctaggcaaagagttgttatcctgtattggttctt

SEQ ID NO: 272740 - DNA, 545 bp, Homo sapiens
ttgcatctaaccagaagtacaattaagcaaaaaatagtgtgcaacaataaaaaccagtaaaatagtagaaaagataaaaaattaaacaagtatgggctatatttatgaaaaaagttgattaaaaaatgggaggaaaaacactaaaaacatagtcttaatttagttctttaaattacttgggaatgtaaaaactaaaaataacataacacaatccaatctctttaatagaggcccctaatataggaggcattaagttaacatgatagcaacctgtttgaagatgtatatcaagaaccraaagaataaaatgcaattaacttggctttcatccatcccacaaatctaattgtgaacatatgcctaagaaacataaagataaaagaaaactgctatttccaaagagattcattcttgaagaaatatccgctgaggcagaagaagcaagagaactagcagaacgatgagtggtaatgaacaacaatgggtgaaacagccataaaaatattctcagaacattccacttgttttgactccttaaccaatca

SEQ ID NO: 272741 - DNA, 599 bp, Homo sapiens
atgttctggtatatatatatatcaaatgcatggtgatcagatcagggtaatttgcatatccttcatctcaaacatttatcattttattgtgttgtgaacattcaaaatcctacttctagctatttgaaactgtatattattgttaactatagtcatcctacagtggtatagaacactactgcttattcctcctatatagccctaattttgtatcttttaattttaatttcgaatctccttattcctgcttccccctaccattccaagcttctagtatcctctgttttactttttacttctatgacatcaactatttttagcttctgcatatggatgagaatatatgatgtttaactttstgttcctgtcttatttcacttaacgtatgtcctccagttccatccattcatcctgttgacaggatttcatttttttatggctgaataatattgcattgtgtatatacatcatattttctttattcattcatcttttattggacatctaggttgatttcatattttggctactgtgaatagtgctgcagtaaacataagcgtgcagatatctcttggatatactgttttcctttcctttgg

SEQ ID NO: 272742 - DNA, 404 bp, Homo sapiens
ttgagtttgggttttgcattttgagaaaatttccatgttcagatttcttagttttcttttttaacatttgtgaagtaattgcgtgaaataacttaaaaaaatctttccagagttctctgccaaaaatatctgagcaacttttcccactcttgcattcctacaggtctttcttcagagctgatgagttactcatttgccctargacagggctacgtgacaaggtaaacatactatggtttttgagaggtattaattcatactattttgggattatataaaaaatacaatgtacatcacagtatttctatatagtaattgtctcacaaaatatgtctatatagtataagaaaaattactacaaaaatctcaacatgggggatattctaatatgagccttggggcaa

SEQ ID NO: 272743 - DNA, 359 bp, Homo sapiens
ctgatagggacccactattttgtttaatttaaaaatctgagggtgagaagccttggaaatgaaagtwaagagttggagacccactcctactcacccttctaatgtttcctttctcagacaatacaccaaaatgttacagtcttaccaatgcaccacaatgtagcagtctcattgtgaggtatcacccagagttctttgtctcatgacctagagaattaaggagtgtggaaacaagggtggggttggagtgaaagtttactaagtgaaagaagaaggctctccactgcatataaagggcctggaagagaattaccatttttatgtaaggttttataagataatgatgggggctgagcatt

SEQ ID NO: 272744 - DNA, 359 bp, Homo sapiens
ctgatagggacccactattttgtttaatttaaaaatctgagggtgagaagccttggaaatgaaagttaagagttggagacccactcctactcacccttctaatgtttcctttctcagacaatacaccaaaatgttacagtcttaccaatgcaccacaatgtagcagtctcattgtgaggtatcacccagagttctttgtctcatgacctagagaattaaggagtgtggaaacaagggtggggttggagtgaaagtttactaagtgaaagaagaaggctctccactgcatataaagggcctggaagagaattrccatttttatgtaaggttttataagataatgatgggggctgagcatt

SEQ ID NO: 272745 - DNA, 601 bp, Homo sapiens
gtatcaactcatgtaggcacctaattatcaaatatacatactttacagtggaaagcatcattagggatggaggaggtaagtgatagagtcactgtataattttaaaaggtacaatttgcaaagacaatatagagttttacatatctttataacgaataaatttataaaattacaaggagaagttcatgtatccaccttcactgtgtcagattcaacatttcctttttggttgtgaatagtgcaaataggcaaaaagctaggaagaatatttaggcaagctgaataatacaattgtcaacctagagctactgtacatatgcmcccaataacaagtaaaaacatctataaaagtattacagtatataaccaaaaatacaataaaagaattaaaaatactaagaatattttaataataaaaggaggcagggaagaaaaagagaaatagaaaataatgcaaaaaatggagagagataagaaaataaatgcaaaaaaggagagagaaaaagcaaaatagcatatcccctcatcgtaccaataattatataaaacacaaattggcaaagcaactaaaataaaaggtagacacattttagaaacagtt

SEQ ID NO: 272746 - DNA, 560 bp, Homo sapiens
tatggacagaagagaatagagagggatgaggtaagagatgggagattttgggtagaatgacttacttctctgagataacatcgaacagggtgtcgaatgaactgatgaagtgagccacgtggctctctgggcaaagaacatttcrgacatggggtacagtaactgcaaaggccttgagccagggatatgttttggcatagaaagaatagcaaggagacatgactggcagaagaaaagcaaaccaaggggagagtggttgaagataggcttgatattgggttggagtgagggcagattgtttaaggccttatgagccatggggagaattttgtttttgattctgaatgagatgggaagagaaatattgtataaaagtatatgagattgagtcccatatacttttaccatggagagaaaattaatcctttagaatatgggaacatgatatttcctaattaaaaatcttgttacttttgcagccaaacctgaagtgcaacaatgggtaaagatgctgttttgtaggtaggagatatatttaaataaaatgaaatgatgattct

SEQ ID NO: 272747 - DNA, 614 bp, Homo sapiens
cagtggctttagtgacattggttacagttttatcactgcctaatcattaattataatttttaaaggttctcagttgattatttgaggaactgtattttccttacagaataattcctaggtatattggatgatcttttccggtgactaaagtatatgtagggtgtttgttacaatatwtgttctcttatcctttaattattttgtttgtaatcaatccagcatggagtaaaagaaataagagtaaagtaatatgtatattttttattttctaaaaatattgaaagagttcttcatgtaataatggttcttgacaaaatgtatcaagaaccatttataccaaccactttatacaaacaaaatctgaacacagagggaaggaatcaagatgtcagtattttaataagttctagagatgaatctaatgtatactcttgattaagaaacaaagatttaatggaaatatctcggctctagttggctaccaacatcttatgcctactattatcttaagagattaattgtatgctgtaagtattgatcttgattattcatgcaaattagtatccgaaatagcaaaagtaatttgattataaaaaattcaaattcaaaaatat

SEQ ID NO: 272748 - DNA, 629 bp, Homo sapiens
tgcacacatacaaacacacaaaaatacacacaaacttgcataaatcagaatgtgctactgtgtacttttgttattaccttatgatatccttactttaagaaataatcaaatttgaaattggctatgactttattttctaaaaattgtatgaattcagtccatgttaatttcccmaaaatatgaatccagggtctttgcacaatgcagcctcagatctaggacagtattttatttggcccagaagttctgactgagattcaacttaattatataagacgagaaaactgaataggattacggagaaaattctaaaagcacatcagaaggagaataaaagaccaaggaaaaaagactcggctgggcacagcagctcacgcctgtaatctcagcacttggggaggctgagacaggaggataactttagcccaggaacttgagaccagcctgggaaacagggagaccctgtcactaaaaaacatttaaaaattaggcaggtgtagtggtgcatgcccatagttgcagctactctggaggctgaggtgaaaggatcacttgagcccagaaggtcgaggctgcagtgagtcacgaccatgccactgcacttcagcctgggcaacagagagagatgt

SEQ ID NO: 272749 - DNA, 564 bp, Homo sapiens
ggtggggccaggtggaggtaattggatcatggggccagttttctccatgctgttcttgtgataatgagtctcacaagatcggatggttttataagtgtcttgtattttcctgtcttgcactcactccatcctattgccctgtgaagaaggtgcctacttcgcctttgcctttcaccatgattataagtttcctgagacctcttcagcaatgcagaactgtaagtcaattgaacccctttcctttataatttacccagtctcaggtatttcttcatagcagtgcgagaatgaactaacacagtcaccaggttcamctgttgctatccaggctaactgctaggtatcttggaactacgaattgaaataagaagacaagcaagagagtggactcaaggcactgcttggaaatgtattgtgttacccaagaatcccttgtattcatcctttcagaaaagaagaattggcaagttaggtaaacttcctgctacctcaagtctgctattgctcaaatcctcttcgcattacaaagcaccatccatctttgacactggctgtcacacaacc

SEQ ID NO: 272750 - DNA, 565 bp, Homo sapiens
tctactcttaagtcctgaaggtataatccaaataatttagaaaattgctaagggcattccccaggtcactttactgtgtaattttttcccaagtatgttttgcattttaaatgttttcatttttcctcttaatcttgttatttatcagtaacacatgatgtgttggcatcttctggaataacacatttgttccaagtgaaaaggactaggtttagaaaacctagtcggccaagaagtttacccracagaaacctatgttgaatctaaaattaatgtgctcacattttccatcaaaatgaaaatggaatgaagccaagaaagcactatgagaagaagtttgttggtctctgccctgcatgaacagcattaacaaaatatgtcatttagtcttgtaaataatagacgtgttgaaaacaatattttacctttaagtctgagatgagacacaaactctgattatgttactcctccccttaagcatcattttattacatctttaagcatataatgacttgaagaaaccattttttcctttggtttatcaaacctttattaaatgtttagt

SEQ ID NO: 272751 - DNA, 438 bp, Homo sapiens
ttcatttttttcattcccaatgcaaagcaacattcacaggccctcaaagctcccttmttttgcatcaggagaaaagaagatcagcaaactccaagatctctttattttattttatttttctttctctcttccagagtcaaggttagcattaagtacatctatccatcaaggcctttgtcagcgtggacattttgtttaaatagaaataagtattggcttgtgctttatggtgagaaacagtaagatgcctgagctctcctattttccatcagattatcattatctgcagctgaagatcaagccttaaggggctgctgcaggcacgggctgaagctgaaagaggtgtgcactcacgtgcctgctctccccatactttccttggcagccgaaccaggataattgtacattttagatgaaagaaagagaaaacagaaaatt

SEQ ID NO: 272752 - DNA, 544 bp, Homo sapiens
catctgcatgcatagtataatactaagaaacaccaaaaaatagtgtgttatcctgaaatcttattaggctgctctgaggagatgagttatctgaccctgaatatcataagcactttcctgttccaaatatttccagttcctttcgcttttttattacagtagtaactctctccttttcccctctaacacacacacaccctttttaaatcacttcagctaaacttctaactcttgagcttctaaggtttgaaaaacactgtaaatttttttttgcttctacaacaaatatcagcctgtagccatagattatagttatttaccatgattatgrtacttaccatgatctttctgtgtctttataatctgtttttgttatcattggcatctttgtggaacagataaggacagttcttgccaaagaggcttgaactcttttggtgtggtcaagcaaaaaataaaaaagaatgcttaataggaatgagatgattatgttaaaaatattgccagcttcaaagcaagttaggggtcacattgttgtacctgc

SEQ ID NO: 272753 - DNA, 619 bp, Homo sapiens
atctacacacttttataaataaatattatgtttcatttagtactttatcatccataatatcttactctctaatccacataatggagttgtgccagactccaaactgaacataatatttatatatacatatatatttatatatatacacacatacataaactataaacctgaatatcttagcatacaaaacttatctaacaactaataatttaggattcctttgagagggaggggttagaagaaactcttcttagtctttgaaatagtcctgacagtaagcaataaacaacattattaatttctgggttctcayttattcaagtgaaagacaaataaaataaaattcacttctgagccactagaaattttgaaatcataaaggattattgggaaatgagtagtctttaagaacaatttagtgttatctaagtaaagtggattttggtaagatacagagaaaaatctatgcataaataaattcttgtttcattgagcaactataatcgctaagtgggtctttttaagtatctcaggaatgtttttaaaatattaatagtgaataaattagattgaggataggaccaatcttttccaaagcaaccaaatataataaggaaga

SEQ ID NO: 272754 - DNA, 533 bp, Homo sapiens
agggctttcttagaaagcaacatgcatcatatcttgaacaagttacccaagcggtttctccgtcctacaaacagacayggatcaatctctccttctgggagcttctctgtctttgcccaggtcgctccctgagaggtgaggtctgaacccactgggaagcaggacgatgttcaaggcttgtactgtggatgcttatttgatgtcttttgctctgcccacaaacagaagagtacctgttggctttctgcagagatgcttacttttcctctcctatcagagtttaatgtcctgggactctgacattttggcaagtgttttcttaacccgcagggctgtcagccttgatgcaggattgtgagcccagcattctgtcatgagttttcccatctgccttagacactgaggaagagaaatgttagaaaaatgtatcatctgcaaggctggcacctgttacaatgtagctttttagttttaggttcattaagtttgaatatatttttaaaaggtacccttaaaaccatgtagaagtaaaa

SEQ ID NO: 272755 - DNA, 533 bp, Homo sapiens
agggctttcttagaaagcaacatgcatcatatcttgaacaagttacccaagcggtttctccgtcctacaaacagacatggatcaatctctccttctgggagcttctctgtctttgcccaggtcgctccctgaraggtgaggtctgaacccactgggaagcaggacgatgttcaaggcttgtactgtggatgcttatttgatgtcttttgctctgcccacaaacagaagagtacctgttggctttctgcagagatgcttacttttcctctcctatcagagtttaatgtcctgggactctgacattttggcaagtgttttcttaacccgcagggctgtcagccttgatgcaggattgtgagcccagcattctgtcatgagttttcccatctgccttagacactgaggaagagaaatgttagaaaaatgtatcatctgcaaggctggcacctgttacaatgtagctttttagttttaggttcattaagtttgaatatatttttaaaaggtacccttaaaaccatgtagaagtaaaa

SEQ ID NO: 272756 - DNA, 630 bp, Homo sapiens
gggtctgtgttatgttctttcttgtaaactcaaatctgttataaaatcatcaaggaccagaaggttcagaagttttttcagaccattccaactcaccatttgtcctgtgccctgctgtgaccacagagctaattatatgtattatctatgttaatatttcctttcactgtgttttacctccatatgagataagaaaagcacagggcctaacacgcaggatgtgctctgcttcatttcagttctttctccctttctcattctcaggaccatggccctggaaacagcctgaaggcaaagcccacatctctttaacccatctcctattttccgctggtggatggactgatggatggggtggggtaggtgtatctactacaacagacgaaggcagagctcaccacttaaaattatgaattactcaaatctaactgttgaataataggccttattcttttctccatgtcatgtaatsaagttttcaaaatttcctgttagctgccatttaactctgtttgaaacctcaaacctttctgtctttcttctcctttaaaagatggaaaggcctacatctggatgtgtctctttcacccagaagggcctggactagaaagataagcccaaaaaacttct

SEQ ID NO: 272757 - DNA, 585 bp, Homo sapiens
agggatttcactaatgtggtgccagcatgtcctaattttaatttttaatcatgaggaagatagtggtgaccccaggtaagaagtcctgggtcccatgcagagaaaacaaacatgagggtttgcagatgaaaagaagatggttaaagacctccactgtattccagaacaagaagaatcttaagacaatccacacagaagggcatttagaaaggccaaaggtgtaatctgaccacagttgataaagattttaggcaatttcattccattcttactcttagctccttaatgtttatttggatttgggaggtcaggaaaagataatggaatgtgtgatgtagagatatctattagaaaaatgaaaggtaattgtgacctaataatagaattaaaatttgtgacagctggastatacatagttcatctctaaattctttttctcaaacactgcaaaaacatacactcaaggattctgaatgtccaccaaatgccaaaaatcagtcctttacatagtcccttaaatacatatgcatgttcagcaataagccatctctctcctccccttcctctcccaccctagacgtttgc

SEQ ID NO: 272758 - DNA, 577 bp, Homo sapiens
tgatactgtaaagtgtcagatcctccaaaacatttagctctgccccttcttccctcaggcatgtttctataattgaaagtcattagactacatttctttctcagattttcagtagcatcattttacctgttcccaaataatggcagagaaaaatcaagcttgtgttaatcctaaagccaaaaatagacataaatgtgatttaacactggggtgccaagaataaaggaagaaaaagrgaatggaagtagagtcagatggtgtggtacacgtgagaacagacagtacaacagacggaaagttccaggagaaagaaggaggcagaaaagggcagggtgccttctgcactagcttcctctagcctccttgtccacagagggctatggaggggagaaacaaggttgacaagaaaagatagatactgcacaagggctgtagactcagagacaataattccaaccccacgcaataatcctatgtactgcagtagctacatacatatgaagtcagattataaaatcatacagaggagacataaataggatactcgttacttctgggaaggatagcaggaaatgaa

SEQ ID NO: 272759 - DNA, 577 bp, Homo sapiens
tgatactgtaaagtgtcagatcctccaaaacatttagctctgccccttcttccctcaggcatgtttctataattgaaagtcattagactacatttctttctcagattttcagtagcatcattttacctgttcccaaataatggcagagaaaaatcaagcttgtgttaatcctaaagccaaaaatagacataaatgtgatttaacactggggtgccaagaataaaggaagaaaaagggaatggaagtagagtcagatggtgtggtacacgtgagaacagacagtacaacagayggaaagttccaggagaaagaaggaggcagaaaagggcagggtgccttctgcactagcttcctctagcctccttgtccacagagggctatggaggggagaaacaaggttgacaagaaaagatagatactgcacaagggctgtagactcagagacaataattccaaccccacgcaataatcctatgtactgcagtagctacatacatatgaagtcagattataaaatcatacagaggagacataaataggatactcgttacttctgggaaggatagcaggaaatgaa

SEQ ID NO: 272760 - DNA, 580 bp, Homo sapiens
cactgctgcctggtatggcgtgtgtgcactgcaggtgttagtgtaactgtgggagggaagtcatggggctgcttgtgtgtgcagaaaggctgaaagtggagccttcagctgggatcctgagcaggttggagaatgaaacatgagcaccccagtggactcagggaacagtgcatgccttaagctcttgactatcatgcattaaatgagggcaggcaaaagatttttgtttcggtggcaaggagtaagggggagttttttaaaaatatagtatctcttcagcctcataatatattaaatgtttttcatgttaattaagccttttagttataaacctaaacccagaaattctggctaaaagtgttatgttaaaaaaaaaaaaaaagagccccaactacttgactgagcacagggcactttccccactgtaccataaactgaagtaagagtctcatgamagtcctaagcacagcccgctgtggcaatgagaggcgagcgcagggaaagagttgctagctccaacaaggtggctctacctcattgagcctttgggcacatgcggatggtcctcctgctggatgct

SEQ ID NO: 272761 - DNA, 517 bp, Homo sapiens
ttacactcttttaaacatatttgagattgagtgtggattctgaatgttcaaaacactgcttccaaattatgaaatactttattttagtattattattttctcagagaaaaaacctgagtaggctcatagtaatcagcagagtagaatacttgcacttccccgttataatggactactacatactctgaagagactcgtcaccatacacctaatcatgtataaatataacaaaacaaaattgtaatgcattgttaggcacatacagaaataaaggaaatctatatgcagggaggaagaaaaaagggagggagggaggaaggagggagggaaggaaggagttgagaccagaccagggaacgataaaccaagctgccgtctgggcaaagaacaataccagaactggaatccagagtttaaactctgactcctttaaaaccagaggaactgaacctagggcttcagcattaagcagagagcatcraatggtactaaatttgctatgggttggtagcatgcc

SEQ ID NO: 272762 - DNA, 644 bp, Homo sapiens
ttataactaggttgttctcatttataatactgtgaacattttccagaacaacaaatatttttttctgcaacaggatttttatattgacacataattataatattttaatacatacataatgaacagtgatcagacagcatatccatcatctcaaacacttatcatttctttgtgttgggaacattcagtgtcctcccacctatttgaaattatttattattkcaacatgacttttttttttttttgatacaggatcttcctctgtggccgaggctggagtgcagtggcacaatctcagcttactgcaacctctgccttctgggttcaagcgattctgtgcctcagcaccctgagtagttgagatcacaggtacgagccaccacgccccacttatttttgtatgcttagcagagatggctttttgccacgttggcccggctggtctcaaactcctggcctcaagcgatcctcggtctcccaaagtgctgggattacaggcgtgaaccactgtgcccagctacaacctgacttttaaagactaaactgtattatacataaaatcatcctaattagaaagtgaatcttctgtcatacattcaggagattctaaagattctgccataaggcttctttgttatacacaa

SEQ ID NO: 272763 - DNA, 644 bp, Homo sapiens
ttataactaggttgttctcatttataatactgtgaacattttccagaacaacaaatatttttttctgcaacaggatttttatattgacacataattataatattttaatacatacataatgaacagtgatcagacagcatatccatcatctcaaacacttatcatttctttgtgttgggaacattcagtgtcctcccacctatttgaaattatttattattgcaacatgacttttttttttttttgatacaggatcttcctctgtggccgaggctggagtgcagtggcacaatctcagcttactgcaacctctgccttctgggttcaagcgattctgtgcctcagcaccctgagtagttgagatcacaggtacgagccaccacgccccacttatttttgtatgcttagcagagatggctttttgccaygttggcccggctggtctcaaactcctggcctcaagcgatcctcggtctcccaaagtgctgggattacaggcgtgaaccactgtgcccagctacaacctgacttttaaagactaaactgtattatacataaaatcatcctaattagaaagtgaatcttctgtcatacattcaggagattctaaagattctgccataaggcttctttgttatacacaa

SEQ ID NO: 272764 - DNA, 644 bp, Homo sapiens
ttataactaggttgttctcatttataatactgtgaacattttccagaacaacaaatatttttttctgcaacaggatttttatattgacacataattataatattttaatacatacataatgaacagtgatcagacagcatatccatcatctcaaacacttatcatttctttgtgttgggaacattcagtgtcctcccacctatttgaaattatttattattgcaacatgacttttttttttttttgatacaggatcttcctctgtggccgaggctggagtgcagtggcacaatctcagcttactgcaacctctgccttctgggttcaagcgattctgtgcctcagcaccctgagtagttgagatcacaggtacgagccaccacgccccacttatttttgtatgcttagcagagatggctttttgccacgttggcccggctggtctcaaactcctggcctcaagygatcctcggtctcccaaagtgctgggattacaggcgtgaaccactgtgcccagctacaacctgacttttaaagactaaactgtattatacataaaatcatcctaattagaaagtgaatcttctgtcatacattcaggagattctaaagattctgccataaggcttctttgttatacacaa

SEQ ID NO: 272765 - DNA, 610 bp, Homo sapiens
ttctgttaatgtctaatgaatatttatgaagtcctttgacaattaagggctcattagaattcacttttaaagaaagataaaaacacttttaagaccaaagcagaatgtggtggcatagaaacttgcatctctctttccttgttgtgaattgtcgagataaacactctacaaatgaacaaagtgtctyttaaaagtgattctaggtaggagtttgagtaatatagacatacttgattattatatgatgactttaattttgcattgacttttgccttggtaagtgttttttttttactgaagatacttggaaatcctgtttttttactgaagatacttggaaatccaaaagtggctttggagtcactttttgtatttaaatctcagtttcagctctttcttagctctgtgactttgagcaagttcttagtgcctcagtttctgtattgcaatatgaaaaatacaatactactctttccacagcttcttggaacaagcaacttagttaatacatgaaaaatacttagaatagtgcctggaacgctggttttgtttgccttgagaaatctttcctttcagttcacatgctttggccctactagaggcgcttgga

SEQ ID NO: 272766 - DNA, 621 bp, Homo sapiens
cattctgggtccagaatttgtactcttagccactatgatagtatgatataagataaattaagtacaggcacatcacacacacacacacacacacacacacacacacacacacacaagtgccctgcaaagggagctttttaaaaaggttccctacacctatatgacctagaggaagacaaagaatgtctctggatgtcaacttcctcactggaagaaataagacattaagacattattttataccacattatgttaagggacattctaaggttagcattttatgattcaaagattctgtctgtagcatatggcctctttgctttttattggcataactcaatactaaagccaagtattcgtgtatttcaaagaaaatgctaaaagagaataaaaaatgactctcaggcaatgaagargcagtagtagctagaatagaggaatgagaattttacctcacatatatcatgcttcgagcttcctggaacattcttaagacacagtttccctgaagtttttctattctccctacaacaatttttagagactaaactagcaaactaggttgatgaaatacctatcattccttcatatcaacacacaaaaattaaacttatgtatacg

SEQ ID NO: 272767 - DNA, 609 bp, Homo sapiens
tgggtgacagagcaagaccccatctccaaaaagacttctggacttcagcatgtaggatgaatctctgaacctcaccttccaactaggtgagggagagtgaaaacgagattaaacatgtgaggagaggtttccacttagtcaaacttcttgctaatgcctatttctttcatttagcaatattttaaaaaatcaagacgtatccctgttaatttcctccattttaaatttaattattaacatatgctaggtgccaacaatgaaggggatcttctataaatggcatattaggcccctgactacttggttcaaaaaatctcatgaaacttactatgtagatcaaaagtctaatttagcagaaccacccagatttgcctatgatttaaccctctcaccctaatgtacatatttttatctacagtttacattttaatttccaatatccaatctaattaagcctctatctgtaccaggtcaagaactggtttcacaattccacaagcaaaacacaaataatcgcattaaaaagtgggcaaacaacaggaacagacgyttctcaaaagaagacatacaaaaggccaagaaacacatgaaaagaatgttcaacatcac

SEQ ID NO: 272768 - DNA, 620 bp, Homo sapiens
ttactcctgcaaaaatgatcatgattaaaaaatttaaaaataagagatgttggcatggatgtggtgaaaagggaacaactagtatactgctggtgagaatgtaaactagtacaaccgctatagaagacactatggaaattccttatagaactaaaagtagaactaccatttgatccagcaataccgctcctgtgtatctacccagaggraaaaaaaagttattatatgaaaaagccacatgtacacacctgtttatagcagcacaattcacagttgcaaaaatataaaaccagcccaaatgcccatcaaccaaagaaaacatggagcatatatatatatatataaacatggaatactactaagccataaaaaaatgaaacaatggcattcacagtaatctggatggagctggaggcggttattctaagtgaaataattcaggaatggacaaccaaacattgtatttcccacttataagcaggaactaagctacaaggatgcaaaggcagaagaatgatataatggactttggggactctgtgggatgggtgggaaggggtgagggataaaagactacacaccgggtacagtgtacactgctcaggtaataggtgcaccaa

SEQ ID NO: 272769 - DNA, 539 bp, Homo sapiens
ggagcatatatatatatatataaacatggaatactactaagccataaaaaaatgaaacaatggcattcacagtaatctggatggagctggaggcggttattctaagtgaaataattcaggaatggacaaccaaacattgtatttcccacttataagcaggaactaagctacaaggatgcaaaggcagaagaatgatataatggactttggggacwctgtgggatgggtgggaaggggtgagggataaaagactacacaccgggtacagtgtacactgctcaggtaataggtgcaccaaaatctcagaaatcaccactaaagaacttttctatgcaagcaaaaaccacctgttcccctaaaactactgaaataataataaatatctcatgtatccaataaacatatatacctattatgtacccacaaaaattaaaaattgaaaataaaaaactaagtgtgtatatatgctaagcttggtgacaatggtgccaggataaattctgaggtgaaattttaaatactgttcttggttgtgtctc

SEQ ID NO: 272770 - DNA, 528 bp, Homo sapiens
aaataaaaaactaagtgtgtatatatgctaagcttggtgacaatggtgccaggataaattctgaggtgaaattttaaatactgttcttggttgtgtctcttctaactgattctcctatctttccagagagtctatgagctagcaaacatcctcttaataactttatttcctgtgtaaattaatcatggttgatgtctgttgctttcagctgaaaaatttgatggatctgatggatacattcaggaagattccattggtaatctcagcagaaataattgcttcctcttctgaacttccataatacttatttttccttgtattataattatgcacgccatcttcctcactatatgttacatttccaggggtgggagggagtgactgtctttcatctttgtccatgcttttaacamttacctctttatctatctttgatatctttaaaaaataaacaaaacattgcaggtatcttctttctagctcaggaagctggtctaagctcctcctctaagtttcaccattctgttc

SEQ ID NO: 272771 - DNA, 616 bp, Homo sapiens
atgcttccccttgactgtgaccttgattttgtcacttgatttggaaaattcaatgtcagaggacacaatatgagcagaagccttaaaagattactcctttacactcctgtgagaaacaatatgccttgggtagctgctgatccaaaataaaaaaaaaaaatgaagaaatgtgcagcaggcctaaactcaaacagcagcatgaagtgaagcccacctaatcccagcagagtgcagcacggatacagcctccttacaaacccctgaatgaaaaataagtgtttttaattataagccactgtggttctgaggttatctgtttcaccgcaaacagtgactaatgctatgcacattttgacctctctcctcaacctcttctctgagccccagatccatatccaactgcatactgatacctctactcagatacataaaaatcctcaaatgtatcatgtccagattggaacttggttcttttcatctgtcctctttcattaaaagtctaccttatgcatttaaatctacatctggaaacttataaagcctctctggttgtcctcctagatgrtatctaatccatcatcatacagctctatcttctaaatatttctcaaataga

SEQ ID NO: 272772 - DNA, 475 bp, Homo sapiens
aaattaagactcaaagtttaagagatctgcacacagataatggatagactatagasccagcatttaaactcaaattgtttcagctttaaaactgtctatctaccatatcacagagtctctctactttaggtactattatgtatattatgtacttctttttaaagaaattatgagaaatatttaatctgtaaattgggtaagaagacaaaaacttagttaatatcaagacacatttcaaaagatacatcttccccatcagcatggggaaatgcaaaatgcctacctattactgtagtgatatttctaccatctttgatagaaggcaccatggtagacatgatctcttagaaagagatattctgggttcaacattaggctttactatttaccaagttagttgtccttagataactttataaataatcttgtgactcatgttcttatccttaaaatggagataattatagacaccaaa

SEQ ID NO: 272773 - DNA, 428 bp, Homo sapiens
atgagaagatatgaattcgataaaagaatataaagaaagaaaatttacaggtaaaattaacaaggcttttaaagactgggaccactgaggtatactgggtgttatacaatttaaaaaataagaatataaaagtgctttaggagaatgttttgaaaactgaagccatttatttatccaaagagggagagcttgagcagcatcaggccagaatgttcctgtgtgtgccatgcccagattgaagataacacaattattataataacatagtttcaattcagatctctccttagtgtttctgcccagaattcaacaagattgtccyttggcagtcttcttcctacaaatcaaagcaaagtagatggtggttcagtatttcagcctattaagtataatttcaagaaaaaagatttatcataaattatcaaaac

SEQ ID NO: 272774 - DNA, 461 bp, Homo sapiens
caccttttggtgagacaagaacctctgggcttagacatggcttttatccctgtagcacatggaataaaacctgacgaaacttgaaaacataaaaacaaaacctgccaaagtgctgataaagaggactgaacttagggagcaaaatattttagtatccctgagacttgacaataaaagaatacatagcaatttgtaaagcacactagagagaaccaaggccttccacaggaaatgggtgataaatgcttagaactaaagacagtcctgtragaaagaatggccacaaagacttaagatgtttgatattatcagagctctcaaattaaaaatttctcaggtcaaaagcactgaacaagttagagtgggggcatgtaagtggttacagtagttctgaaagatgaaaaaacttcttttcattcagacttgtaaaacatttttttcatatacttagtaaggtgctg

SEQ ID NO: 272775 - DNA, 475 bp, Homo sapiens
tcaaattaaaaatttctcaggtcaaaagcactgaacaagttagagtgggggcatgtaagtggttacagtagttytgaaagatgaaaaaacttcttttcattcagacttgtaaaacatttttttcatatacttagtaaggtgctgaaagtacaggaatatgctgtatatagttggttgtttatgacaatctcaatacaatcttattgagggaaatagctccaatcattcctgaaacaaatgcttccagtatatagtcccaaattcaagaaattccactgagaagttttaaatttagatatttagaccagacaggttacagttgaaaattagagtaaaatttctagtatctagaaagaacaaaagcaagtattcagctcctgttacaaaattatgcattaaaggagcatttgttttagcctatgtgtagttctcacatttaaattgacagtaaactcatgtaaactcaaacaatttt

SEQ ID NO: 272776 - DNA, 628 bp, Homo sapiens
aatcctggtctatctatctcctaaataagctcttttcattgaacctattcatacagagacagaagaaactcagtaaggcaatttaatgaaaaaaataaagtattatcctttatgtttcacatatgaaagctctttaaccttcactctgattcctattttatgtaataaktcaatcttcatattgccttcattttgtcaataattgttataaataccccaactgtgaaacatacaaaactaaccagacaacagattccataaatatgattagtatttccacatgaattcaatagtaatagccttgacaaatgattggctgctaaataagatgatgcaggtgtaaaaattttgtaatttaacacttacccaaaataatgattgctacttgatcttagtaatttagtaatattatgttccatacttcatttactaaaaaatgtctgctgaaattaatttctattgttcaatatttgtgtgggttacaaagcccaccaatgattctctttgattagggcataggtcatgagaacttccaaatacagcaggttagagtatatactgacatgtctacagattcaaggaagggctctgggcctaggaagtccctaggagcaataaaataagaaat

SEQ ID NO: 272777 - DNA, 628 bp, Homo sapiens
aatcctggtctatctatctcctaaataagctcttttcattgaacctattcatacagagacagaagaaactcagtaaggcaatttaatgaaaaaaataaagtattatcctttatgtttcacatatgaaagctctttaaccttcactctgattcctattttatgtaataagtcaatcttcatattgccttcattttgtcaataattgttataaataccccaactgtgaaacatacaaaactaacyagacaacagattccataaatatgattagtatttccacatgaattcaatagtaatagccttgacaaatgattggctgctaaataagatgatgcaggtgtaaaaattttgtaatttaacacttacccaaaataatgattgctacttgatcttagtaatttagtaatattatgttccatacttcatttactaaaaaatgtctgctgaaattaatttctattgttcaatatttgtgtgggttacaaagcccaccaatgattctctttgattagggcataggtcatgagaacttccaaatacagcaggttagagtatatactgacatgtctacagattcaaggaagggctctgggcctaggaagtccctaggagcaataaaataagaaat

SEQ ID NO: 272778 - DNA, 524 bp, Homo sapiens
tttccttcaatttctacccacttggttctatctctccatcatctagttcaggtcctaatagattttaatgtawaacacttgcaacaaactacagaactcaaatgaatggcagttctgaggaactaaactgccaaatcaagaaatgtagctagccaattactgtgacaactagcaaaatagggcagaatattacatgggccttactgatgaaatcttgcagggtcagaaatggcttgcttatgatcaaaactcctactgatgacttgctgtcagagaaatgtatggagaccatggttctcaaacacatttcattccatgtaaggcttagcttatggattttattcctcttcctaaataactcattaagaaagacctcatatgtttcctaaaataaaatcttgaattaatccagaaaaggcactattttatatagtgctttggttttcatttataaatcaatatatcttcctaaacctaatttttttcaattttaaattttaaaataatggaatacattacaaaaa

SEQ ID NO: 272779 - DNA, 571 bp, Homo sapiens
aaggaagaatttgaaagttctgaatctgaatcacttgttcccctaggcaagagagttgcacttctaacatatatggttacaattcaagattctcaaaagraggtaaattcatatcacccacaacttaattcaatcagaacttcataaataagaaggtgaagatcattaagctcatattaacgtttatcatggaacattttaagagaactgaatgattcaattttgattcaagttttaaggtaattgagaggtgacaaaagaactccttttgctctgacccatgaccattgaaacttgtctcaaaatatattactctagttggtggcctacttcaactataattgcaatcttctattcatgactgaaaaactcagtcttcagtgtctgcattattaaaaagaaattttaagtaaactgagtatgttgatgctattgaaattgacattttaaataattttctaaagcaatgtcccaaatttctgtaattccatccaattcctttgtatatacatacgctgttaatttccctattctatcatctaaaaatacaataagtattaaacataatatt

SEQ ID NO: 272780 - DNA, 571 bp, Homo sapiens
aaggaagaatttgaaagttctgaatctgaatcacttgttcccctaggcaagagagttgcacttctaacatatatggttacaattcaagattctcaaaagaaggtaaattcatatcacccacaacttaattcaatcagaacttcataaataagaaggtgaagatcattaagctcatattaacgtttatcatggaacattttaagagaactgaatgattcaattttgattcaagttttaaggtaattgagaggtgacaaaagaactccttttgctctgacccatgaccattgaaacttgtctcaaaatatattactctagttggtggcctacttcaactataattgcaatcttctattcatgactgaaaaactcagtcttcagtgtctgcattattaaaaagaaattttaagtaaactgagtatgttgatgctattgaaattgacattttaaataattttctaaagcaatgtcccaaatttctgtaattccatccaattcctttgtatatacayacgctgttaatttccctattctatcatctaaaaatacaataagtattaaacataatatt

SEQ ID NO: 272781 - DNA, 544 bp, Homo sapiens
aatgtcagtgtcagtgtcccaagcactctccaaatcagctgtggatacaacattacacacagttctccagtacacatggttaccaagtcccaaagggtggtcaccattgactccatctggttatgcaagctgtctgtatgtaattcaggctaaaatggatttgccttttccaaagttactttccctctgcaatttwtttttctttccatatatatgaggcaccaaaatataaccatgctaaaaccttggcagtctttggtattcacagtttaagactgctttagcttgtcaaactggtggtaaaatgaatgtctcaaggcaactggactgaggaattttgctcaattttgaagacttcagtgatgactctcttttgaagacaaatattatacttcacagatataggtacttctgattacctccattccctcctaagatctcagaatgaaagtaaatgacaaaaatgttataaatctagaaagacaaagaaatttgagaggaagtcacagcaacataattttggaacctagaagacagatggaca

SEQ ID NO: 272782 - DNA, 438 bp, Homo sapiens
tggttatgcaagctgtctgtatgtaattcaggctaaaatggatttgccttttccaaagttactttccctctgcaatttatttttctttccatatatatgaggcaccaaaatataaccatgctaaaaccttggcagtctttggtattcacagtttaagactgctttagcttgtcaaactggtggtaaaatgaatgtctcaaggcaactggactgaggaattttgctcaattttgaagacytcagtgatgactctcttttgaagacaaatattatacttcacagatataggtacttctgattacctccattccctcctaagatctcagaatgaaagtaaatgacaaaaatgttataaatctagaaagacaaagaaatttgagaggaagtcacagcaacataattttggaacctagaagacagatggacatatggaaacta

SEQ ID NO: 272783 - DNA, 654 bp, Homo sapiens
ataggaaatgtagttatttttagttgaatattatgttttcataaagtatgagataataggaaatgaagtgtcaaaatgagtaaagttaaaaataaaagctttggatgtagtctgcctgagtgaattcaggctccatctaagacaatttattttaactttctgtgcctcagttttcacacatgtaaaatggggaaaracaagtgtcttcctcactgggttcttttgagaattaataagataaagtatttagaatagcatcattggtgccgtcatcacaaataaatgtacttattattattttaactaaaagtagtcatgaagaatcccagagacttttttaaagttagttaatatggttaatcttttgtaatgtgattcttatgccatccttctcaaattagtactatagggttctgattattctgtaactcttctagtgcttcctacttatttaaatgtagtttaaagacatttgcccctctagtacacttgagatttgaaaatacctgaattagtgctggaaactagaaatagattttctctcatttgtattcatggtatttcttcccagttccgcttcccctctccttttcctgccctcttctccactcgtttctgtctctcattcttgcaggcctatatgtgtgtatacac

SEQ ID NO: 272784 - DNA, 654 bp, Homo sapiens
ataggaaatgtagttatttttagttgaatattatgttttcataaagtatgagataataggaaatgaagtgtcaaaatgagtaaagttaaaaataaaagctttggatgtagtctgcctgagtgaattcaggctccatctaagacaatttattttaactttctgtgcctcagttttcacacatgtaaaatggggaaagacaagtgtcttcctcactgggttcttttgagaattaataagataaagtatttagaatagcatcattggtgccgtcatcacaaataaatgtacttattattattttaactaaaagtagtcatgaagaatcccagagacttttttraagttagttaatatggttaatcttttgtaatgtgattcttatgccatccttctcaaattagtactatagggttctgattattctgtaactcttctagtgcttcctacttatttaaatgtagtttaaagacatttgcccctctagtacacttgagatttgaaaatacctgaattagtgctggaaactagaaatagattttctctcatttgtattcatggtatttcttcccagttccgcttcccctctccttttcctgccctcttctccactcgtttctgtctctcattcttgcaggcctatatgtgtgtatacac

SEQ ID NO: 272785 - DNA, 625 bp, Homo sapiens
agtttttgttttttttctcttaaggatagctggaatgacagctggttttatttaaagatctataaagtacactaaagcagtgtccagcatacataaatataaaagtagtttatatcatgtcaagagtatagaggggaggcctttcaaagaatgatctcataggcatctttggcaaaaagctggcatatatcctgtgtactccagtgaggcttacattagccaggcattccaccccctaggaagtaaatttcgtggattgatttacagtgcttttattatcaaatcacttttttgggagaagagaaggcagtctttgtgggaggctgttagccatccttgcataaatcatttctcrttaatttagattgctacataatgtctttctggaatttttttggatgttctacaaagtcatatttctatcctcatgtatcaaacaaagccattggcatatgatagaatagatttatatttaaatctttttgtggatttttggtaactttttcttgatcgatagtattcctacagtaaaatttcacaaatcataaacttttcactcattgaaaatttacagatgtaaccatcatgcatattgagttaaatttttccagcatccacaaagcag

SEQ ID NO: 272786 - DNA, 537 bp, Homo sapiens
tttttccagctcagtatctcagtaatgtttggctttaagtaatatttatagttttcagtgtagaggtctagcatatatttgtaaatttataaacatagaaactattttatagtcttttaaatgatgttttgatgctaatataaaaaatgcaagtaattttgtgtattggttttgtattcaatgacttgcttaattcatttattaattataaaaattaatatgtagattactgtagaatttctatctaaacaattatctggaaatggtaacatttatttcttcattataaatcagcgttcatatttattttattttatagcctwgttgagttttgttttgtttttccactttgtacgtgtctatggaagactgtgaaagcacagtgagtattgatttagggattacaaaaacattataacaactagatgaactcacaaatacaaaatccataaataataaaaattacttgttttaatatttatatatgagatagaatagaatatcatataatagtgtgtgcctctgtgtatattatga

SEQ ID NO: 272787 - DNA, 537 bp, Homo sapiens
tttttccagctcagtatctcagtaatgtttggctttaagtaatatttatagttttcagtgtagaggtctagcatatatttgtaaatttataaacatagaaactattttatagtcttttaaatgatgttttgatgctaatataaaaaatgcaagtaattttgtgtattggttttgtattcaatgacttgcttaattcatttattaattataaaaattaatatgtagattactgtagaatttctatctaaacaattatctggaaatggtaacatttatttcttcattataaatcagcgttcatatttattttattttatagccttkttgagttttgttttgtttttccactttgtacgtgtctatggaagactgtgaaagcacagtgagtattgatttagggattacaaaaacattataacaactagatgaactcacaaatacaaaatccataaataataaaaattacttgttttaatatttatatatgagatagaatagaatatcatataatagtgtgtgcctctgtgtatattatga

SEQ ID NO: 272788 - DNA, 631 bp, Homo sapiens
attgagtgcatttttctgggctgtcttatgacagaggtgcttgacaaaacatgaatatatcctgagaagagctaacagcaaggaggccagaaaatgtgtcttataaagaagggttggggatacataatggttaaaagcctgaatgtcacacattaatagtctcagataaatcctggttcaacccctcactgcttgtgagacctttatttttctgagtctcaataaaatggacataataaaaataatatctcatagggttagggtgagaattaagagagytaactcatgcaaacaaatcgctaaaaaattttataagtgagagggaggaaagggttttttaaggatattagagtatgagaaatggaaaagaaaaacaagaattaatagccttcatatggaaaaggggtttgattcattgtatatatctatagaaaataaaacttaaaaccattcacattattaaaggggtaaatttcagctcaatataaagaaaaagtcaatgttagacaaaaagctgttgtttcttatgggctttttagtcatgggctgattctcttatcttatgccacacttcatgctgcctagttgaaaagtgaatcaaatcttccaccctcctgttctggattcatta

SEQ ID NO: 272789 - DNA, 556 bp, Homo sapiens
tagcttagcagtggagagcatgagctctgcgtcagactgcctggattcaatcttagttgtgtgatgctgggcatgttatttgtctctgtgcctcagtttcctcacctgtaaactgggataattacagtattatcctcataggattgttgaaaggaataaatgagttcatataggtacagtacttgatgcttggcccttgcaaatataaaaaaaaattagcagtaattaytgctattattcatatagaagcaaataaacaccacatatatacaaaatttttttaaagagacttttgtataactgaaagtaaacaagtatcaacaagatagcctgagtgattctggctagatataaaagaatactgaaatggactgagaaaagtattactctgtccacaactatctcttacgtaggtaaaagttccaaactcatacctgcttgtattctcagccccatactcagtattccttttcctcagaaaacagaggtgtctcccaatctgccaactcttccctcatctccattctcatattaataataactactgtttagtgat

SEQ ID NO: 272790 - DNA, 614 bp, Homo sapiens
gcaaaagcaaagggggaaaggaagaggcaactgagacgcttcagtaaaaatcgaagggacctcttagtcagcaatactgtgtggatgttgtgttacgttaaggtaacatgtgatgtggggactcgcttctagagtgataggtcaggrtattcctgggaaggtgagtatgtttttataaaaggtggctgaatcgacttgtgcttgatgcaatctgtctctgtgatctggtatgttcaatccacattggggaaattaagatagcttgttgaggtagggaagtatagtgtacacaacaaggagtttggacccagacagacactatgaacttagaaactatgtgttcatgttcatagcatagtgtgtaacagagtctctctcctccaaataattctaataatgcatctctttctaaaacacggactgatcaagtcactaatcttaaaaaccctttatgactcttgtttgacaagatgaaattcaaactacttagtatggcacttattattttctaaagttagccccagcttctctttccagtctcctcatctgccatctcccctaaatacctttcaattttaccatgcagaccaatctagagtgtctccaaagactcc

SEQ ID NO: 272791 - DNA, 614 bp, Homo sapiens
gcaaaagcaaagggggaaaggaagaggcaactgagacgcttcagtaaaaatcgaagggacctcttagtcagcaatactgtgtggatgttgtgttacgttaaggtaacatgtgatgtggggactcgcttctagagtgataggtcaggatattcctgggaaggtgagtatgtttttataaaaggtggctgaatcgacttgtgcttgatgcaatctgtctctgtgatctggtatgttcaatccacattggggaaattaagatagcttgttgaggtagggaagtatagtgtacacaacaaggagtttggacccagacagacactatgaacttagaaactatgtgttcrtgttcatagcatagtgtgtaacagagtctctctcctccaaataattctaataatgcatctctttctaaaacacggactgatcaagtcactaatcttaaaaaccctttatgactcttgtttgacaagatgaaattcaaactacttagtatggcacttattattttctaaagttagccccagcttctctttccagtctcctcatctgccatctcccctaaatacctttcaattttaccatgcagaccaatctagagtgtctccaaagactcc

SEQ ID NO: 272792 - DNA, 590 bp, Homo sapiens
tggctttaataaaattaagactgggaaaaataggtgtcttttggcygggaaggttgatgaccaagccctagccaaaaaggattagaagtagtgaaagtacagatcctgctcacactttttctacctttaaaaaatatatagaaacaccaataccctcccttacaagtagggggacatggtctgaatgtgactactcaggtttaaaagctctactttaattcactttgacctaagcccaactgctagctcattagctgggaaaattctcctcaccaaggaattacattggctccacaatatataaataactctcaccatcatccacatcaaacagaaagctttcctcaaaagttttcaagagctgcaaaccctcactgaggttaagagacgactacacctgcaaatagctttaccattcaacctcaagtctttttcacacacttagaatgtgaaaggctgtgatagctagtgtacaaatataggaaattcagacatgagctctcaattctaaaaatggctcctgttggcagaatgctcagagaaaacgtccaatggaaatataccagcaatgttattatatcatgaagctt

SEQ ID NO: 272793 - DNA, 595 bp, Homo sapiens
gttcagtcactcaaaaataccatccttggcagtgaaatacaagacaaatatggaacagcctatatgttcaaagtgtatactgattttattcaacaaatttgtgaggttgggccttggagacagtaatgtctcactttgcagatgaggaaagttcccttggaacaaaggttctcaatcagcaacatcatcatcacctagaactagttagaaatgcagttcttaggccccaacaaaggcttattaaattacaaactctgggggttgctgggaccaatcagtctatggtttactaagctccccaggtgcttcaaatgcattctaacattagaaactcacaggtcagtgattcagatcttcagtgcattgcagtcaggacacaagtcctgggccttctccattttacctttctacctccacaataatggatawttattgaacgtccatgctgatttggaacaattgtgtgtagtctgtgatggttaatgctagtgattagtgcccttataaaagaaaccccaaagagctgccctacctttccgccgtatgaagacacatagaaggtgtctatgaggaatgggccatcaccagatattaa

SEQ ID NO: 272794 - DNA, 611 bp, Homo sapiens
tttaatttttttttcttttgagatagggtctttttctatcactcaggccggagtgcagtggcacagtcatagctcactgcaaccttgccctcccgggctcaggtgatcctcccacctcagcctcccaagtagctgggactataggcacctgcccccatgccagtctaatttttgtattttttgtagagatggggtcttgccatgtagctcaaggggacctcaaattcctgggctccagtgatcctcctgccttgacttcccaaactgttgggatcataggcatgagcttctttgcccatccttcattttaatatcctttattaaagcttgaaaatgttccctttaaaggttttgttcattctttgttaatttaattccaacctgatgtgaccatgaggtacttttttatacacccaatattactaattaagtaatatcaaatgttaacacaaaagtggagaaataactggaacatgctgctggtgggartgtaaatctgcatggtgactccagaaagcaatctggaggctcttagtaacttcaatatgcatggaccctttgccagaacatttcactcctgggcaaactaatgcacaagtcaatgaggagac

SEQ ID NO: 272795 - DNA, 585 bp, Homo sapiens
tgtgactcaaacacgtctagagacaataactctgctgccatgactagcatcactatgtagacagaaaccaagtgacagatgatcaggtcatggttttttaggcttgtgatccttaaagaatgtaaaaatgtgccagagaagaagaaagatgttggctgagattccaatgccagcttgaaaacaaaaggccttttgaaagataacatgtgaaatgtgtgttcatcctaatgacatagaagaaacattttgaagacctgaaaaaagtagatctgtgtcatcaatgtccttttgtcagtgttcaaaattattaccattattatttttattttactctcatttcttgattaaccccatcttatataaattcttgataatgtatctcctatactatttcctaaaccaaataaatatatacatatataattattatgaatctctatatagtaaatacattttcaattttgcctaaggtgcatactatctatattcctyatgtaccttggccttcatctcagtaatcatatccttattctatgttctcattttatatttagcacttcagtcaggcatataaaatgaatagta

SEQ ID NO: 272796 - DNA, 599 bp, Homo sapiens
tcaagttgaaatcagaaaaaaaaagtaattttaaattaaagacttaatggtatccaaattttaaggatcacatttcagtactagaaaaatatatttgaacataagataataatatatgtataatgagttattaactatatatctgtatagttttattaatataacccatatgttatgaaccacacaccaaaagaagatataggacaaagaattagattaaataacataaatragaattttaatattttattttttcaccctaaaaaaatccagtttatgctctcaaattcattctccttactctgtaaataacctaaacacactgaaacagaataatcttctgcttgatcagatggtgtattttttccattgaggctcttgagagcattgatgctgatcccagacaagatcagcaatcttggttgtcacactcttggttgtcataaattagagcacacaaatagggtatgattgaattgattgtatcttcaaaaatttttctcacctgccagagctaaacaattgataattgcctttaacatattaatccaaatattaaatttagccgtgttctatattgttatttgataaatctagca

SEQ ID NO: 272797 - DNA, 572 bp, Homo sapiens
tgactaaattcttatgaattcagatttctcatgtttcaaaaaataaaattttggctaggtatatacagtaagttaaactgagaaaaaactagtataataacaaawtacaactacaatttaaatacaatattacaaaattaacaaagtatttataagatcaatatattattacatcagtattcataaagttgcttttctcatttggaatcatctattgtacttagatatgattcactgagacatgactgaaattaggaaaagacaatgatcctagctcttcattgagaaaattctgcctcatcccaccactcgcctgagtcttcagctctcactgttaataatgctgacagacagacagtcacccagctgagtctttggagtgagtccatgtttgtaagatgaggctcacactatgtggttataaggaagcaatgccatcagcccattccctccaggcttataattttcacgtcaactataaagatagtacaagctctggttttgtgattttaagaaagggaaccatcaagggaaaatgaaactttttgattcctagaaaatacattagaaac

SEQ ID NO: 272798 - DNA, 572 bp, Homo sapiens
tgactaaattcttatgaattcagatttctcatgtttcaaaaaataaaattttggctaggtatatacagtaagttaaactgagaaaaaactagtataataacaaaatacaactacaatttaaatacaatattacaaaattaacaaagtatttataagatcaatatattattacrtcagtattcataaagttgcttttctcatttggaatcatctattgtacttagatatgattcactgagacatgactgaaattaggaaaagacaatgatcctagctcttcattgagaaaattctgcctcatcccaccactcgcctgagtcttcagctctcactgttaataatgctgacagacagacagtcacccagctgagtctttggagtgagtccatgtttgtaagatgaggctcacactatgtggttataaggaagcaatgccatcagcccattccctccaggcttataattttcacgtcaactataaagatagtacaagctctggttttgtgattttaagaaagggaaccatcaagggaaaatgaaactttttgattcctagaaaatacattagaaac

SEQ ID NO: 272799 - DNA, 612 bp, Homo sapiens
agaaaccccatctctactaaaaatacaaaattagctgggcttggtggtgcatgcctgtaatcccagctgcttgggacactgagacaggagaatcgcttgaaccaggcaggcaaaggttgcagtgagccgagattgcgccattgcactccagcctgggcaacaagagcgaaactccatctcaaaaaawaaataaataaataaataaaaataataaaaaaaagaatataaaacaaacagaaaaacccacatttaggtgaaaagtgagacattcaatattgaccagaaaacagtcaattccttaggaagatgtaacaaccgtcaaccaatatgcaaataagaaaagagaaacaaaatatatgactgacaaaaataaagcaagcaagaaataatcgaaaaataacagttagagatttaaatacttcattctcaataatgaattaaaaaacagtcaacaagtcaaagagtaaacagactggaagaaaacaaaaccactgagatctagcagacgtgtgtagtcggatccacataacaggaataggctaggcatttttagtaagtgcacatggactgttcttcggaataaactatactctaggtgattaaatacacaac

SEQ ID NO: 272800 - DNA, 513 bp, Homo sapiens
tcattaatagagggaagacttcactttccaaataatctttttttttcttttcgttttgctccagtttattcaaaagagcagacaacaatctttcattttttaaatattacatgaaaatcttgttcacagtttgttaaatctcacccttgcattagtgcactattgatgtcaaacctaattcttaataaaatcttataggaaaatctatctagtcttaatcactttgatcataagttaagattcctataatcctttgataacactttacaattttttgtgaaaaagcagattagtgctctaaaggaaaccagctgttcttttattccagtgttcaattwataaaaaaattgaatactcctttaactttagccaatatgttaacacaaagaatttcttttacaagatttaattttttgcaaacctttcacaacttggttaaaccttcagctctataatttaggccaaaagtaatccacattcccatgacttctcgtaatcttttaccaaaaacac

SEQ ID NO: 272801 - DNA, 510 bp, Homo sapiens
tttgtgaagtttaaccacctgggtaccaccattcttgtcaccaccaactggttttgtaacagttgcaagaaccttctcctttttcttttcaayctttgatttagcggctgagtacttcctcttatacatggcctttctagaatacatggcagatcgggaatacctgccagttcctctgacaaggacagggttgtggctgcaatagggcttccccttcttgggctttttaactttaagattaccctcttgcaccttgccaccagcatcagccttcttggcttcgggtttcttctctttagtatctggcttctcaactttttcacctgccatcttgcaagatgggaaagagcgtcttattccctttttgtgctgttataatacagtaactgatactgggtaatttgtaatgaatgcatatattttttcttttatttagagatggagtcttgctttgtcacccaggctgaagtgcagtggcatgatcacagctcattgcagcctcgaactcct

SEQ ID NO: 272802 - DNA, 510 bp, Homo sapiens
tttgtgaagtttaaccacctgggtaccaccattcttgtcaccaccaactggttttgtaacagttgcaagaaccttctcctttttcttttcaatctttgatttagcggctgagtacttcctcttatacatggcctttctagaatacatggcagatcgggaatacctgccagttcctctgacaaggacagggttgtggctgcaatagggcttccccttcttgggctttttaactttaagattaccctcttgcaccttgccaccagcatcagccttcttggcttygggtttcttctctttagtatctggcttctcaactttttcacctgccatcttgcaagatgggaaagagcgtcttattccctttttgtgctgttataatacagtaactgatactgggtaatttgtaatgaatgcatatattttttcttttatttagagatggagtcttgctttgtcacccaggctgaagtgcagtggcatgatcacagctcattgcagcctcgaactcct

SEQ ID NO: 272803 - DNA, 510 bp, Homo sapiens
tttgtgaagtttaaccacctgggtaccaccattcttgtcaccaccaactggttttgtaacagttgcaagaaccttctcctttttcttttcaatctttgatttagcggctgagtacttcctcttatacatggcctttctagaatacatggcagatcgggaatacctgccagttcctctgacaaggacagggttgtggctgcaatagggcttccccttcttgggctttttaactttaagattaccctcttgcaccttgccaccagcatcagccttcttggcttcgggtttcttctctttagtatctggcttctcaactttttcacctgccatcttgcaagatgggaaagagcgtcttaktccctttttgtgctgttataatacagtaactgatactgggtaatttgtaatgaatgcatatattttttcttttatttagagatggagtcttgctttgtcacccaggctgaagtgcagtggcatgatcacagctcattgcagcctcgaactcct

SEQ ID NO: 272804 - DNA, 567 bp, Homo sapiens
aatagactgatgtaacaccattctggcagtggtggccattgcagtgacactgcagccactgctctgctctgggaagatctgggcacaggcccgccagggtgggtttaaatagcctcaggtgcagcctggcagcagaaagggcggagcttcactcctcctttcatgtgtctcccccaacttttccaggctccatctcctaggaaactgctctcctgatttgatgtcatgtgacgcatttgggacaayctaagaaattagaaattttgttggccaaatatattattaattaaatgcattgaaaactatctagtgctgtggttctcacgttgtggttttgagaccagcagcatccttgcaaccctcaagccccggagatccacaaatctaggttctctcaagccttccccctgaccctgatgtatggcagtttaagaattacccatgtaagcaaaaagacttttaagaaaaagtggagatatgcattgtataaacattcttctgctctggaaccatgtagagactttggggccaggtgggtggagcattcataggatgagggtggtgagg

SEQ ID NO: 272805 - DNA, 558 bp, Homo sapiens
ttggctcttgatttcacagatgttactaatgttgctcagatattgtgtattcaaggaatcaatgccaagttkgagtggttgaatggttagcctctaggaacagtcgatatggaacaaccacaggtgaaaatattaccaaagaaggtacaaatactaattcagtaaacctgaggcagtacaatctgctaagaagtgttaaaattgatagtggtaaaagatatgttggagcagaaaaaggcagaggttggatttataaaaacatgtatttaaagcctatggttactcattgtattcttcatcagcaggtactttgcagagaatattttaatctatcatgtgctattgaaccactagtggcaacagtgaacttcattcaaactcaaagatttaaccatcatcagttgcatgaatttcatgagaaacagaaaaattctgacttgccctaccacatgagagttcaatgtctgagcagcaatgaagttttattgtgattttttttaaatctcagggctgagactgaaatatttctgaataagaacttccctcaagcattactat

SEQ ID NO: 272806 - DNA, 631 bp, Homo sapiens
ccaggggttatttctattctattttgatacctaattccaattctacactgcaaatccttgatgccagctgtctgttgagtagctactctaaccataaacccttaacaaccttgtacgatgtgctgggcacatggagaaaartatgacatggtcccagaaatagaagaactttcagtgtatggatttagataaagagaaataagaaacaaagagctataagacttaggcaaggcaaactctatactggaacacaaaattcatcaccatccttctccaaggtacaattctcttgcatcccctagcttcctcaagtaaggaccattctgtaagcttcaacgaatgaaaaccttagagtagctgctggcatttccctttcaaagtcttggatataagcaatttatgatcatcaacgtttggcaattatgacaatcaatcaaacgatattatactaagtcgatgttagagatttgctttaaaatactgaaacaaaaaaaaaagggacagggagttgatacaagactggcaaatgttaacaaaggttgaagctgggtgacgcttccacagaattattttagtcatattacatttggctatgcttacaaatttccatagtaaaaacttaagggaaaaa

SEQ ID NO: 272807 - DNA, 504 bp, Homo sapiens
cccaatcacacatggctaattttttctttttttgcaaagatggggtcccactatgttgcccasgctggtctcaaactcctggcctcaagtgatcctcccaccttggcctcctaaagtgctggcattgtaggcatgagccactgtgcctagccctgaaattttataacataaagaagagttggaagaattatacagtagtcacccatatattctcagcttagatactaaaattagcaacatttatgtcttagccatctatctagctatcttattacttatccatcagaacattaacattaccccacaaattccctcatgacacttcccagtcagtctctaaccccttcccccagtggcaaccactgttctactttttcaccataaattttactaattttagaatatgaaatatatggaaccatacggtaagaactcttctgtattacaattctttgagtatagtgtttttcagatccatccatgttgatgcacatattagtcatt

SEQ ID NO: 272808 - DNA, 504 bp, Homo sapiens
cccaatcacacatggctaattttttctttttttgcaaagatggggtcccactatgttgcccacgctggtctcaaactcctggcctcaagtgatcctcccaccttggcctcctaaagtgctggcattgtaggcatgagccactgtgcctagccctgaaattttataacataaagaagagttggaagaattatacagtagtcacccatatattctcagcttagatactaaaattagcaacatttatgtcttagccatctatctagctatcttattacttatccatcagaacattaacattaccccacaaattccctcatgacacttyccagtcagtctctaaccccttcccccagtggcaaccactgttctactttttcaccataaattttactaattttagaatatgaaatatatggaaccatacggtaagaactcttctgtattacaattctttgagtatagtgtttttcagatccatccatgttgatgcacatattagtcatt

SEQ ID NO: 272809 - DNA, 490 bp, Homo sapiens
aaatgaaggaagctgtactggcaggaaatttagaaaatatgatatggaaaatggctcctttcttgaaattttttgagttcaaatcaggcttggaattggctattcctctgttgcccgttgacctcatatatttaacatgaacgtatcttttctacaaatcagtttaagccatgtgaatttatggttattcaggaagaggtgggtaggytgagatgggagacggactccagataactataacaagtcaaactacaggaagtatgtacttaccactttccttctgggcaggaaaaaaaatttttaatgaaactttctatattaacacaaaaaggcggagcttgcagtgagctgagatcacgccactgcactccagcctgggcgacagaggagactccgtctcaaaaaaaataatagtaataaataaaaaaaaaagaaaaaaggaaatgataacatgaaacaccaaatgcacctaccctaaattcaacacttc

SEQ ID NO: 272810 - DNA, 265 bp, Homo sapiens
taaataactttccttgcttgactaacagattagccactctaaaacttactttggttatagcctcattttcattcgctgttttttaaaagtaattcggctttgataagatattccattttggccataattatctgtgatttggaaatattgggaaaagyttctaatctggcagtattaatgttattatttttcttcttgtacagctatctgtcactgcaaaacaaacacaatagtcagccgtctgattctataacaaaataatcta

SEQ ID NO: 272811 - DNA, 626 bp, Homo sapiens
aattaaaattagatttgtgcctgacaccatttaaaacatagtcttcatgttttgaaaataattagtgcctgggagtatgggaaagttttcttttaaaaaatcattatacaaaaatttcataaacacattgawattttaaccacataaatttttttagctaagttgcccagtctagagtgcagtggctattcacagtcacgattgtagcacccaatagcctcaaactcctgccctcaagtgatccttctgcctccccagtaactgggactacaggtatgtgacaggtatgtgccaccacacacagcccaaccacataaagattttaagtgaacaataaagtacctcattctttatgttaatagacaaggacaggcaattcttcataaagataacatacacttagcctatgacagcaattccactcctaggtatttacccaagagaaatcaaagcatatgtctgcaaaaaggctaataaaagaatattcttagtagctttatccaaaatttccaaaacctggaaacaaatgttcaccaacataagaatgagcaaactgtggtaatttcctgattactctgaacataaaaagaagactgataagcataataatataaatgaacttaaaa

SEQ ID NO: 272812 - DNA, 626 bp, Homo sapiens
aattaaaattagatttgtgcctgacaccatttaaaacatagtcttcatgttttgaaaataattagtgcctgggagtatgggaaagttttcttttaaaaaatcattatacaaaaatttcataaacacattgaaattttaaccacataaatttttttagctaagttgcccagtctagagtgcagtggctattcacagtcacgattgtagcayccaatagcctcaaactcctgccctcaagtgatccttctgcctccccagtaactgggactacaggtatgtgacaggtatgtgccaccacacacagcccaaccacataaagattttaagtgaacaataaagtacctcattctttatgttaatagacaaggacaggcaattcttcataaagataacatacacttagcctatgacagcaattccactcctaggtatttacccaagagaaatcaaagcatatgtctgcaaaaaggctaataaaagaatattcttagtagctttatccaaaatttccaaaacctggaaacaaatgttcaccaacataagaatgagcaaactgtggtaatttcctgattactctgaacataaaaagaagactgataagcataataatataaatgaacttaaaa

SEQ ID NO: 272813 - DNA, 626 bp, Homo sapiens
aattaaaattagatttgtgcctgacaccatttaaaacatagtcttcatgttttgaaaataattagtgcctgggagtatgggaaagttttcttttaaaaaatcattatacaaaaatttcataaacacattgaaattttaaccacataaatttttttagctaagttgcccagtctagagtgcagtggctattcacagtcacgattgtagcacccaatagcctcaaactcctgccctcaagtgatccttctgcctccccagtaactgggactacaggtatgtgacaggtatgtgccaccacacacagcccaaccacataaagattttaagtgaacaataaagtacctcattctttatgttaatagacaaggacaggcaattcttcataaagataacatacacttagcctatgacagcaattccactcctaggtatttacccaagagaaatcaaagcatatgtctgcaaaaaggctaatamaagaatattcttagtagctttatccaaaatttccaaaacctggaaacaaatgttcaccaacataagaatgagcaaactgtggtaatttcctgattactctgaacataaaaagaagactgataagcataataatataaatgaacttaaaa

SEQ ID NO: 272814 - DNA, 599 bp, Homo sapiens
ctgtcttcactggagtggtccataaacaaatttgctgctccagaggaagacactatatttttgttccctaacgcgtacgcacctttgaaaagacagtggggaacaaaggtgaccagtgtctctactsaaagacatgcagaaaaagagaagtagatacttaagtaaccatagtgtctgcagaaaaataaaagaaaaaaaataagagaagcagatacagagaatgagtggggaatgaggaataataactaatgttacattctacttcaaagccagttgactacagaagaaaaaggccaattctggggttacatctcctttgtgagtggtatgctaataaatgtttaataaatggctctccagaaagaaacatacgtacattatataagtttactataaattttactaatatagaatgttttcagaacacaatttataaacaataataaaatatgcaatactctatttattataaattacaaatttagaaaaccatgttgaatgaaaaaaaagccaaacgcaagagtatattacagtatgatttcatttatataaagttcaagaataggcaaaaccaacatatggtgatagaaagcaaaaca

SEQ ID NO: 272815 - DNA, 659 bp, Homo sapiens
ccacacccttcaaatgccacttctatggagcttcttgcctgtgtagagaatctcatggaaaacctgggtactaacgttctttcatagtaagagcatgggtttcatttttgagcacacttttgaatgttcttcatacagagagtatttttctactggggactaaaaaaaaatctaaagacgttggctgaactgaagaccttaccatgatcatcccaattagaatttccttcctggacacaccctttaatggaaatttgaccactaactacaaccactaccacaaaccacccatttgtcaaaagtaacctctttgccattgtagcatacagcagttgatgggagcttcacagaagttcttgaaatccacagtccttgcctggcacacttcagtgctgcaggctgacattatcgatggcagtgtccctgtcttttgctcccctagccctcccacaggctgagtaagcctctatcatctggaatacagtgtggcttctgttttactaattgaaccctgacttactacatttataatgtttctctctgctcatgtagtctttgatgagtcagaaggtcctttccacgctcacartgtgtgtactgtgtctcatctatatgcactctctgatgggcaaggaggtatgaattacgactgaagccct

SEQ ID NO: 272816 - DNA, 630 bp, Homo sapiens
ggataaattgcaggcattactataattcatccctaaatatttcagtttgtatctcctaagaataagagcattttcctacatttccacattactgctaacatactcaagaaatttcacattgataccactattttttaatacctagttgatatccaagtgttcttaattatcctaataatctcccatttctcttttgtgttttttgaatctaggagccaatgcttttagttaccctgtcttcttagttccttttaacataatacaaatagattaatctgccatgaaaaagtgaaaatactaaatcttggtgtgtgatgagaaatgaactcatgaaatgctactagacttgtgtatcagcacaacaccttagtatagatttatctgtgcctatttcctgggccatattttataatttgattaatactgtcctttgggaatccctgatccrataggattagtgtccttatgagagcctcaacagagcttgctctcattctccctctgccatgtaaggacacagtgagagcagagctgtctgcaagccaagagaagaaacctgaatgaaacctatcttggtggtacttgatcttagactttccaacctccaggacaggaagaaataagtttatt

SEQ ID NO: 272817 - DNA, 558 bp, Homo sapiens
caattctctttggcaaaaagttaattgttgaaactgcatgatgggtactgcaaatggaggatcataataccatttgctctttttgtgtattttcataattaatttttttcatgattaaaagaaaatccttcctccacactgtgatggtctttctaatgtgtcaacttggctaagctacagtcctcagttattgaatcaaacactaatctaggtattgctatgaagataatttgtagatgtgattaaagtccatartcagttgactttaagggagattattctaactaatctgagtatgtctgattcaataaactgaaaggtcttatgagcagagctgaggcttccctgggagggggagaaattccacccacagacagtagcttcagtctgtgtccaagagttccagcccacccttcctgaggggctgccctgtggattctggacttgcctagttagcccccataatcatataagtcaattccttatgataaatctcttaatatatatctcttactggttctgccttgctgactgaactctgaccaatacatacccatt

SEQ ID NO: 272818 - DNA, 670 bp, Homo sapiens
acgaaagaagccatgattaaaagggaaacgtatctttgtgcaaattagaaaaaggtgtcccttcccccagcagatgtggccacacaccggcgttaaggagcaggtagcatgggttggattctagctaccacttggctatcctggcagggtgcccgcatgcacggagcaacctgcacagctgtacccagtagcctcacatgccttacagctcccagcatgctcattctgattctgggagaggtgggaaaggagaggtagtggcatgtcatgtactggttaaaagtggactctggggacaaaatgtctacgttcaaaacctggtgctaccatatacttgctgagtaaccatggttaaattcatgaacctttctaatgtttcagttctgtcatctgcaaaatccagaccacacagtgccaacaatatatgattgttattaggattatctgtgtgcatagaggaaacctattataactataccagggatctctacttccttgcaactatagagatgcagataccattctgtatcacaaaattgccctggcgaatgtattttgtaagacatctggacagcagagattactgctctgtcccgggaaagtcacccktaacttcggaatgtctgtagctctggcttcttacttttgttgccacagtatatactatata

SEQ ID NO: 272819 - DNA, 640 bp, Homo sapiens
ctactacatttctcatgttaaacaaaaatgtgatcctctgtctagatatgacaaaatctcattggtgatgagaacacctagcctgcagggttgtttgtggggctgcgtgtgctcctctgtgaaaagcagctcagtgcttgaccctggggaggactggacaccaggagtttaatttcatggttcttcctcaaggtttgttactttacttactgttctcaggcaacattaaggctatctgtggaagagaaagaactgaaaaaaataaaaaaggaactgaaaatgaactgtgggtaaggcagagccttctagcaccacctcaaagagaggtgcactactccagtaggcacctgctccctcctgccccacctggcctctgctgtagaatccacaggatgtaagcacaactaccaagaacaagtatgaacttggctgygtaatcagcagtaaaagagctgagttttctttcactcatccaatatttatggattgccttctaaaagggatacagtgcccagatagatgccagggtagagggtgcacggagtcctttgagagagcatggaagggccctcaaatccatacatgatgatggaggatggatgaggatggagaaaatgagggctgatcttaatgttggaag

SEQ ID NO: 272820 - DNA, 640 bp, Homo sapiens
ctactacatttctcatgttaaacaaaaatgtgatcctctgtctagatatgacaaaatctcattggtgatgagaacacctagcctgcagggttgtttgtggggctgcgtgtgctcctctgtgaaaagcagctcagtgcttgaccctggggaggactggacaccaggagtttaatttcatggttcttcctcaaggtttgttactttacttactgttctcaggcaacattaaggctatctgtggaagagaaagaactgaaaaaaataaaaaaggaactgaaaatgaactgtgggtaaggcagagccttctagcaccacctcaaagagaggtgcactactccagtaggcacctgctccctcctgccccacctggcctctgctgtagaatccacaggatgtaagcacaactaccaagaacaagtatgaacttggctgcgtaatcagcagtaaaagagctgagttttctttcactcatccaatatttatggattgccttctaaaagggatacagtgcccagatagatgccagggtagagggtgcamggagtcctttgagagagcatggaagggccctcaaatccatacatgatgatggaggatggatgaggatggagaaaatgagggctgatcttaatgttggaag

SEQ ID NO: 272821 - DNA, 482 bp, Homo sapiens
ctacctctcctcaggagcctcaatccctcacttcactacgtgttttctccttttattaagagctcttaatttcttaagagctccttgttccttatcttctatcatgatttgaaaagccacttcttctctgacacctgtctttgtcccctactcctctctggctgactcagactcactcttctctctggagtccaccaacagtgtttgctcatcctcagcctgcaactatgatatcctaagctgttcagtctcaaaccttggtcctctaactctagatccacgggctgtcatttttacccttactattgctttgaaaaaaaatatgagtcaaaatctaagattctatgggagccagggcctgaccaacccattgcagtagaacatcacaaggtctacagagatgacagakaatgactggcttataatatgcacttaataaatgtcattaaatatatgatcaagcatggtttctctaggactcc

SEQ ID NO: 272822 - DNA, 426 bp, Homo sapiens
atcctttgaaatgtattaagcgctgtgcaagtcctaggagttggtttgctgtwtcgttgctggctctgctttttgtagccgcctaagcacacacaggcagaatttcacttgtaagtgtcccacagcatgtgacagtcagctctggattaaaatcttgagattttgtcttgattctccttgtctcctgaaaggggcagtgaaagtaggcttgtagacggtttctttgggcatcaggaatggcgtgtcccttgtactctgagtcctgtaggaagagaggttcttttcctcggctcctgaagcaagtagcgagggtagattacaggaaggggtagattacatccagctggcactgagagatttccccctgtggcgtggtgggaattgggattaaatcatgttatcctgctgttcatttttctttcacag

SEQ ID NO: 272823 - DNA, 533 bp, Homo sapiens
gccctacgtgtgtgacgtgtgtgggaagggtttcatctacagctccgacctccttatccatcagagggtccacactggagagaaaccctataaatgtgctgagtgtggcaaaggcttcagttacagctcagggcttctcattcaccagagagtccacacaggcgagaaaccttacagatgccaagagtgcrgaaagggctttaggtgcacatcaagccttcacaaacatcagcgagtccacacgggaaaaaagccctatacgtgtgatcagtgtggcaagggattcagttatggctctaatcttcgcacccaccagaggttgcacacaggagagaaaccctacacttgttgtgaatgtgggaagggtttcagatatggctcaggtctccttagtcataagagagtgcacactggcgagaagccatacagatgccacgtgtgtgggaagggctatagtcagagctcacatcttcaaggtcatcagagggtccacactggtgagaaaccctataaatgtgaggagtgtgggaagg

SEQ ID NO: 272824 - DNA, 563 bp, Homo sapiens
agaaaaaggtatggtccaaatgtttagtcttcaacattcaaaagatacaaagttcatagtagctctttgrtgataacatagaagtccggagttcaccaagcatattagaagcatgttttagagcatccataagcttgtttttatcctacagaaataccaaaagaatagatgagaatgcttaatttaaataaacatttatcttggttgtacaaactctttacatcaaggacttgttacatagttttaacagtatacagcacttaaatgattttaaccacataaaaaatcaacttagatcatttcaccttgccgtctctactaaaaagaaaaagatgcatgactcttagttgacttacataactaggactgcaagcttcttgatagagcgctaatcttttcaatctatagagactaggaaactagctccattcatcacattttaactgcaatcaagagaactggcatactgattcaggtgaagcaagatactatcctgacatggctttgtcatgggttaaagactcttcagagctgtctgaaatgactatccatgtaagtttgct

SEQ ID NO: 272825 - DNA, 548 bp, Homo sapiens
gttacatagttttaacagtatacagcacttaaatgattttaaccacataaaaaatcaacttagatcatttcaccttgccgtctctactaaaaagaaaaagatgcatgactcttagttgacttacataactaggactgcaagcttcttgatagagcgctaatcttttcaatctatagagactaggaaactagctccattcatcacattttaactgcaatcaagagaactggcatactgattcaggtgaagcaagatactatcctgacatggctttgtcatgggttaaagactcttcagagctgtctgaaatgactatccatgtaagtttgctttcctcttgcattcttcaaaycctcgcaatgcccatatgttccacttaactcagaaatgcaagcaattccttgagatagaggaaacactatccatacacaggaagagaaggaagcaagcaatagcaaacccttcttctccattccaagacatttatttttcattcccaatttgttaggaatgaaaccaataaaagatacaagagcatattactatgc

SEQ ID NO: 272826 - DNA, 638 bp, Homo sapiens
tctgttccaagtgactaagagccaatagaattaatctccatctcctgatttatggttgtgaacaaatggatagcttttttcaccgcaagtttcaaaattaaactctattctgaagctgctgaaattcacagaacacagagaatactgtctatagtgtaatttcaatgtttaaacggtttaaatacaaaattatgggtgattatcaaaactattattggtaatagtttcttttgattccgtacatgccccttagcacattttgtgaagaaatgagtgttctttttaatactactcatctttactcaaatacggtaaaaaatcattttaaaattattttctaccatggattacagaagactcttactaaaagtgaataatgcttattgttctaagtgtttagagaatcatctgaaaaatatattctttytaatactacttacaaaaaacatttaatgaaggtaactcacttctaattatattattctagtgataaaacactttctcatgtaactatttaaaacagatgatttatggcttttcaatttttagaatttcacatttaatgtcatgttaaaacttttctaaatcagtcttccagtatcagattcttcaatgagaaagaaaaaaaaggacaaaag

SEQ ID NO: 272827 - DNA, 589 bp, Homo sapiens
ttttttgttctctaatgaggattttgagaatgttgatcctgagtactagaggaaagaacagtgattttcacaaactaagcatttagttcgatttgaattttaggtaaataatggatgagtattttgtgtaaataccttcaaagaattgcttacacatactatacacaaatatgcaaatctgcatagctatacagaaaagttctttgttgtttattctaattttaagcttaagcgtgttttctgtatttttatttggtaaatctgccatatctaccataaaattatcataaaatgtgaaataacatgttatagacctaagaagacagaayggaacaaaattcataaaagccatatgatttggccagaatgtaaaagaaaattgcttcctaaataatatataaaaatataaatcgagatgtacatgtgagcttttgtttgttttaagtaaaaatattgtttgagttctgttttgttgacaaggacttagaccagacaacctgcctgggcaaggttaccatgaaagtgagatcacacgtgacaaagtttaaagcccatctgttcctcgcctgctgtttttcaggagttaaaa

SEQ ID NO: 272828 - DNA, 553 bp, Homo sapiens
tgcaaactacaacagaaatgaaacccaaaaacattagggtaagcgaaaggaaccagacccaaaagaccacataattcatgatcctggctattagaaactctgataataggctcatctatagagacataaaattgattgttgtctagatctgacatggcaaakgtgaatgcaagtaggatgcattttcctcttaagggatacaaatattctaaacttagatggtaattaagctcacatggctctataaatataccaaatagcctggagttgtacttaaaatatgtgattatattatataaaatataccccagtaaagcattttaaaaaattaacaggtcaacatacactaaggttgtttaagattttgagaaacccagggcacagattgtaaaaatgaaatctatttcttgtccatttcaaagcataataaagaaaatggaggcagcaagctaacacgcaaaggtttggttagtgatgcaggtgtattaatgggcaggaaccatgtgattcgtttaaccaggtcagaaaagcaaaggaaatgatcgtaatttat

SEQ ID NO: 272829 - DNA, 553 bp, Homo sapiens
tgcaaactacaacagaaatgaaacccaaaaacattagggtaagcgaaaggaaccagacccaaaagaccacataattcatgatcctggctattagaaactctgataataggctcatctatagagacataaaattgattgttgtctagatctgacatggcaaatgtgaatgcaagtaggatgcattttcctcttaagggatacaaatattctaaacttagatggtaattaagctcrcatggctctataaatataccaaatagcctggagttgtacttaaaatatgtgattatattatataaaatataccccagtaaagcattttaaaaaattaacaggtcaacatacactaaggttgtttaagattttgagaaacccagggcacagattgtaaaaatgaaatctatttcttgtccatttcaaagcataataaagaaaatggaggcagcaagctaacacgcaaaggtttggttagtgatgcaggtgtattaatgggcaggaaccatgtgattcgtttaaccaggtcagaaaagcaaaggaaatgatcgtaatttat

SEQ ID NO: 272830 - DNA, 587 bp, Homo sapiens
cgaacgttggagcttctaactcatcaggytaatttccaaacacatgcaacactcccaatggggaggggccagggcacaggaatctgtggctatttaacttcatatctcaaggttcctataaaaacagatcttcagataaaatggggaggaaaggaccagcaaaggcaactatacaaagggtgacttaggttgaagctataacttctccatagtccagagtccttaagaccttaacagtggccaattatttcaaaggccaaatgtttgtcccttaaaaagggactgaaactggcagatagcttctaaaaagctataaagatatttattgtactgtgtcattctaatagtacacttgtaagaggtttgccaaaaaacaatcagaaaaatgcttttcagtttatccaggaggttattacaacaataacacatcaagacctacccatgaatgccaaaaaatataaactgttatactaaagctggatagagagaagtctgtggtcttatgcctatttcctttatctgcacgatgaaacctataaagatattgtttacagggttaacttggagagcaaatgaggtatggaaat

SEQ ID NO: 272831 - DNA, 637 bp, Homo sapiens
aagtattaagacattgcttgctttttcactgttcaacacttgtaatgattgcataaaagcaaaagtgggtaaaacttcttgtttctcagtaagaataagggctgtggtaccaaattatactagtattcattacactcttcactcccccttgcagtttttattaaaatatcctgcttcacttaagaatatccttgatgaaacagtaaaaattaatggtgttattaagtcctgaactctcttttaagtattctaagtagtggtgcaggaagtcagggaccccgaacagagggaccagctggagccaaggcagaagaacataaactgtgaagatttcatggacatttatcagttcccaaaattaatacttttataatttcttatgcctgtcttttctgcaatctctgaacataaattgtaaagatttcatggacatttatcacttctctagtaatactcttataatttcttatgcctgtctttactttaatctcttaatcccattatctccrtaagctgacaatgtacatcacctcaggaccactattgtacaaattgactgtaaacgtgtgtttgaacaatatgaaatcagtgcaccttgaaaaagaacagaataacaacgatttaagggaacaaggga

SEQ ID NO: 272832 - DNA, 637 bp, Homo sapiens
aagtattaagacattgcttgctttttcactgttcaacacttgtaatgattgcataaaagcaaaagtgggtaaaacttcttgtttctcagtaagaataagggctgtggtaccaaattatactagtattcattacactcttcactcccccttgcagtttttattaaaatatcctgcttcacttaagaatatccttgatgaaacagtaaaaattaatggtgttattaagtcctgaactctcttttaagtattctaagtagtggtgcaggaagtcagggaccccgaacagagggaccagctggagccaaggcagaagaacataaactgtgaagatttcatggacatttatcagttcccaaaattaatacttttataatttcttatgcctgtcttttctgcaatctctgaacataaattgtaaagatttcatggacatttatcacttctctagtaatactcttataatttcttatgcctgtctttactttaatctcttaatcccattatctccgtaagctgacaatgtacatcacctcaggaccactattgtacaaattgactgtaaacgtgtgtttgaacartatgaaatcagtgcaccttgaaaaagaacagaataacaacgatttaagggaacaaggga

SEQ ID NO: 272833 - DNA, 589 bp, Homo sapiens
ttggtggtgtaaggtaggcctcggagtggttttacacactaggtagtagatgggtagtgttggatgagagcccaaaatagactctttatatcattctttaggatttacaacacattttcatgtacgtctcatgtatcaccctgtctctacaaaaaaaaaagggttaaaaattagccaggtatggtggcttgcacccatagtctcagctgcaagaggatattttgagcccaggagtttgargcttcagtgagctatgctggctccatcgcaccattgcatcactccagcctgggcaacagagtgagaccctgtctctttaaaaaattgtttttttgcccaaaacagctctttattttaacatatttgctatattgagccggtgtctgacagtaattgaccacagcatcacttgctgcttgagactttccctgaaatgcgctggtaatagcagcatagaggagggtgggtatatttgataagtagaaggaggagggcgtgtatatgattcatctaaaagtggcatcagtttatttaggtgcaagttctaaaatgaagtcccagacacagcctggttttattccacatacgt

SEQ ID NO: 272834 - DNA, 589 bp, Homo sapiens
ttggtggtgtaaggtaggcctcggagtggttttacacactaggtagtagatgggtagtgttggatgagagcccaaaatagactctttatatcattctttaggatttacaacacattttcatgtacgtctcatgtatcaccctgtctctacaaaaaaaaaagggttaaaaattagccaggtatggtggcttgcacccatagtctcagctgcaagaggatattttgagcccaggagtttgaggcttcagtgagctatgctggctccatcgcaccattgcatcactccagcctgggcaacagagtgagaccctgtctctttaaaaaattgtttttttgcccaaaacagctctttattttaacatatttgctatattgagccggtgtctgacagtaattgaccacagcatcacttgctgcttgagactttccctgaaatgcgctggtaatagcagcatagaggagggtgggtatatttgataagtagaaggaggagggcgtgtrtatgattcatctaaaagtggcatcagtttatttaggtgcaagttctaaaatgaagtcccagacacagcctggttttattccacatacgt

SEQ ID NO: 272835 - DNA, 479 bp, Homo sapiens
aatttaatagcttggttaaataattttattgtctgtcatggtttctatgggtcagaaatttgagagcaacttggctgtagagttatggcttgagatctctcatgagttttaaatcaggtattatggaccccctccacaggtctgcttgactatcctgcttgaattttccacagaactagggacccaacactcttagtcaattttttgaaatagttttagtaggaatcttactaggtcttctttatacaactggtaaaatttgattatgaattcatctggtcttgggctttttctagttggtaggctttttattactgattcaatatcacaactcattgtaagtctgttaaggaattcaatttcttcctagttcaatcttgggaggttgtcagtttgcaggaaatttattcaattcttctataytttctagtttgtgtttgcatagagtgtgtgtgtgtgtgtgtgtgtgtgtgtgtgtg

SEQ ID NO: 272836 - DNA, 559 bp, Homo sapiens
gaggctgagccctgctgcccctggctggcctgcgagagtcaggtttcatcggctgagagcaggaatccccataagcacctctcagagaatgtgggactcaggaggcatgtttcatgggggctggctacgcaagacacttgcacttgagtccctaccttggaaaaagaaaaactctgtccctagtaaaggaatggcagcaacatagaccctatgggagaaggggtcttctttaggccacggagtaacttgctgtgatgctgaagttaggcctggttagggctgggctgcctatttcygctacagagaaggatgaacctgcctctgttcctctctccatggagacatctgttcccttgggtggcttcctggatccttcatagaatctcctttcctctagccccatttttcagcccagcttatagacagttctattccttgcccagcacgtggctatagacagggctgagagaggaaagctgaagagattgaaaatgcaaacaaaacaaaacagaagaacccaccttcacttctttactgaacatccgcacacagcacacgc

SEQ ID NO: 272837 - DNA, 444 bp, Homo sapiens
ttccccattccttctgtgaagggctttggtttcatktaaaaagtagaacactctaaaaaacttggctcaagactttttggctctcataaagcaacattaaaacaaaatggccccaggtcataaagattgcattgtactgagaaatgacctcgcacagtggtcaacctcagtcccagacaagcttgcaaagcagaaaatcttattttccacttttcctgaccagcttttctggagccctgagctctctttcttatgaatggggacactgagctaagaactgagatttcctgatgcctagataggatctttactccttacccatatttttgacacctggtatctgacctttgcaggccaaagggccagtttctgttgagttctgataaagtcagtccacaagtgctatttgctggtcatctcatctgtgactatcttctgctgggc

SEQ ID NO: 272838 - DNA, 502 bp, Homo sapiens
gggcatttatcccagagaaatgaagacttatgttcacacaaaaatcagtatgcaaatgttgatagcagctttattcgtaatagcgaaaacctgaaacaactcagatgtcctagaatggatggttaaacaaattgtggtatctccatattataaaatacttcctggcaataagaaagaacaaactattgatgtacaaacaacctggatgaattgcctgagatttatgctgagtggaaaaaaaaagaaacagtctcaaaaggttacatgctgtatgattccattcatataacattcttgaaatgatagttacaaaaaagcagaacagattagtggctcccaagagtttagcagggactgaggagtggaaggraaggggctgtggctataaaagggtaacatgaaggatccttgtggtgatagaggtattctaccttttgactgtgtcaatgccaatgtccaggatgtgatattgtactatagttttgcaagatgttaccattag

SEQ ID NO: 272839 - DNA, 567 bp, Homo sapiens
taaagaacatataatctccaaaaagagagagagagaggaaggagggagagagaaagagaatcagattgacaccagactttttataaatgacatgaagaccatgttaatggaaataaggtaataggctcaattcttacattaaagcatcagcttcttggcttgcttgtatctctaagtatgtccttgtcccccaacattgcraatggcctaagaccaacacgttcctatttctggaacagaactcaaagcatgtctgccagggtccccctcagcaagtctgaagtatgcccactgcacttagtgggtatctccaaacctgcctgaaaacctctgctctgaggctttccatatgctgctctctccatcaggaatatgctctctattccttcttcaagtctcattttagaggtcttttcctccaggaaggcctcctggaacctccaagcctgtgtcttgtgttccccctctgtgttttcataacaccccatgttcccctatggtgggtctttatcccctcctgagttataatcatctgtttacttacttgtttctctaacaagcttattt

SEQ ID NO: 272840 - DNA, 513 bp, Homo sapiens
tacacaatgaactgagtaactggagttcctagaggggcctaaggcataaagcagagatgccttggagtttaagagccctgacaagatgtggcatagctgcctctccactcaccttggcttgagaatgacagcrcgtgggaaaatctgagagctgggatgatgttacagttgatttctttcctgtctctatgaccttgtaatgccaaggagccactggatgacaattatttacttagagcttaaatacgtttaaattcagaaaattaagcacagctctcttctaggtgcttcagcaaaattttaaacttttgtgaagcataatgaaatagattctgctaatctaaaggtttgtggctgcatcagacacccaagtttggtaatgagtgaggcctctggagctagaaagtcacagtcatctttgagggaagaactttgtggaatttggaggtatatgtattagtgtttacaggtaagctagccagtgatgactatgatgatttttctttccatctg

SEQ ID NO: 272841 - DNA, 562 bp, Homo sapiens
ccacttgtcagcttttgcaagatgaagacactatctaatcaacaggaaagttaactttgtggccacaaggtcacaaaarctctctgcacctcaatgtttctctgtaaggtgaagggctaaaccagctgttccccaaaaatcattccaggatgctttgtgctactatgcttctaattttcttttgagaagattgtcatttaatcataagctattcttacggggaggtattcataatacttcccagtccatctcattgtgggggctggaaatttctgcccttgctacgatgctgtcaaaattgaaccccagagctcagctcccaagaaggttaacataatggttttgctactcatcgtaacaacacctcacatcatgccttcagatcactccccagcatcattcttcaaattcaaacgcgaaccagaagtgacaaatgattcttgtaatgcgctctttgacacaaatcatttctgattgctcgggaccccagacaaccttgagcatgcagaatcaagctgagagggagaagtcttagaaaatgaacagcttcaacttcttgccg

SEQ ID NO: 272842 - DNA, 582 bp, Homo sapiens
gagaaacagtaggttttgaaatggttacacagcaagaagtaactaaaatggtaacactcaaagacacacacacagcagtgatatggttctctgggactaatcaattcacagaaaatgctcatcaaatttggggtaaggggacaggttgcatcccagtgctggggctcaggagaatgacacaagtgttaaagccaaacaggcttctaggtgagcctaacatgcacccttcctttaagtacagcggtctgagaataaaggcttcagagcagagcctcacaggtgcccaggactcaggccaggagccagaagcacaaagcttgaagtatcaagactcattcctgatttctcagagtcctgatgggctcaaggctagatgggatagagtcaaaggcaatagtctttactaggactgaagaaaggcaggattcttggaggagaaagaccacatttataaaaagataaatttaaggacacaaaagtcaaamacccaaagggtgagtcagatgctgacagctttagtagttcagagaaggggtagatcacccaggagacagctagtgcaagagcaaaggggacagtcac

SEQ ID NO: 272843 - DNA, 647 bp, Homo sapiens
catgtatggatggatggatggacggatggatagatggatggatgatatgcaccaaaaagaagaggcagacctgtgctttaagctaaagatatgaatgagtggatgaaagaataaatagctgggtgtgtgcatggatggatggatggatggatggatgaataagtgcacacgaaggaagagcctgaagaagtcaattaagtcttctagtgggccgttctgaygcttaacatccatcagtgctgctgccctccactgcctcactccctgtgggcccatcccatcagcccattattgcaggctcacctgagtgctggtgaaatggttcaggaaagtgtcatgagagtgacaggggctcattgatcacagacagtctccagctctttcaactcttccagtgaagcacagatatacttgagctgcaagtccctgggaacagatcacaacagcatggaatgaaggctacacgacaggggactcagacatgtcaccattctacatgccttgcaggccccacctccagggcttttgcaaagggcgccccaaccaccttgccttattatcacggcattgaccacagtgccaggcacacagtagatgctcaatgaaaatttgatgtgttgaaatgaaacttcctgggtgagacaaac

SEQ ID NO: 272844 - DNA, 620 bp, Homo sapiens
cggttcacacactgtttaaagtatccagttttgagcagaggcactggaggaatgaggagagaaaatcttattttccttttgtatatctattttatttgaaggttctaccacatattactgttattttttaaatgaaagcaggggttatccgggaaatcgtagtccatgttttttgttggttttctatctctatatactaaaacaacatattcgcacactagtgactgtcattttgttttaaaaaataacatatactgctaccccaaggctctctggtaattcctctccctccttggagccaagcaccagaaatgtctgcactagctcctcctgctcctgcctgcattgtctgctcagwtggtcccattaactcttatagcctgtgaatcaatgagtgagtccaaatttggaacagaagagataatggacttacccagggagccagtacaacagcaatgtatttgtcaagatactctggaccatgctgtaataacaaataaatcccaaattctagtgacttgctcatgacacaatctgatgcagctgtgctcctctcgtccatatggtgactcagggattgaggctgcacccagcaattagtcttccctcttgttgcttca

SEQ ID NO: 272845 - DNA, 620 bp, Homo sapiens
cggttcacacactgtttaaagtatccagttttgagcagaggcactggaggaatgaggagagaaaatcttattttccttttgtatatctattttatttgaaggttctaccacatattactgttattttttaaatgaaagcaggggttatccgggaaatcgtagtccatgttttttgttggttttctatctctatatactaaaacaacatattcgcacactagtgactgtcattttgttttaaaaaataacatatactgctaccccaaggctctctggtaattcctctccctccttggagccaagcaccagaaatgtctgcactagctcctcctgctcctgcctgcattgtctgctcagatggtcccattaactcttatagcctgtgaatcaatgartgagtccaaatttggaacagaagagataatggacttacccagggagccagtacaacagcaatgtatttgtcaagatactctggaccatgctgtaataacaaataaatcccaaattctagtgacttgctcatgacacaatctgatgcagctgtgctcctctcgtccatatggtgactcagggattgaggctgcacccagcaattagtcttccctcttgttgcttca

SEQ ID NO: 272846 - DNA, 620 bp, Homo sapiens
cggttcacacactgtttaaagtatccagttttgagcagaggcactggaggaatgaggagagaaaatcttattttccttttgtatatctattttatttgaaggttctaccacatattactgttattttttaaatgaaagcaggggttatccgggaaatcgtagtccatgttttttgttggttttctatctctatatactaaaacaacatattcgcacactagtgactgtcattttgttttaaaaaataacatatactgctaccccaaggctctctggtaattcctctccctccttggagccaagcaccagaaatgtctgcactagctcctcctgctcctgcctgcattgtctgctcagatggtcccattaactcttatagcctgtgaatcaatgagtgagtccaaatttggaacagaagagawaatggacttacccagggagccagtacaacagcaatgtatttgtcaagatactctggaccatgctgtaataacaaataaatcccaaattctagtgacttgctcatgacacaatctgatgcagctgtgctcctctcgtccatatggtgactcagggattgaggctgcacccagcaattagtcttccctcttgttgcttca

SEQ ID NO: 272847 - DNA, 620 bp, Homo sapiens
cggttcacacactgtttaaagtatccagttttgagcagaggcactggaggaatgaggagagaaaatcttattttccttttgtatatctattttatttgaaggttctaccacatattactgttattttttaaatgaaagcaggggttatccgggaaatcgtagtccatgttttttgttggttttctatctctatatactaaaacaacatattcgcacactagtgactgtcattttgttttaaaaaataacatatactgctaccccaaggctctctggtaattcctctccctccttggagccaagcaccagaaatgtctgcactagctcctcctgctcctgcctgcattgtctgctcagatggtcccattaactcttatagcctgtgaatcaatgagtgagtccaaatttggaacagaagagataatggacttacccagggagccagtacaacagcaatgtatttgtcaagatactctggaccatgctgtaataacaaataaatcccaaattctagtgacttgctcatgacacaatctgatgcagctgtgctcctctcstccatatggtgactcagggattgaggctgcacccagcaattagtcttccctcttgttgcttca

SEQ ID NO: 272848 - DNA, 616 bp, Homo sapiens
gatgtgaagaattccaggaagaagaaccaacatgtgtgaaggaatgtccttggtgtgctcgaggaactggagggaggcccaaatgactgtgactcggagggcaagcgggagggcagtcacgatgagtttagacaggctgcaggagtggagcgggagcaggcagggattctgtggtttatcccaagtgcattgggaagcygtcagtgtctcttaagcagaggattgacatgacacagttttgccttgtacaaagataaatttggcatccctgaggaaaatggattggagggaactaagagggaaagcttttaaaattctgttgtagtagttcaggtgggagatgatggttaagtcacaacagcgtccaaagagatagggagaagtaagtacatagagtgaagacatgtctttgtggcaggatgatatttgtgaagagcttgcctgatgtgcccccacctccttcacacccactgccccatgattctcactatcagggcagacaaaaagtaagatacctgttgctttagcagaattgccagggtagaactagaggataatgacatcatttcctaggtctttgggctaaagagccaaagtccaaatatacattaagaag

SEQ ID NO: 272849 - DNA, 616 bp, Homo sapiens
gatgtgaagaattccaggaagaagaaccaacatgtgtgaaggaatgtccttggtgtgctcgaggaactggagggaggcccaaatgactgtgactcggagggcaagcgggagggcagtcacgatgagtttagacaggctgcaggagtggagcgggagcaggcagggattctgtggtttatcccaagtgcattgggaagccgtcagtgtctcttaagcagaggattgacatgacacagttttgccttgtacaaagataaatttggcatccctgaggaaaatggattggagggaactaagagggaaagcttttaaaattctgttgtagtagttcaggtgggagatgatggttaagtcacaacagcgtccaaagagatagggagaagtaagtacatagagtgaagacatgtctttgtggcaggatgatatttgtgaagagcttgcctgatgtgcccccacctccttcacacccactgccccatgattctcactatcwgggcagacaaaaagtaagatacctgttgctttagcagaattgccagggtagaactagaggataatgacatcatttcctaggtctttgggctaaagagccaaagtccaaatatacattaagaag

SEQ ID NO: 272850 - DNA, 581 bp, Homo sapiens
gagatgagacgggtcttccttcctgggctccccgctgcagcagagacccgcttctgcactgcaacctgyagccagggctcttgccatgccggcagacacagaaggtatcacttgcccaacgtaagattataaatatggattagatctgtgcaagttacagactcaattatgagaacatgcagctaaatcagcctccaactgtcagagtgtcaggatttctgctggagattcaaagtctacctgggttcctcagaacttgagagagagagagagagagagagagaatgaagtaatatatgtgtgtagggcaattatagaagtagaacaaccactgacccaggagatatgagatgaaggttctaggctggggtctgattctaactagctttgtgactttggaaacatcctaattcctccttctgagcctcattataccactcagggaaagaacgagttttaggggggagatttttcacactgaagccccacctttgaaaagcctgacaccaaaggcttaggtgggtctgacatgggcctcccttccaccctgagacccctccatcctctccttttagcggtct

SEQ ID NO: 272851 - DNA, 581 bp, Homo sapiens
gagatgagacgggtcttccttcctgggctccccgctgcagcagagacccgcttctgcactgcaacctgcagccagggctcttgccatgccggcagacacagaaggtatcacttgccmaacgtaagattataaatatggattagatctgtgcaagttacagactcaattatgagaacatgcagctaaatcagcctccaactgtcagagtgtcaggatttctgctggagattcaaagtctacctgggttcctcagaacttgagagagagagagagagagagagagaatgaagtaatatatgtgtgtagggcaattatagaagtagaacaaccactgacccaggagatatgagatgaaggttctaggctggggtctgattctaactagctttgtgactttggaaacatcctaattcctccttctgagcctcattataccactcagggaaagaacgagttttaggggggagatttttcacactgaagccccacctttgaaaagcctgacaccaaaggcttaggtgggtctgacatgggcctcccttccaccctgagacccctccatcctctccttttagcggtct

SEQ ID NO: 272852 - DNA, 578 bp, Homo sapiens
ccctgtcagtttggaccaaaagttcctggattctgttgtgctgtcatttgtgttccatccctgtgctccacaactgtttgccatgccaccgttgtgcacattaacctgagttctygtctagcttcaaagggaatggtaagggagtttccagcggaaaccctcatgagcacctaaacgtgggcaaagcttacagggcacccaaggagctagaccaggctgacacttcatcaccacctgctctccatgtccactccacctcttccctaccttctctcctttctcctttcaacagaatccaggaagttcctataggaggaagcctcagaatacaaacaaccaaagattttggagtcaggccaatctggattctaattctgaatggttcttatcactaggtattttttgcatgcctgggggccccttcctgtctggctgtgggcaatgtccacctctagtccatttccttgacacagcctccagggccaggctccctttcagcctgcagcagagactctgaccagataactagactacattttctaggccgccttgcagctaggtagggccatgtgacagtt

SEQ ID NO: 272853 - DNA, 547 bp, Homo sapiens
gtttggttggtaattatgtcactgatggattagtgactgggaaaatgatttaacctttccatccgcatatgtaaaatgttagtttcatgcctacaaaaatctttgacatactaagaatgtcaaaggtatttgccatgtatactattatttaaaatggatgcagtagagagtatatttactcactgacagctatcttgatcacacccagtagcacatctgagatatttttctcttatgtgtttttcagatcaataatgaatatttgagacatacttatttaaaaaaaagccacctgagttttctcataggaataagccctaataatttcagtgtataaatgcaatctataaagattttttctcttatgctttctataaaacaaagaaacacaaaaaagagaaataatgataactaaatttgttgttcatttacaatagacaatgttcacagtcataaaaagaaggacaggagtggaaatctttttatartaagcttctaccacgaaccagatggttatttacattaccttttttcttaatgtttagga

SEQ ID NO: 272854 - DNA, 560 bp, Homo sapiens
gccatggcagtggaagaggagtttttggttgcctcgcagagcccctccccagggaaacacagaaccactaacagtgggaatggtcagccagggttggggtggctactctgcagtcctaagctgggggtcctgcttggtgaagagtcagggatggaggcttacagggaagagacactgggctcctctccatgtaatggatgtggtgtgctggaggttccagcatagtgacaaggctctctgttccttcgccagccccagagcagtaataaaagtactacagctacaattgcaaaggggttgtgggatgcctctgtgatttcctcctcagagaaatgcagagcggtcattgactgaagtgttcagcagggagtagggtgattgtgttgaggtcccaggtggagagggactgcctagtgaagagtagcagaggtggggacccatatggaaaacagtctggccactttttcataaagcacctkcactgtgatgggggttcgcatttgtccgcaactgcgatgctaccttccaagcatagaggagcaacagctgtgggcagcaaa

SEQ ID NO: 272855 - DNA, 560 bp, Homo sapiens
gccatggcagtggaagaggagtttttggttgcctcgcagagcccctccccagggaaacacagaaccactaacagtgggaatggtcagccagggttggggtggctactctgcagtcctaagctgggggtcctgcttggtgaagagtcagggatggaggcttacagggaagagacactgggctcctctccatgtaatggatgtggtgtgctggaggttccagcatagtgacaaggctctctgttccttcgccagccccagagcagtaataaaagtactacagctacaattgcaaaggggttgtgggatgcctctgtgatttcctcctcagagaaatgcagagcggtcattgactgaagtgttcagcagggagtagggtgattgtgttgaggtcccaggtggagagggactgcctagtgaagagtagcagaggtggggacccatatggaaaacagtctggccactttttcataaagcaccttcactgtgatgggggttcgcattygtccgcaactgcgatgctaccttccaagcatagaggagcaacagctgtgggcagcaaa

SEQ ID NO: 272856 - DNA, 522 bp, Homo sapiens
acaattaagacttgggaaagaaaacaacaacagacactgggacccctttgtcatgaacttgtcccataaaaatagttatttgcgcttctccctccccttactccaataatcccatcactggattctttgttaccccatctctttgaccaacaggcagtttgtagaaccataatgaagactctgcatccctgatgatcattttttcagattgcaatgtgactagaaaaggaaaaaaatgaaaggacccccttctatttttgcacacacatataaatgctgttcattacggttacaaaaattacagtcactttcttagattgatttattgatrtaaatgacatgatatcactgaaaaaatattgccaatttacatataacatcctttataaataccattggttctcagtgaactcctcctgacctcctggtctgagactgtctctatgtgatgtacataattctctcaacactgatccattacttcttctcagtgttgggggttaggccaatagtgtaaagtca

SEQ ID NO: 272857 - DNA, 533 bp, Homo sapiens
tagctatcatttattgagtctataccaggtaccagccagtattctaggcacttcactttgttttaataaaacaacaactctaagaggtaaggactattgagatctccattgtaaaagtgatgcaactaagggatagagagctttagtaaatggcccaaagtctcataaaaagtggtgaacctgcagttttagctgaagcagtgtggctttagtgtccacattattcaccacatgctacactttctcttcaaggttgccttggatcttaaataggtacatactgagtgagaaacttacagtcactatttactcactgtaatcatgaaaccccatgtcccactgactaccatttttcatgtaagagtcatgagcytggaaatttttatttaattataaatttataaaaaatgaaaaaaaatcatcacaagaataccataaaggagaggtgcactaatggttttgtagatagttgactaggaaggattctgaatttctcaaatttaatcccattgttttaaagtgagcaaactgag

SEQ ID NO: 272858 - DNA, 405 bp, Homo sapiens
tgtgccattttgtaaccccatcggaaatgtgcaggattagtgtgggagtgacccaattttccaggtgccgtctgtcacccgtttctttgactaggaaagggaactgcctgacaccatgtgcttcccgagtgaggcaatgtttcaccttgctttggctcccacaaggtgcactgcacccactgtcctgcgcacactgtctggcgttccctagttggatgaacccagtaactcagaaggaaaggcagaaatcagccgtcttgtacatcgctcacactgggagctgtagaayggagctgtacctattcagccatcttggctgccaggtcctgatttcctgaaattttcttttgattgagcagctttgaaacactctttgtagtatctgcaaatggatatttggaacac

SEQ ID NO: 272859 - DNA, 640 bp, Homo sapiens
agctaaagggcattcagggcataaaatatttcactttcacataggagattggattaaaacaggctggtcttatatttgactctcaatttttaagttttcaataaattttcaatgtctgtttttagggttttgttcttcctatagagaatattaatcatccttatactttattaaatgttgtagtcacagttctcctgtccttggaacttcaaatttcttggtaaagtaaactcttggtagaacaacttttcyctcaagaattctaatttctattaattacatgtatctatatttttaaaaaattatttttgcagttgattttactctgcagcctgaaagggacaatagtcatatcttcctgtatggagatttgagaagcatgaatattggatgtgaccctcaagatgatcccgatatcactgcaaaatctgaatgttttcttgtatggggggctcagactttcacatctggcaaatattattgggaggttcacgtgggggactcttggaattgggcttttggtgtctgtaacaattattggaaagagaagagacagaatgacaagatagatggagaggagggactctttcttcttgaatgtgttaaggaggacactcactgcagtctctttaccacctcc

SEQ ID NO: 272860 - DNA, 585 bp, Homo sapiens
gtgccttctgggggacagagcagaatttggagggaaacttaaagttgaggatacagcagatactgagaaaagctgctgaaccagtccaatccaaaacacaaagtaatgctagrtgagcaggaaacttatggtgcactggaattaactctaagaacaagtctcaaaaccaaatcaactcctgactagattgattcaaccttctccctcaaaacatacacatacagcctagtaaaagggaacacatgcaggttttgctttctatattagttctactctacatagttcactttctgagtaaaacttaccagacctatactgaaacagaaaaggtaaataaaggacacactgttaagagaaaaagcaattaataaagccagattcaaatgtggcagaggtgttggaattatctttcaagtagatctcatgggtactgttctagaagcccttagtagggtataaagcccccttttttaaattatacttatgtgacaagatcttccttttatcctcttatgtaaaaggtatttccaatccatattcatctctgtattggcagtcacattttttgacaatttacaaatgtta

SEQ ID NO: 272861 - DNA, 594 bp, Homo sapiens
aaagaagaaagactggttgaaagaagaaatatargaataaatgatatgaatattaaacatagttaacattaataaatacgaaaccaagagaaacgtggtggatttaaattcaatacataattaattttatctttttaaaggagcaactttctcctatttaaaattagaaaacaatggtaagagtcttgtaagagaaacatcttaagtaagaggataaaaaggtaaaaatatattaatagactaaactgcataaactatgaccaaaaggacactatttccatgctaatatcagacaaaactggacttcaaggcaacaaatattgccagaaataaatttttgtaatggcaaaaggttagtaacatgaagataaaattataaattggtatgcaccccaaagcacaactttataagttatttttttaaaaaatagatggacctaaaagtagaaataggcaaatcagcaataatacaggaagattttagcacaatttgaacagctagaaaatacacacaaaaaatttataaagatatgtaatatttaaacaaaaccattaataaatttgacccattgacataagagattatcacgtaac

SEQ ID NO: 272862 - DNA, 519 bp, Homo sapiens
accaagtgggaggtaattgaatcatggatgtggtttccccatgctgttctcatgattgtgagtaaattctcataagatttgatggttttataagtgtctggtatttctcctgcttgcacaaattgtctctcctcctgccctgtgaagagacatgattgcaagttacctgaggccttcycaataatgtggaactgtgagttaattaaacctcttttctttataaattaatgactcttgggtaattccttctagcaatgtgagtacagattaatacatatgcatttctccttttaaaacaataaatatatattgtgtctatatttcactctctaatttggtaatacgtatggattgcagacaatactatgaactatggattttttggcaatttctacattaatttttgtatttgtacatgattatttttgaataattttttattattggagcaaatacattcagattctgtgctgttgtaggtatcatacgacaaacacttttgtgtcattcagagaagtg

SEQ ID NO: 272863 - DNA, 519 bp, Homo sapiens
accaagtgggaggtaattgaatcatggatgtggtttccccatgctgttctcatgattgtgagtaaattctcataagatttgatggttttataagtgtctggtatttctcctgcttgcacaaattgtctctcctcctgccctgtgaagagacatgattgcaagttacctgaggccttcccaataatgtggaactgtgagttaattaaacctcttttctttataaattaatgactcttgggtaattccttctagcaatgtgagtacagattaatacatatgcatttctccttttaaaacaataaatatatattgtgtctatatttcactctctaatttggtaatacgtatggattgcagacaatactatgaactatggattttttggcaatttctacattaatttttgtatttgtacatsattatttttgaataattttttattattggagcaaatacattcagattctgtgctgttgtaggtatcatacgacaaacacttttgtgtcattcagagaagtg

SEQ ID NO: 272864 - DNA, 567 bp, Homo sapiens
ggtgacaatcaaaaaggagtgctgggttggagacctaaggtgagtaattttaycatctcagatcacttggaaaaaagcagcgagtccaaaagaagctggtaataagctttctctctgctaagccctaatcttctgcatgaaatatgtggaggcagaagagagacagtttattatagtctacgtggcatagagtgaaggaataagagaatatttctgataagtattttcaaaatttggagaatcattcctatccaaatcgttcatttaagggactaaatcacaaataagatgtttcttgccacataagcctcagctagccaggctctaaaaaggacaacactggacacctcgacagtggtaaaaagcagggtttactcactcttgagtaactaagaactggtgctaaccttaggcagcagcttatctatttggttgaggttcagctttgtttcattgaacaaatctcttgggttattctcagttgtgccagtcatttaatttgttctgaattaaatgataagaataaatatggcttagagtgcaaacagcattcccagatacattaca

SEQ ID NO: 272865 - DNA, 322 bp, Homo sapiens
taagaactgttgttttggggattatggtttactggggattgctgggggtttttaattttttaaatggatatgtatcatgaattgccaaaaaaaaaattagttaatgggtmaacataaaaagaagaaatcattttgtgaatacaagtaaaattacaaacaaaaagaagttcagtttaattgcaatatgaaaagctacaggttaagtttaaaatccagcttcagccccaagctagcatggaggaccacagagagactgtgtaaaagattttacagaaatctgctttaaattgtcacttatgacatgtacttacggatttttatc

SEQ ID NO: 272866 - DNA, 322 bp, Homo sapiens
taagaactgttgttttggggattatggtttactggggattgctgggggtttttaattttttaaatggatatgtatcatgaattgccaaaaaaaaaattagttaatgggtcaacataaaaagaagaaatcattttgygaatacaagtaaaattacaaacaaaaagaagttcagtttaattgcaatatgaaaagctacaggttaagtttaaaatccagcttcagccccaagctagcatggaggaccacagagagactgtgtaaaagattttacagaaatctgctttaaattgtcacttatgacatgtacttacggatttttatc

SEQ ID NO: 272867 - DNA, 571 bp, Homo sapiens
ttacaattgtggtacaattgccttcgtataccatacaggtttgtagcctaggaacaatatgctatattatataccataggtgtgtagtaggctataccatctrggtttgtgtaagtataccctatgatgttcaaacaataacgagactgtctaatgcgtccctcagatcatatatctgtcctcactctacacatgacactgtacaggagaggaagtccactaggggaatttgttcccttgattatgaagtctgagaagttgaacataggctgtcattaatgttgtgtcctggagataccgatttcctggctgagttagaatcagcttcaagagaaggagaggaaactgctttctctctgccctttatcttcagtctgagctaccagctgattggatagtgtccacccacattgagggctgctgttcctcactcagctcaccaacttacatgtctctctggaaacaccttcacagactcacccagaaataatgctttaccaattctccatgtattatttagtccagtcaagtcaacacttaaaattaaccataataccatagtaatataact

SEQ ID NO: 272868 - DNA, 571 bp, Homo sapiens
ttacaattgtggtacaattgccttcgtataccatacaggtttgtagcctaggaacaatatgctatattatataccataggtgtgtagtaggctataccatctaggtttgtgtaagtataccctatgatgttcaaacaataacgagactgtctaatgcgtccctcagatcatatayctgtcctcactctacacatgacactgtacaggagaggaagtccactaggggaatttgttcccttgattatgaagtctgagaagttgaacataggctgtcattaatgttgtgtcctggagataccgatttcctggctgagttagaatcagcttcaagagaaggagaggaaactgctttctctctgccctttatcttcagtctgagctaccagctgattggatagtgtccacccacattgagggctgctgttcctcactcagctcaccaacttacatgtctctctggaaacaccttcacagactcacccagaaataatgctttaccaattctccatgtattatttagtccagtcaagtcaacacttaaaattaaccataataccatagtaatataact

SEQ ID NO: 272869 - DNA, 571 bp, Homo sapiens
ttacaattgtggtacaattgccttcgtataccatacaggtttgtagcctaggaacaatatgctatattatataccataggtgtgtagtaggctataccatctaggtttgtgtaagtataccctatgatgttcaaacaataacgagactgtctaatgcgtccctcagatcatatatctgtcctcactctacacatgacactgtacaggagaggaagtccactaggggaatttgttcccttgattatgaagtctgagaagttgaacataggctgtcattaatgttgtgtcctggagataccgatwtcctggctgagttagaatcagcttcaagagaaggagaggaaactgctttctctctgccctttatcttcagtctgagctaccagctgattggatagtgtccacccacattgagggctgctgttcctcactcagctcaccaacttacatgtctctctggaaacaccttcacagactcacccagaaataatgctttaccaattctccatgtattatttagtccagtcaagtcaacacttaaaattaaccataataccatagtaatataact

SEQ ID NO: 272870 - DNA, 531 bp, Homo sapiens
taatttgcatttatttggggstttgaggaaccacaaagaagtccatgttgccaattagggtgagtttggaagagaataaatgaaaccttattagaatatgttatgctgggtgaaatgcattgagttgacaatgctagtctgggtcatgtcatcatttgtcatataatggttttacataacttgccccaattctccaaaatagaaataatggtttcttacctagtcaatataactcaatagtttgattcttaagcaagaactgtgttttctttctataaatgtggtgtgaaagagagaaatccatttttatataactatcttagaaaacattttatcattaatcaagtaaatgtaactgggcagaaacaactatgttgatattagtacagaaaaaaaggaaaggaataaaattttgtggaatctgagaattaacaagattgaggattaaaatattgggttttcagaatgctaagaggaatcagtgaaattcaagagaagatggataaaacatttctattttgactaattgtc

SEQ ID NO: 272871 - DNA, 584 bp, Homo sapiens
attcctttaagggcacatttatttattctagagaaactgtctccttgtggagtgcagtggtataatcatagctcactgcagccttgaattccaaggctcaagggatcctccttcttcagcctcccaagtagctaggactacaggctcaaatcatcccacctggctaatttttttaaaaacttttcatagagtcagggtatggctctgtagcccaggctgttctccaactcctgtcttcaagtgatcctctggtcttggacttccaaagtgcttgggagtacaggcataaaccacctcgtccagccttaaatgctgctttagtacatttataggatattsgaagagaagtccaacaggaaggtaaaacttttttttttgttttctaccactctaagagaaatcactgactaaccaaataactctactaatttgaggtctcttattgaatttacaaaactttgccaatctcgtgggtgaaatacgagttattattttaatgcttttctccacatggtgcatgatgttctgccatgactagaaatgcaatatagtaattaatttggggattataaacaagttttagg

SEQ ID NO: 272872 - DNA, 572 bp, Homo sapiens
ttttttgtcataccaaattttatcttttgaaaatgtcatgttcttagaaaactatgttaaatcattgtttttgtagaaaaatgttaacttagtagtttacattgaaggcytagtgatgcttttagtttttaaagtatagtatttttaattacttaaactatagagaatagtttaagtaccctgttttttataagtaaacatttaagttgctgaaagaattatcctattgaaatctagtttgatgatgtaagccagaaaaggcactaaaccttgcagcaagtattgtgtgaaaaaataacagaattgtttatagactacattattctcttgtattcttcagcgcatgtgtctctatcggtctatagcttcaacaatgccagaactctggaatcagttggaagtggtaatgtgaatgagacatgtggaatgtgcatcacagctggcttctagaaacagctcaaattctctctgcgcacgtcctcttccactgccagatttatttaaatagaataatcctgtttaaatttgaggtttagtaattctgcagttttcctcagcagtgcttaatcaga

SEQ ID NO: 272873 - DNA, 572 bp, Homo sapiens
ttttttgtcataccaaattttatcttttgaaaatgtcatgttcttagaaaactatgttaaatcattgtttttgtagaaaaatgttaacttagtagtttacattgaaggcttagtgatgcttttagtttttaaagtatagtatttttaattacttaaactatagagaatagtttaagtaccctgttttttataagtaaacatttaagttgctgaaagaattatcctattgaaatctagtttgatgatgtaagccagaaaaggcactaaaccttgcagcaagtattgtgtgaaaaaataacagaattgtttatagactacattattctcttgtattcttcagcgcrtgtgtctctatcggtctatagcttcaacaatgccagaactctggaatcagttggaagtggtaatgtgaatgagacatgtggaatgtgcatcacagctggcttctagaaacagctcaaattctctctgcgcacgtcctcttccactgccagatttatttaaatagaataatcctgtttaaatttgaggtttagtaattctgcagttttcctcagcagtgcttaatcaga

SEQ ID NO: 272874 - DNA, 531 bp, Homo sapiens
ctccccctttccacctcacacaagggcagagtttgggcaagagagaatgctagaaaccaaccatcccaatccctttactttttgggtgaagaatggaaagccagactggcaggaaagccaatgaagtcaaggtgaaatgtggaggtggtaaccaagatagaatagaagcccagggtccctgcaccaaggagtcgccattaggtctggttacctaccaagttccaaaccaataacaacactattgatagtaagaatagctccattattaaatttttatgatatgcttggtactggaaacattgaactattatcatcattttacagatggaaaattgaggtacagggaagggagtgttttccctaaggtcacatagctgttcactggcagggcagggatttgaagtcagattcgatgccaaagaccatggctcctcaagcccaccctgaatcctattacaaacacctctcccattgtgctttttttcctctgcattttcactgcaccamgcctttcctaggccttcttgtcag

SEQ ID NO: 272875 - DNA, 495 bp, Homo sapiens
ttgagggtatctttgccacactctcaccttacactgagctccaacagtccaacggccagcccctcagagtggttttgacccacagtgatctaagaaggtcagctgacaagggacagaaggaccttgaagccagtgtcaaggtccacagaggtgaagctttgtttctgctaaastcagcaaccatcaccatccacatccaacttgctcatcctagtccttctctccaccactgattttataaatcaaaatcactttggagttgatgctaagaaaaattattttttatattcagattttaatgtccagaagcccatttcaactatcaaattgtttatctctaactcacttcttctcacttcatgagagtttcttagtaaaattaatgttttcaggatgaactattttgctatggccttgagcagccactctgtgatagatgggctcagctgggatggttgtactgttgcttctgggtctcgctgggaaggtaaggtg

SEQ ID NO: 272876 - DNA, 495 bp, Homo sapiens
ttgagggtatctttgccacactctcaccttacactgagctccaacagtccaacggccagcccctcagagtggttttgacccacagtgatctaagaaggtcagctgacaagggacagaaggaccttgaagccagtgtcaaggtccacagaggtgaagctttgtttctgctaaactcagcaaccatcaccatccacatccaacttgctcatcctagtccttctctccaccactgattttataaatcaaaatcactttggagttgatgctaagaaaaattattttttatattcagattttaatgtccagaagcccatytcaactatcaaattgtttatctctaactcacttcttctcacttcatgagagtttcttagtaaaattaatgttttcaggatgaactattttgctatggccttgagcagccactctgtgatagatgggctcagctgggatggttgtactgttgcttctgggtctcgctgggaaggtaaggtg

SEQ ID NO: 272877 - DNA, 610 bp, Homo sapiens
atgactgtggcaagctggagtaaacattggaggaggagttggcagggcttagcatygagctctggccttgccacaaagggacactgggcatgggtgggtcctttcccctaccctgggtctttctcttagcatctaaagaggatgagccagctctgccaggtcctctgcaggtggctctggggacacagccctgcacagggtcggccactgagcaagtcctggctgtgtccccgcaatgttactgggcctctttgtggtgacagccccggaatagtgaggcccagtggaactgctgcttatccctgttcccctggtggctgtcctgctctcctcctctcaccctgactggctggagggcacagccctgccataagggcatctgaggacactcaaatggaggggggcacatctctgtgtgacttctgaccaggccctcagacagccttgctgagccagggctccctcaacatgaagctgataaaaagtaaggagatgcaggggctggctgggaacaggggccctgagccatgtgggcctgggagtggaatccttgctcttccacctcccagctgtgtgaccttggatgagtgacttgacctctctgagtttc

SEQ ID NO: 272878 - DNA, 575 bp, Homo sapiens
acacatcacattttgtttatccattcatcatttgatgaacattcgggttgcttccaccttttgacttttgtgaacagcgctgttgtgaacatatgtgtatctatatttgtttgagtccctgttttcaattctttytggcatatacctagcagtggaattgctgagtcagataatgattccatgtttaactttttaaggaactgccaaactgttttccttagcagctaccattttctattcccaccaacaacgtacaagggttccaatttctccacacccttgccaaaacttttctccttaacttattacagccactctagtgggtgtgatctcattgtggttttgatttgcatgttcctgatggtgaagttgttgagtatattttcatgtgtttgctggttatttgtatatattcttcggggaaatgtctgttcaagccctttgcccatttttaaattgggttgtttgcctttttattgttgagttgtattagttttttctgtattctggatactagactcttatcagatcaatgatctgcaagcctgttctcccattctgtaggttgtcttttc

SEQ ID NO: 272879 - DNA, 575 bp, Homo sapiens
acacatcacattttgtttatccattcatcatttgatgaacattcgggttgcttccaccttttgacttttgtgaacagcgctgttgtgaacatatgtgtatctatatttgtttgagtccctgttttcaattctttctggcatatacctagcagtggaattgctgagtcagataatgattcyatgtttaactttttaaggaactgccaaactgttttccttagcagctaccattttctattcccaccaacaacgtacaagggttccaatttctccacacccttgccaaaacttttctccttaacttattacagccactctagtgggtgtgatctcattgtggttttgatttgcatgttcctgatggtgaagttgttgagtatattttcatgtgtttgctggttatttgtatatattcttcggggaaatgtctgttcaagccctttgcccatttttaaattgggttgtttgcctttttattgttgagttgtattagttttttctgtattctggatactagactcttatcagatcaatgatctgcaagcctgttctcccattctgtaggttgtcttttc

SEQ ID NO: 272880 - DNA, 496 bp, Homo sapiens
taaccaccaccctggcccttacatttgggggacaccaaaggagacctaatgtcccccgggtcctagcctctgacttgtgtgctgagtatggattcactgttcatcctctggatgaagatgccaaggcatcaggacacgatggcctgcccaaggtcactccactggtgaggaccagagctgacatgcaccaccacacatcccagcaaagtctggcccgatccctgtaaggaatgaggggaattttaagagctcgataaagaggtcgctcccacagagacagacattggctgcactggtctgtgacaacctccataggccaacctaccactcacctgggcctcyagaaccctcagaaaccacaggctcttgcagcaggaggaaactgagaccagcccatgcagcctcccactttacaaatggcaaagtggagaccctgagaagaccagtgatctcccctagggccatagagcaaactggtgggtggacacaggatgtc

SEQ ID NO: 272881 - DNA, 572 bp, Homo sapiens
gatgggggcgccaggactgcaccagagcctcaaatttgtttttatggctgaaaacatatgtggcctgattcactctttattcctgtgaaaataatataccaataatcagaaattgtatgaaccacagatatacatagctacgtggttgaagctcacaaaagtcatggtgaatgaaagaaggcaaacccacaagggaacgtggtcaacgattccattcacatgaagttcaagarcaggcaaaactaatctgagatgactgaaatcacaggggacccagcagaggcacaaagtgggcgttctggaatgctagtcatttctgtgtttggacacataggtgtgctcagttcgaaaaactgcagtatctagtcacttttctgaatgtctgggctagttcaataaaatgtttactacaagcaaatcccacttcccacatcgcctatgtagagttcttgcctaaaatgtttaataggaattgaatcattgggaaacaacttgacaaatccaaagtaacggaattccccaaaatatcaatattgcaagaaagaaaaagcctggaccgttctaaattgaag

SEQ ID NO: 272882 - DNA, 512 bp, Homo sapiens
gcctccatgtgccaggctctgtgtcagcaaaaggatcatgaccttcaayttgtcacttcttggaaccatctatataaaggacaaaataagaatacgtattagagagtgttatggtgagcatgcaatgagataatgcattttaagggctcgggcccggcctactgaatgtcaggagtggccagtattccctatagcatgtgcctccacattcaagttcacctgtcaccctgcccccaaccctctgtatcccaggagcaataaacttgcctcaggtccccagaggccctgctcaactctcttgtttccaggcctttgtaatgctgttgcctctgccaggaacactctttctcccttcaacctctcttccacccgcacacacactgcctaattcgtccctgaggttgccactgtcacttctttagggttgactccgcaacaccacctcctaactagtaggaccccctgccacgcattctacagaacagaacttctcaactttggcacttctgaca

SEQ ID NO: 272883 - DNA, 554 bp, Homo sapiens
gtgttaatcaactgtttatgttattggtaaggcttccagtcaacagtaggctatccgcagttaaattttggaggagtcaaaagttatgcatggatttttgactgtgcaaggggttggtgctgatgttgtttaagggtcaactgtatttgacctctaaggatacatcataaaaggcgatgcagcttccacctgagtctttttggacatttgcatttggagctcyaagccactatgtaaggcagctgactgctctgaggccaccatgctgtgaggaagcccaaactagcccacgcagagatcacatggggaggtcccgagactacatgaagacagagatgctcagccactgactcactgcaacctaggggagacgccaaacaagaaccatctagctgagccctctttgatttcctgacccacagaaaccatgagagagaataacatagttgttattttaagccactaaattttagggtgatttattttgcagtaataggtaaccagaacacttgtcatgcctgttttcacctccacaccttttctcacccagtcct

SEQ ID NO: 272884 - DNA, 525 bp, Homo sapiens
cttgggatgtggtccatgtaactgaggaactgcatttcacattttatttaaccttaattaatttacctttaaatagccatctgtggcttgcagctacggaattggacagcacagcatagaccatggggagccatcgaaggttttgcaggtgaggagtgacacagccagawattagtttcagaaagctgggaaaggatagattccaggagagcagatggaggctgcagacagttggagaggtggccatggcaacatcacacagagaaggggaacactgacccaaagtaagcacccagggctggataagaagggatgggtttgggaaacttttagaagggaatatagataagtcgatggatgtgagggtgaggagagagttgaggacgactctgctgttcttgtcttagtagctaaggggatcttctccctcttccccagcttcacctggctccagccacactggcctcctccctgttcccccaacaccaaatgcacttattcagatctcagctttcatcttgtctt

SEQ ID NO: 272885 - DNA, 525 bp, Homo sapiens
cttgggatgtggtccatgtaactgaggaactgcatttcacattttatttaaccttaattaatttacctttaaatagccatctgtggcttgcagctacggaattggacagcacagcatagaccatggggagccatcgaaggttttgcaggtgaggagtgacacagccagaaattagtttcagaaagctgggaaaggatagattccaggagagcagatggaggctgcagacagttggagaggtggccatggcaacatcacacagagaaggggaacactgacccaaagtaagcacccagggctggataagaagggatgggtttgggaaacttttagaagggaatatagataagtcgatgratgtgagggtgaggagagagttgaggacgactctgctgttcttgtcttagtagctaaggggatcttctccctcttccccagcttcacctggctccagccacactggcctcctccctgttcccccaacaccaaatgcacttattcagatctcagctttcatcttgtctt

SEQ ID NO: 272886 - DNA, 525 bp, Homo sapiens
cttgggatgtggtccatgtaactgaggaactgcatttcacattttatttaaccttaattaatttacctttaaatagccatctgtggcttgcagctacggaattggacagcacagcatagaccatggggagccatcgaaggttttgcaggtgaggagtgacacagccagaaattagtttcagaaagctgggaaaggatagattccaggagagcagatggaggctgcagacagttggagaggtggccatggcaacatcacacagagaaggggaacactgacccaaagtaagcacccagggctggataagaagggatgggtttgggaaacttttagaagggaatatagataagtcgatggatgtgagggtgaggagagagttgaggacgactctgctgttcttgtcttagtagctaaggggatcttctccctcttccccagcttcaccyggctccagccacactggcctcctccctgttcccccaacaccaaatgcacttattcagatctcagctttcatcttgtctt

SEQ ID NO: 272887 - DNA, 537 bp, Homo sapiens
tgacaaagttcccttttcttagcccaaggtcagccagagaggcctctgggatgaggcaatccggagtttaatcttaggcagtgagtagagtggtcctagaggacagtgtgtgtgagcacgtgcttgtgtagagtgtcttggtctgtccaggcagctacaacaaaataycatagactgggtggcttataaaccacagaaatgtgtttctcactgtccagaggctgggaagtccaagagcaaggcgctggtagaattggtatctgttgaggcccacttcctggtttgtagaggaccttcttttcactgtgtcctcacatgatgggaggggtaaggaaactctggtgttgcttttttaggttaccaatcccattcatgagggctccatcctcatgacctaatcaccttccaaaggcctcacatcctagtaccattgccctgggggtgaggatttcaacatagaaatttgagagggatataagctttcaatctatagcaatgcatatgcatgcatgtgtgtatgtgtatacgtgtgtgtgc

SEQ ID NO: 272888 - DNA, 537 bp, Homo sapiens
tgacaaagttcccttttcttagcccaaggtcagccagagaggcctctgggatgaggcaatccggagtttaatcttaggcagtgagtagagtggtcctagaggacagtgtgtgtgagcacgtgcttgtgtagagtgtcttggtctgtccaggcagctacaacaaaataccatagactgggtggcttataaaccacagaaatgtgtttctcactgtccagaggctgggaagtccaagagcaaggcgctggtagaattggtatctgttgaggcccacttcctggtttgtagaggaccttcttttcactgtgtcctcacatgatgggaggggtaaggaaactctggtgttgcttttttaggttaccaatcccattcatgagggctccatcctcatgacctaatcaccttccaaaggcctcacatcctagtaccattgccctgggggtgaggatttcaacatagaaatttgagagggatataagcwttcaatctatagcaatgcatatgcatgcatgtgtgtatgtgtatacgtgtgtgtgc

SEQ ID NO: 272889 - DNA, 584 bp, Homo sapiens
cacacaaagcactcctgaggttacaatgctttttctgtccataatccatggaatcctacccaagaggggtgaatgatgccagccccttttgcaaatgaggaagctgaggttcagagaggctgagggctcattccagctcacaactggtcagtggcacggccacaacaaacagggttttagcttcctactggttgctcttcctgctgatctaggctactgtgtcttcgggttggccacaaaagggggagcaaagaccttccctgcacctgtcccccactgccctcccctcgagtcagttatggcactgtgacatttcctgcacgcagggtggggctactgatgtccacaacatgtgtgtgggcccagtgcatcctcctttctccacactgctgagaggtgagctggctgagaaaggggcccacaggtggtctggcckcaccctgccctgctcctcttaacttaaccctcagggccaggctttggagagaatgatgggaaagcactgggagggtggtttaggccaaacgcaggagtgcgggggaaaggtttgcagggaggaacgtagttttagttatgtcttggga

SEQ ID NO: 272890 - DNA, 544 bp, Homo sapiens
agccactaccactgtctggacctttgcgaagtcctgtcccaagggtacagttattggtgttaaatttcctactcaaggctagaggtcagctgtggaagtctttcgtctttgaggcactggttgccttccaaatgagcgtccaggaagacggtcaatgctcaacccaaaaaacccctgctgtctgcaagggtggaatttctgacctcatcacgcctgggtgaggggacacttgcaaayaaggatcacatttttatgcttctcgtgacacacactggggataaaactcaatgccagacacatttaagggaatcctgcaggcctcaagagatgtaccacctgggattaatgagagctttactttgagacttgagtctctcttccaaatttcgaagcttctcatgcccatcacagctctgggttttgcatatttgctattgaccttgagcaagccattttctctctaagctgtattggcatcacaatccagctatcttgaattgctaggcatcagggcctcacaacctctgtagccacagtcaactac

SEQ ID NO: 272891 - DNA, 587 bp, Homo sapiens
gaatgcattttgtactaacattctaaagaaaggagcacctgatcccatggactaattcttgctattatctgatcatggcaccctaaaaaactgacagtatttgggytcatactcagtatgtggctcatgaccatgtccctagcacgagtccatctttttgaaagatctagatctagagacaaaacagcaagatgcatgaggcatgatctgcatttctatcatattttaatgacccttcaaatcatccttaaatgatctttcccagacttggtcccagagaagcaaagaaaaatttagcacttaatttgtgaaaagatggcaagcatttgagaagtccaaagaattagggagacaggaaaattgcaccatagaagaaaaaaaaaaatgggaagtgaaaaatgaagggagggtgatggagagaaaagaaagtgagcaaaagcgatcatttacacactaaggaataaacttgtttcacaaaatacttgtttttctccctttgtttattagacatattggtaaagaacaatttgagacaattagtaatttcaagtatcttaaattacagattgaaacaaaattaatctata

SEQ ID NO: 272892 - DNA, 557 bp, Homo sapiens
gttgatgacggcaaaaggcaggcttctgggtggaaagargctggtgtctggtgaaaccccaccttcaacccaggaatggcctgaagcctggggactgggatgccagtctcatggaccagaatgagaacttatggtgcttttccctggtctgcccatggctgccaatggaccaatcagtgcacactttctcccctgtgaagccgagaaaaaccccagattcagccaaatgtgagaagatgaagggaggccggcctacatatagaagctacccactgtgggtctcctctcccctgagggctgcaggctcgatgggatgtcctgcttgtgactagcagctacccactcctgttctcatcccctgagaattctgctgctgctcagtgaaactcctctctgccttgcttaccctccagttgtccatgtaccttattcttcctggatgtgggacaataatttgggacccaccaaatggagggacttaaaagagctgtaacacaaacagggctgaaacatcccctcccccacttgccacgttgctggtgacaagaaggagagaa

SEQ ID NO: 272893 - DNA, 620 bp, Homo sapiens
cctgcttgtgactagcagctacccactcctgttctcatcccctgagaattctgctgctgctcagtgaaactcctctctgccttgcttaccctccagttgtccatgtaccttattcttcctggatgtgggacaataatttgggacccaccaaatggagggacttaaaagagctgtaacrcaaacagggctgaaacatcccctcccccacttgccacgttgctggtgacaagaaggagagaagagctgtggcccttcatggagcccagacctaggggctccccaagccagggctgtgacactctttgggtttctgcagttcctgtcatctccaagcttctgggcactatggcatttccctcatccatatgcagttgccctcagtggaagctgtgtgcagtacatctgctccagctgcagccttgcatggagccggcaactggaccagtgcctagagctgcctgccctgctgaagcagccaatgtgcctgactgtgcccagcggccagaccctgtgctcattcacccacacacccctcaccactccatgcctggctcacccttggcaggtatgggatgcaagctggtagtgtgccaggcctagtgggcagaacaagcctagca

SEQ ID NO: 272894 - DNA, 620 bp, Homo sapiens
cctgcttgtgactagcagctacccactcctgttctcatcccctgagaattctgctgctgctcagtgaaactcctctctgccttgcttaccctccagttgtccatgtaccttattcttcctggatgtgggacaataatttgggacccaccaaatggagggacttaaaagagctgtaacacaaacagggctgaaacatcccctcccccacttgccacgttgctggtgacaagaaggagagaagagctgtggcccttcatggagcccagasctaggggctccccaagccagggctgtgacactctttgggtttctgcagttcctgtcatctccaagcttctgggcactatggcatttccctcatccatatgcagttgccctcagtggaagctgtgtgcagtacatctgctccagctgcagccttgcatggagccggcaactggaccagtgcctagagctgcctgccctgctgaagcagccaatgtgcctgactgtgcccagcggccagaccctgtgctcattcacccacacacccctcaccactccatgcctggctcacccttggcaggtatgggatgcaagctggtagtgtgccaggcctagtgggcagaacaagcctagca

SEQ ID NO: 272895 - DNA, 571 bp, Homo sapiens
gtcttttttatgttctttttccagaaagtttttttcatttattttaaaaattcatcatttttctattaaccagttcgaaatgtatgtgctctcttttgcttactttaatgcataccttgaatattttattatacatatttattatagaaatacatgctattcttttatttctttaagaagtgtacttaaaatcctattcattaatagccaagtatttcatgaaattattatyttactctcatttctcaaagtcataagttgaggaagtaaatccttaatttcatctgatggtcttctgtcttgctttcttaatatctattttatttcttctccatccatactgctactaaataagttatctcaggactcttttatacctcatctgattcaaacattaatttttgaattgggaaactcttaactccttttgttttccatcttgccaacttcaatctaatttctatattattgttaattcacctttagaataatatttcttttctgttttaaacctttgaatgggtcactatgcctttctatattaggtctcaacataaacacaagatgtaat

SEQ ID NO: 272896 - DNA, 571 bp, Homo sapiens
gtcttttttatgttctttttccagaaagtttttttcatttattttaaaaattcatcatttttctattaaccagttcgaaatgtatgtgctctcttttgcttactttaatgcataccttgaatattttattatacatatttattatagaaatacatgctattcttttatttctttaagaagtgtacttaaaatcctattcattaatagccaagtatttcatgaaattattatcttactctcatttctcaaagtcataagttgaggaagtaaatccttaatttcatctgatggtcttctgtcttgctttcttaatatctattttatttcttctccatccatactgctactaaataagttatctcaggactcttttatacctcatctgattcaaacattaatttttgaattgggaaactcttaactccttttgttttccatcttgccaacttcaatctaatttctatattattgttaattcacctttagaataatatttcttttctgttttaaacctttgaatgggtcactatgcctttctatattaggtctsaacataaacacaagatgtaat

SEQ ID NO: 272897 - DNA, 505 bp, Homo sapiens
taagaatgagacatcatttttctcataaatagcagtctatttgatgcttcgttaatatgatatttttgaagcttttctattagaaatatttcaattataaacctgccaggaatattataaatgaattaaaatatgtgaaagaaatgcaaaatatctttagccaaaatttgaatttcattttgacccatgaatgttatgtccatcacatcttatcagttaataaacccaccaagcaaaacatttacatcatggaaagagtaatgmtcatcatcaaactaaaagttagacctcatttatcccatgctgtgtttgagttatttctctgagtgtcttcaatatattaacctatataatactaaaatgacttaatggaatagctctattcttatttctctatttcagatgaaaaatttatggcatacaggttaagtaatttaatcataggttcatagatttaagaaatggtagagctagaatttgaatttaggtagtttggctaagaaat

SEQ ID NO: 272898 - DNA, 625 bp, Homo sapiens
aggcatttcaaaaacagtaacaaatctgtttttaacatttttacaaggagcagaataatttgttaatgcacatccatctttatacttttatacaagtaattagtttgatgattattagctatttattgcatgtatgcctgataccactcattagtactcatcaatgttttgattgttttattcgattttgttaaataacaaagttgaatttcttaaggatattatattatacattctttttaaatttataatctacctctatccatatagtgttagcaccatctaccattgttatcatccttagtaaatttggaaataattttttaatgataaaaagtaaatttatgttaaatttccaatatatatttgytatatccttaggtaacaattaaaaatagattgaagttaaataaacatcaacaaacatagaaacaaagtgtgtacactaagtgctgtgtagctgcctgagtgaggattttgttagggcctgagtgctgcatatcatctgcaatgcactcattgtaaaatgtgtccttcctagtgggaactgttgctataacaaggaaggaaactacagtaaacttgttactaatcattcaagtaaggtaaacagaccctagttgtt

SEQ ID NO: 272899 - DNA, 604 bp, Homo sapiens
attttatttaacaatgtattgtagcaaaaataatttatatatgtgatgggatagattttggtaaataaaataatttctgatgaatttgttaaaaactttctgagctactcaaggataaaaaattgaacttgtctaaagttttaaagttaaaatttaacatttgttttttactgatgaaaaacttagattaaaagaatatcaaagttagttgagcaaactaaatattcgagcctgtagtcatgtttaatggtgtatgtacgactcatatttccattgaccataattcattttattataatcatattttgtaagaactatctatattagcattctgaaaatgacataggtgacagctcaacatgtttttatgattacacatttgctaggatatataaaatggtaacacttctgagatcaggartttatcttattgctacaatgagtgattttttttttttacttatagtttgacacatttcatttagaaagaatataatttttgtggagccccatcaaaagtgtaggtccttttcctgctctttgtagacattttacagtcaactaaaactgtgtaattaaatattttaacatcttttaaatatgt

SEQ ID NO: 272900 - DNA, 565 bp, Homo sapiens
agtggatgaattccttgtcacatccccaacagaaactgcttctgctgccaggtggtattatatgaatatttatatatggtagaattaggtgtaagacttgcctttctcatttaccacaccttcgtaaatgtatagacataaaattagggaaagatgtataccactattggtgctaagccatcttatagtaagtcatagagaatataattcaacatcatarcaatgtgaggatggtacaactcatctcagctttggctttaccagttcactgggccctgaaatctatgtataagtgttgaatgtataattatatcataatcatacatttgtggtgcagatagatttcttaagttagctggacgggagcctcagagaatgttactgtccaaaaaagtcgtcatagtgatgtgctcattccttatgcatccctgaccatacatacgttcagtattcttgcttgtagtgtgcacaaagcatctatctttgaaaaaaacaggatgatttaaaaaaaaacaccttctgttgttcatgttcttgtaatagtgttagaatttgcaactggttg

SEQ ID NO: 272901 - DNA, 527 bp, Homo sapiens
aatataaaaattggcaaggtagttggatagatttttttttcaaagatatacgaatatctkcattttatatatttaaagatacatcaatatattctttgaatgtactttttggtcatctgccaaagaagatgggccatcggcttttattgttattttttctatttctgcaaaaacaccattaggatattttaggatatttgaaataggtttctgctaaaatatgatagcagatgcaactgcatgattgttcatgttgaaaagttgtgaatcttatcatactcatccactagtctcttcaacccatccttggcccactggacactgtcacatggattctcttctggcgcgtcactgccatttgttcaaacctaaactcactgtttgccacatgtcaaaggctactcatatttctgtttttctaactgagagcgttacattaccctatttatacccagttgctacagcaataataatattttaaaaaattctctcccttgccttcatttctggaggaatgaaaagtacat

SEQ ID NO: 272902 - DNA, 571 bp, Homo sapiens
cagaataaggtaaaaaatcaaggagtcagtaccagggctgcgttcagcttctagaggccaccacagaattacttggctcaaccctctacctttaaaaccagtaacattgtgccaagtcttcctaaaaccactatctttccagttctcttccttctgctgccctctttcacttgtaaggacacttaggattacatttgacctacctaaatagtccagaataatctctccatctgaaggtcagttaattagctgtcttaattctatctggtaaatttaattcccctttgccctgtaactgccgtttacaaagattctgtggacatattttggtgggggtcattattcttcctaccacactgctatggtctgaatgtgtttgtctccaccagattcatatgttgaaacttgattatcagtgtgatgacaataggagacaggtcttttggaagktgattagatcatgtggcagaacccttatgaatgggattagtgccctttttaaggaagtcccagagagctgctttgctgctgtcatgtgagaagacattgagaaggagcatctatgaaccag

SEQ ID NO: 272903 - DNA, 477 bp, Homo sapiens
tgtgatgacaataggagacaggtcttttggaaggtgattagatcatgtggcagaacccttatgaatgggattagtgccctttttaaggaagtcccagagagctgctttgctgctgtcatgtgagaagacattgagaaggagcatctatgaaccaggaagtgggccctcaccagatgctgaatatgtcagcaccttratcttggaatttgcagcctccagagctttgggaaataaatttctgttgtttataagcttcctcatttatggtgtgttgttaccgcagcccaacagagtaagacatacactatttgagtacataatatgatccaaatacctattttatgaatgcagctacaatcaatcactgaattccaaaatatgtcaaatttataagtgtaaaacttaatgtgtgttcaatatctatgaaaattattgcacagacatagcttgaccatgtgtcaatataatgtgatatag

SEQ ID NO: 272904 - DNA, 575 bp, Homo sapiens
ctgaatatgtcagcaccttgatcttggaatttgcagcctccagagctttgggaaataaatttctgttgtttataagcttcctcatttatggtgtgttgttaccgcagcccaacagagtaagacatacactatttgagtacataatatgatccaaatacctattttatgaatgcagctacaatcaatcactgaattccaaaatatgtcaaatttataagtgtaaaacttaatgtgtgttcaatatctatgaaaattattgcacagacatagcttgaccatgtgtcartataatgtgatatagcataaataacatgcgaaattcaaagcaagagatgcatttttgtctcaactatgcttctcactattctttctttgaagggtttagttcttgaagaatcatgtttttgtttggactgcttttttttttcttttataatatgggggttgaaatggggtcagatatacttatctcataaaaatacactactcaaattagatagtatataaaaattctccttaaacctccataaacaattagaatattgtcaatcaaatactaaaagcgatactatact

SEQ ID NO: 272905 - DNA, 575 bp, Homo sapiens
ctgaatatgtcagcaccttgatcttggaatttgcagcctccagagctttgggaaataaatttctgttgtttataagcttcctcatttatggtgtgttgttaccgcagcccaacagagtaagacatacactatttgagtacataatatgatccaaatacctattttatgaatgcagctacaatcaatcactgaattccaaaatatgtcaaatttataagtgtaaaacttaatgtgtgttcaatatctatgaaaattattgcacagacatagcttgaccatgtgtcaatayaatgtgatatagcataaataacatgcgaaattcaaagcaagagatgcatttttgtctcaactatgcttctcactattctttctttgaagggtttagttcttgaagaatcatgtttttgtttggactgcttttttttttcttttataatatgggggttgaaatggggtcagatatacttatctcataaaaatacactactcaaattagatagtatataaaaattctccttaaacctccataaacaattagaatattgtcaatcaaatactaaaagcgatactatact

SEQ ID NO: 272906 - DNA, 517 bp, Homo sapiens
ccttggttcaagcgattctcctgcctcagcctccctagtagctgagactacaggcacacaccaccaaaytcggctcactttggtatttttagtagagacagggttttgccatgttggccaggctgttctcgaactcctgacctcaagtgatcagcccactttggccttccaaattgctttcattagggtgtgagccactgcgcctggctggaagtgctattttatataggggaattgggaaaggcctgtcggaggtggagacaaacaagagagttgaatgctgtgaaagaagccatgcacacatctaggatgttgaggaggagacagcattatcagataaagagaagaacaagtatgaaatccctatggcagggtctatttcctgtattcaaggatctgcacggtgatggagacccgtgtaccaaggagggtggtgggggaattttgtcagagaggtggccaaggcataatgttatgtaagactattgcaagggttttggatttgatgctgcgtgta

SEQ ID NO: 272907 - DNA, 578 bp, Homo sapiens
gagaattcttgaaacagaaatattaacatggggtgtttttaatgataaagacaaaaacactcaatatctagccagctggttaaaatgtagatggaaacgggggcatttggagtcacatttagctaaacagaattttactgttgataaccaattgcaaaaggtaaggagaaaaagatattaagggctgtgcaaagatttgggcctggaaaattgttgcttacttaataaaggaactaaggaagtaatgacagcatagagtgatgatsataatgttgatttattttgagctaaaatgtttataggaccattcgagggaacatacatgagaattcatctaatcatatatatacacatatatatatgatgacaaagaagataatcaatattcaaccctaatactgaatacataatatggtaatatataccaggcaaaagttatttcctaggaaaactgtataataaaattaaaattttgggtgtaattaagatgtgacaatgtaataaagacttggagaacctctctgtgactgagtagaatatgaggggtatgcgatggtacatcatgtcctttcagatct

SEQ ID NO: 272908 - DNA, 533 bp, Homo sapiens
ccagtgtttagttctctttagtaaatctaaccctttatcaatatctgacatgtccataaagcagtgtggtttagctttatggaaaatgaggaaaatggagaggaaagggaaataaaacctgacccacagtcaaccattgtggtctcgtactgaggaatatacatgcaattgtaatgatgagctgaaaaggaaatttgatcctataaaatcgagcagaaatagtaggaaggatcacgtaatgtggggaagaagaccacatagttgatctaaagaagatcaactatcttctttagatcaactatgctactttataactttattctgcaagaataacrtgcatttcaaaatatatattaatcttaattcactaccttttagtgcccatttctcaccagttgagcacaagtatgaagtagctctcatgcattatttttgacatatttcatattaaatttaaagagtgaaaggaaaatcaacaaatacagtttaccttcacaaataagcaaaacctatgtatgtaaatcatttccaaa

SEQ ID NO: 272909 - DNA, 619 bp, Homo sapiens
ctttgtttttgttgcatttgcttttgggttcttggtcatgaagtctttgcctaagccaatgtctagaaaggtttttctgatgttatcttctagaatttttatggttacaggactttgatttatgtccttgatccatcttgagttgatttctgtataggtgcgagatgaggatccagtttcattcttctccatgtggtttgccaattatcccagcaccatctgttgaatagagtgtccttccctcactttatgtttttgtttgctttgtcaaagatcactggctgtaagtatttggctttatttctgagctctctattctgtttcattggtctttgtgcctayttttataccagtaccatgctgttttggtgactatggccttatagtatagtatgaaatcaggtagtgtgattcctccagatttgttctttttgcttagccttgcattggctatgcaggctcttttttggttccatatgaatttttggattgttttttccagttctgtgaagaatgatggaggtattttagtgggaattgcattggatttatagattgcttttggaagtatggtcattttcacaaaattgattttacctatccatgagcatgagatgtg

SEQ ID NO: 272910 - DNA, 629 bp, Homo sapiens
gtgagactccgtatcacacacacacacacacacacacacacacacaaaaggaagaaaaaattctctaatattttcacacaattcttttatgtgaaggaaaataattttacttacaatggcctcatgatgaggtctttataaatggcatattgaaatggcatgtatactgcttacagcaaatgcgatatgaaatatattacaaaaaatgcagtgcataaataatttgaaaattacataataggttttatrttagttgagattttttataacatatttttaggaaaaaatcctaactttataattatgatcaattttgacaattaggcttaagagcatgtacaattttaaaagaaaatgtctaaagatatttaaatatgtgtctgagaagcatggggctgcaaaacaatatctgaatctcattctctttcgagacaaaatggaaaacaatctcttccaaagagatgatagactgtctttatttttcaaagacagtgaaattactattgttgttcagcactttggtttttagcaatcctgtcaacaagttctttttcacaacaaaatgtaaactttgtgctgcagattaagtcaattttgtatcattctgttctcactaaagaataataata

SEQ ID NO: 272911 - DNA, 629 bp, Homo sapiens
gtgagactccgtatcacacacacacacacacacacacacacacacaaaaggaagaaaaaattctctaatattttcacacaattcttttatgtgaaggaaaataattttacttacaatggcctcatgatgaggtctttataaatggcatattgaaatggcatgtatactgcttacagcaaatgcgatatgaaatatattacaaaaaatgcagtgcataaataatttgaaaattacataataggttttatgttagttgagattttttataacatatttttaggaaaaaatcctaactttatwattatgatcaattttgacaattaggcttaagagcatgtacaattttaaaagaaaatgtctaaagatatttaaatatgtgtctgagaagcatggggctgcaaaacaatatctgaatctcattctctttcgagacaaaatggaaaacaatctcttccaaagagatgatagactgtctttatttttcaaagacagtgaaattactattgttgttcagcactttggtttttagcaatcctgtcaacaagttctttttcacaacaaaatgtaaactttgtgctgcagattaagtcaattttgtatcattctgttctcactaaagaataataata

SEQ ID NO: 272912 - DNA, 629 bp, Homo sapiens
gtgagactccgtatcacacacacacacacacacacacacacacacaaaaggaagaaaaaattctctaatattttcacacaattcttttatgtgaaggaaaataattttacttacaatggcctcatgatgaggtctttataaatggcatattgaaatggcatgtatactgcttacagcaaatgcgatatgaaatatattacaaaaaatgcagtgcataaataatttgaaaattacataataggttttatgttagttgagattttttataacatatttttaggaaaaaatcctaactttataattatgatcaattttgacaattaggcttaagagcatgtacaattttaaaagaaaatgtctaaagatatttaaatatgtgtctgagaagcatggggctgcaaaacaatatytgaatctcattctctttcgagacaaaatggaaaacaatctcttccaaagagatgatagactgtctttatttttcaaagacagtgaaattactattgttgttcagcactttggtttttagcaatcctgtcaacaagttctttttcacaacaaaatgtaaactttgtgctgcagattaagtcaattttgtatcattctgttctcactaaagaataataata

SEQ ID NO: 272913 - DNA, 591 bp, Homo sapiens
aatcacattgctggcactgttgtgttttacagattttaactcatttaatctttataatgacactaagaagtaaatgtcatttgccatagcataactttgaaaacacaatagacccaataatagactcaacattcgactttacgtgaagatctgaggaacttttcaccatagaatggtaagcacatatctcaaaaataaatttaaaagtttcacatgaggtacagaagctacaaggtgcatccatttgtcttgggtgaaagtacagctttactgttrttttttctgcaaatttatgtgaaattctatccaggagtcagtctcaggaggacagcctgcctacatgtaatctgatatgcatattcaataataaatcatatttcccctatcatctacactggaacagaaagaacctttggttgataaggttttttaatttctccaaaaattattagagcaactaaataataatgaaagggatgactccagactgtctaaatctcatggttttgtattcatctaacaatataacttatagcttcaaaagttgtaaatcaaatgatgatacaattacaaggcaagtttgataaacga

SEQ ID NO: 272914 - DNA, 572 bp, Homo sapiens
tgtttaatgctgaccttacatatagttaaagattgaggttcaggttaatttttttctgaagtgtattcccaagctctgggacttttggccagtttggtgttaaaagtccatgtttatgaacataattatatatttttttcttgtcaatgaatgtatctgtcaagagtttacatatgccttgcctcaatatctcagtcatgctttgtctcatttatcacaagaaaaatgcaaaagtggtaatgaaatacaggatttcttctacagtttatacatctatattccttwtacattcattctctttgaccaaacaaaagataatacattctctttgaccaaacaagagataatacatttatgaatgtttattgacatctgaccttgtctttatcagatttaacaccaagacaattatttccaaaatacatctaatttattctatataattgtaaatattaaaatactagcatataatattaaacataatatcaacattcatagcattgttattattttatgttagatgcttttatgtaggctcaatcgttgtagtgggttaatatataaaacaattc

SEQ ID NO: 272915 - DNA, 527 bp, Homo sapiens
acctagtcaccccggagctgttgaagaaatccaggcaaagaggttgaccaaagtcccctatgtgccaggatacccacctgaggaccatcaccttaatcttgacaacacgatcaggatcttacactctttggatgactgtggaggctcactgattctgcgaagactccagaattcatttagacrtgaatctctgcattcatacaaccaaaacctgctctggaactcatatgtccaggagcttcagggccctctcacatcagaacaaatgactgtcctgagtaagctgctggcacctgcttgttttgcaccattaaaaagatgtggctgaggaagatcgagatactctgggagatgagggatgagggagcagaactatgaattctgctttgaaaggaagcagaactatgaattccagctctgcagtgcactggctatgtgaccgtggacaagtcactgtgccactctgggccagttttcccatgcacaacaaggtcaggttaagaatcacaatatctacctgccaaggc

SEQ ID NO: 272916 - DNA, 582 bp, Homo sapiens
aatcaaagcactcgactaattaaatgttgattgcttgttgcacaaaggtgaaagtcaaccttcttagccaaggtttgggttattctaacaaatgatgatagttcagctttttcaagccattttgtgcttaatgagtacattacccttaatgaaacttcatttaggctaatgattaccttggtttaccaagtaactaactgatgacagcctgtcttttaatgctctaaatgtggtaactgacaccatggacatgagtaatagatttcaaatacttttctgtgcttggccattggcagtcaacagatgatctagtgtgtcccagcgcccaggtgatgagctcagcctcatcatcgagggaaaaagtggcacctgatatgagatcttcactgataaggttcacgagagcttcagcatcaccacccaggtgtgatgagaacatttccccaaattagggtggcaaggttaaagacatgtcactcatctcatgaagtgaaaaaggygatgaatggctccaggcctaagcagcttatcattaactccctggggaagtcccagggagctgcttctaattaccaatgttca

SEQ ID NO: 272917 - DNA, 638 bp, Homo sapiens
agtcccccaacttttattaagatgtgtgactttatatccatgttttcaaagcatctttgcaattattcttagaatcactcatttaacactccagcacagtaagccaacagccacagaaacrtggccagcagaaatatatctgcttaaataggtgtgtctcactttgagaaaaactggaatataaaaacccaaatatctatgtagaaacataaatgggggaggcattccaattttaaaaggattcacaagtttcctctaaatagcctgttgccttggaaatttccattttaaatgtctgattttggcaccttccaaaaattccatcttttaaatgtctgtccatcctaaggtaaatgaccaatgagttatagttactaagaaaagcacatggcttcatgttataaaagtccaggcccatttcagaaactgccatgtgcatccagctgcaaaaaagcactcgaagagacagcactcctaacccccctaaaatgaaaattattacaaggcaatatatatgacacacagaggtcttgtttcaaggaatctgtcccaacaaagcaaataaaaaattcaacagatctatatgttatgagggtggttgcctcatctccgggtgtcgaaaacagcatgaaattcct

SEQ ID NO: 272918 - DNA, 533 bp, Homo sapiens
aaactggaatataaaaacccaaatatctatgtagaaacataaatgggggaggcattccaattttaaaaggattcacaagtttcctctaaatagcctgttgccttggaaatttccattttaaatgtctgattttggcaccttccaaaaattccatcttttaaatgtctgtccatcctaaggtaaatgaccaatgagttatagttactaagaaaagcacatggcttcatgttataaaagtccaggcccatttcagaaactgccatgtgcatccagctgcaaaaaagcactcgaagagacagcackcctaacccccctaaaatgaaaattattacaaggcaatatatatgacacacagaggtcttgtttcaaggaatctgtcccaacaaagcaaataaaaaattcaacagatctatatgttatgagggtggttgcctcatctccgggtgtcgaaaacagcatgaaattcctaataaccgagacctttacacaacatcttcgatgagatattttcagtttcagtcaatgactgagat

SEQ ID NO: 272919 - DNA, 623 bp, Homo sapiens
gcaggcagcatgggagccttgtccttctcacaggctgctgcaatgacctgggaagacaattagccaggctcctcccacactccaggtctatgttttaatggcttcaatcacagggggctggaagcacaggcccggcccaatttaataggcagtcattcacttgtggtacatttcaagtgtaaaatagctyacttcattttcttggttcctgtttatgcttctaaagttactcttggagagaagattaagtaccgttctccccaaaagcatgaaagcccttcatgttcaatctctttgcagggctgtatattgaaacacgtccaccaagccagcccaagagccgcacacaggaaacccaggtgatcctgaaatcggccatccccagaaaagccagtatacaagcagagaatgacaagaattagacttcagtggccaagtgcagaactgggctcagtttccatctctaccattttctggttggatgatcttgagagagttagttaactgctctgagcctcacttttattataaaatggagacagtaaatgcaactacctcatagaggttactgtagaaataaaataggataatgtctacaatgcttggcaaagtgactgtcacac

SEQ ID NO: 272920 - DNA, 633 bp, Homo sapiens
cagtttaagtataactaccgtgtgccctgtagtatcttatacctcacatgttatagtaatcatgttgctgataattatttgtattcagattataagctttgtgaggccaagagccatatctaataaagtacctaataaaaaatgtgatgtaacaggtgctcaagaaatatttataaatgaatgcatggatagctagctctgacaactccctctttcaaagccttcctctgttatccatctgcaaaatgaggaattttgactgaggatttctaacaagggatttgtgacaaggggacaaaacaggggttccagagaagctgcaagaaatgaagttcaaagcatgcagggaatcagaagaccctactccaggacctttctgtcttttgtgaactacagtacttttcccttagcttcaaggcagtggagaaggatgcttaatggcaatactcctcaaagcatggaccctgaaatcctggggttccaagaaagtgcctcaayatctattgtagaaagcaaggagtaggccagtcttagaaactgtaccttaatccatttgaggtactacgttctaggtgagagttcatttgcaagaaaagtagactttgctgcttacaaaaaagaaatttgaaagca

SEQ ID NO: 272921 - DNA, 561 bp, Homo sapiens
gctcactcaccctgccgctcacctcctgctgtgcagcccatgggtaggggacccctgctgtagagtagtgacaatgaaggcagcctttggccaatgaaggaaaggcaatgcaagactcgcccatgctccactcttaacaaaaggggccagtcagagacaagattggatactctggaaactaagcttgccccatctttctttatatgcaaacatcttttggcaacaacctaacataaactcagagccactgagygcacgtaagatgcatgcttggttgtagtctcttgggtagctaacttcttaaactttgtgcaagagccttgtctcaaaccaatagcatccctgcagaaagacagacccagccagtcagaaaaagacattcacacccaaggacttggggattctccttggaaagaaaaatcgccccatcagcttcctgcaaaatgaatgttagaaggaaacagcgagagcaaaacaaaacaccacagcctgggctgtctattaaaaagcaaacactcataggtaatgtttattttattccttgtgtttatttggaaattt

SEQ ID NO: 272922 - DNA, 540 bp, Homo sapiens
gattggcttgttttttcactcttgagttttaagagttctttacatattctcaacacttgccacctgtaagatatgtgatttgcaaatattttccagtctagtttgtcttttcacttcttaacagagtttttcacccttttttaaaaattttttaataagcccagtttaccaaactttcctcttatgaatcaggtttttggtgtcaagtctgaattctttgtctaggcctaaatcctgaagatttttaatgtttttttcctaaaagttgtakagttttaaattttacatttaagttcatgatgcattttgagtgaatttctgtctatggatgaggcttcggtccagattcgtttctttgcctatgaatgtccagctgctcccgcatcacttattggaaaggctgtcttttctcccttgaattgcacctttgtcaaaaagcagttgagtatatttgcctggctctctttctgggttatctattctgtttcacggatccatgtgtctatccccctgccagtaccacactgtcttgattactgt

SEQ ID NO: 272923 - DNA, 558 bp, Homo sapiens
actcctttctagacctgcatcaccatttgacaatattcagaataccgatcctaaatatcagcagtcctcaccctttttggcaccagggacttgtttcatagaagacagtttttccatggaccaggggaggggcaggcagggatggtttcaggatgattcaagtacattatatttattgtgtactttatttctattattacatacatatgaaataattatacaactcaccataacatagaatcagtgggagccctgagcttattttcctgaatctaratggttccatctggggatgatgagagacagtgacagatcatcaggcattagattctcataagaagagcacaacctagacccctaacatgtgcagttcacaacagggttcatgtgcctatgagaatctaatgctgctgctgatctgacaggaggtggagctcaggcagtgatgcaagcaatggggagtgactgtaaatacagataaagctctgcttgctcacctgtcgctcacctcctgctgtgtgaccctgttcctaacaggccatggaccagtactagtcc

SEQ ID NO: 272924 - DNA, 531 bp, Homo sapiens
tgcccaggtgtctctgggtagggaaaaggagttttgagctcacagggataaagaggcttcccataccaggccacttattgtggggcctgttctgctgatggcccccagacactgtggcctctctcagtagaggacaggattctcaggaccagcagggaggccagtatttcccttagcctcttaccctggggctgggttcagcctcttaccctgctggggctgctttcttctgctgggtggtgggtcaggaaacaccatgcctgggccaccttctcctgttgggcaaggggaggatgtagatgccctgctgctgcatcgcctttccagcactggactcccaaaccagctcaccttcttaccactttcatcattctcttttggttgcctcttgtgctatttccagcgtttattatcatatttaacagagaagagcagaaagaaacaagtctatacsatcttgtccaggccataaatcatatcatatcccattgtatctttttaaaagttagggtgagtgagatatttctttca

SEQ ID NO: 272925 - DNA, 590 bp, Homo sapiens
gcctccactctgtgcctgatctgactgcgtccctcccagggcggtggggcttctgtagggcttagaaaaaaatgaccagccagagctcatgctttgcctttccagcccatgtccttggtccctgagatcccagaattttctgcccaaatggccctgagccaccttccatgactatctggcctgtcctccaggtctatccttttgaggtggcctaagctgccagtgagggccctctaggcccaggagaggccatggggcagtggtttgcagtgacgagggggttacaatcagcaccttgctggctgtctgccggcatgcacaccaggcccttcatggagtaggatgaagccaatggtggtcagtgaaygggagctcttttcacacagccacaccccaagcattatcagggttaagctgccaaggaaggaggacagaacacatgttattgtttaacagtgggttagcctgatttatgatttagttatttagacaggaggtatgtgaacctctgcttaaactctccctgtaggccccacaaatgttagaggcaggctgtgcatagatgtacataagagcatgcttgcccaggt

SEQ ID NO: 272926 - DNA, 579 bp, Homo sapiens
caggccatatatggaaaatgtacacatctatgaactgctttcactcctaaaatgaagcctaaccagtttgtttaagacctctgcctggactgaggctctgagtaaatgatgctttactgacgtctcacaagaatgtttaattctcacaagtttcacagggagctaagctgagcaaatactccattttgtaaacaagacatgtggtgttaaacaaataattagcctttatttctggaaagaagaaagaatattttgcccttattcaaagagtcaacrtgttaataactcctacaattcagacagcagaagggaagaagaggatgcagtctctaaggcactggttcttgagctttagtgtatgtgaggatcacctgcagggcttattaaaacacagatgttgggcctcattccctgagttcctgctgcagcagatatggttggagtgtgggactctaacaaggttccaggggttgcagatgctgctggtctgggggctacacttgaaggcactgcttcaggaaataggtttttttaacctcaaattacctacaaaaactcaaacttattttaaaagcaata

SEQ ID NO: 272927 - DNA, 621 bp, Homo sapiens
gcacctgctggtacctgggtgccctttttcccacccgatgctctctgccatgccagtttctgtcaccttggcctagtgccctccaacataagaaccaaagatccaaccccctacagggtggggagggcagactctttcaaagatctttgctggtttttaaatactaattttattacttaccaatgtccaggacaaagtttacctctacctaataagagaaaattgctcatagaaatggttgaaaattttaaaggttgattttaaactctgagtaattcaaaataatcctctacagatttgaataaaaaagataatgactctctccctcccacccctatcctccgcaaaattaacaaggtattagtgaacatgaccacgtgtcccactaaaaggagaaaataaatattattggcattaagcttccaggtgagagctaacataattaatagtaawcacatcatatttcactaggattctccttgatgccagtattaaaaaaatcaatcatcttttcaacttaatagccaatctgaaaagtaatttgagaaaaataattggttttagaaacacatggatgtaagtgtatctttctatgactttctggaactttacaaggccatt

SEQ ID NO: 272928 - DNA, 605 bp, Homo sapiens
gaactatttttggtaataaccaaaaactagaaataaatccaacaatggaatcatggttaaataaataacagtatttcagaagtacaygacacagaatactatgctataaaaattatgtatcaatagacaaatttttatggagcactaagatgtattacatgaaaaggcaagtatgcagttaaaaatgaatatgcatacatacatactgatatatttacatagccaacttctagaaggatgcaaaaaggctattaagaatagttatctatgggaaaaattattagagataaaaagcaacaagagaaagagttttactttgccttttatgtacttttgaagtatttgaatttttatgctatgtgcatgtttattttacctaaaaaaactttacaattccaagctgtcagttcaaaagccaaaatgccttcccaaattataagtaacactgagctaaaaagaaacacatccagaggaaattacaattagacattccttgaaaaatttgacaatcttcaagataaaggcaagtagtatttttagtacagattttttttttaagaaataaacagttgacaatcagctactcttcttattatgtgcggcat

SEQ ID NO: 272929 - DNA, 605 bp, Homo sapiens
gaactatttttggtaataaccaaaaactagaaataaatccaacaatggaatcatggttaaataaataacagtatttcagaagtacatgacacagaatactatgctataaaaattatgtatcaatagacaaatttttatggagcactaagatgtattacatgaaaaggcaagtatgcagttaaaaatgaatatgcatacatacatactgatatatttacatagccaacttctagaaggatgcaaaaaggctattaagaatagttatctatgggaaraattattagagataaaaagcaacaagagaaagagttttactttgccttttatgtacttttgaagtatttgaatttttatgctatgtgcatgtttattttacctaaaaaaactttacaattccaagctgtcagttcaaaagccaaaatgccttcccaaattataagtaacactgagctaaaaagaaacacatccagaggaaattacaattagacattccttgaaaaatttgacaatcttcaagataaaggcaagtagtatttttagtacagattttttttttaagaaataaacagttgacaatcagctactcttcttattatgtgcggcat

SEQ ID NO: 272930 - DNA, 536 bp, Homo sapiens
agtaaattcctcatacccctctcagcccattcctcagagataatacattacaatttggtactgattcaggtattttatatgcaaatacaagcatttgtcagatacatactctgacataattaggatcgtattcracatattatttgcttttttatttttcttcgagacagagtcttgctctgttgcccaggctggagtgcagtggtgcaatctcaagctcactgcaacctccacctcccaggttcaagcaattctcctgcctcagcctcctgagtagctgggattacaggcacctgccaccatgtccaactaatttttgtatttttaatagagatggggtttcaccatgttgtccaggctggtctcaaactcctgacttcaggtgatccacccgcctcggcctcccaaagtgctgggattacaagcatgagccactgtgcccagcctaattcactttcttaattacaattctcccatctccccccatgctatctggaaatttataccagcaggataattttccatttggtacattt

SEQ ID NO: 272931 - DNA, 536 bp, Homo sapiens
agtaaattcctcatacccctctcagcccattcctcagagataatacattacaatttggtactgattcaggtattttatatgcaaatacaagcatttgtcagatacatactctgacataattaggatcgtattcaacatattatttgcttttttatttttcttcgagacagagtcttgctctgttgcccaggctggagtgcagtggtgcaatctcaagctcactgcaacctccacctcccaggttcaagcaattctcctgcctcagcctcctgagtagctgggattacaggcacctgccaccatgtccaactaatttttgtatttttaatagagatggggtttcaccatgttgtccaggctggtctcaaactcctgacttcaggtgatccacccgcctcggcctcccaaagtgctgggattacaagcatgagccactgtgcccagcytaattcactttcttaattacaattctcccatctccccccatgctatctggaaatttataccagcaggataattttccatttggtacattt

SEQ ID NO: 272932 - DNA, 544 bp, Homo sapiens
acatcaggcatttggtaactgcttatggaatgaaggaaggaatgaacacattaagagcctgaacctcttcagctccaataatggggatctggagtgtaccagtacgatgccccaacactagttaagacaagcccgtgtcagtgtagctccragagcttcagagcatcacaacttggaaggccaccagaaaggaacaaaaggagaagggaataaaaccagagtggaatgggaagaaagacaccaggagaggctgctaaataggaagagaatgaaaacaatcaatgacttgctgatcacttgtcaagcacttcctatatgccaggcatattaattcacttcatcttctcagtgctattgttgaaagtacttatcattattgccattttcagataggaagatttagaatcagagaagttaagctactttcccaggatcacacagctagtaactgacagagtcaaattctaaacttggagaatctgactccaaaccctaagaccccagactgcacttaccaaagtgtatcatgccaaatacattacct

SEQ ID NO: 272933 - DNA, 583 bp, Homo sapiens
ttcaggttaactataattaccatttttacctatttcttagggaaaaatcacagttttaagtataaggcctccaaaagtagctatctgcattagaatatttaaagctcattgcaaatgtaayaatactgcctaattgctgccaaaatgtgaaagtacaccttgagtgaaaactcattatgcaaaatgagtccttcaaacaaccccttgcccagccaggccaagcagggaagaaaaatgattctctgcatctgattgcttttgccctgcctcaggaaagtggactgccaaagcaaaaaccaatgagccagagctgataaacctttgtgtatcactgctttggctgcagctgagagaggaaacctcacatcaggggccaagatcatgaacacatgtgaaggactctaggcaccagagcccacttgggggatggtcactgagcatgggggaggggtctcttagcagccactgctgcagtctatgtcaggaaataagtgctggagtatatgtgatcactcctgcacactgtcctagctaggttcaagggcttccacacacggtgagtataagcaggctgggctgcatc

SEQ ID NO: 272934 - DNA, 583 bp, Homo sapiens
ttcaggttaactataattaccatttttacctatttcttagggaaaaatcacagttttaagtataaggcctccaaaagtagctatctgcattagaatatttaaagctcattgcaaatgtaacaatactgcctaattgctgccaaaatgtgaaagtacaccttgagtgaaaactcattatgcaaaatgagtccttcaaacaaccccttgcccagccaggccaagcagggaagaaaaatgattctctgcatctgattgcttttgccctgcctcaggaaagtggactgccaaagcaaaaaccaatgagccagagctgataaacctttgtgtatcactgctttggctgcagctgagagaggaaacctcacatcaggggccaagatcatgaacacatgtgaaggactctaggcaccagagcccacttgggggatggtcactgagcatgggggaggggtctcttagcagccactgctgcagtctatgtcaggaaataagtgctggagtataygtgatcactcctgcacactgtcctagctaggttcaagggcttccacacacggtgagtataagcaggctgggctgcatc

SEQ ID NO: 272935 - DNA, 583 bp, Homo sapiens
agccttttgagtggcaattttatcatctaatgataaagcttttttaaagacttgcaaggagcccagcaacagttaatttttaaacataaacccaaatagaaagatgcatatctaaatatagtcatttaagttcaatagctcccattaatgcaytccacaggttgaggaatgaaggatggcagtgttactacatgtctattttatgggttacactgaagaatataattatgtcaggcatcttctggacaggacagagaacggtcttgctgtaaattctaactaacccatatgaggaaagactgaatccatttcactatagcatttcataaatgaatattattcaacccttttttagagattgttaaaacctgaaagaccctataaatgtaaacagaggcccaaacttaagcacactgacttaggtctagaatcacatagtattccaaggcagcaggaactctcatgaaaagttgacatggccaggcccagtggctcacacctgtaatcccaacactttgggaggctgaggtgggtggatcacctgacgtcaggagtttgtgaccagcctggccaacatggtgaa

SEQ ID NO: 272936 - DNA, 583 bp, Homo sapiens
agccttttgagtggcaattttatcatctaatgataaagcttttttaaagacttgcaaggagcccagcaacagttaatttttaaacataaacccaaatagaaagatgcatatctaaatatagtcatttaagttcaatagctcccattaatgcactccacaggttgaggaatgaaggatggcagtgttactacatgtctattttatgggttacactgaagaatataattatgtcaggcatcttctggacaggacagagaacggtcttgctgtaaattctaactaacccatatgaggaaagactgaatccatttcactatagcatttcataaatgaatattattcaacccttttttagagattgttaaaacctgaaagaccctrtaaatgtaaacagaggcccaaacttaagcacactgacttaggtctagaatcacatagtattccaaggcagcaggaactctcatgaaaagttgacatggccaggcccagtggctcacacctgtaatcccaacactttgggaggctgaggtgggtggatcacctgacgtcaggagtttgtgaccagcctggccaacatggtgaa

SEQ ID NO: 272937 - DNA, 583 bp, Homo sapiens
agccttttgagtggcaattttatcatctaatgataaagcttttttaaagacttgcaaggagcccagcaacagttaatttttaaacataaacccaaatagaaagatgcatatctaaatatagtcatttaagttcaatagctcccattaatgcactccacaggttgaggaatgaaggatggcagtgttactacatgtctattttatgggttacactgaagaatataattatgtcaggcatcttctggacaggacagagaacggtcttgctgtaaattctaactaacccatatgaggaaagactgaatccatttcactatagcatttcataaatgaatattattcaacccttttttagagattgttaaaacctgaaagaccctataaatgtaaacagaggcccaaacttaagcayactgacttaggtctagaatcacatagtattccaaggcagcaggaactctcatgaaaagttgacatggccaggcccagtggctcacacctgtaatcccaacactttgggaggctgaggtgggtggatcacctgacgtcaggagtttgtgaccagcctggccaacatggtgaa

SEQ ID NO: 272938 - DNA, 566 bp, Homo sapiens
aaataaatgggagcctcatttgtcttgaccaggagggagcaatagagacataaactgaaggaagcaaattaaaaggagggcaggcagtcattttggagttgtctgtgggctgattgcagatacacacaaaatggagaagcacttccctgcaaggctaagtagatcagaactgagtttgtagatcccagatggaggcacactccactttaccaaaactgcaacctttagaaagagatcaatgaagggactgtagccaaacygctctcaagaggattcagtgcaaactggttctatttatcttcacactacttgactggggggaataggaagaagatctggttggtgggtgggagaaatgtccccgaaatgataatagaagtcaccagaaaagtgagatttccagaccattatgtaaatgcttctgttatataatgtgacatttgcctgtaattttgtgtgcaatggaaatctctgctaatcaaactattataaggtacaaaacactccatttattaagacaggagctagcatcacacacaactaccctacctctgagctgttttcat

SEQ ID NO: 272939 - DNA, 566 bp, Homo sapiens
aaataaatgggagcctcatttgtcttgaccaggagggagcaatagagacataaactgaaggaagcaaattaaaaggagggcaggcagtcattttggagttgtctgtgggctgattgcagatacacacaaaatggagaagcacttccctgcaaggctaagtagatcagaactgagtttgtagatcccagatggaggcacactccactttaccaaaactgcaacctttagaaagagatcaatgaagggactgtagccaaaccgctctcaagagrattcagtgcaaactggttctatttatcttcacactacttgactggggggaataggaagaagatctggttggtgggtgggagaaatgtccccgaaatgataatagaagtcaccagaaaagtgagatttccagaccattatgtaaatgcttctgttatataatgtgacatttgcctgtaattttgtgtgcaatggaaatctctgctaatcaaactattataaggtacaaaacactccatttattaagacaggagctagcatcacacacaactaccctacctctgagctgttttcat

SEQ ID NO: 272940 - DNA, 617 bp, Homo sapiens
tccagtttgtaagcaattccatctctgtatccctgtgaaattcccataactattactagtgtgtgtaagtacaggtggttgtatgtttatacacacactctaaatcaccttcrccctgaatagagcaatcctttgataaattggtctgacatttggtttaaagtcctccaggtcttagacaaaatgattcagaaaataacaatgtcagttgctctgctctttcaataaataacccaccagtaaaacacagataataactgacaatcatacttgtactgtaactaatgagaaaagataaagcagcaaatggactgtttatatgcatttgataaattgcatcccttggatataccaatgaaaaataaatgtgtgtggtactggttcactgaactaaaacaaatatttactactgagatttcagatttagaatgaaatttacattttatttggcaactactttaatgctatgtctacatacagttgaaaaatcaaaaacctacctcaacttcctgagtacgaaagcattataaatgagaaaaaaataaaagaatcacatcaaacaataggaagaaatgtatacatttttgataattgcatcaaattttcaaattatcata

SEQ ID NO: 272941 - DNA, 617 bp, Homo sapiens
tccagtttgtaagcaattccatctctgtatccctgtgaaattcccataactattactagtgtgtgtaagtacaggtggttgtatgtttatacacacactctaaatcaccttcgccctgaatagagcaatyctttgataaattggtctgacatttggtttaaagtcctccaggtcttagacaaaatgattcagaaaataacaatgtcagttgctctgctctttcaataaataacccaccagtaaaacacagataataactgacaatcatacttgtactgtaactaatgagaaaagataaagcagcaaatggactgtttatatgcatttgataaattgcatcccttggatataccaatgaaaaataaatgtgtgtggtactggttcactgaactaaaacaaatatttactactgagatttcagatttagaatgaaatttacattttatttggcaactactttaatgctatgtctacatacagttgaaaaatcaaaaacctacctcaacttcctgagtacgaaagcattataaatgagaaaaaaataaaagaatcacatcaaacaataggaagaaatgtatacatttttgataattgcatcaaattttcaaattatcata

SEQ ID NO: 272942 - DNA, 640 bp, Homo sapiens
ctggtgatcagttgcatcccacttactggattctgaagtgagctcacctccattagcacagacacagattgggtgtccctggggtaaggagtgtattagacattgggagtgtgtagttaagactagaaacagcaccttggcctcaaaaaaatcagcaaatatatctctaggattgcccaccaacttctagcactgtgtgcactgtaggcctagtgtctctggtgggaaggtggaaaaataaaatagactcatcccttcaattgctttattaaataatgcacagatgacagtgcatgaaatattgatgcacagagagctcatcttcctgcaggggagaggggcctctggataattggtttttctacatggcaactgagatagattggaaacattgtgactctttcgctcaccatatcaagccctgtctattaatggagagatagacccaagtgattcttgttttccaaatcctcattatcctgccatcactgaggtatcaaaatgaatggaggggctcaggaaagtactggygttttcatataaaccagcttgcaggatcaggcactttctgtgggttaagcttgagaaccattctgaccatctttttaaaacttggtagaatcttattttgttatttgtc

SEQ ID NO: 272943 - DNA, 556 bp, Homo sapiens
ccaaactgttatccatagtgattgcactaattcacattcctaccaacagtatactagggtttccttttcttcacatcctcgccagcatttattgcctgtcttatggaaaaaagccatcttaactagagtgaggtggtatctcattgtagttttgatttgcatttcgctgatgatcagtgatgttgagcaccttttyatatacctgcttgccatttgtatagtcttcttttgagaaatgtttattcagatcttttgcctatttttcaatcagattattagatttttttcctctagagttgtttgacctccttatatattttggttattaatccctttatcacatgggtagtttgcaaatattttctcccattctgtgggttgtctcttcactttgttgatagttttctttgctgttcagaagctttttaacttcgtgtgatcccatttttccatttttgctttggttgcctgtgcttactcaagaaagttttgctcagtccaatgtcctggagactttccaccaatgttttctcctagtagtttcatagtttgtggt

SEQ ID NO: 272944 - DNA, 612 bp, Homo sapiens
ttcagtagggtggactgtgtagttggtggtcacttctgtgtatagttagaattactgctagtcaccatggcgtggaaatggctttcaggaactcacagtaacacttaagaatggggcgagaagtcatgtgacaagaggaacacgtcatacagtgcacagcactggaagtccaggaaggtggaggagaaacaagttctgaaacctataaagccagaatctaacctgtggcacaacctgccagttatcagacacataaaaccaccatgggggtttggtgctcgttgctgcctgtttaaaatggaagttctcatccaataggagtgtccccgataacgcagcatgtacaatcacaaatgctcatgctttgttcctctatctctgggtgggagtcacatgacacagaattaattagattccctgtgcttgaggggagcagtatgacaagcggtgagcaggggacatctgtgtaggaagttktgtgctttcttcgtccaattatcaaaaataaaaagcaaatttcctcagccatgctagaggaaagactgaattatcttttcaatctctcagtagagaaagattacaaaattgatgtcatataaagagacaaccaaa

SEQ ID NO: 272945 - DNA, 587 bp, Homo sapiens
ccattggcttcagaatgtcatggtttaattttaaccagaacaaaagcactgatcccagaaaaaaaaagatgaatcttctggatacctactatgtgctaagcacctccctacattctcttgttgaggggtgggaaggagggtgactgcaaatttctgtctgttcctgagccaccatgctaatgtttggttttcaatctggaccgcatattaaaaccacctggggagtattaamacataccactgtcttggataccttacaaatgttcttcttccataaataattacaacaagcatatataacagataaggatattcccactctgttaaacctcagtttcttcatctgcaagcataagtaatgtgtccaacataattttaaataatttcaaactatctactccgctcttttccttcagtctaatctttacacacacataagcacatgtgtacacttttattgacttttctccttttgataaatatcatgtatactctgaaaaatatataaatatgtaaaaattttaaaataatcacctgaaagcagaactcccaggaagaatcactgttaacattttgatgtctgccta

SEQ ID NO: 272946 - DNA, 541 bp, Homo sapiens
cctttctgatagctcccaggttatgccaaggccactggaaagcagactgccttctgagaggtgagccgctagttgttgaaggcttggctggtcgttcacttgtgctatgacaaaatacctgagacttgggtcatttataaaggacagaaactcatttctcacagttctggaagccgggaaatccaagattgaagtgatagcatctggcatccaaggagggatgtaccgtccaaaggggaggaacactgtgtgctcacatggtggaaggacgagagccaaatgctactgtgtgaagcctcttttataagagtcataatcccaytcatgaaggacatgccctcaaatcatctctcaaaggacccacctctgaatgctatcaaatgagcaacacctgaatttgggaagtgatgcattcaaatcacagcggctagctagaaaaaatccttttatgttctaaaaagaagtttgtctttcctgagcacttggggttgtcctttctttcagctatgatgtgagccctccctcctggtccttgatatca

SEQ ID NO: 272947 - DNA, 518 bp, Homo sapiens
acatcactgttcctctcctcctgcccaggcccagaatctgcacactactttcttcaaatgcctgctgcgaatttctcaagggtcctgaacacacaacatccaaargcatttctgctacttgaacagcttaactggctccctccactgccgcagcttcagcagctgtaaacagaagccaggctgcattctcaggcccatctggaaagtaataagacccagggcccggtcctaggggagtcacctggtagagtctactccccaagggatgtgactctgatacttggagcttagcagaaagaaacaggctgtgagataaaagagaggctgatttgagccccagggacagagtgttcattcactcagagctcttaagctgaaggcaacctctgcaaggcaggtggcagggccctgtgtctgccttcagagtcttccaaggctggggcttccagaaacttgcagcaagagcttcctggtcctaagtggaactcttttggttcctggggatgtctgcataagaa

SEQ ID NO: 272948 - DNA, 518 bp, Homo sapiens
acatcactgttcctctcctcctgcccaggcccagaatctgcacactactttcttcaaatgcctgctgcgaatttctcaagggtcctgaacacacaacatccaaaagcatttctgctacttgaacagcttaactggctccctccactgccgcagcttcagcagctgtaaacagaagccaggctgcattctcaggcccatctggaaagtaataagacccagggcccggtcctaggggagtcacctggtagagtctactccccaagggatgtgastctgatacttggagcttagcagaaagaaacaggctgtgagataaaagagaggctgatttgagccccagggacagagtgttcattcactcagagctcttaagctgaaggcaacctctgcaaggcaggtggcagggccctgtgtctgccttcagagtcttccaaggctggggcttccagaaacttgcagcaagagcttcctggtcctaagtggaactcttttggttcctggggatgtctgcataagaa

SEQ ID NO: 272949 - DNA, 542 bp, Homo sapiens
agggggcagccagattacccagtgctgcagaggatggtccacgattccctctcagtacaccccacaggatgaggtcaccagccctgatctttccccagaggctggggtgcccagctctggacacctgagccctcagcctaccccctctgaatgcagccatcccccaactgagtcaaaggaaccatggtctggtcaattttgttcctgtagttttgccatctgtcaccctaccttaggctaactcctgtagaccaccctccacttctggaagctaacatttctttaaaaacaaaaaacctccaacccaaaatactaataaataaaaactgttcgttattaaactccctacatacttaacaatttgcatacagaaatcaagtctgctaaaaatcaattactrgggtctgaatacttcaaacatgtatgcaaattatttagagtaaatgaacttcacagagcaacaaaacagtaacaaatcaagctgtcagcatttgtttaatcacctcgccgcattttgtttttgagaaacagcaacactggga

SEQ ID NO: 272950 - DNA, 563 bp, Homo sapiens
aaacagtaacaaatcaagctgtcagcatttgtttaatcacctcgccgcattttgtttttgagaaacagcaacactgggattgaaaggggatgaggagtgtgtcatttccatttaaactcaggcctcccaaatacgttttacctagcagcctcaaggctcagggtgatggatgctcctgaaaggcacccagcaccagtactggaaaggactgtggctgcactttgaaaagggaaggataagagatccgaataataagtggcatttgagasgccttttaataagtaggggaaactgtaggtgagaaggtaggagaggcagctgagcgtgacagccctgagcagagttcaaagtttccttgtcatggtgctattgatttcctggggacttgctccaagtttcaatctctctccgcatacaaggagtgagaggatgcagacatccccagaggatgacaaagccctgtgtcttctctacctcttctatcaccaaacctgcaggactcctgtggacccaaacaggacagcatccctagcacagagcaggcgcccaccaaaggttaattt

SEQ ID NO: 272951 - DNA, 589 bp, Homo sapiens
cacatttgtgtttattcaattaatatttacagagtatcattcagcgtgaagaatctttctgcaggctaaaggtgaatacaaagaggtgagcaaaaagatgttcttccagctctccaggggttcaccgttgaacataggagacaggtgaracaggtaaggtacctaattcagcctttcagggggtcaggtgagacttcctggacagactgacatctatggaaaagtaggtttaaaccagataataggatgaggaagaacactccagataacaggaagttgtctttccaggggtaagaaagtttgtggcaggcttaaggaattcaagtgtttcatgaggctggcagcagttggagcaagccggtgagtaaaaaggctggagaagaggctgagcctggtcctgaagggccttggagccacagggaccatgctggggagccagggcctttgagttccacagtgccttcaacccagcatgcaagaacctgtgaccagactaaagtcgggggagaggggcaggaagagggaaccctaaatatgcattttatgtagaaagtggcacttagtaagaacagacacactacatatattc

SEQ ID NO: 272952 - DNA, 552 bp, Homo sapiens
acaataaagaaactgatacagagatcagatcattcttaatttaccaactggtaactgacagagaaatgttaagcctgtttgtggtcacacagccagtgagcctggattttaatcttggcgagtctcacaccaaggctgatacttgaagccactaagccactaatgaaaataacttmtgatggggataaaggtgatgattaaagtgtcaagcagcaatgtatcacacccctctgtccaccttccccaagattcatgttacccagaagacctcataaaaaaagacttcctgtgaaaaaaaaagattgagctatcagaaatcaaagccaaattgctggctatcttaataagcttgtattacttttataatgaatacaaaagtgcgagctgcttttaaaggcaatgctgctgtcctgtgaacttaactccctctgacttaagaaacaatagtgaccaggtgaactgactgtggttccttccgtgaggggtttctgtgaagtgtgcgtatgttccacactgctaatggggagatgcatgaagcccagcgcagcatgg

SEQ ID NO: 272953 - DNA, 552 bp, Homo sapiens
acaataaagaaactgatacagagatcagatcattcttaatttaccaactggtaactgacagagaaatgttaagcctgtttgtggtcacacagccagtgagcctggattttaatcttggcgagtctcacaccaaggctgatacttgaagccactaagccactaatgaaaataacttctgatggggataaaggtgatgattaaagtgtcaagcagcaatgtatcacacccctctgtccaccttccccaagattcatgttacccagaagacctcataaaaaaagacttcctgtgaaaaaaaaagattgagctatcagaaatcaaagccaaattgctggctatcttaataagcttgtattacttttataatgaatacaaaagtgcgagctgcttttaaaggcaatgctgctgtcctgtgaacttaactccctctgacttaagaaacaatagkgaccaggtgaactgactgtggttccttccgtgaggggtttctgtgaagtgtgcgtatgttccacactgctaatggggagatgcatgaagcccagcgcagcatgg

SEQ ID NO: 272954 - DNA, 560 bp, Homo sapiens
ggcaagggaccctggacacttcagaaacacaagatcctggagccataattctgttcagtctttccaatctcaaaatggtaaactctataagaagaaacattaaagcttttcaacatcaagcatggggtccactttgtcccgaaaacttctgctgactaaccacatccacaccactgatgaagccaccctacaacaaacaagtagctcatgcctctctagtagagctgtactctgccttgtctctacccacagatagtaagggctgggaataaaggatgaaaatcctcttcctctcctaagttttgggcactaggttcacacaacagagccttgtacacaaacctacgctcatgctctttttgttttaggagaagctctgtgggctttgaaatgtcactattgaagagtcacagagcttaattgttaaggtatcttaagggccyacattcaagcactgttggtaagaggctagaaaaaaagaagagcttggttagggaaacagaatctggcaaatattgttgatccaagcagacaaggagtccagggaatttggtggcaag

SEQ ID NO: 272955 - DNA, 609 bp, Homo sapiens
agaattagaatttgccggagataatccaactagtaagtagccaatctggggatgtaactgtaagtctgctaaatccagttgaagctccaagagactaaagacagtgtctatcctcttcactgccacatgccacctctcacccaacacagtgtctggaatatcttgggggttcaataactattgctgagcccaggtccatgggcttaaccactactctagcctgctctgtgaggccaggggccaagttttgctcactatttctgaatcccaagtcccctgacatgtgtctgctgtaaaggacatgttcagttaatgctgaaaaactctgtgcaaggggcatctctggatggatctaataacttaagatttccaggtcacaaaaattcagagctgtgagaatccctggagtatttccagaccaacacactcatttttcttttattgttttgtttcacagaataaaaacactcatttttaatgtaggggagacttcaatttgtcaattcaacaaacatttatgaaactcatkttatatgtcaagtactattataaccattgagaatttagagatgcttaagacagagaaagtcctagctcttaaggaactca

SEQ ID NO: 272956 - DNA, 602 bp, Homo sapiens
ggccaggcacagtggcttacacctgcaatcccagcacttcgggagaccgaggcaggcagatcacctgaggtcaggagatcaagaccagtctggttaacatggtgaaaccccgtctttactaaaaataccaaaaaattggctgggtgtggtggcgcttgcctgcaatgccacttacttgggaggctgaggccggagaatcacttgaacctgtgaggcagaggttgcagtgagcagagattgtgccattgcactccagcctaggcagcaagagggagactccatccccccmaaaaaaagaaaacttgccacaaaactttatgggcatttttgtgatgtggggtcccaaatgcccaatccccagtaaaaagacagatgtgccagctgatcctgcctctccccatcctggtgattccatcccagtgactgtccagagactctgaaatgtgaaggaggagccccagggcagaggggacactggcaatgattagactggggttcctgctgtctagccttttggcctccccttagtcctttcacatttccaacctggggttttccagcctctcgcaggctctgggagctttggataaccttcctgtgac

SEQ ID NO: 272957 - DNA, 602 bp, Homo sapiens
ggccaggcacagtggcttacacctgcaatcccagcacttcgggagaccgaggcaggcagatcacctgaggtcaggagatcaagaccagtctggttaacatggtgaaaccccgtctttactaaaaataccaaaaaattggctgggtgtggtggcgcttgcctgcaatgccacttacttgggaggctgaggccggagaatcacttgaacctgtgaggcagaggttgcagtgagcagagattgtgccattgcactccagcctaggcagcaagagggagactccatccccccaaaaaaaagaaaacttgccacaaaactttatgggcatttttgtgatgtggggtcccaaatgcccamtccccagtaaaaagacagatgtgccagctgatcctgcctctccccatcctggtgattccatcccagtgactgtccagagactctgaaatgtgaaggaggagccccagggcagaggggacactggcaatgattagactggggttcctgctgtctagccttttggcctccccttagtcctttcacatttccaacctggggttttccagcctctcgcaggctctgggagctttggataaccttcctgtgac

SEQ ID NO: 272958 - DNA, 602 bp, Homo sapiens
ggccaggcacagtggcttacacctgcaatcccagcacttcgggagaccgaggcaggcagatcacctgaggtcaggagatcaagaccagtctggttaacatggtgaaaccccgtctttactaaaaataccaaaaaattggctgggtgtggtggcgcttgcctgcaatgccacttacttgggaggctgaggccggagaatcacttgaacctgtgaggcagaggttgcagtgagcagagattgtgccattgcactccagcctaggcagcaagagggagactccatccccccaaaaaaaagaaaacttgccacaaaactttatgggcatttttgtgatgtggggtcccaaatgcccaatccccagtaaaaagacagwtgtgccagctgatcctgcctctccccatcctggtgattccatcccagtgactgtccagagactctgaaatgtgaaggaggagccccagggcagaggggacactggcaatgattagactggggttcctgctgtctagccttttggcctccccttagtcctttcacatttccaacctggggttttccagcctctcgcaggctctgggagctttggataaccttcctgtgac

SEQ ID NO: 272959 - DNA, 467 bp, Homo sapiens
tagcagaattgatcaaacagaagaattagtgagcttgaaggcaggccatttgaaaacacacagtgaaaacacataagaaaaaaaattaaaaacaataaagctcacataaaagatctaaaaaaaatagcctcgaaagggcacatctaagagttattggccttaaagaggamgtagagaaagagataggggtagaaagttcattcaaagtgataataacagagaacttcccaaacctacagaaaaatatcaatatctaagtacaagaaggttatataacaccaagcagattaaatccaaagaagactacctcaggacatctaataataaaactcccaaaggccaaggataaagagatgatcctaaaagcagcaagagaaaataaacaaataacatacaatggagttccaatgtgtctggcagcaaacttttcagtggaaaccttataggccaggagagaatggcatgac

SEQ ID NO: 272960 - DNA, 476 bp, Homo sapiens
ctacaagacaggcagtaacaaaatacagtgctccatcctgataagccatgagaaacgaagtcttctaaaggggcagaagcgggaaaggcagcgtatcgaaacaaatkccctttgagaccaaatttatctgtgccacagaatagagatggttattgggaatccaaaaaaattcctgtcctcacaagcacaaagccttctgaaaatcctgatctggaggtgggacagctgaatagacttgagtcaccccgtctttaacaactctcagtcccatatcccccttcagatattttcctctctcattgtcctttcacagccaaccttcttgaaggagttggtggagaagtagtactgctgatcattgagataatgtacatgatcagtacatgatcacagagatatgctaagttgagcagaacacttttatgagccacccttccctttgcataggcccgtttggggtatagggggattgcatc

SEQ ID NO: 272961 - DNA, 481 bp, Homo sapiens
tttttttttctctgtcactttgcaagcgaggaacccccagccagcgacaccccccacccaggcctcactaggccataccggtgtgccccagctcgcctgtgttatagcttgtacctgaattcggcagttcctgagctcttgtaccacacccaagaagcatgaggaaacaygggacgttgaaggatgaggaaggcagagaagaattttactgggtgatgaaaacagctttcaatggagatgggatgtgaggtttatattcatacacgaaggtgggaaagggtctggggccttttatggactcagaatggggagtgtgtgctgattagtttgtgaatatgcaaaaaaggttaaagcaaagacaccactcaaaggtggacatgacagtgtagaaaaccaatgaggaaaggggagttatatgtaaaataggtgaagggtggggataaatcagaggaaagtgcaccaaacaggaaggcaagttctc

SEQ ID NO: 272962 - DNA, 481 bp, Homo sapiens
tttttttttctctgtcactttgcaagcgaggaacccccagccagcgacaccccccacccaggcctcactaggccataccggtgtgccccagctcgcctgtgttatagcttgtacctgaattcggcagttcctgagctcttgtaccacacccaagaagcatgaggaaacatgggacgttgaaggatgaggaaggcagagaagaattttactgggtgatgaaaacagctttcaatggagatgggatgtgaggtttatattcatacacgaaggtgggaaagggtctggggccttttatggactcagaatggggagtgtgtgctgattagtttgtgaatatgcaaaaaaggttaaagcaaagacaccactcaaaggtggacatgacagtgtagaaaaccaatgaggaaaggggagktatatgtaaaataggtgaagggtggggataaatcagaggaaagtgcaccaaacaggaaggcaagttctc

SEQ ID NO: 272963 - DNA, 562 bp, Homo sapiens
gtttgggagagatgtgagatgaaaagctgaatcagctactagaatgtatcaagggacaaatgtggcacaaatgcctggagtctgtcctctgacacaaaatgggaacaattctaggtggccctgccacagctgtctccttgcaggatgccaatagcaaccttcagagttggcctgggaggctaccccaaaggcaggtatcctccctatgtagtgacaggccatgtcctgggttgggtttggaactggcagcagcctggagactatcactgtgagaggtaaagccagctagacttctggstcaggtggggacttggggaacttttctgtcttagaagaggattgtaatatgcaccaatgagtgcgctgtagctaggattgtaaaacacaccaatcagcactctttggctagctagaggtttgtaaaatgtgccaatcagcactctgtaaaaatgtaccaatcagctgtctgtggctaggtagaggtttataaaatggaccaatcagcgctctgaaaaatggaccaatcagcactctgtaaaatggaccaatcagcaggacatgg

SEQ ID NO: 272964 - DNA, 582 bp, Homo sapiens
ttccgggctcctctctggcctcttgacactcctgctgctcttgttcctgtcactgccaccatcagcgctgctctaatgcttgtgtttctcctgttcaggggtgcgctgtggctgcaccttcctccttgccatcgctacatcagccttaccacaaagcttgtttgaccacctcaaagaggcccatctgccatgaatcctgctagagatgcagaataggaatgctcccaggttctcccgcagacaaaggtgctgacggggacctggaggggctgctccaaaagttcttgggaaggcccaagataagatctggctacaagttcayggttctctgggcgtctttccttctgtggtttaagtaaccatactctgctccagacctgtgagcacttgttttgggtaactccagatgggagagttacaaagtaggtaacattttttttcctcctataatttaatctattttaatttatgaagtttatgtagttattcattagttgcattaaagttaaattgtattaaatttagttcattcaaattattttctttggtttgaattcatttcacttagttaattttagttca

SEQ ID NO: 272965 - DNA, 520 bp, Homo sapiens
ggagtttcaatctatctgaaactgtattatccctttttcattagactgcactcacttkatgaatagggactctatttcctatgtttcagtttctgcctcacctggaccacctctgtgtgtatgtgtacatactcacacatacaatgtcataattttatttggcacatgagtataatccctcaaaagttcattgctggaagccatttctgtcaacgagaatagatgtgtatgtggttacctagtggtagtggtgatagtgagattggtgtttaaaatataaaaccttgggcagctaggagaagaaaatattatttcagggttgtatgcttatagtgaatctgtaaggccaaaaaaaaaaaaatggcagcagtaataacaagcctcagcagtcttccacctggcatcctacatgagtgtcttacacactgtggttgcaaaaaaatagtgactcatgaagtcaatttagaaagttatatccacatttaaataaataaatacaataccatattcactaaaaata

SEQ ID NO: 272966 - DNA, 618 bp, Homo sapiens
aataacaagcctcagcagtcttccacctggcatcctacatgagtgtcttacacactgtggttgcaaaaaaatagtgactcatgaagtcaatttagaragttatatccacatttaaataaataaatacaataccatattcactaaaaatatatatttaaaatgagatagaatggaaaatatcagaatacattgtgtgctgtaagagcatcattttgtaaacttttatttgtgtaaaagcacatactgattcatgataaaaatatgtttcttaaagcgagtcatgatcaaatgtgtttaaaacccattgttctaaggtgttgtgaggctttccttgatttaattaggtaataggtgatgaagtatatgatttaatggatacttctgccttatagaaaaggatttttaaaagacacagaaactgctaagccaaagtgaaagatctttccttagaagaaagcgggtgtgagcagtcaaagacaccatcctggagctgccaacagggggagacatacaggtaactaagcaatttccctgctaggtccacctattacgggacttttgacaacagacaatagcttacgcgactcataaatagagacttggataaacaaactacag

SEQ ID NO: 272967 - DNA, 511 bp, Homo sapiens
tcagcctctcaggtatctgggattataggcatgtgtaaccacacctggctaatttttgtatttttagtggaggcagggtttcaccatgtgggccaggctggtctcgaactcctgacctcaggtgatctgcccacctcagcctcccaaagtgccagcattacaggtgtgagccactgcgcccagactttcctccatttttgaagccaccggtgtagcatcttacttgtgttgtaagatgctttcattgccttcatcttctgtgtcaaatatccctctccctagctcccaccctgttaaggagggagaatctctctgtctgtctcaatatccttagtcacatccacgaagcccctttttctataaaaggtaatattcacaggttttaaggattaaggcctgaatatctttgggggccaattagcctaccacaaagtttaaaccmtaattttaattgatgaaataaaatatgttgttccattgattacacagcctaatctctttcttggtattg

SEQ ID NO: 272968 - DNA, 472 bp, Homo sapiens
ggtgttcttggtgttagtgcctgtttataaatcatttcatcttaagatatttggtcacctctagattggaatatctcagagccttttccagatagtgttaggtagcctttcaccttttgtcctatagagctatctacatacaaagattctctactttaccaatcttcagcgatatcaccactgatatcaccaaagattttaccttcttgatggtctctctcctaagttcatcatggttggtaatcactagagagaagtatgatgtgaggaatacaacatgattcttcccagcgagacaaagaacttaaaaaatgtrcacatacaccattgagggaaaccaatgatgggattagacctggctattagaaactgactcagcttggagtcagaagggatatagtaggtcttatataaacaagatgcttgcctacagcttcacttcatgcttctttcactattctattagaatcta

SEQ ID NO: 272969 - DNA, 555 bp, Homo sapiens
tcagtgcccctatgttaaaattaaggaacagttataatatctccatggctggcaaagataaaacagcatttatgtgttcaagagagttttcttcagcatgaacagtacatatcaagaaagccttccagtgactaatggaattaggctttatggaatcacattatttgcaaagtgtaatttacctggaccataatttgttcagcaagattctggaagagcaaagctctttatgtatggaatgtatctgattcacttgatgaatgagaattcttcctctcagtggagttgagggcatggttccacacaaagaatraacttcaggtaactgaaaccccaagtcaatcattgcttttctagatggagagaggactgagaaaagttctgtgggaaaactcctaattgcataagaccgtcagagggaaaagtttcactatccagtttagacagagtctgcttttctcccagtagatatggagggccctactgagaccagaacaatttatctcaagcagtgttctatactgaggattgccgtgctctgaacaagctggggga

SEQ ID NO: 272970 - DNA, 555 bp, Homo sapiens
tcagtgcccctatgttaaaattaaggaacagttataatatctccatggctggcaaagataaaacagcatttatgtgttcaagagagttttcttcagcatgaacagtacatatcaagaaagccttccagtgactaatggaattaggctttatggaatcacattatttgcaaagtgtaatttacctggaccataatttgttcagcaagattctggaagagcaaagctctttatgtatggaatgtatctgattcacttgatgaatgagaattcttcctctcagtggagttgagggcatggttccacacaaagaatgaacttcaggtaactgaaaccccaagtcaatcattgcttttctagatggagagaggactgagaaaagttctgtgggaaaactccyaattgcataagaccgtcagagggaaaagtttcactatccagtttagacagagtctgcttttctcccagtagatatggagggccctactgagaccagaacaatttatctcaagcagtgttctatactgaggattgccgtgctctgaacaagctggggga

SEQ ID NO: 272971 - DNA, 555 bp, Homo sapiens
tcagtgcccctatgttaaaattaaggaacagttataatatctccatggctggcaaagataaaacagcatttatgtgttcaagagagttttcttcagcatgaacagtacatatcaagaaagccttccagtgactaatggaattaggctttatggaatcacattatttgcaaagtgtaatttacctggaccataatttgttcagcaagattctggaagagcaaagctctttatgtatggaatgtatctgattcacttgatgaatgagaattcttcctctcagtggagttgagggcatggttccacacaaagaatgaacttcaggtaactgaaaccccaagtcaatcattgcttttctagatggagagaggactgagaaaagttctgtgggaaaactcctaattgcataagaccgtcagagggaaaagtttcactatccagtttagayagagtctgcttttctcccagtagatatggagggccctactgagaccagaacaatttatctcaagcagtgttctatactgaggattgccgtgctctgaacaagctggggga

SEQ ID NO: 272972 - DNA, 610 bp, Homo sapiens
ctagataaagaaaatatggtacatatacaccatggaatactacacagctataaaacataatgagatcatgtcgtttgcagcaacatggatggaaaggacatgtgaaggccactgtcctaagtgaacgaatccagcaacacaaaacctaacactgcatgttcacccttataagtgggaactaaacattgagtacatatggacaccaaaaagggaatagatactagggcctacttgagggtagagggccggaggagggtgagatcctacagtatctcctagtcaggatggtaggtgcatattctttgagttattactatcctttaaaaccttcaaaagaccatgaatattatgagtatttaatacttaattaaartaagtatagtttaacccttttcctgtttgccctgagaacacttgccagtgatacttgcagctgcagcatttaccccaagataactttgccacaaaatatctcacttttatgattatttttgcattattctagtatatcaactttgaaaacaaaagacatcattctatttagagcattttgtttttagtagtggtatttacacttacaaaatataattttcaatcactgaaaatgtca

SEQ ID NO: 272973 - DNA, 604 bp, Homo sapiens
gcagtactacactatggttaggtatgagaaataccttgatgtccattttgcatgccctstactcttcaccaaaagcactgtttataaatttaagagtgggctttaaaaggcaaggtaacaggactagtttggtgggaagataatgtcgaactttctatattcagtctcaaggcatgtgtgtttgctaatgagaagtttattaagtcttttacgtccattgccccctttaatcatcctgtaaaatagacaggtcatctccttttctgcagatgagaaaactaaggtaaagtaacttgctcaaagtcagacaaaacagttgctgatgaaggcagattcaatcctaaattttctgactctcaaaccagtgctttttgcactagagtatcctacccctctgtaccttatattgtctcaataatgcatgtggacctgccatccaccatccatgaatttatgcagacacttttataattttcagacttacaacataaccaactcataccaacttggagtaactagttccataagactggaaaaatggaaagcaaaatttttctcctccctccctccctccccttccctcattccctcctttccttctttt

SEQ ID NO: 272974 - DNA, 604 bp, Homo sapiens
gcagtactacactatggttaggtatgagaaataccttgatgtccattttgcatgccctctactcttcaccaaaagcactgtttataaatttaagagtgggctttaaaaggcaaggtaacaggactagtttggtgggaagataatgtsgaactttctatattcagtctcaaggcatgtgtgtttgctaatgagaagtttattaagtcttttacgtccattgccccctttaatcatcctgtaaaatagacaggtcatctccttttctgcagatgagaaaactaaggtaaagtaacttgctcaaagtcagacaaaacagttgctgatgaaggcagattcaatcctaaattttctgactctcaaaccagtgctttttgcactagagtatcctacccctctgtaccttatattgtctcaataatgcatgtggacctgccatccaccatccatgaatttatgcagacacttttataattttcagacttacaacataaccaactcataccaacttggagtaactagttccataagactggaaaaatggaaagcaaaatttttctcctccctccctccctccccttccctcattccctcctttccttctttt

SEQ ID NO: 272975 - DNA, 604 bp, Homo sapiens
gcagtactacactatggttaggtatgagaaataccttgatgtccattttgcatgccctctactcttcaccaaaagcactgtttataaatttaagagtgggctttaaaaggcaaggtaacaggactagtttggtgggaagataatgtcgaactttctatattcagtctcaaggcatgtgtgtttgctaatgagaagtttattaagtcttttacgtcyattgccccctttaatcatcctgtaaaatagacaggtcatctccttttctgcagatgagaaaactaaggtaaagtaacttgctcaaagtcagacaaaacagttgctgatgaaggcagattcaatcctaaattttctgactctcaaaccagtgctttttgcactagagtatcctacccctctgtaccttatattgtctcaataatgcatgtggacctgccatccaccatccatgaatttatgcagacacttttataattttcagacttacaacataaccaactcataccaacttggagtaactagttccataagactggaaaaatggaaagcaaaatttttctcctccctccctccctccccttccctcattccctcctttccttctttt

SEQ ID NO: 272976 - DNA, 356 bp, Homo sapiens
gcaaaccaccatggcacatgtatacctatgtaacaaacctgcatgttctgcacatatatcccagaacttaaagtatagtaaaaaaaattaacatcaaaaaaaaagaaagaaaaagggacagagtaaaatgtctccttaggaaccaagaacctgatgccaaggaaataactaaggaatagcacctattgagtcacttgtgtgaagagatcctaataagaaaagacagatggtctagaagtgccagctgctctgaactcaccaagagaggaaaaaggtgggtgattttaaagmctccttaaagtctaagcccaaggaaggagcagcattctcaaacatctaattttgttgagagataa

SEQ ID NO: 272977 - DNA, 597 bp, Homo sapiens
attaaagtgacttttaaaatattgtagaatggaatacatcaacatttcgaaggtctgtataactcagtgagctaatattttccaaatgatcagtgtatgatgttacaagaccatgcatagctaaagaatttatttaaggtgcaagataggccagtgaattttaatccagcagaaaatgaaaagttcatggaaattatttcagattccatatcaaagctgtactttaagaaactactacttgccaagtttttgtgtagtattgaagaatattcacaactatctgaaaaggctattacagtattcttcccttttccaactacatattttgtgaagcttcattttctacatatatgtcagccaaaacagcatttaagtacagactgaatccaaaaacagaaaaatctagmtatcttctgttgagtttcaaaagacatgcaaaatgtaaatgaatgccactgttctcacttctattttatactttaaaaaattcgtaaaaatatattagatatattaagctgtaattattttgttactttaaaatgaattaacacaaatatattttaacatttctcagtttaatttctaatatgataaagt

SEQ ID NO: 272978 - DNA, 597 bp, Homo sapiens
attaaagtgacttttaaaatattgtagaatggaatacatcaacatttcgaaggtctgtataactcagtgagctaatattttccaaatgatcagtgtatgatgttacaagaccatgcatagctaaagaatttatttaaggtgcaagataggccagtgaattttaatccagcagaaaatgaaaagttcatggaaattatttcagattccatatcaaagctgtactttaagaaactactacttgccaagtttttgtgtagtattgaagaatattcacaactatctgaaaaggctattacagtattcttcccttttccaactacatattttgtgaagcttcattttctacatatatgtcagccaaaacagcatttaagtacagactgaatccaaaaacagaaaaatctagatatcttctgttgagtttcaaaagacatgcaaaatgtaaatgaatgccactgttctcacttctattttatactttaaaaaattcrtaaaaatatattagatatattaagctgtaattattttgttactttaaaatgaattaacacaaatatattttaacatttctcagtttaatttctaatatgataaagt

SEQ ID NO: 272979 - DNA, 452 bp, Homo sapiens
gccaaagtagttatactttaaaaagacagggtaaggaagagaaaatagatacatggagagagtcccatcaatttgcagaaggcacttgttcagtcattagctgagtagtgatcagcacatgtatgtgaggaaactacttgaggccaagaacaaagctgtatcagacaagcagagggaaaaaatccttgcagcttgcataaggtcaggaatatttcacatgcctcatagccagaaagaaaaatctcataattctcgaggcattgaacagagtatttaagctctagttacagcaaaacaaagcttaaaaagcaagattggagaggaaaataaataattccaagtaatttaactgtatcccrtaataaagtttaagaatatttataggaattaaaagatacagcactcaaaaagtaaaattcataatgtgtgtcatttaataaaaaattaacagg

SEQ ID NO: 272980 - DNA, 566 bp, Homo sapiens
acatattatatacagaaaaccctgaagaccttaccaaaaaccgttagaacaaatgaacaaattcagtaaagttgcaggatacaaaatcaacatgcaaaaatcagtagtgtttctatatgctaacagtgaataaattaagaaaacaatctcatttacaataacatcgaaaataaaatttaattcttaggagtaaatttcaccaaggaagtgaaagatctgcatactgaacacaataaatattaataaaagaaattaaagacccaaaaaatgaaaagatattccatgttcaaggattgagtgaatattgttaaaatggtcatactaccccaaagcaatctaacccctatcaaaattctaatgaaaattttcacagaaatacgaaaaagtattcttgaaattcgcaatgctgtgacacttgcctcttctgactttsaaatttctgtaacccacctcaggattattaggagcttataagctgctttacaacattaacaactgccatagtcgaagcaaatgtttgacgcactggttataaggtaaaatctagggcctgatttccccattcc

SEQ ID NO: 272981 - DNA, 566 bp, Homo sapiens
acatattatatacagaaaaccctgaagaccttaccaaaaaccgttagaacaaatgaacaaattcagtaaagttgcaggatacaaaatcaacatgcaaaaatcagtagtgtttctatatgctaacagtgaataaattaagaaaacaatctcatttacaataacatcgaaaataaaatttaattcttaggagtaaatttcaccaaggaagtgaaagatctgcatactgaacacaataaatattaataaaagaaattaaagacccaaaaaatgaaaagatattccatgttcaaggattgagtgaatattgttaaaatggtcatactaccccaaagcaatctaacccctatcaaaattctaatgaaaattttcacagaaatacgaaaaagtattcttgaaattcgcaatgctgtgacacttgcctcttctgactttcaaatttctgtaacccacctcaggattattaggagcttataagctgctttacaacattaacaactgccatagtcgaagcaaatgtttgaygcactggttataaggtaaaatctagggcctgatttccccattcc

SEQ ID NO: 272982 - DNA, 536 bp, Homo sapiens
aaaattaaaaggctatagcagtcataatatttggagataaaatagctatagacaaggaattacacatgaagtccaggcagatcaaagctgatgcaagtccccttcctaacagaaagtttggggagtagaggcggggtggggtacagctctggtatgrcttagtagaatattgctaggctataaggaattaaaaaaaaaaaaaaaacctatgattgatttcttttttcgtcaaacttctgttcaggctgttttctgtgattcaacattaaatgttggtttgaaattgtaaaacataaaccaggctgctagagctaaaaattaatccaaaaagaaaacaaagcatctatacagaatacgcaaaaactaaccaagacctggctcaattctactaattcttcatcccttaatttctcattgagaaatcagagcattgagaggttgtaagtagaaatggagatggtcttgtttgagtggcattgaaagatgagcctggaagaggaattttggtgcaagtagtaatttcagagatgatacca

SEQ ID NO: 272983 - DNA, 536 bp, Homo sapiens
aaaattaaaaggctatagcagtcataatatttggagataaaatagctatagacaaggaattacacatgaagtccaggcagatcaaagctgatgcaagtccccttcctaacagaaagtttggggagtagaggcggggtggggtacagctctggtatgacttagtagaatattgctaggctataaggaattaaaaaaaaaaaamaaacctatgattgatttcttttttcgtcaaacttctgttcaggctgttttctgtgattcaacattaaatgttggtttgaaattgtaaaacataaaccaggctgctagagctaaaaattaatccaaaaagaaaacaaagcatctatacagaatacgcaaaaactaaccaagacctggctcaattctactaattcttcatcccttaatttctcattgagaaatcagagcattgagaggttgtaagtagaaatggagatggtcttgtttgagtggcattgaaagatgagcctggaagaggaattttggtgcaagtagtaatttcagagatgatacca

SEQ ID NO: 272984 - DNA, 642 bp, Homo sapiens
ttgctggttcctctctgccctytaaatatcccaagattctcccctgtggcccattttttttaactggaaacacacaagaataaattatgggaaatatagcctagccaaatacacactacaaagccagcacagaactaaacacatttaattcactttttaacacctttaatttagggtttcttttctagatccagtgacattaatgtcttttagttaccgatttacctgatctagaggtaggttttttttgttttgttttgttttcttcaaacaagtgttaaactattgtgcctctagttcatataattgcctgaaagagaaagttattccttgaattcaaagctcatctattccctctgttgggaatctcccaaagatatgctcatccttccctcagatcagaaccctattgatgtattgaggatgtgtctttcttattacaattaaccctgttccccaccaagaccttcagatattaatctttcatcacaccagctgaatgtaacacatactcccctattcagaactgaagtgactctgtatctgagttaggaaaaaatcccaagacttccccctccactggagcttggtccttgtgactttgtcttctcttgataccctcgacgttccctactccaaagg

SEQ ID NO: 272985 - DNA, 642 bp, Homo sapiens
ttgctggttcctctctgccctctaaatatcccaagattctcccctgtggcccattttttttaactggaaacacacaagaataaattatgggaaatatagcctagccaaatacacactacaaagccagcacagaactaaacacatttaattcactttttaacacctttaatttagggtttcttttctagatccagtgacattaatgtcttttagttaccgatttacctgatctagaggtaggttttttttgttttgttttgttttcttcaaacaagtgttaaactattgtgcctctagttcatrtaattgcctgaaagagaaagttattccttgaattcaaagctcatctattccctctgttgggaatctcccaaagatatgctcatccttccctcagatcagaaccctattgatgtattgaggatgtgtctttcttattacaattaaccctgttccccaccaagaccttcagatattaatctttcatcacaccagctgaatgtaacacatactcccctattcagaactgaagtgactctgtatctgagttaggaaaaaatcccaagacttccccctccactggagcttggtccttgtgactttgtcttctcttgataccctcgacgttccctactccaaagg

SEQ ID NO: 272986 - DNA, 536 bp, Homo sapiens
taactgtaactttgtgcctcttgaccaatctctccttctccccaccttgagagatttttgattgattaaatcaaaatgatttgtagaggtttaraaatatactaggggaagcaggttctatttaccagttgtatgacattgtccaagttaccagcctttgattcttagccttttcccctgtaaaatgagaaggttggactacagctgcattttccaaagtgtgttccttagaaaagtactttcatgagacattaataggtataacaaaagaaatcatgggtgagtagctttggaaaacactagtttaatatgtctgttgacaggaagactttctagagcctgtattatctcaacctgtttcatggatatgaatctcagtcacaaactctgatgcataataaaattaactatgctatctagatctcaacctgccaaaggtgataatcttctcttcagtaatgttgggggtcttgattccagaatcttcacagatatgggtagcctatcctgtcctaagtcatcagtccaccaagttt

SEQ ID NO: 272987 - DNA, 570 bp, Homo sapiens
tcattcagcagaaatatgataacttggctgagygtggtggctcatgcctataatcccagcactttgggaggtcgaggtgggcggatcacctgaagtcaggagttcgagactagcctgaccaacatggagaaaccctatctctactaaaaatacaaaattagccaggtgttgtggcacaagcctgtaatctcagctactcaggaggctgaggcaggagaatcacttgaacctgggaggtggaggttgtggtgaaccgagatcgcgccattgcactccagcctgggcaacaagagcgaaactccatctcaaaaacaaaacaaaacaacaatgaaatatgataacttcactcagttttaataatttgaagaacgagtacatcttacagataaaatgagtgtcttaagcattttacaagctaccttctcacctttttactgctttacttgatgctaaaataagttttcaggcaaatagcttgtcatctatttagtcatggctatttgtatttaattatatttctttcctaaatatttcatgagtctcataaaacttgcatgtgttgaaacttgt

SEQ ID NO: 272988 - DNA, 570 bp, Homo sapiens
tcattcagcagaaatatgataacttggctgagtgtggtggctcatgcctataatcccagcactttgggaggtcgaggtgggcggatcacctgaagtcaggagttcgagactagcctgaccaacatggagaaaccctatctctactaaaaatacaaaattagccaggtgttgtggcacaagcctgtaatctcagctactcaggaggctgaggcaggagaatcacttgaacctgggaggtggaggttgtggtgaaccgagatcgcgccattgcactccagcctgggcaacaagagcgaaactccatctcaaaaacaaaacaaaacaacaatgaaatatgataacttcactcagttttaataatttgaagaacgagtacatcttacagataaaatgagtgtcttaagcattttacaagytaccttctcacctttttactgctttacttgatgctaaaataagttttcaggcaaatagcttgtcatctatttagtcatggctatttgtatttaattatatttctttcctaaatatttcatgagtctcataaaacttgcatgtgttgaaacttgt

SEQ ID NO: 272989 - DNA, 545 bp, Homo sapiens
ttttgactgtcttgatagtgaaatacacacacatgcttttcagatgaatcacttacctcagagcattattttcaaatacattcawccatatatgaaagtggcactgtatttacaaatcttttaaaatttcaagtttcttgtatatacataccagcaccgtctgttttaattctgttagatggtatactgggctctcctctacccagtgtattggttgctaccacgcggaattcatactccatccatgggattaagtccactgctcttgctgcctccatatttccttcaataattgggggatctgaataaaataaatagtaaatagagaatacaggttgattaacttatcacttttataacttccctttttattttactatttcagggagaatggtatatattacactgagttgaagtaaaaactacaactaggaatgacaaaatgttaaattcaagggagtaagagaagaggtttaataaataataaacttacaaagagtgatatgcatatgaatcacctatgtaagtaagtttgaggcagggag

SEQ ID NO: 272990 - DNA, 545 bp, Homo sapiens
ttttgactgtcttgatagtgaaatacacacacatgcttttcagatgaatcacttacctcagagcattattttcaaatacattcatccatatatgaaagtggcactgtatttasaaatcttttaaaatttcaagtttcttgtatatacataccagcaccgtctgttttaattctgttagatggtatactgggctctcctctacccagtgtattggttgctaccacgcggaattcatactccatccatgggattaagtccactgctcttgctgcctccatatttccttcaataattgggggatctgaataaaataaatagtaaatagagaatacaggttgattaacttatcacttttataacttccctttttattttactatttcagggagaatggtatatattacactgagttgaagtaaaaactacaactaggaatgacaaaatgttaaattcaagggagtaagagaagaggtttaataaataataaacttacaaagagtgatatgcatatgaatcacctatgtaagtaagtttgaggcagggag

SEQ ID NO: 272991 - DNA, 545 bp, Homo sapiens
ttttgactgtcttgatagtgaaatacacacacatgcttttcagatgaatcacttacctcagagcattattttcaaatacattcatccatatatgaaagtggcactgtatttacaaatcttttaaaatttcaagtttcttgtatatacataccagcaccgtctgttttaattctgttagatggtatactgggctctcctctacccagtgtattggttgctaccacgcggaattcatactccatccatgggattaagtccactgctcttgctgcctccatatttccttcaataattgggggatctgaataaaataaatagtaaatagagaatacaggttgattaacttatcacttttataacttccctttttattttactatttcagggagaatggtatatattacactgagttgaagtaaaaactacaactaggaatgacaaaatgttaaattcaagggagtaagagaagaggtttaatawataataaacttacaaagagtgatatgcatatgaatcacctatgtaagtaagtttgaggcagggag

SEQ ID NO: 272992 - DNA, 557 bp, Homo sapiens
attattaacataactcctgcagtgactaggtttgatccagcagttgttggacaactcccagcacagggagtttccagagccttaattgtccttcagaagctttgagtacaacttctagaagcacattttaatattttaactatatgtcaggccgtgaacagcacctctgtatctaaactaacctaggttttttcaaattttccctaaggtttccattagctgctaccaagttctcacaacaacttcaatattttattttgctcatttagttagactcagaaataattttgctgaaacattccttgatggaacacatgtaagaatggaaaggaaattttaaaataatcctccaagatgtactttctaccagaataattttcattaatgaaataaagtcttagcctccagagttatattttagtattataatgtgccaatgatttttttctacgataaaataaaacttactcttcaaacattacagattttcaaaaacrttttgttctctagtaaattaattcattcaataagtgtctaaacaccaaccatatgtcagg

SEQ ID NO: 272993 - DNA, 514 bp, Homo sapiens
atggattggtatggtttatttttatgcaaaatgatgaattctgattataaaagttcccaaatatttaacgttgaacataaacagaaagtcacaaaataatacatataaggtcatgcatcacataacaaagtttccatcaatgatgtaccacatataagatggtggtcccataagattataattctacacttttgctgtaccttttctatatttatgtatgtatatatatatacaaatacttgccattgtattacaattggctacagtattcagcacagtaatatgcttatgctgtggaggtctgtatcctgagagcaatagrttataaatacactatgccttctaggtatagtcatatgttcgcacaatgaggaagttgcctaatgacatttctgtgaagacattcctgtcattaagcaacgcataactataagcccatttatatgaagtttaaaattagaaaatacattgatgtttaaaggggtttgtgtgtttaatacacacacacacacac

SEQ ID NO: 272994 - DNA, 627 bp, Homo sapiens
tgtcacatggtgagagagggagcaacaaagagagaagcaaggtgctaggctcttcgtaacaatcagttcttgcaygagctaataaagcaagaactcactcattattggaagaaaggcacaaagtcattcattgggaatccacccccatgacccaaactcctcttattaggccccacctccaatattggggatcaaatttcaacatgagatttagagtggacaaatataccaactatgtatcaccatctgatatgatttctttacaactttgctcctacctgtcccctttgtgcagctagtatcaaatatattacatttaaatatattatagatccaataagacaattatatatatacatgcatatataaatgcacaacatatgtgtgaatatatatacatacatatatagttttctacaattacttttaaataagttaagagaagatagaagaaaaaataagtatttatatcatcttttataattacaaaattacctttaccaatgctcattattttgggggagtttattcaaattgctgtttgggatcaactactttcaacttgaagaactttaattttgttttgtaagataagtcttttactaacagtttctctcagtttttgtt

SEQ ID NO: 272995 - DNA, 627 bp, Homo sapiens
tgtcacatggtgagagagggagcaacaaagagagaagcaaggtgctaggctcttcgtaacaatcagttcttgcacgagctaataaagcaagaactcactcattattggaagaaaggcacaaagtcattcattgggaatccacccccatgacccaaactcctcttattaggccccacctccaatattggggatcaaatttcaacatgagatttagagtggacaaatataccaactatgtatcaccatctgatatgatttctttacaactttgctcctacctgtcccctttgtgcagctagtatcaaatatattacatttaaatatattatagatccaataagacaattatatatatacatgcatatataaatgcacaacatatgtgtgaatatatatacatacatatatagttttctacaattacttttaaataagttaagagaagatagaagaaaaaataagtatttatatcatcttttataattacaaaattacctttaccaatgctcattattttgggggagtttattcaaattgctgtttgggatcaactactttcaacttgaagaactttaattttkttttgtaagataagtcttttactaacagtttctctcagtttttgtt

SEQ ID NO: 272996 - DNA, 450 bp, Homo sapiens
tgtattatataatcgctctgcaataaagtagaaccagtttttattcccatcatcagtatttgagtatctcttctgccatatctttacctagtattagtattatctttttaaaaatgaaaactctctaggtttattgtaggacagtatcctttttttttttttgcctttctgtttcttcagtttttgtagttctcatttcaaacatgaatttctagatttttatgaggctacattcgtatttcccttagagaaggatcaaggattcacaccttctgagatgccagaacacagcttgctttacttttgcttcatggaaatttscctaacctatggctccttccagagtcctgccaggcgatccatgggttgggtctaggacctgtaacataagactgagtaggtgcgttagaaccagtgagaagcctttaaattctcatttccagtctcaaa

SEQ ID NO: 272997 - DNA, 582 bp, Homo sapiens
ccaaaacaaatgtctagcagacttttgtctaattcagatttgagggacaaatgcgagaacatcttacagttcctaagaccgttattttttatatgaagacaaatatttatttatttaaagataggttctcactatgttgcctaggctggtcttgttcttccgtcctcaagcaatcctccagcctctgcctcctaagtatctgggattataggcatgagccaccatgcttagcaataaaagacttatttttaaaagctacacamcctaatttcaaatactttcacctttttcttgagtgctctccatctacataatttaactgtggggattctacttccaagtcctcagtgtgacattctcagtatcctttcttcttatccttctccctcagtaacatcagtttcctcaataacatcacagaatccctaactcaacactcccacccaccccaccatatgcattttgtcaaatacttctggaatttaagtccttgagtacatacagcaggaaagagaaattttaactggtaggagaaatatagcaatcatgatttaacacccaaaaaaccaaaggtgggtggcc

SEQ ID NO: 272998 - DNA, 604 bp, Homo sapiens
tataatagttctcaacaggcttctatgaatctaatgtctgcctatgagtcttgctacaacctcttctgaagaatatgaccttcccttcccttctaggaattgcctctaaatgttagacttcaatgcaaaataagacaggyggttgttaggactgtagtctctggtttaccctctgtcatacagaaaatatcttagtagggatgctaaatttaatacactcaattcagaacagtgttcaacttcatttttaatcagcaaaataggaaacaaacctatgtacaggttcattacacacccattagatggctaaaagtaaaaagattggcaatactaagtgttggtgagtatgttgagtgatagtagtcctcataaaagtgtagaagtgtgaattagtataattagcttaaccacattggaaagaaatttggcactttctattaagttgaccatatgcatatcatgtgactcaattcacttttaaatatatccaacaaaaatatgtaaacacatgtaccaaagaccatgctataatgtccacggctcaaatatttgtagtaggcataccctggaaataatccaaatgaccataaataatgcctaaatt

SEQ ID NO: 272999 - DNA, 607 bp, Homo sapiens
gcttgaaccccgagggcagaggttgcagtgagccgacatcgtgccaccactgcagtccagcctgggtgacagagtgagactctgtctcaaaaaagaaagaaagagagaaaagagagaaaagaaaaagaaagacaaaggaagaaagagagaaagagaaggaaggaagaaaggaaggaaggaakgaaggaaggaaggaaggaaggaaggaaggaaggaaggaaggaaggaaggagggaaggaaggaaggaaaagaaattaattcccaccatgactagatggagtggagaaagatggttcccccagaagaaatatcaggtggctgtcagcacgaagaccctccttttaccacattttaaatgtgcactattgcctggtgatgaaaggtgaaggaaaaccattgtcaatcagtcccatctacactgcttttattatttctaagaatgacatgaatatccaagggactttgaaacttcattagaaaagcttatccacattactcaggcacttcaattaattacagggaagagacgtgtcacattaaagtgctgcaaacacatgcactattttaagtgaactatattcgttatccacaaaacctcagtggcat

SEQ ID NO: 273000 - DNA, 537 bp, Homo sapiens
gctcacacatttggacagcagtaggtcagatacgtggctttgcttatctgaactgaactccctcacatgttcgggagtcagctgactgtcagctgttcaaagctgcccttagatggggcctttaggataacttggctccgcttcacttttctcccattctccatcaggctagacctagcacgttctcacggctgacagaggtgcaagaaagcgagtggaaacatgtagctactctctcaagcttttgcttgccttatgtctgttaacatcctattgacaagatcgagtcatattataaacccagagccaagaggcaaggcaggtcacccacatatgtgggtgggcactttaaaggtacagcaaagtgtgtggatatagggagtgttgaagaattggagctaaatgatgtaatgtaccacagatacttaccaaattccactggatctaagaggccatcaattttactattaaaaaagaaaaaaawttataattaaactataacacaatgcttgtttatcatgtagaattgttattctt

SEQ ID NO: 273001 - DNA, 533 bp, Homo sapiens
tcaccgcccacctggcctcgcagggcgtttatctcctatggaaaaaggggatgtggatgtacgcatctggacccatcctgacctctcactcccaagccttcccctacgaggggaccccactccccacaaggacccctcctttgttctccctctgctctgtctgaccctctaaatgatttttattcatctgctcagtattgcctccaccatcagactctatctcccccattagaccaagggctctccaaaataaaatctaattattaggcctatgccccaaacatttcccctctaatttccaagcttctatgtagatgttcagctttgagagtttgaaatgggacaagaaggagacttctttacttatcccccgccctcatgagggaggccagggcaggtagagggagcctctgcgggcccctgggaggttccttgggtactgagaagcagtgtggtacaaagaggagtctgccctgcacgctrgaccccaaggatcagggctctgcagacagggaagccctctaaggtgacta

SEQ ID NO: 273002 - DNA, 584 bp, Homo sapiens
aaatctactgcagtaatagttcatagtatctgtaataacattgaactagtttcttgcttaagttaagggacatttatttcttgttttgaactgcttagctttctaggtttgatgaattttaaagtatctattttatgacagtaaaaaagtacattaactaggtctctgtgctctagaattcaccaatgtgtaaagcattggttttcaggaaaggtaaatcaaagtacatgacaataacaaacatttgtatttttttttttttttagatggagtttcactcttgttgcccaggctagagtgcagtggtgccatcttggctcactgcamcctccgcctcctgggttcaagtgattctcctgcctcaggctcctgagtagctgggatttcaggtgtgtcccaccatgcctggctaattttttgtaattttagtagtgacagggtttcatcatgttggccagtctggtcccgaactcctgacctcaggtgatctgtccaccttggcctcctaaagtgcagagattacaggtgtgagccactgcgcccagccacatttgtattcttaccatggatattggacctgtgct

SEQ ID NO: 273003 - DNA, 582 bp, Homo sapiens
agaaagttgaagttcctgtaagcatatcaatgatttatcattttaaaagcattatrtattatttagagcttatattttgcttctaaatatttgacccttgaaataacagcctagatttcattctgcttgactctgagtcatgaaatgagatgagaaagtatgtctagatatactttgtggtactggaaatcatgcatcttcaacaagttaacataatgtatgatgatgatatctattccccaaggaatacaaagtgctttgcagaaattattttttaacctctgtccacttgtgagtcaaagtctacaggaaatggtgatagttccagtttgaaaaacagaagcaggcccagcatggtggctcacacctatgatcctaacactttgggaggctgaggcgggaggactgcttgaggccagaaactcgagtcagccagagcaacatagtgagaccccatctttacaaaattgtttctaaaaagctaggcatggtggtgcacatctgtaagccaaccacttggaaggctgaggcaggaggagcacttgcacccatgaggtcaaggctgccatgatggtgctactg

SEQ ID NO: 273004 - DNA, 537 bp, Homo sapiens
tcaagtgtgccagtgtgcagctgggcttcttttccagaattaaaagtattttgggtggtgctgaaggtcagcggaagaagtaaagattgcragaaaggagaaacatgggcttggggagatcccagaattggggacagaagacctggcactaggctacagcacttagcacctctgatcttgtttttcctcacctgtaaaaggagattaacaatgcttttctgcccgcctcttggggagaagggaagaatataattggtaaaaaaaaaaaaacaagaaaagaaaaaaaaaaagttgtgaaaaataagcaacactgtctttatagaggtagccaagcattattaattatccaccccatatcactggtagatacctgtattcaagcagtcacattttagaagtcatgaagttggtgctaataaacctaatctacagaaaaactcttgaaaaaacttgagcatttgttctgcgaatagaaaggtttgagattcagagcaagttcagagttggatcgactaagaatggaaaagccctccattc

SEQ ID NO: 273005 - DNA, 537 bp, Homo sapiens
tcaagtgtgccagtgtgcagctgggcttcttttccagaattaaaagtattttgggtggtgctgaaggtcagcggaagaagtaaagattgcaagaaaggagaaacatgggcttggggagawcccagaattggggacagaagacctggcactaggctacagcacttagcacctctgatcttgtttttcctcacctgtaaaaggagattaacaatgcttttctgcccgcctcttggggagaagggaagaatataattggtaaaaaaaaaaaaacaagaaaagaaaaaaaaaaagttgtgaaaaataagcaacactgtctttatagaggtagccaagcattattaattatccaccccatatcactggtagatacctgtattcaagcagtcacattttagaagtcatgaagttggtgctaataaacctaatctacagaaaaactcttgaaaaaacttgagcatttgttctgcgaatagaaaggtttgagattcagagcaagttcagagttggatcgactaagaatggaaaagccctccattc

SEQ ID NO: 273006 - DNA, 537 bp, Homo sapiens
tcaagtgtgccagtgtgcagctgggcttcttttccagaattaaaagtattttgggtggtgctgaaggtcagcggaagaagtaaagattgcaagaaaggagaaacatgggcttggggagatcccagaattggggacagaagacctggcactaggctacagcacttagcacctctgatcttgtttttcctcacctgtaaaaggagattaacaatgcttttctgcccrcctcttggggagaagggaagaatataattggtaaaaaaaaaaaaacaagaaaagaaaaaaaaaaagttgtgaaaaataagcaacactgtctttatagaggtagccaagcattattaattatccaccccatatcactggtagatacctgtattcaagcagtcacattttagaagtcatgaagttggtgctaataaacctaatctacagaaaaactcttgaaaaaacttgagcatttgttctgcgaatagaaaggtttgagattcagagcaagttcagagttggatcgactaagaatggaaaagccctccattc

SEQ ID NO: 273007 - DNA, 537 bp, Homo sapiens
tcaagtgtgccagtgtgcagctgggcttcttttccagaattaaaagtattttgggtggtgctgaaggtcagcggaagaagtaaagattgcaagaaaggagaaacatgggcttggggagatcccagaattggggacagaagacctggcactaggctacagcacttagcacctctgatcttgtttttcctcacctgtaaaaggagattaacaatgcttttctgcccgcctcttggggagaagggaagaatataattggtaaaaaaaaaaaaacaagaaaagaaaaaaaaaaagttgtgaaaaataagcaacactgtctttatagargtagccaagcattattaattatccaccccatatcactggtagatacctgtattcaagcagtcacattttagaagtcatgaagttggtgctaataaacctaatctacagaaaaactcttgaaaaaacttgagcatttgttctgcgaatagaaaggtttgagattcagagcaagttcagagttggatcgactaagaatggaaaagccctccattc

SEQ ID NO: 273008 - DNA, 542 bp, Homo sapiens
tgcttctgtagtatgaaaggctgtccctcacagaggattccagagcactggtaggaaattctgaatgtgagtccctaacataggattccagaacactgctgctgggttctgagggtttgtacctgccttaggatttcaggacactgttacgagggtctgattgtttctccctcacataggattccagaacactgctgctgggtctgaatgtttgtccctcacataggattccagaacactgctaagagtgtctcaatgtttktccctcacataggattccaaaacactgctacgaggttctgaatgtgagtccctcacataagattccagaacactgctgctgtggtctgattgtttgtccctcacataggattccagaacactgccgctgtggtctgaatgtttgtccctcacataggattccagaacactcctgctgtggtctgaatgtttgtccctcacttaggattccagaacagtactgtggggttctgagtgtttgtccctcacgtatgattccagaacactgctacttgggtcta

SEQ ID NO: 273009 - DNA, 532 bp, Homo sapiens
cagaacactgctaagagtgtctcaatgtttgtccctcacataggattccaaaacactgctacgaggttctgaatgtgagtccctcacataagattccagaacactgctgctgtggtctgattgtttgtccctcacataggattccagaacactgccgctgtggtctgaatgtttgtccctcacataggattccagaacactcctgctgtggtctgaatgtttgtccctcacttaggattccagaacagtactgtggggttctgagtgtttgtccctcacgtatgattccagaacactgctacttgggtctaaatatttgtccctcacataggattccagaacactgctgctggggtctgaatgtttgtcccttacataggagtccagaacactcctgttgtagtctgaatgtttgtccctcacataagattccagaacactgctgctggattccgagtgtttgtcyctcacataggattccagaacactcctacgggggtctgaatgtttgtccctcacataggattccaga

SEQ ID NO: 273010 - DNA, 580 bp, Homo sapiens
agaacactgctactcgggtctgaaagtttgtccctcacataggattccagaacactgctaccagggtctgaattattctccytcacataggattccagaacactcctgctgtgatctgaaagtgtgtccctcccctaggataccagaacactgctgttgtgttctgagtgtttttccctcatgtaagattccacaacactgctgttgtgttctgagtgtttttccttcatgtaagattccagaacactgctacgtgggtctaaatgattgtgcttcaaatacgattccagaacacttcttctggggtctgaaagtttgtccctcacatcggattccagaacactcctgcagtggtctgaaagtttgtccctcacatagtattccagaacaatgatgctgtgttctgaatgtgtgtccctcacataggattccagaacactccttctgtgatctgaatgtttttccctgacaaaggattccagaacactgctgctgggttctgattgtttgttcttcacttaggattccagaacactgatatgagggtctgatgtttgtccctcatataggattccagaac

SEQ ID NO: 273011 - DNA, 580 bp, Homo sapiens
agaacactgctactcgggtctgaaagtttgtccctcacataggattccagaacactgctaccagggtctgaattattctccttcacataggattccagaacactcctgctgtgatctgaaagtgtgtccctcccctaggataccagaacactgctgttgtgttctgagtgtttttccctcatgtaagattccacaacactgctgttgtgttctgagtgtttttccttcatgtaagattccagaacactgctacktgggtctaaatgattgtgcttcaaatacgattccagaacacttcttctggggtctgaaagtttgtccctcacatcggattccagaacactcctgcagtggtctgaaagtttgtccctcacatagtattccagaacaatgatgctgtgttctgaatgtgtgtccctcacataggattccagaacactccttctgtgatctgaatgtttttccctgacaaaggattccagaacactgctgctgggttctgattgtttgttcttcacttaggattccagaacactgatatgagggtctgatgtttgtccctcatataggattccagaac

SEQ ID NO: 273012 - DNA, 554 bp, Homo sapiens
acataagattccagaacactgctgctgggatatgagtgtttgtccctcacataggattacagaacacggctacgagggtctgtatttttctccttgacataggattccagaacactcctgctgtggtctggatgtttctccctcacttaggattccaatacaatactgctgtggtctgaatggttgtctctcacataggattccagaacaatcatrctgtcatctgagtgtttgtccctcaaataggattccagaacactgctatgaaggtctgtattattctccctcacataggattccaaaacaatgctagaagggcctgaatgtttttcccacacttaggattccggaacaccccagctgtggtctgaatgactgtccctaacataggattcctgaaaactgctgctgggttctgagtgtttttccctcacataggattccaaaacactgctacgagggtctgaatgtttgtcccttacaaaggattccagaacactactgctgtggtctgaatatttgatcctcacataggattccaaaacacagctgct

SEQ ID NO: 273013 - DNA, 554 bp, Homo sapiens
acataagattccagaacactgctgctgggatatgagtgtttgtccctcacataggattacagaacacggctacgagggtctgtatttttctccttgacataggattccagaacactcctgctgtggtctggatgtttctccctcacttaggattccaatacaatactgctgtggtctgaatggttgtctctcacataggattccagaacaatcatgctgtcatctgagtgtttgtccctcaaataggattccagaacactgctatgaaggtctgtattattctccctcacataggattccaaaacaatgctagaagggcctgaatgtttttcccacacttagrattccggaacaccccagctgtggtctgaatgactgtccctaacataggattcctgaaaactgctgctgggttctgagtgtttttccctcacataggattccaaaacactgctacgagggtctgaatgtttgtcccttacaaaggattccagaacactactgctgtggtctgaatatttgatcctcacataggattccaaaacacagctgct

SEQ ID NO: 273014 - DNA, 440 bp, Homo sapiens
acagaacaatgctacgaggctcagaatgtttgctcttcacatcggattccagaacactactgcagtggtctgaatggttgatgctcacataggattccagaacactcctgctgtggtctgggtgtttgtgcctcacatgggattccataacaatcctgctgtggtstgaatgcttctctgtcacataggattacaaagcattcttgctgtggtctgagtgtttgtccctcacatagggctccagaacattcctgctgtcgtgggaatgtttctccctcacttatgtttccagaacactcctgctgtggtctgaatgtttatccctcacttaggattccagaacactgctgttgggttctgagtgttttgtgcctcacatacgattctagaacacttctacattggtctaaatgctcgtccctcacatagggctccagaaa

SEQ ID NO: 273015 - DNA, 440 bp, Homo sapiens
acagaacaatgctacgaggctcagaatgtttgctcttcacatcggattccagaacactactgcagtggtctgaatggttgatgctcacataggattccagaacactcctgctgtggtctgggtgtttgtgcctcacatgggattccataacaatcctgctgtggtgtgaatgcttctctgtcacataggattacaaagcattcttgctgtggtctgagtgtttgtccctcacatagggctccagaacattcctgctgtcgtgggaatrtttctccctcacttatgtttccagaacactcctgctgtggtctgaatgtttatccctcacttaggattccagaacactgctgttgggttctgagtgttttgtgcctcacatacgattctagaacacttctacattggtctaaatgctcgtccctcacatagggctccagaaa

SEQ ID NO: 273016 - DNA, 549 bp, Homo sapiens
tgctgtggtctgaatgtctgaccatcacataggattccagaacaatcctgctgtggtctgggtgtttgtgcctcacatgggattgcagaacaatcctgcagtagtctgaatgtttctccctcacattggattccaaaacattcctgytatggtctgagtgtttgtccctcaaatacgattccagaacactggtattgaggtctgaatatttgtccatcacataggaatccagaacactatcacgagggtttgaattattctccctcacataggataccagcgcactcctgctgtggtctgaatgtttgtccctcattaggattccagaacactgctgttgggttctgagtgtttgtccctcacgaaagattccagaacactcccatgtgggtctaaatgtttttccctcacataggattccagaataccgctaagagggtctgaatgtttgtcccgcacataggactccagaacactcctgatgtgttctcaatgtattttcctcacataggattccagaacaatgctaccggggtctgaatgtttttc

SEQ ID NO: 273017 - DNA, 504 bp, Homo sapiens
tatcacgagggtttgaattattctccctcacataggataccagcgcactcctgctgtggtctgaatgtttgtccctcattaggattccagaacactgctgttgggttctgagtgtttgtccctcacgaamgattccagaacactcccatgtgggtctaaatgtttttccctcacataggattccagaataccgctaagagggtctgaatgtttgtcccgcacataggactccagaacactcctgatgtgttctcaatgtattttcctcacataggattccagaacaatgctaccggggtctgaatgtttttcccacatataggattccagaacaccccagctgtggtctgaatgattgtaccttacataggactcccgaacactgctgctgggttctgagtgtttctccatcacataggattccagaacactgctgctggattctgagtggttctccatcacataggattccagaacactgctacaagggtctgaaccattgta

SEQ ID NO: 273018 - DNA, 471 bp, Homo sapiens
cccagctgtggtctgaatgattgtaccttacataggactcccgaacactgctgctgggttctgagtgtttctccatcacataggattccagaacactgctgctggattctgagtggttctccatcacataggattccagaacactgctacaagggtctgaaccattgtatctcacataggattccagaacactcctgctgtggtctgaatgtttgtacctcatctaggattcccgagcactgctgctgtggtctgaatggttgaccatcacataggatggcagaacactcctgctgtggtctgggtgtttgtgcctccaatgggattccagaacaatcctgctgtggtctgaatrtttctccctcacatagggttccaaagcatccctgctgtgctctgagtgtttgtccctcaaataggattccagaacactgctactgtggtctgaatgtttgttcctcacataggatt

SEQ ID NO: 273019 - DNA, 597 bp, Homo sapiens
cacacaacctgttccaggacttggtgaccattgtttgagtccagattcaattgagttcaaatttaatatttaaattttactccacaaagtgtcaaaagtaattccttcaaatgcaggaaattatgtaactactcacaaactaaacttctcaaccaaaagtcataaattgagtataggaattaaaaaaaaaaagaaagaaaatctaactacatctgtctaaagggactcaatttatttatttatttattttagagacttggtattgctttgtttcccaggctggtctcaaactcctggtttcacgtgatcctcccacctcaatctcctaaaatgctaggatgacagatatgagccatcttactctatagtaacaaaaacagactaaatgtggcaagatgcatccaaaaaattatgcaaaycataaccaaatgaggacagactatgtcacaattatagtatgcaaaatgctttttaaataactgtcttagtttataaaatatattatgaaatcaaattgtcagaaaaacaaaggacaaaataataaaagggtttattcactggaaacctatgacaattatacacatttacataattgtg

SEQ ID NO: 273020 - DNA, 597 bp, Homo sapiens
cacacaacctgttccaggacttggtgaccattgtttgagtccagattcaattgagttcaaatttaatatttaaattttactccacaaagtgtcaaaagtaattccttcaaatgcaggaaattatgtaactactcacaaactaaacttctcaaccaaaagtcataaattgagtataggaattaaaaaaaaaaagaaagaaaatctaactacatctgtctaaagggactcaatttatttatttatttattttagagacttggtattgctttgtttcccaggctggtctcaaactcctggtttcacgtgatcctcccacctcaatctcctaaaatgctaggatgacagatatgagccatcttactctatagtaacaaaaacagactaaatgtggcaagatgcatccaaaaaattatgcaaatcataaccaaatgaggacagactatgtcacaattatagtatgcaaaatgctttttaaataactgtyttagtttataaaatatattatgaaatcaaattgtcagaaaaacaaaggacaaaataataaaagggtttattcactggaaacctatgacaattatacacatttacataattgtg

SEQ ID NO: 273021 - DNA, 569 bp, Homo sapiens
ggtgtgaatgtttgcctcacatagcattccagaacaatgctacaagggtctgaaagtttgtcccacatgyaggattccagaacaccacaggtgtggtctgaatgattgtccctcaaataggattacagaagactgccgctgggttctgagggtttctccctcacacaggattccagaataccgctacgagggtctgaatgattgtccctcacataagattccagaaccctcctgctgtggtctgaatggttataccttacatccgattccagaacactgctgctgggttctgagtgtttgtccctcacataggattccagaacacttctatgagggtctgaatgtttgtccctcacataggattcaagaacacccaatctatggtctgaatgattgtccctcacataggattccatatcactactgctgggttctgagtgtttctctctcacataggattccagaacattactacgaggttctgaatgattgtacctctcataggattccagaatactcctgctttggtctgaatttccgtccctcagatagaatgccagaacactgct

SEQ ID NO: 273022 - DNA, 632 bp, Homo sapiens
attttaatcagagattcaaatgttaaaacaccgagaatcttgaagtcagcaagaaaaaatgacttagcatgtacaatgttacccctataggatgaccagcagatgtctcagccaatagcatgcaggcaagaggttgtaggatgacatactcaaagtgctgaaaaaaatggcaagtaccaaccaagaacactatgtctgccaaagctatcatttcaaatgaattaaaaaataaaaataaagaatattcaagatcaacraaaactgtattaatttatgcacagtaggcctgtataaaaaaatgctagtcattgacattaaaaaataaaataatgatgagagcaacacagaattatgtaaaatataaagttttctaacagataattatgtacacaattataatattctttgttattataatgaagatgcacagaatacttttaattctgctatgtagttgagataacaaagacttaaaaatgactatataactgtgccaatagattcacaatacaaaatgatgtaattcgcgacatcaataaaacacataggcagccataaagaggcagggttttatatgctatagtagttatttttggtaatatctatagtaacaacaaagaaaatacctatag

SEQ ID NO: 273023 - DNA, 632 bp, Homo sapiens
attttaatcagagattcaaatgttaaaacaccgagaatcttgaagtcagcaagaaaaaatgacttagcatgtacaatgttacccctataggatgaccagcagatgtctcagccaatagcatgcaggcaagaggttgtaggatgacatactcaaagtgctgaaaaaaatggcaagtaccaaccaagaacactatgtctgccaaagctatcatttcaaatgaattaaaaaataaaaataaagaatattcaagatcaacaaaaactgtattaatttatgcacrgtaggcctgtataaaaaaatgctagtcattgacattaaaaaataaaataatgatgagagcaacacagaattatgtaaaatataaagttttctaacagataattatgtacacaattataatattctttgttattataatgaagatgcacagaatacttttaattctgctatgtagttgagataacaaagacttaaaaatgactatataactgtgccaatagattcacaatacaaaatgatgtaattcgcgacatcaataaaacacataggcagccataaagaggcagggttttatatgctatagtagttatttttggtaatatctatagtaacaacaaagaaaatacctatag

SEQ ID NO: 273024 - DNA, 632 bp, Homo sapiens
attttaatcagagattcaaatgttaaaacaccgagaatcttgaagtcagcaagaaaaaatgacttagcatgtacaatgttacccctataggatgaccagcagatgtctcagccaatagcatgcaggcaagaggttgtaggatgacatactcaaagtgctgaaaaaaatggcaagtaccaaccaagaacactatgtctgccaaagctatcatttcaaatgaattaaaaaataaaaataaagaatattcaagatcaacaaaaactgtattaatttatgcacagtaggcctgtataaaaaaatgctagtcattgacattaaaaaataaaataatgatgagagcaacayagaattatgtaaaatataaagttttctaacagataattatgtacacaattataatattctttgttattataatgaagatgcacagaatacttttaattctgctatgtagttgagataacaaagacttaaaaatgactatataactgtgccaatagattcacaatacaaaatgatgtaattcgcgacatcaataaaacacataggcagccataaagaggcagggttttatatgctatagtagttatttttggtaatatctatagtaacaacaaagaaaatacctatag

SEQ ID NO: 273025 - DNA, 401 bp, Homo sapiens
atgaataaataaaaaatattgtgtttatacactggaagaatactgttgatatagctacccaaagtgatctacagacttaatgtgatttttatcaaaataccaatgacattttttgacagaaataaaaaaatttaaatttatatggatccacaaaaaactctgaatagacaaagcaactttgagcaaaataagcaaagctraaggcatcacttcatcaaacttcaaaacttgctataaagctacagtaaccaaaacagcactgtactggcataaaaacaaacacatagactaatgtgcccaataagcccagaagttaatttatgcacctaaagccaactgattgtcaacaaaattaccaagaacacactttagagaaaaactaatctctttaataaatggtg

SEQ ID NO: 273026 - DNA, 401 bp, Homo sapiens
atgaataaataaaaaatattgtgtttatacactggaagaatactgttgatatagctacccaaagtgatctacagacttaatgtgatttttatcaaaataccaatgacattttttgacagaaataaaaaaatttaaatttatatggatccacaaaaaactctgaatagacaaagcaactttgagcaaaataagcaaagctaaaggcatcacttcatcaaacttcaaaacttgctataaagctacagtaaccaaaacagcactgtactggcataaaaacaaacacatagactaatgtgcccaataagcccagaagttaatttatgcacctaaagccaacwgattgtcaacaaaattaccaagaacacactttagagaaaaactaatctctttaataaatggtg

SEQ ID NO: 273027 - DNA, 601 bp, Homo sapiens
tttataacattggacggtgaaaggattattaaaataagatttcaaaacatgggcaacaaaatcragaataaacaaacaacattatgtcaaactaaaatgctttttcatattaaaaaaacaactaaaagtttgaagagacagcttaggcgatgacagaaaatgttctcatatacatgtgacaaaaggctaatattcagaatatataagaaactttaaaatctcaaaataaaatacacttataatctaatttaaaaaatgcaaaagatcttaatagatgtttgtcaaaaagagatacaaaaatggctaactggaacataaaaagatgctctacattactaatcaccaaggaaatgcaaatccaaactgcaatgaagtaccacctcattcccattagaatggctataataaaaataaataaataaataaatcaagaactaatgaggatataaaaaagagtggatgtataccttgttggtggaattgtaaattagtatggccattatagaaaatagtatggaggtttctgaaagaaattaaaaatatatctattatatgatccagcaattttacttctgggtgtatatccaaaagaaaggatatt

SEQ ID NO: 273028 - DNA, 601 bp, Homo sapiens
tttataacattggacggtgaaaggattattaaaataagatttcaaaacatgggcaacaaaatcgagaataaacaaacaacattatgtcaaactaaaatgctttttcatattaaaaaaacaactaaaagtttgaagagacagcttaggcgatgacagaaaatgttytcatatacatgtgacaaaaggctaatattcagaatatataagaaactttaaaatctcaaaataaaatacacttataatctaatttaaaaaatgcaaaagatcttaatagatgtttgtcaaaaagagatacaaaaatggctaactggaacataaaaagatgctctacattactaatcaccaaggaaatgcaaatccaaactgcaatgaagtaccacctcattcccattagaatggctataataaaaataaataaataaataaatcaagaactaatgaggatataaaaaagagtggatgtataccttgttggtggaattgtaaattagtatggccattatagaaaatagtatggaggtttctgaaagaaattaaaaatatatctattatatgatccagcaattttacttctgggtgtatatccaaaagaaaggatatt

SEQ ID NO: 273029 - DNA, 601 bp, Homo sapiens
tttataacattggacggtgaaaggattattaaaataagatttcaaaacatgggcaacaaaatcgagaataaacaaacaacattatgtcaaactaaaatgctttttcatattaaaaaaacaactaaaagtttgaagagacagcttaggcgatgacagaaaatgttctcatatacatgtgacaaaaggctaatattcagaatatataagaaactttaaaatctcaaaataaaatacacttataatctaatttaaaaaatgcaaaagatcttaatagatgtttgtcaaaaagagatacaaaaatggctaactggaacayaaaaagatgctctacattactaatcaccaaggaaatgcaaatccaaactgcaatgaagtaccacctcattcccattagaatggctataataaaaataaataaataaataaatcaagaactaatgaggatataaaaaagagtggatgtataccttgttggtggaattgtaaattagtatggccattatagaaaatagtatggaggtttctgaaagaaattaaaaatatatctattatatgatccagcaattttacttctgggtgtatatccaaaagaaaggatatt

SEQ ID NO: 273030 - DNA, 561 bp, Homo sapiens
ttctgaaagaaattaaaaatatatctattatatgatccagcaattttacttctgggtgtatatccaaaagaaaggatattactgtgtcaaaaagatatttgcattcccatgttcattacagaactatttataatagcttatatatggaatcaattcaaatgtacagcaacagataaatggataaggaaaatgtactatatatacacagcgaaatactattcagccataagaaagcataaaattctgtcagttaaaagagcatggatgaaccttgagcataccatgttaagtaaaataagccacayagagaaacacaaatactttatgatcttattatctcactcatttgaggaacctgaaaaaaagggttgatagaagcaaagagtacaacaggggttaccagagactgaagcaggaggatgggaaaaggctgcttcacaggtattgtgttatgattagataggggaaataagtttttgttttttattacacagtagaataataataattaatgaaaagttatctcatattacaaaatagctaaaagagaccagtttcggt

SEQ ID NO: 273031 - DNA, 561 bp, Homo sapiens
ttctgaaagaaattaaaaatatatctattatatgatccagcaattttacttctgggtgtatatccaaaagaaaggatattactgtgtcaaaaagatatttgcattcccatgttcattacagaactatttataatagcttatatatggaatcaattcaaatgtacagcaacagataaatggataaggaaaatgtactatatatacacagcgaaatactattcagccataagaaagcataaaattctgtcagttaaaagagcatggatgaaccttgagcataccatgttaagtaaaataagccacatagagaaacacaaatactttatgatcttattatctcactcatttgaggaacctgaaaaaaagggttgatagaagcaaagagtacaacaggggttaccagagactgaagcaggaggatgggaaaagkctgcttcacaggtattgtgttatgattagataggggaaataagtttttgttttttattacacagtagaataataataattaatgaaaagttatctcatattacaaaatagctaaaagagaccagtttcggt

SEQ ID NO: 273032 - DNA, 546 bp, Homo sapiens
gatatcatcactgatcccatggaaatatgaacaacaatcagagaacactataaacatatgtatgcacataaaccagaaaatctagaagaaatagacaatttccttgcaaaataaaccctccacaagactgaaccctgaatagatcaataatgtgttctgaaactgaggcagtaaaaactagcctaccaagcaagctgaatttgagcagaggtacaaagaggagatggtaccttttctcctaaaaccatccaaaaaaaattgaagacaaagaagttctctctaactcattctatcaggccagcatcatccagataccaaaacctaacatagatactacaacaacaacaacaacaacacatcatgccaatgtctttggtaaacactgtgcaaaaatcctcaataaaatactggcaaamcaaatccagcagcacattaaaaagttcatccgcaacaatggagttggctttgtccccaggatgcaaggttgattcaacatatgcaaatcaataaatgtgactcatcacataaagagaactaaatacaaaa

SEQ ID NO: 273033 - DNA, 564 bp, Homo sapiens
tccagacagcagctgctgcacctgatatcattctttgaggagatgagtggaggagcagagggcctctgcactagccttgggcagcagtgggcccttaaccttccctgcttcccagcaatggccatcacagtaggggattttcccacactgtgcctctatgatcagyctgaaagagtgaaggctggaacacctacccacatgggcctggaaagagtgagaagtgattgaaaagagctttaggacagcttagatgcccagtgggtgaatgccagaccaaggatacccagagctacctgccatcaagttgttgggttcccaagatgtgggtgtgagagaaagaaagagagcatgtgtgttttgtgatgaactgtggccccaagtatatagtgtttcagtaggggagaagctgaagtacaaagactcttcccaagctagcttgtctcctctcctgtcaccctatgagcccctgagatccatagggatgaagagtattgaaggctccattgcaaacctggtctttctacagtgctacaaggcctatgccaaagagaaaggaaaggtacg

SEQ ID NO: 273034 - DNA, 564 bp, Homo sapiens
tccagacagcagctgctgcacctgatatcattctttgaggagatgagtggaggagcagagggcctctgcactagccttgggcagcagtgggcccttaaccttccctgcttcccagcaatggccatcacagtaggggattttcccacactgtgcctctatgatcagcctgaaagagtgaaggctggaacacctacccacatgggcctggaaagagtgagaagtgattgaaaagagctttaggacagcttagatkcccagtgggtgaatgccagaccaaggatacccagagctacctgccatcaagttgttgggttcccaagatgtgggtgtgagagaaagaaagagagcatgtgtgttttgtgatgaactgtggccccaagtatatagtgtttcagtaggggagaagctgaagtacaaagactcttcccaagctagcttgtctcctctcctgtcaccctatgagcccctgagatccatagggatgaagagtattgaaggctccattgcaaacctggtctttctacagtgctacaaggcctatgccaaagagaaaggaaaggtacg

SEQ ID NO: 273035 - DNA, 564 bp, Homo sapiens
tccagacagcagctgctgcacctgatatcattctttgaggagatgagtggaggagcagagggcctctgcactagccttgggcagcagtgggcccttaaccttccctgcttcccagcaatggccatcacagtaggggattttcccacactgtgcctctatgatcagcctgaaagagtgaaggctggaacacctacccacatgggcctggaaagagtgagaagtgattgaaaagagctttaggacagcttagatgcccagtgggtgaatgccagaccaaggatacccagagctacctgccatcaagttgttgggttcccaagatgtgggtgtgagagaaagaaagagagcatgtgtgttttgtgatgaactgtggccccaagtatatagtgtttcagtaggggagaagctgaagwacaaagactcttcccaagctagcttgtctcctctcctgtcaccctatgagcccctgagatccatagggatgaagagtattgaaggctccattgcaaacctggtctttctacagtgctacaaggcctatgccaaagagaaaggaaaggtacg

SEQ ID NO: 273036 - DNA, 617 bp, Homo sapiens
agaagtgattgaaaagagctttaggacagcttagatgcccagtgggtgaatgccagaccaaggatacccagagctacctgccatcaagttgttgggttcccaagatgtgggtgtgagagaaagaaagagagcatgtgtgttttgtgatgaactgtggccccaagtatatagtgtttcagtaggggagaagctgaagtacaaagactcttcccaagctagcttgtctcctctcctgtcaccctatgagcccctgagatccatagggatgaagagtattgaaggctccattgcaaacctggtctttctacagtgctacaaggcctatgccaaagagaaaggaaaggtacktctttgggtgttccaggcacacatctttctgaaatatttctccagccagttgttgcagacaaaagacgacatttctgggaagatggggacttatgttcagacgagtacccaaactatcaggtcttctggtccaaaggctatttttacttacctctagccaagtgcctgggatggatccttcctgcatctccccaaggctcaccacttagccatagcctcaaacccgtggggaaggaaggtctacccgccctgcaagaggacaaataact

SEQ ID NO: 273037 - DNA, 617 bp, Homo sapiens
agaagtgattgaaaagagctttaggacagcttagatgcccagtgggtgaatgccagaccaaggatacccagagctacctgccatcaagttgttgggttcccaagatgtgggtgtgagagaaagaaagagagcatgtgtgttttgtgatgaactgtggccccaagtatatagtgtttcagtaggggagaagctgaagtacaaagactcttcccaagctagcttgtctcctctcctgtcaccctatgagcccctgagatccatagggatgaagagtattgaaggctccattgcaaacctggtctttctacagtgctacaaggcctatgccaaagagaaaggaaaggtacgtctttgggtgttccaggyacacatctttctgaaatatttctccagccagttgttgcagacaaaagacgacatttctgggaagatggggacttatgttcagacgagtacccaaactatcaggtcttctggtccaaaggctatttttacttacctctagccaagtgcctgggatggatccttcctgcatctccccaaggctcaccacttagccatagcctcaaacccgtggggaaggaaggtctacccgccctgcaagaggacaaataact

SEQ ID NO: 273038 - DNA, 540 bp, Homo sapiens
tatgatgaaatgctaactaacaatatgaaaaatactaaagtataaatgtcactaaaatggtaaatacatactgaatttcagaatactataaattgttatcatcttaaactagactattaaaatacaagatgttttacctaagtctcatgataaccactaggaaaaaaaaactgcagtaaagaaaaagagaaagtaattaaagcatacacaaacaacaaaaattacacattggatatggtgtctcctgcttataattccaacactttgggaggccaaggtggaaggatgaaatctccttgggtgttgyggtacgtgtctgtagtccaagctacttgggtggctaaggtgggaggattatttgagcccaggaggttgaagctacagtgagctgtgatatgccactgcacttcagtctgagcaagaaagcataactttgtctcaacaaaaatgaacaataccacaggaaagacagaaccagaaaaaaaagaagcaaacttaaaatggacagaaaactacaaatttacaatagtaactccttac

SEQ ID NO: 273039 - DNA, 538 bp, Homo sapiens
taaaatggacagaaaactacaaatttacaatagtaactccttacctatcactaccttacaaataaaaagattaaagtatctactaaacagatactgctgtacactgaatgtcatctccaaaatttaggataaaatttaatagccaacatgttagaattaagaggtggaacctttaaaaattaattaagctctaagaactctgccctcatgaatggattaatgttcttattatgggaatgggctaattataacaagaatggatctgttatatattaaaaaaaaaagctctctctccctcacatctttgtctatgttattatccagcaactagaccttcaacatataccagtatcatgttgttttggcttcccagcctccagaatcataagtcaaataaaattctattctttattaattaccagtgtgtgatattcagttatagcagccaaaagagactaaagcagacagagtggataaattaatcktttaaacctcgtaatatgctgcttacaagagactcaattatgaattaagagca

SEQ ID NO: 273040 - DNA, 612 bp, Homo sapiens
gttgttttggcttcccagcctccagaatcataagtcaaataaaattctattctttattaattaccagtgtgtgatattcagttatagcagccaaaagagactaaagcagacagagtggataaattaatcgtttaaacctcrtaatatgctgcttacaagagactcaattatgaattaagagcataggctaaaagtgaaaggatagaaaatgatattccatgcaaacaataaccaaaggagtgcaacggtaatgcttaaattagacaaaatagactttctagcaatgtctctcacaagcatgaaatgagtttaccatagaataataatagaggttaatttctcaagagaatatagctttatatatttatgcacccaaaagggaggcttctaaatataaaaagcaaatattgccagaactgtagggagaagtagaaagaaaccaaataatagaaaactttaatgaaatgtataataaaggacatatagttaacagcattgtaaattggcaagggaaagctggtctcatgtgttgcatttgagaatgcagcaaagaaagtgggaactgataattttactgcaagcctgagttaggatgaaaaacagggtggtcga

SEQ ID NO: 273041 - DNA, 472 bp, Homo sapiens
aactttaatgaaatgtataataaaggacatatagttaacagcattgtaaattggcaagggaaagctggtctcatgtgttgcrtttgagaatgcagcaaagaaagtgggaactgataattttactgcaagcctgagttaggatgaaaaacagggtggtcgattagaggttccacttgccatacattaaaaaaacacaggagaaaaccagtcctcctctggagtgttaaaataattaaagatcagaaaattagtctaaagtggctctagtgccctgtgttcataggtaaaaaacaaaaaacaaacaaaaaaaaatctaaaacctaactcaaatatatttcctataaaacactatcttagcctgaagcaaaatgcaggtttaacccatgacaaacatgcaattaacctctgaatatgtaaccaggacatttccatctggatagttcaaataaggctaccatataactggaaccaa

SEQ ID NO: 273042 - DNA, 507 bp, Homo sapiens
caaccattctgtgtgaggtgatttttccaaggtaattgtgccctgactgcgctggatgtcagtgtgtcttgtctttttgaaaatcactggattactctcatgaacggrgtatttctctttctatttgaaaatggtcaactgtcctctgcaggtgtcctgacttgctagtttagaccctgaaggtagcggtgagaaaatatttgggccacatcagaatacctattctcagctggaggatatatagaaatttcttaataatatctaaccattttctcaataaccattatatttaacattgatagcttggagggcagggaaggacacagatgacacaatcttcaaagtttaatttagttataaggttttttttttgttcttgcttagttttgcttagtttttggatacaaggtcttgctctggtgcccaggctggagggcagtggcataatgataactcataatttggttgtaatggttctttaaaatatatttttgctgagagtgctag

SEQ ID NO: 273043 - DNA, 507 bp, Homo sapiens
caaccattctgtgtgaggtgatttttccaaggtaattgtgccctgactgcgctggatgtcagtgtgtcttgtctttttgaaaatcactggattactctcatgaacggggtatttctctttctatttgaaaatggtcaactgtcctctgcaggtgtcctgacttgctagtttagaccctgaaggtagcggtgagaaaatatttgggccacatcagaatacctattctcagctggaggatatatagaaatttcttaataatatctaaccattttctcaataaccattatatttaacattgatagcttggagggcagggaaggacacagatgrcacaatcttcaaagtttaatttagttataaggttttttttttgttcttgcttagttttgcttagtttttggatacaaggtcttgctctggtgcccaggctggagggcagtggcataatgataactcataatttggttgtaatggttctttaaaatatatttttgctgagagtgctag

SEQ ID NO: 273044 - DNA, 507 bp, Homo sapiens
caaccattctgtgtgaggtgatttttccaaggtaattgtgccctgactgcgctggatgtcagtgtgtcttgtctttttgaaaatcactggattactctcatgaacggggtatttctctttctatttgaaaatggtcaactgtcctctgcaggtgtcctgacttgctagtttagaccctgaaggtagcggtgagaaaatatttgggccacatcagaatacctattctcagctggaggatatatagaaatttcttaataatatctaaccattttctcaataaccattatatttaacattgatagcttggagggcagggaaggacacagatgacacaatcttcaaagtttaatttagttatmaggttttttttttgttcttgcttagttttgcttagtttttggatacaaggtcttgctctggtgcccaggctggagggcagtggcataatgataactcataatttggttgtaatggttctttaaaatatatttttgctgagagtgctag

SEQ ID NO: 273045 - DNA, 498 bp, Homo sapiens
gcatattccacacttgctggagcacgagagacctgagaggcacctgtttcccagttgctaactgatgtccatacaccccattcacgtgtcttcatttaggwttctgcatagtgtatttgctcagccagtgtaaacacatcttctggggggcatcattaattgcagcacctgacccacttgttctgggagggagtcaggaggaatctggtcagctcctaatcccccaggacaaaggtgctgcccccttttcagcactcacatccagcaatgccatctctggatgggtttttcaaacacaagcagtatgaggtagcaagaatggtgtgacaggctcagggccatgggcagccggttgctggagaagcagcacagggcaggcacatctgtgggtggcaccatgacaagccaaggcagccacagaccctaatcccaacagctccagcccagatggcattcaaatcttcccagatagtattggggtacccgatgcccatcact

SEQ ID NO: 273046 - DNA, 498 bp, Homo sapiens
gcatattccacacttgctggagcacgagagacctgagaggcacctgtttcccagttgctaactgatgtccatacaccccattcacgtgtcttcatttaggattctgcatagtgtatttgctcagccagtgtaaacacatcttctggggggcawcattaattgcagcacctgacccacttgttctgggagggagtcaggaggaatctggtcagctcctaatcccccaggacaaaggtgctgcccccttttcagcactcacatccagcaatgccatctctggatgggtttttcaaacacaagcagtatgaggtagcaagaatggtgtgacaggctcagggccatgggcagccggttgctggagaagcagcacagggcaggcacatctgtgggtggcaccatgacaagccaaggcagccacagaccctaatcccaacagctccagcccagatggcattcaaatcttcccagatagtattggggtacccgatgcccatcact

SEQ ID NO: 273047 - DNA, 498 bp, Homo sapiens
gcatattccacacttgctggagcacgagagacctgagaggcacctgtttcccagttgctaactgatgtccatacaccccattcacgtgtcttcatttaggattctgcatagtgtatttgctcagccagtgtaaacacatcttctggggggcatcattaattgcagcacctgmcccacttgttctgggagggagtcaggaggaatctggtcagctcctaatcccccaggacaaaggtgctgcccccttttcagcactcacatccagcaatgccatctctggatgggtttttcaaacacaagcagtatgaggtagcaagaatggtgtgacaggctcagggccatgggcagccggttgctggagaagcagcacagggcaggcacatctgtgggtggcaccatgacaagccaaggcagccacagaccctaatcccaacagctccagcccagatggcattcaaatcttcccagatagtattggggtacccgatgcccatcact

SEQ ID NO: 273048 - DNA, 498 bp, Homo sapiens
gcatattccacacttgctggagcacgagagacctgagaggcacctgtttcccagttgctaactgatgtccatacaccccattcacgtgtcttcatttaggattctgcatagtgtatttgctcagccagtgtaaacacatcttctggggggcatcattaattgcagcacctgacccacttgttctgggagggagtcaggaggaatctggtcagctcctaatcccccargacaaaggtgctgcccccttttcagcactcacatccagcaatgccatctctggatgggtttttcaaacacaagcagtatgaggtagcaagaatggtgtgacaggctcagggccatgggcagccggttgctggagaagcagcacagggcaggcacatctgtgggtggcaccatgacaagccaaggcagccacagaccctaatcccaacagctccagcccagatggcattcaaatcttcccagatagtattggggtacccgatgcccatcact

SEQ ID NO: 273049 - DNA, 579 bp, Homo sapiens
ggtttttcaaacacaagcagtatgaggtagcaagaatggtgtgacaggctcagggccatgggcagccggttgctggagaagcagcacagggcaggcacatctgtgggtggcaccatgacaagccaaggcagccacagaccctaatcccaacagctccagcccagatggcattcaaatcttcccagatagtattggggtaccckatgcccatcacttgcccgctcattagcacggccttgttggttactcagggactaaggagagagggtgggggatgtagatccagggtgggcaccgcctcacagccagagtccacctgactgcaggccagcaagcaagcccaagaagctcagctctagtcacctctggctgtactttatgtgtatacattacataaaggtagcaaacagaggtcaacaatagctgttgtgatatgaaagtctatgcctcattaagaccttaaaatgctgttgtcttaagctttctttattctaataaaatttatacaaataaacacatgcaagctgaaactactataaatgaaatattaggattttttaaacccataaacagacacaa

SEQ ID NO: 273050 - DNA, 473 bp, Homo sapiens
cttaataacagcactgataacttttaagccctagcaagctgaaactgcaagacacatgatcttctgccttagaagggccatgtttgggcagtgggtgcccaggtgagagccccatggttgttagtggcagcygggagctggatgggcctgccccatagcctagtgaaaagtgggaccctctccttccagaacatggaagtctcagaggctggaaaaaggtgcctaagtggcctgccaaaaagcataaggctagaaggcctggaaagagccccaacagccttcaagctgcctgagagggctgggctcattccagctttctttgctttcatcctgttaggaagaaaacctgctcacagatggcaggcgggcctgaggctgccattccctcatcaggggctataggcacctttaatgtggctctttcttgaagcagctgctcaggccggttctcgaagagcagttcccttattatc

SEQ ID NO: 273051 - DNA, 620 bp, Homo sapiens
ggccggtgatcagcacagggccacccagggccagctgtctgcacctaaacgtcatgttggtctggatgtctcagggccagaactctccaggtaagatggcctggtcctcagcacctggcctccrtgctcctttttcctctgttcaatcctggccccaatgcctcccgcaactctcaggtcaccattggagaagatgctcaggaagaacaaggagctgcagtcaaccctgctgaaggtggcatatgggtccaggctcttgagctggtctttgacatggtacatgtggatgcaggctttgagcagtgtgagtagctctttccggaaggaggggaaaacggtgtttccagggtcctacaccctagaacgacccatctagcacagaaaacagtttgcaacgtgctatcatgtgtgattttaattttgggctttaggctttcatttccaaattccacaataaacacataaggtggggttctgatttcaacacacacacacacacacacacacacacacacacattctctctctcttcctctctcttagaatcttccagtgaattcacactgaaagccgaagtcctcccagaatcttgtgagaacctaaatgatctgaatagtttg

SEQ ID NO: 273052 - DNA, 620 bp, Homo sapiens
ggccggtgatcagcacagggccacccagggccagctgtctgcacctaaacgtcatgttggtctggatgtctcagggccagaactctccaggtaagatggcctggtcctcagcacctggcctccgtgctcctttttcctctgttcaatcctggccccaatgcctcccgcaactctcaggtcaccattggagaagatgctcaggaagaacaaggagctgcagtcaaccctgctgaaggtggcatatgggtccaggctcttgagctggtctttgacatggtacatgtggatgcaggctttgagcagtgtgagtagctctttccggaaggaggggaaaacggtgtttccagggtcctacaccctagaacgacccatctagcacagaaaacagtttgcaacgtgctatyatgtgtgattttaattttgggctttaggctttcatttccaaattccacaataaacacataaggtggggttctgatttcaacacacacacacacacacacacacacacacacacattctctctctcttcctctctcttagaatcttccagtgaattcacactgaaagccgaagtcctcccagaatcttgtgagaacctaaatgatctgaatagtttg

SEQ ID NO: 273053 - DNA, 558 bp, Homo sapiens
ttttcccaacttttatttgactaatagtacaatttatttccagtttttattttatctgtcaatgttttatactgtatttacaatatttatattgttaccatatgtaaaaatgtaagacctttctattaaaggctagattacagccttacccttttgtgtaaggaaagaagcaatgcatcagtagcataatttaaaactttctctagtattacttaaatwtttattccttaaaactttctcatcacatctctttttaataattataatatggtttctttgaaatgttgttgccttaattgtatccaaataattcaaaatttatactttttatggattcaaaggaagagttgaaaattgtagttacctaggattctttttcagttggacactatgtttattcaggattttatagatcaaagtttctcttaattatgttttagaatttatgtttctgtattttttagagtaggctgtctcacagcagttaattgtgtttttactttctacctatttattatgattttgaattacattattcaagtaagaattcggggaagg

SEQ ID NO: 273054 - DNA, 656 bp, Homo sapiens
ccatcttttcttgctacacacaggtcatgtgcaaatttggggacagttagtacaaaacatgtgatggaaatttgggctctgacatcagtgagcttatttcacacagactccagttgaccatattggttccgaccaattttagccactttttagaagtctcataagtggaataaatttcattctttmaacaagttctatcttttcttatctgtcattctgcaaactgaagaatttctgctagtcattggttgaactctttggggacctggttctagtttctgtcaaagagaaaacaacaaatgtgataggttatcacttctgacttagttcagacttctataccaaaaaacatagactaggcaacttataaacaaaagactttagttctggaggctagaaatttgagattggcttccagcatggttggggtctggtaaggactctcttctgagtttcaaactccagacttcaggttgtattctcatttagcaaagagagggacagacagctttctgcggtttcttttacaaagccagtaatctctatcacgagggcctcatgcttaggacttacttaattacctctgacctgctaaggccattacactgggaattaatgttctggaatgtgaatatggtggggaatcacatagtcta

SEQ ID NO: 273055 - DNA, 580 bp, Homo sapiens
ccatcttttcttgctacacacaggtcatgtgcaaatttggggacagttagtacaaaacatgtgatggaaatttgggctctgacatcagtgagcttatttcacacagactccagttgaccatattggttccgaccaattttagccactttttagaagtctcataagtggaataaatttcattctttcaacaagttctatcttttcttatctgtcattctgcaaactgaagaatttctgctagtcattggttgaactctttggggacctggttctagtttytgtcaaagagaaaacaacaaatgtgataggttatcacttctgacttagttcagacttctataccaaaaaacatagactaggcaacttataaacaaaagactttagttctggaggctagaaatttgagattggcttccagcatggttggggtctggtaaggactctcttctgagtttcaaactccagacttcaggttgtattctcatttagcaaagagagggacagacagctttctgcggtttcttttacaaagccagtaatctctatcacgagggcctcatgcttaggacttacttaatta

SEQ ID NO: 273056 - DNA, 580 bp, Homo sapiens
ccatcttttcttgctacacacaggtcatgtgcaaatttggggacagttagtacaaaacatgtgatggaaatttgggctctgacatcagtgagcttatttcacacagactccagttgaccatattggttccgaccaattttagccactttttagaagtctcataagtggaataaatttcattctttcaacaagttctatcttttcttatctgtcattctgcaaactgaagaatttctgctagtcattggttgaactctttggggacctggttctagtttctgtcaaagagaaaacaacaaatgtgatagsttatcacttctgacttagttcagacttctataccaaaaaacatagactaggcaacttataaacaaaagactttagttctggaggctagaaatttgagattggcttccagcatggttggggtctggtaaggactctcttctgagtttcaaactccagacttcaggttgtattctcatttagcaaagagagggacagacagctttctgcggtttcttttacaaagccagtaatctctatcacgagggcctcatgcttaggacttacttaatta

SEQ ID NO: 273057 - DNA, 556 bp, Homo sapiens
ggttgaacacaaggagcgtctcgggcccactagggatacctcaaagtgggcagaaagcccctgcggggaaggtaaggtgtgagggagaggaggtgagtcacctgtggcacaaaaaaaaaaaaaaaaacgcgccaccgagaagcgttcctgggtcccccacggacgaaagttccttcccatcagcccctgtgctggaccgcggggaccctggcgtccctgcttagaacccacgcagcgtctcgggccggctaggggtacaccaaagcggacaaaagccactgaggggaaggtaagctttgagggaagggaggtgaggcacccgtggcaggaaataaaaaaaaaaagcgccccggagaaccggggcctgggtcccccacggacaaaagtgccttcccatcagtccctgggttgggctccggttaccatggatcgccggttccaactcagggccctctcgggcccgctaggggtaccacaaagcgggcagaagrcccctgaggggaagttaaggtgtgagggaggggtggtgaggcagctgtagcagaaaaaaaaagga

SEQ ID NO: 273058 - DNA, 656 bp, Homo sapiens
ccatcttttcttgctacacacaggtcatgtgcaaatttggggacagttagtacaaaacatgtgatggaaatttgggctctgacatcagtgagcttatttcacacagactccagttgaccatattggttccgaccaattttagccactttttagaagtctcataagtggaataaatttcattctttcaacaagttctatcttttcttatctgtcattctgcaaactgaagaatttctgctagtcattggttgaactctttggggacctggttctagtttctgtcaaagagaaaacaacaaatgtgataggttatcacttctgacttagttcagacttctataccaaaaaacatagactaggcaacttataaacaaaagactttagttctggaggctagaaatttgagattggcttccagcatggttggggtctggtaaggactctcttctgagtttcaaactccagacttcaggttgtattctcatttagcaragagagggacagacagctttctgcggtttcttttacaaagccagtaatctctatcacgagggcctcatgcttaggacttacttaattacctctgacctgctaaggccattacactgggaattaatgttctggaatgtgaatatggtggggaatcacatagtcta

SEQ ID NO: 273059 - DNA, 550 bp, Homo sapiens
cctggtcatgtagctgggggagtggatgcctctgcctcatggcaaagctgcatctactgtttcttccccttttgtcacttctttggtttcctcttccctaacctcactttagaatctccactttagatctccactttagaagcctgtgtgtgtgtgtgtgtgtgatgtgtttgtgtgtgcatgcmtgcacgcctatgtgacaacattgaagagtagaaagcccaggtagaaagtagagcacagggttttccaggactcatgggctctcatttccaaagcaaacctgatgggtggggtgcatgcaaggcctaggaagctggatccctccctaatactctgtgctctgcccagtttctgggatctggaccagtctttgcctttttgggaggtctcagtcttcctgctgtaaaatgaagagttggctacaaaactgtatgagcacatgctcagtgaagacagggtgtcatgctcaataccacagagaatattgggatggggaaagtttgggcagacttaggtgtccatgcgtgctcaggcctctgaacagggc

SEQ ID NO: 273060 - DNA, 550 bp, Homo sapiens
cctggtcatgtagctgggggagtggatgcctctgcctcatggcaaagctgcatctactgtttcttccccttttgtcacttctttggtttcctcttccctaacctcactttagaatctccactttagatctccactttagaagcctgtgtgtgtgtgtgtgtgtgatgtgtttgtgtgtgcatgcatgcacgcctatgtgacaacattgaagagtagaaagcccaggtagaaagtagagcacagggttttccaggactcatgggctctcatttccaaagcaaacctgatgggtggggtgcatgcaaggcctaggaagctggatccctccctaatactctgtgctctgcccartttctgggatctggaccagtctttgcctttttgggaggtctcagtcttcctgctgtaaaatgaagagttggctacaaaactgtatgagcacatgctcagtgaagacagggtgtcatgctcaataccacagagaatattgggatggggaaagtttgggcagacttaggtgtccatgcgtgctcaggcctctgaacagggc

SEQ ID NO: 273061 - DNA, 550 bp, Homo sapiens
cctggtcatgtagctgggggagtggatgcctctgcctcatggcaaagctgcatctactgtttcttccccttttgtcacttctttggtttcctcttccctaacctcactttagaatctccactttagatctccactttagaagcctgtgtgtgtgtgtgtgtgtgatgtgtttgtgtgtgcatgcatgcacgcctatgtgacaacattgaagagtagaaagcccaggtagaaagtagagcacagggttttccaggactcatgggctctcatttccaaagcaaacctgatgggtggggtgcatgcaaggcctaggaagctggatccctccctaatactctgtgctctgcccagtttctgggatctggaccagtctttgcctttttgggaggtctcagtcttcctgytgtaaaatgaagagttggctacaaaactgtatgagcacatgctcagtgaagacagggtgtcatgctcaataccacagagaatattgggatggggaaagtttgggcagacttaggtgtccatgcgtgctcaggcctctgaacagggc

SEQ ID NO: 273062 - DNA, 563 bp, Homo sapiens
ccatatattcagacttagattaaagctatagtaataaaagctatctatggtagtaatacaaaaataggcacaaagaaaactagaaaaactcgagagtccaactcagactcacacatttagacattttgtatattacaaaacaggcacagaagagcagtggagagaagacagcatctcggtaattagccttgggtcatctggttatttatgtgagaaagaaataaacctatcttatattgttaacaaatttcgaracaagtggattttaaattttaaggtgaaaattgaaaacaatatttctagtagataacatagataagtatgtccatgactttggcacaggccaagatttcttgggacacaaaatgcataaattatcaagacaaaaatatgacaaattggactttattagaattaaaaccttctcttcataaaaaaaaaaagcttcaggagagctgaaaggcaagaacaaagtggaaatcaacatttgtcatatattgatctggcaaaagctttttatctagattattaagctaaatcccatcacttaataaacaaaaatg

SEQ ID NO: 273063 - DNA, 554 bp, Homo sapiens
acatacagaaccgaagggccaacaagtagatgaacatatccacattcttatgcatcagaacaatgcatatgaaaactacaattgaataccactatgcaatcattaacatttttgaaaactgacaaaattaagtactagtgatgatgtcaagcaactggaactttcttataccattctgtgtgcaaactgttataaccacattcaaaaccacttgagtagtaactccttacatacacgatgtacataagcacactctagaacccagcaactctgctactaggtatatacacccaatagaattgccagcatattttccaatgtagtaaagtgctcgaagyagcattatttggtacttttccaaactgaaaaaaactcaaatgtgcatcaataataaaataaataactaaaacagctacatattcctttataaggggacattatacagatataaaattaattggagacatattaaaatatacaaaaatctaacaaatacaatttaattagatttaaaagtcctatccagagcaatcggccaatagaaaagaaaaagg

SEQ ID NO: 273064 - DNA, 554 bp, Homo sapiens
acatacagaaccgaagggccaacaagtagatgaacatatccacattcttatgcatcagaacaatgcatatgaaaactacaattgaataccactatgcaatcattaacatttttgaaaactgacaaaattaagtactagtgatgatgtcaagcaactggaactttcttataccattctgtgtgcaaactgttataaccacattcaaaaccacttgagtagtaactccttacatacacgatgtacataagcacactctagaacccagcaactctgctactaggtatatacacccaatagaattgccagcatattttccaatgtagtaaagtgctcgaagtagcaytatttggtacttttccaaactgaaaaaaactcaaatgtgcatcaataataaaataaataactaaaacagctacatattcctttataaggggacattatacagatataaaattaattggagacatattaaaatatacaaaaatctaacaaatacaatttaattagatttaaaagtcctatccagagcaatcggccaatagaaaagaaaaagg

SEQ ID NO: 273065 - DNA, 554 bp, Homo sapiens
acatacagaaccgaagggccaacaagtagatgaacatatccacattcttatgcatcagaacaatgcatatgaaaactacaattgaataccactatgcaatcattaacatttttgaaaactgacaaaattaagtactagtgatgatgtcaagcaactggaactttcttataccattctgtgtgcaaactgttataaccacattcaaaaccacttgagtagtaactccttacatacacgatgtacataagcacactctagaacccagcaactctgctactaggtatatacacccaatagaattgccagcatattttccaatgtagtaaagtgctcgaagtagcattatttggtacttttccaaactgaaaaaaactcaaatgtgcatcaataataaaataaataactaaaacagctacatattcctttataaggggacattatacagatataaaattaattggagacatattaaaatatacaaaaatctaacaaayacaatttaattagatttaaaagtcctatccagagcaatcggccaatagaaaagaaaaagg

SEQ ID NO: 273066 - DNA, 614 bp, Homo sapiens
ctgttataaccacattcaaaaccacttgagtagtaactccttacatacacgatgtacataagcacactctagaacccagcaactctgctactaggtatatacacccaatagaattgccagcatattttccaatgtagtaaagtgctcgaagtagcattatttggtacttttccaaactgaaaaaaactcaaatgtgcatcaataataaaataaataactaaaacagctacatattcctttataaggggacattatacagatataaaattaattggagacatattaaaatatacaaaaatctaacaaatacaatttaattagatttaaaagtcctatccagagcaatcggccaataraaaagaaaaaggcatacaaatagaaaaagaaattgaattctctttctccatttgcaatatgagtcactacgtagagaatgctaaagcctctccaaaactacttttggggaaaacttgaaaagcctcctgaaacggataagcaagtaaagttttaggacacaaaaccaatgtacaaaaatcagtagcatttctatgcatcaacaactttgaattcctgaacatcttctggttttattgcattttcaattttttccctcc

SEQ ID NO: 273067 - DNA, 614 bp, Homo sapiens
ctgttataaccacattcaaaaccacttgagtagtaactccttacatacacgatgtacataagcacactctagaacccagcaactctgctactaggtatatacacccaatagaattgccagcatattttccaatgtagtaaagtgctcgaagtagcattatttggtacttttccaaactgaaaaaaactcaaatgtgcatcaataataaaataaataactaaaacagctacatattcctttataaggggacattatacagatataaaattaattggagacatattaaaatatacaaaaatctaacaaatacaatttaattagatttaaaagtcctatccagagcaatcggccaatagaaaagaaaaaggcatacaaatagaaaaagaaattgaattctctttctccatttgcaatatgagtcactacgtagagaatgctaaagcctctccaaaactacttttggggaaaacttgaaaagcctcctgaaacggataagcaagtaaagttttaggacacaaaaccaatgtacaaaaatmagtagcatttctatgcatcaacaactttgaattcctgaacatcttctggttttattgcattttcaattttttccctcc

SEQ ID NO: 273068 - DNA, 614 bp, Homo sapiens
ctgttataaccacattcaaaaccacttgagtagtaactccttacatacacgatgtacataagcacactctagaacccagcaactctgctactaggtatatacacccaatagaattgccagcatattttccaatgtagtaaagtgctcgaagtagcattatttggtacttttccaaactgaaaaaaactcaaatgtgcatcaataataaaataaataactaaaacagctacatattcctttataaggggacattatacagatataaaattaattggagacatattaaaatatacaaaaatctaacaaatacaatttaattagatttaaaagtcctatccagagcaatcggccaatagaaaagaaaaaggcatacaaatagaaaaagaaattgaattctctttctccatttgcaatatgagtcactacgtagagaatgctaaagcctctccaaaactacttttggggaaaacttgaaaagcctcctgaaacggataagcaagtaaagttttaggacacaaaaccaatgtacaaaaatcagyagcatttctatgcatcaacaactttgaattcctgaacatcttctggttttattgcattttcaattttttccctcc

SEQ ID NO: 273069 - DNA, 552 bp, Homo sapiens
taaggttaaaaattaggctgggtgaatgagataattacccctagtcaagtagtggaagtatggatggctttgggatgggtgaagacaaaagaatctcagcagagggtgcagataaaaaagggcagaaacacaggaggcttatgcaggaagaggaatgagtttgctggactggggagagtgacagtaaaaagcagaggataataggcatctctggtcatctagggactatagggtggattagttgggggttacagaatcagtgaggtacttttgaacagtaggatggataaakaagagctatattttggaataattatgtagcaatggtggttaggagcaatagaaactcaaagtattacataaatatgtttttttcttattctcccacacaagcctttcgccttccctcttaaactgagaacggagtggtttgctatgatgtttttaaattctcacaggcaagcattactctgtgctgccttttaataaaggctaattttaaccaaattaaagaagattgaatggattttcttgctcataatggttgagtac

SEQ ID NO: 273070 - DNA, 552 bp, Homo sapiens
taaggttaaaaattaggctgggtgaatgagataattacccctagtcaagtagtggaagtatggatggctttgggatgggtgaagacaaaagaatctcagcagagggtgcagataaaaaagggcagaaacacaggaggcttatgcaggaagaggaatgagtttgctggactggggagagtgacagtaaaaagcagaggataataggcatctctggtcatctagggactatagggtggattagttgggggttacagaatcagtgaggtacttttgaacagtaggatggataaagaagagctatawtttggaataattatgtagcaatggtggttaggagcaatagaaactcaaagtattacataaatatgtttttttcttattctcccacacaagcctttcgccttccctcttaaactgagaacggagtggtttgctatgatgtttttaaattctcacaggcaagcattactctgtgctgccttttaataaaggctaattttaaccaaattaaagaagattgaatggattttcttgctcataatggttgagtac

SEQ ID NO: 273071 - DNA, 552 bp, Homo sapiens
taaggttaaaaattaggctgggtgaatgagataattacccctagtcaagtagtggaagtatggatggctttgggatgggtgaagacaaaagaatctcagcagagggtgcagataaaaaagggcagaaacacaggaggcttatgcaggaagaggaatgagtttgctggactggggagagtgacagtaaaaagcagaggataataggcatctctggtcatctagggactatagggtggattagttgggggttacagaatcagtgaggtacttttgaacagtaggatggataaagaagagctatattttggaataattatgtagcaatggtggttaggagcaatagaaactcaaagtattacataaatatgtttttttcttattctcccacacaagcctttcrccttccctcttaaactgagaacggagtggtttgctatgatgtttttaaattctcacaggcaagcattactctgtgctgccttttaataaaggctaattttaaccaaattaaagaagattgaatggattttcttgctcataatggttgagtac

SEQ ID NO: 273072 - DNA, 620 bp, Homo sapiens
agtggctatgcaggagtcagtctttcagtgctgatctttgctgagaaaataatagtattgttcaaacagtatataggatttgcactcaatatttaataatttagtgacaaaaatctcttaaatatacattatactgatataaaataagttactcatctattaccaaatttactcttttatttaatwtaactcttgggataacattttcttttatgcttccataaatatgcttcacatggatatatcacatattgtgtataatttcacacagtgttaatatagtttccatctatttagatgtttgcacatttattttatctcaatgtttgttctcaggaagagtgtttttctttataaactaaattttcagcaaattttaaatgcatttcactgacgtaattatacttacattgtatttgtgtattaagttacattttgtccttaaacctgaaaataacttttcaaatatatgtaattttaaatttacatgtttttccctcagaactttgaaaaccataacctattggattcttgatcttattcacatattgagaaatatgtgtcttttcattgctttataattaatttgaattttatcttagatagctttacgtgatttt

SEQ ID NO: 273073 - DNA, 620 bp, Homo sapiens
agtggctatgcaggagtcagtctttcagtgctgatctttgctgagaaaataatagtattgttcaaacagtatataggatttgcactcaatatttaataatttagtgacaaaaatctcttaaatatacattatactgatataaaataagttactcatctattaccaaatttactcttttatttaatataactcttgggataacattttcttttatgcttccataaatatgcttcacatggatatatcacatattgtgtataatttcacacagtgttaatatagtttccatctatttagatgtttgcacatttattttatctcaatgtttgttctcaggaagagtgtttttctttataaactaaattttcagcaamttttaaatgcatttcactgacgtaattatacttacattgtatttgtgtattaagttacattttgtccttaaacctgaaaataacttttcaaatatatgtaattttaaatttacatgtttttccctcagaactttgaaaaccataacctattggattcttgatcttattcacatattgagaaatatgtgtcttttcattgctttataattaatttgaattttatcttagatagctttacgtgatttt

SEQ ID NO: 273074 - DNA, 527 bp, Homo sapiens
tttaaatttaaaatttttacctaattattttgataatataacttattttgatcttacttttaaacttttcctctaatatatttaaacattataactacttatattatttctacagtatatatacaattttgggatttwttaagatgtaatggtacagctgtgtttttcttataattttgtttcttaataactttgatcttgatgacttttactttgtatattttaaaaagaatagtagacttcattttattataaatgactgacctcaattgatggggccattgaagattctgggtcgaggtattttattccagtgaaaagttatctgtaatgttaataatgcaccctttacagacaactgaaaatgattaagtctatatatttacctaaattgtcctgagtaaaacacatagtgtacatataaaccagaaactcatatgatgattggtgttaattcccaaatcaaccaaagaggagaaataccacctccactaactaacctatttttctaaacttttgaaaattta

SEQ ID NO: 273075 - DNA, 546 bp, Homo sapiens
atcttgctcatacattctcctctacgctctcctgcccccttttccacaaaattgcgggcctgtttttatgagggtgccacctcggcagtgagacagtgccccatrtttgtgctgatccatctgaccctttcctggtgcttttccatgaggaaaaaatggaacaatgaggagtcggtgcttgatctaatgttgcctgttgtttaacacaatcacagaaaggaagacaaaaaggcataactatttctttgatgtgggcctcttgctttaatttaaaactctgatattaagcaggttagctcttcccagctcagctcagctcttgaaatttcatggaagaaattctgtttttattggtctaaattttgtgtcttttatatagaaaaacggtaataaaattgcatcttatatttaaaaattgaatgtcttctgttttgccattttactgaagagaaaatctgtgtagcctattggcattattaacagtgaagctccaagtactaatattcagaaaaaataatgaatcaaaatccaactatttctcagtac

SEQ ID NO: 273076 - DNA, 546 bp, Homo sapiens
atcttgctcatacattctcctctacgctctcctgcccccttttccacaaaattgcgggcctgtttttatgagggtgccacctcggcagtgagacagtgccccatgtttgtgctgatccatctgaccctttcctggtgcttttccatgaggaaaaaatggaacaatgaggagtcggtgcttgatctaatgttgcctgttgtttaacacaatcacagaaaggaagacaaaaaggcataactatttctttgatgtgggcctcttgctttaatttaaaactctgatattaagcaggttagctcttcccagctcagctcagctcttgaaatttcatggaagaaattctgtttttattggtctaaattttgtgtcttttatatagaaaaamggtaataaaattgcatcttatatttaaaaattgaatgtcttctgttttgccattttactgaagagaaaatctgtgtagcctattggcattattaacagtgaagctccaagtactaatattcagaaaaaataatgaatcaaaatccaactatttctcagtac

SEQ ID NO: 273077 - DNA, 645 bp, Homo sapiens
taatattcaattctctttaatcttgctcatacattctcctctacgctctcctgcccccttttccacaaaattgcgggcctgtttttatgagggtgccacctcggcagtgagacagtgccccatgtttgtgctgatccatctgaccctttcctggtgcttttccatgaggaaaaaatggaacaatgaggagtcggtgcttgatctaatgttgcctgttgtttaacacaatcacagaaaggaagacaaaaaggcataactatttctttgatgtgggcctcttgctttaatttaaaactctgatattaagcaggttagctcttcccagctcagctcagctcttgaaatttcatggaagaaattctgtttttattggtctaaattttgtgtcttttatatagaaaaacggtaataaaattgcatcttatatttaaaaattgaatgycttctgttttgccattttactgaagagaaaatctgtgtagcctattggcattattaacagtgaagctccaagtactaatattcagaaaaaataatgaatcaaaatccaactatttctcagtaccattttcttttttataaactttctattttattgtctgtaatttaaaaacttctgtggaaaagagtttaaaattttcaaag

SEQ ID NO: 273078 - DNA, 546 bp, Homo sapiens
atcttgctcatacattctcctctacgctctcctgcccccttttccacaaaattgcgggcctgtttttatgagggtgccacctcggcagtgagacagtgccccatgtttgtgctgatccatctgaccctttcctggtgcttttccatgaggaaaaaatggaacaatgaggagtcggtgcttgatctaatgttgcctgttgtttaacacaatcacagaaaggaagacaaaaaggcataactatttctttgatgtgggcctcttgctttaatttaaaactctgatattaagcaggttagctcttcccagctcagctcagctcttgaaatttcatggaagaaattctgtttttattggtctaaattttgtgtcttttatatagaaaaacggtaataaaattgcatcttatatttaaaaattgaatgtcttctgttttgccattttactgaagagaaaatytgtgtagcctattggcattattaacagtgaagctccaagtactaatattcagaaaaaataatgaatcaaaatccaactatttctcagtac

SEQ ID NO: 273079 - DNA, 524 bp, Homo sapiens
gctcacagctgcagaattccaatcactctcagtctgactgtgctgattttagaaagacacatggggatctgccacaaggaaggcactttgcagggaggcctcaaccccatggcacaccccttcaggagggctcttctccttgtaacagtcacttagccacttgtagaaaggcaamtcttagaaaatttaaatggggaccaaaatactaaccctaaccagtttattatctcaaagaattggaaaaacaaagttttcgaatactacgggattagaagagtaaacaagatatgccttttctttggagctacatatatgtattaaaaatgggatgtacaaagaattttttatcacatggagaagtgattatgagatgatataacattaaacaaattaatgaaaggcacacattaaaaagtataaccaaacttatacattagaactcaaaatttaaaatgtgtagaaaaatgattgagaggaaatatgccgaattataggaattgatgtgtttcttataggaatcagga

SEQ ID NO: 273080 - DNA, 524 bp, Homo sapiens
gctcacagctgcagaattccaatcactctcagtctgactgtgctgattttagaaagacacatggggatctgccacaaggaaggcactttgcagggaggcctcaaccccatggcacaccccttcaggagggctcttctccttgtaacagtcacttagccacttgtagaaaggcaaatcttagaaaatttaaatggggaccaaaatactaaccctaaccagtttattatctcaaagaattggaaaaacaaagttttcgaatactacgggattagaagagtaaacaagatatgccttttctttggagctacatatatgtattaaaaatgggatgtacaaagaattttttatcacatggagaagtgmttatgagatgatataacattaaacaaattaatgaaaggcacacattaaaaagtataaccaaacttatacattagaactcaaaatttaaaatgtgtagaaaaatgattgagaggaaatatgccgaattataggaattgatgtgtttcttataggaatcagga

SEQ ID NO: 273081 - DNA, 524 bp, Homo sapiens
gctcacagctgcagaattccaatcactctcagtctgactgtgctgattttagaaagacacatggggatctgccacaaggaaggcactttgcagggaggcctcaaccccatggcacaccccttcaggagggctcttctccttgtaacagtcacttagccacttgtagaaaggcaaatcttagaaaatttaaatggggaccaaaatactaaccctaaccagtttattatctcaaagaattggaaaaacaaagttttcgaatactacgggattagaagagtaaacaagatatgccttttctttggagctacatatatgtattaaaaatgggatgtacaaagaattttttatcacatggagaagtgattatgagatgatataacattaaacaaattaatgaaaggcacacattaaaaagtataaccaaacttatacattagarctcaaaatttaaaatgtgtagaaaaatgattgagaggaaatatgccgaattataggaattgatgtgtttcttataggaatcagga

SEQ ID NO: 273082 - DNA, 563 bp, Homo sapiens
ctgctacatagtgcacaagttctggagagactataggggtgaagaataataaaagattttatttttgaawcatcttgcgtggttgcctgtttggagtgcagtagcgtgatcatagttcaccgcagcctagaactcctggctcaagtgatcctctgcctcaatatccagcatagctgagacaacagtttggaactatcacacctggctaaatgtttttaatgcttcaagttttttgtataaatggggtctcactatgttgacaaggctggtatcaaattcctggcctcaagcaattctatctcctcagccaatcaatatgccaggaatacaggcatgagacaccgtgcctggccagcgcctttataatgttttattctcccaagttcttctcaaaaaagtcaacatccaccaagtatcagctgagatttgaacttcaaccctgggctgaactcagtggcaggactctccattcccaacaagggacaaatggagaaataaatggtgagagggaggagcttgattctgcccatgctaattggacacctattgtgtgctaggaagac

SEQ ID NO: 273083 - DNA, 563 bp, Homo sapiens
ctgctacatagtgcacaagttctggagagactataggggtgaagaataataaaagattttatttttgaatcatcttgcrtggttgcctgtttggagtgcagtagcgtgatcatagttcaccgcagcctagaactcctggctcaagtgatcctctgcctcaatatccagcatagctgagacaacagtttggaactatcacacctggctaaatgtttttaatgcttcaagttttttgtataaatggggtctcactatgttgacaaggctggtatcaaattcctggcctcaagcaattctatctcctcagccaatcaatatgccaggaatacaggcatgagacaccgtgcctggccagcgcctttataatgttttattctcccaagttcttctcaaaaaagtcaacatccaccaagtatcagctgagatttgaacttcaaccctgggctgaactcagtggcaggactctccattcccaacaagggacaaatggagaaataaatggtgagagggaggagcttgattctgcccatgctaattggacacctattgtgtgctaggaagac

SEQ ID NO: 273084 - DNA, 563 bp, Homo sapiens
ctgctacatagtgcacaagttctggagagactataggggtgaagaataataaaagattttatttttgaatcatcttgcgtrgttgcctgtttggagtgcagtagcgtgatcatagttcaccgcagcctagaactcctggctcaagtgatcctctgcctcaatatccagcatagctgagacaacagtttggaactatcacacctggctaaatgtttttaatgcttcaagttttttgtataaatggggtctcactatgttgacaaggctggtatcaaattcctggcctcaagcaattctatctcctcagccaatcaatatgccaggaatacaggcatgagacaccgtgcctggccagcgcctttataatgttttattctcccaagttcttctcaaaaaagtcaacatccaccaagtatcagctgagatttgaacttcaaccctgggctgaactcagtggcaggactctccattcccaacaagggacaaatggagaaataaatggtgagagggaggagcttgattctgcccatgctaattggacacctattgtgtgctaggaagac

SEQ ID NO: 273085 - DNA, 513 bp, Homo sapiens
acaagtataggtttcatctagactagttttcaaaatgaggaaacaggatgcagacaaatactttattcccactttttggcctggkgtttattaacaaggtgaaattatacagaagaataaattagtttagctgaaaaaagaaaaaatgtatagttaatggagggaaaaaattgaaaatgcactaaaaccacaagatgttcaggaattcaaagttgttgatgcatataaatactactgggttttgtacattggttttgtgtcctaaaactttacttgcttatccatttcaggaggcttttcaagttttctccaaaaggagttttggaaagactttagcattgtctacatagtgactcatattgcaaatggagaaagagaattcaatttttttttctatttgtatgcctttttcttttctattggctgattgctgtggataggacttttaaatctaattaaattgtatttgttagatttttgtatattttaatatgtctccaattaattttatat

SEQ ID NO: 273086 - DNA, 513 bp, Homo sapiens
acaagtataggtttcatctagactagttttcaaaatgaggaaacaggatgcagacaaatactttattcccactttttggcctggggtttattaacaaggtgaaattatacagaagaataaattagtttagctgaraaaagaaaaaatgtatagttaatggagggaaaaaattgaaaatgcactaaaaccacaagatgttcaggaattcaaagttgttgatgcatataaatactactgggttttgtacattggttttgtgtcctaaaactttacttgcttatccatttcaggaggcttttcaagttttctccaaaaggagttttggaaagactttagcattgtctacatagtgactcatattgcaaatggagaaagagaattcaatttttttttctatttgtatgcctttttcttttctattggctgattgctgtggataggacttttaaatctaattaaattgtatttgttagatttttgtatattttaatatgtctccaattaattttatat

SEQ ID NO: 273087 - DNA, 513 bp, Homo sapiens
acaagtataggtttcatctagactagttttcaaaatgaggaaacaggatgcagacaaatactttattcccactttttggcctggggtttattaacaaggtgaaattatacagaagaataaattagtttagctgaaaaaagaaaaaatgtatagttaatggagggaaaaaattgaaaatgcamtaaaaccacaagatgttcaggaattcaaagttgttgatgcatataaatactactgggttttgtacattggttttgtgtcctaaaactttacttgcttatccatttcaggaggcttttcaagttttctccaaaaggagttttggaaagactttagcattgtctacatagtgactcatattgcaaatggagaaagagaattcaatttttttttctatttgtatgcctttttcttttctattggctgattgctgtggataggacttttaaatctaattaaattgtatttgttagatttttgtatattttaatatgtctccaattaattttatat

SEQ ID NO: 273088 - DNA, 650 bp, Homo sapiens
ttgcctttcagctctcctgaagctttttttttatgaagagaaggttttaattstaataaagtccaatttgtcatatttttgtcttgagaattaatgcattttgtgtcccgagaaatctgggcctgtgccagtcatggacatatttatctatgttatctactagaaatattgttttcagctttgaccttaaaatttaaaatccacttttcattggaatttgttaataatataagataggagtgttttttctcacataaataactggttgactcaaggctatttaccgagaagactgtcttcactcctcttctgtgccttttttgtaatatacaaaatgtccaaatgtgtgagtctgagttggactctcgagtttttctagttttctttgtgcctatttttgcattactaccatagatagcttttattactatagctttaatctaagtctgaatatatgtcattttaagctcacaaactttgttattcttcaggacagtttttacatttcttcgattttttatatgtatttaaattttttaaactgattagacagtttccacaagatttctgccaaaatattgtattgtgaaaatggaaatctatgaatcaatttagtgagaagttacatagaaacaaagcaaaacaaaaca

SEQ ID NO: 273089 - DNA, 650 bp, Homo sapiens
ttgcctttcagctctcctgaagctttttttttatgaagagaaggttttaattctaataaagtccaatttgtcatatttttgtcttgagaattaatgcattttgtgtcccragaaatctgggcctgtgccagtcatggacatatttatctatgttatctactagaaatattgttttcagctttgaccttaaaatttaaaatccacttttcattggaatttgttaataatataagataggagtgttttttctcacataaataactggttgactcaaggctatttaccgagaagactgtcttcactcctcttctgtgccttttttgtaatatacaaaatgtccaaatgtgtgagtctgagttggactctcgagtttttctagttttctttgtgcctatttttgcattactaccatagatagcttttattactatagctttaatctaagtctgaatatatgtcattttaagctcacaaactttgttattcttcaggacagtttttacatttcttcgattttttatatgtatttaaattttttaaactgattagacagtttccacaagatttctgccaaaatattgtattgtgaaaatggaaatctatgaatcaatttagtgagaagttacatagaaacaaagcaaaacaaaaca

SEQ ID NO: 273090 - DNA, 650 bp, Homo sapiens
ttgcctttcagctctcctgaagctttttttttatgaagagaaggttttaattctaataaagtccaatttgtcatatttttgtcttgagaattaatgcattttgtgtcccgagaaatctgggcctgtgccagtcatggacatatttatctatgttatctactagaaatattgytttcagctttgaccttaaaatttaaaatccacttttcattggaatttgttaataatataagataggagtgttttttctcacataaataactggttgactcaaggctatttaccgagaagactgtcttcactcctcttctgtgccttttttgtaatatacaaaatgtccaaatgtgtgagtctgagttggactctcgagtttttctagttttctttgtgcctatttttgcattactaccatagatagcttttattactatagctttaatctaagtctgaatatatgtcattttaagctcacaaactttgttattcttcaggacagtttttacatttcttcgattttttatatgtatttaaattttttaaactgattagacagtttccacaagatttctgccaaaatattgtattgtgaaaatggaaatctatgaatcaatttagtgagaagttacatagaaacaaagcaaaacaaaaca

SEQ ID NO: 273091 - DNA, 650 bp, Homo sapiens
ttgcctttcagctctcctgaagctttttttttatgaagagaaggttttaattctaataaagtccaatttgtcatatttttgtcttgagaattaatgcattttgtgtcccgagaaatctgggcctgtgccagtcatggacatatttatctatgttatctactagaaatattgttttcagctttgaccttaaaatttaaaatccacttttcattggaatttgttaataatataagataggagtgttttttctcacataaataactggttgactcaaggctatttaccgagaagactgtcttcactcctcttctgtgcctkttttgtaatatacaaaatgtccaaatgtgtgagtctgagttggactctcgagtttttctagttttctttgtgcctatttttgcattactaccatagatagcttttattactatagctttaatctaagtctgaatatatgtcattttaagctcacaaactttgttattcttcaggacagtttttacatttcttcgattttttatatgtatttaaattttttaaactgattagacagtttccacaagatttctgccaaaatattgtattgtgaaaatggaaatctatgaatcaatttagtgagaagttacatagaaacaaagcaaaacaaaaca

SEQ ID NO: 273092 - DNA, 596 bp, Homo sapiens
cataagtctgctcaaactctccccatcccaatattctctctggtattgagcatgacaccctgtcttcactgagcatgtgtttatgcagttttgtgaccacctatccattttacaacaggaagactgaggcccccaaaaaaggcaaagactggtccatatcccagaaattgggaagagcacagagtattagggagggatccagcttccaaggccttgcatgcaccccacccatcaggtttgctttggaaatgagtgctcytaagtcctggaaaaccctgtggtctactttctacctgggctttctaccctttcttattctcacataggtgtgcagccatgaacacacaaacacaccacacacacacacacacacaggcttataaggtggagatcatggaggtgaggttagagaagaggaacccagagaagtgacaaaacgggaagaaatagaagaggcagctttgccatgaggtagaggcatccactcccccagctacatgaccaggagctgacagcatgcgatgaaggatcctccaggttccctgggttcttccaggcctggggatcttcccagctgtttcaagaggacaggacag

SEQ ID NO: 273093 - DNA, 588 bp, Homo sapiens
gattcttttaaagaaactatacaggtgtggtagtgtgcccaactgtggtcatatttactcaggagacataggaggcatgactgctttacttcagaaatttgaggttacagtgagctgtgattgcaccactgcmatctgtcccaggagatagagtaagatcctgtgtataaaatgaaaaaataaagaaaaataaaatgattttaagttaaaaaataattcatagatctccacttctttagggtcacttgaatatatatttttctcgtttcattaggctatatttcctggttgcttttaagtactgtggttttgttaaggttttggtcaattaagaaaccactacctattttatcctttatgaaaaagctttgtacatgggaaaattgacaatattcagccacactagtcattccgggagcttctccaatctgttgtcaaaatgtgtcttctttgtactgtatgtattttcttgttaataaggtttacctctctttcctcttaggagcctttagtctcttctctttgtcactgttgcaggcactacagtctctttgttgtaagaaatatttatctttattctcagtcgac

SEQ ID NO: 273094 - DNA, 626 bp, Homo sapiens
ctttgctcacccaattgcagttaagttcatacatccattgagagaaacaggatctcaggttcttcttcaactatcattgtgttctcagctggcctcattttgttcattagatttataaaatatatttaccttaatttcatcaccgaattttttaaaaaattattattttccagcttttagcattatatccaacaagaccyagacaaaacagtacataggagcttcttttcaaaaagtaatattgggaagatatgggagctctggccttgaaaatttacacttaaggagagtgggaaattgaaggataagtgtaaagggtacaaaggatgctatgatgaatataccagatatagagcaactacctacagcaaaaatgtcactgctagaagagctcaaaaccataaagtattttggaaaaagcataattaatgttgattcttttttctgaactatatatttgtataattacatatcaataacaatttttgaaacatcatgtttttgaaacaaaatttagaaaatcgcaatagtggcctaggccaggaatatatcttctaatgctatccctcccatagtcccccacttcctgacaggctccagtgtgtggtgttccccttcctgtgtcc

SEQ ID NO: 273095 - DNA, 590 bp, Homo sapiens
gcacttttcaacaacatataatatctcataatttatgtggaccagaatctggacacagttcagttgggtacctctgcctttaggtcttttatgacattgggactgtggtcttaactgaagctggactgggaaagcatgagcctttaagctgactcatgtgaaaattggcagggtttagtgtggctggagagcctgactttccttctctctactggtctgagcaccccctcaggctctgttatgttggtctttacatggagcatctcatagcattgaagcttgcttcctgtgtttgaggtatacaatakagagagagaattagacaaaaaggtgtacacaaaaagagacagagaaagattgagggcgcaaacaggaaaaacccagtaggagaaaaatgagagctttagaaaaatcttgacagggtgcggtggctcacacctgtaatcccaacactttgggatgctgagacgggtggatcacctgaggtcaggggtttgaaagcagcctggacaatatggtgaaaccaccgtctcttctaaaagtacaaaatgagcaaggtgtggtggtgcatgcctgtaatcccagctact

SEQ ID NO: 273096 - DNA, 590 bp, Homo sapiens
gcacttttcaacaacatataatatctcataatttatgtggaccagaatctggacacagttcagttgggtacctctgcctttaggtcttttatgacattgggactgtggtcttaactgaagctggactgggaaagcatgagcctttaagctgactcatgtgaaaattggcagggtttagtgtggctggagagcctgactttccttctctctactggtctgagcaccccctcaggctctgttatgttggtctttacatggagcatctcatagcattgaagcttgcttcctgtgtttgaggtatacaatagakagagagaattagacaaaaaggtgtacacaaaaagagacagagaaagattgagggcgcaaacaggaaaaacccagtaggagaaaaatgagagctttagaaaaatcttgacagggtgcggtggctcacacctgtaatcccaacactttgggatgctgagacgggtggatcacctgaggtcaggggtttgaaagcagcctggacaatatggtgaaaccaccgtctcttctaaaagtacaaaatgagcaaggtgtggtggtgcatgcctgtaatcccagctact

SEQ ID NO: 273097 - DNA, 592 bp, Homo sapiens
gctctcttcctccttctgcaaaatgatggtaaaacttgaagtctgcagtctgaaattcagaagcgagtcatcaccagagctcaaccgtgctgacaacctgatctcaaatttcgaacctatagaagtatgagaaattaagtcctgttgtctataagctgcttatctatggttctttggcatagcagcctgaactaatacaaaagtgatatccttttctgtatttcattggacagaagctgaatttgtacccctatgctgttaaaaaaatgacttaaaatggattttcagaatgaaagataggaaatggcttgttgaaacactaaaattttatstgcttataagatttttaaacattggctgaaattgttggaactgatatggccaaatgaagtccatgaagaatcagattgcatatgttagagcccaaatttccattgtgtgtttcatactaactctccctgaatttgcatgtgacttgagaggaagcaagaagagatgacagtatatgtctcatgactttccatattcctactttccttccagcaatcccttacagaacccacctcttaggccttttctaatcactgcctta

SEQ ID NO: 273098 - DNA, 620 bp, Homo sapiens
caccacatgatttttatgttttatcttatatacatctaatacaatccctaggaagtagatgttagcatcatccccactgtgtatgcttggaggctggggaagcctcaaatacacagtgacttttattgggtcccagagatggtaagaaaaacaaggttatgttccagctgtctcttatatcctggaacccaggctgcatttagttctttccarggaattaaggggaagttgtgtttgcatacttgtgtacaaatgaagagttgacatggaagaggagactgaacaattagtagcatagtggggcttttgggtaggtcttacagaaagaagggacccagtagatggaaccttgaagagtttaacacactttcttggtgacaacccaacatcagttaagaaaccaggaacccacattcttgagacagctctgtatccacctctgttagtgagagatgctcaagagagtgagatgttctttcattgtgccctgaaatttctgagttttgactttacaaaggctcagtgtaaaagccttatctgaaaacacggatgtcaactcaggcctcatcattgatgcccctggctattggctgggtgcacctacaaataacacagggcag

SEQ ID NO: 273099 - DNA, 620 bp, Homo sapiens
caccacatgatttttatgttttatcttatatacatctaatacaatccctaggaagtagatgttagcatcatccccactgtgtatgcttggaggctggggaagcctcaaatacacagtgacttttattgggtcccagagatggtaagaaaaacaaggttatgttccagctgtctcttatatcctggaacccaggctgcatttagttctttccaaggaattaaggggaagttgtgtttgcatacttgtgtacaaatgaagagttgacatggaagaggagactgarcaattagtagcatagtggggcttttgggtaggtcttacagaaagaagggacccagtagatggaaccttgaagagtttaacacactttcttggtgacaacccaacatcagttaagaaaccaggaacccacattcttgagacagctctgtatccacctctgttagtgagagatgctcaagagagtgagatgttctttcattgtgccctgaaatttctgagttttgactttacaaaggctcagtgtaaaagccttatctgaaaacacggatgtcaactcaggcctcatcattgatgcccctggctattggctgggtgcacctacaaataacacagggcag

SEQ ID NO: 273100 - DNA, 620 bp, Homo sapiens
caccacatgatttttatgttttatcttatatacatctaatacaatccctaggaagtagatgttagcatcatccccactgtgtatgcttggaggctggggaagcctcaaatacacagtgacttttattgggtcccagagatggtaagaaaaacaaggttatgttccagctgtctcttatatcctggaacccaggctgcatttagttctttccaaggaattaaggggaagttgtgtttgcatacttgtgtacaaatgaagagttgacatggaagaggagactgaacaattagtagcatagtggggcttttgggtaggtcttacagaaagaagggacccagtagatggaaccttgaagagtttaacacactttcttggtgacaacccaacatcagttaagaaaccaggaacccacattcttgagacagctctgtatccacctctgttagtgagagatgctcaagagagtgagatgttctttcattgtgccctgaaatttctgagttttgactttacaaaggctcagtgtaaaagccttatctgaaaacacggatgtcaactcaggcctcatcattgatgcccctggctattggcygggtgcacctacaaataacacagggcag

SEQ ID NO: 273101 - DNA, 589 bp, Homo sapiens
tcttctgcataggtcttgccaacaggggtattatgacatacctttctattcattgcctaggctatgtgactctccactcttatctgggcccttccaaaagaggggattgtgacatatcagtgaccctaccaccaaggtgatgtgactgttctcttttgcctgggtttgcatattttgggtattgtgacatatcccygggcccaacacttaggggataaaaggcttattcctctaccttatgcacagagaaacttgtgacgtttttctgcattcatcaccaaggagatgtgactctcctacctgcatcctgaccacagagaggattgtaacatattgctagatccagcacccaggtgatgtgactctgctgcctggttcctaatttaaggagtggattgctacatacccatgcctgagcattcaggtaatgtgtctctgttctctggtccctgttctcagggaagcgacatatccctggcccagcgtccaactgattttactctccttctctcttcctatatgaaggtgtaattgtgacttatatcttggaacacaacacacaggtgcaatgatgactttcatatgtcac

SEQ ID NO: 273102 - DNA, 438 bp, Homo sapiens
gcatgtttctgcaatgtgttatctcaagaatttatctctgtagcccatcagggcaggagctggtctctcacctgttgataatattccataagggaggttcttccccacagtgtttagtcttccgacgctggtatagcctgacatgatgacattctactttcatgttggtcrtgctgcagggagaattctgtgagtgtcctaataggctggaatcacttgctaagttgaaccccatctttggtgctcacttttctgttatcttataattagctttattctaagcaaatccatgtctattttatttatctgtttattaacttatttttatgtatggaaaaacacatttttttatttgcttatttatttagagacagggtctccctctgtcatccaggctggaatacagtggtagattggagtgatcatggctcattgcag

SEQ ID NO: 273103 - DNA, 511 bp, Homo sapiens
gtatagcctgacatgatgacattctactttcatgttggtcgtgctgcagggagaattctgtgagtgtcctaataggctggaatcacttgctaagktgaaccccatctttggtgctcacttttctgttatcttataattagctttattctaagcaaatccatgtctattttatttatctgtttattaacttatttttatgtatggaaaaacacatttttttatttgcttatttatttagagacagggtctccctctgtcatccaggctggaatacagtggtagattggagtgatcatggctcattgcagcctcaaactcttgagctcaaatgattctctcacctcagcctcctgtgccaccatgccctgctagttgattttaatttgttataaagaaagtgtctcattatgctgcccaggctggtctcaaactcctgggcccaagcaattctctcatctcagcctcccaaagcactaggattaaaaacatgagccactgtactgcgctgtgc

SEQ ID NO: 273104 - DNA, 589 bp, Homo sapiens
tcttctgcataggtcttgccaacaggggtattatgacatacctttctattcattgcctaggctatgtgactctccactcttatctgggcccttccaaaagaggggattgtgacatatcagtgaccctaccaccaaggtgatgtgactgttctcttttgcctgggtttgcatattttgggtattgtgacatatccccgggcccaacacttaggggataaaaggcttattcctctaccttatgcacagagaaacttgtgacgtttttctgcattcatcaccaaggagatgtgactctcctacctgcatcctgaccacagagaggattgtaacatattgctagatccagcacccaggtgatgtgactctgctgcctggttcctaatttaaggagtggattgctacatacccatgcctgagcattcaggtaatgtgtctctgttcyctggtccctgttctcagggaagcgacatatccctggcccagcgtccaactgattttactctccttctctcttcctatatgaaggtgtaattgtgacttatatcttggaacacaacacacaggtgcaatgatgactttcatatgtcac

SEQ ID NO: 273105 - DNA, 589 bp, Homo sapiens
tcttctgcataggtcttgccaacaggggtattatgacatacctttctattcattgcctaggctatgtgactctccactcttatctgggcccttccaaaagaggggattgtgacatatcagtgaccctaccaccaaggtgatgtgactgttctcttttgcctgggtttgcatattttgggtattgtgacatatccccgggcccaacacttaggggataaaaggcttattcctctaccttatgcacagagaaacttgtgacgtttttctgcattcatcaccaaggagatgtgactctcctacctgcatcctgaccacagagaggattgtaacatattgctagatccagcacccaggtgatgtgactctgctgcctggttcctaatttaaggagtggattgctacatacccatgcctgagcattcaggtaatgtgtctctgttctctggtccctgttctcagggaagcgacatatccctggcccagcgtccaactgattttactctcctkctctcttcctatatgaaggtgtaattgtgacttatatcttggaacacaacacacaggtgcaatgatgactttcatatgtcac

SEQ ID NO: 273106 - DNA, 621 bp, Homo sapiens
tattggttggtttaaggtatgaatgtcatcatcacacctacatgttaggccaaaatatatgtgacaatctcacatttgagtagtcagcaagcaggagggtctcatcacctgggtcattgtcagggatacgtcacattctcccctgaggacagggacaaggcaagaaagtcacatccctaggtattctgccagggatatgttcttgttccctcctgaaagcatgacacatgcagcagagtcacctcacctgggttctgggtccagcgatatgtcacaattttccctgtgagcaaggcacaggcaggagaaacacatcacctgtttgctgggcccagaaatatgctacagtttttcttgtgagcagggytcaggcagaaatgggggaatcacattttctaggtgataaatgcagagctatgtcacaaggtccccagtagtcagggccttggcagaagattcctattgtctaggcgattggcccagtgatacaacacaatagctaaattatgcagggcccaaggcaaagaggagagttgcatcacctaagtgatgaacaaaaagatatgtcataatacccaggtggaaatgggccatgcaggtaagtcacattacctaggtgtt

SEQ ID NO: 273107 - DNA, 621 bp, Homo sapiens
tattggttggtttaaggtatgaatgtcatcatcacacctacatgttaggccaaaatatatgtgacaatctcacatttgagtagtcagcaagcaggagggtctcatcacctgggtcattgtcagggatacgtcacattctcccctgaggacagggacaaggcaagaaagtcacatccctaggtattctgccagggatatgttcttgttccctcctgaaagcatgacacatgcagcagagtcacctcacctgggttctgggtccagcgatatgtcacaattttccctgtgagcaaggcacaggcaggagaaacacatcacctgtttgctgggcccagaaatatgctacagtttttcttgtgagcagggctcaggcagaaatgggggaatcacattttctaggtgataaatgcagagctatgtcacaaggtccccagtagtcagggycttggcagaagattcctattgtctaggcgattggcccagtgatacaacacaatagctaaattatgcagggcccaaggcaaagaggagagttgcatcacctaagtgatgaacaaaaagatatgtcataatacccaggtggaaatgggccatgcaggtaagtcacattacctaggtgtt

SEQ ID NO: 273108 - DNA, 570 bp, Homo sapiens
tgggtagtcctcagtaaaaagacagtcacattasttagagtctgtccccagcgatgtgtaagaatcccagctgtgaacaggcaccagacaggacaagagagtcccatcacctgggtgaacagtgcacagatatgtcacaatgaccccatgtaggtaaagtctagacaagagttacatcacctgggtgttggacccagcaatatgtcacaatggctcatgtgggcaaagcacaggacacagtcatataacaaagtgccaggaccagtgttaggtcaggataccctttatgggcagtgccaagacaggagattagaagcatattaattagatgctggattcaaggatatatcacaatctcatctgtgggctacacccaggcaaaaaagtcaaatcactcaggagctggctagaggtgtacgtcagaatcacacctgcaggaaggtccatggatgagattaacaatccctcataagtgccagttctggatatgagagtgaacgcctcctgtatgttgcatctatgtgcataagtcacaatctcaatggaggaatgggttttttccatgagagc

SEQ ID NO: 273109 - DNA, 570 bp, Homo sapiens
tgggtagtcctcagtaaaaagacagtcacattagttagagtctgtccccagcgatgtgtaagaatcccagctgtgaacaggcaccagacaggacaagagagtcccatcacctgggtgaacagtgcacagatatgtcacaatgaccccatgtaggyaaagtctagacaagagttacatcacctgggtgttggacccagcaatatgtcacaatggctcatgtgggcaaagcacaggacacagtcatataacaaagtgccaggaccagtgttaggtcaggataccctttatgggcagtgccaagacaggagattagaagcatattaattagatgctggattcaaggatatatcacaatctcatctgtgggctacacccaggcaaaaaagtcaaatcactcaggagctggctagaggtgtacgtcagaatcacacctgcaggaaggtccatggatgagattaacaatccctcataagtgccagttctggatatgagagtgaacgcctcctgtatgttgcatctatgtgcataagtcacaatctcaatggaggaatgggttttttccatgagagc

SEQ ID NO: 273110 - DNA, 569 bp, Homo sapiens
gtaaagtctagacaagagttacatcacctgggtgttggacccagcaatatgtcacaatggctcatgygggcaaagcacaggacacagtcatataacaaagtgccaggaccagtgttaggtcaggataccctttatgggcagtgccaagacaggagattagaagcatattaattagatgctggattcaaggatatatcacaatctcatctgtgggctacacccaggcaaaaaagtcaaatcactcaggagctggctagaggtgtacgtcagaatcacacctgcaggaaggtccatggatgagattaacaatccctcataagtgccagttctggatatgagagtgaacgcctcctgtatgttgcatctatgtgcataagtcacaatctcaatggaggaatgggttttttccatgagagccttaatcccttttgaaaacggagttatcttagtggactcacagcctcacaagtgttttggatcttggtcagggagtcacaaacccacttaaggacaacatccacttattagagccaattttccaacttttcactgcctctgggtgtgagttt

SEQ ID NO: 273111 - DNA, 570 bp, Homo sapiens
tgggtagtcctcagtaaaaagacagtcacattagttagagtctgtccccagcgatgtgtaagaatcccagctgtgaacaggcaccagacaggacaagagagtcccatcacctgggtgaacagtgcacagatatgtcacaatgaccccatgtaggtaaagtctagacaagagttacatcacctgggtgttggacccagcaatatgtcacaatggctcatgtgggcaaagcacaggacasagtcatataacaaagtgccaggaccagtgttaggtcaggataccctttatgggcagtgccaagacaggagattagaagcatattaattagatgctggattcaaggatatatcacaatctcatctgtgggctacacccaggcaaaaaagtcaaatcactcaggagctggctagaggtgtacgtcagaatcacacctgcaggaaggtccatggatgagattaacaatccctcataagtgccagttctggatatgagagtgaacgcctcctgtatgttgcatctatgtgcataagtcacaatctcaatggaggaatgggttttttccatgagagc

SEQ ID NO: 273112 - DNA, 570 bp, Homo sapiens
tgggtagtcctcagtaaaaagacagtcacattagttagagtctgtccccagcgatgtgtaagaatcccagctgtgaacaggcaccagacaggacaagagagtcccatcacctgggtgaacagtgcacagatatgtcacaatgaccccatgtaggtaaagtctagacaagagttacatcacctgggtgttggacccagcaatatgtcacaatggctcatgtgggcaaagcacaggacacagtcatataacaaagtgccaggaccagtgttaggtcaggatacccwttatgggcagtgccaagacaggagattagaagcatattaattagatgctggattcaaggatatatcacaatctcatctgtgggctacacccaggcaaaaaagtcaaatcactcaggagctggctagaggtgtacgtcagaatcacacctgcaggaaggtccatggatgagattaacaatccctcataagtgccagttctggatatgagagtgaacgcctcctgtatgttgcatctatgtgcataagtcacaatctcaatggaggaatgggttttttccatgagagc

SEQ ID NO: 273113 - DNA, 569 bp, Homo sapiens
gtaaagtctagacaagagttacatcacctgggtgttggacccagcaatatgtcacaatggctcatgtgggcaaagcacaggacacagtcatataacaaagtgccaggaccagtgttaggtcaggataccctttatgggcagtgccaagacaggagattagaagcatattaattagatgctggattcaaggatatatcacaatctcatctgtgggctacacccaggcaaaaaagtcaaatcactcaggagctggctagaggtgtacgtcagaatcacacctgcaggaaggtccatggatgagattaacaatccctcataagtgccagttctggatatgagagtgaacgcctcctgtatgttgyatctatgtgcataagtcacaatctcaatggaggaatgggttttttccatgagagccttaatcccttttgaaaacggagttatcttagtggactcacagcctcacaagtgttttggatcttggtcagggagtcacaaacccacttaaggacaacatccacttattagagccaattttccaacttttcactgcctctgggtgtgagttt

SEQ ID NO: 273114 - DNA, 592 bp, Homo sapiens
aacattttaaacaaaattggaacaaaagtaaaagttgaaaatataataatgackggtactattaaagagagcaaggcagacaacggacatagctttcatgttcccatggaagttcctagagattcaattttgtctgcctgggtgatgatattattaatattttcttcgactaaaccagactgattgatctcaaaaacagcattcttcttttagatataaacatgttcctctttacccggctgggagaagatcccaggctccttggttttgtcggactacagtggccatggagtccagatgttgttgaagtctattgaggccctctgctgcctgttggggacacactgagattttctgagatagtttatactggattcccaaggctccaccttatggtgacatttgtgctgcaaaggaattctgcattgaaatggtgaaagcagcaaaagttttaagtcttttctattttttgccaataagcaaaagttttctgcagctacgtggtcagcagtcattgggtccatttatggatggtgaagttgaatggtggtcaaagttagagcctggaaggcttcagtaaatgcgctgaagt

SEQ ID NO: 273115 - DNA, 592 bp, Homo sapiens
aacattttaaacaaaattggaacaaaagtaaaagttgaaaatataataatgacgggtactattaaagagagcaaggcagacaayggacatagctttcatgttcccatggaagttcctagagattcaattttgtctgcctgggtgatgatattattaatattttcttcgactaaaccagactgattgatctcaaaaacagcattcttcttttagatataaacatgttcctctttacccggctgggagaagatcccaggctccttggttttgtcggactacagtggccatggagtccagatgttgttgaagtctattgaggccctctgctgcctgttggggacacactgagattttctgagatagtttatactggattcccaaggctccaccttatggtgacatttgtgctgcaaaggaattctgcattgaaatggtgaaagcagcaaaagttttaagtcttttctattttttgccaataagcaaaagttttctgcagctacgtggtcagcagtcattgggtccatttatggatggtgaagttgaatggtggtcaaagttagagcctggaaggcttcagtaaatgcgctgaagt

SEQ ID NO: 273116 - DNA, 592 bp, Homo sapiens
aacattttaaacaaaattggaacaaaagtaaaagttgaaaatataataatgacgggtactattaaagagagcaaggcagacaacggacatagctttcatgttcccatggaagttcctagagattcaattttgtctgcctgggtgatgatattattaatattttcttcgactaaaccagactgattgatctcaaaaacagcattcttcttttagatataaacatgttcctctttacccggctgggagaagatcccaggctccttggttttgtcggactacagtggccatggagtccagatgttgttgaagtctattgaggccctctgctgcctgttggggacacactgagattttctgagatagtttatactggattcccaaggmtccaccttatggtgacatttgtgctgcaaaggaattctgcattgaaatggtgaaagcagcaaaagttttaagtcttttctattttttgccaataagcaaaagttttctgcagctacgtggtcagcagtcattgggtccatttatggatggtgaagttgaatggtggtcaaagttagagcctggaaggcttcagtaaatgcgctgaagt

SEQ ID NO: 273117 - DNA, 620 bp, Homo sapiens
aatagacggtacagtctgagaaagagattccagggcagcctgctcataagagtgagacagcattaattgttgctggagaaaccctcyttctgggagttttacatgattattcataagaaggtggaaagaagtgttatagaaggcatgctttgactggtcttctgggtgcacatgtgcagtagctgtacatatttttgcatatgtttcatgtctcattagcatgcaatgacatttcacccaggaatgtgtttttacttgttaaaatgagcaaaggttcagcttgaagacagataaaatcaaaatgcacatgctctctagacgtaaaagtccctactgaagatagtgggtttcaaacgaccccaagtgctccacaacttaaaagtcgctcccacgaacctggaacactatctgttcctgagggatcaggtcccatttgtgtctctgagacactggcaagtgaggcacgacttgggatgagaccgatgattttaattgtaaaatgcctaaatagtcagcagcttcaggttacattttggagcttgtccacttaaatgggttgatgaaaatggctcacaaaactcacgccttggaaagcgggttttctcccttgctcttagatt

SEQ ID NO: 273118 - DNA, 523 bp, Homo sapiens
acaactcccagcaatcctagggaggagcacacagccccgcctcttcccccagtgatacgcattgtccctgagacaggtgcatgctaagattgtagtcctgaagctctgcgaccaaagggctgggagtgtttatgagcatatatctcccagcaagcctaggaagacgcacacagccccgcctctttttccactgacgcggactgtccctgaccccagtgcatactgggatggtagtcctgcatccctgtgatgaaagttctgggagtctcyatgaaactacctctcccaggaagcagaaggaggggtccacagcctagccttttcctccagtaatgcgcactgtccctgagctgggtgcatgctgggattgtagtcctgcagcccggtgatgaaaggtctgggagtgtttatgagactacatctcctaccaagcccaggaggtgcacacaaccctgcctctttctccagtgacgccaactttccctgagcccggtgcatgctaggattgtagcgctgcagccct

SEQ ID NO: 273119 - DNA, 519 bp, Homo sapiens
ggtccacagcctagccttttcctccagtaatgcgcactgtccctgagctgggtgcatgctgggattgtagtcctgcagcccggtgatgaaaggtctgggagtgtttatgagactacatctcctaccaagcccaggaggtgcacacaaccctgcctctttctccagtgacgccaactttccctgagcccggtgcatgctaggattgtagcgctgcagccctgtgacaaaagggctgtgagtgtttatgagactgcatcttccaccaagcccagagaggcgtgcagagcctcgccccttcctccactgattagcgcatgctccctcagtcccatgcatgctaggattgtagtgctgcagccctgtgaccaaagggcagcccagtgaccaaagggctaagagtgtgtgagaatacatctccgaaaaagcayagcgagaagagcacaggtccacttcttcctccactgaggcgcgctctccctgagcacggtgcatgctgggattgtagtcctgaagccctgt

SEQ ID NO: 273120 - DNA, 577 bp, Homo sapiens
gcatgctgggattgtagtcttatagcactgtgagccaagggtagggagaggacacgagactacatctccgagaaaacctagggagacgcacacagccccacatcttttcccagtgacgcatgctgtttttgatcctgatgcattctgggatyggagtcctgcagtcccgtgacaaaaggtctcagagtctttatgaaactacatttcctagcaagtgcagcgaggtgcacacaaccttcccctcattctccagtgatgtagactgtccgtgagccccaagcatgctgggattgtagtcttatagcaccgtgaccaaaggacagggagaggccatgagactacaactctcaggaaacccagcaaggcgcacactgcccggcctctttctccttagactagcgcactgtcactgagctgggtgcatactaggaatgtattcctgcagccctgtgagcaaagagctgggagtgtttatgagaatacatctcccagtactcccaggaggtgcacacagccctgcctcttcctgcagtgactagcgcactgtccctgagctgggtgcatgctgggattgcag

SEQ ID NO: 273121 - DNA, 577 bp, Homo sapiens
gcatgctgggattgtagtcttatagcactgtgagccaagggtagggagaggacacgagactacatctccgagaaaacctagggagacgcacacagccccacatcttttcccagtgacgcatgctgtttttgatcctgatgcattctgggattggagtcctgcagtcccgtgacaaaaggtctcagagtctttatgaaactacatttcctagcaagtgcagcgaggtgcacacaaccttcccctcattctccagtgatgtagactgtccgtgagcccsaagcatgctgggattgtagtcttatagcaccgtgaccaaaggacagggagaggccatgagactacaactctcaggaaacccagcaaggcgcacactgcccggcctctttctccttagactagcgcactgtcactgagctgggtgcatactaggaatgtattcctgcagccctgtgagcaaagagctgggagtgtttatgagaatacatctcccagtactcccaggaggtgcacacagccctgcctcttcctgcagtgactagcgcactgtccctgagctgggtgcatgctgggattgcag

SEQ ID NO: 273122 - DNA, 608 bp, Homo sapiens
ttatgagaatacatctcccagcaagcccagcgagtaacaaacaaccccgcctcttcctccagtgacgcgcaatttccttgarcccggtgctggctgggagtgtagtcctgcagccctgtgaccaaaggtttgggagtatttatgagaatacatatcccaccaagcccagcgagacgtgtacaatccctcctcatcctccagtaacgcgcactatccttgatcttggtgcatactgggattgtagttctgcggccctgtaatgaaaggtctggtgactttatgaaactacatctcccagcaagccaaaggaggcacacaaagctttgcctcttcatccaggcacacgcactatccctgatcccggtgcatgatggaaatgtagtccttcagccctgtgaccaaagggctgggagtgtttatgagaccgcatctctcagcaactaaagcaaggcctgcacagccccgccttttcctccagtgacgctcactgttcactaaggagtgttcatgagattacattttccagcaagcccagcgagttatgcacagctctacctcttcttctagcgacgcgcactgtccctgattccgttgtatgctgggattgt

SEQ ID NO: 273123 - DNA, 421 bp, Homo sapiens
ccaagaggctctcacagccatgcaccaccccctcccgccccacttttccttcagtgacgcgcactgttccctgaacatggtgcatactggaattctcctgttgcgggattcaggaggacgagacagacctcaggttgaaacaggagaatctttattgagtgcactcaggaccagctgactcacgtcaaaaagaccgggcccggaacasagacaacacctgacttttatacacacttcacaaaagggggtgggctagcttgaagcgagcttacagtggcgtgaaagcaggaatacagaggcaggacaaagacaggattgcacatgaccgttgccaagcaacccacatgtccattatctaggtttccctgggcatgggcttatcctataaccctcactatggtgcccaaacagctgtagttca

SEQ ID NO: 273124 - DNA, 554 bp, Homo sapiens
cacttgtcatgagactgttttcctttaaccccatgaacatacttaccatagcttctttcaaatcttacctaccgattacagcatcttgcacatcttgagaataggttctattgtctgctttttatcttgtgaatcgattacattttcatccttcttcamgcatctcataaatttttaaattgtgtgataggaattacagggactctggcttctgttgtatttctttgaaaattattattttatgagggagttaatttgaatagatgcaaaccccaatccttatctcttctacagtggcaatactaaaatcttcattcagttcttctaaacagtgtgcgtttctatatagcaaaatatagtattttattaaactttattatagtatatgtgaaacagttattgaacaatctactctacttcattattactggaagccagaacctcagttgtgttcactttctggattttatataagtgaaattgtacaacatgtatacttttacatctactttcttctatgcaactttatatttatgatattaattcatcctatt

SEQ ID NO: 273125 - DNA, 558 bp, Homo sapiens
ttgtgaatcgattacattttcatccttcttcacgcatctcataaatttttaaattgtgtgataggaattacagggactctggcttctgttgtatttctttgaaaattattattttatgagggagttaatttgaatagatgcaaaccccaatccttatctcttctacagtggcaatactaaaatcttcattcagttcttctaaacagtgtgcstttctatatagcaaaatatagtattttattaaactttattatagtatatgtgaaacagttattgaacaatctactctacttcattattactggaagccagaacctcagttgtgttcactttctggattttatataagtgaaattgtacaacatgtatacttttacatctactttcttctatgcaactttatatttatgatattaattcatcctattgcagatagctatagtttgtttatttaaaaaatattttttatattgtggcaaagtatacataaaattaaccattttagctattttaagtgtgcagctcagaaaaattaactacactcacattgttttgcaa

SEQ ID NO: 273126 - DNA, 534 bp, Homo sapiens
tgtatacttttacatctactttcttctatgcaactttatatttatgatattaattcatcctattgcagatagctatagtttgtttatttaaaaaatattttttatattgtggcaaagtatacataaaattaaccattttagctattttaagtgtgcagctcagaaaaattaactacactcacattgttttgcaactattattcycattcatagggaccttctttcaacttccaaaaccaaaatttaatgcacattaaataacagctccctgttactccccctccagctcctaggaaccactcttctacttggatttctagaatttaactactctaagtatctcataagtggaatgatacagtatttgtccttttatgactggcttatgtcactttgcacaatgtccttaaggttcatgcataacgtaccatgtgtcagaattttcttattttacataactgaataacgttccaatatatgtataaatcacattttatttatttattcattgatgataattcaaacaacacgggt

SEQ ID NO: 273127 - DNA, 534 bp, Homo sapiens
tgtatacttttacatctactttcttctatgcaactttatatttatgatattaattcatcctattgcagatagctatagtttgtttatttaaaaaatattttttatattgtggcaaagtatacataaaattaaccattttagctattttaagtgtgcagctcagaaaaattaactacactcacattgttttgcaactattattctcattcatagggaccttctttcaacttccaaaaccaaaatttaatgcacattaaataacagctccctgttactccccctccagctcctaggaaccactcttctacttggatttctagaatttaactactctaagtatctcataagtggaatgatacagtatttgtccttttatgactggctyatgtcactttgcacaatgtccttaaggttcatgcataacgtaccatgtgtcagaattttcttattttacataactgaataacgttccaatatatgtataaatcacattttatttatttattcattgatgataattcaaacaacacgggt

SEQ ID NO: 273128 - DNA, 534 bp, Homo sapiens
tgtatacttttacatctactttcttctatgcaactttatatttatgatattaattcatcctattgcagatagctatagtttgtttatttaaaaaatattttttatattgtggcaaagtatacataaaattaaccattttagctattttaagtgtgcagctcagaaaaattaactacactcacattgttttgcaactattattctcattcatagggaccttctttcaacttccaaaaccaaaatttaatgcacattaaataacagctccctgttactccccctccagctcctaggaaccactcttctacttggatttctagaatttaactactctaagtatctcataagtggaatgatacagtatttgtccttttatgactggcttatgtcactttgcacaatgtccttaaggttcatgcataacgtaccatgtgtcagaattttcttattttacataactgaataacgttccaatrtatgtataaatcacattttatttatttattcattgatgataattcaaacaacacgggt

SEQ ID NO: 273129 - DNA, 534 bp, Homo sapiens
tgtatacttttacatctactttcttctatgcaactttatatttatgatattaattcatcctattgcagatagctatagtttgtttatttaaaaaatattttttatattgtggcaaagtatacataaaattaaccattttagctattttaagtgtgcagctcagaaaaattaactacactcacattgttttgcaactattattctcattcatagggaccttctttcaacttccaaaaccaaaatttaatgcacattaaataacagctccctgttactccccctccagctcctaggaaccactcttctacttggatttctagaatttaactactctaagtatctcataagtggaatgatacagtatttgtccttttatgactggcttatgtcactttgcacaatgtccttaaggttcatgcataacgtaccatgtgtcagaattttcttattttacataactgaataacgttccaatatatgtataaatcacattttatytatttattcattgatgataattcaaacaacacgggt

SEQ ID NO: 273130 - DNA, 434 bp, Homo sapiens
aactttggtatttttttttcaaaattatttttgcaatttagggtcccttgagattcctcataaacttaaaaattgattttttaatatctacacaaaataattggcattttgcttcttggttacttcctaattttattcttttgatgctattgtaaattgagttgttttcataattttcttctcagatyattcgtattactacataaaatacagtttatttttctatgttgattttgtatgctactactctgctgaatttattaattttaatattttttgtgtggaatctttaagattttctacataaaagaatatattttctgtacacactttgatgaagtttatttcattgtcttttttaatttctctgaatgaaacttctaatacagtgttgaataaaagtggctggcaagagcagacattctgtcttctga

SEQ ID NO: 273131 - DNA, 503 bp, Homo sapiens
ggtcttttcctctagaacatgtagtttgctgtgggtttttatacgtgaattttacaaagatggttttcttttattcgtaatttattgtttttattataaaatattttgaattttgtaaaatacattttctgtattaatgagataatgttttctaaaaattttsttaatgtgtcatatgcattgattatttttcatatgctaaaacttttgttaagaaaggctagctaagtgaaccagtgagactggaaaaagaataaagaaatctattctggttgtgatcaattagttgtaaacaccattgcactgaaaccagccatacgctaaatcttccttacattccagtaataaattccccttggtcatggggtgtaatcttgctagtatgctgctgaatgtggttagctaggatgttgctgagtagttttgcatccgtgttcataagggatattagtctatgggtttttgtagtctctttgtctggctttggtatgagctaatgctgg

SEQ ID NO: 273132 - DNA, 503 bp, Homo sapiens
ggtcttttcctctagaacatgtagtttgctgtgggtttttatacgtgaattttacaaagatggttttcttttattcgtaatttattgtttttattataaaatattttgaattttgtaaaatacattttctgtattaatgagataatgttttctaaaaattttgttaatgtgtcatatgcattgattatttttcatatgctaaaacttttgttaagaaaggctagctaagtgaaccagtgagactggaaaaagaataaagaaatctatkctggttgtgatcaattagttgtaaacaccattgcactgaaaccagccatacgctaaatcttccttacattccagtaataaattccccttggtcatggggtgtaatcttgctagtatgctgctgaatgtggttagctaggatgttgctgagtagttttgcatccgtgttcataagggatattagtctatgggtttttgtagtctctttgtctggctttggtatgagctaatgctgg

SEQ ID NO: 273133 - DNA, 610 bp, Homo sapiens
ttgttaatgtgtcatatgcattgattatttttcatatgctaaaacttttgttaagaaaggctagctaagtgaaccagtgagactggaaaaagaataaagaaatctattctggttgtgatcaattagttgtaaacaccattgcactgamaccagccatacgctaaatcttccttacattccagtaataaattccccttggtcatggggtgtaatcttgctagtatgctgctgaatgtggttagctaggatgttgctgagtagttttgcatccgtgttcataagggatattagtctatgggtttttgtagtctctttgtctggctttggtatgagctaatgctggcatcatggaataagtttggaactgctctcttcaggattttggtagattttggaaaggatttttgttctataaatgcttgatctacatcaccagtgaagccaacaaaacaagggcttttcttcatgagaggtttttaattactgattccatttccttagtagttttctatctattcagattttgtatttctttgtaatcaagtcttgcataagtaggaatctgcccactttatctaggttttccaatttatcatcctatcatagttca

SEQ ID NO: 273134 - DNA, 503 bp, Homo sapiens
ggtcttttcctctagaacatgtagtttgctgtgggtttttatacgtgaattttacaaagatggttttcttttattcgtaatttattgtttttattataaaatattttgaattttgtaaaatacattttctgtattaatgagataatgttttctaaaaattttgttaatgtgtcatatgcattgattatttttcatatgctaaaacttttgttaagaaaggctagctaagtgaaccagtgagactggaaaaagaataaagaaatctattctggttgtgatcaattagttgtaaacaccattgcactgaaaccagccatacgctaaatcttccttacattccagtaataaattccccktggtcatggggtgtaatcttgctagtatgctgctgaatgtggttagctaggatgttgctgagtagttttgcatccgtgttcataagggatattagtctatgggtttttgtagtctctttgtctggctttggtatgagctaatgctgg

SEQ ID NO: 273135 - DNA, 503 bp, Homo sapiens
ggtcttttcctctagaacatgtagtttgctgtgggtttttatacgtgaattttacaaagatggttttcttttattcgtaatttattgtttttattataaaatattttgaattttgtaaaatacattttctgtattaatgagataatgttttctaaaaattttgttaatgtgtcatatgcattgattatttttcatatgctaaaacttttgttaagaaaggctagctaagtgaaccagtgagactggaaaaagaataaagaaatctattctggttgtgatcaattagttgtaaacaccattgcactgaaaccagccatacgctaaatcttccttacattccagtaataaattccccttggtcatgggktgtaatcttgctagtatgctgctgaatgtggttagctaggatgttgctgagtagttttgcatccgtgttcataagggatattagtctatgggtttttgtagtctctttgtctggctttggtatgagctaatgctgg

SEQ ID NO: 273136 - DNA, 610 bp, Homo sapiens
ttgttaatgtgtcatatgcattgattatttttcatatgctaaaacttttgttaagaaaggctagctaagtgaaccagtgagactggaaaaagaataaagaaatctattctggttgtgatcaattagttgtaaacaccattgcactgaaaccagccatacgctaaatcttccttacattccagtaataaattccccttggtcatggggtgtaatcttgctagtatgctgctgaatgtggttagctaggatgttgctgagtagttttgcatccgtgttcataagggatattagtctaygggtttttgtagtctctttgtctggctttggtatgagctaatgctggcatcatggaataagtttggaactgctctcttcaggattttggtagattttggaaaggatttttgttctataaatgcttgatctacatcaccagtgaagccaacaaaacaagggcttttcttcatgagaggtttttaattactgattccatttccttagtagttttctatctattcagattttgtatttctttgtaatcaagtcttgcataagtaggaatctgcccactttatctaggttttccaatttatcatcctatcatagttca

SEQ ID NO: 273137 - DNA, 588 bp, Homo sapiens
ccgtgttcataagggatattagtctatgggtttttgtagtctctttgtctggctttggtatgagctaatgctggcatcatggaataagtttggaactgctctcttcaggmttttggtagattttggaaaggatttttgttctataaatgcttgatctacatcaccagtgaagccaacaaaacaagggcttttcttcatgagaggtttttaattactgattccatttccttagtagttttctatctattcagattttgtatttctttgtaatcaagtcttgcataagtaggaatctgcccactttatctaggttttccaatttatcatcctatcatagttcacagtacacttttttaaacattttatttctttgaattagtagtaatgtcccactttcattactcattttagtatgtgaatatgctgttaatttttcgtgtgtgtagctgaagttttgccaattgttaattttttgaagaactgagagtgaacttttggttttttggaattctgttgtttgtgtaatctctattgcatttatctctgctaaaatcttcaatactttcttctttctctttgctttgcatc

SEQ ID NO: 273138 - DNA, 529 bp, Homo sapiens
acagtacacttttttaaacattttatttctttgaattagtagtaatgtcccactttcattactcattttagtatgtgaatatgctgttaatttttcgtgtgtgtagctgaagttttgccaattgttaattttttgaagaactgagagtgaacttttggttttttggaattctgttgtttgtgtaatctctattgcatttatctctgctaaaatcttcaatactttcttctttctctttgytttgcatctaatttggtgttatttttctaatttactaggtgataaagttattatttatttgaaatctttgctctttttaaatgtatcttagctgcaaacttttcatcttaacactgtttttgctgtttcccataacttttgatatgttttgttttcatttttcttcctctgtatgttcctacttcttccgtgatttcttcctttacttaatttatacaattttgtaattctttaagttgtaattgtgtagttgtttaatttatacaattttgtaaactttctagcattt

SEQ ID NO: 273139 - DNA, 596 bp, Homo sapiens
aacattttatttctttgaattagtagtaatgtcccactttcattactcattttagtatgtgaatatgctgttaatttttcgtgtgtgtagctgaagttttgccaattgttaattttttgaagaactgagagtgaacttttggttttttggaattctgttgtttgtgtaatctctattgcatttatctctgctaaaatcttcaatactttcttctttctctttgctttgcatctaatttggtsttatttttctaatttactaggtgataaagttattatttatttgaaatctttgctctttttaaatgtatcttagctgcaaacttttcatcttaacactgtttttgctgtttcccataacttttgatatgttttgttttcatttttcttcctctgtatgttcctacttcttccgtgatttcttcctttacttaatttatacaattttgtaattctttaagttgtaattgtgtagttgtttaatttatacaattttgtaaactttctagcatttcatctgttattgatttaatttgagatctactatacagcccatcctggagaattccccatgtgcatttgagaagagtgtgtact

SEQ ID NO: 273140 - DNA, 419 bp, Homo sapiens
ttggttttttggaattctgttgtttgtgtaatctctattgcatttatctctgctaaaatcttcaatactttcttctttctctttgctttgcatctaatttggtgttatttttctaatttactaggtgataaagttattatttatttgaaatctttgytctttttaaatgtatcttagctgcaaacttttcatcttaacactgtttttgctgtttcccataacttttgatatgttttgttttcatttttcttcctctgtatgttcctacttcttccgtgatttcttcctttacttaatttatacaattttgtaattctttaagttgtaattgtgtagttgtttaatttatacaattttgtaaactttctagcatttcatctgttattgatttaatttgagatctactatacagcccatcc

SEQ ID NO: 273141 - DNA, 419 bp, Homo sapiens
ttggttttttggaattctgttgtttgtgtaatctctattgcatttatctctgctaaaatcttcaatactttcttctttctctttgctttgcatctaatttggtgttatttttctaatttactaggtgataaagttattatttatttgaaatctttgctctttttaaatgtatcttagmtgcaaacttttcatcttaacactgtttttgctgtttcccataacttttgatatgttttgttttcatttttcttcctctgtatgttcctacttcttccgtgatttcttcctttacttaatttatacaattttgtaattctttaagttgtaattgtgtagttgtttaatttatacaattttgtaaactttctagcatttcatctgttattgatttaatttgagatctactatacagcccatcc

SEQ ID NO: 273142 - DNA, 419 bp, Homo sapiens
ttggttttttggaattctgttgtttgtgtaatctctattgcatttatctctgctaaaatcttcaatactttcttctttctctttgctttgcatctaatttggtgttatttttctaatttactaggtgataaagttattatttatttgaaatctttgctctttttaaatgtatcttagctgcaaacttttcatcttaacactgtttttgctgtttcccataacttttgatatgttttgttttcatttttcttcctctgtatgttcctacttcttcygtgatttcttcctttacttaatttatacaattttgtaattctttaagttgtaattgtgtagttgtttaatttatacaattttgtaaactttctagcatttcatctgttattgatttaatttgagatctactatacagcccatcc

SEQ ID NO: 273143 - DNA, 419 bp, Homo sapiens
ttggttttttggaattctgttgtttgtgtaatctctattgcatttatctctgctaaaatcttcaatactttcttctttctctttgctttgcatctaatttggtgttatttttctaatttactaggtgataaagttattatttatttgaaatctttgctctttttaaatgtatcttagctgcaaacttttcatcttaacactgtttttgctgtttcccataacttttgatatgttttgttttcatttttcttcctctgtatgttcctacttcttccgtgatttcttcctttacttaatttatacaattttgtaattctttaagttgtaattgtgtagttgtttaatttrtacaattttgtaaactttctagcatttcatctgttattgatttaatttgagatctactatacagcccatcc

SEQ ID NO: 273144 - DNA, 578 bp, Homo sapiens
ctttttaaatgtatcttagctgcaaacttttcatcttaacactgtttttgctgtttcccataacttttgatatgttttgttttcatttttcttcctctgtatgttcctacttcttccgtgatttcttcctttacttaatttatacaattttgtaattctttaagttgtaattgtgtagttgtttaatttatacaattttgtaaactttctagcatttcatctgttattgatttaatttgagatctactatacagcccatcctggagaattccccatgtgcatttgagaagagtgtgtactctgttttgttggatgragtatattgtatatatctgttagatcaatttagttcattgagttagtcaagtcctctatttcctaatttgtcattcatctcatttttctattcattactcagagtggagtattaacatcttcaactattattttagaactgtctatttgtccctttaattctgtcaacttagtctttctatatctaaatgttttattattaggtatgtaagtgtttaaactatttctatcttcttgccaaatgcacgttctatgattatata

SEQ ID NO: 273145 - DNA, 630 bp, Homo sapiens
gaaatcttaaatcaatagcttaatgtttgtaaaagcatttaaatggaaataagctaccagttcaccaggaacaaaggatatcagttgggtctaagaataatcatgccaaaaagctctaggaggaaaagctcctgggaattaggactgtgataatggtctttgagatcaacaaagaaatggggaaatggggatgctcagggtcaggtacatgcttagcaaaagacccagaaaaccctaagctgtcacctgtgtactttaaactctgcacaagtagaaaatagaggcacaaggagagttgtaactttatgctgattagtaaaagcatgctccaacamacatacatagatcccaggtgaaaaaaaatcagatatttatttttagtgaaggttaaaaaatctggagtcttactttccaattaaggattagtgaaaatatttggggagatttgcattgatcagttcatcctgaggtcaagaaaatcttgattttaaaatttggagcctccagtaaaggattagcttccacctagaggtgttctttggccttttggactcagagctatcttgacactactactggttacactgatttgaaagtcagctaagagcttgctacagaactcctgacaaa

SEQ ID NO: 273146 - DNA, 581 bp, Homo sapiens
tatctgtttggttatctacaatggaaagtgtagactgtctgaatatcktttgggctgcaaaccggaaacaaccccagatgctgatctaactgggtcactcatctagaagtccatggtaagtgttttccagagagtgaccacaatcaagctgcagattgaacctaaatctgtgtccaacccagagtctaatactgcaaaccagacttggggttgctggtgaaagttgacctatctgtctcatggttgaagaattcctagaccatacctagcagagtaaccagaagtggacttttagcccacttcttgagatatcagtcaccactgttgacttcttcagcataacagtcatctgactccagccataccatgtgtcccttgaagctaatctgtgccaccttttaggcttttgaggccaattgagctctgacttcgtggcatttttcaccacatcgactaaaatgggccaactctacgatgttccctccttttccacacatgttggttagataattcgttgattaggtatgcttttctctgaaaggggattatctcttccagattgcctccaagataaggatgaa

SEQ ID NO: 273147 - DNA, 627 bp, Homo sapiens
aagtccatggtaagtgttttccagagagtgaccacaatcaagctgcagattgaacctaaatctgtgtccaacccagagtctaatactgcaaaccagacttggggttgctggtgaaagttgacctatctgtctcatggttgaagaattcctagaccatacctagcagagtaaccagaagtggacttttagcccasttcttgagatatcagtcaccactgttgacttcttcagcataacagtcatctgactccagccataccatgtgtcccttgaagctaatctgtgccaccttttaggcttttgaggccaattgagctctgacttcgtggcatttttcaccacatcgactaaaatgggccaactctacgatgttccctccttttccacacatgttggttagataattcgttgattaggtatgcttttctctgaaaggggattatctcttccagattgcctccaagataaggatgaaatgtttgggggatctaggaatctatttcacaaatttggaatttcgtgctaataattcctgggtgaaatgtctttctttcccatacctgcaattctagaccagcctggcttttgtatcctctgagttgcatcccagcctagcagcagttatgg

SEQ ID NO: 273148 - DNA, 581 bp, Homo sapiens
tatctgtttggttatctacaatggaaagtgtagactgtctgaatatcttttgggctgcaaaccggaaacaaccccagatgctgatctaactgggtcactcatctagaagtccatggtaagtgttttccagagagtgaccacaatcaagctgcagattgaacctaaatctgtgtccaacccagagtctaatactgcaaaccagacttggggttgctggtgaaagttgacctatctgtctcatggttgaagaattcctagaccatacctagcagagtaaccagaagtggacttttagcccacttcttgagatatcagtcaccactgttgacttcttcagcataacagtcatctgactccagccataccatgtgtcccttgaagctaatctgtgccaccttttaggcttttgaggccaattgagctctgacttcgtggcatttttcaccacaycgactaaaatgggccaactctacgatgttccctccttttccacacatgttggttagataattcgttgattaggtatgcttttctctgaaaggggattatctcttccagattgcctccaagataaggatgaa

SEQ ID NO: 273149 - DNA, 564 bp, Homo sapiens
tggggccttgctcatcaccagaaaccttgaaaatcctgatgcaamctgtagggttaaccttatcaacacttagttttttaccatatagatttatcttcataaaaaatattttctttggacctttattttgttatatgccatgaagaataaatcatttatttcctttgcgataagaacatcacatttttacacctcaagtattaatgatgccatcccccatgtagtttttgttgtgatggcctgaatgtttatgtccctttgcaaattcctatgtggataattttaggcgtgtggcctttggggaagtggtgaggccaagagttcttcatcttcatgaatggaatcagtgctctttcaagggaagttgaaggcaatgcccttgtcccgtgtgcaagatggtaccatctatggggaacagggctctcaacatatactaaattttctgctgccttgatcttgcactttccagactccataactgtgaaaaatacatttctgttgtttatcctttacccagtctgaggtattttgttatagcagcctggatgcactatgacactttct

SEQ ID NO: 273150 - DNA, 564 bp, Homo sapiens
tggggccttgctcatcaccagaaaccttgaaaatcctgatgcaacctgtagggttaaccttatcaacacttagttttttaccatatagatttatcttcataaaaaatattttctttggacctttattttgttatatgccatgaagaataaatcatttatttcctttgcgataagaacatcacatttttacacctcaagtattaatgatgccatcccccatgtagtttttgttgygatggcctgaatgtttatgtccctttgcaaattcctatgtggataattttaggcgtgtggcctttggggaagtggtgaggccaagagttcttcatcttcatgaatggaatcagtgctctttcaagggaagttgaaggcaatgcccttgtcccgtgtgcaagatggtaccatctatggggaacagggctctcaacatatactaaattttctgctgccttgatcttgcactttccagactccataactgtgaaaaatacatttctgttgtttatcctttacccagtctgaggtattttgttatagcagcctggatgcactatgacactttct

SEQ ID NO: 273151 - DNA, 584 bp, Homo sapiens
aataaacttaaggacaattgatgttgataatattgagatttgctgcctaagaatatgatacaaattgtctatttgcttatgtctacattcatatatttcataaactttctatgtttttctcatattctgtacacatttttgtaatgtttattcctagtttattttattctgctaaaaagtaatttgagacacaatgaaattgcmaagtgtctatttgagtaagagcaattgataaattataaaatatcagaccaaaagttatttagtgcttctctgacagagtaagaagcaagtatttattgaaaaaatgtagaaacaaaaaaatcatttgattggtggtagcacaacttttttattgttttttgttcgtctgtttatcttgttggacagtttctatttatataaggatgttggctactcctgattggttgagcttcatttctcttttttaaataggcagctacaagaaatatttaagttttgcttgtatttgcaaatcaagcaaggttgagatcacttatgagacctaactaatttcgtctgctcagagattattgagacgtgatctccattttaatttattt

SEQ ID NO: 273152 - DNA, 584 bp, Homo sapiens
aataaacttaaggacaattgatgttgataatattgagatttgctgcctaagaatatgatacaaattgtctatttgcttatgtctacattcatatatttcataaactttctatgtttttctcatattctgtacacatttttgtaatgtttattcctagtttattttattctgctaaaaagtaatttgagacacaatgaaattgccaagtgtctatttgagtaagagcaattgataaattataaaatatcagaccaaaagwtatttagtgcttctctgacagagtaagaagcaagtatttattgaaaaaatgtagaaacaaaaaaatcatttgattggtggtagcacaacttttttattgttttttgttcgtctgtttatcttgttggacagtttctatttatataaggatgttggctactcctgattggttgagcttcatttctcttttttaaataggcagctacaagaaatatttaagttttgcttgtatttgcaaatcaagcaaggttgagatcacttatgagacctaactaatttcgtctgctcagagattattgagacgtgatctccattttaatttattt

SEQ ID NO: 273153 - DNA, 584 bp, Homo sapiens
aataaacttaaggacaattgatgttgataatattgagatttgctgcctaagaatatgatacaaattgtctatttgcttatgtctacattcatatatttcataaactttctatgtttttctcatattctgtacacatttttgtaatgtttattcctagtttattttattctgctaaaaagtaatttgagacacaatgaaattgccaagtgtctatttgagtaagagcaattgataaattataaaatatcagaccaaaagttatttagtgcttctctgacagagtaagaagcaagtatttattgaaaaaatgtagaaacaaaaaaatcatttgattggtggtarcacaacttttttattgttttttgttcgtctgtttatcttgttggacagtttctatttatataaggatgttggctactcctgattggttgagcttcatttctcttttttaaataggcagctacaagaaatatttaagttttgcttgtatttgcaaatcaagcaaggttgagatcacttatgagacctaactaatttcgtctgctcagagattattgagacgtgatctccattttaatttattt

SEQ ID NO: 273154 - DNA, 584 bp, Homo sapiens
aataaacttaaggacaattgatgttgataatattgagatttgctgcctaagaatatgatacaaattgtctatttgcttatgtctacattcatatatttcataaactttctatgtttttctcatattctgtacacatttttgtaatgtttattcctagtttattttattctgctaaaaagtaatttgagacacaatgaaattgccaagtgtctatttgagtaagagcaattgataaattataaaatatcagaccaaaagttatttagtgcttctctgacagagtaagaagcaagtatttattgaaaaaatgtagaaacaaaaaaatcatttgattggtggtagcacaacttttttattgttttttgttcgtctgtttatcttgttggacagtttctatttatataaggatgttggctactcctgattggttgagcttcatttctcttttttaaataggcagctacaagaaatatttaagttttgcttgtatttgcaaatcaagcaaggttgagatcacttatgagacctaactaatttcgtstgctcagagattattgagacgtgatctccattttaatttattt

SEQ ID NO: 273155 - DNA, 559 bp, Homo sapiens
gatattttatacaagtacacttcagatgtattggatgtggctgattttaacaaatcctattagatttgtatcaattagttacatgttctattcatagtcttttgtgaatcattgcctttttgtttaaaaagatggcctattttgagcctttgtataagtacattcctgtttttgtgacaaaagaaaaactttaaatttgtcccaaagagaaaaataatggctatcagaagtatgctttgttttagtgcgagttaccgttactgtatttgtgtattgtaaaggtggacattctrattacattaaaatgtaattagaaaaaagtgcttaatgaacaaaaacagaacatagacaacaaaagaatattagaagtgatgcatgaagaaaacgagatatcaataaaaagatttttaaaaaccaagaaaaattgtgactctgaagaacacagtaactatattaaaaatttaatcagcagtcacaaaagtggatttaataaagcagaaaaaattagacagttgataacattgcacttataaatactgattcatgaaaacaaattttt

SEQ ID NO: 273156 - DNA, 559 bp, Homo sapiens
gatattttatacaagtacacttcagatgtattggatgtggctgattttaacaaatcctattagatttgtatcaattagttacatgttctattcatagtcttttgtgaatcattgcctttttgtttaaaaagatggcctattttgagcctttgtataagtacattcctgtttttgtgacaaaagaaaaactttaaatttgtcccaaagagaaaaataatggctatcagaagtatgctttgttttagtgcgagttaccgttactgtatttgtgtattgtaaaggtggacattctaattacattaaaatgtaattagaaaaaagtgcttaatgaacaaaaacagaacatagacaacaaaagaatattagaagtgatgcatgaagaaaacgagatatcaataaaaagatttttaaaaaccaagaaaaattgtgactctgaagaacacagtaactatattaaaaatttaatcagcagtcacaaaagyggatttaataaagcagaaaaaattagacagttgataacattgcacttataaatactgattcatgaaaacaaattttt

SEQ ID NO: 273157 - DNA, 533 bp, Homo sapiens
ttcacgttattgctatggaatttaaaaaatgaagcagaaagctgcataaatatgggttcatagatactcaataagaaaagataacaagtgatattaataacaaagtgggggkataaagaggtaaagctttgcattccattgaaatatagtcattatatattgtcataactttaagatgttttatgaagtctttatttctcaagatgattacaaaaaaacctgtagatggtatgcagaagcaaatgagaaagaaactgaatcatgtcactacaaaatcaatgaagaaaaataaagcagtaagagaaaaaaatgataaataacacatctacaagaaacacagaagacaattccaaataataatagtaacttcattaactacagtaattacttcaaatacaaaaagttaaataccttaaacaaaatgcagaaaatgatttaatggattaagaacaaagaagatccagcaatgtactctctacaagagtcattttagctctaaggacccaaataagttgaaagtagcagtataaaga

SEQ ID NO: 273158 - DNA, 533 bp, Homo sapiens
ttcacgttattgctatggaatttaaaaaatgaagcagaaagctgcataaatatgggttcatagatactcaataagaaaagataacaagtgatattaataacaaagtgggggtataaagaggtaaagctttgcattccattgaaatatagtcattatatattgtcataactttaagatgttttatgaagtctttatttctcaagatgattacaaaaaaacctgtagatggtatgcagaagcaaatgagaaagaaaytgaatcatgtcactacaaaatcaatgaagaaaaataaagcagtaagagaaaaaaatgataaataacacatctacaagaaacacagaagacaattccaaataataatagtaacttcattaactacagtaattacttcaaatacaaaaagttaaataccttaaacaaaatgcagaaaatgatttaatggattaagaacaaagaagatccagcaatgtactctctacaagagtcattttagctctaaggacccaaataagttgaaagtagcagtataaaga

SEQ ID NO: 273159 - DNA, 418 bp, Homo sapiens
tgataaataacacatctacaagaaacacagaagacaattccaaataataatagtaacttcattaactacagtaattacttcaaatacaaaaagttaaataccttaaacaaaatgcagaaaatgatttaatggattaagaacaaagaagatccagcaatgtactctctacaagagtcattttagctctaaggacccaaataagttgaaagtagcagtataaagaaaatatattttatgcaaagagtagctacaattggaggggcatggtcataattatattaaacaaaatatattttaagttaaaaattttaaaaagagacagattgttattawgtaacggtgacatggattaacttgcaagaaatccataacaataatttagaaatcatatatataatttgaaaaatctgcaaaaata

SEQ ID NO: 273160 - DNA, 643 bp, Homo sapiens
ttagtggcatacaaatgtcacctaataagtgggtgaaacctgggcatgctggctcatgcctataattctagaaatttaggaggccaagtcagaacgatcatttgaggccaaaagtttgagactagccatgaaaatatatcaagaccctgtcttgtatagggtaatatatgtgcatacatacwtacatataacaaaaaagtgtaaaaatattttctaatcacatatttcgtaggtgttaatttccaaaagatataaacttctaaaattcaacaacaacaaaatgttaataacttgatttagaatggtaaatgtttgaaatgacctttctccaaagaagacatagaaatgactaggtatttaaaaggatactcgtccgagggcaggactatgggaggctgccctgtacggaaaataagaagaaatggcagtaaagagggcaaccatcattccacccagcccaaaaggaataagagaaaccctatctttcaggattctcaagacacagttttcatggagtgataatgaaaggagcagcagccgccttaatatcccagagagagcaggtggaccagaaagcaacttaaaccagattgttactgaacccaatgcaaactttccccagttcttgcatgaggggtatgta

SEQ ID NO: 273161 - DNA, 504 bp, Homo sapiens
agttcttgcatgaggggtatgtaccatgccaaggtctttactcccatatcaaccagaccttgaaggaggctcacttcaacagcctgcagcagtgagggcaagctccaacatgatgaattaggacttccttattccaacctaaactgtgtttataaaagtaattgcatacaaactaaaaaaaaagtctattggtttttaagtctaaattttaagtaacaagttaatgggcagtagtttaattggggttttacttcactgctatacttttaaaggggctgtgaataaatgtttatgaaattaaaaaaataaaaaataaaaggatactcgacatcactcttctagaaaaatgcaaagcaaagtcacaataatctacggcctcaagccgatatttaaaatagtatgacagctcttcaaaaaatttaaaatgagattattatataatccagcaaacccccttctggctatgtacttaaaatrtacaacgcagatctggaagagatattt

SEQ ID NO: 273162 - DNA, 541 bp, Homo sapiens
gcatattgtgtaaactatggtagagaaattgtcaccaaagggctcagcacactggtgagattatacttctcagattcacaccacaccaatattcaggatggtctctatcacaygtggagagagcccactcttgaggtcctgaattacacatgcagacatagtccacaactgggattctgactttcatatgtgaacatccagccacaggtgggatggtgactcatttttaaacgcagctcataggcagttaagaactcttatttggacccatccaagtagaaagatgttgactgtcataccagggcttaaagctaaaggtacaaggaggggtccgtgcctgcttaaggtttcagagagaattgttacactcatgcatactctataaaggcttcatatggtgaagagagtgtcctgctagggcccagaacaaaggtgagattgtgatactcatatgtacactgagcgaagagcaaaaattgtcatcttttcacatgaacacagcccaatgttaaggttccgaatctcacacctgttgatctac

SEQ ID NO: 273163 - DNA, 541 bp, Homo sapiens
gcatattgtgtaaactatggtagagaaattgtcaccaaagggctcagcacactggtgagattatacttctcagattcacaccacaccaatattcaggatggtctctatcacatgtggagagagcccactcttgaggtcctgaattacacatgcagacatagtccacaactgggattctgactttcatatgtgaacatccagccacaggtgggatggtgactcatttttaaacgcagctcataggcagttaagaactcttatttggacccatccaagtagaaagatgttgactgtcataccagggcttaaagctaaaggtacaaggaggggtccgtgcctgcttaaggtttcagagagaattgttacactcatgcatactctataaaggcttcatatggtgaagagagtgtcctgctakggcccagaacaaaggtgagattgtgatactcatatgtacactgagcgaagagcaaaaattgtcatcttttcacatgaacacagcccaatgttaaggttccgaatctcacacctgttgatctac

SEQ ID NO: 273164 - DNA, 565 bp, Homo sapiens
aagaactcttatttggacccatccaagtagaaagatgttgactgtcataccagggcttaaagctaaaggtacaaggaggggtccgtgcctgcttaaggtttcagagagaattgttacactcatgcatactctataaaggcttcatatggtgaagagagtgtcctgctagggcccagaacaaaggtgagattgtgatactcatatgtacactgagcsaagagcaaaaattgtcatcttttcacatgaacacagcccaatgttaaggttccgaatctcacacctgttgatctacctgctgatggaatagtctgtcaagagaaagcagagatgcacgagcatcaatctggaaaacagcaataatggtagtgtgcaccaggattcagatatcttcctagtattgttttctccaaacctctttattcgtaattcaccatttgtttcattgccattcgggcaactaggtagtaagaccattttctgctaagcaagagtaggtatacaagtaacaaatccctctggcctcctcctgaatagttcagagaacagattctagttcagccagctg

SEQ ID NO: 273165 - DNA, 568 bp, Homo sapiens
acaccacaccaatattcaggatggtctctatcacatgtggagagagcccactcttgaggtcctgaattacacatgcagacatagtccacaactgggattctgactttcatatgtgaacatccagccacaggtgggatggtgactcatttttaaacgcagctcataggcagttaagaactcttatttggacccatccaagtagaaagatgttgactgtcataccagggcttaaagctaaaggtacaaggaggggtccgtgcctgcttaaggtttcagagagaattgttacactcatgcatactctataaaggcttcatatggtgaagagagtgtcctgctagggcccagaacaaaggtgagattgtgatactcatatgtacactgagcgaagagcaaaaattgtcatcttttcacatgaacacagcccaatgttaaggttccgaatctcacacctgttgatctacctgctgatggaatagtctgtcaagagaaagcagagatgyacgagcatcaatctggaaaacagcaataatggtagtgtgcaccaggattcagatatcttcctagt

SEQ ID NO: 273166 - DNA, 565 bp, Homo sapiens
aagaactcttatttggacccatccaagtagaaagatgttgactgtcataccagggcttaaagctaaaggtacaaggaggggtccgtgcctgcttaaggtttcagagagaattgttacactcatgcatactctataaaggcttcatatggtgaagagagtgtcctgctagggcccagaacaaaggtgagattgtgatactcatatgtacactgagcgaagagcaaaaattgtcatcttttcacatgaacacagcccaatgttaaggttccgaatctcacacctgttgatctacctgctgatggaatagtctgtcaagagaaagcagagatgcaygagcatcaatctggaaaacagcaataatggtagtgtgcaccaggattcagatatcttcctagtattgttttctccaaacctctttattcgtaattcaccatttgtttcattgccattcgggcaactaggtagtaagaccattttctgctaagcaagagtaggtatacaagtaacaaatccctctggcctcctcctgaatagttcagagaacagattctagttcagccagctg

SEQ ID NO: 273167 - DNA, 524 bp, Homo sapiens
attgctttgcatcccatggaacgcaaggaaaaagtccattttaccaaaggctatggttaaaatactagaatttgcaacccctaccactaaaaaggaggcccagaaatgtattggcttgtttgaattctggagacatcttcccggtttgggtaacatctcacaacctctgtatgcagtcactagaaaatataatgactttcactggaggtagaaagagaacacagsctttgagcaagctaagcaagcagtgcatctggccctggatggcccatatgggatgggacagtagaattgcaaataactgtcctggattaacatgctaattggagcctttggcagaaacaagatgggaagaggggactcttggggtttcaaacctggaagctgccagaggctggcgaagcttataatccttttgagaagcgactgttagcttgctatcgggctttgctggaaatggagactctctgcttcaaccatgatgtcttcataaggcctgaaattcctattatgacttgggtcat

SEQ ID NO: 273168 - DNA, 446 bp, Homo sapiens
atcaatttgcttattctatcatttgcttattatatctgcattgccatttatgtgggatcgagtttgttgacctttaaaggtattgtgtgtgtgtgttttcttcttccctggagcatctcctgtacataacacctctcttgctgtcatagccagaaattcagtttttaagtttttttctggggtcttcttgctcaagaggaagtatgttcagttgatacggggcttagaattttatttatagcttttattacattctaaaacccccagcagaaacaagtcttaacaaacacagattttaatttctgaacattcttctaataagttttgcacaggtagcggaacaactaaaaaaactgttttttgcattgatggtctacctcattacaatttaacctctaaagggtgttttagycagctctagagtctgctacggttaaggtgaattt

SEQ ID NO: 273169 - DNA, 528 bp, Homo sapiens
gatgacaatgccactgcagggcaggagtcaggaaggacaggccctgaatgaccagcggggctgttgcattcattaattcaacagatacgtgttggacatgcttggccaagggtggggctggagtgggcgtaccacaggactgacacggaaggccctgcaggacagagcaggtcaggtggacatcacctatgcgtggatcayatggaatcgcagtttctgactttgaaggcaaagtaagaaggtacacaaagccgtatcctgcacacacccaattacttcttgaaaataagctaatgaaacacctgtttggtttccacaccatcaccactttgcattcagtgtgttcaagtacagtcagagcagaggaaaatttctgtaaatgtaagaataaaatcatatatatttttcctccttcctctcatgatcaccatggatatacagtttgtatgttcctacaccaaatgattttatgacatgagagtatataacaaaaagatatgactagtacaactttacaatcatagagca

SEQ ID NO: 273170 - DNA, 602 bp, Homo sapiens
  misc_feature (1)...(602): n = A,T,C or G
aaatcaggagggggtggggagaggggnaagcancagtgagtgccactggcatctagtgggtagaggcaagggatgctaactgctcaacatctcacagtgcacaggacagcccccacaacaaagaactctgtagcccaaaatgtcaccagtgccactgttgaacaactctgatatacaaaaacataatttttttaaaataaatacatcgcgttaaatgtcgttcttgcagtaggaatacgacggatttctattttgttcttttyatatttctgtatcttccaaaccttcaaaaacacatgtatattatttaaaatcggggaaaaaatccatttgggaataaatttttaggagaaggaaaaactatctgctcctcatcctgatggggccctttctcaaaagacctgtctcattcaggctgctggccttcaaggagggtccaggaaaattctcctctaaaatcacctctctgccttgaagctgttattcattagccctgatcaaaatgaatattctaaatatctcaaaaccagcactctgaatgtttcacataggagggagaaaactgaaatgtaaaactggacagcctctccggtaaagttata

SEQ ID NO: 273171 - DNA, 618 bp, Homo sapiens
ggaacgttaaaatgtttgtacatttcattaagctgtttattagtatttgtaaatatcgcattcaaaggcttgaggcaaaagttacaaactggtaacttgagggaccacaatgagtcaatagaagtgttttgtttctccagtgatgttatttttagaatttaatccagttactaagatgtttcacattgggagacttcacattaaaattttggcttccctttaaaaatctcaggattaggcatcctaagcccactgatatggtttggctctgtgtcactacccaaatctcatctcaaactggaatccccatgtgttgagggagggaggtgcttggatsaagggggcggcttccgccatgctgttctcatggtagtgagtgagttctcgtgagatctgatggtttttaaagtggcagttttttcctgcacttgcacttctccctcctgccgccatgtgaagaagctgcctgcttccccttcactttctgccatgattgtaagtttcctgaggcctcccctgccatgtggaactgtgagtcaatgaaacgtttttcttttataaattaccagtctcaggaatttctttataggagtgtgaaaatgggctaatacaccccca

SEQ ID NO: 273172 - DNA, 600 bp, Homo sapiens
tgcctgggcttacggatgcccagataactggtaaaatacgattctgtgtgtgtctgtgagggtgtttccagaagggactaacatttgcattggtgaactgaataaagcagatggccctccccaacgtgggtgggcaatgatccagcagaacaaattggggaggaaaggtaaatccactctcctgattgggctgagacatccatcttctgccctaagacattggcccttctggttcttgggctttcagatttggactgaaactttattagtccattctcatcttgctataaagacctaagacggggtaatttataaagaaaggaggcttaattgactgacagttccacaagctatacaggaagcatagctggggaagcctcagaaaacttacaatcatggcagaaggggaaagggaagcaggcacgtcttacacggccagagaaggaggaagagagcaaagcgggaggtgctacacacttttaaacaaccagattgcgtgagaattcactcactatcttgagaacagcaagtggrgagtgtgcctccatcattcaatcacctcacaccaggcccttcctccaacactgggaattacaattc

SEQ ID NO: 273173 - DNA, 570 bp, Homo sapiens
gtcattttaacatcttttaatttagaatgaattttatagcctatggaaagtcatcatgtatttggcagtgttttccttttcttactgatacataaaataatgatatatctattatcaacgatgtcttcaattcaacaaagtatggtatttaaaatgtgactctatcctgttccaggactgatataagaaataactacagtcctacatggcttaacaacaggatacattgtgaaaaaaatgcattgttaggcgatttcctcatgtgcaaacctcatagagtgtactcacacaaatctagatggtacagctactacacacttaggctggctgtaaggcatcacctcttgctcctaggctgctaacctgtacagcatgttactttactgaacactgcaggcaactataacacaatggtaagtatttgtgcatctgaacatatctaatcacagaaaggtacagcaaaaatatagttttataatcttatgggaccaccatagcataggcagtccrtcattgaccaaaacatcgttatgtggtgcatgactgtatttaaagaccacctccatgctt

SEQ ID NO: 273174 - DNA, 482 bp, Homo sapiens
aggatcgtgattaggaaaagaatttcctatttgggtatcatctcagagatggttccctaggaacagagcctatgaaattggtattctcgtgtgaacggatttcaggagaagtatgtaaaggagttagggaagcaggtgagacagaggaagaagatagagatgtgagttcagctgaagtctagcctcagccccatcccacagggagctctggagcgtgaccggcaccaaggaattgtccgacctcaaggcaaggggaccaggcctttataaccctgtgcctgccagtcactggtgcagaccaccccctgagggtgaggggttctcccaagcatctctggctgaggaggttcccactggcggaggacgattctccagaaagagcgtgcctgagatcaggcagcagccagcactcccagtagctgtgyggtggtgcactagtctaataaggggacctgggtgtgcatccccgcatctaccacagg

SEQ ID NO: 273175 - DNA, 493 bp, Homo sapiens
tcaacattttggaagtttccttcaactttatctgtctacccctcccttgaaactgacatagcaggagcaccatcatctcagacaaacaccaccactttaagtgccagctccctttctggactcatgtatttcaaggaaatcacttctgttctaattacaagcagccagaaagagcagacagtaaaacamagataagacagctcgggcacagagggaggtcgggggaaagtctcttgggtaactgccaaacttcaccctcatacagtaaaacagtgggccttaataagcacattcatttcccttcaggtgcactaagttagggaagctaaaagcagactggggggatatgcctgcagctacagaaagatgtatggggatagatacataactcaccctcccggataagtacaacaaagagacacagaagcagcccaagcctctgataaactctcccaccctgaatccttacaatctcttagtctttaagagagtg

SEQ ID NO: 273176 - DNA, 591 bp, Homo sapiens
cttattattcagtggcttctttttggtcactattacataagtaactttttcattaactatttattcttcttattaatagaatatatccctcacttttaattcatttttgaactgatttttatataaccttttacaaatttcccagaatttttagaaacctaactattgaataaattgagacatgaatatattacctcttaagtcttgtagaaaaccaggtcaaagttggcagsagacaggagaagaggttggccaaatccctggggtctaaaagggataaacagcaaattggttttatcctgaggctctgtacccaggacctgagcttagaggaggcccaatttcttcacagccattcctcaaaagcattcctggaactccctacttgtaagctcctttagggcttgtgcacattctctgggattttcttggaagtagccaaccttcattcttttcaaaatggccaaaagtcagttggatttagatctggtggatcaggtcaaatgcatttaaacaagctatgactttgaagtgacaagtctgtctttctcatttagttcataaacagaccgtgtaggaataaacacatca

SEQ ID NO: 273177 - DNA, 569 bp, Homo sapiens
cactcacacacacacacttatatatactggggcttttatttctatagtatagagtcccaggattgagattctgggttgaattgcaagtgcatttaaatttttaatagagatcacgaattgctttttcacatttctaccagtgatatatgaaagtgcccttgccctkactcccatctctgctaataataggtgcagttactctttgatttttgccactctgatggctatgatcatggtaattttcatttccctttctctgcctattggaggagattgaacattttatcatacttgctcttctgccaattgcctattcatatccccaacctattttgctattgggttgattatctttatcttattaaattgtgacatagctttttttatatatagatgcaaatttttatctatcatttgatttatattttttccagcttgtttacctactgattttgtttttggtatctcttgcactacaaataataccttgaagttttataaaggttaggttgatcacctacctttgtttaaaatatttctttaattcttaggtgtacagataataacct

SEQ ID NO: 273178 - DNA, 586 bp, Homo sapiens
ataataacctaattttttataaaatggttatttatttatttttactttcaagtcaaattcattaggaatttacttcataattaatataaactagggggtcyacatttattttcttccaagagcatatccaattgtgatgagattattaattaaatttccccacaatgatataatgaagtatcatcttcatgaggtattacacaattctgagatctctttattattattttttactgatttttttggtagtcttgtgcctatattgtactgttttattatactggcttttaagtagttttaatactgtcattctttttgtttttgagacagagtctcaatctgtcacccaggctggagtgcaatggtgtgatctcagctcactgaaacctctgcctcctgggttcaaacgattctcctgcctcagcctcctgagtagcctgccaccaccctaggctaatttttgtatttttaatagagatgggctttcacatgttggccaggctaatactatcattctttattcatcaatttgaatattttatccaattaaaactgccagagattctatggaagttgtactgaattt

SEQ ID NO: 273179 - DNA, 586 bp, Homo sapiens
ataataacctaattttttataaaatggttatttatttatttttactttcaagtcaaattcattaggaatttacttcataattaatataaactagggggtccacatttattttcttccaagagcatatccaattgtgatgagattattaattaaatttccccacaawgatataatgaagtatcatcttcatgaggtattacacaattctgagatctctttattattattttttactgatttttttggtagtcttgtgcctatattgtactgttttattatactggcttttaagtagttttaatactgtcattctttttgtttttgagacagagtctcaatctgtcacccaggctggagtgcaatggtgtgatctcagctcactgaaacctctgcctcctgggttcaaacgattctcctgcctcagcctcctgagtagcctgccaccaccctaggctaatttttgtatttttaatagagatgggctttcacatgttggccaggctaatactatcattctttattcatcaatttgaatattttatccaattaaaactgccagagattctatggaagttgtactgaattt

SEQ ID NO: 273180 - DNA, 586 bp, Homo sapiens
ataataacctaattttttataaaatggttatttatttatttttactttcaagtcaaattcattaggaatttacttcataattaatataaactagggggtccacatttattttcttccaagagcatatccaattgtgatgagattattaattaaatttccccacaatgatataatgaagtatcatcttcatgaggtattacacaattctgagatctctttattattattttttactgatttttttggtagtcttgtgcctatattgtactgttttattatactggcttttaagtagttttaatactgtcattctttttgtttttgagacagagtctcratctgtcacccaggctggagtgcaatggtgtgatctcagctcactgaaacctctgcctcctgggttcaaacgattctcctgcctcagcctcctgagtagcctgccaccaccctaggctaatttttgtatttttaatagagatgggctttcacatgttggccaggctaatactatcattctttattcatcaatttgaatattttatccaattaaaactgccagagattctatggaagttgtactgaattt

SEQ ID NO: 273181 - DNA, 546 bp, Homo sapiens
ttttgtcctccagtacgattttattttttacatgggtcctattcctttgtcatataatttattcctattttatgatttttgttactattatgaatggaatagtttcctcattttcgtttgtatgtgggtatggcttatatagaaaaagctaatcatactatatctttatgttgtatctacccaatccatcaaattctttcttttacttctatttactttttttactagagtttcttgatgatatcaggtataaaattatattgtcagcaaaaagtttcacctctttctttccatatttatgctgtgcatattaggtttattgcatttactaaaatatctaaacaatattaaataataatagtaawagtaggtgtgatttgtaaactatatatttggtcttcatcctgttttctggcatacaactcctaaaatccttggaatccccaaagtgataaatgtctttttgtatgctaataagttgactggtggctggcagcccctagatagcttcatgatgggggctggtcaccagaaaaaccaatggtc

SEQ ID NO: 273182 - DNA, 599 bp, Homo sapiens
ggtctgaacatgcagcgaactttcataaggacagatatggatgatgccttactcaccagagcacacaagtgactgcataaaggctgtccaggagctgcaaaagaccgaagtggaacagcagcatcctaaaagtgaaattggtggtgaacacatttatttgttcattaaatacttattgcactcactaccatatttcatcaaatctaatataatacaaactattaagttagttataaagcatgtgtgtttattagatgattttctatttcttgggtatctaaaatacttagctatttaaaagctctaacatcatcacaagtaccttaagtactggtatgatgtaaacatactttattcccatagattaaaaaaaatggtgcatagaagatcacaaagacaagaaaataaacagaagctctggctacagaacagagaacaactgaaaggggactcrgggagaccagtgagaagatggccattgggcttagtatgaaatgataatggtggtcgcttccatgtgctttgtgttgatgctggaaatgaagagaagatatatctaagaataagctagaagaaaaaaaaaagacaattttgtggtg

SEQ ID NO: 273183 - DNA, 581 bp, Homo sapiens
tttagaccaggatatgtttatttcccaaccaaaatwgggaaatgctatcgaaccttcacatcactgggagggcatcagataaggaatgttttccacaaaggggttgcctgaccaactacctcagaatcatctcaaaagtttgtttgaaaaagcagatttctgaatttcactcttggatattctgattcagtagtctcaggtggaatctgaaaatctgcatttttaaccaggaccctggtgtctcttacgtacactgaggtgggagaagctttaatgtagggtatgttttaatttgaaaagagtctgttgccataattttaggggctcactgagttatgcagcaggaataaaaatgccaaaggaaaatctgcttcagctcatgagattgagtctctaagtctctgctgctttgagccactgtcgagacagatagagagagacaaagacaggctgatagacagacagaaagctctctgtagttaaaccagcagccttgacccaaatacatgcctatctggactcccatgacatcatgcttggatgactgtagaatgcagaagtgtctgaaaaagagagaaata

SEQ ID NO: 273184 - DNA, 540 bp, Homo sapiens
ttatatacatttcttcccatattgtgggtttaattcttatccctaagttaagtctttgtaaagcccaagttaaaagaataccttctagaaagtttatatagagacactggaatcacagtcctgctgctcagagcaggtatgtggyacacatgtactaaaatggtgaccaaacagggacccctggggcactagtaggaaaaaacactacctaatatggtgtgagtgtgtgtggcttggcaggagtgacccataatcaataggattaggcagaggatttggctcagaaaatataattgcaagtgcaatggtcctttaaggaatgccattaaggtaaaatattttaaagaataccatccacttggaatagttttggggaaagaatttaaaggaatttcaaatgaagaaccttgctgtgattgttgctttaagcaccatttttggtttacaaattacatgccattttacagacaaccaaagaaacatgatccaactgtattattcttttaccccatgttttcacagttccatatggttaacatc

SEQ ID NO: 273185 - DNA, 613 bp, Homo sapiens
ctgtttctgtgagttacatcttaaccactgacaagaccccagttcctgatgaaaaatagaaagtttcrcaggcttagatttttagaaacaaaatagacactagttctgacatcccaagcccatcaaaaagtgtttatgatacataatgaaagttgagacttattccagcacagatttggataaatgggtaccatctaggcattccagggatgcactggcagtgagattgaaagggagaaaaaaatctgatagctctggattgaactatttaacaataaatgtctcttcttgagagtaagccctctgaagatcagcttctaattgccaacatcattttctaccttctgtacaaagtcaacccttccacatagcctaccaagcagggcttgctgcacatctgcatcatgactgtgcaaattagaaaagggcgcttttacaatatgagccagggtggatggcttggtgagttgagcatgggctgaattttacccacaccagcccgcttggttgggcacccttttgcagtgcacaacctgaacaaccatatatgagcagccctgctaccaagcactctgcattccagagagtaggtaactctctgtatattaataac

SEQ ID NO: 273186 - DNA, 547 bp, Homo sapiens
agaaaaaaatctgatagctctggattgaactatttaacaataaatgtctcttcttgagagtaagccctctgaagatcagcttctaattgccaacatcattttctaccttctgtacaaagtcaacccttccacatagcctaccaagcagggcttgctgcacatctgcatcatgactgtgcaaattagaaaarggcgcttttacaatatgagccagggtggatggcttggtgagttgagcatgggctgaattttacccacaccagcccgcttggttgggcacccttttgcagtgcacaacctgaacaaccatatatgagcagccctgctaccaagcactctgcattccagagagtaggtaactctctgtatattaataactagatagtcctagtcctggtgaatataagaatcttggcaatcaggaagttacttgccataaatcaaataatgagttgccaaaatctcctcactcttcataatctagaggaagaaacaactataggagcaataaatgactgatagagcctttgtctggcataatggagat

SEQ ID NO: 273187 - DNA, 632 bp, Homo sapiens
aaatgacttatccaagatcccacagctcccaagtagtggagactgaatctggagccctgtggtctgaattcaaaacccaagctcttaactacagccctatcttgtttctcaaaggactatctatgggtagacatgaggtgtagtaacgattggggtcacctgtgagtctgtgagtcacaatcacacaccctgggcacattttccatctgcattacgccattcttgygttgctatagagaaatacttgagactgggtaatttataatgaaaagatatttaattggctctttaggccaattaagcctctgcaggctttataggaagcatgatgctggcatctgctcagcttctagaggggcctcgggaagcttacaattatggtggaaggtgaagaaggagccgacacaacacatggcaaaagcaggagcaggagagaaagagcgagagacaaattggatggggaaatgccacacacttttaaatgaccagatctcatgagaactcactatcaggaagacagcatgaagccctgagggattcgcctccatgagccaaacacctcctaccaggccccacctccagtactgggaattacaattcaacatgagatttgggagggaacaaatatccaa

SEQ ID NO: 273188 - DNA, 632 bp, Homo sapiens
aaatgacttatccaagatcccacagctcccaagtagtggagactgaatctggagccctgtggtctgaattcaaaacccaagctcttaactacagccctatcttgtttctcaaaggactatctatgggtagacatgaggtgtagtaacgattggggtcacctgtgagtctgtgagtcacaatcacacaccctgggcacattttccatctgcattacgccattcttgcgttgctatagagaaatacttgagactgggtaatttataatgaaaagatatttaattggctctttaggccaattaagcctctgcaggctttataggaagcatgatgctggcatctgctcagcttctagaggggcctcgggaagcttacaattatggtggaaggtgaagaaggagccgacacarcacatggcaaaagcaggagcaggagagaaagagcgagagacaaattggatggggaaatgccacacacttttaaatgaccagatctcatgagaactcactatcaggaagacagcatgaagccctgagggattcgcctccatgagccaaacacctcctaccaggccccacctccagtactgggaattacaattcaacatgagatttgggagggaacaaatatccaa

SEQ ID NO: 273189 - DNA, 587 bp, Homo sapiens
cttaatgaaggttacaatttagtggccttaatcaacagtaagcatatagatgtataattatataatttgatacatattaagaacacttcattgcatttattaaaaacccactaggtaaaattttccatggtagtgtcagacaaggctatggtgacaagatcttccttttacaggctctgactaatttgtagtggtggctgagcaaaccactgaccctttctggaccttggcttctccatctataaaatggacatggcagcagacagcctctctgcctcacaggctcttatgaaaattaagtgggacaagaaacaaaagtgctatcaatgctgaaaagtcctctgcaaactacgtcataaccgaataaatgatcccttgtgccaaaaatgcaaaaatgtttcacaatttattgcttaagcggaaacatctggctaaggaaacttgaaaaaggcagcaacctttccgaccaaagcaatttcatctaatagstggtctctggagtctccccttcagctctgatttgtccgttgctgagaatttcactttaaaatatgtgagccttgcacttttttttttttttttttgca

SEQ ID NO: 273190 - DNA, 450 bp, Homo sapiens
aactcatttttatttaattacttctaaagaccctatcttcaaataaggtcaccttctgaggtactgggggttaggacttcaacatataaattttgtgaggacacaattcaacycacaacattctccgagaaagaacatgaacatcattcatctggtacaaagaaagcactcgttaatctttctcgaatgaatctgtccaaatattcaccacttttatgatcatcaacattattatcattatcaaccagaaaactttaactggcatttctatacttctataggatactgatgattggtattaatcatggtatcatgaaattctgtaaagattcccagacatcatttgactaattggataaagattacacaaaggctataagctcagtatacttttaatgttgtctattttgttgtattctacccaaaataaaatttggtcattcatagata

SEQ ID NO: 273191 - DNA, 450 bp, Homo sapiens
aactcatttttatttaattacttctaaagaccctatcttcaaataaggtcaccttctgaggtactgggggttaggacttcaacatataaattttgtgaggacacaattcaacccacaacattctccgagaaagaacatgaacatcattcatctggtacaaagaaagcactcgttaatctttctcgaatgaatctgtccaaatattcaccacttttatgatcatcaacattattatcattatcaaccagaaaactttaactggcatttctatacttctataggatactgaygattggtattaatcatggtatcatgaaattctgtaaagattcccagacatcatttgactaattggataaagattacacaaaggctataagctcagtatacttttaatgttgtctattttgttgtattctacccaaaataaaatttggtcattcatagata

SEQ ID NO: 273192 - DNA, 418 bp, Homo sapiens
ccagcctgggtaatatggtgagaccctgtctgtacaaagaataaaaaaattaccygggtgtggtggattgtgtcttagtcccagctactcaggaggctgaagtgggaggattgcttgagcccaggagtttgaggctgcagtgggctatgattgcgtgactgcaccccatcctgcctgggtgacagagtgagaacctgtctcaacaacaacaacaaaaatactgttcttcatgaaaagtattctaagtcggtggcttccttcacctagcctcatgtctttttccaaaataaaaataaccctgctgggaatgttaatagctaacttaccgagcacttgactgtgtgccaggcactttactatgccctttgcatgtataaatcatttaatcttcatgacaaccctacaactaggtgttacc

SEQ ID NO: 273193 - DNA, 418 bp, Homo sapiens
ccagcctgggtaatatggtgagaccctgtctgtacaaagaataaaaaaattacctrggtgtggtggattgtgtcttagtcccagctactcaggaggctgaagtgggaggattgcttgagcccaggagtttgaggctgcagtgggctatgattgcgtgactgcaccccatcctgcctgggtgacagagtgagaacctgtctcaacaacaacaacaaaaatactgttcttcatgaaaagtattctaagtcggtggcttccttcacctagcctcatgtctttttccaaaataaaaataaccctgctgggaatgttaatagctaacttaccgagcacttgactgtgtgccaggcactttactatgccctttgcatgtataaatcatttaatcttcatgacaaccctacaactaggtgttacc

SEQ ID NO: 273194 - DNA, 418 bp, Homo sapiens
ccagcctgggtaatatggtgagaccctgtctgtacaaagaataaaaaaattacctgggtgtggtggattgtgtcttagtcccagctactcaggaggctgaagtgggaggattgcttgagcccaggagtttgaggctgcagtgggctatgattgcgtgactgcaccccatcctgcctgggtgacagagtgagaacctgtctcaacaacaacaacaaaaatactgttcttcatgaaaagtattctaagtcggtggcttccttcacctagcctcatgtctttttccaaaataaaaataaccctgctggkaatgttaatagctaacttaccgagcacttgactgtgtgccaggcactttactatgccctttgcatgtataaatcatttaatcttcatgacaaccctacaactaggtgttacc

SEQ ID NO: 273195 - DNA, 608 bp, Homo sapiens
atgggctgcattccttatacaaagatcctagctcctttaaggcaagcttctacccacagccctcttaatcttgggatttcagtaactgctctctccccttgctccttcaggcctagggtggagagctgtacctagctattcatgaacaactacactctcccttgtggcttctctataccctgcccataactttgaaaacaattcctttatttaactgtactcaaagtatcccgatttgagtayaccgtctctttcctgcaagatcctggctactcccagccagtccaagggctttggaagtcatcagtcatcttatctttttccattgacctttcacatctcatccaatgtttttcattgtgattgtttagggaatttgaaaagacaagactaaatatgtaaggagcatgatgaaaatctgaccccaagaaggagcatgggaaggaagcttgattggaagcattctagactgctaggcaatctagaagagatttggcaaggctgctggggagttctcatgccaacatcagccatcagaggagtcttttgtttcccaggaatgggcccgctttagtattcctgctatgctcagtcactgggagcaaccc

SEQ ID NO: 273196 - DNA, 517 bp, Homo sapiens
tctccccttgctccttcaggcctagggtggagagctgtacctagctattcatgaacaactacactctcccttgtggcttctctataccctgcccataactttgaaaacaattcctttatttaactgtactcaaagtatcccgatttgagtacaccrtctctttcctgcaagatcctggctactcccagccagtccaagggctttggaagtcatcagtcatcttatctttttccattgacctttcacatctcatccaatgtttttcattgtgattgtttagggaatttgaaaagacaagactaaatatgtaaggagcatgatgaaaatctgaccccaagaaggagcatgggaaggaagcttgattggaagcattctagactgctaggcaatctagaagagatttggcaaggctgctggggagttctcatgccaacatcagccatcagaggagtcttttgtttcccaggaatgggcccgctttagtattcctgctatgctcagtcactgggagcaaccc

SEQ ID NO: 273197 - DNA, 456 bp, Homo sapiens
aatacacttcaccagactactargcaaccaattggttaataccgtgcaacgaattctcccattccactttgtgagaaggcagcaaatgagccttgccgccatgtcccagcatggtatttacatgcttattacaagtccacatggccagttggaggggcatttcccagccccttgtctttgccttctcagactaagaaccagagaagccgcaagactcatttgtttttggtcaaatgtgggtagggcacggattaaatcctgagagtcaggaaacccaattttcaggctgattttgtcctggacaaactcagtagctctcaacaaaacacttaatccttctggaatgcagttgcctcctccttttaaaatagtaatgtaccatttggcctcactcacctctaggaacgcttaagaggtaaaaatgtgataatggatgtgaaagtgccacaagagatg

SEQ ID NO: 273198 - DNA, 486 bp, Homo sapiens
ttactgagtaccttctgtgtgccaggtaccagggtgaaaaaggcagagttgattcctggtttgggtggagccgatggtctaataagggaagatatattgaataaacacgttaattggtcatacctaagataaacgctacacaggaaaaacagagacttytggaggaggctgcaacagggaaccagctgaagtcctcagctgaatctcaggcatcctttccctcctagaagctctcttctcacttcctgctgctgcaaactgataaaaataatagcctcccagaagcggatggtgagtcagtgcattcaaggctgcacatccccaggtgaggtaacaagagtcagggtctggctgaaatctcctctccccgttcgcactcctgggctgagtgccactcggcaaggcgtgagccattttgcatgatgaagtccacattacagatttcttctgacacctgatgactaacaaggtctgaaaacaacaaga

SEQ ID NO: 273199 - DNA, 486 bp, Homo sapiens
ttactgagtaccttctgtgtgccaggtaccagggtgaaaaaggcagagttgattcctggtttgggtggagccgatggtctaataagggaagatatattgaataaacacgttaattggtcatacctaagataaacgctacacaggaaaaacagagacttctggaggaggctgcaacagggaaccagctgaagtcctcagctgaatctcaggcatcctttccctcctagaagctctcttctcacttcctgctgctgcaaactgataaaaataatagcctcccagaagcggatggtgagtcagtgcattcaaggctgcacatccccaggtgaggtaacaagagtcagggtctggctgaaatctcctctccccgttcgcactcctgggctgagtgccactcggcaaggcgtgagccattttgcatgatgaartccacattacagatttcttctgacacctgatgactaacaaggtctgaaaacaacaaga

SEQ ID NO: 273200 - DNA, 628 bp, Homo sapiens
aatagaatttaatacgtttagagggcttcactaaagaaaaatcacttttgaaggctgtaggctttctagtggaatgttagttctgctttatggtatggtaggctgaataatagtcccccaaagaacttcacgtctcaatcctttggaacctataaatagattactttacacagaaaaagagactttgcagatgtaattacattaaagatcttgagttgaggagattatcctagattatctggatggcctttttataatcacaagggtccttctaggagaggcaggggagtcagagttagagaagatgtgaygatggaagtggaggttggaatggtgtgaggaaggaatacaaaaaatgcagtggcctctagaagctgaaaaagggagaggaaacatcctcctttagatccttcagaaagaacagtcctgcacaggcttgactttagcccattgagactgattttgaacttctgacctccagaatcataagaataaatttgcattgttatgagccactaaatttgtgttatttgttacagcagcaaggggaactaatacagatgtggtgcagctcgcttcagccatctgaggcttgggttcctcacctctaaaatggatactcatacct

SEQ ID NO: 273201 - DNA, 595 bp, Homo sapiens
gactggccactacccaaggtaaatcaagataccacagaggtaataacacaaaccatcttgacaaatcaaattcaaggataactgttgtacagggccasttgtgcaactgtatctgtgtaaatgctggccagacagactcagttggtagctattctgcatgggttatctcatattccaactgcaagacaaagagcaaaatggcactactttccatgttatgtgaaaaatgcatactgcattcaaactactgttgtcctcattgaaacatccatccaacaaagctatgtgtatgttacaaatatactttcaattgtttttgttatatcttttattatttaagaccactttaccctaatcatcttcatgggtacttacgtgtgtaaagtggggaagggagatgaaaattatcattttgaaacgtgtttgagaaatactagataaaacaaagataattcagattcttaattgcaagacttctcagagcctttgatatactaatgtgtcagtaaattttcatgaatataaatgaccacagtgcattttttaaagtaaagaaacaaaatatcattaatgtatgaacaaatggtttgcctct

SEQ ID NO: 273202 - DNA, 567 bp, Homo sapiens
ggcatcggtattgagagcagcagaaaactatgtcccatgccacttgccagaggggagagctatcctctatcctttcctgctaagcccccagcaggtggaagatgaccagtgtggactctgggttggggctggcaaaaccaaagactgatgagtgtctgtatctggatgtcgatcattgtgaatataggaagaaacggatggataaaaatattttaggaggtaaaatagaattgattaaaagaataaaataaataggattttgtgagtaactaaaaaagaattaggaaaagtagaagtgactctacagtttcagatatgggaaaatgcggaatgtaagagatttacagaggaagttgaagtgtggcagagactgctaattttctttaatatctgtcttctcttttcccatagaacyagaactgcagacttttagctgagcatattacttctcagaataaagattgcatttccagtcttcctttcggctcagtgcctgtgtgtaagttcttgcctataggatataaatagaagcaacatatgcaagttcagggttgcgccttcctcctc

SEQ ID NO: 273203 - DNA, 343 bp, Homo sapiens
tatgcttcttgtacagcctgcagaaccatgaacaaataaaccactattttttaataaattacccaccctcaggtattcctttatagcaacacaaatagactaagacagatgcatttaagactctgctaaaaataaaaaataaattaaaaagagagtagttctttaatatctttcctgccagactgccaaaggcatgaatttccacctgcaaattgcccttttgcagcacaatattcagtctccatagtctcctgttrcaatacaaatctatgactagaagagacaggggccacctggctggcctcactaataccacagcacaaggttgcttagcaaattagct

SEQ ID NO: 273204 - DNA, 343 bp, Homo sapiens
tatgcttcttgtacagcctgcagaaccatgaacaaataaaccactattttttaataaattacccaccctcaggtattcctttatagcaacacaaatagactaagacagatgcatttaagactctgctaaaaataaaaaataaattaaaaagagagtagttctttaatatctttcctgccagactgccaaaggcatgaatttccacctgcaaattgcccttttgcagcacaatattcagtctccatagtctcctgttacaatacaaatctatgactagaagagacaggggccacctggctggcctcmctaataccacagcacaaggttgcttagcaaattagct

SEQ ID NO: 273205 - DNA, 528 bp, Homo sapiens
aaaaacaatcatcaaattcgtatggaaccaaaaaagagcccaaatagccaaaccaattctaaggcaaaaagaacaaatctggaggcatcacattaccagacttcaaattctactgcaaggctatagttaccaaaacttttatagttcyataaaagtaggcatatagaccaatggaatagaacagagaacccagaaataaagccggatacatatagtcaactgatctccaacaaagcatacaaaaacacaaattggggaatgaatactctatttcataaacggtgttgggaaaacttccaaaccacaagtagcagaatgaaactggctccctatctctcagcttatataaaaatcaactcaagatggatcaaagacttaaatataaggcctacaatcataaaaattctagaaggtgacattggaaaaattcttctagacattggcctaggcaaagattcatgactaagaccccaaaagcaaatgcaacaacaataaaaaaactaaataaatgacacctgatgaaactaa

SEQ ID NO: 273206 - DNA, 528 bp, Homo sapiens
aaaaacaatcatcaaattcgtatggaaccaaaaaagagcccaaatagccaaaccaattctaaggcaaaaagaacaaatctggaggcatcacattaccagacttcaaattctactgcaaggctatagttaccaaaacttttatagttccataaaagtaggcatatagaccaatggaatagaacagagaacccagaaataaagcyggatacatatagtcaactgatctccaacaaagcatacaaaaacacaaattggggaatgaatactctatttcataaacggtgttgggaaaacttccaaaccacaagtagcagaatgaaactggctccctatctctcagcttatataaaaatcaactcaagatggatcaaagacttaaatataaggcctacaatcataaaaattctagaaggtgacattggaaaaattcttctagacattggcctaggcaaagattcatgactaagaccccaaaagcaaatgcaacaacaataaaaaaactaaataaatgacacctgatgaaactaa

SEQ ID NO: 273207 - DNA, 528 bp, Homo sapiens
aaaaacaatcatcaaattcgtatggaaccaaaaaagagcccaaatagccaaaccaattctaaggcaaaaagaacaaatctggaggcatcacattaccagacttcaaattctactgcaaggctatagttaccaaaacttttatagttccataaaagtaggcatatagaccaatggaatagaacagagaacccagaaataaagccggatacatatagtcaactgatctccaacaaagcrtacaaaaacacaaattggggaatgaatactctatttcataaacggtgttgggaaaacttccaaaccacaagtagcagaatgaaactggctccctatctctcagcttatataaaaatcaactcaagatggatcaaagacttaaatataaggcctacaatcataaaaattctagaaggtgacattggaaaaattcttctagacattggcctaggcaaagattcatgactaagaccccaaaagcaaatgcaacaacaataaaaaaactaaataaatgacacctgatgaaactaa

SEQ ID NO: 273208 - DNA, 537 bp, Homo sapiens
ggatctgtgagacccacccttaaactctttagaagacctttggtctgagtggacagatcttgagatagacctttggtctttctgatatcttagaaaataattctagagtcatacctttggcctcatctttagaccaagctttcctgatagtgccctggatttgtatttttgcttggaagccatttytcaatgttagtattatttgctatattgggagactgagaatttgaaatcatcaagtcccagctcctccatgtttaacattacttttgttaattttttttatcctactatcacattttatataagtagcaaaaagaaaacaggtggcggcctcaatattccctctggaatcctctttacctaggtcatgcagttcattcggtatattttctactttccacaatactgcaggtgacagtattgctaaactttctaccactgcataataaacattccctttcatccagtttcccaataaatttcacttcactttcctttaggccttcaccacagcctcttgaaaggacaataacg

SEQ ID NO: 273209 - DNA, 493 bp, Homo sapiens
tgtattttctaaactggactttgtccttcacagtttgggagtttgcaatggaagagattgcatttaagccacttttcctctcttatccaatctggatgctggccatctaacttgcctgtgctcagaaggctgaaataacttatagcatttgtatctcaagggtgaaatctaaataatattaaggaaatatatcaaaaggaagtgattgctttcaattcccatctcctcataatgtagagaaatggttaaattcgttgcgatcagtcttaatcagagaacctgccccatttgttctaaacagtgctattacagcccctgcatgtttactaaaaagagaaccaccatctgcagatgggttagcaacacatttatactactttcatgcattaccaatgcaaktctagaaatgaatctaagaaaagtgctgttttagcagggagagtgtcttcacttaaatccgaaaaatgatttggttatctccagatttgtaaag

SEQ ID NO: 273210 - DNA, 523 bp, Homo sapiens
ttggcagctgtactcttctaaaattggtcaggaggtattaggttggtttttctttctttacttttaaaattggccttttcccactttataaaagcaaggcatatctttatccttcctgaatattcttaygtgaattgcttcaaggtagaaacaccttcagagtgcccaacaaggacgtaatacaaatattggtgtcccccagtgttggtgtttccttctagggagcatacaacttcctgtccattacagatgcatttccccccaaaattactttttctttttaataatgattgacattaacttgaaatggcaactcaacttggaacacatttttaattgcttgaaagcttatggcactaaggattgtttttaaagttaatttaaatatatttatgtatttctgctgtagcggaacaggatgaccatttcattttgaaaagctgttgtcgggtgggtctctggaaaggggatcatgggctggagtttcgtgtgtagaatgtctatggggggtgcccttgggggg

SEQ ID NO: 273211 - DNA, 505 bp, Homo sapiens
ctctgtggctgcccagagctccaccgacctggaaactcttacaaaatgacttgtgagaatagtggagatttgtacaccgtagcccaaagtctaagcctaagaaaggaggcccaatagttggtcttactcacggctatcatggtgggtgtctytgaacctgggttgggttaatcaccacctggttgcaaggtgcttgaacctcatgcataaaaacagaggtcctgaccaaagcaaggccatggaatggggcctcaggccatccttctccctgcctctcctgcaaacactttacttcattctatctttccaaacagcattcttattcacgagagattctaaaaatttcacacgtgagaggctcccaaacatccttttgaaagcgatgtgcatttttgacctctccacatattatgcatttcaggtgtgctgggaccaggttcactttgcatgtcctgtcttcttatcttcttctcctgcttcaatcgctcctccactgtaccaccag

SEQ ID NO: 273212 - DNA, 498 bp, Homo sapiens
acttcggccatcctttgccaagagcaaggggaggagccgggatctaaaggcatcgaatgtccacgggagggttgaggaatgtcgtagagttctgaytgagtgtcaacacccaagacattccagaagtgatatatctgcaggacttaacatttttacttgaagcattctctacaattgaaagactggttctactctagaagatgccttacgttaagtgaggcactaattgggtgccagctcttacttttaggtgctagcaatgaactaagccgacaagacttcctgtcctagtctgggcgtgagccaccgcgtgagctctttgggaggctgaggagggcagatcacgaggtcaggagttcaagaccagcctggccaacatgataaaaccctgtctctactaaaaatacaaaaattagctgggtgtggtggcgggcgcctgtaatcccagctactctgtctgctgaggagggagaatcatttgaacccaggaggcagagt

SEQ ID NO: 273213 - DNA, 498 bp, Homo sapiens
acttcggccatcctttgccaagagcaaggggaggagccgggatctaaaggcatcgaatgtccacgggagggttgaggaatgtcgtagagttctgattgagtgtcaacacccaagacattccagaagtgatatatctgcaggacttaacatttttacttgaagcattctctacaattgaaagactggttctactctagaagatgccttacgttaagtgaggcactaattgggtgccagctcttacttttaggtgctagcaatgaactaagccgacaagacttcctgtcctagtctgggcrtgagccaccgcgtgagctctttgggaggctgaggagggcagatcacgaggtcaggagttcaagaccagcctggccaacatgataaaaccctgtctctactaaaaatacaaaaattagctgggtgtggtggcgggcgcctgtaatcccagctactctgtctgctgaggagggagaatcatttgaacccaggaggcagagt

SEQ ID NO: 273214 - DNA, 507 bp, Homo sapiens
caggaagccccgggaagaggcagttgaattattattaytgttattattaattcaggcctcttctactacaaagacattgcaaagaaatagcagagcaattgatctatcctgattcacactaagtgcatctgataataacatacgttctcgataccagcctgaccaacatgtagtctctactaaaaatacaaaattagccaggcgtggtggtgcatgcctgtaattccagctactcgggaggctgaggcaggagaatcgctggaacccgggaggcagaggttgcggcgagccaagatcatgccattgcactccagcctgggcaataagagcaaaactccatctcaacataaataaataaataaataaataaataaataaataaataaataacatattttcaggggcataaagaggccagtagtgtcacttaggccagatggccggggcagatgtgttcagcaaccttcccatcattgacaagctttactgctattacctagaaagtca

SEQ ID NO: 273215 - DNA, 507 bp, Homo sapiens
caggaagccccgggaagaggcagttgaattattattactgttattattaattcaggcctcttctactacaaagacattgcaaagaaatagcagagcaattgatctatcctgattcacactaagtgcatctgataataacatacgttctcgataccagcctgaccaacatgtagtctctactaaaaatacaaaattagccaggcgtggtggtgcatgcctgtaattccagctactcgggaggctgaggcaggagaatcgctggaacccgggaggcagaggttgcggcragccaagatcatgccattgcactccagcctgggcaataagagcaaaactccatctcaacataaataaataaataaataaataaataaataaataaataaataacatattttcaggggcataaagaggccagtagtgtcacttaggccagatggccggggcagatgtgttcagcaaccttcccatcattgacaagctttactgctattacctagaaagtca

SEQ ID NO: 273216 - DNA, 507 bp, Homo sapiens
caggaagccccgggaagaggcagttgaattattattactgttattattaattcaggcctcttctactacaaagacattgcaaagaaatagcagagcaattgatctatcctgattcacactaagtgcatctgataataacatacgttctcgataccagcctgaccaacatgtagtctctactaaaaatacaaaattagccaggcgtggtggtgcatgcctgtaattccagctactcgggaggctgaggcaggagaatcgctggaacccgggaggcagaggttgcggcgagccaagatcatgccattgcactccagcctgggcaataagagcaaaactccatctcaacataaataaataaataaataaataaataaataaataaataaataacatattttcagggkcataaagaggccagtagtgtcacttaggccagatggccggggcagatgtgttcagcaaccttcccatcattgacaagctttactgctattacctagaaagtca

SEQ ID NO: 273217 - DNA, 566 bp, Homo sapiens
atattcatcttccaaattggaaactcaaatagataatgcctaaacatgaaatatcaatagaaatgtaatatttaaacatatggtggtgcttctgggaaaaagaaaagaggatggagaagactgtttgtttgtatgtttgtttgtttaaacaagcaatatggatgaaattacaggctaagctgctttagcaaaaagacaccaaaatacagaagcttaaatgaggtaggtataagtttctctgtttgatatgatctcaagagaagcaatctgggttggaaagtcacctttatgatcctcaaaacgtagcttccacctgtgggactaaggcagccattctagttttgtcttcccagccagagggaaggaggacagggtcaggagagcacatgtgcataactgataggaacatgccccagaagggccacacatccatcggtcaggatgtgggcayaaggaccacagctgcatgggaggctgggaagcatagggtctagctgttagccacgtgctcagctaagacactggagccctgatattaaagaaggtgaggaatgatgctagtgctc

SEQ ID NO: 273218 - DNA, 546 bp, Homo sapiens
ggtgtgggtctgtctaatcatttctctggtgctgagttgaagcctaggcaattcttctggctctaaaagaaacagctcagaggtccagtcccagccctgctgaattttatggctacgtcccccatctgacagatggartcattgctgctgtccccggtaccacctcaccaggttactgtgagactcaggtgaggtatcgcatggcaaatgcctaatggtaaggctgcctgctggtctgtcttctcgccagggtccctggcgtccaccagggggcaggacgtggtcattgtggcagccccagagaacaccacagtggtgtctggccagagtgtggtgatggaatgtgtggcctcagctgaccccaccccttttgtgtcctgggtccgacaaggtgagtggagggggtgggagaaggagggcatgggaagggaggcatgtggcatctcacatgcccctaagtcagggggatgtatgggtgacgacccagtggtcacgaacctcctggtgtggcatgaactcctttcccagggctgggtgtggtggtca

SEQ ID NO: 273219 - DNA, 546 bp, Homo sapiens
ggtgtgggtctgtctaatcatttctctggtgctgagttgaagcctaggcaattcttctggctctaaaagaaacagctcagaggtccagtcccagccctgctgaattttatggctacgtcccccatctgacagatggagtcattgctgctgtccccggtaccacctcaccaggttactgtgagactcaggtgaggtatcgcatggcaaatgcctaatggtaaggctgcctgctggtctgtcttctcgccagggtccctggcgtccaccagggggcaggacgtggtcattgtggcagccccagagaacaccacagtggtgtctggccagagtgtggtgatggaatgtgtggcctcagctgaccccaccccttttgtgtcctgggtccgacaaggtgagtggagggggtgggagaaggagggcatgggaagggaggsatgtggcatctcacatgcccctaagtcagggggatgtatgggtgacgacccagtggtcacgaacctcctggtgtggcatgaactcctttcccagggctgggtgtggtggtca

SEQ ID NO: 273220 - DNA, 546 bp, Homo sapiens
ggtgtgggtctgtctaatcatttctctggtgctgagttgaagcctaggcaattcttctggctctaaaagaaacagctcagaggtccagtcccagccctgctgaattttatggctacgtcccccatctgacagatggagtcattgctgctgtccccggtaccacctcaccaggttactgtgagactcaggtgaggtatcgcatggcaaatgcctaatggtaaggctgcctgctggtctgtcttctcgccagggtccctggcgtccaccagggggcaggacgtggtcattgtggcagccccagagaacaccacagtggtgtctggccagagtgtggtgatggaatgtgtggcctcagctgaccccaccccttttgtgtcctgggtccgacaaggtgagtggagggggtgggagaaggagggcatgggaagggaggcatgtggcatctcacatgcccctaagtcagggggatgtatgggtgacgacccagtggtcacgaacctcctggtgtggcaygaactcctttcccagggctgggtgtggtggtca

SEQ ID NO: 273221 - DNA, 611 bp, Homo sapiens
acatcaacgcccctcctggggcttccggcttccactgcctatgactcttccctcctgcgctcctctaggctgagctgtccctttccctcctctggacctctccctcctggtaacagatattttcagttttaatcaagtattcctccctgtctccccagcaccagctcatcctctgctaagccagtgtaactcctttttctattcctggggacatttttcatccatactttctccaaccaatgttatctcagcgctaagcgggatcataattctgcccaatgtcatgggaattctcagcaatcttgcttctgacagtgacaatgtccttcaggctcaaacacctgagcacacacagagattcagacatgacttctcgtgcacacaggccacacgtctgcaactcatatgctatgtacctgccgcatgcaaaatggcaggtattcacatgacatatccagcccataccacatttccacatcacacccagtgcatatatatcagaaacctcacatgtaatatctacccttcatggacccatgctatgtcaatacacatgacatatcccatacatgttgtatacakgcctcagaccacacatccattacctcact

SEQ ID NO: 273222 - DNA, 481 bp, Homo sapiens
tcaggaatttacgtggggggatggaggggtgaagacatccataaggcagtgaggaagagtggtggagaggctgagcttgggcagaaagctgatctgaacttaaatccacattctgccaccaattcagtgtgtgatcttgagcaactacttatcttctctgggcctctgcttccaaatgtgtaaaatgagattatgacagtactccctgctctggtctgaatgtgtctcccaaaagttcgtgtgttggaaacttaatccctctgccctcgtgaatggattaatgttgttattacaggaatgggttcattatcttgggagtggcttygttatgaaagtactggtctgtagcctgttaggaaccaggccacatggcaggaggtgagcagcaggtgagcgagcattactgcctgagctctgcctcctgtcagatcagtggtggcattagattctcatgggagcacacaccctattgtgaactgtg

SEQ ID NO: 273223 - DNA, 538 bp, Homo sapiens
ggtagggccccctccaagtcctacaaggtgaggaagctgtctacagtggtggtgggaggaaggttcatgccaagggctgattatgtgggcacagaggtggcagtgctaaatsgggagggtgaagccagtggatgaggagaggagtggagggcattccagggcctgtccctcatctggctgtcggagcactcacatcacgactgtcatcactcacttccatggttgaaacctctagtagactgaagctccagggaacaggaacaccatgcatggttatgtatgttgtgcactgctcaaggtacctggccaaggggaaaatggggctgaaatctagtcctcaactgccctactatagattcgtatccactcagaggaagggactttttttttttttcccccccggttttcacaaagaggccacttaggctgacaatagccctgcccgagaccatgcctgtttggtcctggctatatctctctcagtacatgtttggtgcataaatacctgaatgaaaataaataaatgaatgaacataag

SEQ ID NO: 273224 - DNA, 538 bp, Homo sapiens
ggtagggccccctccaagtcctacaaggtgaggaagctgtctacagtggtggtgggaggaaggttcatgccaagggctgattatgtgggcacagaggtggcagtgctaaatggggagggtgaagccagtggatgaggagaggagtggagggcattccagggcctgtccctcatctggctgtcggagcactcacatcacgactgtcatcactcacttccatggttgaaacytctagtagactgaagctccagggaacaggaacaccatgcatggttatgtatgttgtgcactgctcaaggtacctggccaaggggaaaatggggctgaaatctagtcctcaactgccctactatagattcgtatccactcagaggaagggactttttttttttttcccccccggttttcacaaagaggccacttaggctgacaatagccctgcccgagaccatgcctgtttggtcctggctatatctctctcagtacatgtttggtgcataaatacctgaatgaaaataaataaatgaatgaacataag

SEQ ID NO: 273225 - DNA, 570 bp, Homo sapiens
tcctcctgcctctctgtctctagtgcccactcacatgaaactactcagacttggtttctctgctttgaaaggtctcagagcccagaaaaagaggagaaacaattccccaggctctttgcaaagacccctcctgaaacaggcttcatgttgggctagcggaatatcytgtgggcatgcttagggcctggtggccaggaatctctgaggaggggcctggagggccagagttcctagcagctcctctctccagttccacacaatggcctgggtctttggggaggtgcatggtgtgaataagcaatctctatatctctgagttggaaaatgtgtggttgaagtcacatagggccattgggaagtcaggcaacagaagatgctaaagtgggaagccttctccccagtatccattccttggtcccagctctccctgggaggagcgtcaggcatgaatgcaacttcattatacagtgactctgcatgcacaaggggtattaatgattcatacaaatctgcaagttaaatgctatgtcaaaaatagaaattcaattgtctacaataaaattaaaaaca

SEQ ID NO: 273226 - DNA, 585 bp, Homo sapiens
tctttgtctctctctctctggtatactttataaatttcctcaactttatgttttggctcttctattgcaacattttaatttccaccattttatttttaattttcaagacctctttcctattctctggatatcctattttatagcactctgttctttcataggtgcaatgttttcttatagctacatgagcatgttcattttaattatgacagaggcttttttccttctctttttttaggttttccttgctccaggcrtggttcctatttcctctgtgttcctgttgcctatttgtttatttcagtgtttctctttcatgtgagggcctatttcaaatatctggtgatccttggccatctgttcatgttttacagtgagccccagaaaagccaattggacacctgggggtggagggagatgtcaggcgtgttgactgatgggaccctcaactatcaatatctttaggtcatttctcttgagctcctcagtgtccctagaaaggaaccctccaacctcctgccacagggagttcagtccggcagtcagcctttaggagcgcagcagggaagagagcagcaggagagt

SEQ ID NO: 273227 - DNA, 585 bp, Homo sapiens
tctttgtctctctctctctggtatactttataaatttcctcaactttatgttttggctcttctattgcaacattttaatttccaccattttatttttaattttcaagacctctttcctattctctggatatcctattttatagcactctgttctttcataggtgcaatgttttcttatagctacatgagcatgttcattttaattatgacagaggcttttttccttctctttttttaggttttccttgctccaggcatggttcctatttcctctgwgttcctgttgcctatttgtttatttcagtgtttctctttcatgtgagggcctatttcaaatatctggtgatccttggccatctgttcatgttttacagtgagccccagaaaagccaattggacacctgggggtggagggagatgtcaggcgtgttgactgatgggaccctcaactatcaatatctttaggtcatttctcttgagctcctcagtgtccctagaaaggaaccctccaacctcctgccacagggagttcagtccggcagtcagcctttaggagcgcagcagggaagagagcagcaggagagt

SEQ ID NO: 273228 - DNA, 585 bp, Homo sapiens
tctttgtctctctctctctggtatactttataaatttcctcaactttatgttttggctcttctattgcaacattttaatttccaccattttatttttaattttcaagacctctttcctattctctggatatcctattttatagcactctgttctttcataggtgcaatgttttcttatagctacatgagcatgttcattttaattatgacagaggcttttttccttctctttttttaggttttccttgctccaggcatggttcctatttcctctgtgttcctgttgcctatttgtttatttyagtgtttctctttcatgtgagggcctatttcaaatatctggtgatccttggccatctgttcatgttttacagtgagccccagaaaagccaattggacacctgggggtggagggagatgtcaggcgtgttgactgatgggaccctcaactatcaatatctttaggtcatttctcttgagctcctcagtgtccctagaaaggaaccctccaacctcctgccacagggagttcagtccggcagtcagcctttaggagcgcagcagggaagagagcagcaggagagt

SEQ ID NO: 273229 - DNA, 585 bp, Homo sapiens
tctttgtctctctctctctggtatactttataaatttcctcaactttatgttttggctcttctattgcaacattttaatttccaccattttatttttaattttcaagacctctttcctattctctggatatcctattttatagcactctgttctttcataggtgcaatgttttcttatagctacatgagcatgttcattttaattatgacagaggcttttttccttctctttttttaggttttccttgctccaggcatggttcctatttcctctgtgttcctgttgcctatttgtttatttcagtgtttctctttcatgtgagggcctatttcaaatatctggtgatccttggccatctgttcrtgttttacagtgagccccagaaaagccaattggacacctgggggtggagggagatgtcaggcgtgttgactgatgggaccctcaactatcaatatctttaggtcatttctcttgagctcctcagtgtccctagaaaggaaccctccaacctcctgccacagggagttcagtccggcagtcagcctttaggagcgcagcagggaagagagcagcaggagagt

SEQ ID NO: 273230 - DNA, 534 bp, Homo sapiens
gcctcacttgtctcatggcagcctccttaactctaaagtgagggtgatgagaatatgtgctgctccaggggctggggacaggctctggggcctgagcagctggaagcccctcagtatacggtgcccrggggtgttgtcatcatgatccctgctgccccactattctgccagatcactcctttgctacagtggctctgagaggggagagctagtggcatcttcttgggaaggaagcactcaaggccagaccccagtcaccgtcctcttctccttgtcactgtgggcacagagcagcaaaggcacagaacagagacaaggacaccccagtctcaagttgccaaggctggtgccccacacactggctgctctcatcccccacacacttgctagctggccctgccacatccacgagggtctgaccactcaccctcaccatagacaactgagtcatccagacacagaatctccctgccctgtctgtagaagaatacttccacccccacgatcctccaaaatacataataaagaagttag

SEQ ID NO: 273231 - DNA, 536 bp, Homo sapiens
actattctaggctcagccctggttcatcctgtgaccttgaaaaaatcattttccctttctaaacctctgcttcttcaccccaaaaagggagaactggactagctgattgctcaggttctgcagttctaatactttatactgacatcctcctcctcaacctctctgagtcacctatgggactcttgactctgaggtctgcgaacagcctgctcagccctggtccttcataatcataattgctacaatttattgtgcatttatcatgtgcttgcactgtgtaaaaacattcaattactgcaactaccctaccatgtcaatgctattatcatttgcattctacagatgggagaaactgaggcacagaaagttttagtaacttgcccaaggtcacctgcagaagcaggacttgacccaggtccattggtgtccacagctcatgctctgaattcctatamcttaatgcccagacccaagctcaggcccaggccaggcccccacagtagtgatttccaagttctccttggtccactttaaac

SEQ ID NO: 273232 - DNA, 592 bp, Homo sapiens
aattctgaaagagatatccagcagaaatgttaatttatagagacagggtgcttttcaccaaatagtttgatagggtaatatagtgaggagaagatattaacgtgttctcttttagaaagttgctttcatggcctagaaaaaaataggactccctgcattcagttgatataacggttgttatggaaactactttgcattgaatgacaaggcagtaagcatatgtatgtagctttgggtagatgcagccacattgttttttttgtttgttttgtttttttttttccaaatgaatggttaactttccaaagtgaataagtagattttcagtagaaaaagatgcaaaataaacaaataaaacccactgtcagttcaaaatttttcagcaggctgagtatgaaagcctcccagaagggactatttggtgaaagttggtttaagtaaaaatgaaatctttacaacttatcaagcttaatatttaccaatgtccagmggctttttagtggtactgtttgtctcatctactccacaaacacttactgggaactttagatacagcatatgcatgttcagaaaagaaaaataacttaaataa

SEQ ID NO: 273233 - DNA, 574 bp, Homo sapiens
ttcaattgatttctcatatcttttcccatttttataaaataaaaaagtcttaagtagagcaaactgtcttaagctataatgctcacataaaatatcgatatttagtgaaggcttgcttgatgaagctggtaaaaataaatacactttcattatatgaagctttctgaacaaggcaggatttttgtttttcaagatgataggaggtttgagcaggaaagagtttgttaggaaaaaagaaagaggcaacataaaagaaattaacaacataattcagatcctggaagtatcttaaaatggacacagagacttggacacaaacacttggaaagaagatctgagaatatttcaaacagaatattaaacaatgacaattaatgctatagagaaatatcactaagatgtaattggcaataggacaataaraagacccgaagggttttcccaggagtagtgtgcatttacataaaatctatgtttttcatgtttaaaaaaaatcacctctgtacatactcatgagcagagaaaaagaaagaaaaatatattgccaggttgggaagttattagaataccattt

SEQ ID NO: 273234 - DNA, 585 bp, Homo sapiens
ttctttaaacggaatggacatgataaaagaaggatcactggagcatcaagaaaaaagaaataatatattaagcaaaaacatgggtaaatataataggtgtctcttctcttcctgtgtttttccaaattatgcctgatggttgaaacaaaatcataacactgactgcctctaaatgtacatagagaaaatatttaaaacagctatatattaaatgtgtgagaataaagggacctagacagagttaaggtttctacatttcacttgaactagtagagtgattatagtatgcttggtaaattatgtatacattatgtattatttagaaaagccactaaaagagaaaaaaaactatataaagaaatacacataaaaacactacaaaaaagtaaaaatgaaattgctcaagtaacccataggaaagcaagaaaagaaaacagaagtaataaaaagagatcaaacaggaaagtaaaatacaacagcagamttcaactctattatatcaaaaattaaatataaatggcctaaatgtaccaaataaaggcagagatcataagagtaaattttaaaaattatctgatatatgct

SEQ ID NO: 273235 - DNA, 402 bp, Homo sapiens
tgtgtgagcaacatggctgttaatttcccctgggtgcaggcgggctgagtccaaaaagaaagtcastgaagcgagataggggtggggccgttttataagatttgggcaggtaaaggaaaattacagtcaaagggggtttgttctctggtgggcaggagtgggggttgcaaggtgctcagttggggagctttttgagccaggatgagccaggaaaaggactttcacaaggtaacgtcatcacttaaggcaaggaccagccattttcacttcttttgtggtggaatataatcagttaaggcaaggaccagccatttacacttcttttgtggtggaatgtcatcagttaaggcaaggcagggcatattcacttcttttgtgattattcagttacttcaggccatc

SEQ ID NO: 273236 - DNA, 402 bp, Homo sapiens
tgtgtgagcaacatggctgttaatttcccctgggtgcaggcgggctgagtccaaaaagaaagtcagtgaagygagataggggtggggccgttttataagatttgggcaggtaaaggaaaattacagtcaaagggggtttgttctctggtgggcaggagtgggggttgcaaggtgctcagttggggagctttttgagccaggatgagccaggaaaaggactttcacaaggtaacgtcatcacttaaggcaaggaccagccattttcacttcttttgtggtggaatataatcagttaaggcaaggaccagccatttacacttcttttgtggtggaatgtcatcagttaaggcaaggcagggcatattcacttcttttgtgattattcagttacttcaggccatc

SEQ ID NO: 273237 - DNA, 378 bp, Homo sapiens
tgttgggtgggccacatttttatttggggaagaatttgcttccaagatcattcagttagtagaatgtatttttttacagccataggattaagagtttataggkttttttgttttcggtttggttttttttttttttttttttttgctggcttttgaccagagcctgctgcaggctcctggatgccatccacagtttcttgtcacatagactttcaacatggctcgtctcatcgggccagaaagaaggatctctacattgagcctgctagcaagatggattcttatattaggtaatgtggccataggagtggcatccccctcacttttgccacattctattgatcagaagtaagtcacgggtcccatttacactcaagg

SEQ ID NO: 273238 - DNA, 582 bp, Homo sapiens
aaaacacatcttgtatctgttagaaaccattcaagagagtaattaaaagaggggatgagaaggcactcactagtggtgggggtgctgctgcagagggtccaggggagaatggttatgcagcgagtatgtttgccattacaaaacctggatgtttgctaagcagggcggaggtcatgatttttgggggccctgagaaacagacaagccatctgaatggaggtgtataacaggctgtgttgggtgcataaagggacttggaaagttaaacttgtgtcacatcctgttaggctattcttggtrcaatcagagatggggaagaagaccaaatctaggaattatttcatgaattaggactttaaccacttcctgagccttctctgtcttgcaggggaaggcttctatccaatttgtaaaggtatcaacacagaccaacaaatactgaaattcccttgacttaggcatatgggtgaagtcttaactgccagtcctctccaggagagtgacctattctttgttcccccagtggggccttatgatggaccaagggattattcctttggcacacctcacaggctttgacta

SEQ ID NO: 273239 - DNA, 555 bp, Homo sapiens
attcccttgacttaggcatatgggtgaagtcttaactgccagtcctctccaggagagtgacctattctttgttcccccagtggggccttatgatggaccaagggattattcctttggcacacctcacaggctttgactacttgttggatggtccrgaggagatttggccctgtaaatagggatttggccattttatgaatgttctcaatacccatatgaaaagtttggtgaagggtcataagtattttccactggctggctttgggtatgagtatctttccgtcttctgtcattaaccaccatgaggggaggaaactatgcccccatgaaagtccccaatctgtttcagtcagggaatactggagcttaatctcttggagagggtagttacataccaagggtccttccataggtatttctaatgggaggttccacctggcagcaattttggactcagcacatctgcctgatggattcctctgcctttttttcttcaccgttttgatggctttttgactgctacctccttgggtttttgcactgtgtgcagtaact

SEQ ID NO: 273240 - DNA, 574 bp, Homo sapiens
tgtaggccttgctaagctgttgtgggctccatgtagttcatgcttcctggcctctttgtttacaccgtgagctactcaagcctgagcaatggtggatgcccctccccgcaccaatctgcagcatcacaagttgatctcagactgctgcattagctgtgagcaaggctccrtgggcgtgggacttgccgagccaggcatgggagaatatctcctggtctgctggttgctaagaccacacaaaaagcacagtaattggtcaagaatataccatttctccgggtacagtctgttcacagcttcccttggctaggaaagggaaatcccccaaccccttgcacttcctgggttaggcgatgccacaccctgcttcagctcaccctccatgggctgcacccactgtccaacccgtcctagtgagatgaaccgggtacctcagttggaaatgcagaaatcacctgtgttctgtgttgatctcactgggagctgcagactggagctcttcctatttggccatcttggacacatccacttatccactttgactcttctgataatgttgctgatcctttgtttt

SEQ ID NO: 273241 - DNA, 552 bp, Homo sapiens
attaaatcataagagtctctgctctcatgaatggattaatgcccttataaaagaggctacaaggggagtttgatctcttgccttttcatccttctaccatgtgaaatcacagcaataaggcatcatcatagaaacagagagactggctgggaccttactagaccctgaacttggcagcattttgatcttagacttccagcctgcccaactatgagaaagcaatttctatggtttataactaatctgtggtattttgttatagttgcataaacagattaagacagaaacaaaaactgaaacatgattttatagattgcatttttgctccttctttgtactctaggagatgagagaagagcaaagtatgttgcttggcaagactcatagtgaaacttgcttacaattgactataatttggttcctttggttccttgaagcacaacaactatgaaggttactggcatgagtgttggccatgggtccaagcactccactttcagaatgttcagtaagggacccctcargcaactcattggggatcttgtccttaca

SEQ ID NO: 273242 - DNA, 568 bp, Homo sapiens
atttggggggcgaaatatctctctgtctgtcacaagagaataggatttgcctgtcatctgttttcatcagaatgcatttgcaaagatatattttttcctgcacttctgcctctgaaagcaaagtaatacagtgggttcagtatagtcattgtactttttcctgcatttctgcctctgaaagcgaagtaataccacgggctcagtgtagtcattagtactgttgccaaatatttctggttctctgcttcttgacacatgacaggattgcactttctgactcctttttggttgtgtggggttgtgaaagtcgttttggctaacaagttatgagtggaaaggaagcaggacacttctatgttgagccaaagtgagacacactctggaactcagttacccgttgcytaagtcaccagctgtatgagtttcctaaggctgccataacaaattatcacaaactatgtggcttaaaacaacagaaatttagcctcctatagtttagaagaccaagagtacaaagtgaaggggttaaaagtgttggttctttccagaggctccaagggagaagcca

SEQ ID NO: 273243 - DNA, 568 bp, Homo sapiens
atttggggggcgaaatatctctctgtctgtcacaagagaataggatttgcctgtcatctgttttcatcagaatgcatttgcaaagatatattttttcctgcacttctgcctctgaaagcaaagtaatacagtgggttcagtatagtcattgtactttttcctgcatttctgcctctgaaagcgaagtaataccacgggctcagtgtagtcattagtactgttgccaaatatttctggttctctgcttcttgacacatgacaggattgcactttctgactcctttttggttgtgtggggttgtgaaagtcgttttggctaacaagttatgagtggaaaggaagcaggacacttctatgttgagccaaagtgagacacactctggaactcagttacccgttgcctaagtcaccagctgtatgagtttcytaaggctgccataacaaattatcacaaactatgtggcttaaaacaacagaaatttagcctcctatagtttagaagaccaagagtacaaagtgaaggggttaaaagtgttggttctttccagaggctccaagggagaagcca

SEQ ID NO: 273244 - DNA, 575 bp, Homo sapiens
caggcctgaggaagggatgagggcttggtactgcgcagtcagaagttttaccagccaggccttcagaaagaaatggtcaatgtgctggaactcaaggatgagctcaaatacaatcacatttttaaaaatgttgacatagacaaaccaggttgaaatagataaacctggtctcaatctcagaagtgagactatggtgaaaaatgatatgcaaaagtatgttaaacatatacagaaattaaaatgtgcagaaaaaggaattggtcaaggaaatgttcattccatgttacaatggacccgctcctctcagtctgcaaagcaggttgatttctgttactccacagcttccaggcggctctgagatgtcaaaagacttttcctctagaagacctgscccctcactgttgatttcactgatgttacaagataacaacctggacagagagcaaaccaaactcatgccagacagagaggggcgtatccacatctgggagaaccaattaactccctgttagcaaccatccaccatccacctccccttcttcaaacagtaaaatccatacacctggcccctgccc

SEQ ID NO: 273245 - DNA, 572 bp, Homo sapiens
catacataattccaggcatcatgagtatgtctgtagggtaaatttctggaaaatgaaattgctgaatcagagagtatttccatttataattatggtatatattgtttaatcacaattgatatagtttctaytaatttataatcccagtaacaagatgtgagtaccacttcaaactccacatcactggcagtgcttgaagtcatgatgcatattgccagtctcccttcaagtaaagttctattagctttacaaaaattttataaatgccagacgttacatttccagatagctttgtggtaaccaaaaaataattgatttattagcaatttgtatatcacattgagacaaaatatatttgtgataaatatcattattgttatgtatttaaaacatctcatgtattaagaaatcatactttagatggggccaaactggccgattagaagcaactgtgtctcatggctctcacagagagcaatgagaactgtgagtgaattctgcaccttcaattgaggtattcaggttcttgcattggaactgactaggcagacagctcgacccacagagagtca

SEQ ID NO: 273246 - DNA, 572 bp, Homo sapiens
catacataattccaggcatcatgagtatgtctgtagggtaaatttctggaaaatgaaattgctgaatcagagagtatttccatttataattatggtatatattgtttaatcacaattgatatagtttctactaatttataatcccagtaacaagatgtgagtaccacttcaaactccacatcactggcagtgcttgaagtcatgatgcatattgccagtctcccttcaagtaaagttctattagctytacaaaaattttataaatgccagacgttacatttccagatagctttgtggtaaccaaaaaataattgatttattagcaatttgtatatcacattgagacaaaatatatttgtgataaatatcattattgttatgtatttaaaacatctcatgtattaagaaatcatactttagatggggccaaactggccgattagaagcaactgtgtctcatggctctcacagagagcaatgagaactgtgagtgaattctgcaccttcaattgaggtattcaggttcttgcattggaactgactaggcagacagctcgacccacagagagtca

SEQ ID NO: 273247 - DNA, 572 bp, Homo sapiens
catacataattccaggcatcatgagtatgtctgtagggtaaatttctggaaaatgaaattgctgaatcagagagtatttccatttataattatggtatatattgtttaatcacaattgatatagtttctactaatttataatcccagtaacaagatgtgagtaccacttcaaactccacatcactggcagtgcttgaagtcatgatgcatattgccagtctcccttcaagtaaagttctattagctttacaaaaattttataaatgccagacgttacatttccagatagctttgtggtaaccaaaaaakaattgatttattagcaatttgtatatcacattgagacaaaatatatttgtgataaatatcattattgttatgtatttaaaacatctcatgtattaagaaatcatactttagatggggccaaactggccgattagaagcaactgtgtctcatggctctcacagagagcaatgagaactgtgagtgaattctgcaccttcaattgaggtattcaggttcttgcattggaactgactaggcagacagctcgacccacagagagtca

SEQ ID NO: 273248 - DNA, 380 bp, Homo sapiens
ggcttctatatgtttgatggaggaaaagacaaaatagggacaacacgtaattgattacccttttaatgcaagtacctcttaatattaggcttttcttagctggggctgaactccccctgccagtccaagcaccccataagaacacaatgagactccttccagttctggtgaggtgtgcaacatgttattaatttcttctagttttccagggttatctagtgtccagtcatcatcttctccctgccctttgagtcctgtcttacgtacacaccccactctcgaaacacycgaacttcaccagaacaacatgcagtggggcctcttatcagctagcaaagctgaatgtttgccctctctgggaagtgacagatgataatagg

SEQ ID NO: 273249 - DNA, 594 bp, Homo sapiens
tttctccgcagactctgcgaggtcagcagccttgtctccaccatcccttcaatgcacagcacataacacagaagctgactccataacatttagttggccaactgagactaaatatgtgttmctctagatcttaaaaagttacagaaacatagcacaatagacaaaaaaattctctttagtcaggagttctccatatatatacaacagtttgaagtcattattaaacaacatgaaacagaaactgtcacagaattccctaaattattttgctttaatcttcaattcatcatgtgagataatgaagaccttgtgtcattgtaaatttttctagcttacgacataacaacctgattttattgtttgaaataaccgtaatataaatcagttaactaaaaatggcataaataatcctttcaaataaagttctaccaaattttacattactcatacgttcaaatgataatgagctcataggcttttccaatacctcagtcaaaacattgtactgattccagctgtgggaatagtatgggaaagttattttacagatggggaaaaggtacctacgtgacattggtctttgcactactgtgc

SEQ ID NO: 273250 - DNA, 584 bp, Homo sapiens
ggccttggctgcgacatctgcaaggacatttccttctacatggtcagtctctcttttgaagtcatctgcaattaattatastcactttttggcagcaaagcagcattcaaacaagctcaaaatctgaatgatgttgtatggaaaagcccttgggggtcaggagtccctacccattccaaattgcagcataagtatgaagcactaaaaaatcatacttggaatcagtgtaaatgttaacttttaaatcctttcccaactgcaggggctgagtaagttcaattaactcagctttttgtgctgaggtagaggccagcaagacttatgccttgattctcttgtgctgactactaatagcatatctaccactcctgttttcctgatgtataaaacaacatacatctgttaaccactcttccttgggatggtcaaggggctcatctctcttaagtctggcccgctagaataaatgtgtttcataacctgtgacaggctttggctgtgtcccagtcaaatcttatcttgaattgtagctcacataattcctatatatcgtgggagggatccagtgggaggtaatcgaatcg

SEQ ID NO: 273251 - DNA, 586 bp, Homo sapiens
atctctaacacccatagcttactgcgggtttgaactgctccaaagtaaaacttataattaaatcctgttgagttaacattcrgaagacctttcctaagcacagatctcctaatagatgaaaagactcatcaattacaaaaatatgtcatcaatctaggacaagtgcgaagacactctgtgaatatggatacaagagtcttcccctcccacatgggaggaaaattcagtttcagctcagctagggatttagtcttactaaagatgtgggaggaagttctccagctgaccagctttccccaacatggaaaggaccacagcaaggacacgtgagctctccaacagacgttcaacgccaagggattcacaggtgggtacacctgtgtggaagtaaagctgttacttattcttggagccgaatccgaggctgagggaggtgggcgccgggctatttcagcgttggtggagtgtgggctgggtagctgcgcgtctgctactccttctcgcgtttctcctgccgctgtaatcccgccttggccatgagggaaatcgtgctcacgcaggccgggcagtgagggaaccagatcgt

SEQ ID NO: 273252 - DNA, 586 bp, Homo sapiens
atctctaacacccatagcttactgcgggtttgaactgctccaaagtaaaacttataattaaatcctgttgagttaacattcggaagacctttcctaagcacagatctcctaatagatgaaaagactcatcaattacaaaaatatgtcatcaatctaggacaagtgcgaagacactctgtgaatatggatacaagagtcttcccctcccacatgggaggaaaattcagtttcagctcagctagggatttagtcttactaaagatgtgggaggaagttmtccagctgaccagctttccccaacatggaaaggaccacagcaaggacacgtgagctctccaacagacgttcaacgccaagggattcacaggtgggtacacctgtgtggaagtaaagctgttacttattcttggagccgaatccgaggctgagggaggtgggcgccgggctatttcagcgttggtggagtgtgggctgggtagctgcgcgtctgctactccttctcgcgtttctcctgccgctgtaatcccgccttggccatgagggaaatcgtgctcacgcaggccgggcagtgagggaaccagatcgt

SEQ ID NO: 273253 - DNA, 590 bp, Homo sapiens
ttgtccctcacataggattccagacactgctgctgggttctaaatgtttgtcacataggattccagaacactgctacaagggtctgaatgtttgttcctcacaggggattccagaacwctcctgctgttgtctgaatgtttgtccctcacataggattcctgaacactgttatgagggtctgaatgtttgtccctcacacagaatgccagttttcccagccctatttattataaaaactgtcttattttttattgtatattcttggcacttttgttgaaaattaattcagctgtatgagtttgtttctaaagtctctatttcgttccatctgtctttatgtctgtttttatgctagtgtcatgctgttttaattattataacttagtagtataatttaaaaacaggtaatggaattcctccagttttgttttatatactcagcatagctttgactattatgctgttttgtgatgtttccatataaatttcagaattttttttctatatctgtgaggaatgtcttcttcttcttcttcttttttttttagattgcatcttgctctatcacctagactggagtgcagtgatg

SEQ ID NO: 273254 - DNA, 564 bp, Homo sapiens
tgtgaacataaaaatatctttccaatttttgggtcctttttcatttcttttatcagtgttttacagttttaactgttgagaacttttatttctttggtaaattcccacacattttgttttatttgtggctactgcaaatagtattacatttttgaattctttttcagtttgttgactgttggcatatagaaatcctactgatttgtatatgttgattttgaattctgcaaatttactcaagttattacttctaatagtttttggtggatgtattaggccattgtcatattgctataaaaagtaatcagtgactggttaatttataaagaaaataggtttaattggttcatggttcttcaggctgtacagaaagcatagcactggcttctgcttctggggaagcctctgaaaactgacaaggtgaaaaataaatccggtgcttgcacatcacatggtaagtgcgagggcaaggggaaagtgctacacacacttatagataaccagctytgataaaaacttactattgtgggaatggcaccgaagtaaatgatgccaaactgttca

SEQ ID NO: 273255 - DNA, 514 bp, Homo sapiens
tcttttaggcctcagggcctgtgatggggggctgccttttagatttttaaaatgccttcaattcctctttcccattgccttggctatcaacacttgcttttttttaggttatacaaatatctctaacaagtagttgacccmtatcctgcttgagttcctctcttataaaagctttttatatttcagccacctgactaggctgcaaagttttcaagcttttacactatgcttcttttgtaagtataagttactacttattttatttttattcttttgctagaatatgtgagcataggttgttagaagcagccaggccacatcacaactgctttgctgtttagacatttttccaacagaaaccctaaatcatcaatttcgaattcaaacttttatatatccctagggcatgacagaaattcagccaaccactttgctaagacaacatgcatgacctttgtttcagtcccaataagtttctagttttcatctgagacctcctcagcccgggcttcac

SEQ ID NO: 273256 - DNA, 514 bp, Homo sapiens
tcttttaggcctcagggcctgtgatggggggctgccttttagatttttaaaatgccttcaattcctctttcccattgccttggctatcaacacttgcttttttttaggttatacaaatatctctaacaagtagttgacccatatcctgcttgagttcctctcttataaaagctttttatatttcagccacctgactaggctgcaaagttttcaagcttttacactatgcttcttttgtaagtataagttactacttattttatttttattsttttgctagaatatgtgagcataggttgttagaagcagccaggccacatcacaactgctttgctgtttagacatttttccaacagaaaccctaaatcatcaatttcgaattcaaacttttatatatccctagggcatgacagaaattcagccaaccactttgctaagacaacatgcatgacctttgtttcagtcccaataagtttctagttttcatctgagacctcctcagcccgggcttcac

SEQ ID NO: 273257 - DNA, 545 bp, Homo sapiens
ggtttttttcctagttaaatcttggtaagttgtgtgtgtctaagaattaatttcctctaggttttctaatttgttggcatacaattgctgatattatttacyaatgatcctttgcttttctgaagcattatttgtaatgtctcctttttacctctgattttactaatttgcatcttttctgttttttagttagcctgtttaaatatttgtcaattgttttacttttgaaaaaatcaacattttctttcattaattctttacattattttcgtcattttaactttatctacttctgctctaatctttattatttcttttcttctaattttgggttaggtttggtcttttattctagttaattaagatgtattgttaggttatttatttgaagcttttctgttttttatgtaggcacttacagttataaattttccttttataatagtatatatttactatattccataagtttttctatgctatgtttccattatcatttgtttcaagaaatttttctattttcttcttaacatttttatcaacct

SEQ ID NO: 273258 - DNA, 595 bp, Homo sapiens
agtttggaaatgttctttccttctctagttttcagtctggtcctacagacttttttattaaggctttaattttgttaattgttattgatctgttcaggttttaggtttttttcctagttaaatcttggtaagttgtgtgtgtctaagaattaatttcctctaggttttctaatttgttggcatacaattgctgatattatttaccaatgatcctttgcttttctgaagcattatttgtaatgtctcctttttacctctgattttactaatttgcatcttttctgttttttagttagcctrtttaaatatttgtcaattgttttacttttgaaaaaatcaacattttctttcattaattctttacattattttcgtcattttaactttatctacttctgctctaatctttattatttcttttcttctaattttgggttaggtttggtcttttattctagttaattaagatgtattgttaggttatttatttgaagcttttctgttttttatgtaggcacttacagttataaattttccttttataatagtatatatttactatattccataagtttttctatgctatgtttccatt

SEQ ID NO: 273259 - DNA, 535 bp, Homo sapiens
tacaattgctgatattatttaccaatgatcctttgcttttctgaagcattatttgtaatgtctcctttttacctctgattttactaatttgcatcttttctgttttttagttagcctgtttaaatatttgtcaattgttttacttttgaaaaaatcaacattttctttcattaattctttacattattttcgtcattttaactttatctacttctgctctaatctttattatttcttttctyctaattttgggttaggtttggtcttttattctagttaattaagatgtattgttaggttatttatttgaagcttttctgttttttatgtaggcacttacagttataaattttccttttataatagtatatatttactatattccataagtttttctatgctatgtttccattatcatttgtttcaagaaatttttctattttcttcttaacatttttatcaacctactaatcattcaggagcatgttgcttaatgtccatgtgtttgcatagtttcttaaattccttttttaat

SEQ ID NO: 273260 - DNA, 545 bp, Homo sapiens
ggtttttttcctagttaaatcttggtaagttgtgtgtgtctaagaattaatttcctctaggttttctaatttgttggcatacaattgctgatattatttaccaatgatcctttgcttttctgaagcattatttgtaatgtctcctttttacctctgattttactaatttgcatcttttctgttttttagttagcctgtttaaatatttgtcaattgttttacttttgaaaaaatcaacattttctttcattaattctttacattattttcgtcattttaactttatctacttctgctctaatctttattatttcttttcttctaattttgggttaggtttggtcttttattctagttaattaagatgtattgttaggttatttatttgaagcttttctgttttttatgtaggcacttacagttataaattttccttttataatagtatatatttactatattccatargtttttctatgctatgtttccattatcatttgtttcaagaaatttttctattttcttcttaacatttttatcaacct

SEQ ID NO: 273261 - DNA, 459 bp, Homo sapiens
tcataatatttgcttcatttatctaggtgctttagtgttgggtgcatatatattttcaattattatatcctcttgatgaattgatctctttattattatataatgaccttttaatttcttcctacagtcttttgtggaaatctatttttgtctggtrtaagtatggctatttctgctttttttggtctctattggcatgggataactttttccatccttttattttcagtctaaatgtatctttgtaggtaaagtatgtttttttttgtgggtcacagattattgtcctgcttctctatccattcatccactatttttcttttgactggagtatttagttcatttaaattcaatgttatcagtgataagcacttactcctgccattttttaatttgttttctgattgatttttgtcctctcttccttttttcctttcttcctgtcttccttttagtgaa

SEQ ID NO: 273262 - DNA, 459 bp, Homo sapiens
tcataatatttgcttcatttatctaggtgctttagtgttgggtgcatatatattttcaattattatatcctcttgatgaattgatctctttattattatataatgaccttttaatttcttcctacagtcttttgtggaaatctatttttgtctggtataagtatggctatttctgctttttttggtctctattgkcatgggataactttttccatccttttattttcagtctaaatgtatctttgtaggtaaagtatgtttttttttgtgggtcacagattattgtcctgcttctctatccattcatccactatttttcttttgactggagtatttagttcatttaaattcaatgttatcagtgataagcacttactcctgccattttttaatttgttttctgattgatttttgtcctctcttccttttttcctttcttcctgtcttccttttagtgaa

SEQ ID NO: 273263 - DNA, 459 bp, Homo sapiens
tcataatatttgcttcatttatctaggtgctttagtgttgggtgcatatatattttcaattattatatcctcttgatgaattgatctctttattattatataatgaccttttaatttcttcctacagtcttttgtggaaatctatttttgtctggtataagtatggctatttctgctttttttggtctctattggcatgggataactttttccatccttttattttcagtctaaatgtatctttgtaggtaaagtatgtttttttttgtrggtcacagattattgtcctgcttctctatccattcatccactatttttcttttgactggagtatttagttcatttaaattcaatgttatcagtgataagcacttactcctgccattttttaatttgttttctgattgatttttgtcctctcttccttttttcctttcttcctgtcttccttttagtgaa

SEQ ID NO: 273264 - DNA, 459 bp, Homo sapiens
tcataatatttgcttcatttatctaggtgctttagtgttgggtgcatatatattttcaattattatatcctcttgatgaattgatctctttattattatataatgaccttttaatttcttcctacagtcttttgtggaaatctatttttgtctggtataagtatggctatttctgctttttttggtctctattggcatgggataactttttccatccttttattttcagtctaaatgtatctttgtaggtaaagtatgtttttttttgtgggtcacagattattgtcctgcttctctatccattcatccactatttttcttttgactggagtatttagttcatttaaattcaatgttatcagtgataagcacttactcctgccattttttaatttgttttctgattgatttttgycctctcttccttttttcctttcttcctgtcttccttttagtgaa

SEQ ID NO: 273265 - DNA, 508 bp, Homo sapiens
tttatttttacttattttttgttattattattattattattaatcattttgaggcagactcttgctctgttgcccaggctggagtgcagtgcaccaacttggctcactgaaacttgcgcctcccgggttcaagcaattctcctgcctcagcctcccaagtagctgggattacaggcatgaatcaccacacccagctaatatttgtatctttagtagagatggggtttcactctgttggccaggctggtctcaaacccctgacaacaagcgatctgcccaccttggcctcccaaattgctaggattacaggcatgagccaccactcccagccacaatgaggtttttcaataattctgatttcctgctsttgagcagggagctgagcaaattcaacagatcatgggcctgaactaggggaagactgaggacaaagtctagaacacatgtgattaaattaattacaatggaaaccaaatcaaattgaataatgctctacctcttagtttca

SEQ ID NO: 273266 - DNA, 411 bp, Homo sapiens
ttaaaaatccttcttttttccatttatagaataaaaaaaaaatttctaaacccctgttgactaaatggacctctcttcttggataagcaaattccaaagttaacctgaaaagctagttcaagccatggktcacacatgcctcattatactctcctccctttggttttaattttaatttaaatttcaatttttaatttatttttgtgggtacatagttgttgtatatatttatgggggtacataacatactttgatgcagtcatgcaatgagtaatacataataaaaaacggggtatctgtcccctcaagcatttatagcttgtgttataaacaatccaattatactcttttagtttttttacatgtggaattaaattatttttgactataatcaccctgttatgctttcaa

SEQ ID NO: 273267 - DNA, 516 bp, Homo sapiens
aaaccaaataccacatgttcttgcctataagtaggatctaaacatggggtactcatgaatataaagatgacaacaatagacactgagaactactagatgaaggagggaaggaggagggcagggggtgagaaacgatgaktgctatgcttactgcctagctgatgggatcaattatatcccacaatatatgctcactaccttggtgatgggatcaataatatcccacatggctcagcatcacacaatatatccatgtaataaacctgcaaatatactccctgaatctaaaaaatttaaggcagagacagaataagagggcagaatagaagcctacattctcatccaccacacaaaaacaccaaattttcacaactcactacattcaagaagcactgtcaaagggaccaaaaattgggtgagcaatcacagtacctggtattaacttcatatcacagaaacagacattggagaagacaaacaaataaaagacggtctagaagcaaggatgccacctct

SEQ ID NO: 273268 - DNA, 545 bp, Homo sapiens
gtgtcacaatgtggctgccgaatctgaagtgggtgttacctttagtgggcttgttaccaggagcacgtgtggttgtgagttctgtcatgtttttgggcaggctggattgtcttcagggctttgttttgtggagcaggcactagggcaggttctgctatatgctgggcctaatagcagatgtgtgggtgagtgtggctcccactgagtacctagcaggttttccccaggttatctacaaacagtgacttttgaactgttttgtgtgagtcacgagtatgatgtccccagcttttttcttattcctcatgattggcttggccattcagcctacattgtaggcttgcattttctattactataaaaaayggaacagggattttgatagggatttgatttaacttacagattgctttggataatatgataccttattaaccaaaggccctgccttctcaaaatggcccttttcgatcttgggttttagcaaggtttcataatgccttgtatcccaaagcttactatattgcacaggctgtttttgaact

SEQ ID NO: 273269 - DNA, 618 bp, Homo sapiens
ttgggttttagcaaggtttcataatgccytgtatcccaaagcttactatattgcacaggctgtttttgaactactggcctggcagtcctcccgcctcaggctcctgaatcgaggagattactgtcatgagccactgtgcctggatctctcataaagttactttcgttgatggatggctgactagtttttattgctgcaggggaatacaacagtagagaccccctattccaccaccttgataatgtcactctctccatacacttcttccttattttgttctcttgtatgtttgtgtgttattttaggttcaaatattaagaccaataggctaggatttatacattctgtaaaaagtaaattagatagctagtaggtaccatatatatatcataatgtttacccataagattaagtttagtgcaggcaaaaaggactcattaaaattttcatccacttttttcaacctctatccaaactataatttatggcccaatttttattttatcaattacccttaaccatatttcataaaatttacattttttctttatttagaaatgtgaggctattatttgcttttaaaggctgtaatacagcttttttattttgtgaaataat

SEQ ID NO: 273270 - DNA, 634 bp, Homo sapiens
accatatttcataaaatttacattttttctttatttagaaatgtgaggctattatttgcttttaaaggctgtaatacagcttttttattttgtgaaataatagtaccaatattataaatattcatagtgtaaatacttattcattaaaatcttcccattagagaattttattaattattgtagtgcatttctgtaaaattgtaccgccacacaccacagggcartgattcaaagtgcctcgtcttcacagatgcacagtcacagttgaacattgtagttatttagaaaaattcttttctagtgttatatcaatgttccaaacaagattttatgggaaaatatttctcccattctagttttgcaattccatgttaactgtatttttattttagggtagattccttgacattggtttatactatatttggttttacctaagtattattttggatgactgtgtgcagcaacttttaacgtacagtttatgtcaatgtgcagtttaattacaatatgaatcagccatatatttattcacaattcaagtttaacaaacttaatgaaaactaagcaaactaacgttacatgataaagccccaatcagctatcttatacttaagcaaatacaccaaaaaat

SEQ ID NO: 273271 - DNA, 391 bp, Homo sapiens
gactgtctactgctcatgcgcgggctagcaggcagtagcctaggttttctaactagcctaggtagagttctcatcccttccctcttgccccccactgcgttcttcagtggggtgggmggagacctccatcccgggaaacactggcccgggcaggcgccagatctgctcttctttccgcgtctctccaactctgcctcccccccacaccgtcactcgcctacccttgtcccgccagcttcctcggcatcaccatggagcgcctgacagctaaatgcagacccgagaccccgcgcaaacccgggtgctgccctttctatgcgggagggaactcaggcagagatggggagaggaacggagacagagagggagggagcgatgaagggaagaaaga

SEQ ID NO: 273272 - DNA, 391 bp, Homo sapiens
gactgtctactgctcatgcgcgggctagcaggcagtagcctaggttttctaactagcctaggtagagttctcatcccttccctcttgccccccactgcgttcttcagtggggtgggcggagacctccatcccgggaaacactggcccgggcaggcgccagatctgctcttctttccgcgtctctccaactctgcctccccsccacaccgtcactcgcctacccttgtcccgccagcttcctcggcatcaccatggagcgcctgacagctaaatgcagacccgagaccccgcgcaaacccgggtgctgccctttctatgcgggagggaactcaggcagagatggggagaggaacggagacagagagggagggagcgatgaagggaagaaaga

SEQ ID NO: 273273 - DNA, 568 bp, Homo sapiens
gaataatatcagaacttcccaaatctagagaaagatattgacaattaagtacaagaaagttatagaacaccaagcagagttaacccaaaagaagactacctcaaggcactactaatcaaactcctgaaggtcaatgataatgaaagaatccaaaaagcagcaagagaaaatgaaaacataacatacaatggagctcccgtacctctggcagcagactttttagtggaaatctaaaaagagccaggagagagtggcatgacatatttaaagttctgaatgaaaaaaaaaatcaccctagaacagtatatccagtatgaatacccttcatgcatgagggagaaataaagaccttccaagacaaacaaaaamtgagggatttcatcaatatcagacctgccctacaagtaatgctaaagggagttcttcagtgtgaaagaaaatgatgttaacaagcaagaagaaatcataagaagctacaaaacttactggtaatgataagcacacagaaaaacacaatattgtaacattgtaacgctgatgtataaagtactattatcttaagtacaaa

SEQ ID NO: 273274 - DNA, 553 bp, Homo sapiens
taattaaaaaaaaaaacctggattctagttcaagctctggctgaccataaaaacttggtcaaataattcctagtttgttccctgataatttttcttttaatttaagagacaaggtctagctctgttgcccaggctggagtgcagtggcacgatmatagctcattgtagtcttaactcttgggctcaatttaccctcctgcctcagactcaattagtttatagaaaagccatatgttctgttaatactatctcaagagtttccaatagtatcacatctaagactgcactggccaccagaaatgttaaacacaaatctatgcatgtctaggcaagaaaatatatgtattattatgaatatgtattcatacataatatactatgaatgtgtatatatattcataaaagttgtttgtaaatgagaagtaaggttttatgaagtggttctaactttttctcactttgtctagagcttgacttcagcaccttttatcatgtaattattagtttctttgccaatcttccccacaagtcaatggctttgtcaaagttttgg

SEQ ID NO: 273275 - DNA, 553 bp, Homo sapiens
taattaaaaaaaaaaacctggattctagttcaagctctggctgaccataaaaacttggtcaaataattcctagtttgttccctgataatttttcttttaatttaagagacaaggtctagctctgttgcccaggctggagtgcagtggcacgatcatagctcattgtagtcttaactcttgggctcaatttaccctcctgcctcagactcaattagtttatagaaaagccrtatgttctgttaatactatctcaagagtttccaatagtatcacatctaagactgcactggccaccagaaatgttaaacacaaatctatgcatgtctaggcaagaaaatatatgtattattatgaatatgtattcatacataatatactatgaatgtgtatatatattcataaaagttgtttgtaaatgagaagtaaggttttatgaagtggttctaactttttctcactttgtctagagcttgacttcagcaccttttatcatgtaattattagtttctttgccaatcttccccacaagtcaatggctttgtcaaagttttgg

SEQ ID NO: 273276 - DNA, 505 bp, Homo sapiens
tcaccaccttcttgatgtcatcatatttggcaggtttttccagatggtaggtgaggtccaccactgacacgttggcagtggggacacggagggccatgccagtgagcttaccattcagctcagggatgaccttcctcacagccttggcagcccagtagtggcagggatgatgttctggagagccctgtggctgtcacgccacagtttcctggagggkccattcacagtcttctgggtggcagtgatggcgtggactgtggtcatgagtccttccacgataccaaagttgtcagtgatgactttggccaggggcgctaggcagttggtggttcaggtggcattgctgatgatcttgaggctgttgtcgtacttctcatggttcacacccatcgtgaacatggggggatcagcagagggggcagagatgatgacccttttggctccccactgcaagtgagccccagcattctccatggtggtgaagatgccagtggactccatgaca

SEQ ID NO: 273277 - DNA, 609 bp, Homo sapiens
gacaaaacctaaatttacgaggggatcacatgggaatctgagaaatgtaatttttagttccccaaactctgtaatactgaaggaggggagaatgagaacacatcaaagggaaaggaatggattcgtagtgcccataaacagctactacactaacctaaagatgacgcctgatttctgaagtagttaatatttggggtagacttcaggatgtaagctccaaatctcaacttttaacgataaattagaaatttgttacccaaattcatctggctgctctttttcctcatgagttcccatattacttttatttctggaggaaagattaggtaccactttacaagggctggcagtaataattcaagcataacaaaaacaaatgttgaataaatatagctttgaaaagcagcttttcttttgygattatgtctttatgacatttttactgagatctgaaatcacaatatattggaaacctaactgtatcatgtacaactgacaaaccctaactatataatatgcttataaaaattgtaaatgtatttgatccccagatttattaattagaacacaagccacactctcaggtgaggtgtgactgttgctaacata

SEQ ID NO: 273278 - DNA, 586 bp, Homo sapiens
ttaaacaacatgctcctgagtgaccagtgagtcaatgaagaaattaaaaaggaaattgaaaaaaaatcttgaaacaaatgataatggaaacacaacataccaaaacctatgggatatagtgaaaggagtactataagaagagacaaagagggaaatttacagctataactgcctatatcaaaaaagagaaaaaaatcaaataaattccaaacaatgcatcttaaagaactagaaaagcaagaacaggttgaactccaaatcagtagaataaaatacaaacgatcagtgaaacaaaaagtgtgttatttttaaaaagataaagttgacaaycttaaaccagaccaatgaagaaataaagggataagacccaaataaataaaatcagagatgaaaaaggagacattacaactgataccagagaaattcaaaggatcattagtggctactatgagcaactataggccaataaattggaaaatgtagaggaaatggataaatccctagacacataaaatataccaagattgaaccatgaagaaatagaaaacctgagcataccagtaacaagattgaaaccataatgaaa

SEQ ID NO: 273279 - DNA, 586 bp, Homo sapiens
ttaaacaacatgctcctgagtgaccagtgagtcaatgaagaaattaaaaaggaaattgaaaaaaaatcttgaaacaaatgataatggaaacacaacataccaaaacctatgggatatagtgaaaggagtactataagaagagacaaagagggaaatttacagctataactgcctatatcaaaaaagagaaaaaaatcaaataaattccaaacaatgcatcttaaagaactagaaaagcaagaacaggttgaactccaaatcagtagaataaaatacaaacgatcagtgaaacaaaaagtgtgttatttttaaaaagataaagttgacaatcttaaaccagaccaatgaagaaataaagggawaagacccaaataaataaaatcagagatgaaaaaggagacattacaactgataccagagaaattcaaaggatcattagtggctactatgagcaactataggccaataaattggaaaatgtagaggaaatggataaatccctagacacataaaatataccaagattgaaccatgaagaaatagaaaacctgagcataccagtaacaagattgaaaccataatgaaa

SEQ ID NO: 273280 - DNA, 556 bp, Homo sapiens
tagcaaactgaattaaacaatacattaagatcatccatcatgaccaagtggaatttataccaggcattcaagcatggttcaacatatayaaatcaatcaatgtaatacatcatatcaacagaatgatgtattacagaataaaatccacattattgtttcaattgatgctgaaaatcatttgataaagttcagcatcccttaataatcaaaaccctcaaaaactgagtatagaaggaacatacctcaacataataaaagtcgtatatgatagacccacagcaagtatcatactgaatagagaaaaactgaaagcctttcctctaagatctggaacatgaaaagaatgcccactttcaccactgttttcaacgtactactggaagtcctagcaatctaataagagaaagaaataaagggcatccaaattggaaagaaagaaggcaaattatccttatttgcagatgacatgatcttatgttccgaaaaatctagactccctaccaaaaaactattagaactgacaagcaaattcagtcaagttgcatgatacaaaatc

SEQ ID NO: 273281 - DNA, 556 bp, Homo sapiens
tagcaaactgaattaaacaatacattaagatcatccatcatgaccaagtggaatttataccaggcattcaagcatggttcaacatatataaatcaatcaatgtaatacatcatatcaacagaatgatgtattacagaataaaatccacattattgtttcaattgatgctgaaaatcatttgataaagttcagcatcccttaataatcaaaaccctcaaaaactgagtatagaaggaacatacctcaacataataaaagycgtatatgatagacccacagcaagtatcatactgaatagagaaaaactgaaagcctttcctctaagatctggaacatgaaaagaatgcccactttcaccactgttttcaacgtactactggaagtcctagcaatctaataagagaaagaaataaagggcatccaaattggaaagaaagaaggcaaattatccttatttgcagatgacatgatcttatgttccgaaaaatctagactccctaccaaaaaactattagaactgacaagcaaattcagtcaagttgcatgatacaaaatc

SEQ ID NO: 273282 - DNA, 445 bp, Homo sapiens
catgttcatggattggaagaatgaatattgttaaaagttcatactatacaaagcaatctacagatttaatgcaatctatttaaatgccaatgacattcttcatggaaatagaaaaaataattctaaaatttatacagaattacaaaagactcagaatactcaaaactatcctgagcaaaaagagcaaaactraggaatcacattacctgacttcaagttacaccacagagctatagtcaccaaaacagtatggtactggcataaaaacagacacatagaacaatgcaacagtatagagaacccagaaagaaatccatacacctacagtgaactcatttttgacaaaggtaccaagaacatacattggggaaaacacagcctcttcaataaattgggaaaactaaatatctctgcagaagaatgaaacttgaccccaatttcttca

SEQ ID NO: 273283 - DNA, 631 bp, Homo sapiens
ctatttttgcaatttttcagtctgtaaggaccagagaagaagggtatatacttgtacagtcaccgactgaaatgcagcacccgtggatcccatgttatattataccaaaaaacctatcccagctgcacacaacagacatgaccagggtagattcaaaggaaaagaaacaaggcttgaaactcaacactgcagcacttagcatggtagggcacagaaatctctaacagagggtgcatctgtctataagacatagacccctgcaggatagccagtactgagatcagtttcccaagcaggacttyccctaaaccagaagaaacaatctcaaacacccattatcgtaagtccagcagatactacctctttaataaccatgtttaatgcaaaggactttctacagaatctgagatttggcccatcagatgaagagcagaaactaggctgccaatgaaatgaaaataaaatgaaactataattcagagaagataagcacagatgcagccagagggcactacagttagttgtcaccatttcttacagagtagtagaccagtaccttaagtatataagtgtatgactgaggctgggaagtggtgggaccaggttttgcagtttttgtacagttttgaat

SEQ ID NO: 273284 - DNA, 556 bp, Homo sapiens
cttgatctaaaggctgaaactcaagatttaggaatttaccagaacatacaaatgaaaaagatcacagactgatcttttataagacattatttgatgctttgtgtttcaaagggataatgactcttatctgtgtaagcaaacttactggcttacaattgtattttaatatttaccttctagtttgtaatggagaatgtatattttttgaaagttttttccccattggttaaattagcattacttaaaatttatttcttttgaaaataaatacagggtagaaatttgtgtatatttagagggtatacgtctctctaagccccctcgcttctgatttttcattgctttctagttccttttactgaaaatactatgttgtcaatggtaacaaactttagtctctgaaacttccaraaccaagcaaaggaatcttaatgaattaaaatgtcagcctgcgtgtatattttacctacactttaatcaagaacaagtctttggcagtagaagaaatactcggccttcctaagacttatttacttataatgaatacatttaatga

SEQ ID NO: 273285 - DNA, 597 bp, Homo sapiens
tacactctattgtaccctcagtgcttatggcagtgcctggcccatggtgggcctcagtaaatacctgcagaaggtaaggctgggagcactgtctgcttcttttgtgctgctttcctggtttctctcctctcttactcaaatgacctcatttgagtgatctggcttatgtgtttagttagaaactcattaaaatattttatgccaacaaattctctaggaatgtaatcttgttaatccattcattcattaattcatttattaagatcatatagttgaaggcctatagtgtctcctgactcaaatatatggcccagaaacaatactcagcgtgtatttcaactataagataatgagatgtcatttaaataaccactctaggctaagccattgggtacagaggccagcggggaaaagggataagttaggaacagtcagggttgagatcaggaaccaactttgccattgaacatgcrtgggaggggtggcctgccttccaaatcacaaaataaaagggatccaaccaagctggcagctttatccagggtcttctgtggtgaacagagtgccacagagcaccctgcagacggggtaatcatc

SEQ ID NO: 273286 - DNA, 621 bp, Homo sapiens
tattcaaaatgatccatgagggagaaaacaaaatattggagctttcattaatatttatttcatccttcctctaaataaatttttctttatgtattgtagtattcacaatatgttcaactagtatactacttgcgtataccttataaataaatcaatatttcttgggaaatgcatactcaaaatttttactgatagctctgtgtgatatgctcattagggtttgtagatcattggtctaagaaatgaaaataaccaatataaagtcaagaaattaatcaaattttccactcatggaagaaaattttctggtgctaatgtatggttaatgttgaagtagagagctgtacataacacaaaaagataactctccctctaggagaaaaaagatatttattaagtttatagaaaaagataacartttcacacataaattatccgattgtattgttaggaaaaaaacaatgtcctttcatataaattacattctccttacctggaaggcctacatggctatatttgtatgtgttgattatcgggacactcattgttatatttgagcctgtagtcaaatattcaagcaagaacccttaatgtctaacatcaatttatttagcacttgat

SEQ ID NO: 273287 - DNA, 615 bp, Homo sapiens
taaaatctcagcttccaaattaaattagagaaatgatttcctaccatttcattatttgcaaggcacattgtactctggtccacaaactggaaatgaataaagcagtcaaatatgatgatattccacaacagtggaaagattcaggtaacaggatctggaatctgaaggtgggctataaatgaaaggagagggagttaggacatgatattatgaagaaataggaatagacaatggtttcaggtcagcagttaccttcaggaaaggctgaggagtatatyacaggaataagatgtgcaagagtaggttgcagtcaggcagcaagggagtcaggcagcagttcaaagaaactcaaccactgggctaggtactcttggggccaggtgacaattttggaaagagaatgacaaatcctccctatacaaaaggactagagtcatcaacagtttgtcaaaccaaaggattaactaaaatctcagttatcagaacagaaatccaattattctgagtatattataacacataatggaaaatagactagcaaaagtctcaaaacaaaatctttcaacaactgtgtgttaaccacctacccagtggtaggaactaggactttggtat

SEQ ID NO: 273288 - DNA, 362 bp, Homo sapiens
cttaagttaaaaatgggaaaaaagtttgtttcctagggcaggggatactgggtgacaatgaaagggaaagyaaaaatggcttactcataggtcacccaggttactgaattgggctccatgcattcccttggctaaggatgtaatgcatatgataactagctcctaagggagcttgtggagggtgagggatagaagggaaaaatcaagagggagaagtcaagtatggaagactagctgggggagtcagtaaaagtatcaacactaaagagagctttttgttggtccatcttgtttccatgttaggacactttccacaggcatgctgttatatttttatagctacctcaattatcaagtacaac

SEQ ID NO: 273289 - DNA, 603 bp, Homo sapiens
tagagcagaaaggaaaagtagaccaaattcagttgatgcctacccacagagggagcatttaaaccagtcctagccagaggaaaatcactgatgccagcaggaaaccatcaatgccagcagtctgaacttgaatgcctgagtacctgcaacctcgctaccaagggccaaagggctcttggtttctaggcaaacttgaaaggcagtctaggccataaggactgcaactcttaggcaagatcctgggcagaactaggtccgagtacagtggactggggaggcatatgacatactgagacactggctggggcagccaagcaagtactagcatcatccttccactaaaccaaggctgcacagcttgttgctccaaaagagaacacttccttccacttgaggagaggagaaggaagaatgaggaggactttttgtcttacatcttgaataccagctcagccatagcaggatgtggcaccagtcagtcattaggcccygttccaggtcctagctcccaaaccacatttctcgacacaccatggaccagaagggaacctgctttcttctcctacaggtcctgccagcattcatcatctgctaactgaagag

SEQ ID NO: 273290 - DNA, 603 bp, Homo sapiens
tagagcagaaaggaaaagtagaccaaattcagttgatgcctacccacagagggagcatttaaaccagtcctagccagaggaaaatcactgatgccagcaggaaaccatcaatgccagcagtctgaacttgaatgcctgagtacctgcaacctcgctaccaagggccaaagggctcttggtttctaggcaaacttgaaaggcagtctaggccataaggactgcaactcttaggcaagatcctgggcagaactaggtccgagtacagtggactggggaggcatatgacatactgagacactggctggggcagccaagcaagtactagcatcatccttccactaaaccaaggctgcacagcttgttgctccaaaagagaacacttccttccacttgaggagaggagaaggaagaatgaggaggactttttgtcttacatcttgaataccagctcagccatagcaggatgtggcaccagtcagtcattaggccctgttccaggtcctagctcccaaaccacatttctcgacacaccatggaccagaagggaacctgctttcttctcctacrggtcctgccagcattcatcatctgctaactgaagag

SEQ ID NO: 273291 - DNA, 552 bp, Homo sapiens
agcaatctaaaaaataaaaaagtaattccacttgtaatagcctcaaataaaattaaatacctaggaattaaccaaagaagcgaaagatctctatttaaaaaaaaaaatctataaaacactgaagaaagaaattggcagacaccaaaaaaaatgaagatatttcatgtccacagattgaaagaatcaatattattaaaatatccatactacccaaagcaatctacagattcaatgcaattcctatcaaaatatcaatgacattcaccacaaaaatagaaaaaacaatcctaaaatttacatggaaccacaaaagactcagaatagccagagctatactragctaaaagaacaaaatcggagaaatcacattacctgacttaaaattatactaaaaattatagtaccgaaacagcatgatactggcattaaaacagacacacagaccaaaggaacagaatagagaacccagaaacaaattcacacacctacagtgaattcatttttgacaacagtgccaaaaacgtacactagggaaaagaaagtctcttcaat

SEQ ID NO: 273292 - DNA, 373 bp, Homo sapiens
ttggataccccattcctcatgatgtgcttatttcacattgcatgtctttatcaaaacatctaacgtatcccataaatatatacacctactaggtatccaccaaaattttcttaaaaatttaaattttagaattgagaatatgcatcatcctctaaccttctcyttaaatatgcaaagaaactgaggccaagaatgattttcttactgccataatttcagtcactaattctttcatttaacaaggacctaggccccctaaaaccagtttatattcaccactgaaacaaattgtttcccagggagctacagggaatctgtttatatcccagcaggtgagtgcagcagaggcctcacagtccacactgagagtgca

SEQ ID NO: 273293 - DNA, 623 bp, Homo sapiens
atttaatgagcaaaagctttaaaaatcttattttaaaataagatttttaaagcttttataaatctcaactttggacattttaatggagttgaaagatattgctgtaatttcagtaagggccttgatgtaagaaaatgacatccctgtgaagcccagcatgggcttcacatgarggcaagacaaaaaattaaacataactaggaggatgcctcaacaagttgaaaatgtttctgggttaagggtttgcttttcaatagccctttgctaagaagaatgctggattctagattaggaccttactacatactattaataagtcacagaatagtaaattccttctagggactgatttcagaatgctctttgatcatatcctctaccataacctttgtttatttgactttcagtagtccgagttccttgagggcaggggctgtatcttctacaattgtgtcaacaatgcctagtacagagcaagcattcaataaactctggttgaattactgaataaccagctgttctatgtgcagtttatgtcttcgtaaactcatgacttgaagcatctatctgaacattgttttagacagacacaggtgagccttacctgacaaagtcatgattgt

SEQ ID NO: 273294 - DNA, 569 bp, Homo sapiens
taatttcagtaagggccttgatgtaagaaaatgacatccctgtgaagcccagcatgggcttcacatgaaggcaagacaaaaaattaaacataactaggaggatgcctcaacaagwtgaaaatgtttctgggttaagggtttgcttttcaatagccctttgctaagaagaatgctggattctagattaggaccttactacatactattaataagtcacagaatagtaaattccttctagggactgatttcagaatgctctttgatcatatcctctaccataacctttgtttatttgactttcagtagtccgagttccttgagggcaggggctgtatcttctacaattgtgtcaacaatgcctagtacagagcaagcattcaataaactctggttgaattactgaataaccagctgttctatgtgcagtttatgtcttcgtaaactcatgacttgaagcatctatctgaacattgttttagacagacacaggtgagccttacctgacaaagtcatgattgtcatcccgaggaccactgaagcacgagccttatacagaagtcagcttaaga

SEQ ID NO: 273295 - DNA, 582 bp, Homo sapiens
ctctgtccctttatttctcagactggctgacacttagggaaaattgaaaagaacctacatgaaatatcgggggtgaattttgcctgatattgagtttctggcctgctggcctatcctatgtattttaaactttccagttctgacaatcatgtgggtcaatttcttaaaatatagctctgtaaatatatatgtatgtaatattaatatatatactgtatacacatatatgcatatataacaaattttatatccaattatacccaatagtatataaaactaattatatacataaaaccagtagaatatgtaccatgtaaatagaatatatactaattacatacataaaaccaatagaatatataccatgtctaaacatacagttagataaaaggcctaagttctttttttttttttttttttttgtgagcaacaaggctgtttatttcacgtgggtgcaggygggctgagtccaaaaagagtcagtgaagggaggtaggggtggggccgttttataagatttgggtaggtaaaggaaaattacagtcaaaggagggttgctctctggccggcagaggtgggggt

SEQ ID NO: 273296 - DNA, 588 bp, Homo sapiens
ttgccttttcaacgtagtctctcattttctccctttccattatcccatattatagtccaaattgatcaattactatttcctgtccatgaccctgtattttcatccctctgtttttaattaaactagaccctgtcacccctttaatcttcacatatctaaatcatatttatttgtcaaggcccagtccaaatgcaaccatcttcattcagtcctaattcttaattattcccagtagaaatgaaatataatttctgagctttattgagaattcagctattccttccattggccatttaacttatcttacctagttatattatttaatatatacctttctcccacaatattaatagtagtagtagcaatggcagtwgaacatttatcttatgccaaacacttctaaacatttcacttggatagcttatttatttctcacagcaaccatgtaagttaaaaaccattattataccattttacagatgaagaaactaaaataataacaattaagttgtgtctcacaaaggttacatttctagaagatgaaattactagccctcaaacttgagtagtctgactctagaactcatt

SEQ ID NO: 273297 - DNA, 572 bp, Homo sapiens
gggtcatttaatggcattgttktatagcctaaaatcaggcctaaaagatgttattatttcacgtcatttcaaactttggccttcactgttatatggtacttctcactgtgtaagatttctagacactccactgtcctagaaaataaagaacagcagaagaggtgacccttgaggagacaggttaacacagatccaagtagagtaccaggacagtagcttagaaatgcagagatgtcctgcttgtggatggtaatatgcccttgaaatcagatgttctctaaaaagaaagccaaacaaaacaaagcaatgtcatgaagcccatttcccattatttttcctatattttatataggaaaaattcccaacatatttctaaaatataattgaaatacagaaaaaatacttagcctataaccccatgattatcaaaacaatatagttgttaaaaaagaagcaattacattttacgcagtagcacttttatttccattgcaattacttcctcatttgctttgcttacttccccacaattttcatgagtaatttcttgtgtttgggggctcacattgtat

SEQ ID NO: 273298 - DNA, 572 bp, Homo sapiens
gggtcatttaatggcattgttgtatagcctaaaatcaggcctaaaagatgttattatttcacgtcatttcaaactttggccttcactgttatatggtacttctcactgtgtaagatttctagacactccactgtcctagaaaataaagaacagcagaagaggtgacccttgaggagacaggttaacacagatccaagtagagtaccaggacagtagcttagaaatgcagagatgtcctgcttgtggatggtaatatgcccttgaaatcagatgttctctaaaaagaaagccaaacaaaacaaagcaatgtcatgaagcccatttcccattatttttcctatattttatataggaaaaattcccaacatatttctaaaatataattgaaatacagaaaaaatacttagcctataaccccatgattatcaaaacaatatagttgttaaaaaagaagcaattacattttaygcagtagcacttttatttccattgcaattacttcctcatttgctttgcttacttccccacaattttcatgagtaatttcttgtgtttgggggctcacattgtat

SEQ ID NO: 273299 - DNA, 388 bp, Homo sapiens
gacaaattgatttgatcattccagagaacaaacccaggacttttccctcagtgacactgtttctaaaatgaggtatgatggattttgcatgtgaccatgaaataatcagtctttactctttgttttctaaaccatttaccttattaatggctgcatgtttaaacatttgatatttacattgcgttgttaatactatcttcccacagcctgtttccccgccccccsccgattccatgtgctttaatcactactttaaaaaaaacctgtgtaacataggctcctggctaatgttcttgccatggattttaggctgtctccaaacccatctgccaaacaggacaaaacacagccaatgtgactgtcatttttcccaccaatgctatttgtt

SEQ ID NO: 273300 - DNA, 581 bp, Homo sapiens
taccaatgagtgaggagaagaattctaggctgagggaatattgagatcagatagggttgcaggagtatgaaagtataggaaaccactagtagtgaaagaatttgaaatagtactagagaattggaataaatgtgaggtgtgttagggcataaaatcaggcagaagtagtagtagtcttgagatgtgtaggtttgccagatttaacaaataaaargagaatgatcagttaaatttgaacttcagctaaaaaagtgttttcttagtgtcagtgtgtcacaaatgttggatgaaggcatatatatacatatatacatatatatgtgtgtatatatatatatgtgtgtgtatatatatatatatgtgtgtatatatatatatgtgtgtgtatatatatactacaaattactgattttctaaaagtcagatttctcaaaatgtccaacagcaagaatgaaagagcctgataactcggggagaaagtatggctgtttgatataaaattctagaggaaaattcaaagcctgacaatctttgtattgcatttgcatgccacaagagaacatttgctgcaaaagaggcac

SEQ ID NO: 273301 - DNA, 547 bp, Homo sapiens
cctgtacgatctggccactgcatacgttgctaaactcatttcctactacttttcctcttaaaattttgattccagccgcactggtctgcttgctgtttcttcacatgctaagcacctgccattctcarggccattatttttctcccaacatgaaccctattctcttgatagccattgggtttcactccctcacttcatgcatatttttaatcaaatgccacctgttgagaaaagtcttttctggatactattctatctaacgtaggacattctgtctttccatctacttgtccttctctactatttttccatatatcatattacatgacatgctactatatatttctttctttgtgtattgtctacctccctgactagaatacaaacaccaaaatgatagggaattttctattccatttgctgtaatatccttgctgcttataagaatgtcagaaaaatagtaggtgttctgtaaaggatgttactgtatgacagtcactccactcaataagttctgaatcttgaattcaaccccaaatttatctgg

SEQ ID NO: 273302 - DNA, 547 bp, Homo sapiens
cctgtacgatctggccactgcatacgttgctaaactcatttcctactacttttcctcttaaaattttgattccagccgcactggtctgcttgctgtttcttcacatgctaagcacctgccattctcagggccattatttttctcccaacatgaaccctattctcttgatagccattgggtttcactccctcacttcatgcatatttttaatcaaatgccacctgttgaraaaagtcttttctggatactattctatctaacgtaggacattctgtctttccatctacttgtccttctctactatttttccatatatcatattacatgacatgctactatatatttctttctttgtgtattgtctacctccctgactagaatacaaacaccaaaatgatagggaattttctattccatttgctgtaatatccttgctgcttataagaatgtcagaaaaatagtaggtgttctgtaaaggatgttactgtatgacagtcactccactcaataagttctgaatcttgaattcaaccccaaatttatctgg

SEQ ID NO: 273303 - DNA, 547 bp, Homo sapiens
cctgtacgatctggccactgcatacgttgctaaactcatttcctactacttttcctcttaaaattttgattccagccgcactggtctgcttgctgtttcttcacatgctaagcacctgccattctcagggccattatttttctcccaacatgaaccctattctcttgatagccattgggtttcactccctcacttcatgcatatttttaatcaaatgccacctgttgagaaaagtcttttctggatactattctatctaacgtargacattctgtctttccatctacttgtccttctctactatttttccatatatcatattacatgacatgctactatatatttctttctttgtgtattgtctacctccctgactagaatacaaacaccaaaatgatagggaattttctattccatttgctgtaatatccttgctgcttataagaatgtcagaaaaatagtaggtgttctgtaaaggatgttactgtatgacagtcactccactcaataagttctgaatcttgaattcaaccccaaatttatctgg

SEQ ID NO: 273304 - DNA, 549 bp, Homo sapiens
aatttataggtaaaacggtgctattgtcatcacacttattgtgtgacttgcaagggagaccctgagaatatttttctcttgactrtagttgtctctcactgaaggagagattggtaagcatactcactctctaattttaagttctgatgattgttaaatactttcctttaagtattatgtttcaatgttaatggagttgtagctaatatttataagcttaagagtaattcctcctgcatataaagaatcctcttaaaaatgtacataatgatttaatctgtctttaaaattaaactctgtaatacattttcctctgttagattttatgtatatatatagtttcatagtgtaagtatagtaacttcaaccctttctagctctcatgaaataaagttcgattcagttcaatactacattaagaagtattaggtacatgccatgtttcaggcactcattgccttgcattatgggattgcaaatttaaaaaatgggtctctgcccactgagagtgcataatttagcacaaggaacaggatgagtgcaactcag

SEQ ID NO: 273305 - DNA, 333 bp, Homo sapiens
ttagcagaatcataaaaaagagagcaaaaatcaaagtggagtgacggagcatttggaaagcagagaataggatttcaacctagtcaggtcactaatggaggcttctcaaaaaggagaagagtgagagtattgacagcagtgaagagtagagaggtgtgtctccactacctctcacaacatmattacattttcaggggataaaagaagtcagggaaatgcttttttaaaaaatatggtaaagtcttactttctatagtcacatttattgtcttgtcttgttaatattctagcaggttttttaaacactcaagtagaaatgaagctgttaattgg

SEQ ID NO: 273306 - DNA, 566 bp, Homo sapiens
tccttttatgatgacagcactcctctcagattatatctctttcagatactggggaaaatcttgaaaattttaaaatgatgtctcaaatgagacctttgattttcatcatggaaataatccctcagtcttttattttgctcttgatctagtgcttttatagacactaattcactcagctagttagaactgtatttcatggcacttgatggatgttccactttgcagtggctcatgtcaccatgacccagtctggtgggttgctgcctggggttgctgtagcccccacactcccatcagtgttatgtgcttaggctgagggaactgcagatggtacctggaaatctcttaggaatgcaaagagagttataatgagtaacagccaatcttggatgctgagttgtttacaaaactttttgaggaggattcaatatgtattttagacaagaaggaactgcttctcaataaagatgagcataattgtcattttggaarttagtctttagagctaaagcattcataatttaaagtgtaaagcttgaataatccatgttactttattttaaaaa

SEQ ID NO: 273307 - DNA, 564 bp, Homo sapiens
ttctggtcaccatagacctgggggtatccttctactggagggctaattatatagcacagtgggcattcatttatgagtctgtgttcccaagcaaccatcagtacatcaaggccagagaagtggcctgtgacttaggctcaccctccttagaggcatatcatctgctttcaaccamccattctaagccatattttaggtatcagatccccatgtggaaaatggggttcattcctccttcttaggtctacagtaaagataaatgagataaaaagtatttaaagcacttaacaaagtaaagtggtgtagcattatcattgtgattcttctttttgtttagcatctagcaccgtgtctggcactgagtaggtgctcagctttattgctcatggagaaggagcaatttgttacataaatacaacaaaatctactaactctcagcaaaaatatccaggtctttttctttcaattatgcaaccattcaaaatttacaagtatccatcctttaccaaaggtatttttgggttttttgtgtgtttttgtttcgttttgttttgttttttaaga

SEQ ID NO: 273308 - DNA, 564 bp, Homo sapiens
ttctggtcaccatagacctgggggtatccttctactggagggctaattatatagcacagtgggcattcatttatgagtctgtgttcccaagcaaccatcagtacatcaaggccagagaagtggcctgtgacttaggctcaccctccttagaggcatatcatctgctttcaaccaaccattctaagccatattttaggtatcagatccccatgtggaaaatggggttcattcctccttcttaggtctacagtaaagataaatgagataaaaagtatttaaagcacttaacaaagtaaagtggtgtagcattatcattgtgattcttctttttgtttagcatctagcaccgtgtctggcactgagtaggtgctcagctttattgctcatggagaaggagcaatttgttacataaatacmacaaaatctactaactctcagcaaaaatatccaggtctttttctttcaattatgcaaccattcaaaatttacaagtatccatcctttaccaaaggtatttttgggttttttgtgtgtttttgtttcgttttgttttgttttttaaga

SEQ ID NO: 273309 - DNA, 564 bp, Homo sapiens
ttctggtcaccatagacctgggggtatccttctactggagggctaattatatagcacagtgggcattcatttatgagtctgtgttcccaagcaaccatcagtacatcaaggccagagaagtggcctgtgacttaggctcaccctccttagaggcatatcatctgctttcaaccaaccattctaagccatattttaggtatcagatccccatgtggaaaatggggttcattcctccttcttaggtctacagtaaagataaatgagataaaaagtatttaaagcacttaacaaagtaaagtggtgtagcattatcattgtgattcttctttttgtttagcatctagcaccgtgtctggcactgagtaggtgctcagctttattgctcatggagaaggagcaatttgttacataaatacaacaaaatctactaactctcagcaaaaatatccaggtctttttctttcaattatgcaaccattcaaaatttacaagtatccatyctttaccaaaggtatttttgggttttttgtgtgtttttgtttcgttttgttttgttttttaaga

SEQ ID NO: 273310 - DNA, 550 bp, Homo sapiens
attgaccacaaccaactgacaaacaaatgactgaagaataaaaatgtaaacacaggaatagtatttattgtgtgggtttctcgaccttagcactattaacattttgtatcagagaattcttccttgtaaggaactgtctcatacattctagaatgttcagcagcatccctggcctctatctagaggtcagtagcacacccacaattgtgacaaccaatacctccagatgttgccaaccactgttctaatcactgggaagaaaatttctgagttatatatttttacaactaggtgaattctcattttatcttttccaccataatcatttttgaaactctcagaattttcacttaatcacactgattctaaacaacatgcaatctatctcaatgaagtcgtctcaaagtcatatatctccaatttacaggttttaccaattatagaatgtcatgtaaataatgttatggtagttaatagcaatcaacttagacaaacacttctgatataaaaacttaaaaatyaatgatgcaacctatgtgattattttgat

SEQ ID NO: 273311 - DNA, 448 bp, Homo sapiens
ggaagttcacgtgaggagacatcatttggaagtctagtaggaagacaataacagagtttggagggaaagtattttgggttgaactaggtctcccaayaaaattcatatgtttgaaaagtgatccctagtacctcagaatgtgactttatttggagatagggtctttacaaaggtaatcaagttaaaatgaggtcattagggcgtgaccttaagccaccctataaaatgtcctcataagaagggaaactttggacacaagacacatatggagggaagatgacgtgcagagacacagggagaagatggccgtttacgcgtcaaggagccacgcctggcacggatccttcctccacagccttcagaaggagccaacacagcccacaccttggtttcagatttttggcctccagaactgtgtgataataaatttctgttttttaagctgccc

SEQ ID NO: 273312 - DNA, 556 bp, Homo sapiens
tgcaaattaagcaggatttcctctccctgcatctaacttgcacactctggagggagtagggtgcatcccggtgtttcataactcaactcacagaagtactgtgagaatgaaataagccaatgtatataataatgtaatcttgcctggcaaataagcatctataaaaaagttggcttttatggtgtgcccctcttgttgtayatttagtagcaaaatgcttggggaaacctcagtgattactctaccaccaccaccaccaccaccaccattcctatctgtaacccccgggttactaactgtcttaaagtgtggtttgttcaccactcaatcctgaggcgtctggcacctgcaaaatgaagtctgttctcaaatcccctatgtctaccagtcccctttcctccctgtgagaatacacaaatcctctatttaaaaaccctgtcaaaggttttggacattaattatttttccttttacttatttcttgtacctaagtgtcattacccagtaaatagcccattgcagggcaaaagtctttaactttccaaagtgaaattgg

SEQ ID NO: 273313 - DNA, 609 bp, Homo sapiens
attatgcaatgactaaatctaggtaattaacatatgtattacttcacatagttatcatgttggtgctgagagcactttatacccactctcttaggatttatcaagaatacaatatgttaactatactcagcatgttatacaatatatctcttgaacttattcctcttatctgattgaaattttatatcctttgaccttcatcttctcaatcccccacccaaccaccccaggccctgctactcaccattctactctctacttctatgagatcaacttttttatatttctcatataaatgagatcatatagtatttgtctttctgtgtctggcttatttcactttaacataatatcttccaggttcatktatgttgtcacaaatgacaggatttacttctttttatggctgagtggtattccattgtgtttatataccccattttctttatccagttaaattaaatttgagattccataaaataaaatgctgatccaatgctgaatttagttcagaaattagagcccgtggggagctgtaattaaaaactagaggatagtttgatcccttgtcctactgtgatggtacagaatggcactgtgcattgctgc

SEQ ID NO: 273314 - DNA, 585 bp, Homo sapiens
aattgaaatccaaaggtttgaactgttttcttggcccttgtgattgctttagaatatgtaatgatcattgtgtctgtgtctgtatgtatgaactataaatacctatattctttattagaaaacttctgtgaaaaagcaaaaattgtgggttttataaggtccatgattgattttgaggtatatttatttaggtaactggatttagctcttaaaggaaaataccaaaatgtatttaggtaactgcatttaggtcttaaaagaaaataccaaaatgtactcggcgttatctaaaattgtagaacactatcctttgatctacaagtgccacaaaaaactaaaattagaatcataattcataagcaaagctattatgaagaaaatgtgagtattggcatataaragaaaactcctgcaatgtaattagctagatgcaggcagaactttacaggagaagccttgtattttcctgtcatggataatgaagtactcatttctggattggatttgaggatgcaactatgtccaaacctggaagatgaatggccattttctcataagccagggctgatggcctgcaaaatgctg

SEQ ID NO: 273315 - DNA, 599 bp, Homo sapiens
ctcggcgttatctaaaattgtagaacactatcctttgatctacaagtgccacaaaaaactaaaattagaatcataattcataagcaaagctattatgaagaaaatgtgagtattggcatataaaagaaaactcctgcaatgtaattagctagatgcaggcagaactttacaggagaagccttgtattttcctgtcatggataatgaagtactcatttctggattggatttgaggatgcaactatgtccaaacctggaagatgaatggccattttctcataagccagggctgatggcctgcaaaatgctgaatctacatgaaaataactgatcagttttacttaatgagaaggtcagacctagcatagcaaattggaagttatayataggctcataggttactctggttgatagaagcttgataaatatttgttgaactgtattattgaatgaatgtttaaagtctcatcggaaatgatcaaatcttttctcttctaccagaatgttaataagcagagaaatcgatttgagtttcatttctttttattttccctgcctaccctcttatagaggtgttgatcagtgaaataattaaagaaa

SEQ ID NO: 273316 - DNA, 528 bp, Homo sapiens
agagtccatacacatggctgttttgagactcaactaacaataatgtacataaaagagctttccataattkggtgacattatttttatcatctaacatcattgcccattagcctgcccatctgcgccttaaaagcttctaggatctcagttacctatgagtaaatggaacatacttctcaccttccaaggtgactattgaggatctccgacatttatttaagcctgtgttctcttggtccttattcttaaagcagctgcatcaatttgctacctaatataccctgatcctaagattatgtttgtttatatagtttaccattttccatgtatacttctttaagctacttccacttttttgttgtgtgaaagaatgaagagaggaaagcaggaagaaagcaaaagagaaatgtcccaggcacggtgaccagtttgacacccagaatctgcctgaacctgtatcacaccttcttgtacagatccatttctaaagtagaacaactctctttttcaaaacttcttcgaaaggag

SEQ ID NO: 273317 - DNA, 568 bp, Homo sapiens
aaattcttaatctcccgaagaaagaggcaggatgagagaagagtccatacacatggctgttttgagactcaactaacaataatgtacataaaagagctttccataattgggtgacattatttttatcatctaacatcattgcccattagcctgcccatctgcgccttaaaagcttctaggatctcagttacctatgagtaaatggaacatacttctcaccttccaaggtgactattgaggatctccgacatttatttaagcctgtgttctcttggtccttattcttaaagcagctgcatcaatttgctacctaatataccctgatcctaagattatgtttgtttatatagtttaccattttccatgtatacttctttaagctamttccacttttttgttgtgtgaaagaatgaagagaggaaagcaggaagaaagcaaaagagaaatgtcccaggcacggtgaccagtttgacacccagaatctgcctgaacctgtatcacaccttcttgtacagatccatttctaaagtagaacaactctctttttcaaaacttcttcgaaaggaga

SEQ ID NO: 273318 - DNA, 577 bp, Homo sapiens
aaaagcttttaaatccttgtgatttactgagtgatagaggtgacaggaatgtcttttgttatttataacaagcccctttagaacataackgagtttatgtgaatgaggtggcacttggtgagcccacagctagtgtcaggatgggggctggttgtcaggggaaccaaccatgcgattagggggtaggagctttcagacccacccctggacctctggggaggggagagaggctagagttcaagtttagtcaccaatggctgatgatttaatgaatcacgtctaaggaatggaacctccataaaaatccctaaatgacaggaattggagagcttctgagtgagtgaacacacccacgtgtctggagggtggcacaccccaacccctcacagagcttcccactacacagctcggtgctcagcactcttccagacatcgccctatttatctcttcatcaggcttttcacttcttatcctttataataaaccagtgattgtaagtttctgggttccctgagctgttctagcaaataactgaacccaaggaagggatgtgggaacccgctgaatatatagcca

SEQ ID NO: 273319 - DNA, 616 bp, Homo sapiens
tatctcactgtcacacatgaatttagtgatttctctagctcttgcatcattttctttctaccttactcctgttgccattttgggggtgttcaaaactcacatggatgatctatccagaattttggacctgaaagcccactttctcttcacctgcaatgagtctttctgccattacacctgagtctcctgtcctagggccatacttttaccttgtcaataccaacagtcataaaattgaaatctccatttcaggcattctactctgaatatcatcctctatcctcctagctgtattcctctggtattgtcacttcagttattctgactccaaacattgtcgaagatctcttatctcaaattttaaaagtcctttatcttgtgtcacactgtcacccttcatagcagactttcttgcaggagttttatgttgtcactttttctactttctcacttgctattctggcatgagcarcattcaacaagatctttgttcactctcctccactgagctactcctatcagaatctccataagaagcactactgtgcttcttactccagtggtcacttttctgctctttaaggttttgtttgtttttgtagcagcctgtaactta

SEQ ID NO: 273320 - DNA, 651 bp, Homo sapiens
ttttatgttgtcactttttctactttctcacttgctattctggcatgagcagcattcaacaagatctttgttcactctcctccactgagctaytcctatcagaatctccataagaagcactactgtgcttcttactccagtggtcacttttctgctctttaaggttttgtttgtttttgtagcagcctgtaacttagctgagcaatcctaccttcccaaaacactctcttctctttaatgttattataccccactctcttggctggatattggagtgctgtggggctctgcatttgactcgttttccctcttcatattcatagactcttcccagctgattttatccagtcccatcactcatgtcccacatctgtgtcagttgctctcaaatctctatccttagcccaacattctggactcctacatcctgcctgttgtgatggccatgaggagtctcaaccacagcatggaagaaatgggattctgggttccccttcctaaagtcactcctctcccagctttccctttctattgttttctcaattccaaaaattacgagttagccttggttcctgtttttccctcaacatcccacatccaatccattagaaaatcttcctgcatctgcattgaaaacttacaaacatctct

SEQ ID NO: 273321 - DNA, 651 bp, Homo sapiens
ttttatgttgtcactttttctactttctcacttgctattctggcatgagcagcattcaacaagatctttgttcactctcctccactgagctactcctrtcagaatctccataagaagcactactgtgcttcttactccagtggtcacttttctgctctttaaggttttgtttgtttttgtagcagcctgtaacttagctgagcaatcctaccttcccaaaacactctcttctctttaatgttattataccccactctcttggctggatattggagtgctgtggggctctgcatttgactcgttttccctcttcatattcatagactcttcccagctgattttatccagtcccatcactcatgtcccacatctgtgtcagttgctctcaaatctctatccttagcccaacattctggactcctacatcctgcctgttgtgatggccatgaggagtctcaaccacagcatggaagaaatgggattctgggttccccttcctaaagtcactcctctcccagctttccctttctattgttttctcaattccaaaaattacgagttagccttggttcctgtttttccctcaacatcccacatccaatccattagaaaatcttcctgcatctgcattgaaaacttacaaacatctct

SEQ ID NO: 273322 - DNA, 491 bp, Homo sapiens
tttttcattaaaattgatcccatctttatctatgcctgccatcaagacccaaatcttttgcaaaattaacattagtggacaaatcatgatattatatggtcttatgactggaattgcacattaaacacaggaaaastttaacaaaattaaaatcctgctatttagcaaatgcccttaatgaatgtattatgtggatcaaatacagagtggttagaaatggaaataacaaaatagttcaacatgtccattcccttccaggactggagaagctgcttctccatctgttcccttcacttagaatacttcactcctttatgaacttcacctcagcatatgctttctaagatatagagatctttcagaaaatatgagtaaagggagccttttacaaacttccataatgttgtaattatatgaactagagacttgatgaatttaattctagaattacattctttaaataacagagtgctagattaggcatccttgct

SEQ ID NO: 273323 - DNA, 645 bp, Homo sapiens
atttgagaatgaaatcttttttcattaaaattgatcccatctttatctatgcctgccatcaagacccaaatcttttgcaaaattaacattagtggacaaatcatgatattatatggtcttatgactggaattgcacattaaacacaggaaaagtttaacaaaattaaaatcctgctatttagcaaatgcccttaatgaatgtattatgtggatcaaatacagagtggttagaaatggaaataacaaaatagttcaacatgtccattcccttccaggactggagaagctgcttctccatctgttcccttcacttagaatacttcactcctttatgaacttcacctcagcatatgctttctaagatatagagatctttcagaaaatatgagtaaagggagccttttacaaacttccataatgttgtaattatatgaactagagacttgatgaatttaattctagaattacattctttaaataacagagtgctagattaggcatccttgctctggatatttctaatattattaatctcaggagaaactagtttttwaaaaagttatgatgtagtatttgatacgtataacatgatattgcttagtttggcttgtttaggagttttaaaaaatagtatcatagcgtttt

SEQ ID NO: 273324 - DNA, 637 bp, Homo sapiens
actacaaggtcacttaaagaattttcagcctgcaactggataccataccctagtttcctgcaagtacaatttagttttctcatggctatatccactaggttcctggggaattgaataatagaaattttgaagaaggataggatcttggtgatcaattaatgtaccccaatagcatttcagatgatcgaaatgaggccaggtttaagaactaacttgtccatgtttaccaagctgaccaggacagagctggagctagagttaagtttgctgggcttccatgtacatgttttgtgacatagagaaggaccaagtggagagcagtgaaggaacaaggcatcagcgtatggaggttgggtttggttgcacccagaaatgatctgggtgctgcatgaactttcttcctttgttgtttccttggtcatttccagcayagcatcttcatttctttttgatgagctcaggttttaagtctgctatattttttactttacacatgaagctctgatgcagatggatctcagcagagctgattaatgtccctatgccaagtactccccatacttggccctggataagttaaatgagggataaacagatactatcaggctcatctgtcattgccaaaagaaaaaacaag

SEQ ID NO: 273325 - DNA, 611 bp, Homo sapiens
gttgtaaagcctccaattgttctcagtatacttaacagaacactaaaatttcttagacccaatatgttagcttcctaattatagattaaagcactttggatttatacaaacttttaaaaattgttaggtctttgaatatagtataatgtaacccaattagttgcttgttcatatgaggaggcctagctccaatttgttttatgcttttagaaaaatttgcaaaaggaatttggcctggctrtattcacttgtgtgaagtttatctgcaaaaaggcatatttctataattcagctcagaaatagaaatgcttgtatttctactaattaacaattgatttcttaattaagaagcatgacattgttgattacttctggagacccaagaataaaacacctcattggtaatgaaatttcagaacacaaagaactctttcttccatcttcagatgttttcccctgaagaatatgcaacattgctaccttgattgaaatattcatggtacatacttgtagaatttccaaaacattttcaaatactcctttggttgatcttggatgaagaaccagatagaaaattttaaaacaaagtttatgaatatatgactgactaa

SEQ ID NO: 273326 - DNA, 453 bp, Homo sapiens
aaacttttaaaaattgttaggtctttgaatatagtataatgtaacccaattagttgcttgttcatatgaggaggcctagctccaatttgttttatgcttttagaaaaatttgcaaaaggaatttggcctggctgtattcacttgtgtgaagtttatctgcaaaaaggcatatttctataattcagctcagaaatagaaatgcttgtatttctactaattaacaattgatttcttaattaagaagcatgacattgttgattacttctggagacccaagaataaaacacctcattggtaatgaaatttcagaacacaaagaactctttcttccatcttcagatgttttcccctgaagaatatgcaacrttgctaccttgattgaaatattcatggtacatacttgtagaatttccaaaacattttcaaatactcctttggttgatcttggatgaa

SEQ ID NO: 273327 - DNA, 511 bp, Homo sapiens
ctgtatccacaacccccagcacatggtagacctgcaacaaatgcttgcttaatgaagccataactgaatgaatgaatgaagagaattttcagttacctctcctttctttcatttttgataggtttaaaattaggaatggagcaagatacctgggtcatgatctctgaacagggtgagaaactttataaaatgatgtgcagacaaggaaatctgatcaaagacmgaaagagaaaactgactacgttccctaaatgctttcttggaaggtagggttgggagtttgggtgcatgactttcttttacattctcattgtctcacctgttaactttccttcaattagttttcctttaaaaatattcccttaggcacttttgaaaacttctttacagttgccatttcctgggcggtagcaggatgaaggaatggacagagagccaggatcatgaccaggaaacttaaggcatccgtccattcattcatgacttctgagatttctgatatgtcatgatc

SEQ ID NO: 273328 - DNA, 511 bp, Homo sapiens
ctgtatccacaacccccagcacatggtagacctgcaacaaatgcttgcttaatgaagccataactgaatgaatgaatgaagagaattttcagttacctctcctttctttcatttttgataggtttaaaattaggaatggagcaagatacctgggtcatgatctctgaacagggtgagaaactttataaaatgatgtgcagacaaggaaatctgatcaaagaccgaaaragaaaactgactacgttccctaaatgctttcttggaaggtagggttgggagtttgggtgcatgactttcttttacattctcattgtctcacctgttaactttccttcaattagttttcctttaaaaatattcccttaggcacttttgaaaacttctttacagttgccatttcctgggcggtagcaggatgaaggaatggacagagagccaggatcatgaccaggaaacttaaggcatccgtccattcattcatgacttctgagatttctgatatgtcatgatc

SEQ ID NO: 273329 - DNA, 501 bp, Homo sapiens
aggtagggttgggagtttgggtgcatgactttcttttacattctcattgtctcacctgttaactttccttcaattagttttcctttaaaaatattcccttaggcacttttgaaaacttctttacagttgccatttcctgggcggtagcaggatgaaggaatggacagagagccaggatcatgaccaggaaacttaaggcatccgtccattcattcatgactyctgagatttctgatatgtcatgatcccgggggaaagtgaggttggggccaggcagggagtggcaggcaggtaggtttgcctgcaggggacaggatgactggttgggcacagacatgtatacacatgggcctgaaagtcagaatcagaaagaaaggaaagataagagacagtctgaactaccagttaatttagaatttaggcagctgggctcaggataaagggtgtaggtaaagagtctgaaaatgtgggtcatgtgaagagacaggcagcaagcaatag

SEQ ID NO: 273330 - DNA, 501 bp, Homo sapiens
aggtagggttgggagtttgggtgcatgactttcttttacattctcattgtctcacctgttaactttccttcaattagttttcctttaaaaatattcccttaggcacttttgaaaacttctttacagttgccatttcctgggcggtagcaggatgaaggaatggacagagagccaggatcatgaccaggaaacttaaggcatccgtccattcattcatgacttctgagatttctgatatgtcatgatcccgggggaaagkgaggttggggccaggcagggagtggcaggcaggtaggtttgcctgcaggggacaggatgactggttgggcacagacatgtatacacatgggcctgaaagtcagaatcagaaagaaaggaaagataagagacagtctgaactaccagttaatttagaatttaggcagctgggctcaggataaagggtgtaggtaaagagtctgaaaatgtgggtcatgtgaagagacaggcagcaagcaatag

SEQ ID NO: 273331 - DNA, 572 bp, Homo sapiens
ccttgtccgttagcagagtgttgatggaatttcctcattccctgagtaggcccaatgataaagccactcattgggttcctttattctcgacctctcactcttaaaaatatttccaatttatagcaatgtttaaattggctctttccctcattgtaatatgacattttcaggaatctagtgccatcagactagagaattatgtcttagttacataacaactatctcaacccacttgtcaaccactgagttagtaaatctcactatgtgccaggccccgtgctgagttcctgacatctgtcatctcatttaatcctttggttgcactatgacattgacattcttttttttttttgagatggagtctcactctgtcgcccaggctggagtgcagtggcacgatctcagctcactgcaaactctgcctcccgggttcaagttattctcctgtctcagcctccctrgtggctgggattacaggtgcatgccaccacacccggctgattttttaaatttttagtagagacagagtttcaccatattggccaggctagtctccaactcctgacctcaaa

SEQ ID NO: 273332 - DNA, 572 bp, Homo sapiens
ccttgtccgttagcagagtgttgatggaatttcctcattccctgagtaggcccaatgataaagccactcattgggttcctttattctcgacctctcactcttaaaaatatttccaatttatagcaatgtttaaattggctctttccctcattgtaatatgacattttcaggaatctagtgccatcagactagagaattatgtcttagttacataacaactatctcaacccacttgtcaaccactgagttagtaaatctcactatgtgccaggccccgtgctgagttcctgacatctgtcatctcatttaatcctttggttgcactatgacattgacattcttttttttttttgagatggagtctcactctgtcgcccaggctggagtgcagtggcacgatctcagctcactgcaaactctgcctcccgggttcaagttattctcctgtctcagcctccctagtggctgggattacaggtgcatgccaccacaccyggctgattttttaaatttttagtagagacagagtttcaccatattggccaggctagtctccaactcctgacctcaaa

SEQ ID NO: 273333 - DNA, 600 bp, Homo sapiens
ttcaccttttcttatatttttcttytgaatttgttatgcagcaatagaaaacgaatggttttgaatggttctcatttaataaaagaataaaaaaaaattaacaactttttctgccttaaagtatttttgtagtctagacaacccatttttagaattttaacctcaattatttgacattagccatttttcttgcttttgtttttgaaattaatgaagaaataatttcctgatgcagtccatagctttgtttctctagccaaaaaaagaaaactagtctacaacaaattcaatagtttatataaaagttcaaatgttagacttttaaaacatgagcaatataatattttttatttgtaaaatgtctctgtatttagtgttctcttaatgataccacgtgacctttttttttaaatcgctacatagctgaggctctcctaagtgatacaaaacatcatccttattatctatgatgcctggggctgccctgcagtggtgacagatgtaacctataatccactgtggccttcacagccacagcagtgtgtggtagacagttctgatggatggttctgtgctggagtattccttatggatgacaga

SEQ ID NO: 273334 - DNA, 600 bp, Homo sapiens
ttcaccttttcttatatttttcttctgaattkgttatgcagcaatagaaaacgaatggttttgaatggttctcatttaataaaagaataaaaaaaaattaacaactttttctgccttaaagtatttttgtagtctagacaacccatttttagaattttaacctcaattatttgacattagccatttttcttgcttttgtttttgaaattaatgaagaaataatttcctgatgcagtccatagctttgtttctctagccaaaaaaagaaaactagtctacaacaaattcaatagtttatataaaagttcaaatgttagacttttaaaacatgagcaatataatattttttatttgtaaaatgtctctgtatttagtgttctcttaatgataccacgtgacctttttttttaaatcgctacatagctgaggctctcctaagtgatacaaaacatcatccttattatctatgatgcctggggctgccctgcagtggtgacagatgtaacctataatccactgtggccttcacagccacagcagtgtgtggtagacagttctgatggatggttctgtgctggagtattccttatggatgacaga

SEQ ID NO: 273335 - DNA, 600 bp, Homo sapiens
ttcaccttttcttatatttttcttctgaatttgttatgcagcaatagaaaacgaatggttttgaatggttctcatttaataaaagaataaaaaaaaattaacaacttkttctgccttaaagtatttttgtagtctagacaacccatttttagaattttaacctcaattatttgacattagccatttttcttgcttttgtttttgaaattaatgaagaaataatttcctgatgcagtccatagctttgtttctctagccaaaaaaagaaaactagtctacaacaaattcaatagtttatataaaagttcaaatgttagacttttaaaacatgagcaatataatattttttatttgtaaaatgtctctgtatttagtgttctcttaatgataccacgtgacctttttttttaaatcgctacatagctgaggctctcctaagtgatacaaaacatcatccttattatctatgatgcctggggctgccctgcagtggtgacagatgtaacctataatccactgtggccttcacagccacagcagtgtgtggtagacagttctgatggatggttctgtgctggagtattccttatggatgacaga

SEQ ID NO: 273336 - DNA, 359 bp, Homo sapiens
gggtttcacgaccccaaaatcaaggtgctggccagacggggctcttagattgaggctctggggaaaagttcagtgccaagcttattcaggtggttgtcaggaatcagctcctcattgaggctgcaagaatgaagtccttgtttccttgctgtcagccaagggttgctctcagcttctgcaggctgcatgtcttggtaccaggtcctctccatcttcagagctggcagtkgcacattgaatccttctaatgcttttaatttctctgacttcctgtcatgccactagcctgagaaaactctgcttcaaagggttccactccctgaatcaggcccactgggataatttacatattttaaagt

SEQ ID NO: 273337 - DNA, 597 bp, Homo sapiens
tctcattatctatcctagaaaagaagactgtggaatgtaacccacctagaaggacttttcccacaagataatatctatttctccagctcattcaaattccaagacaatcatttacaagttaatttctgtctcttgggcccattcattctccctaataaacattttactgcctcctacattccccacctctcccatcgcctatgaagaagggtatataagtatctggacctcactgaattattgggtaatcactctcccatgattttgccccgtgcacattcaataaattttgtatgctttgtctccttattaatctgcctattgcaagttcattttcagcaacccttcaaagggaaaaggacaggctttctctcttagagcctacatcttcgttaattagaatagttgtaactggctcaacgaaattctggtcctgaatacacacaggaaataaaagaaactctccctgataaaataatccttaaatacatgccatgttcacaagctgctatttakgaaaggtaaatatcccaggaggattcagtctgtcaatagtcatacttcaagataaattactcttaacagctggaaagctga

SEQ ID NO: 273338 - DNA, 594 bp, Homo sapiens
tatctttaaactaagcttaaaaatcaactgccaagcaaaaacattccacatccctcgttactttctatgcaagcccagtaaggtatgtttttctttgacacagtttcattgtggaggttagcatagaggtgattrgggaccttctggggttgggtaatgagcatttaggcacttggagaagtatttgccatgccaggaatgtatatgactatgaaacagcagtgtgttaggaccttaaatactgcagccaccaggtttgaatctgcttctccacattttagattcttcagcctggatttaactcaccaatttatttcatttctattttggtgggtggggcggggggaatttaactgaataggttgggtacctatcccagctacccgaagttccttaacattcttattcgttctctagatctcaaatttgacttttgtccttactcctcataggttctctgatgacataaatactttaaagagatgtctagtatgtggttttcatccatatctctagttctttgacactggaccatcattgttttctctttggcctgtttatctgagacactgaacagaactttgtgcatttgac

SEQ ID NO: 273339 - DNA, 624 bp, Homo sapiens
gatcttcccaagcccagtctccacacaaactctgatgaacataaatcagttatcacttacctctaaataatggacagattagaaaaatgagttacttggtaacttcaaataacaaaataagaatagatcaaatcaaactaaagtatttagaaaaattttggaagagatcacatgtggtgggaggccatggtgagaggattgcttgagcccagaggtttgagaccagcctgggcaacatgacaaaaccccatttctacaaaaaatacacaaattagccttgcatggtggtgtgagcctgtagtcccagctatttaggaggctgaggcaggaggatcacttgagactgggaggtggagaaaatagtgagccatgaytgcaccactgcaccactgcactgcacttcagcctgggtgacagagtgagacactgtctcaaaaaaaaaaaaaaaaaaaaaaaggaaagaaaaattctggaagaaattagaatatcttgattcattccttcattcctgtttaatctaaatgtatgggataatttcattctcaataaacattataagtaaagtacctcagtagcattctgtatcaatgataccccagttctctacaaataatgcatgcccaa

SEQ ID NO: 273340 - DNA, 620 bp, Homo sapiens
taaccttgaaaaaataactttaatattttaacatggagaaaatgacatggaagcccatggttctactagacataaagcattagactgtttgtgtttatatgaaggtggtaatactaacattcctccatattttgtaatctgaaagaaatacctgctcaatctctgttaggaggtgagcagggaactttagccccaattttctttatccttttaggatcatttcctctcctctcagatctctattacctctatcatcacctttctgaaatgctatggatttatttaaagttacttagactagtctttatgtgagttctatagttgccacgagcaacaatacaaataaaacattacagggtcactctttccttttctactgattaacacaatggattatctggccagcgtcctgcttatgaattggtgtgtctgagaatgctatggcagtgattttataagtctttcaagcgagcatgtgtaattttagcatttcttgatgcatccttgaagarctgctctttggtgctttcaatcattttaatgaggtatcttagtttgatttacaaatttggtaaacatgacttggtgttgttatgtttagactttggttcttatttcat

SEQ ID NO: 273341 - DNA, 565 bp, Homo sapiens
gtttaaagacatcactgccgctgatataaaactcacattgtgtataattttatttgtcaaaaggctaaacatggaaaactttttaaaagtctgacataatttgaagaatccttagaataatttaagtttgttaattaagttaaattatttaaatgacacaaaagagctaatattcccattacactctgtaatgatctaaagttgtcatgttctagggtaacttgacttctcaaggccagtggagataaaaaatttggaaatgtactatgacagagataacaaaatgatactgactataaatagtctggagagagacagctagataggagtgagtatttgctactcttttgttcttcgaatatctgttttcctgtttttcttcaaaatatcatcttctgttcagcaatggatgatgttgaattattaaagaaaatcatactgtgtgttacggckcctgcctgtaatcccagcactttgggaggccaacatgggagaactgcttagagccagggttctagaccaacctgggcaacatagagatgttaacaattaataatagggatat

SEQ ID NO: 273342 - DNA, 597 bp, Homo sapiens
ttgaaatgcattaaatgaagaaaaatactcatttctctgaattttacataaacaaaatattgagaataccctattttgttgaagatcttatagatctgtaagaggtatctgtttattctataaattttggcatatataattcaacatttgtcattttactctratagttacctgttattgcaatgactaattgaatatgcaacagaggaaggttggtaaatagaaggtgatataaaccatagtattcctattagacgtagcttagccatagctgaataaggacttatgaaggagaactaaatgacacatatagctaaagtcacagaattgtacttaaataaattgttagttgttgttcactctataaatgagtattcttagtagcttgttttggtattaagatctgagcttaggaaccgcttaaaaaaattgaaatgggcagactcttctatctgacaaaatcgcatacacataatcataagattcctttcttctatgattgtattgagatgtactttaaaaatgttagtattcacttcagtattcctgatcatacttaaaaagtagcttttacctaagacattgaattattttaat

SEQ ID NO: 273343 - DNA, 583 bp, Homo sapiens
ggccaaaacaaaggggctagaggccccatgtacgtccaaaatccagtgaggcagtcaacttttaaagctccaaaattatctcctttgactccatgtctcacatccaggtcacgctgatgcaagaagtgggttcccacagtcttgggggctgccacctctgtgtcttcacatggtacagcctccctctcaggtgytttcacaggctggcgtttagtgactgcagcttttccaggcacattatgcaagctgtcagtggtctaccattctggggtctggagaatggtagccctcttctcacagctccactaggcagtgccccagtggggactctgtgtgggggcttcaaccccacatttcccttccccactgccctagtagaggttctctatgagagccttatgcctgccacaaacttctgcctagacatctaggcatttccatacatcctctgaaatctaggcaaaggttcccaaacctcagttcttgacttctatgcacccacaggctcaatgccacatggaggctgccaaggcttggggcttgcaccctctaaagccacaagccacagcttgagctggacctt

SEQ ID NO: 273344 - DNA, 597 bp, Homo sapiens
gggattacaggcatgagtcactgtgcctggccaaaagacaggttcttaacargactacttatgaagttataaaacacttttaacaaatgctataaccatatgtttatagaaagcatatttgtccatttatctctaatggttccttgtacggtgattttcttgtaaatattaaatgctacaatggtttaattaatgatcgttactctttcatcctcatctttatttgaaggtacattatgtttagaccaaaacattaaaaaacaacattgcttaatagcaactatttcaaaatttcaaaagaacagaaagttgacaaatgctactaaaaggtagagaaatgctactaaaaggtagaaaaatgtggttggatctatgaacttgcatgagccagaggagtaatgcagataaggtttctaaacaaagaggacgtcaaagatgttgatctagagaaatggtacaaatgagaactacaggggggagaatagggggaagaaaagatgacgaagtaaaataggacatgtaattcaagaagtgaaggctcttaatgtatgtttgtagagaactttcagtcttttgatcagagaatgagccaattct

SEQ ID NO: 273345 - DNA, 465 bp, Homo sapiens
gattgacccccaaatatcttcatttattaaaacatgaaacaaaaggaaagcttagtggacaaccacattgttgtaattattttagaaacatggcctttgaacaatcagagtatgacatgagtattgattaaattggaatttaagatgttgtcttaaagtagtgctgatttgaagtgcttttactttcaraaaaatttcaataaattactttgtatagcttgcaccagccacactttaagacgttggtaatgaacagttaaaatttgtccatctgtcaaactgtgtttgatgacagtatatgttgtaagagttgtgtaatgtatcagcatttgaacaagaataatgaacaaaaaaaggtagttttctttgaatcattacttaaatatctatcttgcctacagctcagaaacttgacagaaatatgtcttttttcatgaaacttaaaatcacctttcctgtctttaa

SEQ ID NO: 273346 - DNA, 444 bp, Homo sapiens
gtacattagacactaaatagctttataatttatgatcaattcaacaaagggaaatactctaaatcaaatgagcatattatgttttttaaatattctcaatgtaagtaattttttaaagacataccttaaaagcagaaataagaagtatcacttaactttgtcatttctgatcttggaaatgtttaccaaaacaatgatcataagtaatttaatatatctgtgytgtcagactaggacatttggacactacaagtttccactcatgttatgtttctgttttattctcctctgtggagtttagattaatctctcatgtgacacttcagagaaaggaacaagaggactgagtgctagaatcttctcatttactttataaatttctgttgatcctacagacctcaaactgtgattttgacataaatttcacccccaaagatggatttc

SEQ ID NO: 273347 - DNA, 533 bp, Homo sapiens
aaccacatgaactctttatttcatttttattttttcaaagacagggtttctctctgttacccaaactggaatgcagtggcaggatcatagctcactgcagcctcaaccttctgggttcaagtgatcctcctgcctaagcttcctgagtagctgagactacaggtgtctgccaccaggcctggctaatttttgtattttttgtaaagacagagttttactatgttgcccaggctgttctcaaactcctgggctcaagtgatcctcctgtcttgacttcccaaagtgcttggattacaggcgtgagtcaccccatcaggcctacatgaactctttaaaagcatagttttctcyagctggtagcagaatacagatgtttgaagtgtgagaaggatttgaggaaacagttactctattgcagaaatggatgggaccacaaggcaaagcctgagagtggcctttagaagcagacagtagctcttggttgacaaccaacaaaaactggggacttcagttctactttcacaaagaaatgg

SEQ ID NO: 273348 - DNA, 445 bp, Homo sapiens
gtgtgttatgtatgtatagtattccattgtgtgcatatatatgtatatatgtgtgtacatatatatatacataatatatattcttctgcacatggaaatccagtttctccagcatgatttattgaagagggtatcctttccccagtgtatgttcttggtgcttttataaaaaatcaggtgacctcagatcagacccaactacatcataccttctttcgaaatgtgcaagaaacctactagaaattcttattgttagagtttcagatttatgtcctggtttatactgccacattcattcttggaggtgagtacatttcgatcttggtccggctgcgcagagagtcaaagcaggaaaakcacagattcttcccagcagtctacagcctacacagcggcatttggtgcgatgggatggaacatgctgtatctctattccatgtggggg

SEQ ID NO: 273349 - DNA, 445 bp, Homo sapiens
gtgtgttatgtatgtatagtattccattgtgtgcatatatatgtatatatgtgtgtacatatatatatacataatatatattcttctgcacatggaaatccagtttctccagcatgatttattgaagagggtatcctttccccagtgtatgttcttggtgcttttataaaaaatcaggtgacctcagatcagacccaactacatcataccttctttcgaaatgtgcaagaaacctactagaaattcttattgttagagtttcagatttatgtcctggtttatactgccacattcattcttggaggtgagtacatttcgatcttggtccggctgcgcagagagtcaaagcaggaaaatcacagattcttcccagcagtctacagcctacasagcggcatttggtgcgatgggatggaacatgctgtatctctattccatgtggggg

SEQ ID NO: 273350 - DNA, 603 bp, Homo sapiens
aatgtgcacatgtaccctaaaacttaaagtatttaaaaaaaaaaaaaaggatagggtcatattaaaagaacacaggagtcrgtctaaaagagcttcaaatgaccaaagctgcgacaatttgagcaataaaataaataagatagcattggattataatacaacatataataaatatctatgagtccatgatgatatgaataaataattgaataaattggaaaattggtgagaacagatgtgccatatagaataattcccaataattcatacagatactccctgctgaagaaggtggagcttgacctccctctcccttgagcatgggctgtatttagctacttgtttccaaagagaagtgtgtggaaagaagttaaaaaataatttcacctggataaacctgataaggtcatgtttcagattttatggagaaatcatattgataacatgaacctgtgatatgatctgatgagaatggcacttcacttctgttttcttcctcccaaaaccctgcgacccaagacaaacaatgaaaaacatcagaaaaactcaaattcagtggcattctaaacaatatttgaccagtatttctaaaaactgtcaaat

SEQ ID NO: 273351 - DNA, 603 bp, Homo sapiens
aatgtgcacatgtaccctaaaacttaaagtatttaaaaaaaaaaaaaaggatagggtcatattaaaagaacacaggagtcggtctaaaagagcttcaaatgaccaaagctgygacaatttgagcaataaaataaataagatagcattggattataatacaacatataataaatatctatgagtccatgatgatatgaataaataattgaataaattggaaaattggtgagaacagatgtgccatatagaataattcccaataattcatacagatactccctgctgaagaaggtggagcttgacctccctctcccttgagcatgggctgtatttagctacttgtttccaaagagaagtgtgtggaaagaagttaaaaaataatttcacctggataaacctgataaggtcatgtttcagattttatggagaaatcatattgataacatgaacctgtgatatgatctgatgagaatggcacttcacttctgttttcttcctcccaaaaccctgcgacccaagacaaacaatgaaaaacatcagaaaaactcaaattcagtggcattctaaacaatatttgaccagtatttctaaaaactgtcaaat

SEQ ID NO: 273352 - DNA, 603 bp, Homo sapiens
aatgtgcacatgtaccctaaaacttaaagtatttaaaaaaaaaaaaaaggatagggtcatattaaaagaacacaggagtcggtctaaaagagcttcaaatgaccaaagctgcgacaatttgagcaataaaataaataagatagcattggattataatacaacatataataaatatctatgagtccatgatgatatgaataaataattgaataaattggaaaattggtgagaacagatgtgccatatagaataattcccaataattcatacagataytccctgctgaagaaggtggagcttgacctccctctcccttgagcatgggctgtatttagctacttgtttccaaagagaagtgtgtggaaagaagttaaaaaataatttcacctggataaacctgataaggtcatgtttcagattttatggagaaatcatattgataacatgaacctgtgatatgatctgatgagaatggcacttcacttctgttttcttcctcccaaaaccctgcgacccaagacaaacaatgaaaaacatcagaaaaactcaaattcagtggcattctaaacaatatttgaccagtatttctaaaaactgtcaaat

SEQ ID NO: 273353 - DNA, 598 bp, Homo sapiens
aaatgctgggatgaaagagcaaacttgcaaggatatctgctacaataattaaagagaaatagatgcctataattaaaaacattgctgcttgtctctgaaattatttgaacactgtatacatcataatgtacataatcagtttccatctgatatcccagacatctaatcctggaaacaacgtctaatatctctaccccaaagcaatagaattagagctggaaggggcaggtaagcaacagtgtggacctttctcagcagcagtgaacttggggtgctcacaacctgtgcaaaaccagctgtggtggctaaggattgcctatgtcacctctcccccaactctaggcaatgcagcttggggatagactccttccacttgggggaagaagagggaagagtacagagggctttgccttgcaacttgggtaccagctcagccacagtaaagtaaagtatcaaaagtwacccagcatggtgccagctgtggtggccactggacttgcccttcccccaactccaagcagcctggcacagagagagagactccttttgtttgggggtaaatgagggaagagaagaagaaactctgcctggtaaccca

SEQ ID NO: 273354 - DNA, 578 bp, Homo sapiens
tccagacaattcagtgggtaaatagtctttttatcaaatagtgttggagaaactggagagccacatgcaaaagaatgaatttggacccctaccttacatcatacaaaaaaattaaattaaaaaggatcgtacagctaaatgtgaaagctaaaacccttagaagaaaacacaagaataagcctttatgaccttaaattagggaatgatttcttagatatgacaccaaaaagaaaagtgtttttaaaaaagagaacttcatcaaaattaaaaactgctctacttcaaaagacaccattgatataatgaaaaaacaacccagagaatgggggaaatatatgtcacatgtctaacttatcaaatcatatacctaatatggacagcatagataaagaggtagagaatttcagacttgagctggaaactatataagaatgtggcaaaatgcaaatactaaacacacacacacacacacacacacacacacacacacacacacacacacacacasagagagagagagagagaacatataaagtcagtaatttggaggtcagtcccatatagggaagtgatagatt

SEQ ID NO: 273355 - DNA, 585 bp, Homo sapiens
atgaagtggttaagagcattcctgggccgggygcggtggctcacacctgtaatcccagcactttgggaggccaaggtgggcggatcacgaggtcaggagatctagaccatcctggctaacagggtgaaaccccgtctctactaaaaatacaaaaattagccgggcatggcggcgtgctcctgtagtcccagctgctagggaggctgaggcaggagaatggcgtgaacccgggaggcagagcttgcagtgagccgagatggcgccactgcactccagcctgggcgacagagtgagactccatctcaaaaaaaacaaaaaaacaaaaaacaaaaaaagaacaccacatttctagaagtcacacatataccaattgcaaattgcaaagcctttttccaattagaaggaacaaaaagtctatgctaggtataaaaataaagtgtgtattttcccaatacaatttaaaattgggaaataaactatttcatcttaaattttaatcataaaaagataactaatagcatattacaaatattgacatgttacaactaaatactaaatacatccaatggaatatgaatgcatgac

SEQ ID NO: 273356 - DNA, 585 bp, Homo sapiens
atgaagtggttaagagcattcctgggccgggcgcggtggctcacacctgtaatcccagcactttgggaggccaaggtgggcggatcacgaggtcaggagatckagaccatcctggctaacagggtgaaaccccgtctctactaaaaatacaaaaattagccgggcatggcggcgtgctcctgtagtcccagctgctagggaggctgaggcaggagaatggcgtgaacccgggaggcagagcttgcagtgagccgagatggcgccactgcactccagcctgggcgacagagtgagactccatctcaaaaaaaacaaaaaaacaaaaaacaaaaaaagaacaccacatttctagaagtcacacatataccaattgcaaattgcaaagcctttttccaattagaaggaacaaaaagtctatgctaggtataaaaataaagtgtgtattttcccaatacaatttaaaattgggaaataaactatttcatcttaaattttaatcataaaaagataactaatagcatattacaaatattgacatgttacaactaaatactaaatacatccaatggaatatgaatgcatgac

SEQ ID NO: 273357 - DNA, 585 bp, Homo sapiens
atgaagtggttaagagcattcctgggccgggcgcggtggctcacacctgtaatcccagcactttgggaggccaaggtgggcggatcacgaggtcaggagatctagaccaycctggctaacagggtgaaaccccgtctctactaaaaatacaaaaattagccgggcatggcggcgtgctcctgtagtcccagctgctagggaggctgaggcaggagaatggcgtgaacccgggaggcagagcttgcagtgagccgagatggcgccactgcactccagcctgggcgacagagtgagactccatctcaaaaaaaacaaaaaaacaaaaaacaaaaaaagaacaccacatttctagaagtcacacatataccaattgcaaattgcaaagcctttttccaattagaaggaacaaaaagtctatgctaggtataaaaataaagtgtgtattttcccaatacaatttaaaattgggaaataaactatttcatcttaaattttaatcataaaaagataactaatagcatattacaaatattgacatgttacaactaaatactaaatacatccaatggaatatgaatgcatgac

SEQ ID NO: 273358 - DNA, 585 bp, Homo sapiens
atgaagtggttaagagcattcctgggccgggcgcggtggctcacacctgtaatcccagcactttgggaggccaaggtgggcggatcacgaggtcaggagatctagaccatcctggctaacagggtgaaaccccgtctctactaaaaatacaaaaattagccgggcatggcggcgtgctcctgtagtcccagctgctagggaggctgaggcaggagaatggcgtgaacccgggaggcagagcttgcagtgagccgagatggcgccactgcrctccagcctgggcgacagagtgagactccatctcaaaaaaaacaaaaaaacaaaaaacaaaaaaagaacaccacatttctagaagtcacacatataccaattgcaaattgcaaagcctttttccaattagaaggaacaaaaagtctatgctaggtataaaaataaagtgtgtattttcccaatacaatttaaaattgggaaataaactatttcatcttaaattttaatcataaaaagataactaatagcatattacaaatattgacatgttacaactaaatactaaatacatccaatggaatatgaatgcatgac

SEQ ID NO: 273359 - DNA, 507 bp, Homo sapiens
ttgagttaagcctcctcaggatgtattaccaatggaaaatgactagcctaaggaagaattggatttagttaaccataaactaatttctaggctaaataattctgcagctgtaagattaaagtggtagatcaaggggagaaacaagtaacaaatcagtacaaaaatatgaaaatgtatgtaatggctttatgagatagattagttgtttttaaaatctttatccctaccccacactagctcctccaaatgtttttgagcatagcacaaccatggtatgctgggccttccactgctatattttatctactataactagagatctttcttcatactgatactatttctagatctgttatataaatgctatactaaatgyagatgctcagaaatatagaattgttttgctgaaagacagcctaggctaaggggtatggggtggactgtgtaataaagggttaactcagaagatttggggttgtcctaaccctgcatatttcaaaggtcctg

SEQ ID NO: 273360 - DNA, 578 bp, Homo sapiens
cattttgtgagttgtactagtctattttttatggaatatcctttttacttgaaagaatgaatgacagaaatgattatcatttagacttgaatatttggctgacactttctcaaaaacgaacataaccctgtcccttccacataatcaactgatggtattattcccaatgataaaaggcaagctctcaagagaaaattagaatcctggggaacttgtatccaccatcataagcctgatggcttcccaatacttaacaatcttttctggtaatatctgtggtamtattaaaaaatgtgattttttgataacttgtagttaaatgtgtcaacactggaagacataatgtggtgaaattgtgtttctttttttaaaagtcatgtattatacaagaagcattcaatgtggaagtcggacctatatattttaatgtaacagcatgtgaaatagttattgatagtttcatgttccacattacaaataacctttaagaagctaacacttctatcattttagtgtagtatcaaggatgaatatccagttttctaaaaatgttattaaaaacattcctggcctagcga

SEQ ID NO: 273361 - DNA, 535 bp, Homo sapiens
gcggctcggtcctgcctctgcccggggctcaggatacggtcacctgtattcgctgtggcttcaacatcaacgttcggggtgagaggcttgtacgcaggggtcctggcggagggcgcagggtcggaagcttggggaactcaagatcggttgggttgaggaggggatcctagagcaggacatcaggcggttgtacatttggtctagcgatgaaaactgagggaaaggatgtagggcctcctggcctaaccagccaggggaaaggggaggtttccggtgtcagctstctctggttgtctccataaccagttcttacttgcctgtgcagactttgaggggaaggttgtgaagacttcggttgtgttccaccaactggggacagccatgcctatgtcggtggaggaagggcctgagtgccagggacctgtggtaagctaatgagatcaagaactggctccataaggtgggtaggaaagaaatggaggagtgattgcaaagctctggagagttttgtgcccaattccaagagggaaaagag

SEQ ID NO: 273362 - DNA, 469 bp, Homo sapiens
gtttagtttcaccaaatgctttttctgcatctattgagatgataatatggtttatgtccttcattctgttgatgcggtatatgacatattttgattcacatatgtcaaacaatccttgcatcctgggtataaaactcacgtgattatggtgtattgttttgatctgttgttggattttgttgctaatattttcaattactattttttattactaacgtttaaatttttattgtaagcattttaaacttgtaaaatttacatatactgaaatgatcagatcygtatcaaattcatcaatgaattttgacaaatacagccatagcacccatgccactatgaagatacacgaagttctctatttttctgccttcaaattagccccctttccccagcagccattgatctgatgactatcatgatagagtagctcttcctgtttcaaaacttcatacgtatccattcatcccat

SEQ ID NO: 273363 - DNA, 564 bp, Homo sapiens
gggaacagataagtcctatacttactacattttcccgtccattatactccatagagtaatttcattagacttactgtaataccatacattagagtaataccatatttaatttggctacatgtatctgaaaactcaaacaacagtgccttaagtttaaagtttatttctctctcacrtaaaagaggtaggcatatagggccattcaacaattagctggcttccctcttcaaagtcaccttcaaggtggcttctgaaacttcattcatgaaatctgattttcaggcaataggaaggaggaagggggaaggcaaaagaaaatacctctcaaatgagtcagattctaataagcagccctcccagaagtcccccatgcttaaaattacatcccagtagtccagaactttgtcacctagctgcaagcagggctggcttcgatctactccgttacaagagtgtattatagccccattatgatttgggttctattactaaagaaggaaagagtgaatactctctcttcatcttagaaattactcttctaattttcatagtgcaagattaatt

SEQ ID NO: 273364 - DNA, 613 bp, Homo sapiens
gtgctcatatgcataatgaatgcttcaagagaaatcagtttttgtcttgtttacaagaagagtcattttaatggcaaaccataagcatgttgagatagattgtctagtcaaacctgaaaatgaattaaaatattttaagaattcataaaccagtgaaatataattatctttaaaattctaataaaatcacatgaacccagaaatgtaagaccttggaattcatttasttcaaccttcaaattaatgtcatgaatataatgaccagcaggtggttctctaacatcttgtggacacctttggaagctgaaaacttattacttcttgtcagtcccttccagatggcaccaattgttagaacatttctttactaagcaaagccacaaaatatactttccctatcatcatctttaattttttgtcttcttctaccacgccagatgccagatatgtgtgtatgtgctaggtatttatttagcaaaataagttgccatcaatactgacaggcatattacaacaaattttcattttgggaaaggatagtaaaagtggtgaaaaagattaccaaagagctaaataagttaggaaagaggattaagggtgacagatttgggag

SEQ ID NO: 273365 - DNA, 575 bp, Homo sapiens
tagaggcatttcaattggtttttaacttgtgttgaatatcctcttttataaagtacctgtataagccccttgccctttttcctaatggggtgtcagtcttttcaaaaacatatttccagaaattcttcataaattcggtttatttgccctttgttgttgtgttgcaaatacctactcctattaatgcagacctatgacagaaaaatcaagattcctttaatgagctgttttggcttggagactgttgacccggctgaractttcctggaattgtgcttcagtttgaaaatgtttctaccctagtgccctttccttcacagttgtcaggtctataggacggtttgacatctccttttaatttctgtggctccttccccactaagtctcttgcatttttgatctatcttggcatctatttcccagaggaccctaagtaatacagtccctgtacttattattccaatttgccaccatgttgtcttttatccaacagctggtttccttgcgtgcaattttaccttcacaaatcctctgtcagcagcaaccagaataatccatctgtccatagctgcccc

SEQ ID NO: 273366 - DNA, 575 bp, Homo sapiens
tagaggcatttcaattggtttttaacttgtgttgaatatcctcttttataaagtacctgtataagccccttgccctttttcctaatggggtgtcagtcttttcaaaaacatatttccagaaattcttcataaattcggtttatttgccctttgttgttgtgttgcaaatacctactcctattaatgcagacctatgacagaaaaatcaagattcctttaatgagctgttttggcttggagactgttgacccggctgaaactttcctggaattgtgcttcagtttgaaaatgtttctaccctagtgccctttccttcacagttgtcaggtctataggacggtttgacatctccttttaatttctgtggctccttccccactaagtctcttgcatttttgatctatcttggcatctatttcccagaggaccctaagtaatacagtccctgtacytattattccaatttgccaccatgttgtcttttatccaacagctggtttccttgcgtgcaattttaccttcacaaatcctctgtcagcagcaaccagaataatccatctgtccatagctgcccc

SEQ ID NO: 273367 - DNA, 579 bp, Homo sapiens
atgagggcaggcaccctgtttcacctagcttagagtgtgccacagagtgctgaataaaggaaagagtagatctcacataattctgtcaaggattctatagcaccagtactgttactccccactttgctgacaaggattcagacatcctgtgaaattaaataatttgtacaaggtcacagaacaattaaggtgtcagagacatctgcatgaggcatatgtaccgtataaacaaatttggcaggctatattcagaactaaaacagtgtcaaactgaaattcaaatagctagtggtgtttaaaaatgcagcaattaagcaaacagtctgtgaaagactcttctcactgtatataaatagtcagacagacttcttatagctttaatcacagtacacatttagttaaaatatgtatttcacactaattsactatgactattttgcaaattataaacaatgttatctgttaccctttggaaaaatttggttttgccctcaaaatattactgctgtctcagagattctcactttggatgaaattgtgaagaaaatctacccaacaatcttggtttttaaaatggta

SEQ ID NO: 273368 - DNA, 642 bp, Homo sapiens
ccaaaccatatcacaaatggtaactcaatgtaatttttttaacagcactatgagccgtgggaatccaaggcatgagacaagaaggctggacagcgttcctggatcacacagctgagtaccggtgaagtcaacccagtgtgcctcggctaagggactgctctcaccactatgccyctccccagtgtcctgaattctaatgctgaatatttgtatgttctctgcttttctcttagccttccaaagatttgtcatcagtagtatttaatatcaaagaataaaggtttgaattactatatttgttatagtttttcaggttctaagtcattaatttctactatatcttcgttttcttactcatgcttttgttggggctttttaaattattttttgcttctgcagtaacatggatatttcatttgcaactttcttataaaaaccttgaaaacttacaaagttttctcctagcacaatgtgggttacattccatatattatggcatcttctaaacaatctctttattcagttttaattttctctatcattttctttgagttaacagctcatggattattcagggagtatttttaggtttccacatggttttagatttggtgttaaactttttattacttaaattctatt

SEQ ID NO: 273369 - DNA, 555 bp, Homo sapiens
tcttagttcttaggtgttttctgggactcagagttcattctgctgtttcattcaaggttcagtacacttcttgattttatgtccattgtattccaaggatagatgattaaaatatcatcaacaatctagggcactttgtgaaaaccttcaccccagaactcttatccactgatgactctcctggtctgctaaaaactcacttattgtgaaagactttcctgggatcaaatgttttgaaataaaaatttatatgtaaagaaacattgttttgtttaaaacagaggtaacagtatgacttgaattttattcgtttcttaatcatgatttttttttctaatgatgacctttgattaaattgtataaaaggaccttgaaattgaattgacacatcttctccggtgagaccttggtccagctgctaaggtaggatttctgacagtgccggcygtccagtggaactggctgacaccttttctcagaggacaaggcacagctgtgaggttctttggaggaactgtgcgcctgccccattgccagtgtggggcccggtccaca

SEQ ID NO: 273370 - DNA, 493 bp, Homo sapiens
ctcttcacaaaattactgtgagtctgtgagtgcaaagtgttttttgaagtaaacagtgttaataatatgaagtattatcattttctccttctagtaatgtcactaataaaataatttatttcagtatactcataacattctaatccatttttctctttttaaaatgcttcttgcagtaaaccatgcatatccgagagggacaaatcataarcatacagatagatgaatggtttaaaaaatgaagtgttctcaataaatttaattttaagtatttttgtttgtgatcaacatttttgcatgatcatgtgtattattatttataatatttgatattagaaacagtaaaatatttgtcaaagttgtcaaacatccttattctattttattgtccctgtgacatgtattcagcttttgctatctatggaattttagcaagtttctttaaaaatatttaccccttttgtttcagtttgcttttattcaataatattaa

SEQ ID NO: 273371 - DNA, 512 bp, Homo sapiens
cctttcttgttaatagtttgtgagtatatttactggcagcaaagcagcctcaagaaaattctactgcacgtgcactctgggcttttctacatttttatttgtgagctggagctcgtaaacctgacaaaagtctcctcagtagcgagcacttcactgaagaaatgggacaagtaagtcttttctacatctgtaaacatgtagcagactttatagatctaatcttgcccaatattcatactttttttattaataatgarcacatgtctaaggacctatgtatttattctgcacagtaagtgggcagattgtcactgcacacctgctgcattggagacactatgacatacagaaactaactggtgaacagaatgacctatgcactcagagaatttgagatcacgtaggggagacaaatgtgctacagcaataccagaagactttaagctccaggaggccagggactgtgtctgtctctctcaactgctaaatccttgaatctaatgacatgtatt

SEQ ID NO: 273372 - DNA, 603 bp, Homo sapiens
tgctaaatccttgaatctaatgacatgtattgtccacactatatggaatacatgagtaaattaaggatagtttcagaaaacstctcctttattttcagtattctccctcatctaaagttcactgtagccatgccagaaatcttttctctactttcttctttcagcagactatgaaaattaagaagcctattaggcatctaaattattatccaggctccagttaagctcaatatagcactctgtatcagtaacgtggctcaaggtcaactacacgtaagccaatattgtgttttctctttgccattttcccatggaggagaggtagctgtgatatggatcaggattcatgtatttccaagagatattttacacaattttgataagtgcctttattaggaaattacagaaagagcatgcaggtgaggacactgctctaaggttggggcccagcacaggaatacctggaggagattaaattgtcttccaagatattaactaaaatgtgaagatggaattttctcttagtgtgcctgaattaattgcctcttgggagacatgaaatttttaaatatcataagttgcttctaaatttctaagtttgag

SEQ ID NO: 273373 - DNA, 603 bp, Homo sapiens
tgctaaatccttgaatctaatgacatgtattgtccacactatatggaatacatgagtaaattaaggatagtttcagaaaacctctcctttattttcagtattctccctcatctaaagttcactstagccatgccagaaatcttttctctactttcttctttcagcagactatgaaaattaagaagcctattaggcatctaaattattatccaggctccagttaagctcaatatagcactctgtatcagtaacgtggctcaaggtcaactacacgtaagccaatattgtgttttctctttgccattttcccatggaggagaggtagctgtgatatggatcaggattcatgtatttccaagagatattttacacaattttgataagtgcctttattaggaaattacagaaagagcatgcaggtgaggacactgctctaaggttggggcccagcacaggaatacctggaggagattaaattgtcttccaagatattaactaaaatgtgaagatggaattttctcttagtgtgcctgaattaattgcctcttgggagacatgaaatttttaaatatcataagttgcttctaaatttctaagtttgag

SEQ ID NO: 273374 - DNA, 593 bp, Homo sapiens
tggtttaatgtgtgtgtatgtgtgatggtatttgaataatataacaaattctattaattaacttaattaaaaataatctctttagtacaggaagatttataggataacatcaaataattctgcaatcagtagtgctatataatgaagaaatttactcatttacaagtgaaaaatatcttatatcagattagttagtatgtgtcatcaatatctttgcctgtgcatcttaataaaactatgaagaagagtcattgatgagagcacatgaagctagataaattgaataatttaatcctctaataagcaataactgcagctctaaaaattattcagattatttagaattaggaacttgtgaaggcagagagcttgctcctcttttgaccaccaggacttccagtgatcaggcatgaatgatttctggagggttttgacgagaggagtaatatggatctctaggagctagctggacatgtcaagagttccagaaagcaaataaatgtacatattatttctaatagacatgtaaaggcatttcatggactgaataggagctaataataagcttgawtccttttcaggaagagcaagtt

SEQ ID NO: 273375 - DNA, 594 bp, Homo sapiens
aattaaacattttattagaaaaatagtgattttttccaaagtttatattggtaacatgctgaatgttagaattgctttataagaagggcacactactgctgatttaatttttataacattttgtggattttcttttctttcctaaatctttcttaaaaactactaaagttaaccaattggatttaatcacttccccatgaaaataaagatagaaatatgataattttaaataartttagtcgtcatgaatgtttattataacatcgagttttgaaataatagaatatctcccatttagggtgacaacaaagataattgatttaaaacttattttaactttggcaacaaagttaaaatgatatatttaaattatatttttgtctttaagtaaaaatagctcattagtctcattaaaatactttttataaattaatattaccttgcctctaaataaaagaatatttttaaagaagaaaactggttcagctttttgaaatatattatctgaccatatttgaaaagtaacaatatgaaggcagctttacagttgcattagtacacatgtaagtaataatctctaatttatgaagttta

SEQ ID NO: 273376 - DNA, 585 bp, Homo sapiens
ttaatgctttttgcttaatagaaattgctttaatattatttttaaataatcaaagaaaattaaacattttattagaaaaatagtgattttttccaaagtttatattggtaacatgctgaatgttagaattgctttataagaagggcacactactgctgatttaatttttataacattttgtggattttcttttctttcctaaatctttcttaaaaactactaaagttaaccaattggatttaatcacttccccatgaaaataaagatagaaatatgataattttaaataaatttagtcgtcatgaatgtttattataacatcgagttttgaaataatagaatatckcccatttagggtgacaacaaagataattgatttaaaacttattttaactttggcaacaaagttaaaatgatatatttaaattatatttttgtctttaagtaaaaatagctcattagtctcattaaaatactttttataaattaatattaccttgcctctaaataaaagaatatttttaaagaagaaaactggttcagctttttgaaatatattatctgaccatatttgaaaagtaacaa

SEQ ID NO: 273377 - DNA, 585 bp, Homo sapiens
ttaatgctttttgcttaatagaaattgctttaatattatttttaaataatcaaagaaaattaaacattttattagaaaaatagtgattttttccaaagtttatattggtaacatgctgaatgttagaattgctttataagaagggcacactactgctgatttaatttttataacattttgtggattttcttttctttcctaaatctttcttaaaaactactaaagttaaccaattggatttaatcacttccccatgaaaataaagatagaaatatgataattttaaataaatttagtcgtcatgaatgtttattataacatcgagttttgaaataatagaatatctcccatttagggtgacaacaaagataattgatttaaaacttattttaactttggcaacaaagttaaaatgatatatttarattatatttttgtctttaagtaaaaatagctcattagtctcattaaaatactttttataaattaatattaccttgcctctaaataaaagaatatttttaaagaagaaaactggttcagctttttgaaatatattatctgaccatatttgaaaagtaacaa

SEQ ID NO: 273378 - DNA, 538 bp, Homo sapiens
taatttaaactgaataaagcacgttgaagttaccaacatattctcaaaattaggaattcaactgagwcataattcatccagaaacacaatttaaaggcgtacaaatgattcagagtttttaactcatctgtgtaatggaagaccatagtactaagtaaatattactctggagattcctctactactaagagtaaactacataattcattagttataaaacataagaaataaaaatttaaatggagtgattagaataagttgctctgtaaagatttttaatgtaccattttattcaaggaataatttaaagagcaagagtaatgtaaaactacaatgggaatgtcagttacattgagataaaactaagactttaaaaaaatgatatttactgtgagataaaagtatcatcaaattatgatcacaatttatgatataaaataagcttcttatgtcactgataatagtacttgtgctcacctttcataatcaaaatatgaaaaccacttgaaattgtaaccatgagtggcaggtggtaaaa

SEQ ID NO: 273379 - DNA, 536 bp, Homo sapiens
taatttaaactgaataaagcacgttgaagttaccaacatattctcaaaattaggaattcaactgagacataattcatccagaaacacaatttaaaggcgtacaaatgattcagagtttttaactcatctgtgtaatggaagaccatagtactaagtaaatattactctggagattcctctactactaagagtaaactacataattcattagttataaaacataagaaataaaaatttaaatggagtgattagaataagttgctctgtaaagatttttaatgtaccattttattcaaggaataatttaaagagcaagagtaatgtaaaactacaatgggaatgtcagttacattgagataaaactaagactttaaaaaaatgatatttactgtgagataaaagtatcatcaaattatgatcacaatttatgatataaaataagcttcttatgtcactgataatagtacttgtgctcrcctttcataatcaaaatatgaaaaccacttgaaattgtaaccatgagtggcaggtggtaa

SEQ ID NO: 273380 - DNA, 511 bp, Homo sapiens
atttatatttttaatagcaagaagctttgtggcttataggagagacagacacagaaaatataaattaaactatatttattcattatcttccacattaagattctcagaattaattgttctcttaaagaaatggtgcagcactctgtagctgctctccaatcttcagacattttattttttccacccrtcataatgagatctgacttcctctgtatgttattttttggggttgggttctgctagatgtcagtataatctgaagagatagatagagagagagagagagacagagacagagaaagagatcatcatagtatgatgattatttctgaataaaagcatataacttggatctattagtagtcgggcttagtccaggaattacaactacactattaaagaaaaatggaaggagacacacttaaaattttgtacgttattagtaccaatgtatttcacagttgaatgcccttatagaaagacataaaagcatccaatattcataacatag

SEQ ID NO: 273381 - DNA, 631 bp, Homo sapiens
ctttccccttgtatccagtcagtcaccaaatgctgtcatagttgtatctctagtattccataattcctctgtamctacatatatttcctcatcccattgctttatatattcgagagagtattgtttcccaaatgccacattcatcataacttttcccttgtttaaatactgaaacttgttctctataattttaattcacatttgttcattcaatccctgtccctgttttctgagcatcaatgatgtatgaacataatatggagtcctgatgatataaagatgaggacacattgctccagcctacacacacacacacacacacatacacacacacatgcacacacacacatccctctcaatcccttgtttgctttttgaaggtattttatcaactaacccttaatatgagtgataatgttcagaagcagcccacatgccatcagtgataaatgtaattaaagttgcctatagattttgtctataaacataatttttttttctgaatacctccattaatgcagagctgttcttgtcaatatattataggtgcatagtagtcttccacatagaatcaattacatcttagttacaccatttaaaagcaagaaccctgcatgtgtcccagacttag

SEQ ID NO: 273382 - DNA, 542 bp, Homo sapiens
tttacatattttatagcacaagactctcaattactccttgtgtctggtactcccatgactcagatttggttatactgtatgcttatttgatgatggagtttcttctattttcatcaaaacttcccatttgttgcccaagtttctgaatttgttaccattttgttctacattttaaaacattactgtcctacagatgactctcctrtcactatatgcagttttgatacctctctttggttcaagccataaaggtatcctattagaaatttctattctctgcaactaacttctaagattttccagatttcacctgaccacctgaaatagtcaatatttagcttcatttttgttaaccaaactactctgtactgtctttcttatttgcttttatctttattactctcctctcccactattttactgtaatgtaacaagaaatatatattttgtctctgctctccagttattggcatagagcttttaaaaccattgtaattccttgagtgacagaggtgagaatggcatcttttgtaattagaagt

SEQ ID NO: 273383 - DNA, 542 bp, Homo sapiens
tttacatattttatagcacaagactctcaattactccttgtgtctggtactcccatgactcagatttggttatactgtatgcttatttgatgatggagtttcttctattttcatcaaaacttcccatttgttgcccaagtttctgaatttgttaccattttgttctacattttaaaacattactgtcctacagatgactctcctatcactatatgcagttttgatacctctctttggttcaagccataaaggtatcctattagaaatttctattctctgcaactaacttctaagattttccagatttcacctgaccacctsaaatagtcaatatttagcttcatttttgttaaccaaactactctgtactgtctttcttatttgcttttatctttattactctcctctcccactattttactgtaatgtaacaagaaatatatattttgtctctgctctccagttattggcatagagcttttaaaaccattgtaattccttgagtgacagaggtgagaatggcatcttttgtaattagaagt

SEQ ID NO: 273384 - DNA, 542 bp, Homo sapiens
tttacatattttatagcacaagactctcaattactccttgtgtctggtactcccatgactcagatttggttatactgtatgcttatttgatgatggagtttcttctattttcatcaaaacttcccatttgttgcccaagtttctgaatttgttaccattttgttctacattttaaaacattactgtcctacagatgactctcctatcactatatgcagttttgatacctctctttggttcaagccataaaggtatcctattagaaatttctattctctgcaactaacttctaagattttccagatttcacctgaccacctgaaatagtcaatatttagcttcatttttgttaaccaaactactctgtactgtctttcttatttgcttttatctttattactctcctctcccactattttactgtaatgtaacaagaaatatatattttgtctctgctctccagttaytggcatagagcttttaaaaccattgtaattccttgagtgacagaggtgagaatggcatcttttgtaattagaagt

SEQ ID NO: 273385 - DNA, 542 bp, Homo sapiens
tttacatattttatagcacaagactctcaattactccttgtgtctggtactcccatgactcagatttggttatactgtatgcttatttgatgatggagtttcttctattttcatcaaaacttcccatttgttgcccaagtttctgaatttgttaccattttgttctacattttaaaacattactgtcctacagatgactctcctatcactatatgcagttttgatacctctctttggttcaagccataaaggtatcctattagaaatttctattctctgcaactaacttctaagattttccagatttcacctgaccacctgaaatagtcaatatttagcttcatttttgttaaccaaactactctgtactgtctttcttatttgcttttatctttattactctcctctcccactattttactgtaatgtaacaagaaatatatattttgtctctgctctccagttattggcatagagcttttaaaaccmttgtaattccttgagtgacagaggtgagaatggcatcttttgtaattagaagt

SEQ ID NO: 273386 - DNA, 603 bp, Homo sapiens
ttgcctattctgatatgttcaatacatgaagtactaaaacttttctttacatgaagaatataaatcctacatatgtgttattcttttctgcgtgattataccactgtaagtctagaacctcttatatagttaaggccagctctagattaaggcaggatccacaaactaataggcagattgtagttatgrgacactaaaaagccatgcaattatttttccttcatgatctctatttagcaaaaatattaactcatacttcaaatttaataattcttgaagaaatttcgtacaaaaaaagtggaaatgtaaaattgtacaactattttgaagtgaactgggaaatttagaaacataaaaaatgattatcccaaaagactcaaacaatgtagcttctgggtatctgcagcttgttcctatttgtgaagataattggtctttgacacatctctcatagagtaaatctaaattggaaacccattatagctttattaaatgtttaacaaagcccctggtgtggtgcctcacgcctgtaatcccagcacttagagaggctgaggcgggcagatcacctgaggtcaggagtttgagagatcagcctggcca

SEQ ID NO: 273387 - DNA, 485 bp, Homo sapiens
aaaaagagaactaagctaaggttataataagtaaacacatggccagaaatgacagacaattgcttttgaacatgaatttatgtctaagtaattattatagttctaaagtttgtaacatcaaaacccctgaggtaaaaatggtaraaaatgcaagttgccttgtataagaatgggatattaagaagcccttgttaattttagggaaaatacggcttgaaaaataatttttgaaatgttaaacataacctcttatcaaattgacagaataattcattaatctatttcatcacctaaaactaatacatttgtattatatttctattaaatgtcaaaaaatgtccagtttctagaaagataaatgaaaaatattatgcctccaatgcactcaagaatatcacagttcagtaagaaaaactggcacaagcagttaattataaaaagtgtacaaataactatagtataccaaggaaacagtgtcaaagaat

SEQ ID NO: 273388 - DNA, 553 bp, Homo sapiens
ttattgcaacgttgttcaattgctgggctcttcctctatcaattacacagagtctctgtccacaccacatggccactgctgcggggaggcggcgcaggstgacaatagacagaagcaagacatttatctttcttatgttttcaatgcttctttcagcaatatgaagttaaaaccaggcactgggagtgcttacctgatttttggttcttacaaaagtgcttcttttgtgtagatagtcgttaaattggtgttcttggagtggtgacaatcagtggagccttctattaggccatcttgctctgccttactctagatgagaattgagtgtaacttctgaaagtattacgctaaatgtgtcagcacaatggtttagatgtgaatgtgggaattaactcttttccaggttcaaagctagaactcatggccaatcatttgctaagtttgaacttttaatctttctattgaaattatgtttgcagtgtgctcaaaggaagtagtctgaagtctagtgtgcggtggaataaacagaagcagggaattaagctttgccttg

SEQ ID NO: 273389 - DNA, 391 bp, Homo sapiens
ttaattcttgatttcttttaaaataattatttaaatattagaacaaaaggacattgagaggttatttagtctacttcttgtaccttagccaaaatcattcctaaactacaagcataaccatcttcttcctttactcctaggaaactcccacaaagaaactttaggctctatcttagcatcttattctagtccataaaagcactcaatattgtcttaatcacagatttaaatatttgatttcaatttattaaatttttattcttagaatgaataaataaatggctttytccaccataatctcttatttttaaatttcttgtgtaaatgattttttcttctatctcctcattgacattctcaatttcccagcaaaagagtaacagatcgttta

SEQ ID NO: 273390 - DNA, 310 bp, Homo sapiens
acagctgaggtggattggatggtgataattaagatacatactttacaaaatattaattaatttatttgactccttcggtttagcatttgtttcctttctgatatctctaaacgttaaaaattttgtggcaaagttaaattttaaggtaactattattattattattattttactatgctctaagttttagggtacatgtgcacaacatgcaggtttgttacctatgtatgtgccatgttggtgtgctgcacctattaactcrtcatttaacatgaggtatatttcctattgctatccctcccctctctcc

SEQ ID NO: 273391 - DNA, 619 bp, Homo sapiens
ggttcttacaacatagttgatctttaaacaatgttatctctccttctttctttatttcctttctatgaatttaagcatattaaaaccttgtttgggaaaatgcattttcttatttttgcaacattttatttggaaaaatttatttcttaaaaaatagaatagaataagtgaaagtgtataaaactactaatagtggactatttctaacttacaaaaccatcagtgtacttggtgaagagtgtttgcatttaaattgaactacacgagacggttatttttatagataaaaatgttcaaatagcagcagctttatgaaatatatggttcaatataaatacaacaaacacttctatacccttccacttaggtttaacaattgtcaatgttttgcacatttattcactctttttctagattaaaaamaatacaggtgcacagacatacagatatagctatccctgaatctatcattttacctatctacctgcctatctctcaatctatccatccatctatcatcatattttttgattgagctaaaaccaaactctctctacacacagatgaacacacacagacacagacacacacacatacacacacacacacaaacacagac

SEQ ID NO: 273392 - DNA, 582 bp, Homo sapiens
aagcccctgggcctttagtgaacattggtggtagccaagcagtggtcatgacaggccttgggcaagacccagtgctgtgctggctttgggtctaacccagcatagttccagtagtgatggccataggggtgcttatgtcacccctaatctagctccaggcagctcagcacacagagtaagagactccatttgtttgaaagaaagcaaaggaagggaacaagagcctctgcttggtaatccagggaattctcctggatgttacccaagactaccaaggcagtacctctgtaactgtgtacaatttacagcattattagccttggggtgtcccctaatgcagatgaagatgcagtgaccaaasagttagatcacaacactcaattccctatgaattctcagaaaactttgcaaggaaggatagatataaataaacccagaatgtgaagactataagaaatacccaattcttcaatgcctagacatagatgaacatccacaaccatcaagaccacccagggaagaatgaccttactgaatgaactaagtaaggcaccagggaccaatcctggagagggagaggca

SEQ ID NO: 273393 - DNA, 582 bp, Homo sapiens
aagcccctgggcctttagtgaacattggtggtagccaagcagtggtcatgacaggccttgggcaagacccagtgctgtgctggctttgggtctaacccagcatagttccagtagtgatggccataggggtgcttatgtcacccctaatctagctccaggcagctcagcacacagagtaagagactccatttgtttgaaagaaagcaaaggaagggaacaagagcctctgcttggtaatccagggaattctcctggatgttacccaagactaccaaggcagtacctctgtaactgtgtacaatttacagcattattagccttggggtgtcccctaatgcagatgaagatgcagtgaccaaagagttagatcacaacactcaattccctatgaattctcagaaaactttgcaaggaaggatagatataaataaacccagaatgtgaagactataagaaatacccaattcttcaatgcctagacataratgaacatccacaaccatcaagaccacccagggaagaatgaccttactgaatgaactaagtaaggcaccagggaccaatcctggagagggagaggca

SEQ ID NO: 273394 - DNA, 514 bp, Homo sapiens
caaaaagcaaccagaaaacaaataagaaaatggcaggagtattttcttattcataataatattgaatgttaatggactaaactctccaatcaaaagacatagacttgttaaatgaatataaacaaacaagaccaaatgatctgttgcytacaggaaacacatatcacctataaagacacacaaacactaaaaataaagggaaggaaaaagttatgcattgccaatggaaaccaaaaaagggcaggagtagctatgcttatatcaggtcaaaaatatttcaaggcaaaaactgtagaacaaaggaagttattacataaagataaaggggttaattcagcaagagaagggagcaattataatatatatgcatctaacactagagcatgcagatatataaagtaaatattattagagctaaaaaggaagatagacttccatacaaaaatagctggagacatcaacaccccacttttagcactgaacagattatacagtcagaatgttaacaaaggaa

SEQ ID NO: 273395 - DNA, 591 bp, Homo sapiens
ggcaaaaactgtagaacaaaggaagttattacataaagataaaggggttaattcagcaagagaagggagcaattataatatatatgcatctaacactagagcatgcagatatataaagtaaatattattagagctaaaaaggaagatagacttccatacaaaaatakctggagacatcaacaccccacttttagcactgaacagattatacagtcagaatgttaacaaaggaacactggacttaatttgcactctaaaacaaacagtactagtagatatttagagaacattttatcaaaaggctacagaatagacattcttctcctcagcacacaaatcattctaaagaatagaccatatgttaagttacaaaacaaatgttaaaatattcaaaaaaattgaaacagtatcaagcatctcttatgaccaaaatggaataaaactagaaattaacaatgagagaaactttagaaacacatggaaattaaacagcatgcttctgaatgattagtaatgaaattaaggtcaataatgaaattaagaaagaaatgtgtagatcggtcagggtggtgggaaaaattataggaaaga

SEQ ID NO: 273396 - DNA, 599 bp, Homo sapiens
tgcatacaggactgctctctactcaggggatcaacaatattaattactgacaagttgtatttgctccaagccgctgtcattaaatctgtactaaataaatccgagggtcaccggcttatgggggctgcactcttgtcagtggtgctaagctgtgcagtcccccagccatgctctcagtcaaaatgcctgtgtcatcatactcctttcatccgtcgcttggccagagtctgtgggacacactcagcagaaatgtaaaaattgcttgaaacaaatgataatagaaacacaacataccaaaatctatgggatacagcaaaaacagtactaagtggaaaatttatagataaaaatgcctacatcaaaaacgatgaaaamcttcaaataaacaacctattgatgtatcttacataactagcaaaataagcgattacacactcaaaagtagtagaagaaaatatatataaagattagagaagaaataaatgaatttaaaatgaagaaaacattaaaaaagaagataaaagtttcatttaatgaagaaaaagtttattttttgaaaagataagtaaaattgacaaaccaatagctagattaagaaa

SEQ ID NO: 273397 - DNA, 588 bp, Homo sapiens
actgctctctactcaggggatcaacaatattaattactgacaagttgtatttgctccaagccgctgtcattaaatctgtactaaataaatccgagggtcaccggcttatgggggctgcactcttgtcagtggtgctaagctgtgcagtcccccagccatgctctcagtcaaaatgcctgtgtcatcatactcctttcatccgtcgcttggccagagtctgtgggacacactcagcagaaatgtaaaaattgcttgaaacaaatgataatagaaacacaacataccaaaatctatgggatacagcaaaaacagtactaagtggaaaatttatagataaaaatgcctacatcaaaaacgatgaaaaayttcaaataaacaacctattgatgtatcttacataactagcaaaataagcgattacacactcaaaagtagtagaagaaaatatatataaagattagagaagaaataaatgaatttaaaatgaagaaaacattaaaaaagaagataaaagtttcatttaatgaagaaaaagtttattttttgaaaagataagtaaaattgacaaaccaatagctagattaagaa

SEQ ID NO: 273398 - DNA, 588 bp, Homo sapiens
actgctctctactcaggggatcaacaatattaattactgacaagttgtatttgctccaagccgctgtcattaaatctgtactaaataaatccgagggtcaccggcttatgggggctgcactcttgtcagtggtgctaagctgtgcagtcccccagccatgctctcagtcaaaatgcctgtgtcatcatactcctttcatccgtcgcttggccagagtctgtgggacacactcagcagaaatgtaaaaattgcttgaaacaaatgataatagaaacacaacataccaaaatctatgggatacagcaaaaacagtactaagtggaaaatttatagataaaaatgcctacatcaaaaacgatgaaaaacttcaaataaacaacctattgatgtatcttacataactagcaaaataagcgattacacactcaaaagtagtagaagaaaatatrtataaagattagagaagaaataaatgaatttaaaatgaagaaaacattaaaaaagaagataaaagtttcatttaatgaagaaaaagtttattttttgaaaagataagtaaaattgacaaaccaatagctagattaagaa

SEQ ID NO: 273399 - DNA, 583 bp, Homo sapiens
agtcaaggaagggctggtattaccccttctgagccccaggctacagagttcatggctgcaaaagttaccccgtattttcccttgaggagaggagagggaagagtggggaggaacttgtcttgcatcttggatattagctgtaccatagcaagacagcaccggttggagtcatgaggctgctgttccagacctcagctcccagacaacatttcttgatacaccctgggctggaagggaatctgctatsctgaaggaaagaacccagtgctggcagcatttattacctgcttagtgaagaacccttggtcctggataaccagcagtgatacccaggtgctacatcaagggccttgagttagcctctgagacttgtggtcttcagatgagactcagcacattaccagctgtggtgtctctcggcaaaacaccttctgcttgagaaaagcagagggaagagtaaagaggactttgtcttggaccttaggtaccaacatggccacagtggggcagagcaccaagtgggctctcagaggacctgaatctatgatgtgactcttggacatcatttctggatgtgccctgg

SEQ ID NO: 273400 - DNA, 583 bp, Homo sapiens
agtcaaggaagggctggtattaccccttctgagccccaggctacagagttcatggctgcaaaagttaccccgtattttcccttgaggagaggagagggaagagtggggaggaacttgtcttgcatcttggatattagctgtaccatagcaagacagcaccggttggagtcatgaggctgctgttccagacctcagctcccagacaacatttcttgatacaccctgggctggaagggaatctgctatgctgaaggaaagaacccagtgctggcagcatttattacctgcttagtgaagaacccttggtcctggataaccagcagtgatacccaggtgctacatcaagggccttgagttagcctctgagacttgtggtcttcagrtgagactcagcacattaccagctgtggtgtctctcggcaaaacaccttctgcttgagaaaagcagagggaagagtaaagaggactttgtcttggaccttaggtaccaacatggccacagtggggcagagcaccaagtgggctctcagaggacctgaatctatgatgtgactcttggacatcatttctggatgtgccctgg

SEQ ID NO: 273401 - DNA, 536 bp, Homo sapiens
atttgacaacaatcctaaatatttacatagtattattaaaaagaagttgtgaatttaagagacattttaaagtctgtagtaaaaaccaaaaccaaatattgatcaaccatacaagaataaatgcagaattatctttctatcctctgtagagagaatgttactattaaaatcattctcaaatgaaaagcatgcagaaaaaagcatatagggaaaaagtattggagatgcaatcaatgaatacaaaaatatgctcttttctggattttgctatgttcatgctatttttcttgaacatttcttttaagaaattgtcaygtattcttaaaatatgtaatttgttgtgaatcatcaatttgaatatatattcattactctacctaattttttatgtataattttatatcatttttctaaaaggggttactcagtttcatgccccatagtgcttagcctgcctctgattctgacggtgccaaccattggctaaaaccaaacataaacttgtttctcaggttggtctatttgaaggagcgagg

SEQ ID NO: 273402 - DNA, 615 bp, Homo sapiens
atggcatgactgaaaaaatacacatattatattttattgatgtatttctggcagtcttgtttccttatttgtgatgtctccttggggatattgagttttggcattattttaaaaaatcaggataaggagaatcagagagagctgtcaatctttcagccaagaggaacatctgctaatagctaacctacttkaaccagctggattgtgcttatgataaggtttattactttctgaggggcaagagctctggcatcctctgagtggattcagatacattatcagtccaggatgtataaattgcatttaaagtcagaatagcaatcaaggcaaaacaattacagtatctaaaataatgcaatcagggattaccacagttctaaagatcacctggaaagaaattgtaaggaatttggttcttagtggatagctggagcctctttcagagaatcacatattctttcacctctcctggacccccaccagacccatttgcccatgagcaaaaggaaaacttcactaatggttagtacttctggctaagatggctacatctgcactcatatccactcttctctttactaagtagtagaagccttacattttagctgagcacaa

SEQ ID NO: 273403 - DNA, 615 bp, Homo sapiens
atggcatgactgaaaaaatacacatattatattttattgatgtatttctggcagtcttgtttccttatttgtgatgtctccttggggatattgagttttggcattattttaaaaaatcaggataaggagaatcagagagagctgtcaatctttcagccaagaggaacatctgctaatagctaacctacttgaaccagctggattgtgcttatgataaggtttattactttctgaggggcaagagctctggcatcctctgagtggattcagatacattatcagtccaggatgtataaattgcatttaaagtcagaatagcaatcaaggcaaaacaattacagtatctaaaataatgcaatcagggattaccacagttctaaagatcacctggaaagaaattgkaaggaatttggttcttagtggatagctggagcctctttcagagaatcacatattctttcacctctcctggacccccaccagacccatttgcccatgagcaaaaggaaaacttcactaatggttagtacttctggctaagatggctacatctgcactcatatccactcttctctttactaagtagtagaagccttacattttagctgagcacaa

SEQ ID NO: 273404 - DNA, 517 bp, Homo sapiens
taatgccactctctttcagggttgattgaagattaagggaattaatacatttaaaacactttcacatgtactatgtgtttgccgttattatgaacacaaatattttagccacttaagattgcactttctatgtgatgcattattttataccaaattgtaaatgcatttcaaagcaaatttacttaaatatcaggaaatgagatgaaggtgaggctctaggcagtttgggaaaagagtaactatggtagatgaacagaacagaagggtaagattcaggatatgcgactatggtaagagaaaaaggaatctgatagagctctgtgatgcatgtaaatatgaacctgagtgaaaaccctttttatggcttcatgtcatgctaatattcatgttgtsagcttcaggcactttgtcaatgtgacccagtctctaaatcattctattaccatggctatagtcacaggttctcctgctaaaactaaaagtttatgatagcttatctctgccctttgcagcacac

SEQ ID NO: 273405 - DNA, 526 bp, Homo sapiens
tggagggactggctgaagccatggcagaagaacataaattgtgaygatttcatggacgtttattagttccccaaattaatacttttataatttgttatgcttgtctttactgcaatctctgaacataaattgtgaagatttaatggacatttatcacttccccagtcaatactcttataatttcctatgcctgtctttatgttaatctcttaatcctgtcattttcataagctgaggatgtatgtcacctcaggaccctgtgatgattgcgttatctgtacaaattatttgtaaaacatgtgtgtttgaacaatatgaaatctgggcatcctaaaagaacaggataacagcagttttcagggaacaagggagataaccataaggcctgactgcctgtggggctgggcagaacagagtcatatttctcttctttcaaaagtgaatagagaaatatcactgaattctttttctcagcaaggaacacccctgagaaaagaatgcattcccggggggcggcctctaaaat

SEQ ID NO: 273406 - DNA, 649 bp, Homo sapiens
ccaaattaatacttttataatttgttatgcttgtctttactgcaatctctgaacataaattgtgaagatttaatggacatttatcacttccccagtcaatactcttataatttcctatgcctgtctttatgttaatctcttaatcctgtcattttcataagctgaggatgtatgtcacctcaggaccctgtgatgattgcgttatctgtacaaattatttgtaaaacatgtgtgtttgaacaatatgaaatctgggcatcctaaaagaacaggataacagcagttttcagggaacaagggagataaccataaggcctgactgcctgtggggctgggcagaacagagtcatatttctcttctttcaaaagtgaatagagaaatatcactgaattctttttctcagcaaggaacacccctgagaaaagaatgcattcccggggggcggcctctaaaatggccgctctggaagtgtctgtcttatgcagttgaagataagggataaaatatgccctggcctcctgcagcgcccccaggcttgctaggattaggaaattccagcytggcaaattctagtcagaccagttctctgctcttgaaccctgtttcctgttaagatgtttagcaatgacaatgcatgcacagcagggc

SEQ ID NO: 273407 - DNA, 524 bp, Homo sapiens
aactattgcaagaggcaaagaaggtctttcataataataagggtgtcatcatcaagaagatgcatcaactataagtatgtattcacccaacatcagatcacctaaatatgtaaaataaatattgcagaagtgaagggagaaataaacaacaatataattgtagtgggggacatcaacaccatcagtaccccactttcaatattaataagtcatcttgaaagaaagtcaataaagaaacagaagacttgaacaaaactctggaacaaaagtatctaatagacatatacagaacattccatccaacagcataatatgctttcttttcaagagcacatggaacactccwgaatagacactatgttagcccagtaaaccagtctttaaaagttgaagaagattgaaattatgtcagttacattttactaattacaatggcatgaaactagaaatcaatagcaaaaggagtaaattttataacaataaatgcttacattaggacaaagaaataaagagcccaactaact

SEQ ID NO: 273408 - DNA, 432 bp, Homo sapiens
actcaccacagtcttcaataacaactcactggcttttctgttaccaacagcccacctctctcattttatagtaatccttgttgcttactgatagcgcttactaaactgtatactctaggaagataaagagcaaataagtcttgttcacagttgtaatcgtgttctctttaacgatgtccagcacatagtgaactttcaaaactcttttggaaaagaatgcttgtctacgtttatctctccaatagattcaayttaatatccttcccattaataaaatacatatgttccatctttatactagtttctactgtttccacactagtctggacagttagcctactaaatgtttatgtctcattacttaaattttgctttaactgagggtggcagttagtgctgtgagattctttccaaactcttgtttgtttttca

SEQ ID NO: 273409 - DNA, 432 bp, Homo sapiens
actcaccacagtcttcaataacaactcactggcttttctgttaccaacagcccacctctctcattttatagtaatccttgttgcttactgatagcgcttactaaactgtatactctaggaagataaagagcaaataagtcttgttcacagttgtaatcgtgttctctttaacgatgtccagcacatagtgaactttcaaaactcttttggaaaagaatgcttgtctacgtttatctctccaatagattcaacttaatatccttcccattaataaaatacatatkttccatctttatactagtttctactgtttccacactagtctggacagttagcctactaaatgtttatgtctcattacttaaattttgctttaactgagggtggcagttagtgctgtgagattctttccaaactcttgtttgtttttca

SEQ ID NO: 273410 - DNA, 548 bp, Homo sapiens
atatcttccacatcatagtacagagtctggaatatagacaaaatttcataagtattcaaagactccataaacaaatgatgcattgataaaagtaaaattcagagagttggtatggattatccaatttcagagccaagacaatttttgcatattttggagacttttatttcctgaaactttctttggctatattcggctttacctaccatagcaagaacctgagaaaatgcacgttaagcacatgaatatgacttcagcagccagatattgggcaaaagacaagtattgccttcactttgaaagtccctatgtcttgtttttgtcaggtttatcaaaaatcagatggatgtgtggtattatttctgagggctgtgttctgttccattggtctatatctctgttttggtaccagtacyatgctgttttggttactgcagccttgaagcatagtttgaagtcaggtagcataatgcctccagctttgttcttttggcttaggattgacttggcaatgtgcactctttttttgttccatatgaactttaaag

SEQ ID NO: 273411 - DNA, 568 bp, Homo sapiens
atctttgataaactctggatctaatgaaaaattagatttctgcccccttagcttgttacatgtttttcttcatagcattttccactgacatttttttttacttttttactttaaatttactttattttttttacttaactagctgcctcatcattgatattgtaaagttcatgataaattttgtgttgttcacctctctatccctaatatctggaraattacctagtatatagtaaatgctcaataactatttgtttagtaaattgttaatgaacgagttcaaggttgggtggaataaatacctggaaaaaaatcactcacagggaactcataataatgattatttctagagaggcagattatataaatgaaacataagaaaaaataagactttttcctccttgtaaaactttctgctgttaggattttattaaagtaaatatagacatttactatttttagtttaacacgattaccatttgcaactactttttgtttccaaaaagattttgtaaggcctatgcaacccaaacagatatatttttataccaatataaattaaatactg

SEQ ID NO: 273412 - DNA, 647 bp, Homo sapiens
gccacgtatacacaatggggtactattccgccataaaaataatgagatactgttgtttgcaacaacatggatggaatgggaggagattattttaagtgaagtaagccaggcacagagagacagagtttgcatgttctcactcattttgtgggwgctaaaaattaaaacaattgagctcacagaggcagagaataaaaatgatggttaccagtggctaggaagggtaatgggggagaggggacaatgttgggatggtgaataacaaatatacagttaggaagattgaataagatctagcatttgatagcactaggtcaaacagggtgactatagtcaacaataatttattgtacattttaaaataactaagaatataattggaatgtttgtaacgaaaagaaacgatacatacctgaggtaatggataacccagttaatctgatatgcttgttacttattgcatgcctgtactgaaatatttaatgtaccacatgagtatttacacctattacacaaaaattaaaaataaaaattaattttaaaaagacattgtttacctagattcataatctcttattaaacttttacagtataaggttaatttcctggttgtaattgttttggatcaataactcaattctatttaa

SEQ ID NO: 273413 - DNA, 606 bp, Homo sapiens
aaaatttccatagcctaactagagaggttgatatacaaatttaggatattcagagaatcccaaaaatattctatacaagatgaccatcctcgcaacataatcatcaggctctccaaggtcaatgtgaaagaaataagtataaaaggtgactagagataagggcaatgtcacatacaaaaggaacctcatcaaactaacagtagatttttcagcagaaaccttacatgccagaagagartaagggtctacattcagcatccttaaagaaaaaaattttccaactgcaaattttatatccagccaaactcaacattataagtgaaggagaaatacaatccttttctgacaaacaaatattaaggaaattcattaccacaacaccccctttacaagaggtatttaagggagtgctaaacatggaaatgaaagactgttacctgactgagcacagtggctcactcctgtaattgcagcactttgggaagccgaggtgggtggatcacttgaggtcaggagttcgagaccagcctggccaacatggtgaaatcctatctcaactaaaaaatacaaaaattagctaggtctggtggcctgtgactgtaatcc

SEQ ID NO: 273414 - DNA, 606 bp, Homo sapiens
aaaatttccatagcctaactagagaggttgatatacaaatttaggatattcagagaatcccaaaaatattctatacaagatgaccatcctcgcaacataatcatcaggctctccaaggtcaatgtgaaagaaataagtataaaaggtgactagagataagggcaatgtcacatacaaaaggaacctcatcaaactaacagtagatttttcagcagaaaccttacatgccagaagagaataagggtctacattcagcatccttaaagaaaaaaattttccaactgcaaattttatatccagccaaactcaacattataagtgaaggagaaatacaatccttttctgacaaacaaatattaaggaaattcattaccacaacaccccctttacaagaggtatttaagggagtgctaaacatggaaatgaaagactgttacctgactgagcacagtggctcactcctgtaattgcagcactttgggaagccgaggtgggtggatcacttgaggtcaggagttcgagaccagcctggccaacatggtgaaatcctatctcaactaaaaaatacaaaaattagctaggtctgrtggcctgtgactgtaatcc

SEQ ID NO: 273415 - DNA, 650 bp, Homo sapiens
ctgaagaaatagtgactttaaacattttgaatctgctttttaacttattcagtgcaaaaaattatattagttatctattactgagtgacacattacctgaaaccatttatatctgcagtttctgtayatcagaagtctgggcatgagttaagtgggttttctggtcttggtcttgcaagacaacaagctgttgaacaagacctcagtcacttcaagtttgatggaggcaagatcatcttctaaggccactcagtgattgttggaagggttcattccttttgggtcattgaacggaaggtatggtgtgctctcaagctattggctggtggcctctgtctttcatactatgtgggcctcaccctgaggtaggcattaatatagaatttggcttcatgagagccagtaagtgaaaggatgagacagagtgaaagccagatgaaagtcttactcttctataatctaatgttggaagtgacatccaaacatttttaccacttgctatttgttagaaacaagtcattaggcccagtccacacacaaagggagaagatttttacaagggcgcgtgaacattagaaggacacacaatatttagaggcattttgaaaccacctatcacaatgatagaaaaacaggatgattttgaagaa

SEQ ID NO: 273416 - DNA, 579 bp, Homo sapiens
tgttatttttcttaagatactgagctttcttgaccaagagctttttaaaatggaatgcttcatctgtagaaacaagtatatatccttattgatatagatttaatctctgacttagctaagctccatattcctcccaacataaattctttaatgctaaataaaagctcttttcaaagggaaaaaaggataagatttgaattagtaatttagactttttatttgaaagccgttttagctrtttcttatttctaatcatgctgacatttttaaagctttataaccagaaagtctattggtgaatatctactatctcaaattcaacgaagattataagtaaagtccaagataggctcactcttttatggaaacgaaaatacacagtccccaaagcaccaatacaagttattgagaaaaaacagaaatagtagattagttaaaattaaagtctaatattatcaattatattcaaaactacaacagaatgatgtgtgtgtgtgtgtgcacatgtgtgtaatgtataatgctggatgatgaaatttaaatatctgaaacaccttgtgttagctgtggtgcaaacag

SEQ ID NO: 273417 - DNA, 579 bp, Homo sapiens
tgttatttttcttaagatactgagctttcttgaccaagagctttttaaaatggaatgcttcatctgtagaaacaagtatatatccttattgatatagatttaatctctgacttagctaagctccatattcctcccaacataaattctttaatgctaaataaaagctcttttcaaagggaaaaaaggataagatttgaattagtaatttagactttttatttgaaagccgttttagctgtttcttatttctaatcatgctgayatttttaaagctttataaccagaaagtctattggtgaatatctactatctcaaattcaacgaagattataagtaaagtccaagataggctcactcttttatggaaacgaaaatacacagtccccaaagcaccaatacaagttattgagaaaaaacagaaatagtagattagttaaaattaaagtctaatattatcaattatattcaaaactacaacagaatgatgtgtgtgtgtgtgtgcacatgtgtgtaatgtataatgctggatgatgaaatttaaatatctgaaacaccttgtgttagctgtggtgcaaacag

SEQ ID NO: 273418 - DNA, 596 bp, Homo sapiens
attatattcaaaactacaacagaatgatgtgtgtgtgtgtgtgcacatgtgtgtaatgtataatgctggatgatgaaatttaaatatctgaaacaccttgtgttagctgtggtgcaaacaggatctcaaatcattaccttccaaatgactgcttataaacctattctacatctttaaattactgaggaaatataattctgaagacaccayatacactgcatatacacttctaatttctgtctaggtctttggccccatatccctaggtttttgtttttctgtcttgatgatctgagttgggaaatagggaaacttaaatacatggtttcttcttatagcttaacacatagagctgagccaggccttagcatataactgcttgctactcaatttatccttgctctgccattttcacccaagtgacacttctctaacaaaagacatccagcctaagcagatttctcctgctaacttctatataatattttatacttcacccattaaacgctgtgttctatcctgtaaaacagaaagaaacaggtggaacatttcctagaagcatcattatttctgggaggattattttctccataatg

SEQ ID NO: 273419 - DNA, 596 bp, Homo sapiens
attatattcaaaactacaacagaatgatgtgtgtgtgtgtgtgcacatgtgtgtaatgtataatgctggatgatgaaatttaaatatctgaaacaccttgtgttagctgtggtgcaaacaggatctcaaatcattaccttccaaatgactgcttataaacctattctacatctttaaattactgaggaaatataattctgaagacaccacatacactgcatatacacttctaatttctgtctaggtctttggccccatatccctaggtttttgtttttctgtcttgatgatctgagtkgggaaatagggaaacttaaatacatggtttcttcttatagcttaacacatagagctgagccaggccttagcatataactgcttgctactcaatttatccttgctctgccattttcacccaagtgacacttctctaacaaaagacatccagcctaagcagatttctcctgctaacttctatataatattttatacttcacccattaaacgctgtgttctatcctgtaaaacagaaagaaacaggtggaacatttcctagaagcatcattatttctgggaggattattttctccataatg

SEQ ID NO: 273420 - DNA, 613 bp, Homo sapiens
ggtgaggtgagtgttttaccttcatccatgtatgtatccaagagttttgtgccaccatgttttatttgctcaaacgacccaaagatgatcctaacccaaccattggaagcataacccagcttgtaagagcaagtgtggctcagcctcaaacccactygacccaggtgggggtattcgtgtttggaatttcaacagaagaaatcatcagcttgctggagacatcctttggttttccactgttaaaagacctaaagaaggaaataacccagtgccttaaaagtttaagtcaatgagaagctgatagggaagtgataggtttccaggaattattccatgatttatttgcaactcaggaaaaagaatttgtaacagaagtgataaatttctttgaagaagttttcatttgtactggtaacatagaacatttggtagtatcttcattctgccggaagcattgtcaaaatttaactacacttcgcatgtgtgtagagaatattttccagatttctcaggatgcatctcagatcacaatgcgaagctcatctactggcgggagctttgcttaatgttcagtaccaacaagaacttccagatgatagacatggaaaacagt

SEQ ID NO: 273421 - DNA, 613 bp, Homo sapiens
ggtgaggtgagtgttttaccttcatccatgtatgtatccaagagttttgtgccaccatgttttatttgctcaaacgacccaaagatgatcctaacccaaccattggaagcataacccagcttgtaagagcaagtgtggctcagcctcaaacccactcgacccaggtgggggtattcgtgtttggaatttcaacagaagaaatcatcagcttgctggagacatcctttggttttccactgttaaaagacctaaagaaggaaataacccagtgccttaaaagtttaagtcaatgagaagctgatagggaagtgataggtttccaggaattattccatgatttatttgcaactcaggaaaaagaatttgtaacasaagtgataaatttctttgaagaagttttcatttgtactggtaacatagaacatttggtagtatcttcattctgccggaagcattgtcaaaatttaactacacttcgcatgtgtgtagagaatattttccagatttctcaggatgcatctcagatcacaatgcgaagctcatctactggcgggagctttgcttaatgttcagtaccaacaagaacttccagatgatagacatggaaaacagt

SEQ ID NO: 273422 - DNA, 613 bp, Homo sapiens
ggtgaggtgagtgttttaccttcatccatgtatgtatccaagagttttgtgccaccatgttttatttgctcaaacgacccaaagatgatcctaacccaaccattggaagcataacccagcttgtaagagcaagtgtggctcagcctcaaacccactcgacccaggtgggggtattcgtgtttggaatttcaacagaagaaatcatcagcttgctggagacatcctttggttttccactgttaaaagacctaaagaaggaaataacccagtgccttaaaagtttaagtcaatgagaagctgatagggaagtgataggtttccaggaattattccatgatttatttgcaactcaggaaaaagaatttgtaacagaagtgataaatttctttgaagaagttttcatttgtactggtaacatagaacatttggtagtatcttcattctgccggaagcattgtcaaaatttaactacacttcgcatgtgtgtagagaatattttccagatttctcaggatgcatctcagatcacaatgmgaagctcatctactggcgggagctttgcttaatgttcagtaccaacaagaacttccagatgatagacatggaaaacagt

SEQ ID NO: 273423 - DNA, 453 bp, Homo sapiens
aacatccacatacaatggtgtaaagaaatgtaatcgaaaacacttcagccttgcttggaatagcaaaaaaacaagagagacttttaataagtatggtgcattgtcacagtggaatacctcacagccaataaaaagaatgtagctttgtggatttggaaaagtagctaagatatgagttaaatatacagacctaatcccacttgtgggaataaaatgttccacatatgtgtgtaaaacctttaaaaagaaataacaggggccggctgcacttggtggctcccgcctgtaatcccarcactttgggaggccgaggcgggcaaacaactttaagccaggagatggagaccagcctggccaacacagtgaaagcccgtttctactaaaaacacaaaaagtagctgggcatggtggtgcacacctgttaatcccagctattctggaggctgaggcaca

SEQ ID NO: 273424 - DNA, 330 bp, Homo sapiens
tcatggaaaacaaggacagtctaagaaaaggttggattgtgacttcatactgaaaaatgaagcccaaaattatgaaaataggttaaatctgtcctatgttgaataaaatttatttacgcaggcataatagaaactgagtatacaggggctcaygcctgtaatcccagtgctttgggaggccaaggtgagaggatcgcttgagcccaggagtttgagaccagcctgagcaacatagtgagaccccatctctataaaaaatagcaaaaaattagccagacatggcagcgcgtgcctgtagtcccagctactccagaggctgaggagggagga

SEQ ID NO: 273425 - DNA, 489 bp, Homo sapiens
cttgaatggcagaaatgctgctccagtcatcttttaaaattttctgttttgtaaactgaargcatatacgcatattcactgactccgtataacttgtctttccattgaaaaagtgcctacacagctactatagttatctaatgctaccattaaatgcaatattgttatggataaaattcttctgaagcaatttcaattactttcagtatttcagtacacagagattttaaccctggcatcttatttgactactttctatagcacattatagtcaaaatgagatattctaatgtattaaacaagaaaaccacatgtgcaattcccccctcccacacaaatccccaatggagtgacttatcttcttgaaccagagccagttaatgttagatatgtaatacattatcctgatcccttgtgacttaaaacaactaacattctagggattggcaatttagtgatgttggggtgtgagtagccgctgtatgtttt

SEQ ID NO: 273426 - DNA, 580 bp, Homo sapiens
tagtagaaacaaaaattgaaacaagtttccatgtccagcaatagtgaaagaataagtaatacatccattattgaatattttatgataaatccatcgaatagaatactgttcagttactagagctaatactgttaacaaaagtttattgacataggaacacattcatggcatggaaagtggaggaaaagcaaattacagagtctatatactgcataatattttttgatacacacacaaaaatttaatccaaaaactcagtgatagttatctctgaaagctagggttacaggaaattatactttcttgttttacttattggtttgttattcttttctttcattattaaatatggtattcatacgaaatagtaktaataattaatatagataaattacccagtctcaggtatttctttgtagctattcaagaatgacctaatacaataatgtatatgtatgcttacagaacaatgataaaaggaaaacacatgtactcacctccaaaccaataaaataaaaattatgtaatgccctgtgtacaagatactatactatactagcataataatgaccacagtaaa

SEQ ID NO: 273427 - DNA, 671 bp, Homo sapiens
atctcagtcttctcttggtccccaaatacacctctctactgatccttcttagtctactttatacttggcttttatcttcccacctcttcagtaaccatgaaccacagtgttcagttccaagatcttttatattttcaccttctgtctaatttacttgttaaatcttagatatagtaatrttcttcaaaggggacctacattttgtaaaataaaacatttataatacatattattctatgactgctgcagaaatctcttgcctaaggggtcacatcttaaataagattgagtcctgaagtcactatgtaatgtaataattgagtggagtcaaaataaatcttacagtactttacatgagccataaaatacagtgtatatatctttatgcattcaattctaccagcaatatatagacagatatatgtggataaatacaaagtatataatgatgagtgcacatgtaaatttttattttcttctattaaattgtaacactaaagagagaaaaagagacatcacagggaggctgtgtatagttaaatttgaataggccaaaatatagaaaagatttgaggtctctgtccctcactgaccttgccaatgactacctgaaatcctctcattagttgccccttcttacctgagttattgaaaactcttcataagcattt

SEQ ID NO: 273428 - DNA, 600 bp, Homo sapiens
tgatcccccacaagtctgtaagaaccatagcataactgagcttggggaattccctaaggcagatacagcttatatcacaacacctaagtcctttcaaatatctgaaaagccttcccaagaaggaaagatacgaacaagcccagacagtaaagattacaataartacttaactcttcaatgctgagacactgaagaacatccactagtatcaataccatccaggaaacatgacctcactaagtgaactaaataaggctgtagggaccaatactagagaaacagagacatgtgacttttcagacagcaaattcaaaatagcctcaacagggcacatctaagagttattgctgttaaagagaaagtagagaaagaaataggggtagaaagtttattcaaagggatagtaacaaggaacttcccaaagctagagaaagacaccaatattcaagtgcaagaaagttctagaacatctagcagatttaacccaaaaaagactaccttgagacatttaataatcaaattctgaaagttcaaggataaataaaggatcctaaagcagcaagagaaaagaaacaaataacatacaatggagctctaaca

SEQ ID NO: 273429 - DNA, 554 bp, Homo sapiens
gtactcattaactacttccctgctcttcctttcaaggattttgttattttgtttctaggttagtatgctcttctattaagtgcactgaaagacacagataagctggtagctataattatatcacgaggagtaagaaagagaaaacaggtgctacaataaatgaaaattggcccacatatctgattttggcagaagaaatactcatctttaggaaataaagaagcacacatttactatatgacatgatttcaggaatacaatgagtgcccttgaaatatctttcaaaaccagaagtaacaattaaattttaaagctcgtctgttgccattatttctttggattattatttttccaccttactgttttaaaattcaatatgtggtatacgttctaagaaggtgaattggaggcacagttagcatgcctctytcagttggaaagagaaaatagtgtgtagagcttcacattgtgaactttgcaatataatcttgagtggtaatgagctcctttaccagaaatgagaggcaagtgggaagtgtgctgcaggagcatgg

SEQ ID NO: 273430 - DNA, 531 bp, Homo sapiens
cctttgtattataatataaggcaagcacaaatcccactgctaccaatgcagctggtgctcttttgccagtgccaccttctggctggaggccaaccaatacagtttattacagcatctccatgtagaataacccagaactcaggaaggagaaaatgtgtgcatgacctcasttgtcaccaatgcttacagcaccctggctaaccaagagatcctgaatctgaccacatgaccaattcattcctactacaacctgcatttaagaaagccagcacactaaggctatttataattaaggaatctcacagagtctactttgcccccctgccatccccatcagagctggtgctagtacttgtgtctgggagacttgaggacaagtcacatcactggatcccttgcagacatttctcaacaccagcctggagtgtgacagcccaggctggacccaaatgagaaacagcaataacagtattctggctctcagggactcctacttctaggggaagggagagtataccatatcaagggagc

SEQ ID NO: 273431 - DNA, 496 bp, Homo sapiens
gaaaaatccataagaccaaatggttttaaactgtctctgaaatcaagttgaatcaatagagtaatagtttctaagacaaggaaaatgataatacactcctcttttccattcaacscacaaatttgcactgaaccgatgatctaatgatgtttagaaatcatattttttacctgttaagaggtccagcttgttaatcaggtagatacagtttgtattttgactccacaacatttttgttgtttgacgatcacttattctttcactgtcttagttccttcactagagaagttctataaatgtcaacacataaactgaaagaaaacactataacacaatgcatttcatgtggcaaaagtgaaataaatgttatgagttgttaagtactgaattcacattcaatgttgcactcaaatatgtgtactgaaaaaaatttagttcagggatagcttataagggtggtaattggttacacttatataacaaatatattgaaaaa

SEQ ID NO: 273432 - DNA, 573 bp, Homo sapiens
tgaactcctgaccgctttggcctcccaaaatgctggaagtacaggcatgaccacctcacctggcataatatattaagttctaattaagatattagcatatatggcgataccttagcatttttatataatgagtttcaaagatcctgtaagtattcttcttgaatcaaatatgttaataatacctattgtgttaaatattccatttgtttgtgctgataaacttaacatttacaatttccatctgtctctaaggttcttaatgataatgccattggtgaggtaaggtagaggtaagtcgtcatgatagaagaccyaaacttaaaaactgaagcatatatcagtgcgacatggatttatttgttaatgtactggacaggttgagagcaagtaactcaaaattgcaaatgggctttggctaggagcacagattctgaattgagatgagtgaaatgactgctgggtttaaaaatagaacttattagctaatgcacaccagcccacctagaatgctgcccccttttccagagaatggctctagaaaaaaatttggctgtgtctttaatgtttacaaaa

SEQ ID NO: 273433 - DNA, 573 bp, Homo sapiens
tgaactcctgaccgctttggcctcccaaaatgctggaagtacaggcatgaccacctcacctggcataatatattaagttctaattaagatattagcatatatggcgataccttagcatttttatataatgagtttcaaagatcctgtaagtattcttcttgaatcaaatatgttaataatacctattgtgttaaatattccatttgtttgtgctgataaacttaacatttacaatttccatctgtctctaaggttcttaatgataatgccattggtgaggtaaggtagaggtaagtcgtcatgatagaagacctaaacttaaaaactgaagcatatatcartgcgacatggatttatttgttaatgtactggacaggttgagagcaagtaactcaaaattgcaaatgggctttggctaggagcacagattctgaattgagatgagtgaaatgactgctgggtttaaaaatagaacttattagctaatgcacaccagcccacctagaatgctgcccccttttccagagaatggctctagaaaaaaatttggctgtgtctttaatgtttacaaaa

SEQ ID NO: 273434 - DNA, 423 bp, Homo sapiens
ccacttcctcctgctccggccatgtragatgtgcttgctttccccttcaccttccaccatgagtgtaagtttcctgaggcctccccagccatactcctgtataactgtggaactatgagccaattaaagctattttctttgtaaattacccaatctcatgtatttctgggtagcagtgtgagaatggactaacacagtgatgcttctattcatcaaggaatgctaatgactgcaaggaaacccttggaagctaggagacacatagaacagattctcctcatagtcctcagaaggagccagccctgctgacaagttgatctcaggcttgtagcctctagaacagtgaaatagtagtatctgttacttaagaccctcactttgtagtatttcctgcagtaggactgatgaactaatatatcctcc

SEQ ID NO: 273435 - DNA, 600 bp, Homo sapiens
ctaatatatgcaagtcaataaatgtgataaatgacactaacagaattaaaaacaaaaaacatatcatcatctcaatagatggagaaaaagcgtttgacaaaaaccagcatcacttcatgaaaaataccctcaacaaactagrcatagaaaggacatacctcaatgtaataaaagccatctttgaaaaccccacagccggtatcatactgaagggagaatagttgatagcttttccactgagaagtggaacaagacaagggtgcccactttcaccatttctattcaacatactactggaagtcctagccaaagcaatcagccaaatagaagaaataaagggaaaccaaattggaaaataggaagccaaattattgctctttgctgatgatatgatagtatacctagaaaaatctgaagactcctttgaaagactcctagatttgataaatgaattcagtgaagtcttaggttacaaaaccagtgtatgcaaatcagtagcattgttatgtaccaacaatggctaaactgagaatcaaatcaagaactcaactctttttacaatagctgcaaataaaaaatacctagaaatatactgcacca

SEQ ID NO: 273436 - DNA, 510 bp, Homo sapiens
aatgtgaaacagacttggagaagttgagaaatggtaataatatcttacttttgaatagcaaatttgcagtttatggagtgtgttatttcattatttcagtttaaacatcatttcagtttcttctctggagtattactaccctcgtttaagagacaggtatgagaggctcaaacttgtctgtgctaactccactagtaarcatcagtctacccctggggctcctggacctatgcaggaggcacaaagctggcaaagttgaatagctaaaccccaaatgtataactaaatttgcaactagatggggacgttgaatgtcttcagctcccagacatacacccacacataatttgaagcaatgactcccctagaaagaatggcaatcatgaatggaatgaggatgtcagacacccagggcacaccaagtctagaataagagaggctgaaacaagagtcttgttttttcttatttaaatccaataatttgtaagaatacaaggcaagatgagaaaa

SEQ ID NO: 273437 - DNA, 497 bp, Homo sapiens
atcacagacaaactgaccctgagcagtgatattatttgagtcactaaactaatacccataatgaccttatatccagaaatattgtagtgtgtgtgggaggaaaaatccctatttgtaatcactttatttcttacactgttagtcagttttctgttatttgcaggcaaaaaaaaaaaaaattcctaattgattcagcagaggaggcasatcaaatgagtagccatcaactcttaaaaaggttgtttttttgttttgtttcgttttttgggggacagcgtagctttgaaaaacctgagtgaaactaaatattcttctgaaggtaaaaccaatatagcatatcatggagcctcataatttatttcaaattttatgcctgaaacaacttaccatcattactctatgctatggtttgaatgacccctccaaaacgcatgttggaacttaatctccaatctggcagtattgacaggtggtaactttaagaggtgattggatca

SEQ ID NO: 273438 - DNA, 518 bp, Homo sapiens
ggctgcttgtctacagcagcaattaacagaatcacacaaagcccatttcagtggcctattttctcaggccagccatcattgtaattatccacattagaggaattttctgatctggaggagaggttcacaagtcaaagggatctgaagttcactctgaagaatttaactaactgtttggttttaataattcctcatcaaataatctctgaggtatcaraagaaatcattccctctgctcttgataaggaatcgtcatttttgtgctgcattggcattgacacaaaggtgatatcacaaagtcgcttctgcgttttgaggcagcttctctgaagggaatacataaatcatattctcttctttttttttcatgagataagaactgtgttgtcaagtgagtaaaaaaaatagcaataagaaaatgctgaatgattttcttaaagaataaaactatatagatcccattcatgatagtaacagacatgtgatttgtctacagcttcccataatcaccttcaaga

SEQ ID NO: 273439 - DNA, 518 bp, Homo sapiens
ggctgcttgtctacagcagcaattaacagaatcacacaaagcccatttcagtggcctattttctcaggccagccatcattgtaattatccacattagaggaattttctgatctggaggagaggttcacaagtcaaagggatctgaagttcactctgaagaatttaactaactgtttggttttaataattcctcatcaaataatctctgaggtatcagaagaaatcattccctctgctcttgatamggaatcgtcatttttgtgctgcattggcattgacacaaaggtgatatcacaaagtcgcttctgcgttttgaggcagcttctctgaagggaatacataaatcatattctcttctttttttttcatgagataagaactgtgttgtcaagtgagtaaaaaaaatagcaataagaaaatgctgaatgattttcttaaagaataaaactatatagatcccattcatgatagtaacagacatgtgatttgtctacagcttcccataatcaccttcaaga

SEQ ID NO: 273440 - DNA, 565 bp, Homo sapiens
taaaaaatttgaaagtatgcaacaatcacagaatggttcaatgtaatacaattacccaktgtgtcaaaaagctatatagctatgaatagctatgttttaaaagtagtatcactaaaaatcaccaataattactgaaataagcaagatataaattagtaatatttcagtgtgtcactgtgcatgtttctgtatttatagagactatagggttttatgtcaaacaatattcacaatctaaggacattaggggagtggtaatttttcattttttcctcgtcattttcaattttggggcaattaacatttatttatttattggacagggtcttgctctgtcacccaggctggagtgcagtggtgcaattacagctcactgtaacctcaaactcgtggattcatgtgatcctctcacctcagcctccctaagtgctgggattacaggcatgagccaccgattttttctgggtgtggtggtttacacctgtaatctcagcactttgaggggctgaggcagaaggatcacttgagaccaggaattcaagaccaacttgggcaacatagcaag

SEQ ID NO: 273441 - DNA, 588 bp, Homo sapiens
tgcctttcttatcacttgcaccccttcggaaaataaaagatgctcaaatatagatgttaacactacagatgctttgtttggtaatascgtctttcagcttcctgtctttaaaaaattatattgccaaccagccatttgacataaaagtaactctttttaccaaaagacacttatattgggatgccagaagaaagaagtcatttcaaacttccttttgtcatagattcatactgtaatacacttgttcaacagatcatggagcttcctttctactgaccaactaatgaagcaaaatgatcttcagtggacaatataagtagaagcaaaatgttactaattatcagtctttttcctgagccatacagaatcttgtaatttcaagtaagacaaactcaaagagaaagtgttacaatagtctagcataccagcattactcttttaacattcagcagttttcacttccaactaaccctgaaccctagactactgagaatgtctttatcattaatttttaaatctctcctctattcattaaaatggtcacaatttcataagtaaaattaaagaagaagcataatagtggcagga

SEQ ID NO: 273442 - DNA, 569 bp, Homo sapiens
tcaccaggctccaccaacaacactggggattacaattcagcatgagatttggtggggacacaaatccaaactatatcaaggcttttgctgaaaagttaatgaaaatagtagtaaaccatatatttctcttaaagctttatgaagcatattagcatattaaaggctttacggagtcctacagcagagaaagtgatttaattttgcttatcctggaatttccaragttatttgactttgcaacatatatttttctatgtctttgcaacaaatatttttctattttgctatctggtagaatttcatgagacatgaaagtattagggttccacagaatagtttaggaaacaattctctacattatttctatcattctctcttattattctctctctctctctctctgtcacacaaacacacacacacacacacacacacacacggttatttttcctgtagaactgcactgtccaatacaatggccactgatctctagaaatatggctattccaaattgaaatgtactgttagtataaactgtatatcagattttgaagagctgatagccaaaa

SEQ ID NO: 273443 - DNA, 569 bp, Homo sapiens
tcaccaggctccaccaacaacactggggattacaattcagcatgagatttggtggggacacaaatccaaactatatcaaggcttttgctgaaaagttaatgaaaatagtagtaaaccatatatttctcttaaagctttatgaagcatattagcatattaaaggctttacggagtcctacagcagagaaagtgatttaattttgcttatcctggaatttccaaagttatttgactttgcaacatatatttttctatgtctttgcaacaaatatttttctattttgctatctggtaraatttcatgagacatgaaagtattagggttccacagaatagtttaggaaacaattctctacattatttctatcattctctcttattattctctctctctctctctctgtcacacaaacacacacacacacacacacacacacacggttatttttcctgtagaactgcactgtccaatacaatggccactgatctctagaaatatggctattccaaattgaaatgtactgttagtataaactgtatatcagattttgaagagctgatagccaaaa

SEQ ID NO: 273444 - DNA, 585 bp, Homo sapiens
ctctgcttgcatctgctatttacttcactgatgtagatagatgtaaaaggacagctttttaataaagttgtcttttgcaaaaagctatttatgtgtctgcagtttctcttaaaagccatcttgaaatatgccaaagaagtatattttggggtggtatatatttggtgtccagcagtgtggtagagtaatattatatttcactttgggaaattgtaggagactggtcagagtggttggagaagctatagggaaacgagcaggccttctgaaaggtcagaaggctctgcatagcttcaggggagaataagctgagggcaactgttctcttaccttgaggcagagggtgaagaataggtacaagagagtgtaggataatttaccttaaatagacttgtttacttatgtygtctggaaacccacctttgatcatccacccatgtaactgctccctgaaaggatgaacaataatattaattacccacagattgtgtttgctccaggctttcagcattatgtctgtactgaataacagcaagcagctccagctgtttgggactgctcactcttcagccactagtgccgggc

SEQ ID NO: 273445 - DNA, 608 bp, Homo sapiens
gtcactccgccagtgtctgcaggacagacctggcgggagatacctgttgatgtacgttcaaacttactgattctttccttagccatgttgagtctaatcgtgagcccatcaaagacattcattcttcctttcagttgctgtgttttttgtttctagaatttcctttgattccttctcagggtttccatctatctgcttatccatcagttcttatgtgttatctactttttccattaaactccttaccacattaatcatatttattttaagttccctttcagagaattctaatattgtcatcattctcaagtttgtttcttatctttgctttgtcttcccatattgtattcttcttgccttttgtcatgacttgtaattctttaattggaagctggacrtactatatcaggtaatagaagctgagctaaataggcatttagagtgaggatttatgttactttgctggaagttgagctgtgtttagtgttttctgtagctacaggtaccagaggcttcaactctagtgttcttgtttttatctttcctgttagaaactttggacttcctcagagagagttcattttggagttctttcagctataatctaa

SEQ ID NO: 273446 - DNA, 616 bp, Homo sapiens
ttttttaattagttctatctcagtaaccctcaaaaatgctttagggcatgggaacacaactgtccaatgttcaagcaactcctgttgatttaagtgtaattgatcaggagcaatatactaaagaaagcttagtacaaaagacaaataaaaagctggaggctacttcttgtattgtctgtggcttattgtacaaagcaatgaaagtctcatctactcacctatccacagccctggctgttgactccttctagtatwaaataaaatatacctagtttcttcctagaaacattctatccttaagcagatacacattgatattccaattgtctcttggagtacagaaatatttggtggcaattttgacctccaatcatcaggtttcctgtaactaaagagttttgcatggtccaggactctaataattgctttaatttatattaagcgtctcagaattgaaaacatcagattgacagcagaatggtaagtgatttcatgaggtattgtaatgtggccaaaattaataaactataaaaatcactagtaaagtcatttcctttggagacattttatttggaaattcaagtaagccacgtatggtatgcatgtgtattttgtc

SEQ ID NO: 273447 - DNA, 589 bp, Homo sapiens
tgtcaacataaagcctacatatcagttcgttactctgaatgggatggtcttctcccagattttttgaacagctggcttctcctcaacacaacttttgtcaaatactatctttgaacaaaaggctttcctagaccacccaatccaaaaattttcagctctattactctctatctaaatgaccctacttaaataacatttgcatttatttgaaatgattcagtttctatgtttattgtccaggtttaatattcacacctatctcacctccttattagactgcaagcctcaagagacaggatctagaccttaatctactgcctgctatattatccattcctagcaagttcctgtcacatagcaagtgcttgctaaattgytgataagagaaaaaaatgaaagatatatttatgaagaggtttgtatatttccattgtgtttttgatatagaatagtccattaataccataatttaatatgtcccatagctaaattcccagagatcatctctactcgcatctaataatcacaacaagcaaatcttatattttgtatttaattataagcacaaaactaatttgttttaatatat

SEQ ID NO: 273448 - DNA, 554 bp, Homo sapiens
ttgtctgcttctttatttgcttctgaatctagaatgtgaacccacatatacaagaaacctattgtagtcatctttattcctggcatagtgattatctgctgtttgttgaatggctggattcataaaaattgcctacttttattgtactctataaccatacacatttgatatcaaacttcttcttttatgctctttattttgagcttgacractatcctgtgagtcaagtaaagcagatattaccatcttcaatatccaaggagagaagatgagaggttaagtgacttgcctaagcttacataacaagtaaatggtgggtgttgaaaataatttctgaatctgagtatattatgtgttcctcatagcattaaaaacacaatcatctttctgccaattatacctttatttaattcaaattggatctatatataaggacatgagagaaacagctggaacagaaataagagtgagtatacttttagaaagatacagttaatgatttcctcaataatgattttatcttaagtccaaatgggctgtgttcgtccataaaa

SEQ ID NO: 273449 - DNA, 554 bp, Homo sapiens
ttgtctgcttctttatttgcttctgaatctagaatgtgaacccacatatacaagaaacctattgtagtcatctttattcctggcatagtgattatctgctgtttgttgaatggctggattcataaaaattgcctacttttattgtactctataaccatacacatttgatatcaaacttcttcttttatgctctttattttgagcttgacgactatcctgtgagtcaagtaaagcagatattaccatcttcaatatccaaggagagaagatgagaggttaagtgacttgcctaagcttacataacaagtaaatggtgggtgttgaaaataatttctgaatctgagtatattatgtgttcctcatagcattaaaaacacaatcatctttctgccaattatacctttatttaattcaaattggatctatatataaggacatgagagaaacagctggaacagaaataagagtgagtrtacttttagaaagatacagttaatgatttcctcaataatgattttatcttaagtccaaatgggctgtgttcgtccataaaa

SEQ ID NO: 273450 - DNA, 595 bp, Homo sapiens
gttgcaaggccaaaagccttgtatttaggcaacaaacctaacagaaaagctgactttcccacccccgccaccccgccccccgagagcctccaaggcacttaaagtattaaagtttgtgtattctggctatatctgagtagccctgtaacagatggatcttttaggagagcagctctggccagggacttccgtcttatgcagagcttctcaacctcaggatgactgacctttggggccagatagttctttgttgtggggacttttctaygcattgatgtttagtagcattcctggcctctatccactagacgtcagtagcacaccccagtcaggtgacaaacaaaaatgtctctagatgttgccaagtttcccccgataacctcttgttcagtgggccctagagccaaagcctctctcctactggattagtagtagggctatacaattagaggggctgaagtgatggaatgtgcttggattttggtgttggggaccaacccattcccactacttaataggtatagatccttggacaagtcacatataagttaacaagctttagtctcatcaccaagaagatgaagacaataataac

SEQ ID NO: 273451 - DNA, 621 bp, Homo sapiens
atctaactgaataaatctagtttgtccacttgaattgtgtcatttttatgtttgagtttaatagttttaagagagctacaagtgtaaggagtgtatagctacttttatgtcagcatacatttaaatagcgctaagtcaagtttttaaaaagttacactggaggttgctatgaaggatggagtgttggagactggactagggtcaagaagaccagccaggggaaatttgtaattgtgtaggtgagaaatagtccctgagacagaatacagtgcatggctttaaaacgtgggctcctgtgtcacgctatctggggacaacttcagtttccaatccttatgatttaatttggacaagtaaaatcatttctctaaacctcagtttcctcttctgtaagctggggataataatacaatggaactatttcattggatgaaatgaattstaatgattaataataattcatataaagtatttgacatggaatttggccaaagtatatgttcaataaaaattaaaagataaattcacaacaaacaaaaccaccaaaaaacacaaagatggaaccaagggcaatgtacactagatagtcttacatcgaaacgtaattttagtgccgagaga

SEQ ID NO: 273452 - DNA, 587 bp, Homo sapiens
tccggtttatagagcgttttcacttaacaccctccccataatgacctccatctagcaacctttacttaatccgaaactcagtgcctcaatccccttacagccccatgttccacaggatggggtgcagctcagatgtttctcatagacaaggaatacatctttgagttggccacttccagattccctagctcagaacacacattcacatgcgtctgccatacagggtcattctaagtgtttgcttaggtaattgctatcagaggcgtttaccccataccgggtggaaatgatgcctttgcatctgcaactgggcctcacttcagagtgtaactgactgactgctggaagtttcaaaaacagagtgaaggatcatttggcttctgttgaaataygagattcatttaaaagtgaacacttcacagggcactgctttggtcgaagtaagatgtttctaaatactttgtgctacaaatcttcaggtctcctagactggggcttgatgtttttcatccagtgtccatctctgatttctctccttctgccctatcccaggaagtagtctactgaaaatttagatgttaaatgaa

SEQ ID NO: 273453 - DNA, 531 bp, Homo sapiens
ggaccacagaaggaaagccgggtagaaggaaagcacctggggccctgtatctggaaacaaactcttgctactatgcaaaggcagttcacagcactcagatcccattcatctctagtaatagcacagtggtgcactatatgcatttcctgtgtatcccagccaggaaatgggaatgggatagtgttactatttcaccaaagcacctcctttttgtcactggtaactgagacagagcactaggggacaagtcactctatgatcaccaactgtggactgaggtagtggatttaaagcagctcttccataaattatggcccaaaccaaacaaaaaacaccatgcatgaaaaaaaaaaaaaagactgaaaagaaatatactaaagaataagagtggaaaacataactcggtttttctgctccttttacttctmcatattttcctaaacattataaataacacatactacttttaacatgttgagataaaaacagtttttttaagacattcaactgtgaccacatagatagacaaga

SEQ ID NO: 273454 - DNA, 539 bp, Homo sapiens
agttatggttctgctaaaacagaccttttacatgactaagagtcctggtgtacacaaaatgagcattgaatatggttggaaatctacttcacattttattagtgacactttaatatatttggaaacttctcccacaaagagtcaatcttcatggatgagaaattcatttaggaagtatgatatcttttaatcaagagatttcaccatctattaggcctggaaataaactacaaatgacctccaatttcctgtagccagtcaccatccttgaaagccctgtgaataattcatgaaggtgaccyattgcttctctcatctgtatcacaggtgatctgatggtttcattgacaaccatctttgttatgtaagtgaagagtgtgtgtgtatgcacgtacacataaagcagtagatgaatttctcctttagtttacggctttggaaaatgtctctacctatgctataaaaaggtacactttcttttattcaaatgatgatggtaaagttacatcccattttcttttttgtcttggttaacaaaa

SEQ ID NO: 273455 - DNA, 539 bp, Homo sapiens
agttatggttctgctaaaacagaccttttacatgactaagagtcctggtgtacacaaaatgagcattgaatatggttggaaatctacttcacattttattagtgacactttaatatatttggaaacttctcccacaaagagtcaatcttcatggatgagaaattcatttaggaagtatgatatcttttaatcaagagatttcaccatctattaggcctggaaataaactacaaatgacctccaatttcctgtagccagtcaccatccttgaaagccctgtgaataattcatgaaggtgacccattgcttctctcatctgtatcacaggtgatctgatggtttcattgacaaccatctttgttatgtaagtgaagagtgtgtgtgtatgcaygtacacataaagcagtagatgaatttctcctttagtttacggctttggaaaatgtctctacctatgctataaaaaggtacactttcttttattcaaatgatgatggtaaagttacatcccattttcttttttgtcttggttaacaaaa

SEQ ID NO: 273456 - DNA, 539 bp, Homo sapiens
agttatggttctgctaaaacagaccttttacatgactaagagtcctggtgtacacaaaatgagcattgaatatggttggaaatctacttcacattttattagtgacactttaatatatttggaaacttctcccacaaagagtcaatcttcatggatgagaaattcatttaggaagtatgatatcttttaatcaagagatttcaccatctattaggcctggaaataaactacaaatgacctccaatttcctgtagccagtcaccatccttgaaagccctgtgaataattcatgaaggtgacccattgcttctctcatctgtatcacaggtgatctgatggtttcattgacaaccatctttgttatgtaagtgaagagtgtgtgtgtatgcacgtacacataaagcagtagatgaatttctcctttagtttacggctttggaaaatgtctctacctatgctataaaaaggtacactttcttttattcaaatgatgayggtaaagttacatcccattttcttttttgtcttggttaacaaaa

SEQ ID NO: 273457 - DNA, 539 bp, Homo sapiens
agttatggttctgctaaaacagaccttttacatgactaagagtcctggtgtacacaaaatgagcattgaatatggttggaaatctacttcacattttattagtgacactttaatatatttggaaacttctcccacaaagagtcaatcttcatggatgagaaattcatttaggaagtatgatatcttttaatcaagagatttcaccatctattaggcctggaaataaactacaaatgacctccaatttcctgtagccagtcaccatccttgaaagccctgtgaataattcatgaaggtgacccattgcttctctcatctgtatcacaggtgatctgatggtttcattgacaaccatctttgttatgtaagtgaagagtgtgtgtgtatgcacgtacacataaagcagtagatgaatttctcctttagtttacggctttggaaaatgtctctacctatgctataaaaaggtacactttcttttattcaaatgatgatggtaargttacatcccattttcttttttgtcttggttaacaaaa

SEQ ID NO: 273458 - DNA, 513 bp, Homo sapiens
agattaatattaaaacatctttatcccctcagaatatttttcaggagacctactatggaaatccataaggcctgggagtaagacaggagaaccaacagaccccaagtctattatctattatctattatctacttagatcttttggccatcattcatctctgctcttcttcctggcacactccttccacaccttgtccctgtgataaactcctttgtgattaaacttcaaatggtatcataaggaaaggaggtattccttattcatcacagactgtgtttgatattccttcctcactcccaccaccaatgcctcacccttcataagttttcagtacmtagtttttgaataaataaatgatatattaggtacttaaaaaaagaactaaaatgacagtgattttttgtattgctcgtgtcagagcccagtagggtttttggtagatagcattccacatagtgatacagggatcaagtttccttctatttgtggctctgtcatttcttagggcttta

SEQ ID NO: 273459 - DNA, 546 bp, Homo sapiens
ttatgggagaccacagaaaaagcagaatgactgttgtacccagacaatggcttatgaggtgacccgcattttgaaggatgagtaggagtttgccatgaagaaaaaggattgactattccagacaaatggagcaagatacacaagcccatatgtgtaaaagggaaggcatactgcattgaacaatgccaagtgctagagcatagactaaatcagaaggagtgaggaaagamgaccctgttcaggcagattaggaccgttatgtgcagggcctggtatgccacatatgcaaatcaaacaaacatcaaacacagtgctccgctctattcccactctcagtgtgcagttgttagcattggtaatcagcatctcattttacattaaaacaatcacaagaggaaactcagtctcttgccacttaagtagctctccactgcctgaaaataaatttcactggagctgcattctctagacctgtattgaatttaaactctagagtgaccttttacttaaacgtatctctggactacccagcatgagacaatatac

SEQ ID NO: 273460 - DNA, 546 bp, Homo sapiens
ttatgggagaccacagaaaaagcagaatgactgttgtacccagacaatggcttatgaggtgacccgcattttgaaggatgagtaggagtttgccatgaagaaaaaggattgactattccagacaaatggagcaagatacacaagcccatatgtgtaaaagggaaggcatactgcattgaacaatgccaagtgctagagcatagactaaatcagaaggagtgaggaaagacgaccctgttcaggcagattaggaccgttatgtgcagggcctggtatgccacatatgcaaatcaaacaaacatcaaacacagtgctccgctctattcycactctcagtgtgcagttgttagcattggtaatcagcatctcattttacattaaaacaatcacaagaggaaactcagtctcttgccacttaagtagctctccactgcctgaaaataaatttcactggagctgcattctctagacctgtattgaatttaaactctagagtgaccttttacttaaacgtatctctggactacccagcatgagacaatatac

SEQ ID NO: 273461 - DNA, 546 bp, Homo sapiens
ttatgggagaccacagaaaaagcagaatgactgttgtacccagacaatggcttatgaggtgacccgcattttgaaggatgagtaggagtttgccatgaagaaaaaggattgactattccagacaaatggagcaagatacacaagcccatatgtgtaaaagggaaggcatactgcattgaacaatgccaagtgctagagcatagactaaatcagaaggagtgaggaaagacgaccctgttcaggcagattaggaccgttatgtgcagggcctggtatgccacatatgcaaatcaaacaaacatcaaacacagtgctccgctctattcccactctcagtgtgcagttgttagcaytggtaatcagcatctcattttacattaaaacaatcacaagaggaaactcagtctcttgccacttaagtagctctccactgcctgaaaataaatttcactggagctgcattctctagacctgtattgaatttaaactctagagtgaccttttacttaaacgtatctctggactacccagcatgagacaatatac

SEQ ID NO: 273462 - DNA, 546 bp, Homo sapiens
ttatgggagaccacagaaaaagcagaatgactgttgtacccagacaatggcttatgaggtgacccgcattttgaaggatgagtaggagtttgccatgaagaaaaaggattgactattccagacaaatggagcaagatacacaagcccatatgtgtaaaagggaaggcatactgcattgaacaatgccaagtgctagagcatagactaaatcagaaggagtgaggaaagacgaccctgttcaggcagattaggaccgttatgtgcagggcctggtatgccacatatgcaaatcaaacaaacatcaaacacagtgctccgctctattcccactctcagtgtgcagttgttagcattggtaatcagcatctcattttacattaaaacaatcacaagaggaaactcagtctyttgccacttaagtagctctccactgcctgaaaataaatttcactggagctgcattctctagacctgtattgaatttaaactctagagtgaccttttacttaaacgtatctctggactacccagcatgagacaatatac

SEQ ID NO: 273463 - DNA, 485 bp, Homo sapiens
ttcttaatttatacttatacataacatgtttggtgtatgctagggctaaattgtgtacactagggctaatgccaaattcttttaggrcattgaatgcacacatttatcatacatttgtaaacacagtcctcataacttttgggttggtttcctttcattttttcagaattcagccattgtgcagtacccacccagtgtagtcactctgccagaaatgagctgagggtctgtcccagtcaacaaacacaaaaaccacaattcaaaatgattgacatgaagatccatgtaacggccttttaggaatgcaactgggtttaatgtagtgaaaatgactcttagagacttcctcttccttaattttctaccctattttataaactgggaactaccatccattcacaaacattaggaagtagtccctctacccttgattctgtatctccaacacccaacccatcctcagaaagtagaaaagatttctctga

SEQ ID NO: 273464 - DNA, 531 bp, Homo sapiens
aggtataagaaagtgctaagctggcaataccaagacagaaagagcttcagaatgtgcattgcctgtctgtaaagggtgcaggttgggagtgaaagctgctacatcaggattctgacagtcataggggacaaggacaaggctgacacatccagctcctcttgggtgaggtccccaagagcattcttggtccttgccccacccctcactccacctaatggtgctggggcatgttacctttttggtggactacagccattgatctcagttaaatggagytaattttctcaaatatctttagtgtcagaatagatctctttctctcttcatggccaccaggactcgtgggaaggagacaataacttgggcaagcatatctgctgtgcaaacacaaagttgccctcaggtgggcaaagttcagactcagagctagggagttacattccattttggcacttacatgaaactaccacctcaaaatagctttatctgtaccaaaagtggtattttggttctccagccactgacacattt

SEQ ID NO: 273465 - DNA, 563 bp, Homo sapiens
gctcaggtgaatagcactgatcctaaaattgggatcacatctgttctccagtgagagtttgcaaaactctgaacaccttgtcccracaccatctgctccatcccccttccccacctgatgaacttttaccaggctggtagtcgatcccagggaatcaaccattcctcaactcactgggggcttgatgtggaattggagcaactcctttttgccctctctggcccaccttgaactttcttgtcctcacaccctgcagccctgctaccagctcctctgccctcagttgtgtgttgacccaaccagtagcctctttcatcccaaggacctgttgaccatccctttctttgctctcattctgacttctcctcctctcctggtcactttcttctttttctatcaggcattcattcaacaagagttatttcgcacctactctatagtgagtactctgctaagggctagggatacaactgtggaagcgctctccagagtttctgccctcatggagcacaagaagagaaaagtaaaccgatgtggaagcggctaagtttgcattggaacag

SEQ ID NO: 273466 - DNA, 563 bp, Homo sapiens
gctcaggtgaatagcactgatcctaaaattgggatcacatctgttctccagtgagagtttgcaaaactctgaacaccttgtcccaacaccatctgctccatcccccttccccacctgatgamcttttaccaggctggtagtcgatcccagggaatcaaccattcctcaactcactgggggcttgatgtggaattggagcaactcctttttgccctctctggcccaccttgaactttcttgtcctcacaccctgcagccctgctaccagctcctctgccctcagttgtgtgttgacccaaccagtagcctctttcatcccaaggacctgttgaccatccctttctttgctctcattctgacttctcctcctctcctggtcactttcttctttttctatcaggcattcattcaacaagagttatttcgcacctactctatagtgagtactctgctaagggctagggatacaactgtggaagcgctctccagagtttctgccctcatggagcacaagaagagaaaagtaaaccgatgtggaagcggctaagtttgcattggaacag

SEQ ID NO: 273467 - DNA, 571 bp, Homo sapiens
ttatgagataggaacagatattgaaagtacataaacatttatagctattgacagagcaattattttcataatcatcaaataacaaaacatttgggtttatattatgtatgtttttttaaattttccttttctagtaattcatttctattgtgatttacaaaaacatcagtatgtaacacactggaaattaaaaaaataaaaactgattcttcaagtttgagaagcactgtacccaagtgagagacctttgaaaacaggggccatcttttagtgtctggataagtgagaaatattccacgtaagggatggctttttgctgaaaacaatttctgacctatactactagctgcctctagcatttctgatctgaagggacacaaaccaggggggrcaattaaaaatatggacactggagtcagcaggaagtggatttgaatcctgtgtctgcaacttagcaactacactatcttgagtaagttacttagttttgctgtgacttagtctcctcttccatgaaaaaagaaacatacatcagggaaatgcaattcataactacagtgagataccactt

SEQ ID NO: 273468 - DNA, 571 bp, Homo sapiens
ttatgagataggaacagatattgaaagtacataaacatttatagctattgacagagcaattattttcataatcatcaaataacaaaacatttgggtttatattatgtatgtttttttaaattttccttttctagtaattcatttctattgtgatttacaaaaacatcagtatgtaacacactggaaattaaaaaaataaaaactgattcttcaagtttgagaagcactgtacccaagtgagagacctttgaaaacaggggccatcttttagtgtctggataagtgagaaatattccacgtaagggatggctttttgctgaaaacaatttctgacctatactactagctgcctctagcatttctgatctgaagggacacaaaccagggggggcaattaaaaatatggacactggagtcagcaggaagtggatttgaatcctgtgtctgcaacttagcaactacactatcttgagtaagttacttagttttgctgtgacttagtctcctcytccatgaaaaaagaaacatacatcagggaaatgcaattcataactacagtgagataccactt

SEQ ID NO: 273469 - DNA, 602 bp, Homo sapiens
agactttgaccacttcattctttttgccaaggctaagtctctctcaggggtaagacactgcaggaaacaawataatctttgcaccatgttgctttctagttcacaaaaccctgccacaaaattttcccagagagcactcgccatatgcacaagtgaccaaatctctactttggtgagatgatgtccttgcaccggtaggacttttttttttttttttttttttttttgaggcatatcctgaatctatatgcttaaaatttaaataatcttaggcatttatttaaataaataatttagattattattatttaaatacttttcttaagcatatatcttcacaaattttcacatttaaatacattgatataaccatggcacagataaacacacaatatttctagcaccctcagagattccctcacgcattttcctaggcagaaatcatcctacatctatccgtaaggaaccactattctgattactaccataatcagttttatatattatttcataaaagtggagtcatacagtcttcatcctcttgagtcttgattttttgcttaatataatttctgagtgatctattcattttattgtatgta

SEQ ID NO: 273470 - DNA, 602 bp, Homo sapiens
agactttgaccacttcattctttttgccaaggctaagtctctctcaggggtaagacactgcaggaaacaaaataatctttgcaccatgttgctttctagttcacaaaaccctgccacaaaattttcccagagagcactcgccatatgcacaagtgaccaaatctctactttggtgagatgatgtccttgcaccggtaggacttttttttttttttttttttttttttgaggcatatcctgaatctatatgcttaaaatttaaataatcttaggcatttatttaaataaataatttagattattwttatttaaatacttttcttaagcatatatcttcacaaattttcacatttaaatacattgatataaccatggcacagataaacacacaatatttctagcaccctcagagattccctcacgcattttcctaggcagaaatcatcctacatctatccgtaaggaaccactattctgattactaccataatcagttttatatattatttcataaaagtggagtcatacagtcttcatcctcttgagtcttgattttttgcttaatataatttctgagtgatctattcattttattgtatgta

SEQ ID NO: 273471 - DNA, 602 bp, Homo sapiens
agactttgaccacttcattctttttgccaaggctaagtctctctcaggggtaagacactgcaggaaacaaaataatctttgcaccatgttgctttctagttcacaaaaccctgccacaaaattttcccagagagcactcgccatatgcacaagtgaccaaatctctactttggtgagatgatgtccttgcaccggtaggacttttttttttttttttttttttttttgaggcatatcctgaatctatatgcttaaaatttaaataatcttaggcatttatttaaataaataatttagattattattatttaaatacttttcttaagcatatatcttcacaaattttcacatttaaatacattgatataaccatggcacagataaacacacaatatttctagcaccctcagagattccctcacgcattttcctaggcagaaatcatcctacatctatccgtaaggaaccactattctgattactaccataatcagttttatayattatttcataaaagtggagtcatacagtcttcatcctcttgagtcttgattttttgcttaatataatttctgagtgatctattcattttattgtatgta

SEQ ID NO: 273472 - DNA, 508 bp, Homo sapiens
ttgtgcatgtctttttgtagacatatgaactatattctctcgggtttagatcttggagtagcttgctgaggcacayggtaagcttgtgtttaatttagtagacactgccaaacagttttccaaagaagttgtatgaatttaaactccctgttgagactttaaagattatatagttgaacatacagctatatatatacatagagagatagatatagatatagatatatagatatgtagctataaatacagatgtggattctcctccttttcctaaaatgagaacttgaaactcaacaaaatttgtatctaagatgttggtcacaacatttatatttatagatgtgaaaattttgaaatgccaaacaatttaaaaattattaagtaagttattctccatccagaaaatatgactgtatcattagcaacattcactaacataaggtttttaaaatatgggggaaatgtttttgatgtagaaattaagggaaaataattttttagaattcaa

SEQ ID NO: 273473 - DNA, 621 bp, Homo sapiens
tgacaaaccctggaataagcactgaagcttagagggaaattaattttcacaattgacatggaagcaaatacgtgtcaatcaagtgagtgaaatgcgatatctggggtgtttatggggcattgaggaagaaattcctagtgatacataatattgaggtcattaatactgagacgggcaaaagcagggaaagtttcacagagactgatatttctatgaaggaaggaaaattcattacagcactgacaaagcaatttggaaaatgcaaaactaaaccaactttggacaaagtaaggggcctacctgaaattgtgaaaagtgacaaaggacactcttagttaaaaaaaataaagagcagtaggtaattaagagcttaatyccattagcccatcaaggcaattaaaaacaaaaaacaacaaagaaacaacaacaaaaaccctctaagtttctttaagacggaaatacagcatagtaaatattcagctaggacttcttttttgtattctgagcatccagtatatttcactaaatatatatatacacacacacatacatatacacacacatatacacatacattttgagacagagtcttgctcttgctctgttgcccaggctggagtg

SEQ ID NO: 273474 - DNA, 587 bp, Homo sapiens
ttcaaaatactgattcactttcttttgggtatatacccagcaatgggattgctggatcatatagtagctcaatttttggttttttgaggaaccttcaaactgttatccatagtggttgtactaatttacattctcaccaacagtatacaagggtttctttttctccataacctcaccagcatttgttattgtctgtcttttgtatataagccattttaactggggtgagatgatacctcagtgtagttttgattttcatttctctgattatcaatgttgagcacattttcatatgtctgtttgccatttgtatttcttcttttgagaaacgtctattcaaatcttstgcccattttttttttatcaggttattagatttttttccctgtagagttgtttaggctccttatatattctggtgattaaccccttgtcagatgggtagtttgcaaatattccctcccattctttggattgtctctttaatttgctgattttatcctttgctatgcagaagctttttaacttgatgttatttcatttgtgcatttttgctttggttgcctggggtatttctcaagaaattt

SEQ ID NO: 273475 - DNA, 594 bp, Homo sapiens
ttttcattttacagatctttcactttttgaagttaatgcctaggtatttaattttatgtgtggttattgtaaatgggattactttttatttcttttttacattgttcactattgtcatatagaaatgctattgatttttacatgttgattttgtatcctgcaactttactaaatttgtcagttctaatagttttcttgtggaatgtttggatttttccaaatataatatcatatcaacagcaaacaaagatactttgacatatttctttccaatttggatgttctttrtatctttctcttgcctaattgctctagctaggacttgcagtactatattgaataacagtgatgacaatgggcatccttgacatgttccagatcttagaggaaaggctttcagtttttctcattcaatatgatactggctgtgtgtctgtcatatatggctcttattatgttgagttatgttccttctatccacagttttttgagggtttttatcctaaagcaatgttgaattttatcaaatactttttcagtgtcagttgaaatgatcataaggtttttatccttcattctgtttatatgagtacc

SEQ ID NO: 273476 - DNA, 594 bp, Homo sapiens
ttttcattttacagatctttcactttttgaagttaatgcctaggtatttaattttatgtgtggttattgtaaatgggattactttttatttcttttttacattgttcactattgtcatatagaaatgctattgatttttacatgttgattttgtatcctgcaactttactaaatttgtcagttctaatagttttcttgtggaatgtttggatttttccaaatataatatcatatcaacagcaaacaaagatactttgacatatttctttccaatttggatgttctttgtatctttctcttgcctaattgctctagctaggacttgcagtactatattgaataacagtgatgacaatgggcatccttgacatgttccagatcttagaggaaaggctttcagtttttctcattcaatatgatactggctgtgtgtctgtcatatatggctcttattatgttgagttatgttccttctatccacagttttttgagggtttttatcmtaaagcaatgttgaattttatcaaatactttttcagtgtcagttgaaatgatcataaggtttttatccttcattctgtttatatgagtacc

SEQ ID NO: 273477 - DNA, 567 bp, Homo sapiens
tgttgttctcttcccttactctctctggaacaaacagtcgtctctctgttctaagccacttaaagctgggggtagaatgacacaagcacccttgtggccaccaccactatgattgtgctgggtcagaactgaagccagcacaatgctgggtcttgcacagggcctgctgtaaccactcccttcatactatgtatgtttgcttaaggccctggggctctacagtcagtagstggcaaagccagctaggactgtgtcttttccttcagggtggcaaggacccccaggacctaggtgttgtccaggagccagggactagagtcaaaaatcttagaagtctacctggtgttctattgtactatggctgagctagcacacaaaaaaacataagatgcagtccttcccactcttccctcccctttcctaaggcagaagagcctctccctctagccactgccacccgaggctgtgaggagtacttctagactaccagccaagctgtcttaaggcccaagggttctaagtcagcttgttgtgaatgctgcctgggactcagcattcagggcagtg

SEQ ID NO: 273478 - DNA, 567 bp, Homo sapiens
tgttgttctcttcccttactctctctggaacaaacagtcgtctctctgttctaagccacttaaagctgggggtagaatgacacaagcacccttgtggccaccaccactatgattgtgctgggtcagaactgaagccagcacaatgctgggtcttgcacagggcctgctgtaaccactcccttcatactatgtatgtttgcttaaggccctggggctctacagtcagtagctggcaaagccagctaggactgtgtcttttccttcagggtggcaaggacccccaggacctaggtgttgtccaggagccagggastagagtcaaaaatcttagaagtctacctggtgttctattgtactatggctgagctagcacacaaaaaaacataagatgcagtccttcccactcttccctcccctttcctaaggcagaagagcctctccctctagccactgccacccgaggctgtgaggagtacttctagactaccagccaagctgtcttaaggcccaagggttctaagtcagcttgttgtgaatgctgcctgggactcagcattcagggcagtg

SEQ ID NO: 273479 - DNA, 567 bp, Homo sapiens
tgttgttctcttcccttactctctctggaacaaacagtcgtctctctgttctaagccacttaaagctgggggtagaatgacacaagcacccttgtggccaccaccactatgattgtgctgggtcagaactgaagccagcacaatgctgggtcttgcacagggcctgctgtaaccactcccttcatactatgtatgtttgcttaaggccctggggctctacagtcagtagctggcaaagccagctaggactgtgtcttttccttcagggtggcaaggacccccaggacctaggtgttgtccaggagccagggactagagtcaaaaatcttagaagtctacctggtgttctattgtactatggctgagctagcacacaaaaaaacataagatgcagtccttcccactcttccctcycctttcctaaggcagaagagcctctccctctagccactgccacccgaggctgtgaggagtacttctagactaccagccaagctgtcttaaggcccaagggttctaagtcagcttgttgtgaatgctgcctgggactcagcattcagggcagtg

SEQ ID NO: 273480 - DNA, 540 bp, Homo sapiens
tatcttacttagtctggcttggttcacatcatattgtccatgggctctagaagtgacaaatgtgaaaggtcagaggtgtctgatttaactaattgctaactatgggccgggcactgggttaagtktctttcatatcaattatttcttctaacaatcctatatgttaggagctattgttatcttgatttgaggtcatgtaagtttgctgctttttggtgtttcgttttgtttttgctgttataagtaaggctgaaatgacaatctttgcccacatcacagatcgttttcttaggatgacttccaggaagtgagaccagttactcagtcaattcttttgaacagctttaagacccttgatgcagatgaccaaactgctttctggagtgtctgtatcacagtggaccctgaggtccgcagggtatgtgcttgtgtccccaaaatcttgctgctacagtgatgtacagcaaagagattgtcagaagtttcattttaatgaaactggcaatagtctggaaagattctggtctgagattagagacc

SEQ ID NO: 273481 - DNA, 394 bp, Homo sapiens
ctatgaattctctggtaattaagatactgccatgatatatcagtcattaggagcttttctcataatcgcatcagttgtcctgaaaataaagtctcttaagccattactcaggcacactgatttatgaaatctaatgacctggggccacarttaggatttcatagtgatggaatgctttctggtaactcctttgctctggagaccagagaatgaatttacaattcttaagatcaggacatggttgtgcatatttctgaacttggaaacaaaacagagtattagtcaattgaactccatatccagagtccccctccataccagtctcttaaaggccctgggccacaagaacaagtaaaaaatgttagaaagtcagcattcagttctccattcaagc

SEQ ID NO: 273482 - DNA, 554 bp, Homo sapiens
caacctgctcaatatgatgaaaccccatctctactaaaaataaaaaattagcagtgtgtgttggtcttcacctgtagtctcagctacttgggaggctgaggcaggagaatcacttgaacctgggagggggaggttgcagtgagctgagactgagcactgcactccagcccgggtgatagaatgaggctctatctcagaaaaaaaaaaaaaaaaaaaagaaaagaataaaagaaaagcaactacaatgttactcaaaacctctatttgcatttcttagagaacatcagtgggacaccattcctgatcttctatagctctgaatgactttcccttaytcctcacagattccttatatcccagagcagcttcccatcctggttttttttctgacattttcccacacaactcagcctgtgtgtttctttctctttgtccccagggaatgttttctcattccttgattatatagattgtatagattgactttgtctctctggtagaaaaacaggagtcctgagaagatggacgtggggaagcagggggcagttctagaa

SEQ ID NO: 273483 - DNA, 554 bp, Homo sapiens
caacctgctcaatatgatgaaaccccatctctactaaaaataaaaaattagcagtgtgtgttggtcttcacctgtagtctcagctacttgggaggctgaggcaggagaatcacttgaacctgggagggggaggttgcagtgagctgagactgagcactgcactccagcccgggtgatagaatgaggctctatctcagaaaaaaaaaaaaaaaaaaaagaaaagaataaaagaaaagcaactacaatgttactcaaaacctctatttgcatttcttagagaacatcagtgggacaccattcctgatcttctatagctctgaatgactttcccttattcctcacagaytccttatatcccagagcagcttcccatcctggttttttttctgacattttcccacacaactcagcctgtgtgtttctttctctttgtccccagggaatgttttctcattccttgattatatagattgtatagattgactttgtctctctggtagaaaaacaggagtcctgagaagatggacgtggggaagcagggggcagttctagaa

SEQ ID NO: 273484 - DNA, 522 bp, Homo sapiens
tgcatataaagagagaccaagacagaggtggatgggtaagagagagacccttctaccaagagaggaaacagaaatgtcaggagcccacatgagtgcagagatgaagagagagagaatgagagcaagggcccaggcccagagaaacccaggggggccctaagaacagcctcatacaggggctgcccaccccgtgtggctcaccctggccaggtctttagggaatcacttggggcctttgcctgaaaccccctgaccccaggaaycagggcggcagtgtccccagtgcagttgagatcccagggcctgcagaaccggttagtgcgttttgtgatggaacaatgactgaatcatgaacgactgaaaacaagagaacaaagtggggaggaaaaaacccacaggaatagtttggaatcccgatttcctacgtgcagttgctaagcagttccctgcggtgtgcgtctctctctgggtctggagaagcacaaggactatgagaaaagcaggtgtcagggatgtctgctg

SEQ ID NO: 273485 - DNA, 601 bp, Homo sapiens
cctttcctctgattttcatttcataccattgtggtctgaaaagatacttgatatgatttcagtcttcttaaatttgttaagacttgttgtgtggcctaatatgtgatctataagtggggtactaaagtctcctactattattgtattatagtctatctctcccttcagctctattattatttgccttatatatttaggtgcgctgatttgggtgtatatatatttataattgttcttttgatgaattgactattataatgamcttctttgtctcattctgtggttttagactaaaaagtctctttagtctgatataaaaaatagctactcctgctccctttcagtttctattttcatggaatattttctttcatttcttcactttcactctatatatgtccttaaagtgagtctcttgaaggcagcatatagttgggtcctgttttttctatatccatttagtattgattggataatttaatcaatttacattcaaggtcttaggtttttgctattactttcaatgccaaagccacaattacttttgctccaacctagtagttattgataagtaaggagttactactgccatttttttgtt

SEQ ID NO: 273486 - DNA, 601 bp, Homo sapiens
cctttcctctgattttcatttcataccattgtggtctgaaaagatacttgatatgatttcagtcttcttaaatttgttaagacttgttgtgtggcctaatatgtgatctataagtggggtactaaagtctcctactattattgtattatagtctatctctcccttcagctctattattatttgccttatatatttaggtgcgctgatttgggtgtatatatatttataattgttcttttgatgaattgactattataatgaacttctttgtctcattytgtggttttagactaaaaagtctctttagtctgatataaaaaatagctactcctgctccctttcagtttctattttcatggaatattttctttcatttcttcactttcactctatatatgtccttaaagtgagtctcttgaaggcagcatatagttgggtcctgttttttctatatccatttagtattgattggataatttaatcaatttacattcaaggtcttaggtttttgctattactttcaatgccaaagccacaattacttttgctccaacctagtagttattgataagtaaggagttactactgccatttttttgtt

SEQ ID NO: 273487 - DNA, 601 bp, Homo sapiens
cctttcctctgattttcatttcataccattgtggtctgaaaagatacttgatatgatttcagtcttcttaaatttgttaagacttgttgtgtggcctaatatgtgatctataagtggggtactaaagtctcctactattattgtattatagtctatctctcccttcagctctattattatttgccttatatatttaggtgcgctgatttgggtgtatatatatttataattgttcttttgatgaattgactattataatgaacttctttgtctcattctgtggttttagactaaaaagtctctttagtctgatataaaaaatagctactyctgctccctttcagtttctattttcatggaatattttctttcatttcttcactttcactctatatatgtccttaaagtgagtctcttgaaggcagcatatagttgggtcctgttttttctatatccatttagtattgattggataatttaatcaatttacattcaaggtcttaggtttttgctattactttcaatgccaaagccacaattacttttgctccaacctagtagttattgataagtaaggagttactactgccatttttttgtt

SEQ ID NO: 273488 - DNA, 572 bp, Homo sapiens
gtcaaatttatttttggtcaatgactgtggctgagtgccatgaagtgaatgaactccaagcttccccgaagcttcaaagtacttagaataatataatccccatacactttcaaattggatgaaaacatacaattatgattgttcattatttcaacttctggtcacttgatatatttactcctaccaaaaatgattcttattcattatttatgagtatagtatagtctcaattatacatacaatgtatacccacccaatactttgttttctcctatccaataactaaacacatctttgtcctataatwccatccttatccaaccttgggtacaaaaataattgcttacatttacagagcatcaaccatgggtccaggactatgccaggtagttatttatatatgaggagactgctatacagaaatcaaataacctacccaagttcaggtagctagaaacttcctgaacctgtatgcaaactgatgtcgctctggctcaaatacttgtattcttcttggtttattgcactgcttcttagtttaattgacacttccataaacagagaacataata

SEQ ID NO: 273489 - DNA, 404 bp, Homo sapiens
gtttcaatttttttgaagttgatgtaagaaatagttatatgttagacatgtatctatttttttagcgattctgttacctaaaacatgctctcatctcatgttaaatactatgtggaaaaaaaaagagtttcactatttcagaacacaaatcaaagaaattctatgcttttttaaaataaaaactaaatatatcataatttktatttccagaggggctggcaagatggccgaatagaaacagctacagtctgcagctcccaggaagaccaatgcagaaggtgggtgatttccgcatttccaactgaggtacccggtttatctcactgggacaggttagacagtggatgcagtccatggagggcaagcaaaagaagggtggggagtcgcctcacccaggaagcaca

SEQ ID NO: 273490 - DNA, 617 bp, Homo sapiens
actgacatttcagatacttctgaattaagcctcttgggatgttttaagaattaaaatgacttttatttgaaaatgtacttcttgtctctttaaataatttgaagtctttcycaacccctccaactctatagtaatacaaaaactaaaggcaagctagtattaattgcctgttcagtggtgttatttgggttgaatctacattcaagacagatactacatttttatctaaattattctgtcaataacgactcactaatgagttacttgaataaattggcatttacctatgctatattgacccttcaattaagcaaaataatcaaaactgacacatccaaaaagtggcagacactttgaacaaatagtaaaactactgcaaacagctctgaagctttccttcaatgtttaggggaaaaaaacacatttaagtaagtgcatttctggttgttatcgaaaaatatataatacatgtattatttgctacctgtgtaccagacagaacctcaaaaacagttgtaatgcccagtgaaaaacagttgcaatagcacagtgaaaactggctacctagtaaatgctgaatgaatttgttgaagaatgaatgaatgcacagatacctt

SEQ ID NO: 273491 - DNA, 458 bp, Homo sapiens
ttttatctaaattattctgtcaataacgactcactaatgagttacttgaataaattggcatttacctatgctatattgacccttcaattaagcaaaataatcaaaactgacacatccaaaaagtggcagacactttsaacaaatagtaaaactactgcaaacagctctgaagctttccttcaatgtttaggggaaaaaaacacatttaagtaagtgcatttctggttgttatcgaaaaatatataatacatgtattatttgctacctgtgtaccagacagaacctcaaaaacagttgtaatgcccagtgaaaaacagttgcaatagcacagtgaaaactggctacctagtaaatgctgaatgaatttgttgaagaatgaatgaatgcacagatacctttatgtgtaaacattttaagagtttctgctaataaattacaggatattcgaatagatgcta

SEQ ID NO: 273492 - DNA, 459 bp, Homo sapiens
ttacttatgctgcaatgtctttatttacatacttaaatttttcaatgctattccacaggatctctttcttttctatacttggaaaaatctactttcatttataattgtttggttggtttttttttttttttttttttttggttttttttgttgttgtttttgctttgttgaaggtgaatcatatctctattcaaggaacctatcttttatagcaatcatctggtctaaataatataatcactacaataatataatcactaatggatcacgtaatactgagcaaagaggattatggctgttgagcagaggagttggggcaagagtctggaatttggatacctgaaggactagggaagtcacaagagtaaaaatctgtgggacagttagcatttcyctctccaactaagcacctatgatgtgcataacatatagaacactagaaaaggagtgaaataactt

SEQ ID NO: 273493 - DNA, 617 bp, Homo sapiens
aaaatgcacagatgtgaagaaataggggttgatgcagcttcgtcagttagaaacccaatatgtgcaagtttgttctagacagacttagacaaaattggaggctacttagtgctatgagtccatcaactctttcaaaggagcaagaaagaaaaaagtttctaagcagtgttatgaaggaaggggaagggggtggagaggagggaaatcttctcacacagtgcctttttttttcagatcaaattttsaattccttaaaaatgaaaatgcttggtaagggacaaaatggattctgaaatattgtcagtcatgtgtacttactgtgaattaatttctgattacagagagcagattttttttttttaacagatcttgccatgttgctcaagccagttttgagattataggaatgcaccactctacctggcccagagagcagattatgaaaaggaggaaaccttatgcagggttccctgactgcagcgtccaggtcgcaacactcattactattttttattgtgcccacagcagtaacagaaagcccagtttgtgcctctgtgaccagtagcttagggatggtttcagaatcaaaatcttttggttgcaagtaacagaaatgc

SEQ ID NO: 273494 - DNA, 632 bp, Homo sapiens
gcaccagcatggcacatgtatgcatatgtaaccaacctgcacattgtgcacatgtaccctaaaacttaaagtataataataataaaaaataataataattcacctaagccaaaaaaataataaataacttcagaatcttctgtacctcaattacccagtccccatcatgttcacccaaattcttttatacccaccctcatcaggccccagatacaagtctgtccttcatgtattacattcagtaattatacaaattaaagaaatgataaatttattttcccactttacttatcaaagataactcacctccctaagagctttctgccacatggggcttctagtcatcatgattaatataaatattatttcaacattgacttgatatccttctagctaaaaggaaagtgacttgacattttctttagcctggactaacttgtcataagaaacagtataatttccatcaggactttttgaatgcagattataactcaagcttccttccttttgctaatatggtgaagtccaggcaarttaaaagatattgagatcttcaacctgtatggacatgcaggaattttatgtcctgcatgtccatatttgaaaaatgtaagagttttcaagaagctaag

SEQ ID NO: 273495 - DNA, 509 bp, Homo sapiens
gatgagctaacactagcttcagttagttaaatagaaacttacagaaaagaaaatagaaactaaacttttgccaggcaggaactaaatcagaagagtaggaaataaaagatagaaatgaaatacatgtgagatacatctgagaaaaaaagtagaagttttgaaaacaacaaagaacactttccttaaacrtatttatgaacaaattgtagcccttcagcattttccacaatgacaaggaataaaagttatctgatagaggcttgaaagattatttgcaaaaatctggtgcttattttgtggaactaggaaagccattttgggaaaagggcatttgccattactagtatcatgatttcttcaaataatttgttagagtaaaacctgcataaaagtatgtctatttaaaacatatattagaatgcatacagtttgtggtagctttttttcttagctgtacatgaacacgttcattatacgccaataccagaaatttccacattgtgtgtaat

SEQ ID NO: 273496 - DNA, 611 bp, Homo sapiens
agcagccctagctgagctcctggtcaacagccagcatcagctgtcagacatcccagttyaggcaacaagttgtgagtaaagaagtagtcttggaacctgacaccctgtagatataagataatctgcccagacaacaccttctagacttcttgatccacaaaattggaagcaaagtaaaattattgtttgaagatacttagtttgggagtaatttgttacatggccataaataaatggtacagaatccaatacctggaagtgaatagttaccataatagaaaactaaaatatgtagccttggctgctggctggtacaaactggaagatgaggcagctggtaaaaattggaaggactccaaagagtctgctggtgaagacttgaaggacaatgaggaaaatattattgtataccaaagaaaaaggaatcctgatcatgtagtgacaaaaaatttggcaacatggttgcttgccatagcatgggaacaaaaaaagtttgcattatgaatttggggagatttctggacataacatataagtatcaactggtccagcaaaacctttctcgtatttctgactgggaaaataatgaacaaaataaattatgttttaag

SEQ ID NO: 273497 - DNA, 611 bp, Homo sapiens
agcagccctagctgagctcctggtcaacagccagcatcagctgtcagacatcccagtttaggcaacaagttgtgagtaaagaagtagtcttggaacctgacaccctgtagatataagataatctgcccagacaacaccttctagacttcttgatccacaaaattggaagcaaagtaaamttattgtttgaagatacttagtttgggagtaatttgttacatggccataaataaatggtacagaatccaatacctggaagtgaatagttaccataatagaaaactaaaatatgtagccttggctgctggctggtacaaactggaagatgaggcagctggtaaaaattggaaggactccaaagagtctgctggtgaagacttgaaggacaatgaggaaaatattattgtataccaaagaaaaaggaatcctgatcatgtagtgacaaaaaatttggcaacatggttgcttgccatagcatgggaacaaaaaaagtttgcattatgaatttggggagatttctggacataacatataagtatcaactggtccagcaaaacctttctcgtatttctgactgggaaaataatgaacaaaataaattatgttttaag

SEQ ID NO: 273498 - DNA, 623 bp, Homo sapiens
gcttcctgtttaatcctaactgtgttgtattcattgaaacaaggcattttcttacacggtatttccttaaaagattttcacgggaaaccttcttgccttagacccttacgtcagaacctcaacttctcctaaaatgtgacttcactatatattttcaaatagaaaatatacacatgaaacaaaacactcctgatacaagtgtttgagtaggtgttaaatgataaagacacaatctaatacrtaggcatttctttatagataaatcttattctacaaatatttaaagcggctcacaagtaatatattccacagtctataaaaatatgaaaaaatccaggatcagagaaaaattgaagtagagtaaaagtaacaaatcatgaagaaattgttaaattaattccacagttattaagttgaatttgattctgagcttccagacaggtaaagaaaaacaagaaatgtctggcacatatttctcattggcagtgggaaggacatatttcaattgcacagagaaacaagattatttatgtcatagaattatgaaaataattttccttaaggaattgccactgaggacactatgatccctacatctctccagttaataccttacacagata

SEQ ID NO: 273499 - DNA, 623 bp, Homo sapiens
gcttcctgtttaatcctaactgtgttgtattcattgaaacaaggcattttcttacacggtatttccttaaaagattttcacgggaaaccttcttgccttagacccttacgtcagaacctcaacttctcctaaaatgtgacttcactatatattttcaaatagaaaatatacacatgaaacaaaacactcctgatacaagtgtttgagtaggtgttaaatgataaagacacaatctaatacataggcatttctttatagataaatcttattctacaaatatttaaagcggctcacaagtaatatattccacastctataaaaatatgaaaaaatccaggatcagagaaaaattgaagtagagtaaaagtaacaaatcatgaagaaattgttaaattaattccacagttattaagttgaatttgattctgagcttccagacaggtaaagaaaaacaagaaatgtctggcacatatttctcattggcagtgggaaggacatatttcaattgcacagagaaacaagattatttatgtcatagaattatgaaaataattttccttaaggaattgccactgaggacactatgatccctacatctctccagttaataccttacacagata

SEQ ID NO: 273500 - DNA, 553 bp, Homo sapiens
gtcgctgtgtcacccagtctggagtgctgtggcgatctcggcttattgcaacctctgcctcccaggttcaagcaattctcctgccttagcttcccaagtagctgggaccacaggcgcatgccaccacgctgggctaattttttgtattttttgtagagatgtggtttcaccatgttatccaggatggtctcgatctcctgagctcatgatycgcctgccttggcctcccaaagtattgggattacaggtgtgagccactgtgcctggtggattctgtaattttaatgtgatctctaattaataataaataataggcaaagtgaatattattttctctgaaaggattatatcaaaaacttgacccaagaatgataattttctcagtttggtttttatttaaccctctcagttctcaaattctaaataaatagacttttaactttacataataagaaataaaaagcgtttctacatttctgttgtaatttgaaaatataacacaaacttttgtaatctttgaagagtattttgaggggggtattcaaaataactc

SEQ ID NO: 273501 - DNA, 588 bp, Homo sapiens
gctgcaggaagatgtatacaaaaactctccctcccacataagcaagacaaagagacacagaaacattcgaagcctgtgataaggtatgccacctgaatccctaaaaactcttagtctgtgagagagaatgcctctgacctaactcggccagaagtccctctcaggtttattccccaaaataaacctgtctttgactgttgagctgcttttcatgtttctttcctctttctttaactcttacaggtctcctcccatctcctcacttgatgycctgcaattatgaagctctgtgctgcaaaccctcctatctctgtgtattggtctgttactgcacaagagacatacaaacctgttggtcttctaacatttttattatacttatttataggtggctttctatggctaactgcccctaaaccctgaaatgttccaactaataaacaggtatttcaagatttctgatgtaatagaagtgcattaattccaggaatcattgtacttgtgtaaagtctgtgcctatggagaatgagagtgttgttgatagtattgaattaagtaaagtagaaatcatttttaattaaaaagtat

SEQ ID NO: 273502 - DNA, 499 bp, Homo sapiens
tcagatgaatatctatttgaaaatgcagcagtgtgcattgggaagcattcttatcagcaaggataatgtaagatttctttataaatcatttcatgggagacaagcagtcagagtttagctttgcgaagagtagtaggaattgaagtagcactcaggagagtgctaaggcacataggatacttaaaaaataaaaaaatatataatttcttcattaagtacccaactgtggtaaaattacaatgcaaaattcctattaattttaaaatgtctgaagtattgcatagatttaaatttgatttaggcctgcatgtacattttttgatcyctcagaagctgataatattgatgagagaaaacaaatgtagatatttctaggcaagacacatggcaaatctcataatggaaaatccaaaagtgtttttgaagtcaaatttgcaacatagtctttcattttaccaatattgtatcaatagcaagttattttaagggaaaggcactt

SEQ ID NO: 273503 - DNA, 609 bp, Homo sapiens
atttctcttcccgactttcagccttcctaagagaatgaagtggaggacgcatagaaatgtgatctaaataactccccatgttggatgtattcagtagtacactccattaaaactccggtgggaaaatagtttcttargacagctgtgtcatgaatgcgccatcacacagtatgcagataggttcagtttttttaatgagtgttttgaagattgaaagattatgttcactgtgaccttctaaagaaacactgtaaatactttctttagaattttaaatctctgatttttatcctacccgtaaataaatggaatattcacttatttaatagcatgtcttttgcaattttgtccttctttccttatcctgagaagaagtatgaaacagaggagagttgtgcagaaaatagagaacaaagtaaatgtaaaatggcctttccatatagaaagctgtttgatatagtgaagaaagcatggttactagggtcagaaacttgggttcaagtgtcttgtctagctgtgtaaggctgtacaggttgcttgttgtttcttatcttagtttccttatatccttacatagaggtatttaataatccccataccttggaatgc

SEQ ID NO: 273504 - DNA, 609 bp, Homo sapiens
atttctcttcccgactttcagccttcctaagagaatgaagtggaggacgcatagaaatgtgatctaaataactccccatgttggatgtattcagtagtacactccattaaaactccggtgggaaaatagtttcttaagacagctgtgtcatgaatgcgccatcacacagtatgcagataggttcagtttttttaatgagtgttttgaagattgaaagattatgttcactgtgaccttctaaagaaacactgtaaatactttctttagaattttaaatctctgatttttatcctacccgtaaataaatggaatattcacttatttaatagcatgtcttttgcaattttgtccttctttccttatcctgagaagaagtatgaaacagaggagagttgtgcagaaaatagagaacaaagtaaatgtaaaatggcctttccatatagaaagctgtttgatatagtgaagaaagcatggttactagggtcagaaacttgggttcaagtgtcttstctagctgtgtaaggctgtacaggttgcttgttgtttcttatcttagtttccttatatccttacatagaggtatttaataatccccataccttggaatgc

SEQ ID NO: 273505 - DNA, 598 bp, Homo sapiens
aaacaaattatgagcatatcacacactttttaatatcccaccctttcatttaacataatcgaggatttttttttaaaagggtcctttttaactttgactttttgaaattaacaaaggatgaatcgtaaggaattgacattatatcaaacatcatcttaccttgagaagtgataaaaattattagcttctataggatttagcatgctttctttcctattatatgttgatgacagtcacatgtgtaaattaatatatatccattcccttcctttgagaaggaaataaatatatttactatacacctttttatttctaaaaattacgttctttctgtcttcttacttctgccttcttccttttacataatatccctatgaagtcagtcagatgtagaatgccaaggatagatggctgtttactctgggttaggaggaaagttttcaactttgaaatgattgactgaccaaggctgaaccaagcaagcaaggtatagggtgtaaaatagtttarcatattgtaacctagataggctgttcccaaaggcacaacagggagctcagcaggaaataggcactaggagtgggggggcaagtgcatg

SEQ ID NO: 273506 - DNA, 627 bp, Homo sapiens
attggggctcaaaaaagttaagtgacttgcccaaggttattcagctaataaatagcagattcaggaatcaagctcagacctttttctttcaaaacctgaagtctttggcataatatatttgcagttaagattgactttctgaaaattatgagataactctaacctagatttagatataaatttggggcaattagttttaaactgaaacacatgagtagaaaaataacagaaggagatagacaaatacaagaaaaacctacccaaattattgtgctgtaatacaaaatgacttaaagtgagattcagaagayattctttttggtcccaactttctcactaactagctatgtgacctgaggcatcacctgggaactgagatttctcatctgtaaaatgaggatgttgaactcaatgatctttacatcctttccagcataaaaatattctgtgtttctgagtgagaactaattgaagtatattttcatcttttcaaagtcatattagtaaggcaatcaaaaaaaataaaaaaggaaaagggaacaaaagtacatgctatgcatttatgccttgtcaccggttttttttcacagtctcattaaatccccgaacaaacctgggggtattcac

SEQ ID NO: 273507 - DNA, 608 bp, Homo sapiens
taataatgtgcagtcgtttcttatagtattttttttattgttgaaatcataatttcttttcatcttttcatccaacactttttgacacatgcagataaacaatttggaatacagtttggagacctaatgcaattcagaatgtcatttgaatttatgccataaaatgtaaactccaactggaaattctttagaaggaatmtataactcaaagatattttctataactgtaacaaaggatacatgtgacatctagctagtcattgctctgtgcctatagaaaatgattgggatagagaaatgatggttgacaatttaattctaattaaaaatatatgtaagtttattccaaaataagtcgggatgctttggtctatttaaaaaatttattagcaaaatcccatttaagtggaagacaaacagtgatagagtcattaatctaggctgacggaatttatggtctgaaaagttctaaagtttgttttgaattacaccggttacatttcacattttgaaatgagcatctgagcagttttatatacacatagatacttggtggcttgttatcattaagtcaactcttctttttagagggtttttttttttttgca

SEQ ID NO: 273508 - DNA, 580 bp, Homo sapiens
acctaacagctttcacttccctgctagcccatggaatgactcaaacatctaattgcatcctccctcaggaatkagggggcacccctgctcctgttatgacaaaacctatctccaacagcctctttgggtcccctgtgtggccctgaagagcatgaagtgtcctcccccaggtgatgagggtgactaataaactgttgtccatctcatctgtccagttttgggcatcacatagtcagccacctcatcctatttagggcagaagaattcccctttgccagtagggggaatagaagataatcagaacagtagttcctagcatttaaattttacaagcacatttttgtttaaaaaaatatacaatttactacacagaagatagaagagacatgttaaccaatatatttaggacttaatctcagaataaataacagttcttcaagttgaataattaacttaagtaactaaatttattttaatggaagactcactgccctgtctttattttttcattgtgctgtacattgatgaaagcttaagaactgattggcacagtctgtggacagatgtgtgagaaacactg

SEQ ID NO: 273509 - DNA, 483 bp, Homo sapiens
aaatattttatgctttgtgggccatatacagtctctgctgcacatttgtctttttaaaattatgstttaagatttaaaaaatcaattttaactcatgggtgtcccaaaaacaggcagcaggccagagctggtccacaggctgtaacttgccaactcctgacgtggaggctttttcactttcatgtctggcatccagactgtatgacttaaagcccaggctcagttgagactgtcgacttgagcatctatccatagcctttccatgtgatttgagcatcttagctagattctaagagaatgtgtctcatgagaaaatactgccaaagttagtgtacaagaaaataggcggaaactacatggtttcttcttaactgactacaaaagtcacacagtattttttcccactatatcctattcataacaaatgagtcaaaaaggccaacctgattccaaggaggaagaattaatctccacccttcctgg

SEQ ID NO: 273510 - DNA, 590 bp, Homo sapiens
caagcaatagctgtggtttttcatttttcttatgcagtttcggtttcttatttgtaaagttttagaaacatttgggtcagttaaaaataggcaataagaggaatactagctaacatttggatcacatactattttccagataactgtgctcccagaactgtaatttgagaaactgaggctaagtcacattaaagatgtacagctaataataaaygctgggcttaaattggaagccaggtagtctgactccagagcccaccaagcaactatggttcctaggatatttgaccatgtatgcttctaagagtctttagagattgctaggactctaacattgacagactttttttttttttttttttttttttgcgtattttaaccatttatatatctgaggaagttaacacgtgtattttatattccaaggagtaatctcactgtcaattttttttcctttgttaagcataggtttttcacatatttcttacagaatatgaatcccaattttcagataacccagctcatccagtgttagtaaaaacatgtctgtcttatcctagatttattcagtctttgaagtaactacaata

SEQ ID NO: 273511 - DNA, 590 bp, Homo sapiens
caagcaatagctgtggtttttcatttttcttatgcagtttcggtttcttatttgtaaagttttagaaacatttgggtcagttaaaaataggcaataagaggaatactagctaacatttggatcacatactattttccagataactgtgctcccagaactgtaatttgagaaactgaggctaagtcacattaaagatgtacagctaataataaacgctgggcttaaattggaagccaggtagtctgactccagagcccaccaagcaactatggttcctaggatatttgaccatgtatgcttctaagagtctttagagattgctaggactctaacattgacagactttttttttttttttttttttttttgcgtattttaaccatttatatatctgaggaagttaacacgtgtattttatattccaaggagtaatctcactgtcaattttttttcctytgttaagcataggtttttcacatatttcttacagaatatgaatcccaattttcagataacccagctcatccagtgttagtaaaaacatgtctgtcttatcctagatttattcagtctttgaagtaactacaata

SEQ ID NO: 273512 - DNA, 590 bp, Homo sapiens
caagcaatagctgtggtttttcatttttcttatgcagtttcggtttcttatttgtaaagttttagaaacatttgggtcagttaaaaataggcaataagaggaatactagctaacatttggatcacatactattttccagataactgtgctcccagaactgtaatttgagaaactgaggctaagtcacattaaagatgtacagctaataataaacgctgggcttaaattggaagccaggtagtctgactccagagcccaccaagcaactatggttcctaggatatttgaccatgtatgcttctaagagtctttagagattgctaggactctaacattgacagactttttttttttttttttttttttttgcgtattttaaccatttatatatctgaggaagttaacacgtgtattttatattccaaggagtaatctcactgtcaattttttttcctttgttaagcataggtttttcacatatttcttacagaatatgaatcccaattttcagataacccagctcatccagtgttagtaraaacatgtctgtcttatcctagatttattcagtctttgaagtaactacaata

SEQ ID NO: 273513 - DNA, 634 bp, Homo sapiens
tctcttgcaggattcattatttattaagcccatattttttgagcatttatcaagagctatggttctaggttgtaaagacacagatgcctaaaacgaggtagttttttttctgtcattgaacacagtgaggtattttaccattaagaaagtgtatgtggagctggtagagaggcagagttcagctgtgccttgtagtaaagataaaagttaccaaatgacttttcagttgcaggcactatattgttatttaatcatggtaaatatcttgagaaggaactgtgatttctcctttgagtgttagggaaggtgaaactgtgttcattgaaggatattctacccaagtaaaatgtagatgtactgaaaatatattttgaactattattattataatagttcaggctgggcatacctataatcccagcactgtgggtggctgagatgggaggatcacttgagcccaggatttcaaggctatgattccaccactgcactccagcctgggtgacagaatgagaccttgtttcaagaaaaawtttttttaattcaattttctaaaagcaatacacttactcaaatattgatgagcatttaccatgtgcccagctcccttccagaagcggcaaaacaaaataaa

SEQ ID NO: 273514 - DNA, 634 bp, Homo sapiens
tctcttgcaggattcattatttattaagcccatattttttgagcatttatcaagagctatggttctaggttgtaaagacacagatgcctaaaacgaggtagttttttttctgtcattgaacacagtgaggtattttaccattaagaaagtgtatgtggagctggtagagaggcagagttcagctgtgccttgtagtaaagataaaagttaccaaatgacttttcagttgcaggcactatattgttatttaatcatggtaaatatcttgagaaggaactgtgatttctcctttgagtgttagggaaggtgaaactgtgttcattgaaggatattctacccaagtaaaatgtagatgtactgaaaatatattttgaactattattattataatagttcaggctgggcatacctataatcccagcactgtgggtggctgagatgggaggatcacttgagcccaggatttcaaggctatgattccaccactgcactccagcctgggtgacagaatgagaccttgtttcaagaaaaatwttttttaattcaattttctaaaagcaatacacttactcaaatattgatgagcatttaccatgtgcccagctcccttccagaagcggcaaaacaaaataaa

SEQ ID NO: 273515 - DNA, 556 bp, Homo sapiens
ctcccttctgtcacctcatttacaaatgagggaaatgaacctcaggaaggtgaagaggctagctcatgatcacataaccaagttgctccgagtcagacttaggagtaggttttttgattccagtgagaggtcaattcatctaggatccaaaaataattaatttactttatccccatggtagtattagtaatgtcagagtaggtagttaggcaatatgagtagggcaggagagcccccscttcccccaaccaggaatgtcaggcaatcatcaggtgatggtctggcagttgttaaactgtctctctaaaataataattggttgcagctggtgccaggaaaggcagctccctatatatagaaaacacctgaagctggtgattagcagcttcccgataacatctcaggagttgggtgagtgagctcaagcatatgcactgagaggcaaaatggcagagtttaactggtgtgtgtaaccttcctctaggaaggctcaactggtaagagaaaaacacctcaagtgagcatgtgcacaacgttggtaaacacactgtacatg

SEQ ID NO: 273516 - DNA, 582 bp, Homo sapiens
actcacatctccatcatagaactttactcctgtgtctttttttctgaacttgccttcagtgttctaattacttaattaatttttgtaaatcctgcaattatcttggaataaggtatttaaatttattgtatttgggcatgtgtgccaaaggcaaatcattaatttgctaaatataagcattttagaaagctgttttgtaagtcgttgttgtaactctgttttgacttycttcttttttttaatttaaatatacgtggtgtctccaaaagtggaaattttctaggcttttattttgaccctcaggagtgcctagcaaggaatccaagtggaattgcacttaacagatagctttagaaggcatgagtggagtatagaaaatggaggggagcaagactggtcacggtggctcatgcccgtaatcccagcactttgggaggccgagacgggccgatcacgaggtcgggagatcaagaccatcctggctaacatggtgaaaccccgtctctactaaaaatacaaaaaaattagcctggcgtggtggtgggtgcctgtaatcccagctactcgggaggctgaggcaga

SEQ ID NO: 273517 - DNA, 582 bp, Homo sapiens
actcacatctccatcatagaactttactcctgtgtctttttttctgaacttgccttcagtgttctaattacttaattaatttttgtaaatcctgcaattatcttggaataaggtatttaaatttattgtatttgggcatgtgtgccaaaggcaaatcattaatttgctaaatataagcattttagaaagctgttttgtaagtcgttgttgtaactctgttttgacttccttcttttttttaatttaaatatacgtggtgtctccaaaagtggaaattttctaggcttttattttgaccctcaggagtgcctagcaaggaatccaagtggwattgcacttaacagatagctttagaaggcatgagtggagtatagaaaatggaggggagcaagactggtcacggtggctcatgcccgtaatcccagcactttgggaggccgagacgggccgatcacgaggtcgggagatcaagaccatcctggctaacatggtgaaaccccgtctctactaaaaatacaaaaaaattagcctggcgtggtggtgggtgcctgtaatcccagctactcgggaggctgaggcaga

SEQ ID NO: 273518 - DNA, 588 bp, Homo sapiens
tcacggtggctcatgcccgtaatcccagcactttgggaggccgagacgggccgatcacgaggtcgggagatcaagaccatcctggctaacatggtgaaaccccgtctctactaaaaatacaaaaaaattagcctggcgtggtggtgggtgcctgtaatcccagctactcgggaggctgaggcagaacaggagaagcacttgaacccgggaggcggaggttgcagtgagctgagatcttgccattgcactccagcctgggtgacagagagagactccgtctgaaagaaagaaaagaaaagaaaatggagggttacagagaaaccagggaagtttgggacagccwtaaaggcccattgacaattgctgcagaaacaatgattgtttattgttgtgtggataaagttagagtcaaaaattttcctatagaacatagtagtaaatattacatgccttacctaaaattattgaagatcctcttttgaagtttaaagtcattaaactaaaaagttaacattctgttgcaatgtgcctagtagagatatactggtgaaagacaaatgcaaaagagaatgtaaaaaaaatcagtga

SEQ ID NO: 273519 - DNA, 644 bp, Homo sapiens
caaaattgtttctacaattctaaccttccaagataagagaatgtgttggtagttttctgagaagagcaagacattctcctttggaaagattagtagcataccacccttcatttcttatttggtttaacttttcagctgttatgaattaacttttataaatgaactttgtgggaacaaggcattttgatcattgtctcttggctgggtcatctgcatcaatcaatgtggcagaggaaatgggattatcttgattagattagaaaatttgtgttctcacctgaaaatgaggttaggtaataactatgttccccttctatatccctacccaaactatatggttgctcaactatggggaaacagtttaatagatattgatgaggcagaaaattaaagatctctatctgtgccacaaagacatcagattctgtgttggcaagagtagactgaatctttataaaaagtattaatataagtaaaagaaacagaaaactaaaaaagcaaaaaaaaaagtagaaaatttactaaggtaaactaacagttgcatttatattttaatcatacgttaacaatttggaattctgatttacatatcagatttaggaactgaatcagttagcataagwctgcatggttttatattctct

SEQ ID NO: 273520 - DNA, 589 bp, Homo sapiens
ttgtattatagttataaattttaacattgaattaacctgttactggatggtatatgtttactattttcttctctgttccttcttataattgaagttaggtgatttaaattttttctgtaacagtatattctgttttctatttttaaccaaggctttgtataaagttatggtagctgaatttttatgattatgttaatgtgcatctttgtaattaaattaaaacataactataggatatcaggcaattagagtatgaagttattaatgtattgagaaacattattgaaattatggcccacctggatttgttaaaacatcacaaactttaggcttcagtaatttcctattaattcagttcactatttaataccagtagtattagtttagtcatcaaacaaaaaaaatgcaaccatatgttgaagcaaatgataatttaactctgcatcgattagkaaactttagtccatgtgtgaaaaacttcccagatggattttccctcctttttaattatgtctggatcaaatgatatggccaactgaagtgggacctagcatggcacggcaaaacagtatagcctttgaaggtcttg

SEQ ID NO: 273521 - DNA, 632 bp, Homo sapiens
gtatagcctttgaaggtcttgtcctaccatttactgctatttggggcttgggaatgtagtcggtctcagaatcagattcttcatgtataaaaataaaacatggactattataattgttattagtaatgcacataaaatattctagtagtttgcacatactgattattagtaatattattatttattgtcatgtagagaggaacaattccactgattaaaaagaatagaatggcgcctactaaaaagtgtatgacaaagtcatccattcttctctaggctttagttttgtcatttacaaaatgaaattatttgagtttctaatatgtcatccaactccaattttcctactttttttaaaaaaaacaactgaatatgtgtcagttgaattcagctcagtgatttggatcaataagttagatctaatcaaaggctaggaaagtattttgttcacatagattaaaatggagtgtttgataccagaaatcaaaattttctaactaaatgtgcttttaaatataaaytgtttaggtatgagttaacccatttttctactataacctatagaaaaataatacaatttcttcactgtgtcacttttgaaatatattttcaggatttaggctgttccatgt

SEQ ID NO: 273522 - DNA, 549 bp, Homo sapiens
caattccactgattaaaaagaatagaatggcgcctactaaaaagtgtatgacaaagtcatccattcttctctaggctttagttttgtcatttacaaaatgaaattatttgagtttctaatatgtcatccaactccaattttcctactttttttaaaaaaaacaactgaatatgtgtcagttgaattcagctcagtgatttggatcaataagttagatctaatcaaaggctaggaaagtattttgttcacatagattaaaatggagtgtttgataccagaaatcaaaattttctaactaaatgtgcttttaaatataaactgtttaggtatgagttaacccatttttctactataacctatagaaaaataatacaatttcttcactgtgtcacttttgaaatatattttcaggatttaggctgttccatgtcttacagtgtaacttgggaatgttctcttgacaaaataaagtaggtattaaatgycacaaaaagccaaaagagagaatcaagtttacttttaagcaaccattgagtattagatatattt

SEQ ID NO: 273523 - DNA, 600 bp, Homo sapiens
attataagagtaaagatgtaaggagggcattcatagtaccaccataatagcaaaatccaatacagggatggttctgtaagaatgtccttagacatgaagacctataatttaaacaatcctgcatattttatatctaaaggaaaacctatgaacaatgtgatatctctgtttaaatatatgggacagattttgaccaggaggattcagwttgcattgatatttgaactaaaataaaaagaggaatcaaagaaatggtttgaaaatgtggcaagaaaggtaaatagctgagagagctatgtgagggttttatattcattcatttgtaagtttttgtaatttttgcaccggtatgtactgctatggtcaagaaaacaaaaaaaccaagtgaagcgtaagaataagccattaaaaaaaacactttggcaaatgttgaaatagattatggagaaggttttagatttctggagatagtaaagataggccaaaaagtcatcttctgcatgttttagtttatatattgtccaaaagccatagggcaattgaaacttcatagccatagttttatgacatatattgccagtggttgatgcataggtaaga

SEQ ID NO: 273524 - DNA, 577 bp, Homo sapiens
taatgtttagtgagtattgattctattcatagtcctaaacaattgtctcatttaatactgacaacaaccctgagaagtaaatatgttatcatgactattttatagtggaagtttttgaaactaatgctaggtgttcaggcccacatacagaatcaaataattacattgatcaccatttagatcaataggtttggggccttgactacattatctttggctcccaacgagggctgaagaggttggccagccaggcagcaagtagccttggacttaatcttcaagcaatcttcaagttaaaacattgctgagataaaccagaaaaataactgttgccagttaactcaggtttctacctttgactgctacaagctatgccacaaaagtcacagtagatacttgacagtcatctgataatcgcatgaaataaaattttgaaagtgaataatgaatgacataatgctgtttacatagagtgagattttaaaatttcatttctatagttatakctatcctgagttagagttagctaatgatatctaattaggagttaataaatactgaacaacaactccaaata

SEQ ID NO: 273525 - DNA, 592 bp, Homo sapiens
ctacagcccatagttattgtctacacaatgcatactactgtaataaagagaacagggattttgaaatctgacagtgatgagttcaaatcctggatctgccatttgcttgctttatgatcccccactcccaccctagttcttcaatttctttaggtgtaaaaaggtaatacctacctcaaaaagttattataaaattaaaaagaagtatattctttcctctaatataagaaaagaaaatcttttcctttgttgtcatcctggagatccacttacttttccaagacacccaactgctatttggaaaatgattttttcttcttattagaggagctataggccattccaatctagagcagttttgtcctttcacagagggaatggccctaatagtcagaagatgggacataaatgcttcgtatttctataaaatgaacagttagtcagtttattaatgctcctaaggagctcaattctgaaatcaggatttgatgatggagatctgaacattactttttctcagcatttgatctgttgttgaagggatacagctagttactgaataygtttgttacatacattttaaattatcaga

SEQ ID NO: 273526 - DNA, 576 bp, Homo sapiens
gtttgtattgttttcaatgtatgcatgtacacttacttgcaggcaacattgrgtatttttctctttgttgtaaagagaacactgtcacattttatggggtaaaaataaaagtgcttggaagtcttatttgtaagaatgtatactgtaacattatttagaattagatagttttttaaaatgtccaatgatgggagatagggaaattattctacattttaatgacagaatcttataagattttaaaaattacgtgtagttgtaagacgaaatacaaattaaaaccaagaggcttcgtgctccttgttgaaaataattgatttgcctctgctgcttttttagagcatttattttagaaaacttataattgcaaatactttcttctctctttgaaatatatataaatccttttgaaaaccagctaggacttttgttagctttatgacccagaaacgtctttctcagggatcttgaagccatgttttcagaatataaacattaaggaagatagcacccttatctgccagtttctgggtaaaagtctaattttggtgggcaccttgctccaagttgcaggtg

SEQ ID NO: 273527 - DNA, 576 bp, Homo sapiens
gtttgtattgttttcaatgtatgcatgtacacttacttgcaggcaacattgagtatttttctctttgttgtaaagagaacactgtcacattttatggggtaaaaataaaagtgcttggaagtcttatttgtaagaatgtataytgtaacattatttagaattagatagttttttaaaatgtccaatgatgggagatagggaaattattctacattttaatgacagaatcttataagattttaaaaattacgtgtagttgtaagacgaaatacaaattaaaaccaagaggcttcgtgctccttgttgaaaataattgatttgcctctgctgcttttttagagcatttattttagaaaacttataattgcaaatactttcttctctctttgaaatatatataaatccttttgaaaaccagctaggacttttgttagctttatgacccagaaacgtctttctcagggatcttgaagccatgttttcagaatataaacattaaggaagatagcacccttatctgccagtttctgggtaaaagtctaattttggtgggcaccttgctccaagttgcaggtg

SEQ ID NO: 273528 - DNA, 559 bp, Homo sapiens
gaaaaaaatatatataatagcacaaaacaactctagtattcacaactctgattaaccaaaggtaaacattttactatatttgattcagatcctttttaaaaatttttcaagattttgaatataattgaaaccttcactgcacactgtcacatcattcactctgagatgyagccactaccttgaggtttgtgcatataatttaatcaccgatgtatctgtccatgagcaaacaatgtagaattcttatttgtgtgtatttacgctttatataaacgatatgttgcacctatatttctgcatttttttcactcaacattgttttctatattcatatatttattcaggttaatacaactcattcattttaactgatctaaagtattctactgtataaatatttcacagttatccattctcctactgatgaatccttagattgttccttttacttttatgataaaaaatgctttaatggatatcattgttcaaacatgcacaaagagtattttcaacttgaatatcccacattgttctcaataacagttataaaatatactta

SEQ ID NO: 273529 - DNA, 617 bp, Homo sapiens
aaatgattctatatgcttgaaaagattgtaactgctttttatgtggtataaatttcagtatatgtgcattagaccaagttkcgtattttatacaatttgacttaaccaaatctcttattgagaacagctatttgtggcgactaatagaagtaacagataaaattagtaaagatacagaaattttgaatttcaagataataagcttgattttatgcatgtatctaaaaccctggaactgaccttcagaacagatttgctcttgttaaaacacaagtggcagtcacaaaaagtgtccatatataaggccaaaatgaagatttcatgtataccaacgaacagatgtcacatagttttagaaattaagcagaaattcaatagttataagatgaaggagaattacatggaacaaatattatgcctttaatatcgccttaaaaggaaatactattacttcctcccacaaggcttggtctaatcaagtgggaaattacaagatactcatgtaatatgaatctcaccaaataactcttatgacagaaatagagcaggcttttggaactggagagccaaggcagaagatttcaacagccttggatcttccttgaatattctcaaac

SEQ ID NO: 273530 - DNA, 617 bp, Homo sapiens
aaatgattctatatgcttgaaaagattgtaactgctttttatgtggtataaatttcagtatatgtgcattagaccaagtttcgtattttatacaatttgacttaaccaaatctcttattgagaacagctatttgtggcgactaatagaagtaacagataaaattagtaaagatacagaaattttgaatttcaagataataagcttgattttatgcaygtatctaaaaccctggaactgaccttcagaacagatttgctcttgttaaaacacaagtggcagtcacaaaaagtgtccatatataaggccaaaatgaagatttcatgtataccaacgaacagatgtcacatagttttagaaattaagcagaaattcaatagttataagatgaaggagaattacatggaacaaatattatgcctttaatatcgccttaaaaggaaatactattacttcctcccacaaggcttggtctaatcaagtgggaaattacaagatactcatgtaatatgaatctcaccaaataactcttatgacagaaatagagcaggcttttggaactggagagccaaggcagaagatttcaacagccttggatcttccttgaatattctcaaac

SEQ ID NO: 273531 - DNA, 617 bp, Homo sapiens
aaatgattctatatgcttgaaaagattgtaactgctttttatgtggtataaatttcagtatatgtgcattagaccaagtttcgtattttatacaatttgacttaaccaaatctcttattgagaacagctatttgtggcgactaatagaagtaacagataaaattagtaaagatacagaaattttgaatttcaagataataagcttgattttatgcatgtatctaaaaccctggaactgaccttcagaacagatttgctcttgttaaaacacaagtggcagtcacaaaaagtgtccatatrtaaggccaaaatgaagatttcatgtataccaacgaacagatgtcacatagttttagaaattaagcagaaattcaatagttataagatgaaggagaattacatggaacaaatattatgcctttaatatcgccttaaaaggaaatactattacttcctcccacaaggcttggtctaatcaagtgggaaattacaagatactcatgtaatatgaatctcaccaaataactcttatgacagaaatagagcaggcttttggaactggagagccaaggcagaagatttcaacagccttggatcttccttgaatattctcaaac

SEQ ID NO: 273532 - DNA, 595 bp, Homo sapiens
agacaaatatggaaaggctgatggcagcatgggtcagggagaggatgtcaccactactggggatggggaagctgttttttttctggcaaaaaaggtttcctsagactttacaaactcagtgtccccagcttcatcagggtcctcccacatgtcccctttccaagttgcagggtcccattcttttccaaacgatgccctcactttaatagtacatacctggtgaggctgtgcatgcacccttcattggaagtcagccacttgcacaataagagctcatatccattttcccacaatttcagctctttctctgcaggagataatactttcactcagggcaatcttagcagatttgaggctcagtatctgcttctgaagccaggagttagaatccctaagttcattttctttcatcactttgtccattgaacttaggagaaaccaaccaacttcattatgtttccacatatggtcaaaggtattatttatagagtcactaaactccttgcctctcatgagcgctgaatcaggaatgtcaaatgcatttattttgcttaactctctaaacagttcatagaaaggaacactgaatcagtgt

SEQ ID NO: 273533 - DNA, 595 bp, Homo sapiens
agacaaatatggaaaggctgatggcagcatgggtcagggagaggatgtcaccactactggggatggggaagctgttttttttctggcaaaaaaggtttcctgagactttacaaactcagtgtccccagcttcatcagggtcctcccacatgtcccctttccaagttgcagggtcccattcttttccaawcgatgccctcactttaatagtacatacctggtgaggctgtgcatgcacccttcattggaagtcagccacttgcacaataagagctcatatccattttcccacaatttcagctctttctctgcaggagataatactttcactcagggcaatcttagcagatttgaggctcagtatctgcttctgaagccaggagttagaatccctaagttcattttctttcatcactttgtccattgaacttaggagaaaccaaccaacttcattatgtttccacatatggtcaaaggtattatttatagagtcactaaactccttgcctctcatgagcgctgaatcaggaatgtcaaatgcatttattttgcttaactctctaaacagttcatagaaaggaacactgaatcagtgt

SEQ ID NO: 273534 - DNA, 595 bp, Homo sapiens
agacaaatatggaaaggctgatggcagcatgggtcagggagaggatgtcaccactactggggatggggaagctgttttttttctggcaaaaaaggtttcctgagactttacaaactcagtgtccccagcttcatcagggtcctcccacatgtcccctttccaagttgcagggtcccattcttttccaaacgatgccctcactttaatagtacatacctggtgaggctgtgcatgcacccttcattggaagtcagccacttgcacaataagagctcatatccattttcccacaatttcagctctttctctgcaggagataatactttcactcagggcaatcttagcagatttgaggctcagtatctgcttctgaagccaggagttagaatccctaagttcattttctttcatcactttgtccattgaacttaggagaaaccaaccaacttcattatgtttccacatatggtcaaaggtattatttatagagtcactaaactccttgcctctcatgagcgstgaatcaggaatgtcaaatgcatttattttgcttaactctctaaacagttcatagaaaggaacactgaatcagtgt

SEQ ID NO: 273535 - DNA, 562 bp, Homo sapiens
tgtgtgtctgtgtgttcagaaattttgaatattttatgtgataacattaacaaggcttttctattgagggtttcagcttttctgtcttgctaagaaacaccttctttactctagaatgttaaaaatacttagtgtttttacataatacatttaaggtctaatattttatacgtaaaagtatgaatcagcagctcctcaaaaatttaacagagaattaccatacttattcagcaatttcacttctgggtattacccaaagagttgaatacaggaactcaacatgttgatggcagcaatattcatgatagctaaaatatggaagcaacccaagtttctattgatggataaatggataaataaaaggtaatatatctatacaatgcaatattattcagctttaaaaaggaaggaaattctgacacatgccacaacatgaatgaaacttaaagacattaggcttagtgaaataagtcagtcacatatttttcttccctcccacytcctctaaaccattgaacaagtatagacagtactatactgctcacaaaggtggcttaacaat

SEQ ID NO: 273536 - DNA, 413 bp, Homo sapiens
tgaatctaccattctggggtctggaggatggtggccctcttctcacagctccactagacagtgtcccagtggggactctgtgtgggggctgcgaccccacatttcccttccacactgccctagcagaggttctccattagggctccacccstgcagcacacctctgcctggacatccaggcatttgcatacatcctctaaaatctaggtggagttcccaaacctcaattcttgacttctgtgcactcacaggcccaacaccatgtggaagccaccaaggtttagggcttacaacctctgaagcaacagcctgagctgtacattggccccttttagccacagctggagctggagcagctgagatgcagggcactatgtcccaaggctgcatagagcggggtttgagtgtggggg

SEQ ID NO: 273537 - DNA, 608 bp, Homo sapiens
catgtctgtgaactagactgcctaaggccacaagattagaagttaaggtatttcactaaatagttcaagatgtagctatcttcttaaaaaaatttatgtttcattcatttaaaaattacacaagcaaagattattctgtttgggttgagttatagttctgtagcctctatgccaaattttgagtttgtgggcaaactcgtatctgcaccttccaccagaaggtatgctgagggcaatccctccctggcaccatgctccttgaggttatctgctggaacatctggagcctgctgttctaagaaagcagtcatacaggcctgcactaaatcaagcagctgaccaacaaccactcccttcttcctatctcctttattcaataaatgcaaagggctctagaagctcagggcccttgttcactagaagcaaggagcccccgaccccttcttccaaacatactgttttgtctttgtctttgttcccacattcrtcctcctttgttcagtccaccagggtgtgcggcaaagtggcatcacgaacagggacttcaaggatgtgaacaaagaaggtctgctggagcacaggaagtaaaattgaccagaccagtgggg

SEQ ID NO: 273538 - DNA, 563 bp, Homo sapiens
gagctcaagttaattcacagacattaactaagcttccacaggaggtttttacgcataacccatggtttctgcaggcagacagtctctatgtaggaaattgggacagagtaggagagggattgaaacaggctcatcaaaaaggtttcaaagtagacccttctgttttatctgcttggggtttagttcacatggtcctactgccattgtctccttcttattctgtcagacarcaggagtcaggttctgagtctcaagaattaaaaaaatcatttgttcctctgacagtgcctattgaaaataatgagcaggaggaaggggaggagaattggctgcttgctaagcaggaaaaatgataggagaattggcctctgccactccctccaataacagaagtagaaactctcatacaaaaaattttgcacactgctgctatggctggggaacctttagacccttgcacttttcctattactataagacctgatccgaatgatccacaacatcttttacatgaacacactcctgtagaatttaaattactaaaaaaattaaacgctagtgtg

SEQ ID NO: 273539 - DNA, 577 bp, Homo sapiens
atatagtgtaattattgcttatcccctgcaaattacacccttctccatgaaaggagaaaagaggatacaaatggtttgggagcacaactacatgagaaatctatctatcacaacccatagcctctaccagacccacctgtgtagtacaaattaaaggaaggaaattctatgggcttrtggacacaggagctgatgtgtcagtaatatccggtaaggatttgtccccatccgggcccctcagactaactccacatccctagtgagagtaggagcagctcaaagtgttcaacagagtgctgagattttaccttgtcttggtccagatggacaatcatgtactttccagccttatgttgcaaatatagctttcaatttatggactccagaattacttacagcatgggatatgagacttacaaatgaaaactttgataacacaggatttaaaatgttgaaggacatgggatatcagagtgggaaaggtttaggaaaattccaacaaggaaaccctaacccgatatcaataactggaaagacagaaaggactgggacatcaggatttatgattgggttcatt

SEQ ID NO: 273540 - DNA, 613 bp, Homo sapiens
aactgctacaattaaaagtacactagagccagaactgcttaacttgtttctaagacttcaagctctttgatcttgtatagctcctttttatatttctcatatccattttcacactcaattccctgaaccattatctttaggcagacaaacttatcggttctgtatttcaacaagctcaagcttctaatgcattactgcatcaaaacacctctgcccttactcgtatgtttcatctgccttgcagccagtcttgagctattgtacaagcctatycctcttgtcagcgtgtccctggtgttgcacctgtagaaggctgtaacccacgaggtttgctccaaatgaaatctggcaaaatggatgttacacatatagcagactttggcaagcttagctatgttcatgtgaccatagacacttattctcatatgctgcatgctacatgccaaacaggtgagacagctggtcatgtacagtgacattgtctgttgttattggctcatatgggggtccctaaacaattaaagactgacaatggtcctgcttatactagtcatgctttcaaaatttcctacagctttgggctattactcacaaaacaggagttccttacaac

SEQ ID NO: 273541 - DNA, 613 bp, Homo sapiens
aactgctacaattaaaagtacactagagccagaactgcttaacttgtttctaagacttcaagctctttgatcttgtatagctcctttttatatttctcatatccattttcacactcaattccctgaaccattatctttaggcagacaaacttatcggttctgtatttcaacaagctcaagcttctaatgcattactgcatcaaaacacctctgcccttactcgtatgtttcatctgccttgcagccagtcttgagctattgtacaagcctatccctcttgtcagcgtgtccctggtgttgcacctgtagaaggctgtaacccacgaggtttgctccaaatgaaatctggcaaaatggatgttacacatatagcagactttggcaagcttagctatgttcatgtgaccatagacacttattctcatatgctgcatgctacatgccaaacaggtgagacagctggtcatgtacagtgacattgtctgttgttattggctcatatgggggtccctaaacaattaaaractgacaatggtcctgcttatactagtcatgctttcaaaatttcctacagctttgggctattactcacaaaacaggagttccttacaac

SEQ ID NO: 273542 - DNA, 541 bp, Homo sapiens
atatatattcaaggggttagggatgatacagctccacacaaaatgggccaagtcattgccctcgtgcagcgtatcatgctgtaggggaaagaaggagagatatgcaagaagcaaagaaacacaaaagtacrtactgtagtaatatagggtagggacaatttctgtgaagacagtgaagcagggctagtgaggggtgaggctgtgtgcatgtgtaggagtggcgtgtgtgtctgcatgtgcatgtctgcatgtatggttgagagtgtatgtgggaccattgggaaggtgacctgaaccaagaggagtgaactcttcagttattgggggaagagctgaattcctaagttcttgggaaatgtttccttaatgttaaataaataattatgaatgaatcttaggcctaccctgtccaaatcccactttgctttcacattgatcctcacatcaagtccaaacacctccaagggccttttcagcatgaacttcactcccccttatgtgattatctcactacaccacggggcctggattctgattccct

SEQ ID NO: 273543 - DNA, 565 bp, Homo sapiens
aggctgaatgccaatctaacccgtgaagacaaacaaaactggccaatccgttattcgatttatttgaccatgataacagaggttaagagtaccgagtcctgccttccaccaaaatggcctcaactcaatccattttgccagaccatcattatctaccaggggcaaagccccatgctaggcaccaggcaagcacttagggatacygaaaggagaggccctccccacaggaaaatggctcgaacgggtgtccagcacagcgatgaaaatggcctgtgcctttggcaccctttgatggctgaactctgagatgaaaaccaaactcaaacctcaggcttgaccttggtttggcctgctgaaggtcaggaacccctcctgccctcccagtctgagctggagaggtgagaggaaaagacagaaggttttattataccacccaggccacgcctgccaagttctccctacaaccgcttcaaaaaaaaaaaaaaaaaagatggagtgaaagggaattggaaaaatggaaccccctacatcccagaaatattactttcatgagctgtatgaatta

SEQ ID NO: 273544 - DNA, 565 bp, Homo sapiens
aggctgaatgccaatctaacccgtgaagacaaacaaaactggccaatccgttattcgatttatttgaccatgataacagaggttaagagtaccgagtcctgccttccaccaaaatggcctcaactcaatccattttgccagaccatcattatctaccaggggcaaagccccatgctaggcaccaggcaagcacttagggataccgaaaggagaggccctccccacaggaaaatggctcgaacgggtgtccagcacagcgatgaaaatggcctgtgcctttggcaccctttgatggctgaactctgagatgaaaaccaaactcaaacctcaggcttgaccttggtttggcctgctgaaggtcaggaacccctcctgccctcccagtytgagctggagaggtgagaggaaaagacagaaggttttattataccacccaggccacgcctgccaagttctccctacaaccgcttcaaaaaaaaaaaaaaaaaagatggagtgaaagggaattggaaaaatggaaccccctacatcccagaaatattactttcatgagctgtatgaatta

SEQ ID NO: 273545 - DNA, 604 bp, Homo sapiens
cattgtttggttgtactactagggccatactagcatgtgagcatttgcttatggwatgtgagaaatacaaacaggaacaggccttgttcatgtacctgtgtgtgaaccgtggcctagtcacttgtgaatctgaacacaaatgtccactgtgactgcctggtccaggtacctctgcttacagtgcctggaaacagtctctttaccttttttaggataaagtcaatgcaaaggattagccgagaatacttgagtccacatgatggaaggaactggatgccatttaatgaataagtaatttaagtgtaagtatacatacctagaaataactatatgtggtttgggtttttattttagtgtgtattttttttagagacaggatcttactctgtcacctagcctggaatgtagtggtaacctcaagctcccgggctcaagtgatcctccctcctgggcctcccaagtagctaggactacaggcatgtaccaccacgctaagctaatttacaaaaaataaaatatttttgtggtagggacaaggtctcactacattgcctaggctagtctcaaactcctggcctcaaatgatcttttcacctcccaaagg

SEQ ID NO: 273546 - DNA, 521 bp, Homo sapiens
agcatgttctcaaaatagcaaattctatccagtgtcccctttcccccatatcatgtttatgaagagttactcggagccttacacttgaargacaggtatatgcgcaagtgagaataagagacagactatgtggtgaaaagcacctgggcctctgcagtctgaagatgggggaaatagccccttaaggtcatttaccagctggagggttgcttctcctaggatcaaactggcctctctctgttcaccagatactacatttcctaaccagaaacacttgagtgtgcctctggtcataatcagtgtgtgtgtgggtggggaggggaggggaaggatatttagtgggaatccctgcccaccactggaagaaagcagtgcaaagcctgttctatcaaatggtgattttggcaatagtgtcactttaaaaaaagaacagcacattattattaaggctgagttcaggcacagcatagagacagatgaaggaactgctgactctgaaatcccacctgttaaagacacaa

SEQ ID NO: 273547 - DNA, 521 bp, Homo sapiens
agcatgttctcaaaatagcaaattctatccagtgtcccctttcccccatatcatgtttatgaagagttactcggagccttacacttgaaagacaggtataygcgcaagtgagaataagagacagactatgtggtgaaaagcacctgggcctctgcagtctgaagatgggggaaatagccccttaaggtcatttaccagctggagggttgcttctcctaggatcaaactggcctctctctgttcaccagatactacatttcctaaccagaaacacttgagtgtgcctctggtcataatcagtgtgtgtgtgggtggggaggggaggggaaggatatttagtgggaatccctgcccaccactggaagaaagcagtgcaaagcctgttctatcaaatggtgattttggcaatagtgtcactttaaaaaaagaacagcacattattattaaggctgagttcaggcacagcatagagacagatgaaggaactgctgactctgaaatcccacctgttaaagacacaa

SEQ ID NO: 273548 - DNA, 539 bp, Homo sapiens
agttgtgcccccaggacttaacgatatatatgtaatcttcttacttgtctcctgaccacgtgtttgcccatggcatggcagttgaggaaagagtgctgacttgagccaaaattcctgggacctatcatatctggctgtgtggcctggggtaacttaacttctctgtgcctcagtttcttcatctgtaaaagggagcaattctatctcatagaattaatgagatataagagtaaatcgggtaaagcacttagaatgttgcctagcatatggtagagtgcctgggcccattttacagctggagatgtgaaggtattaggcagctctagagttacatagccgagaaaaaatgtrcaaaatttcttttaactctccatgatgttcttccaagcatagcataaatccctcaccactgtagtccactgtatttccagttggaaactttcagcaaacatctggatgcccaactccatcctcctctctgctgtgcccctctccctcggtacaaatagctccccttgaacaggttccagttctcaaac

SEQ ID NO: 273549 - DNA, 605 bp, Homo sapiens
acaaggaagcttttgggggatgatggttatgtttactatcctgattaaatggttccacaggtgtatatatgtcaaaacatccaactgtacactttaaaatgtgtcatttattgtgtgtcatttacactccaataaaactgttaaacaaaatttaaataactgcacaaggctagtggttacttaattggatagtgcagttctagaagataaaaataagagaatatatttataatgctgaatataagtaactgtttctttaastaaaagtaataaccataaaggaaatgactataaattgtacttcattaaaactagggattaaagctcaccaaaatatagcattaagagggtgaaaaggcatgtcacggaatggggaaagatatttgctacgtaaatagtaataaatatgtgtgtgcacacaagtgtgcataggacttgtatctagaaaacataaagaacaacaaatcaaaaaagtagagaacccaatttctaaaatatgggcaaagacttatactggcacttctcaaaaacacatgaaaaggtgatcactgtcattaggcacgtgggaaatgagaattgaaactgcagtgagatacagtatgccc

SEQ ID NO: 273550 - DNA, 605 bp, Homo sapiens
acaaggaagcttttgggggatgatggttatgtttactatcctgattaaatggttccacaggtgtatatatgtcaaaacatccaactgtacactttaaaatgtgtcatttattgtgtgtcatttacactccaataaaactgttaaacaaaatttaaataactgcacaaggctagtggttacttaattggatagtgcagttctagaagataaaaataagagaatatatttataatgctgaatataagtaactgtttctttaactaaaagtaataaccataaaggaaatgactataaattgtacttcattaaaactagggattaaagctcaccaaaatatagcattaagagggtgaaaaggcatgtcacggaatggggaaagatatttgctaygtaaatagtaataaatatgtgtgtgcacacaagtgtgcataggacttgtatctagaaaacataaagaacaacaaatcaaaaaagtagagaacccaatttctaaaatatgggcaaagacttatactggcacttctcaaaaacacatgaaaaggtgatcactgtcattaggcacgtgggaaatgagaattgaaactgcagtgagatacagtatgccc

SEQ ID NO: 273551 - DNA, 605 bp, Homo sapiens
acaaggaagcttttgggggatgatggttatgtttactatcctgattaaatggttccacaggtgtatatatgtcaaaacatccaactgtacactttaaaatgtgtcatttattgtgtgtcatttacactccaataaaactgttaaacaaaatttaaataactgcacaaggctagtggttacttaattggatagtgcagttctagaagataaaaataagagaatatatttataatgctgaatataagtaactgtttctttaactaaaagtaataaccataaaggaaatgactataaattgtacttcattaaaactagggattaaagctcaccaaaatatagcattaagagggtgaaaaggcatgtcacggaatggggaaagatatttgctacgtaaatagtaataaatatgtgtgtgcacacmagtgtgcataggacttgtatctagaaaacataaagaacaacaaatcaaaaaagtagagaacccaatttctaaaatatgggcaaagacttatactggcacttctcaaaaacacatgaaaaggtgatcactgtcattaggcacgtgggaaatgagaattgaaactgcagtgagatacagtatgccc

SEQ ID NO: 273552 - DNA, 529 bp, Homo sapiens
ctagtggttacttaattggatagtgcagttctagaagataaaaataagagaatatatttataatgctgaatataagtaactgtttctttaactaaaagtaataaccataaaggaaatgactataaattgtacttcattaaaactagggattaaagctcaccaaaatatagcattaagagggtgaaaaggcatgtcacggaatggggaaagatatttgctacgtaaatagtaataaatatgtgtgtgcacacaagtgtgcataggacttgtatctagaaaacataaagaacaacaaatcaaaaaagtagagaacccaatttctaaaatatgggcaaagacttatactggcacttctcaaaaacacatgaaaaggtgatcactgtcattaggcacgtgggaaatgagaattgaaactgcartgagatacagtatgcccctgccattttaaataaaactggcaatattcaatgctagtgagggtgtggagcagctggaattctcataccttgctgttgtcaactggtacaac

SEQ ID NO: 273553 - DNA, 567 bp, Homo sapiens
agtgcagtggcacgatctcggctcactgcaagctccgtctcccgggttcaggcaattctcctgcctcagcctcctgagtagctgggactacaggcacccgctgccacacttggctaattttttgtatttttagcagagacggggtttcaccttattagcaaggatggtctcaatctcctgacctcgtgatctgcccacctcagccccccaaagtgctgggattacaggtgtaagccacctcacccagccaaaaggaggaattttttaagcaaaattatgggaggccattgttttgaactaagctcatgcaataggtcccaacagaccaaaccaaayaaaatcgagtcactcatgataaatgtaacataatcaaactaagactttaaggaaacacataaatcctagaacaaaccaggttttgtttttctcctgtaaacaggatgttccagcataagaagatatattctactcaagtccttgttccaccttttcaaatctcactggtctatttcccagtgggtttctaaaccaagtaagtacatttgcaacggtaatagtgacaccagt

SEQ ID NO: 273554 - DNA, 567 bp, Homo sapiens
agtgcagtggcacgatctcggctcactgcaagctccgtctcccgggttcaggcaattctcctgcctcagcctcctgagtagctgggactacaggcacccgctgccacacttggctaattttttgtatttttagcagagacggggtttcaccttattagcaaggatggtctcaatctcctgacctcgtgatctgcccacctcagccccccaaagtgctgggattacaggtgtaagccacctcacccagccaaaaggaggaattttttaagcaaaattatgggaggccattgttttgaactaagctcatgcaataggtcccaacagaccaaaccaaacaaaatcgagtcactcatgmtaaatgtaacataatcaaactaagactttaaggaaacacataaatcctagaacaaaccaggttttgtttttctcctgtaaacaggatgttccagcataagaagatatattctactcaagtccttgttccaccttttcaaatctcactggtctatttcccagtgggtttctaaaccaagtaagtacatttgcaacggtaatagtgacaccagt

SEQ ID NO: 273555 - DNA, 567 bp, Homo sapiens
agtgcagtggcacgatctcggctcactgcaagctccgtctcccgggttcaggcaattctcctgcctcagcctcctgagtagctgggactacaggcacccgctgccacacttggctaattttttgtatttttagcagagacggggtttcaccttattagcaaggatggtctcaatctcctgacctcgtgatctgcccacctcagccccccaaagtgctgggattacaggtgtaagccacctcacccagccaaaaggaggaattttttaagcaaaattatgggaggccattgttttgaactaagctcatgcaataggtcccaacagaccaaaccaaacaaaatcgagtcactcatgataaatgtaacataatcaaactaagactttaaggaaacacataaatcctagaacaaaccaggttttgtttttctcctgtaaacaggatgttccagcataagaagatatattctactcaagtccttgttccaccttttcaaatctcactggtctatttcccagtgggtttctaaaccaagtaagtacatttgcaayggtaatagtgacaccagt

SEQ ID NO: 273556 - DNA, 603 bp, Homo sapiens
tcccaccagtgccatgacagcttgccaatgmcatggcagcacgggaagtccccaccccttgccatggaaacagctggaagttgctgcccatttctagctatttctgaataacccgccccttaattagcatgccattaaaagtgaattataaaaatgactacaagccacccctatgctgctgctctgggagcacaacccacggagggctctctgccctgccgaagtggacgcagggctgtaacaccgccaatgccctccgtagagctgctttcttccaccacaggcttgcttttggatttcttcctgagcgacgccaagaacctgcctttcctcagtgtgactcttgcctaaaacctatccgtggtattctcttttcctgagcatgccctgacttgttctttcatctcctctgatcttgcaattggtcctcagtgactctattctgcagatccagaaaactcaaccttaatcttcccagagccctgttgtctccaatattggaatctctaaccttgttttctcagacgcctagattacaggcttctctcttgaacacctattggtatggtatctggggattctttaaatacacggtgattggca

SEQ ID NO: 273557 - DNA, 603 bp, Homo sapiens
tcccaccagtgccatgacagcttgccaatgccatggcagcacgggaagtccccaccccttgccatggaaacagctggaagttgctgcccatttctagctatttctgaataacccgccccttaattagcatgccattaaaagtgaattataaaaatgactacaagccacccctatgctgctgctctgggagcacaacccacggagggctctctgccctgccgaagtggacgcagggctgtaacaccgccaatgccctccgtagagctgctttcttccaccacagkcttgcttttggatttcttcctgagcgacgccaagaacctgcctttcctcagtgtgactcttgcctaaaacctatccgtggtattctcttttcctgagcatgccctgacttgttctttcatctcctctgatcttgcaattggtcctcagtgactctattctgcagatccagaaaactcaaccttaatcttcccagagccctgttgtctccaatattggaatctctaaccttgttttctcagacgcctagattacaggcttctctcttgaacacctattggtatggtatctggggattctttaaatacacggtgattggca

SEQ ID NO: 273558 - DNA, 603 bp, Homo sapiens
tcccaccagtgccatgacagcttgccaatgccatggcagcacgggaagtccccaccccttgccatggaaacagctggaagttgctgcccatttctagctatttctgaataacccgccccttaattagcatgccattaaaagtgaattataaaaatgactacaagccacccctatgctgctgctctgggagcacaacccacggagggctctctgccctgccgaagtggacgcagggctgtaacaccgccaatgccctccgtagagctgctttcttccaccacaggcttgcttttggatttcttcctgagcgacgccaagaacctgcctttcctcagtgtgactcttgcctaaaacctatccgtggtattctcttttcctgagcatgccctgacttgttctttcatctcctctgatcttgcaattggtcctcagtgactctattctgcagatccagaaaactcaaccttaatcttcccagagccctgttgtctccaatattggaatctctarccttgttttctcagacgcctagattacaggcttctctcttgaacacctattggtatggtatctggggattctttaaatacacggtgattggca

SEQ ID NO: 273559 - DNA, 603 bp, Homo sapiens
tcccaccagtgccatgacagcttgccaatgccatggcagcacgggaagtccccaccccttgccatggaaacagctggaagttgctgcccatttctagctatttctgaataacccgccccttaattagcatgccattaaaagtgaattataaaaatgactacaagccacccctatgctgctgctctgggagcacaacccacggagggctctctgccctgccgaagtggacgcagggctgtaacaccgccaatgccctccgtagagctgctttcttccaccacaggcttgcttttggatttcttcctgagcgacgccaagaacctgcctttcctcagtgtgactcttgcctaaaacctatccgtggtattctcttttcctgagcatgccctgacttgttctttcatctcctctgatcttgcaattggtcctcagtgactctattctgcagatccagaaaactcaaccttaatcttcccagagccctgttgtctccaatattggaatctctaaccttgttttctcagacgcctagattacaggcytctctcttgaacacctattggtatggtatctggggattctttaaatacacggtgattggca

SEQ ID NO: 273560 - DNA, 617 bp, Homo sapiens
aacatgatgtgttagctagctgccatatgagcttctccctgtttcaccactatgtagcctaaagttattccgtcatccatgactatcmtgtctaaagagtctgaagatctttatttggtagctatggcttcagctagttcatttgctaagttacctagagtggttgacagatttctaattatacgttcatgagaggttactccccaccattgcaagagacttctgccaaacataggccaaaattcatctccttggtttgcaggtacagtttgtctaatcctggaaaataatttcaatgaactacttcagcgttcagaaacattggagttataaatagaaagaggaagagccacataacctaatagacaattacctctcatatgccagtggtcaacacattcataagcccatgtgtgcttgatccagggaccacacagggtccctgatggattctgaaatttaaggctttggattactggtaacagagacatgttaaagtacatgtcttcagtcttgagtagagtgtaatcagtctgatttcttttttttttaatgagacaaacatcaggtaaagaccttgacaagaaggaagagaaatcccgagattctataatcat

SEQ ID NO: 273561 - DNA, 386 bp, Homo sapiens
tgtagcctaaagttattccgtcatccatgactatcatgtctaaagagtctgaagatctttatttggtagctatggcttcagctagttcatttgctaagttacctagagtggttgacagatttctaattatacgttcatgagaggttactccccaccattgcaagagacttctgccaaacataggccaaaattcatctccttggtttgcaggtacagtttgtctaatcctggaaaataatttcratgaactacttcagcgttcagaaacattggagttataaatagaaagaggaagagccacataacctaatagacaattacctctcatatgccagtggtcaacacattcataagcccatgtgtgcttgatccagggaccacacagg

SEQ ID NO: 273562 - DNA, 386 bp, Homo sapiens
tgtagcctaaagttattccgtcatccatgactatcatgtctaaagagtctgaagatctttatttggtagctatggcttcagctagttcatttgctaagttacctagagtggttgacagatttctaattatacgttcatgagaggttactccccaccattgcaagagacttctgccaaacataggccaaaattcatctccttggtttgcaggtacagtttgtctaatcctggaaaataatttcaatgaactacttcagcgttcagaaacattggagttataaatagraagaggaagagccacataacctaatagacaattacctctcatatgccagtggtcaacacattcataagcccatgtgtgcttgatccagggaccacacagg

SEQ ID NO: 273563 - DNA, 386 bp, Homo sapiens
tgtagcctaaagttattccgtcatccatgactatcatgtctaaagagtctgaagatctttatttggtagctatggcttcagctagttcatttgctaagttacctagagtggttgacagatttctaattatacgttcatgagaggttactccccaccattgcaagagacttctgccaaacataggccaaaattcatctccttggtttgcaggtacagtttgtctaatcctggaaaataatttcaatgaactacttcagcgttcagaaacattggagttataaatagaaagaggaagagccacataacctaatagacaattacctctcatatgccagyggtcaacacattcataagcccatgtgtgcttgatccagggaccacacagg

SEQ ID NO: 273564 - DNA, 590 bp, Homo sapiens
gttctaattgtttctaagtttagattctgaatgagaatcagcagaggtagaccactgctgctgaggcctggggattgctggggaaaaggcaggaaacagatacggacctgaccatggaaggtttgtgtttcacgtctcccatctgggtacccaaggaacctacatgtagctcgtgtgtggagagcctacattgcccactcaaagcaattgaggatgggacagtcttggwgctggagctcattatttggaatgataaccacatctgcacagagaggacctgataagatgttgtccttccatgtatatctgggaatcctgtgtagggtctgtctgtaaggacaggggaagtgttggctccttggcctctagttagcctcacaagtagtctagtaaaggctttgcaaacttgtcaccatctgtggacattctggccagctcttgttttcaccctactgacttcttcagacactaggcttttgctttagaccattcatggtttttcttcctcttcaaatcagtaatcaataaatcctcttcaagtcaataaatttccactcctttaggaaaccctgatcttctggtcacaccaa

SEQ ID NO: 273565 - DNA, 339 bp, Homo sapiens
acataaattttctctctctagtccatcattttatcaaagacaaatcatagtaggacaaatttctgtgcaaaataagttttagtcttatcatacctggcctgattatttgcataaagtgcagcaagaatatktattgaccatataggcttcttaaaattggctttgttggaactatttaataaggaatcttagacttttaaaaaccttgagactagccaagtcaaagatttgcatcagactgtgtctgtaatactttttttaacctactttttttttttattatactttaagttgtggggtacacgtgcagaatgcacaggtttgttacataggtataca

SEQ ID NO: 273566 - DNA, 412 bp, Homo sapiens
cttcaaatcagtaatcaataaatcctcttcaagtcaataaatttccactcctttaggaaaccctgatcttctggtcacaccaaggtttaattaactggtttgattgtttttctgttttcttgttttktttttccttcttcctaggggtttctagtaattctagtttgatgtctcactttctccattttttatttcttagttttcttctgtgattattttcactgcagctgcagggcctaatactaggttggcagagaactagcacttactctgccctaattggaatccaggagagataggaggtgccctagtgtgaaaatgtgtttgctcctctttgcttctggtagtctctctgtaggagttctttacgtattctgaatgttcacttcttataagatacatgatgagcaac

SEQ ID NO: 273567 - DNA, 412 bp, Homo sapiens
cttcaaatcagtaatcaataaatcctcttcaagtcaataaatttccactcctttaggaaaccctgatcttctggtcacaccaaggtttaattaactggtttgattgtttttctgttttcttgttttttttttccttcttcctaggggwttctagtaattctagtttgatgtctcactttctccattttttatttcttagttttcttctgtgattattttcactgcagctgcagggcctaatactaggttggcagagaactagcacttactctgccctaattggaatccaggagagataggaggtgccctagtgtgaaaatgtgtttgctcctctttgcttctggtagtctctctgtaggagttctttacgtattctgaatgttcacttcttataagatacatgatgagcaac

SEQ ID NO: 273568 - DNA, 412 bp, Homo sapiens
cttcaaatcagtaatcaataaatcctcttcaagtcaataaatttccactcctttaggaaaccctgatcttctggtcacaccaaggtttaattaactggtttgattgtttttctgttttcttgttttttttttccttcttcctaggggtttctagtaattctagtttgatgtctcactttctccattttttatttcttagttttcttctgtgattattttcactgcagctgcagggcctaatactaggttggcagagaactagcacttactctgccctaattggaatccaggagagataggaggtgccctagtgtgaaaatgtgtttgctcctctytgcttctggtagtctctctgtaggagttctttacgtattctgaatgttcacttcttataagatacatgatgagcaac

SEQ ID NO: 273569 - DNA, 479 bp, Homo sapiens
ataatttaagaatgctcacgaatggcttctgaattctggagaaatcagctagagagacagataaatggctcaaatttttgttcacaatgtagtttatctaatatattgtaagttaaaaatagctgaaaagaaaaaaaattcttgactttggaaaacaaaacataaagagaatcaacaatgtttccaatggaaaggccatgaataaaatcttttccttcttttataagttcagtcccatgtaactacagcttgttctgcttgatttcaaatagcaattctcattcagttttttgtgttctgtttgatttcaattggaaattctcattcagctttttagagtcctggaagattttcatagtccaatggtatgatccccaaagttatctgaaaccatatttaagagaacttgtcagagtcctttccattaaaagtaatttagatgrtagctgattgtaaagactttttttttttttttgaga

SEQ ID NO: 273570 - DNA, 501 bp, Homo sapiens
ccctaattggaatccaggagagataggaggtgccctagtgtgaaaatgtgtttgctcctctttgcttctggtagtctctctgtaggagtwctttacgtattctgaatgttcacttcttataagatacatgatgagcaactataggttaaatgtctctgatccaaaaatctgaaatcccaaatgctccaaagtctgaaactttttgagtgccaacatgacactcaaaggaaatgcttattggagcatcgcagactcaggtgtttgaattcgagatgctcaaccagtaagaataatgcaaatattacaaaatctgaaacacatcccaagcatttcaaataagggacactcaactggtattttcttttattctacagtttgccttttaccctgttggttgtgacctttgaggtacagaagtttttaggtttgatatatttttgcttttactgcctgagcttttaatgtcatatcctaaaaattattgacaaattcatcgtcata

SEQ ID NO: 273571 - DNA, 501 bp, Homo sapiens
ccctaattggaatccaggagagataggaggtgccctagtgtgaaaatgtgtttgctcctctttgcttctggtagtctctctgtaggagttctttacgtattctgaatgttcacttcttataagatacatgatgwgcaactataggttaaatgtctctgatccaaaaatctgaaatcccaaatgctccaaagtctgaaactttttgagtgccaacatgacactcaaaggaaatgcttattggagcatcgcagactcaggtgtttgaattcgagatgctcaaccagtaagaataatgcaaatattacaaaatctgaaacacatcccaagcatttcaaataagggacactcaactggtattttcttttattctacagtttgccttttaccctgttggttgtgacctttgaggtacagaagtttttaggtttgatatatttttgcttttactgcctgagcttttaatgtcatatcctaaaaattattgacaaattcatcgtcata

SEQ ID NO: 273572 - DNA, 501 bp, Homo sapiens
ccctaattggaatccaggagagataggaggtgccctagtgtgaaaatgtgtttgctcctctttgcttctggtagtctctctgtaggagttctttacgtattctgaatgttcacttcttataagatacatgatgagcaactataggttraatgtctctgatccaaaaatctgaaatcccaaatgctccaaagtctgaaactttttgagtgccaacatgacactcaaaggaaatgcttattggagcatcgcagactcaggtgtttgaattcgagatgctcaaccagtaagaataatgcaaatattacaaaatctgaaacacatcccaagcatttcaaataagggacactcaactggtattttcttttattctacagtttgccttttaccctgttggttgtgacctttgaggtacagaagtttttaggtttgatatatttttgcttttactgcctgagcttttaatgtcatatcctaaaaattattgacaaattcatcgtcata

SEQ ID NO: 273573 - DNA, 600 bp, Homo sapiens
aacctaaaatcttcattacaggccagtcatttaaagggtaaaactcctgtggcataactgtgtcttcttatgggaagctaatttaaatcacttggaagtcaattccgatgacawagagactttaatttaattagacatagaaagagtgtgtccagggtcatgagtgagcataatattacaaaggaatgtaaacaggaaaaccagagcatagagcagtggggatccatagctcacaatgatagcatggaagtttcctggttacatgaagtaattaagacatatttaaaagccaagagtacaaaatcagacctgatgaaaaagctgaaggagttatcatcccagccaagcaggaaacccaagccttttattccttctcaagaaggaacaggagacagtgatgtgatctgtgagtcatgtgtaacatgaaagtacaggagaagttgaacttctgatatacaaatctgaaaagtttttatagtaatagatttcaggattaaaagtcaatatttattacctcttcttatgagcaaataaatacattaagaaaaccttgttgttttaaccaaaatttttagtattttatcactctttttaatatta

SEQ ID NO: 273574 - DNA, 577 bp, Homo sapiens
aaactcctgtggcataactgtgtcttcttatgggaagctaatttaaatcacttggaagtcaattccgatgacaargagactttaatttaattagacatagaaagagtgtgtccagggtcatgagtgagcataatattacaaaggaatgtaaacaggaaaaccagagcatagagcagtggggatccatagctcacaatgatagcatggaagtttcctggttacatgaagtaattaagacatatttaaaagccaagagtacaaaatcagacctgatgaaaaagctgaaggagttatcatcccagccaagcaggaaacccaagccttttattccttctcaagaaggaacaggagacagtgatgtgatctgtgagtcatgtgtaacatgaaagtacaggagaagttgaacttctgatatacaaatctgaaaagtttttatagtaatagatttcaggattaaaagtcaatatttattacctcttcttatgagcaaataaatacattaagaaaaccttgttgttttaaccaaaatttttagtattttatcactctttttaatattacagctaatttaaataaa

SEQ ID NO: 273575 - DNA, 577 bp, Homo sapiens
aaactcctgtggcataactgtgtcttcttatgggaagctaatttaaatcacttggaagtcaattccgatgacaaagagactttaatttaattagacatagaaagagtgtgtccagggtcatgagtgagcataatattacaaaggaatgtaaacaggaaaaccagagcatagagcagtggggatccatagctcacaatgatagcatggaagtttcctggttacatgaagtaattaagacatatttaaaagccaagartacaaaatcagacctgatgaaaaagctgaaggagttatcatcccagccaagcaggaaacccaagccttttattccttctcaagaaggaacaggagacagtgatgtgatctgtgagtcatgtgtaacatgaaagtacaggagaagttgaacttctgatatacaaatctgaaaagtttttatagtaatagatttcaggattaaaagtcaatatttattacctcttcttatgagcaaataaatacattaagaaaaccttgttgttttaaccaaaatttttagtattttatcactctttttaatattacagctaatttaaataaa

SEQ ID NO: 273576 - DNA, 576 bp, Homo sapiens
aaactcctgtggcataactgtgtcttcttatgggaagctaatttaaatcacttggaagtcaattccgatgacaaagagactttaatttaattagacatagaaagagtgtgtccagggtcatgagtgagcataatattacaaaggaatgtaaacaggaaaaccagagcatagagcagtggggatccatagctcacaatgatagcatggaagtttcctggttacatgaagtaattaagacatatttaaaagccaagagtacaaaatyagacctgatgaaaaagctgaaggagttatcatcccagccaagcaggaaacccaagccttttattccttctcaagaaggaacaggagacagtgatgtgatctgtgagtcatgtgtaacatgaaagtacaggagaagttgaacttctgatatacaaatctgaaaagtttttatagtaatagatttcaggattaaaagtcaatatttattacctcttcttatgagcaaataaatacattaagaaaaccttgttgttttaaccaaaatttttagtattttatcactctttttaatattacagctaatttaaataa

SEQ ID NO: 273577 - DNA, 577 bp, Homo sapiens
aaactcctgtggcataactgtgtcttcttatgggaagctaatttaaatcacttggaagtcaattccgatgacaaagagactttaatttaattagacatagaaagagtgtgtccagggtcatgagtgagcataatattacaaaggaatgtaaacaggaaaaccagagcatagagcagtggggatccatagctcacaatgatagcatggaagtttcctggttacatgaagtaattaagacatatttaaaagccaagagtacaaaatcagacctgatgaaaaagctgaaggagttatcatcccagccaagcaggaaacccaagcyttttattccttctcaagaaggaacaggagacagtgatgtgatctgtgagtcatgtgtaacatgaaagtacaggagaagttgaacttctgatatacaaatctgaaaagtttttatagtaatagatttcaggattaaaagtcaatatttattacctcttcttatgagcaaataaatacattaagaaaaccttgttgttttaaccaaaatttttagtattttatcactctttttaatattacagctaatttaaataaa

SEQ ID NO: 273578 - DNA, 600 bp, Homo sapiens
aacctaaaatcttcattacaggccagtcatttaaagggtaaaactcctgtggcataactgtgtcttcttatgggaagctaatttaaatcacttggaagtcaattccgatgacaaagagactttaatttaattagacatagaaagagtgtgtccagggtcatgagtgagcataatattacaaaggaatgtaaacaggaaaaccagagcatagagcagtggggatccatagctcacaatgatagcatggaagtttcctggttacatgaagtaattaagacatatttaaaagccaagagtacaaaatcagacctgatgaaaaagctgaaggagttatcatcccagccaagcaggaaacccaagccttttattccttctcaagaaggaacaggagmcagtgatgtgatctgtgagtcatgtgtaacatgaaagtacaggagaagttgaacttctgatatacaaatctgaaaagtttttatagtaatagatttcaggattaaaagtcaatatttattacctcttcttatgagcaaataaatacattaagaaaaccttgttgttttaaccaaaatttttagtattttatcactctttttaatatta

SEQ ID NO: 273579 - DNA, 546 bp, Homo sapiens
tcactgcaacctgcaccttccttattcaagcagttctccaacgtcagcctctcaagtacctgggatcacaggtgcgcgtcaccacgcccagctaactttttggtatttttagtagagacagkgtttctccatgttgaccaggttagtcttgaacttgtgacctcaggtgatctgcccgcctcggcctcccaaactgctgggattgcaggcatgaaccaccgcacccggccaaatgtcgttctttttaaaaatttcttttgttttctctttcttttcttttcttttctttctctctctttctttcctttctttcttctttttgagacggtgtctcactctgtttcctaagctggagcacagtggcacaatctcagctgactgcatcctccaccttccaagttcaagcaattctcctgcctcagcctcccaagtagctgggactacaggtgtctgccactatgcccagctaatttttgtatttttaatagagatagtgttttactatttatattagagatggggttggcccagctggtcacgaactcc

SEQ ID NO: 273580 - DNA, 546 bp, Homo sapiens
tcactgcaacctgcaccttccttattcaagcagttctccaacgtcagcctctcaagtacctgggatcacaggtgcgcgtcaccacgcccagctaactttttggtatttttagtagagacagtgtttctccatgttgaccaggttagtcttgaacttgtgacctcaggtgatctgcccgcctcggcctcccaaactgctgggattgcaggcatgaaccaccgcacccggccaaatgtcgttctttttaaaaatttcttttgttttctctttcttttcttttcttttctttctctctctttctttcctttctttcttctttttgagayggtgtctcactctgtttcctaagctggagcacagtggcacaatctcagctgactgcatcctccaccttccaagttcaagcaattctcctgcctcagcctcccaagtagctgggactacaggtgtctgccactatgcccagctaatttttgtatttttaatagagatagtgttttactatttatattagagatggggttggcccagctggtcacgaactcc

SEQ ID NO: 273581 - DNA, 491 bp, Homo sapiens
ttccctttagcactgcctttgttgcctcctcctgagtttgggtatgtcatggttttgttttcatttgcttaaacatttttttgggctattgtaatataattgtgttgtttttaataaaggtaattmatgagacacataatgaattgtgcttctgtttttataatattttaagcattcttaactcagaaatgtaaattttagaaaaaaattccaggccagacacagtggctcacacctgtaatcccagcacttgaggaggctgaggcaggcggatcatctgaggtcaggagttggagaccagcctggccaacatggtgaaaccctgtctttactaaaaatagaaaaaaaatatataaaagttagctgggtgtcgtggcgggtgcttgtaatcccagctactctggaggctgaggcagaagaatcacttgaatctgggaggcggaggttgcagtgagctgagattgcaccactgcactccagcctgggtgaca

SEQ ID NO: 273582 - DNA, 491 bp, Homo sapiens
ttccctttagcactgcctttgttgcctcctcctgagtttgggtatgtcatggttttgttttcatttgcttaaacatttttttgggctattgtaatataattgtgttgtttttaataaaggtaattaatgagacacataatgaattgtgcttctgtttttataatattttaagcattcttaactcagaaaygtaaattttagaaaaaaattccaggccagacacagtggctcacacctgtaatcccagcacttgaggaggctgaggcaggcggatcatctgaggtcaggagttggagaccagcctggccaacatggtgaaaccctgtctttactaaaaatagaaaaaaaatatataaaagttagctgggtgtcgtggcgggtgcttgtaatcccagctactctggaggctgaggcagaagaatcacttgaatctgggaggcggaggttgcagtgagctgagattgcaccactgcactccagcctgggtgaca

SEQ ID NO: 273583 - DNA, 491 bp, Homo sapiens
ttccctttagcactgcctttgttgcctcctcctgagtttgggtatgtcatggttttgttttcatttgcttaaacatttttttgggctattgtaatataattgtgttgtttttaataaaggtaattaatgagacacataatgaattgtgcttctgtttttataatattttaagcattcttaactcagaaatgtaaattttagaaaaaaattccaggccagacacagtggctcacacctgtaatcccagcacwtgaggaggctgaggcaggcggatcatctgaggtcaggagttggagaccagcctggccaacatggtgaaaccctgtctttactaaaaatagaaaaaaaatatataaaagttagctgggtgtcgtggcgggtgcttgtaatcccagctactctggaggctgaggcagaagaatcacttgaatctgggaggcggaggttgcagtgagctgagattgcaccactgcactccagcctgggtgaca

SEQ ID NO: 273584 - DNA, 491 bp, Homo sapiens
ttccctttagcactgcctttgttgcctcctcctgagtttgggtatgtcatggttttgttttcatttgcttaaacatttttttgggctattgtaatataattgtgttgtttttaataaaggtaattaatgagacacataatgaattgtgcttctgtttttataatattttaagcattcttaactcagaaatgtaaattttagaaaaaaattccaggccagacacagtggctcacacctgtaatcccagcacttgaggaggctgaggcaggcggatcatctgaggtcaggagttggagaccagcctggccaacatggtgaaaccctgtctttactaaaaatagaaaaaaaatatataaaagttagctgggtgtcgtggcgggtgcytgtaatcccagctactctggaggctgaggcagaagaatcacttgaatctgggaggcggaggttgcagtgagctgagattgcaccactgcactccagcctgggtgaca

SEQ ID NO: 273585 - DNA, 499 bp, Homo sapiens
attctttaacggtcccatttcaaaaggagaacctggtccatactgatttrtagcttgtttaaattttttgagtaatttaaaaggaaaaggctcaaatgtagctataatatttccctgttgatctgcggggtgtattcaaacagcgaactgccaagcctctaaatcccacttttgtctagcttgctgaattcctgcctgaatagaactaagagcagtcgctcaaggcgctgctcgaacagtcaccagggcaactacttttcacccagtgtcctccagaaaagaaagatctggagggtcgttttcttcaaaataataatgagggggtgcagaagggtagggatgaacctctccttccttttctgctttagatttaggtggcaaataaacctggtctgtaacctctactgttactttgttatactctccttcctcctcatcatcagtgtgaaaaagttccaaggtagaacgaaccacagcccacacttgtcccattgttacc

SEQ ID NO: 273586 - DNA, 499 bp, Homo sapiens
attctttaacggtcccatttcaaaaggagaacctggtccatactgatttatagcktgtttaaattttttgagtaatttaaaaggaaaaggctcaaatgtagctataatatttccctgttgatctgcggggtgtattcaaacagcgaactgccaagcctctaaatcccacttttgtctagcttgctgaattcctgcctgaatagaactaagagcagtcgctcaaggcgctgctcgaacagtcaccagggcaactacttttcacccagtgtcctccagaaaagaaagatctggagggtcgttttcttcaaaataataatgagggggtgcagaagggtagggatgaacctctccttccttttctgctttagatttaggtggcaaataaacctggtctgtaacctctactgttactttgttatactctccttcctcctcatcatcagtgtgaaaaagttccaaggtagaacgaaccacagcccacacttgtcccattgttacc

SEQ ID NO: 273587 - DNA, 333 bp, Homo sapiens
gcgagaagcctgaatggaagcttcatctgcccactaagttttaaatcgtaagaactgagcaggaattagacaagctcgagtaatagtgtcccagtcagtaggaatcatctgactggaaacagcaacattctttaacggtcccatttcaaaaggagaacctggtccatactgatttatagcttgtttaaattttttgagtaatttaaaaggaaaaggctcaaatgtagctataatatttccctgttgatctgcggggtgtattcaaacagcgaactgccaagcctmtaaatcccacttttgtctagcttgctgaattcctgcctgaatagaact

SEQ ID NO: 273588 - DNA, 588 bp, Homo sapiens
atatatggttgtttaggtccttgtcagacagaactgaaataaggatacttttcccctgtaacatttatccttttctatgcctgtaagcayatgaagcacagctgaacaatggcaacatcttccattactgcttgattctctaatcaaccccggttagggccaactcatattaactgatcaaagaaaacaggcacaggtggctgcacttctgtgttttcatttgcctgagtttgagcttcatcagcctaccaagttttaaactgcaagtactgagatggagtgagaacaggttttgtcaaagtatcctaattatatagtagtaatctattaccaagagccacattttttaataaagtttgcacaaaaagagagttcagtccatattgactaatggcttgcttaaattctttagtaacttaaaagaaaaaacagcctaattagctatattctgtcctacttgctggattatagtaacgggaaattgccatgcttcaaggtctcccttggctttagctttttgaatagaattttgtctagcaccaccaattgctccaggttttaatgttgcaactacaggagcagtaagtt

SEQ ID NO: 273589 - DNA, 570 bp, Homo sapiens
atacttttcccctgtaacatttatccttttctatgcctgtaagcatatgaagcacagctgaacaatggcaacatcttccattactgcttgattctctaatcaaccccggttagggccaactcatattaactgatcaaagaaaacaggcacaggtggctgcacttctgtgttttcatttgcctgagtttgagcttcatcagcctaccaagttttaaactgmaagtactgagatggagtgagaacaggttttgtcaaagtatcctaattatatagtagtaatctattaccaagagccacattttttaataaagtttgcacaaaaagagagttcagtccatattgactaatggcttgcttaaattctttagtaacttaaaagaaaaaacagcctaattagctatattctgtcctacttgctggattatagtaacgggaaattgccatgcttcaaggtctcccttggctttagctttttgaatagaattttgtctagcaccaccaattgctccaggttttaatgttgcaactacaggagcagtaagtttttcagctaatttattttctcaccca

SEQ ID NO: 273590 - DNA, 588 bp, Homo sapiens
atatatggttgtttaggtccttgtcagacagaactgaaataaggatacttttcccctgtaacatttatccttttctatgcctgtaagcatatgaagcacagctgaacaatggcaacatcttccattactgcttgattctctaatcaaccccggttagggccaactcatattaactgatcaaagaaaacaggcacaggtggctgcacttctgtgttttcatttgcctgagtttgagcttcatcagcctaccaagttttaaactgcaagtactgagatggagtgagaacaggttttgtcaaagtatcctaattwtatagtagtaatctattaccaagagccacattttttaataaagtttgcacaaaaagagagttcagtccatattgactaatggcttgcttaaattctttagtaacttaaaagaaaaaacagcctaattagctatattctgtcctacttgctggattatagtaacgggaaattgccatgcttcaaggtctcccttggctttagctttttgaatagaattttgtctagcaccaccaattgctccaggttttaatgttgcaactacaggagcagtaagtt

SEQ ID NO: 273591 - DNA, 570 bp, Homo sapiens
atacttttcccctgtaacatttatccttttctatgcctgtaagcatatgaagcacagctgaacaatggcaacatcttccattactgcttgattctctaatcaaccccggttagggccaactcatattaactgatcaaagaaaacaggcacaggtggctgcacttctgtgttttcatttgcctgagtttgagcttcatcagcctaccaagttttaaactgcaagtactgagatggagtgagaacaggttttgtcaaagtatcctaattatatagtagtaatctattaccaagagccayattttttaataaagtttgcacaaaaagagagttcagtccatattgactaatggcttgcttaaattctttagtaacttaaaagaaaaaacagcctaattagctatattctgtcctacttgctggattatagtaacgggaaattgccatgcttcaaggtctcccttggctttagctttttgaatagaattttgtctagcaccaccaattgctccaggttttaatgttgcaactacaggagcagtaagtttttcagctaatttattttctcaccca

SEQ ID NO: 273592 - DNA, 533 bp, Homo sapiens
atcctaattatatagtagtaatctattaccaagagccacattttttaataaagtttgcacaaaaagagagttcagtccatattgactaatggcttgcttaaattctttagtaacttaaaagaaaaaacagcctaattagctatattctgtcctacttgctggattatagtaacgggaaattgccatgcttcaaggtctcccttggctttagctttttgaatagaattttgtctagcwccaccaattgctccaggttttaatgttgcaactacaggagcagtaagtttttcagctaatttattttctcacccatttaggggagagagaggaggtggccattcacttaattcagcaggtggagcaaatgggctaataaaacatactttttaaagtctttcttttctttaatctcctccggtagctgttcttcacactcagaatttgaagttagttttttacactcatcctcctcttcctcatctgaatctgcctcatcatctatttgaaatggctcaaagtctgcctttattagt

SEQ ID NO: 273593 - DNA, 481 bp, Homo sapiens
tctcccttggctttagctttttgaatagaattttgtctagcaccaccaattgctccaggttttaatgttgcaactacaggagcagtaagtttttcagctaatttattttctcacccatttaggggagagagaggaggtggccattcacttaattcagcaggtggagcaaatgggctartaaaacatactttttaaagtctttcttttctttaatctcctccggtagctgttcttcacactcagaatttgaagttagttttttacactcatcctcctcttcctcatctgaatctgcctcatcatctatttgaaatggctcaaagtctgcctttattagtgcccacactgaccatacagaaactggaatttttgctccatctttatatgccttttaaaaatctcttccaattctctcccgttcatctaacttcatactcctttgttctggaaaccatgggcaaaactgttttactgtactaaa

SEQ ID NO: 273594 - DNA, 481 bp, Homo sapiens
tctcccttggctttagctttttgaatagaattttgtctagcaccaccaattgctccaggttttaatgttgcaactacaggagcagtaagtttttcagctaatttattttctcacccatttaggggagagagaggaggtggccattcacttaattcagcaggtggagcaaatgggctaataaaacatactttttaaagtctttcttttctttaatctcctccggtagctgttcttcacactcagaatttgaagttagttttttacactcatcctcctcttcctcatctgamtctgcctcatcatctatttgaaatggctcaaagtctgcctttattagtgcccacactgaccatacagaaactggaatttttgctccatctttatatgccttttaaaaatctcttccaattctctcccgttcatctaacttcatactcctttgttctggaaaccatgggcaaaactgttttactgtactaaa

SEQ ID NO: 273595 - DNA, 481 bp, Homo sapiens
tctcccttggctttagctttttgaatagaattttgtctagcaccaccaattgctccaggttttaatgttgcaactacaggagcagtaagtttttcagctaatttattttctcacccatttaggggagagagaggaggtggccattcacttaattcagcaggtggagcaaatgggctaataaaacatactttttaaagtctttcttttctttaatctcctccggtagctgttcttcacactcagaatttgaagttagttttttacactcatcctcctcttcctcatctgaatctgcctcatcatctmtttgaaatggctcaaagtctgcctttattagtgcccacactgaccatacagaaactggaatttttgctccatctttatatgccttttaaaaatctcttccaattctctcccgttcatctaacttcatactcctttgttctggaaaccatgggcaaaactgttttactgtactaaa

SEQ ID NO: 273596 - DNA, 481 bp, Homo sapiens
tctcccttggctttagctttttgaatagaattttgtctagcaccaccaattgctccaggttttaatgttgcaactacaggagcagtaagtttttcagctaatttattttctcacccatttaggggagagagaggaggtggccattcacttaattcagcaggtggagcaaatgggctaataaaacatactttttaaagtctttcttttctttaatctcctccggtagctgttcttcacactcagaatttgaagttagttttttacactcatcctcctcttcctcatctgaatctgcctcatcatctattkgaaatggctcaaagtctgcctttattagtgcccacactgaccatacagaaactggaatttttgctccatctttatatgccttttaaaaatctcttccaattctctcccgttcatctaacttcatactcctttgttctggaaaccatgggcaaaactgttttactgtactaaa

SEQ ID NO: 273597 - DNA, 464 bp, Homo sapiens
catgggggtgacaaagtccggtggagtyaaaggaatgagaaaaagacagtttgagagagaaagtgggaccaggggaccatcacaagtgtggagtctgcaaagtccccaagctctgggagcccacgctatttattggtgctcaaacaaagaaacaggtggtgaggatgtgggggttgaaaggaaacggagtatcaagtgaatgagaaacatatggccctgcctcagcttctcttccaacactcagcttttctcccaacacattccccttaagaacaggaataaaatagggatgcctgttctcaccactcctgttcaacaagtcctagccagagcaatcaggcaagagaaagagataaaatgcatccaaataggaaatgaagtcaaattatctctcttcactgatgatatgattctacacctagaaaaccctaaagactgtgccaaaaggctcctagaactgataa

SEQ ID NO: 273598 - DNA, 464 bp, Homo sapiens
catgggggtgacaaagtccggtggagttaaaggaatgagaaaaagacagtttgagagagaaagtgggaccaggggaccatcacaagtgtggagtctgcaaagtccccaagctctgggagcccacgctatttattggtgctcaaacaaagaaacaggtggtgaggatgtgggggttgaaaggaaacggagtatcaagtgaatgagaaacatatggccctgcctcagcttctcttccaacactcagcttttctccyaacacattccccttaagaacaggaataaaatagggatgcctgttctcaccactcctgttcaacaagtcctagccagagcaatcaggcaagagaaagagataaaatgcatccaaataggaaatgaagtcaaattatctctcttcactgatgatatgattctacacctagaaaaccctaaagactgtgccaaaaggctcctagaactgataa

SEQ ID NO: 273599 - DNA, 464 bp, Homo sapiens
catgggggtgacaaagtccggtggagttaaaggaatgagaaaaagacagtttgagagagaaagtgggaccaggggaccatcacaagtgtggagtctgcaaagtccccaagctctgggagcccacgctatttattggtgctcaaacaaagaaacaggtggtgaggatgtgggggttgaaaggaaacggagtatcaagtgaatgagaaacatatggccctgcctcagcttctcttccaacactcagcttttctcccaacacrttccccttaagaacaggaataaaatagggatgcctgttctcaccactcctgttcaacaagtcctagccagagcaatcaggcaagagaaagagataaaatgcatccaaataggaaatgaagtcaaattatctctcttcactgatgatatgattctacacctagaaaaccctaaagactgtgccaaaaggctcctagaactgataa

SEQ ID NO: 273600 - DNA, 464 bp, Homo sapiens
catgggggtgacaaagtccggtggagttaaaggaatgagaaaaagacagtttgagagagaaagtgggaccaggggaccatcacaagtgtggagtctgcaaagtccccaagctctgggagcccacgctatttattggtgctcaaacaaagaaacaggtggtgaggatgtgggggttgaaaggaaacggagtatcaagtgaatgagaaacatatggccctgcctcagcttctcttccaacactcagcttttctcccaacacatyccccttaagaacaggaataaaatagggatgcctgttctcaccactcctgttcaacaagtcctagccagagcaatcaggcaagagaaagagataaaatgcatccaaataggaaatgaagtcaaattatctctcttcactgatgatatgattctacacctagaaaaccctaaagactgtgccaaaaggctcctagaactgataa

SEQ ID NO: 273601 - DNA, 615 bp, Homo sapiens
cagcaacccccaaaataaaataaaagaagaatatgtctaaccaaggaggtaaaggatatctaaaaggagaactataaaacactgcagaaagaaatcatwgatgacaaaacaaatggaaaaccattccatgctcatggattagaaagagcaatattgttagaatggctatactgccaaaagcaatctacacattcaacattattcctatgaaacaaccaatgtcgtttttcacagaatcagaaaaaaactattctaaatttcgtatggatttttaaagagcccagacaaccaaaggaaacctaagcaagaagaacaaagctggagacatcacattacttgacttcatactataccctaaggccacagtagacaaaatagcatggtggcgatatgaaaacagacacaaagaccaatgcaacagaatagagaaccccaaaataaacatgcacctacagccatcagctttcccaggataacacaaatagagccaagtggcacctgcacattacactgtggaagaaaaacccaagctcaagaaagccaaacttgtattatgggaagttcacttggctgtacccttcccaagagggagaaattatctgcattatactagac

SEQ ID NO: 273602 - DNA, 615 bp, Homo sapiens
cagcaacccccaaaataaaataaaagaagaatatgtctaaccaaggaggtaaaggatatctaaaaggagaactataaaacactgcagaaagaaatcatagatgacaaaacaaatggaaaaccattccatgctcatggattagaaagagcaatattgttagaatggctatactgccaaaagcaatctacacattcaacattattcctatgaaacaaccaatgtcgtttttcacagaatcagaaaaaaactattctaaatttcgtatggatttttaaagagcccagacaaccaaaggaaacctaagcaagaagaacaaagctggagacatcacattacttgacttcatactataccctaaggccacagtagacaaaatagcatggtggcgatatgaaaacagacacaaagaccaatgcaacagaatagagaaccccaaaataaacatgcacctacagccatcagctttcccaggataacacaaatagagccaagtggcacctgcacattacaytgtggaagaaaaacccaagctcaagaaagccaaacttgtattatgggaagttcacttggctgtacccttcccaagagggagaaattatctgcattatactagac

SEQ ID NO: 273603 - DNA, 615 bp, Homo sapiens
cagcaacccccaaaataaaataaaagaagaatatgtctaaccaaggaggtaaaggatatctaaaaggagaactataaaacactgcagaaagaaatcatagatgacaaaacaaatggaaaaccattccatgctcatggattagaaagagcaatattgttagaatggctatactgccaaaagcaatctacacattcaacattattcctatgaaacaaccaatgtcgtttttcacagaatcagaaaaaaactattctaaatttcgtatggatttttaaagagcccagacaaccaaaggaaacctaagcaagaagaacaaagctggagacatcacattacttgacttcatactataccctaaggccacagtagacaaaatagcatggtggcgatatgaaaacagacacaaagaccaatgcaacagaatagagaaccccaaaataaacatgcacctacagccatcagctttcccaggataacacaaatagagccaagtggcacctgcacattacactgtggaagaaaaacccaagctcaagaaasccaaacttgtattatgggaagttcacttggctgtacccttcccaagagggagaaattatctgcattatactagac

SEQ ID NO: 273604 - DNA, 512 bp, Homo sapiens
tggttttctgatgccctgttgtttctgttctgaatggtttatttctcaktataagagctcagcaaagcaggcagagttaaaaagcagagacatgaaggctttaaaatcatggacttcactcctacactgaatctcaggtccccagaaagacagaaacaccatgggaccacagcaaaggcagaaggaggaatgagagagggaggtggacagaacaacaaacaggagttggctctcaatttttcaaatgtgccattttctttaggtttttctagtttatggagtctctttgttccagttgagcacacagataaactagagatctcacaaggcttttgctgagaacatcaaagcctttaacctctgttgggccaaatatttagaccaaaaatacagatagacacacaaaagccagaaccagaccagattgagtatctcagtggctacagcctttattccctttattctttaggattcgaactcaaaccagattcaggattctaacccaaccagga

SEQ ID NO: 273605 - DNA, 522 bp, Homo sapiens
ggcagagttaaaaagcagagacatgaaggctttaaaatcatggacttcactcctacactgaatctcaggtccccrgaaagacagaaacaccatgggaccacagcaaaggcagaaggaggaatgagagagggaggtggacagaacaacaaacaggagttggctctcaatttttcaaatgtgccattttctttaggtttttctagtttatggagtctctttgttccagttgagcacacagataaactagagatctcacaaggcttttgctgagaacatcaaagcctttaacctctgttgggccaaatatttagaccaaaaatacagatagacacacaaaagccagaaccagaccagattgagtatctcagtggctacagcctttattccctttattctttaggattcgaactcaaaccagattcaggattctaacccaaccaggacacccctggggtgaaactgaaaccccacagtctagacaaggttgggggtctttttttattttttatttttttgagatgg

SEQ ID NO: 273606 - DNA, 373 bp, Homo sapiens
gcccatgagagcagctgtgggggttacaccctgcaaagccacaggtgcactctcctagtagagttttcccatgagcctctgcctctgcagcaggttactcccaccctcacaccaccctactgacaacctactcctccccacactatccctccttttccttccaccccaaccccctctcatccaagattaagtcacytcccacctggcctacctccaacattaaggatgacacatgagttttatagggacacacagccaacccatattattctgaccctgattccccagaacctcatgtccttctcacagagcaaaacacaatcatgccttttcaaaagtttccaaaagtcttaactcattccaaatgtaaaaa

SEQ ID NO: 273607 - DNA, 522 bp, Homo sapiens
ggcagagttaaaaagcagagacatgaaggctttaaaatcatggacttcactcctacactgaatctcaggtccccagaaagacagaaacaccatgggaccacagcaaaggcagaaggaggaatgagagagggaggtggacagaacaacaaacaggagttggctctcaatttttcaaatgtgccattttstttaggtttttctagtttatggagtctctttgttccagttgagcacacagataaactagagatctcacaaggcttttgctgagaacatcaaagcctttaacctctgttgggccaaatatttagaccaaaaatacagatagacacacaaaagccagaaccagaccagattgagtatctcagtggctacagcctttattccctttattctttaggattcgaactcaaaccagattcaggattctaacccaaccaggacacccctggggtgaaactgaaaccccacagtctagacaaggttgggggtctttttttattttttatttttttgagatgg

SEQ ID NO: 273608 - DNA, 522 bp, Homo sapiens
ggcagagttaaaaagcagagacatgaaggctttaaaatcatggacttcactcctacactgaatctcaggtccccagaaagacagaaacaccatgggaccacagcaaaggcagaaggaggaatgagagagggaggtggacagaacaacaaacaggagttggctctcaatttttcaaatgtgccattttctttaggtttttctagtttatggagtctctttgttccagttgagcacrcagataaactagagatctcacaaggcttttgctgagaacatcaaagcctttaacctctgttgggccaaatatttagaccaaaaatacagatagacacacaaaagccagaaccagaccagattgagtatctcagtggctacagcctttattccctttattctttaggattcgaactcaaaccagattcaggattctaacccaaccaggacacccctggggtgaaactgaaaccccacagtctagacaaggttgggggtctttttttattttttatttttttgagatgg

SEQ ID NO: 273609 - DNA, 561 bp, Homo sapiens
gctggaaagtccaagactaaagggtcaggatatttggtgtttggtgaaggtcaaacattcagacactcacaacgactatagtgacagcagcagtcttcaggaatcctatgtgagggacaaacactcagaagcckgctggagtgttctagaatcctatgtgagggacaaagattcagaccccagcagtagtgttgtggaatcctatgtgagggacaaactttcaaacccttgtagcagtgttctggaatcctgtgtgagggacaaaaattcagaacctcgtagcagtgttctggaatcctatgtgaggaacaatcagaccacagcaggaatgttctggaatcctatgtgagggacaaacattcagaccacagcaggagtgttctggaatcctatgtgagggacaaacattcagacaccatcggaagtgttctggaatcctaggtgtggggcaaacattcagaccctcatagcagtgttctggaatgctatgtgaaggaaaaacattgagaccctcctaacagtgttctggaatcctatgtgaaggacagacatttagaccct

SEQ ID NO: 273610 - DNA, 561 bp, Homo sapiens
gctggaaagtccaagactaaagggtcaggatatttggtgtttggtgaaggtcaaacattcagacactcacaacgactatagtgacagcagcagtcttcaggaatcctatgtgagggacaaacactcagaagcctgctggagtgttctagaatcctatgtgagggacaaagattcagaccccagcagtagtgttgtggaatcctatgtgagggacaaactttcaaacccttgtagcagtgttctggaatcctgtgtgagggacaaaaattcagaacctcgtagcagtgttctggaatcctatgtgaggaacaatcagamcacagcaggaatgttctggaatcctatgtgagggacaaacattcagaccacagcaggagtgttctggaatcctatgtgagggacaaacattcagacaccatcggaagtgttctggaatcctaggtgtggggcaaacattcagaccctcatagcagtgttctggaatgctatgtgaaggaaaaacattgagaccctcctaacagtgttctggaatcctatgtgaaggacagacatttagaccct

SEQ ID NO: 273611 - DNA, 561 bp, Homo sapiens
gctggaaagtccaagactaaagggtcaggatatttggtgtttggtgaaggtcaaacattcagacactcacaacgactatagtgacagcagcagtcttcaggaatcctatgtgagggacaaacactcagaagcctgctggagtgttctagaatcctatgtgagggacaaagattcagaccccagcagtagtgttgtggaatcctatgtgagggacaaactttcaaacccttgtagcagtgttctggaatcctgtgtgagggacaaaaattcagaacctcgtagcagtgttctggaatcctatgtgaggaacaatcagaccacagcaggaatgttctggaatcctatgtgagggacaaacattcagaccacagcaggagtgttctggaatcctatgtgagggrcaaacattcagacaccatcggaagtgttctggaatcctaggtgtggggcaaacattcagaccctcatagcagtgttctggaatgctatgtgaaggaaaaacattgagaccctcctaacagtgttctggaatcctatgtgaaggacagacatttagaccct

SEQ ID NO: 273612 - DNA, 561 bp, Homo sapiens
gctggaaagtccaagactaaagggtcaggatatttggtgtttggtgaaggtcaaacattcagacactcacaacgactatagtgacagcagcagtcttcaggaatcctatgtgagggacaaacactcagaagcctgctggagtgttctagaatcctatgtgagggacaaagattcagaccccagcagtagtgttgtggaatcctatgtgagggacaaactttcaaacccttgtagcagtgttctggaatcctgtgtgagggacaaaaattcagaacctcgtagcagtgttctggaatcctatgtgaggaacaatcagaccacagcaggaatgttctggaatcctatgtgagggacaaacattcagaccacagcaggagtgttctggaatcctatgtgagggacaaacattcagacaccatcggaagtgttctggaatcctaggtgtggggcaaacattcagaccctcatagcagtgttctggaatgctatgtgaaggaaaaacattgagaccctcctaacagtgttctgsaatcctatgtgaaggacagacatttagaccct

SEQ ID NO: 273613 - DNA, 538 bp, Homo sapiens
ctacattctcttttgcctacgagtctctgaaataaaaggcaagttcactgcgtctaaggtacaatgatggtacaggcattgtgtaagctttccatatccaaaaaggagacattttccagaaagcttcttatttttatctgaggccccctcagcctggccttcactgtccatgtttttgtcagcattcttgtcacagccatttaaccagtctctaagatggtccaaaaatgttctcatytgtctgtcttctttggagccctccaaactcttccaacctctacccattacccagttccgaagttgcttccacattttcaggtatctttatagcaatgctccagtcctcatttgccatttttggtaagatttgttttgaaaaagaggtctaattggctcatggttctgcagagtggacaggaagcttagtgcttctgctcctggggggcctcagaaatctttcaatcattgtgcaaggtaatgaaagagtgaatggtctcacatggcaagaggaaaccacagagagtagggagtgatgtag

SEQ ID NO: 273614 - DNA, 538 bp, Homo sapiens
ctacattctcttttgcctacgagtctctgaaataaaaggcaagttcactgcgtctaaggtacaatgatggtacaggcattgtgtaagctttccatatccaaaaaggagacattttccagaaagcttcttatttttatctgaggccccctcagcctggccttcactgtccatgtttttgtcagcattcttgtcacagccatttaaccagtctctaagatggtccaaaaatgttctcatttgtctgtcttctttggagccctccaaactcttccaacctctacccattacccagttccgaagttgcttccacattttcaggtatctttatagcaatgctccagtcctcatttgccatttttggtaagatttgttttgaaaaagaggtctaattggctcatggttctgcagagtggacaggaagcttagtgcttctgctcctggggggcctcagaaatctttcaatcattgtgcaaggtaatgaaagagtgaatkgtctcacatggcaagaggaaaccacagagagtagggagtgatgtag

SEQ ID NO: 273615 - DNA, 538 bp, Homo sapiens
ctacattctcttttgcctacgagtctctgaaataaaaggcaagttcactgcgtctaaggtacaatgatggtacaggcattgtgtaagctttccatatccaaaaaggagacattttccagaaagcttcttatttttatctgaggccccctcagcctggccttcactgtccatgtttttgtcagcattcttgtcacagccatttaaccagtctctaagatggtccaaaaatgttctcatttgtctgtcttctttggagccctccaaactcttccaacctctacccattacccagttccgaagttgcttccacattttcaggtatctttatagcaatgctccagtcctcatttgccatttttggtaagatttgttttgaaaaagaggtctaattggctcatggttctgcagagtggacaggaagcttagtgcttctgctcctggggggcctcagaaatctttcaatcattgtgcaaggtaatgaaagagtgaatggtctcacatggcaagaggaaaccacrgagagtagggagtgatgtag

SEQ ID NO: 273616 - DNA, 550 bp, Homo sapiens
ggtctcacatggcaagaggaaaccacagagagtagggagtgatgtagagttttcagtggccagatctcacgagaactcactcatgattgtgaggacagtaccaaggggatggtgctgaaccactcatgagaaatttgccttcatgattcaatcaccttataccaggatccacctccaacattaggaagcataactcaacatgagatttggtggggacacatattcgaattgcctcatcagtctttgagtataaagacatccatagcaggctttatccagccagcttctttgggattctttatagggtttcaggtctatagcatatccactaatatattcctgcttcaaaaggcaataaagtggtattatcattcttcaaaaagttataatggtagtgtaggcattcatagtatgatttagttcacgtttgctactgtttctattctatcaccatagtracactttcctacacaattctatattcagctgggtttcagttgagcacaaagtcatccttgtactaccactgatagctggcactagctctttg

SEQ ID NO: 273617 - DNA, 620 bp, Homo sapiens
aaaaactggccaccttctgatgctctttctaaaagcctgtcactgtcatctgcttgcttgtcaactcattggctgtgaggttgagctgagtggcctgtgtccatcttcttggggaagaatttgaagccatcagtcttgctctcccayccctaaaggttgatggtcaccacctgggggtgtgctgagggtcagaaagaagccagcactcactatctcatccttctcagccttcctcttgcactctctccgggctgtctcttcagtgctggtaggatacatcagaaagtgatggaagatgtggcactgtgcccacacccagagctggccatgtggttggctcctccaccagaatggatgctctgggtgctctttgagccagcttggccttgcctggcatgcacaggacccaggtaccgacatgttgctctgagtgagcttgtcctgccttgggccaaattctgtcaggccagggccacaaaaggccgagtcccacgggtggtaatcctggctgctttctgcacttccacataaagacctcctgaagatggcctgtggtctacctctttgcaaccaagaagcccgcagtgccatatgaatcctcaggcatggactggagcccc

SEQ ID NO: 273618 - DNA, 569 bp, Homo sapiens
tgaccagtatttatgtcctatttcattaaacagacatttcaagattttttagagttaatttttaaaaattaaktatcacaaatatttctgaagtactaccttaaaaaataaaactctttcctagcttttcatatagttaaacattttcataatgactaaaaagataaaaataaattaacaaccataattaatttagaattctactttttatataagatgaaatactatataaaatgtccagaaaatctagtgttaatgaggctgtgcagcctggacatttgatgtctcatctgtgggaatgtgaactaacccaaccattctgaataattattggctctgtgtgttaacagtctagagtcctgaaacaaggatcttaattctaaaataaaatcctattctaagaatataccaagggttgataatcaaggaagtttcaaagttatagagaagaaccttcatcctagcattatatatgtaatcatccatataaaccagatagtgttgaatgaaactgcagaaaaacaaagagcctacagaatatgtttctctttgtgtacaactgtaaatgt

SEQ ID NO: 273619 - DNA, 569 bp, Homo sapiens
tgaccagtatttatgtcctatttcattaaacagacatttcaagattttttagagttaatttttaaaaattaagtatcacaaatatttctgaagtactaccttaaaaaataaaactctttcctagcttttcatatagttaaacattttcataatgactaaaaagataaaaataaattaacaaccataattaatttakaattctactttttatataagatgaaatactatataaaatgtccagaaaatctagtgttaatgaggctgtgcagcctggacatttgatgtctcatctgtgggaatgtgaactaacccaaccattctgaataattattggctctgtgtgttaacagtctagagtcctgaaacaaggatcttaattctaaaataaaatcctattctaagaatataccaagggttgataatcaaggaagtttcaaagttatagagaagaaccttcatcctagcattatatatgtaatcatccatataaaccagatagtgttgaatgaaactgcagaaaaacaaagagcctacagaatatgtttctctttgtgtacaactgtaaatgt

SEQ ID NO: 273620 - DNA, 445 bp, Homo sapiens
cataattaatttagaattctactttttatatmagatgaaatactatataaaatgtccagaaaatctagtgttaatgaggctgtgcagcctggacatttgatgtctcatctgtgggaatgtgaactaacccaaccattctgaataattattggctctgtgtgttaacagtctagagtcctgaaacaaggatcttaattctaaaataaaatcctattctaagaatataccaagggttgataatcaaggaagtttcaaagttatagagaagaaccttcatcctagcattatatatgtaatcatccatataaaccagatagtgttgaatgaaactgcagaaaaacaaagagcctacagaatatgtttctctttgtgtacaactgtaaatgtacacatctatccatgtaaaattttacatctcaggaggataggtaccaacatgttaaca

SEQ ID NO: 273621 - DNA, 445 bp, Homo sapiens
cataattaatttagaattctactttttatataagatgaaatactatataaaatgtccagaaaatstagtgttaatgaggctgtgcagcctggacatttgatgtctcatctgtgggaatgtgaactaacccaaccattctgaataattattggctctgtgtgttaacagtctagagtcctgaaacaaggatcttaattctaaaataaaatcctattctaagaatataccaagggttgataatcaaggaagtttcaaagttatagagaagaaccttcatcctagcattatatatgtaatcatccatataaaccagatagtgttgaatgaaactgcagaaaaacaaagagcctacagaatatgtttctctttgtgtacaactgtaaatgtacacatctatccatgtaaaattttacatctcaggaggataggtaccaacatgttaaca

SEQ ID NO: 273622 - DNA, 445 bp, Homo sapiens
cataattaatttagaattctactttttatataagatgaaatactatataaaatgtccagaaaatctagtgttaatgaggctgtgcagcctggacatttgatgtctcatctgtgggaatgtgaactaacccaaccattctgaataattattggctctgtgtgttaacagtctagagtcctgaaacaaggatcttaattctaaaataaaatcctattctaagaatataccaagggttgataatcaaggaagtttcaaagttatagagaagaaccttmatcctagcattatatatgtaatcatccatataaaccagatagtgttgaatgaaactgcagaaaaacaaagagcctacagaatatgtttctctttgtgtacaactgtaaatgtacacatctatccatgtaaaattttacatctcaggaggataggtaccaacatgttaaca

SEQ ID NO: 273623 - DNA, 445 bp, Homo sapiens
cataattaatttagaattctactttttatataagatgaaatactatataaaatgtccagaaaatctagtgttaatgaggctgtgcagcctggacatttgatgtctcatctgtgggaatgtgaactaacccaaccattctgaataattattggctctgtgtgttaacagtctagagtcctgaaacaaggatcttaattctaaaataaaatcctattctaagaatataccaagggttgataatcaaggaagtttcaaagttatagagaagaaccttcatcctagcattatatatgtaatcayccatataaaccagatagtgttgaatgaaactgcagaaaaacaaagagcctacagaatatgtttctctttgtgtacaactgtaaatgtacacatctatccatgtaaaattttacatctcaggaggataggtaccaacatgttaaca

SEQ ID NO: 273624 - DNA, 582 bp, Homo sapiens
agttaatttttaaaaattaagtatcacaaatatttctgaagtactaccttaaaaaataaaactctttcctagcttttcatatagttaaacattttcataatgactaaaaagataaaaataaattaacaaccataattaatttagaattctactttttatataagatgaaatactatataaaatgtccagaaaatctagtgttaatgaggctgtgcagcctggacatttgatgtctcatctgtgggaatgtgaactaacccaaccattctgaataattattggctctgtgtgttaacagtctagagtcctgaaacaaggatcttaattctaaaataaaatcctattctaagaatataccaagggttgataatcaaggaagtttcaaagttatagagaagaaccttcatcctagcattatatatgtaatcatccatataaaccagatagtgttgaatgaaactgcagaaaaacaaagagcctacagaatatgtttctctttgtgtacaacwgtaaatgtacacatctatccatgtaaaattttacatctcaggaggataggtaccaacatgttaacatgctata

SEQ ID NO: 273625 - DNA, 572 bp, Homo sapiens
ctgtaagataagaaattttactttcctacaatgtgatacacacacacacacacacactctctcaaacacacatacacacacaccgaggatatatacacacacaaatatatatataaacatacatgtttatataggtgcacacacacatacatatacacagatggtcaacttataatggttcaatttatgattttttttttactttatgatgaagcaaaagtgatagctttgaatagaatataaccattctgcttttcactttcagtacaatattcaacaaattacataaaatatccaawactttattataaagtgggttttgtattcaacgattttgcccaattgtctgctgatgtaagtgttctgagcacattaaaggtatgccaggctaagctgtgatattcagtaagttaggtattaaatacatttttaacttactgtattttcaatttataatcagcttatcaagacttaaccccattgtacattgaaaagcatttgtattgcattaaacatgttatataatatttttaattgaaattactggcaacttttgaaaaaatgcaatgaaa

SEQ ID NO: 273626 - DNA, 572 bp, Homo sapiens
ctgtaagataagaaattttactttcctacaatgtgatacacacacacacacacacactctctcaaacacacatacacacacaccgaggatatatacacacacaaatatatatataaacatacatgtttatataggtgcacacacacatacatatacacagatggtcaacttataatggttcaatttatgattttttttttactttatgatgaagcaaaagtgatagctttgaatagaatataaccattctgcttttcactttcagtacaatattcaacaaattacataaaatatccaatactttattataaagtgggttttgtattcaaygattttgcccaattgtctgctgatgtaagtgttctgagcacattaaaggtatgccaggctaagctgtgatattcagtaagttaggtattaaatacatttttaacttactgtattttcaatttataatcagcttatcaagacttaaccccattgtacattgaaaagcatttgtattgcattaaacatgttatataatatttttaattgaaattactggcaacttttgaaaaaatgcaatgaaa

SEQ ID NO: 273627 - DNA, 572 bp, Homo sapiens
ctgtaagataagaaattttactttcctacaatgtgatacacacacacacacacacactctctcaaacacacatacacacacaccgaggatatatacacacacaaatatatatataaacatacatgtttatataggtgcacacacacatacatatacacagatggtcaacttataatggttcaatttatgattttttttttactttatgatgaagcaaaagtgatagctttgaatagaatataaccattctgcttttcactttcagtacaatattcaacaaattacataaaatatccaatactttattataaagtgggttttgtattcaacgattttgcccaattgtcwgctgatgtaagtgttctgagcacattaaaggtatgccaggctaagctgtgatattcagtaagttaggtattaaatacatttttaacttactgtattttcaatttataatcagcttatcaagacttaaccccattgtacattgaaaagcatttgtattgcattaaacatgttatataatatttttaattgaaattactggcaacttttgaaaaaatgcaatgaaa

SEQ ID NO: 273628 - DNA, 548 bp, Homo sapiens
tttttgggcagggtcagtggcttacacctgtaatcccagcactttggtaggctgaactgggcagatcacttgaggtcaggagtttgagaccagcctggcaaacagggtgaaaccccatctctactaaaaatacaaaaattatctgagtgtrgtggcatgtgcctgtaatcccagctactagggaggctgaggtgtgagaattgcttgaactatgcaagcagaggttgcagtgagccaagatcatgccattgcactccagcctgggcaacagagtaagattctgtcagaaaaaaaaaaaaaagaaagaaagaaagaaaagaaaaaaagtttttagcttcaagtaacagaatagtcaactaattgaagaaaaaaacaaggagcaacttttaccaaatcggacaacaaatagatggtatcaatgcttagttaattcaacatgatccacttctttatgattctcttatctttctacctatgttttcaagatggctacggcattcccagccttacaacttcatgtgacaaaatccaatggcaggaaataataa

SEQ ID NO: 273629 - DNA, 548 bp, Homo sapiens
tttttgggcagggtcagtggcttacacctgtaatcccagcactttggtaggctgaactgggcagatcacttgaggtcaggagtttgagaccagcctggcaaacagggtgaaaccccatctctactaaaaatacaaaaattatctgagtgtagtggcatgtgcctgtaatcccagctactagggaggctgaggtgtgagaattgcttgaactatgcaagcagaggttgcagtgagccaagatcatgccattgcactccagcctgggcaacagagtaagattctgtcagaaaaaaaaaaaaaagaaagaaagaaagaaaagaaaaaaastttttagcttcaagtaacagaatagtcaactaattgaagaaaaaaacaaggagcaacttttaccaaatcggacaacaaatagatggtatcaatgcttagttaattcaacatgatccacttctttatgattctcttatctttctacctatgttttcaagatggctacggcattcccagccttacaacttcatgtgacaaaatccaatggcaggaaataataa

SEQ ID NO: 273630 - DNA, 603 bp, Homo sapiens
acaaaatccaatggcaggaaatrataagtgacggcattttggaacgttaaggaaaaactttaaggattggaaaacagggatgccatatgtccagtaacatgggatagccgctcctaattaaggattgctgtatgtcctgaatgactttctaatgtaatgaaggtgaataacctgctttgtttaattatacaatcccaaatgtaactgcctaagtgccaagtacttttgcatggttttaatatgccatgaattttgcaagaatgaaactactatgtatatgagaaaagacggtagattttttcatttagatactcatttcagagtctcaataggaaaaatagaacacacacaaactaagataatttaacatgggtttatttccaaagagactacttacgaaaatttcaggggagaagggtgaaggaatcacagaaatcacaccccacaataactctgggttagtagcagcaggcagagttctggggagtaaactgccctgatcacacaaggaaacactaattttcttatgaaaaagattggtcaaggagacctagcagagagggagtttaggcaataacccccaatcccatttcctccttccct

SEQ ID NO: 273631 - DNA, 645 bp, Homo sapiens
ctttatgattctcttatctttctacctatgttttcaagatggctacggcattcccagccttacaacttcatgtgacaaaatccaatggcaggaaataataagtgacggcattttggaackttaaggaaaaactttaaggattggaaaacagggatgccatatgtccagtaacatgggatagccgctcctaattaaggattgctgtatgtcctgaatgactttctaatgtaatgaaggtgaataacctgctttgtttaattatacaatcccaaatgtaactgcctaagtgccaagtacttttgcatggttttaatatgccatgaattttgcaagaatgaaactactatgtatatgagaaaagacggtagattttttcatttagatactcatttcagagtctcaataggaaaaatagaacacacacaaactaagataatttaacatgggtttatttccaaagagactacttacgaaaatttcaggggagaagggtgaaggaatcacagaaatcacaccccacaataactctgggttagtagcagcaggcagagttctggggagtaaactgccctgatcacacaaggaaacactaattttcttatgaaaaagattggtcaaggagacctagcagagagggagtttagg

SEQ ID NO: 273632 - DNA, 645 bp, Homo sapiens
ctttatgattctcttatctttctacctatgttttcaagatggctacggcattcccagccttacaacttcatgtgacaaaatccaatggcaggaaataataagtgacggcattttggaacgttaaggaaaaactttaaggattggaaaacagggatgccatatgtccagtaacatgggatagccgctcctaattaaggattgctgtatgtcctgaatgactttctaatgtaatgaaggtgaataacctgctytgtttaattatacaatcccaaatgtaactgcctaagtgccaagtacttttgcatggttttaatatgccatgaattttgcaagaatgaaactactatgtatatgagaaaagacggtagattttttcatttagatactcatttcagagtctcaataggaaaaatagaacacacacaaactaagataatttaacatgggtttatttccaaagagactacttacgaaaatttcaggggagaagggtgaaggaatcacagaaatcacaccccacaataactctgggttagtagcagcaggcagagttctggggagtaaactgccctgatcacacaaggaaacactaattttcttatgaaaaagattggtcaaggagacctagcagagagggagtttagg

SEQ ID NO: 273633 - DNA, 645 bp, Homo sapiens
ctttatgattctcttatctttctacctatgttttcaagatggctacggcattcccagccttacaacttcatgtgacaaaatccaatggcaggaaataataagtgacggcattttggaacgttaaggaaaaactttaaggattggaaaacagggatgccatatgtccagtaacatgggatagccgctcctaattaaggattgctgtatgtcctgaatgactttctaatgtaatgaaggtgaataacctgctttgtttaattatacaatcccaaatgtaactgcctaagtgycaagtacttttgcatggttttaatatgccatgaattttgcaagaatgaaactactatgtatatgagaaaagacggtagattttttcatttagatactcatttcagagtctcaataggaaaaatagaacacacacaaactaagataatttaacatgggtttatttccaaagagactacttacgaaaatttcaggggagaagggtgaaggaatcacagaaatcacaccccacaataactctgggttagtagcagcaggcagagttctggggagtaaactgccctgatcacacaaggaaacactaattttcttatgaaaaagattggtcaaggagacctagcagagagggagtttagg

SEQ ID NO: 273634 - DNA, 645 bp, Homo sapiens
ctttatgattctcttatctttctacctatgttttcaagatggctacggcattcccagccttacaacttcatgtgacaaaatccaatggcaggaaataataagtgacggcattttggaacgttaaggaaaaactttaaggattggaaaacagggatgccatatgtccagtaacatgggatagccgctcctaattaaggattgctgtatgtcctgaatgactttctaatgtaatgaaggtgaataacctgctttgtttaattatacaatcccaaatgtaactgcctaagtgccaagtacttttgcatggttttaatatgccatgaattttgcaagaatgaaactrctatgtatatgagaaaagacggtagattttttcatttagatactcatttcagagtctcaataggaaaaatagaacacacacaaactaagataatttaacatgggtttatttccaaagagactacttacgaaaatttcaggggagaagggtgaaggaatcacagaaatcacaccccacaataactctgggttagtagcagcaggcagagttctggggagtaaactgccctgatcacacaaggaaacactaattttcttatgaaaaagattggtcaaggagacctagcagagagggagtttagg

SEQ ID NO: 273635 - DNA, 603 bp, Homo sapiens
acaaaatccaatggcaggaaataataagtgacggcattttggaacgttaaggaaaaactttaaggattggaaaacagggatgccatatgtccagtaacatgggatagccgctcctaattaaggattgctgtatgtcctgaatgactttctaatgtaatgaaggtgaataacctgctttgtttaattatacaatcccaaatgtaactgcctaagtgccaagtacttttgcatggttttaatatgccatgaattttgcaagaatgaaactactatgtatatgagaaaagayggtagattttttcatttagatactcatttcagagtctcaataggaaaaatagaacacacacaaactaagataatttaacatgggtttatttccaaagagactacttacgaaaatttcaggggagaagggtgaaggaatcacagaaatcacaccccacaataactctgggttagtagcagcaggcagagttctggggagtaaactgccctgatcacacaaggaaacactaattttcttatgaaaaagattggtcaaggagacctagcagagagggagtttaggcaataacccccaatcccatttcctccttccct

SEQ ID NO: 273636 - DNA, 531 bp, Homo sapiens
taacatgggatagccgctcctaattaaggattgctgtatgtcctgaatgactttctaatgtaatgaaggtgaataacctgctttgtttaattatacaatcccaaatgtaactgcctaagtgccaagtacttttgcatggttttaatatgccatgaattttgcaagaatgaaactactatgtatatgagaaaagacggtagattttttcatttagatactcatttcagagtctcaataggaaaaatagaacacacacaaactaagataatttaacatgggtttatttccaaagagactacttacgaaaatktcaggggagaagggtgaaggaatcacagaaatcacaccccacaataactctgggttagtagcagcaggcagagttctggggagtaaactgccctgatcacacaaggaaacactaattttcttatgaaaaagattggtcaaggagacctagcagagagggagtttaggcaataacccccaatcccatttcctccttccctttaatctcatgaacatgcatag

SEQ ID NO: 273637 - DNA, 531 bp, Homo sapiens
taacatgggatagccgctcctaattaaggattgctgtatgtcctgaatgactttctaatgtaatgaaggtgaataacctgctttgtttaattatacaatcccaaatgtaactgcctaagtgccaagtacttttgcatggttttaatatgccatgaattttgcaagaatgaaactactatgtatatgagaaaagacggtagattttttcatttagatactcatttcagagtctcaataggaaaaatagaacacacacaaactaagataatttaacatgggtttatttccaaagagactacttacgaaaatttcaggggagaagggtgaaggaatcacagaaatcacacsccacaataactctgggttagtagcagcaggcagagttctggggagtaaactgccctgatcacacaaggaaacactaattttcttatgaaaaagattggtcaaggagacctagcagagagggagtttaggcaataacccccaatcccatttcctccttccctttaatctcatgaacatgcatag

SEQ ID NO: 273638 - DNA, 531 bp, Homo sapiens
taacatgggatagccgctcctaattaaggattgctgtatgtcctgaatgactttctaatgtaatgaaggtgaataacctgctttgtttaattatacaatcccaaatgtaactgcctaagtgccaagtacttttgcatggttttaatatgccatgaattttgcaagaatgaaactactatgtatatgagaaaagacggtagattttttcatttagatactcatttcagagtctcaataggaaaaatagaacacacacaaactaagataatttaacatgggtttatttccaaagagactacttacgaaaatttcaggggagaagggtgaaggaatcacagaaatcacaccccacaataactctgggttagtagcagcaggcagagttctggggagtaaactgccctgatcacasaaggaaacactaattttcttatgaaaaagattggtcaaggagacctagcagagagggagtttaggcaataacccccaatcccatttcctccttccctttaatctcatgaacatgcatag

SEQ ID NO: 273639 - DNA, 527 bp, Homo sapiens
tacttacgaaaatttcaggggagaagggtgaaggaatcacagaaatcacaccccacaataactctgggttagtagcagcaggcagagttctggggagtaaactgccctgatcacacaaggaaacactaattttcttatgaaaaagattggtcaaggagacctagcagagagggagtttaggcaataacccccaatcccatttcctccttccctttaatctcatgaacatgcatagaaggcaatgagcaagggaacygattgagatattcaatatggtccattccacttggacaaaagccagtaaataggggagtataacaggggacaagggccaaacagaaagtatctattacatttaccaatgcagatcaatcatgtcaacaatagaaatggcagttttggcatttggttattcaatgaaactatatttgtagctttttatttaaaatgtttcaaggtatgggcgaagatatgaaaatttcattatgttctattgtatttgagatgtaaatgttctggcacaatta

SEQ ID NO: 273640 - DNA, 476 bp, Homo sapiens
agacctagcagagagggagtttaggcaataacccccaatcccatttcctccttccctttaatctcatgaacatgcatagaaggcaatgagcaagggaaccgatkgagatattcaatatggtccattccacttggacaaaagccagtaaataggggagtataacaggggacaagggccaaacagaaagtatctattacatttaccaatgcagatcaatcatgtcaacaatagaaatggcagttttggcatttggttattcaatgaaactatatttgtagctttttatttaaaatgtttcaaggtatgggcgaagatatgaaaatttcattatgttctattgtatttgagatgtaaatgttctggcacaattatatacattttggatcatatattgacagtaaattatttctcctttgttagcttcagcataacattaatattttcaacaacttgaatgcatacattgtgttctcact

SEQ ID NO: 273641 - DNA, 476 bp, Homo sapiens
agacctagcagagagggagtttaggcaataacccccaatcccatttcctccttccctttaatctcatgaacatgcatagaaggcaatgagcaagggaaccgattgagatattcaatatggwccattccacttggacaaaagccagtaaataggggagtataacaggggacaagggccaaacagaaagtatctattacatttaccaatgcagatcaatcatgtcaacaatagaaatggcagttttggcatttggttattcaatgaaactatatttgtagctttttatttaaaatgtttcaaggtatgggcgaagatatgaaaatttcattatgttctattgtatttgagatgtaaatgttctggcacaattatatacattttggatcatatattgacagtaaattatttctcctttgttagcttcagcataacattaatattttcaacaacttgaatgcatacattgtgttctcact

SEQ ID NO: 273642 - DNA, 462 bp, Homo sapiens
atgaacatgcatagaaggcaatgagcaagggaaccgattgagatattcaatatggtccattccacttggacaaaagccagtaaataggggagtataacaggggacaagggccaaacagaaagtatctattacatttaccaatgcagatcaatcatgtcaacaawagaaatggcagttttggcatttggttattcaatgaaactatatttgtagctttttatttaaaatgtttcaaggtatgggcgaagatatgaaaatttcattatgttctattgtatttgagatgtaaatgttctggcacaattatatacattttggatcatatattgacagtaaattatttctcctttgttagcttcagcataacattaatattttcaacaacttgaatgcatacattgtgttctcactaatcgtttagaatagtgaaggggtctttgaaaaatttcttatgaagtagag

SEQ ID NO: 273643 - DNA, 462 bp, Homo sapiens
atgaacatgcatagaaggcaatgagcaagggaaccgattgagatattcaatatggtccattccacttggacaaaagccagtaaataggggagtataacaggggacaagggccaaacagaaagtatctattacatttaccaatgcagatcaatcatgtcaacaatagaaatggcagttttggcatttggttattcaatgaaactatatttgtrgctttttatttaaaatgtttcaaggtatgggcgaagatatgaaaatttcattatgttctattgtatttgagatgtaaatgttctggcacaattatatacattttggatcatatattgacagtaaattatttctcctttgttagcttcagcataacattaatattttcaacaacttgaatgcatacattgtgttctcactaatcgtttagaatagtgaaggggtctttgaaaaatttcttatgaagtagag

SEQ ID NO: 273644 - DNA, 462 bp, Homo sapiens
atgaacatgcatagaaggcaatgagcaagggaaccgattgagatattcaatatggtccattccacttggacaaaagccagtaaataggggagtataacaggggacaagggccaaacagaaagtatctattacatttaccaatgcagatcaatcatgtcaacaatagaaatggcagttttggcatttggttattcaatgaaactatatttgtagctttttatttamaatgtttcaaggtatgggcgaagatatgaaaatttcattatgttctattgtatttgagatgtaaatgttctggcacaattatatacattttggatcatatattgacagtaaattatttctcctttgttagcttcagcataacattaatattttcaacaacttgaatgcatacattgtgttctcactaatcgtttagaatagtgaaggggtctttgaaaaatttcttatgaagtagag

SEQ ID NO: 273645 - DNA, 582 bp, Homo sapiens
ggggagtaaactgccctgatcacacaaggaaacactaattttcttatgaaaaagattggtcaaggagacctagcagagagggagtttaggcaataacccccaatcccatttcctccttccctttaatctcatgaacatgcatagaaggcaatgagcaagggaaccgattgagatattcaatatggtccattccacttggacaaaagccagtaaataggggagtataacaggggacaagggccaaacagaaagtatctattacatttaccaatgcagatcaatcatgtcaacaatagaaatggcagttttggcatttggttattcaatgaaactatatttgtagctttttatttaaaatgtttcaaggtatgggcgaagatatgaaaatttcattatgttctattgtatttgagatgtaaatgttctggcacaattatatacattttggatcatatattgacagtaaattatttctcctttgttagcttcagcataacattaatattttcaacaasttgaatgcatacattgtgttctcactaatcgtttagaatagtgaaggggtctttgaaaaatttctta

SEQ ID NO: 273646 - DNA, 609 bp, Homo sapiens
tcaacaatagaaatggcagttttggcatttggttattcaatgaaactatatttgtagctttttatttaaaatgtttcaaggtatgggcgaagatatgaaaatttcattatgttctattgtatttgagatgtaaatgttctggcacaattatatacattttggatcatatattgacagtaaattatttctcctttgttagcttcagcataacattaatattttcaacaacttgaatgcatacattgtgttctcactaatmgtttagaatagtgaaggggtctttgaaaaatttcttatgaagtagaggcattgggtcagacagagccgaaaaccattggcttagattaatcactatttatcctagggttgaagagggccaattgaagacacaaatatccaatccctctatgaccttggagatctaggaaacagagaaatagagactggttcttaaggaggtaataagtgtgccttctatggtttataataatatgcattgtcttaacaatcgaatacttaaatgttaatgccctcataatatgcaaaatttttaataagcacattggtccctgtgttcaagtagttgataatcaaattactgcagtatgg

SEQ ID NO: 273647 - DNA, 609 bp, Homo sapiens
tcaacaatagaaatggcagttttggcatttggttattcaatgaaactatatttgtagctttttatttaaaatgtttcaaggtatgggcgaagatatgaaaatttcattatgttctattgtatttgagatgtaaatgttctggcacaattatatacattttggatcatatattgacagtaaattatttctcctttgttagcttcagcataacattaatattttcaacaacttgaatgcatacattgtgttctcactaatcgtttagaatagtgaaggggtctttgaaraatttcttatgaagtagaggcattgggtcagacagagccgaaaaccattggcttagattaatcactatttatcctagggttgaagagggccaattgaagacacaaatatccaatccctctatgaccttggagatctaggaaacagagaaatagagactggttcttaaggaggtaataagtgtgccttctatggtttataataatatgcattgtcttaacaatcgaatacttaaatgttaatgccctcataatatgcaaaatttttaataagcacattggtccctgtgttcaagtagttgataatcaaattactgcagtatgg

SEQ ID NO: 273648 - DNA, 609 bp, Homo sapiens
tcaacaatagaaatggcagttttggcatttggttattcaatgaaactatatttgtagctttttatttaaaatgtttcaaggtatgggcgaagatatgaaaatttcattatgttctattgtatttgagatgtaaatgttctggcacaattatatacattttggatcatatattgacagtaaattatttctcctttgttagcttcagcataacattaatattttcaacaacttgaatgcatacattgtgttctcactaatcgtttagaatagtgaaggggtctttgaaaaatttcttatgaartagaggcattgggtcagacagagccgaaaaccattggcttagattaatcactatttatcctagggttgaagagggccaattgaagacacaaatatccaatccctctatgaccttggagatctaggaaacagagaaatagagactggttcttaaggaggtaataagtgtgccttctatggtttataataatatgcattgtcttaacaatcgaatacttaaatgttaatgccctcataatatgcaaaatttttaataagcacattggtccctgtgttcaagtagttgataatcaaattactgcagtatgg

SEQ ID NO: 273649 - DNA, 271 bp, Homo sapiens
ggttcttaaggaggtaataagtgtgccttctatggtttataataatatgcattgtcttaacaatcgaatacttaaawgttaatgccctcataatatgcaaaatttttaataagcacattggtccctgtgttcaagtagttgataatcaaattactgcagtatggtaagtcttttgaagagcattaaacagcagagaatgtaagaaatttgtccctataatagtgtgggccttctgtgtttcctaagggcacattcatatgatctaataact

SEQ ID NO: 273650 - DNA, 597 bp, Homo sapiens
tatttctcctttgttagcttcagcataacattaatattttcaacaacttgaatgcatacattgtgttctcactaatcgtttagaatagtgaaggggtctttgaaaaatttcttatgaagtagaggcattgggtcagacagagccgaaaaccattggcttagattaatcactatttatcctagggttgaagagggccaattgaagacacaaatatccaatccctctatgaccttggagatctaggaaacagagaaatagagactggttcttaaggaggtaataagtgtgccttctatggtttataataatatgcattgtcttaacaatcgaatacttaaatgttaatgccctcataatatgcaaaatttttaataagyacattggtccctgtgttcaagtagttgataatcaaattactgcagtatggtaagtcttttgaagagcattaaacagcagagaatgtaagaaatttgtccctataatagtgtgggccttctgtgtttcctaagggcacattcatatgatctaataactgagcagagagaagcctaaaggatagtttatggtttcatttgtttgtttttgccaattaacata

SEQ ID NO: 273651 - DNA, 271 bp, Homo sapiens
ggttcttaaggaggtaataagtgtgccttctatggtttataataatatgcattgtcttaacaatcgaatacttaaatgttaatgccctcataatatgcaaaatttttaataagcacattggtccctgtgttcaagtagttgrtaatcaaattactgcagtatggtaagtcttttgaagagcattaaacagcagagaatgtaagaaatttgtccctataatagtgtgggccttctgtgtttcctaagggcacattcatatgatctaataact

SEQ ID NO: 273652 - DNA, 271 bp, Homo sapiens
ggttcttaaggaggtaataagtgtgccttctatggtttataataatatgcattgtcttaacaatcgaatacttaaatgttaatgccctcataatatgcaaaatttttaataagcacattggtccctgtgttcaagtagttgataatcaaattactgcagtatggtaagtcttttgaagagcattaaacagcagagaatgtaagaaatttgtcyctataatagtgtgggccttctgtgtttcctaagggcacattcatatgatctaataact

SEQ ID NO: 273653 - DNA, 497 bp, Homo sapiens
atgatctaataactgagcagagagaagcctaaaggatagtttatggtttcatttgtttgtttttgccaattaacatacatttctagattaaaagtcaactatcttttccttggaagtcaactataggagaagatagtgaagaggcaaggaaaattacagcagctcaacagctttaccctggaaatatctgtattgtgtactgctataacctacctttatcagtcacataacaatgtcaaagaggcaagcttggcaccattgctcttagtgaatccctgctgccagccttttawcctaagtgctctccaaagacccatttaatggaccttcctgaaattgtgctcaggatcaatatgagtctcattgatacagcatttttggaactcaccatttgcttatttattaaacctgggatagttgcccaacttctatcatctgaaacactctccatgactttcaaaattaccaacattggttccaacatcattcctagaaaa

SEQ ID NO: 273654 - DNA, 497 bp, Homo sapiens
atgatctaataactgagcagagagaagcctaaaggatagtttatggtttcatttgtttgtttttgccaattaacatacatttctagattaaaagtcaactatcttttccttggaagtcaactataggagaagatagtgaagaggcaaggaaaattacagcagctcaacagctttaccctggaaatatctgtattgtgtactgctataacctacctttatcagtcacataacaatgtcaaagaggcaagcttggcaccattgctcttagtgaatccctgctgccagccttttatcctaagtgctctccaaagacccatttaatggaccttcctgaaattgtgctcaggatcaatatgagkctcattgatacagcatttttggaactcaccatttgcttatttattaaacctgggatagttgcccaacttctatcatctgaaacactctccatgactttcaaaattaccaacattggttccaacatcattcctagaaaa

SEQ ID NO: 273655 - DNA, 497 bp, Homo sapiens
atgatctaataactgagcagagagaagcctaaaggatagtttatggtttcatttgtttgtttttgccaattaacatacatttctagattaaaagtcaactatcttttccttggaagtcaactataggagaagatagtgaagaggcaaggaaaattacagcagctcaacagctttaccctggaaatatctgtattgtgtactgctataacctacctttatcagtcacataacaatgtcaaagaggcaagcttggcaccattgctcttagtgaatccctgctgccagccttttatcctaagtgctctccaaagacccatttaatggaccttcctgaaattgtgctcaggatcaatatgagtctcattgatacagcatttttggaactcaccatttgcttatttattaaacctgggatagttgcccracttctatcatctgaaacactctccatgactttcaaaattaccaacattggttccaacatcattcctagaaaa

SEQ ID NO: 273656 - DNA, 576 bp, Homo sapiens
tattaaacctgggatagttgcccaacttctatcatctgaaacactctccatgactttcaaaattaccaacattggttcmaacatcattcctagaaaacatttcagtggagtatatttatctgacatttgactgtatttatagcagtaagaatctatgatgattcctcccaaaataatcccacaattacccattttgggtcacctttgagggtcttacccttaatatcagagatctgttctatacatttgagtcttagaaataattattagcttctctgtgaatttaactgaagttccttacttttattcagcctgttacccaaattacataatgtattgaaagctaaaaactgtccaaatttctgattacatttagttaaaaatgggaatatgactttttctttttctaacttggcaaagattatgtttttttttcatgaagaaatataggcatatttaaacactcaggatctgagaatttgaaatacatgaaacttagcaagtggtctttaagtagttttcatttctaaattatagtacataacattgaatgccacagaaggaaagacaatgagg

SEQ ID NO: 273657 - DNA, 295 bp, Homo sapiens
tatttatctgacatttgactgtatttatagcmgtaagaatctatgatgattcctcccaaaataatcccacaattacccattttgggtcacctttgagggtcttacccttaatatcagagatctgttctatacatttgagtcttagaaataattattagcttctctgtgaatttaactgaagttccttacttttattcagcctgttacccaaattacataatgtattgaaagctaaaaactgtccaaatttctgattacatttagttaaaaatgggaatatgactttttctttttc

SEQ ID NO: 273658 - DNA, 576 bp, Homo sapiens
tattaaacctgggatagttgcccaacttctatcatctgaaacactctccatgactttcaaaattaccaacattggttccaacatcattcctagaaaacatttcagtggagtatatttatctgacatttgactgtatttatagcagtaagaatctatgatgattcctcccaaaataatcccacaattacccattttgggtcacctttgagggtcttacccttaatatcagagatctgttctatacatttgagtcttagaaataattattagcttctctgtgaatttaactgaagttccttacttttattcagcctgttacccaaattacataatgtattgaaagctaaaaactgtccamatttctgattacatttagttaaaaatgggaatatgactttttctttttctaacttggcaaagattatgtttttttttcatgaagaaatataggcatatttaaacactcaggatctgagaatttgaaatacatgaaacttagcaagtggtctttaagtagttttcatttctaaattatagtacataacattgaatgccacagaaggaaagacaatgagg

SEQ ID NO: 273659 - DNA, 295 bp, Homo sapiens
tatttatctgacatttgactgtatttatagcagtaagaatctatgatgattcctcccaaaataatcccacaattacccattttgggtcacctttgagggtcttacccttaatatcagagatctgttctatacatttgagtcttagaaataattattagcttctctgtgaatttaactgaagttccttacttttattcagcctgttacccaaattacataatgtattgaaagctaaaaactgtccaaatttctgattacatttagttaaaaaygggaatatgactttttctttttc

SEQ ID NO: 273660 - DNA, 348 bp, Homo sapiens
actttttctttttctaacttggcaaagattatgtttttttttcatgaagaaatataggcatatttaaacactcaggatctgagaatttgaaatacatgaaacttagcaagtggtctttaagtagttttcatttctaaattatagtacatamcattgaatgccacagaaggaaagacaatgagggattacacataaatattgcctttatgatatccttccaaagaaaaccaagtgtccctgtgcttggactcataaagcagaaatgcttaccttgcttttatgtcactaacaaacaattgtgcctagtcatttaattattacacatttaagccatcttgagagtggagc

SEQ ID NO: 273661 - DNA, 449 bp, Homo sapiens
aagaaaaccaagtgtccctgtgcttggactcataaagcagaaatgcttaccttgcttttatgtcactaacaaacaattgtgcctagtcatttaattattacacatttaagccatctwgagagtggagcccctagggaaaactacaaatggaaaattcattgatttttgattttgctttcctatggattaaatttaacactttcttgtaaatctctcccttaacagatcatatgtgataaatagttatccaactttctagatgtccacccagagctgcttccatatgaagaggtggaaacggattctgtgcatgatactggttaggatcgggaactgttttttttaaaggagatttttaaaatttgttttccttgtacacatagccttaatattgtgttgctaactgctctctgggaacaaagtcataccaatcacaaatacattgccta

SEQ ID NO: 273662 - DNA, 511 bp, Homo sapiens
taaatattgcctttatgatatccttccaaagaaaaccaagtgtccctgtgcttggactcataaagcagaaatgcttaccttgcttttatgtcactaacaaacaattgtgcctagtcatttaattattacacatttaagccatcttgagagtggagcccctagggaaaactacaaatggaaaattcattgatttttgattttgctttcctatggattaaatttaacactttcttgtaaatctctcccttwacagatcatatgtgataaatagttatccaactttctagatgtccacccagagctgcttccatatgaagaggtggaaacggattctgtgcatgatactggttaggatcgggaactgttttttttaaaggagatttttaaaatttgttttccttgtacacatagccttaatattgtgttgctaactgctctctgggaacaaagtcataccaatcacaaatacattgcctaaagtgggagggttattactctgctgtgaattcca

SEQ ID NO: 273663 - DNA, 411 bp, Homo sapiens
aaaattcattgatttttgattttgctttcctatggattaaatttaacactttcttgtaaatctctcccttaacagatcatatgtgataaatagttatccaactttctagatgtccacccagagctgcttccatatgaagaggtggaaacggattctgtgcatgatactggttaggatcgggaactgttttttttaaaggagatttttaaaatttgttttccttgtacacatagccttaatattgtgttgctaactgcyctctgggaacaaagtcataccaatcacaaatacattgcctaaagtgggagggttattactctgctgtgaattccatctcctattatgttttaaagatgctacaaacttgagacattattatgtagatgacattcccagcaaatccccaaacaa

SEQ ID NO: 273664 - DNA, 411 bp, Homo sapiens
aaaattcattgatttttgattttgctttcctatggattaaatttaacactttcttgtaaatctctcccttaacagatcatatgtgataaatagttatccaactttctagatgtccacccagagctgcttccatatgaagaggtggaaacggattctgtgcatgatactggttaggatcgggaactgttttttttaaaggagatttttaaaatttgttttccttgtacacatagccttaatattgtgttgctaactgctctctgggaacaaagtcataccaatcacaaatacattgcctaaagtgggagggttattactctgcygtgaattccatctcctattatgttttaaagatgctacaaacttgagacattattatgtagatgacattcccagcaaatccccaaacaa

SEQ ID NO: 273665 - DNA, 568 bp, Homo sapiens
atggattaaatttaacactttcttgtaaatctctcccttaacagatcatatgtgataaatagttatccaactttctagatgtccacccagagctgcttccatatgaagaggtggaaacggattctgtgcatgatactggttaggatcgggaactgttttttttaaaggagatttttaaaatttgttttccttgtacacatagccttaatattgtgttgctaactgctctctgggaacaaagtcataccaatcacaaatacattgcctaaagtgggagggttattactctgctgtgaattccatctcctattatgttttaaagatgctacaaacttgagacattaytatgtagatgacattcccagcaaatccccaaacaacacttaatgagatttcaaataccaggatcatgaaacagtaaaagatataaggaaataaagaaaagcacagtatatgtgtagaaggcattaaaacacaaattttataattatgaatgcatataataaggaacaagttttattctaaatagcaattaaatcagaactacaatacagggaataaaagtgaa

SEQ ID NO: 273666 - DNA, 568 bp, Homo sapiens
atggattaaatttaacactttcttgtaaatctctcccttaacagatcatatgtgataaatagttatccaactttctagatgtccacccagagctgcttccatatgaagaggtggaaacggattctgtgcatgatactggttaggatcgggaactgttttttttaaaggagatttttaaaatttgttttccttgtacacatagccttaatattgtgttgctaactgctctctgggaacaaagtcataccaatcacaaatacattgcctaaagtgggagggttattactctgctgtgaattccatctcctattatgttttaaagatgctacaaacttgagacattattatgtagatgacattcccagcaaatccccaaacaacacttaatgagatttcaaataccaggatcatgaaacagtaaragatataaggaaataaagaaaagcacagtatatgtgtagaaggcattaaaacacaaattttataattatgaatgcatataataaggaacaagttttattctaaatagcaattaaatcagaactacaatacagggaataaaagtgaa

SEQ ID NO: 273667 - DNA, 568 bp, Homo sapiens
atggattaaatttaacactttcttgtaaatctctcccttaacagatcatatgtgataaatagttatccaactttctagatgtccacccagagctgcttccatatgaagaggtggaaacggattctgtgcatgatactggttaggatcgggaactgttttttttaaaggagatttttaaaatttgttttccttgtacacatagccttaatattgtgttgctaactgctctctgggaacaaagtcataccaatcacaaatacattgcctaaagtgggagggttattactctgctgtgaattccatctcctattatgttttaaagatgctacaaacttgagacattattatgtagatgacattcccagcaaatccccaaacaacacttaatgagatttcaaataccaggatcatgaaacagtaaaagatataaggaaataaagaaaagcacagtatatgtgtagaaggcattaaaacacaaattttataattaygaatgcatataataaggaacaagttttattctaaatagcaattaaatcagaactacaatacagggaataaaagtgaa

SEQ ID NO: 273668 - DNA, 572 bp, Homo sapiens
atcatgaaacagtaaaagatataaggaaataaagaaaagcacagtatatgtgtagaaggcattaaaacacaaattttataattatgaatgcatataataaggaacaagttttattctaaatagcaattaaatcagaactacaatacagggaataaaagtgaatattaaaccattgtaccgacaataacagagccctttttctgctgcgtgatggaatttagtgtttactaaggaagaaaaaaatgcaagatatcttawatttggtacttcccaacaaatttaagaaatgtgtacacacttgaggagacttaagaagtctctgactaaaacactagaaaagaaaagcagtgaaaagccaaatagctattactcaacaataacaacatttgttactattatattaatattaaacacactattaagcaacatttcagttactcactgagcccaaagtcatttttcatgaaccattcacaacactgataacctattgaaacatgattgaaaaaaaaaagcttattgctttccaagtccttttaaagccttctcatgtgtcatttcatataatcctt

SEQ ID NO: 273669 - DNA, 572 bp, Homo sapiens
atcatgaaacagtaaaagatataaggaaataaagaaaagcacagtatatgtgtagaaggcattaaaacacaaattttataattatgaatgcatataataaggaacaagttttattctaaatagcaattaaatcagaactacaatacagggaataaaagtgaatattaaaccattgtaccgacaataacagagccctttttctgctgcgtgatggaatttagtgtttactaaggaagaaaaaaatgcaagatatcttaaatttggtacttyccaacaaatttaagaaatgtgtacacacttgaggagacttaagaagtctctgactaaaacactagaaaagaaaagcagtgaaaagccaaatagctattactcaacaataacaacatttgttactattatattaatattaaacacactattaagcaacatttcagttactcactgagcccaaagtcatttttcatgaaccattcacaacactgataacctattgaaacatgattgaaaaaaaaaagcttattgctttccaagtccttttaaagccttctcatgtgtcatttcatataatcctt

SEQ ID NO: 273670 - DNA, 395 bp, Homo sapiens
taaggaagaaaaaaatgcaagatatcttaaatttggtacttcccaacaaatttaagaaatgtgtacacacttgaggagacttaagaagtctctgactaaaacactagaaaagaaaagcagtgaaaagccaaatarctattactcaacaataacaacatttgttactattatattaatattaaacacactattaagcaacatttcagttactcactgagcccaaagtcatttttcatgaaccattcacaacactgataacctattgaaacatgattgaaaaaaaaaagcttattgctttccaagtccttttaaagccttctcatgtgtcatttcatataatccttataacgaatctatggagtatatactgactttatctctgtacagaaaagaaa

SEQ ID NO: 273671 - DNA, 416 bp, Homo sapiens
gactttatctctgtacagaaaagaaaactgaatcacattcagaataagttgcaaagttccccagataatcagtgtcataggtgaaatttggtgtcataggtgaaatttgatgtcacagtgtactcaagtgtaatttagggaagcagtacaaatgayggttgaaagcacaggttctggggtaaatagcctgaagtcaaaatctagttcatatcctcagtggctgtgtgatcttgggaaatttcccttaactctctgtgtcttggttttatagtttcatccatttttgcctctcatatgagctggtgagcattacactagtttatacttctaggacactgaaaacagtacctggctcttgataaatattaacaattttgtttcattttcttcaccttgagtatttcatggccagatgg

SEQ ID NO: 273672 - DNA, 584 bp, Homo sapiens
aagccaaatagctattactcaacaataacaacatttgttactattatattaatattaaacacactattaagcaacatttcagttactcactgagcccaaagtcatttttcatgaaccattcacaacactgataacctattgaaacatgattgaaaaaaaaaagcttattgctttccaagtccttttaaagccttctcatgtgtcatttcatataatccttataacgaatctatggagtatatactgactttatctctgtacagaaaagaaaactgaatcacattcagaataagttgcaaagttccccagataatcagtgtcataggtgaaatttggtgtcataggtgaaatttgatgtcacagtgtactcaagtgtaatttagggaagcagtacaaatgatgkttgaaagcacaggttctggggtaaatagcctgaagtcaaaatctagttcatatcctcagtggctgtgtgatcttgggaaatttcccttaactctctgtgtcttggttttatagtttcatccatttttgcctctcatatgagctggtgagcattacactagtttatacttctaggacactga

SEQ ID NO: 273673 - DNA, 416 bp, Homo sapiens
gactttatctctgtacagaaaagaaaactgaatcacattcagaataagttgcaaagttccccagataatcagtgtcataggtgaaatttggtgtcataggtgaaatttgatgtcacagtgtactcaagtgtaatttagggaagcagtacaaatgatggwtgaaagcacaggttctggggtaaatagcctgaagtcaaaatctagttcatatcctcagtggctgtgtgatcttgggaaatttcccttaactctctgtgtcttggttttatagtttcatccatttttgcctctcatatgagctggtgagcattacactagtttatacttctaggacactgaaaacagtacctggctcttgataaatattaacaattttgtttcattttcttcaccttgagtatttcatggccagatgg

SEQ ID NO: 273674 - DNA, 416 bp, Homo sapiens
gactttatctctgtacagaaaagaaaactgaatcacattcagaataagttgcaaagttccccagataatcagtgtcataggtgaaatttggtgtcataggtgaaatttgatgtcacagtgtactcaagtgtaatttagggaagcagtacaaatgatggttgaaagcacaggttctggggtaaayagcctgaagtcaaaatctagttcatatcctcagtggctgtgtgatcttgggaaatttcccttaactctctgtgtcttggttttatagtttcatccatttttgcctctcatatgagctggtgagcattacactagtttatacttctaggacactgaaaacagtacctggctcttgataaatattaacaattttgtttcattttcttcaccttgagtatttcatggccagatgg

SEQ ID NO: 273675 - DNA, 587 bp, Homo sapiens
atttcagttactcactgagcccaaagtcatttttcatgaaccattcacaacactgataacctattgaaacatgattgaaaaaaaaaagcttattgctttccaagtccttttaaagccttctcatgtgtcatttcatataatccttataacgaatctatggagtatatactgactttatctctgtacagaaaagaaaactgaatcacattcagaataagttgcaaagttccccagataatcagtgtcataggtgaaatttggtgtcataggtgaaatttgatgtcacagtgtactcaagtgtaatttagggaagcagtacaaatgatggttgaaagcacaggttctggggtaaatagcctgaagtcaaartctagttcatatcctcagtggctgtgtgatcttgggaaatttcccttaactctctgtgtcttggttttatagtttcatccatttttgcctctcatatgagctggtgagcattacactagtttatacttctaggacactgaaaacagtacctggctcttgataaatattaacaattttgtttcattttcttcaccttgagtatttcatggccagatgga

SEQ ID NO: 273676 - DNA, 416 bp, Homo sapiens
gactttatctctgtacagaaaagaaaactgaatcacattcagaataagttgcaaagttccccagataatcagtgtcataggtgaaatttggtgtcataggtgaaatttgatgtcacagtgtactcaagtgtaatttagggaagcagtacaaatgatggttgaaagcacaggttctggggtaaatagcctgaagtcaaaatctagttcatakcctcagtggctgtgtgatcttgggaaatttcccttaactctctgtgtcttggttttatagtttcatccatttttgcctctcatatgagctggtgagcattacactagtttatacttctaggacactgaaaacagtacctggctcttgataaatattaacaattttgtttcattttcttcaccttgagtatttcatggccagatgg

SEQ ID NO: 273677 - DNA, 587 bp, Homo sapiens
atttcagttactcactgagcccaaagtcatttttcatgaaccattcacaacactgataacctattgaaacatgattgaaaaaaaaaagcttattgctttccaagtccttttaaagccttctcatgtgtcatttcatataatccttataacgaatctatggagtatatactgactttatctctgtacagaaaagaaaactgaatcacattcagaataagttgcaaagttccccagataatcagtgtcataggtgaaatttggtgtcataggtgaaatttgatgtcacagtgtactcaagtgtaatttagggaagcagtacaaatgatggttgaaagcacaggttctggggtaaatagcctgaagtcaaaatctagttcatatcctcagtggctgtgtgatcttgggaaatttcccttaactctctgtgtcttggttttatagtttcatccatttttgcctctcatatgagctggtgagcattacactagtttatacttctaggacactgaaaacagtacctggctcttgataaatatyaacaattttgtttcattttcttcaccttgagtatttcatggccagatgga

SEQ ID NO: 273678 - DNA, 364 bp, Homo sapiens
atgaaaaaatgttcataattcagcaggaagaaatayaaaaccatataaacaactttgttttactggcaagtgtatttggaagctatgttaaattgagaaggggaagggaaagcctctaaggatatcgattaatcaatgaccgaaagctgatgagacttgtctggaattttttttggagactctgagacttaaaattttgaaaaaataaggagatgaattgagtagtgtggaagagacattttctgaagtcagcagagaaaggagagacaaaaatggtaaggggaaaatagtatgaagtaataatatgaatgaagagctttctaaagtataacacatgtaagttgtgttaaatgtaaactatcat

SEQ ID NO: 273679 - DNA, 364 bp, Homo sapiens
atgaaaaaatgttcataattcagcaggaagaaatataaaaccatataaacaactttgttttaytggcaagtgtatttggaagctatgttaaattgagaaggggaagggaaagcctctaaggatatcgattaatcaatgaccgaaagctgatgagacttgtctggaattttttttggagactctgagacttaaaattttgaaaaaataaggagatgaattgagtagtgtggaagagacattttctgaagtcagcagagaaaggagagacaaaaatggtaaggggaaaatagtatgaagtaataatatgaatgaagagctttctaaagtataacacatgtaagttgtgttaaatgtaaactatcat

SEQ ID NO: 273680 - DNA, 331 bp, Homo sapiens
aaacaactttgttttactggcaagtgtatttggaagctatgttaaattgagaaggkgaagggaaagcctctaaggatatcgattaatcaatgaccgaaagctgatgagacttgtctggaattttttttggagactctgagacttaaaattttgaaaaaataaggagatgaattgagtagtgtggaagagacattttctgaagtcagcagagaaaggagagacaaaaatggtaaggggaaaatagtatgaagtaataatatgaatgaagagctttctaaagtataacacatgtaagttgtgttaaatgtaaactatcatgattatatcatta

SEQ ID NO: 273681 - DNA, 625 bp, Homo sapiens
taggtgaaatttggtgtcataggtgaaatttgatgtcacagtgtactcaagtgtaatttagggaagcagtacaaatgatggttgaaagcacaggttctggggtaaatagcctgaagtcaaaatctagttcatatcctcagtggctgtgtgatcttgggaaatttcccttaactctctgtgtcttggttttatagtttcatccatttttgcctctcatatgagctggtgagcattacactagtttatacttctaggacactgaaaacagtacctggctcttgataaatattaacaattttgtttcattttcttcaccttgagtatttcatggccagatggaaatcaatgtcaatatgaaaaaatgttcataattcagcaggaagaaatataaaaccatataaacaactttgttttactggcaagtgtatttggaagctatgttaaattgagaaggggaagggaaagcctctaaggwtatcgattaatcaatgaccgaaagctgatgagacttgtctggaattttttttggagactctgagacttaaaattttgaaaaaataaggagatgaattgagtagtgtggaagagacattttctgaagtcagcagagaaaggagagacaaaa

SEQ ID NO: 273682 - DNA, 364 bp, Homo sapiens
atgaaaaaatgttcataattcagcaggaagaaatataaaaccatataaacaactttgttttactggcaagtgtatttggaagctatgttaaattgagaaggggaagggaaagcctctaaggatatcgattaatcaatgacygaaagctgatgagacttgtctggaattttttttggagactctgagacttaaaattttgaaaaaataaggagatgaattgagtagtgtggaagagacattttctgaagtcagcagagaaaggagagacaaaaatggtaaggggaaaatagtatgaagtaataatatgaatgaagagctttctaaagtataacacatgtaagttgtgttaaatgtaaactatcat

SEQ ID NO: 273683 - DNA, 364 bp, Homo sapiens
atgaaaaaatgttcataattcagcaggaagaaatataaaaccatataaacaactttgttttactggcaagtgtatttggaagctatgttaaattgagaaggggaagggaaagcctctaaggatatcgattaatcaatgaccgaaagctgatgagacttgtctggaattttttttggagactctgagacttaaaattttgamaaaataaggagatgaattgagtagtgtggaagagacattttctgaagtcagcagagaaaggagagacaaaaatggtaaggggaaaatagtatgaagtaataatatgaatgaagagctttctaaagtataacacatgtaagttgtgttaaatgtaaactatcat

SEQ ID NO: 273684 - DNA, 542 bp, Homo sapiens
agtagtgtggaagagacattttctgaagtcagcagagaaaggagagacaaawatggtaaggggaaaatagtatgaagtaataatatgaatgaagagctttctaaagtataacacatgtaagttgtgttaaatgtaaactatcatgattatatcattactgtctgactgatacaactatatccacctcagttagccacataagatcaattttcctataccttagagaataccagtaacctccagttcagaaacagcataaatatctatccacagctgagcagacacatacagctagctaccagatgaaatgggctatatcttcaaatactattgttttccgttttttaactgtggcaaaacacactcaacaatttgcatcttaaccactgttaagtatacaattcagtgtcattaaatgtattcacaatgttgtgcaagcatcaccaccacccatctccataattctttttgtcttgtaaaattgaaatcctgtacccattaaaaagtgactccccattccccgccctcccagggcaactaca

SEQ ID NO: 273685 - DNA, 542 bp, Homo sapiens
agtagtgtggaagagacattttctgaagtcagcagagaaaggagagacaaaaatggtaaggggaaaatrgtatgaagtaataatatgaatgaagagctttctaaagtataacacatgtaagttgtgttaaatgtaaactatcatgattatatcattactgtctgactgatacaactatatccacctcagttagccacataagatcaattttcctataccttagagaataccagtaacctccagttcagaaacagcataaatatctatccacagctgagcagacacatacagctagctaccagatgaaatgggctatatcttcaaatactattgttttccgttttttaactgtggcaaaacacactcaacaatttgcatcttaaccactgttaagtatacaattcagtgtcattaaatgtattcacaatgttgtgcaagcatcaccaccacccatctccataattctttttgtcttgtaaaattgaaatcctgtacccattaaaaagtgactccccattccccgccctcccagggcaactaca

SEQ ID NO: 273686 - DNA, 331 bp, Homo sapiens
aaacaactttgttttactggcaagtgtatttggaagctatgttaaattgagaaggggaagggaaagcctctaaggatatcgattaatcaatgaccgaaagctgatgagacttgtctggaattttttttggagactctgagacttaaaattttgaaaaaataaggagatgaattgagtagtgtggaagagacattttctgaagtcagcagagaaaggagagacaaaaatggtaaggggaaaatagtatgaagtaataatatgaatgaagwgctttctaaagtataacacatgtaagttgtgttaaatgtaaactatcatgattatatcatta

SEQ ID NO: 273687 - DNA, 542 bp, Homo sapiens
agtagtgtggaagagacattttctgaagtcagcagagaaaggagagacaaaaatggtaaggggaaaatagtatgaagtaataatatgaatgaagagctttctaaagtataacacatgtaagttgtgttaaatgtaaactatcatgattatatcattactgtctgactgatacaactatatccacctcagttagccacataagatcaattttcctataycttagagaataccagtaacctccagttcagaaacagcataaatatctatccacagctgagcagacacatacagctagctaccagatgaaatgggctatatcttcaaatactattgttttccgttttttaactgtggcaaaacacactcaacaatttgcatcttaaccactgttaagtatacaattcagtgtcattaaatgtattcacaatgttgtgcaagcatcaccaccacccatctccataattctttttgtcttgtaaaattgaaatcctgtacccattaaaaagtgactccccattccccgccctcccagggcaactaca

SEQ ID NO: 273688 - DNA, 542 bp, Homo sapiens
agtagtgtggaagagacattttctgaagtcagcagagaaaggagagacaaaaatggtaaggggaaaatagtatgaagtaataatatgaatgaagagctttctaaagtataacacatgtaagttgtgttaaatgtaaactatcatgattatatcattactgtctgactgatacaactatatccacctcagttagccacataagatcaattttcctataccttagagaataccagtaacctccagttcagaaacagcataaatatctatccacagctgagcagacacatacagctagctaccagatgaaatgggctatatcttcaaatactattgttttccrttttttaactgtggcaaaacacactcaacaatttgcatcttaaccactgttaagtatacaattcagtgtcattaaatgtattcacaatgttgtgcaagcatcaccaccacccatctccataattctttttgtcttgtaaaattgaaatcctgtacccattaaaaagtgactccccattccccgccctcccagggcaactaca

SEQ ID NO: 273689 - DNA, 289 bp, Homo sapiens
aacctccagttcagaaacagcataaatatctatccacagctgagcagacacatacagctagctaccagatgaaatgggctatatcttcaaatactattgttttccgttttttaactgtggcaaaacacactcaacaatttgcatcttaaccactgttaagtatacaattcagtgtcattaaawgtattcacaatgttgtgcaagcatcaccaccacccatctccataattctttttgtcttgtaaaattgaaatcctgtacccattaaaaagtgactccccattccccg

SEQ ID NO: 273690 - DNA, 608 bp, Homo sapiens
aatgtaaactatcatgattatatcattactgtctgactgatacaactatatccacctcagttagccacataagatcaattttcctataccttagagaataccagtaacctccagttcagaaacagcataaatatctatccacagctgagcagacacatacagctagctaccagatgaaatgggctatatcttcaaatactattgttttccgttttttaactgtggcaaaacacactcaacaatttgcatcttaaccactgttaagtatacaattcagtgtcattaaatgtattcacaatgttgtgcaagcatcaccaccacccatctccataattctttttgtcttgtaaaattgaaatcctgtacccattaaaaagtgactcsccattccccgccctcccagggcaactacagctttactttctgtcttgatgaatcatacaatatcaaatggaatttttaagatatttaaaatattttgtctggaagtgaagtggaagttaatatcaatggctatgccttcagtgagttctcagaccatattacaatgtagttaactatttatcttttattacgttctagacctattatttctttctggcacaaaa

SEQ ID NO: 273691 - DNA, 492 bp, Homo sapiens
tttatcttttattacgttctagacctattatttctttctggcacaaaaatatcttctttgtagattatggcatttacctctatctccacacctttttgtttctgtcatccacagatcatcagcctcttgcttagtctccatttaatgacaatttctatttagtatacaasagtccttccccctgcaatgcaatttcgtcactctgaaaagctctgactctggctactggtctctgttatgtactcatccctagagccatgtcttcaaatatttctcagaacttcttcacatctaaaaatctaggattaatttattgctctctgattatattcttctggtatttcaagtatcctgtataacttcttcatctgcccttgcttttcttctacatcaagatgtcaagttcatggacttcccaattaatcattttaaaaatttatttcaagcctttatgagtcactacaatgtacatatgttctcaggaattatggc

SEQ ID NO: 273692 - DNA, 492 bp, Homo sapiens
tttatcttttattacgttctagacctattatttctttctggcacaaaaatatcttctttgtagattatggcatttacctctatctccacacctttttgtttctgtcatccacagatcatcagcctcttgcttagtctccatttaatgacaatttctatttagtatacaacagtccttcccccygcaatgcaatttcgtcactctgaaaagctctgactctggctactggtctctgttatgtactcatccctagagccatgtcttcaaatatttctcagaacttcttcacatctaaaaatctaggattaatttattgctctctgattatattcttctggtatttcaagtatcctgtataacttcttcatctgcccttgcttttcttctacatcaagatgtcaagttcatggacttcccaattaatcattttaaaaatttatttcaagcctttatgagtcactacaatgtacatatgttctcaggaattatggc

SEQ ID NO: 273693 - DNA, 560 bp, Homo sapiens
cgtcactctgaaaagctctgactctggctactggtctctgttatgtactcatccctagagccatgtcttcaaatatttctcagaacttcttcacatctaaaaatctaggattaatttattgctctctgattatattcttctggtatttcaagtatcstgtataacttcttcatctgcccttgcttttcttctacatcaagatgtcaagttcatggacttcccaattaatcattttaaaaatttatttcaagcctttatgagtcactacaatgtacatatgttctcaggaattatggccctacaatttgtatgtgagaatagttcctgtgtcaggcattatggacataagagtaaataaattctagcccctgcctacaaggagctaattcccagcctaagacagattgcaagccaataatatgcagagttgtaagtctaaggaaactgattgggatgtacctaattcgagctgggaatatcagaagaaaaactttttgaaagtcatgagacatgagctgtgcctaaaagaataaaaaatagagagagaaataagaataaat

SEQ ID NO: 273694 - DNA, 484 bp, Homo sapiens
cttagtctccatttaatgacaatttctatttagtatacaacagtccttccccctgcaatgcaatttcgtcactctgaaaagctctgactctggctactggtctctgttatgtactcatccctagagccatgtcttcaaatatttctcagaacttcttcacatctaaaaatctaggattaatttattgctctctgattatattcttctggtatttcaagtatcctgtataacttcttcatctgcccttgcttttcttctacatcaagatgtcaagttcatggacttcccaattaatcattttaaaaatttatttcaagcctttatgagtcactacaatgtacatatgttctcaggaattatgrccctacaatttgtatgtgagaatagttcctgtgtcaggcattatggacataagagtaaataaattctagcccctgcctacaaggagctaattcccagcctaagacagattgcaagccaataa

SEQ ID NO: 273695 - DNA, 484 bp, Homo sapiens
cttagtctccatttaatgacaatttctatttagtatacaacagtccttccccctgcaatgcaatttcgtcactctgaaaagctctgactctggctactggtctctgttatgtactcatccctagagccatgtcttcaaatatttctcagaacttcttcacatctaaaaatctaggattaatttattgctctctgattatattcttctggtatttcaagtatcctgtataacttcttcatctgcccttgcttttcttctacatcaagatgtcaagttcatggacttcccaattaatcattttaaaaatttatttcaagcctttatgagtcactacaatgtacatatgttctcaggaattatggccctacaatttgtatrtgagaatagttcctgtgtcaggcattatggacataagagtaaataaattctagcccctgcctacaaggagctaattcccagcctaagacagattgcaagccaataa

SEQ ID NO: 273696 - DNA, 560 bp, Homo sapiens
cgtcactctgaaaagctctgactctggctactggtctctgttatgtactcatccctagagccatgtcttcaaatatttctcagaacttcttcacatctaaaaatctaggattaatttattgctctctgattatattcttctggtatttcaagtatcctgtataacttcttcatctgcccttgcttttcttctacatcaagatgtcaagttcatggacttcccaattaatcattttaaaaatttatttcaagcctttatgagtcactacaatgtacatatgttctcaggaattatggccctacaatttgtatgtgagaatagttcctgtgtcaggcattatggacataagagkaaataaattctagcccctgcctacaaggagctaattcccagcctaagacagattgcaagccaataatatgcagagttgtaagtctaaggaaactgattgggatgtacctaattcgagctgggaatatcagaagaaaaactttttgaaagtcatgagacatgagctgtgcctaaaagaataaaaaatagagagagaaataagaataaat

SEQ ID NO: 273697 - DNA, 560 bp, Homo sapiens
cgtcactctgaaaagctctgactctggctactggtctctgttatgtactcatccctagagccatgtcttcaaatatttctcagaacttcttcacatctaaaaatctaggattaatttattgctctctgattatattcttctggtatttcaagtatcctgtataacttcttcatctgcccttgcttttcttctacatcaagatgtcaagttcatggacttcccaattaatcattttaaaaatttatttcaagcctttatgagtcactacaatgtacatatgttctcaggaattatggccctacaatttgtatgtgagaatagttcctgtgtcaggcattatggacataagagtaaataaattctagcccctgcctacaaggagctaattcccagcctaagacagattgcaagccaataatwtgcagagttgtaagtctaaggaaactgattgggatgtacctaattcgagctgggaatatcagaagaaaaactttttgaaagtcatgagacatgagctgtgcctaaaagaataaaaaatagagagagaaataagaataaat

SEQ ID NO: 273698 - DNA, 539 bp, Homo sapiens
cacatctaaaaatctaggattaatttattgctctctgattatattcttctggtatttcaagtatcctgtataacttcttcatctgcccttgcttttcttctacatcaagatgtcaagttcatggacttcccaattaatcattttaaaaatttatttcaagcctttatgagtcactacaatgtacatatgttctcaggaattatggccctacaatttgtatgtgagaatagttcctgtgtcaggcattatggacataagagtaaataaattctagcccctgcctacaaggagctaattcccagcctaagacagattgcaagccaataatatgcagagttgtaagtctaaggaaactgattgggatgtacctaattcgagctgggaatatcagaagaaaaactttttgaaagtcatgagacatgagctgtgcctaaaagaataaaaaatagagwgagaaataagaataaataaattagggaatgagatgggtataatagtagaaaaaggaaatctctttagataaaacaggttatgagagt

SEQ ID NO: 273699 - DNA, 524 bp, Homo sapiens
gaggcttattaactcagtgtggttggagaaaacaggttgaaaggagaaataggggagaaagttacaaagggaatcaaatgtgttagtagttgaggaaaaagcaaatattgaatacgacccatagatcttggataacccagtgtttggtagtagcttacataaaaggttgtgacaaaataaccagagctatgcggagaaaataataactgagtgttatatttcctctcagtagaaacctaaaaaaaaaaatgwaatcacatcctgatcttttaactgacctccacttatcttgctgcctggattggtatacatattcctgtgcctgaaaaattgctcaacacttttgaaaggttgtttctcactgttacacccaggcatttctgctaacaccagctgagttgtaaggggccctccaggaggcataggttgttctccttatcacatacattattttcatttatcaatttacccagaacatctaatgaaatattatggacaccaataacatgaatacaaatatagct

SEQ ID NO: 273700 - DNA, 528 bp, Homo sapiens
acccagtgtttggtagtagcttacataaaaggttgtgacaaaataaccagagctatgcggagaaaataataactgagtgttatatttcctctcagtagaaacctaaaaaaaaaaatgaaatcacatcctgatcttttaactgacctccacttatcttgctgcctggattggtatacatattcctstgcctgaaaaattgctcaacacttttgaaaggttgtttctcactgttacacccaggcatttctgctaacaccagctgagttgtaaggggccctccaggaggcataggttgttctccttatcacatacattattttcatttatcaatttacccagaacatctaatgaaatattatggacaccaataacatgaatacaaatatagctatagaccctaacaagtaaattgatgtctcttgaaaggctgtcatgtcttagatgctaaatttggagtgtttctaataaataaatagcttgctttaataattctgatttatgaatgtaatataggggagcagcttttat

SEQ ID NO: 273701 - DNA, 524 bp, Homo sapiens
gaggcttattaactcagtgtggttggagaaaacaggttgaaaggagaaataggggagaaagttacaaagggaatcaaatgtgttagtagttgaggaaaaagcaaatattgaatacgacccatagatcttggataacccagtgtttggtagtagcttacataaaaggttgtgacaaaataaccagagctatgcggagaaaataataactgagtgttatatttcctctcagtagaaacctaaaaaaaaaaatgaaatcacatcctgatcttttaactgacctccacttatcttgctgcctggattggtatacatattcctgtgcctgaaaaattgctcaayacttttgaaaggttgtttctcactgttacacccaggcatttctgctaacaccagctgagttgtaaggggccctccaggaggcataggttgttctccttatcacatacattattttcatttatcaatttacccagaacatctaatgaaatattatggacaccaataacatgaatacaaatatagct

SEQ ID NO: 273702 - DNA, 566 bp, Homo sapiens
acctaaaaaaaaaaatgaaatcacatcctgatcttttaactgacctccacttatcttgctgcctggattggtatacatattcctgtgcctgaaaaattgctcaacacttttgaaaggttgtttctcactgttacacccaggcatttctgctaacaccagctgagttgtaaggggccctccaggaggcataggttgttctccttatcacatacattattttcatttatcaatttacccagaacatctaatgaaatattatggacaccaataacatgaatacaaatatagctatagaccctaacaagtaaattgatgtctcttgaaaggctgtcatgtcttagatgctaaatttggagtgtttctaataaataaatagcttgctttaataattctgatttatgaatgtaatataggggagcagcttttatttcacccttaatcttaaaaaacaattagcygggtgtggtggcgggcacctgtagtcccagctactcaggaggctgaaacagaaggatggtgtgcacctgggaggcagagcttgctgtaagccaaaattgtgccactgt

SEQ ID NO: 273703 - DNA, 582 bp, Homo sapiens
gatgatttagcataaaactcaactttagcctaaaacacagatcatagggctcaaactttgttattttatgggattatactaaccagttaatattcaaaatttaccatttcaaaagaagaaatattggtctgggaaaattgccattgcttatacagaagaatggaggaagctttttgagaacaacaattctaatgatcttcctcatcactggttccaaaaccaagcccatggaagtcctgcatagggataatgtggagaacatgcaaaagaaatacacatcaccagctcctcaactcagagctccaagggaatggccaaggaagctgtattgtcctaagaaatttgaggctgtcttgacttacaataaatcctgctcaatcatatrcatgtatacacacacacacacacacacacacacacagacggtgttgtcagtgaagcctctaacaatgcatcttgactggacagatttgacaattaaaatggctggaagaaaatagtcttcataagtggcacttactattcacattacgcattaaaaggacatctcctaaattaaatcttgtctacgataaaaaggca

SEQ ID NO: 273704 - DNA, 582 bp, Homo sapiens
gatgatttagcataaaactcaactttagcctaaaacacagatcatagggctcaaactttgttattttatgggattatactaaccagttaatattcaaaatttaccatttcaaaagaagaaatattggtctgggaaaattgccattgcttatacagaagaatggaggaagctttttgagaacaacaattctaatgatcttcctcatcactggttccaaaaccaagcccatggaagtcctgcatagggataatgtggagaacatgcaaaagaaatacacatcaccagctcctcaactcagagctccaagggaatggccaaggaagctgtattgtcctaagaaatttgaggctgtcttgacttacaataaatcctgctcaatcatatacatgtatacacacacacacacacacacacacacacagacggtgttgtcagtgaagcctctaacaatgcatcttgactggacagatttgacaattaaaatggctggaagaaaatagtcttcataagtggcacttactrttcacattacgcattaaaaggacatctcctaaattaaatcttgtctacgataaaaaggca

SEQ ID NO: 273705 - DNA, 428 bp, Homo sapiens
ggctcatttataactgcagaaatgttcaagatagaccaatgcttgctatgtttaggaactgacaagaaagtacaggtctttataatctaccattttgcctcatttgataccargtgaccttcataatgcaggctatagagaattgcaagatttgtcagagatttcaggtctttggaaagctatgctctttcacaagaacagccatggaaacaggaagaaagtcaattcccacttaaggtaatcagaatttacaaatattcctttcttcattgaaatctcaataggcacttcaatattatatttaattaattcttttgttacagtcatgcatcacataacaacattttggtcaaggatagtgcacttgtatgacagtggtgcaataaaatcataacactatttttactgtacctcttgtatgtttagac

SEQ ID NO: 273706 - DNA, 633 bp, Homo sapiens
atattggtctgggaaaattgccattgcttatacagaagaatggaggaagctttttgagaacaacaattctaatgatcttcctcatcactggttccaaaaccaagcccatggaagtcctgcatagggataatgtggagaacatgcaaaagaaatacacatcaccagctcctcaactcagagctccaagggaatggccaaggaagctgtattgtcctaagaaatttgaggctgtcttgacttacaataaatcctgctcaatcatatacatgtatacacacacacacacacacacacacacacagacggtgttgtcagtgaagcctctaacaatgcatcttgactggacagatttgacaattaaaatggctggaagaaaatagtcttcataagtggcacttactattcacattacgcattaaaaggacatctcctaaattaaatcttgtctacgataaaaaggcagaaaatcatgacccaaggctcatttataactgcagaaatgttcaagatagaccaatgcttgctatgtttaggaactgacaagaaagtacaggtctttataatctaccattttgcctcatttgataccaagtgaccttyataatgcaggctatagagaattgcaagatttgt

SEQ ID NO: 273707 - DNA, 328 bp, Homo sapiens
tgcttgctatgtttaggaactgacaagaaagtacaggtctttataatctaccattttgcctcatttgataccaagtgaccttcataatgcaggcwatagagaattgcaagatttgtcagagatttcaggtctttggaaagctatgctctttcacaagaacagccatggaaacaggaagaaagtcaattcccacttaaggtaatcagaatttacaaatattcctttcttcattgaaatctcaataggcacttcaatattatatttaattaattcttttgttacagtcatgcatcacataacaacattttggtcaaggatagtgcacttg

SEQ ID NO: 273708 - DNA, 328 bp, Homo sapiens
tgcttgctatgtttaggaactgacaagaaagtacaggtctttataatctaccattttgcctcatttgataccaagtgaccttcataatgcaggctatagagaattgcaagatttgtcagagatttcaggtctttggaaagctatgctctttcacaagaacagccatggaaacaggaagaaagtcaattcccacttaaggtaatcagaatttacaaatattcctttcttcattgaaatctcaataggcacttcaatattatatttaattaattcttttgttacartcatgcatcacataacaacattttggtcaaggatagtgcacttg

SEQ ID NO: 273709 - DNA, 428 bp, Homo sapiens
ggctcatttataactgcagaaatgttcaagatagaccaatgcttgctatgtttaggaactgacaagaaagtacaggtctttataatctaccattttgcctcatttgataccaagtgaccttcataatgcaggctatagagaattgcaagatttgtcagagatttcaggtctttggaaagctatgctctttcacaagaacagccatggaaacaggaagaaagtcaattcccacttaaggtaatcagaatttacaaatattcctttcttcattgaaatctcaataggcacttcaatattatatttaattaattcttttgttacagtcatgcatcacataacaacattttggtcaaggatagtgcacwtgtatgacagtggtgcaataaaatcataacactatttttactgtacctcttgtatgtttagac

SEQ ID NO: 273710 - DNA, 614 bp, Homo sapiens
aagctatgctctttcacaagaacagccatggaaacaggaagaaagtcaattcccacttaaggtaatcagaatttacaaatattcctttcttcattgaaatctcaataggcacttcaatattatatttaattaattcttttgttacagtcatgcatcacataacaacattttggtcaaggatagtgcacttgtatgacagtggtgcaataaaatcataacactatttttactgtacctcttgtatgtttagacatgtatagatacacttactgtatatatataagtatagatatacttaactgttgtgttacaattgcctacagtattcagtacagtaayatgctgcacaggtttgtagcctaggaggaataggttataccacctaacctaggtatgtaatcagctatagcatctaggtttgtgtaagtaaactctgtgatgttcatacaataataaaattgtccagcaatgcatttctcagacacacccctctcattaagtgacacacgactgtattagttaacactatgggaacttcatgggaaatggacactctagctccaccataaatagaaactgtttatgtcaaaaaacacataaaagcatagttgcaa

SEQ ID NO: 273711 - DNA, 574 bp, Homo sapiens
atttacaaatattcctttcttcattgaaatctcaataggcacttcaatattatatttaattaattcttttgttacagtcatgcatcacataacaacattttggtcaaggatagtgcacttgtatgacagtggtgcaataaaatcataacactatttttactgtacctcttgtatgtttagacatgtatagatacacttactgtatatatataagtatagatatacttaactgttgtgttacaattgcctacagtattcagtacagtaacatrctgcacaggtttgtagcctaggaggaataggttataccacctaacctaggtatgtaatcagctatagcatctaggtttgtgtaagtaaactctgtgatgttcatacaataataaaattgtccagcaatgcatttctcagacacacccctctcattaagtgacacacgactgtattagttaacactatgggaacttcatgggaaatggacactctagctccaccataaatagaaactgtttatgtcaaaaaacacataaaagcatagttgcaagattacaattccttccagatatttcattta

SEQ ID NO: 273712 - DNA, 631 bp, Homo sapiens
gaccaatgcttgctatgtttaggaactgacaagaaagtacaggtctttataatctaccattttgcctcatttgataccaagtgaccttcataatgcaggctatagagaattgcaagatttgtcagagatttcaggtctttggaaagctatgctctttcacaagaacagccatggaaacaggaagaaagtcaattcccacttaaggtaatcagaatttacaaatattcctttcttcattgaaatctcaataggcacttcaatattatatttaattaattcttttgttacagtcatgcatcacataacaacattttggtcaaggatagtgcacttgtatgacagtggtgcaataaaatcataacactatttttactgtacctcttgtatgtttagacatgtatagatacacttactgtatatatataagtatagatatacttaactgttgtgttacaattgcctacagtattcagtacagtaacatgctgcacaggtttgtagcctaggaggaataggytataccacctaacctaggtatgtaatcagctatagcatctaggtttgtgtaagtaaactctgtgatgttcatacaataataaaattgtccagcaatgcatttctcagacacacc

SEQ ID NO: 273713 - DNA, 631 bp, Homo sapiens
gaccaatgcttgctatgtttaggaactgacaagaaagtacaggtctttataatctaccattttgcctcatttgataccaagtgaccttcataatgcaggctatagagaattgcaagatttgtcagagatttcaggtctttggaaagctatgctctttcacaagaacagccatggaaacaggaagaaagtcaattcccacttaaggtaatcagaatttacaaatattcctttcttcattgaaatctcaataggcacttcaatattatatttaattaattcttttgttacagtcatgcatcacataacaacattttggtcaaggatagtgcacttgtatgacagtggtgcaataaaatcataacactatttttactgtacctcttgtatgtttagacatgtatagatacacttactgtatatatataagtatagatatacttaactgttgtgttacaattgcctacagtattcagtacagtaacatgctgcacaggtttgtagcctaggaggaataggttataccacctaacctaggyatgtaatcagctatagcatctaggtttgtgtaagtaaactctgtgatgttcatacaataataaaattgtccagcaatgcatttctcagacacacc

SEQ ID NO: 273714 - DNA, 614 bp, Homo sapiens
aagctatgctctttcacaagaacagccatggaaacaggaagaaagtcaattcccacttaaggtaatcagaatttacaaatattcctttcttcattgaaatctcaataggcacttcaatattatatttaattaattcttttgttacagtcatgcatcacataacaacattttggtcaaggatagtgcacttgtatgacagtggtgcaataaaatcataacactatttttactgtacctcttgtatgtttagacatgtatagatacacttactgtatatatataagtatagatatacttaactgttgtgttacaattgcctacagtattcagtacagtaacatgctgcacaggtttgtagcctaggaggaataggttataccacctaacctaggtatgtaatcagctatagcatctaggtttgtgtaagtaaactctgtgatgttcatacaataataaaattgtccagcaatgcatttctcagacacacccctstcattaagtgacacacgactgtattagttaacactatgggaacttcatgggaaatggacactctagctccaccataaatagaaactgtttatgtcaaaaaacacataaaagcatagttgcaa

SEQ ID NO: 273715 - DNA, 529 bp, Homo sapiens
tacttaactgttgtgttacaattgcctacagtattcagtacagtaacatgctgcacaggtttgtagcctaggaggaataggttataccacctaacctaggtatgtaatcagctatagcatctaggtttgtgtaagtaaactctgtgatgttcatacaataataaaattgtccagcaatgcatttctcagacacacccctctcattaagtgacacacgactgtattagttaacactatgggaacttcatgggaaatggacactctagctccaccataaatagaaactgtttatgtcaaaaaacacataaaagcatagttgcaagattacawttccttccagatatttcatttagtatctccacagatcactaacttcctgaataacattcttgtgtctccactgcctcacatttgatttcaggtcattccatcaattgtcaaagacgcatccaacattaactttccaactactggtttggattgtgtcaacattgtcatcctgggccacaacaacacaaaaggctaactc

SEQ ID NO: 273716 - DNA, 633 bp, Homo sapiens
tattagttaacactatgggaacttcatgggaaatggacactctagctccaccataaatagaaactgtttatgtcaaaaaacacataaaagcatagttgcaagattacaattccttccagatatttcatttagtatctcyacagatcactaacttcctgaataacattcttgtgtctccactgcctcacatttgatttcaggtcattccatcaattgtcaaagacgcatccaacattaactttccaactactggtttggattgtgtcaacattgtcatcctgggccacaacaacacaaaaggctaactcggtgaggtaacatagacactgatcagtgagattttgctgatgggtggtaccattttttactaagatcaagggtattcataccttcaggcatctagacaacattgaaaagggcaggttcatagataaaaaaggaaagaggaagggtttttgcactatacatcagctaccgtgtctcctgtttaacctgagtctgaagagattcaaagtgcaggtgccatgaatgcctctttaatagcttcatgtcgattgattttctgggctacacttcccagcattcaaattgctaagtgcatataaactactagtgaatatttattacctggat

SEQ ID NO: 273717 - DNA, 529 bp, Homo sapiens
tacttaactgttgtgttacaattgcctacagtattcagtacagtaacatgctgcacaggtttgtagcctaggaggaataggttataccacctaacctaggtatgtaatcagctatagcatctaggtttgtgtaagtaaactctgtgatgttcatacaataataaaattgtccagcaatgcatttctcagacacacccctctcattaagtgacacacgactgtattagttaacactatgggaacttcatgggaaatggacactctagctccaccataaatagaaactgtttatgtcaaaaaacacataaaagcatagttgcaagattacaattccttccagatatttcatttagtatctccacagatcactaacttcctgaatarcattcttgtgtctccactgcctcacatttgatttcaggtcattccatcaattgtcaaagacgcatccaacattaactttccaactactggtttggattgtgtcaacattgtcatcctgggccacaacaacacaaaaggctaactc

SEQ ID NO: 273718 - DNA, 633 bp, Homo sapiens
tattagttaacactatgggaacttcatgggaaatggacactctagctccaccataaatagaaactgtttatgtcaaaaaacacataaaagcatagttgcaagattacaattccttccagatatttcatttagtatctccacagatcactaacttcctgaataacattcttgtgtctccactgcctcacatttgatttcaggtcattccatcaattgtcaaagaygcatccaacattaactttccaactactggtttggattgtgtcaacattgtcatcctgggccacaacaacacaaaaggctaactcggtgaggtaacatagacactgatcagtgagattttgctgatgggtggtaccattttttactaagatcaagggtattcataccttcaggcatctagacaacattgaaaagggcaggttcatagataaaaaaggaaagaggaagggtttttgcactatacatcagctaccgtgtctcctgtttaacctgagtctgaagagattcaaagtgcaggtgccatgaatgcctctttaatagcttcatgtcgattgattttctgggctacacttcccagcattcaaattgctaagtgcatataaactactagtgaatatttattacctggat

SEQ ID NO: 273719 - DNA, 610 bp, Homo sapiens
tgaataacattcttgtgtctccactgcctcacatttgatttcaggtcattccatcaattgtcaaagacgcatccaacattaactttccaactactggtttggattgtgtcaacattgtcatcctgkgccacaacaacacaaaaggctaactcggtgaggtaacatagacactgatcagtgagattttgctgatgggtggtaccattttttactaagatcaagggtattcataccttcaggcatctagacaacattgaaaagggcaggttcatagataaaaaaggaaagaggaagggtttttgcactatacatcagctaccgtgtctcctgtttaacctgagtctgaagagattcaaagtgcaggtgccatgaatgcctctttaatagcttcatgtcgattgattttctgggctacacttcccagcattcaaattgctaagtgcatataaactactagtgaatatttattacctggatttgtgcttttgagtgaccttatctatagttatgtgcttcagtggtctaacttggggtgcactccaaactttgataaattaaagaccctgcttattccttgagtaatgctacactgacaactgatttagtgaat

SEQ ID NO: 273720 - DNA, 591 bp, Homo sapiens
ttaagtgacacacgactgtattagttaacactatgggaacttcatgggaaatggacactctagctccaccataaatagaaactgtttatgtcaaaaaacacataaaagcatagttgcaagattacaattccttccagatatttcatttagtatctccacagatcactaacttcctgaataacattcttgtgtctccactgcctcacatttgatttcaggtcattccatcaattgtcaaagacgcatccaacattaactttccaactactggtttggattgtgtcaacattgtcatcctgggccacaacaacacaaaaggctaactcggtgaggtaacatagacactgatcagtgagattttgctgatgggtggtacsattttttactaagatcaagggtattcataccttcaggcatctagacaacattgaaaagggcaggttcatagataaaaaaggaaagaggaagggtttttgcactatacatcagctaccgtgtctcctgtttaacctgagtctgaagagattcaaagtgcaggtgccatgaatgcctctttaatagcttcatgtcgattgattttctgggctacac

SEQ ID NO: 273721 - DNA, 610 bp, Homo sapiens
tgaataacattcttgtgtctccactgcctcacatttgatttcaggtcattccatcaattgtcaaagacgcatccaacattaactttccaactactggtttggattgtgtcaacattgtcatcctgggccacaacaacacaaaaggctaactcggtgaggtaacatagacactgatcagtgagattttgctgatgggtggtaccattttttactaagatcaagggtattcataccttcaggcatctagacaacattgaaaagggcaggttcatagataaaaaaggaaagaggaagggtttttgcactatacatcagctaccgtgtctcctgtttaacctgagtctgaagagattcaaagtgcaggtgccatgaatgcctctttaatagcttcatgtcgattgattttctgggctacacttcccagcattcaaattgctaagtgcatataaactactagtgaatatttattacctggatttgtgcttttgagtgaccttatctatagttatgtgcttcagtggtcyaacttggggtgcactccaaactttgataaattaaagaccctgcttattccttgagtaatgctacactgacaactgatttagtgaat

SEQ ID NO: 273722 - DNA, 620 bp, Homo sapiens
gtgccatgaatgcctctttaatagcttcatgtcgattgattttctgggctacacttcccagcattcaaattgctaagtgcatataaactactagtgaatatttattacctggatttgtgcttttgagtgaccttatctatagttatgtgcttcagtggtctaacttgkggtgcactccaaactttgataaattaaagaccctgcttattccttgagtaatgctacactgacaactgatttagtgaatgccactgtgaaaataataaacctcttggtgaatatatttagacatgtcttgtaacctgtacacatcttaaccagggatgttacttggtctttctatgttcaggagtgtgtggagatagaaaagcatacaggattgtaattgtttcctgtgagactaacagaaaattcaagctagtgaagtatgcttatgcatggcacacttctcaccagcaattttaggaagttctacccaaaacccatatgtcttttgatatgtgggttaccttggagagagaaaaagaaactctgaaaacaagcatgaaatactttagaattttatctagagttggacttgtccgaaagcttttgtataaacttgcttgatgagcaactgt

SEQ ID NO: 273723 - DNA, 610 bp, Homo sapiens
tgaataacattcttgtgtctccactgcctcacatttgatttcaggtcattccatcaattgtcaaagacgcatccaacattaactttccaactactggtttggattgtgtcaacattgtcatcctgggccacaacaacacaaaaggctaactcggtgaggtaacatagacactgatcagtgagattttgctgatgggtggtaccattttttactaagatcaagggtattcataccttcaggcatctagacaacattgaaaagggcaggttcatagataaaaaaggaaagaggaagggtttttgcactatacatcagctaccgtgtctcctgtttaacctgagtctgaagagattcaaagtgcaggtgccatgaatgcctctttaatagcttcatgtcgattgattttctgggctacacttcccagcattcaaattgctaagtgcatataaactactagtgaatatttattacctggatttgtgcttttgagtgaccttatctatagttatgtgcttcagtggtctaacttggggtgcactccaaactttgataaattaaagaccctgcttattccttgagtawtgctacactgacaactgatttagtgaat

SEQ ID NO: 273724 - DNA, 493 bp, Homo sapiens
gtgaatatatttagacatgtcttgtaacctgtacacatcttaaccagggatgttacttggtctttctatgttcaggagtgtgtggagatagaaaagcatacaggattrtaattgtttcctgtgagactaacagaaaattcaagctagtgaagtatgcttatgcatggcacacttctcaccagcaattttaggaagttctacccaaaacccatatgtcttttgatatgtgggttaccttggagagagaaaaagaaactctgaaaacaagcatgaaatactttagaattttatctagagttggacttgtccgaaagcttttgtataaacttgcttgatgagcaactgttgtccactggtaccttcaccgtacaatcctcacacaaccaaacttcacaactggacacctaaatttgcactttgtttggtaaagttgaatgaaaaatgttgtcttttaagcttatgctctcttacgaaagctgttattagattaatt

SEQ ID NO: 273725 - DNA, 493 bp, Homo sapiens
gtgaatatatttagacatgtcttgtaacctgtacacatcttaaccagggatgttacttggtctttctatgttcaggagtgtgtggagatagaaaagcatacaggattgtaattgtttcctgtgagactaasagaaaattcaagctagtgaagtatgcttatgcatggcacacttctcaccagcaattttaggaagttctacccaaaacccatatgtcttttgatatgtgggttaccttggagagagaaaaagaaactctgaaaacaagcatgaaatactttagaattttatctagagttggacttgtccgaaagcttttgtataaacttgcttgatgagcaactgttgtccactggtaccttcaccgtacaatcctcacacaaccaaacttcacaactggacacctaaatttgcactttgtttggtaaagttgaatgaaaaatgttgtcttttaagcttatgctctcttacgaaagctgttattagattaatt

SEQ ID NO: 273726 - DNA, 493 bp, Homo sapiens
gtgaatatatttagacatgtcttgtaacctgtacacatcttaaccagggatgttacttggtctttctatgttcaggagtgtgtggagatagaaaagcatacaggattgtaattgtttcctgtgagactaacagaaaattcaagctagtgaagtatgcttatgcatggcacacttctcaccagcaattttaggaagttctacccaaaacccatatgtcttttgatatgtgggttaccttggagagagaaaaagaaactctgaaaacaagcatgaaatactttagaattttatctagagttggacttgtcygaaagcttttgtataaacttgcttgatgagcaactgttgtccactggtaccttcaccgtacaatcctcacacaaccaaacttcacaactggacacctaaatttgcactttgtttggtaaagttgaatgaaaaatgttgtcttttaagcttatgctctcttacgaaagctgttattagattaatt

SEQ ID NO: 273727 - DNA, 574 bp, Homo sapiens
ggacttgtccgaaagcttttgtataaacttgcttgatgagcaactgttgtccactggtaccttcaccgtacaatcctcacacaaccaaacttcacaactggacacctaaatttgcactttgtttggtaaagttgaatgaaaaatgttgtcttttaagcttatgctctcttacgaaagctgttattagattaattttactccaagatacgccaattaggaaataacttccaatttaatktcaccaactccctctggatggactaattagtcatacatcacacttactctggtggtgaaatgcctcaaaagaaggtctccagagtgttgctctacctagaaggacaagaatgaagagacataaaaatcattcattaagaaggaagaagattttccttgcctagattttcacttgtaggatgcaattaattttatcacttaatattttgtcctggtgggcattcattttacaaatttgtaaggtcagtagaaatggaaacttttggaaatcgaactgtaaatcttctgtagacgttgacagaaatagctatttggagctgtgcttttgccaactaga

SEQ ID NO: 273728 - DNA, 574 bp, Homo sapiens
ggacttgtccgaaagcttttgtataaacttgcttgatgagcaactgttgtccactggtaccttcaccgtacaatcctcacacaaccaaacttcacaactggacacctaaatttgcactttgtttggtaaagttgaatgaaaaatgttgtcttttaagcttatgctctcttacgaaagctgttattagattaattttactccaagatacgccaattaggaaataacttccaatttaatgtcaccaactccctstggatggactaattagtcatacatcacacttactctggtggtgaaatgcctcaaaagaaggtctccagagtgttgctctacctagaaggacaagaatgaagagacataaaaatcattcattaagaaggaagaagattttccttgcctagattttcacttgtaggatgcaattaattttatcacttaatattttgtcctggtgggcattcattttacaaatttgtaaggtcagtagaaatggaaacttttggaaatcgaactgtaaatcttctgtagacgttgacagaaatagctatttggagctgtgcttttgccaactaga

SEQ ID NO: 273729 - DNA, 588 bp, Homo sapiens
gactaattagtcatacatcacacttactctggtggtgaaatgcctcaaaagaaggtctccagagtgttgctctacctagaaggacaagaatgaagagacataaaaatcattcattaagaaggaagaagattttccttgcctagattttcacttgtaggatgcaattaattttatcacttaatattttgtcctggtgggcattcattttacaaatttgtaaggtcagtagaaatggaaacttttggaaatcgaactgtaaatsttctgtagacgttgacagaaatagctatttggagctgtgcttttgccaactagacactctgagaaaatctgtgagagaatattttcaggaagtcattgaaccccctaaaaatcaagttgattgcttttaccataaatataaataatttatttattatctaccactttcagtattccaataagtaacatttattgtttatttcattgacatgatctacatatacacacaatttatcttcttttgtgatacattcagaaaatttgctgcctggaaaagccatattttaaaattaccacctgtttgatgattttttttatactttaagt

SEQ ID NO: 273730 - DNA, 552 bp, Homo sapiens
ggaaataacttccaatttaatgtcaccaactccctctggatggactaattagtcatacatcacacttactctggtggtgaaatgcctcaaaagaaggtctccagagtgttgctctacctagaaggacaagaatgaagagacataaaaatcattcattaagaaggaagaagattttccttgcctagattttcacttgtaggatgcaattaattttatcacttaatattttgtcctggtgggcattcattttacaaatttgtaaggtcagtagaaatggaaacttttggaaatcgaactgtaaatcttctgtagacgttgacagaaatagctawttggagctgtgcttttgccaactagacactctgagaaaatctgtgagagaatattttcaggaagtcattgaaccccctaaaaatcaagttgattgcttttaccataaatataaataatttatttattatctaccactttcagtattccaataagtaacatttattgtttatttcattgacatgatctacatatacacacaatttatcttcttttgtgata

SEQ ID NO: 273731 - DNA, 588 bp, Homo sapiens
gactaattagtcatacatcacacttactctggtggtgaaatgcctcaaaagaaggtctccagagtgttgctctacctagaaggacaagaatgaagagacataaaaatcattcattaagaaggaagaagattttccttgcctagattttcacttgtaggatgcaattaattttatcacttaatattttgtcctggtgggcattcattttacaaatttgtaaggtcagtagaaatggaaacttttggaaatcgaactgtaaatcttctgtagacgttgacagaaatagctatttggagctgtgcttttgccaactagacactctgagaaaatctgtgagagaatattttcaggaagtcattraaccccctaaaaatcaagttgattgcttttaccataaatataaataatttatttattatctaccactttcagtattccaataagtaacatttattgtttatttcattgacatgatctacatatacacacaatttatcttcttttgtgatacattcagaaaatttgctgcctggaaaagccatattttaaaattaccacctgtttgatgattttttttatactttaagt

SEQ ID NO: 273732 - DNA, 588 bp, Homo sapiens
gactaattagtcatacatcacacttactctggtggtgaaatgcctcaaaagaaggtctccagagtgttgctctacctagaaggacaagaatgaagagacataaaaatcattcattaagaaggaagaagattttccttgcctagattttcacttgtaggatgcaattaattttatcacttaatattttgtcctggtgggcattcattttacaaatttgtaaggtcagtagaaatggaaacttttggaaatcgaactgtaaatcttctgtagacgttgacagaaatagctatttggagctgtgcttttgccaactagacactctgagaaaatctgtgagagaatattttcaggaagtcattgaaccccctaaaaatcaagttgattgcttttaccataaatataaataatttatttattatctaccactttcagtattccaataagtaacatttattgtttatttcattgacatgatctacatatacacacaatttatcttcttttgtgatacattcagaaaatttgctgyctggaaaagccatattttaaaattaccacctgtttgatgattttttttatactttaagt

SEQ ID NO: 273733 - DNA, 621 bp, Homo sapiens
ttaaaattctgataaataaattaattacaccacttacttgaggtactctttcacctttcaagaaatattttgagaattcattggctaaatattgctataatgcaggctagtaataaatggaaataatgagttmattgtaaagtttaaactaatgatggtatgatctggaatttttgttaacctagaagacataattagctctagaggtgaaatgaaagacaaaatcacctcacatattagtaaaaaacaaataatataactttataagctgctgctgttcttttgctattaaaaaccattgacatctgtaattagggaagattatggaaaggttaaaggtgagaatacatgcagtctatctacaggaaacctaaactgtttaggttaaggaaatgtctgcgaaagtcatattaattagcaggttcacaggaaactaacatttattgtataaattccatggtaaaatgtattagggctccacgcacacaactgtgtgccatctacgttaccacacagtgcttacttctttcagtttgtattcatttctctcctaacggtctgtatggtattattgcatagttctaaaaaccttccatgaggcagaaatttcatttaatgata

SEQ ID NO: 273734 - DNA, 621 bp, Homo sapiens
ttaaaattctgataaataaattaattacaccacttacttgaggtactctttcacctttcaagaaatattttgagaattcattggctaaatattgctataatgcaggctagtaataaatggaaataatgagttcattgtaaagtttaaactaatgatggtatgatctggaatttttgttaacctagaagacataattagctctagaggtgaaatgaaagacaaaatcacctcacatattagtaaaaaacaaataatataactttataagctgctgctgttcttttgctattaaraaccattgacatctgtaattagggaagattatggaaaggttaaaggtgagaatacatgcagtctatctacaggaaacctaaactgtttaggttaaggaaatgtctgcgaaagtcatattaattagcaggttcacaggaaactaacatttattgtataaattccatggtaaaatgtattagggctccacgcacacaactgtgtgccatctacgttaccacacagtgcttacttctttcagtttgtattcatttctctcctaacggtctgtatggtattattgcatagttctaaaaaccttccatgaggcagaaatttcatttaatgata

SEQ ID NO: 273735 - DNA, 621 bp, Homo sapiens
ttaaaattctgataaataaattaattacaccacttacttgaggtactctttcacctttcaagaaatattttgagaattcattggctaaatattgctataatgcaggctagtaataaatggaaataatgagttcattgtaaagtttaaactaatgatggtatgatctggaatttttgttaacctagaagacataattagctctagaggtgaaatgaaagacaaaatcacctcacatattagtaaaaaacaaataatataactttataagctgctgctgttcttttgctattaaaaaccattgacatctgtaattagggaagattatggaaaggttaaaggtgagaatacatgcagtctatctacaggaaacctawactgtttaggttaaggaaatgtctgcgaaagtcatattaattagcaggttcacaggaaactaacatttattgtataaattccatggtaaaatgtattagggctccacgcacacaactgtgtgccatctacgttaccacacagtgcttacttctttcagtttgtattcatttctctcctaacggtctgtatggtattattgcatagttctaaaaaccttccatgaggcagaaatttcatttaatgata

SEQ ID NO: 273736 - DNA, 621 bp, Homo sapiens
ttaaaattctgataaataaattaattacaccacttacttgaggtactctttcacctttcaagaaatattttgagaattcattggctaaatattgctataatgcaggctagtaataaatggaaataatgagttcattgtaaagtttaaactaatgatggtatgatctggaatttttgttaacctagaagacataattagctctagaggtgaaatgaaagacaaaatcacctcacatattagtaaaaaacaaataatataactttataagctgctgctgttcttttgctattaaaaaccattgacatctgtaattagggaagattatggaaaggttaaaggtgagaatacatgcagtctatctacaggaaacctaaactgtttaggttaaggaaatgtctgcgaaagtcatattaattagcaggttcacaggaaactaacatttattgtataaattccatggtaaaatgtattagggctccacgcacacaactgtgtgccatctacgttaccacacagtgcttacttctttcagtttktattcatttctctcctaacggtctgtatggtattattgcatagttctaaaaaccttccatgaggcagaaatttcatttaatgata

SEQ ID NO: 273737 - DNA, 535 bp, Homo sapiens
acactttaaaaaacaatgaaactacatcttcaaaattaaaaaaaaaactgtcaactccaaattctataactagaaaaagtaattcttgagaaaataaagatttattcagataaaagaaagcttcgaacaattgtcattagcagacctagatacaagaaatgcaaacggaaattttttaggctaaagaaagataacaacagatggaarttctgacctacaggaagcaaggagaagctctaggaatggcatgtgcataaacatgaaaaactaaggcttttttcttttagttttataacaaacaactgatggcttaaataaaaaattaagtgtactattgataatgtatgtagagtaaaatattctaaattaatagctctgacaggagactaaacgcaaaaattttaccacaacttttctttatgttacatgaaaacgttgactattaacagtaagtggactgtgataagcccaggatgtttattataatccctagagaaccaccacattatatgaagatattcttctaaaatgccaa

SEQ ID NO: 273738 - DNA, 451 bp, Homo sapiens
aatgtatgtagagtaaaatattctaaattaatagctctgacaggagactaaacgcaaaaattttaccacaacttttctttatgttacatgaaaacgttgactattaacagtaagtggactgtgataagcccaggatgtttattataatccctagagaaccaccacattatatgaagatattcttctaaaatgccaataaaggaattaaaatggaacsctgaatattgttcagttaatataaaaaggcatgaaagaaagaacagaggagcaaaaaatgatggaacaaatagaacataagagcaaaataggctgggcgcagtggctcagcctgtaatcccagcactttgggaggccaaggcgggtggatcacgaggtcaggagatcgagacaatcctggctaacacggtgaaacgccgtctctactaaaaatacaaaaattagctgggcgtgg

SEQ ID NO: 273739 - DNA, 451 bp, Homo sapiens
aatgtatgtagagtaaaatattctaaattaatagctctgacaggagactaaacgcaaaaattttaccacaacttttctttatgttacatgaaaacgttgactattaacagtaagtggactgtgataagcccaggatgtttattataatccctagagaaccaccacattatatgaagatattcttctaaaatgccaataaaggaattaaaatggaaccctgaatattgttcagttaatataaaaaggcatgaaagaaagaacagaggagcaaaaaatgatggarcaaatagaacataagagcaaaataggctgggcgcagtggctcagcctgtaatcccagcactttgggaggccaaggcgggtggatcacgaggtcaggagatcgagacaatcctggctaacacggtgaaacgccgtctctactaaaaatacaaaaattagctgggcgtgg

SEQ ID NO: 273740 - DNA, 451 bp, Homo sapiens
aatgtatgtagagtaaaatattctaaattaatagctctgacaggagactaaacgcaaaaattttaccacaacttttctttatgttacatgaaaacgttgactattaacagtaagtggactgtgataagcccaggatgtttattataatccctagagaaccaccacattatatgaagatattcttctaaaatgccaataaaggaattaaaatggaaccctgaatattgttcagttaatataaaaaggcatgaaagaaagaacagaggagcaaaaaatgatggaacaaatagaacataagagcaaaataggctgggcgcagtggctcagcctgtaatcccagcactttgggaggccraggcgggtggatcacgaggtcaggagatcgagacaatcctggctaacacggtgaaacgccgtctctactaaaaatacaaaaattagctgggcgtgg

SEQ ID NO: 273741 - DNA, 451 bp, Homo sapiens
aatgtatgtagagtaaaatattctaaattaatagctctgacaggagactaaacgcaaaaattttaccacaacttttctttatgttacatgaaaacgttgactattaacagtaagtggactgtgataagcccaggatgtttattataatccctagagaaccaccacattatatgaagatattcttctaaaatgccaataaaggaattaaaatggaaccctgaatattgttcagttaatataaaaaggcatgaaagaaagaacagaggagcaaaaaatgatggaacaaatagaacataagagcaaaataggctgggcgcagtggctcagcctgtaatcccagcactttgggaggccaaggcgggtggatcacgaggtcaggagatcgagacmatcctggctaacacggtgaaacgccgtctctactaaaaatacaaaaattagctgggcgtgg

SEQ ID NO: 273742 - DNA, 578 bp, Homo sapiens
aaaaaaaaagaagcaaaaatagtaggcttaaatccaaacttttcaataattatttcaaatataatttaaatactccaaataaaacacagattgtccaactggataataaaagtacctataagagatgcatgccaaatattatggtatagataagttgagagtaaaataatttccaagtataccaaraaaacaacaagcacaagaaatcttatgtggttatattaatataagaaaaagtagacctccaaacaagcaatattacaacagacagctatttcataatgataaaatgtcaagtaattatgaagacataatgctgtattactgacagaataactaaagaaaattaagataaaataattttgacaacagcttgacctaatcgatattgaccaagacaatagaatatatgttctattatgctacacatgaaacatttatcaataggctatagaccacaaaatatctctcaagaagtttcaaaacactgtaatcataaaaagtatgctttctgaccataatgaaaatgagttgaaatgggtaaaaacaagctacccaggaaagtctacactattgga

SEQ ID NO: 273743 - DNA, 578 bp, Homo sapiens
aaaaaaaaagaagcaaaaatagtaggcttaaatccaaacttttcaataattatttcaaatataatttaaatactccaaataaaacacagattgtccaactggataataaaagtacctataagagatgcatgccaaatattatggtatagataagttgagagtaaaataatttccaagtataccaaaaaaacaacaagcacaagaaatcttatgtggytatattaatataagaaaaagtagacctccaaacaagcaatattacaacagacagctatttcataatgataaaatgtcaagtaattatgaagacataatgctgtattactgacagaataactaaagaaaattaagataaaataattttgacaacagcttgacctaatcgatattgaccaagacaatagaatatatgttctattatgctacacatgaaacatttatcaataggctatagaccacaaaatatctctcaagaagtttcaaaacactgtaatcataaaaagtatgctttctgaccataatgaaaatgagttgaaatgggtaaaaacaagctacccaggaaagtctacactattgga

SEQ ID NO: 273744 - DNA, 578 bp, Homo sapiens
aaaaaaaaagaagcaaaaatagtaggcttaaatccaaacttttcaataattatttcaaatataatttaaatactccaaataaaacacagattgtccaactggataataaaagtacctataagagatgcatgccaaatattatggtatagataagttgagagtaaaataatttccaagtataccaaaaaaacaacaagcacaagaaatcttatgtggttatattaatataagaaaaagtagacctccaaacaagcaatattacaacagacagctatttcayaatgataaaatgtcaagtaattatgaagacataatgctgtattactgacagaataactaaagaaaattaagataaaataattttgacaacagcttgacctaatcgatattgaccaagacaatagaatatatgttctattatgctacacatgaaacatttatcaataggctatagaccacaaaatatctctcaagaagtttcaaaacactgtaatcataaaaagtatgctttctgaccataatgaaaatgagttgaaatgggtaaaaacaagctacccaggaaagtctacactattgga

SEQ ID NO: 273745 - DNA, 578 bp, Homo sapiens
aaaaaaaaagaagcaaaaatagtaggcttaaatccaaacttttcaataattatttcaaatataatttaaatactccaaataaaacacagattgtccaactggataataaaagtacctataagagatgcatgccaaatattatggtatagataagttgagagtaaaataatttccaagtataccaaaaaaacaacaagcacaagaaatcttatgtggttatattaatataagaaaaagtagacctccaaacaagcaatattacaacagacagctatttcataatgataaaatgtcaagtaattatgaagacataatgctgtattactgacagaataactaaagaaaattaagataaaataattttgacaacagcttgacctaatcgatattgaycaagacaatagaatatatgttctattatgctacacatgaaacatttatcaataggctatagaccacaaaatatctctcaagaagtttcaaaacactgtaatcataaaaagtatgctttctgaccataatgaaaatgagttgaaatgggtaaaaacaagctacccaggaaagtctacactattgga

SEQ ID NO: 273746 - DNA, 569 bp, Homo sapiens
ttttaaatacaccttaaaatgccctttagctcaatgaagaaatcataagaaacacctttaaatacattgaactgaatacaaataaaaatatactatatcaaaatgtatgggataaagttaagcagacccagattaarttttttgtataaatgcttattctagaaaagagaagttcaaaacaagtgaactaattttctaccttaaaaagaaaatctaaaacaagagagcaaattaagtccaaaacaagtagaagaaaggaaataaaacagaaattagaaatcaatgagacagaaaacagaaacaggagaaaatcaacatggccaaaagttagttctgtgagaaagaaagaaaacgcaaattataaatatcagggattaatgagattgtacagttgtagacacaagagacattaacaagataatggaatattgtgaaacattttatacaaattttcattacttggatgaaagggtgaattccttgaaaaaaaacttataaaaaaattcacaagattaaatggaacatatgaagtaattgacatttattaaagtaattaaattaattgtaaa

SEQ ID NO: 273747 - DNA, 550 bp, Homo sapiens
atcaacatggccaaaagttagttctgtgagaaagaaagaaaacgcaaattataaatatcagggattaatgagattgtacagttgtagacacaagagacattaacaagataatggaatattgtgaaacattttatacaaattttcattacttggatgaaagggtgaattccttgaaaaaaaacttataaaaaaattcacaagattaaatggaacatatgaagtaattgacatttattaaagtaattaaattaattgtaaaatacctgcacataaaaacayaaaattaaagaaataaaaataagcaaaccccagatccaaagaatttcactggtgaattctttcaaacgtttaaaaaaaataaaatttttaaattatttcagaaataaagaagggggaaattccaaacttgttttatgagtcagaatcctgataccaaaattacaaaacctaggaatgcaaaattgacttcaacttaaagagctatcaccattttaatctgtgattctaatgaatttggctatcttagatactttatacaagtggaatcata

SEQ ID NO: 273748 - DNA, 550 bp, Homo sapiens
atcaacatggccaaaagttagttctgtgagaaagaaagaaaacgcaaattataaatatcagggattaatgagattgtacagttgtagacacaagagacattaacaagataatggaatattgtgaaacattttatacaaattttcattacttggatgaaagggtgaattccttgaaaaaaaacttataaaaaaattcacaagattaaatggaacatatgaagtaattgacatttattaaagtaattaaattaattgtaaaatacctgcacataaaaacataaaattaaagaaataaaaataagcaaaccccagatccaaagaatttcactggtgaattctttcaaaygtttaaaaaaaataaaatttttaaattatttcagaaataaagaagggggaaattccaaacttgttttatgagtcagaatcctgataccaaaattacaaaacctaggaatgcaaaattgacttcaacttaaagagctatcaccattttaatctgtgattctaatgaatttggctatcttagatactttatacaagtggaatcata

SEQ ID NO: 273749 - DNA, 550 bp, Homo sapiens
atcaacatggccaaaagttagttctgtgagaaagaaagaaaacgcaaattataaatatcagggattaatgagattgtacagttgtagacacaagagacattaacaagataatggaatattgtgaaacattttatacaaattttcattacttggatgaaagggtgaattccttgaaaaaaaacttataaaaaaattcacaagattaaatggaacatatgaagtaattgacatttattaaagtaattaaattaattgtaaaatacctgcacataaaaacataaaattaaagaaataaaaataagcaaaccccagatccaaagaatttcactggtgaattctttcaaacgtttaaaaaaaataaaatttttaaattatttcagaaataaagaagggggaaattccaaacttgttttatgagtcagaatcctgataccaaaattacaaaacctaggaatgcaaaattgacttcaacttaaagagctatcaccattttaatctgtgaytctaatgaatttggctatcttagatactttatacaagtggaatcata

SEQ ID NO: 273750 - DNA, 478 bp, Homo sapiens
ctctgaaataaattcaacacacggagggggacayatgttatgagactgacctggcctcttcatctcataaaaggggttcttgttgatggtaacacagattaaaactatttcaattacattcaagataaaaagattagcaatggtatctaagttgaaaaaatcaccccgcaggaagacaaaagtctcacaaaaggatatttaagctagccaacactttgaaattcaggcagagatcgtgctttctgggtgaactaaagtagcaagaacaaagtagaggctccaattctaggaaaaatgggccctaataaggtttacaatccagaaactcaagatatccagacagaaggatgcagtctctgctttcaaggcagcagcagtacctggattactaagccaatccccaacacaatcataaacacaaatttgattgaggaagaagcttgcccaccagaagatttaggttattacaaggtagaat

SEQ ID NO: 273751 - DNA, 478 bp, Homo sapiens
ctctgaaataaattcaacacacggagggggacatatgttatgagactgacctggcctcttcatctcataaaaggggttcttgttgmtggtaacacagattaaaactatttcaattacattcaagataaaaagattagcaatggtatctaagttgaaaaaatcaccccgcaggaagacaaaagtctcacaaaaggatatttaagctagccaacactttgaaattcaggcagagatcgtgctttctgggtgaactaaagtagcaagaacaaagtagaggctccaattctaggaaaaatgggccctaataaggtttacaatccagaaactcaagatatccagacagaaggatgcagtctctgctttcaaggcagcagcagtacctggattactaagccaatccccaacacaatcataaacacaaatttgattgaggaagaagcttgcccaccagaagatttaggttattacaaggtagaat

SEQ ID NO: 273752 - DNA, 478 bp, Homo sapiens
ctctgaaataaattcaacacacggagggggacatatgttatgagactgacctggcctcttcatctcataaaaggggttcttgttgatggtaacacagattaaaactatttcaattacattcaagataaaaagattagcaatggtatctaagwtgaaaaaatcaccccgcaggaagacaaaagtctcacaaaaggatatttaagctagccaacactttgaaattcaggcagagatcgtgctttctgggtgaactaaagtagcaagaacaaagtagaggctccaattctaggaaaaatgggccctaataaggtttacaatccagaaactcaagatatccagacagaaggatgcagtctctgctttcaaggcagcagcagtacctggattactaagccaatccccaacacaatcataaacacaaatttgattgaggaagaagcttgcccaccagaagatttaggttattacaaggtagaat

SEQ ID NO: 273753 - DNA, 503 bp, Homo sapiens
tttaagctagccaacactttgaaattcaggcagagatcgtgctttctgggtgaactaaagtagcaagaacaaagtagaggctccaattctaggaaaaatgggycctaataaggtttacaatccagaaactcaagatatccagacagaaggatgcagtctctgctttcaaggcagcagcagtacctggattactaagccaatccccaacacaatcataaacacaaatttgattgaggaagaagcttgcccaccagaagatttaggttattacaaggtagaatgtgatagagaaaacgagcatgggactggaaacaaaaggaggtagccccatgattacaactggaatatatctgtcagcgatggtgcggaaataagactgaagagagagatccttaaaccccacgtgccttacatcaggactaatcctggacacaggctggaaagcatagcctacaggtggtgagggaagaggagtgggctcagctgtgagaaggagaaggaaa

SEQ ID NO: 273754 - DNA, 503 bp, Homo sapiens
tttaagctagccaacactttgaaattcaggcagagatcgtgctttctgggtgaactaaagtagcaagaacaaagtagaggctccaattctaggaaaaatgggccctaataaggtttacaatccagaaactcaagatatccagacagaaggatgcagtctcygctttcaaggcagcagcagtacctggattactaagccaatccccaacacaatcataaacacaaatttgattgaggaagaagcttgcccaccagaagatttaggttattacaaggtagaatgtgatagagaaaacgagcatgggactggaaacaaaaggaggtagccccatgattacaactggaatatatctgtcagcgatggtgcggaaataagactgaagagagagatccttaaaccccacgtgccttacatcaggactaatcctggacacaggctggaaagcatagcctacaggtggtgagggaagaggagtgggctcagctgtgagaaggagaaggaaa

SEQ ID NO: 273755 - DNA, 503 bp, Homo sapiens
tttaagctagccaacactttgaaattcaggcagagatcgtgctttctgggtgaactaaagtagcaagaacaaagtagaggctccaattctaggaaaaatgggccctaataaggtttacaatccagaaactcaagatatccagacagaaggatgcagtctctgctttcaaggcagcagcagtacctggattactaagccaatccccaacacaatcataaacacaaatttgattgaggaagaagcttgcccaccagaagatttaggttattacaaggtagaatgtgatagagaaaaygagcatgggactggaaacaaaaggaggtagccccatgattacaactggaatatatctgtcagcgatggtgcggaaataagactgaagagagagatccttaaaccccacgtgccttacatcaggactaatcctggacacaggctggaaagcatagcctacaggtggtgagggaagaggagtgggctcagctgtgagaaggagaaggaaa

SEQ ID NO: 273756 - DNA, 503 bp, Homo sapiens
tttaagctagccaacactttgaaattcaggcagagatcgtgctttctgggtgaactaaagtagcaagaacaaagtagaggctccaattctaggaaaaatgggccctaataaggtttacaatccagaaactcaagatatccagacagaaggatgcagtctctgctttcaaggcagcagcagtacctggattactaagccaatccccaacacaatcataaacacaaatttgattgaggaagaagcttgcccaccagaagatttaggttattacaaggtagaatgtgatagagaaaacgagcatgggactggaaasaaaaggaggtagccccatgattacaactggaatatatctgtcagcgatggtgcggaaataagactgaagagagagatccttaaaccccacgtgccttacatcaggactaatcctggacacaggctggaaagcatagcctacaggtggtgagggaagaggagtgggctcagctgtgagaaggagaaggaaa

SEQ ID NO: 273757 - DNA, 461 bp, Homo sapiens
tacaaggtagaatgtgatagagaaaacgagcatgggactggaaacaaaaggaggtagccccatgattacaactggaatatatctgtcagcgatggtgcggaaataagactgaagagagagatccttaaaccccacgtgccttacatcaggactaatcctggacacaggctggaaagcatagcctacaggtggtgagggaagaggagtgggctcagctgtgagaaggagaaggaaatatggctgaaaacyagataggggtcttgaaatcacacagaggatttgggcctttgctgctgtctgccagcagctgccagtagttctcacactttggctggcaacaaaatcacctgggacagtggtgcggaagcgcggggagtgatgtaaaaccacaagtgaccaggcaaaaaacacctgtatgttttccaattcagtaagtacagaaatattaattggaaaaaggt

SEQ ID NO: 273758 - DNA, 461 bp, Homo sapiens
tacaaggtagaatgtgatagagaaaacgagcatgggactggaaacaaaaggaggtagccccatgattacaactggaatatatctgtcagcgatggtgcggaaataagactgaagagagagatccttaaaccccacgtgccttacatcaggactaatcctggacacaggctggaaagcatagcctacaggtggtgagggaagaggagtgggctcagctgtgagaaggagaaggaaatatggctgaaaaccagataggggtcttgaaatcacacmgaggatttgggcctttgctgctgtctgccagcagctgccagtagttctcacactttggctggcaacaaaatcacctgggacagtggtgcggaagcgcggggagtgatgtaaaaccacaagtgaccaggcaaaaaacacctgtatgttttccaattcagtaagtacagaaatattaattggaaaaaggt

SEQ ID NO: 273759 - DNA, 461 bp, Homo sapiens
tacaaggtagaatgtgatagagaaaacgagcatgggactggaaacaaaaggaggtagccccatgattacaactggaatatatctgtcagcgatggtgcggaaataagactgaagagagagatccttaaaccccacgtgccttacatcaggactaatcctggacacaggctggaaagcatagcctacaggtggtgagggaagaggagtgggctcagctgtgagaaggagaaggaaatatggctgaaaaccagataggggtcttgaaatcacacagaggatttgggcctttgctgctrtctgccagcagctgccagtagttctcacactttggctggcaacaaaatcacctgggacagtggtgcggaagcgcggggagtgatgtaaaaccacaagtgaccaggcaaaaaacacctgtatgttttccaattcagtaagtacagaaatattaattggaaaaaggt

SEQ ID NO: 273760 - DNA, 461 bp, Homo sapiens
tacaaggtagaatgtgatagagaaaacgagcatgggactggaaacaaaaggaggtagccccatgattacaactggaatatatctgtcagcgatggtgcggaaataagactgaagagagagatccttaaaccccacgtgccttacatcaggactaatcctggacacaggctggaaagcatagcctacaggtggtgagggaagaggagtgggctcagctgtgagaaggagaaggaaatatggctgaaaaccagataggggtcttgaaatcacacagaggatttgggcctttgctgctgtctgccagcagctgccagtagttctcacactttggctggcaacaaaatcacctgggrcagtggtgcggaagcgcggggagtgatgtaaaaccacaagtgaccaggcaaaaaacacctgtatgttttccaattcagtaagtacagaaatattaattggaaaaaggt

SEQ ID NO: 273761 - DNA, 566 bp, Homo sapiens
tgggcctttgctgctgtctgccagcagctgccagtagttctcacactttggctggcaacaaaatcacctgggacagtggtgcggaagygcggggagtgatgtaaaaccacaagtgaccaggcaaaaaacacctgtatgttttccaattcagtaagtacagaaatattaattggaaaaaggtggaggtcagacattgatagtgctgtggactgctccagggacgtaagcatgatctttagagaggtgactctaatcagtcaagggcaaccactggacagaaagaagtccagaccaaccgtacacagagacatcatacaactacactttagcaacctctccaaataacatgtctcttagtgaaacttgggaggttgaaagttaaaaacaaaatccagtgacatttatgtatcctaggcacttacatttgtctgattcttccaacttgcctttgcttggttagagttttgggtagataagaggtggatttacatgtgctagtgtgagaactttgatagactcatttagacattgacctactatcttgatgtttgaaagctaaaacccaa

SEQ ID NO: 273762 - DNA, 566 bp, Homo sapiens
tgggcctttgctgctgtctgccagcagctgccagtagttctcacactttggctggcaacaaaatcacctgggacagtggtgcggaagcgcggggagtgwtgtaaaaccacaagtgaccaggcaaaaaacacctgtatgttttccaattcagtaagtacagaaatattaattggaaaaaggtggaggtcagacattgatagtgctgtggactgctccagggacgtaagcatgatctttagagaggtgactctaatcagtcaagggcaaccactggacagaaagaagtccagaccaaccgtacacagagacatcatacaactacactttagcaacctctccaaataacatgtctcttagtgaaacttgggaggttgaaagttaaaaacaaaatccagtgacatttatgtatcctaggcacttacatttgtctgattcttccaacttgcctttgcttggttagagttttgggtagataagaggtggatttacatgtgctagtgtgagaactttgatagactcatttagacattgacctactatcttgatgtttgaaagctaaaacccaa

SEQ ID NO: 273763 - DNA, 484 bp, Homo sapiens
tttgctgctgtctgccagcagctgccagtagttctcacactttggctggcaacaaaatcacctgggacagtggtgcggaagcgcggggagtgatgtaaaaccacaagtgaccaggcaaaaaacacctgtatgttttccaattcagtaagtacagaaatattaattggaaaaaggtggaggtcagacattgatagtgctgtggactgctccagggacgtaagcatgatctttagagaggtgactctaaycagtcaagggcaaccactggacagaaagaagtccagaccaaccgtacacagagacatcatacaactacactttagcaacctctccaaataacatgtctcttagtgaaacttgggaggttgaaagttaaaaacaaaatccagtgacatttatgtatcctaggcacttacatttgtctgattcttccaacttgcctttgcttggttagagttttgggtagataagaggtggatttaca

SEQ ID NO: 273764 - DNA, 595 bp, Homo sapiens
catcatacaactacactttagcaacctctccaaataacatgtctcttagtgaaacttgggaggttgaaagttaaaaacaaaatccagtgrcatttatgtatcctaggcacttacatttgtctgattcttccaacttgcctttgcttggttagagttttgggtagataagaggtggatttacatgtgctagtgtgagaactttgatagactcatttagacattgacctactatcttgatgtttgaaagctaaaacccaaagaaatttgtctttttacataaaacaaattcagcccttgccttccttgtggattacatcttccactagcagtaataaaaaagtaacaatatgcataagtcaaagtatcttcttagatcctctgtagtgttttattatttagttgtgttaattaaagtaactgtctcaaaatttcaaggaattcctgagaagcaattcatgttcaaagggcttccctcttgtgacaatgtgttgcatgttttactgtaaaagtaatcttattttaccttataacctctacaatccaattcataactgcataaaaaggaaataaaaccttacataaatttgaattttaa

SEQ ID NO: 273765 - DNA, 595 bp, Homo sapiens
catcatacaactacactttagcaacctctccaaataacatgtctcttagtgaaacttgggaggttgaaagttaaaaacaaaatccagtgacatttatgtatcctaggcacttacatttgtctgattcttccaacttgcctttgcttgsttagagttttgggtagataagaggtggatttacatgtgctagtgtgagaactttgatagactcatttagacattgacctactatcttgatgtttgaaagctaaaacccaaagaaatttgtctttttacataaaacaaattcagcccttgccttccttgtggattacatcttccactagcagtaataaaaaagtaacaatatgcataagtcaaagtatcttcttagatcctctgtagtgttttattatttagttgtgttaattaaagtaactgtctcaaaatttcaaggaattcctgagaagcaattcatgttcaaagggcttccctcttgtgacaatgtgttgcatgttttactgtaaaagtaatcttattttaccttataacctctacaatccaattcataactgcataaaaaggaaataaaaccttacataaatttgaattttaa

SEQ ID NO: 273766 - DNA, 577 bp, Homo sapiens
agaggtgactctaatcagtcaagggcaaccactggacagaaagaagtccagaccaaccgtacacagagacatcatacaactacactttagcaacctctccaaataacatgtctcttagtgaaacttgggaggttgaaagttaaaaacaaaatccagtgacatttatgtatcctaggcacttacatttgtctgattcttccaacttgcctttgcttggttagagttttgggtagataagaggtggatttacatgtgctagtgtgagaactttgatagactcatttagacattgacctactatcttgatgtttgaaagctaaaacccaaagaaatttgtctttttacataaaacaaattcagcccttgccttccttgtggattacatcttccactascagtaataaaaaagtaacaatatgcataagtcaaagtatcttcttagatcctctgtagtgttttattatttagttgtgttaattaaagtaactgtctcaaaatttcaaggaattcctgagaagcaattcatgttcaaagggcttccctcttgtgacaatgtgttgcatgttttactgtaaaa

SEQ ID NO: 273767 - DNA, 577 bp, Homo sapiens
agaggtgactctaatcagtcaagggcaaccactggacagaaagaagtccagaccaaccgtacacagagacatcatacaactacactttagcaacctctccaaataacatgtctcttagtgaaacttgggaggttgaaagttaaaaacaaaatccagtgacatttatgtatcctaggcacttacatttgtctgattcttccaacttgcctttgcttggttagagttttgggtagataagaggtggatttacatgtgctagtgtgagaactttgatagactcatttagacattgacctactatcttgatgtttgaaagctaaaacccaaagaaatttgtctttttacataaaacaaattcagcccttgccttccttgtggattacatcttccactagcagtaataaaaaagtaacaatatgcataagtcaaagtatcttcttagatcctctgtagtgttttattatttagttgtgttaattaaagtaactgtctcaaaatttcaaggaattcctgagaagcaattcatgttcaaagggcttccctcttgtgacaatrtgttgcatgttttactgtaaaa

SEQ ID NO: 273768 - DNA, 586 bp, Homo sapiens
gattacatcttccactagcagtaataaaaaagtaacaatatgcataagtcaaagtatcttcttagatcctctgtagtgttttattatttagttgtgttaattaaagtaactgtctcaaaatttcaaggaattcctgagaagcaattcatgttcaaagggcttccctcttgtgacaatgtgttgcatgttttactgtaaaagtaatcttattttaccttataacctctacaatmcaattcataactgcataaaaaggaaataaaaccttacataaatttgaattttaaaaagtaccttgtttatatggctcctttagctaatgaatagtcaatttggtaaatatcccagtgagttgaaggtttgaatccatctcacttaactagcttgatggatgcatttctaaacctatacaacccactcctgtgcttttaaaaaattaaagttagctgtagattgaggtgtcagtgacacagtttatagaacataacttagattgtcatctacattactgtaactataaataccaccctcagatggaagaatcagttttatcagtgaacatctctaattgaactataaatggtgt

SEQ ID NO: 273769 - DNA, 586 bp, Homo sapiens
gattacatcttccactagcagtaataaaaaagtaacaatatgcataagtcaaagtatcttcttagatcctctgtagtgttttattatttagttgtgttaattaaagtaactgtctcaaaatttcaaggaattcctgagaagcaattcatgttcaaagggcttccctcttgtgacaatgtgttgcatgttttactgtaaaagtaatcttattttaccttataacctctacaatcsaattcataactgcataaaaaggaaataaaaccttacataaatttgaattttaaaaagtaccttgtttatatggctcctttagctaatgaatagtcaatttggtaaatatcccagtgagttgaaggtttgaatccatctcacttaactagcttgatggatgcatttctaaacctatacaacccactcctgtgcttttaaaaaattaaagttagctgtagattgaggtgtcagtgacacagtttatagaacataacttagattgtcatctacattactgtaactataaataccaccctcagatggaagaatcagttttatcagtgaacatctctaattgaactataaatggtgt

SEQ ID NO: 273770 - DNA, 586 bp, Homo sapiens
gattacatcttccactagcagtaataaaaaagtaacaatatgcataagtcaaagtatcttcttagatcctctgtagtgttttattatttagttgtgttaattaaagtaactgtctcaaaatttcaaggaattcctgagaagcaattcatgttcaaagggcttccctcttgtgacaatgtgttgcatgttttactgtaaaagtaatcttattttaccttataacctctacaatccaattcataactgcataaaaaggaaataaaaccttacataawtttgaattttaaaaagtaccttgtttatatggctcctttagctaatgaatagtcaatttggtaaatatcccagtgagttgaaggtttgaatccatctcacttaactagcttgatggatgcatttctaaacctatacaacccactcctgtgcttttaaaaaattaaagttagctgtagattgaggtgtcagtgacacagtttatagaacataacttagattgtcatctacattactgtaactataaataccaccctcagatggaagaatcagttttatcagtgaacatctctaattgaactataaatggtgt

SEQ ID NO: 273771 - DNA, 586 bp, Homo sapiens
gattacatcttccactagcagtaataaaaaagtaacaatatgcataagtcaaagtatcttcttagatcctctgtagtgttttattatttagttgtgttaattaaagtaactgtctcaaaatttcaaggaattcctgagaagcaattcatgttcaaagggcttccctcttgtgacaatgtgttgcatgttttactgtaaaagtaatcttattttaccttataacctctacaatccaattcataactgcataaaaaggaaataaaaccttacataaatttgaattttaaaaagtaccttgtttatatggctcctttagctaatgaatagtcaatttggtaaatatcccagtgagttgaaggtttgaatccatctcacttaactagcttgatggatgcatttctaaacctatacaacccactcctstgcttttaaaaaattaaagttagctgtagattgaggtgtcagtgacacagtttatagaacataacttagattgtcatctacattactgtaactataaataccaccctcagatggaagaatcagttttatcagtgaacatctctaattgaactataaatggtgt

SEQ ID NO: 273772 - DNA, 382 bp, Homo sapiens
cctcttggtgagcagtggtgacttaggcagtttcttagaaatattctagaagacatagtcatcttttaaaaaaaatagctacaaggatatgtctaagcagaagggaccatgggccaaattacgtgtagatttcgcattccaaatatggtaaagaagaagcaggaagctggggstcctaaacaggccacacagaaatggacaaggaagaggccatcagcagcttgtggggacaagatgtcaagccccaaatgttaaacccaccaaccatcctccaaattctggctctgtttaacaaggctgtggtctgacactagatgctgcctcagtgactaaagcataatttcccgtctcctgggagtgttgacagctgactcctggcaac

SEQ ID NO: 273773 - DNA, 382 bp, Homo sapiens
cctcttggtgagcagtggtgacttaggcagtttcttagaaatattctagaagacatagtcatcttttaaaaaaaatagctacaaggatatgtctaagcagaagggaccatgggccaaattacgtgtagatttcgcattccaaatatggtaaagaagaagcaggaagctgggggtcctaaacaggycacacagaaatggacaaggaagaggccatcagcagcttgtggggacaagatgtcaagccccaaatgttaaacccaccaaccatcctccaaattctggctctgtttaacaaggctgtggtctgacactagatgctgcctcagtgactaaagcataatttcccgtctcctgggagtgttgacagctgactcctggcaac

SEQ ID NO: 273774 - DNA, 382 bp, Homo sapiens
cctcttggtgagcagtggtgacttaggcagtttcttagaaatattctagaagacatagtcatcttttaaaaaaaatagctacaaggatatgtctaagcagaagggaccatgggccaaattacgtgtagatttcgcattccaaatatggtaaagaagaagcaggaagctgggggtcctaaacaggccacacagaaatggacaaggaagaggccatcagcagcttgtggggacaagatgtcaagccccaaatgttaaacccaccaaccatcctccaaattctggctctgtttaacaaggctgtggtctgacactasatgctgcctcagtgactaaagcataatttcccgtctcctgggagtgttgacagctgactcctggcaac

SEQ ID NO: 273775 - DNA, 382 bp, Homo sapiens
cctcttggtgagcagtggtgacttaggcagtttcttagaaatattctagaagacatagtcatcttttaaaaaaaatagctacaaggatatgtctaagcagaagggaccatgggccaaattacgtgtagatttcgcattccaaatatggtaaagaagaagcaggaagctgggggtcctaaacaggccacacagaaatggacaaggaagaggccatcagcagcttgtggggacaagatgtcaagccccaaatgttaaacccaccaaccatcctccaaattctggctctgtttaacaaggctgtggtctgacactagatgcygcctcagtgactaaagcataatttcccgtctcctgggagtgttgacagctgactcctggcaac

SEQ ID NO: 273776 - DNA, 367 bp, Homo sapiens
tgtggggacaagatgtcaagccccaaatgttaaacccaccaaccatcctccaaattctggctctgtttaacaaggctgtggtctgacactagatgctgcctcagtgactaaagcataatttcccgtctcctgggagtgttgacagctgactcctggcaacaatactcacagcacagtaaagttccttcatccaagttcatgtcccttctgaaggcatcccacatccgataactgcttggtacagaaatataatggcctggttttcttgctccaattcgaggtcattaggtaaactcaccaagatccctgtagagtgsactgcggccatgatagtgattgcattccagccgacttcctgctccaccca

SEQ ID NO: 273777 - DNA, 634 bp, Homo sapiens
acatccccttgaattgaattcagtgcaattcaaaacagtaatttgtgggaaaaattagatatgcagatagcctggactctagrgaggcacgcatcatttggagaataatagtgaaccggctggtctatgagggaagaaaacagagtgaatatagactattagtgaacaaggatattttcccatgtatattcaaattaaggtgaatttctttagagaattgtgccttagaaagaaaaagtatttccctatatttgagtcctcacaagttttcctacgatgagtgcttttgtgattattttgaataacaaagtaatatttaaagaaactctcttgccctgaatgtactttatgtcaattgatgttgcatatagagagcatcagagtcaagccacaagaaaaggaggaacataacttagcaaagacttagaggattagtcctaatagtgtgaaatcaaaagttcaagtgagggaataaatgcagcctttaatgattacttaaatgaaatttaactctagcaggatctacaagaaattggcaacctttggcttcagtaacagaaactcaggatatatgcccttcagtgcttttgtattctgcatcatattgagagagactcctttaaacaagcaataa

SEQ ID NO: 273778 - DNA, 634 bp, Homo sapiens
acatccccttgaattgaattcagtgcaattcaaaacagtaatttgtgggaaaaattagatatgcagatagcctggactctagagaggcacgcatcatttggagaataatagtgaaccggctggtctatgagggaagaaaacagagtgaatatagactattagtgaacaaggatattttcccatgtatattcaaattaaggtgaayttctttagagaattgtgccttagaaagaaaaagtatttccctatatttgagtcctcacaagttttcctacgatgagtgcttttgtgattattttgaataacaaagtaatatttaaagaaactctcttgccctgaatgtactttatgtcaattgatgttgcatatagagagcatcagagtcaagccacaagaaaaggaggaacataacttagcaaagacttagaggattagtcctaatagtgtgaaatcaaaagttcaagtgagggaataaatgcagcctttaatgattacttaaatgaaatttaactctagcaggatctacaagaaattggcaacctttggcttcagtaacagaaactcaggatatatgcccttcagtgcttttgtattctgcatcatattgagagagactcctttaaacaagcaataa

SEQ ID NO: 273779 - DNA, 634 bp, Homo sapiens
acatccccttgaattgaattcagtgcaattcaaaacagtaatttgtgggaaaaattagatatgcagatagcctggactctagagaggcacgcatcatttggagaataatagtgaaccggctggtctatgagggaagaaaacagagtgaatatagactattagtgaacaaggatattttcccatgtatattcaaattaaggtgaatttctttagagaattgtgccttagaaagaaaaagtatttccctatatttgagtcctcacaagttttcctacgatgagtgcttttgtgattattttgaataacaaagtaatatttaaagaaactctcttgccctgaatgtactttatgtcaattgatgttgcatatagagagcatcagagtcaagccacaagaaaaggaggaacataacttagcaaagacttagaggattagtcctaatagtgtgaaatcaaaagttcaagtgagggaataaatgcagcctttaatgattacttaaatgaartttaactctagcaggatctacaagaaattggcaacctttggcttcagtaacagaaactcaggatatatgcccttcagtgcttttgtattctgcatcatattgagagagactcctttaaacaagcaataa

SEQ ID NO: 273780 - DNA, 663 bp, Homo sapiens
ctgaatgtactttatgtcaattgatgttgcatatagagagcatcagagtcaagccacaagaaaaggaggaacataacttagcaaagacttagaggattagtcctaatagtgtgaaatcaaaagttcaagtgagggaataaatgcagcctttaatgattacttaaatgaaatttaactctagcaggatctacaagaaattggcaacctttggcttcagtaacagaaactcaggatatatgcccttcagtgcttttgtattctgcatcatattgagagagactcctttaaacaagcaataagaaacttcctgtgacaacataataaattcaaaaagttctgtaactcagacartttagatagaagtgaggactttggcctagacagccctgttcactctaaaggtggattaaacaaggaaaaatatattgatatcaaaaattcaatcaggaatttgattaaagcatttcattaaatgtgataatttcttagtatattatcttacatatgcaatattcatgtgtaacaaattaaatacaagtaaacatttgagcatattatctgcagcataatttacatattcagttttgcttacatgaaaacttcgatcttctcaataagaaaatttgtgaaatctttaattcctcatccccaggaatgtaaata

SEQ ID NO: 273781 - DNA, 663 bp, Homo sapiens
cagcctttaatgattacttaaatgaaatttaactctagcaggatctacaagaaattggcaacctttggcttcagtaacagaaactcaggatatatgcccttcagtgcttttgtattctgcatcatattgagagagactcctttaaacaagcaataagaaacttcctgtgacaacataataaattcaaaaagttctgtaactcagacaatttagatagaagtgaggactttggcctagacagccctgttcactctaaagrtggattaaacaaggaaaaatatattgatatcaaaaattcaatcaggaatttgattaaagcatttcattaaatgtgataatttcttagtatattatcttacatatgcaatattcatgtgtaacaaattaaatacaagtaaacatttgagcatattatctgcagcataatttacatattcagttttgcttacatgaaaacttcgatcttctcaataagaaaatttgtgaaatctttaattcctcatccccaggaatgtaaataaataaatataaatattgtaagtcagtgattttttcctaggaagacagtaaaaatactttacacgccttctcattgtaaacctaaataacaaacagagaaaggctctctaaagggaaaagacacatcttagggaggagggcact

SEQ ID NO: 273782 - DNA, 481 bp, Homo sapiens
aaggcctctgaattggctaaaactcctatggctgcaaacaaacaaacaaacaaataaacarcaacaaaaaactttccagttagcagaaattattttttaaaactttttttttttacataagtggtctcatctacataacaaggccacccttttgctagccaaggccaaactgaaggagtagtggcggtgacccaatgtgaagattctgccctgttcactacagaatcctgagtttggttcctaagtctagttctttctgtctgatatttgtgttacttttaaagcgtcagcattttgtcccagttatgatgtggtaataaaagattcaaaaggattttctttacaagttctatgattaaaagcttaactaaaagcaaatttcttttttttcttaattatactttaagttctggggtacatgtgcagaacatgcaggtttgctacataggtatacacatgccatggtggcttgctgcatcca

SEQ ID NO: 273783 - DNA, 663 bp, Homo sapiens
ctgaatgtactttatgtcaattgatgttgcatatagagagcatcagagtcaagccacaagaaaaggaggaacataacttagcaaagacttagaggattagtcctaatagtgtgaaatcaaaagttcaagtgagggaataaatgcagcctttaatgattacttaaatgaaatttaactctagcaggatctacaagaaattggcaacctttggcttcagtaacagaaactcaggatatatgcccttcagtgcttttgtattctgcatcatattgagagagactcctttaaacaagcaataagaaacttcctgtgacaacataataaattcaaaaagttctgtaactcagacaatttagatagaagtgaggactttggcctagacagccctgttcactctaaaggtggattaaacaaggaaaaatatattgatatcaaaaattcaatcaggaatttgattaaagcatttcattaaatgtgataatttcttagtatattatcttacatatgcaatattcatgtgtaacaaattaaatacaagtaaacatttgagcatattatctrcagcataatttacatattcagttttgcttacatgaaaacttcgatcttctcaataagaaaatttgtgaaatctttaattcctcatccccaggaatgtaaata

SEQ ID NO: 273784 - DNA, 663 bp, Homo sapiens
cagcctttaatgattacttaaatgaaatttaactctagcaggatctacaagaaattggcaacctttggcttcagtaacagaaactcaggatatatgcccttcagtgcttttgtattctgcatcatattgagagagactcctttaaacaagcaataagaaacttcctgtgacaacataataaattcaaaaagttctgtaactcagacaatttagatagaagtgaggactttggcctagacagccctgttcactctaaaggtggattaaacaaggaaaaatatattgatatcaaaaattcaatcaggaatttgattaaagcatttcattaaatgtgataatttcttagtatattatcttacatatgcaatattcatgtgtaacaaattaaatacaagtaaacatttgagcatattatctgcagcataatttacatattcagttttgcttacatgaaaacttcgatcttctcaataagaaaatttgtgaaatctttaattcctcatccccaggaatgtaaataaataaatataaatattgtaagtcagtgattttttcctaggaagacagtaaaawtactttacacgccttctcattgtaaacctaaataacaaacagagaaaggctctctaaagggaaaagacacatcttagggaggagggcact

SEQ ID NO: 273785 - DNA, 663 bp, Homo sapiens
cagcctttaatgattacttaaatgaaatttaactctagcaggatctacaagaaattggcaacctttggcttcagtaacagaaactcaggatatatgcccttcagtgcttttgtattctgcatcatattgagagagactcctttaaacaagcaataagaaacttcctgtgacaacataataaattcaaaaagttctgtaactcagacaatttagatagaagtgaggactttggcctagacagccctgttcactctaaaggtggattaaacaaggaaaaatatattgatatcaaaaattcaatcaggaatttgattaaagcatttcattaaatgtgataatttcttagtatattatcttacatatgcaatattcatgtgtaacaaattaaatacaagtaaacatttgagcatattatctgcagcataatttacatattcagttttgcttacatgaaaacttcgatcttctcaataagaaaatttgtgaaatctttaattcctcatccccaggaatgtaaataaataaatataaatattgtaagtcagtgattttttcctaggaagacagtaaaaatactttacacgcyttctcattgtaaacctaaataacaaacagagaaaggctctctaaagggaaaagacacatcttagggaggagggcact

SEQ ID NO: 273786 - DNA, 481 bp, Homo sapiens
aaggcctctgaattggctaaaactcctatggctgcaaacaaacaaacaaacaaataaacagcaacaaaaaactttccagttagcagaaattattttttaaaactttttttttttacataagtggtctcatctacataacaaggccrcccttttgctagccaaggccaaactgaaggagtagtggcggtgacccaatgtgaagattctgccctgttcactacagaatcctgagtttggttcctaagtctagttctttctgtctgatatttgtgttacttttaaagcgtcagcattttgtcccagttatgatgtggtaataaaagattcaaaaggattttctttacaagttctatgattaaaagcttaactaaaagcaaatttcttttttttcttaattatactttaagttctggggtacatgtgcagaacatgcaggtttgctacataggtatacacatgccatggtggcttgctgcatcca

SEQ ID NO: 273787 - DNA, 562 bp, Homo sapiens
gtgacagttttgattctgataactttcatatcatgatccctaatttcaaaaaaaattaaacgtgtaacttatttatgatgtatttgataggcttggatttgtgaatcacctctactatctatagtggtagatatatctgagcctgcttacacagsacttccatcagattctctcttcagtggaattggaagaggggggttttggagaagggtatgaaggaattgtgctgcatcagaggtccccacctaacagcacagggactttttctgtgctcttgccaggccgttgtattggctaatgcaaaagtaattttggttttgtcattgaaagtaatgagaccatctgacttacaatgtctgtgccataaccagctcctaatagcctccgaggacagctttgcctgacatatactgtcctgggaccacgtctgctttgtaactcctgaggtagctgccaccatgaccaatgccttctcatctttactctacatgcaggtaacagttataattatatctctgtgtattcacagaacatttagtacatctgggacttctacaaaatt

SEQ ID NO: 273788 - DNA, 562 bp, Homo sapiens
gtgacagttttgattctgataactttcatatcatgatccctaatttcaaaaaaaattaaacgtgtaacttatttatgatgtatttgataggcttggatttgtgaatcacctctactatctatagtggtagatatatctgagcctgcttacacaggacttccatcagattctctcttcagtggaattggaagaggggggttttggagaagggwatgaaggaattgtgctgcatcagaggtccccacctaacagcacagggactttttctgtgctcttgccaggccgttgtattggctaatgcaaaagtaattttggttttgtcattgaaagtaatgagaccatctgacttacaatgtctgtgccataaccagctcctaatagcctccgaggacagctttgcctgacatatactgtcctgggaccacgtctgctttgtaactcctgaggtagctgccaccatgaccaatgccttctcatctttactctacatgcaggtaacagttataattatatctctgtgtattcacagaacatttagtacatctgggacttctacaaaatt

SEQ ID NO: 273789 - DNA, 562 bp, Homo sapiens
gtgacagttttgattctgataactttcatatcatgatccctaatttcaaaaaaaattaaacgtgtaacttatttatgatgtatttgataggcttggatttgtgaatcacctctactatctatagtggtagatatatctgagcctgcttacacaggacttccatcagattctctcttcagtggaattggaagaggggggttttggagaagggtatgaaggaattgtgctgcatcagaggtccccacctaacagcacagggmctttttctgtgctcttgccaggccgttgtattggctaatgcaaaagtaattttggttttgtcattgaaagtaatgagaccatctgacttacaatgtctgtgccataaccagctcctaatagcctccgaggacagctttgcctgacatatactgtcctgggaccacgtctgctttgtaactcctgaggtagctgccaccatgaccaatgccttctcatctttactctacatgcaggtaacagttataattatatctctgtgtattcacagaacatttagtacatctgggacttctacaaaatt

SEQ ID NO: 273790 - DNA, 391 bp, Homo sapiens
cttatttatgatgtatttgataggcttggatttgtgaatcacctctactatctatagtggtagatatatctgagcctgcttacacaggacttccatcagattctctcttcagtggaattggaagaggggggttttggagaagggtatgaaggaattgtgctgcatcagaggtccccacctaacagcacagggactttttctgtgctcttgccaggccrttgtattggctaatgcaaaagtaattttggttttgtcattgaaagtaatgagaccatctgacttacaatgtctgtgccataaccagctcctaatagcctccgaggacagctttgcctgacatatactgtcctgggaccacgtctgctttgtaactcctgaggtagctgccacc

SEQ ID NO: 273791 - DNA, 562 bp, Homo sapiens
gtgacagttttgattctgataactttcatatcatgatccctaatttcaaaaaaaattaaacgtgtaacttatttatgatgtatttgataggcttggatttgtgaatcacctctactatctatagtggtagatatatctgagcctgcttacacaggacttccatcagattctctcttcagtggaattggaagaggggggttttggagaagggtatgaaggaattgtgctgcatcagaggtccccacctaacagcacagggactttttctgtgctcttgccaggccgttgtattggctratgcaaaagtaattttggttttgtcattgaaagtaatgagaccatctgacttacaatgtctgtgccataaccagctcctaatagcctccgaggacagctttgcctgacatatactgtcctgggaccacgtctgctttgtaactcctgaggtagctgccaccatgaccaatgccttctcatctttactctacatgcaggtaacagttataattatatctctgtgtattcacagaacatttagtacatctgggacttctacaaaatt

SEQ ID NO: 273792 - DNA, 481 bp, Homo sapiens
aaggcctctgaattggctaaaactcctatggctgcaaacaaacaaacaaacaaataaacagcaacaaaaaactttccagttagcagaaattattttttaaaactttttttttttacataagtggtctcatctacataacaaggccacccttttgctagccaaggccaaactgaaggagtagtggcggtgacccaatgtgaagattctgccctgttcactacagaatcctgagtttggttcctaagtctagttctttctgtytgatatttgtgttacttttaaagcgtcagcattttgtcccagttatgatgtggtaataaaagattcaaaaggattttctttacaagttctatgattaaaagcttaactaaaagcaaatttcttttttttcttaattatactttaagttctggggtacatgtgcagaacatgcaggtttgctacataggtatacacatgccatggtggcttgctgcatcca

SEQ ID NO: 273793 - DNA, 352 bp, Homo sapiens
tgtagtcccagctactcagggggctcaagtgaggattggttgggcctgggaggcagaggttgcagtgagccaagattgcaccattgcactacagtcttggtgacagagcaagaccctgtcttaaaaaaaataaacaaacaaatagaaaataagtagaaaaatggcagacctaaatccaaccttagcaatgattagttacaatgtaactggacaaatactctacttaagacagagactgccagacctgagaggaaggcaagacccaacaatatggcatccayagagacacaatttaaacacaaagacacaaagaaagtatgagaaaaaatatgctatgcaggcactaatcata

SEQ ID NO: 273794 - DNA, 446 bp, Homo sapiens
atactgctctctcagtaactgatggaacacccagataaaaatataggaaaaatatggatctaaatgacaaaatcctgacccaaatggtacttggcagtaccaagatagactgtatgtcgatcgattgagaaaaggttcaaacctgaaatagtatacaaagtatgttgtctgaacayttgaaattaaattagaaaccaacaacaaattgatatccagaaaagcctcaaatgtctgaaaaccaagtaataaactttgaaataccctgagtcaaaaagtattcacaaggggaactggaatgtatttggaacaaacttgttataaaatctcatttctggtagactaaaggtgacaacttctttctctgctcctctctctgtgaggacaaattccccttaaaccttgaccagactactgacttatttggccaacagaaggtgacaaaggtg

SEQ ID NO: 273795 - DNA, 446 bp, Homo sapiens
atactgctctctcagtaactgatggaacacccagataaaaatataggaaaaatatggatctaaatgacaaaatcctgacccaaatggtacttggcagtaccaagatagactgtatgtcgatcgattgagaaaaggttcaaacctgaaatagtatacaaagtatgttgtctgaacatttgaaattaaattagaaaccaacaacaaattgatatccagaaaagcctcaaatgtctgaaaaccaagtaataaactttgaaataccctgagtcaaaaagtattcamaaggggaactggaatgtatttggaacaaacttgttataaaatctcatttctggtagactaaaggtgacaacttctttctctgctcctctctctgtgaggacaaattccccttaaaccttgaccagactactgacttatttggccaacagaaggtgacaaaggtg

SEQ ID NO: 273796 - DNA, 446 bp, Homo sapiens
atactgctctctcagtaactgatggaacacccagataaaaatataggaaaaatatggatctaaatgacaaaatcctgacccaaatggtacttggcagtaccaagatagactgtatgtcgatcgattgagaaaaggttcaaacctgaaatagtatacaaagtatgttgtctgaacatttgaaattaaattagaaaccaacaacaaattgatatccagaaaagcctcaaatgtctgaaaaccaagtaataaactttgaaataccctgagtcaaaaagtattcacaaggggaactggaatgtatttggaacaaacttgttataaaatctcatttctggtagactaaaggtgacaacttctttctctgctcctctctctgtgaggacmaattccccttaaaccttgaccagactactgacttatttggccaacagaaggtgacaaaggtg

SEQ ID NO: 273797 - DNA, 257 bp, Homo sapiens
acctcatgatggaaaccacatggccagtccatgactagctacacacattgayatcccccactgagcctccagcaacaccgactcccaacaactagtgagcctccagcaacatccactcccaaccactagtgagccaccctgcacaccaccccactgtgctttcacacaatccagcttggctgcaactgtgtgtgagatgagctggccaccaagactctctaagccaaaaaacaagtaataatgagttgttttaagct

SEQ ID NO: 273798 - DNA, 257 bp, Homo sapiens
acctcatgatggaaaccacatggccagtccatgactagctacacacattgatatcccccactgagcctccagcaacaccgactcccaacmactagtgagcctccagcaacatccactcccaaccactagtgagccaccctgcacaccaccccactgtgctttcacacaatccagcttggctgcaactgtgtgtgagatgagctggccaccaagactctctaagccaaaaaacaagtaataatgagttgttttaagct

SEQ ID NO: 273799 - DNA, 345 bp, Homo sapiens
ccaagactctctaagccaaaaaacaagtaataatgagttgttttaagctgycaagttttggggatggtttcttcagaatagataactggaacagaatatgacagctggaaatgagctgctgtggtaatcagaagctacaatatgtgacacgactgtgaggctgacctgtaactgggcctcaaggagaccattcatgcaacctggaagggcatcaagactcttggtcagggcctgaaggatggtgagaaaatgtcattggaaactggagaaaaggtctgagagttacttgctgagggactgtgggaaaactatggccacaacatggaaactgtaagggcactgcac

SEQ ID NO: 273800 - DNA, 577 bp, Homo sapiens
caccacaacctgattcagtcctcactgcrgctgagtgtgtgtgggtgcagaagacaggccaccacaacctgattcaggattcagttgggctaccagccagtgccataaggaaaaccattctggggctcttgagaggggcaaagcatagtttgcatgtgggagaaatgttaatagtttgtggccagaggacaagctgtggtttattaaagactgctgcaggttcctactatgcttctcatcaagaggtagaatctaatcaccttccccccttgaatcatggctggtctcagtgatgagtgcgactgggcagtgtggcaggagagatgctctggcacttctgaggggcgatcatgagaggccttacagcttctgcctgggcctcttggacacacaccctgggagaagccagacaaacctgactacctgacgctgccagactgggaagaagtccgtgctggccacaaagagagggctcggtgcctgctccatgtccccagccactagagtccttccagatgagaccaaggacatcatgaagcaaccaacccgcaccgccctgtccagtgtcttgacccag

SEQ ID NO: 273801 - DNA, 577 bp, Homo sapiens
caccacaacctgattcagtcctcactgcagctgagtgtgtgtgggtgcagaagacaggccaccacaacctgattcaggattcagttgggctaccagccagtgccataaggaaaaccattctggggctcttgagaggggcaaagcatagtttgcatgtgggagaaatgttaatagtttgtggccagaggacaagctgtggtttattaaagactgctgcaggttcctactatgcttctcatcaagaggtagaatctaatcaccttccccccttgaatcatggctggtctcagtgatgagtgcgactgggcagtgtggcaggagagatgctctggcacttctgaggggcgatcatgagaggccttacagcttctrcctgggcctcttggacacacaccctgggagaagccagacaaacctgactacctgacgctgccagactgggaagaagtccgtgctggccacaaagagagggctcggtgcctgctccatgtccccagccactagagtccttccagatgagaccaaggacatcatgaagcaaccaacccgcaccgccctgtccagtgtcttgacccag

SEQ ID NO: 273802 - DNA, 577 bp, Homo sapiens
caccacaacctgattcagtcctcactgcagctgagtgtgtgtgggtgcagaagacaggccaccacaacctgattcaggattcagttgggctaccagccagtgccataaggaaaaccattctggggctcttgagaggggcaaagcatagtttgcatgtgggagaaatgttaatagtttgtggccagaggacaagctgtggtttattaaagactgctgcaggttcctactatgcttctcatcaagaggtagaatctaatcaccttccccccttgaatcatggctggtctcagtgatgagtgcgactgggcagtgtggcaggagagatgctctggcacttctgaggggcgatcatgagaggccttacagcttctgcctgggcctcttggacacacaccctgggagaagccagacaaacctgactacctgacgctgccagactgggaagaagtccgtgctggccacaaagagagggctsggtgcctgctccatgtccccagccactagagtccttccagatgagaccaaggacatcatgaagcaaccaacccgcaccgccctgtccagtgtcttgacccag

SEQ ID NO: 273803 - DNA, 553 bp, Homo sapiens
aggagctgaggcaggagaattgcttgaaccygggaggtggaggctgcagtgagccgagatcacaccactgtgctctagcctgggcaacaagagtgaaactctgtctcaaaagaaaaaaaattaaaaataaaagaacaaggaaacaaaagtaacaaggcttgacaccagatgagcctgaatctaagcaagaaaagcccagaagaaatcccattttgggtcactggctgcatggtagtaataccatacacataaaggaagagaggaggatgtggctttcactttgaattttttgagcttaaggtaacttttgcatagctacaaagaagcattcaacagagagttaaacctatgatggaaagactgaagaggtccaagctgtagagaaacaggacggcaaaccacaaagggctgaatcagtcaaggagaactgcagggcgggatgaacagggaccagtggaacatttggataagctgttgagaagaaaggagaattcagagaaaaagaactgtcagtgaggtcataataggaactgttacagtgaactaaatatgg

SEQ ID NO: 273804 - DNA, 553 bp, Homo sapiens
aggagctgaggcaggagaattgcttgaacctgggaggtggaggctgcagtgagccgagatcacaccactgygctctagcctgggcaacaagagtgaaactctgtctcaaaagaaaaaaaattaaaaataaaagaacaaggaaacaaaagtaacaaggcttgacaccagatgagcctgaatctaagcaagaaaagcccagaagaaatcccattttgggtcactggctgcatggtagtaataccatacacataaaggaagagaggaggatgtggctttcactttgaattttttgagcttaaggtaacttttgcatagctacaaagaagcattcaacagagagttaaacctatgatggaaagactgaagaggtccaagctgtagagaaacaggacggcaaaccacaaagggctgaatcagtcaaggagaactgcagggcgggatgaacagggaccagtggaacatttggataagctgttgagaagaaaggagaattcagagaaaaagaactgtcagtgaggtcataataggaactgttacagtgaactaaatatgg

SEQ ID NO: 273805 - DNA, 553 bp, Homo sapiens
aggagctgaggcaggagaattgcttgaacctgggaggtggaggctgcagtgagccgagatcacaccactgtgctctagcctgggcaacaagagtgaaactctgtctcaaaagaaaaaaaattaaaaataaaasaacaaggaaacaaaagtaacaaggcttgacaccagatgagcctgaatctaagcaagaaaagcccagaagaaatcccattttgggtcactggctgcatggtagtaataccatacacataaaggaagagaggaggatgtggctttcactttgaattttttgagcttaaggtaacttttgcatagctacaaagaagcattcaacagagagttaaacctatgatggaaagactgaagaggtccaagctgtagagaaacaggacggcaaaccacaaagggctgaatcagtcaaggagaactgcagggcgggatgaacagggaccagtggaacatttggataagctgttgagaagaaaggagaattcagagaaaaagaactgtcagtgaggtcataataggaactgttacagtgaactaaatatgg

SEQ ID NO: 273806 - DNA, 553 bp, Homo sapiens
aggagctgaggcaggagaattgcttgaacctgggaggtggaggctgcagtgagccgagatcacaccactgtgctctagcctgggcaacaagagtgaaactctgtctcaaaagaaaaaaaattaaaaataaaagaacaaggaaacaaaagtaacaaggcttgacaccagatgagcctgaatctaagcaagaaaagcccagaagaaatcccattttgggtcactggctgcatggtagtaataccatacacataaaggaagagaggaggatgtggctttcactttgaattttttgagcttaaggtaacttttgcatagctacaaagaagcattcaacagagagttaaacctatgatggaaagactgaagaggtccaagctgtagagaaacaggackgcaaaccacaaagggctgaatcagtcaaggagaactgcagggcgggatgaacagggaccagtggaacatttggataagctgttgagaagaaaggagaattcagagaaaaagaactgtcagtgaggtcataataggaactgttacagtgaactaaatatgg

SEQ ID NO: 273807 - DNA, 552 bp, Homo sapiens
tagctacaaagaagcattcaacagagagttaaacctatgatggaaagactgaagaggtccaagctgtagagaaacaggacggcaaaccacaaagggctgaatcagtcaaggagaactgcagggcgggatgaacagggaccagtggaacatttggataagctgttgagaagaaaggagaattcagagaaaaagaactgtcagtgaggtcataataggaactgttacagtgaactaaatatggcctgggaaggactctgtacttctagacttgagtccctgtggacaaactgmaacctaacttaataggtagaaagactgaaaacctaacttaggagtatgcacctgtaactatagctgagtcctggccaatcccaacagccaaacttctgccactcacacactgctgagtgttcagctgtgttcaaataaggcaaaagctgagcactgtaaccagtccagttgtttctggaccacattgctgagaacggtaagggacccagttgcttctggacctcactcctcactcagatttctgtacatcacgttcccttt

SEQ ID NO: 273808 - DNA, 552 bp, Homo sapiens
tagctacaaagaagcattcaacagagagttaaacctatgatggaaagactgaagaggtccaagctgtagagaaacaggacggcaaaccacaaagggctgaatcagtcaaggagaactgcagggcgggatgaacagggaccagtggaacatttggataagctgttgagaagaaaggagaattcagagaaaaagaactgtcagtgaggtcataataggaactgttacagtgaactaaatatggcctgggaaggactctgtacttctagacttgagtccctgtggacaaactgaaacctaacttaataggtagaaagactgaaaacctaacttaggagtatgcacctgtaactatagctgagtcctggccaatcccaacagccaaacttctgccactcacacactgctgagtgttcagytgtgttcaaataaggcaaaagctgagcactgtaaccagtccagttgtttctggaccacattgctgagaacggtaagggacccagttgcttctggacctcactcctcactcagatttctgtacatcacgttcccttt

SEQ ID NO: 273809 - DNA, 552 bp, Homo sapiens
tagctacaaagaagcattcaacagagagttaaacctatgatggaaagactgaagaggtccaagctgtagagaaacaggacggcaaaccacaaagggctgaatcagtcaaggagaactgcagggcgggatgaacagggaccagtggaacatttggataagctgttgagaagaaaggagaattcagagaaaaagaactgtcagtgaggtcataataggaactgttacagtgaactaaatatggcctgggaaggactctgtacttctagacttgagtccctgtggacaaactgaaacctaacttaataggtagaaagactgaaaacctaacttaggagtatgcacctgtaactatagctgagtcctggccaatcccaacagccaaacttctgccactcacacactgctgagtgttcagctgtgttcaaataaggcaaawgctgagcactgtaaccagtccagttgtttctggaccacattgctgagaacggtaagggacccagttgcttctggacctcactcctcactcagatttctgtacatcacgttcccttt

SEQ ID NO: 273810 - DNA, 552 bp, Homo sapiens
tagctacaaagaagcattcaacagagagttaaacctatgatggaaagactgaagaggtccaagctgtagagaaacaggacggcaaaccacaaagggctgaatcagtcaaggagaactgcagggcgggatgaacagggaccagtggaacatttggataagctgttgagaagaaaggagaattcagagaaaaagaactgtcagtgaggtcataataggaactgttacagtgaactaaatatggcctgggaaggactctgtacttctagacttgagtccctgtggacaaactgaaacctaacttaataggtagaaagactgaaaacctaacttaggagtatgcacctgtaactatagctgagtcctggccaatcccaacagccaaacttctgccactcacacactgctgagtgttcagctgtgttcaaataaggcaaaagctgagcactgtaaccagtccagttgtttctggaccacattgctgagaamggtaagggacccagttgcttctggacctcactcctcactcagatttctgtacatcacgttcccttt

SEQ ID NO: 273811 - DNA, 552 bp, Homo sapiens
acaactttctgtacacttaactaggtgccaagttgtttcttagaaattaaagctctttcagttagggttttcccagctgttagggaagcctgctgatgagacactaggtagagaatatcggaagataatgatctcrtggtaactctttgccaagcaaccaatccacttaaactcccaacatttctgtcttcccttatttttgggaaaaaatcatggaatcatagaattttaggagctggaagaggccttagaaataatctaacccagcaccttctgttgataatctgcttgtttgattatttgagttaacttctcacttataaatctccatttttttctttttctttcttctgaggaaagaagagatcctatcaagacgaactactgtcccttctatgcagtagatcccatttcctttattgtgaccatctaatttactgtccaaactgggacactgttgagagtaaaggaggcattggtagtaatgaagccaagacagctggcaaaaccaagactgtcctgaggaaacgtagatgtatgctcgtcactgct

SEQ ID NO: 273812 - DNA, 552 bp, Homo sapiens
acaactttctgtacacttaactaggtgccaagttgtttcttagaaattaaagctctttcagttagggttttcccagctgttagggaagcctgctgatgagacactaggtagagaatatcggaagataatgatctcatggtaactctttgccaagcaaccaatccacttaaactcccaacatttctgtcttcccttatttttgggaaaaaatcatggaatcatagaattttaggagctggaagaggccttagaaataatctaacccagcaccttctgttgataatctgcttgtttgattatttgagttaacttctcacttataaatctccatttttttctttttctttctkctgaggaaagaagagatcctatcaagacgaactactgtcccttctatgcagtagatcccatttcctttattgtgaccatctaatttactgtccaaactgggacactgttgagagtaaaggaggcattggtagtaatgaagccaagacagctggcaaaaccaagactgtcctgaggaaacgtagatgtatgctcgtcactgct

SEQ ID NO: 273813 - DNA, 598 bp, Homo sapiens
tagggatgcttgtagccatctgaggacttctgtaggcaacatattctcagaagaaaacaaaaactcaaataacaacataagacacagtagtccctccttttctgaggttttgctttccatagttccagttacccatggtgcagtaaattcgatgttttgagaaagagagaccacgttcacataacttttactacaatatattgttaaaattgttctattttattattgttgttgttcattctttactgtgcctaatttataaattaaacttcatcataggtatgtgtgtgtaggaaaaaaaaattagtatatatagggtttggtgctattcgtgatttcaggtatccactgggggacttggaagatatcccctttggataaggggagagactgctatactattcctggaagacaattcttttggatcaaggcacaaactkcatctgaaggcttattctagatctttttataacatggctatggattttaacaaaatgtgttggaaattggagaaatgctgaactgggtgaatattataaaaatataatatagagaacttggcatatatatatttggggtacataatgtactattttga

SEQ ID NO: 273814 - DNA, 567 bp, Homo sapiens
tcagtaaattttcccaatattgtgcaagccagggacatttatgtctttactagattttcctggaaccctaagggaggtaatttattttagaggaggaagtgaatggctccatattattaaaaactgtgatgatgttttggggcaattgcatctcactttctagaaggtcagagaaagaaattcgatttgaagccaatggaaattttcaaacatgtgtgcaatcccatatagcaaatgccatggaaatctccacattccaatgattctcaatggcctgtttgtaccaggcagtattcaatgaggtgaaactttgtcctaaataaaaatgtagacaattacttggagtttattctaatgggaaactgttgcccaaaatcttgagggaggaggggtaggagtaatgaaggaacaccgacttggagagtagcttctgcaggaaactctcagaggggattatttgagagtttagttgggagggaaaaccagatagagggatgmccatgaggacaaaagcctttcagaaatacatagaagccttctcatttaatggaatgagggagagatgct

SEQ ID NO: 273815 - DNA, 517 bp, Homo sapiens
caagagtgggtaatatttacataatcgccaggtggctgcagggttcccctcttgctgggcagccctggaacacctcctttccctttgttcctcccgcgttgggagaggcagcagctgaacttaccgatttctgtttgcttttttcagcaattctaacactttctaactaataccctatattaaatctccctctattgagttatctggcatgagtatatggagtctgactggtcagtcarttaataattctaaaatcaataaatcaagaaatagcagcgtaagcatcatgttagaaatatgggagtaaataccaggtgaaaaaaaagaaggaaggagttgaaattatttgcctctgaggggaagaacttggagatgcaggtcggggagagagggatatattaggggaatgttgtttttgttataaatcttttataatattatttggctttaaactaggtgtatatattactttaaaaaataaatacagaaaaattcactgacttatttgtcaacctga

SEQ ID NO: 273816 - DNA, 502 bp, Homo sapiens
acaggtgcaccattgataattctcagtagtatcccttccccacaacattgcttttcagccctgttctgtcaccacacagaatgtatcagcacagtgagcaaagatctttaggcacaagcaaggttggcctgatctgggaaatttatagaaatgcagtttactatctgtatagtgagaaaagacagaaaaggcacaagtcttggggtttgctctggaaasggaaggaaactatagattctatgaaattttaagtattatacttgcaaagatacttgaaagggagtaaagcaaaggttcttagatcttgaattttgcttgagagctggcaagggctcctatgaagctcttaaagaaaatctgtacctccacagcttctgctagttcttggtacaactaagaggccagaggagataaagaagaagggcatggtaattttctttaagcagcaggttaatggcttttggttctgaaagacaaggatttggtattgtttgaaagagag

SEQ ID NO: 273817 - DNA, 481 bp, Homo sapiens
cccggtctcctgaatatttatcacatctcaaaggaggaaaattaattaaataggttagtcctgcgtctatgacagagacttcacaactctgctgtattgtgttcctccatgctccctaagtgcatacacacaagcacacactgaaggcatgtcaaccgcaatggaagtgccctagctctagaagaccacctactctctaaagcagtgaaagccaaagcaacaaacccaacccttgcccctaatttgtrcctgtgggaatttcctccctgacccatagtgatggtctctgagtctacctcagaagtggtttcagcaagcctggtttccttccacctccctcccctcagtgtccagttcccatgttgtgccaaggttgccagccaagggaccaattagtgtcaactgtgatgtcaacacttgcctgtcaagtcctgcatccagttacatcttcctaatgaagccctgaactatttaattagaa

SEQ ID NO: 273818 - DNA, 499 bp, Homo sapiens
gtcaaaacaaacaaacaaaacaaacaaacaaaaacaagaaagagagagaaagaaagaaaaaaagagaagtatctgaaaatttttaagttggtagaattgacaggatgtgataacagaacagtggtatgacttaggtaactgggtagagaataacaacactatgaggtagagagaaagcagtatataggggaaagacaaagagttcactatttaactgttgattttgagtttcctagaggacctaccagcagagaaattaagcatatagtaggtacatggtctggcttaggaaagaaatctagactggaaatacagatttgggaattgtcagcatggatagaggctagctaaggacgtgaaggtaaatgaagacacccaaggaaagtaagcagagtgaaaagaagaggtggccaaaatccaaatcctagaaaatgycatttaaagagtgggtggaataagcattattcagaaaggtgcttgagaaaaagaaccaggaagg

SEQ ID NO: 273819 - DNA, 517 bp, Homo sapiens
tttctttgaggcctcagaagttggtttcagttgtgccaataccgtcttttatagtttgcccagtttgcacacaatacttaaaatcccaacacacaaataagacacaaaacaaagatagaaggggaaaaatggtgatgatgatgattgtggtagtagcaatggtgatgaaaatggtgacattagatgtgtgaggtcacccggtcagtggctgctagtgtaaatgtgaattccaagactggtctgacttcagagcctggattctaaactgcaacactacaggctatgcagctctggtaaaccctgcccaccctgcaggtctatgggagctggacaggggcactgagaagtccttgctgatggagtctgagaaagtccygagaaagactcagattactacagtagccccaaatggcatttttaatattttcgctctctgtggtgcattcagttaccaagacaatcatcttaaataagaattccagtgaagctcagagcaaattaattagccgtgctgcag

SEQ ID NO: 273820 - DNA, 601 bp, Homo sapiens
cttataatgcattcataaagtgaatattatacagttatcacaaagaattaggttgacaatagacagacaggtgataacaatgaccaagacatattatttaatgaaaaaagcaaggcatsataccacatgtatactatgcttctatatgtgtgtgtatatatatatgtgtgtgtatgtatatatatgtatttgggtatgtgtgtggagagagagaaacatatattaatatctgcttagaagatctctgaaaagacaaaagaaactgttaattgtggctgcctttagggaacagtaccaggaaaatgggacaattttggaaagatatttactttttagggtttaggtttttttggtactgtttgaagttacagttttttagggtttttaatttgatgtgtttgtgcttttattaaaaaattaaataaacacaattacatacaaaacaaaagtaagagtgcagaggaacaggcagtcaaatagccaacaatgccattgattaatttcagcatgactctgaaataactcacccaaccaaacaggaattttgtgccctggagtgtctactgataacataagacttattctatctttttttcatagg

SEQ ID NO: 273821 - DNA, 601 bp, Homo sapiens
cttataatgcattcataaagtgaatattatacagttatcacaaagaattaggttgacaatagacagacaggtgataacaatgaccaagacatattatttaatgaaaaaagcaaggcatgataccacatgtatactatgcttctatatgtgtgtgtatatatatatgtgtgtgtatgtatatatatgtatwtgggtatgtgtgtggagagagagaaacatatattaatatctgcttagaagatctctgaaaagacaaaagaaactgttaattgtggctgcctttagggaacagtaccaggaaaatgggacaattttggaaagatatttactttttagggtttaggtttttttggtactgtttgaagttacagttttttagggtttttaatttgatgtgtttgtgcttttattaaaaaattaaataaacacaattacatacaaaacaaaagtaagagtgcagaggaacaggcagtcaaatagccaacaatgccattgattaatttcagcatgactctgaaataactcacccaaccaaacaggaattttgtgccctggagtgtctactgataacataagacttattctatctttttttcatagg

SEQ ID NO: 273822 - DNA, 531 bp, Homo sapiens
gatatactttcttggcaggtatatttaaaacttatactaaaaatcaattctctggttcttaataaacaaattctgctgcataacaaatcactccaaacttagtggtatgaaataagtttattagtcctcatggttctgggaactggctgggctcagcagggtggttctcactcaaggtttcccaggcagttgcagacagtggtgaggctggagctgcctgaaaggtattcttactcacacgtctggtgcctgggctaagaagacaagtatagctggcacccctcaggcatctacctatctctacatggctcccatctctccacatggcttcttcagcatggtggtttcagggtatccagatttcttatatgatggctcagggtcctaaaggcacgtattttgagagacagccaagtggaagctttattcctagcctcagaagtcatgtagcgtcaattccataatattctattcatcagaagcaagccamtaagtcgccagcccatatttaaggagacggtaactggactc

SEQ ID NO: 273823 - DNA, 586 bp, Homo sapiens
ctgacaaccaagaattctcctgctcaagaaggaaatggcacccctagcagaaagaaaacttgagcaaaagacaactaacatttaagatcgtgcttcccaaattagacatcttatgctcaggaagccactgagtgggtcaaggcacactcaaagccacagaaaaaggatggtgcatctttcagggatgttaattttgcttaactatttgggtaaaataagctatataaaaagtaattgaggktatttttaaaattaaaatagaatgaatgttataaaatagaagccaaaattgacttgaactttttttttaatttttattttttttagacagggtctaattctgtcacccaggctgcagtgcagtgaatagcacatcaaatttcactgtaacctcaagctcctgggctcaagcaatccttctgcctcaacttgctggtagctgggactacaagcttatgccactatgcctggctattttctttatatgtgtgtgtgtgtgtgtgtttttgagacggagtctcactctgtcacccaggctggagtgcagtggcatgatctcagatcactgcaagctccgcctcctgga

SEQ ID NO: 273824 - DNA, 584 bp, Homo sapiens
cttacttgcatcatttcatttaatctttacaatatccataggagatagatattaggacaaattatttaatcactaaacgtcagcttcctcatttgttaaaaggagataataatgccttccctccaaggctgttataaaagttaaatgaaataaaagctgtatgatagctaacacagtgtgtgacgcatagtaggtaattaaaactattaacaccttttctaccctttcccaatgtgtcccaccagtgccctttcctgtcatctttggtaactttctcatgtcttacacatgattttaatgttgattttatctaatctaaatatcttcttaatgctttgttctcccatctgcaagcgtttaacttatttgactatgatcaggacaggaatgatgtctaatrtctcttgtccagccataagcacagaaaggtaatttctggcaagtcatttttttatcatgaagattatacaaaattttcacctgtggaaatttttggcagttacgtttggatcggataattaattaagaaaaggtttgtttttgcaaaaatattgggctgaccttggtggaccatttggccttct

SEQ ID NO: 273825 - DNA, 543 bp, Homo sapiens
gagggtgtaagaagtgagaagattgaaaacttcttactgggtactatgcttattatttgagtgatgaaataatccttccaccaaacctccgtgacatgcagcttacctgtaaaacaaacctgcacatgtacccctgaacctaaaataaaagttaaaaaaaaagcgacaactaagctctatgtgactcaagggcaagaaatgtgtctaatattttcttgctgtttccactgggccagaagcatgctcacattaagagctccttgtatggctactacctagttccattgagaaggactgggtatcaggcaaagagcacggaggtgggaaacagaagagctggtccagttctggctctgctctatgaccccgagcaagcccctctgcctcgctgagccccatgtatcacatatgtgaaaggacaccaccaccactctgcacaatgctgtgtgaggtcagatraataatgtgcactgaagtcctgaatacactaagcttaaagccctggtcacaggaaaggtgtttctgctctgtctttccctctct

SEQ ID NO: 273826 - DNA, 538 bp, Homo sapiens
cattaattttcaaatatagcccagtcaatattcttagcaataatcatgactatttactgcttagtgatgagctggagaaatgacaacaatcttccttttaccgtcttctattttctatcaggaataaatagtagcactcaactattcacaatatctaccagctgccagtataattttaaataacatatataaacacctagttttggttccatcaacttttggcagtattacttaactaccacctaccactataaattgaggatctgactgtccctaacttactgttctcatttatcttctttccttatccatacttctgttgtatattttcttttacatgactgaggacaataacatttaagtacaattccataagcttaattaaatcttccacacttcctttctagattgagtctcaacactaacaagccaataaacaccttttacatggcaattactacataaatatkgtttatcacagagccaattggtatcatataattactcttctttctctacaagtaaaatattttaaccc

SEQ ID NO: 273827 - DNA, 633 bp, Homo sapiens
tatagtattatattgtactctatttagccagtcctttactgataggcctttagatcgtcttcctttttttttgctgttaaaatcaatgctgcagtgaataacctctgtgtgtatgtgtgtgtgtgtgtgtatcatttgtacttgtgtgtatctgtagtataaatgacttaagatacaattgctggcatgaagtgaagtagatttttaactttgacagtgctggctttaacagactgactacacctttgccaacccaatgtgtttgcaaacttgttttgaaactgataccttattgtaggccccctggcactgctaactagctaacttactgtcttttcctccttttcctcccctcccctcccttcccttcccytcattcacatggttggtcagctataaccaccatccatctccagatatttttcatcttctcagattaaaactgtaccagttaggtgataactccccattttttccttcctccccccatcccctggtaaccactattctactttccatatgaatttggctattctagataccttacataagtggaatcctacagcatttgtccttttgtgtctggattatttcacatagcataatgttttctaggttcatctgtgttgtagc

SEQ ID NO: 273828 - DNA, 552 bp, Homo sapiens
atcaatgctgcagtgaataacctctgtgtgtatgtgtgtgtgtgtgtgtatcatttgtacttgtgtgtatctgtagtataaatgacttaagatacaattgctggcatgaagtgaagtagatttttaactttgacagtgctggctttaacagactgactacacctttgccaacccaatgtgtttgcaaacttgttttgaaactgataccttattgtaggccccctggcactgctaactagctaacttactgtcttttcctccttttcctcccctcccctcccttcccttcccttcattcacatggttggtcagctataaccaccatccatctccagatatttttcatcttctcarattaaaactgtaccagttaggtgataactccccattttttccttcctccccccatcccctggtaaccactattctactttccatatgaatttggctattctagataccttacataagtggaatcctacagcatttgtccttttgtgtctggattatttcacatagcataatgttttctaggttcatctgtgttgtagc

SEQ ID NO: 273829 - DNA, 580 bp, Homo sapiens
tttctttactgtggacttactgctgtacttctatgtaggtacatactttattatgaattcttgagtgtaaacgaggtcattatgttaaagaatttactagttcaggtattttaaagttgaagcctagtaactatttttaagaaaaatgaaaataatacaataagttttttttctttaggggcactatttgcatgttttggcaggtttaaaaaataaacaraaactagttttgttcttccattgtggtcttacttttgtggaggacaacaaagtaatgaaatgtttttgtttcttttgctgtgtttttcaagtgttgcttgtagaacaaggctcgctgccttatggttacttttaaaatttaatacttaaagtaattaatctgagtcccctttcaggagaaataagattatttagaataatttaacttaagggaaaaatatttgtttttataacaccttctaaaatttctaagttgtagaaatttactaattttttctttctttttttttttttttttgagatggagtctccttctgttgtccaggctggagtgcagtggcgcgatctcggctcactgcaa

SEQ ID NO: 273830 - DNA, 580 bp, Homo sapiens
tttctttactgtggacttactgctgtacttctatgtaggtacatactttattatgaattcttgagtgtaaacgaggtcattatgttaaagaatttactagttcaggtattttaaagttgaagcctagtaactatttttaagaaaaatgaaaataatacaataagttttttttctttaggggcactatttgcatgttttggcaggtttaaaaaataaacagaaactagttttgttcttccattgtggtcttacttttgtggaggacaacaaagtaatgaaatgtttttgtttcttttgctgtgtttttcaagtgttgcttgtagaacaaggctcgctgccttatggttacttttaaaatttaatacttaaagtaattaatctgagtcccctttcaggagaaataagattatttagaataatttaacttaagggaaaaatatttgtttttataacaccttctaaaatttytaagttgtagaaatttactaattttttctttctttttttttttttttttgagatggagtctccttctgttgtccaggctggagtgcagtggcgcgatctcggctcactgcaa

SEQ ID NO: 273831 - DNA, 518 bp, Homo sapiens
ggggaaccccagacccagtactgcctgtctgctttggcctggctccccagcctggaatcttccaccaagaatcctctcaggccaaggccaggagctcccctgggcccttcagcttcctctgcagcctcaggtatgagaggaggaggaggaggccccctgggcagtgactcctctgttctgtcctcactgyttttgcccctagagcaagttctgcacctggggctggaggcagggaaggagacagtgtggatggcaaatccccaaccccagaaatcatccaccactccatctgcttttccaaggcctggagacccctttccaaaaggccttgaaaaagtcagaaaacaaaaatccaaaaaaaatgtctctggatgcaagaatgaaatactaggtcatgaatatggtaagtcatcttattaaaattttgctgattgattgattatagactcactaatctcctagattcaaagatacctgaagaaaatgtgaacttgtgaattccggtcaaacagtatagg

SEQ ID NO: 273832 - DNA, 508 bp, Homo sapiens
ggttatattatttatgtagtgattctctcaaatgaggtactacctggctctctgattcattcctaggggataatcgaatgcatgttagtatagtaaacctatattaagaccttagaaatctgcatgatattaaaatctaatgtaatcatatttgaacttagataattaaagacaggcaaactttcataaattcttggcttcatttgcatactcagcaacaagtyttaggtatctactaagctttaggaagtgcagccactaagccagagccatagaaggaggtggaagatattattatgcctttctccgtttttaagttagttgggaacacctgaaaactataaaaaaacagtcagggactaagtaaaagtaactaatgagggaatgttagtgtcaagtacattttatttatgtattccaatgatgaaaaacaaggattaactagaaaaaaaattggattaattcatgttttctggttacagtgaatctttgggtttttttttttttt

SEQ ID NO: 273833 - DNA, 577 bp, Homo sapiens
tatgaagaaaatttgaatggcctggaaagatcaaagcagtcacaacattccctgaagccaatgcctggttcagagcaaggacctggttctcttcaattctataaaggcctaactctcttcaattctatgaggaagcagctaaagaaaagctgaaagctagcgggggttggttcatgaggtttaaggaaagaagccatctccataatagaaaggtgcaaggtgaagcagcaagtgctcatgtagaagctgcagcaagttatccagaagatctagctaagatcattgaagaaggtggctacactgaacaacagaaaaccaaataccacatgttctctcttataagtgggagctaaatgatgagaacctatgaacacaaagaacggaacaacagacactggggtctacttgagggtggaggctgggagatgggagargagcagaaaagacaactactgggtactgggcttaatacctgggtgatgaaataatctgtacaacaaggccctgtgacatgacttaacctatgtaacaaaccttcacatgtacccccaaacctaaaatagaagtttttaaaaag

SEQ ID NO: 273834 - DNA, 606 bp, Homo sapiens
cacaactttacaactaattaaccatggatgtataattgtaaatatctgaaatgcttaacataggaaataaaaatataatcaaaagccaggctttacaaaaacaatgctgtgatgtttaataacagcatcttgagtaaaactcttgtttagccaacttcattcttacctatttttgtataatttgtatcttccttcaagcgattcctgtttcttaaatgattacccattttggatacatctacatctctattaaaataaaccctgtagctacatagctatgttccatttagaaaaatttctaggaagtctagaattagactagactagaattaggcaaactctctaaatctcatttcaaacattctatttagaggtgaaataaaaggataaatctagacacactgccagatcatatratgtaataccttaagcaacgttatgatgaattttgcacactccatcactacttttcactgaggttagaaaactcagcatcgcgacacaaaagatggactcattctgctgtcaccattattttagcttctaaagggcacactgcattcctacgttgtcttttaaatgctcattccctttctctcttctctt

SEQ ID NO: 273835 - DNA, 502 bp, Homo sapiens
ctatcatcttgtcttgaatgtctcaaatggatatcaattttcttaaaataattttaagggatgtttaaactcatggtctctctcttttttcttagtaaaattgcaaragtaatgataaaagttatgccactgacataaatacttaaggcctttcattccatggtaagaataacattagtttattctttagatattttgctctcccattttcctctttcccatttctttatctaaatatagttctttacttttgccaaaggttgaacatcttattattattttgaagatagggtctttctctgtcacccaggctggagtgcagtggtgtgatcttggctcactgaaacctgcttcccaggctcaacagatcctcccacctcagcttcccaagtagctggaaccacaggtgcacaacacaacgctctactaatttttaaattttctgtagagacagggcctctctattttgctcaggtggtctgaaactcctgggctcaagtaa

SEQ ID NO: 273836 - DNA, 502 bp, Homo sapiens
ctatcatcttgtcttgaatgtctcaaatggatatcaattttcttaaaataattttaagggatgtttaaactcatggtctctctcttttttcttagtaaaattgcaagagtaatgataaaagttatgccactgacataaatacttaaggcctttcattccatggtaagaataacattagtttattctttagatattttgctctcccattttcctctttcccatttctttatctaaatatagttctttacttttgccaaaggttgaacatcttattattattttgaagatagggtctttctctgtcacccaggctggagtgcagtggtgtgatcttggctcactgaaacctgcttcccaggctcaacagatcctcccacctcagcttcccaagtagctggaaccacagrtgcacaacacaacgctctactaatttttaaattttctgtagagacagggcctctctattttgctcaggtggtctgaaactcctgggctcaagtaa

SEQ ID NO: 273837 - DNA, 549 bp, Homo sapiens
gatttccattcagtattcacacatcacggaagtgcagggtgaaatggggtgaagagaaagagactagccagatggggtagggatagcacttccaacatttcctgagctcctatgtgacagggaggagcccccagttcctgtgtgctctgagcgggacctggaggataactggaaattgagaataatgggactgacttaatgaggcgcaaagggacctcacaccrgagggtgtggcatcccagcctaggccagagtccaggaagaggttggggttggcattcagagggtctgggagtgaaggtggagctgagtcagtggtagagggatgcgtaccaggctcctggccatgctgaggacaggccgggtctagtcaccagggagaagagctgtattaccagagtgagcaaggaacacaaaagatggcctcaggtcctgcacggagaggagctcccttgctgtctactgccttgaggacacatcgcttccccttacagccagatgccacctagagtggcaagaaggaaaaatgaaacttgaaaacagaaaagg

SEQ ID NO: 273838 - DNA, 570 bp, Homo sapiens
tgtcagattgcttagccgaacctggcctacacagttgtttgtcccacacattaaacactttcaaaagagttgcccagtcctcagcttacactctttattgtcttatacctatgtattttattcgtatatagtacctgcctgtaatgcaataaatagggcatttgacaatcagcagtggttctcaacctagcaccgtttacattttaggctggataattcttacttgtggggggctggcctctaccaaytagatcacagtagcactccccaccccaccctcagttatgacaatagaaaatgtctccagacattgtcccaatgttcccttgttttaaggggagggaaaaatcacccgtggttgacaaccactgccttggatgttgttttatgggagaaaataaggtgtaacatttgaaagcatttagtccatttggctgaacaaagtaccatggactgggtggcttatcaacaggagaaatttatttcttacagttgtggaggctggaagtttgagatcagggtgccagcatggttggggtctgatgaaggccctcttctgggttgtggacc

SEQ ID NO: 273839 - DNA, 538 bp, Homo sapiens
tggtgttatggtaaaagcagagacccttgcggagcaagtcttctttgtgtaaggtagagtgaatcagcaacgtagtgtgaacaggttattgtgttatggttggaagaacattgcctttgtgttcaaatccagactgtaccacatactagctgtgtaacttgatcagattaaactctattaaccaaatgtcagattgcttagccgaacctggcctacacagttgtttgtcccacacattaaacactttcaaaagagttgcccagtcctcagcttacactctttattgtcttatacctatgtattttattcgtatatagtacctgcctgtaatgcaataaatagggcatttgacaatcagcagtggttctcaacctagcaccgtttacattttaggctggataattcttacttgtggggggctggcctctaccaattasatcacagtagcactccccaccccaccctcagttatgacaatagaaaatgtctccagacattgtcccaatgttcccttgttttaaggggagggaaaaatcac

SEQ ID NO: 273840 - DNA, 458 bp, Homo sapiens
aataatgacatgtatatcatggtgttgtgatcattcactcattcattcaatatataactagtgtgctttgatatttcaaggacaattctaggaaatagcgatatatagacagttcctgccctcctgggaatttatttatttatttattattttttgaaacagggtttcactctgtcacaaaaaatgcaatggcacgatcacagctcactgcagcctcgacctctgggaatcaaatggtccttctgcctcagcctcccgagtagtggggaccayaggcatgtgccaccatgctcagctaatttcttgcttttttttttttttgtgtagctggtatttactacattgcccaggctgcctcctgataacttattagtaaatagacaatgaacaataaatttataatgtaatttcaggagataataaatgctatggggataaagaagtataacagaataaag

SEQ ID NO: 273841 - DNA, 536 bp, Homo sapiens
ttctgtgatttttatgaaagagaattgttcacaatctctaacctctgtctgtcaaaccttcacagggtgacaaaagttacaggaaacaaagtgtatgcaatataatcttttgtatttgtggtgtgtgaaaactgagaataatamagatgcactctgatgcagaaacccagttttggggagtgtttggatttgaatttgcttgaactggtattttcttccagattggaagaaggaaaccactcccagatgtctttatttttctaacagaagagccttcacaatttaaataatgaggggttcaattagcagaagtcttgtgattcatttgcaatctaagcaaacaaattctagtctactaatttttacaaaactctgtggtcatcctgggtttggctattgagtttggctattgatggttacattcaaagaaattaaaaaggaactggtaagtaacaaagaaaatctcagaaagttttttactcttttcagttaacaagagaagacatggaatatatgtaaatttaaatgtatataaa

SEQ ID NO: 273842 - DNA, 454 bp, Homo sapiens
aaacatggcctgaacatctttccttcrtctttcaaccagaatatgtcccaacaaagtgaattatgtttcgttctcctttttttcttttcccctttttaggaactatagctgtctcacataacaaaaatgttttcatacacgttttattttaaacttgtctaagtcccgatctgttttcttaacatttgctttatttttaataattcactcagaatatataacatctgcttaaaacctttgaccaaatcagctttattgatataaatcaacaaaccaattgcaattcagggaaaaactgccataaaattcttgtgtaacccattgctgaatcactgtgaagggactaatgtttggaaagcttttaattttagttaaaaagttccttgaaacagatgtgaaaattcactcatctcccacattgtctagttcaagcagctgcaaattatttcatgga

SEQ ID NO: 273843 - DNA, 658 bp, Homo sapiens
gcaatcatctgctgagagagtggccacatacaagcatttaagcctccacatggaattcaatgtaccagcatcatggacactgtgataaaaacaaaaacaatttaagtcaatttaatattgacctggttcttcagagccaatggsgtgactgactttgttcttcagaaccaagaacttgaattgtccaacccaggctagaaaaacaaatctcacaggtcatgaggaccaaacttagagaaccaagtagccttttgtcaagctgacatgtagacttttctaccttacctgtttcactgatccaagtatagcaagaagtatcagcaatggtacatataccaccatgactagtgaaaagaaaatccagaagaatgagattgttcaactctcttgccaacagttgagatggatctgtattctatctagggtagaagtagtatcacttatagtttctgccagcattagtgatacatgtcttatagtcttctgtttgcatggttcctattgctggaaactgctttggttgtttgtataaacaatgaatcagtaactcctccaagtagagtgcctgaatattaaagggaggcctcatttaggagcttgcatcagagttaaaatttccagccttgatgatctatagaattagggtgtctgtgtacca

SEQ ID NO: 273844 - DNA, 640 bp, Homo sapiens
gttcatgacctgaggttggatcaaggctgttcattagttgggttacacatgtgaatctctattaatctcttccaggtgacaagtaattggctcatcctcctatgaaggctgttgaattcaaatttagaattacatagattctaattagtagattataataatagggtttttttgtgagaaagggacactagcaaaatcgcaggttgatttatccatgtaagttcaagtggaaatgctttggctttaattccctgtggtctcatttgatgagaccgaaattttccaagggtttttgattatggtagtctcatgagggatagcatatccagcaatcaatgagcttgaaggttactatttaggataatccaagattagtgttagaaagtgattatgctctgatcygaaattttaataagaataaaatgaaagagaaaaagagtcattgtgggtaggtaactaccaggggtctttagaaaatgagaatggctgtaattaagtagataaaaaacataatagcagttacaccagggatcttgatccaatatggtgggcagaagctgtctactctctgaggtcattatctccctctgaaagtctccagtcagctgtctactctgaagatttaagattgtaaccagtt

SEQ ID NO: 273845 - DNA, 575 bp, Homo sapiens
ggggaatgtctggttgtattgtgtgtccacataatgctttgaaataccacttgattagtgtcttagtctatttgggatgctataaaataacacagaaataccaaaaacygtgtcttataaatgacaagtatttatgtctcccacttcaggagactgagaagtccaagatcaaggtgctggctgattcagtgtctggggaggacctgcttcctcatagatggctgtcttctcatggtgtcctcccatggtgggagggtgagctagctttctggggtcttttttataagggcactaattccattcatgagggttccacccttgtgacctaatcacctcccaatatccctacctccttatactaccacacagggggttatgtttcaacatatgaatttgggaggggcacaaacattcagaccataccaattagttaccaatttcacataaaaaaaaatcaggatatctatcttctcttaaaaatcagtgcagctgataacactggatctatattctggaaatacttcacagtagtagcttcctcctgctctagactctgaggccagcagtcatgctcc

SEQ ID NO: 273846 - DNA, 575 bp, Homo sapiens
ggggaatgtctggttgtattgtgtgtccacataatgctttgaaataccacttgattagtgtcttagtctatttgggatgctataaaataacacagaaataccaaaaaccgtgtcttataaatgacaagtatttatgtctcccacttcaggagactgagaagtccaagatcaaggtgctggctgattcagtgtctggggaggacctgcttcctcatagatggctgtcttctcatggtgtcctcccatggtgggagggtgagctagctttctggggtcttttttataagggcactaattccattcatgagggttccacccttgtgacctaatcacctcccaatatmcctacctccttatactaccacacagggggttatgtttcaacatatgaatttgggaggggcacaaacattcagaccataccaattagttaccaatttcacataaaaaaaaatcaggatatctatcttctcttaaaaatcagtgcagctgataacactggatctatattctggaaatacttcacagtagtagcttcctcctgctctagactctgaggccagcagtcatgctcc

SEQ ID NO: 273847 - DNA, 584 bp, Homo sapiens
ggatatctatcttctcttaaaaatcagtgcagctgataacactggrtctatattctggaaatacttcacagtagtagcttcctcctgctctagactctgaggccagcagtcatgctccagtgcactttggtctgtctgcttagcttcattcatttatactatctgtctaaagtctagaggcgtttgtaacctctgaattgtagaaacattgtgtaaaggagtgaagactctccctttaccttctaaacatttggtaagtgaatctatgaaataaactcacaacaggcagtttaacaggagaaaaggtctacaaattaattatgaactaagtggcatcacaggaaagaaaagtaaatactcaaaaacccagtgagatttaggagcttatataccctcttcataggggagagggtaaggggaatggaggcaacttaggggagagggaatgattttggggaaagaagaatgggtctttaggataatcaatgatagtttgtgagaaagtttacctgggcatggtgtcaattcctagtctccctctcctgtgataaaagttcatcttccttggttaatgaaacttccag

SEQ ID NO: 273848 - DNA, 646 bp, Homo sapiens
tttaaggttactaaaatttaaaaccgcagtaaacttttgggataccttatagaaaattatgcaaacaataaaactcctgaattaattttttaaaatcctatgtggttccttttgtttttagattacattgatttcaccaatgatttgtagccaaggttactcgtttcagagtttatagagtcattcacagtatcttactctgtatagcaatataatttctacacttgtctggtaaataatcggttcctgtattttagtttaccttcaatttgagaccaatgctaatttacattctaaaatcctgaaaggctcctgtttttagctactgtcttaatctgtttgcctgctataaaaaaagtactatagactggtggcttataaacgagggaaatttatttctcatagctctagaggctggaagtctgagatyggggtgccagcatggctctggtgaggactttcttccagggtgcagaatgcaaacttctttgtgtatcctcacatggtggaaagacagctggatagctctctaaactcttcttgtaggagtactaattgcgttcatgagggatcttccctcatggcctacatacctcccaaaggccccacctcgaaatagcatcacattatagattagatttcaaca

SEQ ID NO: 273849 - DNA, 580 bp, Homo sapiens
ttaccctttttgactgaaattttcatttataaagaaaatctccatttgtgagggtctctctctttttcttgctctctgtaccagaaagagagggatatgactaaatcatagaaactcttactagagatggaatttacatcaatctgcataacaaagcttattcttgtttgtccagaccacctcatcataacttaggcttttccttacatccttatttttttgtttgtttcagagaagaatattgtttaatcctgaagtctaagacaactctctgagatctgctcaagtgattygctcatttatctgggttagctcccatttatacagaagatacacatgttattaaacttctgtttgtttttctcttgttaatttgttttcttacaaattagcaaaagacccagaactcatgaaaggtagaagagattatttttccccctctacacatcttggtatctcactaaatcttatctaaaaaatcccggagaaaaaatccagtggagtccaccagttacattcaatatcatgtctgaacttgagcaaagttcttattttctatcaccttgacatcagtgccttg

SEQ ID NO: 273850 - DNA, 626 bp, Homo sapiens
actaattgtcattacatctttctaaacttttctaacaatgggttggcaatgaataatttgtgccacattaattgtctgactttaatctctgacattatatatgatttctgagaataatttttaaattagcataatatttagcctttaatattctataagaatcctgctataagcatgtaaatcgagctcatttctttaagacactcatctaatttcacatagctttctggaagaattttagaaaaaaaattataggctgcttattaaaaaaaawatattttttttaaaatttccctttttggttttatttgagactgggtcttactccgtcacccaggctggagtgcaaaaaactttttgtgtggtaaaaggaaaattatgttggagttaaatttggtgaaataagtgataagaatttagaataattagttttggtttattataaattatgtttcattaatatacaacaggtaaaattagaacataatctttacataggtaatattagtaaatctcaaggaaataaaaaatttgtaccagatgttttaactcttatactaaggtataactctttcatactaaggtatgttttaactctttcatactacggtaacatatatgtactt

SEQ ID NO: 273851 - DNA, 591 bp, Homo sapiens
tcattactggctttgaagatggagggggcctgtgggaaggaaaggaggcagcctctgtgacctgtgagcagttcttgactgacagccagcaaggagaggagtccttaggaggaactggattcaaccaatacctccaatgagcttgaaagcagattcttccttagagtctccagataagaccccagcccagccaatgacttgattttgggcttgttagatgctaagcagagaacctagccaagttcaccaggactcctgacttacagaactgtgagataataaatgagtgttttttaagccattaaatttgtggtaatttgttatataggaataaaaaacgaataactcaccttaaatatccatttcaactctgaaattttaaaaactcatcctgctttcgatgatgataatgccaatgtagtttcattkattgtaacaaatatgctactttggtgggggatgttgataatgggggaggctgtgatgtatgttggaggggagagcaggagtatatgggaaatctctgtacctccttttcaattttgctgtgaactcaaagctgctctaaaaatattagagtcttaaaaaaat

SEQ ID NO: 273852 - DNA, 621 bp, Homo sapiens
agcagcttttgcaagtaagccattgtaatgttcatattgatatttcatccatctttctgagctatgaataaagttctgagctcacagatggattcatacacctactacttgccaagctgattcttccagtccaatcagctggtctttgtagtatrtcaatggagtttttcagagttccaaggaagagctacaaacagaaaattggagtgatggagttttacatcaaggtgaattttcatctcaggccactgtcatttcaggccccctttgtctaactctgggatgaatttctgatttcccaaataattgaccaaatgtttttttgttgttgaagacagtaacatgaatggctgaataacctactcactcagcaattatacctcccagacacaagatttgatctttcttctttggctcattcatgatgatggagtttctatatgaacagcatgctgctagcctccctggtcagcagctctgcattctgccttttcatcttagtatactgataggttagatccctagatatattaggtgacttggcactgtttgggcctcataaaatgatatcccaaattttggcattttggtattctgaacactttgaactaaaacaagaag

SEQ ID NO: 273853 - DNA, 594 bp, Homo sapiens
atttatttcagtaaaccttcaatgagtagaaaggaagctttcaccctgcccctaaggcactaatacttcttatagcacttatgaaaattattataaattgtgtgatttaattatctgatttttctcctcttttagacaacaggtccatgtaacaaatagactgagcttcttgtaatctctgtcttatcctccctatctagcacaacttaatgtgaatattatgcactcaatatagttttgaatagttaactagataattacactgattcttttcaaatttgaatttctgtgtctgggctcactgctggctccatctctaaaataatgagtggtaatgagttaaggcggaaaatatgatagctgttaagtttcagggactaatccagcatttttcaaactcaatttgaccttttgaatccacatatttttattaataattgctttacaaaatctgtattttcatgttaaagatgaactgaaaaatatgagcatattctggattatatgaacaamcatctgatcactgagaacgatcatgtgattttagtgcccacagatgttgaaaattgtgctggtgccacttagttgcaagtt

SEQ ID NO: 273854 - DNA, 515 bp, Homo sapiens
gacagtggtaaccctgggccttgggcaagacctagggctgtagtggtttcgtctgactcggcacagtcccagctgtggtgaccacaggggtacttgtgttactcctcccccagctccaggcagctcaacacacagcaagcractttgtttgtttgggagaaattaagggaagagaacaagagtctgcctggtaatccagagaattcttctggatcttatccaaaaccattaaggtggtacctctatgagtctgcaagagctgcagtgttactgggattggggtgcccctaaatgcaaatatggctgcagtgaccaaaaatgtagatgacaacacccaagtcccctcaaatacctggaaacccttcccaagaaggacatatacaaacaagcccagaccgtaaagattacaataaatatctaattcttcaatgcccagacactgatgaatgtccacaagcatcaagaccatccagaaaagaaaaatgacctcaccagatgaactaaataagtcacca

SEQ ID NO: 273855 - DNA, 478 bp, Homo sapiens
tgctaaattgatttacggattaaatataattccaatcaaaatgccataaggaaatttttgtgaatctaaaaaattaaatatattaccatagatgtctatatggagagtatggagaaagaaaatgtgaatagaggatgaaagaaaaaatatctctataaaataaatggagacattgcagggaccaatgttatgagtgtgttataaactgaagccaaaggtcaacttgtaagtttatacacttgtaagtttataaatttttttaaaagcgcaawtagctgtgattttactcataaaaagattatcttatttggggggttccttttaataataatgtcacccagtgcatatatataatttcaatttaagaacaaacaaaatatcttactcatgaaagacagcggagttcatgaaattatacagcatctgaggccagccgttagtaacagtctgatcatgggcaattcattttaagtcttaa

SEQ ID NO: 273856 - DNA, 602 bp, Homo sapiens
gcctctctttctctttctgtctctctcctcctcgattgcttgttctgggagtagttagctgccatatcatgaggacacttctgcagctttagggagaggcccatgcagtgaggaactaaggcctcctgttagcagccatgtgagtgacccttcttggaaatagactctccagccctgccacgcctggctgacccactgactgcaaactcacatgagaccctaaaccaaagctgcccagataagctgctcccaaattcctgacccacccaagctgtgaaataataagtattattttaagccactaggctttagaataatttgttatgcagcatagataactaatatcataagtgacagcaaaataaactacaaactattgcataactatctcaatattttaccaaatatatgcctcttatccaacatgagaatccartcttttatttaactatatactgaaaatgtcttttaagccattcttcaccaaactaatttgtaaattatcccataaaattccttcctacctttcaaagctttttttggtttttggtttttggttttgttttactgtttcatcacgctgtcacttccaagaagctatg

SEQ ID NO: 273857 - DNA, 462 bp, Homo sapiens
tttccagaaggcggggtgggtggggcccccgatttccagaaggcgagttacctagcaggtgtgtggggtgggcattgctattcggtaagtctgttgcatggggtaggatgacgtggggagcttaaaagctttaaagccagcgcaaaggtagagctgcgtctgctgtttttgtttttktttttttttccctgtgtctgtggcaaattaaggagaaaaatcaagacgttcccttcagtcctccctcggtgttaacgtctgctccagctcgcagcccgctgctgggtgagtggcgacatcagggcgagggtgagcttcgtcacggggaaagctggaggctcctgacagctcgtagccgtcctcccctcgccccgccctaggcggaaggtgtgggttgggtggtccgaggagggtgacgtccaaggtggggtgggcacaggctcgggatccctcgcagcgctaggg

SEQ ID NO: 273858 - DNA, 462 bp, Homo sapiens
tttccagaaggcggggtgggtggggcccccgatttccagaaggcgagttacctagcaggtgtgtggggtgggcattgctattcggtaagtctgttgcatggggtaggatgacgtggggagcttaaaagctttaaagccagcgcaaaggtagagctgcgtctgctgtttttgtttttttttttttttccctgtgtctgtggcaaattaaggagaaaaatcaagacgttcccttcagtcctccctcggtgttaacgtctgctccagctcgcagcccgctgctgggtgagtggcgacatcagggcgagggtgagcttcgtcacggggaaagctggaggctcctgacagctcgtagccgtcctcccctcgccccgccctaggcggaaggtgtgggttgggtggtccgaggagggtgacgtccaaggtggggtgrgcacaggctcgggatccctcgcagcgctaggg

SEQ ID NO: 273859 - DNA, 603 bp, Homo sapiens
aatctcaccttgaattttactaatccccacgtgtcaagggtggggccaggtggaggtaactgaatcatggggacagtttcccccaggctgttctcatgatggtgagttcccacgagatctgatggttttataaggggcttccccctttgctcagcactcattctctctcctgccrccctgtgaagaggagccttccaccataactgtaaggttcctgaggcctccccagccatgcagaactgtgagtcaattaaaccccttttctttataaattatccagtcttgggtatgtctttattagcagcagactaatacaaacccaaaacccaagcagtcacagaaacagatgggttgtctaatgaagctgaagcagggtggcaagcaatgagccagtcattaatgatgagtaggagtgatgggaaagtcagcagagcacagttacaaggtggacaaaaggatgtgtcttacccatggctgatgctccaaagaggagggttatcacacgaggggggaaaagcaatgatccaggacagccatgacaagaatgcgtgccaccaatcccaccttctgaacagttacatctctgtaatgttaaaactaatc

SEQ ID NO: 273860 - DNA, 572 bp, Homo sapiens
tacattatagggtagcaattgtaataacagaagacagtaaacacgtgctgctaaaggcaattatttcaaagtacagtcatttattttggctacctgtagtagggggccaagaggtgaaccatgtcacccatttggcctgtgactatcctctcttatgctactcttggatagcagccttagtgcacatgaaaaatacctcattttcaatcttccttccctcttcagtgttaccgactaaacctcctccagcaggcagtaaatggaamcttttccatctggccaaagtaataatttagagatttgtatacacccactgatttcaacatgctccacaatggttggatttcaattttgcttgacatctcacagctgtaaaggttaatccccagcgctgtctcagcaatgtcaattttttcataggctgtgtatgtccatcagtttactctcttggtaagaaggtgtctgccactgctggtattcatgctggtgaaaaccaacacacctcttccaggcactgtttgatgtcagagatacaaagcttcttgtcagctacagatattttctaattagct

SEQ ID NO: 273861 - DNA, 572 bp, Homo sapiens
tacattatagggtagcaattgtaataacagaagacagtaaacacgtgctgctaaaggcaattatttcaaagtacagtcatttattttggctacctgtagtagggggccaagaggtgaaccatgtcacccatttggcctgtgactatcctctcttatgctactcttggatagcagccttagtgcacatgaaaaatacctcattttcaatcttccttccctcttcagtgttaccgactaaacctcctccagcaggcagtaaatggaaccttttccatctggccaaagtaataatttagagatttgtrtacacccactgatttcaacatgctccacaatggttggatttcaattttgcttgacatctcacagctgtaaaggttaatccccagcgctgtctcagcaatgtcaattttttcataggctgtgtatgtccatcagtttactctcttggtaagaaggtgtctgccactgctggtattcatgctggtgaaaaccaacacacctcttccaggcactgtttgatgtcagagatacaaagcttcttgtcagctacagatattttctaattagct

SEQ ID NO: 273862 - DNA, 556 bp, Homo sapiens
actctgcctaaagggaaaccacactttacgtattcctcttcatcaatttttattataaagaaatagggaaaaaagcctgtacatatgttaccctccagaggaatctgtaactttccaaactccacagsttgaagtcattagaaagaatgcaaagggtttctattgccctttgactttggtcgaagtctgacttttccatgcatttatccataaagcaccccattttctcaatgaaggaataagtacagtggtagattttgcagaattcactttggatttgtgttctctgaaagaggaacttcactggccattaggaactttgcctactgcatcctctgagccataaaagtcaatctcctcagtctggtgaatttcacaggagtcctttctataacacttcctataagaaactttcctatgaatgcttattgaggaaggttactaaggaaacaagagacccaggtagtagcaattcatatcaaggttaacaaaatttacaaatgtaatccttgcctggctcgatgatttgaatcattttctcagaagatggagttaa

SEQ ID NO: 273863 - DNA, 630 bp, Homo sapiens
gccctttgactttggtcgaagtctgacttttccatgcatttatccataaagcaccccattttctcaatgaaggaataagtacagtggtagattttgcagaattcactttggatttgtgttctctgaaagaggaacttcactggccattaggaactttgcctactgcatcctctgagccataaaagtcaatctcctcagtctggtgaatttcacaggagtcctttctataacacttcckataagaaactttcctatgaatgcttattgaggaaggttactaaggaaacaagagacccaggtagtagcaattcatatcaaggttaacaaaatttacaaatgtaatccttgcctggctcgatgatttgaatcattttctcagaagatggagttaagactcatttcacaagtatctcttaagagggctccaggccaaacacctgccttctgtcttttgctgtatcaagcctgcacctctgaagggatgtgaggccagaaagcagagaataccatgagaagagccaaagatatctcctataacatatgcaaattataccattatttttagataattctatattttatcagtttggtgattaaattacaagtattaatgttcttaatatacagtgt

SEQ ID NO: 273864 - DNA, 592 bp, Homo sapiens
gcctttataaaaaaaatcctgcacagaaaggatacctgtttcttgagaaaaacacagggaagtgtttcccgtgactctacttgctaacctgcatggcccactctcagtagggcaaaggctaaattacatttctaggagaagaagaagaatcagggctggtccatttttgataatgactctcctttgatagctcttcatggagaagagttcttgagtttgggggaatattgataaggtgagaatgagcatgtttatctgcaaaatgcagagatggcccttactaacagcattcattcattcattcagtaaattacagtgtatttattgaatatttatttatttttgagacggagtctcwctctgtcacccaagatggagtgcgatctcagctccctgcaacttctgcctcccgggctcaaccaatcctcctgcctcagcctctcaagtagccgggaccacagatgtccaccatcatgccaggctaatttttgtatatttagtacagatcggatttcaccatgttacccaggctagtctcaaactcctgagctcaagtgatctgcccacctcactttggaggcttataccaaag

SEQ ID NO: 273865 - DNA, 592 bp, Homo sapiens
gcctttataaaaaaaatcctgcacagaaaggatacctgtttcttgagaaaaacacagggaagtgtttcccgtgactctacttgctaacctgcatggcccactctcagtagggcaaaggctaaattacatttctaggagaagaagaagaatcagggctggtccatttttgataatgactctcctttgatagctcttcatggagaagagttcttgagtttgggggaatattgataaggtgagaatgagcatgtttatctgcaaaatgcagagatggcccttactaacagcattcattcattcattcagtaaattacagtgtatttattgaatatttatttatttttgagacggagtctctctctgtcacccaagatggagtgcgatctcagctccctgcaacttctgcctcccgggctcaaccaatcctcctgcctcagcctctcaagtagccrggaccacagatgtccaccatcatgccaggctaatttttgtatatttagtacagatcggatttcaccatgttacccaggctagtctcaaactcctgagctcaagtgatctgcccacctcactttggaggcttataccaaag

SEQ ID NO: 273866 - DNA, 558 bp, Homo sapiens
tcaataataaaagcagaagtcactttttaatttttcctgttaaatgtatttgtaatccagmtggatttttccttgataatattttttcatctatatatcgcttataaatatttcacttatatttactgcgtacccactctgtgctaggcaccatgttattggaagaggtgtagcagtaagcaaagcgtatattattattgttgttggagaaaggccaactttgccttttaacaaatttactttatatctaaaacaagaaacaaagaaaagaaaagaaaggaagccagccatcctgggccctttagaatacatggtttttgactggtcattttgaaaatctattgtgctatcttcaactacttaagtaaacccagatttttcttccctcattttcttgctttcttccataagaaaagtaaattcattaactcagtaaaacagagtagtccagatccaacactcaaacacttagaatatattgttagttaggtctcaattgtacagaaacatttctacctttaaacagacttagatggcacctattcaaaaaagatatat

SEQ ID NO: 273867 - DNA, 558 bp, Homo sapiens
tcaataataaaagcagaagtcactttttaatttttcctgttaaatgtatttgtaatccagctggatttttccttgataatattttttcatctatatatcgcttataaatatttcacttatatttactgcrtacccactctgtgctaggcaccatgttattggaagaggtgtagcagtaagcaaagcgtatattattattgttgttggagaaaggccaactttgccttttaacaaatttactttatatctaaaacaagaaacaaagaaaagaaaagaaaggaagccagccatcctgggccctttagaatacatggtttttgactggtcattttgaaaatctattgtgctatcttcaactacttaagtaaacccagatttttcttccctcattttcttgctttcttccataagaaaagtaaattcattaactcagtaaaacagagtagtccagatccaacactcaaacacttagaatatattgttagttaggtctcaattgtacagaaacatttctacctttaaacagacttagatggcacctattcaaaaaagatatat

SEQ ID NO: 273868 - DNA, 616 bp, Homo sapiens
atctctcctctcccggataagagccccctcaaagctggctggaaagataggagcagaggcaatggctgagctctaggtcctgcaaagtccagcctggtatttgactcagggaaactctggctgaattaattgaaaaataaaggttattgtcaaattgaactagaaatgaaagatttgggtcaatacttattraattttgctttgctgcacttttcaggcatccaatattatattgactcacattctctttcacttactacctgtttcttagataagttcagatttaaccagcaacttggaaatattgcaaatgaataaggtccaaatctggagcagaaaagtcaatggtctgctgcttctggaattctggtgttgcctcagaagcaggagttatctttcttcttcttcatttaacatgtgttttcacagcactgactgtatcccctcgttggctttccatggcaaccctggaaaagagaaaaggcaagagtttaccatctcattttccacatgtgtaaactgaggctcagagagattgaaagggaccataccattaatcagtgatgagttggaactgggatccaagtttactgagaacatttcccaccaagctggt

SEQ ID NO: 273869 - DNA, 595 bp, Homo sapiens
gatccaagtttactgagaacatttcccaccaagctggtcctcttagggtcacatgcagggaactgcatgtagggatgtaaatgaggaataacagattakgagctgccgtgtgtagttagcccagtatgtgcatgtggtaagtgttcagtacatattaacaatttcaacgtcagtgttgactgttgttgttgttgttatgattcattctccttatctcagaaggaaccaaaataaagttaaggagcttccttacactttcaggcttctctgtatttaggttattttaatcagcggcaataatcatttgcatattaaaaattcatgtaaagtaggctaagtactaggaggatgaaatgaaaaggaatcagctcaagtcctcaaggagcttacctctagctgagaacgagtgattggtgagggcttaacaactaggaatatcagccaggtgtggtggctcatgcctgtaatcccagcactttgggaggccgaggcaggtggaccacatgagggcaggagtttgagaccagcctgggcaacatggtgaaaccctatctctactaaaagtacaaaaattagccgagagtgttggtgcatg

SEQ ID NO: 273870 - DNA, 595 bp, Homo sapiens
gatccaagtttactgagaacatttcccaccaagctggtcctcttagggtcacatgcagggaactgcatgtagggatgtaaatgaggaataacagattaggagctgccgtgtgtagttagcccagtatgtgcatgtggtaagtgttcagtacatattaacaatttcaacgtcagtgttgactgttgttgttgttgttatgattcattctccttatctcagaaggaaccaaaataaagttaaggagcttccttacactttcaggcttctctgtatttaggttattttaatcagcggcaataatcatttgcatattaaaaattcatgtaaagtaggctaagtactaggaggatgaaatgaaaaggaatcagctcaagtcctcaaggagcttacctctagctgagaacgagtgattggtgagggcttaacaactaggaatatcrgccaggtgtggtggctcatgcctgtaatcccagcactttgggaggccgaggcaggtggaccacatgagggcaggagtttgagaccagcctgggcaacatggtgaaaccctatctctactaaaagtacaaaaattagccgagagtgttggtgcatg

SEQ ID NO: 273871 - DNA, 595 bp, Homo sapiens
gatccaagtttactgagaacatttcccaccaagctggtcctcttagggtcacatgcagggaactgcatgtagggatgtaaatgaggaataacagattaggagctgccgtgtgtagttagcccagtatgtgcatgtggtaagtgttcagtacatattaacaatttcaacgtcagtgttgactgttgttgttgttgttatgattcattctccttatctcagaaggaaccaaaataaagttaaggagcttccttacactttcaggcttctctgtatttaggttattttaatcagcggcaataatcatttgcatattaaaaattcatgtaaagtaggctaagtactaggaggatgaaatgaaaaggaatcagctcaagtcctcaaggagcttacctctagctgagaacgagtgattggtgagggcttaacaactaggaatatcagccaggtgtggtggctcatgcctgtaatcccagcactttgggaggccgagrcaggtggaccacatgagggcaggagtttgagaccagcctgggcaacatggtgaaaccctatctctactaaaagtacaaaaattagccgagagtgttggtgcatg

SEQ ID NO: 273872 - DNA, 595 bp, Homo sapiens
gatccaagtttactgagaacatttcccaccaagctggtcctcttagggtcacatgcagggaactgcatgtagggatgtaaatgaggaataacagattaggagctgccgtgtgtagttagcccagtatgtgcatgtggtaagtgttcagtacatattaacaatttcaacgtcagtgttgactgttgttgttgttgttatgattcattctccttatctcagaaggaaccaaaataaagttaaggagcttccttacactttcaggcttctctgtatttaggttattttaatcagcggcaataatcatttgcatattaaaaattcatgtaaagtaggctaagtactaggaggatgaaatgaaaaggaatcagctcaagtcctcaaggagcttacctctagctgagaacgagtgattggtgagggcttaacaactaggaatatcagccaggtgtggtggctcatgcctgtaatcccagcactttgggaggccgaggcaggtggaccacatgaggscaggagtttgagaccagcctgggcaacatggtgaaaccctatctctactaaaagtacaaaaattagccgagagtgttggtgcatg

SEQ ID NO: 273873 - DNA, 631 bp, Homo sapiens
ggcaaaatttgtcatatatggcccagttctatacctagaactcctgctcacacacacactcacacacgtacacatcttttaagattcaagtgagtttggttggatataacagtagacatatttgtttgcataaggctttgaaataaaatgctttcatatatattatgacattgtataccaacaaggaagcaaggcagttgtgaatgtccccattttagtgttacggaaacaaaggcccagaagatttcaagatagggctaaatgttcttgccaacacaactgaattcgagtcctggaattctaaatggaccctgctgtgggatgttctggaaagtcacttggcagtgtccctctctggaaaataagakggttgaatgacctccaaaccagtactttgcaaacttcagtgtgttcacaagtcacctggattcttgttagattgctgccctgaatcagtaggtctgggtaggacctgctattctgcatttttaagaattagtcacagctcccaaaggatgtccaagctgctggttcatcaaccacactctggagagtgagacattggaaccaaatggacttttgatggcccagatctcctgagattcaaaggcatgtggtagaattcaagaag

SEQ ID NO: 273874 - DNA, 599 bp, Homo sapiens
tggcatttttacatatgagttagtgaatagatcttgtccccaaagcttcctggctcctccaaaacagatttatttaggatgaaggcagagggagggctacctggcagcagatggatagcctgaggcttagataggcctctggttttcccaaagccgatgcaaagcctcgggcaagctgccaggcaaacccgcaaaccttctttgtctctgccatgatgagtgcagagcctcatcacagtggggcagcctctgtggatttgcatttaggaagwacccatctggctgacaaagagaaaaccaatcattgtattttagtttttcatcatgtgtgaagtgaagcacaagtgaattttccattatgccttgttaggatcagaatcctcagtcatggaggggtgtgtaatcatagctgattgctcagtagtcaccttgagtgaaagggatagtggctcattagtctttggtctatggaaatgcaactccagtccctttcaaggtgtctctgttgtccttctcatgaccatgtcatggatggaaatcaccctcagcatagacatgaaactgctcctccagatcactcatggtggccagagattccc

SEQ ID NO: 273875 - DNA, 600 bp, Homo sapiens
gaccttttttggaaatagagtctctttaggtgcaatcaagttaagatgaagtcatattggatttggttgggttttaaatccaatgactgtgtcctcaagggacatttggagacatggagacatggaaaggtggacatacacaggaatgaaggccatgtgaagatggaggcagagactggagtgatgttgcttaaagtcaggaaatgcctggagtcactagaagatgaagaggcaaagaataattttcccttagagcttttaaaggaagtacgtccctgctgacaccttgatttcagacttccagcctccagggctgtgagagaataaattgcagttgttttaaatagccaagagaatggtcatttgtcaaggcagctctatgagtataatacagcctccttccttgctttatttttctacatagcacttagagccatatgataaactgtttatattttttacttattttttgtttatttctcctcactagaacttaagctccatgatgatagaaatttttrtctttttagaaaaatccactgttgtatctgcaatgcttgcatagtgtgtggattaaagagagaagcaaatcaatgacaa

SEQ ID NO: 273876 - DNA, 582 bp, Homo sapiens
ccacattgtctttatacattcatctgtcaacctgactcttaggttgtttccatatgttgactattgtgaatagatgcaatgagcwtgggagtgcagatatctttacaaggtgatgatttttatcatctttggttacctactcaaaagaggaattgctgggtcaatccccaaaaaaggtattgttgggtcattgctggtctattttttaatttctttaggaacctccacactgttttccataatgactacacaaatctaaattcccgccaacagtgtactgtatttcccttttccccacactctcaccagcagtaacctcttgtctttttttttttttataatagccatcctaatgggtgaagggtgatatctcatagtggttttcatttgtgtttccctaatgattagcaatgttgtataccttttcatatcctgttagccattatttctcctttggagaaaagtatgttcaggtcccttgcctgtttttaatcaagctgtttgttgtttctgttactcatttgtaagtgttctttacaaatgttgaatattagcctcttaggagatatgctgtgtgaaaat

SEQ ID NO: 273877 - DNA, 458 bp, Homo sapiens
ctgtctctactaaaaatacaaaaattagccaggcatggtggcatgcacctgtaatcccagctactcatgaggctgaggcaagagaattgcttgaacctggaggttgcagtgaactgagatcgcgccactgcactccagcctgggcaacagagtgagactctgtcttgaaaaaaaaaaaaaaaaaaggctgcactgggatacagaagttgagagttggtgaacagctgacaaaactgaggraacagcacatatcctggcacggaggtttgaaatggcataaaggggaggagcagagtgcctgtgtagggagctaaagtaagaccctcatgtcctggaggagtttgcaaaggagagggtagttaaatcgttgcatccttccagaaatggaaatcagaagcaaaatatagggtgtgttttatgtaaaccagatttattttgcaagtttaaaagaaggggaa

SEQ ID NO: 273878 - DNA, 528 bp, Homo sapiens
agcaagttctttacgacctgtatcttgtgctgacctcctgtcttatctagtgacttcaaatgccctaaccatctgggaatgaagcccagtaggtttcagccttatttttacccagttcctatttaggatggagttgctctgattcaaatagccaatagtcatggatatgacttgtgaatyctcatccaaataccctcaccgagcgggtatgtgggactcccaacacaggtaacctttgcatataatgaattagcctctctcttatgcaacaagcatggtactagccctgttttatgagaaaatagtgattcagaccattttcacatttcaaaaaagttgttaaaataatttagcaaatcattttaacatttcaaaagtgcttttttgcatattttaaggcagagtaggcatggattcctgtgtactgagtccatacaaatctgggaagcaggcattactaacccacctgaaggtaaagaaatagagcatttatcatgcactggtctctgtctcttacactgaactatg

SEQ ID NO: 273879 - DNA, 506 bp, Homo sapiens
agccagatggaatagtggctcgagaccttaagttaaattacattcaagaaagataaagggtgattacaaaattcaccttttgactttccacattaatttcaagatgcatgtaaatttcagtaaaatgttttagactggaagaagttgaagatatattcacctctctccatctctactaccagtgcctaatctatgtcttacctagactgtgccctctaaactggggagattaggcttctctatgtacttaggagcaagaaaactaggaccaatggatggaagctttaaaaacagaattctgtatagaatcagagagagtttctcacagtctcagatatccagagataaaatgaatatctttggttggatccatgagccatatcccttgagatgctgtatcatggatgagacacctacaacaaagaagggacyttatgaagaagaattcgacagaagacatggctggatgattttagccttttacgtctcttccaattttgaaattc

SEQ ID NO: 273880 - DNA, 592 bp, Homo sapiens
tgaacattaggttaagtggagattgatgagaaggagtctaaacaatttttaaaagttccaacaattggccaggtgtggtggcycatgcctgtaatcccagcactttgggaggctgagacggatggatcactcgaggtcaggagttcgagaccagtctggccaagatggtgaaatcctgtctctactaaaaatgcaaaaattagctggatgtggtggcacacgcttgtaagcccagttattcgggaggctgaggcaggggaattgcttgaacccaggatgtggaggttgcagtgcgctgagatcacaccactgcactcctgtgtgggcaacagagcgagaccctgtctcaaaaaaaaaaaaaaattccaacgtaagtttatttctaaatttttcctttcctgtggtatcctacttgttctgaatgtcctttgtgtaacccagggtttctcagcctcagcattattgactatttgggaccggataattcttgttgggtggggcctgggggctgttctgtgcattgtagaatgtttagcaacatccctggcctcttcttaccagtaacaacccctctttctacaatttgtgacag

SEQ ID NO: 273881 - DNA, 571 bp, Homo sapiens
catctcttaactaagaatctttccattttagtgagagggtattcaaagataatttatgtttaaaaaaaaaattcaagagacaaggtattctttggactctcctataagaataatttagtcaacgtgcccaatcctaaattatatgacgtatatgtatccagaacaaaatatataaatgaactaaaggatgccaaaaaaatgaaaattaaaattataaaacagaacgggctgggcgcagtgactcacacctgtaatcccagcactttgggagaccaaggtgggcggatcatgaggtcaagagatcaagaccatcctggccaacatggcgaaaccccacctctactaaaaatacaaaaactagccagtcgtggtggcgggcgcctgtaatcccagctactcggggagccgaggcaggagaattgtttgaacccgggaggtggagggtgcagtgagccaagatcgtgccactgcactctggcctgggtgacagagcaagactctgtctcagaaaaaaaaaaaaamaaaaacagaatgatcctgtttttgttttatatgcaaatacttttttgct

SEQ ID NO: 273882 - DNA, 624 bp, Homo sapiens
ctatgattgcaccactgcacttcagcctcagcaagagagccagaccctgtctctaataaataaataaataagttcaaatatcaaggatctgagttctgataattgatcattacttctgatattggtggtacagatacacaggyaggcagccactattgcaactcccaccaccgttgttgcaaccacctccacatcttactaaagtgacttccaggagatttaaagagtaagcacctatccccgacaccttcatttttccctttttctccttttgggaaccatacatataaggacaaggacattcaaaagcaaccataaatatagggatatttagacagtcaccacactgcataaatgctcagagaaaaatgcagtctcaaaaatacctgagaagacattaactctgtgcctttggctgatccccagcacagaaacaccaacagcaataaataaaataaagcaagccctgggaaagaaggagaatctgatctccagagctaccacattataagaatcaaatgtccatttttcaaccaaaaacacaccaagaaaaagaaaaacatggcccattcaaagggaaaatattaaccaacagaaactgttcctgggtaagaccagacagca

SEQ ID NO: 273883 - DNA, 624 bp, Homo sapiens
ctatgattgcaccactgcacttcagcctcagcaagagagccagaccctgtctctaataaataaataaataagttcaaatatcaaggatctgagttctgataattgatcattacttctgatattggtggtacagatacacaggtaggcagccactawtgcaactcccaccaccgttgttgcaaccacctccacatcttactaaagtgacttccaggagatttaaagagtaagcacctatccccgacaccttcatttttccctttttctccttttgggaaccatacatataaggacaaggacattcaaaagcaaccataaatatagggatatttagacagtcaccacactgcataaatgctcagagaaaaatgcagtctcaaaaatacctgagaagacattaactctgtgcctttggctgatccccagcacagaaacaccaacagcaataaataaaataaagcaagccctgggaaagaaggagaatctgatctccagagctaccacattataagaatcaaatgtccatttttcaaccaaaaacacaccaagaaaaagaaaaacatggcccattcaaagggaaaatattaaccaacagaaactgttcctgggtaagaccagacagca

SEQ ID NO: 273884 - DNA, 525 bp, Homo sapiens
actagttatgaagctaaattctcacaataattctstaagtagaaaagatagatgtgctccctttttatgtaagaaagaaaagaaagtgctttgtcgaagattacgcaaaggttggtggtagcagggccggacaaggatccaggtaacctgaactccagcccagagtgtttgccacaacagcaccaggttctcaggccggcctgcacgggtacagggccaagagaaagcctcagacaaacgggaaccgcccttcccaggcttttggagcttgcctccttcctcccctcagctctctcgttacccaccgccttcctatggagcaacagctgcagcatcggaatagcataagcggccgtcttcccggagcccgtgcgggcccgagccaggaggtccttcccttctagggccagtgggatggccttctcctggatcagcgtaggtcgcgaccagcccagatcggtgacagcctaggagaccaggagtgcggtttaagcggcgtgaagagcgatggcgcgccccgcagag

SEQ ID NO: 273885 - DNA, 525 bp, Homo sapiens
actagttatgaagctaaattctcacaataattctgtaagtagaaaagatagatgtgctccctttttatgtaagaaagaaaagaaagtgstttgtcgaagattacgcaaaggttggtggtagcagggccggacaaggatccaggtaacctgaactccagcccagagtgtttgccacaacagcaccaggttctcaggccggcctgcacgggtacagggccaagagaaagcctcagacaaacgggaaccgcccttcccaggcttttggagcttgcctccttcctcccctcagctctctcgttacccaccgccttcctatggagcaacagctgcagcatcggaatagcataagcggccgtcttcccggagcccgtgcgggcccgagccaggaggtccttcccttctagggccagtgggatggccttctcctggatcagcgtaggtcgcgaccagcccagatcggtgacagcctaggagaccaggagtgcggtttaagcggcgtgaagagcgatggcgcgccccgcagag

SEQ ID NO: 273886 - DNA, 525 bp, Homo sapiens
actagttatgaagctaaattctcacaataattctgtaagtagaaaagatagatgtgctccctttttatgtaagaaagaaaagaaagtgctttgtcgaagattacgcaaaggttggyggtagcagggccggacaaggatccaggtaacctgaactccagcccagagtgtttgccacaacagcaccaggttctcaggccggcctgcacgggtacagggccaagagaaagcctcagacaaacgggaaccgcccttcccaggcttttggagcttgcctccttcctcccctcagctctctcgttacccaccgccttcctatggagcaacagctgcagcatcggaatagcataagcggccgtcttcccggagcccgtgcgggcccgagccaggaggtccttcccttctagggccagtgggatggccttctcctggatcagcgtaggtcgcgaccagcccagatcggtgacagcctaggagaccaggagtgcggtttaagcggcgtgaagagcgatggcgcgccccgcagag

SEQ ID NO: 273887 - DNA, 525 bp, Homo sapiens
actagttatgaagctaaattctcacaataattctgtaagtagaaaagatagatgtgctccctttttatgtaagaaagaaaagaaagtgctttgtcgaagattacgcaaaggttggtggtagcagggccggacaaggatccaggtaacctgaactccagcccagagtgtttgccacaacagcaccaggttctcaggccggcctgcacgggtacagggccaagagaaarcctcagacaaacgggaaccgcccttcccaggcttttggagcttgcctccttcctcccctcagctctctcgttacccaccgccttcctatggagcaacagctgcagcatcggaatagcataagcggccgtcttcccggagcccgtgcgggcccgagccaggaggtccttcccttctagggccagtgggatggccttctcctggatcagcgtaggtcgcgaccagcccagatcggtgacagcctaggagaccaggagtgcggtttaagcggcgtgaagagcgatggcgcgccccgcagag

SEQ ID NO: 273888 - DNA, 661 bp, Homo sapiens
tatggtatgtgaattatgtctcaataaagttatttttttaatgtgtaagaaaaaatgtaactgaacttatcactgtacacaaaaatgatacaagttgtaatccattaatttcaagatgcaaaaataaacacatacatttgggaaaaataagttgtacaaagaaaaaaagtaaaaaccaaaggaaaattagtttttaggtgttaaacgccctgcccttaggaaacgatatacttaaatagggttctgtctgaaatatgaagccttcgaggtctatgcctcgaatttccccagttgggtaggaggtaccctatcccagggcacaaagaatgagggaaataaaccaactactgacgcctatcaatatgacattggctaggtaggggggtrattaaaaaggcaagacctagcaaaaacagtctgctgtttctcagtaaataagtctttgagggaaaaaaacccacacatcattacatgatccttaaaccctatgagtgttagctggcaaccattttaaaggacaactcatccactttctttttttcagtttcagactcaattcttctgatgaatcatgaacacatttgctacagacctatggctgttgtctcatgcctgcaattatttttgttttagtagtaatacaaagaactcatgtacagag

SEQ ID NO: 273889 - DNA, 346 bp, Homo sapiens
ccacatccagcctgccaccagtttctttgcatacttctttcctaggcttgaccaagacctttactttcttctgtgtacagctcagcattgaaaaaaaaaagtttaggctgggcacaatgggtcacrcctgtaatcccaacacttagggtggccaaggcgggaggtttgcttgaacccaggagttccacaccagcctaggcaagatggcaagaccacgtctctcaaaaacaatttttgtaaaattagccaggtgtgctggtgcgggcctgcagtctcagctagtgagaagactaaggcaagaggaacccttgaacccaggagttcaaggctacggtgagctgtgatc

SEQ ID NO: 273890 - DNA, 346 bp, Homo sapiens
ccacatccagcctgccaccagtttctttgcatacttctttcctaggcttgaccaagacctttactttcttctgtgtacagctcagcattgaaaaaaaaaagtttaggctgggcacaatgggtcacacctgtaatcccaacacttagggtggccaaggygggaggtttgcttgaacccaggagttccacaccagcctaggcaagatggcaagaccacgtctctcaaaaacaatttttgtaaaattagccaggtgtgctggtgcgggcctgcagtctcagctagtgagaagactaaggcaagaggaacccttgaacccaggagttcaaggctacggtgagctgtgatc

SEQ ID NO: 273891 - DNA, 346 bp, Homo sapiens
ccacatccagcctgccaccagtttctttgcatacttctttcctaggcttgaccaagacctttactttcttctgtgtacagctcagcattgaaaaaaaaaagtttaggctgggcacaatgggtcacacctgtaatcccaacacttagggtggccaaggcgggaggtttgcttgaacccaggagttccacaccagcctaggcaagatggcaagaccacgtctctcmaaaacaatttttgtaaaattagccaggtgtgctggtgcgggcctgcagtctcagctagtgagaagactaaggcaagaggaacccttgaacccaggagttcaaggctacggtgagctgtgatc

SEQ ID NO: 273892 - DNA, 577 bp, Homo sapiens
ttatgagagcactctttgccaggcaatgcaccatgtgttttatgagtgttctctccttgaatcctcatctcaaccctcttgggtagctattactagctagatattattttatcctttttaaataaactgaggtcaataaatttttagcaatctgcctatggagatattctacattaactgtacacttaagatttaacyccatactcaaaagaccattaccttaatcctgctttatgaacctatggccaaatttatgtgtgctgtagtgtgtcaaggaaatgagaaaattagtgaatggacctgattctcattctccacttccctctctgttatttcacctgtttcgttgctagccttttgttttcctatcttgtttctattcccaatctaagtttgatttttgtattttgactcatagtgttctttttggacagatatttccacttttcaacatttttttttcatgtatgatctcgcaaacatgtattagcacttatgctaagccctggcatcacagatatgaaggagatatcatgcctactttcaaggaggtcacaggccatggacagaaaaagac

SEQ ID NO: 273893 - DNA, 602 bp, Homo sapiens
tgtggaataaacattgaataatatgtattttggtgtttaaaaattgtaatttatttggaacatcttgttgtgcattatcttttctttctagaaattttgaaatggtttttaaacatcagaaatgaattttggatcttcatcccctgtgatcaacagatgtttatctgttaaaagattgttggaagtttccttgtcatggtctggacataatgcagtgccacctggataatacaggttttccagaatgtattacgatcctatgctgtttttctcaacaaacctgagacaatatgcagtggattaagagttgtrcggcttggattgtagtgaaggcctaccaccaaccaatccaaagactattcagagtctttttccccccacttggttctgacttaatcttgtttgtaaaactggggtgggtttttcagaagggggtgagatgttgtagcttcagtagttctcaagaggagacaggaagaagaaaggaagacaggacctctaggaaatcgtgagggcattttcagctgtcacaatgggtggtgggtggtaggtgttaaaggcagttgaaagcctgagaccagatatgtcaaacttcccacaaa

SEQ ID NO: 273894 - DNA, 602 bp, Homo sapiens
tgtggaataaacattgaataatatgtattttggtgtttaaaaattgtaatttatttggaacatcttgttgtgcattatcttttctttctagaaattttgaaatggtttttaaacatcagaaatgaattttggatcttcatcccctgtgatcaacagatgtttatctgttaaaagattgttggaagtttccttgtcatggtctggacataatgcagtgccacctggataatacaggttttccagaatgtattacgatcctatgctgtttttctcaacaaacctgagacaatatgcagtggattaagagttgtacggcttggattgtagtgaaggcctaccaccaaccaatccaaagactattcagagtctttttccccccacttggttctgacttaatcttgtttgtaaaactggggtggrtttttcagaagggggtgagatgttgtagcttcagtagttctcaagaggagacaggaagaagaaaggaagacaggacctctaggaaatcgtgagggcattttcagctgtcacaatgggtggtgggtggtaggtgttaaaggcagttgaaagcctgagaccagatatgtcaaacttcccacaaa

SEQ ID NO: 273895 - DNA, 561 bp, Homo sapiens
ctgctaatcccagtaaccaccccctaaaccttttctaataaaattacagccttaaagctagcaccgggagacagayttgaggttgacactcctgtctccttgtaagtcaatttttaatataaagcttttcttctctcaaaaactccatgtcacggtattggctgctagttcattgggcagcaagcctgctttgcttgataacgtcaattgaacttgtgttttatcaattctgtaccttttatcacaaaaattaaatgataatctattgcatgtttatgtcaaacaaagaaatttatattaacgatggaacattatttgtccctttactaattgcctgctgtaaatcaggccctatgccaggaactttacatacattataccaattctcatcccacaagttatagggtgccccacccattttccagaggttcacagagattatgttccctgataacaacagagctggaattcaaccttaagtctgtctgactctaaagatggtcttattctcaatgcaatatgctgctgcaaacattcctaagtgtatagccaaaagttaag

SEQ ID NO: 273896 - DNA, 513 bp, Homo sapiens
actttacatacattataccaattctcatcccacaagttatagggtgccccacccattttccagaggttcacagagattatgttccctgataacaacagagctggaattcaaccttaagtctgtctgactctaaagatggtcttattctcaatgcaatatgctgctgcaaacattcctaagtgtatagccaaaagttaagtttggattccaagttttatatataaaggccacttttattttcagarttgctattaagaaaaaaaatagggtgggggaggaaatatgactagagaatgaggtcccatcaccaggttgtatggttatttattacaaatgctgattttttttctctctttccattatttacttgttcagggagctagaaacaggaaagcagccctagcgattcagcagttatttaaatagaacagtgtagggattgtgtactcagtccaccataattggaaactgttcctaccgtgcaccaatatttcaaaagcaatacaacccaat

SEQ ID NO: 273897 - DNA, 577 bp, Homo sapiens
tctccacaggtagataaggaaatcttccctccctacttctaagaaccatttcatttcctgctccaggatgatcaaaaatgaaatgatccattcctactacrtatgtctcagccagagagatgtaatctgaccactgcccctaacttaaataggaaaatggcacttgcatatgttaaagtttcaaaagtttggattgtccattcacagcaccatgtggcatcagccataatcaatccagttccttgtagctgcctttccttcagcctgagagatatgtggcctgactttcaccatactctaaggggaaaacaggctgtctattccaaagcctttatttcacatgaggaaaatgaagctcagaaagggcttgtctaaggcacccagcaagtcaacagcaaagcccagactagaactctggttgtctaaatcccaatcaagcattctccttcttttcatatgttcctgaaatctcaataatggaaaactttaattttatatgactataaatacacatattagtagtcagcaacggaacagatatgaaaaccccaggaaagcactgaacatatggaaacta

SEQ ID NO: 273898 - DNA, 577 bp, Homo sapiens
tctccacaggtagataaggaaatcttccctccctacttctaagaaccatttcatttcctgctccaggatgatcaaaaatgaaatgatccattcctactacgtatgtctcagccagagagatgtaatctgaccactgcccctaacttaaataggaaaatggcacttgcatatgttaaagtttcaaaagtttggattgtccattcacagcaccatgtggcatcagccataatcaatccagttccttgtagctgcctttccttcagcctgagagatatgtggcctgactttcaccatactctaaggggaaaacaggctgtctattccaaagyctttatttcacatgaggaaaatgaagctcagaaagggcttgtctaaggcacccagcaagtcaacagcaaagcccagactagaactctggttgtctaaatcccaatcaagcattctccttcttttcatatgttcctgaaatctcaataatggaaaactttaattttatatgactataaatacacatattagtagtcagcaacggaacagatatgaaaaccccaggaaagcactgaacatatggaaacta

SEQ ID NO: 273899 - DNA, 577 bp, Homo sapiens
tctccacaggtagataaggaaatcttccctccctacttctaagaaccatttcatttcctgctccaggatgatcaaaaatgaaatgatccattcctactacgtatgtctcagccagagagatgtaatctgaccactgcccctaacttaaataggaaaatggcacttgcatatgttaaagtttcaaaagtttggattgtccattcacagcaccatgtggcatcagccataatcaatccagttccttgtagctgcctttccttcagcctgagagatatgtggcctgactttcaccatactctaaggggaaaacaggctgtctattccaaagcctttatttcacatgaggaaaatgaagctcagaaagggcttgtctaaggcacccagcaagtcaacagcaaagcccagactagaactcwggttgtctaaatcccaatcaagcattctccttcttttcatatgttcctgaaatctcaataatggaaaactttaattttatatgactataaatacacatattagtagtcagcaacggaacagatatgaaaaccccaggaaagcactgaacatatggaaacta

SEQ ID NO: 273900 - DNA, 498 bp, Homo sapiens
atgaacctgtgcacactcataaaaagctacactacacccacacacttatacactcatgcacactcacactcgcaaacatgcacatgtgctcactcatacacatctacacccacacgctcatatactcacactctcacacgtgcacatgcacacactgatacacagctatgcccacacactcatacacacactagcactctcacacatgcacatgtgcacactcattcatacatagctacacccacacactcatacacatactcgcactcacacatgtgcacactcacttataaacagttacacccacacattcatatattcccacacttgcatacatccacacatgcatgtgctcacattcatacacagctactcttatacacttgaactctcacayatgcacatgtgcaccctcataaacagctacacccactcatacacacttgcatacactcacacatgcatgtacacacacactcatgtacagctacacacaca

SEQ ID NO: 273901 - DNA, 560 bp, Homo sapiens
gcatccaaacccatctctgctggctccccactgtggctgcagtaagatccagagatcacagtccccaagaggggattttatattggataatgttcaaggtctgtgaaagtttgttcttgtccctaaagatgtttgctattccaaacatcaaataaaattgaacacccatatataacatgttttcctctgtgagaaatccaaagaaatggcacctgctcctacagccacttgacgtacatttaattttcttgggaaaggcacagccaaaaccaaaatacttaacrtgtgcatgtaaaacagcatggaagtgctatgaacttgatgaccaatgaggaggaaaaggagacaatttacaactcttattaagagcatcataaatgtttgctccaaacaaaaatcagaaccttttttacaagttaaaggtaagtttctagccaagaaaaaaaatacatgaatatctacaaactgaggagttctctacacactctgtatgttacaaacatttgtgttttgtctaaaagaggtagttacatatgtggggggtggatagtcgtacgcag

SEQ ID NO: 273902 - DNA, 544 bp, Homo sapiens
aggtttttatgtaaagagagattttggagagacaaaagatgccaggcatccaaagtctagttgcatttcataacagaaaaaaattagacataggtgagcttttctcctcctcaaaaattttaggattaggccagatattagatctagaaaagaaatgagagggtatctaattctttgagttccatctttgggttctgatttgaaaatgatyatgtttgtcctaattacttgcatcctttttaaatgcaatattttaattactttttaattttaaatgacactaaagaaaaatgtggggttttttttaagaagtaaaaggggcataattttaaagcatttgaaaaacactgatctagttcagctcccttaatctaacagtggggaagttgagcccagcaagaagtgagtctggaagctcactcacggcaaatgacaattattttatgaaaataccagtaataattataataatggatttattttattgaatatttactcctatgaccagtttggataggcactttacataagtattttcaattct

SEQ ID NO: 273903 - DNA, 514 bp, Homo sapiens
agttagaagacgtattttaaattggaggcttccttggtattccatgagatttccatctctcatttgaacagacatcaataacattgaagactctgtctccgtagtgcctttacaatttagcacttgtaaaaatgagactttccagctcattaacttgcttacgcaaatacagcccagaaccagttaatcctgaaaagtgactactctgttttcatcttttaawgacggttttatgcctggacttcagcctaaactaaataaaggctcttgacagagactactcatttcctacctgggctacttaaaaaaaaaatctacaggaaaaaaaaaaaatccaatacagcatggcaggttctggtcatttcttttctgaaaatggcagaggacatcattattcaatccaaaggcaaggctgcagcagccaagtcaaagtggttctcgatcagcatgggaatagcaaggtgctttagatgacattcctgagagccataaccagactggggcccctcattat

SEQ ID NO: 273904 - DNA, 578 bp, Homo sapiens
gtgatatcaattaggagagaagagaggagcttatctttgtgtgtgtgtgacagatatcacaaaagctctgtgtagaagagatctcctgggttgaaaatcctagagaagagagcccctgagatctatagccaggtggcactcctcagcctcagcaaggtgctcttagggaaaggaccatcttggtctcccattctgaagtccattttctagtctttacaaagtgttcaaaataaatttgaaagctgcttgaataatgtgaataaataggcacttactgatagatagaaatctgtattatactgcagaaatagcactggagtgggagttaagaaacctccttctgctcccagtttgccatttatttccaatgtgaccttggacaactcacttttctctgggtctcagtttctctatttgtwaaataagacattattggatgagatgaccactcctcccagtttccccaggactgttccagctctaaaattgaaagtcccactgcgtggcagccccctcacagggaaaaccagaatgattggtccccctaacattaaggttatgtgatgtggatgttctct

SEQ ID NO: 273905 - DNA, 515 bp, Homo sapiens
tgcactatagtaggcttgacctgacctaactggcctaattagctactgcctctcaaaacattgtgagcagaaggctgggctgagctggttaagaggctcacaattaataccytcaaaggttcattttccgaggcaaatctatacaaagctgtataataccacaacaatcaaaccaatgccctgatttcacacatgtgtttacccaggaaaaaagctcaggcagtattctaatgagaggctttatgctaagaaagagcataaagactgacctttgattattatacaagtttaattatttatttatttttgaagctaattttatgattcttaaccaagtggctgatattgtgaaggggagttgcattagcacttccaggacagggatcagtattggcaaactggctacctttagaattccttggggatgcagtaggaatagccttggatttggggcagaaaagcagggataatatactggctccacaaattattcagcttgtaccactcagttgttg

SEQ ID NO: 273906 - DNA, 515 bp, Homo sapiens
tgcactatagtaggcttgacctgacctaactggcctaattagctactgcctctcaaaacattgtgagcagaaggctgggctgagctggttaagaggctcacaattaataccctcaaaggttcattttccgaggcaaatctatacaaagctgtataataccacaacaatcaaaccaatgccctgatttcacacatgtgtttacccaggaaaaaagctcaggcagtattctaatgagaggctttatgctaagaaagagcataaagactgacctttgattattatacaagtttaattatttatttatttttgaagctaattttatgattcttaaccaagtggctgatattgtgaaggggagttgcattagcacttccaggacagggatcagtattggcaarctggctacctttagaattccttggggatgcagtaggaatagccttggatttggggcagaaaagcagggataatatactggctccacaaattattcagcttgtaccactcagttgttg

SEQ ID NO: 273907 - DNA, 518 bp, Homo sapiens
ggacagcctgggtaaaaattctaggtctgccatccaatagctttgtgatattgggtaatcacttaactctgtgtctcggcttccttgtatgcaaaatggggataataacaataccctttcagaggagactgtaaaacttaaattagttaatatctgtaaaagcccttagagcaatgcttggcatgcaataagcattgcatagtgttagctttgttatacttttaaggcatgggttttgcttaggagatacatgtctagatgcatatctaagagatcccagttcactacacgttctctgcccattggaaggcagaaatgggcaccaygatgtgataagagtgccccaggaaactgggcctcttggtagagttatttaactgttctggggctgctaaagtgggagttcttctctccagtccctagcatacagcagtagtgggtttcccctaaaatactcacatggggtgatcgaagatttcttgctcttggctgtgtggcatccaagttttgtgccctta

SEQ ID NO: 273908 - DNA, 263 bp, Homo sapiens
atttacaagaaaaaaacggacagggatctttactttctcatttcagcaccttaatagcctttcagaagtattgtattgactgtcctgggggagaggcagccgttgtatatttatcttaagattgcccactttagtagttcaaataggataagagtcccttaggcgtgacttaccttaccttcttaaatgcttaacacacacacacacagacacacacacacacacacacacaccctyccttgttaagattattttatttatta

SEQ ID NO: 273909 - DNA, 555 bp, Homo sapiens
tttagctcagccatttggagaggtagccatgtgggaaggccgaaatggtcaatcagtagagctataactctgttttctgacagatgacatgagagacaggaatataataggaccagtagtagacccagtctctgacctgggtgctacgactcctgataacttcagtcttctgctagagagacctgcccgccacctccctacataccatctgacattcctaatgcaccatgcctagtaagtggcagcattaccattgaccttccttcacccaaatctctgctgagtgaactttaaactacattgcctttgccagtttgattgtcacctctttctaagtactagcgagtgggcagccccaagctgaagtctcattacagcagaaattgatgatgccctgactctgmagctactatgggaaaagtatttgaaacagttattgtgcctggatgcaactcaccaagttgacttctttcttagccaccactttgcgaagtagaaacgaatgcccttctcctgccaccttcatcctcaagacccaagacaaagaggagaaag

SEQ ID NO: 273910 - DNA, 606 bp, Homo sapiens
cagccatttcctaaggatgcagaagatcaggcctagagcccacagtttctgtaacaggttcactatcagccctgtgttactgatatgtcagcactcagtgcttaatcaagtttggtggccatttggaaaagacaagctgaggaaagagcaagccctagatttcccatcaagaaacccagattctaaagcacacccccatatattatccatgaggactcaatgggaaagtgagggaagagctttgtcttttgttgtttaattctcaaaacacaccccatcacaggaactccataaaacaaagaggagggactagagagccagggatggaagaaaaaactgctggtttccttcatgaactagctatggcaactatataggamaaagcagtgaaaatgcttcgtacactgcacactgctgtgtaagcttaagagctctgtgggacaaaggttagcccccaaatgccataatttgaagttgagtaaaaaatttgacaatctcacctggaaggagccacacaggattttcctgtgtagaacaaaacctagtttatacaacgcacatgctgcgtcacagcccctcttctctggtattgggacacaagagatt

SEQ ID NO: 273911 - DNA, 565 bp, Homo sapiens
actcaggtgtaacctcctctggaaggtgactttgctgtcaccttctccacatcctcccaaaactctaccactctcttctgtgttatatttgtattttgtacatatacttggtcactggtctaatcaaacagcattacaatctgttcctcataggtcttgctcctcgattaaatttccttcatttattttataaacatttattagacacctgcartttcagacttgcactgtggagtccttgagaacagacacaatgttttattcatgtcattctcttcaaaacttgccacagtgcctggctcctggtaggtgtttagtaaatatttgctaagctgaattcctatgccatctctgtttgctcttatgtatgatggcttctattggatctgtagtgagataatttaagagtagaaatatgtttagtggctaaacttcctcaaatataaatcactaactaagaaagggggaattctgaatataatattttttattagcatagattcagccacttttccgcagatatgttactaaaaaatattcagtgtgtcataggttagcaaccttc

SEQ ID NO: 273912 - DNA, 490 bp, Homo sapiens
ccttgggaattaaaatgtgtgtttgttgacattcaaaacataaaagattataaaactgatatattttagtgaatatatagtttccccacctagcttatcttctagtgctatattatcattcatgaccagagcatagtttctattcagattgatcagactttcagaacagttgaaggaagtagctttccagtgattcttcaacaggacaacataatacattagaaatagttggaatatggaattaggttagtagttgaatcccagttcatttatttactagctgcgtagcttagaaaaatgttttaagctctttgagtcttgggtaaaataaggttatagatayttccctacagttctttgtatgtatgtatgagtgtgtgtgagggcaaagtgaaataataagtataaaggtgctttataggtgcttacactttccattgatgaaacaccaagaggcaagactgtcaagttcagatgtactatggccgga

SEQ ID NO: 273913 - DNA, 514 bp, Homo sapiens
agtactcactgcagtggctgtagctttctttaactccttgtgttgactggaagaccacacttctaagtgactaggaaagtttcccaggcctgtatcctctctctccacctgctcttacttttcctgtggcaacaagaagacagaaagactgatgtcaggttctttctcaaacaggacattaaactgcttggactcaataagagtcctcaactgtgtagtkccaccggcattatctccaagggaacccaaataatgaatgacagtaccttacatattactagtatagagaaagaactggatttattcttaccaaatctaaatatgagacatttctttcaagaaggaccttatattgggaaaaaaaaaaaaagagttgagtaaattagcagatgatctggtaagaaatgactcaatttacaaatacagttgaatgagaatttcccacaccactttcatggaacaaactctttgtgctgcagaatcgataacccatgctaagtgtttaaatggaatt

SEQ ID NO: 273914 - DNA, 514 bp, Homo sapiens
agtactcactgcagtggctgtagctttctttaactccttgtgttgactggaagaccacacttctaagtgactaggaaagtttcccaggcctgtatcctctctctccacctgctcttacttttcctgtggcaacaagaagacagaaagactgatgtcaggttctttctcaaacaggacattaaactgcttggactcaataagagtcctcaactgtgtagtgccaccggcattatctccaagggaacccaaatratgaatgacagtaccttacatattactagtatagagaaagaactggatttattcttaccaaatctaaatatgagacatttctttcaagaaggaccttatattgggaaaaaaaaaaaaagagttgagtaaattagcagatgatctggtaagaaatgactcaatttacaaatacagttgaatgagaatttcccacaccactttcatggaacaaactctttgtgctgcagaatcgataacccatgctaagtgtttaaatggaatt

SEQ ID NO: 273915 - DNA, 594 bp, Homo sapiens
catgcatacactgaatctaaagaagttgatctcatagaagtagagaatagaatggtggttaccagaggctggaaagtgtagggaactggagggataagcaaagattgatcaatgggcccaaggtagagttagataggaggaataagttctggtgttctattgcactgttgggtgactatggatattgcatattttaaaatagctagaagtgaggattttgaatgttcttaccacaaagaaatgataaatgtattaggtgatagacatgataggtaccctaatttgatttttccgcaaggtatacatgtatcacaacatcacactatatcccataaatatgtacagttattatgtgtcaattaaaaacaaaataaaatgaatggtaaagctttagagatacagagtccatttactttagattatgaatagagcaaasagttcccaggccaggcaaataattttctctgaatttagctggacaaagaagaaagtcagcaggcagctgccgacagcatcgattcaaacagtgttctgaaacatctctgaataaaaaaaaaaaaaagtgtgcacgtgtatattataagatgaaattaa

SEQ ID NO: 273916 - DNA, 558 bp, Homo sapiens
gagacaggtgaggaagctatagaaatagccaggtgtaaagtgacaatccagattgggataaataggtgggataaaaaacagtagtatacagtattcctgactatacctaggaaagtattcgtcatatccccaggtaaaggatggtgtctgttataaaatagaatcaagagagtacaagaaacacctacccacccgcacctacacatacacacaaccaactctctctcaacgaycatgggggctgtgaactcttctgaggcttctcctgcactatgtgctcattcctgggactgaatttgactctggccttaaaagacacatggaaaatctcacaggacctcaatgttgtgggtagggggtgtgtccttagttcgccagctccaaaaagtcagggggctctattgcttcttagagttgataaaattatccttgagaagggttgacagataatatactggacatgcacttacatttgaatttcagataaacagataagttttagtacaaacaacctaaatattgcagggaacatatttatcctaaaactataatcctaaa

SEQ ID NO: 273917 - DNA, 598 bp, Homo sapiens
taaagtgtcttttgtggcttcttatcagcgaaccattaaagactcatgaatgctccctgggtaaaacctttagcactaattggtttaatattttatttttttgtggattatacaaagatatcttcacctagcattcatttttctctgtgttctctcccaattttaggatagttcatgccttttgtttgggcccacttccccatatgagtgatggttgaactttcctgggtaggcatgggtcactattacagacacactgcttactcttctttttctctggaatgtctttccctgcctgtctgatctaacctccactcaaaattaataacccaggttatcaagcgtcagcccctccaatatatctgtcccctcagcccactctaattgagaccctcctttatgcttccatagcaccatctgtatattggacacaagatatgtcagaaatttgtcaaaacacttatcaaattgagctgrcatcatgggttgacgttcctctttttccttattaatagactaaagaatatttgaagaaaagtccaaaatcgaattcaagtccatattctctttgccaagtatagggtttggtgcaatgtgc

SEQ ID NO: 273918 - DNA, 647 bp, Homo sapiens
agtgcatctccaaatctgacagacatccaagacaattcactcgaaattttgttgtcattcttttttctttcttctttaaagtgccagtcctccccaagattctgggaaaggttctgattttgtcattttaaatctgttctttctctacaaataagatctattcatttgcaattgacaagtcttggaaaatacaaaagaaaaacttagactggctaatgcatttttaatatttatgggcacaaagcacatgtgtgtgtttggtctactgcctagtgcttggtagaactcacaatgtgaaataatagtcacttgaaaaacctaaaacttgtaaggaacagaataaacactttcccagaatactctgcaaaatggttagctctgtattaccctgtgcagggtagatttggaagtgctgcatgaagctgaaataaacacctgagttataaatagtgagatgatcaacgcagttgagtaaatgttgagatccagaaacatctggtgagtttttactttctcacctgccatctctctgctgtcgtcttcttccaaacagtgctcaaattkgtttcttctaagctggggggaaagaaaatctcctgagcggttcagcaaatatcccagtgttgctgacaaaaccaaataacgat

SEQ ID NO: 273919 - DNA, 633 bp, Homo sapiens
ttgtctttgttgtcaactgttaggaaaaatcagaaagcacaagagtcaggttggagaggtcctcagtctccgggcacctctgagtattttcctccattgaaaatttcaattacatgactgcttgacccgcctaccttaatggaagggtcatgaacaggcacagaattagaacctgcacgaggccccattttcccactgacccagtgtgcgtccacctcgggccggcacaactgtgcgcttttggtttcatctagaaaggggtgtcccacccgggtccccaggactgctatgaatcactgatgagaaatatgtagasacattctgcaaactgcaacgtcttattttaaaattacgtaatcgtttctagctgtataattactgggaaatatgtttcattaaccagcattaggtgttgataaaagactccgtagaaggcaaagctgaatgtgtgtatttctgccatcagcaccgccagctattttgcagcctcttgttcatgccctgacaggaacatcctataataatttcgctccaataaaagcctcaccctggttttctcctgatgtagaatgaggaagactttcagagaatgaattgcactcgatggcaaaccaagggaaatgagctctggaa

SEQ ID NO: 273920 - DNA, 561 bp, Homo sapiens
gaagcagagtgcatggtggggccatctaagtatgtttttctgcacaatgtgaaccccggctgttcaaagctaagagccacccactgcagggcacagtgctctggtgagaggaggtcacctcgaagtgggccccccgcatggtgctgccaaatgcacgcacagattacactttatgaaaggtttcctttgctttgaayagttggctgtctcagaaaaactgcagcacccactggttggaaattacatctgaactgcagtggagatgcaggggagacatcgcacaggagcgtcagccatgggacagctgcacatgcctgcagtgtcatccctgccagctctcagaggcacctgcttctgccctggggatcctgctgaaaggttcttgagctgctgctcagcagggacacaggagagggccggatgtgaggggtagacactataagcagacctgcaggcccagccatgccacgtgcagaccactgcccaccctctgcagatgggaaggagaggcccagggaggctgcctgtctgctcagggtcacacaacaacacccaaaggca

SEQ ID NO: 273921 - DNA, 582 bp, Homo sapiens
gacacacctcaggacagagaaattgaagttggtggggtttcttaaagctcttgctgtaatgagcgccacttggaagtaatggcttaatcgttattaatttctttggtatttcctatgataacattaatcacagcaaactcatttgatgtaatggagaccaggaacccccctggaacgttccccagcaattccgtgctaattaactgaagcatcttgtaaaactgccaccctgttttacgattaagtgcatttcttgcacactttgattaagacacaaatcccaagccaataaaaaaaaaagtgggaaagaaagaaagaaaaaaaacccaccgttttagaatgcagtaatgagagcattggtaaagtaacagagacttcactgccagaggcgacaatagctactacttgaagtgaagcaaaaagaactcccyagggatggtgtagactgagaaaccttcttctgtaccttaatttatccactgcatatgtacagaagcaattttaaaatgcatattaaacactccagtgaaagaaaagagaataattcacaaagatgtcagttctgcatacccaagtgagaac

SEQ ID NO: 273922 - DNA, 584 bp, Homo sapiens
tgggggctgccaaatgcagagctgcttcgtgtcccttctttgacagtaaaagttgttttcttggaaataaatcaaatttgtatttctcaacaaaacctgccctccatccctctatgaagaaaaatgcaagttgctcttctgcgctccaaatacaccgagacgaaaacaagcccaggtgaagctgcagctggggacacgagttaatgtgagtgcgagcccagggcagagcgggcccagataaataattcatgagcgccaccggggaagaccgggcactcgtggagtycaacagatcataagcaggatccagggtcgtgtagcgacacagcttcccaagcaggcgagtgacctggagcacagaggggagggacggggacaggtgcagcagagattgggcacgggccaggaatgcatcacggcacctgcgcacaggggtggcctccaggggctccaagtcctctgggatccaggttctccttccttcagggcacccccacccaccctctccccaaggcttgggccacactccatgccaccatgcccaacggtccccgccctgcacccacctctggcaagttctgggc

SEQ ID NO: 273923 - DNA, 558 bp, Homo sapiens
ctctgatttcttagtaataaagtttttgtcatgttttagtgagaaatattttattttatgatattaaaaaagaactcccagactaggaaaaccagttttaaacagatggagtgaaaaccctaatttttgcaaccttgtttttaaataggaatatgtgggctggttactaaatacaaaaacatgacttcaacctactcgctatttcaaattgttagcaattttcaatcaacatcctcagactgaagaaaaaacaaacaaacaaataaacaaaataacctctcctaagacagaaaaggtctacatgaatttgccatgcagacttaccccccatgttaagagtctttgtttaaatagttycctgcaaccttatttaataatacactcttcatttgtggttatgtttaatcatatttaaaatactaggagctgttagctatggccaagaaaagtctccaatctcaatctgagtttctgttatttttgcaagtattgagacaatggtcatacatagcctttattgctgccttgagataggtcttatcaggaagtccacgaatc

SEQ ID NO: 273924 - DNA, 530 bp, Homo sapiens
caaaaacatgacttcaacctactcgctatttcaaattgttagcaattttcaatcaacatcctcagactgaagaaaaaacaaacaaacaaataaacaaaataacctctcctaagacagaaaaggtctacatgaatttgccatgcagacttaccccccatgttaagagtctttgtttaaatagttccctgcaaccttatttaataatacactcttcatttgtggttatgtttaatcatatttaaaatactaggagctgttagctatggccaagaaaagtctccaatctcaatctgagtttctgttatttttgcaagtattgagacaatggtcatacatagcctttattgctgccttgagataggtcttatcaggaagtccacgaatcaagtatttttacttgcacacttcatgctgwatccaactggatttgcatctctacagcaactgtttgctgaaatgctagtcttcatacagccctagtgaagaagatttgaggtgcagatttctttctctgtcaagtgtaagagatc

SEQ ID NO: 273925 - DNA, 502 bp, Homo sapiens
gcctctgcacttgctttcttttcttcccagatatccatgaagtctgcttcctcattttcatctaaactttattcaaatatttccttctcagtgattcctccctctctgatcttcttaaaattataacctccccatctacttcccatttctcttgcctaccctatttttcttggtggctctcttaatttccacagtaaaatatgttcttatttatttaataaatttatctcccttctacaatgtaatacccatagtgacaaagaattttattttgtttactgtgaattttccaggccatggaatagttcttagcatatagtaggccctcaacaatatattgtcaaataaacatacaaaatattgacaaggtcaggatgggrgtccttaagacaaaggaatgaaagacttgagacagcagctagattattgttagggcccagagaaagtcttggtttagtaaagctaaggtgggtttatttgtaggccagggaatatgaggtag

SEQ ID NO: 273926 - DNA, 555 bp, Homo sapiens
tttatccagctaatatagtattgtacttacatgctacagtaaagtgttttatattattatttattagggctttctcaataagtgaagatatcattgactattaagcccttttcaaaagctctttggcattcttatacccagggtattttatgctataagtttatgtgaagaaggagcacaagttttggagcagaccaatatgattcaaactgtggccataaaatatgatcaaacatttaccacaatattaaatcactggaaatagttcaattcaccaatatgtaatgatcttggaaggtattctgtgattacagccatgatgtatattattttcttatatttataattctggttgttaaaaatgtctttagggaacatttaatacttytgtgattatagaaaaaatcattaaacgttgccttttttattatgatcttgggtagaaagagtgttgctttaaagaaaggcagctaaacctaaatgtaaataaatggcagctgttgcagagagggttgaaagaaataactgcatgggaagccctaattacaaggtaga

SEQ ID NO: 273927 - DNA, 576 bp, Homo sapiens
ggagtctatgtgtgtgaaatgtgtgtttgtgagggttttttttcctctgtcctaaggaaagattttacatcagtaggcaatgtttataaagttcctctttagtatttctttctttccaaatatttggcttttctcttgctatttcacgtaaaaataggtaaatatttcccaatagtatattactgcaactgtacgattccttaaggtttcatggaaaactcatgtcagagtactgcaaatcaggaagtagaaaatgaacagtcagtatgatgtctctgaaagtttcattttataaaagagaaatagcagcagctacaagaagccatcaygctttgattttatggctagcatgatcataaaaattcaaagcacaatgtggtcatattttatatatgtattaagaaggaaatcatttccaaggagatatgccttctctccatgtagcctccttcataatattttatagacagtataatttcccaattatctaaatattgttaaagatggtcaaatctagtgtaatctagcaagttgttctaggtcattattagaaactactagaaatgcaaaatgata

SEQ ID NO: 273928 - DNA, 514 bp, Homo sapiens
gtttataaagagtttatgaagagcatcctttctctctgtctcaatctctcactcataatggcagcatattttcccataatatgaatgtaaaataatttatttaacccatatcatattcatgggcataaatggtatttctaatattttgctgcaatgaataaccatgtacatactcttgtcattcctagtatgtttaattgtacatgtaggacacctttctagaagtgaatttactcagttaaagagtatggcacatttaaaaaaataaaaaaataagcastatatacatttgaaaattttaaagttatatcggaatttcccttcatagaaattttaccaatttacatttccacaaacaataaatgaaagcttggtcctcacatccttatcaacaccaaatataatcacacatatttttcctgaacttgagaggtggaaagaggtttttcagtgctctcatcatctttctcccatagttttactgctattggagtttcattgtttatatttaact

SEQ ID NO: 273929 - DNA, 514 bp, Homo sapiens
gtttataaagagtttatgaagagcatcctttctctctgtctcaatctctcactcataatggcagcatattttcccataatatgaatgtaaaataatttatttaacccatatcatattcatgggcataaatggtatttctaatattttgctgcaatgaataaccatgtacatactcttgtcattcctagtatgtttaattgtacatgtaggacacctttctagaagtgaatttactcagttaaagagtatggcacatttaaaaaaataaaaaaataagcagtatatacatttgaaaattttaaagttatatcggaatttcccttcatagaaattttaccaatttacatttccacaaacaataaatgaaagcttggtcctcacatccttatcaacaccaaatataatcayacatatttttcctgaacttgagaggtggaaagaggtttttcagtgctctcatcatctttctcccatagttttactgctattggagtttcattgtttatatttaact

SEQ ID NO: 273930 - DNA, 590 bp, Homo sapiens
tattcttgtttaacttggtttaactttatagtrgggttaaatgtggcatttgaaggttggtgagtaacaacatcttttaaaacatggtgaattccaacaagaaaagaccaaggtattctgtgatctacaaagtatcttgtgctagcttgaacaacagacctccgctctcttgcggccttaaaactggaaacgctccagtttatttctacctgatatgcacacaaattgtattgcaagctccctagaaggtatttttctcaacaggaggaaaaaatacctcttcaaaatgcccacttatccctgtatacctttccaaatactaattaattcctctaattagagctttttttggctgcaaccatttacaaagttgagttgctgcatacaaacaaatttaatgaatattcataaactaataatattcactgaatttacagtcctcttgcccacatactgctattgcaaccggcttataacagccttctatagactatactaaggaaaggccatctccaaggaaaaggtagagaaaaatacagttttattttaaggaacagaccacctaccaactgaattgtatatactatagc

SEQ ID NO: 273931 - DNA, 563 bp, Homo sapiens
caaggtattctgtgatctacaaagtatcttgtgctagcttgaacaacagacctccgctctcttgcggccttaaaactggaaacgctccagtttatttctacctgatatgcacacaaattgtattgcaagctccctagaaggtatttttctcaacaggaggaaaaaatacctcttcaaaatgcccacttatccctgtatacctttccaaatactaattaattcctctaattagagctttttttggctgcaaccatttacaaagttgagttgctgcatacaaacaaatttaatgaatattcataaactaataatattcactgaatttacagtcctcttgcccacatactgctattgcaaccggcttataacagccttctatagactatactaaggaaagsccatctccaaggaaaaggtagagaaaaatacagttttattttaaggaacagaccacctaccaactgaattgtatatactatagcttatgtatatacatattctatatatagtttatatatattatgcatacatatatatgttaggttataaaatacatgcatatg

SEQ ID NO: 273932 - DNA, 501 bp, Homo sapiens
atattttctttaatatttcaaatacaaagcttttatatttatacttatttcagttaactataaactattaaagatgagatttacagtctaaagccaagcacaagtgttccaatatctctgctttcagattgtaygctttgggtcaaacgtctaacctctttgagcatccgtttcataaactgtaaaacaatgatactaacgtctttgagataacggctttgagaaatcaattaagatggcagaaattcatcctgaaactgtgactattatatgattcggatagaataatacacattatgagaaagtaatgttttgtttttcatctcatgaatctttatttattttcaccttttctcttcctcttatgttcttgtgtattatcaatatgttgaagacatctatatttctaaatatactcttgaattttcttccaggctccagacttgaatttcccaaatatttgcaactaacgtcccactagttatctcaattgcactggac

SEQ ID NO: 273933 - DNA, 543 bp, Homo sapiens
tcctgaacattactcttggatataatatatatacatatttacatatatatatatacattcatatatatacatattttctttaatatttcaaatacaaagcttttatatttatacttatttcagttaactataaactattaaagatgagatttacagtctaaagccaagcacaagtgttccaatatctctgctttcagattgtacgctttgggtcaaacgtctaacctctttgagcatccgtttcataaactgtaaaacaatgatactaacgtctttgagataayggctttgagaaatcaattaagatggcagaaattcatcctgaaactgtgactattatatgattcggatagaataatacacattatgagaaagtaatgttttgtttttcatctcatgaatctttatttattttcaccttttctcttcctcttatgttcttgtgtattatcaatatgttgaagacatctatatttctaaatatactcttgaattttcttccaggctccagacttgaatttcccaaatatttgcaactaacgt

SEQ ID NO: 273934 - DNA, 501 bp, Homo sapiens
atattttctttaatatttcaaatacaaagcttttatatttatacttatttcagttaactataaactattaaagatgagatttacagtctaaagccaagcacaagtgttccaatatctctgctttcagattgtacgctttgggtcaaacgtctaacctctttgagcatccgtttcataaactgtaaaacaatgatactaacgtctttgagataacggctttgagaaatcaattaagatggcagaaattcatcctgaaactgtgactattatatgattcggatagaataatacacattatgagaaagtaatgttttgtttttcatctcatgaatctttatttattttcacctyttctcttcctcttatgttcttgtgtattatcaatatgttgaagacatctatatttctaaatatactcttgaattttcttccaggctccagacttgaatttcccaaatatttgcaactaacgtcccactagttatctcaattgcactggac

SEQ ID NO: 273935 - DNA, 564 bp, Homo sapiens
ggttatgttttatgcctctacaacttggtacaatctcatggatttgagctctcattttcattctcattcacctctggttgagataatcatgaattcttgcttagactattgtagtgtctacagatctccaatttccccaacattctgcagaccatttccattttctgaagcacattactggctccttgaaatatkttatggtttccggcttctaaatgcaaaactaaaacttcttagcttgactctcagggaacttcatgatcaaaatccactctacatgttattgttattttcattgctcttatgaaatgaaatttctcatgattccataatattattcatgtatttgcaacttggcttttgtgagtctatatttactctgtttccctcctttgtgtaggtttcctctatcccaacttctagatgtcaaatatcactttagccatgaaactttcctcagtttcctccctccatgttaaggtacacctggttgcccctttctctgaagtttacatttggatttgcatcattcttatttgtatacatttttattgcctctactag

SEQ ID NO: 273936 - DNA, 564 bp, Homo sapiens
ggttatgttttatgcctctacaacttggtacaatctcatggatttgagctctcattttcattctcattcacctctggttgagataatcatgaattcttgcttagactattgtagtgtctacagatctccaatttccccaacattctgcagaccatttccattttctgaagcacattactggctccttgaaatatgttatggtttccggcttctaaatgcaaaactaaaacttcttagcttgactctcagggaacttcatgatcaaaatccactctacatgttattgttattttcattgctcttatgaaatgaaatttctcatgattccataatattattcatgtatttgcaacttggcttttgtgagtctatatttactctgtttccctcctttgtgtaggtttcctctatcccaacttctagatgtcaaatatcactttagccatgaaactttcctcagtttcctccctccatgttaaggtacacctggttgcccctttctctgaagtttacatttggatttgcatcattcttatttktatacatttttattgcctctactag

SEQ ID NO: 273937 - DNA, 629 bp, Homo sapiens
gaagaaaaacaaaaaggtctagtttccactttttccgtaaaaaggaaaaatcctacacatggctaacctaatcgctctccttgaagctttgcacccatcttttcccaagtacccaattgttgcaaagtttcacctcaaatgataagttcacctcaatcatgacagtgatctttaaacatattttgtagaacggtagttgtttaatttttataccatgtcagaattcttcctagagcaaaacatggctgtatttccttaaacaagataatttgtaactgtcaaatgatagacataatctgtcctccaatatcaaaggaatagaggccgggcatagtagttcatgcctgtaatctcagcactttgggaggccgaggcaggctgataacttgaggccaagagttcgagaccagcctggccaatatggtgaaaccctgtctctactaaaaatacaaaaattagctgggcatggtggcatgcacctgcagtcctaactacttgggaggctgaggcatgagaatcgctcgaacccaggaggtggaggttgcagtgagccgaratcacgccgctgcactccagcctcctcggcaacagagtgagactgtctaaaaaaacaaaacacagaaaactta

SEQ ID NO: 273938 - DNA, 600 bp, Homo sapiens
tcaataattgttatatggtattgcttagggaatgatgacaagagcaaaagtctgtacatgtttagtacagacacattctttttattgtcaatatttttgatctgcagttggttgaatccatggatgcagaacccactgatacagagtgctgactgtactttctacttatggtagtaaaagtgtaagagtaaatattgaagttgaggagacgaatatatgttgagcatctcctatataagccaagcactatgctaagtgctttacatatactcactgtattacagtatctcattttattctcctaacaaccttgtgaggttttmatcatcctcattatacaaagaagaaaacagaaagacccagcaaagtgaagcacttaccaacagccttatggcaagtaacagggccaagatttcaatcaaggttaaaatacatgactctgactatgccataagaaagagaatactatgtattttatttggtcccttgtgtgaaacaaggcaaactattgatataaattgaactaacagtaattgcattatcacattgaatgtaataagttgaagcagattttatataatttataagactggttattat

SEQ ID NO: 273939 - DNA, 600 bp, Homo sapiens
tcaataattgttatatggtattgcttagggaatgatgacaagagcaaaagtctgtacatgtttagtacagacacattctttttattgtcaatatttttgatctgcagttggttgaatccatggatgcagaacccactgatacagagtgctgactgtactttctacttatggtagtaaaagtgtaagagtaaatattgaagttgaggagacgaatatatgttgagcatctcctatataagccaagcactatgctaagtgctttacatatactcactgtattacagtatctcattttattctcctaacaaccttgtgaggttttaatcatcctcattatacaaagaagaaaacagaaagacccagcaaagtgaagcacttaccaacagccttatggcaagtaacagggccaagatttcaatcaaggttaaaatacatgactctgactatgccataagaaagagaatactatrtattttatttggtcccttgtgtgaaacaaggcaaactattgatataaattgaactaacagtaattgcattatcacattgaatgtaataagttgaagcagattttatataatttataagactggttattat

SEQ ID NO: 273940 - DNA, 600 bp, Homo sapiens
tcaataattgttatatggtattgcttagggaatgatgacaagagcaaaagtctgtacatgtttagtacagacacattctttttattgtcaatatttttgatctgcagttggttgaatccatggatgcagaacccactgatacagagtgctgactgtactttctacttatggtagtaaaagtgtaagagtaaatattgaagttgaggagacgaatatatgttgagcatctcctatataagccaagcactatgctaagtgctttacatatactcactgtattacagtatctcattttattctcctaacaaccttgtgaggttttaatcatcctcattatacaaagaagaaaacagaaagacccagcaaagtgaagcacttaccaacagccttatggcaagtaacagggccaagatttcaatcaaggttaaaatacatgactctgactatgccataagaaagagaatactatgtaytttatttggtcccttgtgtgaaacaaggcaaactattgatataaattgaactaacagtaattgcattatcacattgaatgtaataagttgaagcagattttatataatttataagactggttattat

SEQ ID NO: 273941 - DNA, 600 bp, Homo sapiens
tcaataattgttatatggtattgcttagggaatgatgacaagagcaaaagtctgtacatgtttagtacagacacattctttttattgtcaatatttttgatctgcagttggttgaatccatggatgcagaacccactgatacagagtgctgactgtactttctacttatggtagtaaaagtgtaagagtaaatattgaagttgaggagacgaatatatgttgagcatctcctatataagccaagcactatgctaagtgctttacatatactcactgtattacagtatctcattttattctcctaacaaccttgtgaggttttaatcatcctcattatacaaagaagaaaacagaaagacccagcaaagtgaagcacttaccaacagccttatggcaagtaacagggccaagatttcaatcaaggttaaaatacatgactctgactatgccataagaaagagaatactatgtattttatttggtcccttgtgtgaaacaaggcaaactattgatataaattgaactaacagtaattgcattatcamattgaatgtaataagttgaagcagattttatataatttataagactggttattat

SEQ ID NO: 273942 - DNA, 469 bp, Homo sapiens
tatcctttcttacaaggagagaaaagccagcaagagatttctgataactaccatcaccttaaagtctgtttttctaaatactaccccttgacacccaataaaaaaactatgaaacaaataggataagactacaagaacacaggattacttttagtgctctaaaggtgggagttctgcaacatcataagggtgtcaaaggcctagcacattggcatttgccattcatggtcgacattgatgatcattgtgttttagcattcaaagcacaaggaataataaaagccatacaagtttttattttcattagttttaacatgtgatattcttgtacacatgcctgaataatgcctttttaaaaacttagtaatcatgcatcatatgagtgggtaataaggaaacaatattctttaccaygagagtgggctaaacacttcaaaggacccttcatgaaacatttggaattagagct

SEQ ID NO: 273943 - DNA, 603 bp, Homo sapiens
ccccgggccatggacaagtgacagtcygtggcctgttaggaactggaccacacagcaggacagctagagatgagtggtagatgagcgaccattactgcctgagctctgcatctgtcagatcagtggtggcattagattctcataggagcgtgaaacctcttgtggactgcacatgtaagggatccaggttgtgtgctcctcatgagaggatctaactaatgcccaatgatctgagatgatctgaggtggaacagtttcatcctgaaacaatcccccacactacccctccccccacactctccaccaccccgtccaagtctttctaacactggtccctggtggcaaaaaaggttgagggctgcttctgtatacttgtttttcaaaatatctcatgtaatcatcataaaagtcttgctaaatggtattattatcattcccattttcaggaaggtaagttaaaggcttcaaaagtttagatttttcccaagaatacactgctaatgtgtagttttgaacataccagtttagattattaagtctcggctctttcccccatatcacaaactcaaatttcactgctttgtaattttcctaattaaaatg

SEQ ID NO: 273944 - DNA, 603 bp, Homo sapiens
ccccgggccatggacaagtgacagtccgtggcctgttaggaactggaccacacagcaggacagctagagatgagtggtagatgagcgaccattactgcctgagctctgcatctgtcagatcagtggtggcattagattctcataggagcgtgaaacctcttgtggactgcacatgtaagggatccaggttgtgtgctcctcatgagaggatctaactaatgcccaatgatctgagatgatctgaggtggaacagtttcatcctgaaacratcccccacactacccctccccccacactctccaccaccccgtccaagtctttctaacactggtccctggtggcaaaaaaggttgagggctgcttctgtatacttgtttttcaaaatatctcatgtaatcatcataaaagtcttgctaaatggtattattatcattcccattttcaggaaggtaagttaaaggcttcaaaagtttagatttttcccaagaatacactgctaatgtgtagttttgaacataccagtttagattattaagtctcggctctttcccccatatcacaaactcaaatttcactgctttgtaattttcctaattaaaatg

SEQ ID NO: 273945 - DNA, 619 bp, Homo sapiens
tcgacacaaattcccttcaatgacagattggataaagaaaatgtagaacatatacaccatggaatactattcagccattaaaaaaaagattgtgtattttgcagatggagctggaggctattatccttagcaaactaacacaggaacagaaagccaggtatcgtatgttctcacttataagtgggagctaaatgatgagaactcaggaacacaaagaagggaacaacagacactgaggcctacttgggggtggggtgggmggagggagaggagtggaaaagataactattgggtattgggcttaatgcctggttgatgaaataatttgtaccagaaacccccatgacacaaatttacctatgtagcaaaccttcacatgtactgctgaacctaaaataaaagttttattttttaaatcctgtttcaaaaattatgcactaagatacttctctcttacattttatagtatccatatttcagaattaatcttggacatgcatacagaacattttaccaataaaaaatggtcagtatacctttgggcagtgttagtccttcataagtgtttcaaaaacttagcagtcctcctttacatgaaagcatgcatttttcaagacaa

SEQ ID NO: 273946 - DNA, 584 bp, Homo sapiens
aagaatattctagtctgagaaaaagcataagcaaaagcacagagatgtgtattcatggaatgctaacaggcacatggagaaagtagagagagaggaaactggaaatgtattgtaggctagaccatggagagcttagcatgatgtggttgatatggtttggctctgcgtccccacccaaatctcaggtgaaattgtaatatccatgtgttgaaggaaggacctggtgggaggtgaytgaatcatgggggcggacttcccctttcctgttctcatgatagtgagttacttctcaggagatctggttgtttggaagtgtgtggcccttccctctttgctttcactctttcctcccaccatgtgaagatgtgcttgcttcccctttgccttccaccatgattgtaggtttcctgatgcctcccaaccatgcttcctgcatagcctgcagaactgtgagtcagttaaacctcttttcttcataaattactcagtctcaggtagttgtttatagcagtgtgagaatggactactacagtgttaaagtttagttaatggaaaaatactgcaagtttataataggtaattca

SEQ ID NO: 273947 - DNA, 584 bp, Homo sapiens
aagaatattctagtctgagaaaaagcataagcaaaagcacagagatgtgtattcatggaatgctaacaggcacatggagaaagtagagagagaggaaactggaaatgtattgtaggctagaccatggagagcttagcatgatgtggttgatatggtttggctctgcgtccccacccaaatctcaggtgaaattgtaatatccatgtgttgaaggaaggacctggtgggaggtgactgaatcatgggggcggacttcccctttcctgttctcatgatagtgagttacttctcaggagatctggttgtttggaagtgtgtggcccttccctctttgctttcactctttcctcccaccatgtgaagatgtgcttgcttcccctttgccttccaccatgattgtaggtttcctgatgcctcccaaccatgcttcctgcatagcctgcagaactgtgagtcagttaaacctcttttcttcataaattactcagtctcaggtagttgtttatagcagtgtgagaatggactamtacagtgttaaagtttagttaatggaaaaatactgcaagtttataataggtaattca

SEQ ID NO: 273948 - DNA, 591 bp, Homo sapiens
atgtgattatttgccatctgaatatagttttcagtgaaaatctcttcatgacttttatctattttctagttgggttgtttgtttctttcactagtgagctttgagaggtctttacatattctagataccagtcctttactgggtatgtcattgcgaatattttctcccacactatatcttgtcctttttgcagtaaaaagttttgatattaacaaaatccaaattgtcaatttttccttccacgtrtcatcttttgggtgtcaagtctaagaattattgcctattctagatcctgaagattttcttccatgtttggttctaaaagttttgtagatgtacattttacatttaagcctgtgatacattttgagttagtttttgcacaaggtttgagacttgggtcaaatttcatttttttttaatgtatatgggatgtccaattgctcccacttcatttggtgaaaaaggtatccttcttccactgaatcatttttataacttaaaaaaaataggcaggcatatttatgtgggtctatttctaggtactgtgttatattccatggatctatgcatctatgcttccactaataa

SEQ ID NO: 273949 - DNA, 581 bp, Homo sapiens
ttcataagcatatggctttctgaattatcacaratgaacacctcgtgtaatcatcaccagaacaaaaaggagaatatcaccataagccctgacatttcccttgtgcctcaattcaatcaccactctcatccttcttcctaaaggtcacccaggaatagtttgtgtgtggtatatttatactactgcattccgcatcactacttgacatacactgctttttttttaactacaataaaagctttatttttacagctctctacagtccattactggaatacgaatattttacacttaactatcactttatttatttttattttgcctctcttgttttaataaattcattttcacaaattaaaaattctcagaaatgagcaataaactttcccataatcctaggccatagagataatcaccgtataaaagactactgatgtcttactttccttaagttttctaaaaattgtttttaatgattaaataaaaaggattttatatatacaaaacaatatatgtgatatacattagcatgataaccctcagtcatgctctactctgtaacctgaagctaaactgtacca

SEQ ID NO: 273950 - DNA, 438 bp, Homo sapiens
cgtataaaagactactgatgtcttactttccttaagttttctaaaaattgtttttaatgattaaataaaaaggattttatatatacaaaacaatatatgtgatatacattagcatgataaccctcagtcatgctctactctgyaacctgaagctaaactgtaccaattccaaagccctatgggcgttttcctgatctcatctcctatctccccttctttggagtattagctctttaatttttatggacattttataaagtagacactagtattacagtcacttaaaagtgagtaaaggaaggcttagaagatttaataactgacacccgcacagccaataagtgaacgaaacccaagaccctgactccagaatcagacttctaatgatatgtatttacatttctattagtataatggcagcttcccaatagattataa

SEQ ID NO: 273951 - DNA, 544 bp, Homo sapiens
tggggtgtagaaataaattaagcataatacattaattaacacaaagctgaaccctgccttgtttttcaccctgaaagatagataattaaaaacaacactgtaaagcatttttcatatgactctmaggttaatgaatggataagaaataagataatgatataaaggaacacttgaatgtgaaactcataacaaaaaagcaagatgtgcatactttgatgttgttattctgtatttaactctaaattgatcctatatttcaaacaactgctcagagcgtttcagtaattagcacatcagggatgcattagtatagaataatagtcttaactttaggagtttttaaaggtttaataatccctcttcccaaaagcataacatgcaaataatttaaattaaaacaatatatctcaatcatctaccaatgcactctactctattattaaatacacacaaacatataagcctactcatgcgaacctgaaaatattagaatattaaaattgttgaacagttctctgggatgactgaagatatgaatacatga

SEQ ID NO: 273952 - DNA, 565 bp, Homo sapiens
aaaacaatatatctcaatcatctaccaatgcactctactctattattaaatacacacaaacatataagcctactcatgcgaacctgaaaatattagaatattaaaattgttgaacagttctctgggatgactgaagatatgaatacatgatagcaaccctttctgctctaactatacaagcaagattgctgttctgagaaagtattttctatcaatcttatttagtggggkctcttctatttccttacatctcagggacttataatcaattttgctaaaaagagtcactctgtttctgaaatcttacattccaggataacatgctgctctttccagtttcacacctgtgacctgttatttcaaattttgcctcagcattaaagtacatttctgaaagttcatgttggaatataaatctcctggattcaaatatcctgcaaaggcattggtgacaattgtgtatatttgaaactctttggtcaattttaggtataaatatgtaatcatgatctttattcaatctcaaggcaacagacttttctcactctacctttggataaatatc

SEQ ID NO: 273953 - DNA, 609 bp, Homo sapiens
gaggagatttttattagacatagaatatttttattgttgatgaaaatctttgatcagctatcagttgttcctttggttggattttgagctccatctagttcagggatatcatcattccttagcaatgttatcaatgcttcaaactcaagtcaactaaatgttatrataagagtagctatcatgtattgagcttgtacaacatgtcatattctctcctggggaatttacatatatagtttcttactctcacaagataaattttgttaagaaagtgccacattaggaaaattctcagccatcatgtgatctagaaataggcatctgtcaatatttcatacatacgcacacagacacatacacacacgtgtatgtatgtgtacatacatctacacatatattaattaaatgattacagtgctttatacttgtttaacacttgcatatttacaaagatccttttaattacagtgttttaatttatcctcaaaataacttgataacaatccaatagaaaaaaatgagcaggaaaccttaagctggcactttaaaaagagactattcaaatggacaataaatgaatagatacttactgggacaaagcaaattaaa

SEQ ID NO: 273954 - DNA, 541 bp, Homo sapiens
cacacctggctaatgtttgtatttttagtagagacagggtttcaccatgttggccaggctgctcttgaactcctgacctcaggttatccgcccgcctcggcctcccaaagtgctgggattacaggtgtgagccaccgctcccggccttctttcttaagcacatactttagacattacctcagcactattgacatttgggacgagacaattctttgggtggggggctgtcctatgcaatacaggatgtttagcagcattcctgacctctactcactagatgctagtaactccagttattatgatcagaaatgttctagatattaccaaatattctcatattctctgaatgagcggtgcaaatakgggtaccaaaaattactcccatttgggaaccactgctttaaaagtgtccttgttattaaactctgtcttgttcttttgagagcaatagcaaaatagaaacctttccgaagagttgtacacctcctagatttataattctatgttgagagttgttttctttcagcaatttgaagattca

SEQ ID NO: 273955 - DNA, 541 bp, Homo sapiens
cacacctggctaatgtttgtatttttagtagagacagggtttcaccatgttggccaggctgctcttgaactcctgacctcaggttatccgcccgcctcggcctcccaaagtgctgggattacaggtgtgagccaccgctcccggccttctttcttaagcacatactttagacattacctcagcactattgacatttgggacgagacaattctttgggtggggggctgtcctatgcaatacaggatgtttagcagcattcctgacctctactcactagatgctagtaactccagttattatgatcagaaatgttctagatattaccaaatattctcatattctctgaatgagcggtgcaaatatgggtaccaaaaattactcccatttgggaaccactgctttaaaagtgtccttgttattaaactctgtcttgttcttttgagagcaatagcaaaatagaaacctttmcgaagagttgtacacctcctagatttataattctatgttgagagttgttttctttcagcaatttgaagattca

SEQ ID NO: 273956 - DNA, 541 bp, Homo sapiens
cacacctggctaatgtttgtatttttagtagagacagggtttcaccatgttggccaggctgctcttgaactcctgacctcaggttatccgcccgcctcggcctcccaaagtgctgggattacaggtgtgagccaccgctcccggccttctttcttaagcacatactttagacattacctcagcactattgacatttgggacgagacaattctttgggtggggggctgtcctatgcaatacaggatgtttagcagcattcctgacctctactcactagatgctagtaactccagttattatgatcagaaatgttctagatattaccaaatattctcatattctctgaatgagcggtgcaaatatgggtaccaaaaattactcccatttgggaaccactgctttaaaagtgtccttgttattaaactctgtcttgttcttttgagagcaatagcaaaatagaaacctttccgaaragttgtacacctcctagatttataattctatgttgagagttgttttctttcagcaatttgaagattca

SEQ ID NO: 273957 - DNA, 588 bp, Homo sapiens
ggaatagaggaaaacctttggcaaaactactaagaggaggtagggaagcactcctcacagccagaagattgcctgaaatacaacttccagctagcttagagttaaaacaaacttgtattttttttttttttagacggagtctcgctctgttggccaggctggagtgcagtggcgtgatctcgggtcactgaaacctctgccttctgggttcaagcgattctcctgtctcagcctcctgagtagctgggaccacaggcatctgccaccatgccagctaatttttgtacttttagtagagatggggtttcaccatattggccaggctgatcttgaaytcctgacatagtgatccacccgcctcggcctcccaacctgctgtgattacaggtgtgagaaagtgctgggattgcaggcgtgagccactgcaccaggcctagaaacctgtactttttaaagtcattattttctcaattagtggagaagatttttactaaatctagctattcttattttgcagtggtttttggatactaatgatattttaaggagtaaagtatcatgattttcctaaggaagcaagttggaaac

SEQ ID NO: 273958 - DNA, 662 bp, Homo sapiens
tgagaatgttccaaaaaatgataaaagatctcaacctgcagattcaagaaaaaattcgtagaagttgcctgagtttaaaaaaaaaaaaaaaaagatgcattatctttaagacagtaagactgaatgaggctgaattttcaacagtaactatggaagccagaaaatgataaaataatattttttaaatgataaaaaaaactactggcctagacttmtataacctatgaaaatatactttaggcatgaaggtaaaagaaatatttttttagacaacaaaagttgaaagaatttataagaattgcacaggaagtttctcagaagagcaatttttatcagattgaggcaccggggtacaagaaggaataaggagcatttggaaggcaattatgtaggtaagtacaaatagcattgattaatacaataaaattaccttgtaacatatgcaaaacatggagtaaaatacatgacattactagcaaaaagagcaagaagtagacaaacagtattgtagtcttgcattttgcaggaagtgttagattattaatgtagccctgcttgggatagatccatatgcctattgtacttctgacaataactactaaagttaattttaaaatgtatatctaaaaatctaattagaggatataaaatagaaaaacaat

SEQ ID NO: 273959 - DNA, 662 bp, Homo sapiens
tgagaatgttccaaaaaatgataaaagatctcaacctgcagattcaagaaaaaattcgtagaagttgcctgagtttaaaaaaaaaaaaaaaaagatgcattatctttaagacagtaagactgaatgaggctgaattttcaacagtaactatggaagccagaaaatgataaaataatattttttaaatgataaaaaaaactactggcctagacttctataacctatgaaaatatactttaggcatgaaggtaaaagaaatatttttttagacaacaaaagttgaaagaatttataagaattgcacaggaagtttctcagaagagcaatttttatcagattgaggcaccggggtacaagaaggaataaggagcatttggaaggcaattatgtaggtaagtacaaatagcattgattaatacaataaaattaccttgtaacatatgcaaaacatggagtaaaatacatgacattactagcaaaaagagcaagaagtagacaaacrgtattgtagtcttgcattttgcaggaagtgttagattattaatgtagccctgcttgggatagatccatatgcctattgtacttctgacaataactactaaagttaattttaaaatgtatatctaaaaatctaattagaggatataaaatagaaaaacaat

SEQ ID NO: 273960 - DNA, 560 bp, Homo sapiens
agcctgattactcatttatattttagtatatatcagttttcaagcatgtttggtacctaacggaagctcaacaarcatttggattatgagtaaattgatgggtgacttcatgagtattttctatggggaagatgttggctccacactctgagagtgagttaagttatattcaagaagacatctagaagagtgacctgactgtaagagagtaaactggaggatggccacgtgcccaaagatgaggctagtgttcctgcacattgaggactcaaagtctcctggcctcaccctccagaatatatcccatgggtggagcaccacccatatcccaggtctgcaccttctaggtaagctcttgggaatggctgtactgaataaatccatctgttagcttagggtcacatggtgtattcatgtttttaaaaacattcttttaaaagtgcaaatacacctgggaaaagatatactttaagcctgattactcatttgtattttagtatatgtaagttttcaagcatgtttggtacctaatggaagctcaacaagcatttggagtatga

SEQ ID NO: 273961 - DNA, 560 bp, Homo sapiens
agcctgattactcatttatattttagtatatatcagttttcaagcatgtttggtacctaacggaagctcaacaagcatttggattatgagtaaattgatgggtgacttcatgagtattttctatggggaagatgttggctccacactctgagagtgagttaagttatattcaaraagacatctagaagagtgacctgactgtaagagagtaaactggaggatggccacgtgcccaaagatgaggctagtgttcctgcacattgaggactcaaagtctcctggcctcaccctccagaatatatcccatgggtggagcaccacccatatcccaggtctgcaccttctaggtaagctcttgggaatggctgtactgaataaatccatctgttagcttagggtcacatggtgtattcatgtttttaaaaacattcttttaaaagtgcaaatacacctgggaaaagatatactttaagcctgattactcatttgtattttagtatatgtaagttttcaagcatgtttggtacctaatggaagctcaacaagcatttggagtatga

SEQ ID NO: 273962 - DNA, 524 bp, Homo sapiens
ggagtaaatccacttcctgctgtaagacagttccatcagtaccagactcaaagctccctttctgaaatctcagtcacacaacgaatacttcatgctgatttgaccgtggagattaccagttgtaaagggactaacgagctgtttttaatggaacatgttttttcttgacagtgctatgagacagccaagtaaaaagggatccccagagaacctccraggggcctatgcactgggaggatggggtgggcttcaggaagttcacaccctttgcagggggtaggagcctgacctctcctgttcctgagtggtatctggaattcaatcagtgagaaggggacctgttaacaggaatccttcttgctttgctgttttttttctttttcatccaataaattcaatttttctcacccatttatgtgtctccaagcctaatctttcctggttgtgtgacaagaacccggtttttagctgaactgaggagaaagtcctataacagctctaccatgtaatagacaaaattgaga

SEQ ID NO: 273963 - DNA, 562 bp, Homo sapiens
tgcgaatgaccaggaataaccaagatggcagatggaagtctgcttttccttggtctgtcttagtttctgctttcattgtgtaagtgttttgttgagctgagtttgataaaatgtaaacccatgtaaattttctacagtatggctaactactttatctgatgatcagataagaaataattctctgttccaataatgctagggaagaaaaaatcctgatttgttgagaaatggcatttgtgggtgtttttcttcatgggtaatttaaggaactttcaaaggtaattttatgtgtgtgtgattttttcacctaaggaattacttttaggacttcattatacttttggattttaataggttcaaatattataacccaaggtcatgagtagcttagggattagggggcacttattagggtatatttggggtaaggagaccaagggaaactttaaaagtatgcataggtgatgttctactctgactatatrtaataataaaaaagaattaatttttatatatgattctgtgatggtaataaaataaccctcacaaaaaaataacatga

SEQ ID NO: 273964 - DNA, 657 bp, Homo sapiens
ccactcagctaaaagaaataaaacctgtacttcaaaaagtaggtttctgacagtggcaggaaaatytttaattaacatcagagttatttaacattttcataactaaaactacccttgaccattttttgtcctcttttgcatggaaagacagagacgttactacatgtatttttggctgtttcaaatccattaagtacaggtctccaaaatagggaggatgtgtgggttattttattgttgttattgttttaccccttatttacactatggtgtttgcaccacacacacacacacacacacacacttacatctgtgttctagaacagtgaggaatgagcagtgggctccccaaacacagctccatctgcctgtcctgaggatgttgctgtcaggtaaggccctctcccgaggtgaataattatctcactgctaatgtgttaggagaaggaaaagtcctaaaaaaactactgggcaaggaaatttccaagaaaagaatctaaaatggatctggatgtgtttattttattcccagtcatacaagcaaaataattgcagggatggaagaaaaagatgaaaaaggtaaataaagttcaaaattttaggctaaaaattgggccacgtttttgaaaaggaattattggtaaagaacaaagagaa

SEQ ID NO: 273965 - DNA, 547 bp, Homo sapiens
tagcagatagcagttttttattttctttttaaattgctgaataatattccatagtatggatatatggccacttgtgttggagtgacatctgggttccacaagcaggatgctgggctggggcagccaccactggccttctcaacttgtctgtccttgtgtggaacctctgccctatgaatgagcagagataagggtgggctaggcytaagattaaaggcctataagcttaggtagagcttccaccccgtgagttggggcagggtagaggaagaggcctccagacttctcagctgtttttgtctagtattaaaacctctgcaatacagatggtggatagtgaggtggggagatgctgcagttctcaactgggagctgggagaagacagagccctgtgttcttggttctactacctggagtggagcttcatcatgcagagctgggtgtggtgaggagagacttttgctgccacagtctcttgctgtttgataggttgaaggtgtgttttctttttcttcccactagttacgactgttttgctgggagagg

SEQ ID NO: 273966 - DNA, 631 bp, Homo sapiens
cactgtggctcacatctgtaatcccagcactttgggaggccaaggtggaaagatcacttgatgccaggagttccagaccaggctgggcaacaaaattagacctggtctttataaaaagtttaaaaattacctgggtacagtggcatgtatgtaatctcagctactcagccagttgaggtgataggatcgctggagcctaggagtttggggctgcagtgagttatgttcgtgtcactgcactctgggtgacagagaaagatcatatctccaaaaataataatcaataatcactattataacaaattgaaacacatcaaatatagtcatgtgtgacataatgacatttacgtcaatgatggacaccatgcaaaatgatggtcccataatattataacgaagctgaaaaattcctatcacctaatgatgctgtagccatggtaacattgtagtgcaattgcctattgtattcagtaaagtaccatgctgtacagagttgtagcctagaagtatagcaggttacaccttctaggttcgcataagtatactctgatgttcacacaatgaaattgcccagtgattcatttctcaggacatatccccatygttaagtaacactttactggattcagga

SEQ ID NO: 273967 - DNA, 591 bp, Homo sapiens
aaaaggcatttcttgccaatctgtgtttcactrcattatcattatcattatcattattattattactagtactgagataatggtattgcctaaacaaaactgctgttgccctgcttagtatttggctcttcctgatctcaatttttatatttgactccatctattctcactggtgtgtttcagctttgtaaatcccatttccagcccccacatctggctttccctccatacaactgcctatgtttgaaaccttccttctctatcaaaatatgcctctcctctgctctctagagattgtgctctccgctgtgcaattttttaattcttccaaaagaatctattcaaagggatacatgcctgccaatacattaatgtcatctctctcataggtaaggtattagcacaaacacttcctaaagaatatgaatgacagtcaactgttgcaaaaatttagaaaaagatatagtttatcatccaatccaggacactttttagaggatgctatggtttgaatgtgtcccctccaaaattcatgttgccaatgtgatagtattaaaaggtgggcctttaatggctgattaggtcatgctg

SEQ ID NO: 273968 - DNA, 591 bp, Homo sapiens
aaaaggcatttcttgccaatctgtgtttcactacattatcattatcattatcattattattattactagtactgagataatggtattgcctaaacmaaactgctgttgccctgcttagtatttggctcttcctgatctcaatttttatatttgactccatctattctcactggtgtgtttcagctttgtaaatcccatttccagcccccacatctggctttccctccatacaactgcctatgtttgaaaccttccttctctatcaaaatatgcctctcctctgctctctagagattgtgctctccgctgtgcaattttttaattcttccaaaagaatctattcaaagggatacatgcctgccaatacattaatgtcatctctctcataggtaaggtattagcacaaacacttcctaaagaatatgaatgacagtcaactgttgcaaaaatttagaaaaagatatagtttatcatccaatccaggacactttttagaggatgctatggtttgaatgtgtcccctccaaaattcatgttgccaatgtgatagtattaaaaggtgggcctttaatggctgattaggtcatgctg

SEQ ID NO: 273969 - DNA, 562 bp, Homo sapiens
tcacattgcctttaagattcacccttgagctaagaccaagattagtgatatttcagattaaagaaaaggaaattgttcagaaagttcaggggaactaacaaaggcgattccaaacacagaggttttttataaacgtaataaatatatacagagtcatatgtgtgcagyttgtctctccaaagaatacaaagcctgttgcagagaagagctccttagtacttccggtgtctccatatgtactgcagggcacaaggaacactagttttgtttgatacataattaatagactttactttttggagcaattttggacttacagaaaaatcgaggagaaagtatacagaattcctatataccttctctcctcctccaaaaacaatttcccctattattagcatcttgcatttgtgtggtacatttgccacaactgatgaaccaaagttgatttattattgaccaaaatccatattttacattaggtttcaccctgtgttgtagagttctatggtttttgaaaaatgcataatgtgtccaccattatagtatcatatggaatagtttc

SEQ ID NO: 273970 - DNA, 562 bp, Homo sapiens
tcacattgcctttaagattcacccttgagctaagaccaagattagtgatatttcagattaaagaaaaggaaattgttcagaaagttcaggggaactaacaaaggcgattccaaacacagaggttttttataaacgtaataaatatatacagagtcatatgtgtgcagcttgtctctccaaagaatacaaagcctgttgcagagaagagctccttagtacttccggtgtctccatatgtactgcagggcacaaggaacactagttttgtttgatayataattaatagactttactttttggagcaattttggacttacagaaaaatcgaggagaaagtatacagaattcctatataccttctctcctcctccaaaaacaatttcccctattattagcatcttgcatttgtgtggtacatttgccacaactgatgaaccaaagttgatttattattgaccaaaatccatattttacattaggtttcaccctgtgttgtagagttctatggtttttgaaaaatgcataatgtgtccaccattatagtatcatatggaatagtttc

SEQ ID NO: 273971 - DNA, 604 bp, Homo sapiens
taaaactgctaccaactaccacctgtggctcaagttttcggcaagctttgagactagagaggtaagaggtcacagacagaatctaaagaataataaatgaatgaagctacccactgggtcacagtgggtcacagagtctctgaaatatcctatagtcataggacagaagccctgaaatgatcatgaaaatctcattctaggccaggtacccagggaataagaaaacatgagacagggttgagcaaaacgtctacacaaaattaaaatcagacatgatattaaaacataggaacaggaagtcactataagattagttttatgaaatagtctgacaaaagctttaaaattagtataaagacgctcaaaaaatatgaagaaacaactttcatttagaaaagagcaagagattatattataataggggaaaaaagcaagtagaggatgaaattaaaaagaacacaaggccaggcactgtggctcacgcctgtaatcccagcactttgggaggctgaggtgggtggaycacctgaagtcaggagctttagattagcctggccaacatggcgaaaccccgactctactataaatacaaaaataagccagg

SEQ ID NO: 273972 - DNA, 630 bp, Homo sapiens
ccagataggatgaagcccctcagtggcttttcttctctcctacctctcgttactgcaggttttaggccaatgattctcagactagtttccaaactggcaacatcaagggacttgtcagaaattgaaatcctccagctcctcctcaggccttccaactcagaaactctggaagtgggacacaatgatctgtagtttcaaatgccctccaggtgattctgatgcatgctcaaatttgagaacaatgatcttaagctaatccttctgtctttgctgcagatcctgcccaagaccacactctcacggctttagagcaatggcaccatcattaacaccctcrgccaccactttatttaacacctatgtcaacaccttccctaactcacccttctatgtcagacttgttctacaaacaattctccaccctgtggccagtatagttcttttggagcataaatttgttagtgtcattttatttcctaaaacctgtcaaagtatcccatctctcaattgtcttataacacctttcaggatatagtgtctgtctccccagcttcatcctgcatggtccatctccttgggattttaatacttcaggtatcctgaaattctttctgtgcctttaagaccagg

SEQ ID NO: 273973 - DNA, 604 bp, Homo sapiens
gcattacatttacttgttatttggtatgtgaactatgtattttgaatgctactgaaaagcaattctctaaaagacatatagctgtcctccaggttttttcctggcttcaattctacgtaagcttgcaagtttgtgtttgtaatgttatcagtttctatgtgtaaagaaatatgacttgttattggaacaaaagaaaggatagacaagatatagttagtaaatatccttaggagaaaattcccaagggaatttcaggacatctcttctctttcacataaaattcctaaaggtaggaatttaaactggaaaawttagataatccttggggcttcaaagtaaatgaagacagatagatttcatagataaagaaaaatgcaaaagtatttgctattgtactatcaagtgataagttaaacagctgtcaaagcctctaataaaaaagatacaaatcatataggctttcattataaaaatattatacctgggaggcagagcttgcagtgagccaaaatcacgccactgcactccagcctgggcagcagagtgagactccgtctcaaaaaaaaaaaaattataaagttaacattttaaactctgtaaaata

SEQ ID NO: 273974 - DNA, 604 bp, Homo sapiens
gcattacatttacttgttatttggtatgtgaactatgtattttgaatgctactgaaaagcaattctctaaaagacatatagctgtcctccaggttttttcctggcttcaattctacgtaagcttgcaagtttgtgtttgtaatgttatcagtttctatgtgtaaagaaatatgacttgttattggaacaaaagaaaggatagacaagatatagttagtaaatatccttaggagaaaattcccaagggaatttcaggacatctcttctctttcacataaaattcctaaaggtaggaatttaaactggaaaatttagataatccttggggcttcaaagtaaatgaagacagatagatttcayagataaagaaaaatgcaaaagtatttgctattgtactatcaagtgataagttaaacagctgtcaaagcctctaataaaaaagatacaaatcatataggctttcattataaaaatattatacctgggaggcagagcttgcagtgagccaaaatcacgccactgcactccagcctgggcagcagagtgagactccgtctcaaaaaaaaaaaaattataaagttaacattttaaactctgtaaaata

SEQ ID NO: 273975 - DNA, 493 bp, Homo sapiens
cacatagactgatcatttcaactggcttctaataatatgtaatatctaggccaggcactatggctcacgcctgtaatcccagcactttgcggggctgaggcagggagatctcttgaggccaggagtttgagaccaacctggccaacatggtgaaaccccatctctactaaaaaatacaaaactagctgggcatggtggtgcatgcctgaaatcccgcctacttgggaggctgagccaggaaaawcgctggaacccgagaggcagaggttgcagtgagccaagatcgtgccactgtgtgacagtgtgagactccagcctgggtgacagagtgagactctgtctcaaaaaaaccaaaaatctaatatctatgtatatttataattatgtatgttatgatgtaaataacataatttataacttatgtatgcttatgtaaattatataatgcaaatactctattataggttcattaaaagttataggtccagaacac

SEQ ID NO: 273976 - DNA, 493 bp, Homo sapiens
cacatagactgatcatttcaactggcttctaataatatgtaatatctaggccaggcactatggctcacgcctgtaatcccagcactttgcggggctgaggcagggagatctcttgaggccaggagtttgagaccaacctggccaacatggtgaaaccccatctctactaaaaaatacaaaactagctgggcatggtggtgcatgcctgaaatcccgcctacttgggaggctgagccaggaaaatcgctggaacccgagaggcagaggttgcagtgagccaagatcgtgccactgtgtgacagtgtgagactccagcctgggtgacagagtgagactctgtctcaaaaaaaccaaaaatctaatatctatgtatrtttataattatgtatgttatgatgtaaataacataatttataacttatgtatgcttatgtaaattatataatgcaaatactctattataggttcattaaaagttataggtccagaacac

SEQ ID NO: 273977 - DNA, 504 bp, Homo sapiens
ggtttcttcatatagacatatgcacgtgctcatgcacatctgtctttgcgtagaaataaaggttacctcaacccactttcagtctattcttcctttccatcttcagaagtaactattattaggaatktgaatacttttccatttttatactcttacatacatttatgtatctataatatttcaacatatagataatgcatagacataaatgctatatagacataaacagtatcatttatttttatgcattttgtgttttttgttatttatggaaatagatattagatttaattctctcttgctctttccctcttttggggtctcccttttgctctgtcagggtgtcctgtgtgtgtctcttgggaactctgtgtctgtctgtctgtgtctctgtcttgctctgtctccctctttctctctctatctccctctctctgtctttgtctctttgtttctctgtctctctttgcttctgtctttagatatagagtgtatctaacccag

SEQ ID NO: 273978 - DNA, 658 bp, Homo sapiens
atttgtatttgcctttggaagatgtcctgactatgttttggcagcagatttactgtcataacttagttttgcttaggataataataaataggttttcatttccaaaatatacacttgagaatgcgtgtgggtggagagaaatagctccacattgcagggagatgacaaaggaaagccattttgggatttaaggtttggcacagaaaatccacaaagtgaacaataaaaatacatatgtataattaagaggtaattgtttataagttaaacacctctacaacacatatcatttccaaaagaacacactgtcttacctctgcttccctgggttcaagcaattcttgtgcctcagcctcccargtagctgggattacagacatgcatcaccacactcggctaatttttgtatttttagtagagacagggttttgccatgttgcccaggctgatcttgaactcctggcctcaagtgatccacctgccttggcctcccaaaattctgggattataggcatgagccaccgtgcctggctaagagcacactgtcttataggtggttcatagtagtgtgccatttgttgctattgcaataaaatacatggaatataacaaataaatttaaaaagaacaagtttttttttcatgtggtagtcacttt

SEQ ID NO: 273979 - DNA, 521 bp, Homo sapiens
gtcttctaggtagaaataaatctgaatgagattggtttgatactttagggcctaagactgacttgaatgaaaacatctggatacagtggttagcccactgattcaggaattatatataccctgaacaattttccatgttcaaaatgcctgaaatgatttaggaagtgatattcctaatgctaacaccttacttaggaaaacactctcagatgaatatcgaccaaaaataaaagaccctaccactttgcaagrcttatatatcatgaaagcggaaaagaaactagtattttttgagaatttactatgcataaagaatttatatacataatcttaattctttctacaggcttgtatcagaggtgttactatccccaatttaccaccaagggaactcagattcaaagaggataagtgtattgtaaaagaatcatatagctgataaacggcagaggcaaggcttaaacataatacctgtcttaaatgggcccttaattcttcccaggaattgatgttgtttgaga

SEQ ID NO: 273980 - DNA, 573 bp, Homo sapiens
gactctctgcccagaaactctaagatgacatgtagtcattctcattcccattgacaggtattttgtgggctccaagcatttgctggacatgttgaaagcaaagcactataatacstggccctgatctgaaggcatgtacatgctgctatggaaaacagaacagaccctttcagagagttcaattggttctattaacattcagagaaggagacttttctacccactcttgaagaaaggtcttctgaagttctactagtagtagaaaataacttagtgtctcttgctgcaacagagcttgtgtaaagtagctggaaattttcagattaagttgtaacatacctgcatgactgatcttcctaagctattgcttaggaaggtcattggcccttatgccaattttattcttcttctgtggacccttctgttcactatcatcttaggacaataatctgacatttccagtaagcccaaatcaattttaattcttttaaagtgttaaaaataaaggttcagtggtgatgtgagtgtgcagaaggcagggtggctttgagctgtatcgggtttgaaagctaa

SEQ ID NO: 273981 - DNA, 581 bp, Homo sapiens
taactgacattttagtcccccatctgcttactcttttgttttatttctcaattccatattcaagtggggaagagggacattttaactagtccctctcacataccagaatggtgtacatagatcctgaccatgttaatcttctgttcccaggctaatgttttgttagagaataaataagcaccagaattttgaaaattaaagagcgtgttgaattaggcttatatttatgttcttaattagaagaacacattttaacaccctcacttgaagtattaacttcccctttaaaagacacacaatttattagttcaacttagttgtaaacagaatagttctcaccatcaagttttaaatatactmttctttgttatatgtttgtgactgtggtttagttttaatctatataagaaggcatggaaaacaatagagaacaagttgtcaaaatctaagagcttttttctcacagattccagtcagatgatctgcaattgaaaattgcagacagaaatgagatacttcactaaagtttaggttcttccagatcaaaatccatttaaagaatgctaggtagaaaggaagag

SEQ ID NO: 273982 - DNA, 487 bp, Homo sapiens
agggaaatgacagggcttaacattaggaactaaacttctgatgatagaatttaagttctcatgatattgaagtgaggtattttttggaagattttttttttgtaattattctccccaaatattggtgactataatgtatagattgagggtgttcagtcacagaatttcmgtttcctaccactgtttgcttgacacttgagatactttaaagaaaaataaaaaggaaatatgactttatcagctggtagttatcttaaagaactcatctcaaaatcccaagttcctaaatataaatgtattcaagagggaatcaagtaactccatggttgagtgaattatatttgtcagactgtttgcttgcaatggaaatgcaatcaaattacattaggcaaaaaaggaagtatgttggctatgtatctgtgaatgacaagcaaggaactttttctgaatgatgctattcaattactcagccctgtttgactttatt

SEQ ID NO: 273983 - DNA, 576 bp, Homo sapiens
agttttataattttaaattgcacatatatgtaggttatcttatctatacttttatttcatatataaaaagaggcattgagaatcactagatgacaatagtatggtatctgtctctcttctggaaaaatctaacttgaactcatgcatagagaaatgaaaactggaatttatagaattgtttctatggggacattgtgagattctctgctgatgataatgacttaagaaagactttgggccacatgcggtggctcatgcctgtaatcccagcactttgggaggctgaggcggttggatcacaaggttaggagtttgaggccagcctggccaataagatgaaaccccatctgtactaamaatacaaaaattagccaaacgtggtggtgggcacctgtagtcccagctacttgggaggctgaggcaaaaaaattgcttgaacctgggaggcggaggttgcagcgagctgagattgtgccactgcactccagcctgggtgacagagtgagattctgtctcaaaaaaaaaaaaaaaaaaaaaaaaagactttgaaagtttgggaaacaagcagattgggct

SEQ ID NO: 273984 - DNA, 521 bp, Homo sapiens
actttgaacttgagagagacgatttaaggtgtctggtgggagaaatttataagaagcaaagcattcaagaggtgacttgggtactgttataggcattcagtttcaaaagtgaaacagagaataaaagtttggaaaatctgcagcctgataatgcaatagaaaagaaaatcccatttttttgaggagaaattcaagctggctgcagaaatttgcacaagtaataaggagctgaatgttaaccatcaagacaatggggaaaaggtctccagggcatatcagaaacctttgcagcagcccctcccatcacaggaccagaggyctaggaggaaaaagtggttttgtaggctgggccacgggccttgtgctatgtgcagcctagggacttggtgccctgcatcccagccactccagctgtggctgaaagggaccaatgtagagctcaggctacggcatcagagggtgcaagcctcaagctttggcagtttccatgtggtgctgagcctgcgagtgcacagaagtca

SEQ ID NO: 273985 - DNA, 575 bp, Homo sapiens
attttttggccctgagcaaacctcttatttctctcacatgtatggaaactcccaatttaagcaaattcaaatttccttaccttctctgcttgttagcattgtttcatgtttggctcctgaacacttactctttgcaaagctgaattgaaatagtaacacttgtggcagtctcttgtgtctagtattccacctatcccttactaacatgagacwgccctgagtgaaagatggagaggggatcattaatacttattcccagttttacttgcttctttgaacaggcccaacaacctaggaatggtggtgatgcttaagaaaacaagctaggctacatcatctaaatgaaggactaagacagttctcttatattcaacattgtaccagatgcctagctaaaataatgagaaagaaaaaaaggtgtaaggacaaaaaggaagaaaaaaaatttcacaatttttcttctagaaaatctgcagaatattaaaactaataagagagttcagccaacttttaaaaaataagattaataatgaaaatcaatgtctacttatgagtaaaagaatattttaaaatac

SEQ ID NO: 273986 - DNA, 575 bp, Homo sapiens
attttttggccctgagcaaacctcttatttctctcacatgtatggaaactcccaatttaagcaaattcaaatttccttaccttctctgcttgttagcattgtttcatgtttggctcctgaacacttactctttgcaaagctgaattgaaatagtaacacttgtggcagtctcttgtgtctagtattccacctatcccttactaacatgagactgccctgaktgaaagatggagaggggatcattaatacttattcccagttttacttgcttctttgaacaggcccaacaacctaggaatggtggtgatgcttaagaaaacaagctaggctacatcatctaaatgaaggactaagacagttctcttatattcaacattgtaccagatgcctagctaaaataatgagaaagaaaaaaaggtgtaaggacaaaaaggaagaaaaaaaatttcacaatttttcttctagaaaatctgcagaatattaaaactaataagagagttcagccaacttttaaaaaataagattaataatgaaaatcaatgtctacttatgagtaaaagaatattttaaaatac

SEQ ID NO: 273987 - DNA, 632 bp, Homo sapiens
tcttgtgtctagtattccacctatcccttactaacatgagactgccctgagtgaaagatggagaggggatcattaatacttattcccagttttacttgcttctttgaacaggcccaacaacctaggaatggtggtgatgcttaagaaaacaagctaggctacatcatctaaatgaaggactaagacagttctcttatattcaacattgtaccagatgcctagctaaaataatgagaaagaaaaaaaggtgtaaggacaaaaaggaagaaaaaaaatttcacaatttttcttctagaaaatctgcagaatattaaaactaataagagagttcagccaacttttaaaaaataagattaataatgaaaatcaatgtctacttatgagtaaaagaatattttaaaatacgattttcaaaagttcccccttttttytgagacaggttctctgtcacccaggctgacgagcaatggcacaatcttggctcattgcagcctcaacctcctgggctaaaacaatccttccacctcagcttcccaagtagctgtgactgcaggtgtgcaccccgacgcctggctatttttttttatttttttttattttttatttttgagacggagtcttgctccatcgcc

SEQ ID NO: 273988 - DNA, 565 bp, Homo sapiens
aacactttgagtgactcactggtcagatgctgtaggtatttttttatttttatttttgctaaagctaaaaatacattaatcagttatgtctgtagatgttttgaagacctaataaagaatgaagaaaatattcatttgtatattaagcagttattattaggcctatatttctttttttagagacagggtctcactctgtcacccaggctggaatgcagtggcatgattctacctcactgcaatcgagaactcctgggttcaaatgatcctcctgcctcagccttccaagtagctagtactaccagccacaccaccatacctggctaattttttttattttaatttttttgtagagacaggtcttgctatattgyccaggctggttttgaactcttggcctcaagccatctttctgccttggcctcccaaaatgttgggattacaggcatgagccaccctaaccacctaggcttatatatttttttgctctattttataaataattattttagagtagaacagggaaataagaagtgttcgttatttttggcatagttgtgatgat

SEQ ID NO: 273989 - DNA, 510 bp, Homo sapiens
tggatatgaaatcaccattataacctactaattacatagttaccttgaatacctgaaaaccataagaggatacttgggaatatttttttttattgtggtaaacaaacatgtaarataaaatttaccctgttaaccatttttaagtgtacaagtgagaactccttttttttctttttgagacagagtttcgctcttgttgcccagactggagtgcaatggcatgatctcatctaaccgcaacctctgcctcctgggttcaagtgattctcctgcctcagcctcctgagaaggtgggattacaggtgcccaccaccatgctcagctaattttgtctttttagtagagatggggtttctccatgttggtcagcctggtctcgaactcccaactcaggtggtccacccacctcagcctcccaaagtgctgggattacaggtgtgagccaccacacccagccaagtgtacaagtcagaactcttaagtatattcacagtgttgtgcaattgagct

SEQ ID NO: 273990 - DNA, 510 bp, Homo sapiens
tggatatgaaatcaccattataacctactaattacatagttaccttgaatacctgaaaaccataagaggatacttgggaatatttttttttattgtggtaaacaaacatgtaaaataaaatttaccctgttaaccatttttaagtgtacaagtgagaactccttttttttctttttgagacagagtttcgctcttgttgcccagactggagtgcaatggcatgatctcrtctaaccgcaacctctgcctcctgggttcaagtgattctcctgcctcagcctcctgagaaggtgggattacaggtgcccaccaccatgctcagctaattttgtctttttagtagagatggggtttctccatgttggtcagcctggtctcgaactcccaactcaggtggtccacccacctcagcctcccaaagtgctgggattacaggtgtgagccaccacacccagccaagtgtacaagtcagaactcttaagtatattcacagtgttgtgcaattgagct

SEQ ID NO: 273991 - DNA, 568 bp, Homo sapiens
tatattcgttcatctgtccgtggacatttcagttgtttccaccttgtgtytattatgaataattctgtgatgaacatggatgtgcaaatatctcttccaggtccttctctgaatacttttaaatgtacgtacagaagtgagattgctggattacatggtaattctatttttaattctttcgaggaaccctcacactgttttccacaatggctatatcattttacaatctcagcaacagagcataaggctcccaatatctccactttcttgccaacacttgttattttgtgttcaacagtgtccagcctaatgactgtgaggctatatctcattgcggttttgatttgtatttcttctattagtagtgatgtcaaacgcattttcatatgtttcttggccatttgtatatctcgtttgaagaattgtctattcaagtcctttgtacatttaaaaattgtttgtttttcttcttgttgctttgaaaaagttcactatatattctataaatgttgacttgtaacaatttttatatgtatattaaccgcttattagataaacaatttgcaag

SEQ ID NO: 273992 - DNA, 526 bp, Homo sapiens
gacatgagataaggaggatgactggagaatttcctaactcaggagctgccagagagactccagcttctgtcaattgaggtattctacatccacaatgctgacaggtatcagtcactttttagccatttgaacatgttcaaagagccatttcttggtacagggttatttttttacttgtttgrccatatgtagttttaattttagcagttaattttcacatttttcatccattttttggaatgttaccttttggtcttttattttaaaaaatcataacgacattttaatcctttgcttttaaaatgaggaacaggaagcactagcataaagggagagttctaaggatcctattcaaaccctgaaaatatgggacacccctttttctcctccccgaaactctgtagggcttttgatgattggaaaaacatttcgaatcccagcctcagataaggaaaggcaatttcaagaagtcagcccccctgggaagagtcacacttccactacaactaaatgaaacagagaaaat

SEQ ID NO: 273993 - DNA, 526 bp, Homo sapiens
gacatgagataaggaggatgactggagaatttcctaactcaggagctgccagagagactccagcttctgtcaattgaggtattctacatccacaatgctgacaggtatcagtcactttttagccatttgaacatgttcaaagagccatttcttggtacagggttatttttttacttgtttgaccatatgtagttttaattttagcagttaaktttcacatttttcatccattttttggaatgttaccttttggtcttttattttaaaaaatcataacgacattttaatcctttgcttttaaaatgaggaacaggaagcactagcataaagggagagttctaaggatcctattcaaaccctgaaaatatgggacacccctttttctcctccccgaaactctgtagggcttttgatgattggaaaaacatttcgaatcccagcctcagataaggaaaggcaatttcaagaagtcagcccccctgggaagagtcacacttccactacaactaaatgaaacagagaaaat

SEQ ID NO: 273994 - DNA, 378 bp, Homo sapiens
tgttccaggaacaatgttcagaccccatagcttatactaacactaaattcagaaaatgtcaaatgtagtgagatgaatataagttgatcagttctgaccatgagattcaaattctacctagggatgttaggtaattcagaaaatgaggtaatgtcatgtgtctttagtgacttagagtatgctgaggtgacatcaacccacagaaacacaaattagagccaatgaatcaattacagctgagagaggctggggcctctctcaagtygattgaaagttgtggcctttgaaaggacagtgaggccagaagaagaggcatttgcaaagcagagaaacatttaaaaacatttaatctaaaacataaaatgtcttaccagtcat

SEQ ID NO: 273995 - DNA, 593 bp, Homo sapiens
aacgacaaatcactttcttcaaaccacacctaatatagaacctcggtatgcaaaacagactttttaaaaagcaacagcaaagatgctatggttgaagcaggtagaagaggagtagagagtgacccacttccctctccctccccctggctacgtggctgaccctgagacagcatcataaagatggtagtcatctgctatttttaatctgtccagaatgtcttttgataagagaagagraccactacacacaaacacacacacacacacacacacacacacacacttataaattcatatcaagaacatggaagcacatcaaaaccaaagacaaaccttgcattgcaattaatgttgaccatgagatctgaagtctttggtaaaggtggttattccagcatctcagggccaagaggagtcttagtgttgagtcacccagctagtcaagccagatgcgtagcctctgtgtgatgctgcctctaatcattttccctgtacttatttcaaagagatttcataatagaggaagattactgccaaagcagataattttgtcttattttgttttgagacagggtcttgctctgttgcccaag

SEQ ID NO: 273996 - DNA, 496 bp, Homo sapiens
aagaactgaaaagtgccaatatgtatagcatctagagggtctttcatggtaccaatggatgggggtgaagtcaaagccgtcatgcagtgagaggctgaggaaatggaaagttaagaagagaaagcaggtgggtaaggtgttggttytggcaagagagtctttgaaggagggataattgggcaatattgtatctactctataccctttacctctacatgccatgggtgccagggtgccaacttacaagggcagtatatcagcaactccccagacctgtgcaggagagtctgtctttttttctgtctaggttggtgtgcttctaaccctttcttgtaagaaaaaattttaaaacccaaacttctatttctggcttctctgtagtttcttaaattacaactttaaatatgtaaaagtttccagtatacatagcaaggtgatgcaataaataaattaaaaaagaagctgatttgtgagaaagagaggagattagcaacaa

SEQ ID NO: 273997 - DNA, 621 bp, Homo sapiens
gtgtacgttgcaatgttgtgtactctgatgtggctgctctgaagtctcrcattcaaggttctcactgtgaagtcttctacaagtgtcctatttgtccaatgacgtttaagtctgccccaagcacacattcccacacctacacacagcatcctagcatcaagataggagaatcaaaaataatatataagtgttccatgtgcaacactgtgttcaccctgcaaaccttgctgtatcgccactttgaccaacacattgaaaaccagaaggtgtctgttctcaggtgtccagactgttctcttttatatgcacagaagcaacttatggtggaccatatcaagtctatgcatgggacattgcaaagcattgaagggccaacttgggtgtaaacttgcctttgagcattaagcctgcaacttataattcagcatatcagaacaaagaggacagcaaatccatgaatgggaaagagaaattggaaaagaaatctccatctcctttgaaaaaaatcagtggaaaccaagaaagtggccagtcctgggtggacatgttgggagtgtgaccgcctgttcatgcagagagatgtgtacatatcccacgtcaggaaggagcatgggaaacaaa

SEQ ID NO: 273998 - DNA, 621 bp, Homo sapiens
gtgtacgttgcaatgttgtgtactctgatgtggctgctctgaagtctcacmttcaaggttctcactgtgaagtcttctacaagtgtcctatttgtccaatgacgtttaagtctgccccaagcacacattcccacacctacacacagcatcctagcatcaagataggagaatcaaaaataatatataagtgttccatgtgcaacactgtgttcaccctgcaaaccttgctgtatcgccactttgaccaacacattgaaaaccagaaggtgtctgttctcaggtgtccagactgttctcttttatatgcacagaagcaacttatggtggaccatatcaagtctatgcatgggacattgcaaagcattgaagggccaacttgggtgtaaacttgcctttgagcattaagcctgcaacttataattcagcatatcagaacaaagaggacagcaaatccatgaatgggaaagagaaattggaaaagaaatctccatctcctttgaaaaaaatcagtggaaaccaagaaagtggccagtcctgggtggacatgttgggagtgtgaccgcctgttcatgcagagagatgtgtacatatcccacgtcaggaaggagcatgggaaacaaa

SEQ ID NO: 273999 - DNA, 562 bp, Homo sapiens
gttcacttggttgtaggtgtgtgactttatttctaggttctctattctgtcccactggtctatgtatctgtttttgtaccagtactgtagtgttttggttatgtagccttctaatatagtttaaagttggatagtgtgatgtctctggcttttttcttttttcttctttttttttttttttttggcttaggattgctttggtgattyctgctctttttttcattccatatggattttaaagtagtgtttttcctaattctgtgaaaaacaacattggtaatttaataggaatagtgttaaatctagagattgctttgggcagtacggccgttttaatgacactcattcttcccatccatgaacatggaatgtttttccatttgtttgtgtcatctgtgattttattcagcagaaatttttgttattcttgtggagttctttcacctccttggttagatatattcctaggtatttttttatgtggccataataaatgggatagcattcttgatttggctctcagcttggatgttattggtgtatacaactgctgctgactttt

SEQ ID NO: 274000 - DNA, 483 bp, Homo sapiens
tttgttattcttgtggagttctttcacctccttggttagatatattcctaggtatttttttrtgtggccataataaatgggatagcattcttgatttggctctcagcttggatgttattggtgtatacaactgctgctgacttttgtacattgattatatattctgaaattttactgaagttatttatcagttgtttgaatttttggtagtcttttaaggttttataggtattgagtaatatcatctatgaagagagataatttgacttattcttttcctgtttgaatttcctgtttttctttctcttgcataactgctctgctacgactaccagtactatgttgagtcagaatagtgagaatgggcaacattgtcttgttctgatgcttaaggggaatgaatccagcttttgccagttcagcatgagcttggctgcgggtttgtcataggtaactcattattttgaggtatactcctttgat

SEQ ID NO: 274001 - DNA, 587 bp, Homo sapiens
ttgttcttgtttttttaggtcctttaggtgtgatgttagattgataatttggtatcattctagctttttgaggtaggcaaaccacttaagcactataaactttcttcttaatactgctttttctacattccagagattttggtaaattrtgtctctgttttcatttattttaaataattatttgatttctgctttaattttgttaactcaaaagttattaagaaacaagttctttagtttccattttattgtgtgattttgaagtatcttcttgatattgccttctatttttattctccatggtccaaaaatatgcttggtgttgtttcttcattaaaaaaagttattgagacttgctttatggccaaatatgtgattgatcttagagtatatgccacgtgcaaatgaaaagaatgtatcttctgtggttgttgggtggaacattttgtcaatttttattaggtccaattggtgaagtgttgaatttaagtcagaatttccttgttagttttctgcctcactcatctatttttctaattagtatgattcagttttttttctgacattgcagttttctgcacctatca

SEQ ID NO: 274002 - DNA, 598 bp, Homo sapiens
caggtaagcaaacagatttaccttttaagggaataaagaacagaaggcaatgatatataaactgcaaatcacatttagtgagagagagcagaatttgaacttctgagacataaatttgagaaatttcaaaaagaaacaaaacctcttgtaattttattaagaacaaataaatactttcagaaaatcttattctaacacaggggaccaatttttagttttgtattagtgtatttttaatatcaaagctccatatttagagagataaatatttgtgttacagcaaacttaatcacacacaaacttcctttaataaactctctttttcattttagaccaatatccttgatgaatattgatgcaaaaatcctcaataaaatactggcaaaccraatccagcagtacatcaaaaagcttatccaccatgatcaagtgggcttcatccctgggatgcaaggctggttcaatatatgcaaatcaataaatgtaatccagcatataaacagaaccaaagacaaaaaccacatgattatctcaatagatgcagaaaaggcctttgacaaaattcaacaacgcttcatgctaaaaactctcaagaaat

SEQ ID NO: 274003 - DNA, 590 bp, Homo sapiens
aacatgtgggaacacagggagaaggtgaccagctgcaagccaaggagagaggccttgggagaaaccaaccctgctgacacctcgatcttggacttgtagcctctagaactctgaggaggtaagtttctgttgttcaagccccgccatctgtgggattaagctatggcagacagagcagacaaacacrgactggagagttccatgtcacagagaatggctgcaataatattagcctggaaaaggttttagtgttatctaagggtcatttcactaccaatattacgatcacatgtccaacccagttaaaaatatacccctcaataacggaaaagcacacaaatgcctgtacgtgattgttacgaacccaccagtgaaatgtaatttggacacaaccacctctgggacccactttactcagcccctggtctccaggtatatgggtggggggtcacaagattcaggggttggtcacctcagaggcagaatacctcagctggaagataagaaacgatggcagatccctgggcacctcaaatcacaccatctgaaggtgtcatggtgtggcggttgacagcaggaacctgggagtc

SEQ ID NO: 274004 - DNA, 650 bp, Homo sapiens
ggggaagaatctagattgtgggggcagtagagggctctgtgccctgtaacccctcaccctccccgccagccccttggtctccctctcagtcaggtgcggggcgctgggcagtggctttccttctctccagagtgcctgggccactggctccgacacatctgtgtgcatgctgctctgccctgtgtctagaggacttttaaacctgacacggaggcagctgacactcacctgctctgtgtcyccatcctccacatgttcttgggtctgtgtcttgggctgctccaggcctcttgggctgtccccaggctctgaggggccctccctgcctgcgcctccacccgcctcactgatctccactctgggtcacctccagtcccggtccccctgctcctgcccaggcctcccagggactcaccctgggggcagctgaatccaggcgggcagggctgtaagggtagagcatccagggcccggctgcggtaggtgcccgcttcacagaggcggcaggcagcatatctcctcagagaccctgaggctggtcccattcagggcttcggagcccccagggcaggcacgaggttgggcactgcccggggggcagtaatggggaaagacacagctgcagagacagagcccggctggttcatgct

SEQ ID NO: 274005 - DNA, 364 bp, Homo sapiens
gacagaagtagccgggggagcaggggccagagggcgcagccaggccagaggcaccacagaaatggccagggggacaggacaggccctcagagaccatggagagaaacattctggggagacagaaagaaacccaggagatgagccagggaggggagcaggcgggaggaaggggctgtgggaccaggcctctctgaaagkgtggacccaggcgcaccctggcagggaccacctttccgcgatttccttttcatctctcctctctcaggctccctgtgactcctgcctacactggctccaggtagcatttccggcaggtgcctgagggaaagtgtggcagggctcttctctctgtctctctttcccc

SEQ ID NO: 274006 - DNA, 492 bp, Homo sapiens
tctcagggctactctgcccctcacggggcaggcaggtgctgggcctttgccctgtggtgtccctgacccccgccctgggaaggccygatagggcctgcactcaccagggacgaggtgttggagccaggcccgcagtgatgcccagggtggcacaggccctggggctcggccaggccagctttgccacagaatgcccccaggtggcatggctggcagtattccacacgggcggccccaggggcctttcggaaagtgccctgggcagatagagggatgtcaccagggtcaaggttctggaagccacagtggggccagggaggaagcagagcagggccctccaccctctctccttgggcacacagaaccagggagaagacaatctgtcctcaccaaggacagagccctcaggacccatccactagtgtgtgggattgaggtttccatagattgaagtctggctgcaaaacagaggggaggctgcccccacgggga

SEQ ID NO: 274007 - DNA, 492 bp, Homo sapiens
tctcagggctactctgcccctcacggggcaggcaggtgctgggcctttgccctgtggtgtccctgacccccgccctgggaaggcccgatagggcctgcactcaccagggacgaggtgttggagccaggcccgcagtgatgcccagggtggcacaggccctggggctcggccaggccagctttgccacagaatgcccccaggtggcatggctggcagtattccacacgggcrgccccaggggcctttcggaaagtgccctgggcagatagagggatgtcaccagggtcaaggttctggaagccacagtggggccagggaggaagcagagcagggccctccaccctctctccttgggcacacagaaccagggagaagacaatctgtcctcaccaaggacagagccctcaggacccatccactagtgtgtgggattgaggtttccatagattgaagtctggctgcaaaacagaggggaggctgcccccacgggga

SEQ ID NO: 274008 - DNA, 606 bp, Homo sapiens
tgcagggtggggcccatagacatctttgagggtctgcactgtcccctaagatatgcactatccccatgccagagggaagagggactgtaacattaaatagcaaataaatagcaatgtgacaaggagagaggaagagaaaaggataaaagagaaaaaggagagaggagaagtggrgagacttacctgaggaacaacaaaataatttatgctttaatgtcacgttttgcctgctttttggacagaagggctcacattttcactttgcacttgcccctctgagggcagtgtctctccatactcccttctcctccaggcaggagttgctcctcccccttctcccttgggcctgaggacagggctgagagggtggtgctagctctgcctccccagccctagagattgttctggacctgctacatttcaccccccacccccacctttgtaagtagtcctttgattaaactctcctcatatcctcctaatttgagtgtcacatgtttttactgcttgaatgcagagcaatacatcctcccacctccacccccaaagacctgattgttgtcctgtatttcatatgaagttgagctgcataatttagagctctgc

SEQ ID NO: 274009 - DNA, 606 bp, Homo sapiens
tgcagggtggggcccatagacatctttgagggtctgcactgtcccctaagatatgcactatccccatgccagagggaagagggactgtaacattaaatagcaaataaatagcaatgtgacaaggagagaggaagagaaaaggataaaagagaaaaaggagagaggagaagtggagagacttacctgaggaacaacaaaataatttatgctttaatgtcacgttttgcctgctttttggacagaagggctcacattttcactttgcacttgcccctctgagggcagtgtctctccatactcccttctcctccaggcaggagttgctcctcccccttctcccttgggcctgaggacagggctgagagggtggtgctagctctgcctccccagccctagagattgttctggacctgctacatttcaccccccacccccacctttgtaagtagtcctttgattaaactctcctcatatcctcctaatttgagtgtcacatgtttttactgcttgaatgcagagcaatacatcctcccacctccacccccaaagacctgattgttgtcctgyatttcatatgaagttgagctgcataatttagagctctgc

SEQ ID NO: 274010 - DNA, 585 bp, Homo sapiens
cagcagaaactggccattggcacccatcccaagataatttgccctctcacagcacaaaaccctggatttgaaacccaaaaggatcaaggttcaatgcaaaaagaacagagtctggcctaagaggaatgtacaacctcagaaggagggcaaaggggccagcagtgtctttcctgctttcctcaaggggtcttgggaggtggatcccattcagcttgccagaactctcaaaagacaaaattacaacaaatttagtttaaagatcttatttagcttttatttattatttcagaatcaactttgaaacccagtctggataaaaaaattggcttaaacaaatgcatagctcaaaacacaaattcttggagcttcaaaatttgagagagaacttgcccaggacccctgctgctgtgagagatctgtgtgcacaatgggcctggtgggtcgctgtgcttggccactccatgcttctggggtttgatggaagttctacttcagattgcatttcctacacgaatctgttaaaaaaaaaaamaaaacctttacatacattaaatttagcagagtttatttgagcaaagaaacaat

SEQ ID NO: 274011 - DNA, 477 bp, Homo sapiens
tataacccatacttaatttattctttcattaaacctttagaacattctacccagtttcttcaatctctggaaacctggcagaggtattagcaaccagtgaagtggccaacgtgcaagcaagtccatcacttatgcgccgtgcaagcaatgtttaagcatccctaagcttctgaagcacctcactgatttcttycctgcctctttccgggcaaaaccaaaagcaagtaggtaaaggttgtgttaacacaggaaaagaacactcccaaacaccacccgataggagtcctagttcatcccaaaatacctctaccttaaatgtccttaaaaatcaatgatctctaggttttgatactcctccagcttgttctatgttaacaatagggaagaggagtgatgaagtatccaacagttattcataatgagcactaaaaaccatttttaccatcgatacttcaccagtgtgaaatgactgaagta

SEQ ID NO: 274012 - DNA, 552 bp, Homo sapiens
ttcctcaagagtccttttattctatcttcttgtctagctcttgaccttcctgagtttttattaaagctctgctgtgctgtaggttacatcaaagagtgcctcctccatgaagcccstcaaatatcttaacccttggtgatccacctgtcctcgctcccctgggacagccacactggtttcctccagtgcggcagttgtgaaccagcctcatttcttagctgtttcccccgcctgtgggcggcaagccactcaggtgccaaggcaagagactgaaggcaaaaactgttccagtataataaagaaaatatacagaataagaatagttatactagaaatagattatagatatgattatatatgaatatcattaatcattagtttgttaacattactctttattccaatattataataatctttgttctacaattataacttaggaaaagccaggccatacagagataggagctgaagggacacggtgagaagtgactggaagacaagagcgtgagccctctgttacgcctggaaaaggccactagagggctccct

SEQ ID NO: 274013 - DNA, 585 bp, Homo sapiens
ggtatatgggatcacttaggataatggtagttctatcagatggctcaagagttatcattattatatattatattgcctatagytttccttgtgcctattttttcttttctttcttttttctttcctttttgttttttttaagacagggtctcactctgctacccaggctggagtgcggtggcacaattatggctcactgcagccttgaactcctgggcccaagcaatcctcctgcctcagccttccaagtagctggaactacagctgtacactaccatgcctagctaattttatttttcttttgtagagatagggtatcactatgttggccaggtgcattttgaactccttttaaatttttttcctgatccatgatctttgctattttctatctcattgaaaaagtcataacctttcaccattacaaataaagaactacaattttttttttttttttttttggaaacaaggactcactgtgtcacccaggctgaagtgcagtggcgtgatcttggctcacagcaacctctgcctcccaggttcaagggattctcccctcagcctcctgaacaagctgggaccaca

SEQ ID NO: 274014 - DNA, 639 bp, Homo sapiens
tgttaagcttctgaccctgtagagacagctggctttgcagctgtgtgtgggagtggcaggagtcacagagccagaacaggtagctgagacagagacagacagtgtaagagagctgctgaatgaaaccatctttcacctgcctatggccccttgagtgttctttcagctatataagatgggggtctcaccatgttgcccaggctggtctcaaaatcctgggctcaggtgatcctcccaccttggcatcccaaagttaggtattacaggtgtgagccaccatgcctgaactccatcttgaaggtagaactaacaagatttactgataggtagaaggtggtggggtgtgagaaagagaggaattgaagataattccaagtgagtctggtgacttttccatattccaaagataaaaagaaactcataacttttcatgttttctcatatgcagcaatagatacaaaawgacagtggagcagtgtttcctgttttaggggaaaaggatcacaattttacactagtatgcttgactctctttgaaatggcaatttacctaggcagccagagagattggctagctgagatccaactaattttaggcaactacaacaaacaagaagagagagaattggggacaaaaag

SEQ ID NO: 274015 - DNA, 617 bp, Homo sapiens
aacagtttataaatatcaacttaatatttattagtctatttgtatttgctagtgaggcattaacatcatttattaaaaatgttaaccagacattcagggtgacattcagrcccctgtcaccatatagcaaaattaactcaagatagattaaagacttaagtatacattctcgaactatataaattccagaagaaaaccttgaaaataactttctcacatcagccttggaaaataatttatggccctcttcaaaagcaattgcaacaacaacaaaaatccatgagtaggacctaattgaagtaaagaacttccacacagcaagagaaactattgacagagtaaacagacaacctacagcatggaagaaaatatttgcaaactatgcatctgacataggcctactatccagaatctaaaaggaactaaacaaataaacaatgaaaaaacaaccccatttaaaagtggccaaaagatacaaacagacacttcttaaatgacgacatccaagtggccaacaaacataccaaaaagtggtcagcatcataatcattagagaaatgcaaatcaaaatcacaatgatatactatctcacaccagtgagaatggctttgttaaaa

SEQ ID NO: 274016 - DNA, 617 bp, Homo sapiens
aacagtttataaatatcaacttaatatttattagtctatttgtatttgctagtgaggcattaacatcatttattaaaaatgttaaccagacattcagggtgacattcaggcccctgtcaccatatagcaaaattaactcaagatagattaaagacttaagtatacattctcgaactatataaattccagaagaaaaccttgaaaataactttctcacatcagccttggwaaataatttatggccctcttcaaaagcaattgcaacaacaacaaaaatccatgagtaggacctaattgaagtaaagaacttccacacagcaagagaaactattgacagagtaaacagacaacctacagcatggaagaaaatatttgcaaactatgcatctgacataggcctactatccagaatctaaaaggaactaaacaaataaacaatgaaaaaacaaccccatttaaaagtggccaaaagatacaaacagacacttcttaaatgacgacatccaagtggccaacaaacataccaaaaagtggtcagcatcataatcattagagaaatgcaaatcaaaatcacaatgatatactatctcacaccagtgagaatggctttgttaaaa

SEQ ID NO: 274017 - DNA, 617 bp, Homo sapiens
aacagtttataaatatcaacttaatatttattagtctatttgtatttgctagtgaggcattaacatcatttattaaaaatgttaaccagacattcagggtgacattcaggcccctgtcaccatatagcaaaattaactcaagatagattaaagacttaagtatacattctcgaactatataaattccagaagaaaaccttgaaaataactttctcacatcagccttggaaaataatttatggccctcttcaaaagcaattgcaacaacaacaaaaatccatgagtaggacctaattgaagtaaagaacttccacacagcaagagaaactattgacagagtaaacagacaacctacagcatggaagaaaatatttgcaaactatgcatctgacataggcctactatccagaatctaaaaggaactaaacaaataaacaatgaaaaaacaaccccatttaaaagtggccaaaagatacaaacakacacttcttaaatgacgacatccaagtggccaacaaacataccaaaaagtggtcagcatcataatcattagagaaatgcaaatcaaaatcacaatgatatactatctcacaccagtgagaatggctttgttaaaa

SEQ ID NO: 274018 - DNA, 610 bp, Homo sapiens
gcatcttctcctctggtcaaatctaactaactctattcaccacacatgccatactatttcccagacctaagattctgtataattattatctttccacctagagaagccttcctccagatatccacattttcacaagctaaatatattttagggactagttcatttgtcatctatgctaatgacacatttccctcttctgaatgtctaaaacattttatctaaacattgttttggttgttttttaatggcacttcaacatagtataacagttgtttaaatatgcattgctccaaaggcaagatcatcatccacacaactgtgtattatattcttctcttcttacaccaccatactgtcttatattaatattatttggataatcamtattgactgcattatctataaatatattatggcatttgactgacctagtgtcgaattccactctttatatttgtagctgtgtaatcatgggtatgtatttatccactctattctgtacactcatgaaaatgattagtggaaaataagttatgcagtatatctacaaagtcttgcaataaaggcacacaataaacacttcataaataggaatcatctaaatttaaat

SEQ ID NO: 274019 - DNA, 610 bp, Homo sapiens
gcatcttctcctctggtcaaatctaactaactctattcaccacacatgccatactatttcccagacctaagattctgtataattattatctttccacctagagaagccttcctccagatatccacattttcacaagctaaatatattttagggactagttcatttgtcatctatgctaatgacacatttccctcttctgaatgtctaaaacattttatctaaacattgttttggttgttttttaatggcacttcaacatagtataacagttgtttaaatatgcattgctccaaaggcaagatcatcatccacacaactgtgtattatattcttctcttcttacaccaccatactgtcttatattaatattatttggataatcaatattgactgcattatctataaatatattatggcatttgackgacctagtgtcgaattccactctttatatttgtagctgtgtaatcatgggtatgtatttatccactctattctgtacactcatgaaaatgattagtggaaaataagttatgcagtatatctacaaagtcttgcaataaaggcacacaataaacacttcataaataggaatcatctaaatttaaat

SEQ ID NO: 274020 - DNA, 610 bp, Homo sapiens
gcatcttctcctctggtcaaatctaactaactctattcaccacacatgccatactatttcccagacctaagattctgtataattattatctttccacctagagaagccttcctccagatatccacattttcacaagctaaatatattttagggactagttcatttgtcatctatgctaatgacacatttccctcttctgaatgtctaaaacattttatctaaacattgttttggttgttttttaatggcacttcaacatagtataacagttgtttaaatatgcattgctccaaaggcaagatcatcatccacacaactgtgtattatattcttctcttcttacaccaccatactgtcttatattaatattatttggataatcaatattgactgcattatctataaatatattatggcatttgactgacctagtgtcgaattccactctttatatttgtagctgtgtaatcatgggtatrtatttatccactctattctgtacactcatgaaaatgattagtggaaaataagttatgcagtatatctacaaagtcttgcaataaaggcacacaataaacacttcataaataggaatcatctaaatttaaat

SEQ ID NO: 274021 - DNA, 594 bp, Homo sapiens
tataccaaatttaccattctgttaaaaaattccattaaaaggttttcatattcatgagttactttgtgtttaatacatcatttttaaataaatttatctagcattgccttctgaatrtatgaagattatttcaatttttgtttttatgtttttcaaaatagaaaaggctataaaatacttactatatttaatattaaattgtattctattctatattaaaatttaagttatttttataatgcatttttctcgttaatataatgttagcctttgtttaatattaaccagtttatattttgcttgacatcttattttttagttactaggttccataccagattggtaaacagaagcatattagcttttggcaaaatggcatctccaagcaatggaatatatttttatacataggtgtatacactaatttttttctaactttatttattctaaaaaatttgctattcttcaaaacagaattaatttagaaacagattaaatcaccacaggtaaatcggaattgattatagcttgcgcttatacagtagatagtatatgctagatctgtacctatgttgtattatttaatagatcaaa

SEQ ID NO: 274022 - DNA, 594 bp, Homo sapiens
tataccaaatttaccattctgttaaaaaattccattaaaaggttttcatattcatgagttactttgtgtttaatacatcatttttaaataaatttatctagcattgccttctgaatgtatgaagattatttcaatttttgtttttatgtttttcaaaatagaaaaggctataaaatacttactatatttaatattaaattgtattmtattctatattaaaatttaagttatttttataatgcatttttctcgttaatataatgttagcctttgtttaatattaaccagtttatattttgcttgacatcttattttttagttactaggttccataccagattggtaaacagaagcatattagcttttggcaaaatggcatctccaagcaatggaatatatttttatacataggtgtatacactaatttttttctaactttatttattctaaaaaatttgctattcttcaaaacagaattaatttagaaacagattaaatcaccacaggtaaatcggaattgattatagcttgcgcttatacagtagatagtatatgctagatctgtacctatgttgtattatttaatagatcaaa

SEQ ID NO: 274023 - DNA, 583 bp, Homo sapiens
cagtctactaacagaaatggtgttagtttaataatataaaataagttgagggagcagacttgggtttttgaaatatttccagcttcattttaagaaattgacagttatttaatcctttagyttctgacaaatagtggaaaatactgaagattacatgataaaatgaggacataagatcaagttatcatactattaaaaaaacttctctactggaggaataagacttcaataaatataaaagaaataatgttttgtgttaaaaaattataaatcagttttataaaataatactaaattgaccatttattcaaacaagatagagaatatcttactgatcacaactttctttctctccagaatcattgtctactgctgttagtcttaaacttcacagcctagctatccagaactcctccaaattctccacacatacagcatactgtttcacacctgtacttgtgctcatattaatctccttgttgagactttcatcaaaaagcctgtcttttaacacatcgcccaacacttgcctaacacgttaggcaagaaactttttctctattgtcccatgatactccacgcc

SEQ ID NO: 274024 - DNA, 619 bp, Homo sapiens
taaagaactacctgagactgggtcatttataaagaaaagaggtttaatttattcacagttccacagcccacacaggaggctgagaaggcctcaggaaaattactatcataatggaaggtgaaggggaagcaagagcatattcacatggcaatagaagagaaaaacagtgaaaaagaaagtgccaaatactttaaaaccatcatatgtcaaaataactcctcactataatgagaatagcagggagaaatctgcctccatgctccaatcacctcccactacattcctctcctgacattgggaattacaattcaacatgaaatttgtgtggggaygcagagaaaaaccatattactgtcctcctggtccctcccaaatctcatgtccttctcacatttcaaaagacaatcatgcctttccaacagttccccaaagtcttaacttattccagcattaactcaaaagtccaagtccaaatctcatctgagacatggcaagtcccttccacctatgagcttgtaaaataaaaaaacaagttagttacttccaacacacaatggaagtacaggcattgggtaaatcctcccattccaaatttaaaaaattggtcaaaacaaagggg

SEQ ID NO: 274025 - DNA, 605 bp, Homo sapiens
actcaaaattagtattgttattatagctgttagtcaatgtagcttcttaattgaaattttttattgaaaaaactctaatttctaacattagtaaggaatctttaatttattgatagttttgcacaatttaactggatatattaagtgtgtgtaaatatgtgtgtatgggtttcttttttatttctttttattgttttttgagacagggtctctctcatccaggctgggcatggtcttggctcaattcaaccttctcctcctgggttcaagtgatcctcccacctcagcctcccaagtagctgggactaaaggcgcattccattacrctcagctaagttttgtattttttgtagagacagggtttcgctatgtcgaccaggctggtctcaaacccctgagttcaagtgatcctcctgcctcggctgggtttctcaaagcaagagaaacttatttttttaatatacagataaattttgaggtgaaagggaggattgagaaaatcaagttaatgtttataaacagtacttcttcccattaataccaaatagggttttaattaaatataatgctagtaaatcagtctataagctaatcaattgacagaa

SEQ ID NO: 274026 - DNA, 605 bp, Homo sapiens
actcaaaattagtattgttattatagctgttagtcaatgtagcttcttaattgaaattttttattgaaaaaactctaatttctaacattagtaaggaatctttaatttattgatagttttgcacaatttaactggatatattaagtgtgtgtaaatatgtgtgtatgggtttcttttttatttctttttattgttttttgagacagggtctctctcatccaggctgggcatggtcttggctcaattcaaccttctcctcctgggttcaagtgatcctcccacctcagcctcccaagtagctgggactaaaggcgcattccattacgctcagctaagttttgtattttttgtagagacagggtttcgctatgtcgaccaggctggtctcaaacycctgagttcaagtgatcctcctgcctcggctgggtttctcaaagcaagagaaacttatttttttaatatacagataaattttgaggtgaaagggaggattgagaaaatcaagttaatgtttataaacagtacttcttcccattaataccaaatagggttttaattaaatataatgctagtaaatcagtctataagctaatcaattgacagaa

SEQ ID NO: 274027 - DNA, 605 bp, Homo sapiens
actcaaaattagtattgttattatagctgttagtcaatgtagcttcttaattgaaattttttattgaaaaaactctaatttctaacattagtaaggaatctttaatttattgatagttttgcacaatttaactggatatattaagtgtgtgtaaatatgtgtgtatgggtttcttttttatttctttttattgttttttgagacagggtctctctcatccaggctgggcatggtcttggctcaattcaaccttctcctcctgggttcaagtgatcctcccacctcagcctcccaagtagctgggactaaaggcgcattccattacgctcagctaagttttgtattttttgtagagacagggtttcgctatgtcgaccaggctggtctcaaaccyctgagttcaagtgatcctcctgcctcggctgggtttctcaaagcaagagaaacttatttttttaatatacagataaattttgaggtgaaagggaggattgagaaaatcaagttaatgtttataaacagtacttcttcccattaataccaaatagggttttaattaaatataatgctagtaaatcagtctataagctaatcaattgacagaa

SEQ ID NO: 274028 - DNA, 605 bp, Homo sapiens
actcaaaattagtattgttattatagctgttagtcaatgtagcttcttaattgaaattttttattgaaaaaactctaatttctaacattagtaaggaatctttaatttattgatagttttgcacaatttaactggatatattaagtgtgtgtaaatatgtgtgtatgggtttcttttttatttctttttattgttttttgagacagggtctctctcatccaggctgggcatggtcttggctcaattcaaccttctcctcctgggttcaagtgatcctcccacctcagcctcccaagtagctgggactaaaggcgcattccattacgctcagctaagttttgtattttttgtagagacagggtttcgctatgtcgaccaggctggtctcaaacccctgagttcaagygatcctcctgcctcggctgggtttctcaaagcaagagaaacttatttttttaatatacagataaattttgaggtgaaagggaggattgagaaaatcaagttaatgtttataaacagtacttcttcccattaataccaaatagggttttaattaaatataatgctagtaaatcagtctataagctaatcaattgacagaa

SEQ ID NO: 274029 - DNA, 292 bp, Homo sapiens
taaaaaatgtattataagaactctaaacaattatctctacatattattattaaagatttcatacttataaatatttwaatacaatgtatattaaataaatatgtataaataataagtagtatacaatccattatctgatatactttgataaaacattttatcattatctaatctctaatattatcttgatgaatttttcccttcaaattgtttttcagtccagtcaaattctaaatcacctatttatttggatttcgtaaagatactgtgtttattaaagttctcatacaag

SEQ ID NO: 274030 - DNA, 622 bp, Homo sapiens
ataaaactcatcattttataatattctaaccttcctattagttatttgacaataatggggcaaattctttcaatttaacattggtgattaacatacaaacatctgcctatgcctactgctttaatgattttgtacttgaactacatgacttagtaatagttctcaaggcttgcttcagtatgatcctgatgggaggggacatagctaggctttttcataactgacatcaaactgaccactctagttgcatatgaataaaacttgaaaaattttgtctctactctaccatccgatttttaaattctgctggaaatatgcttggacacaaaagttgacttattttaaaccacaataatattttttggtcattttaaacttaatctctatttcacttgttcagaattattcttctagtaaattattgtgttgtgtcacctctgattaatttatctgcatctgtgtcattaaaattatgccacagttgcactattttcttacttatgagcacacwttaactcattttttttttcctctaaacttcatactctaggaaatctaaacaagaactagtttgagttggagataatgtgaggttgggtaatgggaacaaaaatacaggtag

SEQ ID NO: 274031 - DNA, 540 bp, Homo sapiens
taatctctatttcacttgttcagaattattcttctagtaaattattgtgttgtgtcacctctgattaatttatctgcatctgtgtcattaaaattatgccacagttgcactattttcttacttatgagcacactttaactcattttttttttcctctaaacttcatactctaggaaatctaaacaagaactagtttgagttggagataatgtgaggttgggtaatgggaacaaaaatacaggtagaatgaataagatctactatatggtggcacaatagaatgactatagttgataatttattgtatacatttaaataaaaagtggaattggaatgtctctaacacagataaatgataaagctttaggtgacagatattccaactatcctagttttatcattacttactgtatgyctcaacacatataatacattgtatgatacatacattgtatatatatcaaaacatcacatgtaccccataaatatatacaactatgtgtaccccaaataattaaaaataaaaatgttaaaaagaac

SEQ ID NO: 274032 - DNA, 550 bp, Homo sapiens
ttcaacatcaccaatcatcagagaaatgcatatcaaaaccacaatgagatatcatctcaccctagttaaaactgattttaccaaaaaggsagagaataacaaatattgtcaaggatgcacagaaaggggaacccctatacaccgtggctaggaatgtaaatctgtacggccactatgaaaaacagtacagaacttcctcaaaaaaactaaaaatatagctattacatgatccagcatcccactactgggcatatatttaaaagtaagcaaatcagtttatcagagagatatctacactctcatgtttattgcagcactaatcacaatagcaaaaatatggaatcaacctaagtgcccatcaatgaatgaatggataaagaaaatgtggtatgcaggcatatacatatacatatatattattcacacacacaatggaatataattcagccatagaaaagaatgaaatctgatttgtaccaacgtggatggatggatgtaactggaggtcactatgttaagcgaaataaggcaagcaaacaaagacaaatct

SEQ ID NO: 274033 - DNA, 560 bp, Homo sapiens
aaaaatttgcaaaaggtatacctgataaaggacagttatccaaaataaacaaataaatatttaaattcaacaataagaaaacaatcaattggattaaaaaaataggccaaagaccttaacagacctctcaaaaaaaaaagacatgcagttggcaaataaacatatgaaaagattttcttaatatrtattatagagaaaatacacattgaaacaataagatactattacatctattagaatggccagaatccagaatgctgatagcaccaaatactggtgagcaagtggagcaacaggaactcttattcactgccagtgagaatgcaaaatggtacagccatgttaaaagacattttgttgatttcttactaaaccaaacaaaatgtgctcttaccacacaacctaccagtcatattccatggtatttatccaacgaattggaaaatttatgtccatgcaaaaatctacacaagcatgtttatggacactttattcataattgccaaatattggaagaaaccaagatgtccttcagtaggtgaatggataaagatattgtg

SEQ ID NO: 274034 - DNA, 560 bp, Homo sapiens
aaaaatttgcaaaaggtatacctgataaaggacagttatccaaaataaacaaataaatatttaaattcaacaataagaaaacaatcaattggattaaaaaaataggccaaagaccttaacagacctctcaaaaaaaaaagacatgcagttggcaaataaacatatgaaaagattttcttaatatatattatagagaaaatacacattgaaacaataagatactattacatctattagaatggccagaatccagaatgctgatagcaccaaatactggtgagcaagtggagcaacaggaactctyattcactgccagtgagaatgcaaaatggtacagccatgttaaaagacattttgttgatttcttactaaaccaaacaaaatgtgctcttaccacacaacctaccagtcatattccatggtatttatccaacgaattggaaaatttatgtccatgcaaaaatctacacaagcatgtttatggacactttattcataattgccaaatattggaagaaaccaagatgtccttcagtaggtgaatggataaagatattgtg

SEQ ID NO: 274035 - DNA, 488 bp, Homo sapiens
agatactattacatctattagaatggccagaatccagaatgctgatagcaccaaatactggtgagcaagtggagcaacaggaactcttattcactgccagtgagaatgcaaaatggtacagccatgttaaaagacattttgttgatttcttactaaaccaaacaaaatgtgctcttaccacacaacctaccagtcatattccatggtatttatccaacgaattggaaaatttatgtccatgcaaaaatctacacaagcatgtttrtggacactttattcataattgccaaatattggaagaaaccaagatgtccttcagtaggtgaatggataaagatattgtggtaactccagacaatagaatattatccagtgctaaaaaggaatcagtgatccagccaagaaaatatgtagaggaaccttaaatgcatattactaagtgaaaaaaaactaatctgaaaaggctatgatttcaataaatgatatcc

SEQ ID NO: 274036 - DNA, 596 bp, Homo sapiens
ctttagtgactatttttcaattaatgtaaaattgaatcattatttactttgatattcattgaacatattaatagtgttggcaacacatgctcctactgttgctaggagctgcagtgtttggatctcaggttcttttttcttttttttttttttttgaggctcattttccattttaaaaggagatgatattggcttcaaagggtatcttagccaaaatatytataatttatgaaaagatattttaaaacattctttaagatacacaatagtaaaagagattaagtttttatactggaataccttacaaaatacttagagtcataaatcagacatagattatataagaagagcctattccatgtctctaccttcctttatctgactctgggtcactgctcctctttactctctcacgcccatctcctttttggtctaagatttccttgagaactgatcaaatatttacaaaaaacctgagtctcaggcattcattttggtagaaatgtagatcaggatctttggattcacagtccagggttagaaaaatgcttgtctgaattcttcactccataaatcttgggtaaacactgagcctc

SEQ ID NO: 274037 - DNA, 596 bp, Homo sapiens
ctttagtgactatttttcaattaatgtaaaattgaatcattatttactttgatattcattgaacatattaatagtgttggcaacacatgctcctactgttgctaggagctgcagtgtttggatctcaggttcttttttcttttttttttttttttgaggctcattttccattttaaaaggagatgatattggcttcaaagggtatcttagccaaaatatctataatttatgaaaagatattttaaaacattctttaagatacacaatagtaaaagagattaagtttttatactggaataccttacaaaatacttagagtcataaatcagacatagattatataagaagagcmtattccatgtctctaccttcctttatctgactctgggtcactgctcctctttactctctcacgcccatctcctttttggtctaagatttccttgagaactgatcaaatatttacaaaaaacctgagtctcaggcattcattttggtagaaatgtagatcaggatctttggattcacagtccagggttagaaaaatgcttgtctgaattcttcactccataaatcttgggtaaacactgagcctc

SEQ ID NO: 274038 - DNA, 602 bp, Homo sapiens
tttataaaccaatttgaaactagtatagagtaaaaagtagaggttgaggaatcttgtaaaacaaaaaaattaagctttgtaatttcagacagaggctttcaaatattcttactggaaatgccaataaaactatcagaatattgctagtttctcttgagttcagaggaatgatccacagatttttatatgcctccatctgcccactttatgtggccaaagcaaacatacccagtcacttcagaaattagccctctattacagttcaatrtaaaagaggatcaagtagatgagaattttgagttcatgaccctgttatctgtagataattctgttctcaatcttagttgaaacttggcaaaggaaaaaaatttaaagggttgccttgatggaatatataaaaaggagtcgcttcctaaatacatttcaaaaaactgtatgatattgtattctttgtagaaaaatataatatatgctaagtatatgtccccaaatttaatataaacttcaaaaacagcacaaaaataattctttttcaggtcttttttaggcacaagtataatgtgaagacaaaggcagcaaatgcatatgcactttataagaat

SEQ ID NO: 274039 - DNA, 602 bp, Homo sapiens
tttataaaccaatttgaaactagtatagagtaaaaagtagaggttgaggaatcttgtaaaacaaaaaaattaagctttgtaatttcagacagaggctttcaaatattcttactggaaatgccaataaaactatcagaatattgctagtttctcttgagttcagaggaatgatccacagatttttatatgcctccatctgcccactttatgtggccaaagcaaacatacccagtcacttcagaaattagccctctattacagttcaatataaaagaggatcaagtagatgagaattttgagttcatgaccctgttatctgtagataattctgttctcaatcttagttgaaacttggcaaaggaaaaaaatttaaagggttgccttgatggaatatataaaaaggagtcgcttcctaaatacatttcaaaaaactgtatgatattgtattcttygtagaaaaatataatatatgctaagtatatgtccccaaatttaatataaacttcaaaaacagcacaaaaataattctttttcaggtcttttttaggcacaagtataatgtgaagacaaaggcagcaaatgcatatgcactttataagaat

SEQ ID NO: 274040 - DNA, 604 bp, Homo sapiens
gtttcctcttgtgctttccagaagaaaagaaagcttgcttcccaagacaatactaaattaaaatttgttttctaaacagtctgtagaagtatttatcttcatcatttatgggtaagttttattttacataaaatcaaaagcaaaacagaagaattacccggtgataaaaacaaattatctgctcttttaaataaactattattttaagactatcgtgacaacatgagaatcaagtgactactgctgtaaatttatataatacagaccagcyacttaaatgatgaccacatccggggaacaatggtttacggtgttaataaaaatgtgctcactcagagttgcacaagtgaagtccaccttccagctcaaaataaacaaaaagaattgggttttgacatgaatttgtgatattatgatttttaattccttctaaatagttaatagatattcatagttttacttttaggaaatatgctgcaggaattattacagagctgttactacatttttacagagctgactgaaaaagtttattctctaataataaatttgctgtgacagctttaaatcttggaaagaaaaagataatgtgaggaatctatct

SEQ ID NO: 274041 - DNA, 604 bp, Homo sapiens
gtttcctcttgtgctttccagaagaaaagaaagcttgcttcccaagacaatactaaattaaaatttgttttctaaacagtctgtagaagtatttatcttcatcatttatgggtaagttttattttacataaaatcaaaagcaaaacagaagaattacccggtgataaaaacaaattatctgctcttttaaataaactattattttaagactatcgtgacaacatgagaatcaagtgactactgctgtaaatttatataatacagaccagccacttaaatgatgacyacatccggggaacaatggtttacggtgttaataaaaatgtgctcactcagagttgcacaagtgaagtccaccttccagctcaaaataaacaaaaagaattgggttttgacatgaatttgtgatattatgatttttaattccttctaaatagttaatagatattcatagttttacttttaggaaatatgctgcaggaattattacagagctgttactacatttttacagagctgactgaaaaagtttattctctaataataaatttgctgtgacagctttaaatcttggaaagaaaaagataatgtgaggaatctatct

SEQ ID NO: 274042 - DNA, 604 bp, Homo sapiens
gtttcctcttgtgctttccagaagaaaagaaagcttgcttcccaagacaatactaaattaaaatttgttttctaaacagtctgtagaagtatttatcttcatcatttatgggtaagttttattttacataaaatcaaaagcaaaacagaagaattacccggtgataaaaacaaattatctgctcttttaaataaactattattttaagactatcgtgacaacatgagaatcaagtgactactgctgtaaatttatataatacagaccagccacttaaatgatgaccacatccggggaacaatggtttacrgtgttaataaaaatgtgctcactcagagttgcacaagtgaagtccaccttccagctcaaaataaacaaaaagaattgggttttgacatgaatttgtgatattatgatttttaattccttctaaatagttaatagatattcatagttttacttttaggaaatatgctgcaggaattattacagagctgttactacatttttacagagctgactgaaaaagtttattctctaataataaatttgctgtgacagctttaaatcttggaaagaaaaagataatgtgaggaatctatct

SEQ ID NO: 274043 - DNA, 604 bp, Homo sapiens
gtttcctcttgtgctttccagaagaaaagaaagcttgcttcccaagacaatactaaattaaaatttgttttctaaacagtctgtagaagtatttatcttcatcatttatgggtaagttttattttacataaaatcaaaagcaaaacagaagaattacccggtgataaaaacaaattatctgctcttttaaataaactattattttaagactatcgtgacaacatgagaatcaagtgactactgctgtaaatttatataatacagaccagccacttaaatgatgaccacatccggggaacaatggtttacggtgttaataaaaatgtgctcactcagagttgcacaagtgaagtccaccttccagctcaaaataaacaaaaagaattgggttttgacatgaatttgtgatattatgatttttaattccttctaaatagttaayagatattcatagttttacttttaggaaatatgctgcaggaattattacagagctgttactacatttttacagagctgactgaaaaagtttattctctaataataaatttgctgtgacagctttaaatcttggaaagaaaaagataatgtgaggaatctatct

SEQ ID NO: 274044 - DNA, 544 bp, Homo sapiens
tggtgggaagatgctactcaaaaattagtgaatataatacttaaagtcaatcatggactcctccatagtcaataaacaaaacagaatttgttgctgatggggaagcggtgaagagggaaagatatccttataagtcattcatagttttactatatgcagttaaaactcctaaagttaatggaaaatgactaagcctttatgactcattggaaaaacaaaagccaaaaaagtccaggggagactcccctggtatttggtcactgaggagctgtatcaggactggaaatgctcatcaggcaagatgaaaaatttggtgataaattagcctaggtacctctgatacaagtttctaaaaagatgaaatgatacttcattcacacaaatatctgtaataagttttaaacaggaccaataatataagctaaaaaaaaaacrtaaggaaacattttaaggtggttaaatctgttggatactcatgaacttctgaaagccccacagacccttactcagagctggcatacggcatactcttactttacataag

SEQ ID NO: 274045 - DNA, 513 bp, Homo sapiens
acttaacgaacagctcagctaaacaatcatatacaggcaggagktataaattatacaggtgtcacaggttgaaacctagaattgagtttcagcctgggaggccacatgggtccatggctttgcccaggaaggaattcaagagtgagccaacagaattaagtgaaagcaaatttgttaagaaaataaaggaatacaagtatggctactccataggctgagcagccctgagggctgctggttggctgtgtttatggttatttcttaatcatatgctaaacaaggggtggatttttcatgagtttccttggaaaggggtgggaaattagaggaactgagggtttctcctcctttaagactacacagggtaactttcagaggttgccatggcatttgtaaactgtcatgatgctggcgggagtgtcttttagtgtgctaatacattacaattagcttacaatgggcagtgaggatggccggaggtgactttcagcgcaatcttgaatttggtgggtt

SEQ ID NO: 274046 - DNA, 554 bp, Homo sapiens
ctcaaaaaaaaaaaaaaaaaaaaattaccaaaaatttagttaataaaacaaataccaattgttcagtatctaacttcatctataactcaatgttttgataacattgaagaatcttcacagttctcaacactcttgtggtgagaaactcagtgaaacttgtggaagacaaggtagtggcactgtgactcaatgaagactgagcaaaatggcattttgcaaagccagggatgtctgaactactgtatttttttccattcaaatctttagggcaccagctagaatgagacaaatyttcttttctagtttcactaaagcttatgcaaattcttgaatctgtttcaccacccggaaagacagctaaaatccacctaaagaggaacaggctgggttagtcaaggaaagaaggtgacatattttggttagggcagtaagtcactttcataaataaagaagaaaaagtgataaaatggaatgcacacaaaaatagatttatggaggaaaaagagtaaccataccaagaatattagttttttctcaaactgctataaataaat

SEQ ID NO: 274047 - DNA, 579 bp, Homo sapiens
gagaacacttgtggttctgtttgtgcttccatgtctctccttataaaattatttcaaaccccacctgctggagggaagtctgattattttacacacaaaataggtctttcttaaggaaagcgggaggctgagtgtctccaaaattaggcaggcctgggaatttcaaatccagaatctcattgcctagaggaaaagatagcaagagaaatccaaggctggcatatttagctggttttctcctaaatggaggaaataactggcattgagcaagtgaggtagagaggaatcaaacatgactgtggttatttgataggcaaattaactaaaaacagatgaacacctcaatgcattcatagaacaggcaataaactgtaatgatgcttattgcgcttgggaaacaatgtcaacatctgtgagaaagaaamaaaaaccttttctttaaatgagaatctcttcaaatgaagagccttcctataacttctgtgccttttctccttgtgtgtgtcttttggatttgaactgtggattatcctaaaagttttgtccctgaggggtatctgactcatagagtaatattaa

SEQ ID NO: 274048 - DNA, 579 bp, Homo sapiens
gagaacacttgtggttctgtttgtgcttccatgtctctccttataaaattatttcaaaccccacctgctggagggaagtctgattattttacacacaaaataggtctttcttaaggaaagcgggaggctgagtgtctccaaaattaggcaggcctgggaatttcaaatccagaatctcattgcctagaggaaaagatagcaagagaaatccaaggctggcatatttagctggttttctcctaaatggaggaaataactggcattgagcaagtgaggtagagaggaatcaaacatgactgtggttatttgataggcaaattaactaaaaacagatgaacacctcaatgcattcatagaacaggcaataaactgtaatgatgcttattgcgcttgggaaacaatgtcaacatctgtgagaaagaaaaaaaaaccttttctttaaatgagaatctcttcaaatgaagagccttcctataacttctgtgccttttctccttgtgtgtgtcttttggayttgaactgtggattatcctaaaagttttgtccctgaggggtatctgactcatagagtaatattaa

SEQ ID NO: 274049 - DNA, 601 bp, Homo sapiens
gaacttatttggaactggagcaaaggtcacttttgttatttgttaacaaagagattgaatgcattatgcccctgctctagggatctgtggaactttgaaattgatagygatgatttagggtggcagaagagatttctaagcagtaaagcatccaagatgtagccaagctgcttctaacaacaacatatgctcctatgcaggagcaaagaagtgatctgaaatttgaacttacatttaaaagggaagcagagcataaaagtttggaaaatttgcagctcagccatatagtagaaaagaaaactccattttctgggtagaattttaaggcagttacaggaatttgcataaataaaaggtaggcaaatgctaatagccaagacagtaagaaaaaggcctccaaggcattacagagacctttaggggcagtccctcccatcatatgcccagaggtctaggacggaaggatggttttgtgggccagggcaagggccccaataccctttgcagcctctggacactgctcttcacagctcagttgcttcagctccagccacgtctaaaaggaccccagatacagctcaggctgctgcttcagggagtg

SEQ ID NO: 274050 - DNA, 601 bp, Homo sapiens
gaacttatttggaactggagcaaaggtcacttttgttatttgttaacaaagagattgaatgcattatgcccctgctctagggatctgtggaactttgaaattgatagtgatgatttagggtggcagaagagatttctaagcagtaaagcatccaagatgtagccaagctgcttctaacaacaacatatgctcctatgcaggagcaaagaagtgatctgaaatttgaacttacatttaaaagggaagcagagcataaaagtttggaaaatttgcagctcagccatatagtagaaaagaaaactccattttctgggtagaattttaaggcagttacaggaatttgcataaataaaaggtaggcaaatgctaatagccaagacagtaagaaaaaggcctccaaggcattacagagacctttaggggcagtccctcccatcatatgcccagaggtctaggacggaaggatggttttgtgggccagggcaagggccccaataycctttgcagcctctggacactgctcttcacagctcagttgcttcagctccagccacgtctaaaaggaccccagatacagctcaggctgctgcttcagggagtg

SEQ ID NO: 274051 - DNA, 601 bp, Homo sapiens
gaacttatttggaactggagcaaaggtcacttttgttatttgttaacaaagagattgaatgcattatgcccctgctctagggatctgtggaactttgaaattgatagtgatgatttagggtggcagaagagatttctaagcagtaaagcatccaagatgtagccaagctgcttctaacaacaacatatgctcctatgcaggagcaaagaagtgatctgaaatttgaacttacatttaaaagggaagcagagcataaaagtttggaaaatttgcagctcagccatatagtagaaaagaaaactccattttctgggtagaattttaaggcagttacaggaatttgcataaataaaaggtaggcaaatgctaatagccaagacagtaagaaaaaggcctccaaggcattacagagacctttaggggcagtccctcccatcatatgcccagaggtctaggacggaaggatggttttgtgggccagggcaagggccccaataccctwtgcagcctctggacactgctcttcacagctcagttgcttcagctccagccacgtctaaaaggaccccagatacagctcaggctgctgcttcagggagtg

SEQ ID NO: 274052 - DNA, 529 bp, Homo sapiens
gagtgcagtggcgtgatctcggctcactgcaagctccgcctatcaggttcacgccattctcctgcctcagcctcccgagtagctgggactacaggcacccgccaccacgcccggctaatgttttgtatttttagtagagacggggtttcaccgtgttagctaggatcgtctccatctcctgacctcgtgatcygcctgcctcagcctgaaagtttatattaagtaagcagatatttagcatggtatattccctactttaatcctaaattctctgaagcacttagaagtttttcaatagatgaatagtattctacaggaaaaaaaaaaagtgagcactggaaataacaatgcttataatccttcctacaagttataaagcactgtcataatgctaccttcaccctcttacccccataacaagcttttcagggggacagtgtgttataagtgcattttgaaaatgaacaaagcaaagtttcaaaagccataatttatccaaaatcacagagctaaggaaagaaggaattga

SEQ ID NO: 274053 - DNA, 529 bp, Homo sapiens
gagtgcagtggcgtgatctcggctcactgcaagctccgcctatcaggttcacgccattctcctgcctcagcctcccgagtagctgggactacaggcacccgccaccacgcccggctaatgttttgtatttttagtagagacggggtttcaccgtgttagctaggatcgtctccatctcctgacctcgtgatctgcctgcctcagcctgaaagtttatattaagtaagcagatatttagcatggtatattccctactttaatcctaaattctctgaagcacttagaagtttttcaatagatgaatagtattctacaggaaaaaaaaaaagtgagcactggaaataacaatgcttataatccttcctacaagttataaagcactgtcataatgctaccttcaccctcttacccccataacaagcttttcagggggacagtgtgttataaktgcattttgaaaatgaacaaagcaaagtttcaaaagccataatttatccaaaatcacagagctaaggaaagaaggaattga

SEQ ID NO: 274054 - DNA, 518 bp, Homo sapiens
aattgatcaaatagaagaaagaatcagcatgctccaagatggactattgaaaatatacaaccagaagagaaaaaaataatagtactcaggaggctgaggagggaagatagcttgagccagggaggtcaaggctacgttgagctatgatcatgccactgcactgcagcctgggtgacagagygagacaaacaacaacgacaacaacaacaacaacaaaaacctgttagaaaaataattactctttctgtactttatacaaataatcaggccaagtataatgaattgaattgttcttaccataatttgtcttcagtaaaaatagaagattggagagagaaaaattgtttcaataactatggtatgcctgttattaaattctagtctcatcagttgtttttgagtttttttctgtaatttagactggctctgcttatttttgtgaatcaaccagtgatctctgattgcagctcaaaagaaacaagagagatgggtaatgtgaaaatctggatcaatattct

SEQ ID NO: 274055 - DNA, 633 bp, Homo sapiens
gtttcttctgaccttagagggttcaatttaactctttcttcctaccacagtagaaggaaggaacacagacattattctcagagacaggatctcgagaatttatggttcccccaaaatgtccagtggctgtcagaaggagcctccttttctttaagaaaattccagtgtttttaattgtgagcacttgccttcactsgaagcccccaaaccctaagatgattcctggcattaagaggatttaggggccaggccaggtgcagtagttcacacctataatcccagcattttgggataccaaggccggcagatcacttgaggccaggagttcgagaccagcttggccaacatggtgaaacccgtccctactaaaaatacaaaaaaaaaaaaaaaaaaaaatagccggtgtggtggcaggtgtctgtaatcccagctactcgggaggctgaggcaggagaatcacttgaactgggaaccaggaggtggaggttgcagtgagctgagattgtgacactgcactccagccagggtaagagagccagactctgtctaaaaaaagaaaaagactttgggctatagaattaggtatggtatccccaatgtccccaaaatctgttcagctacttagcagtacat

SEQ ID NO: 274056 - DNA, 601 bp, Homo sapiens
ggaagcagctttaaagctgggtagtaggcacaggttggaatagtttggagggctcagaagatgacaggaagacaaagaaagtttggaacttcttagagtctgtttaaatgattgtaaccaaaatgctaatagaaatatggagagtgaatgctggactgatgaagtctcagatggaaatgaggaacttactgggaactggagcgaagattgctcttgtaatgccctagcaatgaacatcgctgcatttgccaatgccctatgactttgcagaagactgaacttgagtgatgacttagggtatctgrtggaagaatttctaagcagcaaagcatgcaagatttggtgtgctagcttctcatggccagtgatcagatatgggagcacagaaagaacttacagttggaacttatcattaaaagggaagtagagcataacaatttgggtaatctacaccctggccatgtggtagagaaggaaagagcatttccaggtgaggaatttgagcaagcaaccattgctagagatattagcatgaataaatgggagtcatgtcctaatagccaagacgattttaaaaaaggtctcaaggcattacagaaat

SEQ ID NO: 274057 - DNA, 545 bp, Homo sapiens
tcagactaagaaaactacaaagttttcaaaaccagtggtcctcaacttttttggcaccaggtactggttttgtagaaaacaatttttccatggacaagggtaggcgggcagggaggagatggttttgggatgaaaccgttccacctcagatcagcaggcattagattctcctaaggagccagcagcctagatgtttcacgtgcacagttcacagtaaggtgttcgctcctatgagactctaatgctgctgctgatccgacaggaggcggagttcaggcggtaatgctcactggccagctgctcacctcctgctgtgcagcctgattcctgacaggccaaggaccagtacctgtccatggtaaaatgatccctccaccaagacatgacaatcctaaaygtgtatgcatctgtgctgattaacattaggtgtcaacttgaaggatacgtaactggctggtaaagtgtttccgggtgtgtctgtgaaggcgttgccagaggagactgacatttgtgttggtggattgggagaggaagacccaccctca

SEQ ID NO: 274058 - DNA, 538 bp, Homo sapiens
tctcactcctttattagggtgaagattttacagccaatcatcatagttatctttcaagaaaataatcactgaataatgaatcatcttggtattccccaaagcgatgcttatacaaaggcaagacatmaaaaatctaggacttaaaatgttaaccacttgtggagtaaactgaatgcaccatattatagtgggtatttccaatttggcacaacacaaattttagacaagttttgacagaaactattaaagaaaattaataatcagttaaaagctaattatttttatactgaaaagttctaactttgagagaaagtgatgagcaacagtcagcaaagaatttactcatcatctagctcagcttcaggacacattagagaagaaaagcggggttaatgaatcaggtccagaattttctagagtgagttcagtaaacacaaagcccaaggtcacacattttggaatatgttgacctagatccaagtggtcattgccattctaaaaaggttttcctcctaaaagcatctatccatatctttct

SEQ ID NO: 274059 - DNA, 612 bp, Homo sapiens
tgtgttgatgaagatgtttataatgtccaactaaccttayttttaaaataatgccttttgtctttttctcagtattggatgtgagtcagaatgtgggggtgggggagcttcttaaaaatgcaaatgcttgacaacccccatccagagattctgattgaagtagtctagagtgtcatttttgcgatggtatttttaaatgacagcagaaaatgttatttaaagatatttggggacattattattgacttggaaatgaataacaatatcacctaagtcttcaaaaatcataacaaataaacagcatcaattaatgagatctaatatatttgcaaagtctactgcactgtgcaaacttctttcacatatttaatcttttatgatcctgacaactctgacactttctatttagactgcctccattttgcagatgaggaaattaatatgagaaactaccttttcaccatttcattttacagctctcataaaaatgtacataagtgaacgcagatccttgcaagagcaaatacgttcctctgtcagaggcgtttgaaccagagagactccatctttaataggggctggataaaataagcctgagacctactggactcc

SEQ ID NO: 274060 - DNA, 612 bp, Homo sapiens
tgtgttgatgaagatgtttataatgtccaactaaccttatttttaaaataatgccttttgtctttttctcagtattggatgtgagtcagaatgtgggggtgggggagcttcttaaaaatgcaaatgcttgacaacccccatccagagattctgattgaagtagtctagagtgtcatttttgcgatggtatttttaaatgacagcagaaaatgttatttaaagatatttggggacattattattgacttggaaatgaataacaatatcacctaagtcttcaaaaatcataacaaataaacagcatcaattaatgagatmtaatatatttgcaaagtctactgcactgtgcaaacttctttcacatatttaatcttttatgatcctgacaactctgacactttctatttagactgcctccattttgcagatgaggaaattaatatgagaaactaccttttcaccatttcattttacagctctcataaaaatgtacataagtgaacgcagatccttgcaagagcaaatacgttcctctgtcagaggcgtttgaaccagagagactccatctttaataggggctggataaaataagcctgagacctactggactcc

SEQ ID NO: 274061 - DNA, 612 bp, Homo sapiens
tgtgttgatgaagatgtttataatgtccaactaaccttatttttaaaataatgccttttgtctttttctcagtattggatgtgagtcagaatgtgggggtgggggagcttcttaaaaatgcaaatgcttgacaacccccatccagagattctgattgaagtagtctagagtgtcatttttgcgatggtatttttaaatgacagcagaaaatgttatttaaagatatttggggacattattattgacttggaaatgaataacaatatcacctaagtcttcaaaaatcataacaaataaacagcatcaattaatgagatctaatatatttgcaaagtctactgcactgtgcaaamttctttcacatatttaatcttttatgatcctgacaactctgacactttctatttagactgcctccattttgcagatgaggaaattaatatgagaaactaccttttcaccatttcattttacagctctcataaaaatgtacataagtgaacgcagatccttgcaagagcaaatacgttcctctgtcagaggcgtttgaaccagagagactccatctttaataggggctggataaaataagcctgagacctactggactcc

SEQ ID NO: 274062 - DNA, 612 bp, Homo sapiens
tgtgttgatgaagatgtttataatgtccaactaaccttatttttaaaataatgccttttgtctttttctcagtattggatgtgagtcagaatgtgggggtgggggagcttcttaaaaatgcaaatgcttgacaacccccatccagagattctgattgaagtagtctagagtgtcatttttgcgatggtatttttaaatgacagcagaaaatgttatttaaagatatttggggacattattattgacttggaaatgaataacaatatcacctaagtcttcaaaaatcataacaaataaacagcatcaattaatgagatctaatatatttgcaaagtctactgcactgtgcaaacttctttcacatatttaatcttttatgatcctgacaactctgacactttctatttagactgcctccattttgcagatgaggaarttaatatgagaaactaccttttcaccatttcattttacagctctcataaaaatgtacataagtgaacgcagatccttgcaagagcaaatacgttcctctgtcagaggcgtttgaaccagagagactccatctttaataggggctggataaaataagcctgagacctactggactcc

SEQ ID NO: 274063 - DNA, 548 bp, Homo sapiens
ctggtggcatgctgacccaatccataaaaactggctaagataggcgcacggtggctcacacctgtaatccaagcactttgggaggccaaggcgggcagatcacctgaggtcaggagctcgagaccagcctggccaacatgactaaaccctgtctctactaaaaatacaaaaattagccgggcgtggtggtgggtacctgtagtcccagctacttgggaggctgaggcaggataatcrcttgaacccaggaggcggagggtgcagtgagctgagatcatgccactgcactccagcctgggcaacagagcaagactccatctcaaaaaaaaacaactggctcagataggtcaaatgttctgtatcccaggatcaatctattaacaggttttatctaggctgacaaataggttttatcacatgtgacaactccaatcgattggcagtggctgcctttcctagggtacatagtaaagtgtcataatcttctagcgatgtctgccatgacagcaagagaaaaagtaatggcacaggggtcaggcatttattat

SEQ ID NO: 274064 - DNA, 483 bp, Homo sapiens
aagcatcagctatgcacaaagcatcctaagagacaaaaaaaaaaatgaagtgacagtccctggagaattcataattgagatgggaagacagatggtacctaaaataccgaggagttgagagttaagcagcttaaagcctcagatgacttgcactggcagtcacttcatttggtcccaaggctccttccttaaccctgcaccaaagatgggacacccaggaagggctgcatcttttccccgcctttgactcaaagttgraggcatgtgcagggagtcaggcggctgagctcccaacctgcctccaactttcatcagatagttgtgagcttgggtagctatttccccactaagccactgtgtccccatccatagaaaggaataataatgcatccctctcagtgttctggggagggctccttctgttgttttaaaaaaaaaaaaaagaaaaaggaagaaagaaattcagggatttgggcaacttgt

SEQ ID NO: 274065 - DNA, 543 bp, Homo sapiens
ggccaatccctaaagacttcctaaacttttggatggagccactttgaaaccactttggaaacacatacacatcaacagggcaatcttgttagtattttcaacagccctgaagagtcttaagaagaggaaagaggaggagcgctggcataagggaaagcaaagggaaaggagagatagagaagaaggaagagagaggacagttatcaccagagaactgaacacagccttgaccggaacaaggcagaaagggaaaactcacacaaaaytactgcttcatcaactgtagctttaaagccagggattaactttagcttgattattaaccctgaaatataacccatgtctgacctccacaaagaccaaatcatagcttctcatttgaattaaactgtctgcattcacatatgtggagtgtttataaaactactctggtaactgaaattcagccgtgcctatcctacacgatcacaacatttctctcacgtgctacccaacttctgttttccacagccattcccctttaccacaaaaatccaaccacag

SEQ ID NO: 274066 - DNA, 431 bp, Homo sapiens
cctgaggaaggtaaactgactgtgagtgaggtgcttggaggaggagaggcaaggaagccaggcctctgtgtgcagctgaggaagggggtggcccagggttcctcctaagtctgtggccatgtctggttctttgctcctttcttagctgtcaaaggtgscttaatgagactgttcctggtcacagaatgtgccacaggaaataggcctgcagggtgtgtaagaggaaagaccagtgggtttgcagaaacctgacactggcttttcccagactgggaggcagcctcagaggtcagcgtggcattagcccagagcacaggactgtcccagggcgtagacttttaaaaatgaaagtgtatttatagatggtggccctggggacagaactttcaactgttccttgtcaggccccaccccttcacagcactgggctc

SEQ ID NO: 274067 - DNA, 622 bp, Homo sapiens
agtatcctgagaagtttagataaacactacaatcataaattgcatgtaaatcaatcaaaaccaaaagaatccaattttgtctgcttagtatgyatcttcaagattattggaagtattgtttcccaatttttggcattgattacttttaaaatttcatctagctcaagaatactatatttctacagaatgtttcacaatcatgattatgtgttttattttcaattttgggaagctttgcctagtgggttatagatcttccatataacattcaataagaacttagataaatcacttaaagcttgaacatacatcaaacatgaaggtacaggcttcatggtagactgtgaaatacaatctctagctttataaacacccttatatccaaattatttaaaatatgaaatgcccattaataccttcttaagtttaaaaggccaaatttgaaagatcagatgtgtctgatccagccttctgtttttccttttttattttctgtttggattttgattcaggaataaattgctgaaaacaatcttttttttaatgttctctctaacgtactgtttgtactcaagagcacaagatgaagagtggttagtcaaagaatccaatgtctaactgg

SEQ ID NO: 274068 - DNA, 622 bp, Homo sapiens
agtatcctgagaagtttagataaacactacaatcataaattgcatgtaaatcaatcaaaaccaaaagaatccaattttgtctgcttagtatgcatcttcaagattattggaagtattgtttcccaatttttggcattgattacttttaaaatttcatctagctcaagaatactatatttctacagaatgtttcacaatcatgattatgtgttttattttcaattttgggaagctttgcctagtgggttatagatcttccatataacattcaataagaacttagataaatcacttaaagcttgaacatacatcaaacatgaaggtacaggcttcatggtagactgtgaaatacaatctctagctttataaacacccttatatccaaattatttaaaatatgaaatgcccattaataccttcttaagtttaaaaggccaaatttgaaagatcagatgtgtctgatccagccttctgtttttccttttttattttctgtttggattttgattcaggaataaattgctgaaaacaatcttttttttaatgttctctctaacgtactgtttgtactcaaragcacaagatgaagagtggttagtcaaagaatccaatgtctaactgg

SEQ ID NO: 274069 - DNA, 586 bp, Homo sapiens
tctcacttggtcacgaggctggagtgcagtggcgcaatctcggctcactrcaacctctgtctcctgggttcaagagattctcctgcctcagcctcccgagtagctgggactacaggcgagtgccatcacgtccagctaatttttgttatttctagtagagatgggatttcaccatgttggccaggatggtatcaatctcttgacctcgtgatccgcccgcctcggcctcccaaagtgctgggattacaggcatgagccaccatgcccagccacagattccttcttgtgttcatttgaaatgtgaactctgaacaaaggacagtttatcttggatagtcttattccatgatttatatatcactaaaagagcagagaatctgtagatattataagtgggatccttaataattaatatatggaaagagaagcttaccagataccaggatttttctgcattgcctggaaaaggaggatatctgcaaacttttgtaccctgtgcacttatcagattggacctcagatgggacctctgccccacagaatttctctttaatgactcattgcttactggtctaagaagaaaaat

SEQ ID NO: 274070 - DNA, 510 bp, Homo sapiens
tcatacagttttcgaaaaacaggtgagacatcttccagttaaattcatcttccttttatgtttaatctattgaagaattctaaacattgttttgcaccaaattgctcccttaagttttaagagccacctagtttgggcatcagatgttctcctttatttctgtaaaaatcttgcaaattcactcccagaaagaaatgtagagaatactaggctatttcacagaaaaggcttgctgccctttcctgataacaaggtagttattattcttggctgagcctgtcccagaaagagtcttaggtgacctggtgtgggaattgctaaatctcaggctactcactgagactgtctgctgctgtgctgggcactgcagtcctccagagcaggcctgtcagcatcctaccgtgctctgagtaggtccactggggaacctggtggagtgacatcatgtatcagcctctagcagcaactcctctctgtagccccrtgtctttcctgtggtacaaaggaaca

SEQ ID NO: 274071 - DNA, 497 bp, Homo sapiens
agtcactttcctaacacttatataattgttctcttcccaatagctagtagtgtttcctgtaacacatattgacacatactaagttcttatataagaaaatatttaagggaattttgtatttttccactaaactttctgttgattatttgaaggtaccacacttttggttgttattgtggcttcatggtaaaattttatatgtattagagcaagaccgtaaccatgttatattttataacatggcctaattcctccaaaaagtaaaataaaaaamtaaaaaagagatgattttcttgcaataacattaaacttagaaaattattcaaaggaacatcagtcttgattatataagtcttggaaaagttgtatagatttcttaatctaagttctacttatttctttctgagcttatttttaaacattttggttttgtttgtttttataaatgagatgttggtgtggtaattttaacaactggtctttgattttataaataa

SEQ ID NO: 274072 - DNA, 373 bp, Homo sapiens
tctataatctgttcttcccactcaacattgtgtcattaacatgattacgtattcttctacattattttaacagcctcatagtatttcatcatatgatgtatcaacatttactaagccaatccttcagtacagcaattagattacatccagttatttgctattataaatgagctgcagtgaacatctttgtgcctggatatttgccaaacagttttattaaactatgtctaaaatgtcaaaaccattagttctcaaactttaatatgcactggaatgatactggtgacttattcagwctcataagccctactcatagagattgtgtttaggaagatctggaataagacccgggagtctgaattttagcaagcac

SEQ ID NO: 274073 - DNA, 536 bp, Homo sapiens
cttggtttgattcaagtgctgctttctgaattcagtgcaggtgctaattagtacgaaggcacataaatctagagaggaaggtaaatgggaaacatatggaaayagaaatgtaaccaaaagttctttttgatgatatacatggttcaacaagttttaaaacaaaactgcaagctgatggatggtaatattctacatcacttatactgaaacaaagctgccaatgtgattgtctagttgttcactacttgaatatttataaagtttacagttcacatgtggcatttccataagctgccttgattaatgaatttaattgtaaatgttatgagctgatttcttaaactgtatttcattttgtttatatgcttggtgtaaaagtaaattttcagactgaataatacccagcagatttgaatcagggacaaagctctcaagctgcgtggtgtgagcagtgcatagtgaatgtggctgcacagcaagtattgtgtttggccaaagtaaatatggggctcagtgccagatttcctgagccagtc

SEQ ID NO: 274074 - DNA, 536 bp, Homo sapiens
cttggtttgattcaagtgctgctttctgaattcagtgcaggtgctaattagtacgaaggcacataaatctagagaggaaggtaaatgggaaacatatggaaacagaaatgtaaccaaaagttctttttgatgatatacatggttcaacaagttttaaaacaaaactgcaagctgatggatggtaatattctacatcrcttatactgaaacaaagctgccaatgtgattgtctagttgttcactacttgaatatttataaagtttacagttcacatgtggcatttccataagctgccttgattaatgaatttaattgtaaatgttatgagctgatttcttaaactgtatttcattttgtttatatgcttggtgtaaaagtaaattttcagactgaataatacccagcagatttgaatcagggacaaagctctcaagctgcgtggtgtgagcagtgcatagtgaatgtggctgcacagcaagtattgtgtttggccaaagtaaatatggggctcagtgccagatttcctgagccagtc

SEQ ID NO: 274075 - DNA, 536 bp, Homo sapiens
cttggtttgattcaagtgctgctttctgaattcagtgcaggtgctaattagtacgaaggcacataaatctagagaggaaggtaaatgggaaacatatggaaacagaaatgtaaccaaaagttctttttgatgatatacatggttcaacaagttttaaaacaaaactgcaagctgatggatggtaatattctacatcacttataytgaaacaaagctgccaatgtgattgtctagttgttcactacttgaatatttataaagtttacagttcacatgtggcatttccataagctgccttgattaatgaatttaattgtaaatgttatgagctgatttcttaaactgtatttcattttgtttatatgcttggtgtaaaagtaaattttcagactgaataatacccagcagatttgaatcagggacaaagctctcaagctgcgtggtgtgagcagtgcatagtgaatgtggctgcacagcaagtattgtgtttggccaaagtaaatatggggctcagtgccagatttcctgagccagtc

SEQ ID NO: 274076 - DNA, 673 bp, Homo sapiens
tggggttaagtaacctgcctaaggtccaaagtaagtggtaatctgactttcaagtttgtactttgtacttcaagccatcacactgtaaagacctccccaccatcatcagtaaccaaagattgtgataaatgattttatttctatgcactaggaacacagaggaggaaatgatgatttatcccaacttggaggaatctggaaagtcggtagataccaaatcgattctacactggacttagaaagacagagagaaaattcatacayggagggaaacatttcagatgaagagattagtcaacaaaattgggaaatctataaagaatatttccctagaaaatttctgtgcaattttagaacataaggaaaatttctacattccaatttttgccacctatctgtcatccccagggagcagctaaccctttagaaatggtgaaatctcccttttctggggcagcaacaggcttctggagccataccaaaacactatgggactcagaagttttgaggtggctatctggtctcctgcaccattgctttgaaataggattcagaaaatttgtagctggaacaccttgtactgcacacttaatgcctcaaattcaagtgattttcctcaggttcaaagtcctgaccctgctcagattaattcagtggatttgattgctagcac

SEQ ID NO: 274077 - DNA, 614 bp, Homo sapiens
ttgaactctcttttcttccatattgtaattaacaaaaatgtttgaagctatatgattcttcccttaaaacgttttctagatagatgtaaaaggagatatatatatatatatatatwaataagcattcatataaaagataataattttgcgcattttatggggctgccattatgcaaattagttaacttttggctggttgacccaagacaactgcaggactgcagaattcctctgagagactgaagtgctatcaagcttaggaaaacacttaaaaacctatttgattatagaaggtgagggttttctttttctttttattttttttgagacagagtctcaatctatcctccaggctggagtgcagtggtaccatctcagctcactgcaacttccgcctcccaggctcaaacgattctcctgccccagcctccaggcactggccaccatacctggctaatttttgtatttttagtagagacagggttttaccatgttggccaggctggtctcaaactcttgacttcaggtgatccgcccaccttggcctctcaaagcgctggaaagtttaaacagtaacaaaagaggggaaattactgcataacgaagtaaaaggc

SEQ ID NO: 274078 - DNA, 349 bp, Homo sapiens
tcactgcaacttccgcctcccaggctcaaacgattctcctgccccagcctccaggcactggccaccatacctggctaatttttgtatttttagtagagacagggttttaccatgttggccaggctggtctcaaactcttgacttcaggtgatccgcccaccttggcctctcaaagcrctggaaagtttaaacagtaacaaaagaggggaaattactgcataacgaagtaaaaggcattgagttttgtcatttttgtgagggttatgatactggtagaagagatgcaagaggaagtatctggaggtgaggagttctgtgtccatggacagacttggtcagggagtgtctg

SEQ ID NO: 274079 - DNA, 349 bp, Homo sapiens
tcactgcaacttccgcctcccaggctcaaacgattctcctgccccagcctccaggcactggccaccatacctggctaatttttgtatttttagtagagacagggttttaccatgttggccaggctggtctcaaactcttgacttcaggtgatccgcccaccttggcctctcaaagcgctggaaagtttaaacagtaacaaaagaggggaaattactgcataacgaagtaaaaggcattgagttttgtcatttttgtgagggttatgatactggtagaagagatgcaagaggaagtayctggaggtgaggagttctgtgtccatggacagacttggtcagggagtgtctg

SEQ ID NO: 274080 - DNA, 632 bp, Homo sapiens
gcacaaaatactattttgtcatacatataagcttaatgatatacatgatatgatacatgagatgttcaataatctgtctatagattcctgccttcacattgtgagataataactgggttctgagactggattttagtgctcaggtctgccactccatagctgtgagaaaaatctcactctcccatctttcagtttcattgcaaaagcagtagtcacatccaatcctatattgttattttaaataaatcatgtttaagggatatggcccctgctccttagaatctgtaatgtaacattgacatcatgatagggagaaagacaytcatggcatatattaaataaaagcaaaatgcacaatgcatgtatcttttaatgacaaaataaagataagaatggcttagaaaaaacatttttagagttccaaggttgaggagaaactgctattatttgttcctccatcatgtagttcaaagttttctggagagaatagtctcttacttaatgcaaaagaggaagctcagcaaacctctaatgatggcagtaaatagcatatttggaatgcttactacctggcagatgaattgtcatgcatatctcctttaatcctcacaacaacctgaagagacaagcag

SEQ ID NO: 274081 - DNA, 552 bp, Homo sapiens
ttctgagaaattggttttattactgtttttaatttcttcttttttcctcgttttatttctggataatttaaagcttaaataggttaaaaaagtaccagttatgattaaagaaacaagttattccagggcaactctgaatagagcaatatcttgtctagctcaaaacatttatgccaatggcataaattgagtgttacagaagaagagcaatttcaaaaaaaattgtcaatattattagcaatatttgagtccatactacrtgctaggcatgattcaaagttcttcataaatattaatttatttaatcctcacaacaaacctgcgtaagaaagataatgttgtaacatttatattaatattttcatgtaatatcagcttttgtgatagatattgatagtaaatagaagaaaaaagaactaaggaatatttctttgggattataaagagtaaagattatttttctgtgtatttaggtaaatttatactattctcttatatctaatgtcaataaaaatacctaatgcaaagggattgaatttttttccccaaaca

SEQ ID NO: 274082 - DNA, 604 bp, Homo sapiens
tgccaagatggccaactagatagcttctgcacagcaaagaaactaacagagtaaacagaagacctgcaaaatggaagaatatatttgcaaactatgcatatgacaatggcctaattttcactatctacagggaacttaaacaaatcaataagcaaaaaacacataaccccattaaaaagtgggcaaagggcttcatgaacagaagacatacaagtggccaagaaayatatgaaaaatgcttacgtcactaatcatcagagaaatgcaaatcaaaaccacaataagataccatctcacaccagtcaggatggctattataaaaaagtcaaaaaatgacagatactggcgaggctgaaaagggaatgcttatacaccattggtgggaatgtaaattagtccagttattttggaaagcagtctggagatttctcaaagaacttaaaacagaattaccatttgacccagcaatcccattaccaggtatatacttccacaaaaataaataattctactaaaaagacacatgcactcatatgctcatcactgcactattcacaatagcaaagatgtggaatcaacccaggtgcccatcaatagtagattg

SEQ ID NO: 274083 - DNA, 604 bp, Homo sapiens
tgccaagatggccaactagatagcttctgcacagcaaagaaactaacagagtaaacagaagacctgcaaaatggaagaatatatttgcaaactatgcatatgacaatggcctaattttcactatctacagggaacttaaacaaatcaataagcaaaaaacacataaccccattaaaaagtgggcaaagggcttcatgaacagaagacatacaagtggccaagaaatatatgaaaaatgcttacrtcactaatcatcagagaaatgcaaatcaaaaccacaataagataccatctcacaccagtcaggatggctattataaaaaagtcaaaaaatgacagatactggcgaggctgaaaagggaatgcttatacaccattggtgggaatgtaaattagtccagttattttggaaagcagtctggagatttctcaaagaacttaaaacagaattaccatttgacccagcaatcccattaccaggtatatacttccacaaaaataaataattctactaaaaagacacatgcactcatatgctcatcactgcactattcacaatagcaaagatgtggaatcaacccaggtgcccatcaatagtagattg

SEQ ID NO: 274084 - DNA, 575 bp, Homo sapiens
cacctgccaggtcttgaccctgatgataaggtttgggkaatgacttgtctctgaaatacttcttgacatggtttggctgtgtccccacccatatctcatcttttgaattgtagttctcataatccccatgtgtcacaggagagacctggtagaaggtaattgaaccatggggacagttacctccatactgttctcgtgatagtgagttctcatgagagctgatggttttatagaggcttttccccactttgctctgcagttctccttgctgccaccacgtgaagaagggtttgcttccccttctgccatgattgtaagtttcctgaggcctccccagccatgctgaactgtgagtcaattaaacctctttcttttgtaaattaccccgtctagggcagttctttatagcagtgtgagaacggacaaatacacttctcaagtacttcacacatgtatgcacactcctgtgactgcatgcacactacaacaaagacagtaacttctggagaacaaggacacctgtaacaaaagttaaatgcaacttttttcatctttttcctcacgattgtcttcaa

SEQ ID NO: 274085 - DNA, 564 bp, Homo sapiens
tcttgaccctgatgataaggtttggggaatgacttgtctctgaaatacttcttgacatggtttggctgtgtccccacccatatctcatcttttgaattgtagttctcataatccccatgtgtcacaggagagacctggtagaaggtaattgaaccatggggrcagttacctccatactgttctcgtgatagtgagttctcatgagagctgatggttttatagaggcttttccccactttgctctgcagttctccttgctgccaccacgtgaagaagggtttgcttccccttctgccatgattgtaagtttcctgaggcctccccagccatgctgaactgtgagtcaattaaacctctttcttttgtaaattaccccgtctagggcagttctttatagcagtgtgagaacggacaaatacacttctcaagtacttcacacatgtatgcacactcctgtgactgcatgcacactacaacaaagacagtaacttctggagaacaaggacacctgtaacaaaagttaaatgcaacttttttcatctttttcctcacgattgtcttcaa

SEQ ID NO: 274086 - DNA, 575 bp, Homo sapiens
cacctgccaggtcttgaccctgatgataaggtttggggaatgacttgtctctgaaatacttcttgacatggtttggctgtgtccccacccatatctcatcttttgaattgtagttctcataatccccatgtgtcacaggagagacctggtagaaggtaattgaaccatggggacagttacctccatactgttctcrtgatagtgagttctcatgagagctgatggttttatagaggcttttccccactttgctctgcagttctccttgctgccaccacgtgaagaagggtttgcttccccttctgccatgattgtaagtttcctgaggcctccccagccatgctgaactgtgagtcaattaaacctctttcttttgtaaattaccccgtctagggcagttctttatagcagtgtgagaacggacaaatacacttctcaagtacttcacacatgtatgcacactcctgtgactgcatgcacactacaacaaagacagtaacttctggagaacaaggacacctgtaacaaaagttaaatgcaacttttttcatctttttcctcacgattgtcttcaa

SEQ ID NO: 274087 - DNA, 541 bp, Homo sapiens
ttattcaatcagtttctctggatcccttttcccatggcaaacagacttcacttcatcctcagccttgccaccaaaaagtcatcccagatcctaacctctctcaaatttgactcttcgctaaagatgtcacttccctgtggtggattcagggtaaggtactctggttctcaatgccctctctgggtcccaagatgaaatgggtgctctcctggttactcacttttacttactcctccaccttcttgtaaaaacttctcgtttgacatctatgccaatcaactctacttccttgtctctgacttctgccagtccctttggtcagtttctcattcactgaaaactgcccacctttttgtcatcttgacagcttgaatcctgctgcagtcctgggtgactttgatgttgatgtggaggcatcacctcatgccccgatctctcagttcctcagctacatcttttccaaggcagtcaccctcttccctgacayccttctatgtcttgaacataccttaaattacctctagcacttacatcttaaagt

SEQ ID NO: 274088 - DNA, 569 bp, Homo sapiens
ggattgactccaattttgaaagaagttctactatgggtaaaatgctgtcaaacaccattgcatgctacagagaaattgttcatgaaaggaggaatcaatggatgtggcaattttcactgtagtgttattctaagaaattgtcacagccaccccaatcttcagcaaccaccaccttgatcagtcagcagtcatgaacattgaggcaagactctccaccagcaaaatgtttctgacttgctgaaggctctaatggttgttagcatttttttttttagcaattaagtatttcttacttaaggyatgtacattgttttcttagagacaatgctattacacactacaatatagtgtaaacataagttttatatgcactggaaagccaaaaagtatgtgtgacttgctttattgtgatatttgctttattgcagtggcctggatctgaacccacaatatctccgaggtatgtctggtatataccttcaagaaataaagttagtctgaattaaataatgttggagaaataagaaagccaaaatcacatgttaactgagacacagaagagttagtag

SEQ ID NO: 274089 - DNA, 584 bp, Homo sapiens
tactatatgtatatctgtactttgtacataaaaaggctaagtatagagcttactgtttttattcaatacaggcttaagaagagccgaataaaacatttaagctgaaaattaaattaaaaattaaagacctattaataccaaatttagctttgcacctatacttgctgaataacttttcatgtaatttatttacttatatatatatatcatcacaatgtgtcaatttacatacataaattagcaattcatataaaaacaacagcaatataataaattcttataaaatcatttaaaacttatttttttcagaaaaaaattttaaaaacttctttaaaaatattcttagtgaacttttaaaactttttgctagatatgagaaaacaatttttaatttaaccagctaatagatrtacattcagatattgacattttttcctttcagcgcttgatataattaatgatgggttaaacaacttttatgtaattaaatatatactactttcaattaattttcaaagctcaaatcatacagaaaagcaagaggatcaataaaaagcattcacaaggcagccaatagcagccaa

SEQ ID NO: 274090 - DNA, 637 bp, Homo sapiens
actataattagaccttaggtcaacctgaattcaatatctagtccttttctactataccttcctagaaattcagaaaaattatgttacagactgattaatatcaaataagtaataaaaattcaaataatttttctttgaatttaatttccctaaattttatcagaatactttttgatgaaaagtttaatttcccttaacaaaataactccaaatgaatttaaccaataatttttcaacccagggacattattctgatatgaccactaaaaagatgaattcccaaagtccctcacatccattaagaacaggggatagcaccatattccttaagtgtgctggaggataaataaggtttagaatccatgaattttagaaagcaggagtttttctttggccttaatagtcaagataacaaactaatacaagtgctttaatagatgtaaaataaaaaccaccaagacaattctggcaaaagcaaaatcctagagttcaatgagcctaaaaaagaataaagctgtatttccaggtcacawgaaatcttgtatcaagtcatgaatacagtttgtgtaaatttatctcaactaacatgcctctctaggagtatttatctcttacctacagagaagttctatgagat

SEQ ID NO: 274091 - DNA, 454 bp, Homo sapiens
tgtttcgcagttataaaaaatttgattagccaatcttgctttggtttaaaaaggaggtcgttttgtgcttcataaaacatctcgagcagaaaatctttatgactttatgttaaatggcaggcaaatattaggaaagaatcygtcacttttgttaaaaattgtagcagggtaacatttaatcttgggactatctgcttagtttattaattacataaacaggtatccctgttgtactactaatgactaaattcatcttttaaagaataaagtaaggcttatgtgagagaacattgaaacaaagtcattgttggtccaaatgatttgcttcatagtttcttagtaattaaagctgtttcctttttggaagggagccatatttctaataaaagattagcttgtttctgcacagtgaaatttgaatatgagtatttgctttttgtagctgtgaaatgag

SEQ ID NO: 274092 - DNA, 606 bp, Homo sapiens
ccaattttaagaaagtttagtggggtctgaaattccaaagtagaaacagcttctgcaagaaggaaacaagatggttgtctctgggtgcagctagtggggcacatggtcctttgcaaccatgaaaaaggggccacatagccagtattttaaaattcaaacagtctttggtagaattatgaataataatcttattcaacaaaatgtttcatttacttattttagtgtccctttcatagtgttgtggaggatatagcatgaaacagcatgtttaggagctttgttaaaattttattttggttgaggtaaatatttgattttttttttttaacaaagagaattgcttctattgctttgcactttgttttcctgcctgcagtctaaattaatgcccgctagtgctcttgtttcataggctttctgaagcattctctttataattacyactccttttcctctccttcctctgcacagtagcataaattcctacttcatgtcatgacatagaattgttgtacttgtgaatagtaataatatgcatatatgaattatgaataatattatagctgagtttcccttttattgttagatgccagaaagtagagccct

SEQ ID NO: 274093 - DNA, 438 bp, Homo sapiens
tcacagctcttttatattcaggacactaacttttcagagggatatttacaaacattggtcttgttcttgagtcaaactcagcctcattcaaagctacatcccagctgggtgtggtggctcatgcctgtaatcccaacacttggggaggctgaggtgagaggatcacttgagcccaggagtttgagactagcctgggcaacatagtgagaccccatctctaaaaaaaattttaaaaattggcctggaatggtggcatgcacctgtagtccctagctactcaggagactgaggcaggaggattgcttgagcccaggagtttgaggccacagtaagctatgattgtgtcactgtgctgcagcctggrtgacagaacaaaaccctgtctctaaaaacaaaaaccctgcatactacattctctgccaagaagagaaaacagag

SEQ ID NO: 274094 - DNA, 356 bp, Homo sapiens
ggtatcaaacaattccccaaggaattcacacacacatgaacatgcacatggtctctcacatacacaaacagcagtttagaatcctcctctaggatataatttctttaaaaatgtttttaattatttcatctgggaggcattttagaaaattaaaatcttactattgttgaaataatcaaaattaatatttcagaaataaacactttcattatcccagacacgcatttttttcagtaagcagaattaatgtaagtaaatgttactcatatcttatcatgaaatatttacattaatcaggtttaatcactgatcactaayacgttttctgttttagcaaacatgcatttaattcagac

SEQ ID NO: 274095 - DNA, 625 bp, Homo sapiens
tttaccctgcagtactatagaacactaggacttattcctccttatctaactgtaattttgtatctgttagccaacttctccctattcttacttccccctttacctttcccagcctacaattctgctctctatttcaatgagctaaatttctcttagctcccacatatgagtgagaacatgcagtaaaattttagtattattttgaaaataattttgacctcactgaaaaggtcttacaacactcctttcccctgtcctaagccttggcctcccaagacttctagatcatattttgagaaacactgctctgtttttataatatttagagcatatattatttattattttttgtgtctaatttacatatatgtcctattgttgtttccctatttgaaattttcctgatggagatcatcattacaaaccttaggtatcactttacagcatgtggtaagcctgcctggaaccacagtgtacctcaacatgtaatattgattcaatgacccattgatagatygaagcctatagtgtcttatggtccctttaatgacctttaaaatatgtgatatagtagtatttttatagtttgtcaaattttgagcccattatgtcaacattctaccta

SEQ ID NO: 274096 - DNA, 496 bp, Homo sapiens
cttacaacactcctttcccctgtcctaagccttggcctcccaagacttctagatcatattttgagaaacactgctctgtttttataatatttagagcatatattatttattattttttgtgtctaatttacatatatgtcctattgttgtttccctatttgaaattttcctgatggagatcatcattacaaaccttaggtatcactttacagcatgtggtaagcctgcctggaaccacagtgtacctcaacatgtaatattgattcaatgacccattgatagattgaagcctatagtgtcttatggtccctttaatgacctttaaaatatgtgatatagtagtatttktatagtttgtcaaattttgagcccattatgtcaacattctacctaaatagaaggatgagctaatcatacataaatttattctagatgaaacaacgtttttttttttttgactcagctgtgacttttggaaaagaaactagaattctag

SEQ ID NO: 274097 - DNA, 551 bp, Homo sapiens
ttgttaagattatagagctagttactttcagctgtgggacataattacaaaggaaatttgtacatttggttattcttgttaagtatctctatttgtaatgccaaacacaaatttttgctacttcaaaagctgttttatttcttaaatttgtgatgtctctattatattttgccaatgtgaggaaatgagtgtctaatcttgtcaatgtaatatttattctcaattcctgctatattcattcctcctaatttgaaagttgataaaatctgttggcaacctcctygaagctgcaaagcagttactcaaaacaattttcagaatgttcagtataaatgggcacatgaaccattcttgaaaaccgatgtgcctttttgcttcacatgtttaactaaagtcggttataaattttaaaattatttatttaactttttcacatccttgttttaaaatttccataccataatacagtgttctttcaggatcacatgtgaaatagataatatttccaacatttcatgaggagctatggggaagaaatgatgagcaattcc

SEQ ID NO: 274098 - DNA, 566 bp, Homo sapiens
gtggtgccctaacttcaagcaaagagaacatctcatacttgtataaatgtttggtgtgtttattactgttagatgttgcatacatgaaaacaagagactagcatgttcaccagcaagatgtaacatagtggtgcacgccaggaaggaggaaagaacacaacagaattgaaaamaatgccccaccctaaacatggctggaagatttagtgaatggtacttcttggtaatgtaaaacactaggttcaatcttttactagaagagtgaacatacacttattccaaactccagtgccctttaatagttgtgttacaaattgcaaatagctgcatgatgtggtttggctttgtgtccccacccaaatctcatctcaaattgtaatccttgtgtgtcgagtgagggacttggtggggggtgatttgatcatggggcaggacttcgctcttgctgttctcatgatagtgagtgagtcttaggagatctgatggtttaaaagtaaagcacttccccctctcttgctctctctcctgccaccatgtaagatgtaccttggtccaccttcgccttc

SEQ ID NO: 274099 - DNA, 614 bp, Homo sapiens
ttaaacagtcaaattaaaaagaaatcataaacgatctcccaaatgtaaacaaggaaatgtgattatgattttttactctgttttatttttattcacaataaacaaatgcatcaataacttaaatctcaaaaatatgttttcaacagattacaagtttartcctcccattactatcttagaaacataattctggacaacaggaactagttttctgtgtctggaacaattcctggtaattttaagcccttcacacacaaaaatcaaaggaccagatgggattttagagtattttccaatccatattcctatcataaagcctagtaactgaagtcacaaatacaagcaaggtaattatctgattttagaaggcttccacagaattcacagaaatgtaatcccctactgattcaactgaggtcaaactcaacactagttcacacaggacagcaaaacaccatcattaccacttgtgtctgtacagtaaggagtgacctaatacaaaagcaaggtttgtggggcaaaaaggacacacagggaccttgtggcatgggcccagctgctcctgctcaccttgctctctgcccacttggcttctctgggcctcagataaatcc

SEQ ID NO: 274100 - DNA, 596 bp, Homo sapiens
accacaaacagctaataaaaagaaaaagtgcaattcaattcaaattccagtctgtgttgttctcaaaaacattttgcgaacctgtcttaaacgaggacaagggaacaaactaaactacagagtggcaaagatccaaatgcacatctttccttcaggcagtataaggacagaaaaataggacaagatggtctcctatgctgtgggaaagacagggaaatcctcagaaaaatgggtctaaacacttgactcctaaaaatgtcatcataaatcctatcgtctccttaccaactaactgcrtaatttatcaggaaacactacttccttcatctatctagacttatcatattacaaaggtaccaagttatctacttgcaaaaataccaaatatggtatgagggaaatactcatacacagagtctgaggagccatccttaaaaattatggagtggggagacggtgatgcatgcagggcattaaactccccaccaaactagggggaaaaagcttcccaatttactaagttttaatatccctgaaaacattaggatttcatgagcaaaatatattacgctcattacatgtccattactaactga

SEQ ID NO: 274101 - DNA, 606 bp, Homo sapiens
ccgggcgcggcggctcaagcttgtaatcccagcactttgggaggccgaggcgggcggatcacctgaggtaaggagatcgagacgagcctgaccaacatggcgaaatgccgcccctactaaaaatacaaaaattagccggccgtggcggagagttcctgtagtccsagctactcaggaggctgaggcaggagaattgcttgaacccggggggcggaggttgcagtgagccgagactgcgccactgctctccagcgtgggtgacagagcaagactccatctcaaaaaaaaaaaaaaattatctcgtccttcctgtccaccagctacccacgggctaactggcttcttgtgtttcttttaagagatattccacagactcctttttaaaaaagattgctgttatgttcaggtagattcagtataaaggcgtaccagacttactttaatgctctggcgtaactgaatgcctatggacttaagaaggttctcggcagttggaaggtctcttcctggtcttgcttaggtgaagtgagtttttaatgcagttgaattgaaaattggggttcagtatgtctaggatacagaacgagtctgttaagatgtacttgg

SEQ ID NO: 274102 - DNA, 360 bp, Homo sapiens
tactcaaattacacaggagtagcttgtctccatctaggctcaagagtatttgctcttaaaagctattttttccccagaaacaatagtgcaggtgcatcgcrcttcagtgtgcaacatattcatcctgggaggcaggaaggtgatttcacacctgtctcctctttttattcactcctggcctggctaatttgcccaatgtcaagattggtatggccaagtctgtcgaggagaattactgctttgcagcacgatgtcctcactctgggcatttggactgtgtgatttgccgcatgtctattctgagtacatctttctgtttttcatcatccataaatggaaccgattggtaataataatcca

SEQ ID NO: 274103 - DNA, 613 bp, Homo sapiens
gggctagcagacctgtttctttctgccattcagaaagccataaagatgactctgggagggacaccctccctgtaccagggtgagaaaatcamcctcatcaccagggacttggaattgggggctacaacaaacctgaataaatccacttcctgatgtaacccttatctgctgctagttttacacacatccatacatctccccatgattcccctagaaatttactgcccctacccagatcccctttgtcttatcatttcttctcaaattcattgttctttgactaaaaagtataaaagcatcttgctttggccacttcttcaaacttcaccctcttgtgaagatccccaggtacatagaaaactaataaaattgttatacttttctcttgtttgttaatctgcctggtgtcaaatttggcttccagccaaagggctcatataagagctaacggcaggtttgcagtgatcactggctcccctttacagcaaagagctaaactaacaatcttaaaggtaattagttttttgaggcaaggtctctgtctctgtcacctaggctaagtaccatggggtcatcttggctcactgcagtcttgacctcccgggcaaaagtg

SEQ ID NO: 274104 - DNA, 542 bp, Homo sapiens
actagattgaaaaacatgagttttcttatggatttcaagttcattgctcccatcaaaatccatgcaagcaaaggcacgagagccaaccacagtgacccagagtcattcttctcattaacaagaatcrggggagttgttctattcaggctacagatgaccacagttatcaaactaatgccagacaatttccaagccagctggcatgctctttgtccacagtaattcaactattgactgacagcctacaatgggcatgtgaagtggcccctgcaagcctgagaaggctggagagaacaggatacctgtggcttctgccttcatggagcttcaagtcaagagggacaaaaaagctaaacaaacaattcagaggcttgtatgttagaaatatttcacgaggatagaacaggtcatgtgggagccagaaaggagggtggaacaaattgagagagggtggtcagggtcagacttctgaagacaccattttggcagagatgaaagtttgagggagagaaagagccagacagaagtggcggtggtgatgg

SEQ ID NO: 274105 - DNA, 557 bp, Homo sapiens
agaactccaagtgcaatgttgaataaacgtgatgggaataaaattgttgctattttatcaattttagtgaaaacatgttcagtctttcatcattaagaatgattctagctgtagtttgccattgttatttctagaaatttttgttaggttgagacagtgcctttctattcctagttttctgagagtttttataataaattgatkttggaatttgttaaatatgtattattttacatctctgtagattgttcgagtaagtagttaggcagacatgaacagggcaggagagcttccctacccaggaatgtcaggcaaccatcaagtgatggtcaggtgattgctaaattatctctctaaaatgataattagttacagccaatgccaggggaagacagtcttccaatagagagaaaacacctgaagctggtgatcagcagcttccagataagctctcaggagttgggtaagtgggttcaagcatgcacactaagaggcaaaatggtgaattttaattggtgtctgatattcctctaagaatgctcaactggtaagggaaa

SEQ ID NO: 274106 - DNA, 577 bp, Homo sapiens
atctccatttccatttgatgatttgtgtgccaaagtttgtacgggttttacataatgcattttcaagacataatgactttattatattattccacatatattattgagttttttgtkctaggtgctgaggatttaaaatgaattgtagctcctcccattatgttgctcagtttctcagaggagctcaaagtctagctcacttctaagactaaataaaataaatgtgtgcttcagttaatacagtataaaataatagttgatataaaacatatatatgttctacctttaacaaattacagataatcaataaaacttaccccatacctattatataacataaccttatgagatattttggagaattaattcaaagcatgggttccagtctcaaggtgcttgcatttgcatagggagatgattcatacatttatagaaccaaaacaaaaatttaaaaaactaaattaaataaaataacaatagatatgaaaagtcacagcagactaaaatttactgcatcatgtcccagcaaataagaggtacaaatctgataagaaacaacattttgcgttgtcttaca

SEQ ID NO: 274107 - DNA, 573 bp, Homo sapiens
acttataatctcagaaagttctgttggacattgctgctcctgaatataagctccttgaaatccacccacctggtgagttctgcttactactgtgtctctaataccctaaagaaaaactggaaaatagattattttttgaatgaatgaatggactggtttcctagagcatatggatcatatggactggaagaaagggatgaggctgaatctataattggagccaaatactgaaagaactcacatgcttacatgaggagttgatactgatagcttgcaagtcaaatgggaatcactaaaagtttttgaaatgaagactaacctgattaaatctttagacagaaaggattctcccagcagcatgaacagaatgaattagaatagarcaggagagactgatggccagaaatcatctaggacatcatggccccttgtaaagaaatgaaacggcaagggactaacgtcagtttgagaaagaagaatcaataaagtttggtgcccatgttagtcaaaagaggttagattatactgaggtaataaataagctcaacatttctgtggctttatgcaacagca

SEQ ID NO: 274108 - DNA, 642 bp, Homo sapiens
tatccacctgcaatagtaaatgagacaggcatgccctctgcttaggaagcaactggcctagcagggggcatcagacaagcaattacaatacagtatgatgaactgtgtgtttgaggaagtgtatgaaattttgggagtgcggggaaagaacactgaacatagccaagggggcagatgggctgcgagagtaaaggcacaggttgagagcagccttggcaaaggagagctgcattggagctcctggtgtctcctctagcatcaagtttccttgatgtcaagaagaggggagtctagaacatggtagaggctcatgctttctcttaggaacggcctaattttcctgcttcctccttccacctttgtgcattcagggtcagaaggcaaggggaggagaaagggagctaagtggccccagagttgggcatgcttccagctggctcttagcttcctcccaacagcaaagaaggaaggactttgggtagcgagcctgtctaagctgctttgtgctccagggttggaatstgatggcaggagtgctgtcctacaatttcataggaaggggctctttgaagcttcttcattattcttttacatatttttccgttattcatttatttgtgtatcatcctgacaagggacagg

SEQ ID NO: 274109 - DNA, 620 bp, Homo sapiens
ctcttttctccgtatttctcatttaacccttgcaccaccaccttgagataagcagcactacttccattttatggataagaaaactaccaggtcatcttcctggtctcatttaattttcacagctatcattcaagacayacttttttttaaatctctattttttacaaaacatatgaacagcatatggcagagccagggttcaaacccaggcttcttccacttcgaagcccaaggttttccttgactgactctctatttggtccactttgaacaataaacactagagaaagcacatcaacttaaagtttaaaaatcctttgtagattttatttaaaatgaagctgcagtaagtgatgttgtcttcaggcatttgaatcttactatccgtattttcctctttccccttccctcctttgctccataccctccctttccccagtggataacttggtgagaaaacggagcaagcaaggggactggcaaaaacagcgctgtttctgcaccagagtttcagagacaggtgcaccatgagcacagctgtcaccttggttaggggtgctgtggctgcaaaggttaaagggcatgtgaaacgtaggcagggaagtcacatttggccaaga

SEQ ID NO: 274110 - DNA, 620 bp, Homo sapiens
ctcttttctccgtatttctcatttaacccttgcaccaccaccttgagataagcagcactacttccattttatggataagaaaactaccaggtcatcttcctggtctcatttaattttcacagctatcattcaagacatacttttttttaaatctctattttttacaaaacatatgaacagcatatggcagagccagggttcaaacccaggcttcttccacttcgaagcccaaggttttccttgactgactctctatttggtccactttgaacaataaacactagagaaagcacatcaacttaaagtttaaaaatcctttgtagattttatttaaaatgaagctgcagtaagtgatgttgtcttyaggcatttgaatcttactatccgtattttcctctttccccttccctcctttgctccataccctccctttccccagtggataacttggtgagaaaacggagcaagcaaggggactggcaaaaacagcgctgtttctgcaccagagtttcagagacaggtgcaccatgagcacagctgtcaccttggttaggggtgctgtggctgcaaaggttaaagggcatgtgaaacgtaggcagggaagtcacatttggccaaga

SEQ ID NO: 274111 - DNA, 506 bp, Homo sapiens
tcaggtctgaatgatcttttatgacagacttcaaatgaggtgcaaattgatgaagaattgtgttccaggtctcacagagagcagatgagaatcaaggcccgatctaggctaactttgaagccaggctttgtcttacacaacaccactctcagatcaaagggataaggctgggatgctgtattttggaagtaatactacatcctagcyctccaatttgagttgcatcagctgctgaagttgggggaaggaggaccttgatcaagatcacatcctgctccttgctccttattctatgtgatttgtatagcctgctcaaagtcttcagtctgattccatttgagccaggcccggccaataactgcagctggttggttcttggacttggtcacctttcagcaaggctcaatcacacctccatcttatgcacatacaagatgcactggggcacctgccatcttcctgctaatggcaggctgctaaggatgttagcacgcacctgcagctgt

SEQ ID NO: 274112 - DNA, 587 bp, Homo sapiens
taaatttgaatttaaagaatccctcttgtgctgggaatctaaaaaaaaatgatagcaaagtgaggaagatatgcycagaaaaccagaatgaaatcagagtcaatagccattggaagagaagcagaaggaagatgacatttgagagacggttaggaagatgtgaacaggaagctcatgtcttttaatatttgaaataaagatatgaaaaaagcccaattctgatatagggcaatattaaagagaaaaaactacatgccaaagagtttctctgcctaaaaagaccacaggagcacaaaatgagggagaaaacagactccgaacccctgcaccaaagaaggggacagtgctgactatcttcttcaggtgcattaggaagcagagatgccccacagaaaattcagctgtcagcctcacacctagtcctagatgaacagaatcctcaacaacccttgagtgaagtcatggtgagaacacatatcaagatttatttctggaaaagagcaaagaatgaaactaaaggtgacgctcccaaaggagatattgagctatactcttaggaagtgcagacttcctgctaactgtgcaag

SEQ ID NO: 274113 - DNA, 587 bp, Homo sapiens
taaatttgaatttaaagaatccctcttgtgctgggaatctaaaaaaaaatgatagcaaagtgaggaagatatgctcagaaaaccagaatgaaatcagagtcaatagccattggaagagaagcagaaggaagatgacatttgagagacggttaggaagatgtgaacaggaagctcatgtcttttaatatttgaaataaagatatgaaaaaagcccaattctgatatagggcaatattaaagagaaaaaactacatgccaaagagtttctctgcctaaaaagaccacaggagcacaaaatgagggagaaaacagactccgaacccctgcaccaaagaaggggacagtgctgactatcttcttcaggtgcattaggaagcagagatgccccacagaaaattcagctgtcagcctcacacctagtcctagatgaacagaatcctcaacaacccttgagtgaagtcatggtgagaacacatatcaagatttawttctggaaaagagcaaagaatgaaactaaaggtgacgctcccaaaggagatattgagctatactcttaggaagtgcagacttcctgctaactgtgcaag

SEQ ID NO: 274114 - DNA, 628 bp, Homo sapiens
aatatcagaacttagctctagacaaaggacttgaaggagtttgccagatgatgtggaatgaatgaaatatttaagagaacggcctgtactgaaaaagaaagtaatcttgaaaagggcattcccaggccytccattaccttatccgaaggggttccactctccaaagagacctggctcgagtcccagctcccccagcttcgtagaatatcctcctgtgagcagagttggagatcagctcctacttgcatgacactgatcagcacccgggtgaagaacagctccctgcagaggctgttcaggtactgagcttgtctaagcccttttggagtcagcagaatgcaaagccagaataagagggaagacagtttcccagtctctctctctcagaaagggtcaaagcagctagaggggagggaactgctcaccatatccatatcatgggcatttatgcatcatcaggtatacaagggaaaggcaggaacaagaacatctccatttctatatcaggagtcacaatagcccagttacacaatgacggcagacacagaatgctccagttccttcaggtcaagctccctgatgtagttttattatatctttaaaaaatgtatttgtactttaaaaacac

SEQ ID NO: 274115 - DNA, 662 bp, Homo sapiens
tttcccagtctctctctctcagaaagggtcaaagcagctagaggggagggaactgctcaccatatccatatcatgggcatttatgcatcatcaggtatacaagggaaaggcaggaacaagaacatctccatttctatatcaggagtcacaatagcccagttacacaatgacggcagacacagaatgctccagttccttcaggtcaagctccctgatgtagttttattatatctttaaaaaatgtatttgtactttaaaaacacctattcgacatagtgtgaactcatttccatcattccagggcagttggaacaaagctttatgctcagttgttacactgttcatgattttattactgtactgttgcttcctttcccgtgttaagaatcatcttttaatgtgttttgaaataaaatttttattttagaaaaatgttaggtttatcaaacagttactaaagatagtccagagagttcctgtatgatctcactcagcttctcccaatgttatcatcctayattaccagggtacgtttgtcaaaactgagaaaccaacacgagtatgtcattactagctaaactcaagactttatttgaatttcaccttaatttttcctgcaaacttttttccagttccaggatataatccaggataccacactg

SEQ ID NO: 274116 - DNA, 562 bp, Homo sapiens
ttttaaagttttattttaaataaattctgtataacctgtgatcggggcaggttgctccacattatacaaaattcacagtttaagagcatgtctcaagaacagcagtccccagattacctggtatactgaatccagccactttctgagaatcttgygacctctgatcaaaactgattatttaactgcatttacattcactaacttaaaatcctacctccaccgtagagaatttgtatggatcacaattgaagtggtcaaacccaagaggaatcctgatttagatgttagagacaagagttagtcaatagtggtgaaaagaaaatgtatacttattttttttttctggagaagtagtataattatgagtcgattcaaaatatgagcttggaagttaagacagacctgggtttgaatctggtagctgtgtgatctcgggcaagccccttcaactctctgtgtctcagtttgctttctaataagggtacttataaaacaatgttgtgaaaatttaaaggactttttaaaatgtttagaaagtgttttttataaatgtttataaaca

SEQ ID NO: 274117 - DNA, 544 bp, Homo sapiens
atttttttttccaaaacacaaattagagcctatgaaatcctgggctaaagaaaggtcaccttcatgtttatttaaatgatggcatgcatgtctgctccagtgtgcctattgtgaaaatcccyctccatctacttcactcttcccatcacctcctttcaaacacttgctgagcctttccttgtaagcagaattttgctgaatcacttgaacaaaatgcccaccaaatgactaacctaagtagcagtttctgtccagctgtttctaatttggctctaattttgatgacaggtgtgtgcatgtgggtgggggcatgcccatggtaaatacttcattttttccagttcccatccttaaaagtagaacaggaatagagagaatgaactaggaaaaccctgatgtattccatcttagatacagacaaccctgcaaaactcataaaatcttagttattcatctacctgcaaaccttccccttgatgcagcaggatatgatatcaaagggacagtaaatgggctattgtatagtttcaatattgaataaaag

SEQ ID NO: 274118 - DNA, 568 bp, Homo sapiens
gagaacactgccaagtgctggtgcatcatgacttttcttaactgaaatctatcagggccatagtcaggaaagcagcatcatgatgaagatcacttacgttcttaagggctgaagtgggtttctcaccagtggatgctggaaggacatttttctacagagcaagatgactcaagtgatgagttatccagactatattacaacggcactcaacacttctataaggaccttttgacatgatttgcaaacactccttaattaatttccacaagccctctgttgggaccaggaaataattttattcctayggtgaaaataaaaaatttaacatggagaagattgagccaaaactttcttgagaaagacttaaacccagagcttcttgattcttaatagaaagggattgactgacaatagacccaggagggtgggttaattttggcacaaaggaagagggctaaacacatcctaccttttaaagccttccacttgttgccaaaagagttaagaatttgtcttttcctgagtcttcagtttagctatcatgcattctgaaactggggtatcacct

SEQ ID NO: 274119 - DNA, 598 bp, Homo sapiens
ttgctccttgttctccttcctcttaggacaacccttcacgtgcacacaacaagtgcacattccagacctcaacttctgttggtctctaaccgttccagacagccccccatctgctcttgactatgtctgtcattttcattttccctagagacagaaaaacagtgtatggaaaggagtattggaggccggaaactatagcggcctytgagtatttttaatgcaaataggaaaaatgctttttatagtctttcaaatttctgttttgagaattgactccaatcaagaccaccaagaataaataaataaataagaatctatgtcattggtctactgcacacttacacactttcatctttgtctccccctgtcctaagggaagcttttttaaaggcttacatctgcaaggactcagacaataagtgagaaattgatagcaaagaagataaattgacattttggaaaaaggaaagcaggtggaagcttttagccaataaaaagtgaaaacccaggtctttcagtaagaaaatggagatgaagaaaccatcaataaaaagccaattcctgctgcagaatctcaagaaagtccctggacttggaa

SEQ ID NO: 274120 - DNA, 598 bp, Homo sapiens
ttgctccttgttctccttcctcttaggacaacccttcacgtgcacacaacaagtgcacattccagacctcaacttctgttggtctctaaccgttccagacagccccccatctgctcttgactatgtctgtcattttcattttccctagagacagaaaaacagtgtatggaaaggagtattggaggccggaaactatagcggcctttgagtatttttaatgcaaataggaaaaatgctttttatagtctttcaaatttctgttttgagaattgactccaatcaagaccaccaagaataaataaataaataagaatctatgtcattggtctactgcacacttacacactttcatctttgtctccccctgtcctaagggaagyttttttaaaggcttacatctgcaaggactcagacaataagtgagaaattgatagcaaagaagataaattgacattttggaaaaaggaaagcaggtggaagcttttagccaataaaaagtgaaaacccaggtctttcagtaagaaaatggagatgaagaaaccatcaataaaaagccaattcctgctgcagaatctcaagaaagtccctggacttggaa

SEQ ID NO: 274121 - DNA, 598 bp, Homo sapiens
aagtctcgctcttctcccccaggctggggtgcaatggtgcgatctcggctcactgcaacccctgcctcctgggttcaagcgattctcccacctcagcctcctgagtagctgggattacaggcgcctgccaccacacccagctaatttttgtacttttaatagagwcggggtttcaccatgtcggccaagctagtctcaaactccttacatcaggtcatccgccagcctcggcctcccaaagtgctgggattacaggcatgagccaccgtgcccggcccatttttactacccttttaaaccttctgatgctttcaaataaagttttacatttggaactagtgtatcattaacatgttataatatttgtcaacatctcttcaattacttaatgacatggttttcattattttacttttatggcaagcaaaaacagtttatacttacggcaataagttttgtctgtaaaattttaagtacaaaagtaattaaatttaaataaaatcataaagtaaatgatattataaaggatacagtggaatggcaaaatcacgattatagatgtcaataacatttggaaaacactactttagacatagct

SEQ ID NO: 274122 - DNA, 598 bp, Homo sapiens
aagtctcgctcttctcccccaggctggggtgcaatggtgcgatctcggctcactgcaacccctgcctcctgggttcaagcgattctcccacctcagcctcctgagtagctgggattacaggcgcctgccaccacacccagctaatttttgtacttttaatagagtcggggtttcaccatgtcggccaagctagtctcaaactccttacatcaggtcatccgccagcctcggcctcccaaagtgctgggattacaggcatgagccaccgtgcccggcccatttttactacccttttaaaccttctgatgctttcaaataaagttttacatttggaactagtgtatcattaacatgttataatatttgtcaacatctcttcaattacttaatgacatggttttcattattttacttttatggcaagcaaaaacagtttatacttayggcaataagttttgtctgtaaaattttaagtacaaaagtaattaaatttaaataaaatcataaagtaaatgatattataaaggatacagtggaatggcaaaatcacgattatagatgtcaataacatttggaaaacactactttagacatagct

SEQ ID NO: 274123 - DNA, 532 bp, Homo sapiens
catacaagattctttcttatataaaattatttctctttaagtttttcacctcaaaaaaaaaagcctctttatttttataactttctttacgtcttttttattcctggttcctttyaccttgttgtatacataacctttaagttttgaattagacaaaacttgttcacttttttttaaggacacactttttttttctttaacaataatgttttcctacaatatgtatttattggaaaatacccaaatagtgaaatatctattatttgatttaatatagctttatattctaaattatgaccagtttgtctacaaatatttgtgccattacatttacctaattgttttgtttacctagattattcacgaaaactgtgacagtcattatttaaagttataaaactgccgttgcaaaattataactgagacactgaaaagagatttgatctgaccaactcaatattgttctttttttgggggggggggatttctgacttctttttatttatttattttaagtggatgaataatactt

SEQ ID NO: 274124 - DNA, 532 bp, Homo sapiens
catacaagattctttcttatataaaattatttctctttaagtttttcacctcaaaaaaaaaagcctctttatttttataactttctttacgtcttttttattcctggttccttttaccttgttgtatacataacctttaagttttgaattagacaaaacttgttcacttttttttaaggacacactttttttttctttaacaataatgttttcctacaatatgtatttattggaaaatacccaaatagtgaaatatctattatttgatttaatatagctttatattctaaattatgaccagtttgtctacaaatatttgtgccattacatttacctaattgttttgtttacctagattattcacraaaactgtgacagtcattatttaaagttataaaactgccgttgcaaaattataactgagacactgaaaagagatttgatctgaccaactcaatattgttctttttttgggggggggggatttctgacttctttttatttatttattttaagtggatgaataatactt

SEQ ID NO: 274125 - DNA, 545 bp, Homo sapiens
caaatgggagcactgtacctgccactagtttacagagtttcctggcagcttagtttctgtacctctggtgtgtggtccctgcctggactctctgtacttggaaataagagcatgccactccaacagcacmcaaaacaatgtgtgggcagtggtaagggagggaacagagcaactggaatgtctggagaaaaacaaaacaacgaaaaacttgtgacatgaatggagcacagagccatctgacctgctatgccagctgccatccttaattaaactccaaactggcctgaactcccacctccacactcctgatgaatgagcaaaggccactcgtccattaaagctaatttgtttgtagccatgagagtcccctaggaggccagctcattgtgtctgtgctgtggaacctgtggcctcagtcactctacctggcaggcacggggcaagtgtttgatgactctcagcatggagagaagggctctgttgacatctgttctgaaatagctcctcatcactctccccaagccctgccctgaacctagagaagc

SEQ ID NO: 274126 - DNA, 599 bp, Homo sapiens
tctcttggaggaaggtttagtaactcaagtgagaacaacacttgcatcaattatcaatatcatcatcatcatcatcatcatcattatttttttgagacaaggtctctctctgttgcctaagttgaactccaattcctaggctcaagagactctcccgcctcagcctcttaaagagctgggactactagtgtgtgccacagcacccagctaattattcttttggtggtgctcagagatttctcacaagagctaaaacagatatgtataagcttgttctggaaggattaatgcagaaatacggtgagccaagaaactcctgagcaggactggcaaaatttcatattccagtttttccctctgcctggcagcacatggtcggcatgttacaragctaaggtgccaataggtgaaaagttggaacccttgcacctggaaaaacaagttgtgttgatgagtagcaactaatacctactgttgatggacagaaatacctgaaacactgactctttatatggtcataaaaatatacagccataaataagcaaccacttaatgagtagcacaggtactacaatgagctgtggaaacttaatgggaac

SEQ ID NO: 274127 - DNA, 536 bp, Homo sapiens
cttctccccaaatctttcctggttgaagtcattgacatctttcacccagggcatgagctgtctctgataaacacagggaaaccattaggagactcagtctcctcctacttgaattcaacccatcactcagtatctggggggactggccaggaaataccacgtctaatgctacatctgtccaaccatccaagttcacatgactgggctttcatcttgagctcccttcctccgctttgctgagtaattaaccagggttactgaggttctgcatcaacaatgaagacagggaaggggtgctgcatgacaaattatggcctttctttttccctcctggataactaagagttatctccaatacataatggttgagttcacttggcarcactaggcagaatgaatgcattgatagaaactgatggagcaatgccacacctcaaaaagcaaagtccttgctcacagcgacctaagcaaggtctgtcagaccccatgaagataaatgcttcagattagccacttgctttcctgtggcattcatc

SEQ ID NO: 274128 - DNA, 536 bp, Homo sapiens
cttctccccaaatctttcctggttgaagtcattgacatctttcacccagggcatgagctgtctctgataaacacagggaaaccattaggagactcagtctcctcctacttgaattcaacccatcactcagtatctggggggactggccaggaaataccacgtctaatgctacatctgtccaaccatccaagttcacatgactgggctttcatcttgagctcccttcctccgctttgctgagtaattaaccagggttactgaggttctgcatcaacaatgaagacagggaaggggtgctgcatgacaaattatggcctttctttttccctcctggataactaagagttatctccaatacataatggttgagttcacttggcaacactaggcagaaygaatgcattgatagaaactgatggagcaatgccacacctcaaaaagcaaagtccttgctcacagcgacctaagcaaggtctgtcagaccccatgaagataaatgcttcagattagccacttgctttcctgtggcattcatc

SEQ ID NO: 274129 - DNA, 536 bp, Homo sapiens
cttctccccaaatctttcctggttgaagtcattgacatctttcacccagggcatgagctgtctctgataaacacagggaaaccattaggagactcagtctcctcctacttgaattcaacccatcactcagtatctggggggactggccaggaaataccacgtctaatgctacatctgtccaaccatccaagttcacatgactgggctttcatcttgagctcccttcctccgctttgctgagtaattaaccagggttactgaggttctgcatcaacaatgaagacagggaaggggtgctgcatgacaaattatggcctttctttttccctcctggataactaagagttatctccaatacataatggttgagttcacttggcaacactaggcagaatgaatgcattgatagaaactgatggagcaatgccacacctcaaaaagcaaagtccttgctcacagcgacctaagcaaggtctgtcagaccccaygaagataaatgcttcagattagccacttgctttcctgtggcattcatc

SEQ ID NO: 274130 - DNA, 624 bp, Homo sapiens
tttgcatatgcctatagttctatcttttggaaccttctctttccttttctagggcccttttcttctcttcctagaaacatgcttgtgtctcttatgaaaactttttctttacaaccttaaaactttttctttataagacttcaattctacttcaaccgtcattttttttttctcttcttcatttaaacactcaacttcttttaaagagcaatgaatactcattgatgaggttctggttcaggtaatggtggaactacctatagcaaaataatcctcttgccaataacaatgatacattctggataaatatttaaataaataactatttgaaggcaccagggagcaatctagaactgaaaggaatattactttttaaagatgagaagtcaatcaggtgctataaacatttaattaaattttcttctaagggtactctcctgttcataggatccatggggaatagatgtcaagaaaaaggcttctaggaagtaagagacctgagtmtggggctaccagaatgtctggaaatagaagaggagaaatgttaggaacaaggaaaccaccatagattaataaaacccaagatcagtatacaaattcccctcaatttgtttgccaactcat

SEQ ID NO: 274131 - DNA, 617 bp, Homo sapiens
gtctatagcaagtgttaatgatcttattatactcatgccctttattcttctatcctctcactcctttgcttccatatgatctccttttctccgggtcacacaccaagaatagtttttgaacactttatctctttttttctctgaggtctttcttctccatagaattcatctcaattttctctgagtctcaactagcttaaaacacccttgactagaaatgcccaaggtcaccggtaggctctgtagccagctgagaagaaggatatttgatgtctgtgcctcatgcccagtgccaagcttggaaacatacctcctcacctcactgcatgacttccattaggatmcaagaatctaagaatggtacagctcgttgagaaatttgatggtagagaattagggcaactatttagtaataagggagaagacaaccagccaaaagagagggttgcatagctgcaaatgactgcaggaaagaatgaagctcttgggaacccagttcctctagcagactgctcccaggaatggtgacaagaaattctgaatattttgttctatcccttcctgtgattttttccctgtttttctgtgagaaccctgatggcgcacttccctcatgc

SEQ ID NO: 274132 - DNA, 547 bp, Homo sapiens
tctgtcttttacacaaaatcagaccttgtaagtcaaaagggataacaactttatacttagtattattatcaactctagctgttaagtgtactgtattagttcagtattatgtgctttatatatattatttctctttattttcacagtccccctgaaaggtaattagttttccttattttaaagaacaagaaactaagtcccagtttaaatgtcttgtacaatatgaaatcataataaccagtggttttatcaagcttacaatgcactaggcgatttacgaacmcatttgatcctgacagcaatcttatagggtagttactattaaattcccattaagcagatgagaaaactcagctcagaaaagtgaggtaccttgtccaaggtcctggtttagccagcaagtggtagagacaggattccaactttgacagtctggctcacagcctgtgccctaaagcagggtccccaacccctggggccatggacccagttcatggcctgttgggaaccaggctgcacagcaggaggtgagtgaggattactgcct

SEQ ID NO: 274133 - DNA, 547 bp, Homo sapiens
tctgtcttttacacaaaatcagaccttgtaagtcaaaagggataacaactttatacttagtattattatcaactctagctgttaagtgtactgtattagttcagtattatgtgctttatatatattatttctctttattttcacagtccccctgaaaggtaattagttttccttattttaaagaacaagaaactaagtcccagtttaaatgtcttgtacaatatgaaatcataataaccagtggttttatcaagcttacaatgcactaggcgatttacgaaccyatttgatcctgacagcaatcttatagggtagttactattaaattcccattaagcagatgagaaaactcagctcagaaaagtgaggtaccttgtccaaggtcctggtttagccagcaagtggtagagacaggattccaactttgacagtctggctcacagcctgtgccctaaagcagggtccccaacccctggggccatggacccagttcatggcctgttgggaaccaggctgcacagcaggaggtgagtgaggattactgcct

SEQ ID NO: 274134 - DNA, 568 bp, Homo sapiens
aggcttctggaggacgtggccatcaccctggacatctggtgttacagattttagccaaactctctgtgtatgtctgtgttgtgtatgtttatgtggaaaatggcatgccaataggtgggtcttttggaaaatgttaccaatttctgatttttgttttcggtttttttaaaaaaggttctgtgagaaaaactgagcttagagggtgtgatggtgggttttatgtcaacttggctaggccatagtgccgttatkcagccaaacgacaccataggttttgatgtgaaggtattttgtagatgtaattaacatctgcagtcagttaactttaagaaaaggctattagccttgataactttggtatgcctcatccgatcagatgaaggccttcagaacaactgagatgtcctagaaaagaaggaactctacctcaagatgacagcattaactcctgcctgagtttccagcctactgatactaactacagatttcagtctcactagcccctacgactgcaagaactaatttcttaaaagaaatctctatacacttatatacttacctacctacc

SEQ ID NO: 274135 - DNA, 623 bp, Homo sapiens
taggtgagctgatgatttcaacatttgggcaaatatgaaagcaaatttatacaatctctccaaatatagaataaaacaataagataggattgargggaacagagaatacagacaagatcagagcaaggtgggatgagtggagggaaagtgttggggtttcaggttgtggaagaggcaaagtatgttttgttggaggaaggcagtgtatgtcgtgggccgcatatttgccagagatggtagaggaagatatggagggtgaaggagatgggttttagactcacagaaaaggaagattaaagatgccttgaagatcaggtaagaggaggaggaactgaaggtcaagtagaagaactgctctgaattctcaaggagtagacctccctcctaaatatcaatcccaaaagcagccctcctaaaatttcagaggccctggaaaagaggcagccctccatctacaccaaaacattttcttgcacaaccctccctgaggtggagaggaaaacagtttccttactaatccttccattcctgcccctcctatctgtcaggccatgctccctagtcaccaccacatagctttggatttcaagcagcaaacagatttccaggtgtggttaagttac

SEQ ID NO: 274136 - DNA, 369 bp, Homo sapiens
tggggaacaatggtgaaaacagacattacttctggaaagcatcatggcattcatattctaccctagaagaacctcagagagtaaagcccaatgtatagagataagtcagagcmtcaactcagaaacaactacaattatcacctatcccttcccaccttcttcaactccctatagcctgtcccactatattcttaggcctttgccaatgaattcttttattaaattcaagtgaggtcccaggtgattctgaatatttatcataacataatgatttatttgttgtctctcttctaaggttaaacttagaggacagctgacagtatcttttcctcagcagagtttttcagactccttaatcgatcacactgt

SEQ ID NO: 274137 - DNA, 613 bp, Homo sapiens
tgaaaacagacattacttctggaaagcatcatggcattcatattctaccctagaagaacctcagagagtaaagcccaatgtatagagataagtcagagcctcaactcagaaacaactacaattatcacctatcccttcccaccttcttcaactccctatagcctgtcccactatattcttaggcctttgccaatgaattcttttattaaattcaagtgaggtcccaggtgattctgaatatttatcrtaacataatgatttatttgttgtctctcttctaaggttaaacttagaggacagctgacagtatcttttcctcagcagagtttttcagactccttaatcgatcacactgttcattctactggacagttcccagcaactctacagaggatgatgagatagcatgatgaaattttaacctcttcgtcttcatttttctttcttgttccttccctattcccttagccttaatgtgctcccagaaggccacccctcctcctggtttccgtgtgcacacagcatacaaagttggtttctcaaaagagatgggaaagaagaatctacttcaaaatgtttttttctccttcacttcctagctatcacaaaatcc

SEQ ID NO: 274138 - DNA, 540 bp, Homo sapiens
cagtatcttttcctcagcagagtttttcagactccttaatcgatcacactgttcattctactggacagttcccagcaactctacagaggatgatgagatagcatgatgaaattttaacctcttcrtcttcatttttctttcttgttccttccctattcccttagccttaatgtgctcccagaaggccacccctcctcctggtttccgtgtgcacacagcatacaaagttggtttctcaaaagagatgggaaagaagaatctacttcaaaatgtttttttctccttcacttcctagctatcacaaaatccaaacactgtaacttttgcagcccacaccccctcagcattgatattttttcattagtcctttttttctaaaatatcctgtgcctggaagaatcaagaatttccctcttgagggtgggacttaacagctgaataaagagctcagtaaatcttttctcacacaaaataataaaaaaattgggcaaaatcattcaaaataacaatctctggactctggaaattgactagaggcat

SEQ ID NO: 274139 - DNA, 540 bp, Homo sapiens
cagtatcttttcctcagcagagtttttcagactccttaatcgatcacactgttcattctactggacagttcccagcaactctacagaggatgatgagatagcatgatgaaattttaacctcttcgtcttcatttttctttcttgttccttccctattcccttagccttaatgtgctcccagaaggccacccctcctcctggtttccgtgtgcacacagcatacaaagttggtttctcaaaagagatgggaaagaagaatctacttcaaaatgtttttttctccttcacttcctagctatcacaaaatccaaayactgtaacttttgcagcccacaccccctcagcattgatattttttcattagtcctttttttctaaaatatcctgtgcctggaagaatcaagaatttccctcttgagggtgggacttaacagctgaataaagagctcagtaaatcttttctcacacaaaataataaaaaaattgggcaaaatcattcaaaataacaatctctggactctggaaattgactagaggcat

SEQ ID NO: 274140 - DNA, 628 bp, Homo sapiens
gtttaaaattacaaaagggcaaatttatcagaaatatatatctattataaacatataagcacctaacaacagaaaccaaaatatgtgaagcaaaaactgatggaattgaagtagaagatgacaattcaacagtaacagaaacatcaatacccgattctccaccagttaatgtaataaaccatattaacaaaggacaaaactatatgatcwtatcgatagaccaagaaaaagcatttgaaaaaatctaatgctcattcaagataaaagctctcaacaaaccaggaatagaagggaacttcctcgacctgataaagggtatctacaaaaaccctacagtcaatatcgcacttaacggtgaaaaattggtgtttcccaccctgtccccacccccaccttagatcaggaacaagacaagaatgtctgttcacatcacttttattccacattgtagtggatgttccagccagtgcaataatgcaagaaaaataaataaagggcatccctattggaaagaaaaaaataaagctctttttattcacagatgacataatcctgtatgtaaaaagttctaaagaatccacctgctccccaaaaagcccactgaactaataaataatttcaattaggt

SEQ ID NO: 274141 - DNA, 587 bp, Homo sapiens
caaatagacttatcttagagggttggaagattcaatgatttacatgtagggaattggcatggcacctagaatctaataggtgctcaatgagtgtttgttatcagaggcagtatagtactgatcttggatcagttgtctggaagctaagagtatctacttgtcactaaggatatcatgacacaatttttttgggactaccagctttttgtgtggaggtcaggggctttttcccttaaaatgatcaagtatgtgaagatgttaagtgaggtagtttgatcctggttcaagtcaaggttagtttgatcctggttcaagtcaaggtcaaatcctgatccaagttcactggcatggtttcctcttgatggaagcaagcaaagagagacaaagtgtagatcctggaagtctacatgtcaacatagacaaaacatgtggctctagaaaatatctakagaataaagattgttggtctctctcatttttagcataaagaaacaacttactttcctttccatgtgaaacatctcttcctttttattattttgaaggtacttcctgatatgatgaaatagaataccggcttgttcatt

SEQ ID NO: 274142 - DNA, 587 bp, Homo sapiens
caaatagacttatcttagagggttggaagattcaatgatttacatgtagggaattggcatggcacctagaatctaataggtgctcaatgagtgtttgttatcagaggcagtatagtactgatcttggatcagttgtctggaagctaagagtatctacttgtcactaaggatatcatgacacaatttttttgggactaccagctttttgtgtggaggtcaggggctttttcccttaaaatgatcaagtatgtgaagatgttaagtgaggtagtttgatcctggttcaagtcaaggttagtttgatcctggttcaagtcaaggtcaaatcctgatccaagttcactggcatggtttcctcttgatggaagcaagcaaagagagacaaagtgtagatcctggaagtctacatgtcaacatagacaaaacatgtggctctagaaaatatctatagaataaagattgttggtctctctcatttttagcataaagaaacaacttactttcctttccatgtgaaacatctcttcctttttaytattttgaaggtacttcctgatatgatgaaatagaataccggcttgttcatt

SEQ ID NO: 274143 - DNA, 567 bp, Homo sapiens
gttttgggtggcttggttgttgaaaccttccattttttttgaaggtactgtatccagcctttgcggttgttttcagaagaagggttggtctcatacaagccagattatgtggtctcttatttattgtattttctatcccctcttgatcatttcatttccccttttctggatattttcctagtctgtgttgccttaaggtaataagrtattaccttatgttcattctcaacatcctttcttatcataacctgcattctggaaaactgttcatcatgactaccttaggctgctatacctcaactacagagcacagtgcctcctagcaccttattctgggactagttgactatttaaacccatattttataagggtatttcaggaataaaagcatcacatctttgacatccattatttggttcccaccaaaagaaacactgttacggcaattgactttctggtaaatagatgctgcatgcacccaagctagtttttctcgctggagcaggctgtgatgcaccactcaaatcaagatacactctgtggatacagtgtcattccacaacatc

SEQ ID NO: 274144 - DNA, 567 bp, Homo sapiens
gttttgggtggcttggttgttgaaaccttccattttttttgaaggtactgtatccagcctttgcggttgttttcagaagaagggttggtctcatacaagccagattatgtggtctcttatttattgtattttctatcccctcttgatcatttcatttccccttttctggatattttcctagtctgtgttgccttaaggtaataaggtattaccttatgttcattctcaacatcctttcttatcataacctgcattctggaaaactkttcatcatgactaccttaggctgctatacctcaactacagagcacagtgcctcctagcaccttattctgggactagttgactatttaaacccatattttataagggtatttcaggaataaaagcatcacatctttgacatccattatttggttcccaccaaaagaaacactgttacggcaattgactttctggtaaatagatgctgcatgcacccaagctagtttttctcgctggagcaggctgtgatgcaccactcaaatcaagatacactctgtggatacagtgtcattccacaacatc

SEQ ID NO: 274145 - DNA, 567 bp, Homo sapiens
gttttgggtggcttggttgttgaaaccttccattttttttgaaggtactgtatccagcctttgcggttgttttcagaagaagggttggtctcatacaagccagattatgtggtctcttatttattgtattttctatcccctcttgatcatttcatttccccttttctggatattttcctagtctgtgttgccttaaggtaataaggtattaccttatgttcattctcaacatcctttcttatcataacctgcattctggaaaactgttcatcatgactaccttaggctgctatacctcaactacagagcacagtgcctcctagcaccttattctgggactagttgactatttaaacccatattttataagggtatttcaggaataaaagcatcacatctttgacatccattatttggttcccaccaaaagaaacactgttacggcaattgactttctggtaaatagatgctgcatgcacccaagctagtttttctcgctggagcaggctgtgaygcaccactcaaatcaagatacactctgtggatacagtgtcattccacaacatc

SEQ ID NO: 274146 - DNA, 366 bp, Homo sapiens
cttgttaattgtaaaatcaatggctttcgagttctggttacttcagtgattatttaaatccacgggaaaaggggacacctagtaagctcttctcttctgttctgattttgtgtaattcttcactatattttctactttcctcatcctgatttrtataacttaataagtaatctgttactagccaattaacttatttccagcgagtgacatcttccataattgtaatggttatctgtcacaaatgcactgactcagaggctttcatcatatctattgatttcatgtaaaaatttcttataaaaacctgcagagaaaggagaccctttgaatacgcaggggttaataccgtggcttaagctaatgtag

SEQ ID NO: 274147 - DNA, 606 bp, Homo sapiens
tttacttttcattgtcatctccattctgttatttaacccatttgatcagtttacattggattatatttcagttataaaatttgttttaatacattctatttcttgctagaatttattttaatttatttcaaatgtgttttcctttacctaaaggaaccagttatggaagctgctttaaagtttttccctgatacttccaacatctgagtcattctggagttgtcttttccttgagaactggtcacattttcctggtcctttataccaagtaattttggattttatcttggacactgaatattatgttatgtagcctgggtactgttataatacttccgagattgttgatgctcttgtttcagcaggcaaacacttgagttatattcagactgtaatttgtgttttactttttgtaggcagtgaacttgcagttcagttacttaagccttttctattccagtttgcatctgtcccataactgtgcaggtcaaggggtagggtgaaacttgtatgggattcccctcaaactttctgcacaaagaggcctctttctcaggcttctctgttcrggaaatatggggtttctcttgaagtttatctgccaga

SEQ ID NO: 274148 - DNA, 319 bp, Homo sapiens
atgtaagaatttactttttgggtaatttccacatcactgatatattgcatactatctaggtaaaagttaaacagacttttaagacagtgataacaaatattgttgaatgtgaatgcctattaatgtgaaaagtcactgggtttaggcagaagcaactttaatgggatgaatgatttttggttgttcacttgttttcatagtattagrgatttcaaaataatagggacacagggctttgactcaacttggacttgtgatgacatgttgagctttatagcatatgacgttcactttggaatcacttacacttttgtttgtt

SEQ ID NO: 274149 - DNA, 552 bp, Homo sapiens
aaggtatcccctctgaggacatagaattctagtcattcagaacccaggagtgtagagatgggaagcataatgttccccagtgaatcactggaagtgacggcaactcctgcttccacccctaattcccatggcatattagcttcctagggttgctataacaaattatcacaaactggatgacttaaaacaacagaaaatgtattctctcaccattcaggaggccagacgttcaatatcaaggtgttggcagggtttatcactattagagggtctgagggataatctgttctatgcttctcttctcacttctggtggttgcgggcaatgcttagcattccttggcttgtagatgaatcatgccaatctctgactccatcttcttatggcttttttccttgtgtgtcttgtgtgtcctctcatcatctttggatatgagcctaccctaacccagcrtgactacatcttagctaattacatctgcagagaccatacttccaaataaggtcacattctgacattccagaagaacatgacttttggggtgacactatt

SEQ ID NO: 274150 - DNA, 552 bp, Homo sapiens
aaggtatcccctctgaggacatagaattctagtcattcagaacccaggagtgtagagatgggaagcataatgttccccagtgaatcactggaagtgacggcaactcctgcttccacccctaattcccatggcatattagcttcctagggttgctataacaaattatcacaaactggatgacttaaaacaacagaaaatgtattctctcaccattcaggaggccagacgttcaatatcaaggtgttggcagggtttatcactattagagggtctgagggataatctgttctatgcttctcttctcacttctggtggttgcgggcaatgcttagcattccttggcttgtagatgaatcatgccaatctctgactccatcttcttatggcttttttccttgtgtgtcttgtgtgtcctctcatcatctttggatatgagcctaccctaacccagcgtgactacatcttagctaattacatctgcagagaccrtacttccaaataaggtcacattctgacattccagaagaacatgacttttggggtgacactatt

SEQ ID NO: 274151 - DNA, 597 bp, Homo sapiens
ccgaggggctagcatattcctctatctcattgttcccattgcattgatacccataggcagaaaattaagcaaggaaaaaaaaaggcaagaaaagaaaaggaacaccagccaccaaagcacttagcgatttcagattcagacatttacaaagtgaaattgcaaaagagtttcaattcttctttgcaagctccattctacctggatgagtgccatcaccctgtcaggatattttttckgtgtttatacagaatcatggaatgctagcagctataccttaattctttccttttcaattttgctctttttacaaaggaatggaaagtctattgaggttactgaatactccaagtcaagatagctagttagtaactaaacagggttaaggtcttttgaagtctttctcatttcccaactcactgtcaaggtctacagagtctgagatttgatactacttgcagactaacaagtttgcctgccactgttttgtggatactggcagaagacacaggactcttgggtcagagacaaaagacttcagcactcatgggattgaagttagcctgctactgttttgtggatactggcagaagacacaag

SEQ ID NO: 274152 - DNA, 652 bp, Homo sapiens
ctttctgtgggtatttgccattggaaatgtatagtttgtcgtatacaatatgtgtgtttcaaatggcatgttcaaatgtgagcagtcaagttttataaaaccatgtgcatatgagaatcaaaatgacaatgcttcattgctttttatagcacacacagatgtagtcattcttcctcagtggccattctaatttatttaagaacaaaattagaataaaataatcctccttatcatgtaattaggaagataaacagtagtgggaaattggatagccagcttgtgcttatccataaatagagaattcactgacccctcccagctaaataatttcttctgcaggrcgcttgctaagcatctctgtgtccttctggaagatttgtatcagacaggcttctctctcatttcttgctcccacatcctgctctattgtgccacatttggtgaagctggctgctgtcgttcctgttgcattgtggcaggtggaggcagaagatgtttttgtcacaagatagaatctctgggaaaaaaaaaacttggcttaaaatctaagtgccataaagagagggatattgtctttcttgctaccatatccccagtgcccagaatagtgcctggtacataataagtgctccacaaataactgttaaagatg

SEQ ID NO: 274153 - DNA, 638 bp, Homo sapiens
caagctcattcaagttgttggtgaatttactcccttgtagtcataggactgtagttcccaattttctgggtgactgttggccagggttgatctcagttcctagggatgtcctcaggtcacagacacatgactatctcaaaacatggcagcttactttttcaaagccaggagaagactctctctcttagggctcacctgattaggtcagactcacccagataatctccacttagataaacttaaaatcgactgattgggggatctggcaaaatggcckaataggaacagctctggtctgcaacaaccagcgagaccaatgcagaaggtgggtgatttctgcatttccaactgaggtgcctggttcatctaattcagactggctagaagtgggtacagcccctggagggcaagcagagcagggtggggtgtcacctcacccaggaagtgcaaggggccagtgaactacctcccttagccaagggaagccataagggactgtgccatgagggactgtgctatctggtccagggccccagattttaagcacaaaaccaggcagctgtttgggcagacaccaagctacctgcaggagtattttttcataccccagtggcacctggaaccccagcaaaacagaa

SEQ ID NO: 274154 - DNA, 638 bp, Homo sapiens
caagctcattcaagttgttggtgaatttactcccttgtagtcataggactgtagttcccaattttctgggtgactgttggccagggttgatctcagttcctagggatgtcctcaggtcacagacacatgactatctcaaaacatggcagcttactttttcaaagccaggagaagactctctctcttagggctcacctgattaggtcagactcacccagataatctccacttagataaacttaaaatcgactgattgggggatctggcaaaatggccgaataggaacagctctggtctgcaacaaccagcgagaccaatgcagaaggtgggtgatttctgcatttccaactgaggtrcctggttcatctaattcagactggctagaagtgggtacagcccctggagggcaagcagagcagggtggggtgtcacctcacccaggaagtgcaaggggccagtgaactacctcccttagccaagggaagccataagggactgtgccatgagggactgtgctatctggtccagggccccagattttaagcacaaaaccaggcagctgtttgggcagacaccaagctacctgcaggagtattttttcataccccagtggcacctggaaccccagcaaaacagaa

SEQ ID NO: 274155 - DNA, 601 bp, Homo sapiens
ctacaattgacagaatgctttctgtgaataaattttaccttttttcatgcaaataaataataaaataataaaataaatacatggatggcactttatgttttgcaatgtgttacattaaagtaacaaagtcatgtcrtaggtcaaaataatattcagatagttcatattcgttttatcaaaaggatggaatattccctcctaacactagttattttgctcaattcatctcaaaagttagtaattttgaaaaggaatgcttacattttctttttatgtgactggacaaaattccagtgtgggtgttcaatccacccttcagggacaaaagcaacatggctgaatttttaagtgaattgctttgtggcaatatctcacccgttgatgaatccttgtggcataatataattctgtaataaaatttcacagctcaatcgttcatatatttctaatgattcacagcacaatttcccagattgcttgagagggattaacagattacctaaaagccattgttaaaattgatcaaatgacaattttatcactgttactgaactccacatttttttttttggctgtcaatgaaagttttgtaaaagaacac

SEQ ID NO: 274156 - DNA, 601 bp, Homo sapiens
ctacaattgacagaatgctttctgtgaataaattttaccttttttcatgcaaataaataataaaataataaaataaatacatggatggcactttatgttttgcaatgtgttacattaaagtaacaaagtcatgtcgtaggtcaaaataatattcagatagttcatattcgttttatcaaaaggatggaatattccctcctaacactagttattttgctcaattcatctcaaaagttagtaattttgaaaaggaatgcttacattttctttttatgtgactggacaaaattccagtgtgggtgttcaatccacccttcagggacaaaagcaacatggctgaatttttaagtgaattgctttgtggcaatatctcacccgttgatgaatccttgtggcataatataattctgtaataaaatttcacagctcaatcgttcatatatttctaatgattcacagcacaatttcccagattgcttgagagggattaacagattacmtaaaagccattgttaaaattgatcaaatgacaattttatcactgttactgaactccacatttttttttttggctgtcaatgaaagttttgtaaaagaacac

SEQ ID NO: 274157 - DNA, 587 bp, Homo sapiens
gcaacatagtgagatcctgtctctgtgaataatacaatgattagccgagtgtggtgacatacacctgtaggcccagctactcgggatgctgaggtgggaggagcgattgagcacgggaggttgcagtggccataatcgcatcactgcacttcagcctgggtgacagagcaagacactgtctcataaacaaaaacaaaagcaaaacacagtcacattctctaaagagcttttatcagtaataaagctaatatattgctgccatctgtttgagtcctatctctcaacttgctctgatcttgagagtggaaagaaggtattgttgattgattccttaaacctccagcagattgtatacttctcttagtggagataacaawgttgccttgagtgggatgtaggacctacaggatgggtccagcaaggtcatttggtgggcttcatatctgagagtgttccaaagtttggctaatattcaatggcaacttggcaaagggatgagagtacagtaacctcatcacaaaccttaactttcttttttttaaactcctcaattatggcttccccaagtttttctgtgagacatattg

SEQ ID NO: 274158 - DNA, 654 bp, Homo sapiens
accaaaacctatggggtacagcaaaagcaggactaagaggaaagtttacagcaataagcatttacgtcaaaaaaaaagcttcaaataaataacttaataatacaacttgaagaattagaaaagcaggagcaaaccaaactcaaaattagtggaagaaaataagcaataaaaaattagagcagaaaaaataaaattgaaataaaactacaaaagattaatgaaattaaaagttggaattttgaaaagataaacaaaatggacacamcttcagacaaagaaaagaaagatccaaataaataaaatcagagatgaaaaaggaaacattacaactgataacacagggattcaaaggatcattcaaggttactataagcaactatatgccattaaattgaaaaacctagaagatatggataaattcttagacacatgcaacccaccaagattgagccatgaagaaatccaaaacctgaacagaccaataacaagtaatgaaattgaagccataataaaaagtcttccaggaaaataaagcccaggatctaagggcttcatgctgaattatgccaaatatttaaagagctaataccaatcctactcaaactattccaggaaatagaaaacaagggaatatttccaaactcattctacaag

SEQ ID NO: 274159 - DNA, 649 bp, Homo sapiens
cataagtaattggctactttcctccactgtctctcgttattttcctcctcccacctctttccttttcctaactcagttcccttgctttgattttcctttcccctctgccttgtccataccatagcattaacataatcacctaggattcacactgggttctagtgttcaaggttctgaaacggctgggtcagccatttctgatccttttctatccccagacacataagggatgtagcaggcagtgccatcaaaatccatggctctctacagcactaattttaagaggtggagaaaggcrtatcagattctccaacgaaaaagaaactttataggttgaaaacttttaaatgcttccaatgaagatctgatcagcatgtttccctacattccttctatgtcgtgttggcatcactggaaagagcctcgcctaatgtggtggcttacggaccagcatcaccaacgtcacttgggaacttgttagaaatgcagaatctcaggcctccaccccagacctactgaatcagaatctgtgttttaactagatgttcacattaaagtttgagaatcactgtgctctcatggtaggaatatagtaaaacccaacatatctaatggtgtaaatggcattcaactactgataacaacatat

SEQ ID NO: 274160 - DNA, 578 bp, Homo sapiens
tgttttcctttttccatggacctttctcaggtactgcaattcctagagtaataaatgtagatgtttacaccaggttacagtatttttgtttatttatatagataaagcaagattcagtaatttcataatttgggatattcaagggaatcattatggtgagtttttttatatttattaytctttgaaaaggtgatatagatagaaagtccccagcttttctaaaatacacattttaataaaagtctgcccatgctagaggtattatcatatgctagtaagtcttcactcagtcacagtctttcggggtttattcatcaactcatagcacataatctattactgactttctacttgtggtacttgtggtgacttgtgcagtcacccagtgcccctgaagggcaagtggattcacattcacttcactaagaatgaaaagaaaaaaatggacagatgttcttggtaatggttggcatttcagtgtgtaatgtataaagttacctaatatgttagcctttcacatgaaagaaagaaaatagaatccatataatattcctgtaactgtggctggttgaataaat

SEQ ID NO: 274161 - DNA, 566 bp, Homo sapiens
aaaatcacttccttagtatcttaagggccttacttgacatgctaaggtccttagtctcctgagtttcatgcccacatttaggacaaggaggctgttttcctttttcttgcttaaacactttgctccttgtatgatcatcacagaaacaagcctgtataggagaagcaaaataaagtaaataaataaaaatgtaaaaatatacaaaaagacagtattcagtgttttaaagatatagctttattaaggcagtgagattaacaattttgttgggagcagtcacacttctcatttcattttcttaacagaaatggtttttgtcaggacccttctgaacaatgatctaacaaaaggcagactatattgagtatgacatgtaagtacatttagctgttcacaaatatttcagtactcataagggccctgatgaaatgaaataatggtgaacagcctatttactctcacacagtgtatggtctaactagggatrgagacagtgaaaaggcaattacaagacactaagcactgaacgggaagtgcagagggaagggcactaaagcagacatggg

SEQ ID NO: 274162 - DNA, 602 bp, Homo sapiens
cttcttgacctgcagaagaggttcgggggaaatgccttacacatcagcaggggccatgagagcaggtcttatctgtgatgcctcatatctgattctgctcttgtctgcctactgtccacactattcttcgaatcataattagatcacatcgcattctgcagaaagccttctagtgggcacccctgcaggtaccttggcttattaggcccctttacactctgacctcttcccctgagacatcatatccaactaggctgycttgttcttcctgccccaaccctcacctctcagcccactggcttcattttggctctaaacacaccaactgagaaagtgaagggacttcaagtagatgtcccggagggctctgaaatgtgccctctactttgggaagcctgataaatctaacagaatgcactgaatctgattggggccaggaactgggaagaacaatgaaagggctaagtgttcctgaggtagagccctgagagcatggtctaagggctgcgccagtgtttccctggaccagatgtgtgccgggggaagagattttacctggggaccaacagggaggaaaataggccacagaaaaaagaggccag

SEQ ID NO: 274163 - DNA, 626 bp, Homo sapiens
attcaggtgtcacgtgcacaatatctccccccccaaaaatgtaggggtgtgtcacatcctagaaaccctttttaaatagtgagaaaaatatttcctaaaatggccatccatactgctgcaccgaagaagatgtcagatccctttggcctgggtttgatmatatataaccatggctaaattcaatccctcagaagaagagtagaattatgattgactcagccaccagtgattcatagtacagagcaggttgaacctcagagcaaaactagggctctgtcagtaagggagaattgggaagcaagtggcaagaaatggtgtctgtctcagtgaattagccagactagggaaactttacatttctttttttccagtccatttgaagttgacttcatattttagctttcagaaggcactctatttctccttttcttgggcctgatctcctctgttgctcattcttagactgattccatatgtcttggttttattatcatgtttaaaaactctaaggaagtttacacgataacatattaccacctcctatttgcaacgtgcattatagtataaacaagactgccacatatagaaacaaggcttctacaaacagttcactgttactcaaaata

SEQ ID NO: 274164 - DNA, 626 bp, Homo sapiens
attcaggtgtcacgtgcacaatatctccccccccaaaaatgtaggggtgtgtcacatcctagaaaccctttttaaatagtgagaaaaatatttcctaaaatggccatccatactgctgcaccgaagaagatgtcagatccctttggcctgggtttgataatatataaccatggctaaattcaatccctcakaagaagagtagaattatgattgactcagccaccagtgattcatagtacagagcaggttgaacctcagagcaaaactagggctctgtcagtaagggagaattgggaagcaagtggcaagaaatggtgtctgtctcagtgaattagccagactagggaaactttacatttctttttttccagtccatttgaagttgacttcatattttagctttcagaaggcactctatttctccttttcttgggcctgatctcctctgttgctcattcttagactgattccatatgtcttggttttattatcatgtttaaaaactctaaggaagtttacacgataacatattaccacctcctatttgcaacgtgcattatagtataaacaagactgccacatatagaaacaaggcttctacaaacagttcactgttactcaaaata

SEQ ID NO: 274165 - DNA, 558 bp, Homo sapiens
gtaaagatcacttttgctatgctttagcaaaaacccctgttttgactgtacccctgccctagggatctgtggaactttgaactggagagtgatgatttagggtatatggcagaaaaagtttgtaagcagcaaagtgttcaagatgtggcttggcttcttctaacaacctatgcacatgtgtgtaagcaaagaaatgacctaaaattggaacttatatttaaaggggaagcagattgtgaaagtttaggtaatctgtagcctggctatgtggtagaagagaaaagcctattatctggggagaaattcaagcaggctgcacaaatttgtgtaactaaaaggayagcaagtgctgatagcccaagacaatggggaaaagccctccagggaattttacaaacttttgtcgcaacccctcccaccacaggcccagaggcctaggagggaataatggtttcatggaccaggcccagggccccagtgtcctgcacagccttaggacactgttccttgcatgctagctgctccatctctagctgtggctcaaaggggcccaggtac

SEQ ID NO: 274166 - DNA, 543 bp, Homo sapiens
cactagtgtttttttttctttttttgagacggagtcttgctctatcgcctaggctggagtgcagtggcgcgatctcggctcactgcaaaatccacctcccaggttcaggccgttctcctgcctcagcctcctgagtagctgggactacaggcgcccgccaccgcgcccggctaatactagtgtttttaagattaattttattatctcaatatgcatgcctccataatatattttagcttgaccctttttaaaaaaactttgatatgtcttttaattgtcttttagtctctaggacccctcaccattaataatatttgctgatcccttatctatgaagaactcatacaatgtgacatgtagagtttcacagagtctaaatttttctgatcttatactwacatttcatactcattgttttcctatgtccttgatacatcctgaaattggtagctggatccaaagtcttgatcagactaatatttaatacctgttgcgggggtgtgggtgattttatgttctctcagcaggaaacacataagatcc

SEQ ID NO: 274167 - DNA, 582 bp, Homo sapiens
ctttatggcagctggtgatactctaatatttctgagtagtacataaaaggtgaaagggtgtatctcctttcaatgtgcatatgtaagtgcaataagtattaataggagtacatacttgtagataatcctggaatgtatatctagatttataattaggaacagttatgtgaaactgatataaatgtctgtcatcagtggtgtttgattatcaatttcccttgtgcattttrcaaggactataagtatatggtagcttgcttttctcagattttataacaggtaatgaaagagtgtttagaatttctttacattctttcatatacaattatatttgtttggcatctatgaatttagatgcaagggtgcttttttatttgttttattttgcaaagtccaacaaggcattatagaattttgaaatgtaattttgtgtatgaaattcaattcttaactgcctttttttagtaaccccaaaagaaatctcaaatagttattttattatattctcctgctctctgcacatatctccctgacttcctggctctcttaatttttcattctttgcttagcttttttattatc

SEQ ID NO: 274168 - DNA, 559 bp, Homo sapiens
gataactacctttttttttaactgaattgtcattgtgaaggcagaaaccatacctgttttttcctcggtcatattctctatgcttttagcttcagtagatatttgttatttaacatataagtatacttagtaattaagaaacattccagcataaaaatggtaaagtatacaaagtacattattatgtaaatataaagtagtgcaatgcacaaacacaaatggccaataatcatgaaaggtgttatacctcattaagaatcaaataatatagatggaaaaaacctatatatcttttttccaaagattcaaaatacttgattatcttcaggattggcaaaggaatagggaaaaatgagcactttcattctctattgataaaatgaaaattacttcagttcattctggaaagcagtttggaaatatgtaccaaagatagaagatatggagcttttgttcccatagtaccataggtaggaatttattttaaggagatattcgagtgtggkgaggtgtggtaagatgtacctgtaaggattttttttttttttgagacggagtc

SEQ ID NO: 274169 - DNA, 567 bp, Homo sapiens
acctccccaacagtttggcagtttggcagattgtcaacaaagtaaaaggagcagagcakcagtccaatccaccctttctgtagggctccaagttctttggggtcaatctcttccagactcactgcttttcttttctgcatcccaacttcttactgtgggcactccaacagatcctggttctgttccctcagttttccatacagagcttgtccattcacttgtatgtttgagcttttttttctgaggagaactggcatttgatttccttagtagccatcattttccatcttcttgcattttcaacttacgatattttcaacttatgatgggtttattggcacataacctcctcataagttggcaagcatctacatatctttcttcagctggctgcagaagaagagtcagagagacactctctggatagtcgggaatgcatatgtccgttgctttgaactgcctgtgaaggccatgtggaaagaacctgagagtggcctctaagagctgagaatggcctctggatgatagctaacagggaaaggggaaccttagtcatatatcccaagg

SEQ ID NO: 274170 - DNA, 567 bp, Homo sapiens
acctccccaacagtttggcagtttggcagattgtcaacaaagtaaaaggagcagagcatcagtccaatccaccctttctgtagggctccaagttctttggggtcaatctcttccagactcactgcttttcttttctgcatcccaacttcttactgtgggcactccaacagatcctggttctgttccctcagttttccatacagagcttgtccattcacttgtatgtttgagcttttttttctgaggagaactggcatttgatttccttagtagccatcattttccatcttcttgcattttcaacttacgatattttcaacttatgatgggtttattggcacataacctcctcataagttggcaagcatctacatatctttcttcagctggytgcagaagaagagtcagagagacactctctggatagtcgggaatgcatatgtccgttgctttgaactgcctgtgaaggccatgtggaaagaacctgagagtggcctctaagagctgagaatggcctctggatgatagctaacagggaaaggggaaccttagtcatatatcccaagg

SEQ ID NO: 274171 - DNA, 575 bp, Homo sapiens
ttacgaggctttggaattaggataatactggcctcatagaataagtggagaagggttatttctcttcttttttcttaaagagcttatgaaaactgagtattatttattctttttaaaaattatttattttatttcaaaagttttttggggaacagatggtgtttggttgcatggaaaagttctttagtggtgatttctgagattttggtgcacccatcacctgagcagtgtacactatactcartgtgtagtttttgatccctcaccatccttccaccctttctcctgagtccccaaagcccattatatcactcttatgcctttgcatcctcacagcttagctcccatttataagtgagaacatacaatgtttggtttacttcacttagaataatggtctccaactccatccaggctgcagcaaataccattattttgctcatttttatggctgagtagtattccatggtattatatataccacattttctttatccactcattggctgatgagcatttagactggttttatatttttgcaattgcaaattgtactgttataaacatgtgtatgc

SEQ ID NO: 274172 - DNA, 522 bp, Homo sapiens
tgatgttgagaattttttcatatgtttgttggccatttgtatatctcttttgagaactgtctattcatgtcctttgcccactttttgatgggattatttgttttctttcttgctgatttgtttgaattctttatagattctggttattagtcctttgttggaagtatagtttgtgagtattttctcccactctgtggttgtctgtttactctgctgattatttcttttgatgtgcagaagctttttagtttaactaggtcccatctrtttatctttgtttttgtcacatttgctttcgggttcttggtcatgaattctttgcctaagccaatgtctagaaaagattttttgaagttatcttctagaatttttatggtttcaggtcttagatttaagtgtttgatccatgttgagttgatttttgtataaggtaagagatgaggatccagcttcattcttctacatgtagcttgccaattatcccagcaccatttgttgaatagggtgtcctttgcccagttt

SEQ ID NO: 274173 - DNA, 535 bp, Homo sapiens
atttgtctttctgtctattctgtacctggcttatttcacttagtataacaacctccagattcagtcatgttgtcacaagtgatagactgtcctttcttgttaaagcacaacagtgttccgttaggtagatacaccatattttctttatccattcctcttttagtgaacccttaaattgtttctgtgtcttggctattgcaaataatgctgcaatgaacatagaggtgcagaaatctctttcacatactgatttcatttgctttgaatgtacatatgctctatgacttatgacaaaattwtatcttaacacatccatagtaaattgaaaagatcacaatttaaaaataaatttaataccctgataagccaaacataaagtaaacaaaaatcataaattaaataattttaagtgggaagccatccatagatccaaaattgaaattgctggattatatggtagttctactttcaattacttaaaaagcttccatattggttttcataatggttgtgctgatttgtctttatacccaca

SEQ ID NO: 274174 - DNA, 515 bp, Homo sapiens
cagaaagtagaaaataacaaagatcaaaggagaaatagagatgagaaaaacaatagaaaagatcaatgaaatttaaagtttttcctttatgttaaaaaatatacaaacatttatcaaacctaacaaagaaaaaagagagaagattgaaataaaatcagaaatgaaagaggagccattacaaatgataccagagaaatacaaaggaccataagasattataaaaaattataccccctaaaattagataacctggaagaagtgaataaattcctgaacacacacaaattaccaaagctgaatcatgaagaaactagaaaatctgaatagataaataataagtaagaggattgagtcagcaataaaaaacttttcaacaaagaaaatgtcaggactggatagctccattcctgaattctaccaaacgttcaaagaagaactaactcatatttttctaaaattttttcaaaatattgaaaaggagggtacacttgaaaactattttcatgtgcccagtg

SEQ ID NO: 274175 - DNA, 515 bp, Homo sapiens
cagaaagtagaaaataacaaagatcaaaggagaaatagagatgagaaaaacaatagaaaagatcaatgaaatttaaagtttttcctttatgttaaaaaatatacaaacatttatcaaacctaacaaagaaaaaagagagaagattgaaataaaatcagaaatgaaagaggagccattacaaatgataccagagaaatacaaaggaccataagacattataaaaaattataccccctaaaattagataacctggaagaagtgaataaattcctgaacacacacaaattaccaaagctgaatcatgaagaaactagaaaatctgaatagataaataataagtaagaggattgagtcagcaataaaaaacttttcaacaaagaaaatgtcaggactggatagctccattcctgaattctaccaaacgttcaaagaagaactaactcatatttttctaaaattttttcaaaatattgaaaaggagggwacacttgaaaactattttcatgtgcccagtg

SEQ ID NO: 274176 - DNA, 559 bp, Homo sapiens
aattttttcaaaatattgaaaaggagggtacacttgaaaactattttcatgtgcccagtgttatcctgatattaaagctggactaggacactacaagaaagtgacaaatttcaataatacaaaaytattccatacaatattagcaaactgaaatccacagcacattaaaattattattcactaggattatgtgagatttatccctggaatgcaaggatggttcaacaagtgcaaatcaataaacacagtataccacgttaacaaaataaaggaaaaaaaacatacattcttctcaatagattgagaaaaaacatttggcaaaaattgacatccttttatgataaaaactatcaataaattgggtactgaagaaacacacttcaacacagtaaaggccatatatgacaagcccacggttagccttgtatttaatgttgaaatgtttacttttctctaagattaggaacaagacaaaaacctactctcatcatttctatttaatatagtactggaaatcctagctagaataagtaggtgaaaattaataaataaacaaaca

SEQ ID NO: 274177 - DNA, 384 bp, Homo sapiens
ctctataaatctgactacattgaataccttatataagtgggatcatacagcatttgtcctcttataactgtctgattttacttagtataatgttgcttargttcattcatgtcgtagcatgtgtcagaatttcttttgtttttaaaactggataaaatctcattgtatgtggatatcatatcttgtttatccattcatgtatttgtagacacttgagttgcttccactttttggctattgtgaataatgctacaatggtcatgggtgtcagtattagaaatctactgccttaaacctcaatctcattttgttatcattggaccacttctaataacttgatttaaaaatttattttaagacatgggtttctattatttcagttct

SEQ ID NO: 274178 - DNA, 552 bp, Homo sapiens
aagtttatagggtatatccaatgattttatgtatattaataaaatttctagtgtatttgacatagcagacaacagttaaaatctttaataatcaaaaatatgaatatatttatattaattactctaaattgatatactatataataaacataacattttatgtaatacttagaatattaaatcctatattagtcataccactgcagtgagctatctaaaataattaaagtattaataaaaatagttatggcaattgaatgcttattgaatcatcactatgtggtagacacatttgtaagtgcttaacatgygtaaaccacttaatctttattaccttgagaagggcaatattcagctattcatattacatgaaggaactaagtcaatgagagttcaagttacttgctctaaatctcatttcaaggaagaatcctgggcttgaaccctaccagctgatcccagagcctatgtaaaataatttagttaaaatataataattaaacatacaaatacattttcagacactttagaaatgatcatgagatgagctta

SEQ ID NO: 274179 - DNA, 636 bp, Homo sapiens
tcttttcttctattcatcagactcttcccaagtacggctattggattttttgacttgacacttaacaatgctcttcacagtaaatgctagttagagcttgtttacttgaaagttaccaaactcaattcaagttgactaaaacaaacaaccaaaggaattgttttctcattaagtcaaactcarttcaagttgacttaaacaaaccaccaaagaaattgttccctcattaagtagtaatttatttattttgttttgttttggtccatgtggacagaggatatcttgctcaatatttttcagcacttctcactgtgtgttgacttcagttttagaaagtctctctcttttgaacctctagatgacagacagcagctctagtgaccacatttaccccaagtcactcacaacaaacagtaagtaattttagtctagaattcccagtgaatagtactggcatatatgctgatagatttaatttatactgctctcttaaccaaccaatgaatataagtcatacagtgtgttgcttggcttaggcctaaattatgtgctctgctcatagaagcagtagtgatcacagaaatataaattatcccagggtgccaattttgccaactgagttagaaagtaatataa

SEQ ID NO: 274180 - DNA, 576 bp, Homo sapiens
ttttgacttgacacttaacaatgctcttcacagtaaatgctagttagagcttgtttacttgaaagttaccaaactcaattcaagttgactaaaacaaacaaccaaaggaattgttttctcattaagtcaaactcagttcaagttgacttaaacaaaccaccaaagaaattgttccctcattaagtagtaatttatttattttgytttgttttggtccatgtggacagaggatatcttgctcaatatttttcagcacttctcactgtgtgttgacttcagttttagaaagtctctctcttttgaacctctagatgacagacagcagctctagtgaccacatttaccccaagtcactcacaacaaacagtaagtaattttagtctagaattcccagtgaatagtactggcatatatgctgatagatttaatttatactgctctcttaaccaaccaatgaatataagtcatacagtgtgttgcttggcttaggcctaaattatgtgctctgctcatagaagcagtagtgatcacagaaatataaattatcccagggtgccaattttgccaactgagtta

SEQ ID NO: 274181 - DNA, 641 bp, Homo sapiens
gagcctactcaggctgctataacaaagcatcatagactgggtggtataaacaacagaaatttatttcttaaaattctagggctagaaagtcccagattaaagtatcagcaaggtaggtttcataatggggtcttatctcttggattttaggtgtcaacatctcccctatgctcaaatgttttccttgttcatgtgtagagggagagagagagtaagctctctggggtctcytcttagaaaaacacttattctatcagaacagagcccatctttatgaccttatttcttcttaattacttctttagaggctccatctccaaatacagccacactgggctttagggcttcaaaataataatttttggaaggacacaaactttcagtctttaacattcatcgagaacatatcaaaagatttattactcacaaaatgagactttctggggacattaggttgaaaggccatgtggatctcttttcccagaaatcctagttgagggcattataaacttacataccaaaccaactcacctcagatgtacaagtgagctcaaccaagattagccagtcaagatttggactagaacaactttgcaactgctctcatttcaaattgctaatcggcaaagttgtgaatttaa

SEQ ID NO: 274182 - DNA, 575 bp, Homo sapiens
tagtacagaatggtgatgacatttcagctcagcagtctcatggcagaatctgtaatcataaccgctctactatactgaatcaaaacattgtaaatrttcttggagcatcaattttatctgaggatttgagaaaaacatattacttttatattaaaataagcaaaaatatattatagagcagaatgcaagaagtatgtgaatttttaatatgaaaaaagcgacttcatagagtgttcttatatctggtttgcttcaggcaaaggcacttgatctcggtgggggggtatgcgttcattgtcctgtgccagtaggaatatttcagtgaaaaacataaaaatttattacattacacaaagtctctccttgctgggtgttgagcctgtttatttataactttcttttaggtatgtggttagactaaactcttcataacttataaaaaattatatatatatatatggaaggaacacacaaatatataaagacagttgcataagaaggttttccattatccaagttcataattttactttctgtatcagattcttagtaactttgcaggtttcagtggacct

SEQ ID NO: 274183 - DNA, 459 bp, Homo sapiens
agcctgacttcagaggaagagcactgtaaagatatcttccagcataattgagaaatgtacttttgtcatttaagctgctattttgtattattttgttataatattctagcctactctgactcatctttccttataatagattctagataaatgtttattgaatgaatgaatatttatttttcttattaattttctgaagcgggttcttagaaacccaactcattgacaatatgtagatgcttaatagaaaaccctatgaaccaaagatgtgagcaaccatggatactactaaatttataccatcaraaaaaaaatcaaggatggacaatcaggagtttgatggcatttacctcaagaaagaaaaaaagaaatattactatacccaattttttgaagggagacaggttttagacctggaaattcataaaagaataataggtgggtccactgaaggccaga

SEQ ID NO: 274184 - DNA, 660 bp, Homo sapiens
gtcaaatataatttattgaaaattttaatataactaaatttataattatatctttggaacacaaaggakaaatgcttgaggtgatggatacccctttaccgtgatgtgattattatgcatcttatgctgcatcaaaacatctcatataccctataaatatatacacctactatgtacccaccgaaattaaaaataaaaaagggagaaattctttttatggaagtagtaaatgtcaaatccctttatctcagcataaattagtacaaaagccataccatccttatttatcactacctttcacaaaatacttttttctttttcctgaggcaaaaacaaaatgtcttgtatattaatggatagcttgtgatatttggaaagaaaaatatcaaaaagcgatctatactttgattctgggccttacctcataaaaccatcacatgccatattcatttgttaaataattatttttgaacacctaaatgccaggcaatgttctagggcctacacatacattatcaaataaaacaaaacaaaacaacagtcatactagaacttacatatagagagagacagacaataaataatgaacaaaattccatagtatatttatataggaaaatccccatagaaaaagtagaatggtgtgtgtgtgtgtgcgtg

SEQ ID NO: 274185 - DNA, 565 bp, Homo sapiens
gctttcatactttcttgcttcagtggctctgttttcaagatatttttgtaaatactttaacatcatcatctcctggaagcccccttcatagatccaaaaccatagaaaccttttttttctccaggtatcatcccaggtggcagtggcagcatttcttcccacagtcttaaaaggatttttgtttttttccccagcaaactcaaccatctgtaaggtacatggatgtgctttggttaaggaataggctgagtcagacatctagtcaagagtgactcagcaagtttagggtgcaggcacacacctccacttgttatataacctgtttgtrtaaactcatacttgccttggagccactattgtttaaaaaggtataactgccctgctgatgctgttcacagggctcaacatgtctcaggtgcccctggtgcccaaagagagaataatgctactgattcctgtaagggatagctggttgccttggaggtggtcagggggtagccagaaaccagcttgcacccagagggaaagagttaagctgctgaccctgtagctggccttgcaggcc

SEQ ID NO: 274186 - DNA, 520 bp, Homo sapiens
tatatatatcctgtttgtcacagtatggaggctgcatgacatgagtagaatgggaggcactggtagaggggaggcactgctatggttcaaggttatacatatgaccttgagtaatagttgtagaactgtagttattttgtccatttgtatttatttcataattattctataatgaaagtgaattaccttcaaagttactacaaaattgtcctgaattaaacatttgargaattttcactttgaattgttggaaatgttacaaaggttttactaagaatttagaatctctctccttttttcttctagcagtaagttttaaggaaagtaattatatagaaataaagaaagcaattatatggataaaagagacatcttgttttcccttctatctctgtagagtagttaagcctgaataacaaaatggctttatgagttaagatgaaattgcaagaaacttcagaaatgccttttctcattatctccctcagacatctgtcaatatttatctgttaatagacta

SEQ ID NO: 274187 - DNA, 632 bp, Homo sapiens
gtctaacattaaataggttttcaaggcttattacttagatcacttaagaatattaagagaaacttatataatgcaaacaaaatatacttagtaaatgatcagttccttaaaagcaatagtccttcatctattctgtaagacgatgatgataatttaatgaaaatctgaaatagtctcagcattttaaacaaacctatagttacatgcagctgtgcatttgagtatgttcatattagccctggctctacttttgaaagatgcagtttctgagatgtttttccttctctaggcacgtggtaaaatggtggttaaaaatgcaaagtacaaaatgcaggaaaatacagaaaatagaggatgatttcacagtaaaaaattgttataaaattctattcatcagctctgctactttgaatatccacaccttatcttaaaattggtgataattataacaacttcacatggtttttgacaatatttagtgagttaatacataggacaggtacctgtcacacagtaggttattaataactcagctccctactaatactctacctaccttttgcacacacamaaaaaacaaaacttcaaattaaaattgtcttcagcaactagctctagcccaggttaatgca

SEQ ID NO: 274188 - DNA, 598 bp, Homo sapiens
taaggaagctttgacccactcaaagagaattgtctccctgagagaaaagaaaaaaaaaaagcattttgagaaaacaataaatctagtatgcaagcttatactgccctagattgctaggcttataaagccrataaggtgaccaactagcaaatgcgccagttttatgttatctgtgattccacttctcatatactatttatgtcgatgttttgcgtgattgtactatgaatgctgatatggtttggctgtgtccccacccaaatctcaccttgaattgtcataatccccatgtgtcaagggctgggcaaggtagaaataattgaatcatgggggtggtttcctgcatactgttctcgtggtagtgaaaaagtctcaggagatctgatggttttataaggggcttttccccgttttcctgaggcctccccagccatgcagaactgtgaatcaatcaaacctcttttctttataaattacccagtcttgggcagtcctttatagcagcatgaaaacagactaatacaaatgcttatgggtaaaagagcgatttgtttactcagtgaccatggcatgtagagaactgctgataaaacatgta

SEQ ID NO: 274189 - DNA, 411 bp, Homo sapiens
tcttatgtcagacaaaacaaactttaaagcaatagcagttaaaagagacaaagagggacatataaataatgtccctctttatataaaaaaatttatttatttaatctccctctttatatataaaaggccttgtccaacaggaaaatatcacaatcctaaacatatatgcacctaacactggtgctcccaaatttataaaataattactaatagacctaagaaatgagayagacagcaacacaataatagtcggggacatcaatactccactgacagcgctagacaactcatcaagacagaaagtcgaaaagacaatgaatttaaactataccttcaaacaaatggacttaatagatatatagagaacatctcattcaacaactgcagaatacacattctattcaacagtgc

SEQ ID NO: 274190 - DNA, 620 bp, Homo sapiens
ccaactatgcacattatgtgaaagaatttttaaaatacaaattattgaatatgtgcgtaagatatgataataataaaaaagttactgagctgagcacaatgacacaagcctgtagtccctgctactggttaggctcaaatgagaggctcccttgatcacaggattttgaggccagcctgggcaacatagagagaacttgcctcaaaaataacggtaacaacataaaacaaggtattgaataaaaagatagcagagtagaaagattaacrgtggaaaaggaggatgaagaaaaaggaggaggggaagggaagggagaggtagaggtgaaaggaagagaggaggggaagaagaagaaagtacatggtagttacttttaaatactttctccaagctctgatactgcagacaagaaataaagtgtttgtccacattaaataaattagtcaattagtgaagcggaacatgcatgtcttggatttacttcaaatacattattaatattaataaaaaagacttgcttaattctacatattaaatctagttagtggccttcacatttttcatgagtgctgttagctgctgcctgtaactgagccccttatcccacctggttctgtatt

SEQ ID NO: 274191 - DNA, 613 bp, Homo sapiens
aagccggaggcatcacactacagacttcaaacgatactacaaggctacagtaaccaaaacagcctggtaatgttacaaaaacagtcacatagaccaactggtcagaaaaaaagtgcccagaagtaaagtttcacatgtacagttttgctctttgagttttaactctttgagtcttcttttagtgcttttgagccctctttcataattctgaattctggttgcctgtttacaaaattcaccaatgctgattttggcagcaaatttggcactgatgctggctttagtgatgacatcagcaccagcgatagctttggcagtgggcctaatgtcagctttggcagtgggcctaatgtcagctttgacagaggactgagtaccatcattggttgtggcagtcatcccaactggcaaacccagctccagcaayagcttcaatagtggatcttgttctattgttggccttggtggtggaccaagcagtggtcctagcttctgcagtgaaccaagcaccaggcttccgtggtggactgagcactggtgttaggtttggtggtgaactgggcaccagtactggctttggcagtggagccaccagccttggtgcttgtggctt

SEQ ID NO: 274192 - DNA, 585 bp, Homo sapiens
atttctctacagatgactgaatgagggtcaacatatgcttgctaatattattgatcatctactgtgtgcagaactaagccctttatgtgccttaattaaactaaatctgacaataaccctataagattgctactattacattcttcaaaattacagataaataaaactaaatggaagagagggtgagtggcttgtctaagtaacttggcaattaaaagtttcaaaatgctatcccaggcagtctgattccagagcttaccctcttatacattaagcaatatggaaagtccccagcctgagtagtttgaaaaaaactagcctggtattttctgctctctagaatattttgccaataatattatctccttctgtttttctttaaatgtgtttcattaaacaatgatacatttttctaaaattcagaatgattctgaagaatgtttatctgtctctgataatcagaatttaaacaggacaatggatgaaggcccatccrtttaattttgaaggctggagttggtatgacctgcttcagtagttttgctccagcactttgggaagccgaggcaggaggatcacgaggtc

SEQ ID NO: 274193 - DNA, 528 bp, Homo sapiens
taatttttatgtgagatactattttcactttttgcttgggtaacccatgaaaaggaagccagaatataaaaaataactactgttctttattctaatgatatttacatatcccctaccacttagaatttggaaataaaaaaaattctttctatagaatctgacaaattgcaaaaaaaaaatactaatgacaaagacatgaagatttttcctatctggaaaatgaacaggacatgttattcaggtggaggtcggtaggcagagtcaaagactaactttcttcatttacagaagtatattctattgcccctcactgttytcctattggctaaaaaagcccacatttttgtactaattctgtcaccttctaatattatttttaaaacattcacgtggcatttttttctaaatgctatgtttctctgacgctcatgttttcaatccctctccacagggcacataaactgataccattaacgttcattacctaaaagtttgctattgtactcgccacttttctctatacccaac

SEQ ID NO: 274194 - DNA, 560 bp, Homo sapiens
agataactactttaaatacttatgctttaaataaattagttttcatatttacatatatttttaccacttccagcacccttcatttcttcctgtaaatctaaattttaacaagtaytatttctctaactctgagaaatttcttttaggaattcatataaattagacataatttatgtgaattcacataaattcacataagttagaattcaaaggtgaggaatgatttcagattttatttaaataaagtgttttatttttccttcatgattttgaagttgtctctttctcggtttttgttttttcacctgaaatttactataatgtgccttagtgtggttaatttgatatttatcctacagggatttgctaagctctttgaatgtgtttcatcacatttgaaaagactttggttatcatattttcaaacttttggttattatgtttttagtcattttaggatttcagttatatataatttagtttgattgtataattcagttttatatagtataatatttttaaatttaattctctggattacaattgtttggtttaatatt

SEQ ID NO: 274195 - DNA, 560 bp, Homo sapiens
agataactactttaaatacttatgctttaaataaattagttttcatatttacatatatttttaccacttccagcacccttcatttcttcctgtaaatctaaattttaacaagtactatttctctaactctgagaaatttcttttaggaattcatataaattagacataatttatgtgaattcacataaattcacataagttagaattcaaaggtgaggaatgatttcagattttatttaaataaagtgttttatttttccttcatgattttgaagttgtctctttctcggtttttgttttttcacctgaaatttrctataatgtgccttagtgtggttaatttgatatttatcctacagggatttgctaagctctttgaatgtgtttcatcacatttgaaaagactttggttatcatattttcaaacttttggttattatgtttttagtcattttaggatttcagttatatataatttagtttgattgtataattcagttttatatagtataatatttttaaatttaattctctggattacaattgtttggtttaatatt

SEQ ID NO: 274196 - DNA, 615 bp, Homo sapiens
agcattctctctttagtgtgttaccaaatatagtataaggaaatgtctctttacttaggacatcacagaaaaaaaggtttttcctcctgtcttaaaatccagtacttccttttaataatcagttgagttttttcttcttaagttacacagcacctttcagtagaaaaacatgtttttcttctttcagtttcatcttcaacgagtttccttggacatcaattatgtgtggctcattattaagtaccaaaaatacagacgtgaattaaacaatgtcgttgtatgcagggagttgataatctagaataaaacaartattctgcttttaaatgtacataaagattatctatacatcaaatgaccactaaccctaatgtttcaaaaatgcccttactacccaaaattatctacagatttaatgcaatccttatcaaaattctgatgtcttttttcacagaaatagaaaaaacaatactaaaatttatctggaacctcaaaagacctcaaatagtcaatgtactcttaaaaaataacataactgggaacattacgcttcctgatttcaaattatgttatacaactatagagatccaaatgtggagtacaatctatgactta

SEQ ID NO: 274197 - DNA, 410 bp, Homo sapiens
tgaaaataactaatttgaataatttatcattgcctactttcacagaatttcaccttataggaaatatagtgtgtgtatgtgttttttggtgtatgtgtatatatatagtagttgatatatacatatttctgtataataattgatatagatatatagatatatggtgaattcccaatctaggggaagctttggatgcaacatctatcataaaagacactgcagtgggattatttttttcattaaaaacaaaaataagtcagatcgatatccaatatttgtttaattatgtacatattaggactgratatggctgcaattaacaaagtatctgatatctgaggaaccacagtatgtcaatatgaagtattccttatctaatcttacaaaaaatttaaaatagaagattgctt

SEQ ID NO: 274198 - DNA, 558 bp, Homo sapiens
ggagctgcagtatctggtatacagagagcaatatcattaggctgtgcagggcaaaaaccattcagcctataaaaccattcattctccctagccttccaggcctgtgataggaggagctgttgctaaggtctctgaaatgactttgagaccttttccccattgtcttggtgattaacatttggttcctttttacttatgtaaatttctctagcaagtgattactcagcatcttacttgaattcttctgaaaatgggcttttcttttctaccacatgaacaggmtgcaaaattttcaaacttttcaaacttttatattctgcttcctttttaaatataagttcaaactatagatcaattgtttgctcatgcttatgaacataggctgttagaagcagccaggttacttcttgaaccttttgctgcttagaaattttttctgccaagtaccctaaatcattactctcaaattaaaaattccacagagccctaaggcagagacaaaatgtgccaagttatttgctatagcatcacaaaagtgccctttgttctagttcccaa

SEQ ID NO: 274199 - DNA, 538 bp, Homo sapiens
gagaataattcaaccaatttaaagaattaaaagctgagctagtaataatgaaccatagctgagatttttttaaagggcatatgaaagcagggtttgacaaactaaagcaattaagatgattcttacattttcagatggttaaattttaaatggttatgcaaatacctacatgatagcttaaattttacctaaaatatttactatctggccctttaagaaaaagtcagccagccaactcctgtgtcaaagcagtgaaattctattttgctagtttctggtggtattaatgtttcggagtcagtacaagtttcagatgacttatttagaaacttttttaaatgtcttttgagtgtcatctgaaaaatgtatattcttacttattatctgtgtttccacgagatttcttgtaatttgcataatcctcaagaatggaatccacattcttcttkgcaggaagataaaagagctatgaagacaaaaatatgcttaaatataagcactctcttttttaaagaaaaatcataccaggcaagttttt

SEQ ID NO: 274200 - DNA, 538 bp, Homo sapiens
gagaataattcaaccaatttaaagaattaaaagctgagctagtaataatgaaccatagctgagatttttttaaagggcatatgaaagcagggtttgacaaactaaagcaattaagatgattcttacattttcagatggttaaattttaaatggttatgcaaatacctacatgatagcttaaattttacctaaaatatttactatctggccctttaagaaaaagtcagccagccaactcctgtgtcaaagcagtgaaattctattttgctagtttctggtggtattaatgtttcggagtcagtacaagtttcagatgacttatttagaaacttttttaaatgtcttttgagtgtcatctgaaaaatgtatattcttacttattatctgtgtttccacgagatttcttgtaatttgcataatcctcaagaatggaatccacattcttcttggcaggaagataaaagagctaygaagacaaaaatatgcttaaatataagcactctcttttttaaagaaaaatcataccaggcaagttttt

SEQ ID NO: 274201 - DNA, 594 bp, Homo sapiens
aattcctgtaactcctaacgcttgggaatgtgacttttaacaatgtagtcactaaaataaaattactctacaatgtagataccctgcagagttccttataacaggatgtaacctgtaaaagcaaggagtgttcactccttacaacctctcctaaataaaaacacacagatatctaagataaaagaacagatactcttccagctgaacaatgggacgtatacaagggctttgcttaaagtataagttctggttaagaaacttaatgtattttatacaagcaagtctataattctcttgctaacccggattttatgtctgatttttttaaaaactgcaagacactttcctaatgttgaagtaactgtgtctaataatgaaatgaagtctttagaaaattaaaactgatagctagaaaatagtaatacatggagaggccaggcatggtagctcatgtctataatcccaccactttgggaggctgagatgggaggatcacttgaacccatgagttcaagaccagcctgggcaacatggtgagaccctgyctctaaaaaaaaaaatttttttttaaattagcttgacatggtggcacac

SEQ ID NO: 274202 - DNA, 614 bp, Homo sapiens
tgcaaatttcaagtcactgacatgcctcctctcttctaaaatatcttcaaactcatcccactttttgagctccttctgtggataaggcaagaaagtaatgagcacatactgtaaaataaatcaggacagattaaagactacattggtaaggtttcatctttgacaaaatwttactctatgacgtgaacaggagcagagtgttctgatgttagattttcatatagtaaaaaaaagagatgtaaagaaaattaggatcaataaattgatactgagttatcataatattttattatatttctgattgctatcattgtcagtatctctttgggaaatttaatgaagacagcaaagatgagacattaagccctagagtaatctgatcaacttcacatggtttcacctgccacactgacaaacctgttccatttgcctctacttagctttaaaaattacattaaaacaaacatttgaaacccaaattatataaaataaaacaaaaccatatgggtgcaaataaaaggaaaaatcattcaagaaacaagcgctccaataaaaggtactgttgagcagtatatggctgtgataactttcttttcttcttttcgagacaagag

SEQ ID NO: 274203 - DNA, 614 bp, Homo sapiens
tgcaaatttcaagtcactgacatgcctcctctcttctaaaatatcttcaaactcatcccactttttgagctccttctgtggataaggcaagaaagtaatgagcacatactgtaaaataaatcaggacagattaaagactacattggtaaggtttcatctttgacaaaattttactctatgacgtgaacaggagcagagtgttctgatgttagattttcatatagtaaaaaaaagagatgtaaagaaaattaggatcaataaattgatactgagttatcataatattttattatatttctgattgctatcattgtcagtatctctttgggaaatttaatgaagacagcaaagatgagacattaagccctagagtaatctgatcaacttcacatggtttcacctgccacactgacaaacctgttccatttgcctctacttagctttaaaaattacattaaaacaaacatttgaaacccaaattatataaaataaaacaaaacyatatgggtgcaaataaaaggaaaaatcattcaagaaacaagcgctccaataaaaggtactgttgagcagtatatggctgtgataactttcttttcttcttttcgagacaagag

SEQ ID NO: 274204 - DNA, 560 bp, Homo sapiens
gaccacttaccttcttttctttaactctactttctatctccaaaaatccactgagtattcacattactgattagctgtgttttccagagccattgctaatcgcacgtcgaccttacataaaaatggaatattcatgcattttctatgtatttttaaagccattatttgtggcacaagctcagtgtgctttcagagacactgaacactctgttgaagaaactcaaatggcttttaaaataaaaagacaaaatcattatctctgtgtagaggatggttttatccttgaaggtttactatttgaaacctcatcacaatagaatgctgagggaagtttttggaagtacaagcgtgatagttctcagatgatgtttgcaaagttgaaatattgtccrtactcttaggaattcagtggaatgcagtagcagaagctctctggtgcttagtgaatgaatgaaaattttttttttttttaccttgcaggtgaaaaaggtgtgagggttgaactcaataaaccttcagattcggtcggtaaagacgtcttctagagcctttgatccagc

SEQ ID NO: 274205 - DNA, 560 bp, Homo sapiens
gaccacttaccttcttttctttaactctactttctatctccaaaaatccactgagtattcacattactgattagctgtgttttccagagccattgctaatcgcacgtcgaccttacataaaaatggaatattcatgcattttctatgtatttttaaagccattatttgtggcacaagctcagtgtgctttcagagacactgaacactctgttgaagaaactcaaatggcttttaaaataaaaagacaaaatcattatctctgtgtagaggatggttttatccttgaaggtttactatttgaaacctcatcacaatagaatgctgagggaagtttttggaagtacaagcgtgatagttctcagatgatgtttgcaaagttgaaatattgtccatactcttaggaattcagtggaatgcagtagcagaagctctctggtgcttagtgaatgaatgaaawttttttttttttttaccttgcaggtgaaaaaggtgtgagggttgaactcaataaaccttcagattcggtcggtaaagacgtcttctagagcctttgatccagc

SEQ ID NO: 274206 - DNA, 562 bp, Homo sapiens
ctgtgggatccatgaagtctgtttggattctcagcacttgaattcttgcccttttartaggatttttaaaattattttaacattcatagctgttgacagatctgtatcacccctctgctgcaaaaggaagtggggttaggcatttatctctaattgtcatagatgtaccattgtgtatatgcaagaaggtttaatttgtgtggtcataactaaaatatgagagctcttattaaggtgagatcaaaatacctgtttatatatctgttatttaaagaaaaattttccacagtgttttgttattttccagcgtttcttagaacatttgggaattacactaaaatatagctgggtggattgaagtaaagggcaaatgagtttgagatgaagtttgagatgtgcttttttatatacaaaaagcacatcttccaccttaaacagttgtatgagacctaaatgaaatacagtgtgcaaagtaccttacaatgcatggaacaaagtaggccttcaacgaggattattgccctttcctttaacaatatgatagcataattgcagagagaga

SEQ ID NO: 274207 - DNA, 562 bp, Homo sapiens
ctgtgggatccatgaagtctgtttggattctcagcacttgaattcttgcccttttagtaggatttttaaaattattttaacattcatagctgttgacagatctgtatcacccctctgctgcaaaaggaagtggggttaggcatttatctctaattgtcatagatgtaccattgtgtatatgcaagaaggtttaatttgtgtggtcataactaaaatatgagagctcttattaaggtgagatcaaaatacctgtttatatatctgttatttaaagaaaaattttccacagtgttttgttattttccagcgtttcttagaacatttgggaattacactaaaatatagctgggtggattgaagtaaagggcaaatgagtttgagatgaagtttgagatgtgcttttttatatacaaaaagcacatcttccaccttaaacagttgtatgagacctaaatgaaatacagtgtgcaaagtaccttacaatgcatggaacaaagtaggccttcaacgaggattattsccctttcctttaacaatatgatagcataattgcagagagaga

SEQ ID NO: 274208 - DNA, 562 bp, Homo sapiens
ctgtgggatccatgaagtctgtttggattctcagcacttgaattcttgcccttttagtaggatttttaaaattattttaacattcatagctgttgacagatctgtatcacccctctgctgcaaaaggaagtggggttaggcatttatctctaattgtcatagatgtaccattgtgtatatgcaagaaggtttaatttgtgtggtcataactaaaatatgagagctcttattaaggtgagatcaaaatacctgtttatatatctgttatttaaagaaaaattttccacagtgttttgttattttccagcgtttcttagaacatttgggaattacactaaaatatagctgggtggattgaagtaaagggcaaatgagtttgagatgaagtttgagatgtgcttttttatatacaaaaagcacatcttccaccttaaacagttgtatgagacctaaatgaaatacagtgtgcaaagtaccttacaatgcatggaacaaagtaggccttcaacgaggattattgccctttmctttaacaatatgatagcataattgcagagagaga

SEQ ID NO: 274209 - DNA, 606 bp, Homo sapiens
tattagtctaaaatgtatttaaatccatctctttacagaaacaatttttatcagtatcactttcgtgtagttataaaatgttgatcactgtgggggggggataaattctaataattaatataatacataccttttttcatttaactttcctgcatgtcttacattttagatattttcttccaagagcaccaactaactacattgactccctcccagtcaaatttggggggtggcaagcaaggtgggggaagggggaggtgggagaacaraaaaagagaaaaatattaactacttggttcacctgtgacagaacccagagtgacctcttgtggtaaatactaactacagtactttggtgaacagcacaaccttttcctaggctacactctggagaatgcagaagcattgttcctccaagctaagaaactcggctgtgactcacaaggaaagaaaaagataaacactgactaaactaaagggcttctttaggaaatctactcagtcgctatcaattaaaataatcataactacgcccttctattaaaaataatgtttatatgatccttttagtaagtcagttacaaggtgcctaggtagatggatgtc

SEQ ID NO: 274210 - DNA, 568 bp, Homo sapiens
agagaaaaggaggcaatatgactacatgcttttctgtctgtgcgtgaactgagtaacagccgtgctgtttccaatactgacaggctttgaaagaagtgatgtgatcagtgactggttgtgaaggtgcatctgttattttccagtgatttgtagactgaagatcaagyggcaaagcttgcactttgtgcaattactcacagttaacatactgtggaaactgaaatttgaactgtgctgtggaactggtgttatttaactaaaccacagtgactgaaatctgtgcatacaggaactgtgtaaagcaagaactgcctctcatgatttgactattctgtgtaggagcaatattatattttctagccacatttgactagtcaaagacaattatatgatttttgtagcatttgaaaggcaacacaaaagtgaaatcgattgtttgttttttttcccccccagttttatgtatggggaattgactgacaagaagaccattgagaaagtcaggcaaacttttgacaactaccgaatcaaactgctttgaagttcttctgtacaagaaaaacagtag

SEQ ID NO: 274211 - DNA, 576 bp, Homo sapiens
ttcaatctacagacaaaggcagaaagcgtataccaactcaacttataaatgtagaatagtagaaaggaacaattgatcccacatacgatgacgatgatcaaaacacagtggcttatgcttgtaattgcagcacttcgggaagctacgatgggaggattgcttgagcccaggagtttgagaccaacctgaacaacatagtgagaccctgtctctgcaaaaaataatttwaaaaaattatctgggtgtaataacgcacacctgtgaccccagctactcagaaggctgaggtgagaagattgcctgagcccaagagggccaggctacagtgagctgtgatcttgccactgcactccagcctgggcgacagagtgagaccctatctcaagggaaaaaaaaaaagaaaaagaaaaaacagcatgaaagtgggtcatgaaagttatcttggatttgaatcattaagttcattcttgcacacatgggggataccttgggtcttatgctatttcttgtagatgacaaaggccatattcatcacagatctttagcagttccgaggcttttcatcaccattcctat

SEQ ID NO: 274212 - DNA, 629 bp, Homo sapiens
ttccaaatttacagcagaaaaaatttggccagcccagctctgtccaggcrtctacacctggtactggcctcggcccggcaatgttatagaaaagcctcctcaactgtgaagcaccgaacaaacatagggcactactagtattccttaattctctaaatctattgtttctaaaatgttatcatcctatgaactttccatacacaggtcgcaaagatctggtgcttccacaacccaccaatttgccacatcattaagaattacacatagcccattaccccgcaagcaaacaaatgcacactctgtaatggggaaaatctgggcactgaaccatggattctctcactgtgccagccccactccactgacatggattataagacattatttactctgggcttctgtctctgaaagtcagaattctctagtggccataacacttgtcattgcccatcctccccattgggtgtcctgagtgttccctgtctccaggcattttgtcggtaacagtgtcaataaagcagaggcggtttctgaacaatttatgaatgctaactaataatccctcctcaagacaggtgactgaaatgggtctcactgccacagagataattaaggaatattgcctaaaa

SEQ ID NO: 274213 - DNA, 502 bp, Homo sapiens
tatggcggcctgagtagactactacagtaaccctgttgacacacacttgaaaacaaaaaatgaatatctgtctgtggcccaggccacctccagagaagatgatcagtttttctccccaggtcaatttctccaatgacattaacatctgatttccactcaagtgatgtgatcagctctgcgctgatctgaactggtcaccaagacaagcaaaaatcccgaatcgaacccgccaccgcttgctgtttttcagttgtctagacatggtcataaatagtkggatgactgctcactataaatttttaatgagagattttgaaattagaaaagtagagaagcaattggaatttatggcctggagttataaaataagcagggacccacctgcaaagccagcgctgggtttccatcagcttcctcacaccagtagctctctcgactatgcaagtccagaatgccagcctcgtttttactcccccgactcctcctagaaaaaatcccacag

SEQ ID NO: 274214 - DNA, 502 bp, Homo sapiens
tatggcggcctgagtagactactacagtaaccctgttgacacacacttgaaaacaaaaaatgaatatctgtctgtggcccaggccacctccagagaagatgatcagtttttctccccaggtcaatttctccaatgacattaacatctgatttccactcaagtgatgtgatcagctctgcgctgatctgaactggtcaccaagacaagcaaaaatcccgaatcgaacccgccaccgcttgctgtttttcagttgtctagacatggtcataaatagttggatgactgctcactataaatttttaatgagagattttgaaattagaaaagtagagaagcaattggaatttatggcctggagttataaaataagcagggacccacctgsaaagccagcgctgggtttccatcagcttcctcacaccagtagctctctcgactatgcaagtccagaatgccagcctcgtttttactcccccgactcctcctagaaaaaatcccacag

SEQ ID NO: 274215 - DNA, 502 bp, Homo sapiens
tatggcggcctgagtagactactacagtaaccctgttgacacacacttgaaaacaaaaaatgaatatctgtctgtggcccaggccacctccagagaagatgatcagtttttctccccaggtcaatttctccaatgacattaacatctgatttccactcaagtgatgtgatcagctctgcgctgatctgaactggtcaccaagacaagcaaaaatcccgaatcgaacccgccaccgcttgctgtttttcagttgtctagacatggtcataaatagttggatgactgctcactataaatttttaatgagagattttgaaattagaaaagtagagaagcaattggaatttatggcctggagttataaaataagcagggacccacctgcaaagccagcgctgggtttccatcagcttcctcacaccagtagctctctcgactatgcaagtccagaatgccagcctcgtttttactccccygactcctcctagaaaaaatcccacag

SEQ ID NO: 274216 - DNA, 496 bp, Homo sapiens
aattgccaaggctccctttgttagccagaaggttctttaactccacatttttcaaattctttcatttcactaattcttggacatgattatgcaagctctygatgctctgttcagtatcaatagaatgtagaaagaactcctgttagaaactcaactcctcaaacctctctccagacctgctgagtcagaagctccagttggttgtgatgctggctcaggtttgagaagcacaactctaggctctcctctcattcttcagggaagacaaatgatgtcctaaaaagagctgtgacttgcctgaaagtctagaaaatgggttcctaatggggcaagacctgaatccagctctgctcactactcgaaatggtaacaataacagctaacagggaaaaggcccttcttacatggcaggtgctgggctaaatactgaatctggatactacgtttaatactaacaaaaccgtatctggtaaatattgcttgaattttcctattt

SEQ ID NO: 274217 - DNA, 496 bp, Homo sapiens
aattgccaaggctccctttgttagccagaaggttctttaactccacatttttcaaattctttcatttcactaattcttggacatgattatgcaagctcttgatgctctgttcagtatcaatagaatgtagaaagaactcctgttagaaactcaactcctcaaacctctctccagacctgctgagtcagaagctccagttggttgtgatgctggctcaggtttgagaagcacaactctaggctctcctctcattcttcagggaagacaaatgatgtcctaaaaagagctgtgacttgcctgaaagtctagaaaatgggttcctaatggggcaagacctgaatccagctctgctcactactcgaaatggtaacaataacagctaacagggaaaaggcccttcttacatggcaggtgctgggctaaatactgaatctggatactacgtttaatactaacaaaaccrtatctggtaaatattgcttgaattttcctattt

SEQ ID NO: 274218 - DNA, 615 bp, Homo sapiens
tgcagcactattcacaatagcgaagtcatggaatcaacctatgtgtccatcaatgggcgattggattaaaaaatgtcgtgtgtacgtatacacacacacacacacacacaataatggaatactgctcagccatataaaggaataaaatcatttattttgtagcaacatggatagaacaggagaccactttccttagtgaaatgactcaagcagaaagcaaaaaaccacgtgttctcacttatacatgggagctaaacaataggcacacacagacatacagagtggaataatagacactggagactccaaatcatgggaaggctgaggaggtgatggatgaaataccacctaytgggtacagtgtacactatttgggtgatgagtacactgaaagcccagattttactactatgcaatacacccaggtaacaaaactccacttgtacccctaaatccataaaaataagaaaatttaataaagaatatgtaaaacattagaaaaaattaaacagcagtttgcttaatcatgatagccaaggtaatttttagagtgtgtacatcaataaagcaaaagaaaaaataaaaggcaaaagtaagcatgccttctttagaatg

SEQ ID NO: 274219 - DNA, 587 bp, Homo sapiens
aggaatgctgttgttctccagatatcgggatatctggacactcccaagtctgggtctgtttagtaaacattattaatttattcccctaaccataccataagcatctagaggctgggaatgcctaactttctgagaaagcagcccagcaagtccaagcctcattttcctaggccttactcaaaatgggtcgctttggtttgaatgcctctgacacctctggttctcccatattcttgaaacataaccctgsgactgagaccaagggtattcacaggggcctagcccctgttgggtcctgcactctcattgtcatctactcaacagtatgggactgaggaacattctgctctactttttagatgttttcagcatagctctttaatttcctgttctacacagctttagaatttggcaaatgtgttgaaacactggctgtgtgtcggaggactgtaaagtccccacttttgtctttccagctttagagaactgtaaaagtctcacttgttggccattcccagcctttctcccagaatagatcttggatccctggcctgttgcccacaccaagaatctgcaaatctttttag

SEQ ID NO: 274220 - DNA, 603 bp, Homo sapiens
ttctgtgattaggcctcacagtactgcacagtttttttcctgcgcaatattatttttacaaagggaatatttcgaaaaagatctgagaagacagaaagaccttgactgaagttaaacaatgccaatgtttaccatagaaagracttaatataaaggactactaatacttgaacacatctcataaataaaatcaattatatatgaggctggtttttctcaaaaagacaaattcttaagttgaggcatgtcagcatgcttggtaaaagcaacttgtctgaacctcatttagaactattgcacatgagaagttaaatatttttgcagccagacattgaacttactgcttcacacatctggaatatcacttcttacacatgctgattttttttcttaaaaaaaggaatgtcatcattggatgatttttttttcacatagaacttcaaaaaatatctcttatttcttctaatttcaaactgactgaatagttgcaagaatagcacaaggaatttctgtatatccatatagtcatgttcaccaattatttacaacaaacctatccctttgcttcatcatgttctctcatgtgcacacacacgcaaacat

SEQ ID NO: 274221 - DNA, 649 bp, Homo sapiens
aaaaggagacgcaagactaacaatatgacatcaaaatgcagggccttttaaacaygtttgttcatgcatttaaaaaaatgccagtagcatttaggtgtatttaggtttgtgcttaataagggtcccagaatgatggcccgagatcttttcctgctattattttgtttgctcgttgatctatttcttgataaatctggtcagcagttactgcatgtctagtacataccaggtactattctaggcacagaggatgcagcagagaatatgagagaaaaattctcctaccttcctactaagacagacaattagtaagtaaacaaacatatgtgacatcatttcaggtagaaaaaagtgctaagaagaaacataaagcaagagtaagagtataggaagttagtaaagtgggatgctgttctaggtctggtcaggaaaggtgtctgagcaggtagcatttgaacaaagggcacagactcagtctatttgctggaaaacactacagaatgtcatggatgggtcagtgaatggacacgacacactgatattgacacccagtccccaggactgtttttcttagtcaccagggcctccctaggtacttgccctgggaaaaaggcttcacgatgagagaagaaaatttaaaatgcaaaaa

SEQ ID NO: 274222 - DNA, 649 bp, Homo sapiens
aaaaggagacgcaagactaacaatatgacatcaaaatgcagggccttttaaacacgtttgttcatgcatttaaaaaaatgccagtagcatttaggtgtatttaggtttgtgcttaataagggtcccagaatgatggcccgagatcttttcctgctattattttgtttgctcgttgatctatttcttgataaatctggtcagcagttactgcatgtctagtacataccaggtactattctaggcacagaggatgcagcagagaatatgagagaaaaattctcctaccttcctactaagacagacaattagtaagtaaacaaacatatgtgacatcatttcaggtagaaaaaagtgctaagaagaaacataaagcaagagtaagagtataggaagttagtaaagtgggatgctgttctaggtctggtcaggaaaggtgtctgagcaggtagcatttgaacaaagggcacagactcagtctatttgctggaaaacactacagaatgtcatggatgggtcagtgaatggacacgrcacactgatattgacacccagtccccaggactgtttttcttagtcaccagggcctccctaggtacttgccctgggaaaaaggcttcacgatgagagaagaaaatttaaaatgcaaaaa

SEQ ID NO: 274223 - DNA, 440 bp, Homo sapiens
atgtggcagcaggctttatgccacatcatccaatggtggaaggtggaagggcaagacagcatgagacagcaagagtggaacttgcagcctcaggtcctttcataattggcattaatccattcatgagggtggagtcctcatgacttaaacacctccattaggccccacctcccaacactgttgcatttgggattaaatttctaacatatgaacttcgggagaaatattcagatcataggagtgtaccttacaaggtttataaaacaaagggcaaaggaaaagttaaaaaaattgaatgggaaagatgtggcaattcctttgggaatgaaattgtgactattctgaaggaaatctctgatgttaagaggttaattccatsagatgagctatcacatataaagggaaacagaattcctacaaaagaggtatgaataacccat

SEQ ID NO: 274224 - DNA, 470 bp, Homo sapiens
acttgaattttacatttccagaagtctttccaaggtagtttagttattttgccttatgttaatggattgaaattattatctgatcattgttcaggcctatctggttctttccagataactctctatgcagataagtgcctgcttatagccaatrggatatataccccatagcattgtaagttaaaacttgtgcctcctttctgtgcactatctacattgagttttgcttttgttttcctctttagtgaaggataggtgttatccatgtattataatggagttttgctatttaaatgcagcttttaaaaagtcttgtaaatagctgaaaggttttgaacatcagctgagaaaagcatatttttgtgatttaaaaaaagtgttaggtagaaaaattcacatctgcagaaaactgttttgggaatgcctatgtgccaagttctcccaatacgtcctttaagcaattaagttaa

SEQ ID NO: 274225 - DNA, 470 bp, Homo sapiens
acttgaattttacatttccagaagtctttccaaggtagtttagttattttgccttatgttaatggattgaaattattatctgatcattgttcaggcctatctggttctttccagataactctctatgcagataagtgcctgcttatagccaatgggatatataccccatagcattgtaagttaaaacttgtgcctcctttctgtgcactatctacattgagttttgcttttgttttcctctttagtgaaggataggtgttatccatgtattataatggagttttgctatttaaatgcagcttttaaaaagtcttgtaaatagctgaaaggttttgaacatcagctgagaaaagcatatttttgtgatttaaaaaaagtgttaggtagaaaaattcacrtctgcagaaaactgttttgggaatgcctatgtgccaagttctcccaatacgtcctttaagcaattaagttaa

SEQ ID NO: 274226 - DNA, 580 bp, Homo sapiens
catttttctgcttacaggaaatatgcatttccaaagctctttgaaacacactgacaccttcttttaaaacattctcagtaaataaattttcatcagtaatttttaaattataaggccacataagtggactactaaaaggagaactgagagaaatcttctgttgcatatcctttttcttagcttgtattcgcctttcaaaatcttaagatacaatattttcctatgtgagctcattaattccttccaaggaatgaacaatttgcaggatgaccaaggaagccacaaaatgtgggaatctagtttatgaacaaatgtattgaccttaagatcagtgttatagaaaagttacatagttgcttcttagaatcattaggcaactatctgctggcattttagtccattccaatgaaaaaaggcatgtggcaatataaaaacaatagcaccattaaagataagtagtcctgagccttayattcctataataataatattggccttttgcctcggttacagcaaatctattaaatattcatgtcgatgtttattttctaaatgtaaaatggaatcaggataacaaata

SEQ ID NO: 274227 - DNA, 587 bp, Homo sapiens
cctgtgttggagaaggtgtgccaccatcaagatcctcatatgctcagtctcctaggttcttcaaggcagtacagactgtgcactcaggattttcacaccaagagcagaactgaataagctacatggcatttctattatttgggaaaaacagtatatattcaacactgtgatggttaattttaagagtcaacttgaataggctaagggatgcccagaatgctggtaaaacratatttcttggtgtgtctctgaggctatttccggaagatattagcatttgaattggcaaactgagtaaagcagacagccctccccaatgtggatgtataccattcaatccatggagggtctaaatagaataaaaaggcagaaaagtgaattcattctctctccttgagctgagatgttcattttctcctgcccttggacatcagtattcctagttttgggacatccagactcagacagggacttataccaccagccttccaattcaaaggcctttagactcaaactgaattacaccattggttttcttggttctccagcctgcagaaggcagatcatgagacttcttgaccaccatt

SEQ ID NO: 274228 - DNA, 541 bp, Homo sapiens
tgattatttctagaaggatatgtcccttttttggaaatgttagatatagaaaaaatgtaagaaaaatatgaaattatctaaactgaagagttcatggtataaagaagctaatttttgtgatgtgcatgctacatcatccaagatggagtcagattctacttggtggaagtgtgacaccaatcactacacattgatatagcacaatgtaggcattaagacaaacaggcagacaaagcatcaacatcaagaaagataatatatgacatagttccatcatgtggggaactcataagctcactggtgatatttacaatttcagtttaaaattacagaccaaagttaaattgcatattggctagggaataaatgagacatgagagagagaagacagtgaagactactctatcaggaggagactaatatactaaaggaagaacaaatctggttggaagaatgaaattaatcataagattgatggggacttataaatgtggtagatgtytaaacatgttttattcagagggtatcaataggaagagag

SEQ ID NO: 274229 - DNA, 479 bp, Homo sapiens
tatgatgaacttggtgctttctgacccatctagccataaaatgggtcacacacagcagcattccatcatcaaatggaaatggtatatatgtgattgggctcaagcaggtcctgaaggcacaagtaagtcacatgaggaagtggctcaaatatctatggtctccactttggtcaccctgccttctctcccccagcctacaccgatgggcacatgaggagttccctatgaacagttgacagaggaagagaagactaggggctggttcatagatgattctgcatgatatgaaggcacyacctgaaactggacagctgcagcgctacagcccctttctaagacatccctgaaggacagcagtgaagggaaatcttcccagtgggcagaactttgagcagtacacctggttgtacactttgcatgggaagagaaatggccagatgtgtgattatatagtgattcgtgggctgtagccaattgtt

SEQ ID NO: 274230 - DNA, 551 bp, Homo sapiens
gactgtgccgactttttctggtagcatgacttcttgaaaggataactgaccaccttgcttgaggaatactaatgaatactaatggggagtaataaaggtaattttatyagtagtttttaagagcttgtatgcttgtagattaatattgggattactgtttaacaatctcccaggggatcagagtttccattgggtatattgaaatttgaaagtaaataaaaactcaagaattattttgatgtattgccatatttgcaaattacttaagggtttgttcttgtaaagcaaaaagaggctattcgttaacctctattattataccaatgatagcacagtagaaaatagtttaacataataaatattgtcattttagagtggagtcttagttcttgccaaagaaacctgtttcagtcatgtgatgaaggtgaaacatcccagggatattgactctccttcttgttagcttatggaaatgttaagactatacttaaggacatgtaaaactccaaggagaattatgtgtcatatttattacgttgttatattgattt

SEQ ID NO: 274231 - DNA, 449 bp, Homo sapiens
ccatccaaacttttgacaagcctggctataaatgtgggggtttctatgactctctcacttttgacaattctctagaataactcaaggaactcactgaaagtgctatgcttgcttttgcagtgttattgtaaaggctacaaataggacatgatttggaagggttttgaacacacargttctatgccccctctctgtagaggcagggcatatcaccctccctgcacataagtgtatttaccgaccaatcaggatgctccaccaagcttcagaggctttttgtttgttttattggaaggacatgccggcatgataaattagattaaatcttggccatgtgattgagttcaatcttcagcacccatcccaacttctaatcacataattagcctttctggggaccagccctcatcatgaagctatccaggggactcacttgtcacttcattagt

SEQ ID NO: 274232 - DNA, 585 bp, Homo sapiens
atagccaatacatggagggcttaatacttaggtgatggattgagaagtgcagcaaaccaccataatgatagcaacaggaggcagccaaatgcctaggccgataggggagggttcccagtgaaacaccacctccaagttgaaaacagtttaaagcctgaaagccaagctacaagttaaatcctcagactggattgagaacttgtcttcctatttggtgtgctttcctctgattgatccccactcttcacctattttacatatacgtactctttcctaactggttttatacactgttgtgtccacctttgaatggtgtttctgctttaaccttttttgcatactcacaaacaaatcaatacacattccccattctgaggtcataaaagccccrggatccagccacacaggggattttcccaccttcaggtaggggaaccacccaccaagtcccctctttgctgagagccttcctttcacttaataaattcttctcctctcactctctggtgtctgcatacctaatttttcctggttgtgagacaagaacttggacctagctgagctaaggagcagaaagatcacaac

SEQ ID NO: 274233 - DNA, 567 bp, Homo sapiens
tttgaatggtgtttctgctttaaccttttttgcatactcacaaacaaatcaatacacattccccattctgaggtcataaaagccccgggatccagccacacaggggattttcccaccttcaggtaggggaaccacccaccaagtcccctctttgctgagagccttcctttcacttaataaattcttctcctctcactctctggtgtctgcatacctaatttttcctggttgtgagacaagaacttggacctagctgagctaaggagcagaaagatcacaacaatgacacacgtttacctatgtaacaaaacaaaactgcatgttctgcacatgcatcccagaacttaaaataaaataaaattttaaraaccagcatgcaaatgaaacaaaaaatagaagaaaacaatttagtgaagttctttttgctctttattgtgcaaatatcaataaattagattgtatctactgtatgcttctctcctttgatgaaatatggcagtttcagatactacaaagtttaacatgtattctctatagtaaaaaatactgtacacaagtatttttagt

SEQ ID NO: 274234 - DNA, 599 bp, Homo sapiens
aaggaatttcattcaggaaggaatatgaccctagctgaagtctaaaattgtttcactttaatttgaagaaataatgggatgttctctcaatagctttttatctttgcactaaattatttctgctactgctgtcaataagcattaaaagttagggatgcacaagaaagtagagaagaggagataaacgttgtatcagaacatcaattggatgcctaatgtggatggggcatttgtacagccaggacttacactgtttcatagtaataaaatgcaagccacctaggtaatcctagatttactagtaggcacgttaaaaayttacaaaggaataggtaaaattaatgttaaaatatattttatttaaatcatatattcaaatatgatctcaacgtgcaaccaatataaaaatttacgagatattttactattttattatttacatacagaatcttagaaatgcagcaaacatattacacttgtagcatgcctctgtttgtactacccacttttacatggtcaactaccacatgtagatactgattctcacactggacagcacaggcataatgcttgttcgtgatgagagaagaaaaagtttg

SEQ ID NO: 274235 - DNA, 599 bp, Homo sapiens
aaggaatttcattcaggaaggaatatgaccctagctgaagtctaaaattgtttcactttaatttgaagaaataatgggatgttctctcaatagctttttatctttgcactaaattatttctgctactgctgtcaataagcattaaaagttagggatgcacaagaaagtagagaagaggagataaacgttgtatcagaacatcaattggatgcctaatgtggatggggcatttgtacagccaggacttacactgtttcatagtaataaaatgcaagccacctaggtaatcctagatttactagtaggcacgttaaaaacttacaaaggaataggtaaaattaatgttaaaatatattttatttaaatcatatattcaaatatgatctcaacgtgcaaccaatataaaaatttacgagatattttactattttattatttacatacagaatcttagaaatgcagcaaacatattacacttgtagcatgcctctgtttstactacccacttttacatggtcaactaccacatgtagatactgattctcacactggacagcacaggcataatgcttgttcgtgatgagagaagaaaaagtttg

SEQ ID NO: 274236 - DNA, 603 bp, Homo sapiens
ccattgctctcaagtgccttctactggttcctatcccaaactacaacgtgctaaattgctctactgattcacccccttgcaacaccgggaacaaccattytataacaaagatgctgcacagagccttagtactctaaaaacttccaaaaataaagccagtggaccatactcaacttatagcacaattaaagtaatgacagcccttccagatgagaaaaaaaaaaaaaatcagacaatccagatgagaaaaaaaatcagacaagaactctggcagttcaaaaaaccagaatgtccccttatccccaaacgagcctactggcaccccagcaatggttcttagtctgaattgtctgaaatgacagaaacggaattcagaatgtagatggcaaggaagctcatcgagatggagaaaattgaaattcaaagaatccaaggcaagccagtaaaacaattcaagagctaaagacaaaatactaattatttttaaataaatattttaagttctaggatacatgtgtacaacgtgcaggtttgttacattggcatacatgtgccatgttggtttgctgcacccattaactaatcatttagattgtgtggtct

SEQ ID NO: 274237 - DNA, 301 bp, Homo sapiens
caccttttccttcctcaggactcaaggccttctagcacaaaccccaccccttgaatttccagttcaccaccaccagtctggagaccacatccttgtcaaagatagaaagagggaaaactcaaacccacttgggaaggaccttatctagtactcctaatgactgagatggctgcctggactgctgaaaaaggatggtctcatcatacctaagtcaagaaggtgtcrccctctccagaatcacagactgtcatccaaggtccaattcccacaaccataatgttaaaaagaagttcctaatctg

SEQ ID NO: 274238 - DNA, 607 bp, Homo sapiens
ggaaaaaagactccctattcaataaatggtgttgggataactggctagtcatatgtgcaagactgaagatagaactctacttttcaacacttactaaaactaactcaaaatggatttaatatttaaatctaagacctcaaactataaaaatcctggaagataacctaggaaatactgttctcaacattggccttggcaagaatttttggctaagtctccaaagcaattttaacaaaaacaaaaataaagaagtgaaacttcaactaaagagcttcttcacagccaaagaaactatcaacagagcaaatctacaggatgggagaagatagtctcaaactgtgcattcaacaaaggtctaatatccagaatctatagagaacttaaagaaatcaacaagcaaaaagcaaataattccattcaataatgggccaaggacatgaacagacacttctcaaaagaggacatacaagcagccaacaaacatatgaaaaactgcttaacatcactaatcatcayagaaatgcaaatcacaaccacaatgagataccatctcacaccagtcagaatggctattacccaaagtcaaaaaacaacagatgctggcaag

SEQ ID NO: 274239 - DNA, 591 bp, Homo sapiens
aaaagtctcatgtagagtttggaagacatcgttcatctcctactatggggtctgtgttcttcaaataggtctgtagatggaccttataattcttggtttataatttttttggtggtctggatctcccgaccttgtgatccgcctgcctcagcctcccaatgtgctgggattaccggcgtgagccaccgcgcccggcaattctccaatttttagattgactgcttcgctgtcagataatcaactctttctgttggaataattctattgttttctttgctgcatgcttcattgttgaaagttttagctatcacatattccatgttttgtttttaagtgcctggatttcaatttttctaaatttccccttattaacttgtccattttaactattttcaatctgtyttcaaatttcttatttcaaactgatctgttttctgaataattcaaaattgtttacacttttaaaatataaattttaaaattattctttaatcaggaaagttttaggaaatttgtcctatcagagaagtggcattaaatataattgcaacattgtaaataaaatgattgagtgaatcattgatatgtaaa

SEQ ID NO: 274240 - DNA, 520 bp, Homo sapiens
gaagtcaataaatcttatgttacacaataaaggtaaaaggaaacaaaatgacaatattttcttagtacaagtgtatacatgcacaaacatgtttttacaaaagaagggggaaatactcataacaattacagtcctggttcctgaagctggacgtatgatcgtagctggtattgatgactaccttcttctactacccattctgtattccttttgccttcagcaagcacctcagcaggacatggttttttcctggtgtagtgacccaaattttcattcatgaagagtctgggccatttgtagtcctgcctggatttgtctgtygcagttttccattacccttgatcacagggcatggtaatactgagagatgccctaatggatatcctgtattccatgcataatcttccttacctccgttgtggagtggtagactgatttcatcatgatagtcaatcatcccagccaacacagtcactcccttcttagcctgttgacttaaaggtaggaggagcccaaagta

SEQ ID NO: 274241 - DNA, 601 bp, Homo sapiens
tttcagttttctctacagtagatcagaatctcactcagggcaatcttagcagatttgagctcagtatctgcttctgaagccaggagatataacccctgagtttcatcacttcctttcatcactttgtccactgaacttaggaacaatcaaccatatttattaggttccttgggtctccatatatggtcaaaggtattatatagagtcactaaactccttgcctctcatgagcagtgaatcaggattgtcaaatgcatttattttgcataattctctaaacagttcacaccraggactattagtgttgtccatactattgggagtagtgtccttagcatttttgagtgtgatcatattcagcagccaactccagaaaccccaaaaccaatgaaagaactccattcttaatattctgtttctctagaaccactcctggtaccaaatctgtattagtctgggttctctagaggaacagaatatatatatatatatacacacacacacacacatataaattatttaaaaaattcatatataaagtgaggttattaagtattaactcacacaatcactaggtcccaaaataggctgtctgccagtt

SEQ ID NO: 274242 - DNA, 456 bp, Homo sapiens
gtgtcactttacacgtaatctgtagcttaataattccaagtatgctgagtgcttcttacagctcaggcacatccatatgaaataacatacaaaaattaatgtatctatagacctataaaatgaacaaagggtttctgatgtcacactttttttaagaatttatcaatctggtattttatttatgttgttgygacaatgaacagctaacatcacttactgctaatgatgagttcatctaaatatccaaaaccaaaccaatgaacctctacctcaagcctgcaactctttttccatttgcttattatgtcaatgacttctaccattttttagttatctaggcttaacaaaaaaaccataaagttattagtaaatcctttcagtcttaaattttctatatcagattaaatgtaagctttcttctgaataactataataggattcaaaatttactcacac

SEQ ID NO: 274243 - DNA, 621 bp, Homo sapiens
cttctgaataactataataggattcaaaatttactcacactgataatctgatgtgttaagaaaatgtagccaattggtccagtattgtttactaagatattatctgttttttcagaattgctctgaggtgcctacattgtcaaaaataaggtagtccatacatacacyggactgcatttgagctatccaattttatctgtcagttggtccatctttgcaacatgatcttattttaatatatctttacaatgggtcttatatctagtgttgtgtgtcctccagattttctcttcaaagttgccaagaattcacaattccaaaataattttagaactcactagttatattttggggaaaaaacttagattttaattgggtatatagattaatttggggaaaactgatattttaatattaagtatttcaatattaattataatacatccctagttttaaattttacccccaaaatattacaaagaaatcactgtagaggtctttgtaccttcattaggtatttagacataaaaaatttttgataaaagagagtttatactgtgacaaaataaagaaaaatttggggaaggtattagtccatttgtgcattgctataaagaagta

SEQ ID NO: 274244 - DNA, 621 bp, Homo sapiens
cttctgaataactataataggattcaaaatttactcacactgataatctgatgtgttaagaaaatgtagccaattggtccagtattgtttactaagatattatctgttttttcagaattgctctgaggtgcctacattgtcaaaaataaggtagtccatacatacaccggactgcatttgagctatccaattttatctgtcagttggtccatctttgcaacatgatcttattttaatatatctttacaatgggtcttatatctagtgttgtgtgtcctccagattttctcttcaaagttgccaagaattcacaattccaaaataattttagaactcactagttatattttggggaaaaaacttagattttaattgggtatatagattaatttggggaaaactgatattttaatattaagtatttcaatattaattataatacatccctagttttaaattttacccccaaaatattacaaagaaatcactgtagaggtctttktaccttcattaggtatttagacataaaaaatttttgataaaagagagtttatactgtgacaaaataaagaaaaatttggggaaggtattagtccatttgtgcattgctataaagaagta

SEQ ID NO: 274245 - DNA, 509 bp, Homo sapiens
ataattaaggccacttgaaagctaaagacaagtgtgggggtgggctacatcacatctatttcactgtcacaattttctcactgatataatttttgcacaggcagtttcagtttccaggtgactctaatatacaccttgtgttgagaaacacaaatgatcttcaaataagagattggattttcaaataagctggtaatctaaccccaaatcctgagatccttcaatcataatatgtgcaagaaactaaattaataattacaactaacataaatagagtttatggttccacattcttaatagtttggacactggcaaaaacataggaaccaactcaaaggcagctaaaarttgtcataagacctaagcacaataattattgcaaatattactctcaggtaattagttattctactttcattcagttatacatagctttaatgtacagtttctcagttattggaattattagaaaataaaatgaaaatacaaaagattatctgtggtagaat

SEQ ID NO: 274246 - DNA, 648 bp, Homo sapiens
taaagggtcctcaggattttaagtttatatcattcatcttattctgaacttttgtgtttcatgttggagttttccagtaaaaacaaatggatgggccagaattatttttaattttctttcccaatttcacttaaaaacaaactgaattcactatattaatgctgcagaatcctatgttgtgttctgtccctggctacttttatctttttgccatttccatctctaggtagaaatttttctcttcttcaagtgagagctcaagaatgatccctcatccaacctgctcccttccagcttgaagtcatatatctactaatttcagttctccttctttgmagagtctgtatttatcttttatgattctgcctagggacgtaagacttaaacattttttctcaaataaaagaaaaaagtacattatttcatctagacactagcctccttgagggcagtgtttacaggtgagagttcttgtatttcccacacatattctggtctcaaacaaatacagggttatataagtggtttatggctaattaaaagttatcttttctgcccacattcatattgatcagtaatgaaaataaatcccaagtaaaagtttgacaattcgagagttatattcagttagcctgaatttgagaccca

SEQ ID NO: 274247 - DNA, 632 bp, Homo sapiens
tacagtccatccttagtttttgcttctctttttctacaaatacaccaggatgtcctaaataatgtaaaccgtgttattttaaaactgtggatgtgtcagtcaacacagtgtttcttcaaacggggaaaatgaatgtctaattctcatgaaacacatgaatgatctgaagacaggttaaaaaaaaggacatttagaaatgatagattgaggatatgaaacggagtttctgagaagtcgaaaaagactcccatcagccatacctaactccacatgttcatggggaaagatgaagcaaataaaaaatattgccaaaataaaatgactggctacttcttaccaccccaaactcttgattgtttagtaaaccaatttgtctccaaactcttgttttttaaactgttagtcaggcctaaaamgttgaaaatgttcattctgaaattagctattttattttgcctctgcagataattcaacccatcacttattttaaatagttgcaatgactttttacattaaatctaatagatatgtatatatacccaccatgtatatacacactaatatacacagttataagtagtcatattcccagagaaaacataaaaaaattcacttctctgatactgagtata

SEQ ID NO: 274248 - DNA, 608 bp, Homo sapiens
tatcagctctgtttcctcttcatatgcaatcacctattcatgaatataaaacaaacttccctcggcaccctctctccagatcattactcccagttaggtctaagttgctcaaagtatttttttttttttttgtgatgagtctttctttgattaaaaaaatgagaaaagcaagcttacacttattccaagtattcttcttcgaagtgggcaggacagaaattactgctagctagagattgcagcaagcatttcctgcactggctccatttatgatggaactaawatttgatgaacattatgtaggtgacagtgttggcacttagcaacagtgggcccctatgtggtggagacagggaaagtaaagtttcattaattctaaaaaggaaaaggtcaactaaagccttattatgtgtcttcaccgcctctgttttttcatatacgtttgcagagggttaaatattataaatttcttcacagaagtgtcatgtacaataccattaggtgacaagtggtctccctagtataaattaaaattcttggagcaattccatgctaaacaaaactttgtatcaatgtcagctgttcaaatgtacataaatctttccaga

SEQ ID NO: 274249 - DNA, 407 bp, Homo sapiens
aagattcagtagaaaattaactttttttgtcatctttttgtaacatgctgtaagggtatgcagccacaattagtggaaaaggatttaatccaamagaattatacaagcaattacataccagatagatagtccccaggtcttgagcacatgatgcctggaagcacaacataccatttgcaggcatctctcagataggttttctgtatttggtggtggttatgttattaatagcaaagcaagtggcagtgatgtctagaacatcaaagatagattcccactgttcttttggtgcttcaaggtgattgtcattgggaacgtggacaggccttggtaatagtggaattgtttcctgtttttgttgtttttgtttttgtgttttttggcattagcctacaaactcaatagtt

SEQ ID NO: 274250 - DNA, 583 bp, Homo sapiens
gggcagagctcagtaatgaatagggtagacaaggcatttcctatgcccagactcagsattgataggccaaaacattttactaatagtgtttctagtctttccttatactcaggactagttcattctttttctgtttacaaatttgaatgacagaccaatcaggattatttttcttttgaggaaatacttatattctaataaattgtttgatacttttctagcccccatccctccttttttgtgggggtcagtgcctgaaagattgaatggttaggtcttttatatctttcttaggtacctctcatttgaatttagctatccatttacaggcttcaccatgttaataaaaggctgtggaatgttaaaaggagaactttattttctgaaagctatctatagactgggaagatgcaggcttctgtgcaaaacaaaagtgtgttccaaggagcaagcagggtgtagaagattataaaggcaaaacctgggctgggtgtggtggctcacagctgtaatcccagcactttgggaagccaaggtcggcagattgcttcaggccaggagtttgagaccagcctgaacaaca

SEQ ID NO: 274251 - DNA, 577 bp, Homo sapiens
ctttgtattaaatctatccataatagatatgaaaagctgattaactaaatccaaagttcaatctaactctaaataccataaaaattacattataacagaattagaaatttagtttatatgagtgaaacttttttcatgtcytagatgacaagtacttatctaattatttaaatttaatctgtaaagatattttactattataaatatttttccacaagacatgtgatataatgtttatctttgtatgttttctattacatacactgagagagaaaactgacaaccactgataacaaaaattctttatgctaaaggattataagagattttaactgtgataatttaaataacacttcttaagcaaatttcttctaaaaacaatgtaaaaatatattttaaaaattatgtttttaatacagatttttttgaagaaggagaagttaacacatttaattcaatcacttccttccctttttattattatgaaccacatagtacttagttttttatagtccaaactttactgaagcaaacctaagaaaaatttaaatgtcatcttaattttccacctcacaaa

SEQ ID NO: 274252 - DNA, 619 bp, Homo sapiens
aagttgtttcatgaacagattttcaaaaagaaactgacacttaaataattcatatttggtcttgacttttgcctacatagagtattgatcttaaagccaaaagacatcttgtctacctcttgttaactgttggatatcattgcaaggagaaaggatatgagtgaaagaggcaagacttattttacatttggtaaaagcaattgtagaaaatccatgcttttagaaagccttctaccatttatgaatgtggaatgtcactaaacagttagcctattgaggaaaaatgtgtatctcatcagggaaaaaaaaagacacaacacagataccaaaaaaaaaaaaaaatgcttttgctgttaacaataacccaaagcaatcatcaatgttaatactttttattctgcacagatttatgtcattcatttgtcttgaagcagcaaaaggccttagaagaccacatgagttaagcacactacactttcagatactgtgaatgaaaaatgcatgtggattactctacattccaaaaaataatatcaawgtaatgtatagcttttgctaaagttcactgacacctagatagttgaaaaatgtctctttccaagagtgtgaacatgtcaat

SEQ ID NO: 274253 - DNA, 621 bp, Homo sapiens
ctttctttttcttttttctttctttcttttctttccagaaaacattaataagatgtgcctgttatctggtgtttaaatagaagggaattatattcatccatatcatgcggcttggttcccccaaatgttgtttggatcagagagataaaaaattttttttccaaaatgtttgccaagatgcagtgtctctaattgactgtcaatcttcagtggactacaacagtgtttatgcataatgagttcctggactcatgcccttttaataattcaacatacaggaaggcacatatatctggcaagcatccaacacatacaaaaaatcaagtcttctcggggtatccaaagatagtctcagaagaaagctattactttgtcttargaaattccctacttaaaatagcctttttttttttttgcataccttgttagttgtgacttttgaagaaactaaatgtcatcatattctggctattatagttacattgttttggatatagtacatttattaaagagagtatgtagagttcattactttctatgtgctaatatataaaatgcacatacttcatatcttatagttgcatttcaaaacaatttttagtgttcaccttataaaaattc

SEQ ID NO: 274254 - DNA, 590 bp, Homo sapiens
tgtttggaaaatatgaacattttttctaatatggcatattaagtttcaggtggaattaatttcaaattttagtccacttgatctcttgattcttaggaaagaatttgatctaaatttaacctcacccagaaataaactttgttttcagcagctcagagttcaatttcatacatctcatgatacattaggacctttgctcacaaatgaaactgtgagtacaacaggaacactttccaaccctcaccaaggatatggggtggatcaaaaagagctgttaaatgattattaaactcttatatctctgtaagttctctctgactggctaatggamaaaagctggtgaaaaacatttttctctgttgtcaggccagcattattattgtgaacactgtttcaattggacttcttagcagtttcataaaagaagaccattaggaattatcccatatgctttagtttatatgctgcttaattttaatggaaaattaagagtttccttctggtttgctcagtgatctctctcttcttgaatttctatttcccatatgtgtttaatatgtcaaaaagtcacaggtaaaatccaaaaccca

SEQ ID NO: 274255 - DNA, 606 bp, Homo sapiens
tttctgattttgacacagatttgcttctgtatattattgacctatcccttttattttcctttgcttcatctctctcacacacacacttgaagcccctctctctctgagacatcttattcctgctaattattcagcattaatttatttttttcagcaataatttaatgtaatgactgcttagtctatatttgcagtctcaaacactccactaaatgctaattttacattttcatctcctcactagatatcactacctcaatatttgcaaacagcattgatgtccaaagctgagtcgatcatttttcactaatgaaatttcttctttgatgtctctagattcgatgtgtattttaccagttttccgggttctaagctccagattatttttgattattaccttttttcatttttcacatgctttgtcaataaacaaatattgatttgacattrtgtgctttgcaaaatgattgagattcagccattgacaaaatttcttctgttacagtgtggtctgggagacaaacaattaaataaattaatttagttaatttcagataattctaccaggatgaaatactgtgacaaagtatgatcaagagaaatatc

SEQ ID NO: 274256 - DNA, 590 bp, Homo sapiens
aattttttaattgattgctattgtctgaatatttatgtgccccctgaaatgcatatgttaaaatcctaacccccaaagtaatggcatttaggaggtgattaggtaatgaggctggagtgctcgtgattggaaataatgccattataaaagaaaytccagagagctagctagtcccttccaacatgtaaagatgcagcaagaagtcattgtctatgagccttcagtagacaccaaatttgccaccacttgaccttggatgtctcagcctcaagaattgtgagaaataaatttgtgttgtttataagctacctatttatagtattttgttatagcattccgaatagattaaacagaaaattggtaccaagagtgggatgctgataaaacaaatatttaaaaatgtagagctgactatggtactgggtaaagggtagaacctagaaaagttttgatgtgcatgctagaaaaagcctatatcctgccattaaggacaattccactgaaggcccagaaagaagagaggagagatatagagggagcctcgatgtcttagagaatatctaggtggtcataaacagaaggttggtaga

SEQ ID NO: 274257 - DNA, 465 bp, Homo sapiens
catctaataactaatcatgcttctgggcttatatagcagagaactcatgtagccctagaatactttaaaagaccaaaaaaataaacgagcaaaacttggtaaactaaagctttaacaagattgtagttaaaagccaggaagtttttacctactgaaactcagatgggctgttttgaraaatgatttaaaggattagtatcacataatcaatgttctgaacacatcacaatctccagtacacatggggctttgcttattagaaaagtgggtgtctaatacagaaattccttagggtgtgataattatttccattcctataagtaagcaacattttaaggacatcatccatgccaaggtacacacaagtaatgtgacctgtggcaataagctatactttaattacatattttctgtgatcaaaatcctcaataggtaagatgttacgtacattcattcatactttcg

SEQ ID NO: 274258 - DNA, 653 bp, Homo sapiens
ctctttctttgtccatcttcaagacagagtatgtatttttggtcagtaaaagtgcttaatgttcctaagaatttgtaataattttagatacaatattcttgaatataaaatgctgcaaatgatactttttgggaacaagaattgtttcaaaatttgattttattcaatttgaatattgtgaaagtaatgtaagcaactgaaaaagttgctaactactcataaatatagaagatgcaattccataagagttgtgtttcatatttcttggttttcaatatttgacatgtctgcttcatctaagccttagttacaaaatttaagtaaggtttaagatatatataactttcattaatatttttattcacgtaataaatcaatatacataaatactgtaagtaaagccctgtgttgggttatggtgatataatagtgcatygctcttccttgatggcagtgactcctttgctgacttgacatttttgtatgacacaataaaaacagactgccaaagaagtgaaatagacatacatagccaattctttatatgatccatcaaacataagatgattctgtcaaattgctaaaacagttgctaaacacttttgattttctttacttttttaaatcttatattattaatcatttgcaaacta

SEQ ID NO: 274259 - DNA, 526 bp, Homo sapiens
gaaaaacacagtgttcagatagatacttcttacaaatattttataaaagtcaaggatgaaactgaaaacttaactcagggaggaggccactttggtgaattaactcttgacagggatagaactttgaaattatggagagcctggttttcttaaatgtcagtctcaacaaaattgatatgtattcaatgaaagtcaatatatagttcaattccctgatgggttcacttaacattaacttctattttgtttctaaatacacacgttccagacattttattaattcacttttcttcacattcattttttcagtgggcacgtgccaatcatttaggttgaaaatatgagtttatggttaaaataggtgtcaaattctaaaagttatgaggcaatctaggagtacacatgsttatgggatttaagatttaaaaattttgaatgaataatatagtcaaatgtaacagctaatgtgaataagacaacatcccacctaggatgcttaatattttatgtcaacctgagtaggtca

SEQ ID NO: 274260 - DNA, 556 bp, Homo sapiens
cagagcttgctgtggcaagggaatcaagcatcatcatctgcgcttgacagagactcaggcacgcaggggagtgggaaagctttctaggtattccttgaatgggaaggcttccggtattccttgagtggaggttgctggcatgtcatgtaaagcattttattaaataaacgttattacttcaacaagccatgctctcacttttcaaaagtttaatttaaaaaataaacagttgccattcatatttccatgatctcttcgactgaaatcagaaacattagttcttttagattgtctctatgttttactacaccaaatgaagtraaaactgaggtttttccttgggcaattctcccaatgttccctcaaatataaaaaaatacagatatttgtatacatattctctgtattagcttcttaattcataaattatccattgtttctagcccttagtttataaaagtttcctggtaaaaataatgttttgtaattccaaaaggtttattctacaaatattctccttaatatatgagattttgaaaattcatgataaggaact

SEQ ID NO: 274261 - DNA, 529 bp, Homo sapiens
aaaatttccaacaaattctacaaggctcttatgagtttgtaaatatcagacaagaagaatattaacataaatgattaggtttcaatccatttgcacttgtcaatgagcccccagcatttcccacttaaggcagatgtgtwtaaacaataaaacaagatttctgtgtgcctcaatctttaaaagctattttcagagagaaatataagttgtgtttctctcttttgttttaagcaaatagacatttagatttctattgtaaatgaaaacaatgaatctgttgggggggaaaaatgagtaaaaagcaggctgggtgtggtggctcacacctgtaatctcagcgctttgagaggctgaagcaggagattgcttgagcccaggaagttgagaccagcctgggcaacacggggacccaccgtttttttttttgttttgttttgtttttagaaaatgtatctgagcgtggtggtgcatgcccatgttccagctactcgggaggctagggtgggaataccacttcggcctggacggt

SEQ ID NO: 274262 - DNA, 625 bp, Homo sapiens
tattcactatggcaaaaacatggaatcaaaccaggtatccctcaatggtcaattggataaagaaaatgtggtacatgtacaccatggaatactatgcagccataaaaataataaaataatgtcctttgtagcagtatgaatagagctggagactataatcctaagtgaactaacacagaaacagaaaaacaaatgctccatgttttcacttataggtgggagctaatcactgagtacacatggacataaacatgggaacaatagacactagactactagagggtgtcaagagggggcataggtttaaaaactacctattgagtactatgcttactatctgggtgcaatatacccatgtaacaaacctgcacttacatatcctatatgcrtagttgacatttttaaaaaatctcataacttgagtaatttgtatttttgatatgttactttttgtcattccaaattatagcaagttaatctcttatacatttattaacttttttactatttgtaaataggatatacgctactaaaaaattgagacagtaactaatgaagtaaaattttaaagcattaaaaaataagtcaataaaaaatatacttttaatgtaggtacaatatcttc

SEQ ID NO: 274263 - DNA, 556 bp, Homo sapiens
ggaaggtggagcagatgaaacaatggtatccactgcacaaggtaagccagaagggaaaaactttgaggtaatttttatacaatacagaggcatgccaaccatgcaggattttataagtcagtggctttcagactacaagacctaacatagaagacatattttatgatgacccattaaatagatgcacaatgaaacaaaagtattctaaaatagtaatgaatatatccttactatataacaatacacaatgatctatcctattctattctaatatgttagtcacaacctattattttttttggttcatccccaataaatcatgacttaccatttgaaaaccctgatctaggtgaagcaaagaaaaacaggctcctggaaatcaaatataaaattaaatatcataaggaaacttactggctgggtaccatggctgaagcctataatcttagcaatttgggaggctgtgtcaaaaggattgtttgagctgaggagttggagtccagcctgaatracatcgtgaaaccccatcttactaaaaattaaaaaggaaaataac

SEQ ID NO: 274264 - DNA, 579 bp, Homo sapiens
tccaactagctcacagctggccatcttttaatgaatatttcagctaaccaagcaaataaactcttagaaccctttaaaactccccaagctgcaacattaaatgcacagtccctatttagtgggcctaaatcaataaaggcagcctgatccaacggtatgttccttccatcattatcccacacctttaatatctattcccatgcctgttctccagatttctgttcatctaagttagaaaactcaagcaattattttactgtgtagcaaatctcttcatggttcacactctcaacctcacctctagggttctgcgaggacattagtctagttgtaggtctagaagcaaacatggctattggcggtggcttctgaggagaatcaacattatctttcttggcaactgcctcaggggaggccatcactgttgtgtcagtcagcacagggtttatctcctcagaccaaggtggaaaggctgatgtcagcatgggtcagggaggagatgttgccactactgtggatggaaaaactattccttctggcaaaaragattcatcaaagtttacaaaatctgtgtcccca

SEQ ID NO: 274265 - DNA, 563 bp, Homo sapiens
catagcatagtttcaggacagccagagatgtgtctattggactagcatgtttagtacagaggtagagttagaaagcttcatccagttacctccaggaaaatccttcatctcagtggcagcagctgtccaattataggaacagtagaaagatggctcactattgggcttatcacattagccaagacaggccagaaaaccctgatgttcaaggggcctgcatatggcctgtacatgtggactctgctctgatccagggcctgttagtaactgtcatcatgccaatttttttttagtctcgttgtgattgttttggaatgtcgtgtatgcaaattgtcatggttattgttaaartttttttttttttttgacagattctcgctctgtcacccaggctggagtgcagtggcatgatctcagctcactgcaacctctgcctcctgggttcacaccattctcctgcctcagcctcccaagcagctgggactataggcgcccacgaccacgcccggttaattttttgtatttttagtagaaactgggtttcaccgtgttagccaggatga

SEQ ID NO: 274266 - DNA, 481 bp, Homo sapiens
aaaaaaagatgagatgcacaagaatcaaacatgaaaaatcagtaccataaattttctactagtctagaggcaattggttttayttattttcaagatctaaactacatgccacttcatatcaacaacgtgtttcaggaaagcatttattgtgtacatatcatgtgccagtctctgtgctagactttgagataacaacattaacaaaagaccctgtttcttcaaggagcttactgaataaagaagacagaagaaaagtaagccattacaatacagcctgataatgatatactagagatttgtaaacaacattataaacaaacttgtcttggtagcaaagaggtgtttgaaaggaattgttaggaagaaataaaatagttccaactggttagattctataaggaagtgattagaagactgcatgaagaaaaagggatgtcactgatgtgtaggtttgtagctttgatgagtgggtggattatgc

SEQ ID NO: 274267 - DNA, 568 bp, Homo sapiens
tagcatatgcgttgtctctttgaattaaaagtccacattacacagtgtgccttaattaccttatggttagtggaaagtgtgcatttattcaatatagaaaaatctatttatgattcaagaataaacctaacattagacttcagtgtgttttttttttagctttgctataacaacacttaatcyggaaaataaaattaaaattcaaaaaattatcttgctgaattataaattagaaaaattgatttgctgttatctagtttttgaattgtgtggcttctaaaaaagaactaaagttgtccacttggcttactttagctattgatcaatcaaataggttcatttcaggatagattttcctataatactagttaggaacaatgcaaatctgcctgctaagtggtcactaagattttaaatagaagaaaagtcatctatagcatgaaataatggttctcaaaatgcaaaagttaaacgtaatttctaaaaacattctaaagttgaagcaaaattgaagaacatggtatgttcttaaacaaaaacaaaaattaacagttggtcattaaatgga

SEQ ID NO: 274268 - DNA, 568 bp, Homo sapiens
tagcatatgcgttgtctctttgaattaaaagtccacattacacagtgtgccttaattaccttatggttagtggaaagtgtgcatttattcaatatagaaaaatctatttatgattcaagaataaacctaacattagacttcagtgtgttttttttttagctttgctataacaacacttaatccggaaaataaaattaaaattcaaaaaattatcttgctgaattataaattagaaaaattgatttgctgttatctagtttttgaattgtgtggcttctaaaaaagaactaaagytgtccacttggcttactttagctattgatcaatcaaataggttcatttcaggatagattttcctataatactagttaggaacaatgcaaatctgcctgctaagtggtcactaagattttaaatagaagaaaagtcatctatagcatgaaataatggttctcaaaatgcaaaagttaaacgtaatttctaaaaacattctaaagttgaagcaaaattgaagaacatggtatgttcttaaacaaaaacaaaaattaacagttggtcattaaatgga

SEQ ID NO: 274269 - DNA, 610 bp, Homo sapiens
tcccaaaatgagatatgagagacagagtgtgcatgagagtagccaatacagaatataaatgctgaacttaaatattttatctcattaatgtcaattgtttccactcaaatgaaaagatcgtctctgttaaacytaaactaatctaatccaaatctaatttattaacaaaggcctatgtatctccctgtgtagaacacaattacactgtagacctgttcctacagactgagaaaaacgtattttctgaaacttccatttcgtattcttaaactacacaagactttagacaggaaagaccataatgcagagaccattattttttattataccttaatcttggaaatgacttaccctcacctctgtcatatgttatcagtcacccatatcaaacctggtacattgtggaaggggtctccacaaggataggaacacattcaggagccatgctacaggctttctaccacgacacaactatcagatttggcagactgaagatttttcatacaatagtaaaattatttacctaggatgactattatacagttctaaaacataatccattttatacctgggtatattctggaaacatattatattctggaaacatatt

SEQ ID NO: 274270 - DNA, 610 bp, Homo sapiens
tcccaaaatgagatatgagagacagagtgtgcatgagagtagccaatacagaatataaatgctgaacttaaatattttatctcattaatgtcaattgtttccactcaaatgaaaagatcgtctctgttaaacctaaactaatctaatccaaatctaatttattaacaaaggcctatgtatctccctgtgtagaacacaattacactgtagacctgttcytacagactgagaaaaacgtattttctgaaacttccatttcgtattcttaaactacacaagactttagacaggaaagaccataatgcagagaccattattttttattataccttaatcttggaaatgacttaccctcacctctgtcatatgttatcagtcacccatatcaaacctggtacattgtggaaggggtctccacaaggataggaacacattcaggagccatgctacaggctttctaccacgacacaactatcagatttggcagactgaagatttttcatacaatagtaaaattatttacctaggatgactattatacagttctaaaacataatccattttatacctgggtatattctggaaacatattatattctggaaacatatt

SEQ ID NO: 274271 - DNA, 610 bp, Homo sapiens
tcccaaaatgagatatgagagacagagtgtgcatgagagtagccaatacagaatataaatgctgaacttaaatattttatctcattaatgtcaattgtttccactcaaatgaaaagatcgtctctgttaaacctaaactaatctaatccaaatctaatttattaacaaaggcctatgtatctccctgtgtagaacacaattacactgtagacctgttcctacagactgagaaaaacgtattttctgaaacttccatttcgtattcttaaactacacaagactttagacaggaaagaccataatgcagagaccattattttttattataccttaatcttggaaatgacttaccctcacctctgtcatatgttatcagtcacccatatcaaacctggtacattgtggaaggggtctccacaaggataggaacacattcaggagccatgctacaggctttctaccacgacacaactatcagatttggcagactgaagatttttcatacaatagtaaaattatttacytaggatgactattatacagttctaaaacataatccattttatacctgggtatattctggaaacatattatattctggaaacatatt

SEQ ID NO: 274272 - DNA, 646 bp, Homo sapiens
tgaattatgggggtgagtcttttttgcactgttcttatgattatgaatgagtctcaagatctgatagttttaaaaatgggagtttccttgcacaagcactctctttgcctgctgccatccatgttaagacgtgacttgctcctccttgccttccaccacgattatgaagcctccccagccatgtggaaatgtaagtccattaaacctctttcttttgtaaattgcccagtctcaggtatgtctttatcagcagcatgaaaacaggctaatacaactttcaaccatttctaatttgtttcattccaatcagtacaattcacttgctcttatcaagcatgaatgcacacttctgagttatcttatttcctctcagctgcgttcaacagggccattcatgactttcttgacttccatttttgcttttcttccctagagctctccctaggctcacaatatccaagtgcccttctccatttcctttgatggcctcacaattaaatgttagaatcatgcatttcttggtcctgagccttgtgctttcctcagtaatctcattagcatcagtagctttatatagcccatctttatgctgataagtacmaaatttctatctcccaacggcttctcatatgagtgctagattatt

SEQ ID NO: 274273 - DNA, 514 bp, Homo sapiens
tctgcccctggtctagccctccatcctctaccccactgcatcttaaccataccaacaatttttttttttaactcaaaaaccgcccagggaaatgttcccatcgcttccaggccttccctgatccatattatcgatcacggtctcttgcctacaaatctatggcagcccagaaggcagtctggcagaagacagctcatatctattgatcttttttaatgtattatgctttayggatgtggtctcatttaagcctcccacttgtcctattagttataccacctcacttcacagatgaagatatggacagtagaagggagaaatgccttgtccgagttcagaggtggagctagactctgaagccaggctgtgggttccatgctttctccccttatatggcttccctgatccctagactcatatcaaactgcccattccatgtcatcacttagaagtctaatgggcagctcaaacttaacactttcatcctccctgccaaaccagctcttcccacatg

SEQ ID NO: 274274 - DNA, 514 bp, Homo sapiens
tctgcccctggtctagccctccatcctctaccccactgcatcttaaccataccaacaatttttttttttaactcaaaaaccgcccagggaaatgttcccatcgcttccaggccttccctgatccatattatcgatcacggtctcttgcctacaaatctatggcagcccagaaggcagtctggcagaagacagctcatatctattgatcttttttaatgtattatgctttatrgatgtggtctcatttaagcctcccacttgtcctattagttataccacctcacttcacagatgaagatatggacagtagaagggagaaatgccttgtccgagttcagaggtggagctagactctgaagccaggctgtgggttccatgctttctccccttatatggcttccctgatccctagactcatatcaaactgcccattccatgtcatcacttagaagtctaatgggcagctcaaacttaacactttcatcctccctgccaaaccagctcttcccacatg

SEQ ID NO: 274275 - DNA, 514 bp, Homo sapiens
tctgcccctggtctagccctccatcctctaccccactgcatcttaaccataccaacaatttttttttttaactcaaaaaccgcccagggaaatgttcccatcgcttccaggccttccctgatccatattatcgatcacggtctcttgcctacaaatctatggcagcccagaaggcagtctggcagaagacagctcatatctattgatcttttttaatgtattatgctttatggatgtggtctcatttaagcctcccacttgtcctattagttataccacctcacttcacagatgaagatatggacastagaagggagaaatgccttgtccgagttcagaggtggagctagactctgaagccaggctgtgggttccatgctttctccccttatatggcttccctgatccctagactcatatcaaactgcccattccatgtcatcacttagaagtctaatgggcagctcaaacttaacactttcatcctccctgccaaaccagctcttcccacatg

SEQ ID NO: 274276 - DNA, 610 bp, Homo sapiens
ctgaaccatgaacaaggcatggaactatatgtttaatgagttttgggttattgacctcaagagaacatttaactgacmaattaggctaaacattttaattttaaaaaatatttaattgagggacaatattttaaaacctaaataccccatccaaacaacatatttaatgaatctaaatccaaatgcagcaatattttctataccagaaaactgtgactcaaggatatttcacagagagatgggaattaactggttgggggagaaaagtctagttccacaattacaccagtagaaccaaactttgaatatgtaggagctctctctccaggactgagatggcttcctcacattagtgccagagaagtgttggctcatggagtcccacatcacttaaggccgccagtcaagacacatcagctctgccttggctagctggttagctgcgggcaagttgtggccacagagctatacagtaaacatttcttgaattgatctgagcaactgtcacccttttggtattccgttgattgaaattacagcattgggaattgtgggattcactcacaccaccctgataatgcataattacttgtggtcgattgtgatacca

SEQ ID NO: 274277 - DNA, 541 bp, Homo sapiens
gaatacaaatggcacaggctggcaagtgagtctgtcataacggggttggcatcttcagcctggagttgacaggcaggagtggtgagcatcacactgccaggcctctgtcctgctttgtcatcagggccatttatcaktgctgcatgcctcataggtcagtgcatgggggaggtggttgtggtggtccccacatgcccaggctggctgtctcactgcccctcttcctctccaaaaataattagctccaaacacaggcagcaagcatcgtagaagcagaggcctaaaaggatcttgtctaagtgtgcgggcacctccaggtgatttatttcatccttttctagagaaagcaccttagtccaggcactcatatattcatattcatggtctaaacacatagcatttgaggtgggaaacaggaggccaacttacccatctcccactgggtggggaggtaccctttctctcctgttaataacagcagtcataacagtaaccacctgagctatcatttgttcagttttgttcagtgtttttttttttt

SEQ ID NO: 274278 - DNA, 615 bp, Homo sapiens
cattcttgcagcaatgagggaattaattcttactgtaaccaaaggtcarcaggcagccagtccaggtctaaatgtaaacaaattctaaatgcacactgcaaagtcgtatttaaaagagtgttcaacaaagagcaaagaaaatggtagactttttcagagaagagaggaaaactggaacgcacagcttctgaatagggcaacagaatttgccctgaggaacaggttttcagggggaaagaaaaaaaaactagggacacttcacaggtttagatcaaaatacagggaggaagaaaaggaaaaataagaactctgaatccagtctgcactggcctcctagcccccgttaaacgggctgaacagatctgcaccttcgcgctaagtttcaaaacaaaagccttcactctacttctctttaggttgttgttgttgttttaatcagatcaagtacgaggacaagcacaggctggattaatgatcagagaaacaaaaaggattaaatatctggcctgggagaagtttattgtgcaactagaatgtcaaagtcatctctctactcttctgtctcaaaaaagcttctccctctggggcaaacactagcgacaagccgttcagctt

SEQ ID NO: 274279 - DNA, 566 bp, Homo sapiens
aggactgcatcgctactgtgttgtcatggagatggatttgcttggatgtgttaggttgtttcacacctttataaytcagtagggccaggttggggggctgagatggattctgaaacagaaaagtaattgctttatagattcaacttttctgggtaatgattgggtagtttctctggccagttaaaattatgctgaagatggcagttcctagtttgtataactattttcccattgaagtaggcataagagagcagactacaggagttctcaaagtcattctttaaagtgattagtcagaaatatttttggctgcatgagctaattgatgaaagattacaaaggatcaaagggatcttattgcaaactcatctggaataatccttccctcttagatgctggtgcagtttttaatagaaaaaagcatctgggtaccactccctccaccttcgtgcaatgcaaactctacataggtctgaggtgtcactggggacgtgctggtcgagtgcattatgatcacaagcgggactccagagttagagcctggccctgccaattgctggctgtgt

SEQ ID NO: 274280 - DNA, 566 bp, Homo sapiens
aggactgcatcgctactgtgttgtcatggagatggatttgcttggatgtgttaggttgtttcacacctttataattcagtagggccaggttggggggctgagatggattctgaaacagaaaagtaattgctttatagattcaacttttctgggtaatgattgggtagtttctctggccagttaaaattatgctgaagatggcagttcctagtttgtataaytattttcccattgaagtaggcataagagagcagactacaggagttctcaaagtcattctttaaagtgattagtcagaaatatttttggctgcatgagctaattgatgaaagattacaaaggatcaaagggatcttattgcaaactcatctggaataatccttccctcttagatgctggtgcagtttttaatagaaaaaagcatctgggtaccactccctccaccttcgtgcaatgcaaactctacataggtctgaggtgtcactggggacgtgctggtcgagtgcattatgatcacaagcgggactccagagttagagcctggccctgccaattgctggctgtgt

SEQ ID NO: 274281 - DNA, 566 bp, Homo sapiens
aggactgcatcgctactgtgttgtcatggagatggatttgcttggatgtgttaggttgtttcacacctttataattcagtagggccaggttggggggctgagatggattctgaaacagaaaagtaattgctttatagattcaacttttctgggtaatgattgggtagtttctctggccagttaaaattatgctgaagatggcagttcctagtttgtataactattttcccaytgaagtaggcataagagagcagactacaggagttctcaaagtcattctttaaagtgattagtcagaaatatttttggctgcatgagctaattgatgaaagattacaaaggatcaaagggatcttattgcaaactcatctggaataatccttccctcttagatgctggtgcagtttttaatagaaaaaagcatctgggtaccactccctccaccttcgtgcaatgcaaactctacataggtctgaggtgtcactggggacgtgctggtcgagtgcattatgatcacaagcgggactccagagttagagcctggccctgccaattgctggctgtgt

SEQ ID NO: 274282 - DNA, 583 bp, Homo sapiens
gacttgggggcagggtcaagtaattaacccacaaggcttctatcagtgtggtccctgaatacctctcggaagtactgaccttgactaagtccaatcctttggtatttgagcttccccatcggtaaaatgggtgtgatggtgcttttgtcaacagttatcaggggtcatatcaaatgtagacatacagttagtcccagcccgacatgctcatgaactgtgccaacagatgaatgagaagtaattcatctattgaattactatgaatgaggaagtgaaagagagatggcataaaggcagggaatagactargaagtacatggcatatgtaaggcgctggctatagagccaagaaactcaactcatttccctggctctcatccttccacatcttattcacatctgtatcaatgaattgcaatgatttttataattgatagtaacatttacctctgaggacattaatgcagagttttaaagtattcactaacaaaatagaatgataaaatctagccataaaaaataatttatgttcaacttcattacaacataatgagccaatttgttttgttagattgatttgtca

SEQ ID NO: 274283 - DNA, 616 bp, Homo sapiens
tgtttatgtagaaatggttttagtgtctacccagttcttcctgcttatgtaaggaaaaccaggcaaccttgttacatggaataatgaacaaaacaatggcaaagcagctacagggtactgtaaaatgcttattaaaaacaggtaggaggacttgggggcagggtcaagtaattaacccacaaggcttctatcagtgtggtccctgaatacctctcggaagtactgaccttgactaagtccaatcctttggtatttgagcttccccatcggtaaaatgggtgtgatggtgcttttgtcaacagttatcaggggtcatatcaaatgtagacatacagttagtcccagcccgacatgctcatgaactgtgccaacagatgaatgagaagtaattcatctattgaattactatgaatgaggaagtgaaagagagatggcataaaggcagggaatagactaggaagtacatggcatatgtaaggcgctggctatagagccaagaaactcaaytcatttccctggctctcatccttccacatcttattcacatctgtatcaatgaattgcaatgatttttataattgatagtaacatttacctctgaggacattaatgcaga

SEQ ID NO: 274284 - DNA, 583 bp, Homo sapiens
gacttgggggcagggtcaagtaattaacccacaaggcttctatcagtgtggtccctgaatacctctcggaagtactgaccttgactaagtccaatcctttggtatttgagcttccccatcggtaaaatgggtgtgatggtgcttttgtcaacagttatcaggggtcatatcaaatgtagacatacagttagtcccagcccgacatgctcatgaactgtgccaacagatgaatgagaagtaattcatctattgaattactatgaatgaggaagtgaaagagagatggcataaaggcagggaatagactaggaagtacatggcatatgtaaggcgctggctatagagccaagaaactcaactcatttccctggctctcatccttccacatcttattcacatctgtatcaatgaattgcaatgatttttataattgatagtaacatttacctctgagracattaatgcagagttttaaagtattcactaacaaaatagaatgataaaatctagccataaaaaataatttatgttcaacttcattacaacataatgagccaatttgttttgttagattgatttgtca

SEQ ID NO: 274285 - DNA, 556 bp, Homo sapiens
gttattttccaactggcatgaggagaatttcctayggggactatcaaaatgcagtgctgtggatgagctgctccattcaagagggaatggccttttgcagggtctttatggaaagcaaacattttgcagctgacggttttgtgtcaccaggtactttcttttttttattttatttattcatatatttatttatttatttatttgagatggagtctatctcggctcactacaacctctgcctcccagattcaagtgattctcctgcctcagcctcccgagtagccggggctacagtgcgtgccaacacgcccggctaatttttgtatttttagtagagatggggtttcaccatgttgaccaagcttgtcttgaactcctgacctcaggtgatctgcctgcctcagcacccccaagtgctgggattataggcatgagccaccgtgcctagccacctgctgctttcttgaagggaacactcaatatattgtgatagtatttgtgtccttggtccatccctttcttaagaacttaagccattgcatagttgtatttagaa

SEQ ID NO: 274286 - DNA, 451 bp, Homo sapiens
aatgaggataaacaattttcttatgtttaatttcccatatacatttcttcaatattagtcatttttggtggcttttttgggtgacttttgtataccttttatatgttaaatacaatctttgattacatatcttgcaatattttttctattatcattaggcttttttacttacgattctttctgtatattttaaaacrttacttaaaaataatcttaacgaatgtttgggaaagtagagagcacaactctataaccaaattgctctaacacaactattatttgctaggcctgtgggtgaaggcaaacatttttacataattgtaatagctttagaacactttttgatggagaaagtatttaatttttacttgataaaacatatcaaacttctatttctttaaatggtagaaagtgtgaaagttttttttccatattgaggtctgaaaagtat

SEQ ID NO: 274287 - DNA, 451 bp, Homo sapiens
aatgaggataaacaattttcttatgtttaatttcccatatacatttcttcaatattagtcatttttggtggcttttttgggtgacttttgtataccttttatatgttaaatacaatctttgattacatatcttgcaatattttttctattatcattaggcttttttacttacgattctttctgtatattttaaaacgttacttaaaaataatcttaacgaatgtttgggaaagtagagagcacaactctataaccaaattgctctaacacaactattatttgctaggcctgtgggtgaaggcaaacatttttacataattgtaatagctttagaacactttttgatggagaaagtatttaatttttacttgatwaaacatatcaaacttctatttctttaaatggtagaaagtgtgaaagttttttttccatattgaggtctgaaaagtat

SEQ ID NO: 274288 - DNA, 605 bp, Homo sapiens
ggctaaacttccaaatttgcatatactttctggattgctgtgaggtttgatcgacattaagtcttatcaggggtttagtactttttgccaaaagtactagaatgcaaattcattaaagtcgtcatggtatctacatgactacaagcagttctcatgagattgtcgctatttccatattttgtacatcctaagatgctcttttcatgctttaacatgtctaaaatcaggatgcatgtgtgattgatggggttgtgaagtttctgttgccaggtggcagtcatgatgcagacgtcaccatcccagcactgcaaacccagtcgcacgagtaccccttatcacttccattgagttgcctacatacttggtattacaccattgagtttaattgccatttgaatgtaatgattcagtactaaaatgaaaagttatagaaagcctcaaaaacagaacaattggatattgatgaagtacatattcattgttagaagcagaatcacaattctgtgttttcttgcaaagggacaagcaaatgtttyatctgcttagaaagatgcacccaagggaattaaaagtggtgttacattttgttattgagaacattcaaa

SEQ ID NO: 274289 - DNA, 614 bp, Homo sapiens
tattgggattctgactagccataatcaagaaagattctgggagacaaagtagggaagtaggagcagaaacttggagtcagacagcccctgcctgttttgtttctttttttggtgtgattgacaagttatttaccctctgcatttcagtttcctatgccatttgtgaggattgaataacataatatactataatataaggcccctagcacagtgcctggcgcatggtaaatattcaaagaactgttagatgaaaaaaggatttttcccaaacatcaaatcatcaaaaacaaaacaaaacataaaaacctcacttgattagcacagaatcatagaactctatttctggaagggactgttgtacacgatctagtctggtggtttgcaagttttttttaaaagctaggattctttgaccagaatattaagaggaacatgatgcattaaggaaataatggcaggcggggtgtggtggctcacatctgtaaccctagaactttgggaggctaagatgggaggattgcttgaggccaggagttcaagaccagcctggtcaacatagcaygaccccatctttaaaaaataataataatagtaatggcagagctggaggagtg

SEQ ID NO: 274290 - DNA, 532 bp, Homo sapiens
aaataaaaatgctaataacaactttcccaaaggttataattaaggatcaaataatttactaataatgaatcaatctgacacatttatgttgtgacaattagtactatttgtgatagcactgaagactgggagcaagagttaaagtgctaaatgaaagggatgcgaatgcagcctataaatgtacaagcttatttcaggaagtttgacatttatgggaaggaaaaaaatatctatttaagttaagtggggcargttgttggtttgggttccagtagttagaagctactgtgcaaggcaagtatttaaggcaataggaaacatcttcgcaaaaatagccaagaccaagaagtactgcatgccatttacatttgttaatcagcacatatccagagcttaaactgccatacataatacagcatacaaaatagttacaaaacccctacctaaatccactattccaagcttaatcatgctatttaattgccaagcttaatttgaaaataattgttcacagcaattaagtaaatgcccc

SEQ ID NO: 274291 - DNA, 483 bp, Homo sapiens
tattttattttgagtgatgactatattgaccttaatcttgagaaagcaaccaatgcacagggtttcaattaagtcctgtgaaccatgacagtagctttttttacatgccacaagtrtcttttttatatatttgaacagtaactgttagtatgaattgttctcatagtctcgaaatctggatctatattcagtatctgtttttcttcacatattggggaaaattgaattatagtaggtggatgtaaatatctcaataggatgtactgaaaaacacatcttcttaaccaaattccacataaaaatttataaaatatactccaacagaaaacaaatggaaaaataaaatttatttctgtggccttgctttttgctttggtttttaagatttaagcatatttattttaaaagcttgaatagtaaaagtagctgtgaaaagtagaaaatactataaatgcttaaattaatttttcctggccgggcgca

SEQ ID NO: 274292 - DNA, 572 bp, Homo sapiens
atgttccgaattatgtcctgaactagcaactgagataaagaatttaatagccccaaagcaaaatctacactgtaatttaaatataagagatatgcattatttagttcttactatatttccactgaggagaaaatttaaggataattcatatgttctatcatctgsaatcaaatatcaccataatattttaaaattccatttgaaaatacttctcttctaaattagagaaaatctttgtgtttctcatagttcaagataaaacataggattttttaccttattttctctgacaaaattgaaaaaattattatatgtctgtagcaactactttatccaaatttagaaatatattacctttggatcttttgaaggtatattatattcctttcagtttgagtctcaatattattcaatatacaaaatttccaatgcaatcttgaaattataggtcatgcatgatttatgtggctggatatattagcactttgataatccattttccaccagtgcaacataattgctttgtctcaatattctagccatcccagtgtgcaatgcattcggttatattc

SEQ ID NO: 274293 - DNA, 480 bp, Homo sapiens
gccacgtttacaagttcaagctcccaagtatacgactgaccaatttgctggcctgtcttgaaaagcaggcttacaggtgtcttaagcccattttctgtcctaaggtacccctcattatgacggaacaatacaggaggacacacaaagcacacaaattggctacagctcaagattagcctcacaaatccttttttctgattaaaactttacagagtagataaacagtgatttttaccgtttaaccagtttgcacagggagacagacagagaggcagggtgaggaaggcaaggcactcagagaggccagagaaagacccaccaatgacagtggacactgaaatgttcaggcakctacttcttggtagtgaaggtatcttttccagcactcccatcagctctcaagttttctcttttcagggaagaaaaactttctcatgtcccacgatcctgtacatgcctaatcctgtcacccacagccat

SEQ ID NO: 274294 - DNA, 572 bp, Homo sapiens
atgttccgaattatgtcctgaactagcaactgagataaagaatttaatagccccaaagcaaaatctacactgtaatttaaatataagagatatgcattatttagttcttactatatttccactgaggagaaaatttaaggataattcatatgttctatcatctggaatcaaatatcaccataatattttaaaattccatttgaaaatacttctcttctaaattagagaaaatctttgtgtttctcatagttcaagataaaacataggattttttaccttattttctctgacaaaattgaaaaaattattatatgtctgtagcamctactttatccaaatttagaaatatattacctttggatcttttgaaggtatattatattcctttcagtttgagtctcaatattattcaatatacaaaatttccaatgcaatcttgaaattataggtcatgcatgatttatgtggctggatatattagcactttgataatccattttccaccagtgcaacataattgctttgtctcaatattctagccatcccagtgtgcaatgcattcggttatattc

SEQ ID NO: 274295 - DNA, 610 bp, Homo sapiens
gaaaacgctttacagactaaatatattggaagaaaaattggagaaaaatgagcgagtctttagagaaaagaataggggtggagctgcctgtacaactgaaattgcactgaccatgaaaaccattaatagaaaattggacaaggaaaatttaggagatggaagaaacgattatttttaataaatgatttcaaaattgttataccatttaaaaaatgtttgagatactaatttgaaatttctagtccaaagacccgaaagagttaatatatgtagggaagtsactaatgcattttcgggaaggtcctttaaaaaaaattaaaactttaataacacaactgcagttgaaatcacatttacatctgagataaagaaaatagtaatgttatggctgatttgaaataatgcagactaatcgtaaaataatagctataacaataatggaattaaacgagtaattcattttacagattaatctctgtgggttacattagctaaagacaaacatttatttgcaagttttttttctaatatcagtgtaatgaagaactaaattgtacaagactatacaaaaatatttaagacatctttttttgtatatagatcactgtga

SEQ ID NO: 274296 - DNA, 610 bp, Homo sapiens
gaaaacgctttacagactaaatatattggaagaaaaattggagaaaaatgagcgagtctttagagaaaagaataggggtggagctgcctgtacaactgaaattgcactgaccatgaaaaccattaatagaaaattggacaaggaaaatttaggagatggaagaaacgattatttttaataaatgatttcaaaattgttataccatttaaaaaatgtttgagatactaatttgaaatttctagtccaaagacccgaaagagttaatatatgtagggaagtcactaatgcattttcgggaaggtcctttaaaaaaaattaaaactttaataacacaactgcagttgaaatcacatttacatctgagataaagaaaatagtaatgttatggctgatttgaaataatgcagactaatcgtaaaataatagctataacaataatggaattaaaygagtaattcattttacagattaatctctgtgggttacattagctaaagacaaacatttatttgcaagttttttttctaatatcagtgtaatgaagaactaaattgtacaagactatacaaaaatatttaagacatctttttttgtatatagatcactgtga

SEQ ID NO: 274297 - DNA, 476 bp, Homo sapiens
acctgcttaaagaagcagtctgactgccctttggtggagcaggtgtgctgcactgcgggggaatttcactcatccagactgccctgattcctcagagcccgccgggggaaagactaactctgctgatctgtagagaccctggcagtccctcctcccgggggttctgtcccagggaaatcaaacttctgttcctaaactcctggctggagctgcaaaaattcccactgggaggccctgcctgatgaggaagaatgaatckgggtctcacctaagtaagcagcctagccacgatctgtcacagcatcaatctgggtctcagctaaataagcagtctagccatgatctgccacagccgttgtgctgtgctgtggggaattccacacagtccaaaccgtccagtctccccattactgacaggggaaaacagctgatgtgagctgcagtgatggtggtctttcctctccccaggaactcag

SEQ ID NO: 274298 - DNA, 476 bp, Homo sapiens
acctgcttaaagaagcagtctgactgccctttggtggagcaggtgtgctgcactgcgggggaatttcactcatccagactgccctgattcctcagagcccgccgggggaaagactaactctgctgatctgtagagaccctggcagtccctcctcccgggggttctgtcccagggaaatcaaacttctgttcctaaactcctggctggagctgcaaaaattcccactgggaggccctgcctgatgaggaagaatgaatctgggtctcacctaagtaagcagcctagccacgatctgtcacagcatcaatctgggtctcagctaaataagcagtctagccatratctgccacagccgttgtgctgtgctgtggggaattccacacagtccaaaccgtccagtctccccattactgacaggggaaaacagctgatgtgagctgcagtgatggtggtctttcctctccccaggaactcag

SEQ ID NO: 274299 - DNA, 574 bp, Homo sapiens
aatcatgcaagtagctagaagcaatttattatcaaatgagtatgatttcaaatttaactaaaacaatgaggctaattttgccaaataaaactcagttttattacattcaactaaataatgagctgtctgatgtgtaactgaaggatttgcaagcacatgctcaatttatattcagtagcagacgtttyaggattacaaaattagaaaaattttaaaagattactttgattatccctttctcagaagcttaagaccttaaatcctctcactggtcccaactagtaaggtagattaaatctttcttactcacacacagatttataattattagtgttccacacaaagtagccatagtcacttagaatcaggatcaactaacattttagagcaactataatgctcttgattgcctgggactttattttgcaaattcatttaattcatttgacatcaaagagtatacagaacatgatattgatatttgtgtgtgtgtgtcaatgtatgtgcgtgtatgtttgtgcttgtattaccaacaatctaccatgtgcctctctacttctattataactcctaa

SEQ ID NO: 274300 - DNA, 516 bp, Homo sapiens
aatcacctctggaacaatctctaaactagactcttaataatattaacaatttgctgaattttatgaatatgaaatattcataatctgtatccacattaaataacatttatcctttgcatgcctctaacactaagtaattttgaaccaaggaaataatattagccagtgttttttttgtttgtttgtttgtttgtttttgagacagagtctcattctcgttgcccaggctggagtgcaatggcgctatctcagctcactgcaacctctgcttcccrggctaaagcaattctccagcctcagcctcccgagtagctgggattacaggcacccaacaccatgcctggctaatttttgtattttcaatagcgatggggtttcaccatgttggccaggctggtctccaactcctgacctcaggtgatcctcccacttcgacctcccagtgtgctgggattacagactcaattctctgtcttatttagttgctactattgttaatgttcattgttgttcctt

SEQ ID NO: 274301 - DNA, 573 bp, Homo sapiens
agatgcgatgtcagatgcgtgtgcactgtaattaagatctaaccaaaacagaaatattcacaatgtatacaaakaagagacatcgatgtcatagtttgtcacatcaaatcagcactgcaaaaaagaacaaaaacattttttaaaactttttttgcagttttttgtttaggaatacaattcagtgtacttaaatcttgaaaagctagcagagctattatacattataaaatgagtcagattaaaaataatttttaatgtaataatgctaaagccacaatgaatttttttttttttgcttttttagaggcctcagttaagagtgttgttatttcagactccccaaaagggaaaagtgaggtcacagcgcagaaaggattaaaagacaaactgtgcagtggcaaggtggatgtcctgcagctgtggcggtggaactaatcaaacatgtatgtctgattaattttgatgtgttagagggcatttggcctcctgaagagagaagtcatgaatttcataatgaggcccaaaatggaacaaatatagctatagccttgagagtatttgctctgaaaatgc

SEQ ID NO: 274302 - DNA, 573 bp, Homo sapiens
agatgcgatgtcagatgcgtgtgcactgtaattaagatctaaccaaaacagaaatattcacaatgtatacaaagaagagacatcgatgtcatagtttgtcacatcaaatcagcactgcaaaaaagaacaaaaacattttttaaaactttttttgcagttttttgtttaggaatacaattcagtgtacttaaatcttgaaaagctagcagagctattatacattataaaatgagtcagattaaaaataatttttaatgtaataatgctaaagccacaatgaatttttttttttttgcttttttagaggcctcagttaagagtgttgttatttcagactccccaaaagggaaaagtgaggtcacagcgcagaaaggattaaaagacaaactgtgcagtggcaaggtggatgtcctgcagctgtggcggtggaactaatcaaacatgtatgtctgattaattttgatgtgttagagggcatttggcctcctgaagagagaagtcatgaatttcataatgagrcccaaaatggaacaaatatagctatagccttgagagtatttgctctgaaaatgc

SEQ ID NO: 274303 - DNA, 576 bp, Homo sapiens
agaatataaaaggagtctggcagaagtgaaatatttagttttgaacagaaggagagtttttcttaaccgtttacaacttttttcattggaatgtaaacacctacttttatcaggaaccttttagttccatataacagaaatgcaattcagccagttgaatcaygatgtaaatttgttggctcacaaactgaattttagagagcgttttgcatttgggttctgttagatgtcaggtgctataaccccaatgttgaaaatttgtcttctgttttctcttaatctttattgtctatgtgtttcctttgtatctgtggtctctccccacaggaatgagaagacagattttggaagagtcagagaaatccagttcttgtagtatctaactacattaaaaattgttaatttgccacaaagccaaagaattccctaaaaaaccccttgacttacttgggctacatgagtccccatctgactagcatacctgtaacacatgggatggaggaaaatgtggctccttaactgaaaggagaaaggtagacaaatatgtcccattccaattcccatctagctgctatt

SEQ ID NO: 274304 - DNA, 576 bp, Homo sapiens
agaatataaaaggagtctggcagaagtgaaatatttagttttgaacagaaggagagtttttcttaaccgtttacaacttttttcattggaatgtaaacacctacttttatcaggaaccttttagttccatataacagaaatgcaattcagccagttgaatcatgatgtaaatttgttggctcacaaactgaattttagagagcgttttgcatttgggttctgttagatgtcaggtgctataaccccaatgttgaaaatttgtcttctgttttctcttaatctttattgtctatgtgtttcctttgtatctgtggtctctccccacaggaatgagaagacagattttggaagagtcagagaaatccagttcttgtagtatctaactacattaaaaattgttaatttgccacaragccaaagaattccctaaaaaaccccttgacttacttgggctacatgagtccccatctgactagcatacctgtaacacatgggatggaggaaaatgtggctccttaactgaaaggagaaaggtagacaaatatgtcccattccaattcccatctagctgctatt

SEQ ID NO: 274305 - DNA, 576 bp, Homo sapiens
agaatataaaaggagtctggcagaagtgaaatatttagttttgaacagaaggagagtttttcttaaccgtttacaacttttttcattggaatgtaaacacctacttttatcaggaaccttttagttccatataacagaaatgcaattcagccagttgaatcatgatgtaaatttgttggctcacaaactgaattttagagagcgttttgcatttgggttctgttagatgtcaggtgctataaccccaatgttgaaaatttgtcttctgttttctcttaatctttattgtctatgtgtttcctttgtatctgtggtctctccccacaggaatgagaagacagattttggaagagtcagagaaatccagttcttgtagtatctaactacattaaaaattgttaatttgccacaaagccaaagaattccctaaaaaaccccttgacttacttgggctacatgagtccccatctgactagcatacctgtaacacatgggatggaggaaaatgtggctccttaactgaaaggagaaaggtagacaaataygtcccattccaattcccatctagctgctatt

SEQ ID NO: 274306 - DNA, 592 bp, Homo sapiens
tgtcataattatgcatttaaaaaaattaagtggttgagattttacaatctatatttagaattacttcaagcccattttcagataacattatactacttaacaggaagtataactcataataacaaactattcctattttttcctcctgttccttgtattatcagtgatgtcatacattttacttatacataagcatatataaatatatatagttgtaaataattgaatatagcttctactgttattttgaacaattttgttatctattggataaactaagaataagaaaaataaaagtattgttttttacttatttattctctaaygttcttcctgtctttatttagatctgcatttctgacctatataatttttctttgtactgaaaaacaggtttttaactcttcttgcaagacatctgatggcaaaaaattccctcaacttttgtttttctgtgaaaatcttcactactccttcacatttgagggataataaattctaagttggtgtttttatgtttgtttgttttattttttctctcaacccctcaaatattttattctacactcttctttcaggcatgttgtttgag

SEQ ID NO: 274307 - DNA, 574 bp, Homo sapiens
gctacacaaactctactttatttggtattatttatttatgccccaaagttacatacattgttcattttttttcaaatatacaaatattcacagtgattacttcctttccaaaaatgccaatctaaaagacaagaattatttttctttatgtcattaccttagacttttctcatgatttctcttctatttccccaatttccctgcctttcttaccattggcctctccaacttgaatctttactattttgatttttaatttatgttgaccattcttcacaatattcccaatattttgttcatcctcattttcaattacttattgagtctattagatcttcacaatctagaaactgcaggagtatgtctggactgcttgactccctctaaaagcattcatctagtttaagttccagttataccagagcaagttttatggtggagaaacaggaggctcttccataatcttactaggttctcagtytataatatgcaaacagagtcccacaacacctacataaaatgaaacacagtatcttagtgaagccccatacagtttattatgcaatatatatat

SEQ ID NO: 274308 - DNA, 546 bp, Homo sapiens
agacctggcaagtatgtatttccctctttacaaagcagcaacaaggcaaggaaattcttcctattcataatttttattcaattcacagaaagctgaagttgctggggacaattaaccctaagtataagacacgtgactccaaaatgagatgagagaaaacttagcttacttgcagcagatgccatttgagcaatggtgaaaagaagttagctggattttaattgctcaagctacaagctacatgtggagtagcaagaaaatatgaacctctgagggcagaggacacaagggcaatttgcacttattcacagattcttttctattgatgtttctagaactctaaaaaaaagattaggggcatgatgatactggcttaaatgagaggctgcttcaagaaggtcagaaagccaacccaagatcctttccccctcctctcctatgrgacaaaaatctttttttttttttttttttttgagatggagttttgctcctgttgcccaggctggagtgcaatggcgcgatctcagctcactgcaacctccgcct

SEQ ID NO: 274309 - DNA, 540 bp, Homo sapiens
taatgctgcctcattaaattttttattttatgattatccagataccatagtttcagatctctcatatggctattctacccatatagtacaatgagtttaaccctcttccgctaacatactcataaaggcaaagatcagtaaatgttcaaccctgaggtacctgacaggggagggaacatcactgaagctcttttagaatagagaagtttgaatccctcaaatcttaggattcaggtgaaaaatgtcccatgctatcatattccactgttttagcatacggttagcatttcttcaatttttttctaaaattgacacttaaataagaggctccaattttattttgtggcttctgatacctctaaatgtaaacccctatgtcatataaagcccacttttagatgcaaaacctrgaagatatagattattaccttcctacaaataccatgagtaaaaatattaaactccattggaaagcagaaatggaaagaaaatggttctcaaatttctgcccccggaatacacatcatatgtaattcttcc

SEQ ID NO: 274310 - DNA, 556 bp, Homo sapiens
tgctatttaatgtgttcaagtgtattcagacaatgagtgaaagggtcagaaattgwacctagacctgtctgatttaaaaactcatgtttttaggcagtattttatttaatcactaagttagcaaatattagaaaagaagacacagtaataaactctttttttatctcttgaacgtatatttccttttttattagaatatatttggacttatttcaactagataagtagccacaagagaatcacccagataaaagtttgactgcctgattatgcacacatgcaacatgtcgtaactctgagaatttggtcaccatttcaaagatgagatttgacatggcatagtagctgagagaataaaaatccttaacactatggaataaactcccattctctttaggtgcctgggggagatgcatttataattgattgctcaagttccagctgttctctgaactgtcattgaagttatgaattatttgctgaatctaatatgtggataacagttaaatcagcacagtgagtttatttatcttttgcataatcagttttataaaca

SEQ ID NO: 274311 - DNA, 645 bp, Homo sapiens
aaaagtttgactgcctgattatgcacacatgcaacatgtcgtaactctgagaatttggtcaccatttcaaagatgagatttgacatggcatagtagctgagagaataaaaatccttaacactatggaataaactcccattctctttaggtgcctgggggagatgcatttataattgattgctcaagttccagctgttctctgaactgtcattgaagttatgaattatttgctgaatctaatatgtggataacagttaaatcagcacagtgagtttatttatcttttgcataatcagttttataaacatgcttgtccaaacaaaagatacttaattatcaaagaaatcagtctaaattttttgataaaaatagtacaaaataaacacacatgtgtaaacacaaacacatacayacacaaatacactcagaataactcattatggaatagatgtcaaggcagcttcacaaaattttcaaagatttctgttttgaagatccctgtaaacatctttgagactattttcttgaactggcttccttcattaggattcattgtttgaatccatttgcttgaattacaaagtaaggctttgtgtgcccaactgactagcgcagtgtttgccaactttccttgataagaaatcc

SEQ ID NO: 274312 - DNA, 523 bp, Homo sapiens
tgtcaaggcagcttcacaaaattttcaaagatttctgttttgaagatccctgtaaacatctttgagactattttcttgaactggcttccttcattaggattcattgtttgaatccatttgcttgaattacaaagtaaggctttgtgtgcccaactgactagcrcagtgtttgccaactttccttgataagaaatcctgaggcattccttatatgacttcttttagaaaagtacttctcacctttaatgagcatgtgagtcacctgagaatcttttgaatattcagtaggtttgaagtcagagatgagattctgtagccctcagaagctcacagctgatgctaatgctgctggtccaagaactattctctgagtggcatgggtgtggagccacaccatccaataacctagccactagtgacgggcagttacgggacacttgaaatgtgactagtcagaagagagatgtgctgtgagtctaaaagagacagcggattttgaaacttactggacaaataataaaaa

SEQ ID NO: 274313 - DNA, 552 bp, Homo sapiens
agtcggctggcggccggaagcccctagctggcttcaggttgtgggttggtcaccagaaagtccaaggaatgattagagggytggaacattcaaatctcaccccctaacctcagaggaggggagtaggattgaaggctaagctgattgccagttcccaatggtttaattactcatgcctgagtaatgaaacctccataaaacctgaaagaacagggttcagagagcttccagataggcaatcacgtggaggttcctagaaggtgatatacccagagaggtcttagaagctctgtgccccttcttgtatcctttgtaatatcttttatatcttttataataagctagttgatgaggcacggtggctcatgcctgtaatcccagtgctttgagaggctgaggagggagaatcacttctggtcagaaatttgagacaagcctgggcagcatagcaagaccctcaactctaaaaatgtaaaaataaaaataaattagctggacagagcagtgtgtgtctgtagtcccagctagtcgggaagctgaggtgagaggatc

SEQ ID NO: 274314 - DNA, 566 bp, Homo sapiens
ctagttgtctaagatagccaagtacatargcagctcaacatagtaatttttccctgggaattctgtaaattctgggctggagggggcttcaaaactattattaacttagaacttgtttgataaaatgaaaattataatattttacaaaagtatcttatagtatgtattaagcagattcaaaaattatctgggattattattttaatttactcttctgaacatagttagaatctttacagctaagcctgcttcttatgatacttaaatctaatgattatggaactcaatttctcctcttagaaagttctgtaattcctgcttaataaaaatttaagcctagaattttaaatatgttttcgcctcaatccctatatcctaattagcttgatacaactaaaataaaattactcagcctcaatcttaaccataaacagaaacaggaaacaacaaaataaataaaacaattgaaattgtatactagcattatattaaaaggtatttaatcatgtgttcaggaacatgctattattatttttacatgatcaaagacattaaggtatgattgt

SEQ ID NO: 274315 - DNA, 599 bp, Homo sapiens
agaagtagtagtgtgtcatattaagtatcctcaaaataatacgtgcaaaaatacatagggtttactggacagaatacccaaaataacattctgaaatcttattggaatgactgattaacaggttagcctaatggaaatgtgtaaaactgtaagagtacaccaagagttcacctgtgtgtatatgtgtttgtatttttttgtttcaagttataaattaacctaacaacccaaayacattgaaataaagagatgtccataagacaaaatatataagggttaaagaaaccatgcatttaataaatacaagtgatgtttaaaagttgcaagaaaaacctttttaagatattaaaagtcaaaacagcatgacctgactgcctacaaattaaaatttttgaaagttaaagtcaccataaaaaatagatttataacaactagtgagattattctttgccatatatgttcaagtcatatatcttactaataaataaaataatttcataaatcagcaagaaaacaactatccaaagagaaaaatggacaaataccatgaaaaaatcagttcactagttttgaaatggttatatacaaatacaatgaaa

SEQ ID NO: 274316 - DNA, 582 bp, Homo sapiens
gagaaaaaaaagattaacagagggatttagaatacatttaacaatatataatctattattcttaagtctatatcaattggtccatatgttatcaggatccttaaacacagaacagttggaagaaaatgaagaattatgagacctcgagaatgatttaagaaagctggatttgcataagaaacaagggggtttggaaaatatgtagaacttggacaaaatcttttgaaggctatttccaatatcttcctttcgtgagtagagtagaccctaatatagtcctgcaagcaaagaaagaatagtctattaggcgctttagggatactcttcttatcttctttagacagcatccattagtaaatcctaatgtagttgagactgaacctttctcttcgctttttgaaaaattaatggtgaaccttaaacataatacgggcctctaaagaaagagcatacrctattttatgagaagaacacacttaaatttctatatactttttgagatatttatatttctaagaaaactgggaagcaaataaagcattaaattcagtaacatgattgacaccccccttttttttcatg

SEQ ID NO: 274317 - DNA, 403 bp, Homo sapiens
tgaacggttacacaaatataaaactttgcttagtttcatatttgtataaccgttcagtttttacaaagtgtgcataaaactgaccacctaggccagaacactctcaaaagtaagggtgccactatttttatagtcctaagatccatgtcataaaggagaactatcccagtcaaagtcctataaatcattgctcaattattcctgtaagttcaagttacttcttttattcaggcaattctcttyaccgccacagctactaccagcaccaactgcaaaaaaactcttctatctttgggaagatcctcagggaaaccatatctgacttaagtttagggccacaaaattaattcaaataaagcactatgaagacaaaaatatgattttggtaatttctgcctcctga

SEQ ID NO: 274318 - DNA, 482 bp, Homo sapiens
  misc_feature (1)...(482): n = A,T,C or G
nnnnnnnngccctatttgatcttgccaatttgagatttgagtaaagccagtgaagtatcacagtctttctgctaacccaatgtcctgcttaaactttttttttttcctaaatagtgatcagactctaggtgacaggaagaatctgtcctttcctaaagcctcagataagagtggatatgtttaatactctgtttgctctagtaaaagcagtcaaataatatccctgacaactaaagtctcttcacaaaaggagcatattttaaggcaggcacattttcaatctgcgtaagaattttcagaatatcattacaataatttaataggtgaattacattgatatagttaaatatattttaaatgttaatattatattttagcattctcatgcatacacttcacatgaatatatatatgatcaataaakacaaatacattttgaaagtgatcatttatgtaatgatagtaatagcattaactgtatg

SEQ ID NO: 274319 - DNA, 589 bp, Homo sapiens
tgatctcatatgcagctaatagctagatctatgagagagagaaaggtggagatacagacagatagatattgatgatatagatatctacctctggctcttggcctatgatcagatgccctgtttctcctatttttttctccttcctttaaagaagtactaccttgagacttcagctgtcacctccatattaatatttaaaaggactaaacctagattccacttccaatgcccgtgtctgagtttaatacctatttaaacttattttctattgaaggtttctattttaatcatccttctttttctcaaactgaaaatgctargacatttatctctcaagacctcttctatattttctgcctctttcatttttctgccaattacttcagttaaaaacctctcagttacttctaattcaacttttctttcatctctgtcttaattttctgttggtggtttaataaatcacctctaacatagtggcttaacacagcacaaattgattgtcttatcgtatggaggtcagaagtccaaagtggatctcactgggctaaaatcaggatgtcagcagggcttttctccttccagagga

SEQ ID NO: 274320 - DNA, 589 bp, Homo sapiens
tgatctcatatgcagctaatagctagatctatgagagagagaaaggtggagatacagacagatagatattgatgatatagatatctacctctggctcttggcctatgatcagatgccctgtttctcctatttttttctccttcctttaaagaagtactaccttgagacttcagctgtcacctccatattaatatttaaaaggactaaacctagattccacttccaatgcccgtgtctgagtttaatacctatttaaacttattttctattgaaggtttctattttaatcatccttctttttctcaaactgaaaatgctaagacatttatctctcaagacctcttctatattttctgcctctttcatttttctgccaattacttcagtwaaaaacctctcagttacttctaattcaacttttctttcatctctgtcttaattttctgttggtggtttaataaatcacctctaacatagtggcttaacacagcacaaattgattgtcttatcgtatggaggtcagaagtccaaagtggatctcactgggctaaaatcaggatgtcagcagggcttttctccttccagagga

SEQ ID NO: 274321 - DNA, 555 bp, Homo sapiens
acttatcactcattataacttaaatgcctaataattgtcctaacattgctaagaaaccaaccagtcaagtgatacacaaaacttctaaaagtatgacaaatatagctctcatcttatatatgaggaaattgagactcaatataattaaactattagtccagggaacacccatcctgataagataatgcaagtttcaaaaatctgtgcagtttttaaaaattgttttatgctgccagatgatcttggttttataacttatatatgtttataaaatgattacaaccacttcacaaatcatctttcctgcaaagcacgttatcataaaataggaaataaatagagagagaaagcaaggaataaaggaaagaaaagaaaacccatgtgtcttgtattcagaatgatacktcctggtgagcacacacactaagcaagataataaagcaaaaaccaggaccttggtgccaggactcatagtaataattagaaattgagcattcaggaaacacataatttaaactgcatattttatttttcagtagtcatttactttttatt

SEQ ID NO: 274322 - DNA, 576 bp, Homo sapiens
actctaaccttcagcagatggcatggaatacagccaaatttgaataggattcagagtagaaaagtaccttgcagcagattcaggctgctatgagaacaactgtaccatctagaccacagtgttgtgaaacaactaatatttttcatttctgcatgatccaggatttctgagtaaaggatgattgaatagcaacctgaaagataaatcctccctggagccatttgcttatatttcaaaatggtaaagaaaagctagagatttyctcttcctctccctggagaagatttgtttacattgcaaaggaaaaatccttctctagggaggaggaggaatagatgcaccagatgccctacttaagctctgattctcataatttttggattcctcttctgtagcaaaacctctatatgcgcaggtgatatctggccctcattgtgttgcccaaaggagaactggggcactgctgagatgatctgcaaataaatgatgtgttctttcatccagaagtaatgtctcagatccttcacagtttcaaacttaaaattgttatacataatttgtggtggaaaaacacat

SEQ ID NO: 274323 - DNA, 576 bp, Homo sapiens
actctaaccttcagcagatggcatggaatacagccaaatttgaataggattcagagtagaaaagtaccttgcagcagattcaggctgctatgagaacaactgtaccatctagaccacagtgttgtgaaacaactaatatttttcatttctgcatgatccaggatttctgagtaaaggatgattgaatagcaacctgaaagataaatcctccctggagccatttgcttatatttcaaaatggtaaagaaaagctagagattttctcttcctctccctggagaagatttgtytacattgcaaaggaaaaatccttctctagggaggaggaggaatagatgcaccagatgccctacttaagctctgattctcataatttttggattcctcttctgtagcaaaacctctatatgcgcaggtgatatctggccctcattgtgttgcccaaaggagaactggggcactgctgagatgatctgcaaataaatgatgtgttctttcatccagaagtaatgtctcagatccttcacagtttcaaacttaaaattgttatacataatttgtggtggaaaaacacat

SEQ ID NO: 274324 - DNA, 576 bp, Homo sapiens
actctaaccttcagcagatggcatggaatacagccaaatttgaataggattcagagtagaaaagtaccttgcagcagattcaggctgctatgagaacaactgtaccatctagaccacagtgttgtgaaacaactaatatttttcatttctgcatgatccaggatttctgagtaaaggatgattgaatagcaacctgaaagataaatcctccctggagccatttgcttatatttcaaaatggtaaagaaaagctagagattttctcttcctctccctggagaagatttgtttacattgcaaagsaaaaatccttctctagggaggaggaggaatagatgcaccagatgccctacttaagctctgattctcataatttttggattcctcttctgtagcaaaacctctatatgcgcaggtgatatctggccctcattgtgttgcccaaaggagaactggggcactgctgagatgatctgcaaataaatgatgtgttctttcatccagaagtaatgtctcagatccttcacagtttcaaacttaaaattgttatacataatttgtggtggaaaaacacat

SEQ ID NO: 274325 - DNA, 571 bp, Homo sapiens
taatttttatgtgcctcaagttctcatgtgagatgagaataaaaattacccctatttcataagatttgataaagtgtttagcataatacctcataacaattgcaattcagtggtggttattattataaagaaaagatgattaactttatcttaatgtttaacttgttctgatagttattgatctatagctttgatatggaggtttgagaatgacctggaaaraattggccacaatgattgaagatagtgatacaagaataaaagatgactgcaaaatgtaaacctgcaataacagaaagaatgaagtcactggtctcatgggaactgatatgggagaaaaaaacagatcaaaaggctattcatgttttgggcctctttgtcaaaatggaaatgagaaattggggaataaaaattaaagcaattctagcatctggttttaacataattcttatccctaaaaagaatctataagaaactcccaaaatgacaggcagccgtgggtagcattgcatttcaagtaatcttttaattgttaaaatttaagtttccaacatgaacataaaattttcaa

SEQ ID NO: 274326 - DNA, 588 bp, Homo sapiens
gccaacgtggtgaaccctgtctctactaaaaatacaaaaattagtcgggctaaggtggtgtgttcctgtaatcccacctactcgagaggctgaggcaggagaatcgcttgaacctgggaggcggaggttgcagtgaactgagattgtgccattgcactccagcctaggtggcaagagcaagactccatctcaaaaaaaaaaaaaaagaaatctctctatatgtatctatagatrtagatatgtttatagatatatagatatacagagacatatatatagagatgagagatatgtgtacacatatatatagatacacattttgtgtgtgtttgtgtgtgtgtgtgtgtgtgtatgtttgtcttcaggcacctgaagaaaaacagatgtactagcaaaacttactaaaggctcaaactctagtaaattttctttaggtacctgaagaaaaacaaatatctaattattatacctagaaaagtgggggtatcaccccatttcctagacttctggaagttttcttaaatagctgtgtgtcctcactctgacactatgtggccaaggggctgagagcacagactgtggtgctgt

SEQ ID NO: 274327 - DNA, 588 bp, Homo sapiens
gccaacgtggtgaaccctgtctctactaaaaatacaaaaattagtcgggctaaggtggtgtgttcctgtaatcccacctactcgagaggctgaggcaggagaatcgcttgaacctgggaggcggaggttgcagtgaactgagattgtgccattgcactccagcctaggtggcaagagcaagactccatctcaaaaaaaaaaaaaaagaaatctctctatatgtatctatagatgtagatatgtttatagatatatagatatacagagacatatatatagagatgagagatatgtgtacacatatatatagatacacattttgtgtgtgtttgtgtgtgtgtgtgtgtgtrtatgtttgtcttcaggcacctgaagaaaaacagatgtactagcaaaacttactaaaggctcaaactctagtaaattttctttaggtacctgaagaaaaacaaatatctaattattatacctagaaaagtgggggtatcaccccatttcctagacttctggaagttttcttaaatagctgtgtgtcctcactctgacactatgtggccaaggggctgagagcacagactgtggtgctgt

SEQ ID NO: 274328 - DNA, 588 bp, Homo sapiens
gccaacgtggtgaaccctgtctctactaaaaatacaaaaattagtcgggctaaggtggtgtgttcctgtaatcccacctactcgagaggctgaggcaggagaatcgcttgaacctgggaggcggaggttgcagtgaactgagattgtgccattgcactccagcctaggtggcaagagcaagactccatctcaaaaaaaaaaaaaaagaaatctctctatatgtatctatagatgtagatatgtttatagatatatagatatacagagacatatatatagagatgagagatatgtgtacacatatatatagatacacattttgtgtgtgtttgtgtgtgtgtgtgtgtgtgtatgtttgtcttcaggcacctgaagaaaaacagatgtactagcaaaacttactaaaggctcaaactctagtaaattttctttaggtacctgaagaaaaacaaatatctaattattatacctagaaaagtggggstatcaccccatttcctagacttctggaagttttcttaaatagctgtgtgtcctcactctgacactatgtggccaaggggctgagagcacagactgtggtgctgt

SEQ ID NO: 274329 - DNA, 510 bp, Homo sapiens
catttaattttcctggccaatgagaagtgtggctaggaaaactgaaaagggtatcaaatatggccattacaaatatggccacaatcatcactcctttccttatccatgccattttccattgattttcaacttctcccatcaagagatggagtctgtttcttcacatctttatctgggctggcctggtaaatasaatgtggtagaagtgacaggatgctattttcaagccacgaactcaacgcccttctgtgtgactctttcagaactctgccaccatcatgcctctcttcttcatgtggtttctcatccaccatcagtctaaaccagccagcagcagaccctacatacatgatcagctcagaaaaaacatccagctgagctcagtccagactgccagtttgcagatatgtaggctaaaagaggagctgctttaagccactatgtttgcgattgattgttacgtggtaattataaggtagcatcttgctttgctgaaaagtagagaaaaaa

SEQ ID NO: 274330 - DNA, 572 bp, Homo sapiens
taccagctcctctttgtacctctggtagaattcgtgttgggattcactcaggatggtggcagaaatattaaagggaaatattagggaaagttatagggaatagtcacaaatcttttggaaggccgaaaggttacatagcttgtaataactgaacagggcaaaggcagcckgttcttaccttagagcattaggtcatagcgtaaatattagggacaatagaggcttctccagttaagtgtgtttaccctacctccattaactaacctttgagccagatggctctctcggtgggggagaggtctaagaggcaaattgccccctcatggtagttactttagaccccggtacctgagctttaatcattcctagaactactctcttaaccatgttagttatccgcaagtgtgtttactcaaagcttctgttgttaattgtataccaaataaatgcctggaatgcgaactgctcagggccggccacagtgacaaacctctcttgatgtgcaggcagttggacactcagctgaactggcaaaacaaaatatctgtgtgtcagggtacattttattcatc

SEQ ID NO: 274331 - DNA, 572 bp, Homo sapiens
taccagctcctctttgtacctctggtagaattcgtgttgggattcactcaggatggtggcagaaatattaaagggaaatattagggaaagttatagggaatagtcacaaatcttttggaaggccgaaaggttacatagcttgtaataactgaacagggcaaaggcagcctgttcttaccttagagcattaggtcatagcgtaaatattagggacaatagaggcttctccagttaagtgtgtttaccctacctccattaactaacctttgagccagatggctctctcggtgggggagaggtctaagaggcaaattgccccctcatggtagttactttagaccccggtacctgagctttaatcattcctagaactactctcttaaccatgttagttatccgcaagtgtgtttactcaaagcttctgttgttaattgtataccaaataaatgcctggaatgcgaactgctcagggccggccacagtgacaaacctctcttgatgtgcaggcrgttggacactcagctgaactggcaaaacaaaatatctgtgtgtcagggtacattttattcatc

SEQ ID NO: 274332 - DNA, 566 bp, Homo sapiens
aatatatgttaataaaaggctcaattaaaaatgtataacaattataaacacatacacatcaaacaacagttccccaaaatacrtaaagcaaacattgacaggattgaagggagaaatagaccactctacaatagtagttggggtcttcaacaccccactttcaataattaatcacagccacttaaggaaccagtgcataccaaaacacacttctggcagtgttgcttcagggaattccgagtgtagggttaatgttccattttctctacctcttctaaaattcctccttcttcaaatggctattaataactttatatttttgtcctttgtgtcagttcttaattcatgttgcttataagcatgatttttattattaaagtgagatgggataaaaatatttttgcaatgagataacgttttattttaattctcaccatttatatacaaacacaagtgaataaaacacatcgcaaaatggtaaaatttcatatttagtatttataggtgcatagtttcatgctcacatatttttaagtattatatatattaacaaatttcacaatacg

SEQ ID NO: 274333 - DNA, 545 bp, Homo sapiens
ctctggtttctcagttcaactttctaaattcctaggatcttctgattgccacagcttaaataaggcatccatatcaacccaatcaactgcagcaggtgaagcaggtcatatagcagtgccatggctggtagagacccacctcactgtaacagggacagtttccagaaaagtagaactcttgacaactagacactaatccaagagttattctacaactcaaatgagtatgatcatttatcaaattaaatttcaatgactatcaaagttgatgactgcatctttcagatttcatttcattggtatccattatgagtcatactcaattcaattttattagaaaatatatgcatgtgcatgtatgtaaacatgataactttgccatgtaattaatatkgttgatgctagtaatgtttacacagttgatttaaaattaacctagcgctcttaatggagattattttataatatgtggagaggcttctgccaagaatgttagtgtctacttccaacaagcttgaacagaagaggtgcagcctggagccatc

SEQ ID NO: 274334 - DNA, 651 bp, Homo sapiens
ctctgtgttctttttaaccttggctgccagaaagttggagccaaattcaacgctcagccgcaataaccatcttatctcaggttcctggaggattatctcaccttctgatcattcgtctttatttttaactgtcctgttgtatttaggcttttaatgtgtgctgtcttgagccctctgggagaggaggcaaggtgtaaattctagattaagttattaaaacaagaacktcaggcgagatttaattggaatgatatgccagagagacattttaagggtgtccacagccacgtgccttctggcatggatcctggcccagcctcggctcggctctgcagtcagcattgtgggcacagatgtgtctgggcccagtgtatggacagaatagctctgccagccaccgccgcgattctggaacatcttgtgtggaaaggtgtgttggattcacgagagatatgcagttgatttcatcttccttgttggcttcccttatgtctgtgggcagcacatggggccagccagaggcccattaggacacaaatcacaaaagacagagccacagcaccagggccagccctgaagctggaacttctccatctctacctgtccaggaactcttcagggcatgagctgtttgctagaaattctcaagtg

SEQ ID NO: 274335 - DNA, 651 bp, Homo sapiens
ctctgtgttctttttaaccttggctgccagaaagttggagccaaattcaacgctcagccgcaataaccatcttatctcaggttcctggaggattatctcaccttctgatcattcgtctttatttttaactgtcctgttgtatttaggcttttaatgtgtgctgtcttgagccctctgggagaggaggcaaggtgtaaattctagattaagttattaaaacaagaacttcaggcgagatttaattggaatgatatgccagagagacattttaagggtgtccacagccacgtgccttctggyatggatcctggcccagcctcggctcggctctgcagtcagcattgtgggcacagatgtgtctgggcccagtgtatggacagaatagctctgccagccaccgccgcgattctggaacatcttgtgtggaaaggtgtgttggattcacgagagatatgcagttgatttcatcttccttgttggcttcccttatgtctgtgggcagcacatggggccagccagaggcccattaggacacaaatcacaaaagacagagccacagcaccagggccagccctgaagctggaacttctccatctctacctgtccaggaactcttcagggcatgagctgtttgctagaaattctcaagtg

SEQ ID NO: 274336 - DNA, 518 bp, Homo sapiens
gttagctttgttcccacaggcaattttaggccttcccatcttatagcacattggaagcagaagctggaaatacaaactttgaaacttggcctctggaagtgacaagcaatgaggaaccagcaaaagcagccaaatcaccaattgcagcatcatttggggctctttagtattagagctaagggcctgtcaacccaactagctccaaggcctggccagcttacagtccaggacagtgagtgagagttacatggaatttgtcagcagtttgcctagcagttgcctccagtagagtgtaagcaccttgagagtaagttatgagtcyttcatgtgtcccctgcaccgaacacaggttctgccagtgaataggttcttgacaagcatttgttgaatgaatgaaaggtgaacaggatcctaacagacagaagaatgctctgacaaccacaggacccaccttgcctaggcagatagccctgccctgggtgcttggacaggacacccttttcccaggtcacagttta

SEQ ID NO: 274337 - DNA, 602 bp, Homo sapiens
tatctggtttgcagcaaagccctgatagaaaggcaaagctttgtccttagtaatacagacagtccccaacttaccatttttcaamtttacaatggtgtgaaagtgatacacattcagtacagtattcagtaaattgcatgagatatttaacacttttttataaaataggccttgtgttagatgatatggcccaactgtaagtgttctgagcacatttaaggtaggcgaggctcagctaggatatttggtaggttaggtggattaaatgcatttttcaacttacgatattttcaacttacaatgggtttatgggaatgtaaccccatcgtaagtcaaggagcatcttttctgctagggtatttataataaccaccaaatcctggcccaaagctcgagaaaattcatctcccttgtttattcaagtctccctggtcattcccagggcagtagctggtacatatgggccctcattaaatacctgctggattgctgaatggttagatgattggatggacagatcttggattcagagaaaaatatgctcctgtcatcagcttttttagccaaagcaagtccaaggaactttctggtaagcgcccagc

SEQ ID NO: 274338 - DNA, 521 bp, Homo sapiens
ggaggctcccaaggagcaggctstctgaatcctggcccaggagacccctgctctgtgcctgctgctccacaccactgctcatacagccatcctacgggatgtgggttgttcaaggatgggaaacaggcccaacatgaagaatacgtacccaaggccacctaataaggctgtggcaaaggcaggaacaaccagaatcttagctggtcttccttctctacctgaccctgactcacagaaattagagcagagaaaggtggcagcggtcatctcacccagcccctcctagtacagttggggaaacggaggcccagcaactggagccaaggtcaaccagaaggtcacgagagggccagcatggaacccagatgtcctggttttgagacttggctcttctcagtccacttcccacacctgttctgccataggtagtacgaccacagcggtgagacgctgccccatagagcaatttctcagctaccacagactgagaaatctttacatagcctcactaaatatggagt

SEQ ID NO: 274339 - DNA, 521 bp, Homo sapiens
ggaggctcccaaggagcaggctctctgaatcctggcccaggagacccctgctctgtgcctgctgctccacaccactgctcatacagccatcctacgggatgtgggttgttcaaggatgggaaacaggcccaacatgaagaatacrtacccaaggccacctaataaggctgtggcaaaggcaggaacaaccagaatcttagctggtcttccttctctacctgaccctgactcacagaaattagagcagagaaaggtggcagcggtcatctcacccagcccctcctagtacagttggggaaacggaggcccagcaactggagccaaggtcaaccagaaggtcacgagagggccagcatggaacccagatgtcctggttttgagacttggctcttctcagtccacttcccacacctgttctgccataggtagtacgaccacagcggtgagacgctgccccatagagcaatttctcagctaccacagactgagaaatctttacatagcctcactaaatatggagt

SEQ ID NO: 274340 - DNA, 552 bp, Homo sapiens
cagcccctcctagtacagttggggaaacggaggcccagcaactggagccaaggtcaaccagaaggtcacgagagggccagcatggaacccagatgtcctggttttgagacttggctcttctcagtccacttcccacacctgttctgccataggtagtacgaccacagcggtgagacgctgccccatagagcaatttctcagctaccacagactgagaaatctttacatagcctcactaaatatggagtcagccaagacaacatttggtctttcctcttagcacgtctgaragagagaaatgacccaagtgttgaagatgctccttgtcacatcactgaagtgatgccttgcttggccataagcaggaaaagcccagacagcaatggtgcacttcattcctcttcattcttcttcaaaagcattctgtcttccttttgttatgactgggtcatttctgagttaaaaataaaagagtgtttcccaacctcaaagacaggctttctggagttgaagccctcttagaaagctctgcctgggggtctcctcaccctg

SEQ ID NO: 274341 - DNA, 556 bp, Homo sapiens
gctggcattacaggcacgaaccactgtacscggcccagggcttagcactttaatttcatactggagcccacaaattatgtagccagtcctatacctagacctgaaaatgagtaaaagctagccagcaaaagagagaaagaagaggaggggagagggagagaactagcagcccaattctgtagaatgcatgcacctgcaggggctgctgtggctgcaccaaggacaactaagttgttgtgtgttaatcacctgtcatggaatccatgtgacttcagactgctgcgtgatcagacagcacgcatcctgtctatgtgtgatgatgtgagttacatctgaaaaatcatcaggcctgggtgcacatttgtacaccttcacttacctggctgcatggctttgaatgattccacctctctgagcttctgatccctcatctgtaaaatggacatgatacctcgctcagagcttctctgacagtcaaagaggctcatgtaggggaaagtgccttgtgaacactaagcttatatttgtgctactcccagacaggaggaatgtaaaa

SEQ ID NO: 274342 - DNA, 556 bp, Homo sapiens
gctggcattacaggcacgaaccactgtacgcggcccagggcttagcactttaatttcatactggagcccacaarttatgtagccagtcctatacctagacctgaaaatgagtaaaagctagccagcaaaagagagaaagaagaggaggggagagggagagaactagcagcccaattctgtagaatgcatgcacctgcaggggctgctgtggctgcaccaaggacaactaagttgttgtgtgttaatcacctgtcatggaatccatgtgacttcagactgctgcgtgatcagacagcacgcatcctgtctatgtgtgatgatgtgagttacatctgaaaaatcatcaggcctgggtgcacatttgtacaccttcacttacctggctgcatggctttgaatgattccacctctctgagcttctgatccctcatctgtaaaatggacatgatacctcgctcagagcttctctgacagtcaaagaggctcatgtaggggaaagtgccttgtgaacactaagcttatatttgtgctactcccagacaggaggaatgtaaaa

SEQ ID NO: 274343 - DNA, 556 bp, Homo sapiens
gctggcattacaggcacgaaccactgtacgcggcccagggcttagcactttaatttcatactggagcccacaaattatgtagccagtcctatacctagacctgaaaatgagtaaaagctagccagcaaaagagagaaagaagaggaggggagagggagagaactagcagcccaattctgtagaatgcatgcacctgcaggggctgctgtggctgcaccaaggacaactaagttgttgtgtgttaatcacctrtcatggaatccatgtgacttcagactgctgcgtgatcagacagcacgcatcctgtctatgtgtgatgatgtgagttacatctgaaaaatcatcaggcctgggtgcacatttgtacaccttcacttacctggctgcatggctttgaatgattccacctctctgagcttctgatccctcatctgtaaaatggacatgatacctcgctcagagcttctctgacagtcaaagaggctcatgtaggggaaagtgccttgtgaacactaagcttatatttgtgctactcccagacaggaggaatgtaaaa

SEQ ID NO: 274344 - DNA, 556 bp, Homo sapiens
gctggcattacaggcacgaaccactgtacgcggcccagggcttagcactttaatttcatactggagcccacaaattatgtagccagtcctatacctagacctgaaaatgagtaaaagctagccagcaaaagagagaaagaagaggaggggagagggagagaactagcagcccaattctgtagaatgcatgcacctgcaggggctgctgtggctgcaccaaggacaactaagttgttgtgtgttaatcacctgtcatggaatccatgtgacttcagactgctgcgtgatcagacagcacgcatcctgtctrtgtgtgatgatgtgagttacatctgaaaaatcatcaggcctgggtgcacatttgtacaccttcacttacctggctgcatggctttgaatgattccacctctctgagcttctgatccctcatctgtaaaatggacatgatacctcgctcagagcttctctgacagtcaaagaggctcatgtaggggaaagtgccttgtgaacactaagcttatatttgtgctactcccagacaggaggaatgtaaaa

SEQ ID NO: 274345 - DNA, 532 bp, Homo sapiens
gcaagttgagcctgagcaagcaaattaaaggaagaccacagagagaactggagcatttgatagcaaaagaggctgagttcatggcctcagctgccccttccacatgctgtctgacaggtagtgagctccccatcactccacatattcaagcaaagcttggaagactcccccccttctccccctccatcagaatgctccaggggcatttcctgcactgagggaggtttcatttaatgacatcccaggtgcctcccttctatgtggctctatgatgccaagtaaacgagaaggtttcatctgaagggttctaatgattctgktttccaatatgttaccaccaatacaagtctctactggttcgtcaacaccaaatagctacttcactttttctcctaaagtcttacgtgtgtttatttttctgatttaacatctttctttttctccccttagccatcaggtactcagccccctctgcgaactgccttgaacataatccatccatgggggaagacaaactttaggcaggtagtgc

SEQ ID NO: 274346 - DNA, 586 bp, Homo sapiens
ccagtcttttttctattaaactaagcagatcccttgtgtctgagacttctattgtccccaagcacacacagacacccagaatagcgactacatttttcagctgccctagaggctaggcgtggcatattgctagcttctggacaatgcctgtaaatagaagtggtgtgcacatgttctgggaagtgtctttaaagggaagaggtgttgcttttcctccttcctaacagctggagtggaatgtgatgggtggagcttcagcatccrtcttagatcacaaggctatgacgtggaacctgtgtaatgatgatgtgggggctgcaagatgcaaggaactgagattctgggagccttaccccagccctagactgcttacctctggactaggtttacctgagaggaacatttcctgtctcttcaaccattattattttgggtttttctgtgacttgcagctctactcctaaccaatagatgtcttgacagaaatggacagggtagaggccaactatgatctgaagcagggtgtcgagggtttaacccttatgggtggtctaaggggagggcgggctgcagggacagctcaggt

SEQ ID NO: 274347 - DNA, 572 bp, Homo sapiens
aattcaaccctgcactccagttctctgcataattcatgcctctccaatttgagtcagagctcctgagggtaggaactgggtcacttctttgcccctaggatctaacacaaaacctggcccaatgcaggtaccgctaatatttgttgtgagaatgaggtataaagttaggtcaggaggtcttcaggtatytctggggttacctctgtgcaactggagatataggatatactggcctgcccaagcctggggcctgccaaacccttctgaggagaccctcttgcccacagccccactgctggagcagtgatggcagccaggttgtgtaccacatgactcatccttggccagagctgactggacaaagaatgggcacctgaccccaggcagccaatccagaggcttgtcagatacctatgaggtttcctcctacaaagtgctctgcctaatgagggttgatggagaggatccctcctgagcacattctctctggcaggaacttgaattgggaaactctgggagataattggccagatggtggcaacaagacaaaaagacacccagggaatgaaaca

SEQ ID NO: 274348 - DNA, 615 bp, Homo sapiens
gtgcccagggcctgaggtatcctaaagtctccttcaaggggctgttttgtccaggatctccaaacagaaagcctaggcttgggggagagatgatgaaagacctttgtggcccatccctccctcccacttacctacttcagacaccctgtgtgctccggactctgagcacctgaggattccaggtatgggccttgtaatatggtacrcgtcctagcctttgctcatgctggtgtccccttccagaatcttctctgtcaagtatatgacttcagtttcagcaccagtgttacctcctatggagaggtgtccctgtgttcactggctccgctggagtcgagaacctgctctgcctcacttcctcccccagcatcccaaacattccccagtcaggactcccagcaagcaacttctccaggacagggccatgtctcagccagcctccacacagcccacccagcaagcacgccacggccggcatcttccatgggaagacacaggtagccatggcagccacagcctcatggcagcctgcaggcaaatcagggagcagactaaacctgcagacgaataaccgtatcacttcagatcactgtcgactctgaaagcagtgagagg

SEQ ID NO: 274349 - DNA, 615 bp, Homo sapiens
gtgcccagggcctgaggtatcctaaagtctccttcaaggggctgttttgtccaggatctccaaacagaaagcctaggcttgggggagagatgatgaaagacctttgtggcccatccctccctcccacttacctacttcagacaccctgtgtgctccggactctgagcacctgaggattccaggtatgggccttgtaatatggtacgcgtcctagcctttgctcatgctggtgtccccttccagaatcttctctgtcaagtatatgacttcagtttcagcaccagtgttacctcctatggagaggtgtccctgtgttcactggctccgctggagtcgagaacctgctctgcctcacttcctcccccagcatcccaaacattccccagtcaggactcccagcaagcaacttctccaggacagggccatgtctcagccagcctccacacagcccacccagcaagcacgccacggccggcatcttccatgggaagacacaggtagccatggcagccacagcctcatggcagcctgcaggcaaatcagggagcagactaaacctgcagacgaataaccstatcacttcagatcactgtcgactctgaaagcagtgagagg

SEQ ID NO: 274350 - DNA, 633 bp, Homo sapiens
gggtctaagtttattcatctgaaaattgaataatgtgaattacatgagaataatatattcacttaagccatgtataacagaaagcttaagtaagtaatcaaggcttaaataagatgagtatttttcccttcaagtaatgagaattctatggttagcaatttaaggcaggcctaacagttccatgayaccatcaggggcccaggttcttcctgtttctctgctcaactatccttagcatgttcttcttactgtatggttgcaggtaacagttggagctccagtatccaaaccatactccaggaagaaagatgggaagaagaaaatgtaaaaggattattctggttgagttggcttccttgtaacgagttaggcacattgtatactttctcttagatctcaatgggtagaactatatcacatgtttacaagggacgctgggaaatgtatttttttcaaggtggtcacttttatatattcaacaaaatcagagctctgtttgtaaagagatatggagaaataaacattgagtaagaaactagatgttttagtcacaagtgcaatccacttatataattaaaaatttgttgcatgggcatttaacattaagtattttacagtggttgagatggacag

SEQ ID NO: 274351 - DNA, 570 bp, Homo sapiens
atatgtatacatatatgcatgtatatgtatatgtacatggaagggaatggttaacacactatagtccaaattatgattatataaaaagagaggaagtaggaaaagggtataggagaggaggacattcacaaatgtaagttacaggcagtgttgcatctttgttatatctattaggtcatgggtttaccctgcattgtacataataaaaaagcaaaagcaagcaaacatgaaccaagatgaaagtgcatcatgagcccaggacaggttggaataaaatgccaaacaagaaataatctccacccattaaataattaaataaaagaaatagcatgagacaaaaattgtcacttggacttatcatttaactgctaatcatagtctttgaaaastaacaaaagaaaaatagctattgaatttatggaggtgccatgtgaatagttcttcttatcaacatcaattgctttttttccctcagtattgaaatgaaaaaaagcagccacggaataattttctagggcctgagactctgaatctcttttctattacacatggcaaaacacttatcatcag

SEQ ID NO: 274352 - DNA, 570 bp, Homo sapiens
atatgtatacatatatgcatgtatatgtatatgtacatggaagggaatggttaacacactatagtccaaattatgattatataaaaagagaggaagtaggaaaagggtataggagaggaggacattcacaaatgtaagttacaggcagtgttgcatctttgttatatctattaggtcatgggtttaccctgcattgtacataataaaaaagcaaaagcaagcaaacatgaaccaagatgaaagtgcatcatgagcccaggacaggttggaataaaatgccaaacaagaaataatctccacccattaaataattaaataaaagaaatagcatgagacaaaaattgtcacttggacttatcatttaactgctaatcatagtctttgaaaactwacaaaagaaaaatagctattgaatttatggaggtgccatgtgaatagttcttcttatcaacatcaattgctttttttccctcagtattgaaatgaaaaaaagcagccacggaataattttctagggcctgagactctgaatctcttttctattacacatggcaaaacacttatcatcag

SEQ ID NO: 274353 - DNA, 543 bp, Homo sapiens
aaagacatgaaggaaacttaaatgcacamttttaagtgaaaaaagccaatctgaaaagtctgtatactctatgattccaattgcacgccattttggaaaaggtaaaaatatggaaacagtaaaaagtcagtggttgctaaggtttgaggagagagggatgaatagttggaggatataggattttaaaggcaatgaaactactctgtaagccactacatggtagataaatgtaattatacattatcaaacttatagaaagtacagcaccaagagttaatcctaatgtaagctatggactttgagggataatgaagtgtcaatgtgggttcaccaattgtgaaaaatgtaccactgtggtgggggtagagaatgttgataatggggaaggctatgcatatgtggttgcagagtatatatggaaactctgtactttcacttaattttgctatgaacctaaaactgttctaaaaaaaaaaaaaaaacccaaagtctattaaaaataaaacaaaacaaaaagaagtagggtggtcgaaatgctgcaat

SEQ ID NO: 274354 - DNA, 600 bp, Homo sapiens
ctgcaatatctgtaatgacagtggcgtctatcttgggctacagatggtggggccataraaaccatgatgcgttcagtcttgtgtccagctgaaaaacacaaagcttttgaaagagacccttcgggtggcatttctctaatgaagcctgaatcactttttgcaagctgtgtgagtttatcacaaagaagagaaagggactgtgtatgatggtaggagtcacaatgaaaataaaagtttcaagaggaaaaatgcagtaagttgtgttatcaatttcagtcttatccatcttccccagagagctacctttttgtagagttagctggacatgagctactctgctcactcccgctgggtgtacaataaacacaataccttacatacatattcctcgatttctgaatgttttcaggaagaatgcatgctaaatcacctgaaaaagaatcctgctggattttgtataatggagctctcctctacaaatgaggagaggtatagaagtatttttaatatgcctgatattgtgaattccaacatttgctaaaggatattaccactacttccttaattgatactaataaattaattgcatggcactaaaat

SEQ ID NO: 274355 - DNA, 600 bp, Homo sapiens
ctgcaatatctgtaatgacagtggcgtctatcttgggctacagatggtggggccataaaaaccatgatgcrttcagtcttgtgtccagctgaaaaacacaaagcttttgaaagagacccttcgggtggcatttctctaatgaagcctgaatcactttttgcaagctgtgtgagtttatcacaaagaagagaaagggactgtgtatgatggtaggagtcacaatgaaaataaaagtttcaagaggaaaaatgcagtaagttgtgttatcaatttcagtcttatccatcttccccagagagctacctttttgtagagttagctggacatgagctactctgctcactcccgctgggtgtacaataaacacaataccttacatacatattcctcgatttctgaatgttttcaggaagaatgcatgctaaatcacctgaaaaagaatcctgctggattttgtataatggagctctcctctacaaatgaggagaggtatagaagtatttttaatatgcctgatattgtgaattccaacatttgctaaaggatattaccactacttccttaattgatactaataaattaattgcatggcactaaaat

SEQ ID NO: 274356 - DNA, 517 bp, Homo sapiens
taagtgctatgatctctcacctggcttccttagcttttgtgaaagttttttcatgcgtagatggttattcaaattgatggttctgttagggaatgagcactggagagttttattctgccatcttgctgtcactccaaaagctcctcaatttcttaacagtgttttaacaaaaggctcaatgtttttattttgtgatgaaacatgcaaattatacagccagtcctgtctgtgaaagtcctggagttctagtatatagccccactattcagcayacactatttgcatcgcaatttcttttattaacattgcaaaacacttgccttctatgtttcatattagtcgattctttatgttcctcctatgacattaatgttcaccaagttttcactctgctgtcagtttttatctttattcttttggagaagtcatgatacctatcattattttatttttagttcacagaccaagctgatatataacctgaaatagtttggcaactttatttttgactttgaga

SEQ ID NO: 274357 - DNA, 517 bp, Homo sapiens
taagtgctatgatctctcacctggcttccttagcttttgtgaaagttttttcatgcgtagatggttattcaaattgatggttctgttagggaatgagcactggagagttttattctgccatcttgctgtcactccaaaagctcctcaatttcttaacagtgttttaacaaaaggctcaatgtttttattttgtgatgaaacatgcaaattatacagccagtcctgtctgtgaaagtcctggagttctagtatatagccccactattcagcatacactatttgcatcgcaatttcttttattaacattgcaaaacacttgcyttctatgtttcatattagtcgattctttatgttcctcctatgacattaatgttcaccaagttttcactctgctgtcagtttttatctttattcttttggagaagtcatgatacctatcattattttatttttagttcacagaccaagctgatatataacctgaaatagtttggcaactttatttttgactttgaga

SEQ ID NO: 274358 - DNA, 473 bp, Homo sapiens
cctatttcttggtactctcttcagatcctttgatctatttctccaccaataccacatgccttgattactgtagatacataggaagacttagtatcatgtacagtgactcctctcactttattttgtcaatgttgacaaaaatmattacacgtagtttagtaagaattacaatgaagattgatttgggaaaattgacatcttgactatgttgtcttccaatttatgtacgtccctccacttatttaggtcttctttgatttttttcatcagtattttaaaattatcagcatacagattcataactgtcttatcaagtttattcctaagtatttcactgtcactggggacatccctcaaaatggcatcatgttttaagttttggtctctatatattcatttctagtatgtagaaatgttattgatttttgtgtgttgattcttgtattctgcaatcttgctaactcacctatcag

SEQ ID NO: 274359 - DNA, 473 bp, Homo sapiens
cctatttcttggtactctcttcagatcctttgatctatttctccaccaataccacatgccttgattactgtagatacataggaagacttagtatcatgtacagtgactcctctcactttattttgtcaatgttgacaaaaataattacacgtagtttagtaagaattacaatgaagattgatttgggaaaattgacatcttgactatgttgtcttccartttatgtacgtccctccacttatttaggtcttctttgatttttttcatcagtattttaaaattatcagcatacagattcataactgtcttatcaagtttattcctaagtatttcactgtcactggggacatccctcaaaatggcatcatgttttaagttttggtctctatatattcatttctagtatgtagaaatgttattgatttttgtgtgttgattcttgtattctgcaatcttgctaactcacctatcag

SEQ ID NO: 274360 - DNA, 473 bp, Homo sapiens
cctatttcttggtactctcttcagatcctttgatctatttctccaccaataccacatgccttgattactgtagatacataggaagacttagtatcatgtacagtgactcctctcactttattttgtcaatgttgacaaaaataattacacgtagtttagtaagaattacaatgaagattgatttgggaaaattgacatcttgactatgttgtcttccaatttatgtacgtccctccacttatttaggtcttctttgatttttttcatcagtattttaaaattatcagcatacagaytcataactgtcttatcaagtttattcctaagtatttcactgtcactggggacatccctcaaaatggcatcatgttttaagttttggtctctatatattcatttctagtatgtagaaatgttattgatttttgtgtgttgattcttgtattctgcaatcttgctaactcacctatcag

SEQ ID NO: 274361 - DNA, 567 bp, Homo sapiens
tatgtccacacaaaaacctgcacacagatgtttatagcagctttattcataattacccaaactcagaaacamccaagatgtcacttcagtaggtgaatggataaacagtggtgcatccagacaagggaataatattcaacattaaaagaaagtgagttatcaagccatgaaaagacatggagggaccttcaatgcatattactaagtgaaagaatccaatcgaaaagggctaaataatgtaggattccacctatataacatctggaagaggcaaaaacatgcagaggatgttagggcagtgaaactcctctatgtgatactgtagtggtggatacaggtcataatacatttgtcaaaacccattcatcaagagtgaagctaatgtaaactatggattttgagtgataatggtgagtcaatgtaggttcatgagttgtaaaaaatataccactctggtgcctggtgctggttttaggggagattgtgcatgtgggaaggcaaggggtatatgggaattctctatactttccactttatattgctgtgaacctaaaattgctttaaaaa

SEQ ID NO: 274362 - DNA, 576 bp, Homo sapiens
aaattcatttactacgaagacaactccacctagcaataagtcagtctattttttttttttggtgggtgtttttttgttgttgttttttatttttgagacagggtctcactctgtcactcacccaggctggagtgcagtggcacgatctcagctcactgcarccctggccttccgggctcaagaggccctcctgcctcagactccccagtagctgggactacaggtgtgggccatcatgcctgggtaatttttgtttatttttcatagagacaaggtcccactgtgttgtccaggctggtctctggctggagtgatcctcctgcctcagcctcccaaagtgctggagttacaggcatgagcctccgcacctggctggaaagcctatctaacatataagagacataagaaatagaaaacacttaaccagttgttcctcctccaggctgggagtcagctgaaatgattccaggatatctcaggcatcagaaatctaacccataccggtaatgataataccatgaaaaagagaaaacgtattcaaacacaaatattttaaatcagatagatgcaaaaaaa

SEQ ID NO: 274363 - DNA, 476 bp, Homo sapiens
aaacagagtaatttataaagaaaagaggtttaattgacttatagttcctcatggctggggaggcctcaggaaatttacaatcacggcgaaggcaaaagagaagcaaataccttcttcactaggcagcaggagasagcaggagattgaaggactgccaaacacttatgaaaccattagatctcatgagaactcactaccacgagaatagcaggaggaagccaccctcatgatccaatcacttcctaccatgtccctcccttgacaagtggggattacatttcgagatgagatttgggtgcagacacagaaccaaacaatatcactcactgttgatcagcatgggagttttgatctgctctgttttcaacttgggctggtccacccactttaggcaacctgttggtccctcattcccggaaggtcaccatattggtgccaaacttagtgtggacaccctatcggcatagtacactgta

SEQ ID NO: 274364 - DNA, 559 bp, Homo sapiens
attgtaaagataaaggattgtatrttgtattacatattacaataaaaagattatctaaaaaggtattgattggtttggtgctgataccagaagaatacaagcaaaatggcacctctagtctttcttccatttgtaaggcagaaatacacttctacagtcaatatactaactgggtcttcacgtttcagctaaatctttaatttggcagattactgtatcattggaaagttgaagtgctatgagctctttcaatgctttttcatctaaacaagcctttatcgtgtgtttctgcgaccaacgcaacttgataatttaccctgctttatgcttcaactttgtcggtttcagtttgaaaagctatgacaaaaatttctggcttttaaaaagctcattacatccacacttaaacgattcaattcatttttctttagaggactctgaatggttggtctcaaaatcatgctactggcaccataataccattgaaaatggttctctggcataagattcataagaccaattactaacagctataaagctgaggaaagctttcaccttg

SEQ ID NO: 274365 - DNA, 590 bp, Homo sapiens
ataaaggtgcattgatctgtacacataagatggacatattatatgaggttttactttaataaaattgtggaagaatattgggatctagtaaaattccatatgcatttgccctcactggagtcaataacagcgtctggcacacaggtgaatacaatgaagaaagggaaacaagattttaaatgtgcattcatatttttaagtaaaaaggggaaaaataaaatcagtgttttaaaatttctattgcagataagagaggtacaggtgttatattttttaaaatcatgaggtcattctcagttccttaatatttgctgtgaaaagtaatagcaaaacagaagcatttactaaagtagatagtctcagatttactatggatcaacttaccattttggaagctgtacttcgagtacccataagccgttatgtttttcacttttcatacagtgttcaatacattacatgagattgtcaacattttagtataacayaggctttgtgttagatgattttgtccaactgtacaccaatgtaagtgttctgagcatgtttaaggtggactgagctaggatatttggtacattaggtatatt

SEQ ID NO: 274366 - DNA, 599 bp, Homo sapiens
ttaagtaaaaaggggaaaaataaaatcagtgttttaaaatttctattgcagataagagaggtacaggtgttatattttttaaaatcatgaggtcattctcagttccttaatatttgctgtgaaaagtaatagcaaaacagaagcatttactaaagtagatagtctcagatttactatggatcaacttaccattttggaagctgtacttcgagtacccataagccgttatgtttttcacttttcatacagtgttcaatacattacatgagattgtcaacattttagtataacataggctttgtgttagatgattttgtccaactgtacaccaatgtaagtgttctgagcatgtttaaggtggactgagctaggatatttggtacattaggtatattcaatgcattttttatttaatatttacacaatattcccaccttacgatacgtttatcggaaggtaatcccatcrtaagtcaaagaacagatgttaaaatataaaataaagaatacggttggcacaaaggagtcttcccaggaaattgtaaactgtctgacctgaacagaagcattggaaagagtttccacataattatatgaaca

SEQ ID NO: 274367 - DNA, 616 bp, Homo sapiens
tgtttcaacagaaagggtagaagaaggggaggggagaagatgtagtaaatttagttttggtgttttctttcattctctttagaataatggggtcccagacacttctgagtctcatgatgcagtggtatctttacaactgactttctagattgacacttttatgtttgttttttttcctgttgtcrtgtttctcaaagtgtggtctaggtctcattttccagattgaattacagtttatgaaggtgtccttatagtcagctgatggtggaaaggtagagtcaaagtcagaaaaataattttagtgtatgtctatagttttgatgagaagaggctttaaccaacgattaaagcagaaagggtaaatgccttctgtgttaagagctgctttttggttttgtaaagggaaagaaaaattcagctaaaggttctgtgaaatttgttataacttaaagaggtcttgccatgtgaaatttgagattcattatagtcgtattttttcccaagagaatcttatctatcgtatgccttagatttagatttagattctgaactctacaagtcagagcagaatgttgtactcaatacactaaataaactgaactcagtagactaaaat

SEQ ID NO: 274368 - DNA, 544 bp, Homo sapiens
caggggtgtcaatccccttaacatttctttttaattcatcagtctgacccctgcaaatccagttaggtcatggtggttgatagtgatctattataatcttaattaagtggtagctccaatcaaacagctgctaggcccagatgttgcacctttactagaacagacctacaaagcctctgacaattggtatactatttatctggcaaatttgttcttttcagaaactattcccttggaagagtcagtatacattcatgatatggcccccggcctttaataattattcattctctatcacaatacagtccaaagggtccttaatcatttggctattctatagaacagggatgagcaaacycagatctgtaggccaaatctggcccgctgcctgtttttgtaaataaagttttattcgaacagacacactcctttgcttatgtacagtaatgtctatggccgctttcactctatgatggcagaggtgagtagctgtgacaataaaatagagtatttacaatctgttcccttacagaaaatttgctga

SEQ ID NO: 274369 - DNA, 600 bp, Homo sapiens
ttagaaaagaaataactttttaaaagtctcaccacatgcatccataacaatggaatattactcagccttaaaaagtcagaatttacaacacagatgaactgtgaggatattatgctaagtgaaaaaaaccagtcacaaaaagacaaatactatgtactatgattctacttatatgagatacctaaagtagtcaaattcagagaaacagaaagtagaatgggggttctcaggagctgragagaggggaaaatggggtgttgtttaacacagagtttcgatcttgcaagatgaaaaagtcctggagatctgctgcacaacaatgtgaataaagttttataccctactaaactgtacacttaaaaacggttaagtgttttctaaccacaatttttttaaaaaagcatcaccataaaattatagtaagtaatgacagaggaccctcaaatggtagctgctatttaccaagtattatactaaccattctacacacatcaactaataaaattcttacaacagccctaaaagataggtactattatccttgttttataaaacgtagaaaacaaatcagagagattgttagtactttaccaatggtca

SEQ ID NO: 274370 - DNA, 583 bp, Homo sapiens
cattttgaccaacaacctaattctgcactaaaaatccttccgccaagatcctcagacaatctggtatttgattgtctactatgcataccataaaattttgacaagcctcatggatcagtccmttctcacactgctagaaagaaatgcctgagactgcataatttataaagaaaagattggcttccttggctcatggttccaggctgtacaggaagcatagaggcttctgcttctggggagacctcaggaagcttttaatcatggcagaaggcaaaaggggagcaaggtatctcacatggccagagcaggaagaagagagtgagtggtgaggtgctgcgcacttttaaacaaccagatctcaccaaaacgcactcactatcacgagaacagcacccagggaacggcgctaacccattcatgagaactccacccccacgagccaatcgcctcccacccagccccacctccagcactggggattacaattcgacaggagatttggtagggacacagagccaaaccccatcagctcaactgtgttgactttttgtcttttacagttttggaagtccaatactcagaa

SEQ ID NO: 274371 - DNA, 554 bp, Homo sapiens
tggtctttcacaaaagtcagccaaccactaacctkaacaatattgtcttccaattgatgtacacagtatctctccttttatttagatctcttgcaacttcttccaacaatgttttatgtctttcagtgtatagaccttgaatttcttttgttaaatttattcgtaaatattttattcattgtcagatcgcttgttgccaattcaattcgtttttgtataccgatcttatatcaaccaactttgctaaacttacttattctagttattttattgctttctgctcttatttttattattttttctttctagttactttgctttttttttctagcttcttaaattggtgcttaggtcaataattttagactttcctttctagtaaaaattttaaagctgtaagtttatctctaaacactgccttagctgtctgtattccacaaatttcaatatgttacatatccattatcactcacttcaaaatgttttctaatttctttgacatgcagattatttacaagcgttctgtttaatttagaaatacttgggggtattcc

SEQ ID NO: 274372 - DNA, 621 bp, Homo sapiens
gacagcagtggagcctgagaggcaacaggttagtgctccaaaacttgtgagagggaggcaggtgagaaaagggggactcgggatgcagcattaacaccagcaaatgcaaggctcatgagactggagagaacctcagacaccataccgaaatctttggttagctggctccagtcttgcttggagatggggtcagcaaggtccttcagaatgccagtgaacacaggtctctaagtagctcccatcgcgggctccaagtcctgtagaagagaagtcagcaaggtcaatgcatgaagccccttggtgcatatmtgagatattttctctactacggtagcaaagatgtagtgcatctgtactttccaatatatatctacgacttttggtacattcgacagacatctgttccgtgctcttaagcacctgccagccatggagtttcagatgcatttcttagataagcgagcttctttcccattgcaaatcacagagtgacaaaagcacagatccttgctagggctgcaggctgctggcagtgtcacccaaaggctgctttctaaggaaaacattctgctggggttttttttttggacaacacggtttcatgtgctcatttatttcaca

SEQ ID NO: 274373 - DNA, 609 bp, Homo sapiens
agtagttacaacagagaccacatgacctgcaaagcttaaaatatctactatctaatggtctttcacaaaagtcagccaaccactaaccttaacaatattgtcttccaattgatgtacacagtatctctccttttatttagatctcttgcaacttcttccaacaatgttttatgtctttcagtgtatagaccttgaatttcttttgttaaatttattcgtaaatattttattcattgtcagatcgcttgttgccaattcaattcgtttttgtataccgatcttatatcaaccaactttgctaaacttacttattctagttattttattgctttctgctcttatttttattattttttctttctagttactttgctttttttttctagcttcttaaattggtgcttaggtcaataattttagactttcctttctagtaaaaattttaaagctgtaagtttatctctaaacactgccttagctgtctgtattccacaaatttcaatatgttacatawccattatcactcacttcaaaatgttttctaatttctttgacatgcagattatttacaagcgttctgtttaatttagaaatacttgggggtattcc

SEQ ID NO: 274374 - DNA, 609 bp, Homo sapiens
ttccagtaaagcaaattttgaaaaagcctatatagtcaatcactattgttgcggcacttgcacaaataatcattacttttgcaaacattactttgcgaacaaattagtcttactttgataatctttggtagaaatggaaatgactatagaaagaaaaatatttcagaagaaaactatatgcactcgttattagattccagctcattgtttttgaggtttttgttactcacctacaatctggactggatcctgaattcttctcgtttccagaaatgtctggctacaggtctccaaactaatatttttctcccacccttctggtttggaatcactgaaatgagaactgctctattcctgaagccctgcgaaygaaaactggatgacttgacacaagccgtagagaaagcacagcaacttatgtatgcgtggtcctcacgcctgctgctatatggactactcagaaacgcccctggaacacctgatgcaaactgtaaagtggggaaacctgtcaaactgccacggcctgctcccaccccagctgaagatgctttcagccaaaacccagaaatcttctcacctggctgctttcagagcttaaaaaccgagttt

SEQ ID NO: 274375 - DNA, 622 bp, Homo sapiens
gttgtaaggatgtcacttctccccaaattggtctatagctctaatgcaatcccaataaaacttccagaagatattttgaggtaactgaccagatgattttgaaaatcttgtgtcaattcaaagggccaagattagccaggacacttttaaaaaacaaaagcaaggtcggacgattggtctacccgatctcaagacgtttkataaagctaaagtagttaagatggcattagtgcaagaagagacagactaataaaacaatgcagagtcaaggaccagatccacacttacccacttgatttatgatcacggtgacactgcagcagagtggggagtgcgtggactcttcagtcactggtgccatgaatatggttctatatctactgggtctaatgggtatccatagagaaccaaaagtcaacctgaagttctgtctcacaccatactcacatcaattccaggtagattgcaagtctaaatctgaaaggtgaaacaacaaagtatttaatagacaacagaaatcatctatatgattgaggataaatgaagatttctcaaacaagccacaacaagccctaaccacaaagggaaagtgataaattagacttcgttaaacttaagaatt

SEQ ID NO: 274376 - DNA, 594 bp, Homo sapiens
cactgggtggaaaaaccagagacaccaaccactgagtcaaaaagtgattcagaaaagcaaaacccgaagtttcaggaaaacaaacaaacatacatttctagatccgtttctacagatgcgcaagtgataacatctgcatctagcaaagtctcaaagagctcctcaatgggatacaaagtaaaaagtccaaacaacaagaaagcgttctgtttcttttttcttttgtttttttcagagatagggtctggctctgttgcccagggtggagtgcaatgctctgatcatagtcacttcagcctctgcctcctgggctgaagttatcctcccacctcagcctcccaactagctgggactacaggctcacaccatgacacccagccaatttttgtagagacagggtctccctgtgttgcccaggctggtcttgaactcctggactcaagcgatcctcctccctcagcctctcaaagtgctgggattacaggcatcagccactgcacttggccattgtgtctatttaaatgcaagttttcttcctttcttagaacataaaaataatagtgkgtattacaaataacagcatattttaataac

SEQ ID NO: 274377 - DNA, 521 bp, Homo sapiens
acatatactcccaaaataaggcagagttatctcccgaaactatccccttagggatgctcaccttatatttgaaacattacactctttcaggatatactaaatgctgtcggtaacctgaaaagaatacaagttattgttctgtggaaacattattagcctcaaacaaccttaagcaatgctaatattgtggctggtaggataagttgtaaaggaggcacattaacagtcacggtctctaggattataaagctacagttacaagtatttggtgtcactggaaagaagcctgttaaaaatcraaagcaatgctctgtggattctgaaaagcagctgccctagtgctacctacacacaggcatacttgtggcttgggataaatgtccaccaacagcatcatccatagaccccgaaactgctgcatcccaaacaacttagaaagaaaaaagatcatctgctcttaacctattaggggatgccaaagggggcaccaagatcaaatacgaagtcggagtgacatgcct

SEQ ID NO: 274378 - DNA, 616 bp, Homo sapiens
aaacattattagcctcaaacaaccttaagcaatgctaatattgtggctggtaggataagttgtaaaggaggcacattaacagtcacggtctctaggattataaagctacagttacaagtatttggtgtcactggaaagaagcctgttaaaaatcaaaagcaatgctctgtggattctgaaaagcagctgccctagtgctacctacacacaggcatacttgtggcttgggataaatgtccaccaacagcatcatmcatagaccccgaaactgctgcatcccaaacaacttagaaagaaaaaagatcatctgctcttaacctattaggggatgccaaagggggcaccaagatcaaatacgaagtcggagtgacatgcctgaaatgcgaatgtgaagagggaaagcccacatgctggttaatagattaacaaatctgaaacacctgtaactaatagtacaggtgtctattttatcctctcatctacaatcctaaactttatatatgtaagttggctaaaaaaaagttttctgggatcttcacattggaaggtaaggggtggcctgtttagctaccttatagacaaacatactaaagctataaaaacagtgccatgaaat

SEQ ID NO: 274379 - DNA, 585 bp, Homo sapiens
aattaaataagagatatttccctcttatgtcaaaatttatacatcatatgccagatgagctaatcaccttaatatgtacatatctttaaatcatggaaaattatgacaatagttctgtgaagtaaagggttaactcagtaggcttggggcatttacaccctaaatatcataaggaaaggactggtccttgaccaattcctgtaatattaattccaagcacttgggaaatcctatgtaataaaagtgtctttatatacctgagaccttgggctataacagatagcttatattaatgatttgatttatggtgggtgcttggaccacartagatagtttatgctaataatgtagtttatcacgggagcagtagaccacactctatcaacttgacctccggaggggctgaagacatagtgactaagatcagccatagtgtcacttcaagactgagtgacaagtccttaataaaaactccagacacaaaagctcaggtgaacttctctggttggcaatactctatatatgttgccacatatattgctgtgagaattgagcaccatctatgtgactcaactgacagaaaaa

SEQ ID NO: 274380 - DNA, 585 bp, Homo sapiens
aattaaataagagatatttccctcttatgtcaaaatttatacatcatatgccagatgagctaatcaccttaatatgtacatatctttaaatcatggaaaattatgacaatagttctgtgaagtaaagggttaactcagtaggcttggggcatttacaccctaaatatcataaggaaaggactggtccttgaccaattcctgtaatattaattccaagcacttgggaaatcctatgtaataaaagtgtctttatatacctgagaccttgggctataacagatagcttatattaatgatttgatttatggtgggtgcttggaccacaatagatagtttatgctaataatgtagtttatcacgggagcagtagrccacactctatcaacttgacctccggaggggctgaagacatagtgactaagatcagccatagtgtcacttcaagactgagtgacaagtccttaataaaaactccagacacaaaagctcaggtgaacttctctggttggcaatactctatatatgttgccacatatattgctgtgagaattgagcaccatctatgtgactcaactgacagaaaaa

SEQ ID NO: 274381 - DNA, 586 bp, Homo sapiens
gagtaattcaagctgacttcagaaatttgcataagtaaagagaggccaagtgttaatccccaagacaatggacaaagtcacaagggcatgccagagatcttcaaggtaggccctcccatcacaggcccagaggcctaggaagataaaatggtattgtgggtgcggccttgggccctgctggtgtgtgcagccttgagacttggtgccctgcatcccagccactccatggctaaaagtggctaaagtgcagctcaagccattgcttcagagggtgcaagccacaagccttggtggcttccacattgtatttggcctgcaggtgtacagaatataagagttaagttttagaaacctctgcctatgaaaacacctggatgtccaggcagaattttgctgcaggggcagaatctctgctagggcactggggaagggaaatktggggttaaagcccccatacagagtacccacgggggtactgcctagtggagctgtgagaagaggactaccattctccagaccccagaaagttagatccacagacagcttgcatcgggtgcctggaaaagccacaggcactcaatgccag

SEQ ID NO: 274382 - DNA, 586 bp, Homo sapiens
gagtaattcaagctgacttcagaaatttgcataagtaaagagaggccaagtgttaatccccaagacaatggacaaagtcacaagggcatgccagagatcttcaaggtaggccctcccatcacaggcccagaggcctaggaagataaaatggtattgtgggtgcggccttgggccctgctggtgtgtgcagccttgagacttggtgccctgcatcccagccactccatggctaaaagtggctaaagtgcagctcaagccattgcttcagagggtgcaagccacaagccttggtggcttccacattgtatttggcctgcaggtgtacagaatataagagttaagttttagaaacctctgcctatgaaaacacctggatgtccaggcagaattttgctgcaggggcagaatctctgctagggcactggggaagggaaatgtggggttaaagcccccatacagagtacccacgggggtactgmctagtggagctgtgagaagaggactaccattctccagaccccagaaagttagatccacagacagcttgcatcgggtgcctggaaaagccacaggcactcaatgccag

SEQ ID NO: 274383 - DNA, 441 bp, Homo sapiens
aagaagtaattattaacattaatattatagttaattgtggtagtaagtgaatttgagtactaatttacatgaacaaaatttatataccaatatttattagtttttttaataaacccagttctgtagaaacatcatttttactaatttaacattataacatattgtacaataatgttgttttctaatttccctcaacattagttatcatctctatattttcagttaagtctcctakaacataagcagctgaaacagaaagcttttgttgaaatgtaatttaatatttgagcacagtgttttaaaggtgtgtgtatttttttaaatggagttgtttgatattaacattgcaattctattgattggaaatagcattaaaaatttacctgtaatagtctatttagttaagtaagatacaaagagtattagaaagtgatagcttag

SEQ ID NO: 274384 - DNA, 607 bp, Homo sapiens
tgactgattcagataagaaaaactctggagccagcatttgtttcccaaatcttgcctaccttcgtacacgcctcttaactgtttgtctttgaaattattataaagctttgtcttggataagacctctaatttgtcagagtctgatttctcaatttcattatttttgttagttgagatcccagagagcagaattgcctttgagacccacctatcasaatgactaatatgtgttttggtcagaaaaagaaaagcatgaaaaaatataagaatttgaagccagattgagtgcctacacatccttgggaaaaagtgacaaaatcttaaataaattgtcagagacaactcttgcaaattgaatttggaggaaatagcctacaaaatgtagtatatataagtattcattttttgcatatgattgtaatgtttttatatgttcatatttaaaaatccaaggaacacataatactaaaaatgatcaaaaattttaaaaattatatcaaatcccatcattctgtaatcatacttttatttaacacatttgcagagttagaaaggtaggtaagtggtaggtagaaagaaattacctagaacaaagctggataaaact

SEQ ID NO: 274385 - DNA, 572 bp, Homo sapiens
ggttcctcaaaaaaataaaaacggaactgtcatatgatccataatcccacttctgggtatatagccaaaggaattgaaatcaatgtgataaataaatacctgcattcccacgtttactgcagccctattcacaacagtcaagatgtagaatcaagctaagtttttctcaacagatgaatggatttaaaaatgtggtatatgtacaccaatgaaatactattcagccttaaaaatagaatgaagctctgtcatttgtaataatatgaatgaacctggaggacattatgctaagtgaaataatccaggcacggaaaatcaactaccagataatctcactgatatggtatggatctgtgtccccacccaaatctcttattgaattgtaatccccattgttggaggtagggccaggtaggaggtgattgaatcatgggggcagagttctcatgaatggtttagcaccaccccgttgctactgtatagtgagtgagttctcgtaagacctggttgtttaaaagtatgtagcacctcccgactcytttcctgctctggtcatgtaagacatgcctact

SEQ ID NO: 274386 - DNA, 585 bp, Homo sapiens
tataatacatgctaattattattgttatgattactactccctagaccaggaatcggatgaaaatttattgagttaaattctggctactaaatttgcagcctcctcctgccacyatcaaagtggaataactacccaagttatttccagttgcttttgaccctgatgatcagattttcattagcatattcacaggaatattaaactcatcttgatcctttacttccaaaactgtgtttacagaaagtaaaatttaaattatccaattaaactataaaatcaaaattaatctactttttcatagatttctgattttaaaataaagctaaatgaagcaaaagcaacttttaccacttcttttatttatttatttatttatttatttatttatttatttatttatttttgagacaggttctaactctgccactcaggctggagagtagtggaatgatcatcactcactacaggcttgacctcccttgttcaagtgatcctcccacctcagcctcccaagtatctgggaccagaagtgtgtgccatcgtgtttggctaatttttgttttttaaatatttttgtatagattg

SEQ ID NO: 274387 - DNA, 585 bp, Homo sapiens
tataatacatgctaattattattgttatgattactactccctagaccaggaatcggatgaaaatttattgagttaaattctggctactaaatttgcagcctcctcctgccaccatcaaagtggaataactacccaagttatttccagttgcttttgaccctgatgatcagattttcattagcatattcacaggaatattaaactcatcttgatcctttacttccaaaactgtgtttacagaaagtaaaatttaaattatccaattaaactataaaatcaaaattaatctactttttcatagatttctgattttaaaataaagcyaaatgaagcaaaagcaacttttaccacttcttttatttatttatttatttatttatttatttatttatttatttatttttgagacaggttctaactctgccactcaggctggagagtagtggaatgatcatcactcactacaggcttgacctcccttgttcaagtgatcctcccacctcagcctcccaagtatctgggaccagaagtgtgtgccatcgtgtttggctaatttttgttttttaaatatttttgtatagattg

SEQ ID NO: 274388 - DNA, 519 bp, Homo sapiens
ccttttgatgtataggtcctgaatgtaatacatttaaatgttaagtctccaccccaaagtgaacatgagtcatacattacatgcttgtttgttcaatacacaagcatcatgaccaccttcatgaataatcctagaccttcctgtaacctgttgaatatttatgtttggccaatctgtttagcataaagcttctaccccaacacctcctccttcaaagtgcctgtctctggtctctgctggaggctgtgcttctccacctgtgagatagccaacttgcaggatataaccctttataagaaataaagtctcctcttcttttccaaattgataaattgtggggctttactttgtttaagttaacaagtgcaatgtacctattagaatgaatctggacagagcaggagagctgagaaaaatcaaraagagaaactctaggttgtcagggaaaaaaattattgagggtgaggcaacagtgctgaaagaaggcattctaggagttcacaggcccctcttctccca

SEQ ID NO: 274389 - DNA, 564 bp, Homo sapiens
gcttagaaaacataaatttctcagatgttggctaagtttttagttccaatttatgaaagccatactctctttgctagtgactgatcattaaagtagcctttataatctgaattacatatgcattcraattatacagtttgataaattagggaagaaaataaaaacagaatatatatttgggttgagagatctcaagaccctcaatagccacaaaaatttgcaagaagactctaaggagaactgttataatcatgagtatagtatattacaatgaaaagatacataataaagtcaacaaataaaaaaaagtatgagaaaagtcctacgattaaccagataaaagcattcaggcactctatttcagcagaatcacacagaagcacttgttttcccaacaaaaatgtgtggcaaattatgtgaagtattgccacagaaaagctcacatgagccttggtgtccagggccgttattggaattcagtcagttatacatacagccacctgtgtaattgtcatcaattacttagactacagcaccccacagcaaaaccagaagtgcaccata

SEQ ID NO: 274390 - DNA, 499 bp, Homo sapiens
ttatcattctactccttaaattaccccatatcccttttttatattgttacctttctatttagtttgctagcttctttaaaaatatataatgtagttatttgaatccaaatttaaaattctacatattgaatattaattcttatgacatttctacccagttgtctgcccctctaccttcaggttttcatattaatgtatttaaaatgtcaatatgtatgcacaagtatataagtagagagattctgattccattcctatttttagcaaaaatacatatactattcatcaccgtgagtagattttaaaaatatttttaaaataagaagtcttcctgtttcaaaggattcagacattcgtcagatagtttatagaactaagaaatttcccactgtatgaacatataataatttatttmattcatttaattagtttgattacactattttgccactataagcgaagttacaatgaacagtattatttcaagtacacctgtatg

SEQ ID NO: 274391 - DNA, 622 bp, Homo sapiens
cctatccataggaataatttgataagaagaaatctgtaaactcccatttgtaaggttgacaatagacccatgggatagagcttgtctttcatttgctccaaaagtccaagaaagagttaaaatatggaactgacttcttcaaaactcattatagtgcactaacaaggtaataggcagcatgattgctgctattccgccaacccatgrtggtggaaatacctgctctcagttaattgtcaggcctataccacataatgtaaatcaattgccaatactaagactaagactaaacataaaaaagacacatataaatagacatagcaggtgggaagaaataggccagaaaaatacacgagttagtaaattagaactgttagaagtggatgacaaattcaacaaatctcaagaaattattaaaagtgattcagccagagtacaattcttactggaagtaaaatgttttcttacattagttatttaaattatttttagttgtacctgcacatatttggattattcttaatctttgcttctatacatgctattggcctagccttctttcatgtattagctttctttttcatttaattttataaactcatatttatctaagtgtaaaaaa

SEQ ID NO: 274392 - DNA, 545 bp, Homo sapiens
ttcaattttctccacctagtcctgcctttgacacatgggtattattacaattcaacatgaaattgggtgggaacacagaaccaaaccatatcagaggtatttatgaagaatttgctgccatgatttaaacacctcccaccaggccccacctctaacactggggaccccatttcaacatgagatttggaggagacaaacacccaaactatagcaactatcagtgaaattctttcaaaagggaacttccagaatggtggaataaaaatatcagaggatcctttcatcagcaacataacaaattaattgataaaaattataaaacaaaaataatgtttcatttgtgaaattttacttatattcatttaagaaaatcttcygtctttgcacaaaatacagtgagagtctatagaatttgaactataacccatattctgacccttcccacttattccacccctagctctgtgttatgaatctctaccatgggcattctactcccaaggaagtgtggcaaaaaagacaatgacttgctctatccaactcat

SEQ ID NO: 274393 - DNA, 561 bp, Homo sapiens
ccgtctttgcacaaaatacagtgagagtctatagaatttgaactataacccatattctgacccttcccacttattccacccctagctctgtgttatgaatctctaccatgggcattctactcccaaggaagtgtggcaaaaaagacaatgacttgctctatccaactcatagtcttgggatgtggtttcacataaagatggtcaggatgctaacatttcttatgcctcccagccctgtcctgcagaatcttcataccatctgagcactttggatagcwctggtgtcccttttcccatccagcccccaaccataaaatggacattgtactccaggaatgcagaccaagaatattgggccccaagtgcccctttcccagttggcttataaatataatttccatgataggagagccaagctgaaaagagaagaatctacttcccaccaccagtgcacacttgtaatatgagtagttttctggaaaatctgatcctctaacacaccagttctgttgcacttgtgaagagattatgcatgtggggaaggcaagtcctaacaatgaa

SEQ ID NO: 274394 - DNA, 510 bp, Homo sapiens
atggtgagggttggtcagaaagactggattagggtgatactattaatttttcaataaagtrttttatcaaactagcctctgtttcttccatgatgaattataataattaaaataatgtcaaagtaaaatgcaatgaacattcaacataaagatattttatcccattttatgtctttaaaaaacattgaaaatattataaaaagtgcaaaaaaatcataaatgctaacttcaactaaaatcgaaatggctcttactaactaaaataatctaaaactcagaaattttaaagcaaatctttactgaaagatgggaaatgatttaggctctctcaaacttttgttttcaagtgaatgatggagggaacagaaaaaatattctgttcccatagacgtgcaaaacaacacatggcagaactgcaggaataaagctagaaaaccttctatcattactgtctaacaaatcactctgtgtatactgagatttctttatttgagtgaagtatagaaagaa

SEQ ID NO: 274395 - DNA, 595 bp, Homo sapiens
tgataaatgtatcaaattgagtctcaagaagagatagagataaggttttatttattaaggtggaaataaagttattcttgagggccttctcaagcagagcaagtgagaaaagagtaagtacaaatagaagagaagatttaaaattgattccttaaagatcctcatgctttgagaaattccttggaaggtattttcataaaccaggggttctcacacaattgctaggtcccacaatagaccatctgcaagctgaggagcaaggaaacccgtccgaktcccaaagctgaagaatttgcagtctgatgttcaagggcaggaagcattcatcacaggagaaagatgtaggctgagagcctaagctggtctaggctcttcatctttttctgcctgcttttatattctggccacactggtagctgattagatggtgcccactcagattaagggtgggtctgcctttgccagaccactgactcaaatattaatctcctttggcaacaccctcacagatacacgcaggattaatactttgtatccttcaactcaatcaagttgacactcagtattaatcatcacagagatactataagaacag

SEQ ID NO: 274396 - DNA, 595 bp, Homo sapiens
tgataaatgtatcaaattgagtctcaagaagagatagagataaggttttatttattaaggtggaaataaagttattcttgagggccttctcaagcagagcaagtgagaaaagagtaagtacaaatagaagagaagatttaaaattgattccttaaagatcctcatgctttgagaaattccttggaaggtattttcataaaccaggggttctcacacaattgctaggtcccacaatagaccatctgcaagctgaggagcaaggaaacccgtccgagycccaaagctgaagaatttgcagtctgatgttcaagggcaggaagcattcatcacaggagaaagatgtaggctgagagcctaagctggtctaggctcttcatctttttctgcctgcttttatattctggccacactggtagctgattagatggtgcccactcagattaagggtgggtctgcctttgccagaccactgactcaaatattaatctcctttggcaacaccctcacagatacacgcaggattaatactttgtatccttcaactcaatcaagttgacactcagtattaatcatcacagagatactataagaacag

SEQ ID NO: 274397 - DNA, 595 bp, Homo sapiens
tgataaatgtatcaaattgagtctcaagaagagatagagataaggttttatttattaaggtggaaataaagttattcttgagggccttctcaagcagagcaagtgagaaaagagtaagtacaaatagaagagaagatttaaaattgattccttaaagatcctcatgctttgagaaattccttggaaggtattttcataaaccaggggttctcacacaattgctaggtcccacaatagaccatctgcaagctgaggagcaaggaaacccgtccgagtcccaaagctgaagaatttgcagtctgatgttcaagggcaggaagcattcatcacaggagaaagatgtaggctgagagcctaagctggtctaggctcttcatctttttctgcctgcttttatattctggccacactggtagctgattagatggtgyccactcagattaagggtgggtctgcctttgccagaccactgactcaaatattaatctcctttggcaacaccctcacagatacacgcaggattaatactttgtatccttcaactcaatcaagttgacactcagtattaatcatcacagagatactataagaacag

SEQ ID NO: 274398 - DNA, 517 bp, Homo sapiens
aaccagggacttcataatgtatagaatggaacatcagaccaaaaagaggctgagagatttgagaatatgtaattgtagcaaaagactataggtccagraattactgaaactttgggaagtttagcagtttggagttgtgactgtgggtgtggtaggtcgatccaagagcagaagtgataagcagacatagaaaatgataagccctggtatggaattggtcattcatacagatcaggtctgtgcttgtgggtgggcagaaacacttgatccatgttgcaaggcctttaataagtgacattgttatatctattcaaagatattattattagtagatgacaaaatagtttcaaatatttttaagaagtagagagtagcacagctaaatgacatgatcttaacatgattgctttgcttgtttgttttatgtttaaagaagagcagtcaaattgcctgactggtgttttgggataaggataagagtgattgaaggccaaagagctcaccagcaaaacctaat

SEQ ID NO: 274399 - DNA, 517 bp, Homo sapiens
aaccagggacttcataatgtatagaatggaacatcagaccaaaaagaggctgagagatttgagaatatgtaattgtagcaaaagactataggtccaggaattactgaaactttgggaagtttagcagtttggagttgtgactgtgggtgtggtaggtcgatccaagagcagaagtgataagcagacatagaaaatgataagccctggtatggaattggtcattcatacagatcaggtctgtgcttgtgggtgggcagaaacacttgatccatgttgcaaggcctttaataagtgacattgttatatctattcaaagatattattattagtagatgacaaaatagtttcaaatatttttaagaagtagagagtagcacagctaaatgacatgatcytaacatgattgctttgcttgtttgttttatgtttaaagaagagcagtcaaattgcctgactggtgttttgggataaggataagagtgattgaaggccaaagagctcaccagcaaaacctaat

SEQ ID NO: 274400 - DNA, 549 bp, Homo sapiens
tttaaactttagaaaatctttaacagaataaaaaaatactgatgcaataattctttcataaggtttactttactatgaaagtgttctcaaggataattaatgtattaattcattctcatgctgctatgaagaaatactggagactggctaatttatgaagaaaagagttttaattgactcacagttcttcatggctgaaaaggcctctggaaacttacaatcatggtggaaggagaaggggaagaaagatagcttcwttacaggatggcaggaagaagaagtgacaagcaaagaggaaaaagacccttataaaaccaccaggtctcctgagaactcactcgctgtcacaagaacagcatggggggtaaccacccccatgattcaattacctcccataggatccctccctaaacatgtagtgattatgggaattataattcaagatgagatttgggtggagatacagacaaaccatgtcatttcaaccttggcacctccaaaatctcatgtcctcacatttcaaaacacaatcatgcctttctagcagtc

SEQ ID NO: 274401 - DNA, 549 bp, Homo sapiens
tttaaactttagaaaatctttaacagaataaaaaaatactgatgcaataattctttcataaggtttactttactatgaaagtgttctcaaggataattaatgtattaattcattctcatgctgctatgaagaaatactggagactggctaatttatgaagaaaagagttttaattgactcacagttcttcatggctgaaaaggcctctggaaacttacaatcatggtggaaggagaaggggaagaaagatagcttctttacaggatggcaggaagaagaagtgacaagcaaagaggaaaaagacccttataaaaccaccaggtctcctgagaactcactygctgtcacaagaacagcatggggggtaaccacccccatgattcaattacctcccataggatccctccctaaacatgtagtgattatgggaattataattcaagatgagatttgggtggagatacagacaaaccatgtcatttcaaccttggcacctccaaaatctcatgtcctcacatttcaaaacacaatcatgcctttctagcagtc

SEQ ID NO: 274402 - DNA, 639 bp, Homo sapiens
tttttttgtttgtttgtttgtttgttttttcctattacatcatcaggctgcaaattttccaaacttttgtgttctgcttcctcttgaatgttttgctgcatagaaatttcttctgcaagataccctaaatcatctctctcaaatgtaatgttccacagatctctagatagaggcaaaatgctaccagtctctttgctaaagcacagcaagagtgacccttactccagttcccaacaagtttttcatctccacctcagcctcaactttattgtccatatcactatcagcatttggtcaaagccattcaacaagtctctaaaaagtgacaaactttcccacatcttcctgtctttctttgagtcctccaaatattccaacgtctgcccagatccaaagttgcttccacatttctgggtattcttatctttattccccactccctcagtactaatttactgtattaattcattctcatgctgctgtaagaaatacccaagactgagtaatttatraagaaaggaggtttaattgactcacggttctgcatgactgggaaatcctcaggaaacttacagtcatggcagagagcaaaggggaagaaagacacctgcttcaaagggtggcaggaaggagaaatgc

SEQ ID NO: 274403 - DNA, 573 bp, Homo sapiens
ccttctttctctcagttcctctttctctctaactttataaatttgtgtatctcaaattatttggtagtattgtcaacatgttactttattcctctgaattattgagtagttatttcttayaaacaaggacagtctttaacataatcacaacaaaaccaccaaatccagaattaacattgatacattactatttaattatcagacaccattaaaatgtttccaaatgtcacaatattgtcttcatatcaaatgaatttacttcagaatcaaatcattcctctagtcaaaatgtctcttcagtctctatattaacagggctatttcctaaactttttctcaattttattaccagggctattttctaaaattgttccctggtatttttcatattatatgggagttgttttgtagaatttcactcaacatgaatttatttgctgtttccttataattagattcaggttatgcatctttcgtaggaacacagaaacaataatgtgttattttcattgcgtcctatcaggtagtgcacaattttattttaccctattaaatatgatgttcattttaatc

SEQ ID NO: 274404 - DNA, 573 bp, Homo sapiens
ccttctttctctcagttcctctttctctctaactttataaatttgtgtatctcaaattatttggtagtattgtcaacatgttactttattcctctgaattattgagtagttatttcttataaacaaggacagtctttaacataatcacaacaaaaccaccaaatccagaattaacattgatacattactatttaattatcagacaccattaaaatgtttccaaatgtcacaatattgtcttcatatcaaatgaatttacttcagaatcaaatcattcctctagtcaaaatgtctcttcagtctctatattaacagggctatttyctaaactttttctcaattttattaccagggctattttctaaaattgttccctggtatttttcatattatatgggagttgttttgtagaatttcactcaacatgaatttatttgctgtttccttataattagattcaggttatgcatctttcgtaggaacacagaaacaataatgtgttattttcattgcgtcctatcaggtagtgcacaattttattttaccctattaaatatgatgttcattttaatc

SEQ ID NO: 274405 - DNA, 493 bp, Homo sapiens
atatacattttgccaataaagctgaactttttattacatttgaattgtatacatgtattattatattccagatcaaaactaatgatcagaatgttttgttggtttttgtaaaaatttaacatagaaagtgcttttttaaaggctcattattggaagtcattccacatttgaaaataccatatttctgtgtgtgtgtgtgtgtgtgtgtgtgtgtgtgtgtacatgtattgtagcctaraaaaccagacttaaatcaaaatagggttatagtaaaaaatgcttatgaaaagtggaaagtagtttaattgacaagaacacagacttgtatatgaatatgtattaaataaaagcagaggaaattatttttatctctaaaaattttaaattacatttttgaatactttcataatataaaattaattccttcacaaaaatatctgaaaattaaaacttcattctttttttctattaatggaaataatttgactatgaa

SEQ ID NO: 274406 - DNA, 493 bp, Homo sapiens
atatacattttgccaataaagctgaactttttattacatttgaattgtatacatgtattattatattccagatcaaaactaatgatcagaatgttttgttggtttttgtaaaaatttaacatagaaagtgcttttttaaaggctcattattggaagtcattccacatttgaaaataccatatttctgtgtgtgtgtgtgtgtgtgtgtgtgtgtgtgtgtacatgtattgtagcctagaaaaccagacttaaatcaaaatagggttatagtaaaaaatgcttatgaaaagtggaaagtagtttaattgacaagaacacagrcttgtatatgaatatgtattaaataaaagcagaggaaattatttttatctctaaaaattttaaattacatttttgaatactttcataatataaaattaattccttcacaaaaatatctgaaaattaaaacttcattctttttttctattaatggaaataatttgactatgaa

SEQ ID NO: 274407 - DNA, 569 bp, Homo sapiens
actaatatagttttatccacaaaatcactttacatgcttctgatgtgaatcttatcattgggcttttttgcagcagctccctaactctgagacttttcctattaggagatggcaagaaacctataactgggtcatgatctttggttgtcttttcattgttcctggatctattatatatgctttacctcccttgtaggatttaagttgttttcaaagctaagatcatgaktctatttctctgagacctggaagttgtccatattctcttgtgcttgttgtcaccatctgttcttactaaatggccacttcccaacaatagttggacagaagtctctcaggacaaggataacatcttgatagaaacatataatggaattggaatcttttcttactctctggaattattaaaacaactactttaggcaaaggatacatacttagtaagtttcaacttcttcgcttgaggcaaaattctctgtttgctctttcagtggagcctctacatatggtcacaaattcatcagcatgatcagcttgcaaaattatagaacaagtcaacttactggatg

SEQ ID NO: 274408 - DNA, 569 bp, Homo sapiens
actaatatagttttatccacaaaatcactttacatgcttctgatgtgaatcttatcattgggcttttttgcagcagctccctaactctgagacttttcctattaggagatggcaagaaacctataactgggtcatgatctttggttgtcttttcattgttcctggatctattatatatgctttacctcccttgtaggatttaagttgttttcaaagctaagatcatgattctatttctctgagacctggaagttgtccatattctcttgtgcttgttgtcaccatctgttcttactaaatggccacttcccaacaatagttggacagaagtctctcaggacaaggataacatcttgatagaaacatataatggaattggaatcttttcttactctctggaattattaaaacaactacttyaggcaaaggatacatacttagtaagtttcaacttcttcgcttgaggcaaaattctctgtttgctctttcagtggagcctctacatatggtcacaaattcatcagcatgatcagcttgcaaaattatagaacaagtcaacttactggatg

SEQ ID NO: 274409 - DNA, 595 bp, Homo sapiens
cttggcattctggtccccagctaaaactcaccacagcctccactaattatcacaccaaaaaccactgaagaaatcacagataccactggtgttgtttataaccaaagaaatcataccgrgactaccctactgcatgcatccaaattcaaggccaaagtaccctacctaaccagtaacatatataaatattcagaaaaaaaaaaatcctcccctacaaaagaaaattcgaaaaattggaagaagcaactgttacaccagatgcacagatatcaatgtaaggatccaggaaaagtgaaaagtaagaaaatataacaccttgaatagaaagcaataattctccaggaacagatcccagtctaaaagaaattcacaaaatcctagataaataattcaaaataccaattttaaagaagctcagcagatacaagagatttctcaaaaacaatacactgaaatcaataaaacaattcatatgtttttctagatatgaatgggagatttactaatgaaacagaaaatttttaaaaagccaaacaaattctagaactgaagaatttactaaatgaaatacaaaataaatttaaaaaatttaaca

SEQ ID NO: 274410 - DNA, 510 bp, Homo sapiens
tatcttaacttttcttccctggtgatcatttgacacaagtatcccatagtgaaaagtgtcactcttaccatataattcaaaggaatttttcccgggtcctctggacctggtggaagtattcccctttaggaaactaagacctctaaacatgtcaagcctagaattctatttcctgtgtggctttttgagaataaaggtaatgaggcccactcctgcttcaactktttggtttccagaaccatgttggatgtccacattctaaatttccctaagtagcaatttaatgtgatcaaataacaatcccataacaaggacagaacaatggttttgttgctggcaggttggccttttgatagcagaaggagttacatgaactttgataagtcagaaccaatgtttcaggatccattctgagcctctactttggctaggcagtgggatagtcaatgagaatctggccgatgtcaactggttgagtcactttatctacttggtttgttgaatacgttt

SEQ ID NO: 274411 - DNA, 510 bp, Homo sapiens
tatcttaacttttcttccctggtgatcatttgacacaagtatcccatagtgaaaagtgtcactcttaccatataattcaaaggaatttttcccgggtcctctggacctggtggaagtattcccctttaggaaactaagacctctaaacatgtcaagcctagaattctatttcctgtgtggctttttgagaataaaggtaatgaggcccactcctgcttcaactgtttggtttccagamccatgttggatgtccacattctaaatttccctaagtagcaatttaatgtgatcaaataacaatcccataacaaggacagaacaatggttttgttgctggcaggttggccttttgatagcagaaggagttacatgaactttgataagtcagaaccaatgtttcaggatccattctgagcctctactttggctaggcagtgggatagtcaatgagaatctggccgatgtcaactggttgagtcactttatctacttggtttgttgaatacgttt

SEQ ID NO: 274412 - DNA, 510 bp, Homo sapiens
tatcttaacttttcttccctggtgatcatttgacacaagtatcccatagtgaaaagtgtcactcttaccatataattcaaaggaatttttcccgggtcctctggacctggtggaagtattcccctttaggaaactaagacctctaaacatgtcaagcctagaattctatttcctgtgtggctttttgagaataaaggtaatgaggcccactcctgcttcaactgtttggtttccagaaccatgttggatgtccacattctaaatttccctaagtagcaatttaatgtgatcaaataacaatcccataacaaggacagaacaatggttttgttgctggcaggttggccttttgatagcagaaggagttacatgaactttgataagtcagaaccaatgtttcaggatccaytctgagcctctactttggctaggcagtgggatagtcaatgagaatctggccgatgtcaactggttgagtcactttatctacttggtttgttgaatacgttt

SEQ ID NO: 274413 - DNA, 629 bp, Homo sapiens
agcaaagattaagagctctctttgattagagattcaagaaactatctataaagaaaagagtaggtgaatgttagccatcaaaaaccagtgatcaagttttaccttataaatctagagagatttatttcacctaacagttcttatctcttctggttgttctcgaatggaataaatatattccagcattttcttcaggttcactaacaatggaaaaaaaacagatatgggcttgatttgttttggtatagrcttgttctataacctaggttgtgtttctcaatttaagtacaaggcattctgacttaatttcttgactttttactcgaaatgtttttgcttatggaatcctgctgtaaactttaaaatttagtttagctttactataagtacatggagtatgactgggcttatgcatgaattaggaaagtgattcagatttataatgctgcttttttcccccagctcaaataaagtgtttttagtggacagccacagccaaaattatgactgacattgcatcccatttccctggatctcagatatcaaaacaatacagattagaccttaagttcatcacttcctgtggatttcgatttaaactttgctaaattcaaaattcctaaattatg

SEQ ID NO: 274414 - DNA, 648 bp, Homo sapiens
tcttctcttctagctattttaaaatacgtaataaattttgtaaactatagtctccctattatgctaccaaacrctcagtcttatcccctctgtctaattgtgtttttgtatccattaaccaactgctctttatccccttcttaatacacttcctagcctctggtaagcactattgtatttgctacctttatgagatcatttttttcagctcccacatatgagtgagaacacttgatatttgtctttctgtgtctggcttattgaatttcacataattttctccacttctacccatgttgctgcaaatggcaggatttcattctttttatgactgaataatattatattgtgtatatacattttctttatgcattcaaccattgatgaccacttaaagtgattccataccttgggtattgggaagagtgctgcaatacctttaatttgtatgtttagactaggccagaagctttttaatgggaggttcagtttgagaggctaaaatgaggtctctgttcggacagaagttattttgaccttttcacttctatctgtttagttatatgtgagttgagaatgtctcacaaggggataaaggggtttgtgagtgctacatataacattttttttgtgcaaagacaatgttac

SEQ ID NO: 274415 - DNA, 648 bp, Homo sapiens
tcttctcttctagctattttaaaatacgtaataaattttgtaaactatagtctccctattatgctaccaaacactcagtcttatcccctctgtctaattgtgtttttgtatccattaaccaactgctctttatccccttcttaatacacttcctagcctctggtaagcactattgtatttrctacctttatgagatcatttttttcagctcccacatatgagtgagaacacttgatatttgtctttctgtgtctggcttattgaatttcacataattttctccacttctacccatgttgctgcaaatggcaggatttcattctttttatgactgaataatattatattgtgtatatacattttctttatgcattcaaccattgatgaccacttaaagtgattccataccttgggtattgggaagagtgctgcaatacctttaatttgtatgtttagactaggccagaagctttttaatgggaggttcagtttgagaggctaaaatgaggtctctgttcggacagaagttattttgaccttttcacttctatctgtttagttatatgtgagttgagaatgtctcacaaggggataaaggggtttgtgagtgctacatataacattttttttgtgcaaagacaatgttac

SEQ ID NO: 274416 - DNA, 565 bp, Homo sapiens
tcgagagattcaagaaactatccaaaactgagagcttagtttcagtaaacacatgcggtcaaaatacagtcttttcccataaactttgttgtgttgcccaatttaaatagtatcctgacttaattttctattttaaatttatttttaaaggtctaaggtaggaggaagggattgtattagtcagggttctctagagggacagaactaataggatagttgtatataaaaagaggagcttaataaggagtattaactcacatgatcacaaggtcccacaataggcagtctgcaagctgaagagaraggaagccagtctgagtcctaaagctgaagaacttggagtgcaatgttcgagggcaggaagcatccagcatgggaaagaaatgtaggctgggagactaagccagtctaccttttcaagtttttctgcctgctttatatcctggatgagctggcagctgattagatgttgcccacccagattaagtgttggtctgcccttcccaccccactgactcaaatgttaatttcctttggcaacaccctcacagacaaacccaggatc

SEQ ID NO: 274417 - DNA, 565 bp, Homo sapiens
tcgagagattcaagaaactatccaaaactgagagcttagtttcagtaaacacatgcggtcaaaatacagtcttttcccataaactttgttgtgttgcccaatttaaatagtatcctgacttaattttctattttaaatttatttttaaaggtctaaggtaggaggaagggattgtattagtcagggttctctagagggacagaactaataggatagttgtatataaaaagaggagcttaataaggagtattaactcacatgatcacaaggtcccacaataggcagtctgcaagctgaagagagaggaagccagtctgagtcctaaagctgamgaacttggagtgcaatgttcgagggcaggaagcatccagcatgggaaagaaatgtaggctgggagactaagccagtctaccttttcaagtttttctgcctgctttatatcctggatgagctggcagctgattagatgttgcccacccagattaagtgttggtctgcccttcccaccccactgactcaaatgttaatttcctttggcaacaccctcacagacaaacccaggatc

SEQ ID NO: 274418 - DNA, 565 bp, Homo sapiens
tcgagagattcaagaaactatccaaaactgagagcttagtttcagtaaacacatgcggtcaaaatacagtcttttcccataaactttgttgtgttgcccaatttaaatagtatcctgacttaattttctattttaaatttatttttaaaggtctaaggtaggaggaagggattgtattagtcagggttctctagagggacagaactaataggatagttgtatataaaaagaggagcttaataaggagtattaactcacatgatcacaaggtcccacaataggcagtctgcaagctgaagagagaggaagccagtctgagtcctaaagctgaagaacttggagtgcaatgttcgagggcaggaagcatccagyatgggaaagaaatgtaggctgggagactaagccagtctaccttttcaagtttttctgcctgctttatatcctggatgagctggcagctgattagatgttgcccacccagattaagtgttggtctgcccttcccaccccactgactcaaatgttaatttcctttggcaacaccctcacagacaaacccaggatc

SEQ ID NO: 274419 - DNA, 558 bp, Homo sapiens
attctacatagtttaaaaacatatcttgttcctttatttcaagatttagtttaatttaattaccttaaaacattgcaaaatatttcatagcaataattccctacatgtcactttattaatgagaaaaaatttggggttttccttaatttaatggagcattttattatatttaaaaagggctctgtagaagtaagatctcctattggataaaacaaatctaaaaagtagtagaaacctgtcaataatgcccaagagtccaataaaatgtttgatttctttcatggtatgttatgcttcatcagatttcctaatctaagctgcagttcacattgacattctgacacagttcactgataagtaatttctcttctagctgtggcataacaacctcaaattcaggttattttgggaacggggatttgttttgcataaatcatattttaaaaataatttccaaatgagattaattgatgataggaaaattattcttcaaagagatacataactgggytttgagtgtttttctagacttaaagacacaattgtcttttggtggtt

SEQ ID NO: 274420 - DNA, 653 bp, Homo sapiens
tgtcattagctacgtcagctactttttcaacttgctaattgtaataccttaattaacatgtctaaaaaatgtgctgctccattgtttcttcctaaatagaaagtttcccaattaaaaaaattcaaaagtgttctccaaaaattgaacatagttatttatagatttgattttaattattctttagtcattttttataatcttatattactttttgagagtaatgtaatgtaaattacttcccaaaagtaatataaattacttttccttttgttccttttattgcttctgtattttcttattttaatattcaaaagattacactgctcattaattaattcattagttactttactcctttcacaattgtttattctatatctgtaatattcccagtatatttttaaatacagaaaattagaamgaaatacgatctggtttcttctctcaaaaatctcaaaatcagctaagtgataaataaatataaatatgagttattttatgatttcaaaagagtattaagcacctgtgattgaggaaatttgccttgaggaggtaatgcttgagctaaatctggagaaattattttgaagtcattgggcatagaaagagtagaatgcagtattttctgattattttatatagtttagaattgc

SEQ ID NO: 274421 - DNA, 653 bp, Homo sapiens
tgtcattagctacgtcagctactttttcaacttgctaattgtaataccttaattaacatgtctaaaaaatgtgctgctccattgtttcttcctaaatagaaagtttcccaattaaaaaaattcaaaagtgttctccaaaaattgaacatagttatttatagatttgattttaattattctttagtcattttttataatcttatattactttttgagagtaatgtaatgtaaattacttcccaaaagtaatataaattacttttccttttgttccttttattgcttctgtattttcttattttaatattcaaaagattacactgctcattaattaattcattagttactttactcctttcacaattgtttattctatatctgtaatattcccagtatatttttaaatacagaaaattagaacgaaatacgatctggtttcttctctcaaaaatctcaaaatcagctaagtgataaataaatataaatatgagttattttatgatttcaaaagagtattaagcacctgtgattgaggaaatttgccttgaggaggtaatgcttgagctaaawctggagaaattattttgaagtcattgggcatagaaagagtagaatgcagtattttctgattattttatatagtttagaattgc

SEQ ID NO: 274422 - DNA, 653 bp, Homo sapiens
tgtcattagctacgtcagctactttttcaacttgctaattgtaataccttaattaacatgtctaaaaaatgtgctgctccattgtttcttcctaaatagaaagtttcccaattaaaaaaattcaaaagtgttctccaaaaattgaacatagttatttatagatttgattttaattattctttagtcattttttataatcttatattactttttgagagtaatgtaatgtaaattacttcccaaaagtaatataaattacttttccttttgttccttttattgcttctgtattttcttattttaatattcaaaagattacactgctcattaattaattcattagttactttactcctttcacaattgtttattctatatctgtaatattcccagtatatttttaaatacagaaaattagaacgaaatacgatctggtttcttctctcaaaaatctcaaaatcagctaagtgataaataaatataaatatgagttattttatgatttcaaaagagtattaagcacctgtgattgaggaaatttgccttgaggaggtaatgcttgagctaaatctggagaaattattttgaaktcattgggcatagaaagagtagaatgcagtattttctgattattttatatagtttagaattgc

SEQ ID NO: 274423 - DNA, 578 bp, Homo sapiens
ttgggcatagaaagagtagaatgcagtattttctgattattttatatagtttagaattgctgagtatgagattcaaatgggacaatttaggaagatgatagaaaaaagacacatagggcaatataaaagcataaaaagaaatccggaatcattttgcaggttatagaagccatgcaaaacacttggtaagtaaattttgaatagattcacaatttagcaatatatgtctggtcaatatatgttagctaaattgaaraggctgtaactaaaggggataataacaactaggggactactttgcagttgcaggtccaaaacctacatgctgaaagtagagtaaaaagtaggtggttaatgcaataaatattaaataatttgtcacactcttggggaaaatagaggagttgacaaagatgaccccgagtgcagttggcataattatagaaattataagtaaatagatatatttagaatgactgtattatcaataatgatatttaacactaataataataatattagctaacattgatttctgactatatgccaggcaatgtgatgaccactttatattcttg

SEQ ID NO: 274424 - DNA, 636 bp, Homo sapiens
aggtggttaatgcaataaatattaaataatttgtcacactcttggggaaaatagaggagttgacaaagatgaccccgagtgyagttggcataattatagaaattataagtaaatagatatatttagaatgactgtattatcaataatgatatttaacactaataataataatattagctaacattgatttctgactatatgccaggcaatgtgatgaccactttatattcttgtataatattttgaaaatgtatattattaaaatttactaactacatactcaccatttctctataaatcttttttgtatttctctataagtcttgaatatatgtttattcagcaactctcttgcaataaagagattattaacttaaaatattaatttgttctattgatcaactaatttatgttagagaaaagttcattataaaattcataatttttttatccaggagtctttctctatttctctattccaattacaggctcactccctttgataataattatatactttctactctttttcaattatcttaagttttttccatctctaccatcaggtgaatagccatgcttcatatttaactgatgaaaacatctcttttgatccaataaaaaaagatttccaca

SEQ ID NO: 274425 - DNA, 578 bp, Homo sapiens
ttgggcatagaaagagtagaatgcagtattttctgattattttatatagtttagaattgctgagtatgagattcaaatgggacaatttaggaagatgatagaaaaaagacacatagggcaatataaaagcataaaaagaaatccggaatcattttgcaggttatagaagccatgcaaaacacttggtaagtaaattttgaatagattcacaatttagcaatatatgtctggtcaatatatgttagctaaattgaagaggctgtaactaaaggggataataacaactaggggactactttgcagttgcaggtccaaaacctacatgctgaaagtagagtaaaaagtaggtggttaatgcaataaatattaaataatttgtcacactcttggggaaaatagaggagttgacaaagatgaccccgagtgcagttggcataattatagaaattataagtaaatagatatatttagaatgactgtattatcaataatgatatttaacactaataataataatattagctarcattgatttctgactatatgccaggcaatgtgatgaccactttatattcttg

SEQ ID NO: 274426 - DNA, 610 bp, Homo sapiens
tttgtctctctgtgcctggtttatttcacttaacataatgtcctccaggttcatccatgttatcacaagtgtcagagttccctgcatcacgggttttaactcacacctttgatgtacttggctctagtaagtacaagcgtggggaaaatgtaaaactcttttggtgcaagcattctgcatcatgtttcagactttcaaagaaaattttaagtcatcctcaacaacatctcattaatttgaggctagagaagatactgactataaccctgacaaaagccacttgagcaaatccgtcagaatcattctgcaggtataaatttttaaatcacaaactcatgagggaaaatgtaacttcatttctccataacccagaaagctttctagtaggagctggaattctggctgatacagagactggaagtagtcacaacaggtgtctctgtccagttaagggataagcctgtcagttcgtgtctgtattggtcgcagacccttgaaaattccttcaggggttcttttacttccccttcatccccagagttaactctggtctcttctggctttgctaattgccttggtaaagcrgggaggggagtgtgttcaagcccca

SEQ ID NO: 274427 - DNA, 564 bp, Homo sapiens
gttcctagtctgcgagatagcagaaaaattaaaacacctttagcctactcaattccctttcaaactttttctacctcagaccaaaagatgcttttggacttcagaagtgaagattaatgtcttggttcacagtctctgcaatgatccccttttctctacacagaagactcaagacaatctgagttaggagcaaakacggaggtctgagggcactggcgaaaaatttcagtgagcttggaagcagggtcatttatgttaattgtacatgtcatcccacacagaaatggcctttataggaattatcagtgtcgtgaagaaagtttttatttccatttttaaacctcatatccccccatcaaaagctcccatcatgagtttctggctgacttacgccaggactcacagaatgattcatccctacatgaaaaagtattttcaccagcctcaaaggttttcaggaattactagatcaaagaattgttaaagaaactttccaaaagctcattctacttgcccctccaagcaaaatactaactttgtgatggattttagacattcctagtc

SEQ ID NO: 274428 - DNA, 551 bp, Homo sapiens
acatcatgttcccatctggcaggagtgcacagcaggcatggaaaatggggatgagtgcgtccaagttagttccaattttcaaacattcstcccgcaccgcctgttcagttgcctgggtaaaactgccccacgcagagaagcttttaccccaggttaataaagatgctttttatatttgtatttgagttgtggtcactagcaatgttttctagtccagattgtgaaatttgtatttgttactatctttgtttttatacctcaaagaaccatttagagtcactgattcatttccataaagcaggaactttccaaaatttagtaagaatagctaagtacaaatctaaaaaaaaaattacatacttcaaaaactaaaaatgcattcactgagatgccttatatcctaattaaatattagctgaattgtaattgatcttacattttgattttgtgaaatatatattgcctttactccaaaatttactagaccaccttcttacgtatggcagtgggcattaggtggcttgtgaatttgagaactgctctatggggtt

SEQ ID NO: 274429 - DNA, 551 bp, Homo sapiens
acatcatgttcccatctggcaggagtgcacagcaggcatggaaaatggggatgagtgcgtccaagttagttccaattttcaaacattcgtcccgcaccgcctgttcagttgcctgggtaaaactgccccacgcagagaagcttttaccccaggttaataaagatgctttttatatttgtatttgagttgtggtcactagyaatgttttctagtccagattgtgaaatttgtatttgttactatctttgtttttatacctcaaagaaccatttagagtcactgattcatttccataaagcaggaactttccaaaatttagtaagaatagctaagtacaaatctaaaaaaaaaattacatacttcaaaaactaaaaatgcattcactgagatgccttatatcctaattaaatattagctgaattgtaattgatcttacattttgattttgtgaaatatatattgcctttactccaaaatttactagaccaccttcttacgtatggcagtgggcattaggtggcttgtgaatttgagaactgctctatggggtt

SEQ ID NO: 274430 - DNA, 551 bp, Homo sapiens
acatcatgttcccatctggcaggagtgcacagcaggcatggaaaatggggatgagtgcgtccaagttagttccaattttcaaacattcgtcccgcaccgcctgttcagttgcctgggtaaaactgccccacgcagagaagcttttaccccaggttaataaagatgctttttatatttgtatttgagttgtggtcactagcaatgttttctagtccagattgtgaaatttgtatttgttactatctttgtttttatacctcaaagaaccatttagagtcactgattcatttccataaagcaggaactttccaaaatttagtaagaatagctaagtacaaatctaaaaaaawaattacatacttcaaaaactaaaaatgcattcactgagatgccttatatcctaattaaatattagctgaattgtaattgatcttacattttgattttgtgaaatatatattgcctttactccaaaatttactagaccaccttcttacgtatggcagtgggcattaggtggcttgtgaatttgagaactgctctatggggtt

SEQ ID NO: 274431 - DNA, 551 bp, Homo sapiens
acatcatgttcccatctggcaggagtgcacagcaggcatggaaaatggggatgagtgcgtccaagttagttccaattttcaaacattcgtcccgcaccgcctgttcagttgcctgggtaaaactgccccacgcagagaagcttttaccccaggttaataaagatgctttttatatttgtatttgagttgtggtcactagcaatgttttctagtccagattgtgaaatttgtatttgttactatctttgtttttatacctcaaagaaccatttagagtcactgattcatttccataaagcaggaactttccaaaatttagtaagaatagctaagtacaaatctaaaaaaaaaattacrtacttcaaaaactaaaaatgcattcactgagatgccttatatcctaattaaatattagctgaattgtaattgatcttacattttgattttgtgaaatatatattgcctttactccaaaatttactagaccaccttcttacgtatggcagtgggcattaggtggcttgtgaatttgagaactgctctatggggtt

SEQ ID NO: 274432 - DNA, 525 bp, Homo sapiens
tcaccacggcaccccaaggctgtggccttctctgagcaccctgagactcagccatgtctttctctctgttttcccacaaaaccagccagtgctaaagcatatcctcctggcctacaaacagkggccatgacttccaactcatccaggctacttctgatttagtgttaggccgcccacttgatgtgtatgttcccatgctgtgtcgaccctattacttaatgaaaacacacagcactcgtttgcttctcaacttacttctcatgaaatattactactcctccccacccaatcacaatcctttgctgccaaaaatcccttgctaccctgtacattttgcccaataagggaacccctcagcacacacacacaatggcctactcagaaggctgagtcagcagaatcacatgaaccagggagttgcaggttgcagtgagccaagatcgcgccacagtgctccaacctggcgacagagcaagactctgtctcaaaacaaacaaacaaacaaaaaacaaaaaaaatgcctca

SEQ ID NO: 274433 - DNA, 525 bp, Homo sapiens
tcaccacggcaccccaaggctgtggccttctctgagcaccctgagactcagccatgtctttctctctgttttcccacaaaaccagccagtgctaaagcatatcctcctggcctacaaacagtggccatgacttccaactcatccaggctacttctgatttagtgttaggccgcccacttgatgtgtatgttcccatgctgtgtcgaccctattacttaatgaaaacacacagcactcgtttgcttctcaacttacttctcatgaaatattactactcctccccacccaatcacaatcctttgctgccaaaaatcccttgctaccctgtacattttgcccaataagggaacccctcagcacacacacacaatggcctactcagaaggctgagtcagcagaatcacatgaaccagggagttgcaggttgcagtgagccaagatcgcgccacagygctccaacctggcgacagagcaagactctgtctcaaaacaaacaaacaaacaaaaaacaaaaaaaatgcctca

SEQ ID NO: 274434 - DNA, 525 bp, Homo sapiens
tcaccacggcaccccaaggctgtggccttctctgagcaccctgagactcagccatgtctttctctctgttttcccacaaaaccagccagtgctaaagcatatcctcctggcctacaaacagtggccatgacttccaactcatccaggctacttctgatttagtgttaggccgcccacttgatgtgtatgttcccatgctgtgtcgaccctattacttaatgaaaacacacagcactcgtttgcttctcaacttacttctcatgaaatattactactcctccccacccaatcacaatcctttgctgccaaaaatcccttgctaccctgtacattttgcccaataagggaacccctcagcacacacacacaatggcctactcagaaggctgagtcagcagaatcacatgaaccagggagttgcaggttgcagtgagccaagatcgcgccacagtrctccaacctggcgacagagcaagactctgtctcaaaacaaacaaacaaacaaaaaacaaaaaaaatgcctca

SEQ ID NO: 274435 - DNA, 570 bp, Homo sapiens
aaataaactaagagttgtagttaaaacataataaaaatttttttaaacgcttctttactttgccaattttgtcatccaaatagggataattaaataatctgggacaacaaaatgtatactgtggcagaacaaaagaatccaaggtaaaaaaaaaaggacatggcagaatttaaggtctttgataaataatactcagatattgcaaggggtatacaaagagttcaaacactgtcaaagtcaggtgtgacttgttcaaggcacacaaagatcataccaagggaaacccagcaggacaagaaagccgaagtgatcaacttattcctgtcaaatacattcttggagtttcaaatgtgaacaaatatgcttattctgaattttacttccttctgcaaagtattaatcaattataattattttgttaaawgaaaatccaatgagagtcaccaaggagcaatacaaggaaaaaggcagactcaccatctcttcgattaagccttgaaaaccccgggccgtggctgctggacagctctgaggagctgctgaaggatgacctaggcaaggcagaggcca

SEQ ID NO: 274436 - DNA, 606 bp, Homo sapiens
ttcctgtcaaatacattcttggagtttcaaatgtgaacaaatatgcttattctgaattttacttccttctgcaaagtattaatcaattataattattttgttaaatgaaaatccaatgagagtcaccaaggagcaatacaaggaaaaaggcagactcaccatctcttcgattaagccttgaaaaccccgggccgtggctgctggacagctctgaggagctgctgaaggatgacctaggcaaggcagaggccagtggrgcatcacagtcagctgccaggaaaaataccgtgatatggttaacactcagattgcagcttgggagaaataatagtccaaaaatatatatgaatatattctaggatgtatggcaatcatcactccttttttaattctttacaatttttaaaatttacattgcagcataatttacagagagtaaaattccagagaatttatttgatgtttttaaagtgtacagctctattcattttgacaaatgcattcagccttgtaacctccaccataatgaagacataaaacaggtccattagccctcaaagttccctaatgtcccacattttctcaattctgcaagatgtctgggta

SEQ ID NO: 274437 - DNA, 583 bp, Homo sapiens
aggttctttaggtacacacatacagaggtagtgtgaattctgtgcccaaacctcaatagcggctagaaattctcacagtgccccagcacagaacctgtgggggatgggaaaagtgaaatgcaccaggtgttcaggtcagagttacctgcgtgaagccaggacccatgagaggcaacacctgtagtgatgaactggaaaaagcccactctgtagacccctccagagggaattactgcgggctacttgcctacaggagatggaggctcctcctttttgcctgataacttgagcattgcaggaayttgctctgcctttccaacccaaggacccctgcatgtcaccatgtcaccctcacctcagggtgactctctattgcttcagctctggtctaaaagaattgctgggggttaagtagtgtttgacccagatcatcttatttgtcctaagaccataaggaccctcagagccttcttgcccctggtgttccccaccgtcaaacttgaggagcccctgggaccattcccaccttgggtagctcttttcctatgcgtagccatgggtaacagaagcaacccagaggtta

SEQ ID NO: 274438 - DNA, 583 bp, Homo sapiens
aggttctttaggtacacacatacagaggtagtgtgaattctgtgcccaaacctcaatagcggctagaaattctcacagtgccccagcacagaacctgtgggggatgggaaaagtgaaatgcaccaggtgttcaggtcagagttacctgcgtgaagccaggacccatgagaggcaacacctgtagtgatgaactggaaaaagcccactctgtagacccctccagagggaattactgcgggctacttgcctacaggagatggaggctcctcctttttgcctgataacttgagcattgcaggaatttgctctgcctttccaacccaaggacccctgcatgtcaccatgtcaycctcacctcagggtgactctctattgcttcagctctggtctaaaagaattgctgggggttaagtagtgtttgacccagatcatcttatttgtcctaagaccataaggaccctcagagccttcttgcccctggtgttccccaccgtcaaacttgaggagcccctgggaccattcccaccttgggtagctcttttcctatgcgtagccatgggtaacagaagcaacccagaggtta

SEQ ID NO: 274439 - DNA, 583 bp, Homo sapiens
aggttctttaggtacacacatacagaggtagtgtgaattctgtgcccaaacctcaatagcggctagaaattctcacagtgccccagcacagaacctgtgggggatgggaaaagtgaaatgcaccaggtgttcaggtcagagttacctgcgtgaagccaggacccatgagaggcaacacctgtagtgatgaactggaaaaagcccactctgtagacccctccagagggaattactgcgggctacttgcctacaggagatggaggctcctcctttttgcctgataacttgagcattgcaggaatttgctctgcctttccaacccaaggacccctgcatgtcaccatgtcaccctcacctcagggtgactctctattgcttcagctctggtctaaaagaattgctgggggttaagtagtgtttgacccagatcatcttatttgtcctaagaccataaggaccctcagagccttcttgcccctggtgttccccaccrtcaaacttgaggagcccctgggaccattcccaccttgggtagctcttttcctatgcgtagccatgggtaacagaagcaacccagaggtta

SEQ ID NO: 274440 - DNA, 574 bp, Homo sapiens
agaagccattgaaatgtgcagagctgttaagaaaggtttgctttctctacgctttccttaaatgtccccctcaatgtttatgccacaagagaggctttcttgatttccccagcacacatgctctctggataacactgtgcagtcgggattcccagatgtcagcaaatatgctacagagtgggctaagaaaaatagataaatacgaatccaactggctacgaactttacttacattttctaaaaaggcattttaaaactgtgaagaagctaaagtacaagaaggcaactaaggctctgctccatctatagacaagtcccacatggcccacgagtggtcacagcaggatccaagaaggaaggacatcatccagggaatagtgcctcctaagcctgtctgcctgatgttattttctctctattttctgggaaagaataaaacaaatccaagaacatctaaagtagcattgacattttttggataaaatctcttcctacattagaaaagcatgatagctgttctcatgatgcctctgtcctgcagtatcatgcaayacataaaacagcactgggcgtt

SEQ ID NO: 274441 - DNA, 599 bp, Homo sapiens
cagcaggatccaagaaggaaggacatcatccagggaatagtgcctcctaagcctgtctgcctgatgttattttctctctattttctgggaaagaataaaacaaatccaagaacatctaaagtagcattgacattttttggataaaatctcttcctacattagaaaagcatgatagctgttctcatgatgcctctgtcctgcagtatcatgcaatacataaaacagmactgggcgtttcacgtgtccctggattcctgcagtatcatgcgatacatgaaacagcactgggcatttcacatgtccctgggattcctggctgacatgtctaactctctctgtggaatcatgagctcttgaaggcacaataaaagtctttcccaacttcatgtgctctatacctagcgcagaatctgaaagatagcacatgctcaataaacttcaactgaatatttactaaatacgtaaaagagaattatcattaaccaatacacttaattaaacttagtcttcctaagttagcagagtacaatttattaaagttcaaacacaagaggcctagaggtatcagattcacatctctaataaaaataataaccaga

SEQ ID NO: 274442 - DNA, 599 bp, Homo sapiens
cagcaggatccaagaaggaaggacatcatccagggaatagtgcctcctaagcctgtctgcctgatgttattttctctctattttctgggaaagaataaaacaaatccaagaacatctaaagtagcattgacattttttggataaaatctcttcctacattagaaaagcatgatagctgttctcatgatgcctctgtcctgcagtatcatgcaatacataaaacagcactgggcgtttcacgtgtccctggattcctgcagtatcatgcgatacatgaaacagcactgggcatttcacatgtccctgggattcctggctgacatgtctaactctctctgtggaatcatgagctcttgaaggcacaataaaagtctttcccaacttcatgtgctctatacctagcgcagaatctgaaagatagcacatgctcaataaacttcaactgaatatttactaaataygtaaaagagaattatcattaaccaatacacttaattaaacttagtcttcctaagttagcagagtacaatttattaaagttcaaacacaagaggcctagaggtatcagattcacatctctaataaaaataataaccaga

SEQ ID NO: 274443 - DNA, 572 bp, Homo sapiens
acagctggaaacaaaattgctgaaattttccatttcgcctttggaaaattcaagagtcaatagcatctgtctgccaaagagtcaccttgtaatgaagaaaatttctggcacaggcttgaataaatcttgcccttcagaaaggcaataaattcgggcgyggtggctcacacctgtaatcccaacactttgggagaccaaggtgggtggatcacaaggtcaggagatcgagaccatcctggctaatacggtgaaaccccgtctctactaaaaatacaaaaaattagctgggcatggtggcacgtgcccatagtcccagcttcccaggaggctgaagcaggagaatcgcttgaacctgggaggaggaggttgcagtgagcccagatggtgccagtacactccaggctgggtgacagagaaagactccgtcttaaaaaaaaaaaagaaagaaagaaaggcactaaattttataaaataaaagaacataagaacatatctggtacctaagtttattgttttttccctatcattttgaattctgtaaacactttctttctagaaagaattgtacacta

SEQ ID NO: 274444 - DNA, 572 bp, Homo sapiens
acagctggaaacaaaattgctgaaattttccatttcgcctttggaaaattcaagagtcaatagcatctgtctgccaaagagtcaccttgtaatgaagaaaatttctggcacaggcttgaataaatcttgcccttcagaaaggcaataaattcgggcgtggtggctcacacctgtaatcccaacactttgggagaccaaggygggtggatcacaaggtcaggagatcgagaccatcctggctaatacggtgaaaccccgtctctactaaaaatacaaaaaattagctgggcatggtggcacgtgcccatagtcccagcttcccaggaggctgaagcaggagaatcgcttgaacctgggaggaggaggttgcagtgagcccagatggtgccagtacactccaggctgggtgacagagaaagactccgtcttaaaaaaaaaaaagaaagaaagaaaggcactaaattttataaaataaaagaacataagaacatatctggtacctaagtttattgttttttccctatcattttgaattctgtaaacactttctttctagaaagaattgtacacta

SEQ ID NO: 274445 - DNA, 572 bp, Homo sapiens
acagctggaaacaaaattgctgaaattttccatttcgcctttggaaaattcaagagtcaatagcatctgtctgccaaagagtcaccttgtaatgaagaaaatttctggcacaggcttgaataaatcttgcccttcagaaaggcaataaattcgggcgtggtggctcacacctgtaatcccaacactttgggagaccaaggtgggtggatcacaaggtcaggagatcgagaccatcctggctaatacggtgaaaccccgtctctactaaaaatacaaaaaattagctgggcatggtggcacgtgcccatagtcccagcttcccaggaggctgaagcaggagaatcgcttgaacctgggaggaggaggttgcagtgagcccagatggtgccagtacactccaggctgggygacagagaaagactccgtcttaaaaaaaaaaaagaaagaaagaaaggcactaaattttataaaataaaagaacataagaacatatctggtacctaagtttattgttttttccctatcattttgaattctgtaaacactttctttctagaaagaattgtacacta

SEQ ID NO: 274446 - DNA, 542 bp, Homo sapiens
tttggcttgctgcacttccctaggcttgttgatttagtctcggcgattagctctgcctaggttcctctctccccactctatggtcttggtttgtcccctgacccctgcctggcatcactcttagctttccacttctccttgacaagtattcccagcatgctttgtgattcccagcatggtgcctatgaacggtttgggacagaaaccatttcttagtattatgttcatgaaagacagcagaagattaaaattagcctaagggcttcctgtatacaaatcaacattgcattcacagatgtgctagtttatgacaatttttaccacatgaatatgaaatgattaaaaaatcaatttgaggaattgcccttacctaagacagagatgatatacttttcaaaacagcgtttcatttatgttaattcttgcacttatttaataaaagtgtattgagcacctaccatgtkcaaagcattatggggcataaagagagacatagttctaggttcaagaagtccagaatctaacatgggagggagatgtgt

SEQ ID NO: 274447 - DNA, 542 bp, Homo sapiens
tttggcttgctgcacttccctaggcttgttgatttagtctcggcgattagctctgcctaggttcctctctccccactctatggtcttggtttgtcccctgacccctgcctggcatcactcttagctttccacttctccttgacaagtattcccagcatgctttgtgattcccagcatggtgcctatgaacggtttgggacagaaaccatttcttagtattatgttcatgaaagacagcagaagattaaaattagcctaagggcttcctgtatacaaatcaacattgcattcacagatgtgctagtttatgacaatttttaccacatgaatatgaaatgattaaaaaatcaatttgaggaattgcccttacctaagacagagatgatatacttttcaaaacagcgtttcatttatgttaattcttgcacttatttaataaaagtgtattgagcacctaccatgtgcaaagcattatggggcataaagagagacatrgttctaggttcaagaagtccagaatctaacatgggagggagatgtgt

SEQ ID NO: 274448 - DNA, 390 bp, Homo sapiens
gacagattttgtccgtatctgcagaggaratgggaaaagccaaaaggaggggcgacaactgatcctatggggaggagctttacattcaaatgaggacacctcctggcatctccagatggagctccgaattcattacagtattacttaaaggattttattaaaagaccaaaccacactgcacttgtggctgaatgcctttatcagagatgaatcttacatgtgttaggacaggctgacagtggctcccaaagatatgtctatgccccaatcccgggaccctgtgaaggttacttcagaaggtaaggttctccagatgtgatcaaagaccctgagacgaggaaattatcttgaattatctggctgggtcttaaataccatcagaactgccct

SEQ ID NO: 274449 - DNA, 526 bp, Homo sapiens
aaagatatgtctatgccccaatcccgggaccctgtgaaggttacttcagaaggtaaggttctccagatgtgatcaaagaccctgagacgaggaaattatcttgaattatctggctgggtcttaaataccatcagaactgcccttgtaagagagataaaggtgatgatgaacagagccccacacaaaagagaagagggtgtgaaaatggagtgaggcacccacaaggtgaggcacacgggcaaccacaggaagccggaagaaacgaagaatggatgtccccctagagccttcrtagggagtgtggcccatcttgattttggactagggatactgatgcggaacttctggtctccagactatgacagaataaattcttttgctttaagtcagccagtttatggtcatttctcacaagggccataggaaatgaacacactgtttatatggaattacatattggatattttagggcaaatgcaggagagttccactgaaaatacgattaacatccttttgaatcgcacag

SEQ ID NO: 274450 - DNA, 526 bp, Homo sapiens
aaagatatgtctatgccccaatcccgggaccctgtgaaggttacttcagaaggtaaggttctccagatgtgatcaaagaccctgagacgaggaaattatcttgaattatctggctgggtcttaaataccatcagaactgcccttgtaagagagataaaggtgatgatgaacagagccccacacaaaagagaagagggtgtgaaaatggagtgaggcacccacaaggtgaggcacacgggcaaccacaggaagccggaagaaacgaagaatggatgtccccctagagccttcatagggagtgtggcccatcttgattttggactagggatactgatgcggaacttctggtctccagactatgacagaataaattmttttgctttaagtcagccagtttatggtcatttctcacaagggccataggaaatgaacacactgtttatatggaattacatattggatattttagggcaaatgcaggagagttccactgaaaatacgattaacatccttttgaatcgcacag

SEQ ID NO: 274451 - DNA, 618 bp, Homo sapiens
ccagactatgacagaataaattcttttgctttaagtcagccagtttatggtcatttctcacaagggccataggaaatgaacacactgtttatatggaattacatattggatattttagggcaaatgcaggagagttccactgaaaatacgattaacatccttttgaatcgcacagatactcaattccttctgagaagggcttcatgatgctaagccactctgccaggctgtggctctccccatgcttgcggctgcacttgctcctcactgtgaaaggagctaagcactgtgtcggcggaacctaacgatggaaggagaggggaaggggccaccgaattgctaatatgaggggacggcaccttaacaagcttcgaattatcakaaaaacacaaagcctattattaaagagttcaacagatggttactgtgttatcacagatgtacagaaaacctctttgttctaaaaaaagaaaaaagaaaaaaaaaaagattcctgtcctttctcagactgtctcgattaggtcaaattcactaactccacagcaggcttctctctggttccacatattgagtcagcagggagcacagcctcgggaatcgaatcacaaacagggaagg

SEQ ID NO: 274452 - DNA, 596 bp, Homo sapiens
aactccacagcaggcttctctctggttccacatattgagtcagcagggagcacagcctcgggaatcgaatcacaaacagggaagggggtgcccataccttcttcaggccacgtctggatgttcatctggatacggcgctattccattcttcccatttcatcacctgtcttttcagttcttaatgtaccttaacattatcttaatgagaggttaaataatgcttttatttagaaggtaccaaaagttcatcttgttatgaatctgaattgatctgtgcattgctatctagagggaatgcttyggaaaaagtacattttactcacagtgaacataagcagtgatggtcaatgtaaaaatctacttttttccatataaaaacttctgttttacatggtcttgatctccattcgattatcttcagtcactgtcttccctacatctcactccatggggtctgaagggggctcaccctaccacctggggccagcacagggacacgcctcaggcctggcaactgaatgccatgcctgtcctactggaaaggactggttccaggatggtcaggaagcccacgctgaatgaatgggaacagaacc

SEQ ID NO: 274453 - DNA, 583 bp, Homo sapiens
gccatgcctgtcctactggaaaggactggttccaggatggtcaggaagcccacgctgaatgaatgggaacagaacctgggactttcgaatgaataacagcagaacytgggactttcggcttgaactcttggaagaaatacccattcattcattcaacaaatatttgttgaaaatctatactgtgccaggtgtgcccctatgttctggggatataaccataaacaacagaaaaagtctctgctcctgtgaagcttatcctactgagtagaataaacaaataaaggcataatatctgtagaactcaacattgctaagaacagaaataaaggaaaatagtcacgctcctaagctggtaaacggtatgcctgaagctaaggcatagacagagctgcccaagaatgaggccagttgtagatgaaaataaaactgcaagaaggaaagaggcagactgctgatgaaagaatctgattgcctaaattcagcctggcttcaatcaagacactttggttccctttattattcaagcctatttgatcttagattttggtcacctgaaactgaaaaatgctcaataagtacactg

SEQ ID NO: 274454 - DNA, 583 bp, Homo sapiens
gccatgcctgtcctactggaaaggactggttccaggatggtcaggaagcccacgctgaatgaatgggaacagaacctgggactttcgaatgaataacagcagaacctgggactttcggcttgaactcttggragaaatacccattcattcattcaacaaatatttgttgaaaatctatactgtgccaggtgtgcccctatgttctggggatataaccataaacaacagaaaaagtctctgctcctgtgaagcttatcctactgagtagaataaacaaataaaggcataatatctgtagaactcaacattgctaagaacagaaataaaggaaaatagtcacgctcctaagctggtaaacggtatgcctgaagctaaggcatagacagagctgcccaagaatgaggccagttgtagatgaaaataaaactgcaagaaggaaagaggcagactgctgatgaaagaatctgattgcctaaattcagcctggcttcaatcaagacactttggttccctttattattcaagcctatttgatcttagattttggtcacctgaaactgaaaaatgctcaataagtacactg

SEQ ID NO: 274455 - DNA, 583 bp, Homo sapiens
gccatgcctgtcctactggaaaggactggttccaggatggtcaggaagcccacgctgaatgaatgggaacagaacctgggactttcgaatgaataacagcagaacctgggactttcggcttgaactcttggaagaaatacccattcattcattcaacaaatatttgttgaaaatctatactgtgccaggtgtgcccctatgttctggggatataaccataaacaacagaaaaagtctctgctcctgtgaagcttatcctactgagtagaataaacaaataaaggcatartatctgtagaactcaacattgctaagaacagaaataaaggaaaatagtcacgctcctaagctggtaaacggtatgcctgaagctaaggcatagacagagctgcccaagaatgaggccagttgtagatgaaaataaaactgcaagaaggaaagaggcagactgctgatgaaagaatctgattgcctaaattcagcctggcttcaatcaagacactttggttccctttattattcaagcctatttgatcttagattttggtcacctgaaactgaaaaatgctcaataagtacactg

SEQ ID NO: 274456 - DNA, 583 bp, Homo sapiens
gccatgcctgtcctactggaaaggactggttccaggatggtcaggaagcccacgctgaatgaatgggaacagaacctgggactttcgaatgaataacagcagaacctgggactttcggcttgaactcttggaagaaatacccattcattcattcaacaaatatttgttgaaaatctatactgtgccaggtgtgcccctatgttctggggatataaccataaacaacagaaaaagtctctgctcctgtgaagcttatcctactgagtagaataaacaaataaaggcataatatctgtagaactcaacattgctaagaacagaaataaaggaaaatagtcacgctcctaagctggtaaacggtatgcctgaagctaaggcatagacagagctgcccaagaatgaggccagttgtagatgaaaataaaactgcaagaaggaaagaggcagactgctgatgaaagaatctgattgcctaaattcagcctggcttcaatcaagacactttggttccctttattrttcaagcctatttgatcttagattttggtcacctgaaactgaaaaatgctcaataagtacactg

SEQ ID NO: 274457 - DNA, 592 bp, Homo sapiens
gaaattaaattaggaatctactatatctagtggtcttgaaatcaaagccccctccccattccttatcttcactgctgtgttcaaaaagactagactccagggacctgtccaaagctgggttaaatataggatgtctgagagacacccttctttcatagttcgagggtaagcatgtagctgtatgtgtgtggaggggcgggtggaggaggttagctgtatcagggtaggcataatactatattttaaatccctccttctgttataaatgtaagctgaaaatartctctgctcccagcggcagcaatcgtaaactcgcttagttctgcctgtaatttaatttaatttaacatgtgacattgagacaatgtttcttttaattcacatataacttcttcctcacccacattccagccaaataaacacatacttatagaaaaatgtgactgttttcctgggcaccccaacaattcaactgtccctaaaacaccaggttcaatttaaactctattagcttgtctgagggctaagatatctaaaaatccaagacaaattatcatttgcatatatggaggcagctctgattgaacagata

SEQ ID NO: 274458 - DNA, 594 bp, Homo sapiens
tgaacattaagtgaatggatacgtactggacactcagaaaaatgcttgggttgtagtgatatttaagtgccattataatggcagcattgtatgaacagaaattaaaaacttcaaagtacatgtgaaaaaatatttttaaaaaatctaatcattgtatgatataactagaaattttatttaagtacttaaagtaagaatatttctacttaaaattctagatgcagtgaaaaaaacattaaaaaatgaaaataaagacatttttcagacttagaaaacctgaaataattcatctccaacatagccactttacaataaatgttaaagaaagtttttaggcagaagaaaattgaaaaactgatactagatggaaatataaatgcatacaaaggactgtgggacactggacatggtaactacatgaataaaactctggaatgtttttcttattatttaagyatttttaaaatataattgtttaagtaacagtaataacaatatagcatgaggtttataacacatgtagaagtcaaatttatggcagtgatggcacaatgcctatgaggagaaaaatggaagtatgctattcaaaaattt

SEQ ID NO: 274459 - DNA, 561 bp, Homo sapiens
aaaaccaccagcctagatttctgcacactgtaaaattatccttcaaaagtaataagaactaaagttcttctcagacaaacaaaacctgaaggcattgttactggtagacctaccttgcaagaaatgttaacrgaagttcagaaagaaaatgatgtaggtcagacactccaatctacataaataaaagaagagagtcaaagaattaataagtaaaagtaaagtaaaacattcatttttttgttcttaattgatcaaagacataatagtttgctcaaaataataatagcaacaatatatggttatgtacgcatatatatatgcttttgcatacttttgtgtacatgaagtgagagatagcaatgataaaagggaaaggaaggaagaattaggaatattgtgttattaatatatcttctacctgtgaagtggtatagtgtcatttgaaagtgtacttggattagttgtaaaaatatattgcgaactctaggactaatgttttaaaactttaaaaaagtataattgatatgctaagggaggagagaaaatgaaattatataaagt

SEQ ID NO: 274460 - DNA, 561 bp, Homo sapiens
aaaaccaccagcctagatttctgcacactgtaaaattatccttcaaaagtaataagaactaaagttcttctcagacaaacaaaacctgaaggcattgttactggtagacctaccttgcaagaaatgttaacggaagttcagaaagaaaatgatgtaggtcagacactccaatctacataaataaaagaagagagtcaawgaattaataagtaaaagtaaagtaaaacattcatttttttgttcttaattgatcaaagacataatagtttgctcaaaataataatagcaacaatatatggttatgtacgcatatatatatgcttttgcatacttttgtgtacatgaagtgagagatagcaatgataaaagggaaaggaaggaagaattaggaatattgtgttattaatatatcttctacctgtgaagtggtatagtgtcatttgaaagtgtacttggattagttgtaaaaatatattgcgaactctaggactaatgttttaaaactttaaaaaagtataattgatatgctaagggaggagagaaaatgaaattatataaagt

SEQ ID NO: 274461 - DNA, 561 bp, Homo sapiens
aaaaccaccagcctagatttctgcacactgtaaaattatccttcaaaagtaataagaactaaagttcttctcagacaaacaaaacctgaaggcattgttactggtagacctaccttgcaagaaatgttaacggaagttcagaaagaaaatgatgtaggtcagacactccaatctacataaataaaagaagagagtcaaagaattaataagtaaaagtaaagtaaaacattcatttttttgttcttaattgatcaaagacataatagtttgctcaaaataataatagcaacaatatatggttatgtaygcatatatatatgcttttgcatacttttgtgtacatgaagtgagagatagcaatgataaaagggaaaggaaggaagaattaggaatattgtgttattaatatatcttctacctgtgaagtggtatagtgtcatttgaaagtgtacttggattagttgtaaaaatatattgcgaactctaggactaatgttttaaaactttaaaaaagtataattgatatgctaagggaggagagaaaatgaaattatataaagt

SEQ ID NO: 274462 - DNA, 561 bp, Homo sapiens
aaaaccaccagcctagatttctgcacactgtaaaattatccttcaaaagtaataagaactaaagttcttctcagacaaacaaaacctgaaggcattgttactggtagacctaccttgcaagaaatgttaacggaagttcagaaagaaaatgatgtaggtcagacactccaatctacataaataaaagaagagagtcaaagaattaataagtaaaagtaaagtaaaacattcatttttttgttcttaattgatcaaagacataatagtttgctcaaaataataatagcaacaatatatggttatgtacgcatatatatatgcttttgyatacttttgtgtacatgaagtgagagatagcaatgataaaagggaaaggaaggaagaattaggaatattgtgttattaatatatcttctacctgtgaagtggtatagtgtcatttgaaagtgtacttggattagttgtaaaaatatattgcgaactctaggactaatgttttaaaactttaaaaaagtataattgatatgctaagggaggagagaaaatgaaattatataaagt

SEQ ID NO: 274463 - DNA, 515 bp, Homo sapiens
atatatttatatgtatgaaaatataaaattttgaaaagttgaatatttcaagccaattatgtagatgtccttgtccttccctgagctgctgactcaygttccatgaagcgggatgggtctcacaggcctgtcaggatgcaggctgtgatgtgaaggccgctcgacgctcacaggattggacgggtttgtgaaggaatttgcagcgagccttagttagctccttaacatttcctttgagcaacatcagtgcttttgacgttttgcactactgtataaaactgtaagtgtatgcagagatgtatgtttctgaataaatcacaaaattgacaagcaactgccatgcattgttttttgtatcatagcttactgataaagtacagactgcaacatttacttattcaaatacctttaaagatctggtatttttttgcttctacttcccaggaatttgacctcagggacattttctattatttccatatctattgaaatgaactcaaatcaaaaatgaggat

SEQ ID NO: 274464 - DNA, 473 bp, Homo sapiens
tttataataattatggccttcaaccatgtgaagtttgtggagcactgagatttcttggggcgattttgtaacagctaattcttaacagcaatgttatttcaggctttttggccattccctgttacaactgctgatcttttattcctataatggtacagaattctttgagaaaaataaattcatcttttcattcatttaaggaaaaattgtcagcacgagcctatggctataatgttctccatcatttaaagaataaaaggaataatctggttgaaattgaattatctaagcttatatatggttttgattcaatggttaaygtgcatttttaacaagtgatatggtttggctgcaacatttacttattcaaatacctttaaagatctgttttttttttttttttttttttgcctgtccttcccaggaatttgatgtcaaatgcattttctattatttccatatctattgaaatg

SEQ ID NO: 274465 - DNA, 473 bp, Homo sapiens
tttataataattatggccttcaaccatgtgaagtttgtggagcactgagatttcttggggcgattttgtaacagctaattcttaacagcaatgttatttcaggctttttggccattccctgttacaactgctgatcttttattcctataatggtacagaattctttgagaaaaataaattcatcttttcattcatttaaggaaaaattgtcagcacgagcctatggctataatgttctccatcatttaaagaataaaaggaataatctggttgaaattgaattatctaagcttatatatggttttgattcaatggttaatgtgcatttttaacaagtgatatggtttggctgcaacatttacttattcaaatacctttaaagatctgtttttttttttttttkttttttgcctgtccttcccaggaatttgatgtcaaatgcattttctattatttccatatctattgaaatg

SEQ ID NO: 274466 - DNA, 584 bp, Homo sapiens
aaatgaaaaataaaatgatattactagaatatacttgtctaaacttttactttgagaaaacagaaaatcaaacacattgttctcacggygttaactttcaaagaaatgatctgtaatttatctggtggaattcaatgcagttattttgtttataacatttttcaaaagctgcggttttccctgggtgtgtgtgggcacaatgccattgcgataacactcatcttttgcagagtgctgaaagagtgagccaggacagcctttcgacattgaacaaggcaattcccaatctcttggtgggtgaatggaggaagagtgatatcctgattgatgcctctacaattacttaaaaatatatggacactctagaaaattactctttttggaccatcccctcaggtcccttaaatatctgtgtcccttaaatatctgtgtccctttactgagcagcaatttgggtcagaaaaaatgggctctgaggatgctcagaaacaaaagtgttttggggagaaagatatggttctcaaggcctggagaggcaaaccatgtctagaaaaggtccctgatgatagaactccctgagtatt

SEQ ID NO: 274467 - DNA, 584 bp, Homo sapiens
aaatgaaaaataaaatgatattactagaatatacttgtctaaacttttactttgagaaaacagaaaatcaaacacattgttctcacggcgttaactttcaaagaaatgatctgtaatttatctggtggaattcaatgcagttattttgtttataacatttttcaaaagctrcggttttccctgggtgtgtgtgggcacaatgccattgcgataacactcatcttttgcagagtgctgaaagagtgagccaggacagcctttcgacattgaacaaggcaattcccaatctcttggtgggtgaatggaggaagagtgatatcctgattgatgcctctacaattacttaaaaatatatggacactctagaaaattactctttttggaccatcccctcaggtcccttaaatatctgtgtcccttaaatatctgtgtccctttactgagcagcaatttgggtcagaaaaaatgggctctgaggatgctcagaaacaaaagtgttttggggagaaagatatggttctcaaggcctggagaggcaaaccatgtctagaaaaggtccctgatgatagaactccctgagtatt

SEQ ID NO: 274468 - DNA, 584 bp, Homo sapiens
aaatgaaaaataaaatgatattactagaatatacttgtctaaacttttactttgagaaaacagaaaatcaaacacattgttctcacggcgttaactttcaaagaaatgatctgtaatttatctggtggaattcaatgcagttattttgtttataacatttttcaaaagctgcggttttccctgggtgtgtrtgggcacaatgccattgcgataacactcatcttttgcagagtgctgaaagagtgagccaggacagcctttcgacattgaacaaggcaattcccaatctcttggtgggtgaatggaggaagagtgatatcctgattgatgcctctacaattacttaaaaatatatggacactctagaaaattactctttttggaccatcccctcaggtcccttaaatatctgtgtcccttaaatatctgtgtccctttactgagcagcaatttgggtcagaaaaaatgggctctgaggatgctcagaaacaaaagtgttttggggagaaagatatggttctcaaggcctggagaggcaaaccatgtctagaaaaggtccctgatgatagaactccctgagtatt

SEQ ID NO: 274469 - DNA, 584 bp, Homo sapiens
aaatgaaaaataaaatgatattactagaatatacttgtctaaacttttactttgagaaaacagaaaatcaaacacattgttctcacggcgttaactttcaaagaaatgatctgtaatttatctggtggaattcaatgcagttattttgtttataacatttttcaaaagctgcggttttccctgggtgtgtgtgggcacaatgccattgcgataacactcatcttttgcagagtgctgaaagagtgagccaggacagcctttcgacattgaacaaggcaattcccaatctcttggtgggtgaatggaggaagagtgatatcctgattgatgcctcyacaattacttaaaaatatatggacactctagaaaattactctttttggaccatcccctcaggtcccttaaatatctgtgtcccttaaatatctgtgtccctttactgagcagcaatttgggtcagaaaaaatgggctctgaggatgctcagaaacaaaagtgttttggggagaaagatatggttctcaaggcctggagaggcaaaccatgtctagaaaaggtccctgatgatagaactccctgagtatt

SEQ ID NO: 274470 - DNA, 511 bp, Homo sapiens
agctaggactacgagcacaggtcaccatacctgactttttwaaaaaattttttgtagagacagcatctcactatattgcccagactgacctcaaactgccggcctcaagcaaacttcctgcctcaacctttcaaagtgctgggattacagacattagtcaccatatctggtcaagattgtcattcttaaaggcattgatattaaaagggttattgaagattaaggttttgctatgagtgctgttagtaactgtactgttgctaagaaagctgttgttaagggcatttttgataagggtactattggtaaggttattgttcttaagggtattgctatggtttggatgtttgtcccctctaaacctcatgttgaaatttgatccccaatgttggagatggggcctaatgggaagtgtttgggtcatatgaccaaatcccttattaacagattaatctccttccttgaggctgagtgtgtcgtctatcagttcctgccagagctggttgttaaa

SEQ ID NO: 274471 - DNA, 511 bp, Homo sapiens
agctaggactacgagcacaggtcaccatacctgacttttttaaaaaattttttgtagagacagcatctcactatattgcccagactgacctcaaactgccggcctcaagcaaacttcctgcctcaacctttcaaagtgctgggattacagacattagtcaccatatctggtcaagattgtcattcttaaaggcattgatattaaaagkgttattgaagattaaggttttgctatgagtgctgttagtaactgtactgttgctaagaaagctgttgttaagggcatttttgataagggtactattggtaaggttattgttcttaagggtattgctatggtttggatgtttgtcccctctaaacctcatgttgaaatttgatccccaatgttggagatggggcctaatgggaagtgtttgggtcatatgaccaaatcccttattaacagattaatctccttccttgaggctgagtgtgtcgtctatcagttcctgccagagctggttgttaaa

SEQ ID NO: 274472 - DNA, 511 bp, Homo sapiens
agctaggactacgagcacaggtcaccatacctgacttttttaaaaaattttttgtagagacagcatctcactatattgcccagactgacctcaaactgccggcctcaagcaaacttcctgcctcaacctttcaaagtgctgggattacagacattagtcaccatatctggtcaagattgtcattcttaaaggcattgatattaaaagggttattgaagattaaggttttgctatgagtgctgttagtaactgtactgttgctaagaaagctgttgttaagggcatttttgataagggtactattggtaaggttattgttcttaagggtattgctatggtttggatgtttgtcccctctaaacctcatgttgaaatttgatccccaatgttggagatggggcctaatgggaagtgtttgggtcatatgaccaaatcccktattaacagattaatctccttccttgaggctgagtgtgtcgtctatcagttcctgccagagctggttgttaaa

SEQ ID NO: 274473 - DNA, 537 bp, Homo sapiens
accaactaaatagtttttctgtataaattacccatcctcaggtatttatttygagcaacacaaaatggtataaggcaggtgttgatgtcaaaaaagttttgtaagggcattgttctttaaggccttgaagttattgtgcaaagaaagttttgctaagggtgttattgctatgactagtgtttctaaggaaactgttgctaaaagcactttttttctcagagcattattcctaaggacttaattgctaagagaatggtagtaataatatttttgccaaggttgttgtggctaaggaagtcattgctgagggtcttttgttaaacatgctgttcttaaaggcatttttgttttgttttgttttgttttgttttgagacagggtctcactctgtcacccaagctggagtgcagttgcgtgatcacagctcactgcaggcttgaactgctgtgctcaaagtgatcctcctgcctcagtctccaaagcaactgggacaacaagcacacaccaccatgcctagtgtattagactgttctcatg

SEQ ID NO: 274474 - DNA, 537 bp, Homo sapiens
accaactaaatagtttttctgtataaattacccatcctcaggtatttatttcgagcaacacaaaatggtataaggcaggtgttgatgtcaaaaaagttttgtaagggcattgttctttaaggccttgaagttattgtgcaaagaaagttttgctaagggtgttattgctatgactagtgtttctaaggaaactgttgctaaaagcactttttttctcagagcattattcctaaggacttaattgctaagagaatggtagtaataatatttttgccaaggttgttgtggctaaggaagtcattgctgaggktcttttgttaaacatgctgttcttaaaggcatttttgttttgttttgttttgttttgttttgagacagggtctcactctgtcacccaagctggagtgcagttgcgtgatcacagctcactgcaggcttgaactgctgtgctcaaagtgatcctcctgcctcagtctccaaagcaactgggacaacaagcacacaccaccatgcctagtgtattagactgttctcatg

SEQ ID NO: 274475 - DNA, 537 bp, Homo sapiens
accaactaaatagtttttctgtataaattacccatcctcaggtatttatttcgagcaacacaaaatggtataaggcaggtgttgatgtcaaaaaagttttgtaagggcattgttctttaaggccttgaagttattgtgcaaagaaagttttgctaagggtgttattgctatgactagtgtttctaaggaaactgttgctaaaagcactttttttctcagagcattattcctaaggacttaattgctaagagaatggtagtaataatatttttgccaaggttgttgtggctaaggaagtcattgctgagggtcttttgttaaacatgctgttcttaaaggcatttttgttttgttttgttttgttttgttttgagacagggtctcactctgtcacccaagctggagtgcagttgcrtgatcacagctcactgcaggcttgaactgctgtgctcaaagtgatcctcctgcctcagtctccaaagcaactgggacaacaagcacacaccaccatgcctagtgtattagactgttctcatg

SEQ ID NO: 274476 - DNA, 537 bp, Homo sapiens
accaactaaatagtttttctgtataaattacccatcctcaggtatttatttcgagcaacacaaaatggtataaggcaggtgttgatgtcaaaaaagttttgtaagggcattgttctttaaggccttgaagttattgtgcaaagaaagttttgctaagggtgttattgctatgactagtgtttctaaggaaactgttgctaaaagcactttttttctcagagcattattcctaaggacttaattgctaagagaatggtagtaataatatttttgccaaggttgttgtggctaaggaagtcattgctgagggtcttttgttaaacatgctgttcttaaaggcatttttgttttgttttgttttgttttgttttgagacagggtctcactctgtcacccaagctggagtgcagttgcgtgatcacagctcactgcaggcttgaactsctgtgctcaaagtgatcctcctgcctcagtctccaaagcaactgggacaacaagcacacaccaccatgcctagtgtattagactgttctcatg

SEQ ID NO: 274477 - DNA, 429 bp, Homo sapiens
tgtgccaccatgcccggctaatttttgtaatttgagtagagacggggtttcaccatgttgaccaggctggtctcaaactcctgacctcaggtgatctggcctcctcggcctcccaaagtgctgggactacaggtgtgagccactgtgccccacccaagtacattcatttttaaacaattaagaagttttgtaatgacttgtgaaatgaggtgatgaaatataattaaartaatcactattttaatggtagttctccatggaatatttcacaaaattattcagcaccttgttaagtttttaagaactaataatgaaataatataataataaaccaggaacatagtgttataaatagatacaaaatactttagagattgaagttttgtattcacagagatgggagtgaaataaagcagttgttcttataac

SEQ ID NO: 274478 - DNA, 527 bp, Homo sapiens
gatgttgctgccatggaacacgtgcctaagggcgatatttcaattggcatcgatagtaaggtcactgttgctaaggaagttatttctaagtgcattgttcctggagccattgtagttatgggtgatgttcataagagaactgttgaaggtcattgtggctaaaggcattattactattgctagtgtttctcatgatgctgtttctaccagcactgatcctaaatctcgtgttgctaagagtattgttactgagggtattactgctaagtatrttgttgcttagggtactattgcttagaatgtttttgtatattattgttaaggacactgtttctaagatcattgttcctagggtgttaatgttggcaagggacatttttgctgaaggcattgtgactaaaggcattgttgttacaggtattttcttcaaagggcattgttgggaaggggacatttctagagtcactcttgctaaagactgttgctaagaccattttactaaggtcaatgctaacagcattattacc

SEQ ID NO: 274479 - DNA, 527 bp, Homo sapiens
gatgttgctgccatggaacacgtgcctaagggcgatatttcaattggcatcgatagtaaggtcactgttgctaaggaagttatttctaagtgcattgttcctggagccattgtagttatgggtgatgttcataagagaactgttgaaggtcattgtggctaaaggcattattactattgctagtgtttctcatgatgctgtttctaccagcactgatcctaaatctcgtgttgctaagagtattgttactgagggtattactgctaagtatgttgttgcttagggtactattgcttagaatgtttttgtatattattgttaaggacactgtttctmagatcattgttcctagggtgttaatgttggcaagggacatttttgctgaaggcattgtgactaaaggcattgttgttacaggtattttcttcaaagggcattgttgggaaggggacatttctagagtcactcttgctaaagactgttgctaagaccattttactaaggtcaatgctaacagcattattacc

SEQ ID NO: 274480 - DNA, 590 bp, Homo sapiens
gccattgttgttatgttatgagtgttgtctctagggtcattgttcctaagggccatttttgttaagggtcttgatgctaaaggccatttttttaaaggacattttggtaaaggtattcatttcaagctatttgttgctaaggtcattgttgtttggggtggttgttaaggtccatgattgctaatgtaagatattgcttctaggagtgttaatgtcagtcaaaggtgttgctaagagcaactgtggcaaatagtgttatagctgagggcatttttctaatgttactgttgcttagattatgttgccaagagtcttttggctaaaagggttaatattaacaatgttgtcttaaagcattattcctgatggtgtctatgctaaggktattgttgctatgggatttgttgctaagggccattattaacaagtcattgttgtgataggcatatttttaaaggtgttggtgctaagggcaattgttcttaaggatgtttttgccaagggcattagtggtaaaaaattgttgcgaaagccatttttttctaagtgggttggtcctaatgtatcccacaccatgaaatcactacctc

SEQ ID NO: 274481 - DNA, 562 bp, Homo sapiens
ttgtctcctcaaagacctgagagctgtctctttgaaatgcaaacattcaggaagctaactcttgctcttgttgccagttcctgagggaggggaaaggcctagctttggcaagcaccttgctccagcttgcacctctgactcttttattgccatcaaaatcaacatgtagacttttttcaaacccaatgacagcccattacaatggaggccatagcaatggaggtctctacatgcaamaaaaatggtgggacagtttcctgacaacagtccaactttattccaaggataagcatgtcatgaaattattggatggcagattatgcttatctatggtcttcctttttctccttggtctcatcccaataacttacagatcctttaaaggcaaaggccaaatattcagctaagttaggcatactttagatgccaatatcaattttagctatatgggagattctacttaagatattgaggacgatcatgtgtgtacagggcaaaaaagatgggacaaagagataaggggatgggaaatcgcaccctccctccgcaccacagaccatga

SEQ ID NO: 274482 - DNA, 562 bp, Homo sapiens
ttgtctcctcaaagacctgagagctgtctctttgaaatgcaaacattcaggaagctaactcttgctcttgttgccagttcctgagggaggggaaaggcctagctttggcaagcaccttgctccagcttgcacctctgactcttttattgccatcaaaatcaacatgtagacttttttcaaacccaatgacagcccattacaatggaggccatagcaatggaggtctctacatgcaacaaaaatggtgggacagtttcctgacaacagtccaactttattccaaggataagcatgtcatgaaattattggatggcagattatgcttatctatggtcttcctttttctccttggtctcatcccaataacttacagatcctttaaaggcaaaggccaaatattcagctaagttaggcatactttagatgccaatatcaattttagctatatgggagattctacttaagatattgaggacgatcatgtgtgtacagggcaaaaaagatgggacaaagagataaggggatgggaaatcrcaccctccctccgcaccacagaccatga

SEQ ID NO: 274483 - DNA, 562 bp, Homo sapiens
ttaatggccatagacatattatgagccacacaaaccagcactaaagtagagaattttttccagaaaaggtgtgctaaaaaagcatgtaaatgaaagcttttatttgttttattttcagcaacmaagacataaaattattaggtaggccatgatacacaaacactaaccactgtaccatcctttgatgttcattgcaatggattcaatgtttgtgccccccacacaaattcatatgttgaaatcctagcccccaaagtgatgagattagaagggaggattgctgagaagtgattcagtcatgatgggccctcggaaatgggattagtgctcttatcaaagagactaggagcactggcttgcccctatcaccacatgaggacacagcaagaaagcacccatctatgaaccacaaagcaggccttcaccagacactgaatctgccaatgccgtgatcttggacttcccagcctccagaacgataagaaacacatttctgtggtttataagtcacccggtctatggtattttgttgtagcatcccaaatggacgaagacatagttc

SEQ ID NO: 274484 - DNA, 562 bp, Homo sapiens
ttaatggccatagacatattatgagccacacaaaccagcactaaagtagagaattttttccagaaaaggtgtgctaaaaaagcatgtaaatgaaagcttttatttgttttattttcagcaacaaagacataaaattattaggtaggccatgatacacaaacactaaccactgtaccatcctttgatgttcattgcaatggattcaatgtttgtgccccccacacaaattcatatgttgaaatcctagcccccaaagtgatgagattagaagggaggattgctgagaagtgattcagtcatgatgggccctcggaaatgggattagtgctcttatcaaagagactaggagcactggcttgcccctatcaccacatgaggacacagcaagaaagcacccatctatgaaccacaaagcaggccttcaccagacactgaatctgccaatgccrtgatcttggacttcccagcctccagaacgataagaaacacatttctgtggtttataagtcacccggtctatggtattttgttgtagcatcccaaatggacgaagacatagttc

SEQ ID NO: 274485 - DNA, 607 bp, Homo sapiens
ctcatttatgtgatgtttccatcmtgtgctgggttttatgctccaaatacatgtcctttcatactttaatggacacaaatgtgctttataaatattttgaaatccattttaaggtaatttattgagtgaaaattctgtgctcggtattttattggggtcagtggtggggtaggagaaggaaaggacatggcttttgccctccaaggaagttgcagggaaactgtctctgatttcattatcaaagcgaggcccctttctatttctccatttcaataccttttctactgacttcagatctatcagatgttataattatttcccacttgtgtttgtgtaactgtgttctgactatccacacattaggtgtgggctctgtgaaagcagggaccatattgatcctgttcaatgtcataccatatccctagcatagaactagtagaggcataacaaagatctgtgaaaaagtaaatgcatgcataactcagttgatcaattaatgtacatcacttggcagaagaataaaaggatcacgagagcagatgaaagaagactttatattttgcagaagaaaattttctgtgtcttcaaatgatcacaaatataatta

SEQ ID NO: 274486 - DNA, 607 bp, Homo sapiens
ctcatttatgtgatgtttccatcatgtgctgggttttatgctccaaatacatgtcctttcatactttaatggacacaaatgtgctttataaatattttgaaatccattttaaggtaatttattgagtgaaaattctgtgctcggtattttattggggtcagtggtggggtaggagaaggaaaggacatggcttttgccctcyaaggaagttgcagggaaactgtctctgatttcattatcaaagcgaggcccctttctatttctccatttcaataccttttctactgacttcagatctatcagatgttataattatttcccacttgtgtttgtgtaactgtgttctgactatccacacattaggtgtgggctctgtgaaagcagggaccatattgatcctgttcaatgtcataccatatccctagcatagaactagtagaggcataacaaagatctgtgaaaaagtaaatgcatgcataactcagttgatcaattaatgtacatcacttggcagaagaataaaaggatcacgagagcagatgaaagaagactttatattttgcagaagaaaattttctgtgtcttcaaatgatcacaaatataatta

SEQ ID NO: 274487 - DNA, 607 bp, Homo sapiens
ctcatttatgtgatgtttccatcatgtgctgggttttatgctccaaatacatgtcctttcatactttaatggacacaaatgtgctttataaatattttgaaatccattttaaggtaatttattgagtgaaaattctgtgctcggtattttattggggtcagtggtggggtaggagaaggaaaggacatggcttttgccctccaaggaagttgcagggaaactgtctctgatttcattatcaaagcgaggcccctttctatttctccatttcaataccttttctactgacttcagatctatcagatgttataattatttcccacttgtgtttgtgtaactgtgttctgactatccacacattaggtgtgggctctgtgaaagcagggaccatattgatcctgttcartgtcataccatatccctagcatagaactagtagaggcataacaaagatctgtgaaaaagtaaatgcatgcataactcagttgatcaattaatgtacatcacttggcagaagaataaaaggatcacgagagcagatgaaagaagactttatattttgcagaagaaaattttctgtgtcttcaaatgatcacaaatataatta

SEQ ID NO: 274488 - DNA, 607 bp, Homo sapiens
ctcatttatgtgatgtttccatcatgtgctgggttttatgctccaaatacatgtcctttcatactttaatggacacaaatgtgctttataaatattttgaaatccattttaaggtaatttattgagtgaaaattctgtgctcggtattttattggggtcagtggtggggtaggagaaggaaaggacatggcttttgccctccaaggaagttgcagggaaactgtctctgatttcattatcaaagcgaggcccctttctatttctccatttcaataccttttctactgacttcagatctatcagatgttataattatttcccacttgtgtttgtgtaactgtgttctgactatccacacattaggtgtgggctctgtgaaagcagggaccatattgatcctgttcaatgtcataccatatccctagcatagaactagtasaggcataacaaagatctgtgaaaaagtaaatgcatgcataactcagttgatcaattaatgtacatcacttggcagaagaataaaaggatcacgagagcagatgaaagaagactttatattttgcagaagaaaattttctgtgtcttcaaatgatcacaaatataatta

SEQ ID NO: 274489 - DNA, 415 bp, Homo sapiens
tttttgttttcaaactttctgtgaatagaatattacactgtgtatttgataattgttttctttcaatcagcatggtgtttttaaattcatctatgttatgtatattactacttcatcctctatttttgcttartagtattccttttctagctagaaagtagtatcaagatactaaaatatatttgttcatcacttgttggtaggcaactataaataaatttattgccataagcatgtgtatacaagctttctgtgagcatatgttttcatttttcctgtataaatttctacaagtgagattttggggtcatatggtaaatcagtaccaaagtattttccaaagtaatgtattattcttcattttcatcagcaatatgtgggagttctagttgttctacatctttactaatatttg

SEQ ID NO: 274490 - DNA, 415 bp, Homo sapiens
tttttgttttcaaactttctgtgaatagaatattacactgtgtatttgataattgttttctttcaatcagcatggtgtttttaaattcatctatgttatgtatattactacttcatcctctatttttgcttagtagtattccttttctagctagaaagtagtatcaagatactaaaatatatttgttcatcacttgttgrtaggcaactataaataaatttattgccataagcatgtgtatacaagctttctgtgagcatatgttttcatttttcctgtataaatttctacaagtgagattttggggtcatatggtaaatcagtaccaaagtattttccaaagtaatgtattattcttcattttcatcagcaatatgtgggagttctagttgttctacatctttactaatatttg

SEQ ID NO: 274491 - DNA, 415 bp, Homo sapiens
tttttgttttcaaactttctgtgaatagaatattacactgtgtatttgataattgttttctttcaatcagcatggtgtttttaaattcatctatgttatgtatattactacttcatcctctatttttgcttagtagtattccttttctagctagaaagtagtatcaagatactaaaatatatttgttcatcacttgttggtaggcaactataaataaatttattgccataagcatgtgtatacaagctttctgtgagcatatgttttcatttttcctgtataaatttctacaagtgagattttggggtcatatggtaaatcagtaccaaagtattttccaaagtaatgtattattyttcattttcatcagcaatatgtgggagttctagttgttctacatctttactaatatttg

SEQ ID NO: 274492 - DNA, 592 bp, Homo sapiens
taaaaaaaatctttaaaaaggtaaggcaaccttcaaatctaagatgctcagctttaaactagtaagttcttaaggatgttttttttcctccaaggaaacaattctcctctttgctgagcaataatacaggttttaatattaaataagtacacaaagtaaaagaaacagacaaaaatgtcttcatagcaaggctgttaacagatttctttcttttttttttatttttgagatggggtctcactcttgcccaggcgggagtgcagtggcacaatctcagctcactgcaacctctgcctcctcagttcaagtgattctcctgcctcagcctcccaagttgctgggatcacaggtgcctgccatcacgcccggctaatttttttgtatttttagtagagacggggttttgccatgttggccaggctggtctcaaactgctgacctcaggtgatccrcccaccttggcctcccaaagtgctgggattacaggcatgagccaccgtgcctggccagatttctaatatacgtaaagaaaaaagaaaaattttcaaatacttgtttagataagtactgatatttaaaaaaacaaccaacc

SEQ ID NO: 274493 - DNA, 595 bp, Homo sapiens
ggtaagttgtctagagcataataattagatttwctggctttcaaaaatttggattgcaataagaggaaacttcatgctatttttacaattttcagtacaaaggggtgtatatctagaaacaataaagttgacatatttgagtaccttttcaaaaaaaggtaaccataaccttttttttttttttattaaaaggaccaggtgctaaaccttggaagaatattaaggcaagagtattaaggcattttaattcagcttaagtatcatgttaagtggtgaaattcagatgtaatagaatgcataaaagtgttaatcaccagtgcttaagatggcccacagaggttgttctaccaggcatatagaaatctttctcactatgcctgtttgtgagcaggatcagtggttttgcactgcaggcacacatttcattttgtcaaatatttttgcaacctcccctctacttaatagtttaatcactacatctatacaaactacttggtcaatgagggcccattttacttgtgtcttccagaaatattttgcattaccccaaatgacatcttccagcagatcttcctcagatataaagtttccaaaa

SEQ ID NO: 274494 - DNA, 595 bp, Homo sapiens
ggtaagttgtctagagcataataattagattttctggctttcaaaaatttggattgcaataagaggaaacttcatgctatttttacaattttcagtacaaaggggtgtatatctagaaacaataaagttgwcatatttgagtaccttttcaaaaaaaggtaaccataaccttttttttttttttattaaaaggaccaggtgctaaaccttggaagaatattaaggcaagagtattaaggcattttaattcagcttaagtatcatgttaagtggtgaaattcagatgtaatagaatgcataaaagtgttaatcaccagtgcttaagatggcccacagaggttgttctaccaggcatatagaaatctttctcactatgcctgtttgtgagcaggatcagtggttttgcactgcaggcacacatttcattttgtcaaatatttttgcaacctcccctctacttaatagtttaatcactacatctatacaaactacttggtcaatgagggcccattttacttgtgtcttccagaaatattttgcattaccccaaatgacatcttccagcagatcttcctcagatataaagtttccaaaa

SEQ ID NO: 274495 - DNA, 595 bp, Homo sapiens
ggtaagttgtctagagcataataattagattttctggctttcaaaaatttggattgcaataagaggaaacttcatgctatttttacaattttcagtacaaaggggtgtatatctagaaacaataaagttgacatatttgagtaccttttcaaaaaaaggtaaccataacctwttttttttttttattaaaaggaccaggtgctaaaccttggaagaatattaaggcaagagtattaaggcattttaattcagcttaagtatcatgttaagtggtgaaattcagatgtaatagaatgcataaaagtgttaatcaccagtgcttaagatggcccacagaggttgttctaccaggcatatagaaatctttctcactatgcctgtttgtgagcaggatcagtggttttgcactgcaggcacacatttcattttgtcaaatatttttgcaacctcccctctacttaatagtttaatcactacatctatacaaactacttggtcaatgagggcccattttacttgtgtcttccagaaatattttgcattaccccaaatgacatcttccagcagatcttcctcagatataaagtttccaaaa

SEQ ID NO: 274496 - DNA, 648 bp, Homo sapiens
taaggcattttaattcagcttaagtatcatgttaagtggtgaaattcagatgtaatagaatgcataaaagtgttaatcaccagtgcttaagatggcccacagaggttgttctaccaggcatatagaaatctttctcactatgcctgtttgtgagcaggatcagtggttttgcactgcaggcacacatttcattttgtcaaatatttttgcaacctcccctctacttaatagtttaatcactacatctatacaaactacttggtcaatgagggcccattttacttgtgtcttccagaaatattttgyattaccccaaatgacatcttccagcagatcttcctcagatataaagtttccaaaaaactggcaaataaaattactatcttcagaacttttctgtatttaaaaataacaataaaaagctatgaatttacataaaattcaaaccattgtgtttatagccacagtcctccacacaattttcatgagaccattggtaaaatcatatataagcaacattcctgtattcctagaaagtgtttatatttcaaaagcactttatttttcctcagatattcccctgaagaaatttggaaagaaattgaaattgcctgtggttgtagccaattcacctgtaaagaatataaa

SEQ ID NO: 274497 - DNA, 224 bp, Homo sapiens
ttaccccaaatgacatcttccagcagatcttcctcagatataaagtttccaaaaaactggcaaataaaattactatcttcagaacttttctgtatttaaaaataacaataaaaagctatgaatttacataaaattcaaaccattgtgtttatagccacagtcctccacacaattttcatgagaccattggtaaaatcatrtataagcaacattcctgtattcct

SEQ ID NO: 274498 - DNA, 521 bp, Homo sapiens
tcatcagtcctaacaactaaatgaaactaaactacataagttaaactaaagcttgccaaaatatttttatgactttaaggctccttaataaattaatgtttacattcagggttttgaagactagtattcaccaaaagtcttgcagtgttttctttgcatcataaaagatgctgaaagcaaaaacctgggaaatacggaaaattgccttgtgagttagtaaaagtcatttataagctgctgaggggcttttgggaacagccacactttttataagcttgttagctcatgaattaattcaggatgcccaccccgtgtgtcaaactgggcccttacccagctactccccttagagaaggttgcagctgctcagcagatgaactaggcccttaaaactcctcatggctccctacccaccacactagtgttaayggctcgattagggctctgtaggaaagggaaagaagtttgaatcaaaaattttctttttttttttaataatttaaacaatcagtaaggaatgt

SEQ ID NO: 274499 - DNA, 550 bp, Homo sapiens
ggtggctccccaacaggggtgattttgccctccaggggacctttgtcaatgtctggaggcaattttggttttacaactggggaggagggagccactggcactgagyagaggccagggatgctgctaaccatccggcaaggcagaggacagcccccaaaataagcaatatccaaccccagatggtgacagcacggaggttgagaaaccctgcgccacatgatgtaacctgaagaaaagctgtcatgcggagcttctgagttggaaagactccagtcagccttccttctgccccagcgcagatcgagagggaagtctattctcggttcctccctgcccagaactccctggagccttggatctgagacataagagcatttcctgcactgaggacagtcacccatagaactctttttaattcacctctaggagggaaacttacattgcctgattcccaagtgttctggagctacccaaggtgccacgtattcaactttaatctacactaagagctggtgatagtaacacgggtattgaacttttcacttacaaa

SEQ ID NO: 274500 - DNA, 550 bp, Homo sapiens
ggtggctccccaacaggggtgattttgccctccaggggacctttgtcaatgtctggaggcaattttggttttacaactggggaggagggagccactggcactgagtagaggccagggatgctgctaaccatccggcaaggcasaggacagcccccaaaataagcaatatccaaccccagatggtgacagcacggaggttgagaaaccctgcgccacatgatgtaacctgaagaaaagctgtcatgcggagcttctgagttggaaagactccagtcagccttccttctgccccagcgcagatcgagagggaagtctattctcggttcctccctgcccagaactccctggagccttggatctgagacataagagcatttcctgcactgaggacagtcacccatagaactctttttaattcacctctaggagggaaacttacattgcctgattcccaagtgttctggagctacccaaggtgccacgtattcaactttaatctacactaagagctggtgatagtaacacgggtattgaacttttcacttacaaa

SEQ ID NO: 274501 - DNA, 491 bp, Homo sapiens
tttgagcaactgattaaagtgtgtatcagccatttataaaccagtgtcagaagagaaggcacatctctcttcagtaactctgatgtaatagcacaaaacacctggtagctgaatactaagactgctgaagttcaagaatatttgtatttaaggtaataaaaagctrgtgttttcccccagattcaatgaaaatcatagctgcctcatccaaaagcaagtgattcgtttctcagtacttttttacatccttgctgatgtgcttgcatttccagatcaagaaaattaagccaagcttctttgactggtttctaagaagactctctgttttatacaactttctatggtactgaggaagaaacgatgactgattcattccaaagatattcccctacatacaactaagaatgtttcaagaaacttctagtgaattcaaagcatgtttccctttgaattttttgtgattcatgacctttttcttgctatttgaattt

SEQ ID NO: 274502 - DNA, 458 bp, Homo sapiens
cccctaatgcaaatatggctgcagtgaccaaagtcttaagacttagatcacaacactcacttccctttgaatacttggaaagccttctcaagaaggatgggtataaacaagcccaaactgtgaagatgaaaataaatacctaactcctcaagccctracattaatgaacatccataagaatcaagatcagctaggaaaacatgacttcaccaaatgcactaaataaggaactagtgaccaatccttgagtgacagagatatgtgaactttcagacagaggattcaaagtagtggtttcaaggaagctccaagaaaattcaagataacacagaaaagaaatgcagaactctataaaataaattttaagaagagattgaaataatttttaaaaatcaagcagaaattctggagctgaaaaattcacttggccaattgaagaatgcatcagagtctcatta

SEQ ID NO: 274503 - DNA, 458 bp, Homo sapiens
cccctaatgcaaatatggctgcagtgaccaaagtcttaagacttagatcacaacactcacttccctttgaatacttggaaagccttctcaagaaggatgggtataaacaagcccaaactgtgaagatgaaaataaatacctaactcctcaagccctgacattaatgaacatccataagaatcaagatcagctaggaaaacatgacttcaccaaatgcacyaaataaggaactagtgaccaatccttgagtgacagagatatgtgaactttcagacagaggattcaaagtagtggtttcaaggaagctccaagaaaattcaagataacacagaaaagaaatgcagaactctataaaataaattttaagaagagattgaaataatttttaaaaatcaagcagaaattctggagctgaaaaattcacttggccaattgaagaatgcatcagagtctcatta

SEQ ID NO: 274504 - DNA, 458 bp, Homo sapiens
cccctaatgcaaatatggctgcagtgaccaaagtcttaagacttagatcacaacactcacttccctttgaatacttggaaagccttctcaagaaggatgggtataaacaagcccaaactgtgaagatgaaaataaatacctaactcctcaagccctgacattaatgaacatccataagaatcaagatcagctaggaaaacatgacttcaccaaatgcactaaataaggaactagtgaccaatccttgagtgacagagayatgtgaactttcagacagaggattcaaagtagtggtttcaaggaagctccaagaaaattcaagataacacagaaaagaaatgcagaactctataaaataaattttaagaagagattgaaataatttttaaaaatcaagcagaaattctggagctgaaaaattcacttggccaattgaagaatgcatcagagtctcatta

SEQ ID NO: 274505 - DNA, 558 bp, Homo sapiens
actctctaatcaaatgacaaaaggctaaatgggtttttaaaaatccaacaatctgatggctacgagaaacacactttacctaaaaagacacacatagactgaaaataaaggtatggaaaaagatattccatgctaatggaaaccaaaaaaaagggaaggagtagctatacttatatcagatgaaattaatttcaagacaaaaactataaaaagagataacgaaattatataatgataaaacagtcaattcagcaagaggatttaacaattataaatccatgtataacccaacactgaaacacttagatatgtaaagcaagtattcaagccaaagagagagacagacccaaataccataatagctggagacttcaacatcccacttggacagatcatgccaacagaagatcaacaaagaaatgtcatacttaatttgtactatggaccaaatggatctaatagataactacckaacatttcatccaatggctgcagaatacatactcttctcctcagcacatggatcattgtcaaggatggatcatattttaggccaca

SEQ ID NO: 274506 - DNA, 592 bp, Homo sapiens
aatgtgaatagtctttgtcaaatgattccactaaagggtctcgttaacactaaaatagtggtgaaatgattaatttctaggtactgacttgaataacattaatcttgttgaaatcatttggtatgaatgtgactgtcatatatattttaaaaaacagaaagcaactgattgtttttgatctgtcatgtcactgcatttgatgtttgaaggaactgtggggtctgctctcttgggaggcatatcccacatgtttgacacactgatagcagttgtaattgtcgtgcagagggagggaaatcagaatttttaactgcaatcaagaagttctctcccaaccttcctcccccataggaactgagatgtatattcagaacataaattgcaataatctcctgctattaacctcaggcaactgttccaaaatgcagcttaaataatggaaatatttaacatatgatactaagtgtggaaacaagattgtctttctgccctcacactcatagttgcaacaacaaaaaagagacttctgaaagctaaataatgaggtgtgtacatgttaaatttgaaaargtagggatcacctgtgggacat

SEQ ID NO: 274507 - DNA, 530 bp, Homo sapiens
ttaaagtgttcagcaactccaaattattattctaatacaaattttacccattctcaatcattgctctttcttgaaagatctagcttgaacctcttgattctagacctcaaaaccttgaaactgatcttctctgacctcagttgtctaaagcacttctaagattctgtcaaggtggtgttctgccctactgcagtaaatctaataaactcagcttygctttatcaacaggctttttggtaggtttctggacagctgagcaatcaacaaagctctggctcaactgttgacagagcttaggacaaagttcatacagaggaaaagtgatattctttgttttggtgctgaatctgaggaaggtcactttactgaagcttataaggcacacatttcttataattactgtctttatcttcataataaaaaaggcttctccccattatagcatattggcatgttggttattacacctgtttatgctctctatataatagcaccttacctggtatgtctcgaatcagtaatgcattgca

SEQ ID NO: 274508 - DNA, 571 bp, Homo sapiens
tctaccatcctaccacaacacagatcagttgcaggggttagagagttaacgcagagtttctggagtaggtgttcaaagacaagagaaacatttgatgatagagaagagaggataaaaatggtatgaaagagaacccaactggagaaatgatcaaggaagtcaaacagattagagtaggtagatgggagagaaaaagtaggaggcagggaatgatgtgagattgtaaagttgagtagattggttactcaaagaaattaagtaaaaggagaagctgsaattgaattaatgaacaggaggagatcattgtagacttgttcaatggaatagaaactgatccaacagagtgcttaagagatgctaatctaagttacttgaaaattgcttgaaacagggaacagacccaaaaaagttcaacttagatgttatactgttgtgtacattttaatggtggactatttgacagatattgaaagctgaaaatccagaattctaaaaataattattgatgccatcctcctacatcattctaaaatttgtctgccactcctttcttttacttgctaaatgtctg

SEQ ID NO: 274509 - DNA, 571 bp, Homo sapiens
tctaccatcctaccacaacacagatcagttgcaggggttagagagttaacgcagagtttctggagtaggtgttcaaagacaagagaaacatttgatgatagagaagagaggataaaaatggtatgaaagagaacccaactggagaaatgatcaaggaagtcaaacagattagagtaggtagatgggagagaaaaagtaggaggcagggaatgatgtgagattgtaaagttgagtagattggttactcaaagaaattaagtaaaaggagaagctgcaattgaattaatgaacaggaggagatcattgtagacttgttcaatggaatagaaactgatccaacagagtgcttaagagatgctaatctaagttacttgaaaattgcttgaaacagggaacagacccaaaaaagttcaacttagatgttatactgttgtgtacattttaatggtggactatttgacagatattgaaagctgaaaatccagaattctaaaaataattattgatgccatcctcctacatcatyctaaaatttgtctgccactcctttcttttacttgctaaatgtctg

SEQ ID NO: 274510 - DNA, 629 bp, Homo sapiens
aaaacttaaaaatagaacttaaaaataggtttcagcaatccatcttctaagtgtacatcaaaaggaaatgaaatcagtatgtggaaaacattcactgtcatgttcactgcagtgttattcacagtagccatgatatgaaaacattagtgtccatggatgattgaataaagaaaatgttgtatgccttaatatatatgtgtaatattcagcagtaaaggaataaracgctggcatttccaacaagatggataaatctgtaggatgtatactaagaggaatcagctagacacagaaagactactgcatgatcttagttatatgtaaaatctaaaaataaaaattgaactcagcagcagtgaatagaatggtaattatcagaggctgggaaactgagagtagcagaaaacagaagatgttggtcaaagagcacagactttcagttataagaggagttagttctgcagtcctaatgtaaagcatggtgactatagttaacaacaatgtcttgtatacttgaaatttgctaagagagttggcctcaaacattctcactacccacacaaaaaagtagctaggtaaaatgatgactatgttagttagtttgtactcaaaaataaaaataaagatca

SEQ ID NO: 274511 - DNA, 629 bp, Homo sapiens
aaaacttaaaaatagaacttaaaaataggtttcagcaatccatcttctaagtgtacatcaaaaggaaatgaaatcagtatgtggaaaacattcactgtcatgttcactgcagtgttattcacagtagccatgatatgaaaacattagtgtccatggatgattgaataaagaaaatgttgtatgccttaatatatatgtgtaatattcagcagtaaaggaataagacgctggcatttccaacaagatggataratctgtaggatgtatactaagaggaatcagctagacacagaaagactactgcatgatcttagttatatgtaaaatctaaaaataaaaattgaactcagcagcagtgaatagaatggtaattatcagaggctgggaaactgagagtagcagaaaacagaagatgttggtcaaagagcacagactttcagttataagaggagttagttctgcagtcctaatgtaaagcatggtgactatagttaacaacaatgtcttgtatacttgaaatttgctaagagagttggcctcaaacattctcactacccacacaaaaaagtagctaggtaaaatgatgactatgttagttagtttgtactcaaaaataaaaataaagatca

SEQ ID NO: 274512 - DNA, 533 bp, Homo sapiens
agtataataaaaactaaataaataataaaaattaaaaaaagaagaaaggtctcaaatcaacgacctaacataacatcttaaagaactagaacaataagaaaaagagaacaaaacacaaagctactagaagaaagaaaataatagagatacatgaaacagagaatagagaaacaatagagtgtaagagttcaagaaagaggaaagaawctcaaaaagcagctcaacagtcaaagacaggtttcttttggagaataaacctgagaggagcttctggccgattttggtcaggagcattctctcttacagactaagagtgtttaagggttcatggcgggagaacttatcacaggttcagaacgtttgtgtgtggaggagaaatttattgcagggttggaatatctttggtcggaggggaaattatcttggggctggcaagtccccggttggaggggtggttatctcggggctgtcatgtctctgcttggagaggggcttatctcagagttagaatgtttctggacagaggtgttatt

SEQ ID NO: 274513 - DNA, 533 bp, Homo sapiens
agtataataaaaactaaataaataataaaaattaaaaaaagaagaaaggtctcaaatcaacgacctaacataacatcttaaagaactagaacaataagaaaaagagaacaaaacacaaagctactagaagaaagaaaataatagagatacatgaaacagagaatagagaaacaatagagtgtaagagttcaagaaagaggaaagaaactcaaaaagcagctcaacagtcaaagacaggtttcttttggagaataaacctgagaggagcttctggccgattttggtcaggagcattctctcttacagactaagartgtttaagggttcatggcgggagaacttatcacaggttcagaacgtttgtgtgtggaggagaaatttattgcagggttggaatatctttggtcggaggggaaattatcttggggctggcaagtccccggttggaggggtggttatctcggggctgtcatgtctctgcttggagaggggcttatctcagagttagaatgtttctggacagaggtgttatt

SEQ ID NO: 274514 - DNA, 544 bp, Homo sapiens
gaataaaccagtattgtacaacacctgatttgaagcagtagaaagtttataacatcgccaaattcaattcttgccaaaagtattttttctgaatctaaaaattaggaaaacattccagaggttggaatattttactacaaaacttggatttttaaaaaatatctaagtcatagaaatatttaaaaataaaatagtgagtgaaatgttctagactggggtcagaaaactattcaatgaaaaccaaattcaaggtgtgatccctgattggatcctgaatttmcaaaacaaataagtaataaaataaagtacattttggaaatttgaaaatggacagtatgccatatgtaaaataagcattttatcattcttaggtatcttgggtatcaaaataatatcatggttgtggaacaggatatctttcttctatataaatgcatgctgaagatttaagagtaaagtatcatgatgtctaccacttacttctaaacaaaccaaatagaaataaaagagttaaatagatatttgtgtatgagtacaatcatcc

SEQ ID NO: 274515 - DNA, 544 bp, Homo sapiens
gaataaaccagtattgtacaacacctgatttgaagcagtagaaagtttataacatcgccaaattcaattcttgccaaaagtattttttctgaatctaaaaattaggaaaacattccagaggttggaatattttactacaaaacttggatttttaaaaaatatctaagtcatagaaatatttaaaaataaaatagtgagtgaaatgttctagactggggtcagaaaactattcaatgaaaaccaaattcaaggtgtgatccctgattggatcctgaatttacaaamcaaataagtaataaaataaagtacattttggaaatttgaaaatggacagtatgccatatgtaaaataagcattttatcattcttaggtatcttgggtatcaaaataatatcatggttgtggaacaggatatctttcttctatataaatgcatgctgaagatttaagagtaaagtatcatgatgtctaccacttacttctaaacaaaccaaatagaaataaaagagttaaatagatatttgtgtatgagtacaatcatcc

SEQ ID NO: 274516 - DNA, 536 bp, Homo sapiens
attgtattattctttcaaatttactgtgggtttaaaatttccaagaaaaaatgttagaaaaaaaataaataacataaaataccatgttcagaccttactccagaattctgaatcaactagcctgttgtgaaaccctaaacatcatactttttaatggtaaaaatttaaggtgtacaatatgatgttttsatagacatatgcatagtgaaatatttgctacagataatcaatttaacatatctataatctcacatagaacctattttttgtgggaagagtactgaaaatctacattctcaagcaacttctagtatacaatacaatattattaactatggtcctcatatcgtacatctgatttctagatttattcatcctacataactgctattttactattttctaatgtgagttccaggaggaaaatcagtaatgcaggataaagaaaaggtatatcagggtcagagagatttaagttgtttctgtcactcatcttctcaacctttctctaagccttattttctctgtctgtaaag

SEQ ID NO: 274517 - DNA, 536 bp, Homo sapiens
attgtattattctttcaaatttactgtgggtttaaaatttccaagaaaaaatgttagaaaaaaaataaataacataaaataccatgttcagaccttactccagaattctgaatcaactagcctgttgtgaaaccctaaacatcatactttttaatggtaaaaatttaaggtgtacaatatgatgttttcatagacatatgcatagtgaaatatttgctacagataatcaatttaacatatctataatctcacatagaacctattttttgtgggaagagtactgaaaatctacattctcaagcaacttctagwatacaatacaatattattaactatggtcctcatatcgtacatctgatttctagatttattcatcctacataactgctattttactattttctaatgtgagttccaggaggaaaatcagtaatgcaggataaagaaaaggtatatcagggtcagagagatttaagttgtttctgtcactcatcttctcaacctttctctaagccttattttctctgtctgtaaag

SEQ ID NO: 274518 - DNA, 522 bp, Homo sapiens
tactttttaatggtaaaaatttaaggtgtacaatatgatgttttcatagacatatgcatagtgaaatatttgctacagataatcaatttaacatatctataatctcacatagaacctattttttgtgggaagagtactgaaaatctacattctcaagcaacttctagtatacaatacaatattattaactatggtcctcatatcgtacatctgatttctagatttattcatcctacataactgctattttactattttctaatgtgagttccaggaggaaaatcagtaatgcaggataaagaaaaggtatatcagggtcagagagatttaagttgtttctgtcactcatcttctcaacctttctstaagccttattttctctgtctgtaaagtgtaaataatactaccaatggcatagagtgttattattaaattagatcattactgaagactacaaaaacagcacaaaacatattgctttttctaacattgtccctacctatttgagcaggttgttaacaa

SEQ ID NO: 274519 - DNA, 549 bp, Homo sapiens
tccaatttttccagtacactagggcaagaacctgggatacagaaagccctctgtccttgagataaagcagtgggtctaactgagctgattaacacaagccacctgcagacaggaaagttgaaagagcatactgtcatacatgcccactggggcttcgggagctgtaaacactcaaccctagaggctgccatgggttcagagccacagaatgctccccacgacctgctcatctgcaggctcccactaggggttagagcagcagggcaccaaagaagcgaagaagccagccacacccttgtcacacgctttgcaagggggacaagagaacttttcccgttttatgggtgtgtgtgtgtgtgtgtatgtgtgtatttattcattcatttatctgttcacttatttatccatttattcactaagctayttagtccttcaattattcgtataatattgtagtcaaaaaataattattgactctttacaatgggccacttaatttttctagaagctgtgaaaaaggaattaaacaaaacagactattatctctgc

SEQ ID NO: 274520 - DNA, 479 bp, Homo sapiens
atagctatccagaagaaaaagtccccaaatacactttaagtgcccaagttaagcccatttctctactggaaggtaaggacttggcagcattcacctcaagatttcccactcatagaataccatctttgacacagaatcccagctaagctctatgtttctccacctctactttctgtgcctcctctcctcctataacgttaatccmccttcccagcacgtttgggacccaagtgcaaggctattttggcacttctttaaaagacagattgcccttgacttggtaaatgtcaatagttctgaaaacagccattaaaactgggtaggaaaaccttcccagtgtgaagattcacaggtgatagcctgtaatggatgatctgaagccaggactggctatcatttcagtggaaatgcttacctggggcctgtgctgaggcaatcctggaaggggagtgtgtgtgcttgtgtgattgtgggcaggg

SEQ ID NO: 274521 - DNA, 479 bp, Homo sapiens
atagctatccagaagaaaaagtccccaaatacactttaagtgcccaagttaagcccatttctctactggaaggtaaggacttggcagcattcacctcaagatttcccactcatagaataccatctttgacacagaatcccagctaagctctatgtttctccacctctactttctgtgcctcctctcctcctataacgttaatccaccttcccagcacgtttgggacccaagtgcaaggctattttggcacttctttaaaagayagattgcccttgacttggtaaatgtcaatagttctgaaaacagccattaaaactgggtaggaaaaccttcccagtgtgaagattcacaggtgatagcctgtaatggatgatctgaagccaggactggctatcatttcagtggaaatgcttacctggggcctgtgctgaggcaatcctggaaggggagtgtgtgtgcttgtgtgattgtgggcaggg

SEQ ID NO: 274522 - DNA, 577 bp, Homo sapiens
gggtatgcagaatgaccccctgtgtaatatggcaagcaaatataactctgtttatatatatcctttctctacmcctttaaaatttccgtttttgaggtatcatttataacacacttactatatcaggatagtacataaacaaacagatatatgacagggtgccagcttttttttttttttttttttctgacagtactcaaggaaaaatgttgtggtttttttttttttcagctttaatgtatctaagactaattggactaccttgtttaaaatgcaaactccactgggcatggtggctcacacttgtaatcccagcagtttgggaagccaaggccggtggatcacttgaggtcaggagttcgagaccagcctggcaaatatggtgaaaacctgtctctgctaaaaatacaaaaattaggcgggcatggtagcgtacacctgtaatcccagctactcgagagggtgaggcaggagaatcatttgagcctaggaggcagaggttgcagtgaaccaagattgagccactgcactccagcctgggtgacagagtaaaactgcctcaaaaaaataaagcagc

SEQ ID NO: 274523 - DNA, 577 bp, Homo sapiens
gggtatgcagaatgaccccctgtgtaatatggcaagcaaatataactctgtttatatatatcctttctctacccytttaaaatttccgtttttgaggtatcatttataacacacttactatatcaggatagtacataaacaaacagatatatgacagggtgccagcttttttttttttttttttttctgacagtactcaaggaaaaatgttgtggtttttttttttttcagctttaatgtatctaagactaattggactaccttgtttaaaatgcaaactccactgggcatggtggctcacacttgtaatcccagcagtttgggaagccaaggccggtggatcacttgaggtcaggagttcgagaccagcctggcaaatatggtgaaaacctgtctctgctaaaaatacaaaaattaggcgggcatggtagcgtacacctgtaatcccagctactcgagagggtgaggcaggagaatcatttgagcctaggaggcagaggttgcagtgaaccaagattgagccactgcactccagcctgggtgacagagtaaaactgcctcaaaaaaataaagcagc

SEQ ID NO: 274524 - DNA, 577 bp, Homo sapiens
gggtatgcagaatgaccccctgtgtaatatggcaagcaaatataactctgtttatatatatcctttctctacccctttaaaatttccgtttttgaggtatcatttataacacacttactatatcagkatagtacataaacaaacagatatatgacagggtgccagcttttttttttttttttttttctgacagtactcaaggaaaaatgttgtggtttttttttttttcagctttaatgtatctaagactaattggactaccttgtttaaaatgcaaactccactgggcatggtggctcacacttgtaatcccagcagtttgggaagccaaggccggtggatcacttgaggtcaggagttcgagaccagcctggcaaatatggtgaaaacctgtctctgctaaaaatacaaaaattaggcgggcatggtagcgtacacctgtaatcccagctactcgagagggtgaggcaggagaatcatttgagcctaggaggcagaggttgcagtgaaccaagattgagccactgcactccagcctgggtgacagagtaaaactgcctcaaaaaaataaagcagc

SEQ ID NO: 274525 - DNA, 577 bp, Homo sapiens
gggtatgcagaatgaccccctgtgtaatatggcaagcaaatataactctgtttatatatatcctttctctacccctttaaaatttccgtttttgaggtatcatttataacacacttactatatcaggatagtacataaacaaacagatatatgacagggtgccagcttttttttttttttttttttctgacagtactcaaggaaaaatgttgtggtttttttttttttcagctttaatgtatctaagactaattggactaccttgtttaaaatgcaaactccactgggcatggtggctcacacytgtaatcccagcagtttgggaagccaaggccggtggatcacttgaggtcaggagttcgagaccagcctggcaaatatggtgaaaacctgtctctgctaaaaatacaaaaattaggcgggcatggtagcgtacacctgtaatcccagctactcgagagggtgaggcaggagaatcatttgagcctaggaggcagaggttgcagtgaaccaagattgagccactgcactccagcctgggtgacagagtaaaactgcctcaaaaaaataaagcagc

SEQ ID NO: 274526 - DNA, 633 bp, Homo sapiens
tctgtcctgtttactgctacaaaactaaagagtgacttctagccacagcactccatgcgacacttagcttaagttgttggtatcctgcctacaytcccttaacactcaccctctccaaacctatggactgcctctgattgcatgtggccacatctcaagcttgagtgctttccttggctggtagaagggacccctcagccctcaccccaggaagatagaagatctgggaaatttctgacccagaaatggcctccaacccatgacacataagagttgatggcttcctcgcccttcacatgggacaactctgagacatgatctatgtagtctcccaaagaaccaacagcaataacctgctcattaatctaccttgaacttgctttccttttgtccttgccttacttctccacttccctacgggtgcttcctgggttgccttgcaattaaactacttgctttcatatcattgtttcaaatccttagatttgagagaatccacctatgcaaatacattttccaaatgagttccaagttgtcattttttctccaaaaatatgtttagtatctatgcagaaaataatgacctataaattttcataggtgatgatctcaaagacattaaatgacaaaatt

SEQ ID NO: 274527 - DNA, 620 bp, Homo sapiens
tgctttccttttgtccttgccttacttctccacttccctacgggtgcttcctgggttgccttgcaattaaactacttgctttcatatcattgtttcaaatccttagatttgagagaatccacctatgcaaayacattttccaaatgagttccaagttgtcattttttctccaaaaatatgtttagtatctatgcagaaaataatgacctataaattttcataggtgatgatctcaaagacattaaatgacaaaatttttggaggatgccaacactgcatgtcagatgctgggaataagatggtgaataaggtacccaaccactgcctttacctagatatagtttcaaccctgtgataatgaatcctagatttcttctccgaggatttcagaagtgaggaaaggtcttgcattttaccttctaaaattccactttaaggtctcatacccttctatgaaagactctagaccaatggtgactacccttgttctgtatcacaaattctgatcaaaagttactgatactctttcagaaaaattcacatatgtagatgcatataacatggggcatataatttcagagatttcccagtcttctaaaactctatacatggatactttt

SEQ ID NO: 274528 - DNA, 620 bp, Homo sapiens
tgctttccttttgtccttgccttacttctccacttccctacgggtgcttcctgggttgccttgcaattaaactacttgctttcatatcattgtttcaaatccttagatttgagagaatccacctatgcaaatacattttccaaatgagttccaagttgtcattttttctccaaaaatatgtttagtatctatgcagaaaataatgacctataaattttcayaggtgatgatctcaaagacattaaatgacaaaatttttggaggatgccaacactgcatgtcagatgctgggaataagatggtgaataaggtacccaaccactgcctttacctagatatagtttcaaccctgtgataatgaatcctagatttcttctccgaggatttcagaagtgaggaaaggtcttgcattttaccttctaaaattccactttaaggtctcatacccttctatgaaagactctagaccaatggtgactacccttgttctgtatcacaaattctgatcaaaagttactgatactctttcagaaaaattcacatatgtagatgcatataacatggggcatataatttcagagatttcccagtcttctaaaactctatacatggatactttt

SEQ ID NO: 274529 - DNA, 620 bp, Homo sapiens
tgctttccttttgtccttgccttacttctccacttccctacgggtgcttcctgggttgccttgcaattaaactacttgctttcatatcattgtttcaaatccttagatttgagagaatccacctatgcaaatacattttccaaatgagttccaagttgtcattttttctccaaaaatatgtttagtatctatgcagaaaataatgacctataaattttcataggtgatgatctcaaagacattaaatgacaaaatttttggaggatgccaacactgcatgtcagatgctgggaataagatggtgaataaggtacccaaccactgcctttacctagatatagtttcaaccctgtgataatgaatcctagatttcttctccraggatttcagaagtgaggaaaggtcttgcattttaccttctaaaattccactttaaggtctcatacccttctatgaaagactctagaccaatggtgactacccttgttctgtatcacaaattctgatcaaaagttactgatactctttcagaaaaattcacatatgtagatgcatataacatggggcatataatttcagagatttcccagtcttctaaaactctatacatggatactttt

SEQ ID NO: 274530 - DNA, 620 bp, Homo sapiens
tgctttccttttgtccttgccttacttctccacttccctacgggtgcttcctgggttgccttgcaattaaactacttgctttcatatcattgtttcaaatccttagatttgagagaatccacctatgcaaatacattttccaaatgagttccaagttgtcattttttctccaaaaatatgtttagtatctatgcagaaaataatgacctataaattttcataggtgatgatctcaaagacattaaatgacaaaatttttggaggatgccaacactgcatgtcagatgctgggaataagatggtgaataaggtacccaaccactgcctttacctagatatagtttcaaccctgtgataatgaatcctagatttcttctccgaggatttcagaagtgaggaaaggtcttgcattttaccttctaaaattccactttaaggtctcatacccttctatgaaagactctagaccaatggtgaytacccttgttctgtatcacaaattctgatcaaaagttactgatactctttcagaaaaattcacatatgtagatgcatataacatggggcatataatttcagagatttcccagtcttctaaaactctatacatggatactttt

SEQ ID NO: 274531 - DNA, 569 bp, Homo sapiens
aacagaatagatagatagatagatagatagatagatagatagatagatagattgatagacaaatacagatatgaagataggtaatagattaaattatcatattatatattatatacagaaataatatttattataaggaattggctcatgtggttataaagatcaaaaagtcccaaaatctgcagtcagtgagctggagacccagtagagccaacggtgaagtttcagtatgagtccaagttgaaacaggaaaaamcaagtatcctatctgaattagagagagagaattctcccttgcccagccttcttgctctattgaagcctcaaaggataggatgacgtccacccatcctaggcagggcaatctgctttactccgtccaccaattcaaatattaatctcatccagaaacagcctcacagacactcccagaataatgtttagccaaatatctgagaacactgtggcctaatcaggttgacacataaacttaaccatctcaagcccaccccttctcaacttggcacctataggcatatccctaaaccatacataatctccaaataaag

SEQ ID NO: 274532 - DNA, 569 bp, Homo sapiens
aacagaatagatagatagatagatagatagatagatagatagatagatagattgatagacaaatacagatatgaagataggtaatagattaaattatcatattatatattatatacagaaataatatttattataaggaattggctcatgtggttataaagatcaaaaagtcccaaaatctgcagtcagtgagctggagacccagtagagccaacggtgaagtttcagtatgagtccaagttgaaacaggaaaaaccaagtatcctatctgaattagagagagagaattctcccttgcccagccttcttgctctattgaagcctcaaaggataggatgacgtccacccatcctaggsagggcaatctgctttactccgtccaccaattcaaatattaatctcatccagaaacagcctcacagacactcccagaataatgtttagccaaatatctgagaacactgtggcctaatcaggttgacacataaacttaaccatctcaagcccaccccttctcaacttggcacctataggcatatccctaaaccatacataatctccaaataaag

SEQ ID NO: 274533 - DNA, 593 bp, Homo sapiens
gaaagacaattgacagtttggccatttagaatttttcccataacatttacacacatttgcctgaagccagttttctgatctgagcactataatggggaagagattatatgtatgtccaggaaccccgacctagatgatatcctttatcctttcttattcccactaagagatctgaacatctctgttattgtgtgagttacttatttaatgactaagttacttgttggattctttcagcaggcagtgagattactgagtaccaaattctatttatttttataaccataattcttaaagtggtatccagcatacagttggcgtttaataaatgttcaatatastacaatcttattgttgcctactctgtagctcacactatctaagtcatccagcagaaatctccactgtagcttacaggtagggtttacccatcgatcctaggggccttctgcacctataattctttttttctcttggtacttattagaaatattctattttataacatttgttcaagctccaccccacctgacctaatccctcttccctccaatcaccctaagtgccttacagtggtgccacatttgtgtccc

SEQ ID NO: 274534 - DNA, 593 bp, Homo sapiens
gaaagacaattgacagtttggccatttagaatttttcccataacatttacacacatttgcctgaagccagttttctgatctgagcactataatggggaagagattatatgtatgtccaggaaccccgacctagatgatatcctttatcctttcttattcccactaagagatctgaacatctctgttattgtgtgagttacttatttaatgactaagttacttgttggattctttcagcaggcagtgagattactgagtaccaaattctatttatttttataaccataattcttaaagtggtatccagcatacagttggcgtttaataaatgttcaatatactacaatcttattgttgcctactctgtagctcacactatctaagtcatccagcagaaatctccactgtagcttacaggtagggtttacccatcgatcctaggggccttctgcacctataattctttttttctcttggtacttattagaaatattctattttataacatttgttcaagctccaccccacctgacctaatccctcttccctccaatcaccctaagtgccttasagtggtgccacatttgtgtccc

SEQ ID NO: 274535 - DNA, 285 bp, Homo sapiens
gggtcttacatcttatttacttttgcatccacatttttagaggaaaaacactgagacacccgttgccagttccccaatgttatttctccagttcccattctaatgactgcctatatcatttgactcctcctttctaatttgaaggaaagtagagatagcttttgaraagtataagaagtccagctgaagaattcagacacagaccagtgcggaactgaaagcattgacgatttttaacaaggatgtctcagcaatggagtaggattgtttagaaagcaatatgta

SEQ ID NO: 274536 - DNA, 421 bp, Homo sapiens
tgagggacgcaaccatggagactgtctcctcagggaaactatagacctggaaggtcttataatgtctattaaagcagcatatcccaacctctctctcctcctgccttccaatcttctgccagtgcttcccatcggaaaccagatggcaagaaagcctgggtgatcccattcacaggggcctaaatcaaggcagagatagctgctttagagggacaaacgcagtaaccaggacgcatatcacttctgacccaaaatgacttgatttttcaccttctctatgatcccaaattactgctgctccccaaaatcatacctactccagtttataggaagaaaacatatgtgtgcatgtttctttatagtggaatgatttataatcctttggctatatayccagtaatgggattgctgggtcaaatgg

SEQ ID NO: 274537 - DNA, 548 bp, Homo sapiens
aagaacaagtaggtatagtaaagtgatagagggcccatcaaggttcggtgtgctgtggaacacggaggagggggtgatccattcccctccagagacttcttggagaggtgatacttgacctgagtcttatggaatcaggcagtagatagaaaagtaattcctggctaagggtgcaacatgaatatagtccaatrgaaaagcatttgggtatgagccagcacagtttcaagttgtcgtttgatgtgactagtggatattggtgtgaaggacaagttttgggagagatgaaggaagcaggactcagatcatgaagaactttgtatgtaaggtgcacaaaagacccaaaggtcaagcgttttcaaacaaatcagaagccctacttagcatcaagctttactattaatttaaagaatgcaattaatcattaggctaatgcaagaaagggagcagtccaaggacacaagcatagctccccagtcccttcttgctgagtcaggcaggatgcactctggcccaggtcaacaaatgtgatttttaagtaatgtatg

SEQ ID NO: 274538 - DNA, 548 bp, Homo sapiens
aagaacaagtaggtatagtaaagtgatagagggcccatcaaggttcggtgtgctgtggaacacggaggagggggtgatccattcccctccagagacttcttggagaggtgatacttgacctgagtcttatggaatcaggcagtagatagaaaagtaattcctggctaagggtgcaacatgaatatagtccaatggaaaagcatttgggtatgagccagcacagtttcaagttgtcgtttgatgtgactagtggatattggtgtgaaggacaagttttgggagagatgaaggaakcaggactcagatcatgaagaactttgtatgtaaggtgcacaaaagacccaaaggtcaagcgttttcaaacaaatcagaagccctacttagcatcaagctttactattaatttaaagaatgcaattaatcattaggctaatgcaagaaagggagcagtccaaggacacaagcatagctccccagtcccttcttgctgagtcaggcaggatgcactctggcccaggtcaacaaatgtgatttttaagtaatgtatg

SEQ ID NO: 274539 - DNA, 537 bp, Homo sapiens
atgtattaatgttgaggttttgacatatatcaagggactatttcacctctgtatagtttgtataaattttagattttcatacatgtggggtttttctactcttatttaatgttattatgtacctttatcctaataatattaaaaatattttgctagcatcatttttaatggctacatgctattccaccacagaattttcctgcagtttgcttaatgattttcctatgttggacatttcaggtattactactctctgctgttacaaataaagttcaggaacattggtgactaattttagtgttgcatcaacctaactgactgtaagtcttctgtcttaaacacagaccaaatcaggccagggtgagtaaagttggagatcccttaagcacatgctacagagtcccatgtgcccggaacatcaaagactctctcattgtctcctwcagcttgccccagtaagcaaccaactacacgtcccatttctttagggtgtgataacatcaagaatataaacaggtactttaaaatggttttatt

SEQ ID NO: 274540 - DNA, 289 bp, Homo sapiens
ctaagattttacgctcattgagagaaagtgatttgatttttctattgtttgaggtttgttaaaaagttctagaaatgttaataatacattttattaacccgatgaaagcaacctcttgaaacataattctggtgatcagtatatttactgggtatcataaattcattttagtattaacccaaattcaaattaacttaattatctttcatttgaaaaaacaataacacttttatgtcctgggatagtatartgagatcaagtgaattcaatttgatttggtgattagatt

SEQ ID NO: 274541 - DNA, 596 bp, Homo sapiens
aagtacagtgctaaggtggaatctctgaagtaatatatgtgaaactacctgtcaaagagtaggcacttaattgatatatgtcatgtgcgaagctgtccatgtcctgcatagacatctctgagcagacagaccaagctgctctgatataactattataagctagaaggaaagttcatattcggttggctttatgaaaacaaacaaataaataagagaacaactctaccaaaacaatcagaaaagtattcctagttagtatctgtatggattcacaatgccatattttgtaaatgaacatacaaatatgagttaacagctactgggagggtgaggcaggagaatctcttgaacctgggaggcggaggttgcagtgagtggagatcgtgctactgtattctagcctgggtgagactccgtctcagaaaaaaaaaaaaaaaagaaataggagttaatacttacggtactttgagcttggtcatcctctcttgaaaagagggactctgggcactgctgagttgtttccaatttatactcaatgktactatttggctttaatgaaccaatctccgagtttaacaagcttaaaaatgaccgtg

SEQ ID NO: 274542 - DNA, 628 bp, Homo sapiens
gacatggatggagctggaagctattatccttagcagactaacacaggatcagaaagccaaactctgcatgttctcacttgtaagtgggagctaaatcatgggaacacatggacacawagaggaggacaacacacactggggcctatcagaaggtggaggttgggaggagggagaggatcaggaaaaataactaatgggtactaggcttaatacctgagtgatgagataatctgtacaacagaccctcatgttacaagtctacctatgtaacaaacctgcacatgtacccctgaacttaaaaaataaaataaaatcaaaaagttgtcactaaaaaaagagaaaaaaaatcttaaaaaaatgtgtgttgtttgtttggttgttttggggtttttttgttattattattatttttttttcacactctgtggcccaggctagagtgcagtggcataaacatagctcactgtagcatctacctcctgggctcaagtgatcctcctgcctcagcttcagctgggactgcaggcatgtgccaccacatctggctttaaataaaactttttaaaggtacaaataagttgaaacaaagtaaggaatactcaaaagaccaaaaagtaaattaaaaaag

SEQ ID NO: 274543 - DNA, 628 bp, Homo sapiens
gacatggatggagctggaagctattatccttagcagactaacacaggatcagaaagccaaactctgcatgttctcacttgtaagtgggagctaaatcatgggaacacatggacacaaagaggaggacaacacacactggggcctatcagaaggtggaggttgggaggagggagaggatcaggaaaaataactaatgggtactaggcttaatacctgagtgatgagataatctgtacaacaraccctcatgttacaagtctacctatgtaacaaacctgcacatgtacccctgaacttaaaaaataaaataaaatcaaaaagttgtcactaaaaaaagagaaaaaaaatcttaaaaaaatgtgtgttgtttgtttggttgttttggggtttttttgttattattattatttttttttcacactctgtggcccaggctagagtgcagtggcataaacatagctcactgtagcatctacctcctgggctcaagtgatcctcctgcctcagcttcagctgggactgcaggcatgtgccaccacatctggctttaaataaaactttttaaaggtacaaataagttgaaacaaagtaaggaatactcaaaagaccaaaaagtaaattaaaaaag

SEQ ID NO: 274544 - DNA, 628 bp, Homo sapiens
gacatggatggagctggaagctattatccttagcagactaacacaggatcagaaagccaaactctgcatgttctcacttgtaagtgggagctaaatcatgggaacacatggacacaaagaggaggacaacacacactggggcctatcagaaggtggaggttgggaggagggagaggatcaggaaaaataactaatgggtactaggcttaatacctgagtgatgagataatctgtacaacagaccctcatgttacaagtctacctatgtaacaaacctgcacatgtacccctgaacttaaaaaataaaataaaatcaaaaagttgtcactaaaaaaagagaaaaaaaatcttaaaaaaatgtgtgttgtttgtttggttgttttggggtttttttgttattattattatttttttttcacactctgtggcccaggctagagtgcagtggcataaacatagctcactgtagcatctacctcctgggctcaagtgaycctcctgcctcagcttcagctgggactgcaggcatgtgccaccacatctggctttaaataaaactttttaaaggtacaaataagttgaaacaaagtaaggaatactcaaaagaccaaaaagtaaattaaaaaag

SEQ ID NO: 274545 - DNA, 551 bp, Homo sapiens
gatcaatggtccataaatggaaggccactttgggggcagaactatgaacagacatttaggaccgattacaacaaccaaggctaaagtcgcagtgttctacatagtagctcaccaacagtcaccccytgtagaaatatgaaagcagaaactctgtcccaaacctggtcagtggtcacctgaagaagcaggtatagcatattgaatacatcagaagggagctcacaggggttctgcatactatttggaaattggccaagcactctggcttactagtgtccaaacaagacagagaaaagacaatacaaaattggcccaactgttgccagacccctcctcagcaagcaccagaggccaccactggaaatgtaaaaagaagggagagagccattgacacatggcaactagattctattggcccattccctaaatggtaagggataccaatatacattgacatgcataaacactgagtggccctttgcaagctttcctccactgaaaagcaaatcagaccttgactatatagagtctgcaatgcttgcaactaatgt

SEQ ID NO: 274546 - DNA, 335 bp, Homo sapiens
tcttgacaggactcccctcattgagaaattggactgtggtttaaatggaagtcatatgtgccttgaatgaagctcccattatgggaggaaagttggcttatgaacatgtaatggatatatamagccaggtgcaagccacaggggtatggaaaaaaactaagcctggaattcagtcccacatggactggactgattttgtgctctccttgtcccataacccctgggcagggaatcctgaagtgagatctggggtagaaagtaccactgcactggactagtaatccttcttcccatgaggtgggaggccgccactgccctggacttgacccccactt

SEQ ID NO: 274547 - DNA, 577 bp, Homo sapiens
gtttgtttttggtgggatgactgattgactgtatttgtacccctggaaagctctgttgatattgtgcagaaggtggaagcccttcagagatgtgtctccagagctctgaatgacactgagcatggtttggagtccttcaacattgaaacagccacaatgaggaaagtgtcctacagaactgaatagctctagaaatgctgacagctgagcagggaggaatctgtgcccttttwaaaactgagcattgtgtatatatgccagacaaagaaactgatattaatcaatccctcttcatttttaaaagcaattacagctaattgaccacaggggtttgactcttggtggtctacaataaaatcatagttttcagaattggagcctcagtgaaaagcactgctagtaagccttttgggaactgtgattttaggtctcgtcacatgcacctgtatttactgttgctgttttgttggcaatgtgtcataaagttagggaaaaggacctgacaagcaattccaccctttcctgccagctcagggaacatctcagaagagatgggtgtgtgaaataataagagcca

SEQ ID NO: 274548 - DNA, 503 bp, Homo sapiens
tgcattgacagctctgtgacccagagagctgcaggtttttcctagctggcttgaatgcaaactggagccttgaacattttcaggtactaataaaggtatctaggttgttgctcaaatcactgaaagaaattaatgtggtcccaagccaaattctttaaaccctcatataaagtccataccctgaactcctcactgtggacatctcagatagaacaccctttttctcttgctgtcagtagtgaggacttctgcagcatgctgtaagttcccttaataaatgctttggacttatcaccccagcattcagtgcttccttttttggaatctcaaccagcttcatctctggaaggctygggcactcctttgtggaaactcttctgctgcccctttggggtgactccgggtgcagattagggaagttgaaacagtcccaaaactcaacagtaaaaatgaagaaatccgttagaacatgggcaaaggacatgaagagacattttagcaaa

SEQ ID NO: 274549 - DNA, 507 bp, Homo sapiens
aaaatcaacatggatattctagctttactgatggtaagattcaactagcatctgacaawgtctacaagagttccccaaaggtgaaatgaccacatccacaactttccttacacagaggtatagaaatagtttgtcaggtagatgcctgattacagtgcaatggaaaatgacaggctttaaaaacttggctctaaggctgtaaagacttttcaggaaatcatctataatatggtaaaaataaactgggcttaactgaaattttattccaagttctgatattccattttttacacaaaatcaactcatttaaaaaccagatggaagaatttgggaaaaaaaggaaaaaatgcagaaatatctaaggaaataggaatcatcaaccatatcagaaaactgaagctttaggttaagctttggcacccttgtatcatttttactctccagtcatttgtttccaatccttgctgaatctttaagccttctcaagtccctcaaagctctcatcaa

SEQ ID NO: 274550 - DNA, 507 bp, Homo sapiens
aaaatcaacatggatattctagctttactgatggtaagattcaactagcatctgacaaagtctacaagagttccccaaaggtgaaatgaccacatccacaactttccttacacagaggtatagaaatagtttgtcaggtagatgcctgattacagtgcaatggaaaatgacaggctttaaaaacttggctctaaggctgtaaagacttttcargaaatcatctataatatggtaaaaataaactgggcttaactgaaattttattccaagttctgatattccattttttacacaaaatcaactcatttaaaaaccagatggaagaatttgggaaaaaaaggaaaaaatgcagaaatatctaaggaaataggaatcatcaaccatatcagaaaactgaagctttaggttaagctttggcacccttgtatcatttttactctccagtcatttgtttccaatccttgctgaatctttaagccttctcaagtccctcaaagctctcatcaa

SEQ ID NO: 274551 - DNA, 507 bp, Homo sapiens
aaaatcaacatggatattctagctttactgatggtaagattcaactagcatctgacaaagtctacaagagttccccaaaggtgaaatgaccacatccacaactttccttacacagaggtatagaaatagtttgtcaggtagatgcctgattacagtgcaatggaaaatgacaggctttaaaaacttggctctaaggctgtaaagacttttcaggaaatcatctataatatggtaaaaataaactgggcttaactgaaattttaytccaagttctgatattccattttttacacaaaatcaactcatttaaaaaccagatggaagaatttgggaaaaaaaggaaaaaatgcagaaatatctaaggaaataggaatcatcaaccatatcagaaaactgaagctttaggttaagctttggcacccttgtatcatttttactctccagtcatttgtttccaatccttgctgaatctttaagccttctcaagtccctcaaagctctcatcaa

SEQ ID NO: 274552 - DNA, 558 bp, Homo sapiens
agttgaaattttcccgaccattttattccattgagcaagcttgcattcattcattcattcattcacgtgtccatgtgcagtcaccatgtacaaaatcctctttttatgctggattccacagaaggacttaacatctctgtactttaatttccttatctgtaaaatgggaatgataataatratagtatttcattaagttttttgccaggagtaagtgagttaatgtgtctgacacaatgggtctggcacacaaggcctatgcatatattgattactgtttcagcctcagaactttaagaagtattacatgaggcaccccatcgagcaccccattatggtagcataccttttatttggaaggtgtaagcccaaaagagtgagggtgagataaaaaaaaaaaaaaaaaaaaaaaaaaaaagagagagagaagtgaggcaaagaaaaagtgatgtgaaatgatgtttctccactttacaacaagctgccacgagaccaacaggacactcaggagatatgtttgcttgtcacatacaacttctccagaaagactgcaaagaa

SEQ ID NO: 274553 - DNA, 553 bp, Homo sapiens
aaatcctgaagattgtgtatgtacagaagagatggatctttctgtttcttcccggggaatcataaatatcatgaaggctttatgaagctatgtttagccatactttctcaatttagatactagagtgttattgtttgtgtattgaatacagattaaattatttataactgttatgtccacaaatttgtttaaaataatttgattgtaaccatgattatcgaaatgttagataaaaatatataagaaaatgaaatttctttatattgatctcaccattatcttaataacgttaagttccacactacctagctcaaataccatctccaygacttacttatggtgtgaccttgagcatgctacttaaaatttactggacttggttttctcatatatgaaatggggacgctaacaggacgaatctcacagggttagtaagagaaagaacgatttaacacatatatagtacttaagcggagagatgggtcccagttctcctcctcctcccccttgtctgtcttctctagttttccttaataggttcatagagacatgg

SEQ ID NO: 274554 - DNA, 604 bp, Homo sapiens
tttaatatttacatggaaaattagaagatcttggatagccagaagaatctggtgggaaaaaatagagtggatggacttacactatctaatctcaagatttactataaagctacggtaatcaaggcagtatggtaatggagtaaggatagaccaattgaccaatggaacaagactgagtctagaaacagatttcacacatatacagtgaactgattttcaacaaagctgtcaaagcaattcaatgggggaaaagaaagtctttttaacagatggcacaaggacaaccagataaatgtatagaaaatgaatctcaactttttgtcttttaccacatgcaaaaatccactcaaactggattaaacctaacagctaaagttatatagtttctagaagaaaacataagaaaataattgctactttgaaataggaaaagatttctttgygctaaaaaccactacattttgaaaaaaatgataaatttgtcaccaaaattaaaaaccacttctcaaaaaagacatcatttaggaaataaaagggatatgtaccagactgtgagaaaatattagtatgtatatatgacaaatgactcacacccagaatatat

SEQ ID NO: 274555 - DNA, 604 bp, Homo sapiens
tttaatatttacatggaaaattagaagatcttggatagccagaagaatctggtgggaaaaaatagagtggatggacttacactatctaatctcaagatttactataaagctacggtaatcaaggcagtatggtaatggagtaaggatagaccaattgaccaatggaacaagactgagtctagaaacagatttcacacatatacagtgaactgattttcaacaaagctgtcaaagcaattcaatgggggaaaagaaagtctttttaacagatggcacaaggacaaccagataaatgtatagaaaatgaatctcaactttttgtcttttaccacatgcaaaaatccactcaaactggattaaacctaacagctaaagttatatagtttctagaagaaaacataagaaaataattgctactttgaaataggaaaagatttctttgtgctaaaaaccactacattttgaaaaaaatgataaatttgtcaccaaaattaaaaacmacttctcaaaaaagacatcatttaggaaataaaagggatatgtaccagactgtgagaaaatattagtatgtatatatgacaaatgactcacacccagaatatat

SEQ ID NO: 274556 - DNA, 603 bp, Homo sapiens
tgagaaaatattagtatgtatatatgacaaatgactcacacccagaatatataaacaatcctaccaatcaataaaaaaagacaaatgacccaattaaaaatgagtcatgattgttcctaacgtgaatatctggatgtttcagttgaaggtgctgtatttacttgctcctctcattcctctccgtgggagccatgcaccctagctgcttgtcgtaggccatcttcggatatgagaagatactgacttgactctggacagggaagctaaccagactgaactgttatcctttggggatacagtataaatgcttttttcgaatagagaatagcctcaccactttgcaaacacattattactgtttgaagtttaaatgggatatagttattcattcaaaaattaatttttaaatacctctgtgcctggatatactatttgatttggtgtatcttgaattacgctaataactattcctgatatgagcatggttaaccttattcaagttgtataaaataacttctaytattttataacatagaatggttattttttaaaaatgagtcaaagatttgaacatatacctcagaagaagatatataaacagca

SEQ ID NO: 274557 - DNA, 589 bp, Homo sapiens
tgtatcaattattgtttaattatgttgtaataatattaattcctggcatatagtaagtactcacattttattttgtcttaaagaacacattaagaccaagaggtacttcaaaaacaccggtcaaaggatttctattatttcaaatttacagcccaygactttcagtagatctacatagattgtgactagatgcatccgtgggtgaggtcctcaattcaaaggccacagctttgttatcaaaaatgttacatttgctaaagaggcacattttaaaatgtaggcatcccttcgcaataggtactagggttcttagaaattcttaaaaaccgtgggctctgatggggttgctatgatcagggctggccctgttttcctctaattcctcctcagcactctcttctctcatcttgctacctccctctttgaagcagtaacatcttattatgagtcacaggccttaatatgcataaataatcatagtaaaccaccaataagtaattaaatgaataaatgacaatgaatctttgcaagatatggaaaactgctattctgcaatgataatttttaattagcatgaacattaaatatt

SEQ ID NO: 274558 - DNA, 589 bp, Homo sapiens
tgtatcaattattgtttaattatgttgtaataatattaattcctggcatatagtaagtactcacattttattttgtcttaaagaacacattaagaccaagaggtacttcaaaaacaccggtcaaaggatttctattatttcaaatttacagcccacgactttcagtagatctacatagattgtgactagatgcatccgtgggtgaggtcctcaattcaaaggccacagctttgttatcaaaaatgttacatttgctaaagaggcacattttaaaatgtaggcatcccttcgcartaggtactagggttcttagaaattcttaaaaaccgtgggctctgatggggttgctatgatcagggctggccctgttttcctctaattcctcctcagcactctcttctctcatcttgctacctccctctttgaagcagtaacatcttattatgagtcacaggccttaatatgcataaataatcatagtaaaccaccaataagtaattaaatgaataaatgacaatgaatctttgcaagatatggaaaactgctattctgcaatgataatttttaattagcatgaacattaaatatt

SEQ ID NO: 274559 - DNA, 590 bp, Homo sapiens
aatataatcacaagggtccttataagagggaggcataaggatcagcataagaggaggaaatataaccacaaaagcagaatcagagaaggaaatgtggcagtggaagcagaggtcacagagagagagagagatgggagggatgtcatgctactggcactgaagatggaggaaggggccattagccaagaaatgcacctagagtctagaagatgcaaaaggcaaggagacaggttctcttctaatacctccagagagaatgcagacttgtcaatactttgacttcagaccagtgaaactgaattcggacttctgacctccagaactcaagacaataactttgtgctagcttgttatagaagcaatagaaaacgaatacgaatggttttgttcattaatttgctttttaacttttcagatgtcaatgttagtaactatayggtaagctcctgaatgtcaatcccatgtctcatacttctgtgtgtctttacacagagactgtgcagttagatccattaaatcttgtctaatttactgcagtaaatattagaactatatcattttatatctggatcttgagttcctttttttct

SEQ ID NO: 274560 - DNA, 559 bp, Homo sapiens
cccatgttccctcagctgccaagccagactgagcaagggaaagtgatggacagttctgtccatgcattaatgttcctggaatgaataaaaaaaatagtcagtatgattcttgatcatcttgggtacctgctatgaaaatgaagcttttgtgtcttccttgtgggccattacaytttcctgctgcaattacaggttctaataatataaaatactctgggatctcagcagctgtgaaagctggaccatgcagctcctgttgtccctggtgggagtgacatcacagcggctgcaaaatgccacaggtgacattcacctaggactctgctgagactatagctaccttgagacagatagagtagcactggtggtctcggctccatgaacttcatgatgggctcccaaatggttgttgccttcatttcctctctcaaataatttttagcaggttttctaggagctttggtaggaggatgtggcagtgaatccacctggggctatatcaagaagcaccctgtgccatcatgttctagcatccagagaccaagctggactctaccct

SEQ ID NO: 274561 - DNA, 559 bp, Homo sapiens
cccatgttccctcagctgccaagccagactgagcaagggaaagtgatggacagttctgtccatgcattaatgttcctggaatgaataaaaaaaatagtcagtatgattcttgatcatcttgggtacctgctatgaaaatgaagcttttgtgtcttccttgtgggccattacattttcctgctgcaattacaggttctaataatataaaatactctgggatctcagcagctgtgaaagctggaccatgcagctcctgttgtccctggtgggagtgacatcacagcggctgcaaaatgccacaggtgacattcacctaggactctgctgagactatagctaccttgagacagatagagtagcactggtggtctcggctccatgaacttcatgatgggctcccaaatggttgttgccttcatttccyctctcaaataatttttagcaggttttctaggagctttggtaggaggatgtggcagtgaatccacctggggctatatcaagaagcaccctgtgccatcatgttctagcatccagagaccaagctggactctaccct

SEQ ID NO: 274562 - DNA, 582 bp, Homo sapiens
aaggcttcacgttcagatcattaaaaatgcccatctgtcttttttatttaatatgccatccgctctccaatttggataaaatctgagatcctgcccctattgaaacttcccaggtaagcttcacatttctgttttgtttgttaagatccttgtggaagctgtccagctcaaaccgtagccaaggggcatgactggctcctccctcctgtttgctttcctagggttaatctgtgctaaagcttttattygaagaaactaggaaatttgaagaatcatatggacaggcttaaaaaaatgacattaaccttgagtactaactcaatattaagctgatagtataaattcagtatcgtttttatcttagaaattgcaaatctagacagcaagaaaaaaattacacatattagcagaattcttattgtattttagaagccacaagtttaaagaaaaagagtgatttagctagcttcacatcagcagattgaaacacatttcacatgacttttttaaaagctcagaactaaaaatgtctaacatttaaacattttctaacataattctctcacttaaaaatgttctagc

SEQ ID NO: 274563 - DNA, 586 bp, Homo sapiens
actgcactgcacccgttaccaccagtaccaccactggcattattgccactgagtcctagacattgccatgcctattgccccacacagttcttcactctggcttctggggccagagaacctgggagagtgagtatctgtcctggacaaagattcagactgtgcasaatgtatgaacactggaaggggttttggagtttagattgtcaaaatcctcacacacctttatccagaaaatgtatagtacacttcctctggtcttattaatatatggctcagaacatttcaatgccataaacaaaaattgagttgaatgccttttgtattcctagtaatgaaagtagaataataatgcccgaccactccaagactcagatgcctggcaaagcttacctcttctggacaacaaccaagagcaagaaagtgagctaaaaggaatcttctaagcagccagactctatgttacaatgttcacatgatgactctcactgtcttgactcatggggagattcccagaggctctctgtcagactctctttacacttactgtacacacaattcaaacaaactgggttttcccagttggcag

SEQ ID NO: 274564 - DNA, 586 bp, Homo sapiens
actgcactgcacccgttaccaccagtaccaccactggcattattgccactgagtcctagacattgccatgcctattgccccacacagttcttcactctggcttctggggccagagaacctgggagagtgagtatctgtcctggacaaagattcagactgtgcagaatgtatgaacactggaaggggttttggagtttagattgtcaaaatcctcacacacctttmtccagaaaatgtatagtacacttcctctggtcttattaatatatggctcagaacatttcaatgccataaacaaaaattgagttgaatgccttttgtattcctagtaatgaaagtagaataataatgcccgaccactccaagactcagatgcctggcaaagcttacctcttctggacaacaaccaagagcaagaaagtgagctaaaaggaatcttctaagcagccagactctatgttacaatgttcacatgatgactctcactgtcttgactcatggggagattcccagaggctctctgtcagactctctttacacttactgtacacacaattcaaacaaactgggttttcccagttggcag

SEQ ID NO: 274565 - DNA, 494 bp, Homo sapiens
ccagggggaggtaattgaatcatgggggcctgtctttcacatgctgttttcgtgacagtgaataagtctcacraggtctgatgggtttatcaggagtttctgctttctcttcttcctcattttctcttgatgctgccatgaaagaagtgcctttcaccttctgctatgattctgaggcctccccagccatgtggaactataagtccaattaaacctcttttcttcccggtctagggtatgtctttatcagcagcgtgagtatatatgttgttcacctttcattccctgctctccctctccatgacttccattctcatggttgcaggactggcttcagttgctatgttcatagaatattaatccaccacctctcccattgatagttcgagtggacttttccaagtcctttccctgggaatttgggtggctggacctgtgacagataaatccaggaggcatcagtggtggtttctgacaagtagaccacagaagta

SEQ ID NO: 274566 - DNA, 551 bp, Homo sapiens
tcaactgttctaaccttttcgttccatgggaaactcttttcctctgcaatgaagtctcccatatttgtctaagtacctcaaatagtttctgttatttgtaaccatgtcaatattatatctccaagcagtcattttgttatttctgggtatttatctccctctcttctctcttacttgatccaggaggggatttttccstccatcagtcacaccaagtagaaacaataattcaaagaggtcttgtacctaacttacagatgagaagcatgcctgaagttccatttctcctttccctacagtggagtgattagataatgctgctcctgggggaggggagagaaaaggcagaaaaatctaacaatctcataagagaggaagaatggattggaaggacaaaggggagaactttcagtcacagagcagggattgcagagtggaaggattgagaggttgagcacctccctgcacactcattcattacctgccattcaatagtccttggccctggtaagtcctctgattagatggtaggagatttggacctctgtatg

SEQ ID NO: 274567 - DNA, 551 bp, Homo sapiens
tcaactgttctaaccttttcgttccatgggaaactcttttcctctgcaatgaagtctcccatatttgtctaagtacctcaaatagtttctgttatttgtaaccatgtcaatattatatctccaagcagtcattttgttatttctgggtatttatctccctctcttctctcttacttgatccaggaggggatttttccgtccatcagtcacaccaagtagaaacaataattcaaagaggtcttgtacctaacttacagatgagaagcatgcctgaagttccatttctcctttccctacagtggagtgattagataatgctgctcctgggggaggggagagaaaaggcagaaaaatctaacaatctcataagagaggaagaatggattggaaggacaaaggggagaactttcagtcacagagcagggattgcagagtggaaggattgagaggttgagcacctccctgcacactcattcattacstgccattcaatagtccttggccctggtaagtcctctgattagatggtaggagatttggacctctgtatg

SEQ ID NO: 274568 - DNA, 593 bp, Homo sapiens
ttaaggtacaaagcaagcatataatttgttctctgtagttggkttccttcaactttaactggatatccaggtcaaggttttcctcaaatcctgagttcctgttctttttgtgataagcttcagaggtcaaccctcaagtttgatcaacattgctctgtatattgtcattagaacttaacttagggttctattatatcctgaagtcaacccaacacctcttttcgcaattatttttccttaggccttacgagctaattgtgtatcttctctgctcttaaagtagttgtgaacaaagcaggctcttaaagggatatacctgtatccaagtctgtctccatcacttatagttgtaggactttgggaaaatttatttgtgtttgagattcctcattgctagggtaacttactagcaataacttccttattgctagtgtaacttacaatgagattcctcattgtgagtgtgaagtaatacaaccactttgaaaaacaatttgatattgtcttgtaaagctgttgaatatttgcattctctataacccatcagttgcttacctatgtatacaaagagacacacatgagaatctttataa

SEQ ID NO: 274569 - DNA, 609 bp, Homo sapiens
acaacatttgaaatatttgtaaagatggcaagwttttcttatcttttgatactcatgctagtagatctgatcacacttaattttaataatgctatgctattataaatgtataaaggaattcaaggcatatgctggtgagaaactataagaggaagtagcaataacttcattttacaaatgctgaaattgaagcaagtaaattttaatcattattccaaagttaacacaacagtgtaggatcataacccaggattcctgactgtcagattcctggcttacctaactggatacctggtgtcatatctctcataatcttctctttctctctcttagtctctctttcttcacaccttttttcccccaactcctgtaagaggcaggtttgcatcatggctaagagcatggaccttgggatgagaaatactggctcttccactctctagcagtgtgcctaaaggtaccgtttttgatattctcttgtttcatgttcctcatctataagaaggggctgctaatggtacctattttatatggctattgttgaaaactaaataggctgttacaggtaaactgtcttgcccagaagaaggccctcaatacatgttacat

SEQ ID NO: 274570 - DNA, 609 bp, Homo sapiens
acaacatttgaaatatttgtaaagatggcaagtttttcttatcttttgatactcatgctagtagatctgatcacacttaattttaataatgctatgctattataaatgtataaaggaattcaaggcatatgcwggtgagaaactataagaggaagtagcaataacttcattttacaaatgctgaaattgaagcaagtaaattttaatcattattccaaagttaacacaacagtgtaggatcataacccaggattcctgactgtcagattcctggcttacctaactggatacctggtgtcatatctctcataatcttctctttctctctcttagtctctctttcttcacaccttttttcccccaactcctgtaagaggcaggtttgcatcatggctaagagcatggaccttgggatgagaaatactggctcttccactctctagcagtgtgcctaaaggtaccgtttttgatattctcttgtttcatgttcctcatctataagaaggggctgctaatggtacctattttatatggctattgttgaaaactaaataggctgttacaggtaaactgtcttgcccagaagaaggccctcaatacatgttacat

SEQ ID NO: 274571 - DNA, 443 bp, Homo sapiens
acgtaattagtactcaataaatgaatgagcgaatagtttgtatcataatgaaaacattaactaaaccaaagtaaaaaaattaacatgtcctcctaaagccaacatgaatcaaaatccaatgtcactttcaagtaatagttgactatgttgacagcattaactatcatatgtgagtcttgaggtgaygttaaaaaatacttgatggagtatggcattgtcaagtgcttagtggattctcttcccaataagcaataatcaaacttgaccaaattgtcaaaataaccattttaaagatctgtcaaacagccaaagatcaaaggcatgaaacaaattgagaagtcattattcatgaataatcactgaactttgggtaagaggagtctgtggggattcttgccttctcctatccctacttaactgagacttcacaccttcacacccca

SEQ ID NO: 274572 - DNA, 573 bp, Homo sapiens
ctttgaactagctgcagtaatccatatatgaggtgaggagaactttactgcagtaggaaaaggaggaatgcaaatgagagatttgaagagaaattgagtgataaattagatacacaggaaagagactctgtaagatggctggtaataggaattgagtctgaagattgtcttggttaaatacaaagtgtatgccctatgactagttcacaagccattataaacctcagacaatgtccatacaatctatatcacctagattaaattaatataaagtacttcacccataactttccagtaaagcttggctgtactaccactctcatcatcatcataacggggtgattaacattttctaatttataaaatagctgtttcccttgcaactaataggtattttgtgaggaaatagtttaaggctatataggctgttgctcctcgaactttcattgatgatcctygtctgaataaattattatggttgtcaaataatgattttctgtttccatagtttcttttacatctatcacttagcaaataatgaagagctctcttttctcctatccatctgcccat

SEQ ID NO: 274573 - DNA, 589 bp, Homo sapiens
tactgaaccatcactcctgggagaaatacagggctaggttcctgtgagcctttgatcacattttctttgttaattttttattttaatagcttttagggtacaagtggttttttgttacatgggtgaattatatattgatgaattctgagacttttggtgcatgagtcacccaagtagtatacattgtacctaataggtaggcttttttatccctaggtccccatccactctggctcctgagtctgtaaggtctattatatcactctgtatgtctatgtactcayagcttagttcccacctataagtgggaacatacgatctttgggtttctactcctgtgttacttcacttagaatactggcctccagctccatccaagttgctgcaaaagacattatttcgttattttctatggctgagtggtattccgtggtgtatatatgccacgttttctttatccactcatcagctgatgggcacttggattggttccacatcttcacaattgtgaactgtgctgccatcaatgtacatgatcacaatatttgtatcgagcaatcaataacataaccttgtttatgtgtgtttc

SEQ ID NO: 274574 - DNA, 573 bp, Homo sapiens
ccacgttttctttatccactcatcagctgatgggcacttggattggttccacatcttcacaattgtgaactgtgctgccatcaatgtacatgatcacaatatttgtatcgagcaatcaataacataaccttgtttatgtgtgtttctgtttaaaggcaccttatttaatacatattgttgattcattaacattggccaacggcactataactcatgcctgaatgcagcttatctagcacgtgtattttctcccgaaggcaccccacagccttaggaacactagcacttcagcactaagcttgggggccacgtgaaatggtgaaatctattttaaaaaacagaaaaggaagaacaatgtggcatgaaatagacttaggaaagggcacctgtttgtggtatgagagctgaaacaagaagcagagcattgccttgttccactcagttgggaatgtgtgcatgtcaggggactcaaattttacattgctcagtgcatgtctgtgaacaaccctgaaggcaccatgagtattgattttggctacaaataaaktttagtaagtggacaaacgtacaaat

SEQ ID NO: 274575 - DNA, 565 bp, Homo sapiens
tatttcatcaatcatgaagcaagtctgaccttatccttaaaaatagtcaaatctatcgaattaaggttttttgttttccaaaaaatttttgttacagacaaaaccatagtccatttcactggaatatctacaacatagagaaggcggaagctacatcttctttgtcaatgttttccaccttttcccttagtttgctgctgctatcttattaataagcaggaggtgagatggacatttggggtctgcaatgtatccttcttagctgctcctatggcctctggcaagtcagcatgtagtcctacaggggcgggaaatgagaacatgggtggggcttgagggtgtggggcatataaaagcagacattcctgagaattccacactaacttgtggcctttggtaytaaggatttctctgaaataacctacagtcaactgccaattagtggcacattaaagataaaaatgtccagacagtaaccctaattctcaaacgatgtgtacgtactgtttcaatggtgtagggaaggcctgggaacattagaggctgttacaacaagattggaagc

SEQ ID NO: 274576 - DNA, 583 bp, Homo sapiens
aggatgacaggctggctccgaggtcatgttgttaagcacagtgtcagttttatggcaaagagcgaaaaaagcctttttattgccacctacattggcaggcccttcatctgcctgcctttttactgtctgactcactggtttattctccacatggggggtgctatcacccagtgagttacgcccacttcatgtttgctagagcagataattcttagatctcataacctatttatttcatttggatcagcgtgctttccctgactacctcccaaaccataagcaattgtttctacatatctctccctttatgrcttaccattaagggactcagaacgcttctttgacctgtgtaattgcaaaccatattctcagtctgggaattcgaatgggggttacatattgtgcacatcagagacggtgagttatcccagggactgccagttaaggttattgaattacgcattttctgaaccatttcaacaagaaatcttacccttaatgtatattttcacttgatggaggaccaagtctcacaggggttgaagaactgtatttatcgacttcctataaagtacaaaaaacc

SEQ ID NO: 274577 - DNA, 583 bp, Homo sapiens
aggatgacaggctggctccgaggtcatgttgttaagcacagtgtcagttttatggcaaagagcgaaaaaagcctttttattgccacctacattggcaggcccttcatctgcctgcctttttactgtctgactcactggtttattctccacatggggggtgctatcacccagtgagttacgcccacttcatgtttgctagagcagataattcttagatctcataacctatttatttcatttggatcagcgtgctttccctgactacctcccaaaccataagcaattgtttctacatatctctccctttatgacttaccattaagggactcagaacgcttctttgacctgtgtaattgcaaaccatattctcagtctgggaattcgaatgggggttacatattgtgcacatcagagacggtgagttatcccagggactgccagttaaggttattgaattacgcattttctgaaccatttcaacaagaaatcttacccttaatgtayattttcacttgatggaggaccaagtctcacaggggttgaagaactgtatttatcgacttcctataaagtacaaaaaacc

SEQ ID NO: 274578 - DNA, 616 bp, Homo sapiens
tggccagtcattattaaaacaatctcagcatttctgagaagtcttgcttgccaatggttacaaattgtccctgacttcaactatatcaagcactagcaaaggtaatctcttccagacttccaggagctgctggcttcaggtcctctcttgaattttccacccatgccacttccagatgtgaatttcagcctgattattgggggcctggccccccgacatgctgaagacggatcacagagcatcaggccgtgtgtctgacatcactgttccacaatcaacagagaacacatttataaacattaaattgccccagactaaagcatttcttgccaaagagatacagcataattaaactgcaaatgatagcaaaaactaattgttactgtcttgtgaggtgttagctaaaagctttccctcgtgtagctcacttttctggatgaaactgacctaagtgcattcattagtggacatttggggtttttttagtggagtagacataacaaacacygctttggattagcagttaacacaaaatagaagcctttttgaatgtggtgtttataggttcactttttatttatctagtcatggaatgactattaagtgctcactatgt

SEQ ID NO: 274579 - DNA, 464 bp, Homo sapiens
tcaaccaataatggaaacgtatctcactatcaccattccaccacccccttggtccaagccaccaatctcccccaccaggatgactctagaggttccccttccagagtaaatgtcctctcttcagtggtgatgctgctgacagaacctaaggggtctcccatggatggctttgcatctcatgtgactcactgcacccataccatcctcaggggtttcaagyaatccatctctagatgctaacacctcaaatgcctgcaccaaattatcaattatgaatggctagaaatggtcaactaaatctcaagatctaagttttaaatgtcttctttcaagtttgtgattcccaaaatggtttgatattttgctctcatcagttaaaaaataaatgagcacattctcctaatgtatgtacacttatttattaattataaattataaatataaatgaccaaattaataaataa

SEQ ID NO: 274580 - DNA, 567 bp, Homo sapiens
atcccttttcctttccttggttcaggctggtagccagggtctgtgtttcttgacctcttctttccttcctttgtttccrgtaaaagctgaagcccaactccagagtcaaaaccacttcccagagatgaggaggatagggtggtcgtggggtctgagtctggccatgcagaaagccctggcatggttaccggagcacagtgttggctgagacagggattcagaagaaggagggactgagggggccaggggaggttctggttgggttttgaacaggttgggttcatagttgccctgtggggttgggctgaaggcatctggaggcatcgtctagagctacgagtgatccggtgcctctgagtgtaagtctcagtaaagcaatgccagcctgcctttgcaaataggcatcgaagcttcaaaatccccttaaaaccaacttattttaactagaaattggtatgatagttatctgagtgggtcatttgtctaaaggttaaatactgggtaaaagccagagcagaaaacatcctttagcaaatccacctgtctgtgctactcgtgccggggaaa

SEQ ID NO: 274581 - DNA, 613 bp, Homo sapiens
ttaattatagctcctgacaaaattcagactactgctccttactcctacttggggaccttagtaaatgatactaccattgtgccacagaaagtaaccatatgtagggatcaattgaaaacattaaatgactttcaaaaattactagcattaattactagcattaattgcatacgacctgcactaggcattcctacctatgccatgagtaatctgttttctatccttagaggaaaacctagtctcactagcccttggcaattaacaaaggaggctgaggcagagttacagttaattgaaaagcaagtccataaagctcaaataaatataatagatccagagaagactctagatttgctaattttttcaactcagcattcacctactggtgttaytgtccaagaacaggacttagtagagtggctttttcttccacatactaattcacagactctaactccttatttacatcaaattactactatgataggaaatgggagaactcggattgtttaattacatggatatgatcctggaaaaattattgtccctctcacgaaggcacaaatacagcaagcttttataaatagtcttacttggcaaacccatttagctg

SEQ ID NO: 274582 - DNA, 622 bp, Homo sapiens
gctccaaccccctccaacctactccaccttagtaggtgtgaaatggactgattcacagtgagtcccagctaagcttgggtgtcgcttgtactgtcttgtcaccatagtttattgataacagtgaaagtgatgattgttcaagttctcacctggtcttggtggcaacgcggaagggctcttgtactagaggctagtccatagacaggacatactgatgtggccagcaggatataaaaagcccaactgacacttcatttggagctccctgcttctgaggggttctgtgcacacaggctggcttctgatcggagagaaaaaatgcatcctggcactaccctgcagagaggaaagttggagctggggcccattccttcctgacccttcactgtgaggcggcctttggctgaggtgcttttaccactcctgatgcacrtcttcgacatctttgctgtatcaaatccttttcctaaaataaactgtacatttctaagctttgtcattttgggtcctgtgccctggtgtctagacacacagttgatttgtttatattgacctacatttagtaagcttttatactcatttagctattctgcaatttacctttagattattctagttttgt

SEQ ID NO: 274583 - DNA, 636 bp, Homo sapiens
tttctatatattggattggaatggcttcaaagaaggcctgtttgaagtcagcaaattgatttcaatttgggattctcttttagccttaccgttcttggggataagaaatctggagatgaactggcctcagaaacattcaggaagattacgatgggaaatctgtcatcttgtaaagttggatcatttggtgctctctgaactaaattatgctgactaacattctgagcatctgaaaatcattcttcctggttgcctgatagatgaccacacaggagtcatttctatcacatcttatttgggggttggtatagacgccaccagcactgcagggaaaaccaccccctaggaggggtgagacagagagaatgtgagattttgatcattgattgctctttctgaaaggcactgctgaccatagtaggtgtggtgaatgtttgtgtcactgcattgggtattagaacttttgctctgagcatgggctgccctaccctgaagagctgaatcttggcttctgacagaagctctgcatgacwcattctcctcaagcatattttccttattttcctatgaaagtatctatagtttgcaacaagaactgtctttggttcaagtgtcagtgtactagaatagatgctt

SEQ ID NO: 274584 - DNA, 592 bp, Homo sapiens
atgtgatgtgtctccacaaatcccatctggaacccgtggtggcccaccctcagcaaccctcctctccccactgactctgctttctctgtccataaacttttagcctccaggagcagaggagccgtggctgagatctgaccctaggagagggagtttgggccttctctgaccatgatgctgagccaggctttctgcttagagtgacagagattgtcattgtattgggtttcccctgagggaactgcaaattaaggcatgaaaaacactctgctgatgacagtttcacagcatatcttaatgctgcacaaagtgaaatggtttaaaaggaattagtgtgtcctaagtcattgagccctgctctgggctctgcaatcctctagggattcaagatcccattgcaacaaggtcatgactgcgtctaggccggacagayggattctgaaggacaaggtgtttgtcttttgtgcaggtctttcctatggtccttacaagagaggcagccacagctcctgtttctcccaactgggacaaaagatgtagctgttttctaagcactggtttgtcatctctttaaggagtggttggctccaga

SEQ ID NO: 274585 - DNA, 371 bp, Homo sapiens
  misc_feature (1)...(371): n = A,T,C or G
agaaaagaaatggccacaatcataactgaaattaacaaaatggagatgagaaaaaaatgtaaaaaaatcaacaaaactgaatgttgggtatttgaaagaaaaaataatgttgataggccattatctaaacttataaagaaaaaaaagagacaatattcaaataaacacaatcacaaaagagacaaaggggacattaccagtgaccccacagaaatacaacaaccctcagggatgattatgaacacctctatgtacacaaactgaaaaacccagagaagctgcataaattcckggaagcaatcttcaaagattgaaccaggaagaaaatgaaactttgaacagactaataggaagnnnnnnnnnnnnnnnnn

SEQ ID NO: 274586 - DNA, 371 bp, Homo sapiens
  misc_feature (1)...(371): n = A,T,C or G
agaaaagaaatggccacaatcataactgaaattaacaaaatggagatgagaaaaaaatgtaaaaaaatcaacaaaactgaatgttgggtatttgaaagaaaaaataatgttgataggccattatctaaacttataaagaaaaaaaagagacaatattcaaataaacacaatcacaaaagagacaaaggggacattaccagtgaccccacagaaatacaacaaccctcagggatgattatgaacacctctatgtacacaaactgaaaaacccagagaagctgcataaattcctggaagcaatcttcaaagattgaaccaggaagaaaaygaaactttgaacagactaataggaagnnnnnnnnnnnnnnnnn

SEQ ID NO: 274587 - DNA, 564 bp, Homo sapiens
acaatgaatacagtattgccaagtcatcatttatgggtggagacgttgaccacagcagttgaggtgctttcaactggatcttatgccctttattttaatcccaattgatagttcctcatttgtattttatgacttagaaatactcctacgtgatgctcgtttgtttttctcccaggcttctggaaagtgctgatcatgattgcttcctatcatttggatcccaaagttgataacttaacataagtgactgaggttttagtagaactgggttttactaatcgtatctcctccttgaggtgctgttcccttcattcctttcctttatgacaggtgaatgcattggctatgctgattttatttrcatcctggcgagtcttggagaatcaatctcgttaaaatgatgactgcatttgcctttggagaagaggtttattgtctaagtaaaactcttatgtgaaggtgtcatttatgtaaaaaaaaaaaaaaattctaacttgataagatggccacaggttagaggggtgtgttctcagttgatattaagggatatgttgaaaaggcaag

SEQ ID NO: 274588 - DNA, 525 bp, Homo sapiens
ggggtttaaggaagatactttagaaatagcaactagccattgctgagagtgaacctggaggctgttcataatgacactgagagcagaaatgccaagaaggtgctcatttgacacagggcagaggtggaaattaatctgaaagttgatgtccaaggtaggggtcgctctttaaaaaaaaaataagtaattaagttaaattaaaatttactttttttttttttttttttgagacagaatctcactctgtcacccargctggagtgcggtggtgcgatctcggctcactgcaagctccatctcccggtttcatgccattctcccgcctcagcctccggagtagctgggactacaggtactcgccaccatgcccggctaattttttgtgtttttagtagagacggggtttcaccattcacaggatggtctcgatctcctgacctcgtgatccacccacctcagcctcccaaagtgctgggattacaggcatgagccaccacgcctggcctaaaatttactttttaagaa

SEQ ID NO: 274589 - DNA, 639 bp, Homo sapiens
gggagggaggcaggcggggctttctggaagaaggagcagatctaagcaaggcttcaaaggaggtgagttaggagcctgagacagccgccctgcccacctgccctaagtcaatctgaaggctctctttaagggagctgaagaggacagtctggatgttctgagaacagttcctcttgttctctgtctcacgatctttcaagaatcctcctccttgttctttagaagccaaagtgctcactattgtgttcagggccaaattccatcagagactctttgtctgcacacagaggtggaaggcgggctcactcgtcactccccatcttgcctcacatcacagaggtgggctccggggcctattgcctcccagagggaatccatttcctgggctcctgcttcttacttgtcagagaaactacaaaaggcatacacttccatagctttttccagctggatttaaagttttaaaaaaatcactttaaactttctcttctatgaggctagcaagatacctttgtttatgtctttycattttaaggacaaaaggagttggagtctattagatcaaactatatgaaagtcccatttttgtaggtcagaaacaattttatatatgtgatatcacatagttccgaataatat

SEQ ID NO: 274590 - DNA, 345 bp, Homo sapiens
catgtctgtgtgacccattgttaagggcccagtagctatctgggctgtataagtctttattgaatgactgggtattaaggagagattgggaagatatgtatggtgtggggaatgtggaaaggtgttgcgagttattaatgaagaggaaaaatggaaaagcaaatgagaggaagtgagtgagagtggaactcagagaaaagatgtggtcaggagtccatccaatcagggggaactatattggaggagaatttctttccacacatccacatgccctttccctrtgtgttagtttcctgcggctggagtaacatattatcacgaactgggtagctacaaacaacagga

SEQ ID NO: 274591 - DNA, 593 bp, Homo sapiens
tcaccactgcttttagggctacccagattccctctcctttccttcctgatttagaaaggttaactcactgaatgtcaccaccatggagcctcagccctcctcctccttgctgtccatggagttaacatttgtgttccccctcaccactcaggaaaaaagctcctaagcaaggcctttcccttgaaagggctcctgagaagtgagaggaggggggtgcatgaggagggactcacagtaacttagcaatggcatttctcaagtgcttccaagtcaagggctgtgtgcaagagacaagagacacagtctctgctctcaattgagtcagaggcagagaagcagcaytggaatgacctggaggagaggcagattcatgaagtaacatgtccctgtgcacaaactcatagggtgaggctgaaaagaccatccagtgaagacaatgaaatggggattgctgagtgctgatggcagggagggacgaacagaaagaaagaagacggagatgaaagaaaggacagatgggcagttgggaagagaaggtgtgatggactgaactgtgtgccccccaacacatgctcattatggggaagtcctaa

SEQ ID NO: 274592 - DNA, 576 bp, Homo sapiens
ggcttaatatttgatagcatcatgaaaatatatacttgacacagttccttgcacgtacataattatgagtccttaaattgctctaccactttgcacttatctaagcaatctctgttgtagagttggcttttaggatctcagaattagagaaaagcaaaactttgagatcatcttctgaaacctcatgtccagcacaggcatctgtataatgtggttctaaggattttctagaaacccaatggggatggagaacccactatcttgtaggacggtctgttccattttcacacaataagggtaacttcctgcagcactgtgcttcaccaccctcaggtgtcaactatctctagcgttttccartcttgccacccctgtgggtgaggaacacattgcagagcccactcattgcaccaaaataatggaggacaacccttgcatacatctctgtactgaaacctggctttgtgatctctgattgttccaaattagggtccttaagcatcatcccagatcagtcattcgctgagaagaacacctgtctcctggtttatgtcatttaatgaacatttatgaaat

SEQ ID NO: 274593 - DNA, 567 bp, Homo sapiens
tcttgagtaggttcttctcctctctaaatttagtatccagcaataaagatccatcatagggaaaaccttggcttgtaacttaaaatggtttaaaatttctgatatataatttctaccttattcttttacatagaataatagccatctattgggtgcctaatgggtactggcaatttgaatacttatcttatttaatgtgcacaaaagaagaaattgtttttttttcagatgaggaatctaagtcttagtgaatttaagtaaatttcctaaggccaaatagctctcagcagaagctcagtgattcaattgaatatctgcctgactgcaatgtcagtgggtgctcggcccatctgctcttgggctatcaactttcctacctccaactttgctcttwgggattagcaaagcctagaaaaaaacaaccgagagtaaaaactgtgtttgaagttctgaatttcagatgctttgtattgacccagtcttctgattcctcctcctcctcctccttccgtttagacactgacagatcacaaaatcttgggctatgaggattatgagagaaataca

SEQ ID NO: 274594 - DNA, 588 bp, Homo sapiens
ggacaaccagtacaagaacctcatctcctgacagccagcatcacttcttcattggtgcctgggtctacttaggagtacctaatggctaaaaccaaagggacaaatctggataagccctctccaaacagggtcagcatccctcaagaaccagtatgcctagctgctaatcctttatcaccagttaagctaggggtcaagcctccctactcctggyctcagaggaaggaactatatgattctgagtgtagctggcaactgcttgcctatgtggacatgaatagacttgtgatggaccccttcctctttgcactgtttcaggcttccaactacagggacaccttattggagtaacaggtctaatgcagagagctctccagtcttaatctcacctcttgggagaaaaagcttgtctgattttggggactgcgcatggggccacaaccccttcccttttctgatgagtatcttctccctacaaagaggagcaatgagcagcaaaacttctgcctctgcagagcaaagtctgcaatatttccaggctgctatgactgagctggaatgcctaatcttgctataaagattagggga

SEQ ID NO: 274595 - DNA, 588 bp, Homo sapiens
ggacaaccagtacaagaacctcatctcctgacagccagcatcacttcttcattggtgcctgggtctacttaggagtacctaatggctaaaaccaaagggacaaatctggataagccctctccaaacagggtcagcatccctcaagaaccagtatgcctagctgctaatcctttatcaccagttaagctaggggtcaagcctccctactcctggtctcagaggaaggaactatatgattctgagtgtagctggcaactgcttgcctatgtggacatgaatagacttgwgatggaccccttcctctttgcactgtttcaggcttccaactacagggacaccttattggagtaacaggtctaatgcagagagctctccagtcttaatctcacctcttgggagaaaaagcttgtctgattttggggactgcgcatggggccacaaccccttcccttttctgatgagtatcttctccctacaaagaggagcaatgagcagcaaaacttctgcctctgcagagcaaagtctgcaatatttccaggctgctatgactgagctggaatgcctaatcttgctataaagattagggga

SEQ ID NO: 274596 - DNA, 597 bp, Homo sapiens
ctttccgtactctccaagattttctctgccccagggcctttgctcctccttttgccagaaaactctccactgagctgtgtctacatgacagcccagattagctggcactccttatgacctctacagaacatgagatcctgaacactccctgcaagttggatacccagggagatactactttcccacagaggggcttaccaagagtcatcagtgattgttcccaaactcattcatgacaactaaacctgctaatgtaattacttaatgtaatgaaatgttctagaaaccaawgaaatatgaatgtagattggagagtttttatggaagctaggatgaatgcttttaaaaaacctgctaaaggtcagtggttaaaaatactgttaagagtggaaggaaaaagcataaaaacattgggaaaatagtaaaaatccgagattctgcactcagattgtttcacaaatgttttaagctcctgcttcaatttaaagtaattgaaactagaaattgtgactactcaaaacaaaaaccaaaacacccttcaagccaaaaggaacccaaaagctgcccaggggtgctgggcaggaagaaatataatgc

SEQ ID NO: 274597 - DNA, 597 bp, Homo sapiens
ctttccgtactctccaagattttctctgccccagggcctttgctcctccttttgccagaaaactctccactgagctgtgtctacatgacagcccagattagctggcactccttatgacctctacagaacatgagatcctgaacactccctgcaagttggatacccagggagatactactttcccacagaggggcttaccaagagtcatcagtgattgttcccaaactcattcatgacaactaaacctgctaatgtaattacttaatgtaatgaaatgttctagaaaccaatgaaatatgaatgtagattggagagtttttatggaagctaggatgaatgcttttaaaaaacctgctaaaggtcagtggttaaaaatactgttaagagtggaaggaaaaagcataaaaacattgggaaaatagtaaaaatccgagattctgcactcagattgtttcacaaatgttttaagctcctgcttcaatttaaagtaattgaaactagaaaytgtgactactcaaaacaaaaaccaaaacacccttcaagccaaaaggaacccaaaagctgcccaggggtgctgggcaggaagaaatataatgc

SEQ ID NO: 274598 - DNA, 556 bp, Homo sapiens
cccacagtgtcgcagatgatctgcctagtaaggatttgcgagaggaagcatttacagactattattttctcctccccctaggacagacctgcacgttaacagctgctgacgaccgctcctcccaagccacaggctgcaatgyggctgctacacactgcagggctatgccccagtctttacagggaggggattaaaactggttcccttcttcacactttctgtctctgtttctcagcctctgaggaatggtatttgttgaccttggagggcaaggctaaagagtctcccactgcgagaaaataggaagtcaggccctctctcgggaggccacctgctcctgctacctaatcattcccaggtgactagggatgacacataggttctgcaaggtgagtgtcctggcacggcctgggagtgaagacagggctcacgatggcagctgtacaatgtcaagcccacatctctgaacacgccgggattgggaaggcctgggaagccacaggtgcttgcttcaagacctggatcctccaagagcttatgcacctcacagaaaaac

SEQ ID NO: 274599 - DNA, 493 bp, Homo sapiens
tggatggagcttgcatggggcctagggagttccccacacaagggtttgcaaagcttctcaagtgaggacagggctacctacgatgaaagaaaaaagtttagcctggggctgatgatcrgctctccctttactaccacattcctgtgcagagcaccaagaaatcagagaattctacactcaactttgaccttgtgggttattatggcagtatatttatcgaaataggagaatagaacatatttaactatttgttagcttcatttataactcataattatttagacataatgcaaatgtgggctggaatttacgttctgattttttgtggccttgagctaaggaaaagggacccaaggaaatgggctttatatgcttggatggctttgtggaatccccaacttcattagcttttgtggtgactcaagatagttactaaaatccactttgtattatctttaaaaaccaaggaatattatgtagatcagtagttaga

SEQ ID NO: 274600 - DNA, 524 bp, Homo sapiens
cccagttgagctaaaagaaagtctggagggccgagtgcggtgactcatgcctgtaatcccagcactttgggaggccaagataggtggattacctgaggtcaggagttcaagaccagccagacaaacatgcagaaaccctgtctctacaaaaaaaaaaaatacaaaattagccagsagtggtggtgcacgcctataatcccagctactctggagtctgaggcaagagaatcacttagacccgggaggcagaggttgcagtgagctgagatcataccactgcactccagcatgggcaacgagagcgaaactccatctcaaacaaaaagagtctggaacaattctgttgtttaaaataactttctaggtggatctgggagatgtttccttggcttttaagacagtggcaatggaggaggcaatatttgccatggtttgggacaagattattttcatttttttatgagcaataactcctatgaatggtaccaaagatctcataaaagacgtaaacccaaagtcagtta

SEQ ID NO: 274601 - DNA, 506 bp, Homo sapiens
tatattccttgagccaaaattgaggtgtaaaataaacatgcycacataaatggttgattatgttcttaaatgaaggagaaaatagttgcagtgatgttaagtcatcaaccatttaaaatgttgcttttgaaagagatgaatcaaggaagggatggacatgaattttccttacctaaaaagctagtgaaaattaagagtgacatgaacaggattaaaactttattttatagtggtactgagatgaaacatcacactatctgacttcatagcttaaaaatataatcaccccaccaacttctcactcttttcaaggattttgtgagtaaccagctttaatttggaaaacctagacttctacatacagattgttatgtttgtgagtatgattatttctatcattttgttttacattgtgctttatcattcaataattaatatctatcattttccattaactaatttattttatgaccatttattattattattaccctatggtagtcaat

SEQ ID NO: 274602 - DNA, 569 bp, Homo sapiens
atcttattttggctaaataagtctgaatctaaactagaacctaactctcagtacctgagctatgcagggtcagatttttcaaaatctaggatcattaaaaggatgtattctaccattgtttacttacgaatatggtattataacctgcatttgggggctgagtggatccctttgaatctagtgtgatccatkgatctgagcttggttgagacctccagctttgttgagtgacttgagctcttttaacatcatcttaaaatttgtttccactagaagatattagtgcagccaggaggcctcagtggagccatttgcaaaaggaaataagggccaaattatttttcaactcacatctttggagttgaaatgtctgctctattaaaaaatacattgcttgggggcagtaaaggacaatgaggtgtcagaaagagtgctagaatttaggcaggattaagaaagaggaaaacaaaataagttataaaaggcatgtgttcctggggcttccctcagaactttgctcctggcagatgcagctctaggtaagagaactggggagaatcacaatgggc

SEQ ID NO: 274603 - DNA, 469 bp, Homo sapiens
ttaccataaatgacaccctttatgacaatctcctgatagaccatttatcattaacatatgttgccaaggttttaccactcttcagagttgtctcctccaaagtagatgagttgctttctcatgtacttcatgactcagcccatgcagattagggaatacagaggaagcttgaatccctccattggttccagaaatattaygccctgtgaatccacgcttgctcatctttgctgggtctcggtttctttatctggaatatgggttacttcgtgtcctgtatgcctcatcggagttgtgtgagtatagatgttttgaacctctcagtgagaagcaggcttctctgtgatttttggaatccaccagctggctccttctgtaattagatgcggaagcctgagaaccttgtagaacttagctgagtttctatttaacccaaagcggtgggttccctctaactgaagaaaagttg

SEQ ID NO: 274604 - DNA, 642 bp, Homo sapiens
gatcactattcagcagttcagcaatacctcaccgaacacccacagggtgtggaaggaaacgaacrtttattgaggacctactatgtgccagatccaaacagggtgatataaatgcttcatttaatctttctagacactagtttctccttctcctccccactctagcctcctcctccatcttcttcaattgtttgaacactcactgtgggccaggctatttgctaaaatatttacattcttgatattgcttgattctcacaataaccccatgagtaggtataagtataatcccttttcaggagatgaggaaaacaccaccaaacttgcctagagttgcaaaactagtaagagtcacacattttctctgagattcatgggaatttcagttctgtgacttttaaaataatgaatgaagatggtgtgttcaagaaattaactgacagaaaggctgcacactacaaactcacatttagtaaaggtcatctaatttgtttttttcagtgtgagggtgtacgttctaagaatgcctgaatcacacagttagaattgcacagaggacttacatttaccttcagtcaatgttttcgatctctcttgtctttctggcatcttctgaaaggggtgactgttcagatcgtccat

SEQ ID NO: 274605 - DNA, 642 bp, Homo sapiens
gatcactattcagcagttcagcaatacctcaccgaacacccacagggtgtggaaggaaacgaacgtttattgaggacctactatgtgccagatccaaacagggtgatataaatgcttcatttaatctttctagacactagtttctccttctcctccccactctagcctcctcctccatcttcttcaattgtttgaacactcactgtgggccaggctatttgctaaaatatttacattcttgatattgcttgattctcacaataaccccatgagtaggtataagtataatcccttttcaggagatgaggaaaacaccaccaaacttgcctagagttgcaaaactagtaagagtcacacattttctctgagattcatgggaatttcagttctgtgacttttaaaataatgaatgaagatggtgtgttcaagaaattaactgacagaaaggctgcacactacaaactcayatttagtaaaggtcatctaatttgtttttttcagtgtgagggtgtacgttctaagaatgcctgaatcacacagttagaattgcacagaggacttacatttaccttcagtcaatgttttcgatctctcttgtctttctggcatcttctgaaaggggtgactgttcagatcgtccat

SEQ ID NO: 274606 - DNA, 642 bp, Homo sapiens
gatcactattcagcagttcagcaatacctcaccgaacacccacagggtgtggaaggaaacgaacgtttattgaggacctactatgtgccagatccaaacagggtgatataaatgcttcatttaatctttctagacactagtttctccttctcctccccactctagcctcctcctccatcttcttcaattgtttgaacactcactgtgggccaggctatttgctaaaatatttacattcttgatattgcttgattctcacaataaccccatgagtaggtataagtataatcccttttcaggagatgaggaaaacaccaccaaacttgcctagagttgcaaaactagtaagagtcacacattttctctgagattcatgggaatttcagttctgtgacttttaaaataatgaatgaagatggtgtgttcaagaaattaactgacagaaaggctgcacactacaaactcacatttagtaaaggtcatctaatttgtttttttcagtgtgagggtgtacrttctaagaatgcctgaatcacacagttagaattgcacagaggacttacatttaccttcagtcaatgttttcgatctctcttgtctttctggcatcttctgaaaggggtgactgttcagatcgtccat

SEQ ID NO: 274607 - DNA, 545 bp, Homo sapiens
cccagtccaggaccgggtaagggtagaatccagccacaatgtccaggatcttgtttgtatatattagctcatgtgtttacggactagaacaagaaattgaacatacttcacaggcaagtcacaaggattctgctttcaaggtcagaaacaccgttatcttactgatttatgattttcactgacaacagacactggamgatggtccttcaatacccagggcctacacaaagaggacaggaaggagacatcctgggagggacttagctatggggtggtaaccggaagatctagagtgtcctggatacaaacagctgccatttgttggccatgtattgttatgtgtggtatagcacaggtaagactattgtatacatattatgtaacaattatgtgtacataagtatgtatacatattgtgatttatccttgcccaaaagcccatttttcccatagagtaactaagtctcaggaaggttaagttacttgttcatggccacaatgaagcacatgagctgcagctgggatttttttttattgccaacttc

SEQ ID NO: 274608 - DNA, 556 bp, Homo sapiens
ttgttgctcacaaaaaacctgtttggtagtctcttcacactgatgcactgatgcatgacaatgccatgctgtcagtaagcatgtctatgagtcctgggccccaggttgccacaggagaatccaatggatccttacaggytgcttaaaagggatagtttgttgtagtcctgaattaataaagtaatgtcctattctccacttaccatgtagtactgcttttgttaaataatccactggggcttgggtagtttatgtggcatttttgatatgccccactgttatggcttgaattctgagttgtcaaaaagtatgtcccctcaggcaatggtgatttttgtgctacaagaagtcgggggctcaataccaataatgcactcacaagtgagaaccatggtcactgacatccaatatggaccaaagccatatcacaggtagataagcactactggtcaatgcattcattctaaaaccttccagtgtcaccagtttttctccctaagaggacctggaagtattatgtggactcctgtatcaaaaaaaaaagtctgaatttctt

SEQ ID NO: 274609 - DNA, 556 bp, Homo sapiens
ttgttgctcacaaaaaacctgtttggtagtctcttcacactgatgcactgatgcatgacaatgccatgctgtcagtaagcatgtctatgagtcctgggccccaggttgccacaggagaatccaatggatccttacaggctgcttaaaagggatagtttgttgtagtcctgaattartaaagtaatgtcctattctccacttaccatgtagtactgcttttgttaaataatccactggggcttgggtagtttatgtggcatttttgatatgccccactgttatggcttgaattctgagttgtcaaaaagtatgtcccctcaggcaatggtgatttttgtgctacaagaagtcgggggctcaataccaataatgcactcacaagtgagaaccatggtcactgacatccaatatggaccaaagccatatcacaggtagataagcactactggtcaatgcattcattctaaaaccttccagtgtcaccagtttttctccctaagaggacctggaagtattatgtggactcctgtatcaaaaaaaaaagtctgaatttctt

SEQ ID NO: 274610 - DNA, 556 bp, Homo sapiens
ttgttgctcacaaaaaacctgtttggtagtctcttcacactgatgcactgatgcatgacaatgccatgctgtcagtaagcatgtctatgagtcctgggccccaggttgccacaggagaatccaatggatccttacaggctgcttaaaagggatagtttgttgtagtcctgaattaataaagtaatgtcctattctccacttaccatgtagtactgcttttgttaaataatccactggggcttgggtagtttatgtggcatttttgatatgccccactgttatggcttgaattctgagttgtcaaaaagtatgtcccctcaggcaatggtgatttttgtgctacaagaagtcgggggstcaataccaataatgcactcacaagtgagaaccatggtcactgacatccaatatggaccaaagccatatcacaggtagataagcactactggtcaatgcattcattctaaaaccttccagtgtcaccagtttttctccctaagaggacctggaagtattatgtggactcctgtatcaaaaaaaaaagtctgaatttctt

SEQ ID NO: 274611 - DNA, 556 bp, Homo sapiens
ttgttgctcacaaaaaacctgtttggtagtctcttcacactgatgcactgatgcatgacaatgccatgctgtcagtaagcatgtctatgagtcctgggccccaggttgccacaggagaatccaatggatccttacaggctgcttaaaagggatagtttgttgtagtcctgaattaataaagtaatgtcctattctccacttaccatgtagtactgcttttgttaaataatccactggggcttgggtagtttatgtggcatttttgatatgccccactgttatggcttgaattctgagttgtcaaaaagtatgtcccctcaggcaatggtgatttttgtgctacaagaagtcgggggctcaataccaataatgcactcacaagtgagaaccatggtcactgacatccaatatggaccaaagccatatcacaggtwgataagcactactggtcaatgcattcattctaaaaccttccagtgtcaccagtttttctccctaagaggacctggaagtattatgtggactcctgtatcaaaaaaaaaagtctgaatttctt

SEQ ID NO: 274612 - DNA, 610 bp, Homo sapiens
ttcttggctttttctagcttgcccaaatcgcaccaattatttcttctatactgttggttcatgagttcgtgactgtacatagttagtaattacttaaaatcagatttwttttttacattttactgaaacatggtttaattcacctttgcttttctcccactagcttgatatattattgaactataataattttaaaaagaaaaatcacactatgccaaagataaggaagcatttaaatgacagaactattttgtctgaataaagacacaagatcatatatagagaagagaaaatgagctaattcatatatttggatgatatgaagtagattaaatattttatgtttttaaataagtaacatgttaagcaagacagaaaattatttttaataaaataaaaaatatacaaaagctttaaaattcatgcaaatatctaaatgaaagaagaaatcagacaatgtatatcttggcattgttcagttggggattattgcttggacgatatttgctatatttgtatttctctgtcttgttatttttttttctattagctgaacataaaaatttcaaacacgaaactaaaataaatgagtaaaataacatcattatgg

SEQ ID NO: 274613 - DNA, 610 bp, Homo sapiens
ttcttggctttttctagcttgcccaaatcgcaccaattatttcttctatactgttggttcatgagttcgtgactgtacatagttagtaattacttaaaatcagatttattttttacattttactgaaacatrgtttaattcacctttgcttttctcccactagcttgatatattattgaactataataattttaaaaagaaaaatcacactatgccaaagataaggaagcatttaaatgacagaactattttgtctgaataaagacacaagatcatatatagagaagagaaaatgagctaattcatatatttggatgatatgaagtagattaaatattttatgtttttaaataagtaacatgttaagcaagacagaaaattatttttaataaaataaaaaatatacaaaagctttaaaattcatgcaaatatctaaatgaaagaagaaatcagacaatgtatatcttggcattgttcagttggggattattgcttggacgatatttgctatatttgtatttctctgtcttgttatttttttttctattagctgaacataaaaatttcaaacacgaaactaaaataaatgagtaaaataacatcattatgg

SEQ ID NO: 274614 - DNA, 610 bp, Homo sapiens
ttcttggctttttctagcttgcccaaatcgcaccaattatttcttctatactgttggttcatgagttcgtgactgtacatagttagtaattacttaaaatcagatttattttttacattttactgaaacatggtttaattcacctttgcttttctcccactagcttgatatattattgaactataataattttaaaaagaaaaatcacactatgccaaagataaggaarcatttaaatgacagaactattttgtctgaataaagacacaagatcatatatagagaagagaaaatgagctaattcatatatttggatgatatgaagtagattaaatattttatgtttttaaataagtaacatgttaagcaagacagaaaattatttttaataaaataaaaaatatacaaaagctttaaaattcatgcaaatatctaaatgaaagaagaaatcagacaatgtatatcttggcattgttcagttggggattattgcttggacgatatttgctatatttgtatttctctgtcttgttatttttttttctattagctgaacataaaaatttcaaacacgaaactaaaataaatgagtaaaataacatcattatgg

SEQ ID NO: 274615 - DNA, 577 bp, Homo sapiens
aaaaatttatccaattaagagacactagaccttcttttttcttcctagtgaaaatacaatgagaaggcagctgtctgcaagccaggaagaactcttaccaagaattgaatctgctggcacctttaacttggacttgccagcctgcagaactgtgaaaaacaaatgtcttttgtgatcaagtgccaagatgacttactagaagcagctagtatgctccactctcgtgaaaaggaaatagactggccagtaaacactagcacttcaactggatcttccaagaggacatgttgggattcagcaaggaagcaacagaagccatggagaacaaaaacagcaagacacaacagccacccacccaggattgrgtggagtcaggggaggatccttaccacaaagaaatagtgactgagagagagccccatggccccatacttctgtcacggacctttgtaatcataggcacaggtgatccaccctgagtccctccccctggggccttcagactaacaaggagagctgcatagaatctgggcagagctccagatcaggcacatgagaagtcccaggggtcttagac

SEQ ID NO: 274616 - DNA, 544 bp, Homo sapiens
aatctgctggcacctttaacttggacttgccagcctgcagaactgtgaaaaacaaatgtcttttgtgatcaagtgccaagatgacttactagaagcagctagtatgctccactctcgtgaaaaggaaatagactggccagtaaacactagcacttcaactggatcttccaagaggacatgttgggattcagcaaggaagcaacagaagccatggagaacaaaaacagcaagacacaacagccacccacccaggattgggtggagtcaggggaggatccttaccacaaagaaatagtgactgagagagagccccatggccccatacttctgtcayggacctttgtaatcataggcacaggtgatccaccctgagtccctccccctggggccttcagactaacaaggagagctgcatagaatctgggcagagctccagatcaggcacatgagaagtcccaggggtcttagacccctaagcaccccagtgctagttgccatagcttcaccaacaagaacgccaagttctctgcatgccaaaagttag

SEQ ID NO: 274617 - DNA, 544 bp, Homo sapiens
aatctgctggcacctttaacttggacttgccagcctgcagaactgtgaaaaacaaatgtcttttgtgatcaagtgccaagatgacttactagaagcagctagtatgctccactctcgtgaaaaggaaatagactggccagtaaacactagcacttcaactggatcttccaagaggacatgttgggattcagcaaggaagcaacagaagccatggagaacaaaaacagcaagacacaacagccacccacccaggattgggtggagtcaggggaggatccttaccacaaagaaatagtgactgagagagagccccatggccccatacttctgtcacggacctttgtaatcataggcacaggtgatccaccctgagtccctccccctggggccttcagactaacaaggagagctgcatagaatctgggcagagctccagatcaggcacatgagaagtcccrggggtcttagacccctaagcaccccagtgctagttgccatagcttcaccaacaagaacgccaagttctctgcatgccaaaagttag

SEQ ID NO: 274618 - DNA, 544 bp, Homo sapiens
aatctgctggcacctttaacttggacttgccagcctgcagaactgtgaaaaacaaatgtcttttgtgatcaagtgccaagatgacttactagaagcagctagtatgctccactctcgtgaaaaggaaatagactggccagtaaacactagcacttcaactggatcttccaagaggacatgttgggattcagcaaggaagcaacagaagccatggagaacaaaaacagcaagacacaacagccacccacccaggattgggtggagtcaggggaggatccttaccacaaagaaatagtgactgagagagagccccatggccccatacttctgtcacggacctttgtaatcataggcacaggtgatccaccctgagtccctccccctggggccttcagactaacaaggagagctgcatagaatctgggcagagctccagatcaggcacatgagaagtcccagrggtcttagacccctaagcaccccagtgctagttgccatagcttcaccaacaagaacgccaagttctctgcatgccaaaagttag

SEQ ID NO: 274619 - DNA, 565 bp, Homo sapiens
gggtggagtcaggggaggatccttaccacaaagaaatagtgactgagagagagccccatggccccatacttctgtcacggacctttgtaatcataggcacaggtgatccaccctgagtccctccccctggggccttcagactaacaaggagagctgcatagaatctgggcagagctccagatcaggcacatgagaagtcccaggggtcttagacccctaagcaccccagtgctagttgccatagcttcaccaacaagaacrccaagttctctgcatgccaaaagttagtggctacattcatggttctgaggagcagagggacttcatgccttgcctctggttaacctctccaggcaaggcacactgacctggaactccagaacagccatgaaacacccatttgacctcttcaactggcagcagctctgcatttctctgggatgaagctcccagatgcaatagacatatctgctgtttttgctgctattgcagctccagccactacccaactgccttcaaggtcaggagggagtgaagagtgttatgactgttgtgggcctccagc

SEQ ID NO: 274620 - DNA, 579 bp, Homo sapiens
tgacaacttgggccagaagcagcattgcatttccctgggacagagctctcataggtataagacaggcctgccrtttttgcctgctatagcccctgcccataatgccctcagatcaagagatagcaaagaggcttaaggattatagcaggtcttcagctcagcacatctgccttatggaggtgttgtcagacttttttccatgcctgtctttgctcctgctacttctcactgggtagggcctcccgacctcggccccagcacagctaccctgctcccacttgaacacttcagacagtggcacctgtgcatttctctgggatagaattcccagtgacaacccacagcccctctgccattacatacagtggtaccacccttgctgcctgatatggtttggctctgtgtccccattcaaatctcatcctgtagatcccacaattcccatgttttgtgggaggtacctggtgggaaatgactgaataatggagatgggtatttcccatgctgttctcgtcatagtggatgggtctcatgagatctaatgattttaaaaacaggagtttcctgacacaagctctc

SEQ ID NO: 274621 - DNA, 579 bp, Homo sapiens
tgacaacttgggccagaagcagcattgcatttccctgggacagagctctcataggtataagacaggcctgccatttttgcctgctatagcccctgcccataatgccctcagatcaagagatagcaaagaggcttaaggattatagcaggtcttcagctcagcacatctgccttatggaggtgttgtyagacttttttccatgcctgtctttgctcctgctacttctcactgggtagggcctcccgacctcggccccagcacagctaccctgctcccacttgaacacttcagacagtggcacctgtgcatttctctgggatagaattcccagtgacaacccacagcccctctgccattacatacagtggtaccacccttgctgcctgatatggtttggctctgtgtccccattcaaatctcatcctgtagatcccacaattcccatgttttgtgggaggtacctggtgggaaatgactgaataatggagatgggtatttcccatgctgttctcgtcatagtggatgggtctcatgagatctaatgattttaaaaacaggagtttcctgacacaagctctc

SEQ ID NO: 274622 - DNA, 593 bp, Homo sapiens
ccacccttgctgcctgatatggtttggctctgtgtccccattcaaatctcatcctgtagatcccacaattcccatgttttgtgggaggtacctggtgggaaatgactgaataatggrgatgggtatttcccatgctgttctcgtcatagtggatgggtctcatgagatctaatgattttaaaaacaggagtttcctgacacaagctctctcttagcctgctgccatccatgtaagatgtgacttgctcctacttacctttcaccatgattgtgaggccttcccagccacgtggaactgtaagttgattaaacctccttcttttgtaaattgcccagtctcaggtctgtctatcagcagcatgaaaatggaataatacagtaaattggtaccagtagagtgggctctactgaaaagtgcctgaaaatgtggaagcaactttagaactgggtaacaggcagaggttgaaacagcttggagcactcagaaggagacaggaaaatatggcaaagtttagaaccacctagagacttgttgaatggttttgcctaaaatgatgttaatgatacggacaatgaaatccaggatggggtgg

SEQ ID NO: 274623 - DNA, 593 bp, Homo sapiens
ccacccttgctgcctgatatggtttggctctgtgtccccattcaaatctcatcctgtagatcccacaattcccatgttttgtgggaggtacctggtgggaaatgactgaataatggagatgggtatttcccatgctgttctcgtcatagtggatgggtctcatgagatctaatgattttaaaaacaggagtttcctgacacaagctctctcttagcctgctgccatccatgtaagatgtgacttgctcctacttacctttcaccatgattgtgaggccttcccagccacgtggaactgtaagttgattaaacctccttcttttgtaaattgcccagtctcaggtctgtctatcagcagcatgaaaatggaataatacagtaaattggtaccagtagagtgggctctactgaaaagtgcctgaaaatgtggaagcaactttagaactgggtaacaggcagaggttgaaacagcttggagcactcagaaggagacaggaaaatrtggcaaagtttagaaccacctagagacttgttgaatggttttgcctaaaatgatgttaatgatacggacaatgaaatccaggatggggtgg

SEQ ID NO: 274624 - DNA, 593 bp, Homo sapiens
ccacccttgctgcctgatatggtttggctctgtgtccccattcaaatctcatcctgtagatcccacaattcccatgttttgtgggaggtacctggtgggaaatgactgaataatggagatgggtatttcccatgctgttctcgtcatagtggatgggtctcatgagatctaatgattttaaaaacaggagtttcctgacacaagctctctcttagcctgctgccatccatgtaagatgtgacttgctcctacttacctttcaccatgattgtgaggccttcccagccacgtggaactgtaagttgattaaacctccttcttttgtaaattgcccagtctcaggtctgtctatcagcagcatgaaaatggaataatacagtaaattggtaccagtagagtgggctctactgaaaagtgcctgaaaatgtggaagcaactttagaactgggtaacaggcagaggttgaaacagcttggagcactcagaaggagacaggaaaatatggcaaagtttagaaccacctagagacttgttgaatggttttgcctaaaatgatgttamtgatacggacaatgaaatccaggatggggtgg

SEQ ID NO: 274625 - DNA, 610 bp, Homo sapiens
ttgtgggagggacccagtgggaaatgattgaatcatgagagtgagtcttccccatgctgttctcatgatagtgaatgggtctcatgaaatctgatggctttaaaaatgggartttccccaaatgaggtctctatttggctgcagtcatccatgtaagatgtgacttgctcctcttcttgacttctgccatgagtttgaggcctcctcagccatgtagaactacaaattgattaaacctctttcttttgtaaattgtccagtgtcaggtatgtctttatcagcagtgtaaaaaaagactaagaaactccccttgggctggggaaagaacaaaatcctggttgcttcactagcaccttcatcatgacacagctgccatatagcgtagagcccagtctctcttccttgtgagctcccaactcctatccttcactaagcagaactccttgcttgggcctgcagagtagctacctcacccaagctgaacatttctattgccagtggctctgtgttatcctgtgatggagctcccagaggcaaatgacagccaactgccactgccaatgcagtggtacctgcccttgctgtcttagactgggaaagaaataaaaga

SEQ ID NO: 274626 - DNA, 610 bp, Homo sapiens
ttgtgggagggacccagtgggaaatgattgaatcatgagagtgagtcttccccatgctgttctcatgatagtgaatgggtctcatgaaatctgatggctttaaaaatgggaatttccccaaaygaggtctctatttggctgcagtcatccatgtaagatgtgacttgctcctcttcttgacttctgccatgagtttgaggcctcctcagccatgtagaactacaaattgattaaacctctttcttttgtaaattgtccagtgtcaggtatgtctttatcagcagtgtaaaaaaagactaagaaactccccttgggctggggaaagaacaaaatcctggttgcttcactagcaccttcatcatgacacagctgccatatagcgtagagcccagtctctcttccttgtgagctcccaactcctatccttcactaagcagaactccttgcttgggcctgcagagtagctacctcacccaagctgaacatttctattgccagtggctctgtgttatcctgtgatggagctcccagaggcaaatgacagccaactgccactgccaatgcagtggtacctgcccttgctgtcttagactgggaaagaaataaaaga

SEQ ID NO: 274627 - DNA, 610 bp, Homo sapiens
ttgtgggagggacccagtgggaaatgattgaatcatgagagtgagtcttccccatgctgttctcatgatagtgaatgggtctcatgaaatctgatggctttaaaaatgggaatttccccaaatgaggtctctatttgkctgcagtcatccatgtaagatgtgacttgctcctcttcttgacttctgccatgagtttgaggcctcctcagccatgtagaactacaaattgattaaacctctttcttttgtaaattgtccagtgtcaggtatgtctttatcagcagtgtaaaaaaagactaagaaactccccttgggctggggaaagaacaaaatcctggttgcttcactagcaccttcatcatgacacagctgccatatagcgtagagcccagtctctcttccttgtgagctcccaactcctatccttcactaagcagaactccttgcttgggcctgcagagtagctacctcacccaagctgaacatttctattgccagtggctctgtgttatcctgtgatggagctcccagaggcaaatgacagccaactgccactgccaatgcagtggtacctgcccttgctgtcttagactgggaaagaaataaaaga

SEQ ID NO: 274628 - DNA, 610 bp, Homo sapiens
ttgtgggagggacccagtgggaaatgattgaatcatgagagtgagtcttccccatgctgttctcatgatagtgaatgggtctcatgaaatctgatggctttaaaaatgggaatttccccaaatgaggtctctatttggctgcagtcatccatgtaagatgtgacttgctcctcttcttgacttctgccatgagtttgaggcctccycagccatgtagaactacaaattgattaaacctctttcttttgtaaattgtccagtgtcaggtatgtctttatcagcagtgtaaaaaaagactaagaaactccccttgggctggggaaagaacaaaatcctggttgcttcactagcaccttcatcatgacacagctgccatatagcgtagagcccagtctctcttccttgtgagctcccaactcctatccttcactaagcagaactccttgcttgggcctgcagagtagctacctcacccaagctgaacatttctattgccagtggctctgtgttatcctgtgatggagctcccagaggcaaatgacagccaactgccactgccaatgcagtggtacctgcccttgctgtcttagactgggaaagaaataaaaga

SEQ ID NO: 274629 - DNA, 637 bp, Homo sapiens
gggccaggggtataataatatggtttgactctgtgtccccacccaagtctcatcttgtagttcccataacttctacatgttgtgggagggacccagtgggaaatgattgaatcatgagagtgagtcttccccatgctgttctcatgatagtgaatgggtctcatgaaatctgatggctttaaaaatgggaatttccccaaatgaggtctctatttggctgcagtcatccatgtaagatgtgacttgctcctcttcttgacttctgccatgagtttgaggcctcctcagccatgtagaactacaaattgattaaacctctttcttttgtaaattgtccagtgtcaggtatgtctttatcagcagtgtaaaaaaagactaagaaactccccttgggctggggaaaraacaaaatcctggttgcttcactagcaccttcatcatgacacagctgccatatagcgtagagcccagtctctcttccttgtgagctcccaactcctatccttcactaagcagaactccttgcttgggcctgcagagtagctacctcacccaagctgaacatttctattgccagtggctctgtgttatcctgtgatggagctcccagaggcaaatgacagccaactgccactgc

SEQ ID NO: 274630 - DNA, 609 bp, Homo sapiens
tcatccatgtaagatgtgacttgctcctcttcttgacttctgccatgagtttgaggcctcctcagccatgtagaactacaaattgattaaacctctttcttttgtaaattgtccagtgtcaggtatgtctttatcagcagtgtaaaaaaagactaagaaactccccttgggctggggaaagaacaaaatcctggttgcttcactagcwccttcatcatgacacagctgccatatagcgtagagcccagtctctcttccttgtgagctcccaactcctatccttcactaagcagaactccttgcttgggcctgcagagtagctacctcacccaagctgaacatttctattgccagtggctctgtgttatcctgtgatggagctcccagaggcaaatgacagccaactgccactgccaatgcagtggtacctgcccttgctgtcttagactgggaaagaaataaaagagcctgaatgctttactcatgcttccagcacactatgattaccatatgatcaccatatggcatggagcccaatctctattctctgtgagcccctgatcccctgctcttcaccaggcaggggtcccaggaaaggctcatagtgca

SEQ ID NO: 274631 - DNA, 522 bp, Homo sapiens
aagaacaaaatcctggttgcttcactagcaccttcatcatgacacagctgccatatagygtagagcccagtctctcttccttgtgagctcccaactcctatccttcactaagcagaactccttgcttgggcctgcagagtagctacctcacccaagctgaacatttctattgccagtggctctgtgttatcctgtgatggagctcccagaggcaaatgacagccaactgccactgccaatgcagtggtacctgcccttgctgtcttagactgggaaagaaataaaagagcctgaatgctttactcatgcttccagcacactatgattaccatatgatcaccatatggcatggagcccaatctctattctctgtgagcccctgatcccctgctcttcaccaggcaggggtcccaggaaaggctcatagtgcagcagccccactccaggctgaaaatgcccagtggcagtggttctgcatttctctggggtggagatcccagaagcaactgaaagtttttctgc

SEQ ID NO: 274632 - DNA, 623 bp, Homo sapiens
cttgcttgggcctgcagagtagctacctcacccaagctgaacatttctattgccagtggctctgtgttatcctgtgatggagctcccagaggcaaatgacagccaactgccactgccaatgcagtggtacctgcccttgctgtcttagactgggaaagaaataaaagagcctgaatgctttactcatgcttccagcayactatgattaccatatgatcaccatatggcatggagcccaatctctattctctgtgagcccctgatcccctgctcttcaccaggcaggggtcccaggaaaggctcatagtgcagcagccccactccaggctgaaaatgcccagtggcagtggttctgcatttctctggggtggagatcccagaagcaactgaaagtttttctgcaaccgctattcagcagtactgcccttgctgccctccaactggggagggaacaagaccccaagtgctttactcacacctccagcacactgcagctaccctacagagaagagattaatctgtcttctcacaagccctgacaccctctgctcatcaccagtagtgtcccccagcttggttccaaaatgcacaggccccatcaaaggttgaccactccatttggc

SEQ ID NO: 274633 - DNA, 590 bp, Homo sapiens
gctttactcatgcttccagcacactatgattaccatatgatcaccatatggcatggagcccaatctctattctctgtgagcccctgatcccctgctyttcaccaggcaggggtcccaggaaaggctcatagtgcagcagccccactccaggctgaaaatgcccagtggcagtggttctgcatttctctggggtggagatcccagaagcaactgaaagtttttctgcaaccgctattcagcagtactgcccttgctgccctccaactggggagggaacaagaccccaagtgctttactcacacctccagcacactgcagctaccctacagagaagagattaatctgtcttctcacaagccctgacaccctctgctcatcaccagtagtgtcccccagcttggttccaaaatgcacaggccccatcaaaggttgaccactccatttggcagcatctctgcatttctgtatggtggagctgcaaaagacaagtgatagacctccacacattaccactgccaaggtcctcaccccttttgtccccaagcttgtgaggaaacaaaaaccttgagctcatcccagggctgtgatgt

SEQ ID NO: 274634 - DNA, 590 bp, Homo sapiens
gctttactcatgcttccagcacactatgattaccatatgatcaccatatggcatggagcccaatctctattctctgtgagcccctgatcccctgctcttcaccaggcaggggycccaggaaaggctcatagtgcagcagccccactccaggctgaaaatgcccagtggcagtggttctgcatttctctggggtggagatcccagaagcaactgaaagtttttctgcaaccgctattcagcagtactgcccttgctgccctccaactggggagggaacaagaccccaagtgctttactcacacctccagcacactgcagctaccctacagagaagagattaatctgtcttctcacaagccctgacaccctctgctcatcaccagtagtgtcccccagcttggttccaaaatgcacaggccccatcaaaggttgaccactccatttggcagcatctctgcatttctgtatggtggagctgcaaaagacaagtgatagacctccacacattaccactgccaaggtcctcaccccttttgtccccaagcttgtgaggaaacaaaaaccttgagctcatcccagggctgtgatgt

SEQ ID NO: 274635 - DNA, 623 bp, Homo sapiens
cttgcttgggcctgcagagtagctacctcacccaagctgaacatttctattgccagtggctctgtgttatcctgtgatggagctcccagaggcaaatgacagccaactgccactgccaatgcagtggtacctgcccttgctgtcttagactgggaaagaaataaaagagcctgaatgctttactcatgcttccagcacactatgattaccatatgatcaccatatggcatggagcccaatctctattctctgtgagcccctgatcccctgctcttcaccaggcaggggtcccagsaaaggctcatagtgcagcagccccactccaggctgaaaatgcccagtggcagtggttctgcatttctctggggtggagatcccagaagcaactgaaagtttttctgcaaccgctattcagcagtactgcccttgctgccctccaactggggagggaacaagaccccaagtgctttactcacacctccagcacactgcagctaccctacagagaagagattaatctgtcttctcacaagccctgacaccctctgctcatcaccagtagtgtcccccagcttggttccaaaatgcacaggccccatcaaaggttgaccactccatttggc

SEQ ID NO: 274636 - DNA, 623 bp, Homo sapiens
cttgcttgggcctgcagagtagctacctcacccaagctgaacatttctattgccagtggctctgtgttatcctgtgatggagctcccagaggcaaatgacagccaactgccactgccaatgcagtggtacctgcccttgctgtcttagactgggaaagaaataaaagagcctgaatgctttactcatgcttccagcacactatgattaccatatgatcaccatatggcatggagcccaatctctattctctgtgagcccctgatcccctgctcttcaccaggcaggggtcccaggaaaggctcatagtgcagcagccccactccaggctgaaaatgcccagtggcagtggttctgcatttctctggggtggagatcccagaagcaactgaaagtttttctgcaaccgctattcagcagtactgcccttgctgccctccaactggggagggaacaagaccccaagtgctttactcacacctccagcacactgcagctaccctrcagagaagagattaatctgtcttctcacaagccctgacaccctctgctcatcaccagtagtgtcccccagcttggttccaaaatgcacaggccccatcaaaggttgaccactccatttggc

SEQ ID NO: 274637 - DNA, 619 bp, Homo sapiens
aacttcaactctaaaattactttgctaatataagcctctgtgaaacccaggacaataattcagctactaataaagatcatgcaaaaaggtgcttygaaaacatccagaaacaaagtcaactgactatgctcaaattataccacagttaaagaaacaccagcccacacagatgagaaaaaagccaacataagaactctagcaactcaaaaagtcagagtgtcactttacctccaaatgactgcactagttctacagcaatggttgttaaatagaaggaaatggctgaaatgacagatatagaactgagaggtagaaggaaatgaagatcattgaaattcagtagaaagttgaacactatttccaagaatctgaggaatccagtaaaatgattaaagagaaaaaaattagccatttgaaaaaacaaaacaagacaaacaaacaaacaaactaaaaccaaacctagcaggtagagttacaaaatacactacaagaatttcataaaatgattggaaatattcacagcagaatggactaagccaagaaaagaatctcagagattgaagactgattatttaagttaacacagccagaaaataaataaagaaaagaagaattttaa

SEQ ID NO: 274638 - DNA, 619 bp, Homo sapiens
aacttcaactctaaaattactttgctaatataagcctctgtgaaacccaggacaataattcagctactaataaagatcatgcaaaaaggtgctttgaaaacatccagaaacaaagtcaactgactatgctcaaattataccacagttaaagaaacascagcccacacagatgagaaaaaagccaacataagaactctagcaactcaaaaagtcagagtgtcactttacctccaaatgactgcactagttctacagcaatggttgttaaatagaaggaaatggctgaaatgacagatatagaactgagaggtagaaggaaatgaagatcattgaaattcagtagaaagttgaacactatttccaagaatctgaggaatccagtaaaatgattaaagagaaaaaaattagccatttgaaaaaacaaaacaagacaaacaaacaaacaaactaaaaccaaacctagcaggtagagttacaaaatacactacaagaatttcataaaatgattggaaatattcacagcagaatggactaagccaagaaaagaatctcagagattgaagactgattatttaagttaacacagccagaaaataaataaagaaaagaagaattttaa

SEQ ID NO: 274639 - DNA, 567 bp, Homo sapiens
tgaagactgattatttaagttaacacagccagaaaataaataaagaaaagaagaattttaaaaaatgaaaggtcaggcatggtggctcatgcctgtaatcccagcactttgggaggatattgagaccatcctggctaacacggtgaaaccctgtctctactaaaaatacaaaaaaaaaaaattcactgggcatggtggcaagtgcctgtagccccagctactcaggaggctgaggcaggagattggtaggaacacgggaggtggagcttgcattgagccragatcatgccactgcactccagccagggctacagagcaagactccatctcaaaaaaaaaaaaaaagaaagaaagaaaaagaaaagaaaaaaccttggagaagtaagggattctgtaaaaaatttccccaatttcactagagagattgacatataaatttagaaaattcagataacctatgtaagatgctatgtaagacaaccattgcagagacacaaagtaatcagattcttgaaggtcaatgcaaaagaaaaaaatattaaaggcagttaacgacaaggggcaggt

SEQ ID NO: 274640 - DNA, 567 bp, Homo sapiens
tgaagactgattatttaagttaacacagccagaaaataaataaagaaaagaagaattttaaaaaatgaaaggtcaggcatggtggctcatgcctgtaatcccagcactttgggaggatattgagaccatcctggctaacacggtgaaaccctgtctctactaaaaatacaaaaaaaaaaaattcactgggcatggtggcaagtgcctgtagccccagctactcaggaggctgaggcaggagattggtaggaacacgggaggtggagcttgcattgagccaagatcatgccactgcactccagccwgggctacagagcaagactccatctcaaaaaaaaaaaaaaagaaagaaagaaaaagaaaagaaaaaaccttggagaagtaagggattctgtaaaaaatttccccaatttcactagagagattgacatataaatttagaaaattcagataacctatgtaagatgctatgtaagacaaccattgcagagacacaaagtaatcagattcttgaaggtcaatgcaaaagaaaaaaatattaaaggcagttaacgacaaggggcaggt

SEQ ID NO: 274641 - DNA, 539 bp, Homo sapiens
aggtggagcttgcattgagccaagatcatgccactgcactccagccagggctacagagcaagactccatctcaaaaaaaaaaaaaaagaaagaaagaaaaagaaaagaaaaaaccttggagaartaagggattctgtaaaaaatttccccaatttcactagagagattgacatataaatttagaaaattcagataacctatgtaagatgctatgtaagacaaccattgcagagacacaaagtaatcagattcttgaaggtcaatgcaaaagaaaaaaatattaaaggcagttaacgacaaggggcaggtcacataaagtggaaactacatcaaactcacaggggaactctcagcaatatcccacagtcagaagacattaagaatccatattcagcatttttgaaaaaataaaattttgaaccaagaattttatgtcccaccaaactaagcttcataaacaagggagaaataaaatccatttcagataagcaaaagctaggggaatttattaccaccaggcctttagagaccacaagaga

SEQ ID NO: 274642 - DNA, 539 bp, Homo sapiens
aggtggagcttgcattgagccaagatcatgccactgcactccagccagggctacagagcaagactccatctcaaaaaaaaaaaaaaagaaagaaagaaaaagaaaagaaaaaaccttggagaagtaagggattctgtaaaaaatttccccaatttcactagagagattgacatataaatttagaaaattcagataacctatgtaagatgctatgtaagwcaaccattgcagagacacaaagtaatcagattcttgaaggtcaatgcaaaagaaaaaaatattaaaggcagttaacgacaaggggcaggtcacataaagtggaaactacatcaaactcacaggggaactctcagcaatatcccacagtcagaagacattaagaatccatattcagcatttttgaaaaaataaaattttgaaccaagaattttatgtcccaccaaactaagcttcataaacaagggagaaataaaatccatttcagataagcaaaagctaggggaatttattaccaccaggcctttagagaccacaagaga

SEQ ID NO: 274643 - DNA, 467 bp, Homo sapiens
tatgtaagatgctatgtaagacaaccattgcagagacacaaagtaatcagattcttgaaggtcaatgcaaaagaaaaaaatattaaaggcagttaacgacaaggggcaggtcacataaagtggaaactacatcaaactcacaggggaactctcagcaataycccacagtcagaagacattaagaatccatattcagcatttttgaaaaaataaaattttgaaccaagaattttatgtcccaccaaactaagcttcataaacaagggagaaataaaatccatttcagataagcaaaagctaggggaatttattaccaccaggcctttagagaccacaagagatccttaagaaagtgctaaacatgaaaatgaaggactgttacctagcaccagaaaaacacactcaagtatatagaccatcaacactataaagtaattacacaatcaagtttacataacaaccagcta

SEQ ID NO: 274644 - DNA, 467 bp, Homo sapiens
tatgtaagatgctatgtaagacaaccattgcagagacacaaagtaatcagattcttgaaggtcaatgcaaaagaaaaaaatattaaaggcagttaacgacaaggggcaggtcacataaagtggaaactacatcaaactcacaggggaactctcagcaatatcccacagtcaraagacattaagaatccatattcagcatttttgaaaaaataaaattttgaaccaagaattttatgtcccaccaaactaagcttcataaacaagggagaaataaaatccatttcagataagcaaaagctaggggaatttattaccaccaggcctttagagaccacaagagatccttaagaaagtgctaaacatgaaaatgaaggactgttacctagcaccagaaaaacacactcaagtatatagaccatcaacactataaagtaattacacaatcaagtttacataacaaccagcta

SEQ ID NO: 274645 - DNA, 467 bp, Homo sapiens
tatgtaagatgctatgtaagacaaccattgcagagacacaaagtaatcagattcttgaaggtcaatgcaaaagaaaaaaatattaaaggcagttaacgacaaggggcaggtcacataaagtggaaactacatcaaactcacaggggaactctcagcaatatcccacagtcagaagacattaagaatccatattcagcatttttgaaaaaataaaattttgaaccaagaattttatgtcccaccaaactaagcttcataaacaagggagaaataaaatccatttcagataagcaaaagctaggggaatttattaccaccaggcctttagagaccacaagagatccttaagaaagtgctaaacrtgaaaatgaaggactgttacctagcaccagaaaaacacactcaagtatatagaccatcaacactataaagtaattacacaatcaagtttacataacaaccagcta

SEQ ID NO: 274646 - DNA, 630 bp, Homo sapiens
acatgaaaatgaaggactgttacctagcaccagaaaaacacactcaagtatatagacyatcaacactataaagtaattacacaatcaagtttacataacaaccagctaacaacatgctgggaggatcgaatgtgcacatgtcaatattgaagataaacaagctaaacacccacttaaaaggcatggagtggcaaagtggataaagaatcaagacccaactgtatgctgtcttcaagagacccatctcacatgtgagaacacccataggttcaaagtaaagggatggagaaagaactaccaaacaaatgaaaaacaaagaaaaacaggtgttgctgttcttattttagataaaactgacattaaactaacgatgatcaaaacagacaataaagggcattacgtaatgatgaaggattcaattaaacaagaagacttaactatcctaaatatatatgcacctaacactggagcactcagattcacaaaacaagctcttagagatatacaaagaaacttacataactacacaatgacagtggcagacctcaacaccttactgacagtgtaagacagatcactgaggcagaaaactaacaaggatattcgggacctaaacttgacacttggcca

SEQ ID NO: 274647 - DNA, 630 bp, Homo sapiens
acatgaaaatgaaggactgttacctagcaccagaaaaacacactcaagtatatagaccatcaacactataaagtaattacacaatcaagtttacataacaaccagctaacaacatgctgggaggatcgaatgtgcacatgtcaatattgaagataaacaagctaaacacccacttaaaaggcayggagtggcaaagtggataaagaatcaagacccaactgtatgctgtcttcaagagacccatctcacatgtgagaacacccataggttcaaagtaaagggatggagaaagaactaccaaacaaatgaaaaacaaagaaaaacaggtgttgctgttcttattttagataaaactgacattaaactaacgatgatcaaaacagacaataaagggcattacgtaatgatgaaggattcaattaaacaagaagacttaactatcctaaatatatatgcacctaacactggagcactcagattcacaaaacaagctcttagagatatacaaagaaacttacataactacacaatgacagtggcagacctcaacaccttactgacagtgtaagacagatcactgaggcagaaaactaacaaggatattcgggacctaaacttgacacttggcca

SEQ ID NO: 274648 - DNA, 534 bp, Homo sapiens
aggttcaaagtaaagggatggagaaagaactaccaaacaaatgaaaaacaaagaaaaacaggtgttgctgttcttattttagataaaactgacattaaactaacgatgatcaaaacagacaataaagggcattacgtaatgatgaaggattcaattaaacaagaagacttaactatcctaaatatataygcacctaacactggagcactcagattcacaaaacaagctcttagagatatacaaagaaacttacataactacacaatgacagtggcagacctcaacaccttactgacagtgtaagacagatcactgaggcagaaaactaacaaggatattcgggacctaaacttgacacttggccaaatacacctaacagacatctgcagaacactccacacatcaacaacagaatatatattcttatcatctgcacgtgacacatattctaaaatcaaccacatgctcagctataagtcaattctcaacaaataaaaaaaaaattttaccagccacactctcagaccagagcac

SEQ ID NO: 274649 - DNA, 630 bp, Homo sapiens
acatgaaaatgaaggactgttacctagcaccagaaaaacacactcaagtatatagaccatcaacactataaagtaattacacaatcaagtttacataacaaccagctaacaacatgctgggaggatcgaatgtgcacatgtcaatattgaagataaacaagctaaacacccacttaaaaggcatggagtggcaaagtggataaagaatcaagacccaactgtatgctgtcttcaagagacccatctcacatgtgagaacacccataggttcaaagtaaagggatggagaaagaactaccaaacaaatgaaaaacaaagaaaaacaggtgttgctgttcttattttagataaaactgacattaaactaacgatgatcaaaacagacaataaagggcattacgtaatgatgaaggattcaattaaacaagaagacttaactatcctaaatatatatgcacctaacactggagcactcagattcacaaaacaagctcttagagatatacaaagaaacttacataactacacratgacagtggcagacctcaacaccttactgacagtgtaagacagatcactgaggcagaaaactaacaaggatattcgggacctaaacttgacacttggcca

SEQ ID NO: 274650 - DNA, 574 bp, Homo sapiens
ttcgggacctaaacttgacacttggccaaatacacctaacagacatctgcagaacactccacacatcaacaacagaatatatatycttatcatctgcacgtgacacatattctaaaatcaaccacatgctcagctataagtcaattctcaacaaataaaaaaaaaattttaccagccacactctcagaccagagcacaataaaaatacaaatcaataccaagaagatctgccaaaactgtaggattaagtgaaaattaaacaacctgaacctgaatgacttttgtgtaaacaataaaatcaaggcagaaatcaagaaattcttagactctgatgaaaacaaaaatacaacacaccagaaactctagaacacagctgaagcatggttaaaaggaaagtttattgtgctaaacacttatgtcaacagctagaaagatctcaaatttgcaacctaacatcacagatagaggaacctaaaaaacaaaacagaaccaacctcgaaggtagtagaagaaaagaaatggccacaatcataactgaaattaacaaaatggagatgagaaaaaaatgtaaaaa

SEQ ID NO: 274651 - DNA, 534 bp, Homo sapiens
aggttcaaagtaaagggatggagaaagaactaccaaacaaatgaaaaacaaagaaaaacaggtgttgctgttcttattttagataaaactgacattaaactaacgatgatcaaaacagacaataaagggcattacgtaatgatgaaggattcaattaaacaagaagacttaactatcctaaatatatatgcacctaacactggagcactcagattcacaaaacaagctcttagagatatacaaagaaacttacataactacacaatgacagtggcagacctcaacaccttactgacagtgtaagacagatcactgaggcagaaaactaacaaggatattcgggacctaaacttgacacttggccaaatacacctaacagacatctgcagaacactccacacatcaacaacagaatatatattcttatcatctgcacrtgacacatattctaaaatcaaccacatgctcagctataagtcaattctcaacaaataaaaaaaaaattttaccagccacactctcagaccagagcac

SEQ ID NO: 274652 - DNA, 602 bp, Homo sapiens
aaactaacaaggatattcgggacctaaacttgacacttggccaaatacacctaacagacatctgcagaacactccacacatcaacaacagaatatatattcttatcatctgcacgtgacacatattctaaaatcaaccacatgctcagctataagtcaattctcaacaaataaaaaaaaaattttaccagccacactctcagaccagagcacaataaaaatacaaatcaataccaagaagatctgccaaaactgtaggattaagtgaaaattaaacaacctgaacctgaatgacttttgtgtaaacaataaaatcaaggcagaaatcaagaaattcttagactctgatgaaaacaaaaatacaacacaccagaaactctagaacacagctgaagcatggttaaaaggaaagttkattgtgctaaacacttatgtcaacagctagaaagatctcaaatttgcaacctaacatcacagatagaggaacctaaaaaacaaaacagaaccaacctcgaaggtagtagaagaaaagaaatggccacaatcataactgaaattaacaaaatggagatgagaaaaaaatgtaaaaaaatcaacaaaact

SEQ ID NO: 274653 - DNA, 605 bp, Homo sapiens
ctaaacttgacacttggccaaatacacctaacagacatctgcagaacactccacacatcaacaacagaatatatattcttatcatctgcacgtgacacatattctaaaatcaaccacatgctcagctataagtcaattctcaacaaataaaaaaaaaattttaccagccacactctcagaccagagcacaataaaaatacaaatcaataccaagaagatctgccaaaactgtaggattaagtgaaaattaaacaacctgaacctgaatgacttttgtgtaaacaataaaatcaaggcagaaatcaagaaattcttagactctgatgaaaacaaaaatacaacacaccagaaactctagaacacagctgaagcatggttaaaaggaaagtttattgtgctaaacacttatgtcaacagctagaaagatctcaaatttgcaacctaacatcacagatagaggaacctraaaaacaaaacagaaccaacctcgaaggtagtagaagaaaagaaatggccacaatcataactgaaattaacaaaatggagatgagaaaaaaatgtaaaaaaatcaacaaaactgaatgttgggtatttgaaagaaaaaa

SEQ ID NO: 274654 - DNA, 422 bp, Homo sapiens
caacacaccagaaactctagaacacagctgaagcatggttaaaaggaaagtttattgtgctaaacacttatgtcaacagctagaaagatctcaaatttgcaacctaacatcacagatagaggaacctaaaaaacaaaamagaaccaacctcgaaggtagtagaagaaaagaaatggccacaatcataactgaaattaacaaaatggagatgagaaaaaaatgtaaaaaaatcaacaaaactgaatgttgggtatttgaaagaaaaaataatgttgataggccattatctaaacttataaagaaaaaaaagagacaatattcaaataaacacaatcacaaaagagacaaaggggacattaccagtgaccccacagaaatacaacaaccctcagggatgattatgaacacctctatgtacacaa

SEQ ID NO: 274655 - DNA, 574 bp, Homo sapiens
ttcgggacctaaacttgacacttggccaaatacacctaacagacatctgcagaacactccacacatcaacaacagaatatatattcttatcatctgcacgtgacacatattctaaaatcaaccacatgctcagctataagtcaattctcaacaaataaaaaaaaaattttaccagccacactctcagaccagagcacaataaaaatacaaatcaataccaagaagatctgccaaaactgtaggattaagtgaaaattaaacaacctgaacctgaatgacttttgtgtaaacaataaaatcaaggcagaaatcaagaaattcttagactctgatgaaaacaaaaatacaacacaccagaaactctagaacacagctgaagcatggttaaaaggaaagtttattgtgctaaacacttatgtcaacagctagaaagatctcaaatttgcaacctaacatcacagatagaggaacctaaaaaacaaaacagaaccaacctygaaggtagtagaagaaaagaaatggccacaatcataactgaaattaacaaaatggagatgagaaaaaaatgtaaaaa

SEQ ID NO: 274656 - DNA, 422 bp, Homo sapiens
caacacaccagaaactctagaacacagctgaagcatggttaaaaggaaagtttattgtgctaaacacttatgtcaacagctagaaagatctcaaatttgcaacctaacatcacagatagaggaacctaaaaaacaaaacagaaccaacctcgaaggtagtagaagaaaagaaatggccacaatcataackgaaattaacaaaatggagatgagaaaaaaatgtaaaaaaatcaacaaaactgaatgttgggtatttgaaagaaaaaataatgttgataggccattatctaaacttataaagaaaaaaaagagacaatattcaaataaacacaatcacaaaagagacaaaggggacattaccagtgaccccacagaaatacaacaaccctcagggatgattatgaacacctctatgtacacaa

SEQ ID NO: 274657 - DNA, 605 bp, Homo sapiens
ctaaacttgacacttggccaaatacacctaacagacatctgcagaacactccacacatcaacaacagaatatatattcttatcatctgcacgtgacacatattctaaaatcaaccacatgctcagctataagtcaattctcaacaaataaaaaaaaaattttaccagccacactctcagaccagagcacaataaaaatacaaatcaataccaagaagatctgccaaaactgtaggattaagtgaaaattaaacaacctgaacctgaatgacttttgtgtaaacaataaaatcaaggcagaaatcaagaaattcttagactctgatgaaaacaaaaatacaacacaccagaaactctagaacacagctgaagcatggttaaaaggaaagtttattgtgctaaacacttatgtcaacagctagaaagatctcaaatttgcaacctaacatcacagatagaggaacctaaaaaacaaaacagaaccaacctcgaaggtagtagaagaaaagaaatggccacaatcataactgaaattaacaaaatggagatgagaaaaaaatgtaaaaaaatcaayaaaactgaatgttgggtatttgaaagaaaaaa

SEQ ID NO: 274658 - DNA, 570 bp, Homo sapiens
acaaaggggacattaccagtgaccccacagaaatacaacaaccctcagggatgattatgaacacctctatgtacacaaactgaaaaacccagagaagctgcataaattcctggaagcaatcttcaaagattgaaccaggaagaaaatgaaactttgaacagactaataggaaggtccaaactgaattggcaatacgatgcctatcaatcagaaaaagtgttgkcctcaaaggattcactgccaaattctaccagatgtataaagaagagctgataccacacctactgaaactatctaaaataattgaggaggagggactcataactaactcattctatgaggacaacatcattctgataccaaatcctggcagagatgcaatgaaaaaaaaaacttcagaccagtatttctaatgaacatagataaagaaatattcaacaaaatactagcaaaccaaatccagctgtacatcaaaaagctaatccaccacaatcaagtaggttttatttcttgcataatatttccagaatggtacttccaaggttttcttctagagattttatagtttga

SEQ ID NO: 274659 - DNA, 570 bp, Homo sapiens
acaaaggggacattaccagtgaccccacagaaatacaacaaccctcagggatgattatgaacacctctatgtacacaaactgaaaaacccagagaagctgcataaattcctggaagcaatcttcaaagattgaaccaggaagaaaatgaaactttgaacagactaataggaaggtccaaactgaattggcaatacgatgcctatcaatcagaaaaagtgttggcctcaaaggattcactgccaaattctaccagatgtataaagaagagctgataccacacctactgaaactatctaaaataattgaggaggagggactcataactaactcattctatgaggacaacatcattctgataccaaatcctggcagagatgcaatgaaaaaaaaaacttcagaccagtatttctaatgaacatagataaagaaatattcaacaaaatactagcaaaccaaatcyagctgtacatcaaaaagctaatccaccacaatcaagtaggttttatttcttgcataatatttccagaatggtacttccaaggttttcttctagagattttatagtttga

SEQ ID NO: 274660 - DNA, 635 bp, Homo sapiens
gtgtatggtcagcaggttatcctggcaccatttgttgaataagatgtcctttccccattgtttgtctttgtcagctttgttaaaaatcagatgattgtttatgtatggctttatttctgtgctctcaaaactgttccattacactatgtgtctgttttagttactgtagccttgtagtatagtttgaagccagggagtgtgatgcccccagctttgttctttttgcttagaattactttggctattcaggcacttttttggttccaaatttattctagaattttttttctagttcagcgaaaaacgttgttggtagtatgataggaatagcattgaatctgtaacttgggttgggcagaatgagcrttttaataatactgcaaaccccaacctttggtagagtctatgtgatattgggcctgtgggtgtgcagaagacaagagttgagctttaggaacctcagcctgaatttcaaaggatgtacggaaacacctgaatgtctaggcagaagtatgctgcaggggaagggctcctcatggagacctctgctagggcagtgcagaaggaagatgtggggtcagagcatccatgcagggtctccactggggcactgactagtggagctgtgagaagag

SEQ ID NO: 274661 - DNA, 634 bp, Homo sapiens
ctatgtgatattgggcctgtgggtgtgcagaagacaagagttgagctttaggaacctcagcctgaatttcaaaggatgtacggaaacacctgaatgtctaggcagaagtatgctgcaggggaagggctcctcatggagacctctgctagggcagtgcagaaggaagatgtggggtcagagcatccatgcagggtctccactggggcactgactagtggagctgtgagaagagggccgtcattctccggatcccagaatgatagatccaccaaaagctcacaccactcacctggaaaagctgcaggcactcaacaccaacctgtgaaagcagccagaagggaggctgtaccctgccaagccataggagtggagcttcccaaagccatggtatcccatctcttgcatctgtgtgacctggatgtgagacawggagtcaaaggacatcattttgaaactttaaggtttaatgactgctctgttggatttcagacttgcatggggcctatagctcctttgttttggtcaatttctcctatctccaatgggtgtatttacccagtacctgcactcccattgtatctaggaaataactaacttgcttttgatgttacaggctcataggtggaagggactt

SEQ ID NO: 274662 - DNA, 582 bp, Homo sapiens
tcagacttgcatggggcctatagctcctttgttttggtcaatttctcctatctccaatgggtgtatttacccagtayctgcactcccattgtatctaggaaataactaacttgcttttgatgttacaggctcataggtggaagggacttgccttttctcagatgagattttgaactcgaactttcaggttaatgctgaaatgagttaagactttgggggattcttggaaaggcataattgtgttttgaaatgtgaggacatgagatttgcgaggggccatggacagaataatatagtttggctttgtgtccctacccaaaatctcatcttgaattgtaatgcaaattgtaatccccacatgttgggggaaggacatcatgggaggtgattagacatggggatcatactgttctcatgataatgagtgagttcttatgagagctgaaggttttataggggctttcccccactttactttgcacttctctctcctgcagccatatcaagaaggacatgtttgctgccccttccaccataagtgtatgtttcctggagcctccccagccatgcagaactgtgagt

SEQ ID NO: 274663 - DNA, 574 bp, Homo sapiens
atcattttgaaactttaaggtttaatgactgctctgttggatttcagacttgcatggggcctatagctcctttgttttggtcaatttctcctatctccaatgggtgtatttacccagtacctgcactcccattgtatctaggaaataactaacttgyttttgatgttacaggctcataggtggaagggacttgccttttctcagatgagattttgaactcgaactttcaggttaatgctgaaatgagttaagactttgggggattcttggaaaggcataattgtgttttgaaatgtgaggacatgagatttgcgaggggccatggacagaataatatagtttggctttgtgtccctacccaaaatctcatcttgaattgtaatgcaaattgtaatccccacatgttgggggaaggacatcatgggaggtgattagacatggggatcatactgttctcatgataatgagtgagttcttatgagagctgaaggttttataggggctttcccccactttactttgcacttctctctcctgcagccatatcaagaaggacatgtttgctgccccttcc

SEQ ID NO: 274664 - DNA, 582 bp, Homo sapiens
tcagacttgcatggggcctatagctcctttgttttggtcaatttctcctatctccaatgggtgtatttacccagtacctgcactcccattgtatctaggaaataactaacttgcttttgatgttacaggctcataggtggaagggacttgccttttctcagatgagattttgaactcraactttcaggttaatgctgaaatgagttaagactttgggggattcttggaaaggcataattgtgttttgaaatgtgaggacatgagatttgcgaggggccatggacagaataatatagtttggctttgtgtccctacccaaaatctcatcttgaattgtaatgcaaattgtaatccccacatgttgggggaaggacatcatgggaggtgattagacatggggatcatactgttctcatgataatgagtgagttcttatgagagctgaaggttttataggggctttcccccactttactttgcacttctctctcctgcagccatatcaagaaggacatgtttgctgccccttccaccataagtgtatgtttcctggagcctccccagccatgcagaactgtgagt

SEQ ID NO: 274665 - DNA, 233 bp, Homo sapiens
aagactttgggggattcttggaaaggcataattgtgttttgaaatgtgaggacatgagatttgcgaggggccatggacagaataatatagtttggctttgtgtccctacccaaaatctcatcttgaattgtaatgcaaattgtaatccccacatgttgggggaaggacatcrtgggaggtgattagacatggggatcatactgttctcatgataatgagtgagttcttatgag

SEQ ID NO: 274666 - DNA, 582 bp, Homo sapiens
tcagacttgcatggggcctatagctcctttgttttggtcaatttctcctatctccaatgggtgtatttacccagtacctgcactcccattgtatctaggaaataactaacttgcttttgatgttacaggctcataggtggaagggacttgccttttctcagatgagattttgaactcgaactttcaggttaatgctgaaatgagttaagactttgggggattcttggaaaggcataattgtgttttgaaatgtgaggacatgagatttgcgaggggccatggacagaataatatagtttggctttgtgtccctacccaaaatctcatcttgaattgtaatgcaaattgtaatccccacatgttgggggaaggacatcatgggaggtgattagacatggggatcatactgttctcatgataatgagtgagttcttatgagagctgaaggttttataggggctttcccccactttactttgcacttctcyctcctgcagccatatcaagaaggacatgtttgctgccccttccaccataagtgtatgtttcctggagcctccccagccatgcagaactgtgagt

SEQ ID NO: 274667 - DNA, 570 bp, Homo sapiens
tggttctggttctttctcatctctgtgagctaatgttcctttaatcgttgaagttagtttgcttgtttgttttggatggggctttttacttgtatactttgatgccgttaagggtttactatgctataagttgcatttaattgactrgcttcatctctggatgatttcaggtggccaaggctcagctcagctctcctgggatgtgtgctctaacactggggggattgggacctggcccacagctttgttatatgccccctcaagatgaagtacctgctgcactgacagggccacagcattctcagtccactggcaacaacagtccaacgggggatgccaacaaaagtgcttcattggagcatttgctgaggggtccatgcttacgcacatgtgcaccagctgcagcaggggtgcagtgtggcatgttatactcatactcaccctggcagtggcaggttgtcagggtttatacacacacaccagtggggcccatgcagttgcagtgaggactctgcatatgtgcacactggcgaaacagtgattggagactgtgcacagtgcatgccggca

SEQ ID NO: 274668 - DNA, 465 bp, Homo sapiens
atgccgttaagggtttactatgctataagttgcatttaattgactggcttcatctctggatgatttcaggtggccaaggctcagctcagctctcctgggatgtgtgctctaacactggggggattgggacctggcccacagctttgttatatgccccctcaagatgaagtacctgctgcactgacagggccacagcattctcagtccactggcaacaacagtccaaygggggatgccaacaaaagtgcttcattggagcatttgctgaggggtccatgcttacgcacatgtgcaccagctgcagcaggggtgcagtgtggcatgttatactcatactcaccctggcagtggcaggttgtcagggtttatacacacacaccagtggggcccatgcagttgcagtgaggactctgcatatgtgcacactggcgaaacagtgattggagactgtgcacagtgcatgcc

SEQ ID NO: 274669 - DNA, 570 bp, Homo sapiens
tggttctggttctttctcatctctgtgagctaatgttcctttaatcgttgaagttagtttgcttgtttgttttggatggggctttttacttgtatactttgatgccgttaagggtttactatgctataagttgcatttaattgactggcttcatctctggatgatttcaggtggccaaggctcagctcagctctcctgggatgtgtgctctaacactggggggattgggacctggcccacagctttgttatatgccccctcaagatgaagtacctgctgcactgacagggccacagcattctcagtccactggcaacaacagtccaacgggggatgccaacaaaartgcttcattggagcatttgctgaggggtccatgcttacgcacatgtgcaccagctgcagcaggggtgcagtgtggcatgttatactcatactcaccctggcagtggcaggttgtcagggtttatacacacacaccagtggggcccatgcagttgcagtgaggactctgcatatgtgcacactggcgaaacagtgattggagactgtgcacagtgcatgccggca

SEQ ID NO: 274670 - DNA, 590 bp, Homo sapiens
cagaagctctccaatgagagcagagtagagtctgctgctatggtgatggccactgagaagcaccctcgttgggcatgcaaagctgccctccaagagggtatggcctggcggggaccccaggagagtccagtcgacaggagagcatctaatcacactggcatatcccatgggcaagacagcccttctctgtgsaggtctgacaatcaataatgacctaagtcactcagaggcgtgtggtaagccttaggaaatgggtgtccctggctgtgcttcactggaaccattcttatgtcaaactatctgggctctacacatactggaatcctgtctttgctacttctccaagcaactctccttgctagctcgaatgtccatggggattgtgaagtctcctaaagctaggattctggagctctttggaaagagtaagccactccatcgtatttaactcaccccctccctcacctttcagggccaggaatgagtcctggtgctccacaaccccatgctgggttcccagctttctgatcctttagcccagtgtctccatcctctctccttccactctcaatgctttccttttgaagatc

SEQ ID NO: 274671 - DNA, 530 bp, Homo sapiens
cttttagggtttccttggtgagtatcaggtgttcataaattaaggatttatatattgggtttaawaatcaagattgtaaatcaagatatctttagtgtgatgaaaggaagtaaattataaaacgtatttaggttactatgttgctcttaataagtagtacggctgccacattttaaagtgttttctttttcccctatggttgttttaaggatttctttttctctgtcactctctgtctttccagctctcattttctctctttctctcacatcagatttattgttaagtgttaattcagtggttattttttccttgaaatttactgtgtttcttgaatggacacgtgtatctttcatcattttggaaagtttaaaccattaagtattcacatatttatctgctccatttattttattctagctctctatttaaatatatcacctcacacaactcattatttgtgataaccactcttctacatttccattttttcatctcactgtattgaactgtgctcatttgcttttctg

SEQ ID NO: 274672 - DNA, 532 bp, Homo sapiens
ctccacaaccccatgctgggttcccagctttctgatcctttagcccagtgtctccatcctctctccttccactctcaatgctttccttttgaagatctgctcagagtgtgctggttttcttgatagtcagctctttcagtggaggatcttcctggctctgtcttgatggccattttggctcttctgtcttttagggtttccttggtgagtatcaggtgttcataaattaaggatttatatattgggtttaaaaatcaagattgtaaatcaagatatctttagtgtgaygaaaggaagtaaattataaaacgtatttaggttactatgttgctcttaataagtagtacggctgccacattttaaagtgttttctttttcccctatggttgttttaaggatttctttttctctgtcactctctgtctttccagctctcattttctctctttctctcacatcagatttattgttaagtgttaattcagtggttattttttccttgaaatttactgtgtttcttgaatggacacgt

SEQ ID NO: 274673 - DNA, 532 bp, Homo sapiens
ctccacaaccccatgctgggttcccagctttctgatcctttagcccagtgtctccatcctctctccttccactctcaatgctttccttttgaagatctgctcagagtgtgctggttttcttgatagtcagctctttcagtggaggatcttcctggctctgtcttgatggccattttggctcttctgtcttttagggtttccttggtgagtatcaggtgttcataaattaaggatttatatattgggtttaaaaatcaagattgtaaatcaagatatctttagtgtgatgaaaggaartaaattataaaacgtatttaggttactatgttgctcttaataagtagtacggctgccacattttaaagtgttttctttttcccctatggttgttttaaggatttctttttctctgtcactctctgtctttccagctctcattttctctctttctctcacatcagatttattgttaagtgttaattcagtggttattttttccttgaaatttactgtgtttcttgaatggacacgt

SEQ ID NO: 274674 - DNA, 544 bp, Homo sapiens
tcattatttgtgataaccactcttctacatttccattttttcatctcactgtattgaactgtgctcatttgcttttctgatttagcttccagtgatctagctcttttgctrtgtccaaaatattatcatactcatgctcctaatgtttaattttagtcataatatcatttatctttaaaatttgttattagtttcatgttaaaactgaaagattacattgtattgttttcatttggcagatattttcaaatttacttcttagaacataatacaaatacatgtttttcaatgtgtctgtaataataccagatctgcaatttttgtgacttttttcattatttttcctgctacttattgcaaaatgtgtcctgtttccttgcattctttattagctttgaaagcatgatgcttactgcttctgccaaaattacttggaaggattcctcaaatcctggaatgatgacttcctatatagaatcattttctttatctttactagttatctctgtagattactttaagaacgatataaattaaattagta

SEQ ID NO: 274675 - DNA, 595 bp, Homo sapiens
ctttagccctaattaattctcatactttcttttttttttgagacagagtcttgctctgttgcccaggytggagtgcattggtgtgatcttggctcaccacaacctctacttcctgggttcaagctattctcctgcctcagcctcccaagtagctgcgactataggcattcaccaccatgcccagcaaatttttgtatttttagtagacatggggtttcactatgttggccaggctggtctcaaacttctgacctcgtgatacacccacctcaacctcccaaagtgatttttgatcaagtaattccttacatacttaccattttcttcctttaagaagattttataaaatatttatatatctattaatattatctgccgttacctgacagaagtagatatgcatcatttttttgatgcaggtggagacttaataattgagaaaaataatataatctataagcctgcagtaaagattaaaccaaaaaatcaagagtttgatcacctctgtagataaaggaaataaattgataaagttcaaaatttgtgctacacttgaaggaagtaatttgaaatcatttatcttataaaggcttta

SEQ ID NO: 274676 - DNA, 595 bp, Homo sapiens
ctttagccctaattaattctcatactttcttttttttttgagacagagtcttgctctgttgcccaggctggagtgcattggtgtgatcttggctcaccacaacctctacttcctgggttcaagctattctcctgyctcagcctcccaagtagctgcgactataggcattcaccaccatgcccagcaaatttttgtatttttagtagacatggggtttcactatgttggccaggctggtctcaaacttctgacctcgtgatacacccacctcaacctcccaaagtgatttttgatcaagtaattccttacatacttaccattttcttcctttaagaagattttataaaatatttatatatctattaatattatctgccgttacctgacagaagtagatatgcatcatttttttgatgcaggtggagacttaataattgagaaaaataatataatctataagcctgcagtaaagattaaaccaaaaaatcaagagtttgatcacctctgtagataaaggaaataaattgataaagttcaaaatttgtgctacacttgaaggaagtaatttgaaatcatttatcttataaaggcttta

SEQ ID NO: 274677 - DNA, 475 bp, Homo sapiens
gatactttagccctaattaattctcatactttcttttttttttgagacagagtcttgctctgttgcccaggctggagtgcattggtgtgatcttggctcaccacaacctctacttcctgggttcaagctattctcctgcctcagyctcccaagtagctgcgactataggcattcaccaccatgcccagcaaatttttgtatttttagtagacatggggtttcactatgttggccaggctggtctcaaacttctgacctcgtgatacacccacctcaacctcccaaagtgatttttgatcaagtaattccttacatacttaccattttcttcctttaagaagattttataaaatatttatatatctattaatattatctgccgttacctgacagaagtagatatgcatcatttttttgatgcaggtggagacttaataattgagaaaaataatataatctataagcctgcagtaaa

SEQ ID NO: 274678 - DNA, 595 bp, Homo sapiens
ctttagccctaattaattctcatactttcttttttttttgagacagagtcttgctctgttgcccaggctggagtgcattggtgtgatcttggctcaccacaacctctacttcctgggttcaagctattctcctgcctcagcctcccaagtagctgcgactataggcattcaccaccatgcccagcaaatttttgtatttttagtagacatggggtttcactatrttggccaggctggtctcaaacttctgacctcgtgatacacccacctcaacctcccaaagtgatttttgatcaagtaattccttacatacttaccattttcttcctttaagaagattttataaaatatttatatatctattaatattatctgccgttacctgacagaagtagatatgcatcatttttttgatgcaggtggagacttaataattgagaaaaataatataatctataagcctgcagtaaagattaaaccaaaaaatcaagagtttgatcacctctgtagataaaggaaataaattgataaagttcaaaatttgtgctacacttgaaggaagtaatttgaaatcatttatcttataaaggcttta

SEQ ID NO: 274679 - DNA, 595 bp, Homo sapiens
ctttagccctaattaattctcatactttcttttttttttgagacagagtcttgctctgttgcccaggctggagtgcattggtgtgatcttggctcaccacaacctctacttcctgggttcaagctattctcctgcctcagcctcccaagtagctgcgactataggcattcaccaccatgcccagcaaatttttgtatttttagtagacatggggtttcactatgttggccaggctggtctcaaacttctgacctcgtgatacacccacctcaacctcccaaagtgatttttgatcaagtaattccttacatacttaccattttcttcctttaagaagattttataaaatatttatatatctattaatattatctgccgttacctgacagaagtagatatgcatcatttttttgatgcaggtggagacttaataattgagaaaaataatataatctataagcctgyagtaaagattaaaccaaaaaatcaagagtttgatcacctctgtagataaaggaaataaattgataaagttcaaaatttgtgctacacttgaaggaagtaatttgaaatcatttatcttataaaggcttta

SEQ ID NO: 274680 - DNA, 534 bp, Homo sapiens
taatatataaaactatcaagtatgttgattatgtttttagtatagtggtattgtttatccggatttaatcttgaagattaaaaataaaaataatgttaacttcagttaactgttcaggcaaattattttcttttttgataaaatgtatttgtgttgctacacactgacatggagctgcagattttctcattcaagttattaaaatgccaaccacctttgtaatgctagtagtcactgccaaatcaattttcattayatcggggggaaaatacaaatcttcttaaaaactgatataactgaaactgtacgtacattgtattatatcacaaaatacatgtaagtataatgaagaaaaatttgttaagaaagtttaccaaagcattctagttaagattacatttaggtggataagaaatttttcatttccaaaaaattacaaaacaacggtaaattgagttggtatttcacagtatttgaattgcaatagtatgaagcgtgtatctaaatgcatgctatttatgaggcaatagttat

SEQ ID NO: 274681 - DNA, 588 bp, Homo sapiens
tagagttgtacaaagccaagagttccaggagactaaggtaactagagtttctaggtctgagaagctagagattcaaagagagaaatctctgatatctacagatgttctcctttcagtgcttagcagaatactgattagtgtatacatgtgagtaatctgctcactgccagggaaacaagcatcttcaaagattaaaaacaaacaaacaataacaacaacaaaaaccagtgcctgacattcacatatgacctggattatacctgtatttgccagycaaatgaaagaaaaaagctcaattcacagtgcatttggtaaagcaatttaaaaggtcttgcctcaggggtagaaattaattagatttaaactgagtactgagttgaatgcatcaaaaaatcataaaagaagtatctaaaaggatcaagcggttttgaacaaattaactgtgtcctagagaaaaagctcatattttgtacagaaatacaaaatatccagcactcacaaagataacattaacaaaaacttccattatattaaactgtagttaggttaaaatttctttaacagattcacagagactggcagcacaaa

SEQ ID NO: 274682 - DNA, 398 bp, Homo sapiens
gacattcacatatgacctggattatacctgtatttgccagccaaatgaaagaaaaaagctcaattcacagwgcatttggtaaagcaatttaaaaggtcttgcctcaggggtagaaattaattagatttaaactgagtactgagttgaatgcatcaaaaaatcataaaagaagtatctaaaaggatcaagcggttttgaacaaattaactgtgtcctagagaaaaagctcatattttgtacagaaatacaaaatatccagcactcacaaagataacattaacaaaaacttccattatattaaactgtagttaggttaaaatttctttaacagattcacagagactggcagcacaaagttttgtaaggatttagagctactggaactctcataccttgat

SEQ ID NO: 274683 - DNA, 398 bp, Homo sapiens
gacattcacatatgacctggattatacctgtatttgccagccaaatgaaagaaaaaagctcaattcacagtgcatttggtaaagcaatttaaaaggtcttgcctcaggggtagaaattaattasatttaaactgagtactgagttgaatgcatcaaaaaatcataaaagaagtatctaaaaggatcaagcggttttgaacaaattaactgtgtcctagagaaaaagctcatattttgtacagaaatacaaaatatccagcactcacaaagataacattaacaaaaacttccattatattaaactgtagttaggttaaaatttctttaacagattcacagagactggcagcacaaagttttgtaaggatttagagctactggaactctcataccttgat

SEQ ID NO: 274684 - DNA, 588 bp, Homo sapiens
tagagttgtacaaagccaagagttccaggagactaaggtaactagagtttctaggtctgagaagctagagattcaaagagagaaatctctgatatctacagatgttctcctttcagtgcttagcagaatactgattagtgtatacatgtgagtaatctgctcactgccagggaaacaagcatcttcaaagattaaaaacaaacaaacaataacaacaacaaaaaccagtgcctgacattcacatatgacctggattatacctgtatttgccagccaaatgaaagaaaaaagctcaattcacagtgcatttggtaaagcaatttaaaaggtcttgcctcaggggtagaaattaattagatttaaactgagtactgagttgaaygcatcaaaaaatcataaaagaagtatctaaaaggatcaagcggttttgaacaaattaactgtgtcctagagaaaaagctcatattttgtacagaaatacaaaatatccagcactcacaaagataacattaacaaaaacttccattatattaaactgtagttaggttaaaatttctttaacagattcacagagactggcagcacaaa

SEQ ID NO: 274685 - DNA, 398 bp, Homo sapiens
gacattcacatatgacctggattatacctgtatttgccagccaaatgaaagaaaaaagctcaattcacagtgcatttggtaaagcaatttaaaaggtcttgcctcaggggtagaaattaattagatttaaactgagtactgagttgaatscatcaaaaaatcataaaagaagtatctaaaaggatcaagcggttttgaacaaattaactgtgtcctagagaaaaagctcatattttgtacagaaatacaaaatatccagcactcacaaagataacattaacaaaaacttccattatattaaactgtagttaggttaaaatttctttaacagattcacagagactggcagcacaaagttttgtaaggatttagagctactggaactctcataccttgat

SEQ ID NO: 274686 - DNA, 588 bp, Homo sapiens
tagagttgtacaaagccaagagttccaggagactaaggtaactagagtttctaggtctgagaagctagagattcaaagagagaaatctctgatatctacagatgttctcctttcagtgcttagcagaatactgattagtgtatacatgtgagtaatctgctcactgccagggaaacaagcatcttcaaagattaaaaacaaacaaacaataacaacaacaaaaaccagtgcctgacattcacatatgacctggattatacctgtatttgccagccaaatgaaagaaaaaagctcaattcacagtgcatttggtaaagcaatttaaaaggtcttgcctcaggggtagaaattaattagatttaaactgagtactgagttgaatgcatcaaaaaatcataaaagaagtatctaaaaggatcaagcggttttgaacaaattaactgtgtcctagagaaaaagctcatattttgtacagaaatacaaaatatccagcamtcacaaagataacattaacaaaaacttccattatattaaactgtagttaggttaaaatttctttaacagattcacagagactggcagcacaaa

SEQ ID NO: 274687 - DNA, 438 bp, Homo sapiens
tagaaattaattagatttaaactgagtactgagttgaatgcatcaaaaaatcataaaagaagtatctaaaaggatcaagcggttttgaacaaattaactgtgtcctagagaaaaagctcatattttgtacagaaatacaaaatatccagcactcacaaagataacattaacaaaaacttccattatattaaactgtagttasgttaaaatttctttaacagattcacagagactggcagcacaaagttttgtaaggatttagagctactggaactctcataccttgatggtagaaatgtaaaatgttttaaaaacttctgaaaactctttggaaatgtcttattttctcataatgttaagcatacacctatactatgacaaagaactccattataaggtgtttacaggccctcgatcagaaaaaacataaccaaacat

SEQ ID NO: 274688 - DNA, 485 bp, Homo sapiens
gggaaacaagcatcttcaaagattaaaaacaaacaaacaataacaacaacaaaaaccagtgcctgacattcacatatgacctggattatacctgtatttgccagccaaatgaaagaaaaaagctcaattcacagtgcatttggtaaagcaatttaaaaggtcttgcctcaggggtagaaattaattagatttaaactgagtactgagttgaatgcatcaaaaaatcataaaagaagtatctaaaaggatcaagcggttttgaacaaattaactgtgtcctagagaaaaagctcatattttgtacagaaatacaaaatatccagcactcacaaagataacattaacaaaaacttccattatattaaactgtagttaggttaaaatttctttaayagattcacagagactggcagcacaaagttttgtaaggatttagagctactggaactctcataccttgatggtagaaatgtaaaatgttttaa

SEQ ID NO: 274689 - DNA, 438 bp, Homo sapiens
tagaaattaattagatttaaactgagtactgagttgaatgcatcaaaaaatcataaaagaagtatctaaaaggatcaagcggttttgaacaaattaactgtgtcctagagaaaaagctcatattttgtacagaaatacaaaatatccagcactcacaaagataacattaacaaaaacttccattatattaaactgtagttaggttaaaatttctttaacagattsacagagactggcagcacaaagttttgtaaggatttagagctactggaactctcataccttgatggtagaaatgtaaaatgttttaaaaacttctgaaaactctttggaaatgtcttattttctcataatgttaagcatacacctatactatgacaaagaactccattataaggtgtttacaggccctcgatcagaaaaaacataaccaaacat

SEQ ID NO: 274690 - DNA, 438 bp, Homo sapiens
tagaaattaattagatttaaactgagtactgagttgaatgcatcaaaaaatcataaaagaagtatctaaaaggatcaagcggttttgaacaaattaactgtgtcctagagaaaaagctcatattttgtacagaaatacaaaatatccagcactcacaaagataacattaacaaaaacttccattatattaaactgtagttaggttaaaatttctttaacagattcacagagactggcagcacaaagttttgtaaggatttagagctaytggaactctcataccttgatggtagaaatgtaaaatgttttaaaaacttctgaaaactctttggaaatgtcttattttctcataatgttaagcatacacctatactatgacaaagaactccattataaggtgtttacaggccctcgatcagaaaaaacataaccaaacat

SEQ ID NO: 274691 - DNA, 438 bp, Homo sapiens
tagaaattaattagatttaaactgagtactgagttgaatgcatcaaaaaatcataaaagaagtatctaaaaggatcaagcggttttgaacaaattaactgtgtcctagagaaaaagctcatattttgtacagaaatacaaaatatccagcactcacaaagataacattaacaaaaacttccattatattaaactgtagttaggttaaaatttctttaacagattcacagagactggcagcacaaagttttgtaaggatttagagctactggaactctcataccttgatggtagaaatgtaaaatgttttaaaaacttctgaaaactctttggaaatgtcttrttttctcataatgttaagcatacacctatactatgacaaagaactccattataaggtgtttacaggccctcgatcagaaaaaacataaccaaacat

SEQ ID NO: 274692 - DNA, 409 bp, Homo sapiens
tgatcaaagttaatcacagattgtttataygtgaatgaacacacaaaaaatatgtatgcacttacctctccaaaatgttgaagtgtctgcttgtaaaagataccgttaatatttattcatttcacatattcatatgattcaaacatttaaatatttaaaacaaatattaccaacacttttagtaaattggaaaatttaagtcaatatcgaattgagagtttttttctcatttggttgattcattaattataatcagcaaaaaaaatttgcatatgttacgtttcattatacagatacatttgtgacatataattgcagtattgggcaatgactgataaagttgtattttatcaaaacagctttctgagtatgtgatattgtgatatataagtaaaaaaaaaatgctaat

SEQ ID NO: 274693 - DNA, 409 bp, Homo sapiens
tgatcaaagttaatcacagattgtttatacgtgaatgaacacacaaaaaatatgtatgcacttacctctccaaaatgttgaagtgtctgcttgtaaaagataccgttaatatttattcatttcacatattcatatgattcaaacatttaaatatttaaaacaaatattaccaacacttttagtaaattggaaaatttaagtcaatatcgaattgagagtttttttctcatttggttgattcattaattataatcagcaaaaaaaatttgcatatgttacgtttcrttatacagatacatttgtgacatataattgcagtattgggcaatgactgataaagttgtattttatcaaaacagctttctgagtatgtgatattgtgatatataagtaaaaaaaaaatgctaat

SEQ ID NO: 274694 - DNA, 616 bp, Homo sapiens
gtaatataatgtaaattatatgtagatatatatttttaaagttgaggacacctaaataaaacatgtaaattattttaattacttaacaatctattatatacaaagtatttaagtatattttaaacatatttaatttaactaattttttgagtgatttgggcaaaattctgttttagttcatgtatagacatgcttatatttgagttactgaaaatgcaaacatttaagtagtctactcttagcatattaatatgtcctgtattcattacaacattaattgcattaaattcagctactatgaataaataatctatcacatatacattttaaaggtagaagcatttyagttttatacaaggatgtctttttgagctgacataggtttccaagatttgagacaatatcagaagatttattaaaaatgatatgagacagcaactccccacatcactttgctggcatatatctgcatgggtgggctttacttgcttcaacagcacatgggaatgcagtgtgccccccataatccccaccaaccaccactgcagatggatccttgttgggcacagagtcatcaagccccatctacaccagtgccctgcccttgtgctgtgct

SEQ ID NO: 274695 - DNA, 496 bp, Homo sapiens
tgggtgggctttacttgcttcaacagcacatgggaatgcagtgtgccccccataakccccaccaaccaccactgcagatggatccttgttgggcacagagtcatcaagccccatctacaccagtgccctgcccttgtgctgtgctgcacacagagcaggggatccccccacaacctgagcaattgctcctgcttgcagaccacagataaggcgccaagacctccactggccagcaccccaccccaagccatcaccacctacagtgcagcagtgcactctgtctccagcagaaggcccttactcccccaacagctgccttgcctccaatactgtggtgaacacctgcagagaggcagacacccctatatccactagtactttgctgcaggtactgcagtttgctatccccagcacagtggactccaaatctcgaggagccacagtgtaagagatcgatcaggttgttgtgggaatcaggagactggagagattggta

SEQ ID NO: 274696 - DNA, 496 bp, Homo sapiens
tgggtgggctttacttgcttcaacagcacatgggaatgcagtgtgccccccataatccccaccaaccaccactgcagatggatccttgttgggcacagagtcatcaagccccatctacaccagtgccctgcccttgtgctgtgctgcacacagagcaggggatccccccacaacctgagcaattgctcctgcttgcagaccacagataaggckccaagacctccactggccagcaccccaccccaagccatcaccacctacagtgcagcagtgcactctgtctccagcagaaggcccttactcccccaacagctgccttgcctccaatactgtggtgaacacctgcagagaggcagacacccctatatccactagtactttgctgcaggtactgcagtttgctatccccagcacagtggactccaaatctcgaggagccacagtgtaagagatcgatcaggttgttgtgggaatcaggagactggagagattggta

SEQ ID NO: 274697 - DNA, 599 bp, Homo sapiens
tgggtgggctttacttgcttcaacagcacatgggaatgcagtgtgccccccataatccccaccaaccaccactgcagatggatccttgttgggcacagagtcatcaagccccatctacaccagtgccctgcccttgtgctgtgctgcacacagagcaggggatccccccacaacctgagcaattgctcctgcttgcagaccacagataaggcgccaagacctccactggccagcaccccaccccaagccatcaccacctacagtgcagcagtgcactytgtctccagcagaaggcccttactcccccaacagctgccttgcctccaatactgtggtgaacacctgcagagaggcagacacccctatatccactagtactttgctgcaggtactgcagtttgctatccccagcacagtggactccaaatctcgaggagccacagtgtaagagatcgatcaggttgttgtgggaatcaggagactggagagattggtaggtgaaacagaaggatttttattgagtgcactcagaaccagcagattaatatccaaagactggaccctgaacaaagacagcacttgccttttacgcacacttc

SEQ ID NO: 274698 - DNA, 599 bp, Homo sapiens
tgggtgggctttacttgcttcaacagcacatgggaatgcagtgtgccccccataatccccaccaaccaccactgcagatggatccttgttgggcacagagtcatcaagccccatctacaccagtgccctgcccttgtgctgtgctgcacacagagcaggggatccccccacaacctgagcaattgctcctgcttgcagaccacagataaggcgccaagacctccactggccagcaccccaccccaagccatcaccacctacagtgcagcagtgcactckgtctccagcagaaggcccttactcccccaacagctgccttgcctccaatactgtggtgaacacctgcagagaggcagacacccctatatccactagtactttgctgcaggtactgcagtttgctatccccagcacagtggactccaaatctcgaggagccacagtgtaagagatcgatcaggttgttgtgggaatcaggagactggagagattggtaggtgaaacagaaggatttttattgagtgcactcagaaccagcagattaatatccaaagactggaccctgaacaaagacagcacttgccttttacgcacacttc

SEQ ID NO: 274699 - DNA, 599 bp, Homo sapiens
tgggtgggctttacttgcttcaacagcacatgggaatgcagtgtgccccccataatccccaccaaccaccactgcagatggatccttgttgggcacagagtcatcaagccccatctacaccagtgccctgcccttgtgctgtgctgcacacagagcaggggatccccccacaacctgagcaattgctcctgcttgcagaccacagataaggcgccaagacctccactggccagcaccccaccccaagccatcaccacctacagtgcagcagtgcactctgtctccagcagaaggcccttrctcccccaacagctgccttgcctccaatactgtggtgaacacctgcagagaggcagacacccctatatccactagtactttgctgcaggtactgcagtttgctatccccagcacagtggactccaaatctcgaggagccacagtgtaagagatcgatcaggttgttgtgggaatcaggagactggagagattggtaggtgaaacagaaggatttttattgagtgcactcagaaccagcagattaatatccaaagactggaccctgaacaaagacagcacttgccttttacgcacacttc

SEQ ID NO: 274700 - DNA, 581 bp, Homo sapiens
tgggtgggctttacttgcttcaacagcacatgggaatgcagtgtgccccccataatccccaccaaccaccactgcagatggatccttgttgggcacagagtcatcaagccccatctacaccagtgccctgcccttgtgctgtgctgcacacagagcaggggatccccccacaacctgagcaattgctcctgcttgcagaccacagataaggcgccaagacctccactggccagcaccccaccccaagccatcaccacctacagtgcagcagtgcactctgtctccagcagaaggcccttactcccccaacagctgccttgcctccaatactgtggtgaacacctgcagagaggcagacacccctatatccactartactttgctgcaggtactgcagtttgctatccccagcacagtggactccaaatctcgaggagccacagtgtaagagatcgatcaggttgttgtgggaatcaggagactggagagattggtaggtgaaacagaaggatttttattgagtgcactcagaaccagcagattaatatccaaagactggaccctgaacaaagacagcactt

SEQ ID NO: 274701 - DNA, 476 bp, Homo sapiens
ttttttaaagttgcactttttggaatttaaaattaatccagattatgtaatatataacatttggaatttaccaatcaatactctatcatttyatttttcactcttcaaataatttcttgttcaagagtttaaaatgcttttaaaattaatagaatctgcaggctatggtctgtagagactgtctctacaaaaaataaaaatatatattattttaaaatatatataaaatatatatttatttaaatgtatatgtttcaagtatataaaatatatttttaaaatttcatttttttgccggatcgtatggtaagcgtatgtttagtctggcaggaacttgcaaaactgccttccacagtggctgacccactttgcattctcagcagaaatagagatgagttcctgtcgctccgtatcttcaccagcatttggtgttggtgtttgcattcaagccagtctaagagatgtgtaatggtatc

SEQ ID NO: 274702 - DNA, 476 bp, Homo sapiens
ttttttaaagttgcactttttggaatttaaaattaatccagattatgtaatatataacatttggaatttaccaatcaatactctatcattttatttttcactcttcaaataatttcttgttcaagagtttaaaatgcttttaaaattaatagaatctgcaggctatggtctgtagagactgtctctacaaaaaataaaaatatatattattttaaaatatatataaaatatatatttatttaaatgtatatgtttcaartatataaaatatatttttaaaatttcatttttttgccggatcgtatggtaagcgtatgtttagtctggcaggaacttgcaaaactgccttccacagtggctgacccactttgcattctcagcagaaatagagatgagttcctgtcgctccgtatcttcaccagcatttggtgttggtgtttgcattcaagccagtctaagagatgtgtaatggtatc

SEQ ID NO: 274703 - DNA, 476 bp, Homo sapiens
ttttttaaagttgcactttttggaatttaaaattaatccagattatgtaatatataacatttggaatttaccaatcaatactctatcattttatttttcactcttcaaataatttcttgttcaagagtttaaaatgcttttaaaattaatagaatctgcaggctatggtctgtagagactgtctctacaaaaaataaaaatatatattattttaaaatatatataaaatatatatttatttaaatgtatatgtttcaagtatataaaatatatttttaaaatttcatttttttgccggatcgtatggtaagcrtatgtttagtctggcaggaacttgcaaaactgccttccacagtggctgacccactttgcattctcagcagaaatagagatgagttcctgtcgctccgtatcttcaccagcatttggtgttggtgtttgcattcaagccagtctaagagatgtgtaatggtatc

SEQ ID NO: 274704 - DNA, 622 bp, Homo sapiens
cagtttggtagcattctacctacagtagaatttatatcaaaattggaaccaattctctcaaaccctgccactcttttatcaactaagtttatgggatattctaagtcctttgttgttctttccacaatgttcacagcattttcaccaggagtagattccatcgcaagaaaccactttctttcctcattcataacaagcaacaataatataktattttatatatgttatatatgtattattatataatataaattatatattatataacattatataataatatataatattatatattgtatattattatattaattatattatataatattatatattgtatattattatattaattatattatattatatattttatcataatataatatgtattataatatatattatataagcagaaatgatatcccttggtttttaaagataatacaaagtggattttagtaacaatcttgagttgtcacagaagctaaggaagttggggattccatgaagccatccaagcatataaagcccatttccctgggtcccttttccttagctcaaggccacaaaaaatcagaacatgaattccagcccacatttgcattacgtctaaata

SEQ ID NO: 274705 - DNA, 622 bp, Homo sapiens
cagtttggtagcattctacctacagtagaatttatatcaaaattggaaccaattctctcaaaccctgccactcttttatcaactaagtttatgggatattctaagtcctttgttgttctttccacaatgttcacagcattttcaccaggagtagattccatcgcaagaaaccactttctttcctcattcataacaagcaacaataatatagtattttatatatrttatatatgtattattatataatataaattatatattatataacattatataataatatataatattatatattgtatattattatattaattatattatataatattatatattgtatattattatattaattatattatattatatattttatcataatataatatgtattataatatatattatataagcagaaatgatatcccttggtttttaaagataatacaaagtggattttagtaacaatcttgagttgtcacagaagctaaggaagttggggattccatgaagccatccaagcatataaagcccatttccctgggtcccttttccttagctcaaggccacaaaaaatcagaacatgaattccagcccacatttgcattacgtctaaata

SEQ ID NO: 274706 - DNA, 622 bp, Homo sapiens
cagtttggtagcattctacctacagtagaatttatatcaaaattggaaccaattctctcaaaccctgccactcttttatcaactaagtttatgggatattctaagtcctttgttgttctttccacaatgttcacagcattttcaccaggagtagattccatcgcaagaaaccactttctttcctcattcataacaagcaacaataatatagtattttatatatgttatatatgtattattatataatataaattatatattatataacattatataataatatataatattatatattgyatattattatattaattatattatataatattatatattgtatattattatattaattatattatattatatattttatcataatataatatgtattataatatatattatataagcagaaatgatatcccttggtttttaaagataatacaaagtggattttagtaacaatcttgagttgtcacagaagctaaggaagttggggattccatgaagccatccaagcatataaagcccatttccctgggtcccttttccttagctcaaggccacaaaaaatcagaacatgaattccagcccacatttgcattacgtctaaata

SEQ ID NO: 274707 - DNA, 383 bp, Homo sapiens
gatatcccttggtttttaaagataatacaaagtggattttagtaacaatcttgagttgtcacagaagctaaggaagttggggattccatgaagccatccaagcatataaagcccatttccctgggtcccttttccttagctcaaggccacaaaaaatcagaacatgaattccagcccacatttgcattaygtctaaataattatgagttataaatgaagctaacaaatagttaaatatgttctattctcctactttgataaatattcacagtatattatgataaatatattgccataataacccacaaggtcaaagtcgagtgtagaattctctgattccttggtgcgctgcacgtgaatgtcgtagtaaagggagagccgat

SEQ ID NO: 274708 - DNA, 383 bp, Homo sapiens
gatatcccttggtttttaaagataatacaaagtggattttagtaacaatcttgagttgtcacagaagctaaggaagttggggattccatgaagccatccaagcatataaagcccatttccctgggtcccttttccttagctcaaggccacaaaaaatcagaacatgaattccagcccacatttgcattacgtctaaataattatgagttataaatgaagctaacaaatagttaaatrtgttctattctcctactttgataaatattcacagtatattatgataaatatattgccataataacccacaaggtcaaagtcgagtgtagaattctctgattccttggtgcgctgcacgtgaatgtcgtagtaaagggagagccgat

SEQ ID NO: 274709 - DNA, 197 bp, Homo sapiens
aatagcaaatgagcattggcttgtaacaagaaagtcagcctgtcctttaaatctttttctttttcttgatataaggtctcactccattacccargctggattgcagtggcatgatcttggcccactccatacttgacctccttggccccacaatcctcccacctcagcctcctgagtagctgggactagtagcatgc

SEQ ID NO: 274710 - DNA, 574 bp, Homo sapiens
cacatttctcttctgcacagccctarcagaggttctccatcagagcaccacccctgcagcaaacttctgcttggacatccaggtgttttcaaacatcctctgaaatctaggtggaggtttccaaacttcagttcttgacttctatgcatgtgcaggctgaacacaacatggaagctgccaaggcttggtgcttgcactctcaaggccatggcctgagttctatgttttcctctttcagccatggttggaggggctgaaacgcagagaaacaaggccctaggctacacacagcacagtcaacctggcccagcacagaaatccattttatcctcctaggtcccaggcttgtgatgggaggggctgctgtgatgacctatgacatgtcctgtagacattttccccattgtttttgggattaacattcagcttcttgttacttatgcaaatttctgcagacagcttgaatttatcctcagaaaatgggattttcttctctatcacattgtcaggctgcaaattttccaaaactgtatgctctgcttcctttataaaaccaaaggcctttaacatcacc

SEQ ID NO: 274711 - DNA, 574 bp, Homo sapiens
cacatttctcttctgcacagccctagcagaggttctccatcagagcaccacccctgcagcaaacttctgcttggacatccaggtgttttcaaacatcctctgaaatctaggtggaggtttccaaacttcagttcttgacttctatgcatgtgcaggctgaacacaacatggaagctgccaaggcttggtgcttgcactctcaaggccatggcctgagttctatgttttcctctttcagccatggttggaggggctgaaacgcagagaaacaaggccctaggctacacacagcacagtcaacctggcccagcayagaaatccattttatcctcctaggtcccaggcttgtgatgggaggggctgctgtgatgacctatgacatgtcctgtagacattttccccattgtttttgggattaacattcagcttcttgttacttatgcaaatttctgcagacagcttgaatttatcctcagaaaatgggattttcttctctatcacattgtcaggctgcaaattttccaaaactgtatgctctgcttcctttataaaaccaaaggcctttaacatcacc

SEQ ID NO: 274712 - DNA, 574 bp, Homo sapiens
cacatttctcttctgcacagccctagcagaggttctccatcagagcaccacccctgcagcaaacttctgcttggacatccaggtgttttcaaacatcctctgaaatctaggtggaggtttccaaacttcagttcttgacttctatgcatgtgcaggctgaacacaacatggaagctgccaaggcttggtgcttgcactctcaaggccatggcctgagttctatgttttcctctttcagccatggttggaggggctgaaacgcagagaaacaaggccctaggctacacacagcacagtcaacctggcccagcacrgaaatccattttatcctcctaggtcccaggcttgtgatgggaggggctgctgtgatgacctatgacatgtcctgtagacattttccccattgtttttgggattaacattcagcttcttgttacttatgcaaatttctgcagacagcttgaatttatcctcagaaaatgggattttcttctctatcacattgtcaggctgcaaattttccaaaactgtatgctctgcttcctttataaaaccaaaggcctttaacatcacc

SEQ ID NO: 274713 - DNA, 495 bp, Homo sapiens
acaatgtgttttttttaaaggaagagaatcctaaacataaattcagggtaatagttacyctcgggctgaagggtgaaaatcaggaaaaaggacagaggaggagcagatgttagggtcagaaccctagttctttggttgtgttgtaagttgacaagtgattaccatattgttcaaatacatttacacagaggcccaggcacagacaagggtgaaataggagccaaggtgtactatgagccaaggattatgattaatccaattttgtgcacttaagccatttgaaaaacagaaaagcaaaacaacaaaataatttttaagaaattgaatatagggtgctatgctctgaatgtgtccccctaaaattaatcacaaatgtcataggattaggaagtagggcttttaggtagtgattcagtcatgaagggagagtcttcacaaatgggtgtaggatccttacacaaggactggagggagtgggcttcccctgttttaccc

SEQ ID NO: 274714 - DNA, 612 bp, Homo sapiens
tttgtgcacttaagccatttgaaaaacagaaaagcaaaacaacaaaataatttttaagaaattgaatatagggtgctatgctctgaatgtgtccccctaaaattaatcacaaatgtcataggattaggaagtagggcttttaggtagtgattcagtcatgaagggagagtcttcacaaatgggtgtaggatccttacacaaggactggagggagtgggcttcccctgttttrcccttccgccttctgccatgtgaggacacagtgcctctcctcctgaagacacagtgcacaaggtaccatcttggatgcagagaccaggccctcaccagacaccaatcctgctggcaccttgatcttggacttctagcctatggaactgtgagaaatacatttctgttcttcagaaattacccagcctagtgtattttcttatatagaagcacaaactcattaaggcacaatgcctcttgtcattttcttctacaattttctttgtggcctctttagcactgggtcattttatatttgctccttcataatatctcttactttcggtttttcacatttctgttccaagtgtattcttagatacatattttccactattagtt

SEQ ID NO: 274715 - DNA, 612 bp, Homo sapiens
tttgtgcacttaagccatttgaaaaacagaaaagcaaaacaacaaaataatttttaagaaattgaatatagggtgctatgctctgaatgtgtccccctaaaattaatcacaaatgtcataggattaggaagtagggcttttaggtagtgattcagtcatgaagggagagtcttcacaaatgggtgtaggatccttacacaaggactggagggagtgggcttcccctgttttacccttccgccttctgccatgtgaggacacagtgcctctcctcctgaagacacagtgcacaaggtaccatcttggatgcagagaccaggccctcaccagacaccaatcctgctggcaccttgatcttggacttctagcctatggaactgtgagaaatacatttctgttcttcagaaattacccagcctagtgtattttcttatatagaagcacaaaytcattaaggcacaatgcctcttgtcattttcttctacaattttctttgtggcctctttagcactgggtcattttatatttgctccttcataatatctcttactttcggtttttcacatttctgttccaagtgtattcttagatacatattttccactattagtt

SEQ ID NO: 274716 - DNA, 577 bp, Homo sapiens
ctggctctccagcttagccactgtggtgcctcccctgggggtgtgcaatcaggcacagtgggggcctgcttggggaaggtctgatggtcttttttggtgaaattcatctgttttagcaggagttgtgggggagggtgggtggggagcagagggagagggacagaatggtttgggggactttgtggggagcagagggtctagrgagaaagtgggaagggaaagggacggaggtcaacaggagttttggagaacaagggttgtaggctgtggggggtaaagccgatttgtgaagaactggtgataggaactaaaacaacccacctagaaggggaggggctttgagcaggggtggggaggtgggatttgaggcaaaacagctaggagttctgaaactattaatatctagctgtgtgactcagggcaagttgcttaacttttctctctgccttagtttcttgacctgtaaaacagggataccaataatagaacttatctcagggggttatttggaattagaggaaatacatgccatgtgttttccacagtgcttgacacatagaacctgccagtaaatgtt

SEQ ID NO: 274717 - DNA, 577 bp, Homo sapiens
ctggctctccagcttagccactgtggtgcctcccctgggggtgtgcaatcaggcacagtgggggcctgcttggggaaggtctgatggtcttttttggtgaaattcatctgttttagcaggagttgtgggggagggtgggtggggagcagagggagagggacagaatggtttgggggactttgtggggagcagagggtctagggagaaagtgggaagggaaagggacrgaggtcaacaggagttttggagaacaagggttgtaggctgtggggggtaaagccgatttgtgaagaactggtgataggaactaaaacaacccacctagaaggggaggggctttgagcaggggtggggaggtgggatttgaggcaaaacagctaggagttctgaaactattaatatctagctgtgtgactcagggcaagttgcttaacttttctctctgccttagtttcttgacctgtaaaacagggataccaataatagaacttatctcagggggttatttggaattagaggaaatacatgccatgtgttttccacagtgcttgacacatagaacctgccagtaaatgtt

SEQ ID NO: 274718 - DNA, 577 bp, Homo sapiens
ctggctctccagcttagccactgtggtgcctcccctgggggtgtgcaatcaggcacagtgggggcctgcttggggaaggtctgatggtcttttttggtgaaattcatctgttttagcaggagttgtgggggagggtgggtggggagcagagggagagggacagaatggtttgggggactttgtggggagcagagggtctagggagaaagtgggaagggaaagggacggaggtcaacaggagttttggagaacaagggttgtaggctgtggggggtaaagccgatttgtgaagaactggtgataggaactaaaacaacccacctagaaggggaggggctttgagcaggggtggggaggtgggatttgaggcaaaacagctaggagttctgaaactattaatatctagctgtgtgactcagggcaagttgcttaacttttctctctgccttagtttcttgacctgtaaaacagggatacyaataatagaacttatctcagggggttatttggaattagaggaaatacatgccatgtgttttccacagtgcttgacacatagaacctgccagtaaatgtt

SEQ ID NO: 274719 - DNA, 571 bp, Homo sapiens
gtccctgactgactaggaggaacagagctgcctgctatctggaacaacttcctcccagactaagtgagaaataaacttctgttttctatatgctactgtgtttgggggcctttgtgttatagaagttttgctgtcatcctttccaattcaccttctcacaccagatatttcaaattaaraagattatatcaggccaggtgccatggctcatgcctgtaatcccagcactgtgtggggctgaggcaggtggatcacttgaggccaggagttcgagaccagtctggccaacatggtaaaaccccatctctactaaaaaatacaaaaattagctggacacagtggcacactcctgtaatcccagctacttgggaggctgagacaggagaattgcttgaacccaggaggcggaggttgcagtgacccgagatcatgccactgtgcaccagtctgggctacaaaatgagattctgtctcaaaataaaaaactgattacatcagatcacggaataactataataatatttattgggccagatagtatgcaaaggactctatgcacattatttagtgt

SEQ ID NO: 274720 - DNA, 571 bp, Homo sapiens
gtccctgactgactaggaggaacagagctgcctgctatctggaacaacttcctcccagactaagtgagaaataaacttctgttttctatatgctactgtgtttgggggcctttgtgttatagaagttttgctgtcatcctttccaattcaccttctcacaccagatatttcaaattaagaagattatatcaggccaggtgcsatggctcatgcctgtaatcccagcactgtgtggggctgaggcaggtggatcacttgaggccaggagttcgagaccagtctggccaacatggtaaaaccccatctctactaaaaaatacaaaaattagctggacacagtggcacactcctgtaatcccagctacttgggaggctgagacaggagaattgcttgaacccaggaggcggaggttgcagtgacccgagatcatgccactgtgcaccagtctgggctacaaaatgagattctgtctcaaaataaaaaactgattacatcagatcacggaataactataataatatttattgggccagatagtatgcaaaggactctatgcacattatttagtgt

SEQ ID NO: 274721 - DNA, 571 bp, Homo sapiens
gtccctgactgactaggaggaacagagctgcctgctatctggaacaacttcctcccagactaagtgagaaataaacttctgttttctatatgctactgtgtttgggggcctttgtgttatagaagttttgctgtcatcctttccaattcaccttctcacaccagatatttcaaattaagaagattatatcaggccaggtgccatggctcatgcctgtaatcccagcactgtgtggggctgaggcaggtggatcacttgaggccaggagttcgagaccagtctggccaacatggtaaaaccccatctctactaaaaaatacaaaaattagctggacacagtggcacactcctgtaatcccagctacttgggaggctgagacagragaattgcttgaacccaggaggcggaggttgcagtgacccgagatcatgccactgtgcaccagtctgggctacaaaatgagattctgtctcaaaataaaaaactgattacatcagatcacggaataactataataatatttattgggccagatagtatgcaaaggactctatgcacattatttagtgt

SEQ ID NO: 274722 - DNA, 571 bp, Homo sapiens
gtccctgactgactaggaggaacagagctgcctgctatctggaacaacttcctcccagactaagtgagaaataaacttctgttttctatatgctactgtgtttgggggcctttgtgttatagaagttttgctgtcatcctttccaattcaccttctcacaccagatatttcaaattaagaagattatatcaggccaggtgccatggctcatgcctgtaatcccagcactgtgtggggctgaggcaggtggatcacttgaggccaggagttcgagaccagtctggccaacatggtaaaaccccatctctactaaaaaatacaaaaattagctggacacagtggcacactcctgtaatcccagctacttgggaggctgagacaggagaattgcttgaacccaggaggyggaggttgcagtgacccgagatcatgccactgtgcaccagtctgggctacaaaatgagattctgtctcaaaataaaaaactgattacatcagatcacggaataactataataatatttattgggccagatagtatgcaaaggactctatgcacattatttagtgt

SEQ ID NO: 274723 - DNA, 545 bp, Homo sapiens
ccctcctgcccaaaggcaaagcagccacagtggaagtgcytgagtcctccctcacagccttctgtctagtggttattcccgcttcaaggctaaggaagggaaggacccgttttgccttcaaaggctttttccttccagcccttgctgtgcagcccgttgtgtgtgggaggaaccatgagaggcctggatattgtcaacaaaagacttgaacaagccaaagagctgattatgttgacaagaaggggaccttaacaaggcagataatcaaaagttgatgactgacagcctctttcgcatcccttcaccctctactaaatcaggtctcttacatgatcttgatgacaaataataaaaattataaacacattacagttttcacatgcatttgttcacttctcacagcaaatatgagatttatctaaggctgagcagcttattacagaaaaaagtttatgggactagaaccttaattttatgtaacaaaatttatatagagcttaccatggatcatgtactctcctaaatagttcaaaactttcattttt

SEQ ID NO: 274724 - DNA, 545 bp, Homo sapiens
ccctcctgcccaaaggcaaagcagccacagtggaagtgcctgagtcctccctcacagccttctgtctagtggttattcccgcttcaaggctaaggaagggaaggacccgttttgccttcaaaggctttttccttccagcccttgctgtgcagcccgttgtgtgtgggaggaaccatgagaggcctggatattgtcaacaaaagacttgaacaagccaaagagctgattatgttgacaagaaggggaccttaacaaggcagataatcaaaagttgatgactgacagccyctttcgcatcccttcaccctctactaaatcaggtctcttacatgatcttgatgacaaataataaaaattataaacacattacagttttcacatgcatttgttcacttctcacagcaaatatgagatttatctaaggctgagcagcttattacagaaaaaagtttatgggactagaaccttaattttatgtaacaaaatttatatagagcttaccatggatcatgtactctcctaaatagttcaaaactttcattttt

SEQ ID NO: 274725 - DNA, 526 bp, Homo sapiens
ggctcccggtctagagaggggaggaggaagggagatccacagtgatttgtatcatatgctgaggaaagagagtcatttactatcaycgtttgacatcctcacccccagtgcagtccttctctttgtctctccatgctgggagtgggcagtccctgctctgctgcccttcagacacagccctcttccctcaagctgccctctgcctggatcccaccttccttgtgagctggagtatttgcttgtgggagtcttgactctccttccctgtcagtcactgtttggctgcaggcagtgacagtggtggcaataaagcagcagagaggaggctttggtatcaagcagggactcacgggtgggatgggacggggatggttttatgtttgccccactgtgttctctgtgctgctctgcccagggaggctgacctctgcagactgtgtcacatgggccccctgatctctcggccaatagagttcccggctgagaagggggagagaggagtcagggtatttgtttcctccattcc

SEQ ID NO: 274726 - DNA, 526 bp, Homo sapiens
ggctcccggtctagagaggggaggaggaagggagatccacagtgatttgtatcatatgctgaggaaagagagtcatttactatcatcgtttgacatcctcacccccagtgcrgtccttctctttgtctctccatgctgggagtgggcagtccctgctctgctgcccttcagacacagccctcttccctcaagctgccctctgcctggatcccaccttccttgtgagctggagtatttgcttgtgggagtcttgactctccttccctgtcagtcactgtttggctgcaggcagtgacagtggtggcaataaagcagcagagaggaggctttggtatcaagcagggactcacgggtgggatgggacggggatggttttatgtttgccccactgtgttctctgtgctgctctgcccagggaggctgacctctgcagactgtgtcacatgggccccctgatctctcggccaatagagttcccggctgagaagggggagagaggagtcagggtatttgtttcctccattcc

SEQ ID NO: 274727 - DNA, 601 bp, Homo sapiens
aaggaaacagccactgctggggacctaccctgtgctggtcactgacaagctgtctcattaaaccttcccagaccctcaacccctcctagtatcttatcctcattttayagatgagaagactgtggcccagagaggtaaagatctggggagcaggatgggagcttcactttgtctcagttgctctggcaaagagaagcctcaccttgtgatcaagggattgggagggtgacagataaattttggcttaagtgtcagcatagcactgggaatctggagctagatggcactggcttgactccttggatctgcctcttactggctgtgtgatactgggcatgcctctgtttccccatctataaaaatggggctaatgataacaacacctgccttacaggttgtgtagaaggttgaatttgtagttgtgaggtgcccaggaacagtgctggcacacagtgagcgccatacacaagtgttaaagaatggagcctcctgctctctccttattttccaccccctgccctcttctcattgcccacctcccctgccttctcctcaccatcctgaaaaagggtgaacagccacccaggagcccctgaacggg

SEQ ID NO: 274728 - DNA, 586 bp, Homo sapiens
aaattttggcttaagtgtcagcatagcactgggaatctggagctagatggcactggcttgactccttggatctgcctcttactggctgtgtgatactgggcatgcctctgtttccccatctataaaaatggggctaawgataacaacacctgccttacaggttgtgtagaaggttgaatttgtagttgtgaggtgcccaggaacagtgctggcacacagtgagcgccatacacaagtgttaaagaatggagcctcctgctctctccttattttccaccccctgccctcttctcattgcccacctcccctgccttctcctcaccatcctgaaaaagggtgaacagccacccaggagcccctgaacgggcatgttggtcccaggccctttgtgagcatgcttttccctgccctgccccctgtcatcaccattctggatggagcagcaaggacggagacacttagttgggctgtccactccaggtccaatgccagtgggatcagctttgatgggatgcacacagactgacctcttctccccagccccttcaacttcccagagctgcagggggcctgggagttcttggta

SEQ ID NO: 274729 - DNA, 601 bp, Homo sapiens
aaggaaacagccactgctggggacctaccctgtgctggtcactgacaagctgtctcattaaaccttcccagaccctcaacccctcctagtatcttatcctcattttacagatgagaagactgtggcccagagaggtaaagatctggggagcaggatgggagcttcactttgtctcagttgctctggcaaagagaagcctcaccttgtgatcaagggattgggagggtgacagataaattttggcttaagtgtcagcatagcactgggaatctggagctagatggcactggcttgactccttggatctgcctcttactggctgtgtgatactgggcatgcctctgtttccccatctataaaaatggggctaatgataayaacacctgccttacaggttgtgtagaaggttgaatttgtagttgtgaggtgcccaggaacagtgctggcacacagtgagcgccatacacaagtgttaaagaatggagcctcctgctctctccttattttccaccccctgccctcttctcattgcccacctcccctgccttctcctcaccatcctgaaaaagggtgaacagccacccaggagcccctgaacggg

SEQ ID NO: 274730 - DNA, 601 bp, Homo sapiens
aaggaaacagccactgctggggacctaccctgtgctggtcactgacaagctgtctcattaaaccttcccagaccctcaacccctcctagtatcttatcctcattttacagatgagaagactgtggcccagagaggtaaagatctggggagcaggatgggagcttcactttgtctcagttgctctggcaaagagaagcctcaccttgtgatcaagggattgggagggtgacagataaattttggcttaagtgtcagcatagcactgggaatctggagctagatggcactggcttgactccttggatctgcctcttactggctgtgtgatactgggcatgcctctgtttccccatctataaaaatggggctaatgataacaacacctgccttacaggttgtgtagaaggttgaatttgtagttgtgaggtgcccaggaacagtgctggcacacagtgagcgccatacacaagtgttamagaatggagcctcctgctctctccttattttccaccccctgccctcttctcattgcccacctcccctgccttctcctcaccatcctgaaaaagggtgaacagccacccaggagcccctgaacggg

SEQ ID NO: 274731 - DNA, 586 bp, Homo sapiens
aaattttggcttaagtgtcagcatagcactgggaatctggagctagatggcactggcttgactccttggatctgcctcttactggctgtgtgatactgggcatgcctctgtttccccatctataaaaatggggctaatgataacaacacctgccttacaggttgtgtagaaggttgaatttgtagttgtgaggtgcccaggaacagtgctggcacacagtgagcgccatacacaagtgttaaagaatggagcctcctgctctctccttattttccaccccctgccctcttctcattgcccacctcycctgccttctcctcaccatcctgaaaaagggtgaacagccacccaggagcccctgaacgggcatgttggtcccaggccctttgtgagcatgcttttccctgccctgccccctgtcatcaccattctggatggagcagcaaggacggagacacttagttgggctgtccactccaggtccaatgccagtgggatcagctttgatgggatgcacacagactgacctcttctccccagccccttcaacttcccagagctgcagggggcctgggagttcttggta

SEQ ID NO: 274732 - DNA, 586 bp, Homo sapiens
aaattttggcttaagtgtcagcatagcactgggaatctggagctagatggcactggcttgactccttggatctgcctcttactggctgtgtgatactgggcatgcctctgtttccccatctataaaaatggggctaatgataacaacacctgccttacaggttgtgtagaaggttgaatttgtagttgtgaggtgcccaggaacagtgctggcacacagtgagcgccatacacaagtgttaaagaatggagcctcctgctctctccttattttccaccccctgccctcttctcattgcccacctcccctgccttctcctcaccatcctgaaaaagggtgaacagccacccaggagcccctgaacgggcatgttggtcccaggccctttgtgagcatgcttttccctgccctgccccctgtcatcaccattctggatggagcagcaaggacrgagacacttagttgggctgtccactccaggtccaatgccagtgggatcagctttgatgggatgcacacagactgacctcttctccccagccccttcaacttcccagagctgcagggggcctgggagttcttggta

SEQ ID NO: 274733 - DNA, 592 bp, Homo sapiens
gaaaaacatgactttaaaattttgatgaatggagaaatctctttccattcaccttcctttcctctatttcattcttattttaaaatatgcaaacaaaggtatggatacatcaattattaaataaacatctgtgtgatatctatccaggtgaagaaatagagcactatcaccaccgagaagtcctctgtatgcccctaactgatcctaaagtcttccttccccttattagtaacagatataacagatatccacattacctgtggatatctgccatcstctccttggttctctttataattttattatgtattttatatatttttttctgttttggagatggagccttactctgttgcccaggctggagtgtagtggcatgatcttgactcactgcaacctccgcctcccagattcaagcgattctcatgactcaacgtcccaagtagctgggattacaggcatgggccatgtgcctccatgcctggataatttttgtatttgtagtagagatggggttttgcatgttggtcaggctggtttagaactcctgagctcaatgcctggccttattatgcattttttatatgcctaa

SEQ ID NO: 274734 - DNA, 592 bp, Homo sapiens
gaaaaacatgactttaaaattttgatgaatggagaaatctctttccattcaccttcctttcctctatttcattcttattttaaaatatgcaaacaaaggtatggatacatcaattattaaataaacatctgtgtgatatctatccaggtgaagaaatagagcactatcaccaccgagaagtcctctgtatgcccctaactgatcctaaagtcttccttccccttattagtaacagatataacagatatccacattacctgtggatatctgccatcctctccttggttctctttataattttattatgtattttatatatttttttctgttttggagatggagccttactctgttgcccaggctggagtgtagtggcawgatcttgactcactgcaacctccgcctcccagattcaagcgattctcatgactcaacgtcccaagtagctgggattacaggcatgggccatgtgcctccatgcctggataatttttgtatttgtagtagagatggggttttgcatgttggtcaggctggtttagaactcctgagctcaatgcctggccttattatgcattttttatatgcctaa

SEQ ID NO: 274735 - DNA, 592 bp, Homo sapiens
gaaaaacatgactttaaaattttgatgaatggagaaatctctttccattcaccttcctttcctctatttcattcttattttaaaatatgcaaacaaaggtatggatacatcaattattaaataaacatctgtgtgatatctatccaggtgaagaaatagagcactatcaccaccgagaagtcctctgtatgcccctaactgatcctaaagtcttccttccccttattagtaacagatataacagatatccacattacctgtggatatctgccatcctctccttggttctctttataattttattatgtattttatatatttttttctgttttggagatggagccttactctgttgcccaggctggagtgtagtggcatgatcttgactcactgcaacctccgcctcccagattcaagcgattctsatgactcaacgtcccaagtagctgggattacaggcatgggccatgtgcctccatgcctggataatttttgtatttgtagtagagatggggttttgcatgttggtcaggctggtttagaactcctgagctcaatgcctggccttattatgcattttttatatgcctaa

SEQ ID NO: 274736 - DNA, 592 bp, Homo sapiens
gggccaatcttatctggatacccttgccttcccactttccttgagtcacctttcttaagtccttcacacaatgttcttttcctccmattttccttcctccaagatactttctcagattacctacagcctcagtcctggattcagatactctttcagataatcttttatttttttatttttatttttattttttatttttcttgagacagaggctccctctgtcacccaggtggaagtgcagtggcagtcttggatcactgccacctgtgtctcccaggttcaagtgattctcctgcctcagcctccagagtagctgggattacaggcttgtgccaccatgcccagctaatttttgtatttttagtagagacgaggtttcatcacattggccaggctggtctcgaactcccgacctcaaatgatctgcccccctcagcctcccaaagtggtgggattacaggcatgagccactgtgactggcctatccagcaatatttactgagtatctactatgcactgggcacaggttgccaagaattcatgaataaatggaacaggcataatccctgaactcaaggaccatacatttcag

SEQ ID NO: 274737 - DNA, 592 bp, Homo sapiens
gggccaatcttatctggatacccttgccttcccactttccttgagtcacctttcttaagtccttcacacaatgttcttttcctccaattttccttcctccaagatactttctcagattacctacagcctcagtcctggattcagatactctttcagataatcttttatttttttatttttatttttattttttatttttcttgagacagaggctccctctgtcacccaggtggaagtgcagtggcagtcttggatcactgccacctgtgtctcccaggttcaagtgattctcctgcctcagcctccagagtagctgggattacaggcttgtgccaccatgcccagctaatttttgtatttttagtagagacgaggtttcatcacattggccaggctggtctcgarctcccgacctcaaatgatctgcccccctcagcctcccaaagtggtgggattacaggcatgagccactgtgactggcctatccagcaatatttactgagtatctactatgcactgggcacaggttgccaagaattcatgaataaatggaacaggcataatccctgaactcaaggaccatacatttcag

SEQ ID NO: 274738 - DNA, 592 bp, Homo sapiens
gggccaatcttatctggatacccttgccttcccactttccttgagtcacctttcttaagtccttcacacaatgttcttttcctccaattttccttcctccaagatactttctcagattacctacagcctcagtcctggattcagatactctttcagataatcttttatttttttatttttatttttattttttatttttcttgagacagaggctccctctgtcacccaggtggaagtgcagtggcagtcttggatcactgccacctgtgtctcccaggttcaagtgattctcctgcctcagcctccagagtagctgggattacaggcttgtgccaccatgcccagctaatttttgtatttttagtagagacgaggtttcatcacattggccaggctggtctcgaactccygacctcaaatgatctgcccccctcagcctcccaaagtggtgggattacaggcatgagccactgtgactggcctatccagcaatatttactgagtatctactatgcactgggcacaggttgccaagaattcatgaataaatggaacaggcataatccctgaactcaaggaccatacatttcag

SEQ ID NO: 274739 - DNA, 381 bp, Homo sapiens
cccattctgggaacatcctgaagccagtcattgtgggagagagacatgayccccaacccagcctcacagaccccacccttcttccacgctttgccctaccctccttccgtgtgcttgtatcctaaccttaagccctagagacttctaggtacccagagagcagcctattcagtgatgtttactgagcgcatgttatgtgccttgcactgggcctggagcaagggctaaggagtgaaattagacctgatccctgtcctgaagatgtcacagctgagtaggcagaaagactttaaacagataatggcaacacgatgtgctaaggaacatcaatgtacaagataacaggtagtctgtatttatgggagagggaggcataaaaga

SEQ ID NO: 274740 - DNA, 381 bp, Homo sapiens
cccattctgggaacatcctgaagccagtcattgtgggagagagacatgatccccaacccagcctcacagaccccacccttcttccaygctttgccctaccctccttccgtgtgcttgtatcctaaccttaagccctagagacttctaggtacccagagagcagcctattcagtgatgtttactgagcgcatgttatgtgccttgcactgggcctggagcaagggctaaggagtgaaattagacctgatccctgtcctgaagatgtcacagctgagtaggcagaaagactttaaacagataatggcaacacgatgtgctaaggaacatcaatgtacaagataacaggtagtctgtatttatgggagagggaggcataaaaga

SEQ ID NO: 274741 - DNA, 381 bp, Homo sapiens
cccattctgggaacatcctgaagccagtcattgtgggagagagacatgatccccaacccagcctcacagaccccacccttcttccacgctttgccctaccctccttccgtgtgcttgtatcctaaccttaagccctagagacttctaggtwcccagagagcagcctattcagtgatgtttactgagcgcatgttatgtgccttgcactgggcctggagcaagggctaaggagtgaaattagacctgatccctgtcctgaagatgtcacagctgagtaggcagaaagactttaaacagataatggcaacacgatgtgctaaggaacatcaatgtacaagataacaggtagtctgtatttatgggagagggaggcataaaaga

SEQ ID NO: 274742 - DNA, 381 bp, Homo sapiens
cccattctgggaacatcctgaagccagtcattgtgggagagagacatgatccccaacccagcctcacagaccccacccttcttccacgctttgccctaccctccttccgtgtgcttgtatcctaaccttaagccctagagacttctaggtacccagagagcagcctattcagtgatgtttactgagcgcatgttatgtgccttgcactgggcctggagcaagggctaaggagtgaaattagacctgatccctgtcctgaagatgtcacagctgagtaggcagaaagactttaaacarataatggcaacacgatgtgctaaggaacatcaatgtacaagataacaggtagtctgtatttatgggagagggaggcataaaaga

SEQ ID NO: 274743 - DNA, 580 bp, Homo sapiens
acgctcccccgcgttgattcccggtcccctcccacctcatcctgtggctccttgtttcgggacgcagttgtgcttctgtgaccccgcggctcctgttctgggacgtctgctttctccatcactccctggcttcccgggcgggccccatcctcctgagcggagsggagcagcgcgcacagaagcgccactgttctgccttggcagggcctggcccgacagcttgtgcctgcgcagcagacccatccgtcaggcgggaaggatggagcgacgtccggctgcccgctctgaggactccccagggagacacatctggccttggcccagactcctctcttcccttctcccaacccgccaacccttcccccaaataccagctcagtatatacttctgtctctcctcctttccttgcttctcctcctccctcccatacacatgcagcctggggcctggggcccaggagagctactcctctcatgggtcacactgagaagtccttcctccacctgcatccacatggcagggcataactctaaagcttaaaaagatccagcgatctcagtggaccacaatccaaagcta

SEQ ID NO: 274744 - DNA, 519 bp, Homo sapiens
aggttgacacaagcttgtgaaagacccagtatgccaggctaagggggtgggaacagtgagggacactgagggttttatggcttaaattttgacaagtgtatctacatatagacaactaatgtaacactcctttttttttttttttttttttttttagagatggagtctcactctgtcgcccaggctagagtgcagtggtgagatcttggctcactgcmacctgcgcttcctgggttcaagtgattctcctgccttagcctcctgagtggctgggactacagactgatcccaccacatctggctaatgttttgtatttttggtggagacagggcttcgccatgttggccaggccggtctcgaactcctgagctcaagtgatccacctgcctcagcctcccaaagtgctgggattacaggcaacactttttttaattttcttttttgagacagagtcttgctttatcatccaggttagagtgaagtggctcagtcatagctcactgcagccttgacctccc

SEQ ID NO: 274745 - DNA, 519 bp, Homo sapiens
aggttgacacaagcttgtgaaagacccagtatgccaggctaagggggtgggaacagtgagggacactgagggttttatggcttaaattttgacaagtgtatctacatatagacaactaatgtaacactcctttttttttttttttttttttttttagagatggagtctcactctgtcgcccaggctagagtgcagtggtgagatcttggctcactgcaacctgcgcttcctgggttcaagtgattctcctgccttagcctcctgagtggctgggactacagactgatcccaccacatctggctaatkttttgtatttttggtggagacagggcttcgccatgttggccaggccggtctcgaactcctgagctcaagtgatccacctgcctcagcctcccaaagtgctgggattacaggcaacactttttttaattttcttttttgagacagagtcttgctttatcatccaggttagagtgaagtggctcagtcatagctcactgcagccttgacctccc

SEQ ID NO: 274746 - DNA, 519 bp, Homo sapiens
aggttgacacaagcttgtgaaagacccagtatgccaggctaagggggtgggaacagtgagggacactgagggttttatggcttaaattttgacaagtgtatctacatatagacaactaatgtaacactcctttttttttttttttttttttttttagagatggagtctcactctgtcgcccaggctagagtgcagtggtgagatcttggctcactgcaacctgcgcttcctgggttcaagtgattctcctgccttagcctcctgagtggctgggactacagactgatcccaccacatctggctaatgttttgtatttttggtggagacagggcttcgccatgttggccaggccggtctygaactcctgagctcaagtgatccacctgcctcagcctcccaaagtgctgggattacaggcaacactttttttaattttcttttttgagacagagtcttgctttatcatccaggttagagtgaagtggctcagtcatagctcactgcagccttgacctccc

SEQ ID NO: 274747 - DNA, 600 bp, Homo sapiens
cagcacaccaattatattctgtccatctaagtgataaaagagtacgtaggaggcattcaatagataaattagatatcactcccaattatgtcctttattttatggagtcatatgctccccttagaactttttttcttcatttggcttgtaaaggggaattacttgacccccctaaagactgggactgcctcccctgcctgtcccaacttgggttctaccctgatcccttccgacaggctcatagtctttcacctgggctttctctgggactcacctaggagttccccagtgtggtasgtccacaggtgtaaagggagggaggcagaagtgcttcaccatttgggaaggagttgggtcaggcctttgggaaggactaggaagtctgacaatgcctttaatgtgacactgcccaaataaatgagaccgggagaggggctggaaaatgggtaaaaatcctccagtccagacaacagagccttcaaattaggacaactagtaattggctatggctggggaggaagaggatggtaaaaaggttttcagtccttaagaagtgaattcatccatccctctacctccactccagactgggtggggcca

SEQ ID NO: 274748 - DNA, 600 bp, Homo sapiens
cagcacaccaattatattctgtccatctaagtgataaaagagtacgtaggaggcattcaatagataaattagatatcactcccaattatgtcctttattttatggagtcatatgctccccttagaactttttttcttcatttggcttgtaaaggggaattacttgacccccctaaagactgggactgcctcccctgcctgtcccaacttgggttctaccctgatcccttccgacaggctcatagtctttcacctgggctttctctgggactcacctaggagttccccagtgtggtaggtccacaggtgtaaagggarggaggcagaagtgcttcaccatttgggaaggagttgggtcaggcctttgggaaggactaggaagtctgacaatgcctttaatgtgacactgcccaaataaatgagaccgggagaggggctggaaaatgggtaaaaatcctccagtccagacaacagagccttcaaattaggacaactagtaattggctatggctggggaggaagaggatggtaaaaaggttttcagtccttaagaagtgaattcatccatccctctacctccactccagactgggtggggcca

SEQ ID NO: 274749 - DNA, 600 bp, Homo sapiens
cagcacaccaattatattctgtccatctaagtgataaaagagtacgtaggaggcattcaatagataaattagatatcactcccaattatgtcctttattttatggagtcatatgctccccttagaactttttttcttcatttggcttgtaaaggggaattacttgacccccctaaagactgggactgcctcccctgcctgtcccaacttgggttctaccctgatcccttccgacaggctcatagtctttcacctgggctttctctgggactcacctaggagttccccagtgtggtaggtccacaggtgtaaagggagggaggcagargtgcttcaccatttgggaaggagttgggtcaggcctttgggaaggactaggaagtctgacaatgcctttaatgtgacactgcccaaataaatgagaccgggagaggggctggaaaatgggtaaaaatcctccagtccagacaacagagccttcaaattaggacaactagtaattggctatggctggggaggaagaggatggtaaaaaggttttcagtccttaagaagtgaattcatccatccctctacctccactccagactgggtggggcca

SEQ ID NO: 274750 - DNA, 532 bp, Homo sapiens
ggagggaggcagaagtgcttcaccatttgggaaggagttgggtcaggcctttgggaaggactaggaagtctgacaatgcctttaatgtgacactgcccaaataaatgagaccgggagaggggctggaaaatgggtaaaaatcctccagtccagacaacagagccttcaaattaggacaactagtaattggctatggctggggaggaagaggatggtaaaaaggttttcagtccttaagaagtgaattcatccatccctctacctccactccagactgggtggggccaattcaagcccttcctcggaagaactcccagaatcttctacatccccattctgatccatatcagatgacttcctcagctcaagtcctagctctgccactgtggtagggacataataccagctttcctgggggaggcasagggctcctgtttgagaaaaagcccgaagaatggttcatttccaagaagagagctcacctgaggcagggaagtgcctggccaaggaatagaggtacagtgaaggcata

SEQ ID NO: 274751 - DNA, 532 bp, Homo sapiens
ggagggaggcagaagtgcttcaccatttgggaaggagttgggtcaggcctttgggaaggactaggaagtctgacaatgcctttaatgtgacactgcccaaataaatgagaccgggagaggggctggaaaatgggtaaaaatcctccagtccagacaacagagccttcaaattaggacaactagtaattggctatggctggggaggaagaggatggtaaaaaggttttcagtccttaagaagtgaattcatccatccctctacctccactccagactgggtggggccaattcaagcccttcctcggaagaactcccagaatcttctacatccccattctgatccatatcagatgacttcctcagctcaagtcctagctctgccactgtggtagggacataataccagctttcctgggggaggcagagggctcctgtttgagaaaaagcccsaagaatggttcatttccaagaagagagctcacctgaggcagggaagtgcctggccaaggaatagaggtacagtgaaggcata

SEQ ID NO: 274752 - DNA, 391 bp, Homo sapiens
tgtgccaccacacccagctaattttttgtatttagtaaagatggggtttcaccacgtttgtcaggctggtcttgaactcctgacctcaggtgatccacctgcctcagcctcctaaaatgctgggattacaggcatgcacccctgcaccctaatatttcctatgtgcaatggtgtagccagggtgcaaagccagttcttaatgattctgtcatccaaatattataccttctcrattccccttgagatatgctcattcctccatacaattaaacaatctcaattactcttgaaggagcataaaatcctccctgtctaatcatgggtctttccaaattatttgttggcttgtgtttaaaatataaaaaagagaatgtagattttgttttcttct

SEQ ID NO: 274753 - DNA, 500 bp, Homo sapiens
aaattacgtaaattacctaaagctatccagttaataagtgacagaacagagctcttgtttaaacactgggcccttgactccaaagcctgcagttcccagcacccccagggtcaccaaaacctggcctctcctgggggaggtcagggctgaggccaacaagcccaagtcacaccctttaccacctgggacctgattttctccaggtgagcaatgttttcttaaaagaacaggaggacagtaaataattaaccaagacagtttctccctccctgaagccaaggtagaacctcccmcctacagccaaccgccactctcctcactgctgtttcctctgtgctcaagtttgtggccattaaatagaagaggagaaagtttgagccaggcatgaaatatttatcagttaattacaatatgcagattctgttcctaggggtgatttatctttttggaaatataggaaaagatcctggaaacttgtatcctaatcgcttggcctatta

SEQ ID NO: 274754 - DNA, 500 bp, Homo sapiens
aaattacgtaaattacctaaagctatccagttaataagtgacagaacagagctcttgtttaaacactgggcccttgactccaaagcctgcagttcccagcacccccagggtcaccaaaacctggcctctcctgggggaggtcagggctgaggccaacaagcccaagtcacaccctttaccacctgggacctgattttctccaggtgagcaatgttttcttaaaagaacaggaggacagtaaataattaaccaagacagtttctccctccctgaagccaaggtagaacctccccmctacagccaaccgccactctcctcactgctgtttcctctgtgctcaagtttgtggccattaaatagaagaggagaaagtttgagccaggcatgaaatatttatcagttaattacaatatgcagattctgttcctaggggtgatttatctttttggaaatataggaaaagatcctggaaacttgtatcctaatcgcttggcctatta

SEQ ID NO: 274755 - DNA, 500 bp, Homo sapiens
aaattacgtaaattacctaaagctatccagttaataagtgacagaacagagctcttgtttaaacactgggcccttgactccaaagcctgcagttcccagcacccccagggtcaccaaaacctggcctctcctgggggaggtcagggctgaggccaacaagcccaagtcacaccctttaccacctgggacctgattttctccaggtgagcaatgttttcttaaaagaacaggaggacagtaaataattaaccaagacagtttctccctccctgaagccaaggtagaacctcccccctacagccaaccsccactctcctcactgctgtttcctctgtgctcaagtttgtggccattaaatagaagaggagaaagtttgagccaggcatgaaatatttatcagttaattacaatatgcagattctgttcctaggggtgatttatctttttggaaatataggaaaagatcctggaaacttgtatcctaatcgcttggcctatta

SEQ ID NO: 274756 - DNA, 576 bp, Homo sapiens
gcacatgcctgtaatcccagctactcaggaggctgaggcaggagtatcacttcaaccctggagtgatatagtgattatatataatatataactatatagtgattatagtttataattttaactatatcatgtctcctgcctcataagtrccactggacaagttcccttttatgaactcagctgctgtcagaggtaaatgtattttgaagtggagaacaaagataagtgcaaaattggcatggagaactaaggtaattatgaaagttccagatacaaagagagagggctcaatatgccagcagttctcttccaatccatcctagtggccttctgttaggattgcctaaataatggaggagatgggtgcaagacacacaagtgttccagaagcatgtaaacaaggtacagagaagaggataagataaaataagatgagataagaatattaggaatgccttgttcagaagattgcctacagaggcaaaagggacagtttcattttgctgagggaaacagggtggtaagaaccctcctggggaagatccccacttaccctgatacagaaagaaggtgtaa

SEQ ID NO: 274757 - DNA, 576 bp, Homo sapiens
gcacatgcctgtaatcccagctactcaggaggctgaggcaggagtatcacttcaaccctggagtgatatagtgattatatataatatataactatatagtgattatagtttataattttaactatatcatgtctcctgcctcataagtaccactggacaagktcccttttatgaactcagctgctgtcagaggtaaatgtattttgaagtggagaacaaagataagtgcaaaattggcatggagaactaaggtaattatgaaagttccagatacaaagagagagggctcaatatgccagcagttctcttccaatccatcctagtggccttctgttaggattgcctaaataatggaggagatgggtgcaagacacacaagtgttccagaagcatgtaaacaaggtacagagaagaggataagataaaataagatgagataagaatattaggaatgccttgttcagaagattgcctacagaggcaaaagggacagtttcattttgctgagggaaacagggtggtaagaaccctcctggggaagatccccacttaccctgatacagaaagaaggtgtaa

SEQ ID NO: 274758 - DNA, 576 bp, Homo sapiens
gcacatgcctgtaatcccagctactcaggaggctgaggcaggagtatcacttcaaccctggagtgatatagtgattatatataatatataactatatagtgattatagtttataattttaactatatcatgtctcctgcctcataagtaccactggacaagttcccttttatgaactcagctgctgtcagaggtaaatgtattttgaagtggagaacaaagataagtgcaaaattggcatggagaactaaggtaattatgaaagttccagatacaaagagagagggctcaatatgccagcagttctcttccaatccatcctagyggccttctgttaggattgcctaaataatggaggagatgggtgcaagacacacaagtgttccagaagcatgtaaacaaggtacagagaagaggataagataaaataagatgagataagaatattaggaatgccttgttcagaagattgcctacagaggcaaaagggacagtttcattttgctgagggaaacagggtggtaagaaccctcctggggaagatccccacttaccctgatacagaaagaaggtgtaa

SEQ ID NO: 274759 - DNA, 576 bp, Homo sapiens
gcacatgcctgtaatcccagctactcaggaggctgaggcaggagtatcacttcaaccctggagtgatatagtgattatatataatatataactatatagtgattatagtttataattttaactatatcatgtctcctgcctcataagtaccactggacaagttcccttttatgaactcagctgctgtcagaggtaaatgtattttgaagtggagaacaaagataagtgcaaaattggcatggagaactaaggtaattatgaaagttccagatacaaagagagagggctcaatatgccagcagttctcttccaatccatcctagtggccttctgttaggattgcctaaataatgsaggagatgggtgcaagacacacaagtgttccagaagcatgtaaacaaggtacagagaagaggataagataaaataagatgagataagaatattaggaatgccttgttcagaagattgcctacagaggcaaaagggacagtttcattttgctgagggaaacagggtggtaagaaccctcctggggaagatccccacttaccctgatacagaaagaaggtgtaa

SEQ ID NO: 274760 - DNA, 504 bp, Homo sapiens
gctctcctgtgggacaaagagttcctctggggctcttgttctcggctgcagtgtactcatcttgatcctagaaaagaggccactcaggatggggatgagatttcagttgctccgggagcgacgcatctcctcacgtgggccaggctttcaggcacccaaagcggatccgccgcggcgaaaacgattgacagccggcctcatgacccaggtrgagacgcagaaagaggctcaccaaagacaggccgccatgcgacaaaccgctttgtggcgcacagggcacattcggccaaagacacacacgcacacgggcatacacacacaaacccacagagagagggaaagaaacacacagagactgagagacagagagagaagagagactgggagacacacacacagacacacacacacacactcacacacacacacacacacacacagagacacacacacagcgtcatacagcagaggcattgaaacacacaccaccaggcaacccctgag

SEQ ID NO: 274761 - DNA, 548 bp, Homo sapiens
ccaacatggatgcatgggcagggcctggtccatggagcagctggcatcaataaatggaagccccttcccatcttgtctttgcgtgcaccacaaaatcyggaatatgtgggtataaaaagtactcttaaaagagacataattggaaacttttgcaaaaagagattggaaaggtgtcacatcttgtggcatgaggagctgtgggcatacacttgaactttgtgctgtgagatatccacagaacttcagtagctgaagagaacagtttagatgtcatcttattcatctaccatagaacttcctcttcttctctgagatttctagacaataacttttacagctctaataatgcagttgtctcacaattgtttggactattctaatagatacaaagcagtatttcaccagcagatgctactgcagtttgtatgatgatttcaaactgagaatctatttaaagttatgcaatacttttttttggaaatagggtgaaagtagtttaagtttaaaatcctataaaataggtttacagtaaataattacttgttgca

SEQ ID NO: 274762 - DNA, 602 bp, Homo sapiens
gagacataattggaaacttttgcaaaaagagattggaaaggtgtcacatcttgtggcatgaggagctgtgggcatacacttgaactttgtgctgtgagatatccacagaacttcagtagctgaagagaacagtttagatgtcatcttattcatctaccatagaacttcctcttcttctctgagatttctagacaataacttttacagctctaataatgcagttgtctcacaattgtttggactattctaatagatacaaagcagtatttcaccagcagatgctactgcagtttgtatgatgatttcaaactgagaatctatttaaagttatgcaatacttttttttggaaatagggtgaaagtagtttaagtttaaaatcctataaaataggtttacagtaaataattacttgttgcaatatctatcatactatcttatattcacacatgtgttggtgtcctaatacatatgtatgagagtgaaagttacctgaggtcagasactgtgccatatgttccctgcaccactggtgcctatttcagcacatgatatacagtagatgctcaataaatactttcacttaaaaaatgcactgagaata

SEQ ID NO: 274763 - DNA, 444 bp, Homo sapiens
ttgtctcacaattgtttggactattctaatagatacaaagcagtatttcaccagcagatgctactgcagtttgtatgatgatttcaaactgagaatctatttaaagttatgcaatacttttttttggaaatagggtgaaagtagtttaagtttaaaatcctataaaataggtttacagtaaataattacttgttgcaatatctatcatactatcttatattcacacatgtgttggtgtcctaatacatatgtatgagagtgaaagttacctgaggtcagacactgtgccatatgttccctgcaccactggtgyctatttcagcacatgatatacagtagatgctcaataaatactttcacttaaaaaatgcactgagaataaatcttattagacatcaaaatacatatgagtacaatctagggacatggtcaggagctcaaaat

SEQ ID NO: 274764 - DNA, 528 bp, Homo sapiens
gtttaagtttaaaatcctataaaataggtttacagtaaataattacttgttgcaatatctatcatactatcttatattcacacatgtgttggtgtcctaatacatatgtatgagagtgaaagttacctgaggtcagacactgtgccatatgttccctgcaccactggtgcctatytcagcacatgatatacagtagatgctcaataaatactttcacttaaaaaatgcactgagaataaatcttattagacatcaaaatacatatgagtacaatctagggacatggtcaggagctcaaaattcaatcttatttattttttatttggagacagaatctcactctgttgcccaggctggagttcagtggcatgatctcagcttactgcaaccttcctctcctgggttcaagtgattctcctgcctcaccctccagagtagctgggattacaggtgcacaccaacacacctggctaatttttttgtatttttagtaggcacagggtttcaccatgttggccaggttggtct

SEQ ID NO: 274765 - DNA, 528 bp, Homo sapiens
gtttaagtttaaaatcctataaaataggtttacagtaaataattacttgttgcaatatctatcatactatcttatattcacacatgtgttggtgtcctaatacatatgtatgagagtgaaagttacctgaggtcagacactgtgccatatgttccctgcaccactggtgcctatttcagcacatgatatacagtagatgctcaataaatactttcacttaaaaaatgcactgagaataaatcttattagacatcaaaatacatatgagyacaatctagggacatggtcaggagctcaaaattcaatcttatttattttttatttggagacagaatctcactctgttgcccaggctggagttcagtggcatgatctcagcttactgcaaccttcctctcctgggttcaagtgattctcctgcctcaccctccagagtagctgggattacaggtgcacaccaacacacctggctaatttttttgtatttttagtaggcacagggtttcaccatgttggccaggttggtct

SEQ ID NO: 274766 - DNA, 484 bp, Homo sapiens
tgatctacataatattccttggtttttaaagataatacaaagtggattttagtaacaatcttgagtcaccacagaagctaatgaagttggggattccacaaagccatccaagcatataaagcccatttccttgggtcccttttccttagctcaaggccacaaaaaatcagaacgtaaattccagcccacatttgcattatgtctaaataattatgagttataaatgaagctaacaaatagttaaatatgttctattctcctatttcgataaatatactgccataataacccacaaggtcaaagttgagtgtagaattctctgatttcttggtgctctgcacaggaatgtggtagtaaagggagagctgatcatcagccccaggctaaacttttttctttcatcgtaggtagccctgtcctcacttgagaagctttgcawacccttgtgtggggaactccctaggccccatgcaagctccatcca

SEQ ID NO: 274767 - DNA, 479 bp, Homo sapiens
tgtgttggcttccctgtgaaagccgggcagagcaggggagacagcttgggaygggctgatttgtctgattctgggtttcggggctgtcccttgtggtctggttctgggcctgggttgacactgggcagggaaatattggctgggggtacggaagatgaaggaagtggtttggagcagggactctgggcagcaggggaggtgctaacagccctggtcaggaggttggccctgtcatcatgaccgcaagtactcaaacgcaggatctaaggaggcacagatcaaggacgaagccagcaggaaggtcagtggggatgagggggacttggggtctttcttcctctgcctccttccccttcccacaccggagggtaaattgtgttcttctgtgaaagtcacaagaaccctcagacacccagagagttcacacacaaacacaggaaaagacacaagtcgtatgaccatctcaacagatgcagcct

SEQ ID NO: 274768 - DNA, 479 bp, Homo sapiens
tgtgttggcttccctgtgaaagccgggcagagcaggggagacagcttgggacgggctgatttgtctgattctgggttycggggctgtcccttgtggtctggttctgggcctgggttgacactgggcagggaaatattggctgggggtacggaagatgaaggaagtggtttggagcagggactctgggcagcaggggaggtgctaacagccctggtcaggaggttggccctgtcatcatgaccgcaagtactcaaacgcaggatctaaggaggcacagatcaaggacgaagccagcaggaaggtcagtggggatgagggggacttggggtctttcttcctctgcctccttccccttcccacaccggagggtaaattgtgttcttctgtgaaagtcacaagaaccctcagacacccagagagttcacacacaaacacaggaaaagacacaagtcgtatgaccatctcaacagatgcagcct

SEQ ID NO: 274769 - DNA, 409 bp, Homo sapiens
atctacccactcatcatccatctgcctacccatccagccacccatccattcttcatctggatggacaaatcttcattgagcaccaattctgtgctgggcaacaggagacagagatgcaggaaacacaatctctgctctcagagaacatgctttccagggacaagaagacatggacagatggacagaagcaccaggtgaagatgctaggacatggctgatctgtggtccatatcctgttggggaaaactgggggcctggggacgttggtctaatgaagagaagacttggaggaactggcatatgctgctgagaatgtttggtgcccaccataatacctgggagggrggagggaggacagaggggtgaccacagtgaaaatgtggagggatcagtggagtgtaagcccagc

SEQ ID NO: 274770 - DNA, 600 bp, Homo sapiens
attctgctgttttttgtggactgattctatatttagagagagatatatatataattgacatatatttatctgtatatgtgtgtctgtgtgtgtgtgtgtgtgagtttgtgtgtgtgaataaaatcttgttggttgattgtgctgtacagatcttctacatgcttgctgattgtcaaatttttgtccaataattctatcaattgctgagataaggctgttaaaacccacaactataatttattattttttagttctataatttttctcttcatgttgtttaagactttgttatttggtgcatatatatttggaattgttatgtttactkgtgaattgatccatttattattagtgttgcagtctcctcactccttaatttagtgaggtccaagatcttgtcccacaaccaagagaataaggcacacaaataccagagagtgagtaaggcaaattaacattcattaagcaacagaaaagctctcagcagcaagagtggacccaaacaagggttgccagaaatggggctgagttctgatccctttatgtgacagaaacaaggaagtcctttgtgggtcctgccttaatggaaggggtaaaatt

SEQ ID NO: 274771 - DNA, 600 bp, Homo sapiens
attctgctgttttttgtggactgattctatatttagagagagatatatatataattgacatatatttatctgtatatgtgtgtctgtgtgtgtgtgtgtgtgagtttgtgtgtgtgaataaaatcttgttggttgattgtgctgtacagatcttctacatgcttgctgattgtcaaatttttgtccaataattctatcaattgctgagataaggctgttaaaacccacaactataatttattattttttagttctataatttttctcttcatgttgtttaagactttgttatttggtgcatatatatttggaattgttatgtttactggtgaattgatccatttattattagtgttgcagtctcctcactccttaatttagtgaggtccaagatcttgtcccacaaccaagagaatraggcacacaaataccagagagtgagtaaggcaaattaacattcattaagcaacagaaaagctctcagcagcaagagtggacccaaacaagggttgccagaaatggggctgagttctgatccctttatgtgacagaaacaaggaagtcctttgtgggtcctgccttaatggaaggggtaaaatt

SEQ ID NO: 274772 - DNA, 601 bp, Homo sapiens
gtattttcatttacattggttttcctctataggtgatgtttcacctataggtgactgtttctatctggctgcytttaagactttgtctttagttttgtcaacaacctacattggggaaaggacacaatctccaatacatgcttctggaaaaattggatatccatatgcagaagaatgaaactaaactcctatcactcaccttatacaaaaataaactcaaaatggattaaaaatttacatgtaagacatgaaaaattagactaccatacactgttggtggtaagttaaattatttcacttattatgaaaaactgtatggtggtttctcaaaacaaaaatagagacaccatatgatctagtgatcccactactaggtgtttatccaaaggaaaggaaatcattacacttaagaggtatctgcacctccatatttattgcagctgtcttcacaataaccaagatatggaattaagctaaatatccatcaatggatggataaaaaatgtggtatatacatataccaaatttgtatatacattcatatatatatatatgaataatattctgccataaaaagaatgaaattctgtcatttgcagaa

SEQ ID NO: 274773 - DNA, 601 bp, Homo sapiens
gtattttcatttacattggttttcctctataggtgatgtttcacctataggtgactgtttctatctggctgcctttaagactttgtctttagttttgtcaacaacctacattggggaaaggacacaatctscaatacatgcttctggaaaaattggatatccatatgcagaagaatgaaactaaactcctatcactcaccttatacaaaaataaactcaaaatggattaaaaatttacatgtaagacatgaaaaattagactaccatacactgttggtggtaagttaaattatttcacttattatgaaaaactgtatggtggtttctcaaaacaaaaatagagacaccatatgatctagtgatcccactactaggtgtttatccaaaggaaaggaaatcattacacttaagaggtatctgcacctccatatttattgcagctgtcttcacaataaccaagatatggaattaagctaaatatccatcaatggatggataaaaaatgtggtatatacatataccaaatttgtatatacattcatatatatatatatgaataatattctgccataaaaagaatgaaattctgtcatttgcagaa

SEQ ID NO: 274774 - DNA, 601 bp, Homo sapiens
gtattttcatttacattggttttcctctataggtgatgtttcacctataggtgactgtttctatctggctgcctttaagactttgtctttagttttgtcaacaacctacattggggaaaggacacaatctccaatacatgcttctggaaaaattggatatccatatgcagaagaatgaaactaaactcctatcactcaccttatacaaaaataaactcaaaatggattaaaaatttamatgtaagacatgaaaaattagactaccatacactgttggtggtaagttaaattatttcacttattatgaaaaactgtatggtggtttctcaaaacaaaaatagagacaccatatgatctagtgatcccactactaggtgtttatccaaaggaaaggaaatcattacacttaagaggtatctgcacctccatatttattgcagctgtcttcacaataaccaagatatggaattaagctaaatatccatcaatggatggataaaaaatgtggtatatacatataccaaatttgtatatacattcatatatatatatatgaataatattctgccataaaaagaatgaaattctgtcatttgcagaa

SEQ ID NO: 274775 - DNA, 620 bp, Homo sapiens
tctatctggctgcctttaagactttgtctttagttttgtcaacaacctacattggggaaaggacacaatctccaatacatgcttctggaaaaattggatatccatatgcagaagaatgaaactaaactcctatcactcaccttatacaaaaataaactcaaaatggattaaaaatttacatgtaagacatgaaaaattagactaccatacactgttggtggtaagttaaattatttcacttattatgaaaaactgtatggtggtttctcaaaacaaaaatagagacaccatatgatctagtgatcccactactaggtgtttatccaaaggaaaggaaatcattacacttaagaggtatctgcacctccatatttattgcagctgtcttcacaataaccaagatatggaattaagctaaatatccatcaatggatggataaaaaatgtggtatatacrtataccaaatttgtatatacattcatatatatatatatgaataatattctgccataaaaagaatgaaattctgtcatttgcagaatcatggataagactagcgaacattatgttaagtggaataagtcagacacagaaaaattaatactgtctgtccttaccc

SEQ ID NO: 274776 - DNA, 593 bp, Homo sapiens
tgtcttctaaaacttttactattctccataatcctcaaagatatctagagcaacttaaaaatctctttcctaaactttcttattgttttggaatgagttctactccaatactagggcccagggctcatagtgcctcttcgttcatcttgagatttaattaaaagcaatgttgagtcttctcttttggatctaaagatctatttgatgagaaagactgaagaaaaataaggataagggtatttcctccatgttttcatggcacaaaatctttgctaactgtgataagsagaataatgccccccccaccccccacaagactgtccctgtcctattctccatgtcaggaaggatatgctatgtaatataagaatatatgatgttacaatgcaagaaagtattaaggttgcacatgacattaagcttactaaacagcggaacttaaaataagagatcatacttgattatctggggggggccaatttaatcacaaggatcctttaaatgtggaagagtgtggtagaaaatatttaaagatactacattgctaattgtactggaggaaagaaccaagagacaaggaatggggaaagcgg

SEQ ID NO: 274777 - DNA, 595 bp, Homo sapiens
tagagtccccagaaggaaagcggtgctgctgacaccttgattttagcctaatgaaaaccatttaagatttctgacctttataattttaaagtggtagatttatgtttctaaactaccaaataaaaatrttttgtctttagtttttaaaagtttaatcaaaatatttcttgaaatgtgtttattccgtgtagggtatcttaggcttcttgaatctatacatttgtgtcttctgcaaatttgaggtttttttgaagcactatttcttcaagtattctttcagcctcattttactttttttctggtacacgtaataaaaatgttggatcttttgttgttgcctcacacatacctacatctctgttcattttatgtatcagtctgttttatttatgttgttcaaattggttaaattctactattctgccctcacattcactgattttaccttctcgcatctcaatggcactattgactccatccaacacatttttcatttctgttacagtgtttgtttgcttttataatttacatttggttcttttttgttgttgtttttttacaaatcaagtttggttaatattttgcgattttgtta

SEQ ID NO: 274778 - DNA, 504 bp, Homo sapiens
gtggattacctgaggtcaggagttcaagaccagccagacaaacatgcagaaaccctgtctctacaaaaaaaaaaaatacaaaattagccagsagtggtggtgcacgcctataatcccagctactctggagtctgaggcaagagaatcacttagacccgggaggcagaggttgcagtgagctgagatcataccactgcactccagcatgggcaacgagagcgaaactccatctcaaacaaaaagagtctggaacaattctgttgtttaaaataactttctaggtggatctgggagatgtttccttggcttctaagacagtggcaatggaggaggcaatatttgccatggtttgggacaggattattttcatttttttatgagcaataactcctatgaatggtaccaaagatctcataaaagacgtaaacccaaagtcagttacacatccagtcaggtctttggtaagtctggtatacagcattaggctcctgagtcaatggagca

SEQ ID NO: 274779 - DNA, 504 bp, Homo sapiens
gtggattacctgaggtcaggagttcaagaccagccagacaaacatgcagaaaccctgtctctacaaaaaaaaaaaatacaaaattagccagcagtggtggtgcacgcctataatcccagctactctggagtctgaggcaagagaatcacttagacccgggaggcagaggttgcagtgagctgagatcataccactgcactccagcatgsgcaacgagagcgaaactccatctcaaacaaaaagagtctggaacaattctgttgtttaaaataactttctaggtggatctgggagatgtttccttggcttctaagacagtggcaatggaggaggcaatatttgccatggtttgggacaggattattttcatttttttatgagcaataactcctatgaatggtaccaaagatctcataaaagacgtaaacccaaagtcagttacacatccagtcaggtctttggtaagtctggtatacagcattaggctcctgagtcaatggagca

SEQ ID NO: 274780 - DNA, 504 bp, Homo sapiens
gtggattacctgaggtcaggagttcaagaccagccagacaaacatgcagaaaccctgtctctacaaaaaaaaaaaatacaaaattagccagcagtggtggtgcacgcctataatcccagctactctggagtctgaggcaagagaatcacttagacccgggaggcagaggttgcagtgagctgagatcataccactgcactccagcatgggcaacgagagcgaaactccatctcaaacaaaaagagtctggaacaattctgttgtttaaaataactttctaggtggatctgggagatgtttccttggcttctaagacagtggcaatggaggaggcaatatttgccatggtttgggacaggwttattttcatttttttatgagcaataactcctatgaatggtaccaaagatctcataaaagacgtaaacccaaagtcagttacacatccagtcaggtctttggtaagtctggtatacagcattaggctcctgagtcaatggagca

SEQ ID NO: 274781 - DNA, 504 bp, Homo sapiens
gtggattacctgaggtcaggagttcaagaccagccagacaaacatgcagaaaccctgtctctacaaaaaaaaaaaatacaaaattagccagcagtggtggtgcacgcctataatcccagctactctggagtctgaggcaagagaatcacttagacccgggaggcagaggttgcagtgagctgagatcataccactgcactccagcatgggcaacgagagcgaaactccatctcaaacaaaaagagtctggaacaattctgttgtttaaaataactttctaggtggatctgggagatgtttccttggcttctaagacagtggcaatggaggaggcaatatttgccatggtttgggacaggattattttcatttttttatgagcaataactcctatgaatggtaccaaagatctcataaaagacrtaaacccaaagtcagttacacatccagtcaggtctttggtaagtctggtatacagcattaggctcctgagtcaatggagca

SEQ ID NO: 274782 - DNA, 563 bp, Homo sapiens
gacatttttccacaaagttatttaagttaaaagatagcacytttgaattcttcctatgtggcatgtgctaggtcctcactcagtaagctaggacttagggtccattactgtactctgtggcattaggagtgctggagtagttaaccacaggcaagatgaaaggatcgttctagtcaatgagagaacgaggtcgtggatggagcatccagcactttgtcaggttacccatggtgtaaccatggcactttggaagaggccactaaggcattatgctcacaggcctataatgccccatccatgtggaaaagcagactgacagtttaatgcccacctctcaccctttccagggtctcagatgttctctacctattgaataagaattaggctgagttggtatagcaacccggtctgtctgttttagtcccaagctacttctgcagacatccattgcccttgttgcttgactcaaacctttctgcctcaatcatccactccagtacaaagctggcatatctcataacatcatccacccaaatggaaggatcagaggcatccagcatcat

SEQ ID NO: 274783 - DNA, 398 bp, Homo sapiens
tctggcctcccacattattccggatatcacacctgacctccatggctgtatctctctgatccacctgacattcactccgtttcccatatttccttctttcctgttcctcaccctgatcacacttggtttatcaatgrcagttccaccaggcctaattgccactcaccagcaaaggcaggctatgctatagtatcttccacatctatcattgaggctaccgctctgccccactcccctacctctcagcaagccaaattcattgccttaactcgagcgtcactcttgcaaagggactacacatcaatatttaaactgactctaaatatgccttccatatcctacgccaccataccattatatgggcagaaagaggtttcctcactgcgcaagggtcctcc

SEQ ID NO: 274784 - DNA, 398 bp, Homo sapiens
tctggcctcccacattattccggatatcacacctgacctccatggctgtatctctctgatccacctgacattcactccgtttcccatatttccttctttcctgttcctcaccctgatcacacttggtttatcaatggcagttccaccaggcctaattgccactcaccagcaaaggcaggctatgctatagtatcttccacatctatcattgaggctaccgctctgccccactcccctacctctcagcaagccaaattcattgccttaactcgagcgtcactcttgcaaagggactacacatcaatatttaaactgactctaaatatgccttccatatcctaygccaccataccattatatgggcagaaagaggtttcctcactgcgcaagggtcctcc

SEQ ID NO: 274785 - DNA, 522 bp, Homo sapiens
cccaaaactcaccaaccaaacaagtaattatgctgaacccccttgagcactctctaattggatgtccttggtcctcccaattcttagtcatttaatacctgtttttctccttcacttattcagaccttgtgtcttccgtttagtttctcaattcatacaaaactgcatccaggccattaccaatcattccatatgacaaatgctcctcttaacaaccccacagtttcaccccttaccacaaaatcttccttcagcttaatctctcccactctaggttcccatgcctcccctaatcccactcgaagcagccctgagaaacatcacccattatctctccatagcaccccccaaaattttcaccaccccaacacttcaacactattttgttttatttttcttwttaatataagaagacaggaatgtcaggcctctgagcccaagctaagccatcgtatctcctgtgacctgcacgtatacatccagatggcctgaaacaagtgaagaatcaaaagaagtgaaaat

SEQ ID NO: 274786 - DNA, 522 bp, Homo sapiens
cccaaaactcaccaaccaaacaagtaattatgctgaacccccttgagcactctctaattggatgtccttggtcctcccaattcttagtcatttaatacctgtttttctccttcacttattcagaccttgtgtcttccgtttagtttctcaattcatacaaaactgcatccaggccattaccaatcattccatatgacaaatgctcctcttaacaaccccacagtttcaccccttaccacaaaatcttccttcagcttaatctctcccactctaggttcccatgcctcccctaatcccactcgaagcagccctgagaaacatcacccattatctctccatagcaccccccaaaattttcaccaccccaacacttcaacactattttgttttatttttctttttaatataagaagacaggaatgtcaggcctctgagcccaagctaagccatcgtatctcctgtgacctgcacgtrtacatccagatggcctgaaacaagtgaagaatcaaaagaagtgaaaat

SEQ ID NO: 274787 - DNA, 515 bp, Homo sapiens
cctgttcagggttatatacctcagagccaatgtgaaacattgacttaaagctttgagggrcatcctgcttccagaggaaagagcaacaggcccaggctagtccagtcagcccctccttatctcaccataatgtattcccagcacaatctacagtaattattaagacctacaaggaagaaagggaagagaactgggtcaatccaaggccacatggagaactgtcctgcactggccaattgttttggctgtagtttcaataccaagttaatgtttagagcttttgcattgtgatttcagactctttgattaatatggtgctgctgggaattccactgctccctgttagtgctgcctatggcagtggaagcagtttctccaggttaggctaccaggtgtctgaggtatgtggtgaggggtgtggtagaatcccccaaccaatgtcccctggctactctggggtcattgggaagagagtcttaggcctgcagggacaaagcagcttcttaggccaggcc

SEQ ID NO: 274788 - DNA, 515 bp, Homo sapiens
cctgttcagggttatatacctcagagccaatgtgaaacattgacttaaagctttgagggacatcctgcttccagaggaaagagcaacaggcccaggctagtccagtcagcccctccttatctcaccataatgtattcccagcayaatctacagtaattattaagacctacaaggaagaaagggaagagaactgggtcaatccaaggccacatggagaactgtcctgcactggccaattgttttggctgtagtttcaataccaagttaatgtttagagcttttgcattgtgatttcagactctttgattaatatggtgctgctgggaattccactgctccctgttagtgctgcctatggcagtggaagcagtttctccaggttaggctaccaggtgtctgaggtatgtggtgaggggtgtggtagaatcccccaaccaatgtcccctggctactctggggtcattgggaagagagtcttaggcctgcagggacaaagcagcttcttaggccaggcc

SEQ ID NO: 274789 - DNA, 515 bp, Homo sapiens
cctgttcagggttatatacctcagagccaatgtgaaacattgacttaaagctttgagggacatcctgcttccagaggaaagagcaacaggcccaggctagtccagtcagcccctccttatctcaccataatgtattcccagcacaatctacagtaattattaagacctacaaggaagaaagggaagagaactgggtcaatccaaggccacatggagaactgtcctgcactggccaattgttttggctgtagtttcaataccaasttaatgtttagagcttttgcattgtgatttcagactctttgattaatatggtgctgctgggaattccactgctccctgttagtgctgcctatggcagtggaagcagtttctccaggttaggctaccaggtgtctgaggtatgtggtgaggggtgtggtagaatcccccaaccaatgtcccctggctactctggggtcattgggaagagagtcttaggcctgcagggacaaagcagcttcttaggccaggcc

SEQ ID NO: 274790 - DNA, 515 bp, Homo sapiens
cctgttcagggttatatacctcagagccaatgtgaaacattgacttaaagctttgagggacatcctgcttccagaggaaagagcaacaggcccaggctagtccagtcagcccctccttatctcaccataatgtattcccagcacaatctacagtaattattaagacctacaaggaagaaagggaagagaactgggtcaatccaaggccacatggagaactgtcctgcactggccaattgttttggctgtagtttcaataccaagttaatgtttagagcttttgcattgtgatttcagactctttgattaatatggtgctgctgggaattccactgctccctgttagtgctgcctatggcagtggaagcagtttctccaggttaggctaccaggtgtctgaggtatgtggtgaggggtgtggtagaatcccccaaccaatgtcccctggctactctggggtcattgggaagagmgtcttaggcctgcagggacaaagcagcttcttaggccaggcc

SEQ ID NO: 274791 - DNA, 582 bp, Homo sapiens
tatgtggtgaggggtgtggtagaatcccccaaccaatgtcccctggctactctggggtcattgggaagagagtcttaggcctgcagggacaaagcagcttcttaggccaggccactttctctactaggtccctcttcctgattctattttcccacctttgtgcttcctggtagaaaaggaagcctcaagctgtactgggaaggagagcacctctcttagcrtttctcctagctgcttctcctggatggtggtgggtgtctcaagctagtggctcctgattgatccaagggaggaaggagcttacttgaggtatcttctgttgctagattgggggattaggaaaaataagtctgaaggccttcttcaggacttcaggatacacaagatgccttgctgttgtgctgtttcaccattccttgcatatcaaactaactcttcttctgtttacctccatctcttagagctttttcatgttagtcacatgtgtcattttcaaaatatacagttgtgcataacaaaaagaggcgggaaaaacatggatctgtgccatattgtctgaatccgaagttccttgcatacttt

SEQ ID NO: 274792 - DNA, 582 bp, Homo sapiens
tatgtggtgaggggtgtggtagaatcccccaaccaatgtcccctggctactctggggtcattgggaagagagtcttaggcctgcagggacaaagcagcttcttaggccaggccactttctctactaggtccctcttcctgattctattttcccacctttgtgcttcctggtagaaaaggaagcctcaagctgtactgggaaggagagcacctctcttagcatttctcctagctgcttctcctggatggtggtgggtgtctcaagctagtggctcctgattgatccaagggaggaaggagcttacttgaggtatcttctgttgctagattgggggattaggaaaaataagtctgaaggccttcttcaggacttcaggatacacaagatgccttgctgttgtgctgtttcaccattccttgcatatcaaactaactcttcttctgtttacctccatctcttagagctttttcatgttagtcacatgtgtcattttcaaaatatayagttgtgcataacaaaaagaggcgggaaaaacatggatctgtgccatattgtctgaatccgaagttccttgcatacttt

SEQ ID NO: 274793 - DNA, 369 bp, Homo sapiens
ctataccagaattggcaaacagccagtgcattacaatatctaatgggagctgcagtctaggactcattccccgctagccaaccatcctcctgtgcatgtctgccattcaagtctcaggcacccccatctgagctatccttattagggaccctcaatakaaaacctttgcagagaactccttatgatagggagagagggataagggagaggagaaaggggaaacattgaaatcattattctctattctgaatctgaactcagtattttcccattcttagcccttcctcctctttctgtcccaaggacccaggtccataagatgaaaggagctttttgttcatggctccttggtcaaaagatccttgctga

SEQ ID NO: 274794 - DNA, 369 bp, Homo sapiens
ctataccagaattggcaaacagccagtgcattacaatatctaatgggagctgcagtctaggactcattccccgctagccaaccatcctcctgtgcatgtctgccattcaagtctcaggcacccccatctgagctatccttattagggaccctcaatagaaaacctttgcagagaactccttatgatagggagagagggataagggagaggagaaaggggaaacattgaaatcattattctctattctgaatctgaactcagtattttcccattcttagcscttcctcctctttctgtcccaaggacccaggtccataagatgaaaggagctttttgttcatggctccttggtcaaaagatccttgctga

SEQ ID NO: 274795 - DNA, 616 bp, Homo sapiens
ttcatgggacaaaatggaacattggaggagctagygatctttcctctttagtttcttgcttaaactatctcagttagtaaagatttgactgttactgtcattttggcttattgttttaattagctatttcaactccatggcagcttagctcttgacagcattctggaaagtacataggattctagacatttttactgcttttgttatatgaattacatgtcttcataataaggaattaaggctgggagtggtcacttgtaatcacaacactttgggaggccaaggcgggtggatcaactgaggtcgggagtttgagaccagcctggccaacgtggtgactgaaatcccatctctactaaaaacgcaaaaattagccaggcatggtaaagtgcgcctgtagtcccagctactcgggaggctgaggcgggagaatcacttgaacccgggaggcgaaggttgcagtgagccgagacgatagtgccatttcactccagcctggacgacagagcaagactctgtctcaataacaataataagaataataaggatttaatatccaaaccattcttgtaacatatttaatattgccattcagtggtaaataaaaataatatac

SEQ ID NO: 274796 - DNA, 340 bp, Homo sapiens
catggctccttggtcaaaagatccttgctgagaaaattcccacatctgcatttgtgctgagctacatgaccttggcctggagctgtttcatgggacaaaatggaacattggaggagctagcgatctttcctctttagtttcttgcttaaactatctcagttagtaaagatttgactgttactgtcattttggcttattgttttaattagctatttcaactccatggcagcttagctcttkacagcattctggaaagtacataggattctagacatttttactgcttttgttatatgaattacatgtcttcataataaggaattaaggctgggagtggtca

SEQ ID NO: 274797 - DNA, 616 bp, Homo sapiens
ttcatgggacaaaatggaacattggaggagctagcgatctttcctctttagtttcttgcttaaactatctcagttagtaaagatttgactgttactgtcattttggcttattgttttaattagctatttcaactccatggcagcttagctcttgacagcattctggaaagtacataggattctagacatttttactgcttttgttatatgaattacatgtcttcataataaggaattaaggctgggagtggtcacttgtaatcacaacactttgggaggccaaggcgggtggatcaactgaggtcrggagtttgagaccagcctggccaacgtggtgactgaaatcccatctctactaaaaacgcaaaaattagccaggcatggtaaagtgcgcctgtagtcccagctactcgggaggctgaggcgggagaatcacttgaacccgggaggcgaaggttgcagtgagccgagacgatagtgccatttcactccagcctggacgacagagcaagactctgtctcaataacaataataagaataataaggatttaatatccaaaccattcttgtaacatatttaatattgccattcagtggtaaataaaaataatatac

SEQ ID NO: 274798 - DNA, 558 bp, Homo sapiens
gacaaaatggaacattggaggagctagcgatctttcctctttagtttcttgcttaaactatctcagttagtaaagatttgactgttactgtcattttggcttattgttttaattagctatttcaactccatggcagcttagctcttgacagcattctggaaagtacataggattctagacatttttactgcttttgttatatgaattacatgtcttcataataaggaattaaggctgggagtggtcacttgtaatcacaacactttgggaggccaaggcgggtggatcaactgaggtcgggagtttgagaccagcctggccaacgtggtgastgaaatcccatctctactaaaaacgcaaaaattagccaggcatggtaaagtgcgcctgtagtcccagctactcgggaggctgaggcgggagaatcacttgaacccgggaggcgaaggttgcagtgagccgagacgatagtgccatttcactccagcctggacgacagagcaagactctgtctcaataacaataataagaataataaggatttaatatccaaaccat

SEQ ID NO: 274799 - DNA, 558 bp, Homo sapiens
gacaaaatggaacattggaggagctagcgatctttcctctttagtttcttgcttaaactatctcagttagtaaagatttgactgttactgtcattttggcttattgttttaattagctatttcaactccatggcagcttagctcttgacagcattctggaaagtacataggattctagacatttttactgcttttgttatatgaattacatgtcttcataataaggaattaaggctgggagtggtcacttgtaatcacaacactttgggaggccaaggcgggtggatcaactgaggtcgggagtttgagaccagcctggccaacgtggtgactgaaatcccatctctactaaaaacgcaaaaattagccaggcatggtaaagtgcgcctgtagtcccagctactcgggaggctgaggcgggagaatcacttgaacccgggaggcgaaggttgcagtgagccgagaygatagtgccatttcactccagcctggacgacagagcaagactctgtctcaataacaataataagaataataaggatttaatatccaaaccat

SEQ ID NO: 274800 - DNA, 558 bp, Homo sapiens
gacaaaatggaacattggaggagctagcgatctttcctctttagtttcttgcttaaactatctcagttagtaaagatttgactgttactgtcattttggcttattgttttaattagctatttcaactccatggcagcttagctcttgacagcattctggaaagtacataggattctagacatttttactgcttttgttatatgaattacatgtcttcataataaggaattaaggctgggagtggtcacttgtaatcacaacactttgggaggccaaggcgggtggatcaactgaggtcgggagtttgagaccagcctggccaacgtggtgactgaaatcccatctctactaaaaacgcaaaaattagccaggcatggtaaagtgcgcctgtagtcccagctactcgggaggctgaggcgggagaatcacttgaacccgggaggcgaaggttgcagtgagccgagacgatagtgccatttcactccagcytggacgacagagcaagactctgtctcaataacaataataagaataataaggatttaatatccaaaccat

SEQ ID NO: 274801 - DNA, 306 bp, Homo sapiens
tttaatattgccattcagtggtaaataaaaataatatacartcatgccctgcctaataagaacatttcggtcaatgatgaactacctacagaacagtggtcccataagattataatgagccaaacaattcatatatatatatatggagagaggagagagagaaagagttaaccattaaacagcctcagacaggtccttgaggaggtattctataaggaagcattgttatcgtagaagatgaaagttccacgcatgttattgccctggaagaccttccagtgggacaagatataaaggcagaagaca

SEQ ID NO: 274802 - DNA, 306 bp, Homo sapiens
tttaatattgccattcagtggtaaataaaaataatatacaatcatgccctgcctaataasaacatttcggtcaatgatgaactacctacagaacagtggtcccataagattataatgagccaaacaattcatatatatatatatggagagaggagagagagaaagagttaaccattaaacagcctcagacaggtccttgaggaggtattctataaggaagcattgttatcgtagaagatgaaagttccacgcatgttattgccctggaagaccttccagtgggacaagatataaaggcagaagaca

SEQ ID NO: 274803 - DNA, 306 bp, Homo sapiens
tttaatattgccattcagtggtaaataaaaataatatacaatcatgccctgcctaataagaacatttyggtcaatgatgaactacctacagaacagtggtcccataagattataatgagccaaacaattcatatatatatatatggagagaggagagagagaaagagttaaccattaaacagcctcagacaggtccttgaggaggtattctataaggaagcattgttatcgtagaagatgaaagttccacgcatgttattgccctggaagaccttccagtgggacaagatataaaggcagaagaca

SEQ ID NO: 274804 - DNA, 306 bp, Homo sapiens
tttaatattgccattcagtggtaaataaaaataatatacaatcatgccctgcctaataagaacatttcggtcaatgatgaactacctacagaacagtggtcccataagattataatgagccaaacaattcatatatatatatatggagagaggagagagagaaagagttaaccattaaacagcctcagacaggtccttgaggaggtattctataaggaagcattgttatcrtagaagatgaaagttccacgcatgttattgccctggaagaccttccagtgggacaagatataaaggcagaagaca

SEQ ID NO: 274805 - DNA, 456 bp, Homo sapiens
atctaaagactttgctttctctcaccactcactcactgtctcatccagagcaacttctaggcctgcaagtgccatttatagtaaccatcctatacaggtgtgcaactttttattttttataccatatctttttattgtatgttttctatgtttagatataaagatgtttatcattgtgtttcarttggctacattatttaatatagtaacctgatgtaagggcttgtagcctaaaagcaataacttctaccttattgccgaagtgtgtagtaggctacaccgtctaggtttgtaaaaggacactatgatgttcacctagggaacacatttctcagaatgaattctcatcattaatcaactcaagactgtacttataagtgaatccactgtcattactatagttcaggtcaccttaagtttcttcttggacttgccaatgaactgtggaattaagaa

SEQ ID NO: 274806 - DNA, 456 bp, Homo sapiens
atctaaagactttgctttctctcaccactcactcactgtctcatccagagcaacttctaggcctgcaagtgccatttatagtaaccatcctatacaggtgtgcaactttttattttttataccatatctttttattgtatgttttctatgtttagatataaagatgtttatcattgtgtttcaattggctacattatttaatatagtaacctgaygtaagggcttgtagcctaaaagcaataacttctaccttattgccgaagtgtgtagtaggctacaccgtctaggtttgtaaaaggacactatgatgttcacctagggaacacatttctcagaatgaattctcatcattaatcaactcaagactgtacttataagtgaatccactgtcattactatagttcaggtcaccttaagtttcttcttggacttgccaatgaactgtggaattaagaa

SEQ ID NO: 274807 - DNA, 456 bp, Homo sapiens
atctaaagactttgctttctctcaccactcactcactgtctcatccagagcaacttctaggcctgcaagtgccatttatagtaaccatcctatacaggtgtgcaactttttattttttataccatatctttttattgtatgttttctatgtttagatataaagatgtttatcattgtgtttcaattggctacattatttaatatagtaacctgatgtaagggcttgtagcctaaaagcaataacttctaccttattgccgaagtgtgtagtaggctacaccgtctaggtttgtaaaaggacactatgatgttcacctagggaacacatttctcagaatgaattctcatcrttaatcaactcaagactgtacttataagtgaatccactgtcattactatagttcaggtcaccttaagtttcttcttggacttgccaatgaactgtggaattaagaa

SEQ ID NO: 274808 - DNA, 589 bp, Homo sapiens
ggacttgccaatgaactgtggaattaagaagctctctgcctacagtcttgtttatctattgtaatctgtttcttgtagtccctattttagatctcattaatgtcttgtcacttccattagartaaattataaacactttggatggcctgaagacatttgtaatttatcctaaactcatctctactctcatcgcttgacatctccctcttctacccacacatatatatttaagcccacgtaattactgcaattaccccaaattctgtacttctcaccagtgtcttgcaaaacccactccatctaactaataagacttttcatttaactctccagttgtagttgatattctagtttcaaactctattttctctgtgaaggctgtactgatatcacaattttgtttcttcagtgtgagcattggcagcctgtggcctatggttttggtacagcctgcaaggtaataatggtttttagagatttaaatgattgaaacaattttttaaaataacattttgtagcatataacgattgcagaaagtaaaaactgcagtgttttcataaataacaaggtttttttttggacacaaga

SEQ ID NO: 274809 - DNA, 497 bp, Homo sapiens
tctcatcgcttgacatctccctcttctacccacacatatatatttaagcccacgtaattactgcaattaccccaaattctgtacttctcaccagtgtcttgcaaaacccactccatctaactaataagacttttcatttaactctccagttgtagttgatattctagtttcaaactctattttctstgtgaaggctgtactgatatcacaattttgtttcttcagtgtgagcattggcagcctgtggcctatggttttggtacagcctgcaaggtaataatggtttttagagatttaaatgattgaaacaattttttaaaataacattttgtagcatataacgattgcagaaagtaaaaactgcagtgttttcataaataacaaggtttttttttggacacaagatcattcacttacatgtggtctatagatgttttcaggctattatgtcagagttgagtggttgcaacagaaactgcatgattgtcaaagcctaa

SEQ ID NO: 274810 - DNA, 564 bp, Homo sapiens
cttgtcacttccattagaataaattataaacactttggatggcctgaagacatttgtaatttatcctaaactcatctctactctcatcgcttgacatctccctcttctacccacacatatatatttaagcccacgtaattactgcaattaccccaaattctgtacttctcaccagtgtcttgcaaaacccactccatctaactaataagacttttcatttaactctccagttgtagttgatattctagtttcaaactctattttctctgtgaaggctktactgatatcacaattttgtttcttcagtgtgagcattggcagcctgtggcctatggttttggtacagcctgcaaggtaataatggtttttagagatttaaatgattgaaacaattttttaaaataacattttgtagcatataacgattgcagaaagtaaaaactgcagtgttttcataaataacaaggtttttttttggacacaagatcattcacttacatgtggtctatagatgttttcaggctattatgtcagagttgagtggttgcaacagaaactgcatga

SEQ ID NO: 274811 - DNA, 497 bp, Homo sapiens
tctcatcgcttgacatctccctcttctacccacacatatatatttaagcccacgtaattactgcaattaccccaaattctgtacttctcaccagtgtcttgcaaaacccactccatctaactaataagacttttcatttaactctccagttgtagttgatattctagtttcaaactctattttctctgtgaaggctgtactgatatcacaattttgtttcttcagtgtgagcattggcagcctgtggcctatggttttggtacagcctgcaaggtaataatggtttttagagatttaaatgattgaaacaattttttaaaataacattttgtagcatataacgattgcakaaagtaaaaactgcagtgttttcataaataacaaggtttttttttggacacaagatcattcacttacatgtggtctatagatgttttcaggctattatgtcagagttgagtggttgcaacagaaactgcatgattgtcaaagcctaa

SEQ ID NO: 274812 - DNA, 493 bp, Homo sapiens
gttttcaggctattatgtcagagttgagtggttgcaacagaaactgcatgattgtcaaagcctaacatacttaaaatctgaccctttgtagaaaaagctaacatttgatctaaagttttctgtaaagatacatctacattatgtttatcgtaatttatatttatctgcctactgkttgcagttttgaaaaactataatcttccagaaaatggaaactataatatttttaattagacctcaagcaaaattattttaaaatgtggtctcaatttttaagaaagtggggaagaatgcttttttttcttttgttaaacttctttgcttccagtccaagaagtgactgtcatttatttttatcttattgcttcctttctcatattagcttgataaaaagtaatgaaataatattcaggtttcttagtagagtcatgttgtaaacataaactttttttttctagccactctcaaaaaatggaaagcatctgctttatga

SEQ ID NO: 274813 - DNA, 493 bp, Homo sapiens
gttttcaggctattatgtcagagttgagtggttgcaacagaaactgcatgattgtcaaagcctaacatacttaaaatctgaccctttgtagaaaaagctaacatttgatctaaagttttctgtaaagatacatctacattatgtttatcgtaatttatatttatctgcctactgtttgcagttttgaaaaactataatcttccagaaaayggaaactataatatttttaattagacctcaagcaaaattattttaaaatgtggtctcaatttttaagaaagtggggaagaatgcttttttttcttttgttaaacttctttgcttccagtccaagaagtgactgtcatttatttttatcttattgcttcctttctcatattagcttgataaaaagtaatgaaataatattcaggtttcttagtagagtcatgttgtaaacataaactttttttttctagccactctcaaaaaatggaaagcatctgctttatga

SEQ ID NO: 274814 - DNA, 581 bp, Homo sapiens
aatgcttttttttcttttgttaaacttctttgcttccagtccaagaagtgactgtcatttatttttatcttattgcttcctttctcatattagcttgataaaaagtaatgaaataatattcaggtttcttagtagagtcatgttgtaaacataaactttttttttctagccactctcaaaaaatggaaagcatctgctttatgagtcacctaattaatgacattgaattatctagtaagtggactcttcaggttaattaaatatcttcattaactttttcactgcttttaaaaataacatttacacatttatgcwaataggttcatcatgtgtccttaatcagttatttagctttggtgcagagttaataattccaatatttgttcaaactgaagaaaatccaggactcaaaaaagaaaggatatttttattcaggttttgagaaaatcataagtaaaacccccaacttatttatcaataattgtatgttacatacatttccatatttacaattttgataaaatagttaaaattaatatttatctttaataatttaaatattaattagttatgtatttatt

SEQ ID NO: 274815 - DNA, 581 bp, Homo sapiens
aatgcttttttttcttttgttaaacttctttgcttccagtccaagaagtgactgtcatttatttttatcttattgcttcctttctcatattagcttgataaaaagtaatgaaataatattcaggtttcttagtagagtcatgttgtaaacataaactttttttttctagccactctcaaaaaatggaaagcatctgctttatgagtcacctaattaatgacattgaattatctagtaagtggactcttcaggttaattaaatatcttcattaactttttcactgcttttaaaaataacatttacacatttatgctaataggttcatcatgtgtccttaatcagttatttagctttggtgcagagttaataattccaatatttgttcaaactgaagaaaatccaggactcaaaaaagaaaggatatttttattcaggttttgagaraatcataagtaaaacccccaacttatttatcaataattgtatgttacatacatttccatatttacaattttgataaaatagttaaaattaatatttatctttaataatttaaatattaattagttatgtatttatt

SEQ ID NO: 274816 - DNA, 499 bp, Homo sapiens
ccttaatcagttatttagctttggtgcagagttaataattccaatatttgttcaaactgaagaaaatccaggactcaaaaaagaaaggatatttttattcaggttttgagaaaatcayaagtaaaacccccaacttatttatcaataattgtatgttacatacatttccatatttacaattttgataaaatagttaaaattaatatttatctttaataatttaaatattaattagttatgtatttattggctcatattatttacattatatatatatttatataatttgcagtctgacaatgcaatagaaaaaaaaccaaaacattttctgagaagaaattcaagccagctgcagaaatgtgcataagtaacaagaagccaaatcataatcatgaagacaatgggaaaaatgtctctaggccatgtcctaggtcttcacagcagcccctcccatcacagacccagaggcctcgggggaaaaaatgttttctggggacag

SEQ ID NO: 274817 - DNA, 499 bp, Homo sapiens
ccttaatcagttatttagctttggtgcagagttaataattccaatatttgttcaaactgaagaaaatccaggactcaaaaaagaaaggatatttttattcaggttttgagaaaatcataagtaaaacccccaacttatttatcaataattgtatgttayatacatttccatatttacaattttgataaaatagttaaaattaatatttatctttaataatttaaatattaattagttatgtatttattggctcatattatttacattatatatatatttatataatttgcagtctgacaatgcaatagaaaaaaaaccaaaacattttctgagaagaaattcaagccagctgcagaaatgtgcataagtaacaagaagccaaatcataatcatgaagacaatgggaaaaatgtctctaggccatgtcctaggtcttcacagcagcccctcccatcacagacccagaggcctcgggggaaaaaatgttttctggggacag

SEQ ID NO: 274818 - DNA, 499 bp, Homo sapiens
ccttaatcagttatttagctttggtgcagagttaataattccaatatttgttcaaactgaagaaaatccaggactcaaaaaagaaaggatatttttattcaggttttgagaaaatcataagtaaaacccccaacttatttatcaataattgtatgttacatacatttccatatttacaattttgataaaatagttaaaattaatatttatctttaataatttaaatattaattagttatgtatttattggctcatattatttamattatatatatatttatataatttgcagtctgacaatgcaatagaaaaaaaaccaaaacattttctgagaagaaattcaagccagctgcagaaatgtgcataagtaacaagaagccaaatcataatcatgaagacaatgggaaaaatgtctctaggccatgtcctaggtcttcacagcagcccctcccatcacagacccagaggcctcgggggaaaaaatgttttctggggacag

SEQ ID NO: 274819 - DNA, 519 bp, Homo sapiens
aatattaattagttatgtatttattggctcatattatttacattatatatatatttatataatttgcagtctgacaatgcaatagaaaaaaaaccaaaacattttctgagaagaaattcaagccagctgcagaaatgtkcataagtaacaagaagccaaatcataatcatgaagacaatgggaaaaatgtctctaggccatgtcctaggtcttcacagcagcccctcccatcacagacccagaggcctcgggggaaaaaatgttttctggggacaggcccagggcccctctctgtgtgcagtctagggacttggtgccctacatcccagccactccagctgtgactaaaagggaccaaggtacagcttgggccagggagtcagaggtcgcaagccccaaaccttggcagcgtccatgtggagttgagcctgcatgtgcacagaagtcaagaagcaaggcttgggagcctcagcctagatttcagaggatgtatggaaatgcctggatgtccaggaagaa

SEQ ID NO: 274820 - DNA, 519 bp, Homo sapiens
aatattaattagttatgtatttattggctcatattatttacattatatatatatttatataatttgcagtctgacaatgcaatagaaaaaaaaccaaaacattttctgagaagaaattcaagccagctgcagaaatgtgcataagtaacaagaagccaaatcataatcatgaagacaatgggaaaaatgtctctaggccatgtcctaggtcttcacagcagcccctcccatcacagacccagaggcctcgggrgaaaaaatgttttctggggacaggcccagggcccctctctgtgtgcagtctagggacttggtgccctacatcccagccactccagctgtgactaaaagggaccaaggtacagcttgggccagggagtcagaggtcgcaagccccaaaccttggcagcgtccatgtggagttgagcctgcatgtgcacagaagtcaagaagcaaggcttgggagcctcagcctagatttcagaggatgtatggaaatgcctggatgtccaggaagaa

SEQ ID NO: 274821 - DNA, 519 bp, Homo sapiens
aatattaattagttatgtatttattggctcatattatttacattatatatatatttatataatttgcagtctgacaatgcaatagaaaaaaaaccaaaacattttctgagaagaaattcaagccagctgcagaaatgtgcataagtaacaagaagccaaatcataatcatgaagacaatgggaaaaatgtctctaggccatgtcctaggtcttcacagcagcccctcccatcacagacccagaggcctcgggggaaaaaatgttttctggggacaggcccagggcccctctctgtgtgcagtctagggacttggtgccctacatcccagccactccagctgtgactaaaagggaccaaggtacagcttgggccakggagtcagaggtcgcaagccccaaaccttggcagcgtccatgtggagttgagcctgcatgtgcacagaagtcaagaagcaaggcttgggagcctcagcctagatttcagaggatgtatggaaatgcctggatgtccaggaagaa

SEQ ID NO: 274822 - DNA, 576 bp, Homo sapiens
cttggcagcgtccatgtggagttgagcctgcatgtgcacagaagtcaagaagcaaggcttgggagcctcagcctagatttcagaggatgtatggaaatgcctggatgtccaggaagaagtttgctgtgggggagggggggtgatcatggagagcctctgctaaggaagtggggaagggaaatgtggggttggagccccacacagagtccccactgaggcgctgcctgtgcgagaagaggaccaccatcttccagaccccagaatggtaaatccactcacagcttgcatatgcacctaaaaaaacctcagwtgctcaacaccagcctgtgaaagcagctaggtgggaaccgtacctttcaaagccacaggggcagagctgcccaagtccatgggagcccacatcttgcatcagcatgacctggatgttagacatggagtcaaaggagatcattttgaagcgttaagattcaactgccttgctggagtttggacttgcatgcggcctgtaacccctttattttggccaatttgtcctgtttggaatgggtatagttaccgaatgcctgtacccccata

SEQ ID NO: 274823 - DNA, 576 bp, Homo sapiens
cttggcagcgtccatgtggagttgagcctgcatgtgcacagaagtcaagaagcaaggcttgggagcctcagcctagatttcagaggatgtatggaaatgcctggatgtccaggaagaagtttgctgtgggggagggggggtgatcatggagagcctctgctaaggaagtggggaagggaaatgtggggttggagccccacacagagtccccactgaggcgctgcctgtgcgagaagaggaccaccatcttccagaccccagaatggtaaatccactcacagcttgcatatgcacctaaaaaaacctcagttgctcaacaccagcctgtgaaagcagctaggtggraaccgtacctttcaaagccacaggggcagagctgcccaagtccatgggagcccacatcttgcatcagcatgacctggatgttagacatggagtcaaaggagatcattttgaagcgttaagattcaactgccttgctggagtttggacttgcatgcggcctgtaacccctttattttggccaatttgtcctgtttggaatgggtatagttaccgaatgcctgtacccccata

SEQ ID NO: 274824 - DNA, 591 bp, Homo sapiens
ctaatttgtaactttcatatgtttctgaaacttttatagtcactaaataatttgagtaaagcaaatgggtttcagaccgattacaatttggaaagattgattataaatttttaataatatgtaacaaagaaaaatgtggtcacttgattatatacctcttccccaagatcaagtaaatactttatcaatagaaaaaagaaagaaaagcaaaaagaaaagaaaaagaaagcaacactgytatacagaacatttttttttctaaatggaatccagcagcaaaaaaaaagataattgaagatactattaaaagatacaatttaatattaatattgaccacatttataaattcacataattttataaaacatatgcacttctgagtataaaacacacataatacaaaaaagattattacattttaaattgttaaaatttcctcaatagtttttccacacctgatgattactctcaatctcaacaagataattataaatgatgtttattattcaaaatagattattttgtgtgtgtgttttattcaattaggtggtaaattataagattttgccaggtgattcagagaagtagcct

SEQ ID NO: 274825 - DNA, 591 bp, Homo sapiens
ctaatttgtaactttcatatgtttctgaaacttttatagtcactaaataatttgagtaaagcaaatgggtttcagaccgattacaatttggaaagattgattataaatttttaataatatgtaacaaagaaaaatgtggtcacttgattatatacctcttccccaagatcaagtaaatactttatcaatagaaaaaagaaagaaaagcaaaaagaaaagaaaaagaaagcaacactgttatacagaacatttttttttctaaatggaatccarcagcaaaaaaaaagataattgaagatactattaaaagatacaatttaatattaatattgaccacatttataaattcacataattttataaaacatatgcacttctgagtataaaacacacataatacaaaaaagattattacattttaaattgttaaaatttcctcaatagtttttccacacctgatgattactctcaatctcaacaagataattataaatgatgtttattattcaaaatagattattttgtgtgtgtgttttattcaattaggtggtaaattataagattttgccaggtgattcagagaagtagcct

SEQ ID NO: 274826 - DNA, 590 bp, Homo sapiens
acataatacaaaaaagattattacattttaaattgttaaaatttcctcaatagtttttccacacctgatgattactctcaatctcaacaagataattataaatgatgtttattattcaaaatagattattttgtgtgtgtgttttattcaattaggtggtaaattataagattttgccaggtgattcagagaagtagcctggaaaagtttatatagatggtactaaatgaaagatagaaaattaaaaatttatagttaaatttattagaaacttaaaattctttaaaaaattatagttaggtaaataaatcaactaaatttttcctttttccttcatattgcagagtgtattattccagccggtttaccrtgcaggcttcccaatttgatactaattttaacctgacttttatatatcaatattaaagagacgaaaaataaatgtgattttctccagctctatatccctccaaggagagctttggaactgaaatcctaatcaggggatacatttttaatatttttgtctcaaatgaatttggagtcctccatagtatttccaaagttgcagagcagaaaagaggttacca

SEQ ID NO: 274827 - DNA, 542 bp, Homo sapiens
caggcttcccaatttgatactaattttaacctgacttttatatatcaatattaaagagacgaaaaataaatgtgattttctccagctctatatccctccaaggagagctttggaactgaaatcctaatcaggggatacatttttaatatttttgtctcaaatgaatttgragtcctccatagtatttccaaagttgcagagcagaaaagaggttaccaataaaattgggtagttctcatcccaattacagaattaggccaagttatcagatatgcaacaaatatccactcagaaagattgaatatttaaatattttaatttatgaagtattagcctattgctcagttaaagtattttggaaatttttctttaaaaaaatgtatcaaacttgtggttagatgacattactgactcattttgcatctgatcaaaacaaataatgcataaaacaaagcaatgtaagttataaagcattttaaaattgaaataagagatctttatttctgttgcatatcaaatgggatttattgacttccttttct

SEQ ID NO: 274828 - DNA, 542 bp, Homo sapiens
caggcttcccaatttgatactaattttaacctgacttttatatatcaatattaaagagacgaaaaataaatgtgattttctccagctctatatccctccaaggagagctttggaactgaaatcctaatcaggggatacatttttaatatttttgtctcaaatgaatttggagtcctccataktatttccaaagttgcagagcagaaaagaggttaccaataaaattgggtagttctcatcccaattacagaattaggccaagttatcagatatgcaacaaatatccactcagaaagattgaatatttaaatattttaatttatgaagtattagcctattgctcagttaaagtattttggaaatttttctttaaaaaaatgtatcaaacttgtggttagatgacattactgactcattttgcatctgatcaaaacaaataatgcataaaacaaagcaatgtaagttataaagcattttaaaattgaaataagagatctttatttctgttgcatatcaaatgggatttattgacttccttttct

SEQ ID NO: 274829 - DNA, 542 bp, Homo sapiens
caggcttcccaatttgatactaattttaacctgacttttatatatcaatattaaagagacgaaaaataaatgtgattttctccagctctatatccctccaaggagagctttggaactgaaatcctaatcaggggatacatttttaatatttttgtctcaaatgaatttggagtcctccatagtatttccaaagttgcagagcagaaaagaggttaccaataaaattgggtagttctcatcccaattacagaattaggccaagttatcagatatgcaacaaatatccactcagaaagattgaatatttaaatattttaatttatgaagtattagcctattgctcagttaaagtattttggaaatttttctttaaaaaaatrtatcaaacttgtggttagatgacattactgactcattttgcatctgatcaaaacaaataatgcataaaacaaagcaatgtaagttataaagcattttaaaattgaaataagagatctttatttctgttgcatatcaaatgggatttattgacttccttttct

SEQ ID NO: 274830 - DNA, 542 bp, Homo sapiens
caggcttcccaatttgatactaattttaacctgacttttatatatcaatattaaagagacgaaaaataaatgtgattttctccagctctatatccctccaaggagagctttggaactgaaatcctaatcaggggatacatttttaatatttttgtctcaaatgaatttggagtcctccatagtatttccaaagttgcagagcagaaaagaggttaccaataaaattgggtagttctcatcccaattacagaattaggccaagttatcagatatgcaacaaatatccactcagaaagattgaatatttaaatattttaatttatgaagtattagcctattgctcagttaaagtattttggaaatttttctttaaaaaaatgtatcaaacttgtggttagatgacattactgrctcattttgcatctgatcaaaacaaataatgcataaaacaaagcaatgtaagttataaagcattttaaaattgaaataagagatctttatttctgttgcatatcaaatgggatttattgacttccttttct

SEQ ID NO: 274831 - DNA, 448 bp, Homo sapiens
tttacattggggacaagtacataatgtagtcatcaatttgcttagattctgaaataccattcatttatgtacatattttctctattcaaatgtactattcacatcacttgtcaatttgcatatattaaatcatcatgcaaaatttaccatattttgartattttattaataatgacccttttctacaatttttatatgcacttaaattttaaacagccaaacattcaaaggcttaaaaatcaacacttgaattttaaaatactatttgtatgaaatgaaatatttaattacaaatgttaactatatgttattgctgtaactattgggatagacagtgggcagttagtataagctactttgttaataaataaaattttaaaaataatcaatggaatgttcatttcaaactactttgttatttcatttcatttaaatttagcataaactt

SEQ ID NO: 274832 - DNA, 493 bp, Homo sapiens
atagggtaataataataataaatggtcataaaataaattagttaatggaaaatgrtagatattaattattgaatgataaagcacaatgtaaaacaaaatgatagaaataatcatactcacaaacataacaatctgtatgtagaagtctaggttttccaaattaaagctggttactcacaaaatccttgaaaagagtgagaagttggtggggtgattatatttttaagctatgaagtcagatagtgtgatgtttcatctcagtaccactataaaataaagttttaatcctgttcatgtcactcttaattttcactagctttttaggtaaggaaaattcatgtccatcccttccttgattcatctctttcaaaagcaacattttaaatggttgatgacttaacatcactgcaactattttctccttcatttaagaacataatcaaccatttatgtgagcatgtttattttacacctcaattttggctcaaggaat

SEQ ID NO: 274833 - DNA, 493 bp, Homo sapiens
atagggtaataataataataaatggtcataaaataaattagttaatggaaaatgatagatattaattattgaatgataaagcacaatgtaaaacaaaatgatagaaataatcatactcacaaacataacaatctgtatgtagaagtctaggttttccaaattaaagctggttactcacaaaatccttgaaaagagtgagaagttggtggggtgattatatttttaagctatgaagtcagatagtgtgatgtttcatctcagtaccactataaaataaagttttaatcctgttcatgtcactcttaattttcactagctttttaggtaaggaaaattcatgtccatcscttccttgattcatctctttcaaaagcaacattttaaatggttgatgacttaacatcactgcaactattttctccttcatttaagaacataatcaaccatttatgtgagcatgtttattttacacctcaattttggctcaaggaat

SEQ ID NO: 274834 - DNA, 482 bp, Homo sapiens
cttttgagaggcagacagtcactctggatctgcattcaaatttcaccctagaacttatccgcatgttaatactgcgtttcwttttttaatttttcactgcctttctcgcccaaaaagaaagaacgtaagctcttttagtcagggacagctattttttttctgttttctctttttcttaacctggcatgaagacacatttctggcatagagcaaatgaataataaatatttgttgaataatcttgcataagttaatccttaatttgtcaactgttgattcattttgctctgaaatcaatgacaataaaaaagaattgtacttctattttgtacttttttactcagagtaaatatttattgagatttaatttgtgccctgtaaactgctaaactcctaaatccattaggtctatttctcccatgaggtaaatatttgctcttcattgaggatatagccagcaaggcagaaactagtctaggact

SEQ ID NO: 274835 - DNA, 482 bp, Homo sapiens
cttttgagaggcagacagtcactctggatctgcattcaaatttcaccctagaacttatccgcatgttaatactgcgtttctttttttaatttttcactgcctttctcgcccaaaaagaaagaacrtaagctcttttagtcagggacagctattttttttctgttttctctttttcttaacctggcatgaagacacatttctggcatagagcaaatgaataataaatatttgttgaataatcttgcataagttaatccttaatttgtcaactgttgattcattttgctctgaaatcaatgacaataaaaaagaattgtacttctattttgtacttttttactcagagtaaatatttattgagatttaatttgtgccctgtaaactgctaaactcctaaatccattaggtctatttctcccatgaggtaaatatttgctcttcattgaggatatagccagcaaggcagaaactagtctaggact

SEQ ID NO: 274836 - DNA, 482 bp, Homo sapiens
cttttgagaggcagacagtcactctggatctgcattcaaatttcaccctagaacttatccgcatgttaatactgcgtttctttttttaatttttcactgcctttctcgcccaaaaagaaagaacgtaagctcttttagtcagggacagctattttttttctgttttctctttttcttaacctggcatgaagacacatttctggcatagagcaaatgaataataaatatttgttgaataatcttgcataagttaatccttaatttgtcaactgttgattcattttgctctgaaatcaatgacaataaaaaagaattgtacttctattttgtacttttttactcagagtaaatatttattgagatttaatttgtgccctgtaaactgctaaactcctaaatccattasgtctatttctcccatgaggtaaatatttgctcttcattgaggatatagccagcaaggcagaaactagtctaggact

SEQ ID NO: 274837 - DNA, 554 bp, Homo sapiens
ggacagctattttttttctgttttctctttttcttaacctggcatgaagacacatttctggcatagagcaaatgaataataaatatttgttgaataatcttgcataagttaatccttaatttgtcaactgttgattcattttgctctgaaatcaatgacaataaaaaagaattgtacttctattttgtacttttttactcagagtaaatatttattgagatttaatttgtgccctgtaaactgctaaactcctaaatccattaggtctatttctcccatgaggtaaatatttgctcttcattgaggatatagccagcaaggcagaaactagtctaggacttacaaacaatctgattttattatgtggagcaggtaacatcrgggtgaaaataactaagaaacaaagcaaggaatagtgatgaaagtattagcactagcagagaactaatcctttcctcatgatagtaaggtcaatgggagaaactaaagttccagagatccagtaatgagccatttcacagtagaattactgctggtgagaaatgggaccaggg

SEQ ID NO: 274838 - DNA, 572 bp, Homo sapiens
aagttaatccttaatttgtcaactgttgattcattttgctctgaaatcaatgacaataaaaaagaattgtacttctattttgtacttttttactcagagtaaatatttattgagatttaatttgtgccctgtaaactgctaaactcctaaatccattaggtctatttctcccatgaggtaaatatttgctcttcattgaggatatagccagcaaggcagaaactagtctaggacttacaaacaatctgattttattatgtggagcaggtaacatcagggtgaaaataactaagaaacaaagcaaggaatagtgatgaaagtattagcactagcagagaactaatcctttcctcatgatagtaaggtcaatgggagaaactaaagttccagagatccagtaatgagccatttcacagtagaattactgctggtgagaaatgggaccagggagaaatatgayctctgatgtaggtgtcattagaagcagagaaaacaaacaaacaaaaacagaagtggcccttctccttgccttttcctgtccttcaatctttggcttttgccttcccttgcct

SEQ ID NO: 274839 - DNA, 630 bp, Homo sapiens
gttatatgtttcggtgtgtggcgtgtgtgtgtgtgtgtataaaatgattctayattaaatcaaaaatttaacttaaaattttaaagatagagtaagggctgataataggtttaccaccaatgcacattttcaagcagttaagtgattctaattagtaagaaaaaaacctagcagtccgtacctagcatatgggctggcatatagttggcactcagtgaccgtcttttgaaagttattatgcccttgaggctgttacaattccaaaatgagatggagcaaagtttgtgatagttgtgatttcacttataattcacttataggtgttgaattctcagtaaggataatccaggtatttcacttccatttatcctttgtaacatttacttaatacacactttgtgctcttatcgaacttttctgttatatttttaaaaggtttatttgccctccaggttaactggagaaatagtgttttattcaaagttatgaagaaggacttcctcattctattatttctacacaaatatttattacaaatatatagattacttaagtagctacttatctgatgacttacaaaatgatttgagaacaatttaaagttacgtggtgtgctttctgtacacataa

SEQ ID NO: 274840 - DNA, 538 bp, Homo sapiens
tctgatgacttacaaaatgatttgagaacaatttaaagttacgtggtgtgctttctgtacacataacccacatactaagtaatttataaaaatccataaaataggaaattaacttraaggtcactaggctctcagaagaataaatgacctttgatgctggaaataacttactatttttttcaggttttgcataatatattatgtatcactgttctcaagatatttcttataaaaattaaaagaaaactcacacagaatgaactgttataaaatatgtaaaattttagaaactctcataattatatgaatacttaaagcactgctctggaaaaataattgaaagataaaaggatatttatcttaaatggtagtaattttcatgtttatttaaaataagcacagataaaattctgaaaaaagaatgataaagtgaactcagagtagaaaaatcctttagtagtgaaataacaggtaaaacaggactaaaatcttttaaataatgtacttaacttacttagttttgaaaatatcatcatca

SEQ ID NO: 274841 - DNA, 538 bp, Homo sapiens
tctgatgacttacaaaatgatttgagaacaatttaaagttacgtggtgtgctttctgtacacataacccacatactaagtaatttataaaaatccataaaataggaaattaacttaaaggtcactaggctctcagaagaataaatgacctttgatgctggaaatmacttactatttttttcaggttttgcataatatattatgtatcactgttctcaagatatttcttataaaaattaaaagaaaactcacacagaatgaactgttataaaatatgtaaaattttagaaactctcataattatatgaatacttaaagcactgctctggaaaaataattgaaagataaaaggatatttatcttaaatggtagtaattttcatgtttatttaaaataagcacagataaaattctgaaaaaagaatgataaagtgaactcagagtagaaaaatcctttagtagtgaaataacaggtaaaacaggactaaaatcttttaaataatgtacttaacttacttagttttgaaaatatcatcatca

SEQ ID NO: 274842 - DNA, 538 bp, Homo sapiens
tctgatgacttacaaaatgatttgagaacaatttaaagttacgtggtgtgctttctgtacacataacccacatactaagtaatttataaaaatccataaaataggaaattaacttaaaggtcactaggctctcagaagaataaatgacctttgatgctggaaataacttactatttttttcaggttttgcataatatattatgtatcactgytctcaagatatttcttataaaaattaaaagaaaactcacacagaatgaactgttataaaatatgtaaaattttagaaactctcataattatatgaatacttaaagcactgctctggaaaaataattgaaagataaaaggatatttatcttaaatggtagtaattttcatgtttatttaaaataagcacagataaaattctgaaaaaagaatgataaagtgaactcagagtagaaaaatcctttagtagtgaaataacaggtaaaacaggactaaaatcttttaaataatgtacttaacttacttagttttgaaaatatcatcatca

SEQ ID NO: 274843 - DNA, 538 bp, Homo sapiens
tctgatgacttacaaaatgatttgagaacaatttaaagttacgtggtgtgctttctgtacacataacccacatactaagtaatttataaaaatccataaaataggaaattaacttaaaggtcactaggctctcagaagaataaatgacctttgatgctggaaataacttactatttttttcaggttttgcataatatattatgtatcactgttctcaagatatttcttataaaaattaaaagaaaactcacacagaatgaactgttataaaatatgtaaaattttagaaactctcataattatatgaatacttaaagcactgctctggaaaaataattgaaagataaaaggayatttatcttaaatggtagtaattttcatgtttatttaaaataagcacagataaaattctgaaaaaagaatgataaagtgaactcagagtagaaaaatcctttagtagtgaaataacaggtaaaacaggactaaaatcttttaaataatgtacttaacttacttagttttgaaaatatcatcatca

SEQ ID NO: 274844 - DNA, 413 bp, Homo sapiens
caagctttttcactattattatatctgttatggtgatctgtattcagtgatctttgatgttgctactgtaatatggggagaaaccacaaaccatacctttaagagmtagcaacttaatcaatacatattgtgtgtcttctgactactccactgaacagaacttccctgtctctctccctctcttagtgactccaatttgtgagacacaacaatagtgaaattaggccagttaataaccttataataggctctaagtgttcaagtgtaagaaagactttcatgtgtgttattttaaatcaaaagccggaaatacttaagcctggcaaggaagacatgtcaaaagccaacttagatctaaagctagaactcttgtttttaacagttagccaagttgtgaatgcaaagaaaaaatt

SEQ ID NO: 274845 - DNA, 413 bp, Homo sapiens
caagctttttcactattattatatctgttatggtgatctgtattcagtgatctttgatgttgctactgtaatatggggagaaaccacaaaccatacctttaagagatagcaacttaatcaatacatattgtgtgtcttctgactactccactgaacagaacttccctgtctctctccctctcttagtgactccaatttgtgagacacaacaatagtgaaattaggccagttaataaccttataatrggctctaagtgttcaagtgtaagaaagactttcatgtgtgttattttaaatcaaaagccggaaatacttaagcctggcaaggaagacatgtcaaaagccaacttagatctaaagctagaactcttgtttttaacagttagccaagttgtgaatgcaaagaaaaaatt

SEQ ID NO: 274846 - DNA, 413 bp, Homo sapiens
caagctttttcactattattatatctgttatggtgatctgtattcagtgatctttgatgttgctactgtaatatggggagaaaccacaaaccatacctttaagagatagcaacttaatcaatacatattgtgtgtcttctgactactccactgaacagaacttccctgtctctctccctctcttagtgactccaatttgtgagacacaacaatagtgaaattaggccagttaataaccttataataggctctaagtgttcaagtgtaagaaagactttcatgtgtgttattttaaatcaaaagcyggaaatacttaagcctggcaaggaagacatgtcaaaagccaacttagatctaaagctagaactcttgtttttaacagttagccaagttgtgaatgcaaagaaaaaatt

SEQ ID NO: 274847 - DNA, 413 bp, Homo sapiens
caagctttttcactattattatatctgttatggtgatctgtattcagtgatctttgatgttgctactgtaatatggggagaaaccacaaaccatacctttaagagatagcaacttaatcaatacatattgtgtgtcttctgactactccactgaacagaacttccctgtctctctccctctcttagtgactccaatttgtgagacacaacaatagtgaaattaggccagttaataaccttataataggctctaagtgttcaagtgtaagaaagactttcatgtgtgttattttaaatcaaaagccggaaatactkaagcctggcaaggaagacatgtcaaaagccaacttagatctaaagctagaactcttgtttttaacagttagccaagttgtgaatgcaaagaaaaaatt

SEQ ID NO: 274848 - DNA, 582 bp, Homo sapiens
tcttataacttaatatatacattttgtaaggttgtagstgtcatagatagtgattcctctgatggatctgaaaaatcttctggaaaagatccaccattctaggtactattaggaacatttgtgattcatggaagaaagctaaagtatcaacattagtaggagtttagaacaagttgcttccaaccctcatggatgactttgaggggttcaagacttcagaggagaaagtaattgcagatgtaatggaaatagcaagagaactaggattaaaagtggagcctaaagatgtcactgaattgctgcaatcttgtaatataactaacagatgagcagttgcttcttatagatgaacaaagaaagtggtttcttgagatggaatctattcctggtgaagatactgtgaacattattgaaataacaatgaggatttagaatagtccctaaatgtaattgatagagcaatggcagggcttgaaaggattgcctctaattttgaatgaagttctactgtggataagtactatcaaatgatatcctatgctacagagaagtctttcatgaaagagtcattcaatgcagcat

SEQ ID NO: 274849 - DNA, 582 bp, Homo sapiens
tcttataacttaatatatacattttgtaaggttgtaggtgtcatagatagtgattcctctgatggatctgaaaaatcttctggaaaagatccaccattctagrtactattaggaacatttgtgattcatggaagaaagctaaagtatcaacattagtaggagtttagaacaagttgcttccaaccctcatggatgactttgaggggttcaagacttcagaggagaaagtaattgcagatgtaatggaaatagcaagagaactaggattaaaagtggagcctaaagatgtcactgaattgctgcaatcttgtaatataactaacagatgagcagttgcttcttatagatgaacaaagaaagtggtttcttgagatggaatctattcctggtgaagatactgtgaacattattgaaataacaatgaggatttagaatagtccctaaatgtaattgatagagcaatggcagggcttgaaaggattgcctctaattttgaatgaagttctactgtggataagtactatcaaatgatatcctatgctacagagaagtctttcatgaaagagtcattcaatgcagcat

SEQ ID NO: 274850 - DNA, 394 bp, Homo sapiens
aggctgagggaggggaattgcttgaacctgggaggtggaggttacagtgagccgagatggtgccattgcactccagactgggcgacggagtgagactctgactcaaaaaaaaaaaaaaaagaaaaagaaattcccacagccaccccagcctttagcaatcacaaccctgatcagtcagcaaccaccagtactgaggcaagaccctccagcaaccaaaacattatgactcactgaaggctcagatgattaacattacttagcaataaagctttttaaaattaaggtaagtacattatttgtttaaacataatactattacacmctttacagtacaatgtaaacataacttttatatgcattgagaaaccaaaaatttttgttgacttgttttatt

SEQ ID NO: 274851 - DNA, 568 bp, Homo sapiens
ggttctctttccatttctggccttaatatgaaatccttatactgtacaccaagtaatacatttaatgaagaccaaatctattggatatttgaaccactgcattccatgtaaaatgtgtctttttaaacctataatggacattaaaaatatgctcaatcaaatttyttggggcctcctgtgtcagtcttcctggaatcccttgagaagcgttgtcttagacatgatcggatgtgctctcaggtgaccttttctgtattaagatctccctttttattcataaaatgtcgatactgtaacacagagaatcctatatccacctggatttcagacctccacacatcctagtgcaccctggcttcagaaactccattttgcagtagcaatgccctcctttctcttcacaggcaacctctcttgcccctccttctgacaatctgtcagacagtcaccgatttttctttgctggcaatgcactgttaccagtaattgcagaaaccattaataaagtgggtgggagggggcaagggggagagggaagcgagacacaaagggaataagtattgtacat

SEQ ID NO: 274852 - DNA, 588 bp, Homo sapiens
tatgggacttaacttgcttatttaaagagaacagatcaccgctgttagctgggccaaatgtaagcttgaatttttagggacgatatggtatattctgcctatcaagttcttrctccctggggtccattgctctaaagaacagctgattcttggggctttagccatgaggaatactaagtaatcgatatttggctttcttttattagatgagcccaagaggcaggtatgatttttctaaaagtctacttagctcagttggttagaacatgatgctaatgagaccattatcttggtctcattttcttgtggtttaactttgcatagaagaaatttcttccatgctcacagaatttactcatgaagagaaacagtgtggcctgctcaagacaaagccatcatcacctctgggaaaccaaatcacagagcctaagctgttcctgtgtttctcacacctgttccttctttccattctgggaagaaaagtttagtgacctgtcacagcttgtttcagtaggcttctaatattctccgtgtctctagtctcttcccatcctaataatcctacacatgaaggccaggggcagctct

SEQ ID NO: 274853 - DNA, 588 bp, Homo sapiens
tatgggacttaacttgcttatttaaagagaacagatcaccgctgttagctgggccaaatgtaagcttgaatttttagggacgatatggtatattctgcctatcaagttcttgctccctggggtccattgctctaaagaacagctgattcttggggctttagccatgaggaatactaagtaatcgatatttggctttcttttattagatgagcccaagaggcaggtatgatttttctaaaagtctacttagctcagttggttagaacatgatgctaatgagaccattatcttggtctcattttcttgtggtttaactttgcatagaagaaatttcttccatgctcacagaatttactcatgaagagaaacagtgtggcctgctcaagacaaagccatcatcacctctgggaaaccaaatcacagagcctaagctgttcctgtgtttctcacacctgttccttctttccattctgggaagaaaagtttagtgacctgtcacagcttgtttcagtaggcttctaatattctccgtgtctctagtctcttcccatcctaataatcytacacatgaaggccaggggcagctct

SEQ ID NO: 274854 - DNA, 582 bp, Homo sapiens
ggcaaacaggcatatggaagggtgctaaacatcattgatcatcagagaaaagcaaatcaaaatgacaatgagatatcatctcaccccagttaaaatggcttatatccaaaagacaggcaataacaaatgctggcgaggatgtggagaaaagggaaccctcgtgcactgttggtgggaatgtaaattagtacaaccactccaaacaacagtttggaggttcctcaaaaaactaaaaatagagctaccatatgacccagcaatcccactgctaggtatgtacccaaaagaaagaaaatcagtatattgaagagatatttgcaccctcatgtttgctgcagcactgttcacaacagccaagatttggaagcaactgaagtgttcatcaacagatgaatggaaaaaaaaagtgtagtacttacacacaatggcatactattcagctgtataaaaraatgagatcttttcatttgcaacaacatggatagaacgtaaggtcattatattaagtgaaataagccaggcacagaaagacaaacattgcatgttttcattgatttatgggatctaaaactcaaaacaatt

SEQ ID NO: 274855 - DNA, 561 bp, Homo sapiens
aataagctaatatggaagacacttagtgtatataacaggtactcaaaaaacatttgttaaatagttgctggatgagttgagtgtgttgtttttttggggaaaagaaaaaaaaaagactgcctctcacataagacaaactgaaacagcagacaggatcctgggatacagtacagaaccatctcctgcccaagcagttgtcaactgctttcctcaagtattttctttttaaaaaaaaaatcagaccttttccaaccatgasgttagagaattcaggaaagcagaagaatgggctgaacatggcccatgtctggaagcaccaaaacatttatgttcaggaaaattggagagaaaaacaatttcataatgggtattaagttaattaaatttcatctaggcctgaaatacatgaaaacagaacaaaaaccctcccactttttaggttttttttttttttcccagctcttttacttggacatcttaaaattattcacaattaagtttttctcatataagtctttggagggtaacatcgttttcatttaaaaatgggaaatggaagca

SEQ ID NO: 274856 - DNA, 601 bp, Homo sapiens
acagcagcgtggagaatgaggtggcagactactctgatggccaaaacgaaggggtggctgtattgcatacatgtttttttcttggctatatgttatgatgttttcacatcttcaaaaacctctctggctgaggagataatgtcctcttctatgactagccagttcttagagatagccagggctcagctagaagcatgcctttgatatacaaatgaaccaatcctgagctgtagatcttcacctgccctgcacaccccaggaggcaatatgacttggccttaagcatcccatcagggccaggtacgggacaactaggggccatccctacagcctaaagccctctgaaattactcaaactagyccatcctaaactgttcaccctgcactgtctttcccatggaaacctcaataagggctctggcctcagtcttccccttgctgcctgtcttctgtctcctgaccacccttgtgtctttcccatgtggtcccatgtggtcccatatggtgtgctatgcctcctgtctttgggacccgtgagcataataaacattgttttttcctgagcttttcctgtgtctcctcttgtgatcacactggactg

SEQ ID NO: 274857 - DNA, 562 bp, Homo sapiens
ttatttgggaataaaatgggaggcaagtttgcctaacacagttcccagcttgacttttccctttggcttactgattttggggtcatgagacttatttttctttcaaatttccacccttttctttttaaaaatctttcagagaaagcattttagaagaaaatgagtctctgttctcaagttttgtctaccccaaaccttatgaatggaaccttatttgcaaatagtctttgcagttacaattagttaaggggaggtcatcaaggtgggccttaatccaatatgacttatgtgttttataagaagagggaaattttgacagacacacagagaggatagstaggtgaagacagaggcagaaatcagaatgatgtatttataagccaaggaacaccaaaaattgacagtcatcgccagaagctaaggagagaggtgtggaatagattcttcctcacagctgtcagaagaaaccaacccggttaacacttttagacttctggcctccagaactgtgagaaagaataaatttctgctatttgaaagtcacataatttgtggtactttg

SEQ ID NO: 274858 - DNA, 573 bp, Homo sapiens
aatgacatacatacatacatacatacaaaatacaaagatacaatgccttccataaacaagcttacaatataataggagaggcaaaaaagggaatcacgagttacgacacagttaattgcaaagatacatgtgtgcacaagrtgttaattgtagaagagagaacttcaacccaaatttcagtgaatagcagtgaatatccagggctattcaatggatagcccaaagcaatggggaggaaagccaagggaagacagagcaattaaaaagggaaggctttatgaaggagagtgagagaatagtatatggcacgttgaaggtggtcaatcaattttgactgaataaaggaataagctaattacgatcttacaatttactattgaagcatgattgggtgtttgagtagatgaagaggcagaagattatttttaaagagattcagagattatagaatcattggggaagtttgagttatttgacatggttggaggtgtgagagcatgtattagaatttgaatattaagaggtagtcaggtgccaaatcacacatggctttctatgtcattttaagacatt

SEQ ID NO: 274859 - DNA, 595 bp, Homo sapiens
ccctttagtcatacttaatttccatacaaaaacaatatcaaaatcatgtattcagtattttgtataaccaaaaatatgctaaccctctccccaaaaaggatgcagtcatactttttgaatgatattatttaccatctaggacagtcatgtccctctttgacatcctgtaagttaaatactaatatttgatgttagctattactattacttgttatgttagatcataggagagtggtaraaggaaaaaattattaaaatagacacaaatattttcatatcaaaataataaggaaaaaatgtgattattacagtactcatttctgaaaactggatgcataacagctaatattcatcatgtctttctttcactgccaatttcatgtatactttgcccacaccaagcaccttagcatgtagagtgacccaaagtttcatttctcaagggtcaggccattagtcattttctgtgtatggaattgttgtagtttattcattgactttaactgcagaaattgaaactactatgaagtttcccagaagatttcctgcattcccatacagacttctctttaacctactgtgcagtagaaaatca

SEQ ID NO: 274860 - DNA, 545 bp, Homo sapiens
aaattccagctctttccatgagggaggcaatctaatgtaacagtctgtcacagttggctgctggccaccacaatgaatggtgtcatattggggcccacatgctggtctctgctcttgacagatcaggcattcagcagtacctgtagctagtcactgttgatgactggaagtccatttgctgaatccatgcataacctgcattcccactaccatggacagtttgtgagcccattgggcaagaaaaagaatggctgaagttagmatgtgtcattttgtccatattattatgaagctccttgatatggttaggtattgtgtccccacccaaatctcatcttgaattgtaatcctcattatccccacatgttgagggagagacatcttaggagatgattggaacatgggggcagtgttctcataatagtgagtgagttgttgtgaaatctgatggttttataagtgtctgacagttcctccaaacacactctcttctctcttgcctgccaccaattaagatgtagctttgcttctccttcaccttccac

SEQ ID NO: 274861 - DNA, 570 bp, Homo sapiens
ttacaaaatacatgcattaaccttttgtaaaaatgtcattatgcatgcatgttcacacagtgccagtgaatatcggatgttactcaaatccactctaccattcctaatcaagtcaaacaaacttcttcygacttctttcactcaacaattaattgttttaaagaaattttcaataaggctgtggagtagagctacattttaagagtttgaaatagtagttgcctttatttttactgaagaaaatttcagaaaatgtgctggtcagttctcccacatattgtaggggtgggcattacctctacttatgttactttttgcctcatatttatctgatggtgcaggaacatgcatgaacatgtgtgtattctgagattaattaggagattcccatttatttcctgtgttgtacttttgggtttttttctcccatattatatgcagagttcccataccagtgcttctcaagtttctcaagtgtactcctggaatcaatgaatggcgaggtttcattttaaaattatgatccagtctgtgttctcataatgacttgttaatagcatatgaaatatt

SEQ ID NO: 274862 - DNA, 570 bp, Homo sapiens
ttacaaaatacatgcattaaccttttgtaaaaatgtcattatgcatgcatgttcacacagtgccagtgaatatcggatgttactcaaatccactctaccattcctaatcaagtcaaacaaacttcttccgacttctttcactcaacaattaattgttttaaagaaattttcaataaggctgtggagtagagctacattttaagagtttgaaatagtagttgcctttatttttactgaagaaaatttcagaaaatgtgctggtcagttctcccacatattgtaggggtgggcattacctctacttatgttactttytgcctcatatttatctgatggtgcaggaacatgcatgaacatgtgtgtattctgagattaattaggagattcccatttatttcctgtgttgtacttttgggtttttttctcccatattatatgcagagttcccataccagtgcttctcaagtttctcaagtgtactcctggaatcaatgaatggcgaggtttcattttaaaattatgatccagtctgtgttctcataatgacttgttaatagcatatgaaatatt

SEQ ID NO: 274863 - DNA, 627 bp, Homo sapiens
ttttgcctcatatttatctgatggtgcaggaacatgcatgaacatgtgtgtattctgagattaattaggagattcccatttatttcctgtgttgtacttttgggtttttttctcccatattatatgcagagttcccataccagtgcttctcaagtttctcaagtgtactcctggaatcaatgaatggcgaggtttcattttaaaattatgatccagtctgtgttctcataatgacttgttaatagcatatgaaatatttggtcatttccttcttcaaacacttcttcctcttggctcttttggtgctttatctacatgactgcttacttcctcccaggctcttctgttgcattttcttaatctccataacctttaaatgttgtagtcaccaaggcttggttttttcttccttatctactcttatttctaaatgatctcctccttcttggtttgaaagaccatgctatgctaattgccaaatttataccatctcagaactctacgctaaatttcagactcatatttaattactarctccatattttcatttggatatctgatagatgtcttaaaccacatgttgaaactcaactcctgattccccacactcccccaaaactcattgat

SEQ ID NO: 274864 - DNA, 636 bp, Homo sapiens
tattaggtttgggtctctgggctcaaaatagaggagcagcaaaccccccactgaataaataagtggatatcataaaatcatatgctttgtgtgtcacaaaggaggttggattgtagcctgcaagttatgtaaagccactgaaatattttaaacatggtcatattggcaatcaaaaaataattctgggtagatggattagaaaatgggagttagaaagctactgaaataatgtatgtaaatttataagagatttgcccaagaaaataaatgaaaaggggcaatacagaggtaagagatgggaaatagtttaaaccaacgtaatattaaggtcattttgaaacaagggaaaacaggtaatttaggatgattcccagatttccaggtcaagaaggtagaaatattttgatagtttgtaaactagaaaaggaataagttgamaatgaaattgaatacaaaatttccattctgaacacattgtgtttaggataaatatgcagcacataagacttaagccatttaagaaggttgtggaacatcccagtggaacattcagtaagaagagaccatttggaagagatctgagctgcaggtggaaatttggagatcataagtatatgtgtgtccattaaaaccata

SEQ ID NO: 274865 - DNA, 636 bp, Homo sapiens
tattaggtttgggtctctgggctcaaaatagaggagcagcaaaccccccactgaataaataagtggatatcataaaatcatatgctttgtgtgtcacaaaggaggttggattgtagcctgcaagttatgtaaagccactgaaatattttaaacatggtcatattggcaatcaaaaaataattctgggtagatggattagaaaatgggagttagaaagctactgaaataatgtatgtaaatttataagagatttgcccaagaaaataaatgaaaaggggcaatacagaggtaagagatgggaaatagtttaaaccaacgtaatattaaggtcattttgaaacaagggaaaacaggtaatttaggatgattcccagatttccaggtcaagaaggtagaaatattttgatagtttgtaaactagaaaaggaataagttgaaaatgaaattgaatacaaaatttccattctgaacayattgtgtttaggataaatatgcagcacataagacttaagccatttaagaaggttgtggaacatcccagtggaacattcagtaagaagagaccatttggaagagatctgagctgcaggtggaaatttggagatcataagtatatgtgtgtccattaaaaccata

SEQ ID NO: 274866 - DNA, 620 bp, Homo sapiens
agtttgcatcatcttggttttcttgtctttggattggtttcagccaatgggaagcacaaacaggaaatcagagggcagaagaaattagaaatctgagtatttaccttcctttaccactctctttgcctgctacaattctgtcagtggttcgtcctacaattataggttgtatcacgtggctcctccttcatggccctaagacctctctgggcttcaccactaccttactttcccctgattcctttggttccaagggattataatgggttcttgttgtttttctgtgtgtgttttgccattattagcttaagatatccttaaatctacttacaactctgtaaatagtccctttgttcaagaaacactcagttatcaaatgtttcttagaacaccctgaaaattcataccttaattttcatttacattatagagagtggaggaagggctgaggagaatgaaaattttggggaaaaaaaggatcagtttcacatcaacttcagatataccawcttcataacaataaaatgggactttagcattataaaacatctatcatctatctatgtatctatctatctaatctatatacctacctacctacctacctacatatctatcta

SEQ ID NO: 274867 - DNA, 619 bp, Homo sapiens
gtccagacatttaatagctaataacaaatcttttgcttaacacacccacacatggtatatgagttattttttaatgctcctttggaaaaattaagatatcatgattcaaaatgttatttgggcaacaaagaaaaaatgactgcatttgccaacaaccaagaataatttcactgggaattctctacttcatattttctcttgagatttttaataggcttttaaagaagattctgagctgggaactaatccaagaaataaagaaagccaaggggaaaaagtaataataatagasagttgtacttgattgtttccatggtcagggcctcctcctgagtgacagataattcatcttctgtcagtttccattgcctagagatcattctaagtattgttatcagcaaaacctccataaaatgaaggattttcaaacaggaaaccagatgtgatggggtcaggccctgcatgtgatggggatatttgggttaatgatgactgatgccatatcacatttcataaagtacacacttgccaaatcaggtatttttcccgtcacataggagcagttgctaagttcctttatggtaaagcaccaaggtgaatgaggaaggagtgaacacaa

SEQ ID NO: 274868 - DNA, 540 bp, Homo sapiens
ggtaaagcaccaaggtgaatgaggaaggagtgaacacaaaagaaaggtggcataataaaacaaagataatcwcattgcatattgtataagatttgcatgataatctgtcctaaatgtctgttatttatctgggaattctaaaacatttcaattttttctgtacctacaacatacaccatgtttttgtttcctgtttgtttgtttggggtctacttttaactttgtttctctaaattaatatattaattacattaactgtgtccttactgtaattactttatcaaaatcaatgattgaagtggtgaactcttaactttttcatcacatatgtcatgatttggggaaaaaaagtcactcaaaatacaaatgtattatcgaacaacactgccttctatttgacggtacatgtaaaggtagtgatttaattaccaatcttgctttagtaacaagtaggctttctttgtgtgatattttaatatgggcatatatttagattctctaagaggacaattttcaaacatgctcaagggaaaaagagcc

SEQ ID NO: 274869 - DNA, 607 bp, Homo sapiens
ctgagccatgaaaggcccagatatttggctaaatattagctctgggtttctctatgagggtgtttctagatgagattagcattttaatcagtagactgagtaaaacagattgctctcttcaatgtggattggcataatctaatcttttgagggcctgagtaaaacaaagatagccaaagggagaatttgctctttttctctctgcctgactgttgaactgggatactggtctttttcccttggactgggatgtgcaccatyggctctcctcattctcaggactttaggctcagctggaactataccattagttctcatggtttgggcgtcttcagacttggattggaaatataccaccagctctcctgggtctccaacttgccaaatgaagcacatgggacttctcagcctcataatcatgtgaatcaatttcttataatttctctctctttcttcctctcttcctttctctctcatttttctcacttcaatattttttgtttgtgtttctctggagaaccctaactaatcacattttagaactaagaagtgagatgctgttgtaacaaataccaaaacatgtgaaaaggctttggaagtgggtaat

SEQ ID NO: 274870 - DNA, 577 bp, Homo sapiens
  misc_feature (1)...(577): n = A,T,C or G
accctcttgttgtccctcatcaatatccctctctttcatggacctatgagtaataaacttcttttatgtcaygtgtttttgttgtgtgggttctctgggtctcacccagctgacacaccaaaacctaacctttctctgggtcaagttctctctagagagtagctatctttgcagaagtaaactagtcaaagatcagacaagagccactagggtgtctgccagtataaacaaatttcctgggagagggacaactggtcatgagtcagacatttaggctgattgccaggataaagaagtttcctgtgaaagacacagtgtaagcatctatgatcaaatctcctggaaccctatcagggatgggctagagtttatggccactctccagagagagatgtcaacgtcaaatttgaaagaaacaacacaggaggtggcactgaactctggaggggacagtggtttatcatcactggtatttatgtttctgagtgtgggttttcttccacttcccacattctcttaattggcatcattatcttnnnnnnnnnnnnnnnnnnnnnnnnnnnnnnnnnnnnnnnnn

SEQ ID NO: 274871 - DNA, 577 bp, Homo sapiens
  misc_feature (1)...(577): n = A,T,C or G
accctcttgttgtccctcatcaatatccctctctttcatggacctatgagtaataaacttcttttatgtcatgtgtttttgttgtgtgggttctctgggtctcaccmagctgacacaccaaaacctaacctttctctgggtcaagttctctctagagagtagctatctttgcagaagtaaactagtcaaagatcagacaagagccactagggtgtctgccagtataaacaaatttcctgggagagggacaactggtcatgagtcagacatttaggctgattgccaggataaagaagtttcctgtgaaagacacagtgtaagcatctatgatcaaatctcctggaaccctatcagggatgggctagagtttatggccactctccagagagagatgtcaacgtcaaatttgaaagaaacaacacaggaggtggcactgaactctggaggggacagtggtttatcatcactggtatttatgtttctgagtgtgggttttcttccacttcccacattctcttaattggcatcattatcttnnnnnnnnnnnnnnnnnnnnnnnnnnnnnnnnnnnnnnnnn

SEQ ID NO: 274872 - DNA, 610 bp, Homo sapiens
atgaagcacttttagaaggtaatggcaagcattggaatctaagattttgtattggtattgactaagatcactaatgaaaacaaaaaaagtagcaaataagggccaaaatagttcttcgtaggataccaattaactgctaatctgtttgctctaataggccactattagaggaaatgataaaattagctatgcacataagaaacatttattgcctacatattacttttgccctgagaccaatgcaattcagcaaacttgtacaataaaatcagccccaaaagrgtttaacaaacacaagtttttacctctacttgcttgaataagggttttatttaaaaaaactaaaatcctaaatagtcaaagaagtgagaaaaatctgtttctttaaatgagttttgaatactccttttttaaacttctgaattgctttctgcatctagaatgctatctaaatccctgctgatttatccttatactttcagcaggatttcattgctcctgggcaccagacagtcttgttaataatggcaaatcctttcagtccctctttggtgcaaggtgggctttgattgacaaggtaataaaagtgttaatgagacagagtggcaca

SEQ ID NO: 274873 - DNA, 542 bp, Homo sapiens
aggttccagggcacgcatggggtggcgccccagaatgcacgctcctgagcgggcttcccactgtcctgcgggacatccaygctggggagtatctgtgtgtaattatctgcacttagaacagaactccattttacataaaaacaccaaactgtttccccggctttaataaaagctgagttttccaggattacaactggagatggaacaaactgaactttgctttgtttgaaatattgcactgagttgattcttgtttcagaaaattgtgtcgccaatggcaatggcgatgactgtgcctgaggcacccatgcaacctgaggagtcagcctgcttgtgcgttcatagcgatacccccaagaggcgaagcagctggcagcttcctgcattttctggtgaagacctatctaagcaggtacatatgaaaatacacctaattttactataagctacattcttcttatttctcatttattttacaattaagatgcatattgattctttgaaattatgtgtgtagataaattatatttcaggataagaaa

SEQ ID NO: 274874 - DNA, 542 bp, Homo sapiens
aggttccagggcacgcatggggtggcgccccagaatgcacgctcctgagcgggcttcccactgtcctgcgggacatccatgctggggagtatctgtgtgtaattatctgcacttagaacagaactccattttacataaaaacaccaaactgtttccccggctttaataaaagctgagttttccaggattacaactggagatggaacaaactgaactttgcyttgtttgaaatattgcactgagttgattcttgtttcagaaaattgtgtcgccaatggcaatggcgatgactgtgcctgaggcacccatgcaacctgaggagtcagcctgcttgtgcgttcatagcgatacccccaagaggcgaagcagctggcagcttcctgcattttctggtgaagacctatctaagcaggtacatatgaaaatacacctaattttactataagctacattcttcttatttctcatttattttacaattaagatgcatattgattctttgaaattatgtgtgtagataaattatatttcaggataagaaa

SEQ ID NO: 274875 - DNA, 542 bp, Homo sapiens
aggttccagggcacgcatggggtggcgccccagaatgcacgctcctgagcgggcttcccactgtcctgcgggacatccatgctggggagtatctgtgtgtaattatctgcacttagaacagaactccattttacataaaaacaccaaactgtttccccggctttaataaaagctgagttttccaggattacaactggagatggaacaaactgaactttgctttgtttgaaatattgcactgagttgattcttgtttcagaaaattgtgtcgccaatggcaatggcgatgactgtgcctgaggcacccatgcaacctgaggagtcagcctgcttgtgcgttcayagcgatacccccaagaggcgaagcagctggcagcttcctgcattttctggtgaagacctatctaagcaggtacatatgaaaatacacctaattttactataagctacattcttcttatttctcatttattttacaattaagatgcatattgattctttgaaattatgtgtgtagataaattatatttcaggataagaaa

SEQ ID NO: 274876 - DNA, 542 bp, Homo sapiens
aggttccagggcacgcatggggtggcgccccagaatgcacgctcctgagcgggcttcccactgtcctgcgggacatccatgctggggagtatctgtgtgtaattatctgcacttagaacagaactccattttacataaaaacaccaaactgtttccccggctttaataaaagctgagttttccaggattacaactggagatggaacaaactgaactttgctttgtttgaaatattgcactgagttgattcttgtttcagaaaattgtgtcgccaatggcaatggcgatgactgtgcctgaggcacccatgcaacctgaggagtcagcctgcttgtgcgttcatagcgataccccyaagaggcgaagcagctggcagcttcctgcattttctggtgaagacctatctaagcaggtacatatgaaaatacacctaattttactataagctacattcttcttatttctcatttattttacaattaagatgcatattgattctttgaaattatgtgtgtagataaattatatttcaggataagaaa

SEQ ID NO: 274877 - DNA, 470 bp, Homo sapiens
acactgcaaacagggataaaacttaaagaatcacaagtgtactttgcctgtgtttaaatatttccctcgcttggaaaaaaataagaaaacagtattcaaatacaagcacaagaaaccaggagcacgtttgttggtctgctctgcctctgccttccgtgttggttattaatcaagtgacagcggccttctaagaaagactccagctgatcatgtttctctgtgcagcagacaacacagagatcactccagttttcttctaacttctcagagaagacagatcatccwcagcatggagctatgagtgtacttcataacatacatgactaagaacacacatccattaggatggctactatcaaggaaaaaaacagaaaataacaagtgttgtcagggatgtggagaaattagaacccttgtacaccgttggtgggtatgcaaaatggtgcaaccactgtgaaaaacggtttggt

SEQ ID NO: 274878 - DNA, 546 bp, Homo sapiens
gctccacagtttttttggtggggggaggctgggggaagaagtcttactctgtcgcccaggctggagtacggtggcacaatcttggctcactgcaacctccacattctgggttcaagcgattctcccgcctcagccacccaagtagctgagactacaggcgcatgccaccatacccagctaatttttgtatttttagtaaagacggggtttcaccatgttggccatcctggtcttgaactcctgacctcaggtgatctgcctgcctcggcctcccaaagtgctgggattacaggtgtgagccgccgtgcccaaccagtagctccataattaatatattatagtagatgataaatgaagatcttttgagaaattacaaggaaagattactcaacaagctaggctttgggttcgacacaatcatcttaacaagaacaaacaygacagtttctagatgaatatttttaagacttattttgatactaacaaagacactttcattgtcccccaatagaaatttctattttaaccagtatggcttatgctcag

SEQ ID NO: 274879 - DNA, 448 bp, Homo sapiens
ggagatggaggctgcagtgagctatgattgtgccactatgctccaatctcagcaacagagtaagatcttgtttctataaaaagataaacaaggaaaagacgacacggagccacggagaatggcctgcgcctgatgatactcccacacatccttctgtaactcactgccaccagacacatttcacccagcgctggtcctggtatcagctgttaagacttcatttatttggtactttctacctaaaagatcactataaatacccaagttctcgcattttctcctgctgactcattgaatcatcaagggcccttgtcacaatgtgcaccacacaccaaaatatgcccagtggtcagcaaggtcatttctcattgcaggccttaggagcygccctgttgctgtaagctggctagcacctccttggccttctggaaactctcatgtatcctgc

SEQ ID NO: 274880 - DNA, 459 bp, Homo sapiens
agtaataaaataagccattgattgtgttaaaactcaaggtgggtcatttaattgcagttattaaaaagttctttcattatttacctctgggagagactgtaggtaggactgtaagattattaatgaaaatgcgtgtagattggtttaaatgattcagcttcatctcaccaaggagttagcatgttcattcattttacaaaagtgtattgagcacctcgcctactatgtcttgagtaatttgttagacatacaaagttgactaaaacatggactctgaccccaaggctaaaatgttatttcacatgtgcacagtgctttacagattacaaatgacatcattacrtcctcataagaatctcatgaagcagatgttggttccatttcattcatgatgaaactaaaacatagaaaacataatagtctccccaaggctgcctgtagcacagttccttagattcc

SEQ ID NO: 274881 - DNA, 598 bp, Homo sapiens
gaagtgagacctgtgctttagctggacttagccatcactgaaccagacacagatgctttggtgaagggtgcaaaaaggtcatcccttcatccctctcagaaatgaaagtgaggtagttgacaataatgaaaaaacgttttatttattaaaatgggtgatcattaaaaatgtctatttaaaatgagaagtctgtgtttgtgaatgctgaaagctgaggaatattaccattggtcagtggttcttaattctggctgcacagtgcctgaggtgtgttaaaaagctcccgatgcctgggcattgtctggatcaactgtgtgttagtttcctattgttactaacagatgacacaagctttgtggcttaaaacaagacagatttgttatcttacagttctataggtcagaagccccacatgagcctcactgggccaaaatcaagatgtgggcagagctgtgtgtttyctggaaatgccagggagactccatttctttgccttctccagcttctagagtctgcccacatttttgccttgtagccccctcctccatcttcacagccagcaacaaagtcctggctgggggtcctccccacaccacat

SEQ ID NO: 274882 - DNA, 602 bp, Homo sapiens
taattagaaggtctggggcatttggaaataggaggtttcagttagaatagttttgctggtgttgccatttcacaacttctggctggggcaagagagggagaagggtagtgttgttacattgactgaccatggggaccacttcaagtacagatgtgaggacaggaggaggcagccagatgggagaaacttgggggaccaaagtgaccacagctgtaaagagcaggaaagaggggaactgtagagtrctggaagcctgaaggctgtgtctcaacacgggagagaggactagagggggataaagactttaccagccttgtgaccccaacttctagtagatggccacccacacatgacaggtattaatataagttggtggtgggatgaagaaaccataggtaacataggtctcattatgcccattttgcagatgaccagagacacttactgttttgtttaaggtcacacagctagaaagtgctagggccaagacccgaagtcaggtctccagagtcctggcctagggctctttccttcagcacattgtcactctctcaggctttgccacttgcctccatcacacctactcggagccaacctcctat

SEQ ID NO: 274883 - DNA, 518 bp, Homo sapiens
gtgggctcccacagccttgggaagctccacccctgtgggtctgcagggtatagcctggcattgagtgcctgtggcttttctaagtgcatggtgcaagctttcagtggatctacctttcgggggtctggaggatggtagacctcatctcacagctccactaggcagtgccccagtggggaaactgtgtggggcttccaaccccacatttccctttcacactgccctaacagaggttctccatgagggctctgccccggcagcagacttctgcctagacattcaggtgtttccatacatcctctgaaatctgagcrgaagttcccaaaactcaactgttgtcttctgtctacccacaggcccaacaccacatgcaagctgccaaagcttctatgtagtactgggctgtggatagcaatggtctgggctgtaccttggctccttttagccatggctggaactggagtgactgggatgcagggcaacaagtcccaaagcttcacagagcaatggggacctgg

SEQ ID NO: 274884 - DNA, 568 bp, Homo sapiens
gcttcttgaagggtaaatcatttccagaatattttcaagttattttgcccagattcattggaggaatcactatctatggtggctatagccttatgaaatatatttcctaaatgataatacttgaaagtagaaattactccctgatccatgggttgcagaatrtatgttgtataagaaagcactaaaataacattaatctccttgcacatcttcattagagttcttgggtgaccaggtgcattgttcaatgaacagtaatattttgaaaggaatcttgttttctgagcaataggtctcaacagtggtcttaaaatattcagcaagtcatgctgtaaacagatgtgctgtcatccaggctttgatgttccatttatagaagacaggcagagtgatttagcataattcttaagggccctaggattttcacaatggtaaataagtactggctttaaattcaagtcactagttgcattagttcctaacaagagattcagatggtaccttgaagctttaaagccaggcattcacttctctgtcactatgaaagtcctagttgttatctacttcc

SEQ ID NO: 274885 - DNA, 568 bp, Homo sapiens
gcttcttgaagggtaaatcatttccagaatattttcaagttattttgcccagattcattggaggaatcactatctatggtggctatagccttatgaaatatatttcctaaatgataatacttgaaagtagaaattactccctgatccatgggttgcagaatatatgttgtataagaaagcactaaaataacattaatctccttgcacatcttcattagagttcttgggtgaccaggtgcattgttcaatgaacagtaatattttgaaaggaatcttgttttctgagcaatagrtctcaacagtggtcttaaaatattcagcaagtcatgctgtaaacagatgtgctgtcatccaggctttgatgttccatttatagaagacaggcagagtgatttagcataattcttaagggccctaggattttcacaatggtaaataagtactggctttaaattcaagtcactagttgcattagttcctaacaagagattcagatggtaccttgaagctttaaagccaggcattcacttctctgtcactatgaaagtcctagttgttatctacttcc

SEQ ID NO: 274886 - DNA, 568 bp, Homo sapiens
gcttcttgaagggtaaatcatttccagaatattttcaagttattttgcccagattcattggaggaatcactatctatggtggctatagccttatgaaatatatttcctaaatgataatacttgaaagtagaaattactccctgatccatgggttgcagaatatatgttgtataagaaagcactaaaataacattaatctccttgcacatcttcattagagttcttgggtgaccaggtgcattgttcaatgaacagtaatattttgaaaggaatcttgttttctgagcaataggtctcaacagtggtcttaaaatattcagcaagtcatgctgtaaacagatgtgctgtcatccaggctttgatgttccatttatagaagacaggcagagtgatttagcrtaattcttaagggccctaggattttcacaatggtaaataagtactggctttaaattcaagtcactagttgcattagttcctaacaagagattcagatggtaccttgaagctttaaagccaggcattcacttctctgtcactatgaaagtcctagttgttatctacttcc

SEQ ID NO: 274887 - DNA, 629 bp, Homo sapiens
tttcacaatggtaaataagtactggctttaaattcaagtcactagttgcattagttcctaacaagagattcagatggtaccttgaagctttaaagccaggcattcacttctctgtcactatgaaagtcctagttgttatctacttccaaaataaggctgtttcttctacactgaaaatctgctatttattgtagtcgcctttatcagtgattttacctagattttctggataacttgctgccgcttctatatcaggatttgctgcttcatcttgcatttttctgttayggagatggcttctttccttaaacctcaggaaccgatttctgctagcttcaaacattcttctgcagctttctcatccctctcatccctcagagaattacagagagttagggtcttgctctggattaggtttttgcttaaagaaatattgtagctggtttgattttctatctagaccactaaagatttctctatatcagcaatagggctctttcacttatttattttttatcattcctgtgttcactggaggagcacttttaatttccttcaataatgtttcatttgcactcatgacttggctgtttggtgcaagagggctagattttcagcttgtcttggct

SEQ ID NO: 274888 - DNA, 565 bp, Homo sapiens
cctgtgctgttctcttgatagtgaatgagtctcctgagatctgatggttttaaaaatgggagtttccttcaagaagctccctytttgcctgctgccatccaggtgagatgtaacttgctcctccttgcctaccaccaggattgtgaggcctccccagccatgtggaactctaagtccattaaacctctttattttgcaaattgcccagtcttgggtatgtctttatcagcagtatgaaaatggattaatacaggttcttgaactcttagaggccatggtagggttattaattgttctaatttcaatattgttgtgtctcaggaaatagggaggcccaaggagaagcagcaagattggggaatggttggtagtggaacagccagaggacacgtgacatttattgattaaatttgccatcttatgtgggtgcagtttgtggcaccccaaaaagaatacatagtgacattaaagatcactggccacagataaccataacacatataataataatgaaaaagtttgaaatattgcaaggatctccaaaatgtgacacagacacaaagcg

SEQ ID NO: 274889 - DNA, 508 bp, Homo sapiens
actggtgtgggggcatttctgagctccaggtgacccacctggctttatgtgatggcagattgtgaggcagcagctcctcaaacccagtccttgaatgaaagctaaagataccttgcccaatctctaggcaaggctgtgcttgtctcacgggagactgtgmttttcctacacaggctgatgaatggtgggggcacccacctggatcagcttccagaagagtaagtcaaaaatacagagttattgagaaagcctcaactaaaccttattgaatttctccttgtatttcagcatttcgggcaccattcccttggcatgtgtttatccttgacatttctaaaatcaaaccccacatctcacaggcatagttcagagcaggaaaaggtaagattgatatccctgtctaaaatactatgccaggtttcccagaaatcacttgacatttcaggttcttttactaagtgagctgaatggaccaaaaatgtaggcaaacagaaacatacttctaatt

SEQ ID NO: 274890 - DNA, 416 bp, Homo sapiens
tccactaggaagcatagaattctagaaatggtagcatttcactaaacctgttagtgggcatgtatgtctctttctaaaagacaattatttcattctacaaacattgactaggcacttgctatgagccaggtacagtcctaggcattggggatgtggtgggaaaggaaagaaatacagccctggtccccatggaatttaccttctactggggagagatagaaaataattttacaaatgtaatataatattaatgaatgattagggctacaaaraaaaatcaatgagggtaaaataatggagaaagatggaagagagtatatctcggagtaaggaggttagcaaagaccttgttgagcagagaatatggtgggaatagccatgcagatatctcggtaagattattctaggccgaggca

SEQ ID NO: 274891 - DNA, 544 bp, Homo sapiens
ggggttttgaatgcacctacacacggcctttctataatgaagctgcctggcaccgggctgcattggggacttaatgtgttgttatccgatttagctctgaccccaattcagcaaggtcggtattatttcccctattaatcagatgaggaaatggactccaaagagttgggtaacctggcgtaggtcacacagctagttagtgacagagatgggatttatgctgtgtggactctccagcacctgggacagctgcccttgctagtgtcttttcaacaactcctcataaagccatgatgagccagygggtttcccgggactcagagctagcctgcttgacattgatgagatactcaggccggacctccagctggctttatctgcaagaatgttcctgaccagaggaagtgagtgctattctaagccaaaagcacagcagaatagcagaagctgccagaatgttggtgtgggtaacactgccttggacagaatgcttctgggtgtgaggccctgtccaccgcctgtgtttggatggtttgagtcatcc

SEQ ID NO: 274892 - DNA, 570 bp, Homo sapiens
cgtaattcttgtcctaagggtttttcatttcctgtttagctcagtctgaaaatctagtcctggaagagcggtattatccctgcctctcagacaatccatattgcctttgtagcatcctcagcaaggggttagctttcccaagttaaatgcctcagcaagggagcccactactccagttcatccacaggcattttaagagcaggggccacagccaggcacagtggtgaccaagggtgatgtagtccctgctttgtggatctmactgtgttaggaggatgagatggcctgatggctctgtccttgtaaggctcctcctaacacgaaacccaaagatgtcccctgtgggccagtccatggttctagaccttcccttgggagtctcacagagtaagaccaaacccattcacataataatgccactttgggctttcaaagacaccttcagttccctcttgagttactttcccttgaaggttagagggggaaccaaatcatttgattttgtcatttctcacctcccacatctgctccattatcaagaactattgattctatatcctaaaggtgtct

SEQ ID NO: 274893 - DNA, 555 bp, Homo sapiens
caaaggaagtccaggcgggctgtgtactccagctgcagtacatgtgagagaaagaggagaatgaggtaaacttctgaggtgtaggcttcaggcacagacaactgggaggcaggaaaggcttctctggaactcttcacaaatgaaacagagcctgatctgaatattttgggaggcattttrttggaagccaagtgatcagagaatgattaggtttcacagggatgtgcgcctgcctttcacagcattattgccccctgtgatttcatacttgtttgtgtgattacctgataatgttggtgtcctctactagactgtcagtgttgtatggtgtattagtccattctcgtggtgctaatcaaaatacacccaagactggataatttataaaggaaagatgtttaatggacttctagttccacatggctgaggaggcctcacaatcatggtggaagatgaaggaagagcaaaggaacctcttacatggcagcaggcaagtgagagcttgtgcaggggagctcccatttataaaaccatcagatctcatgaaagtcattc

SEQ ID NO: 274894 - DNA, 525 bp, Homo sapiens
attattgccccctgtgatttcatacttgtttgtgtgattacctgataatgttggtgtcctctactagactgtcagtgttgtatggtgtattagtccattctcgtggtgctaatcaaaatacacccaagactggataatttataaaggaaagatgtttaatggacttctagttccacatggctgaggaggcctcacaatcatggtggaagatgaaggaagagcaaaggaacctcttacatggcagcaggcaagtgagagcttgtgcaggggarctcccatttataaaaccatcagatctcatgaaagtcattcactaccatgagaacagtatgggggaaactgcccccatggctcagttatctccacctggacccatccttgacatatggggattattataattcagggtgagatttgggtgggaacacagccaaaccatatcatatcgtcagaggtgcttctatctgttcgactttacatccttactgttacagactgaatgtctgtgtccctctcaaattcata

SEQ ID NO: 274895 - DNA, 504 bp, Homo sapiens
actagctgaatagccttactttcatcgtccataaaacaggagtaataataacttccattccaggttgttgataggattaaatgagaatagagagaaagtgctaggcacatagtagggactcaataaatattaattctttattcatttccttcacttgccaagttttaatattatctatttttttcttgactacactgtacaatcccctttattacaaataactttaawtatgtgtctctgtgttcttggggttttgggctgtttcatccctattttctcagggttcgttacctccatttccatggtgatttcccagcaatgtgcttctatttctggtctggctgacagtctccttgctgtgctttcctccttttctggttatggtttttgaagtacacacagaccacagaaagatggaccaagatccagagaagggtagtgagggaggcagtgcctgatttctaccagggggtgagaatctccccaagcgacgaacgttcatgg

SEQ ID NO: 274896 - DNA, 537 bp, Homo sapiens
gaaaaaacagcctgagcacagactgcagaatatgcacagtaagtcagcyaggctgaggagcatcagaactgtggtttgaaattagaaagtttttatttttgtagtttcaatgattccttaaagaacttccaaagagagccaaatgactgaaatctgtactgtattataatgttttgcttaatattggttgccagggacttaaaaccaagaacatgttgaactaatttatttgtattaataaaatcactgagttaatactgtcatctctttatgctaatagaaaggaacattcttaagtgaaaacccatgtagcataatgtaattttcagggctataacaatctttagagatcatcttatctgatgtatcacaaaaattaatatttgagtgctattcattacagaaatatttatgctaattatagtgagtttggaaactaataaagatgcacatataaaaaaataaaaattgcccttaagcctaccacccagagaagacaatggttaaaattttggagttaactaaatgtcatttcct

SEQ ID NO: 274897 - DNA, 537 bp, Homo sapiens
gaaaaaacagcctgagcacagactgcagaatatgcacagtaagtcagccaggctgaggagcatcagaactgtggtttgaaattagaaagtttttatttttgtagtttcaatgattccttaaagaacttccaaagagagccaaatgactgaaatctgtactgtattataatgttttgcttaatattggttgccagggacttaaaaccaagaacatgttgaactaatttatttgtattaataaaatcactgagttaatactgtcatctctttatgctaatagaaaggaacattcttaagtgaaaacccatgtagcataatgtaattttcagggctataacaatctttagagatcatcttatctgatgtatcacaaaaattaatatttgagtgytattcattacagaaatatttatgctaattatagtgagtttggaaactaataaagatgcacatataaaaaaataaaaattgcccttaagcctaccacccagagaagacaatggttaaaattttggagttaactaaatgtcatttcct

SEQ ID NO: 274898 - DNA, 533 bp, Homo sapiens
atgaatattctcgtataaacatgagagtagaattggaaatggttcagtgaaaagtacattgaacatggttggcataaagaatggcattccagaactggctttgtcatatactagtagttcatagtttccctatcattaaaagaagactgaatcttcctatgtttgaaaagaggaagatggcactcacatcaaaaggttatcaagatgtttaaatgagatgataaattagaaagagacatatgaactattaagtattgtatatatatgagagaaaattgatatatggccactatcatcagtctttacaattctggttatttatgaggactgtgtggacaaatgaacmtttccgatgtaataaacaaatggggatcaaactaaaacaattttaggtcagaaaaaatcttttctccaccacatggcttctagattctgcctgtgccaattttctttaattccctccaaatgcttttagataagtgtttttcctagatactatctattctaactcattctcattcatgagaatggta

SEQ ID NO: 274899 - DNA, 517 bp, Homo sapiens
ccaggtcacatgtctgtgtaatatcygagctgaaatttgaacccagagaccaagtctgtgcttttagttactagactgctttgcatcaaaattagtgattcattctgaccacatgactcaaggaaaaatttgcagaaaaggttttgatttcactaagatgagagaggaaaaagtaggagagtattccatttggaaaactgctctggcaaggccatacaagtgagaaaggccttgtgtttatagaatagtgattaaatgtaagagccaatagcaaagggcttgtgcaagaatatagtagacactatggctgaaaaagaagagaaccagcagaagttcaatgttcataactatgttaaagactttggaattgattctgagggtgagaaggggccccaggagatttttaggaagattgtagcatgatgctgtggaagaaagatgttcaagttaactaatatgcaagggcaggccatgcttgaccttccccctaattagcagaggacattagaaagagaga

SEQ ID NO: 274900 - DNA, 645 bp, Homo sapiens
tgtagaccaagggctcagtaaattacaagggttcacaggtcatttccaagaacacttttcctaaggatcctagaaaagttaagaattctacccggtggtgggtaatctttcaagaagcaaggggaataatgagagtggggtcttcttccaagttaaaaaacacacaggaggtcataatttctttagaagaatcttttataacatggtggaaaaatcagtcaacacttttggggtcaccgctgagtgcaaggtacaatactgtacagaggaatagaagacagcatcctgcaaggcaacaccattgaaaaggcaagcttcacatagaagaaagtatagaaataaaataagtataattaattgattgacagtaggtaacatttatataggrttatcgtggaaggcactgttctaagcatcttatatatattacctcatttcattctcccagtaacccttatgagataattcctattattgtatccattttctagataaggaaactgagacatagaaagcttaaagattttgtccaaggttgcataggtgttagagctgggattcaaatccacttaatctagctcttgattagttcatgctcacaactgagatataaaaggataagtggggccaggtgaggacagaaca

SEQ ID NO: 274901 - DNA, 645 bp, Homo sapiens
tgtagaccaagggctcagtaaattacaagggttcacaggtcatttccaagaacacttttcctaaggatcctagaaaagttaagaattctacccggtggtgggtaatctttcaagaagcaaggggaataatgagagtggggtcttcttccaagttaaaaaacacacaggaggtcataatttctttagaagaatcttttataacatggtggaaaaatcagtcaacacttttggggtcaccgctgagtgcaaggtacaatactgtacagaggaatagaagacagcatcctgcaaggcaacaccattgaaaaggcaagcttcacatagaagaaagtatagaaataaaataagtataattaattgattgacagtaggtaacatttatataggattatcgtggaaggcactgttctaagcatcttatatatattacctcatttcattctcccagtaacccttatgagataattcctattattgtatccattttctagataaggaaactgagacatagaaagcttaaagattttgtccaaggttgcataggtgttagagctgggattcaaatccasttaatctagctcttgattagttcatgctcacaactgagatataaaaggataagtggggccaggtgaggacagaaca

SEQ ID NO: 274902 - DNA, 548 bp, Homo sapiens
tagttaaatgtgcaatgagatagtatgtaaatactaaaattactgtgtaagtgaatatttaataatgaggaaaaaagctcaagcaaagaatgtttaacactatgttacgaagccctgtgcatacaatggtctatttttataaaaatttttgatatggtttggctctctgtccccacccaaatctcatcttgtagctcccataattcccacatgttgtgggagggacccagtggggcgatgactgaatcatgggggtgggtctttcctatgcgattctcgtgatagtgaatgggtctcgtgagatctaatggtttttaaaatgggagtttccctgcacaagctctctctttgcctgctgccagccacataagatgtgacttgctcctccttcaccttctgccatgattgtgaggcctccccagccatgtgtaactgtaagtccaataaacctctttcttttgtaaattgccccatcttaggtatgtctttttcagcagcatgaaaatggactaatacrgttgtgtacataagtctatagattcacactc

SEQ ID NO: 274903 - DNA, 564 bp, Homo sapiens
tgtttgaacatttcagtgttttcataaaggtggaaaggcaaacgggttcctatattcatttgtcttcttattgttcaaacggaataaagcctttcctttcctacaaagattgcaaaggaacaattatttttccatttccatttttcctttcagaaaacatacttttatggtccagacttgttcccaagaagaaaggtagggcagtggsaagagaaaaggctttagaatcataaatattgtatgtatttaaaaaattctaagatatatattcttaataaaaatgttcaattttccttaaaatgtacaccttgacatctctgaaatcagcatgcaccttattatcaagggaatcctaaaatcttgagttctttccagggaggtttgcaattgcttctgtggtcaccaggtggcaatatcaacccaggatcattttaaattaaattctctgataatttttttttttttttgtccacattcaaagtgtgaattcatgcggcaaacctatgcagattccatttcggagtttaaattcttggggagcttcttccctttattaaatcaata

SEQ ID NO: 274904 - DNA, 564 bp, Homo sapiens
tgtttgaacatttcagtgttttcataaaggtggaaaggcaaacgggttcctatattcatttgtcttcttattgttcaaacggaataaagcctttcctttcctacaaagattgcaaaggaacaattatttttccatttccatttttcctttcagaaaacatacttttatggtccagacttgttcccaagaagaaaggtagggcagtgggaagagaaaaggctttagaatcataaatattgtatgtatttaaaaaattctaagatatatattcttaataaaaatgttcaattttccttaaaatgtacaccttracatctctgaaatcagcatgcaccttattatcaagggaatcctaaaatcttgagttctttccagggaggtttgcaattgcttctgtggtcaccaggtggcaatatcaacccaggatcattttaaattaaattctctgataatttttttttttttttgtccacattcaaagtgtgaattcatgcggcaaacctatgcagattccatttcggagtttaaattcttggggagcttcttccctttattaaatcaata

SEQ ID NO: 274905 - DNA, 497 bp, Homo sapiens
atcagcatgcaccttattatcaagggaatcctaaaatcttgagttctttccagggaggtttgcaattgcttctgtggtcaccaggtggcaatatcaacccaggatcattttaaattaaattctctgataatttttttttttttttgtccacattcaaagtgtgaattcatgcggcaaacctatgcagattccatttcggagtttaaattcttggggagcttcttccctttattaaatcaataccagggtataggcatatgggtttcctcactacccttgtctaagggggttgtcccactagcccctcagccccccatatccttacccggagggtgtaagcccagtttattagtgtgtgtgtgtatgtgtgtgtgtttcctcttagaaacccatattgaggtttttttttttttttttycctttctgagagctgcatagaaaatacagcatctcacagttgatgacaccttagagtcaatgaaatatagtagctggat

SEQ ID NO: 274906 - DNA, 630 bp, Homo sapiens
agtttctccatgtcacgtttcaccaagtataaaatgaagctcataataacatctactttttattactgtttttgtcagttgatttatgcagacagcttagaaatagtgcctggtacttggtaaatacccaatgaatgttacttgtgatatattctctgctcagcagtaacacagtccctagagatggtctcagagcaagagtcaatgaagagtatctcggtaagagtcagtgaagaatatctcggtgacaggagaggagtgatcgtttgctgatgtgtcctgttgccatcaccactggggaacccatgcaatgcatagcacaggctaggtggtctgtggctagactgtcaatgggcaagtcccatgtttgttcagggtgctgtactctggctcttctagaakaatcttccctggtcacagaaatcaacctcaggcatgctgttcctcccttagatgtgaatgctattaaataaaacacactagaaactatctgtagtatgcacgggttaggttattagtgaagcaagtacatctttagcaaaaataaataaaagcgttttgtatagctctggacacaggtatttacacaagctaattgagaagtttctttgtaaagcaatctgctcttca

SEQ ID NO: 274907 - DNA, 543 bp, Homo sapiens
ctcaggatgatggtgggggcacgagagaaatcccaatcacacaagctcatctcatgtctttgcttgtgtcacttctgctaatgtcattgcctgaagcaagtcatgtgacagtatccaacgtgaatatcagggaactaaaccaagtctttggctggaggaactgcaaagttacatggcagagggtattgtatagcaggggtccccaactccacagtccatggcctatgaggagccaggccacatagcaggaagtgagtggcaggcgagcaaggattccagcctgaggtctgcctcctgtcagatgagcagtggcatcagattcttgtaggagcacaaaccgtattrtaaactgtgcatgtgagggatttgggttgcatgctccttatgagaatctgatgatctgaggtggaacagtttcatcccgaaaccatccttctgcctcatccatggaaaaattgtcttccatgaaactggcccctggtaccaaaaaggttggggactgctgatgtatagcaaaggctgaagaaacagagtcaataatta

SEQ ID NO: 274908 - DNA, 335 bp, Homo sapiens
tgggggttcaagccccaccccagtgtgtccagaatgtggggcatggattaaaaaatattttggagacttaagatttaatgtttgccctgttgggttttggacttgatcagggcctgtcattccttccttcctatttctctatgttgaaataagcatgtttatcttaygcctgtcccaccattgtattttggaagcatgtcacttgtttgattttgcacgttcatggctggagacaaatttgcctcagaataaatcttaccttgagtttcatccatatctgttttacgtgatatttagataagactttggattttagacttttgatgctggaacta

SEQ ID NO: 274909 - DNA, 584 bp, Homo sapiens
ggcaggttctgtcttgtctctctgagatcctgactctttaaataaaggttacttaaccctatacctcttgctaggcatctcttgtctgaattccttcctccaagaagactaagaactggaggatttccatgcctctcacagtgacagtgctacccaaacatcagggttgtcatctaggccccctgccctgcacagaaagccaatcaccaacagcagtgccagggaagaargcctcattcaagtgctacagcccagagatgggcgctcagtcacaaatccctctcctcagcccactaaaattagaagtttccagagcagggaagaaatgtcaccctgtgtgggaaaacaggaattagggagagtgaggaggcagctaggcagtcatgactggtgaggggtctggcctcaaggacctactgagtttcagcgccttgatactgtctgggaggcccgatggttggtttcctgagaaaggagctcagataagacaaatgtaactttcccaagttttaagacagggtgggccaatttctatgtttattcaaaagaaaccctaaatactagttttacgagaaattgggccc

SEQ ID NO: 274910 - DNA, 584 bp, Homo sapiens
ggcaggttctgtcttgtctctctgagatcctgactctttaaataaaggttacttaaccctatacctcttgctaggcatctcttgtctgaattccttcctccaagaagactaagaactggaggatttccatgcctctcacagtgacagtgctacccaaacatcagggttgtcatctaggccccctgccctgcacagaaagccaatcaccaacagcagtgccagggaagaaagcctcattcaagtgctacagcccagagatgggcgctcagtcacaaatccctctcctcagcccactaaaattagaagtttccagagcagggaagaaatgtcaccctgtgtgggaaaacaggaattagggagagtgaggaggcagctaggcagtcatgactggtgaggggtctggcctcaaggacctactgagtttcagcgccttgatactgtctgggaggcccgatggttggtttcctgagaaaggagctcagataagacaaatgtaactttcccaagttttaagacagggtgggccaatttctatgtttattcaaaagaaacmctaaatactagttttacgagaaattgggccc

SEQ ID NO: 274911 - DNA, 509 bp, Homo sapiens
tgtctgggtcatttccaattaagaaaagtttatgctatgggaaacatgtttctagaattgtggaagggtcttatctataaagtgctaacatctggcaaacagtgcaggatctcttgcttcctcagttttcccactcacggatgagcgagtgcgcttagctgtcccttcccttcccttcccgctctggtttcctgtatgcaatgtgctcagccttccaagccttgggacacacagggatgctcatgctcctttatgttcccctagggactaggggttagtggacctcacccagaggtgtgggatcctttgggttctgtctgctggggagcctggagccggggatcctccaggtcagccaccatcctgttacatggggctcttcagcctttcgggtcccagggctgcagtgccaccccagtggaaagcccatttgagactcagagggatatttgccagcatgtcctgctgggtctcyctcgtccccttcattggctgcatatttgctgtct

SEQ ID NO: 274912 - DNA, 617 bp, Homo sapiens
gtttacatttgcctccaatcattcctatatgggaattccttgggagtctaacttggagactttgtttcttctgcctttgctcctgggggcttaatcacttctgtgcctctggttatctgtggcatatctgtatttgtcattagtaaaccagaggctgggggtctgagtggagggtatgtccccctccagtgatggtttctgttsgcttcccagggtgaggatgactcatgaccacttgcaagtggtttttgtgtctggggtttacgatcacatagtcatatacgttctaactccagcctgactgatgattctatgggcttatgctttgcctagtattggaggtgtaaaaatctctggatgcctgatctaaggggcctgaggcaggatgtctttatttccaaggtcagaagacgggatgggttgccagaataatctttatgtggaattgttgtaatctagaagacacaaactttaccattaagttaaacaagcaaaggcgaaagattactaataatgagataaatatcaaaggtcctaggaagggcaaaaaccaagtgagactcaggagggtgctttttattgttgaccagctatagttaggatcacagccttggttg

SEQ ID NO: 274913 - DNA, 597 bp, Homo sapiens
tttagttttcattaaatatttttagcaatatttaatgtttatctctcagttttaacattaaaaataaaatatggccaggtatggtggttcacacctgtagtcccagaggctgagggggaaggatcttttcaaaaccaggagttcgagcccagcttcggcaacatggtgagacccatctccacaggaaaaaaaaaaaaaaaaaaagaataaaaaagaaaaagaaaacagaagaaaattttccaggcatggcagagtgtacctgtagtacccaggctgagttgggaggatcacttgagcccagagggtggagactgcagtgagagacattttcacctgcactccagcctaggctacaaagtgagaccttgtctcaaaaaataaaaaataaaatactgttggcacttacatctgtaaaaagaaaaaaacagcatatttcttttgtccctctgcattctgatttcctctacattctaatttcctctacattctaatatttattaagaaaagatattttaggctcaaattttttaaattatcgtttgaattttatattayactttttgcctttcaagaataatttttgacttttatcttgtt

SEQ ID NO: 274914 - DNA, 590 bp, Homo sapiens
tagcaaactatgcatctgacaaaggtctaatatcaaggatctataacgaacttaaatcaaccagcgaaaaaaaaatgtaattaaaaaataggcaaagaatatgaacagacgcttctcaaaagatttacaagtgaccaacaaacgtgaaaaatgctcaacatcactaatcattacagaagtacaaatcaaaacaataataagataccatctcacaccagtcaaaatggcaaataataagcagccaagaaaacaatagataygggcaaggctgtggggaaaaggggatgcttatatgctgttgttgggaatgcaaatcagttcagccagcttagagttttctaaaagaacttaaaatagaactcccattcgaccaggaatcctgctactaatgaaaataatttattctatctaaaagacacaggaacttatacattcattgcagcactattcacaatagcaaaaacaaggaatcaacctaggtgtccatcagcagtgagtagattgaataaagaaaatgatacacataccattggtggcatacatatgccatggactactatacagccataaaaaagaacaaaaatgtacct

SEQ ID NO: 274915 - DNA, 572 bp, Homo sapiens
tctggggtctttgttaaaacagattcccaggcttctctccaataactgaattggaatattcaagaatggatgcaagaaatctgaatttttaagaagtactctgtaggatgttcatgcccagccagtctggaaaattcataacctattaattaataaatcattcacgaaactggcatgatggtttttaattaacaacttggttgactgacaaatgttacaatcaaatacaaatggaaaaaccagaatattgaccaaaagggttagcacamaactgtcataaatatcttactgtcagcaatgcaacatactgatattttctattatgttttatttccttttaaaaatgtgttcattacaaaccacttcatttcatttcctatttaataaatctcatccacaattttaaacacaatgacctaaggacatttttcaaacatgcatggctgacccagcctacctgactctgtaggatccaggtgatgcctcggcgaataggtgtgcctgaaagataaacccaaaacagtgctgtcatcagaccacaggagatcaatctattgttgaaatattagata

SEQ ID NO: 274916 - DNA, 572 bp, Homo sapiens
tctggggtctttgttaaaacagattcccaggcttctctccaataactgaattggaatattcaagaatggatgcaagaaatctgaatttttaagaagtactctgtaggatgttcatgcccagccagtctggaaaattcataacctattaattaataaatcattcacgaaactggcatgatggtttttaattaacaacttggttgactgacaaatgttacaatcaaatacaaatggaaaaaccagaatattgaccaaaagggttagcacaaaactgtcataaatatcttactgtcagcaatgcaacatactgatattttctattatgttttatttccttttaaaaatgtgttcattacaaaccacttcatttcattkcctatttaataaatctcatccacaattttaaacacaatgacctaaggacatttttcaaacatgcatggctgacccagcctacctgactctgtaggatccaggtgatgcctcggcgaataggtgtgcctgaaagataaacccaaaacagtgctgtcatcagaccacaggagatcaatctattgttgaaatattagata

SEQ ID NO: 274917 - DNA, 492 bp, Homo sapiens
ggtgggtaaatggagagcaacagaacaataccagcttcactgtagagttacggtctgcttctgctagaaactcattcaagagagtaattcactactgagacatctccccctttactcccctttgctgctcaaaggaccttttataaggtttacgtatagttgtcagattttaagttgtactcttatagttggaaattaaatcacaaaacaaccttcccctgtcatgactaaaaatgtttaaaatgtgctcttacaaaataatcttattttaaacatatttccctccaatgtgacttgttccaagtagtttctctagtgagaaaagctacatattagtttatttctytgcaatttgcaaggtctttgatataagggatatttgaaatgaccttggtgtcacatagcatctgctggctgataaagattacctttgacctgtacctgaggcaaaggagacacaatgaccttgaattgatttcaggtaacattata

SEQ ID NO: 274918 - DNA, 616 bp, Homo sapiens
aattgtttcagaggctccatgtacatagtaactggtgattaataaaggatgctttaagtgattcagctattcaacttttgggggggccaaatgtagaccagggatgagctatgtggtagacagaaggtaccgagtacctgataatcatgtttattgtgagtaggacacactcgagcattaaaaacatkccagtcggtgtggtctgatcttatccttcttcatactgcacagaagcatgtactgtctctgcatcatattactataatatgatgtttcttcatacttttcttgctactgttggactttcccagcctgacttattttccttgaaaatagacattgtctttatttattactgaccagtctttattatctagcacagtagtcaacacaagcatacatgtggcacttaatgaatgttattagatttggagggtcaagtctggccaggctgttctgggtgggttctgcagtcacctggagtgtgccatgtcagtaagatcaaacttctcatgctcttttcctgctgcaaaataccctaatacagaacaatttaagggtaagcatctgagtcaagtcctttgggaaaccagagtgtatgaaacaatttctgatg

SEQ ID NO: 274919 - DNA, 602 bp, Homo sapiens
ataacactaattcttgctccactagaatttaaattcgaattgattgggttccaaagccatgatactaaggatcaaagacaaggcttgcaagatttaagcctcctcttgtatattctctctcaagttcctggctcatagcatgtaccagcaaactcattaaaactaaaayggtctgtttgggagtgaaggatgggagacattgagagcaacagcagaaagggttgggggagtcttgggaaatgcaagggtgcttaggttgggacccgtggcaatgaatggaagggcaagggaaactgtctaaccagaacttaaaaatgcctcttggtgatttacatgaaaagtggcctctcaagtttttctattattcagtgcttctaagatactgttgcactgtaaaccacaaaattaatcttatgattctacaattttactttctaaatgatcacttatttgatggtttttgaagtacagaaagtatttggtcatttaaattatttccttccatggactctgtatcactgagacaaggaatctttgcctttattgtagatatttcaatgaaaatgtcaacacgttgcaaattggcatactttgggtttgcc

SEQ ID NO: 274920 - DNA, 573 bp, Homo sapiens
ttaggattcttgtaattacagtagttcactgctctagtagcaattatatttgctggatttcttttcactttcctcacttaatctatttttaaggtgcaggaagactcctttgcatggagccttggcaggaggggaaaaatgctactggcctgaaagtattgctaattatttaagtttcttaaaaatggcagatgctacaagtgcacaaataacaaatatacgttacttgtatttttatgactgcagggagaattacaaggcaaaggcaacactaccagtgaacctgatataagtagctatgtgtgtatttgagaaaagcttttctgccttagcttgttcccagctmgtaaaattgttttacaattctgtttactttcatgaagttatttttcttgaactgcaacctcagtattctaaatatgagtaatcttgaattctgaacttagcaagcttatgaaaaatagtatgtccttgagaagttggtgtcagttaaagttttgaacacgtaatccttttcagtcaacttactataatttcagagatcctgtttcttttctgaattgtctttagttg

SEQ ID NO: 274921 - DNA, 573 bp, Homo sapiens
ttaggattcttgtaattacagtagttcactgctctagtagcaattatatttgctggatttcttttcactttcctcacttaatctatttttaaggtgcaggaagactcctttgcatggagccttggcaggaggggaaaaatgctactggcctgaaagtattgctaattatttaagtttcttaaaaatggcagatgctacaagtgcacaaataacaaatatacgttacttgtatttttatgactgcagggagaattacaaggcaaaggcaacactaccagtgaacctgatataagtagctatgtgtgtatttgagaaaagcttttctgccttagcttgttcccagctcgtaaaattgttttacaattctgtttactttcatgaagttatttttcttgaactgcaacctcagtattctaaatatgagtaatcttgaattctgaacttagcaagcttatgaaaaatagtatgtccttgagaagttggtgtcagttaaagttttgaacacrtaatccttttcagtcaacttactataatttcagagatcctgtttcttttctgaattgtctttagttg

SEQ ID NO: 274922 - DNA, 585 bp, Homo sapiens
atggacttgggaaggcagccttcccttggtgtttaatcattatggggatgcctctctgattattcacccacgttccattggtgtctgatctccttcgggacgcctgccttggtcattcacccacattcccttggtggcaagtcaattgcggggatgtctgctttggctgctccccaccccccttctccatgtctctacccttctctttaaacttgcctccttcactataggcaaccttccaccctccattcctccttcttctccattagcctgtgttctcaagaacttaaaacctcttcaactctcgcctgacctaaaatctaagcatcttattttcttctgcagtactgcttcatcccaatacaaactcaacagtagttccaagtggccagagaatggcactttcgatttgtctatcctacaagatctagataaattttgttgaaaaataggcaaatggtctgagatgygtgacatccaggcattcttttacacattggtccctccctagcctctgttcccaatgcgactcatcccaaatctttcttctttctctcctgtctgttccttcagtctccaacccaa

SEQ ID NO: 274923 - DNA, 567 bp, Homo sapiens
aatttaaaattcttagatgccttagaatttcctattataatagaatgtggctgacacagttcacaacgctgcttgttctrtctgccacccccagctccatcctatgccaggagtgctgtgtgtgtgtgtgtgtgtgtaagtgtgtgtgtgtgtgtgtgtaagtgtgtatgtggacccctccacctgcaaccccaactctgtccacagccctctcccttcaagcagccatcttgcaggcacgactcaggcttagagaagagtacatccacggagtgatctgccccactatgaatgtggcaggggaagaggcagctctggccctgttctggaggtctggggtgtgagctctgcccctgatccttgcttggtgggaaggggtctggctgcaaggccagagcaaggccctcaaaagcctagggcagggccaggaatggtactagggataagacagcactttgtgaaaaaatcggaacccaatggcaggaaggggcttggaggctgcttcccttgcttctcagctggggagtccagtgagctgatttgctgtaggcagaaggggcattggca

SEQ ID NO: 274924 - DNA, 500 bp, Homo sapiens
cccctctcctaccctttcccctgagtccccaaagtccattgtatcactattatgctgtggcgtcctcatagcctagcttctacttatgagtgagaacatataatgtttggttttccattcctaagttacttcacttagaataatggtctccaattccatctaggttgctgcaaatgccattatttcattcctttttatggctgggtagtattccacggtatatattactatatgccacattttatttacccatttgtcgattyatgggcatttgggctggttccatatttttgcaattatgagttgtgctgctacagacatgtgtgtgcaagtatctttttcgtttaatgactttttttcctctgggtagatacccaagagtgggattgctgaatcaaatggtagagctactttcagttctttaaaaaatatgtacactgttttccatagtggttgtactagtttacattcctatcagcagtgtaaaagtgtttcgtttt

SEQ ID NO: 274925 - DNA, 502 bp, Homo sapiens
agttgagttccctattttcagcttgttcactattggtgtattgcagggctactgattttgtgtacattaattttgtatctgtaaagtttgctcaatgttttttatcagttctaggagctttttggatgagtctttagggttttccaggtatacaattatgtcatmagcaaacagtgacagtttggcaccctctttactaatttggatgccctttatttatttctcctgtctgattgctctggctaggacttccagttctgtgttgaatagaagtggtgaaagtgatcattcttgtcttgttccagttctcaggggcaatactttcagcttttccccattcagtataatgttggctgtgattgctatttctcttatggatctagccacccagtggagctaccaggcactgggctggtactgtggggtgtctgcaaagagttctgtgatgtgattcatgttcaagtctctcaggcgtgaataccagcacctgttccagtggagg

SEQ ID NO: 274926 - DNA, 528 bp, Homo sapiens
ggtaggttgctacatatttgacattcctggactactaatgaactattctgttaagagaattattcacatcaagaaggtgagaaagagaaagaaggaaactgaaaagagatggtgtctaacaaatatcaaatggagacgacattgtggtcaagttgttctaggttaaatgcaatacctgaaaaatgaaggttaagaaatagaataatccataaggttgtgatagttacataaatattttgatggtatgaatagaaacatttcaagagctgtgtgaaaaaaactagcagcaaggctgtatactagacactcaagttctttcaagtgtggagaactytattaaataatgaggaatcaggtttgaaaaatggatcttttacttctgttttgttcactgtttttaaatatggggaacctgaatccatacctacaccacttatttatttacaagttatgagataactggtcttgtttatttaaggaataataagaatcaacaaaaataaattttgttatctcctctcaagtgtt

SEQ ID NO: 274927 - DNA, 579 bp, Homo sapiens
ggagcgacaagcacataaatagtatgcgaagttctactactgagatatgtacaaggtgcttcagaaaggacaaggtttttaaccttgtacttgaaatttatgttaggtctctgatctttaaatttataaaagataaaagtgacagaaatagagcaagattttagataaccataaatatttcctcgatgttcattttctcaagctcacaagaaaaccattacatcactcaccattacaatattcattctgtataagcatatgatcatcttctgcccacgcagagaaatatcgaactacatgagaatgctgtccaagcactgcatgagcatatacttctctcaaagcgttctgcctagaagaaatttgagattaatagaatggtaaataattttcactcaagcttaaactgaattaatttatctgaaacktcatacaataaatttttggtatctattgttatgctaaaaagcaacttgcttaagagagaaggggtttagacttgtaagagatttttccaaaggcagattccattaaagatttatcagaaagaagaaatgttgcttgccctaggactcaggt

SEQ ID NO: 274928 - DNA, 591 bp, Homo sapiens
acaagaatagtatttactcacacaaaacagccctgaaaacaacattctggatctcatgtgtttcccatgtataccagcactcagccagttacgttttgtcaatatgcaagtagtatgaaaattatgttgtgacttgtacagaatactctttggacgtgaggatagattcacttatcatcatagccatttagagaagaagaracccactttccctgtaaatctccaggggtattacatgccccaaattactatatttggagcttttctatactcaggctgctttgcctctgatccaaaaacactagccaaggatctccttccatatctatgctgaattaacagaaaaaataccaagccaggtctattaaatgctaaaatgaccaagtaaaaactccccaagccacaccttacctcttctgacacaataattaatggatacttgtcctcagataaaaagttgaaaataacccatattttaaatgcatcttcttctgtaatgagcaggggattctttgtgaggttttttttgacacagagggtccaacacatcctattgaattcaatcttgtcaaagttgtcttggacctaaaa

SEQ ID NO: 274929 - DNA, 573 bp, Homo sapiens
ttagaatagaaatctctagtattgtttagtgatataaaccagagcttactggagaggttaagaccagaaagagatctatgaatcatttgaatagagatgacttaaggttgtcagaataaaatcactttcttttttctttttataaatgtttagatttataaaatataaaatttgaaaaaatttaagtcttttgattcataaacacagaatgtcttgtctttatttttatttttatttttttttgagacagggtcttcstctgttgcccacgcaggagtgcagtgacacaatctgtgcgcactgcaacctccgcctcccgggttcaagtgattctcatgcctcagcctcccaagtagctgggattacaggcatgtgccaccacgcccagctaatttttatgtttttagtagatacagggtttttgccatgttggcaggctggtctcaaactcctggcctgaagtgatcacctgccttggcctcctaaagtgctgggattataggtgtgagccactgtgcctggtcaaaagcactttctaagaagaaattaaagtagaactgagggttgaaaatt

SEQ ID NO: 274930 - DNA, 573 bp, Homo sapiens
ttagaatagaaatctctagtattgtttagtgatataaaccagagcttactggagaggttaagaccagaaagagatctatgaatcatttgaatagagatgacttaaggttgtcagaataaaatcactttcttttttctttttataaatgtttagatttataaaatataaaatttgaaaaaatttaagtcttttgattcataaacacagaatgtcttgtctttatttttatttttatttttttttgagacagggtcttcgtctgttgcccacgcaggagtgcagtgacacaatctgtgcgcactgcaacctccgcctcccgggttcaagtgattctcatgcctcagcctcccaagtagctgggattacaggcatgtgccaccacgcccagctaatttttatgtttttagtagatacagsgtttttgccatgttggcaggctggtctcaaactcctggcctgaagtgatcacctgccttggcctcctaaagtgctgggattataggtgtgagccactgtgcctggtcaaaagcactttctaagaagaaattaaagtagaactgagggttgaaaatt

SEQ ID NO: 274931 - DNA, 540 bp, Homo sapiens
acactgaaaaaaaagcggagtgggggcagatttctattccaaaagacttatctgaactgacacaattatagacttataactcataatgggcaatctttttttaaaacattaaaattcctgtctgatttataaaatttcaagccaatggcaaattaccagaaaattcttcctaacaatggaccagcatgaccaatttcctaccacagctatgccctgccttaaaagcattgtctactctaagtcctgcccattcccgcatggactcattttccccttccaaacatcttttcatcctgcttgycactgcttaagtcttgcttgtttcctcttacctttaatctaaccagcctcaaaaatctcaaagtcattgttcacattgctctcaatccctaagtacaatcagttaccatcctagacacttacaccaaatcttcaagtaccactaacatcacgttatccccctgcctaaaaatcatcagaagactacagaagtaaaagctaaagaaatatgtgagttgtatatttaagtcactccacagg

SEQ ID NO: 274932 - DNA, 648 bp, Homo sapiens
ccagaatagtctgtgggaggaaggcaagacaagcagttaatgggtgctaggcagcagaattcaatggaccgactggccacagtggcagctgaagtgctgccattggctgagaggccagcagatggcgrccccaagagactgaaagggtgcataagctgtgatggatgctgctgttaactgcttcttcctccctccctccctcgccacatcccccctgctcctttctttatttctttttactcataaactctacctgtcaataattacaggagtaatgctcactatttattatatacttacagtgaaccagatagtgcacatgcattacttcatttcattaccatgatcagcccataaaacaagggttgttccccatttaaaagtgggcaaaggacatgaacagatacttctcaaaagaagatatacatgcggccaacaaacatacgaaagaaagctcaccatcactgatcatcagagaaatgcaaatcaaaaccacaatgagatatcatctctcaccagtcagaatggctattactaaaaagtcaaaaaacaacagatgctggcaagtttacagagaaaaaggaatgcttttgcactgttggtgagaagtgtaaattagttgaaccattttggaagacagcgtggcaa

SEQ ID NO: 274933 - DNA, 648 bp, Homo sapiens
ccagaatagtctgtgggaggaaggcaagacaagcagttaatgggtgctaggcagcagaattcaatggaccgactggccacagtggcagctgaagtgctgccattggctgagaggccagcagatggcgaccccaagagactgaaagggtgcataagctgtgatggatgctgctgttaactgcttcttcctccctccctccctcgccacatcccccctgctcctttctttatttctttttactcataaactctacctgtcaataattacaggagtaatgctcactatttattatatacttacagtgaaccagatagtgcacatgcattacttcatttcattaccatgatcagcccataaaacaagggttgttccccatttaaaagtgggcaaaggacatgaacagatacttctcaaaagaagatatacatgcggccaacaaacatacraaagaaagctcaccatcactgatcatcagagaaatgcaaatcaaaaccacaatgagatatcatctctcaccagtcagaatggctattactaaaaagtcaaaaaacaacagatgctggcaagtttacagagaaaaaggaatgcttttgcactgttggtgagaagtgtaaattagttgaaccattttggaagacagcgtggcaa

SEQ ID NO: 274934 - DNA, 562 bp, Homo sapiens
ccttgtagttctttctctagtcatcctccttcatgcaataactcttagagagtgattataaactttgtgagaaattctgttagagcgcactgctagtgctgataatgaaagtggagagaaaaatgaaatgatgcgtcctgagtaggggggaagagccgtgtccaaatgactctcacagtgggccagtgctacttggtccatagttgtattgatgaactggggactgggggagggaattgtgctgcccagtgactgtctgtgtgctgctcccattcagcaatctgtgccaggcaaggtgctagtgctgcctggctgcaggaaggctaactggacctgacrtggtctctacctcaggggctcatggtatacagaagacagacacctacgtaggcatacatcagtgctgaggactcttctgggtaaccatcagccagagaatccgcagaagaaatccagctctgcttgagcaactggataaaatgatgcctaaggtcccctgaggttctaagcaccgaccaagggagatctgggatgggaccacagacagaagaatgcccaccag

SEQ ID NO: 274935 - DNA, 584 bp, Homo sapiens
tgaacaaaacagatgtctcaggcgatggttgtctccggcttcctttgtccagctttgactttgcaggacctctgggtaggatggtctggccaaatgtccctattatgctttccctggagatgtttcataaaaagaaggmatcttagagcagaggctgactgtcaagcattggttctgagtgcaagcccttctctctgttccacaataggaatcattttctagtacttgattctgatttgattagggaaggagtctttatgatgattctcatgcaggtcaaattcatgaaagtttattagaaatacatatatttagttcccttgaccgttacattcttagctatggatatcctgatggatttgaatgaaaactgtgcaaataagtgtccactggctttcttgggcaggtttcagttatttgggagaaaaggtattaatagacaaatcatggagaaaagtctcttacacatcagcaaagaaaatttgagacatggtggttgattagggaaggatttctcccaaagtgtatggacttaagctctagtaaccaacagcttaaaaaaatgaagccaaatgaaatatgat

SEQ ID NO: 274936 - DNA, 539 bp, Homo sapiens
cttacacatcagcaaagaaaatttgagacatggtggttgattagggaaggatttctcccaaagtgtatggacttaagctctagtaaccaacagcttaaaaaaatgaagccaaatgaaatatgatgtgcttaactgtgaaaattgtaaggaatttgttttctaggctctcattatttgatcactaaccaatcagaartcctggctctttcattctcggaatatagcagtagaaggagattctcattagaccctccagatgcataagaaatctggccatcggattaactcctaaggctctgcccccagcacctcaacccaaggccagggtcactatgaagtgccaaagggctgtggtttaagaactgtgctggatgaaacttgccatgtagttgagggctgcctcataggtgcagcagctgacagcaagagagcctcctaaagggaccacatttgaggttagaggagcaggcagctggcccatgtgcatagcaccactccacgctgtccctcctgtcctggatgatgttgtaatacaatcg

SEQ ID NO: 274937 - DNA, 522 bp, Homo sapiens
agaaggatgcctgccttgggtggaygagtgtcctggagccttgctcctcaaagtgctccagggaacctacagcataagctgatgagaaatgcagaatctcagccccactccagaccccactgactcagattctgctttttaacaagttctccaagcacctcatacatcctgaagtcgagcagcgatgccctagactttgaagaaagttatctcagggaaaatactaggtttagttttaaggccagacacactaaaaagatgattcaagaggcttgggaaataaaacagtagatctaagatcatcttttatgtttttaagcatcaagactgactataatatgaaaataaataggaaaatgtctgtaaatacaacatttaacagtggtttccttgggagatgagtgggatgggtgaggtggaaggagggaaggaggatttatatttgtgttcagcttgttctgtattgttggaattcaaatgtgaatatgctagaattatttttgaaccaaaaagtaggaaaga

SEQ ID NO: 274938 - DNA, 556 bp, Homo sapiens
aaaaatgtctgtaattatcctcacaacaagagcaggatctccagcgtgtgcctctgagtgctggaggttaataaggattgcgccttcataaggcagcagaatagcatttgtggttacactagttaaggatgctacaaattacaaggccctctcagccccagcatgcagtgggaaaggaaagacagtgaactcagaaactgacatgcagaagtggtccaaccactgtacacacttcagggtggtagtttttaactttttccatrtacatgatgaaagcttctttgaaattgagccttcataagtgggcataaaatgctgaaatttctacaactgtaaaaatgcttgtatgtcgctctgcagtttgcaaaaatgctttcacctccatgtcctcaaaatagacctgagtgagctgcatgttattactcccattttacagataaggaaactgagaatcagctcctaaaaggcagcatggtgacccaaccctgctcttttcacgctccatcctgtattgtttccattacgctaaatgcctcctatgattaatgattgtggt

SEQ ID NO: 274939 - DNA, 559 bp, Homo sapiens
tcacgctccatcctgtattgtttccattacgctaaatgcctcctatgattaatgattgtggtaagccctagattttttgaaatagagctgatttcagggaatttaaacacgaaagtcagttcattaagtgcttagcaaaatgtagtttatttgtatctttttaggaccctccaaataaatcacttcataaattttaagttcacaaatcaaatcaagtctatttatttatttatatttgcttagaaaatagatttctagtgctctgatagcaaaaccagctacttttactagtgtccatgttaaatatgagaacatccatggactgaagctcttatgggacaaattcccacctgtccaagtaggcatcatcaggttttattgacscactggaaagagactgtttatggtgcaagacacagcttggtggatggaccaggaaaacttgtgctttggcaccatgtaatcccagctctctagtagccatttcattatcagtgaaccagggaccataatactttgttcaccgcattgttgggaggactaaccctgtgagtgtaag

SEQ ID NO: 274940 - DNA, 548 bp, Homo sapiens
ttatttatttatatttgcttagaaaatagatttctagtgctctgatagcaaaaccagctacttttactagtgtccatgttaaatatgagaacatccatggactgaagctcttatgggacaaattcccacctgtccaagtaggcatcatcaggttttattgacccactggaaagagactgtttatggtgcaagacacagcttggtggatggaccaggaaaacttgtgctttggcaccatgtaatcccagctctctagtagccatttcattatcagtgaaccagggaccataatactttgttcaccgcattgttgggaggactaaccctgtgagtgtaagtgccttgtgcagagtargagatcaggaaatattagtatccttccttcttgggtacaagcaggacaggaaaacagaacttaattcttccttcccagcacacataccccatttctcctctggtgtgcacattttcccctaggaacttgacctccaggaacctggttttgacaaatcaacaaatacttattgggcacctgctgtatggctgtc

SEQ ID NO: 274941 - DNA, 473 bp, Homo sapiens
atgtgctcagaaaatggtggttgctgctaccatcatcatcaccatcttcatcttcatcatcttcaccttctcaatatattcatcatgcttatcaccacaatcttcatccatcatcatcatcaccatctcttcattgtcttcatcatcttcattttttacaaagttaatttttgtccttatttggtatatcagtttctgaaaaccaaaaatgctatcgtgtgtgtcttttaaaaaccttttatttggaaataattgcatttccagacaggaccctttattctgcagttggcagagtgattgccacagccactgccacactgaaaggtttccagggccrtgtgaattgaggaatgcatgagagtgcggactgctctcccctggtcctgggactcattatcttgtttgcctttaatcacaaatctgcacaaagatcctttgccgggactgtttactgcatagctgagactggtggc

SEQ ID NO: 274942 - DNA, 546 bp, Homo sapiens
agtaagagaatgaaggtctagtgggatgctcaggttagtgaccatgctgctgcactaacttccatcttttcttctgccttgctgccgtcctctacctagatctggtccaggctccaggaaactagtaataggtccaggccctggaggaattaactgtcttcagtacaaacaggcaatgtcatttcatgtgaaggagtggctttcacagaggcatggaagtgtggaggagaagttagttgtccagaagtgcctctgggtattttttgtagagtctttgcttcgcttccccatgagtggacattcaaaccactaccatggaatagggagtcccccagaagaaacccaagagatggagggtgggtggaggggctgggagccaaggctccaagctgtaagactgtggrgcaagcctcctctcctctctggtcctcagctttcccctctgtgaaatgaataagttgtactagctcatctctaaaataatcttaataatctttgccagccctatcattctaagactgctcatttaaaagtctggctaaaaaa

SEQ ID NO: 274943 - DNA, 538 bp, Homo sapiens
ggctactgtaggccatgttttgctgaaccagaaagcaggtagagttcctacatttctttttgttggtgatttctaatataattctgttgtggtgaaaaaaatactttgtgtgatttcagactttttcttgacttagctctcagcttaggcattgttagtgtatagaaatgctactgatttttgtacactgattttgtatcctgaaactcrgctgaagttatttatcagatctaggagcttttgggtagaaactgtggagttttctaggtatagaatcatattatctgaaaacaaggatagtttgacttgctgtcttcctctttgtatgccttttatttatttctttttcttgattgctttggctaggacttcaagaactgtgttggataggagtggtgagagtgggcatccttttctttttcttgctctcaggggaaatgcttcaagtttttgcccattcagtgtaatgggtttgtcatagatggctgttattattttgaggtatatattccttcaatgcctagtttgttgagggttt

SEQ ID NO: 274944 - DNA, 601 bp, Homo sapiens
ctctctcttctctttctctggtttctctctttctcctctcctggagcctttattatatgtttgttgttgggcttaatgttgtcccactctcagtcagtttctattgactgctttccttcctaagtatgggtcacactttcctgtttctttgtatgcatgtcttgtaattttgattttgttgttgaaaactggacacttcagttactatattgtaacaactctggattctaattttcacttatgaagattgttgttactgttctctttttatttattgtttatctttggtggtttttttgttttgttttgttttgttttttgagatggagtcccgctctgtctcccaggctgaagtgcggtggtgtgatctcggctcactacaagctccgtctcccgggttcatgccattctcctgcctcagcctcccgagtagctgggactacaggcgcacaccaccacgcctggctaatttctattgtattttttagtagagacagggtttcaccatgttagccaggatggtctcaatctcctgacctcgtgatccacccacctcagcctcccaaagtgctaggattacrggcgtgagccaccccgccca

SEQ ID NO: 274945 - DNA, 645 bp, Homo sapiens
aaacccacccccatgactgaattacctcccacagggtccctcccatgacatgtggggatcattacaattcaaggtgagatttgggtggggacayagagccaaaccatatcactggaatataaagaaattgaagtgttcggggaaagcttacactgggaagcaggaggcttggatgccagactagccctgccactaactttccccaagacgttggtcaagtccctgccctctctgagcctcagtttcctcatccgcaaaatggagatgttcagcaaatgattgctaggatcctctcaacaacactaagtgatcctatggcctaaaaatcagggtcccaggatccaaaaactgtccataatgctctgtagaattaaagaacctgaatctcaggtgttgggccaaacccctcacaaatggcatttattaccccattccttggactctagtcgcaggtgtacttgttttatttccaggtaggctgcaagctcataaagggtctgtgcctttctcatctccacatccccaggttctgggcacatggggtgaggctcataagaacaataaaatacttgcttgagtgtctgaagctgaatttgggcccagtctgtgtaccccacatacctaaccaaaggttaaacaccaaac

SEQ ID NO: 274946 - DNA, 548 bp, Homo sapiens
ccatttccacacaggtcatggtctgtccacctggaaayggacgttaatattacttaatatccacagatcattacaggacatttttcttacgaagtagaaatagtcagaactttatagtagtagagcattatattttaaaacatctctggttttaaaaactactcttgtttgtcattgtgccctctgtgcctgattcaatgcctggcatatgagaggtgctccaggaaaaaaatatttgagaaaggagtgcttggctgagttgatatcgatggtctgaggaaatagtgaacatctgctgagatgttgatgaggtttgagagagtgattcctgctcatctgttcactaacattcgcacctactatgtgacaagcactggactcagtgcaagtgacatggtgataaataagaggcatctcgaggggctcacagattagtgggggacatatgcatgcatacgagttagtgtgctagctggacaagcacagctaccttgtggttttgggttcctgggacatgaaggagggtgtggtcaggtctgcctgaagag

SEQ ID NO: 274947 - DNA, 535 bp, Homo sapiens
cataggacatggcacggagtaggtaccaaactggtggtggtttttatgaataagtgagcattgtaaagccaccacagtcttaagcacttggcatgtattaactcatttaattctcacaaacagccttgtgaggcagataccatttttatccccattttacagatgaggaaactgaagtacagagaagttaagwgacttgaataagatcacaccttaagtggtagggccaggattccgcccttgacatgctagcactacagcagcactctccagtagaactcactgctgtaacagaaatggtctagaacttgtactgtccaatacggtagccactagctgcgtggaaccactgatcgcttgaaatgttgctgttatgcctgaggagctgagacttgttcttataatattaaatatttaaataaataatattaaatattaaaatttatagttaaaatcgctaccatattggacagcacagctctagaatccgtgcttaatcactatgccatattggctgtggttaccggtagtagag

SEQ ID NO: 274948 - DNA, 643 bp, Homo sapiens
agccatcctctgaacaacataagatgctgatgtgggacagcgttcctagaggttgcccaggacagctgagcacctggagctagagatggcatgagcaggattcaggcaggaccaggccttgctgatttgatggaggataaactatggggaatctgttaccactgccccatgccctctctgctcccctgcacacaggcaccttatgagcaatgacccagagacttaggcrcctccctaatccggaagcaaagagcagcgacccaatctctggcatgtcactcatgggtgggcatttcacgtgactctccaagagactctgacatttgacccctgagagtaaagcaatttttcaccaacttcaccagagccccggcagtggagcaggaaatcaatattataaataaaaccccagccccaccacccaggcacccggcacagaccaaaccagccactcaccagtctcagtgttttcatgctcggtgtcggtgagtgtgagattggaattggcccggctggacaggcaggagctgcgccctgaccgtgtgctccggcacccacagacgcacggggtgctcaggggacagcaccgtgtcagcctccatgtcggcatcagagccagcccccatggagtagccgcagtggg

SEQ ID NO: 274949 - DNA, 580 bp, Homo sapiens
tctttgatggtaattatcactttttaccatgttttatagccatttgtttttataaaattgatttgtcttatttattagaaggcaaaattccttgtaggcaaaatctctgtgtcttacttctcatcttaatatatctctcaaaaacctgcttaattcaaggcagaaaataggagctatgtaaacactaaaagaaggcataaaataataaatcgagagactacttgatggggtgraaatgaaaatagccttagagaatgaaatgttgccattagtaagtttaactaactaaggaaagttatgttaggatgagttatataaacactttagctttcagaaaagcaaactttttcaagtcagaaaataattatacataatctcatggccagagatacaaccaaaaaagtagaagcttataagatttcaaggatttttttagatattgagtgttatttataaaggggagattgcaaagaagtctaattaaaaaaatgcagagacatcaaaaattaacaatgcgaggtatgtcaccaatgacaaaggaagaaaagatatatggaatacatcaaaatttaaaacttct

SEQ ID NO: 274950 - DNA, 576 bp, Homo sapiens
aaattgaaaaccttctggaaagcattcacctttctagatgccagtaagaacattcactgttcatgggaggaagtcaaaatgtcaacattagtaggaatttggaggaagtccattccaacccccatagatgactttcacaggcttaacactttagtagaggaagtaactacaaatgtgatagaaacggtaagagaactgtaattagacataactgtaattagacatggagcctgacaacgtagctgaattgctgcaatcttgtgatgaaatttgaatgaataaggagtcacttcttatggaagagcaaaggaaatggtttcttgagatggaatctactcttggtgaagatgttataaacattgttaacataacaacaaaggatttagaatataacataaacttagttggtaaagcagcagcagggcttgagaggactgactccaattttgaaagttctactctgggtaaaatactgtctaaaagcatcacatgccacagagaaatcttttgtgaaagaaaaatttgatgaatgtggcaaatktaattgtcttatttttaaaaactgccacagacact

SEQ ID NO: 274951 - DNA, 632 bp, Homo sapiens
gatgtcacaataaacaatgatgcactgagtattcttgtaytttaatccgaaatttttatttctcttggatagattcctgggaatggaattgctggaccaaaagacatctatgtattttttaatttgaatagatgttgcttttgaaaaaggctataacattttcctgtttccactagcaatatgtgagagtacacttctccatacatctccaccagcaatagatattaagtattgccagacatttaatagatataaagcagtatgcccctcattttattttgtactcaccactaatgagtttgggtatttttcatatgctgttggacatatatatttgtactattttgcattgcctcttcagatgccatctatttttattttgcacacgctattcttttctagttaaatcattagagaagcatctgtataattttaaacattaactgtttgtcccccatgttccaattttttccaaatttgtcagtcttttcttggctttgtgaatggtgttttttctcatacaaagctacttttaaatgcttcatataaaccaaatgtctaactttacatatatatatatatacgtatataagtatatatatgcatatatatacacatatatgtatatatac

SEQ ID NO: 274952 - DNA, 632 bp, Homo sapiens
gatgtcacaataaacaatgatgcactgagtattcttgtattttaatccgaaatttttatttctcttggatagattcctgggaatggaattgctggaccaaaagacatctatgtattttttaatttgaatagatrttgcttttgaaaaaggctataacattttcctgtttccactagcaatatgtgagagtacacttctccatacatctccaccagcaatagatattaagtattgccagacatttaatagatataaagcagtatgcccctcattttattttgtactcaccactaatgagtttgggtatttttcatatgctgttggacatatatatttgtactattttgcattgcctcttcagatgccatctatttttattttgcacacgctattcttttctagttaaatcattagagaagcatctgtataattttaaacattaactgtttgtcccccatgttccaattttttccaaatttgtcagtcttttcttggctttgtgaatggtgttttttctcatacaaagctacttttaaatgcttcatataaaccaaatgtctaactttacatatatatatatatacgtatataagtatatatatgcatatatatacacatatatgtatatatac

SEQ ID NO: 274953 - DNA, 606 bp, Homo sapiens
gttaatactcatgaatacaatgtgcttaagtaacacacttaagcctcagcactcacagcagtgcaacaaggggtgattcattattgtgaacagcaaatcacagttgccaacatcagcagtcaggaggaaaaacagtgacagcaactgtgggaaacataatctatgccatatccatctgctacaaaaacagtgttgctttcagctattttttgagccgtggtatgggtttgatactacsccccctaaccttctgtacccattgccaaaaacctggatttgttgcctccctgaaagtttactcatgacatggggcttttgtgctatgactgggcattggaggcaaacctgggcaattgtcaccctagctcttcctattaagcttacatttatgagcatttccgtcaattcatctattcaatactttggttgagaaactggggctggattatttgttgtagcctcaaagatttttttggtctcacttgaatccagttaagtgctcttcttacttttctgttagaattgtaatcttccacactgctgtttccctggagtgtattctacttgttctaatttatttttccctttccgactgtggaactcact

SEQ ID NO: 274954 - DNA, 527 bp, Homo sapiens
tgtttcaagaaaaagttggcagcggagggtaaagaagctacattcagttttctattttcctagaatgcttttaaaaactttaaaaaatatatttagtattcctgataatctccaaaagaacaggcaagaaataagatttagaggtgggcataacacttcttttctaggttaaaaaattgatttttttwaaaaagttgatgtttattttaaatacattcatatattctttttgaaagtttgtgccctatgataactatgtcagagcacaaattaaaattttgacaaaataacagataaattatcataggccaacaattaaggtagcagtaaacaaaaccatatatattttaaagtcagtcttaagtacttaaacttgagtttgatcatgatttattgtgctgtataaattcagaagaattgatgaatgctgctaaattattaatttgcccaaagtgtgagaggctaccgcccagaaccatgtgttataaatattaaagccatcccatctttaggacttatgtgggcaa

SEQ ID NO: 274955 - DNA, 576 bp, Homo sapiens
gagaagtaagcaacctttttcttaaaagcccaatttttttttaccttaataccgtgatcatatagaactgaggaarctgcatgctttctgtggcccttgccgtaaactacatagcattatatttctttacgtaactgttgtttctcaaactccataggctataccttacaggcaaaggctattctatgtcacatgcttttgcattcctatggagaatctcccagaaatttatatttaatgtagtgcaaagagcataggaagatagccttgatctcacattccaaatctaccgcaaatcattggtatgacttagagcaagttacaattacctcacctgtgaattagatatcctatcagctgtctcacagtgttgtaaagaacaaataaatgtgtatgtaaatggcatttttagcagttgaaacatgtttggtaaatgttatctattatcataagaaataaatggaggacagagggaggattttctttagcaaaggaaattcctatctaacccttttggtttaatgtcacttttccataattgttcccactgaatgttttttaataagaaaggatcat

SEQ ID NO: 274956 - DNA, 599 bp, Homo sapiens
tagagctctacagttcacaaagcattgacaacaatgctagaaaacttttctaacagcaaagcaatatgtcgcctactggggaggtcccttgaggtttgtaaagaagctgccaggggatccaggaggccagactaacagtttaaaacagaagataatcacaaaaatcaaagtaggttgttagaggaagcttcaaggtcactgctactcccaatcactgtaaatttagacctagggagctataagcaggtctgcaagttggttgcaaagatcagagaaaagaaggaaactatggrataactctgtgggtgagaaatcaatgcagacgaaacctaaccaagtgtttttccttctctcacactaacactccaagcatctcctagttttataattatatcaagccccacgtatataaaattgtttccgatgatattactcatttttttatcatcagcatcattagtaataaaaaagtggtgtgcataagctgtcaggattgttaaaatgcatactcccaggccttaaacatcaaacatcatcatgcagtaactttgggattagatctagaatctacatttctaacacaaaaatcccctagtaat

SEQ ID NO: 274957 - DNA, 587 bp, Homo sapiens
aatttttcacttttacagcagttatatcttaaaggattctttctttgcactaggtacagtttagarcaattgtttattggaacgaatgataatatggttttttacatcttttcattcatatctgttcatgtcaaagatcatttctatgcaccctgaaactcaaggtgcagtaagctaaacttaagaaaactgaaatcctgtaataaatttatatctcttgggatataattgcttcctatccaataacaaagacccaagagaaagaagcaaaagtcatatttttttctaatatactgataaagagaatagcaaccatgaccaaatagaaatcatcaccaaagcctattcacatctcatacaagatcttgacattttaacttggatttataagcctagatttagatatacctacatcaatgatttatcaaaacaaaactttgaatgtctcgaagctgaattacttgcctatggaataaatgggctacactgatactttcacacagtgtttagaggggtcctacggtgcatcagtgtctgcccctagaggtaaggggaaggctgactactttgagttctaggcaagtagc

SEQ ID NO: 274958 - DNA, 537 bp, Homo sapiens
tgaacgtaatagtaattaaagaaatgtttaataaatcacaccaagtgttgcatttcttattagccctgcagtgctttacctatcagagattttaattctcagaaaatgtactctagtgaactgctaaaaagtattattaagcattaagcattatttttcctttgtttgatatgcagtacagatgttggcagtttaaattktttctttctgtggagtttcttggtaacgacaccctgcatcctgattccctggacatatggagaaaaggagagccaggaaagaagcaggacctggcgatcatcagtgtgccagctcctctctttatacacatgtgccacattaatttatcacccaaaacctctcgctaaattcagaaaatatttgcatttgttccatttttttatagccataaggaaaaagagatcttccctttctgttaactgattttaaaaattataaagatcatcaaatttaaccattttagtacactgtggtcagtatgttttatacatcagcatccggggccattgatattac

SEQ ID NO: 274959 - DNA, 599 bp, Homo sapiens
acaggcatgagccaccgcgcccagcgattttctggattttttatgtaaaaaataatgcatgaacgtaatagtaattaaagaaatgtttaataaatcacaccaagtgttgcatttcttattagccctgcagtgctttacctatcagagattttaattctcagaaaatgtactctagtgaactgctaaaaagtattattaagcattaagcattatttttcctttgtttgatatgcagtacagatgttggcagtttaaattgtttctttctgtggagtttcttggtaaygacaccctgcatcctgattccctggacatatggagaaaaggagagccaggaaagaagcaggacctggcgatcatcagtgtgccagctcctctctttatacacatgtgccacattaatttatcacccaaaacctctcgctaaattcagaaaatatttgcatttgttccatttttttatagccataaggaaaaagagatcttccctttctgttaactgattttaaaaattataaagatcatcaaatttaaccattttagtacactgtggtcagtatgttttatacatcagcatccggggccattgatattacata

SEQ ID NO: 274960 - DNA, 537 bp, Homo sapiens
tgaacgtaatagtaattaaagaaatgtttaataaatcacaccaagtgttgcatttcttattagccctgcagtgctttacctatcagagattttaattctcagaaaatgtactctagtgaactgctaaaaagtattattaagcattaagcattatttttcctttgtttgatatgcagtacagatgttggcagtttaaattgtttctttctgtggagtttcttggtaacgacaccctgcatcctgattccctggacatatggagaaaaggagagccaggaaagaagcaggacctggcgatcatcagtgtgccagctcctctctttatacacatgtgccacattaatttatcacccaaaacctctcgctaaattcagaaaatatttgcatttgttccatttttttatagccataaggaaaaagagatcttccctttctgttaactgattttaaaaattataaagatcatcaaatttaascattttagtacactgtggtcagtatgttttatacatcagcatccggggccattgatattac

SEQ ID NO: 274961 - DNA, 567 bp, Homo sapiens
cataatgttcataccatgacaaaaatcacctaaagatacatttttcagaacacatccttgtcgttaagcagcacatgactatgtctcttgttcaagccarccagtccatggtacttggttatggcagccctggcaaattaatacagtcgatgaatgacagtaaatgcagtaaatgctaaaaaaaaaaaaaaaaaaaaaaaaaaatgaactggaacaaaagagacaccacttcgaatggagtattaatcaggaatattaatcaggaagtggcagcaaatgagcctgggaagatacacaaaggacatggggacttcttagcttcattgagaagggcctgagatgcctggccagagttcagactcaatcctgagcatgaagggatgccaccagaggtttttaagtgagattgaacataaaaagcttacattttataaaagtcactctggctgcagtgttgattattagttgtctgagagcaagactctttgaagctgggagaccagtcagaaatttaatctagatgagagatgataccaacctaaaatacagtgaaaatggggggaaaaa

SEQ ID NO: 274962 - DNA, 567 bp, Homo sapiens
cataatgttcataccatgacaaaaatcacctaaagatacatttttcagaacacatccttgtcgttaagcagcacatgactatgtctcttgttcaagccagccagtccatggtacttggttatggcagccctggcaaattaatacagtcgatgaatgacagtaaatgcagtaaatgctaaaaaaaaaaaaaaaaaaaaaaaaaaatgaactggaacaaaagagwcaccacttcgaatggagtattaatcaggaatattaatcaggaagtggcagcaaatgagcctgggaagatacacaaaggacatggggacttcttagcttcattgagaagggcctgagatgcctggccagagttcagactcaatcctgagcatgaagggatgccaccagaggtttttaagtgagattgaacataaaaagcttacattttataaaagtcactctggctgcagtgttgattattagttgtctgagagcaagactctttgaagctgggagaccagtcagaaatttaatctagatgagagatgataccaacctaaaatacagtgaaaatggggggaaaaa

SEQ ID NO: 274963 - DNA, 428 bp, Homo sapiens
atgggcttttccctcatgaatggcttagctagcaccatcctcttggtgatgagtgagttcacatgagatctggttgtttaaaagtgtgtggcagctccccgccacacttgctccagcttccaccatgtgatgtgcctgctttctcttctccttctaccacgagtaaaagctccctgaagctccccagaagataagcagttgtgagtgccatgtttgtatagcctgcagaaccatgagccaattaaacctctttcctttataaatcactcagtcttaggtatttctttctgtttttttttttttttttttttttttttttttactttaagttctggaatacatgcgtaraacatgcaggtttgttacgtaggtacacacttgccatggcggtttgctgcacccatcaacccatcatctgcattagatag

SEQ ID NO: 274964 - DNA, 564 bp, Homo sapiens
ggccagcagaccaagaggtgctcaggtcagatcagccccatgagatgggcaagactgacctatagagttcagaaccaacagttccactaggattagagtctcctttgggagtaagttgagcctagtgggtagccatttctggtcgtgccccactacagacactcctgcaccaaactctctgggctccacatcagctggctttctgcccctaccactattctaagcagctctccctgccaacccaagtgtccatgataattgtgggatctcctcttgctggggttacagaggcccatggtgagagtgggctgctccttgctagttcaactcaccaggtcccccagagtcactgagggccaggaaaaagttcrggtatgcagtaggcccttgtatggttcccagcttcctccctcttcagcctagcttctgtgtctttcctctatccactctcagtgccttccttctgaagatctgctaggagtacacaagccatcttggtcccttggtggcagctgttccatctgactgtgtctagtcaaccatcctgtcttccccctcccatta

SEQ ID NO: 274965 - DNA, 548 bp, Homo sapiens
atcctcatcccttaaaaactctctcttgactctaattcctccatcatctaccattccatttctcaacttccttttgtctcaaagtctcccagaggatttcctatacaggcttcctctgaaacttttcccagtcactcttaaattcattctaattaggtctttacttacccaccatcactactctgacaccataactttcaaagtaatctatgatgtctgcattactaaatcctatcatttctgtttttatcttactggaccaatcagttgcatctgacacagttgacattttctcccaattgctactctttgtttggcctcaaggacatcactcttggtttgtttgtttgtttttctacctcattggtttgtccttaggttcctttgtagtttctcttcttccttctgaactcttaatgttgatattccagagctcactrtttgtctattatttcttctcttcattagtaatgtcacccagtctcataagtttaaacaccattgacctattctaacgtatctttggctaagacctcttcctaaactcc

SEQ ID NO: 274966 - DNA, 591 bp, Homo sapiens
ctgttattttcagtttcctatcatgtatagtcaaatattgtaatatacacatacatcactagtatattccacaaactcctcaaatacagcatgttcaaatagtgcccaatactccatcccctcgaatgcacccttactcttattctttctttttcaaataatgttactrtgatctacccataggaatccagatcacaaacctgagaatcatcctagaatccttctctacctttatgctccaattcaacaaatacctagggctttttcattttaccccattctctaaatatttcttaagtatatccttctcctctttatatatgaactacctctgacttgcacttctttcttgtactaataaataacacttagaataaaatacaaatgttctattatggcctaatgtccccctgcatgaccttactcttctacttttacaaccatacctttctctactatcttctaccctccttaccctctaggcactatgccatccctttctgtttcttggagatattgatctgatttctgtttcagagcctttataccagctgttcactctgcatggagaactaatcctttccccaggct

SEQ ID NO: 274967 - DNA, 571 bp, Homo sapiens
gatattgatctgatttctgtttcagagcctttataccagctgttcactctgcatggagaactaatcctttccccaggcttctcacatggctggtttctccctcttcaaatctgagtaaatgtcagctcctcaaaaggctttccccgatcaccctatataaatccccctgtagcacacacagatacacagctattctctctcacactattacacttattttctttatcgcatttatcacatctggaattatcttgtttgcrtgttgtttacttgtttgttgttcatctccctcatgagatagcaagcagattaagatagatttcatccattccttcattcctacgtcctttttgccaagcatataggaagtgcttaaaatatgtgttgaataaatgaatgaatggtctctctgtttctaatctgggtccccctttttggacctatccttctcactgatgccagaatggtctagacagaatctaactatgaaacaatgctaacaaaaacttttcaaggcactaccaggtgttcccaaactttagtgtgctaagaaacaccttgaagtattcaa

SEQ ID NO: 274968 - DNA, 571 bp, Homo sapiens
gatattgatctgatttctgtttcagagcctttataccagctgttcactctgcatggagaactaatcctttccccaggcttctcacatggctggtttctccctcttcaaatctgagtaaatgtcagctcctcaaaaggctttccccgatcaccctatataaatccccctgtagcacacacagatacacagctattctctctcacactattacacttattttctttatcgcatttatcacatctggaattatcttgtttgcgtgttgtttacttgtttgttgttcatctccctcatgagatagcaagcagattaagatagatttcatccattcsttcattcctacgtcctttttgccaagcatataggaagtgcttaaaatatgtgttgaataaatgaatgaatggtctctctgtttctaatctgggtccccctttttggacctatccttctcactgatgccagaatggtctagacagaatctaactatgaaacaatgctaacaaaaacttttcaaggcactaccaggtgttcccaaactttagtgtgctaagaaacaccttgaagtattcaa

SEQ ID NO: 274969 - DNA, 425 bp, Homo sapiens
ctgcttttctttacctatctatagcaatggaggaaaagatttgaacatctaggacttatagttccatttctaactatgataatctcccttgggttcaaaaatgggatggaaataggctatttgtaaaatgttatgaaaatatattgactttggaggactcggaattgtttagtaaagccaaaccaataaacaaacatcatcagaaattggatcctttctgtctttcctccagtcccattgaaaacagagcctaagaggaaagcttctgtgctgatattttattgggggtgtgcagcctcagagaagcagaagtgagagagggcagtgagctagagaagaatgagagagaactcaacatggtgttttacaaagstgaccacagcctcataataaatgcagctgattgctcagtctcacaaggcctc

SEQ ID NO: 274970 - DNA, 629 bp, Homo sapiens
aataccaagtgtgatttcctgtacctcatggagcctagttataatagctgctttcaaatcatcatctgatagttgacacattgggtcatttcatgggtgtgtgtgtgtgtgtgtgtgtgtgtgtgtgtgtgtgtgtgtgtcttgctttcccttgggaattggtcacagttttctgattctttgaattttaagtaattttgagttgctttttaaaacattgtgagcattatgctgcaaaggctgagtcctgttataaacttatagagaatgctgaagtttgtatttttgtttgtttgtttgttttttggaaatggagtctcgctctgtcaaccaggctggagtacagtggcacaatctcagctcactgcaacctccacctcccaggttcaagcgattctcctgtctcagcctcccgagtagctgggattacaggtgcccacaaccatgctcggctaatttttgtatttttagtagagcyggggttttaccatgttggccaggttggtctcgaactcctgacctcaggtgatttgcccgcctcagcctcccaaagtgctgggattacaggtgtgagccactgtgcccagcctgtattttagaaggcattcaacctgtttaggtttacacat

SEQ ID NO: 274971 - DNA, 629 bp, Homo sapiens
aataccaagtgtgatttcctgtacctcatggagcctagttataatagctgctttcaaatcatcatctgatagttgacacattgggtcatttcatgggtgtgtgtgtgtgtgtgtgtgtgtgtgtgtgtgtgtgtgtgtgtcttgctttcccttgggaattggtcacagttttctgattctttgaattttaagtaattttgagttgctttttaaaacattgtgagcattatgctgcaaaggctgagtcctgttataaacttatagagaatgctgaagtttgtatttttgtttgtttgtttgttttttggaaatggagtctcgctctgtcaaccaggctggagtacagtggcacaatctcagctcactgcaacctccacctcccaggttcaagcgattctcctgtctcagcctcccgagtagctgggattacaggtgcccacaaccatgctcggctaatttttgtatttttagtagagctggggttttaccatgttggccaggttggtctcgaactcctgacctcaggtgatytgcccgcctcagcctcccaaagtgctgggattacaggtgtgagccactgtgcccagcctgtattttagaaggcattcaacctgtttaggtttacacat

SEQ ID NO: 274972 - DNA, 569 bp, Homo sapiens
ggaatcagcatgagaatacaacctcttcttgtctcatagatttgacaaaggcaaagcacaagtgtaaagtttacagtgtgttatctttgtactaactcatgtaatacgctctcaaataatttttttaccatctgcgctttttcattagaaaattattttgtgatgtgtcatacataacttaaacattgtttcttaccccgtaaaattgatttaaaaattggctagatgacactgagcagaatgtcaaccctctgtaactcatctggaactcaatgcacatttcacattctttacagaagatttccacacatggcctaagtttgctcagtgggtgggctttcaggagcatgaaggtttktaaattcaggacctctgatttatggtgggtctttattccaaagactttctttaaatttagttttttgagaactgagggattgagaacatatttttcaaaggatgtgttcatttaaattgcaggtagatcagcccacagggctcttctcatacataatgtagctgtgctatatggattaactgatacaaataaactagaatttgtgtcaaag

SEQ ID NO: 274973 - DNA, 569 bp, Homo sapiens
ggaatcagcatgagaatacaacctcttcttgtctcatagatttgacaaaggcaaagcacaagtgtaaagtttacagtgtgttatctttgtactaactcatgtaatacgctctcaaataatttttttaccatctgcgctttttcattagaaaattattttgtgatgtgtcatacataacttaaacattgtttcttaccccgtaaaattgatttaaaaattggctagatgacactgagcagaatgtcaaccctctgtaactcatctggaactcaatgcacatttcacattctttacagaagatttccacacatggcctaagtttgctcagtgggtgggctttcaggagcatgaaggtttgtaaattcaggacctctgatttatggtgggtctttattccaaagactttctttaaatttagttttttgagaactgagggattgagaacatatttttcaaaggatgtgttcatttaaattgcaggtagatcagcccacagggctcttctcatacataatgtagctgtgctmtatggattaactgatacaaataaactagaatttgtgtcaaag

SEQ ID NO: 274974 - DNA, 513 bp, Homo sapiens
gtgtaagttgaataattaagtgaacttgtgtaatataccagctcatctctatcacacatattatttctttctgtcacttcatttttttcctcctcattcacttccatcagcctaratcttgaaaactgaagcaaggcttattttgctctgtctgctctttttggtctgttctttagaacaggatacttgcttttgaaaactgacacttcagaccattgcagtttattcttcatagccatacttttgaataggaaaaaatatgcttcccttggcatgctgaggcttttgtgaagtggagaagacaagcatggagtgagtctgttttgataactatggggagttggttggagagaaaaccgaaacacttactaaacctaaggtgccactccacggggacgaatagtgatgtagattactgctagcagtgttagtgtcatcagataggattttcctggtgattgtgggaattgcagtctgctgaatgaaacacagagaatagtaaaaacaacttac

SEQ ID NO: 274975 - DNA, 552 bp, Homo sapiens
aaaaaggtggatccactacttgttattttactgataagagttttctgttctgcttcagtcttcctttgctcctaaccaactrtttaattctatgcctcccatcttctgtatcctaggtcagctgtgctaacttgatctctgaaaataggctgtggatggtccttgcccttccggactaacttgtgctgccatgttgtttatagtcattagaaatactgtaaaagcatgcactggtattctaaattctatcttctagcatttgagaattttgtccaagacaatatcctgccaaaatgcttcaacaacagaacaagagaagggaaatggaatcctggaaccagtaaggatttctgctgagttacagcatctgtacatagctcaatattaaaatattaaaattaaaatactgtaacttagcaagctaatagataaaaagagaaaatgcgtataattatctctttatagctagaagaaatttgatgaaattcattctctattcttgttaagaactcttaatgcactgcaatgtatttacataaaatatcctgaaaa

SEQ ID NO: 274976 - DNA, 590 bp, Homo sapiens
acttttttgagaagtgtgaggtttaagcgcttctacatgttgcaataagaataaaaggataactggtgatgttcatgtagaatatctccagagctttattgaagccgtgtgtatgtctaatgaacacagtatactaaagtacctaaggaggactggtcatctttagaaacaagagtaggatgtcatgctgagataacaaagtagtagcttgctttcttaggtaccatagtagagtgttaaggcactaactcattgccaaagttataaaggaccagtaatttccttatcactggatgttcaatgggtgagaagtagttttccttcaagatggataatatctaagaaatttcataaaccatcatgagtaaaattatacctgccaattgtgtggcatttatctttatctactactgtacatttccacaggtaaatgtggtataagactcaaaattaatattttatactgccttgaccrctgatgaaattgggagagcctcaaattgcctaatcacaagtttccccccaccactgtgatcctgtgcataaagtcttctaaccaaacaactcaccatatcaaaaagaccaaatgc

SEQ ID NO: 274977 - DNA, 573 bp, Homo sapiens
agctatgaacaactcttgaaacacattattcagaaggcatacaacccaataaatatggggaaaatgtataaaaagactcttccaaaagtatacaaatggccaaaagcccatgaaaagatgttatcagggaaatgcaaattaaaaccacaatgagatacactacacactcaccaagaacggctaattataaaaaggacaattctaaatgtccatgaggatgtagagcaactggagctcatatattgatggtgggattacgaaatgttacagttactttggaaaacagtttggcaatgtgttataaagttcaataaatacatatcaaataaaacatatgttcatgcaaagacttgtttacaaatgttcacagcaattttgttcaaaattgcttctaaataggaaaacccaaaatgtccatcaactggagaatatataaatagtggtatatccatatattgaaattctactcagcaatgaaaaggagtgagcaatggatacatgcaataacaagggtgaatctcaaacacattatgttttaagagcacayagtgtatgattccctttatataaaat

SEQ ID NO: 274978 - DNA, 579 bp, Homo sapiens
tttataaaaattacataaattatttacaaaacattctctggagttggagagattggactttggagaggaacaacggagatctttccctgcactttaaagtaaaaataatraactattaatagctaacaatatagtaaactattataatcgaggtttataataaactgctttgttaggtttctttagtccctaaaatttgaactttctcctgctttttaaaactacttttacttttggaagaatctagatcactgtgattattttctcatgttatcatttaactattttctctagctcttgtattttctctagactggaagtttggcttagaagtgtgtaaattgaagttaatatttagagaaaaaatattttataggtaatggagtgtgtacaccatattgtatcatatcaggggacataacataatataatctaattattagtgatagtaaattcactcactttttgaaagaggtagaagtcaagtcttgccactgtgaaggttcatttttctcatttgtaattatcaagtaatgtgtgatgagatactttgacactacgcacatctcctgacgctat

SEQ ID NO: 274979 - DNA, 579 bp, Homo sapiens
tttataaaaattacataaattatttacaaaacattctctggagttggagagattggactttggagaggaacaacggagatctttccctgcactttaaagtaaaaataatgaactattaatagctaacaatatagtaaactattataatcgaggtttataataaactgctttgttaggtttctttagtccctaaaatttgaactttctcctgctttttaaaactacttttacttttggaagaatctagatcactgtgattattttctcatgttatcatttaactattttctctagctcttgtattttctctagactggaagtttggcttagaagtgtgtaaattgaagttaatatttagagaaaaaatattttataggtaatggagtgtgtacaccatattgtatcatatcaggggacataacataatataatctaattattagtgatagtaaattcactcactttttgaaagaggtagamgtcaagtcttgccactgtgaaggttcatttttctcatttgtaattatcaagtaatgtgtgatgagatactttgacactacgcacatctcctgacgctat

SEQ ID NO: 274980 - DNA, 579 bp, Homo sapiens
tttataaaaattacataaattatttacaaaacattctctggagttggagagattggactttggagaggaacaacggagatctttccctgcactttaaagtaaaaataatgaactattaatagctaacaatatagtaaactattataatcgaggtttataataaactgctttgttaggtttctttagtccctaaaatttgaactttctcctgctttttaaaactacttttacttttggaagaatctagatcactgtgattattttctcatgttatcatttaactattttctctagctcttgtattttctctagactggaagtttggcttagaagtgtgtaaattgaagttaatatttagagaaaaaatattttataggtaatggagtgtgtacaccatattgtatcatatcaggggacataacataatataatctaattattagtgatagtaaattcactcactttttgaaagaggtagaagtcaagtcttgccactgtgaaggttcatttttctcrtttgtaattatcaagtaatgtgtgatgagatactttgacactacgcacatctcctgacgctat

SEQ ID NO: 274981 - DNA, 412 bp, Homo sapiens
tatataaatagtggtatatccatatattgaaattctactcagcaatgaaaaggagtgagcaatggatacatgcaataacaagggtgaatctcaaacacattatgttttaagagcacatagtgtatgattccctttatataaaattctagaagaggaaaaatccaggtattttgacagaaaacagttaagtggttaagtaggttaaccacaaatagttaccaggaaactttttaaggtgatgaaaatttttggaccaggcacagtggcttacacctataatcccagcactttgggaggccaaggtgaaaggattgtttgagcccaggaattcaagtccaggctaggcaacakagaaagtccctgtctctatacaaaaaataaaaagtttagccaggcatggtggtgcacacct

SEQ ID NO: 274982 - DNA, 555 bp, Homo sapiens
cagaaatgcccatcccccaaggcttaccatgctcctccagatggctttggcttctgttgacagttgggtctggacagagtaggggtgtcttacctgtgggataaagccagtctaatctgagtgytcccctgtctgcccacctttcctggggtcccttcctggtggcacctgctcatagtgcagcctcaaatgcccaatgcgggtgcttcccggtggccactaccatacctcttctgctggcagaccctgtctaaccatcaaggagcttcagcagatgggccctcaccaatgtacacacattcacagtctcccccactccttcgatggcacacacttgcccatagccttttcccaccactttgatggcatgtgtgcacacgtggacctcaccaacccaatgaagtgcttttgctggcacccccatcagggtgttgttgcaggcacactggaaataccttggctcctccagtgcagcaagtgcttaacctagaggggccagagaacaaagctgtaagcctggttccagctcctcagagttagagcatgcaggccagg

SEQ ID NO: 274983 - DNA, 596 bp, Homo sapiens
caaacaatgtcattgtgcttctttttgatggcacagaggaaagaaaatccaaactcattgctatcacctacaaccccccacataatctaaccttgaccatctctccggggcctaacatcagcaagtcagaccacagaggtaggcttgcaagacaggttggtgggggagtcaacasagtttttaaaaacagttgaatggcatttaaaaggattattctgaattccttgttggacatatcacagatctttaattccaagtccattattggagctttgttggtttctttaggcagtgtcatatttccctgagttttcataatttttgtgtctttacattgatacctgtgcatttaaggagacagccaccccttccagcttttgcaggtgttctttggtggttttagatatctactacttaaaatcagaacttaattattggtctgctgtggcttccttttctggggagggcttatggtgagcaccaggactaaaacactgcacaggaactaattgccctgtctggggaagacttaaacaaacagtggaacttaattactgacctttcagttgtttcccagtcaggggaaggctgcactc

SEQ ID NO: 274984 - DNA, 553 bp, Homo sapiens
cttaaatcatgctatggcaaatcattaagtatgcttaattccactggagagaaccatcacatagccactccctaagtaagcaaggaagtgtcatctagctccatgctcaggagcaggtagaacagattttgggatacagccagcagttcctaccatggccattctgtatcaactttctttgaaatttggtacgcccttttagtctgtagattgaatgtttttgtttataaaktgtcttcagaaattcttaatgtgtgttctgttccaatacttcagcttccttctttaggaactccctttacacttatgtgtaagctccatttacacttacatttcatttactttgagtatgttccatatctacactaacattcaaccctatttatgcatcagtatcctctgcgttccttattgtactttttctaatttatttgtctaatggagttttgaggcttttttttttttttacttttttactatgacctgtacactcacatttcatttcctctcgttctctctactttgtgctttactttattattaagaaattttc

SEQ ID NO: 274985 - DNA, 546 bp, Homo sapiens
ttgtagttcaaagttttagctgactcctagttttgtgggaggtagagttcatttcttttcttacctccttgtgactttcacatattttcctcaagggtacagggaaatgttgactttaccccatcattgtcaaagaggcattctaattacaattttttactgtcaaatgccattctgctgtgagttttaacaagtagacataaaagagaaaaaccacagaaatacttcatatttcttaattctgaattgaatatttctgaaatactacttaaaagagtctggggaagattgttattacagccatgctgtagaactgttttataaaattttttgtaattgtctgacttgcaactaatattattcccaggatgtgtacattcctatakcaactctgctcggtatggagtagtaaatccctggctgactgagtcctatgtgataaatatctttgctaacagattttttcatttccttgtaacacatatatatgcatgtatcaatatgtgcatatatagttattaccacaacgtattcaatcttctcatt

SEQ ID NO: 274986 - DNA, 588 bp, Homo sapiens
tatgtggatggacctctctgagtggtcaaaaactgtaaagatatttgtattccatgtaagtgctcaccagtgggtgacctgatcagaggaagagtttaataatcaagcagataggatgacctgttctgtggacaccactcagcctctttccccagccatccctgtcattgcccaaatgagcccatgaacaaagtgtccgtggtggcagggatggaggttacacatgggctcagcaacatggacttctactcaccaaagctgacccagctacaggmactgctgagtgcccaatttgccaacagcagagactaacactgggccctcgatatggcaccattcctcggggtgatcaaccagctacctggtggcagggtgattatatcagacctcctccatcatggaaaggacagaggtttgtcctcactggaatagacacctactccagatatgggtttgcctatcccgcacacaatgcttctgccaagactaccatctgaggacttacggaatgccttatccaccgtcatggtattccacacagcatggcctctgaccaatgccctcactttgtggctaaagaagtgcggc

SEQ ID NO: 274987 - DNA, 627 bp, Homo sapiens
ctgcagttaaataactaccacaagaaaaataacaaggagggcaatactgaagagcaaataattcaatgagaatgaagacatggactcagagggtcaaaatttttctctgacctatgtggcacaataatctattacatagttaatagtttgaaagacgtttccatcagcctggggccctctctccggtatcgagacacagtgatattttctacgtcaagaccatagctccagtccaccagattaatgccagaaatatgtatacgcagggcctacaaatctaatgagtatgttggcagaccataattctacacagcttcaatatcactgtcctaccttaatatcactgtccataattctacacagcttcagtatcgctagcctactcagagcccctctccatgcttgttgtgatctgattttattcccccaaagttaaataacaaaataggcaaaagccttaaggtatcaaaaggaaaatagagagagaaytggggtaattagtcatggattactatcaacactaaattattattaaccccaaattaccactacattggctgttgtcacttcatgttcctgttttaccagtctacatatgcaatactatgacataattccatggttttt

SEQ ID NO: 274988 - DNA, 534 bp, Homo sapiens
cttatcttttttcctttatatatagtgtgtctttttttccccctgtgtttaagatttttccatcatctctagttgtgtttttacatgccttagaatagttttatttatgttttcttgtgttggggtttaataagcttctggactctttgtgtatttaaaatgtttctcaaatttgaacaacttcagctattctttttacagattttttttgcctcacccctccatgtcctctgtgtcttcaagttcacctatcttttcttcttcattatctaatctgctgataatcacatgcagtgcattttttcatcttagaaattgtaacttacatatgtagatatccattttgggtctcctttttattttatatgtgtctatgtaacatttattctttcctctagsttcttgagtgtatgaaacacaattatagtaatttttgtaatttgcttgtctactaattctatcatccatgtaattgctacatcagtttcaagtgaatgatttttcttctaatcatggattgtattttctcacttc

SEQ ID NO: 274989 - DNA, 545 bp, Homo sapiens
gaataattttcaaacacaataatttggcattacaagaatatattccttccatcaagctgaaaatataattatgacaactagtattactaaagactacttactggcccctgaaaatccagcaggctttaacagtatggctacacaaaatgtgaagacaaagccaccgcttcctaggaaaccagataaaaataagagattaggcatcatttcaggggtatgcttaggcaatgcttgatatcatgtctggctctcaatgacacagaggcattctaaagtcaaaatcatttgttcatccacaaagaaacagttaccgtgtttctctaatcaccaagtgttgcatttatttgagtaaatagaaatcaatagggtctggggtctgtcaccaagttcaagtctaagaagaaatatcaattgtctcatgtatggtacaatatttaatraacaaattcaaacaagcaaaaacaaaaacactaatatgagacaatttaatcactgttaaatgactataattttagtgtctatgaagacactttcataaaccaatt

SEQ ID NO: 274990 - DNA, 577 bp, Homo sapiens
cgcaccgcctgctgggtaatcagctctgcgctctgcaaggggagacctcggcggggtgaacccggtgccccttgccagagccaaggaaaaggagaacatcaagctttgcgggggtagaaatgttttmagtgatcacctacattcagtttgaaggataatttgcagatgcctatattggctcaattatgagcagcacttactactttttaagtactagaaagctttaacttaagttaatcttcatcatacctatcaaatatttctccccaattacttccattgagtcaggaacaaaattcattttgtaatgattatctgactcaggtagagctgattttctataactctaggctaaagccactgacaagggcacaaaaaggattatttttcagcagttttcagcccagctaaatcagcagataatggcatctatgatgcagagtgattctgacctaaaacccctctcatcgttaatgtgtctcacatctcaaatacgccacagaggcaaaaatattctatagacatctctactgtccctagagagcaaaaggacaggtttaggaattcttgattttta

SEQ ID NO: 274991 - DNA, 541 bp, Homo sapiens
cagggctctcagcctttacgctgtgaaacaaagacccaatgttccaattccaaataactcaaagaacaagaacatgcttacactcctactcccaagtcaggaggatttcctgcccttgcccagcatccagaagtcacctcccctgtgctcaggaatcatccccttcaagtcaggaggatttcctgcccttgcccagcatccagaagtcacctcccctgtgctcaggaatcatccccttatctggcctctttgtccaaagaggagcctggctgcaggcattrtggcagggggccttttggggggcccacccttcctgctctctacttgctgttctatattgaagtaaggggaatacctttgtcccatgtggtatgacaatttgcccccaggtccccaatttctccagccactcgaatgtcttgttgtaagggtccttccaccttctgccataataccattgccctactacctcccctgtgtttccatctccactgtcctctctcaagcattgtcaaacagcctcctacttcctctcacaaat

SEQ ID NO: 274992 - DNA, 541 bp, Homo sapiens
cagggctctcagcctttacgctgtgaaacaaagacccaatgttccaattccaaataactcaaagaacaagaacatgcttacactcctactcccaagtcaggaggatttcctgcccttgcccagcatccagaagtcacctcccctgtgctcaggaatcatccccttcaagtcaggaggatttcctgcccttgcccagcatccagaagtcacctcccctgtgctcaggaatcatccccttatctggcctctttgtccaaagaggagcctggctgcaggcattatkgcagggggccttttggggggcccacccttcctgctctctacttgctgttctatattgaagtaaggggaatacctttgtcccatgtggtatgacaatttgcccccaggtccccaatttctccagccactcgaatgtcttgttgtaagggtccttccaccttctgccataataccattgccctactacctcccctgtgtttccatctccactgtcctctctcaagcattgtcaaacagcctcctacttcctctcacaaat

SEQ ID NO: 274993 - DNA, 541 bp, Homo sapiens
cagggctctcagcctttacgctgtgaaacaaagacccaatgttccaattccaaataactcaaagaacaagaacatgcttacactcctactcccaagtcaggaggatttcctgcccttgcccagcatccagaagtcacctcccctgtgctcaggaatcatccccttcaagtcaggaggatttcctgcccttgcccagcatccagaagtcacctcccctgtgctcaggaatcatccccttatctggcctctttgtccaaagaggagcctggctgcaggcattatggcagggggccttttggggggcccacccttcctgctctctacttgctgttctatattgaagtaaggggaatacctttgtcccatgtggtatgacaatttgcccccaggtccccaatttctccagccactcgaatgtcttgttgtaagggtccttccaccttctgccataatrccattgccctactacctcccctgtgtttccatctccactgtcctctctcaagcattgtcaaacagcctcctacttcctctcacaaat

SEQ ID NO: 274994 - DNA, 535 bp, Homo sapiens
tgttatgctcttttcttggtaatatgccttttcttataggaatgtcagccatgagccttgcaataggtgaggaaaagatactatttttctctcctataaccttatatagcgaatattaggatagctacaagtatccaatggggtacctcttcctataaatgcctgaagtygggtgaagttaagacagttaaaccaaaaggagcatccaagacttgatcccaggtttttataaaccaagttcaaaattgtattggtttctttctttctctgtttgtcttaacctcaccatgcctgcatttaaatacccagcacagccgcccatacaactaccaattcagtagttgaagggaagagaacatggctccagttcctgagtcttcttatagactgctgcaaaataatgctttaaataaaataattaaaaaatttaaaacagtaactagaaatgtgataatctccaacaaagtggatgtggaatctgaaatttgaattgaattatccttctgtctatccatgtttgtatcctctaatggtt

SEQ ID NO: 274995 - DNA, 521 bp, Homo sapiens
ctctacatttgtccctgattttgtaaaataaaatgcagaaaattgaagcacatttgcaataactggatacaagatgtaaaaaagaaaataaaggaagggaataaaaccagtgggctagctaagggactagtccatcttttgctttttggttatttatttttaattttaattttaattttttgagagagggcctcactctgtkgcccaggctggagtgcagtggtgcaatcatgcctcactacaacctctgcctcccaggctaagcctcctgagtagctggaaccgcaggcatgcgccaccacaccaatttttttttttttttgtacagatggggtctccctgtgatgcccaggctggtcttgaacttctgggctcaagtgacccacctgcctcggcctcccagagtgctgggattacaggcatgagccactgcaccaggccttttttcttatttttaattttacctagtactgtggcgatatcacttgaaactgacccaagtagtgtttttggttgtaagg

SEQ ID NO: 274996 - DNA, 521 bp, Homo sapiens
ctctacatttgtccctgattttgtaaaataaaatgcagaaaattgaagcacatttgcaataactggatacaagatgtaaaaaagaaaataaaggaagggaataaaaccagtgggctagctaagggactagtccatcttttgctttttggttatttatttttaattttaattttaattttttgagagagggcctcactctgtggcccaggctggagtgcagtggtgcaatcatgsctcactacaacctctgcctcccaggctaagcctcctgagtagctggaaccgcaggcatgcgccaccacaccaatttttttttttttttgtacagatggggtctccctgtgatgcccaggctggtcttgaacttctgggctcaagtgacccacctgcctcggcctcccagagtgctgggattacaggcatgagccactgcaccaggccttttttcttatttttaattttacctagtactgtggcgatatcacttgaaactgacccaagtagtgtttttggttgtaagg

SEQ ID NO: 274997 - DNA, 521 bp, Homo sapiens
ctctacatttgtccctgattttgtaaaataaaatgcagaaaattgaagcacatttgcaataactggatacaagatgtaaaaaagaaaataaaggaagggaataaaaccagtgggctagctaagggactagtccatcttttgctttttggttatttatttttaattttaattttaattttttgagagagggcctcactctgtggcccaggctggagtgcagtggtgcaatcatgcctcactacaacctctgcctcccaggctaagcctcctgagtagctggaaccgcaggcatgcgccaccacaccaatttttttttttttttgtacagatggggtctccctgtgatgyccaggctggtcttgaacttctgggctcaagtgacccacctgcctcggcctcccagagtgctgggattacaggcatgagccactgcaccaggccttttttcttatttttaattttacctagtactgtggcgatatcacttgaaactgacccaagtagtgtttttggttgtaagg

SEQ ID NO: 274998 - DNA, 580 bp, Homo sapiens
tatatagacaatgtttctttacatttttctgcaacttacacattaaaggaggacattcccgtggtttacaaaaagttgtctatagtaaacattcctctgagactttttttgtggtgttatttataccattttgagtcatttagcctatagttctggagcatcttctgcctgctaaactctgtgctctgtttggagggctctcattgccaagttctcaatcattcataattacaaaaaaaaaatcaaagcaatataaatattcacatgcaagggaaatgcaaggatcttayaggcttttaaaaatatttttacttttcagaatttctgtagaaattatatattctacttttaccagccagaagcagaacaactagaactcaatcaaaattttcttaaaaatgtaaccggaggccctcagggtttagctccatttcataccaacactaacctagaaaactcagataaaagtaagtgcaatttgtttcaattagttgtgaccataaaatatataaagaaaaggaaggaaatagtcccaacaagcttatgttaagtccagaaagacgggaacaataagagaaca

SEQ ID NO: 274999 - DNA, 580 bp, Homo sapiens
tatatagacaatgtttctttacatttttctgcaacttacacattaaaggaggacattcccgtggtttacaaaaagttgtctatagtaaacattcctctgagactttttttgtggtgttatttataccattttgagtcatttagcctatagttctggagcatcttctgcctgctaaactctgtgctctgtttggagggctctcattgccaagttctcaatcattcataattacaaaaaaaaaatcaaagcaatataaatattcacatgcaagggaaatgcaaggatcttacaggcttttaaaaatatttttrcttttcagaatttctgtagaaattatatattctacttttaccagccagaagcagaacaactagaactcaatcaaaattttcttaaaaatgtaaccggaggccctcagggtttagctccatttcataccaacactaacctagaaaactcagataaaagtaagtgcaatttgtttcaattagttgtgaccataaaatatataaagaaaaggaaggaaatagtcccaacaagcttatgttaagtccagaaagacgggaacaataagagaaca

SEQ ID NO: 275000 - DNA, 559 bp, Homo sapiens
  misc_feature (1)...(559): n = A,T,C or G
nnnnnnnnnnnnnnnacacggaacaagtaaccttattgaataaatcttgtatccccctcacctgaaagagaaccgggatcagagtaggtgctaaataatattttaatttaagatggtacaaaaagagaacttatgataggttactaaaagacatgtggctggttcttttcttctaaaagtactaggtatagcaaacmaatgcaagagagaggcagcctgttaatctagaaagagtgaggagagtgaggtcccctttcttcatccatgttaagtgctgttttttgttacagtggtttagaaggatagacaatgatgttatgacaatcagtcttcaaaagaatatttctaggttctaacatccccacatgatgccatggagcagaggtcttaccagcaaaatctcaaatacaaagaaaagatgtttgagtaacatttgacaaaggtttataaaacatgaactcctctaaacacatatttaaaagacttagtatttcaaagtttaatattagattagtattcaagggaatcactttttaagatattgagtccaataggaaac

SEQ ID NO: 275001 - DNA, 515 bp, Homo sapiens
ctgctgtcgcaaagtctattgtaattcttatctttcttctgctacacctgtgtgtttttttcctctgtctgcttttaaaccttttctctttatcgttgctatttagcaatttgattattttgtgccttggtgtggttttatttgtttattgcatttaaaattgattgggttaatttgatgtgagggattatgattttcttcaaatctggaaaatattttagccataatttcttcaaattttttctattctgcccctacttactggaactctattccacatatgttaaatagcttcctctacacgtcattgatgctctgctgatttttcctcagtcttttctttctgcacttcattttggattatttctattgctacaatttcaaggtcaatagttttttctattgcaatgtattatctgctattaatcttatccagtttgtttytcatttcagatattgtattttttatctttagaagttccactgggtttcttttctctatggttcatatttat

SEQ ID NO: 275002 - DNA, 606 bp, Homo sapiens
tttgaccgatttgcttttatgctgtgatagggaaggtccaaagtaacttgatccagggctaatttaacctcaatattaaagtgatatcccatttgagaaatgtagaaaattatttatgtgtcatgatgtctttccttttagatggygagaacagaagctcttaggaaccctgagaaatagccgggaatttccagtagtagtagttagggtaattgcctcttattcatgtataaattaaagatccaggggatgggacccatttgccgacctccagagtcctttccatttccctgccctgcatgtcaggctgccttggtctccctgaactcagttctctgtgttctataccagtaaggtggtttggctcttctggggtttcacttgctgtgctgtggcttgaaaactgcctccaggcagtagcttgggacaatcttagtactcacttctttatttcttttctctcaaggatcagaatcctatgcttgccgtcatccaatgtctgaaaactgtcttttcaaatattttgcctggttttcaaattttttaaaggcagcatgatatatctggtccatgttactaaattgtccccagaagtagaattttttg

SEQ ID NO: 275003 - DNA, 606 bp, Homo sapiens
tttgaccgatttgcttttatgctgtgatagggaaggtccaaagtaacttgatccagggctaatttaacctcaatattaaagtgatatcccatttgagaaatgtagaaaattatttatgtgtcatgatgtctttccttttagatggtgagaacagaagctcttaggaaccctgagaaatagccgggaatttccagtagtagtagttagggtaattgcctcttattcatgtataaattaaagatccaggggatgggacccatttgccgacctccagagtcctttccatttccctgccctgcatgtcaggctgccttggtctccctgaactcagttctctgtgttctataccagtaaggtggtttggctcttctggggtttcacttgctgtgctgtggcttgaaaactgcctccaggcagtagcttgggacaatcttagtactcacttctttmtttcttttctctcaaggatcagaatcctatgcttgccgtcatccaatgtctgaaaactgtcttttcaaatattttgcctggttttcaaattttttaaaggcagcatgatatatctggtccatgttactaaattgtccccagaagtagaattttttg

SEQ ID NO: 275004 - DNA, 542 bp, Homo sapiens
caatgatgacactgattttccattgcatgctcaacrttggcttacttttctgcatcactacataatgtgttccttaagggtaggaactggcacatatttaccttattcatccctgtgacctcagtactagtgcatcacctgtattgggttgaatatatcaaatgtatcactccacagcaaacgaacagctggaattattctgtcttgtctacacagtaagcacacatagctcatcttggtattcaagaccattggtaacgtgacataattcattatcatagtctgatctctctctacaagacctttatggtcagcaaagcttaggcccaccatttataaaaaacaacatagccctcccacccatggcccttttttatgcaatttcttccacctggaatttccttttccacaaatcctatctatcaaaattattttctttaacatccatgtcaaataccacatcttccctgatgcttatgctggttgaccagcatttgtaatgcccttgcaatttatttaccctggtcatgtgtcctatttta

SEQ ID NO: 275005 - DNA, 550 bp, Homo sapiens
agcaggcaccttcttcacaaggtggctggagacagagagagggcaggggaagctgccacttttaaaccatcagatctcatgaggacctcctcactgtcatgagaacagcatgggggaaaccatccccacaatccaatcacctcccaccaagtccctctcttgacatgtggggactacaattccagatgaaatttgggtggggacacagagccaaaccatatcattctgctatttgttagtctataaagaactgcctgagactgggtaatttataaatggaagacgtttaattgactcatagttctgcatggctcggggggcctgaggaaacttacaatcatggcagaaggcaagggggaaacaggcatcttcttcacaaggtggccggacagagagagagagagagagggcaggggaagctgccacttttaaaccatcagatcgcatgaagacctcttcactgtcatgagaacagcacgggggaaaccatccccatgatccartcacctcccaccagctccctcccttgacatgtggggattacaattca

SEQ ID NO: 275006 - DNA, 1153 bp, Homo sapiens
caaacattagacctttttagtgctaatcaaaagtgtttccttgcaagctcctgcaatgacacttataagcagatggaattcataagagagagacaaagaggagagggacaggcacaatggtttaccccctaaataaaagaaaatcttgaaggtctacaaataacttctgatgtcttagatgttattccagttttctttgctgtactagtctgaaaaagatttgtcaggtattttcactactcaatttaaatacttaagttatttraaagacagatgccatctgtatcgtaaagcagtcaactattttgttgaactttttttgtccaaatgattcagtgagttatttacagagcaggtactgctcacattcagtctgtaagataagatgcaaggataaaatagagttcagaatttatttttacatattctttcataaaaattataattgaacataagagattaaaaggcagtggaagaatcacatcaaataatcatacctaaatttctctcccttgaagagatgagaaaataaaggtctaggcagcccagggtccctgggacatctggaacaaaagtwcaaacattagacctttttagtgctaatcaaaagtgtttccttgcaagctcctgcaatgacacttataagcagatggaattcataagagagagacaaagaggagagggacaggcacaatggtttaccccctaaataaaagaaaatcttgaaggtctacaaataacttctgatgtcttagatgttattccagttttctttgctgtactagtctgaaaaagatttgtcaggtattttcactactcaatttaaatacttaagttatttgaaagacagatgccatctgtatcgtaaagcagtcaactattttgttgaactttttttgtccaaatgattcagtgagttatttacagagcaggtactgctcacattcagtctgtaagataagatgcaaggwtaaaatagagttcagaatttatttttacatattctttcataaaaattataattgaacataagagattaaaaggcagtggaagaatcacatcaaataatcatacctaaatttctctcccttgaagagatgagaaaataaaggtctaggcagcccagggtccctgggacatctggaacaaaagt

SEQ ID NO: 275007 - DNA, 550 bp, Homo sapiens
agactgattgtctatgtaagcctctgatattttttgtttgcttgcttaatttaatatcttagtatttcttttttttttcagccctccttgaggtttaattgacaaataaaagtgtatgtatttaaaatgcacaatgtgatgatttgacgtatgtgtaatcataaaatggttaccacaatcagctagtcaacaacatctcacctagttacctttttttgattgtttgttttatttttgtggtgagaacattcaaagggtacaaaccttcagctatagcctatgctccagctaagtgctcccaatgactgcactgactctcattcctggataaaaaattagaatccattagaaatattttttaaacgtttgcattcagcactgcccctccttccctaccccacccaggtcatgccttagcttttgaagggtgaaacccaggcttcagtactttcaaagcaaaaacctyaattacttttgcaccagcctaataaaagataggatctgaggatctcatgtacagcatagtgactctagttaataacactgcttt

SEQ ID NO: 275008 - DNA, 574 bp, Homo sapiens
ttcctggaaatccagtgcatttcctaagctaaaggagtgtttaagaattacatggtgtaggttttatttcttttaaaattttattacttgaatataacacaattattgtkttagtggattaatcctcatcatgatctcataatttgcattgcctaaatgaataatttatgttctagtaaacaaatctataaacagagatgtttttattgggggtggtggtgatgaaacgtgagcatctggcaaccacaccttgattcattttagcccctagagtcgtggtatggcgcattaatttctcagtttgtaatttaccagctgcatttaatggaaccaattttcattacatctgttctatggttcaaagagctcttttagttgccaaagggggccagcgtcacacagattctgagaggggctaatacactgtttcttgaagtattagataaccaaggatgattcctagttttacagcaaacaaattattttgacagaggcaagttttatattcatgacttagccgttggtagatttcaaattaaaagtatagtgtgcccttttcccaggaattacatat

SEQ ID NO: 275009 - DNA, 545 bp, Homo sapiens
caagttttatattcatgacttagccgttggtagatttcaaattaaaagtatagtgtgcccttttcccaggaattacatattgattttcatgtcattttcttcataatacycactgatcgcctgtctttacaatcagtggtagatttattgtttactagttaaaggaaacataattatgcttaagtaaatcctctttgtaaattacaggtggttagaagatgggtatttcttaggcaaatatggaatttataaatggttcttacatttattatagtaagcattatttacggacaagaaaaggtcatagctcttcatagtgtatagtgggaacatttttaatagtagaaatggttttgcttgggcaacttagcattcttggtgtgtaattttaatctcgtaaaaatatgtcactgttgtgtaataccaaatgtaggattccagttgaaagcaactttcaatgcaaagggttttctcatgggcagaagagaaatttgaaatgttctacagtgctttgaagttctaaagcttcagctgggagaattata

SEQ ID NO: 275010 - DNA, 545 bp, Homo sapiens
caagttttatattcatgacttagccgttggtagatttcaaattaaaagtatagtgtgcccttttcccaggaattacatattgattttcatgtcattttcttcataatacccactgatcgcctgtctttacaatcagtggtagatttattgtttactagttaaaggaaacataattatgcttaagtaaatcctctttgtaaattacaggtggttagaagatgggtatttcttaggcaaatatggaatttataaatggttcttacatttattatagtaagcattatttacggacaagaaaaggtcatagctcttcatagtgtatagtgggaacatttttaatagtagaaatggttttgcttgggcaacttarcattcttggtgtgtaattttaatctcgtaaaaatatgtcactgttgtgtaataccaaatgtaggattccagttgaaagcaactttcaatgcaaagggttttctcatgggcagaagagaaatttgaaatgttctacagtgctttgaagttctaaagcttcagctgggagaattata

SEQ ID NO: 275011 - DNA, 548 bp, Homo sapiens
acttctctaaaaatataattggtcttatggatttaaaactggatggaattctgcttaccattaggaatttaatattaaaaattgccaagccactagcagtcatagcagaaaactaccatayggaaaagttatcaacatgtcctttttggaaaccgaaaatcactgcaatgtttctaagtatcaaataaaacccattaaacatgtttctgggcatcttccctcccattgggatgagaacagcattcccatttatgacagagtgaactattcgtgttctcagaaggagcgactggctaattgcagacaaaggatgtaaattcagcccaagagcccagctatgactcccacacccacacaggggcttgttcccattggttccggcactcagatggaaacaccacttctttattacagaagccctactgggtagctcaggccctgcgcatgaaggggctggagaactattatttcccagcggtccttgtaaccttctcctggatccaactgttaggaagtgggaagtgcaggcagttgtgggggtgtatgtc

SEQ ID NO: 275012 - DNA, 548 bp, Homo sapiens
acttctctaaaaatataattggtcttatggatttaaaactggatggaattctgcttaccattaggaatttaatattaaaaattgccaagccactagcagtcatagcagaaaactaccatatggaaaagttatcaacatgtcctttttggaaaccgaaaatcactgcaatgtttctaagtatcaaataaaacccattaaacatgtttctgggcatcytccctcccattgggatgagaacagcattcccatttatgacagagtgaactattcgtgttctcagaaggagcgactggctaattgcagacaaaggatgtaaattcagcccaagagcccagctatgactcccacacccacacaggggcttgttcccattggttccggcactcagatggaaacaccacttctttattacagaagccctactgggtagctcaggccctgcgcatgaaggggctggagaactattatttcccagcggtccttgtaaccttctcctggatccaactgttaggaagtgggaagtgcaggcagttgtgggggtgtatgtc

SEQ ID NO: 275013 - DNA, 623 bp, Homo sapiens
caaaaaaaaccccaaccaaccctcaagtaaacattaccaaaaatgccaaaacaaacaacatctgtatctacagaaatgattgaacctactgcatagaagccagatccccttccgaggtctgatcagacaacaaaaccactgtgtttgtgaactacgcatctacttagcagyagctctgactacagctttctttgagatgtattcttttttttccttttacccatccgataggttgtgagaatgctatgattatagtttcctcatcataaattctttatccacaatctatttttaattaccccttatcaattttaattttgacataatgtattttttgacagcaaagattttaaatactacatatagacatacatatgtatacatacatatacacacattcttttcttaacacagatcccttaatacaaaaaaagtgacaattcctgttgacatcttccccagtccaccgggttggtagtcataggatggtgcagagaggtaatctgtttacatttctttttcttgatacacataccaacagccagacccagaaaacatgcccaaaggctttcatatctgttgtgaaaatgccaagcatctgccaagcattgcaaagggaaaac

SEQ ID NO: 275014 - DNA, 534 bp, Homo sapiens
agagcatagagtagtttggaaatttagtgcagagtcatttggagaatatatatyaacagttaaaatgtgaaatggaaatttgaagtatatatgcttttataaactatttgggaagggcatactagcagtgatatttttagtctgatttttagaagcccatgctgtgtttcataaatggaaacgtcacatccaagaaagtgagaccagcggggaagagtgataggaactccagaggggcagccaaacagcagctcagagctgacatacgaggcaaaatgagcacttagcacctcctagcatatttatcagaagttgccaatctaaactatttgagtttcttcccacaaatggcgtgcactagtaaaacacatgtgttaagcaacttggacagcaccttgacggtgttagttaactaacagccatatttcatggggaattactgaagtgacgtcactcctttaatttcaacctaaacaaaactgtttacatggaaagttgcatgcataggtttctataaaagtctagaccagaaag

SEQ ID NO: 275015 - DNA, 534 bp, Homo sapiens
agagcatagagtagtttggaaatttagtgcagagtcatttggagaatatatatcaacagttaaaatgtgaaatggaaatttgaagtatrtatgcttttataaactatttgggaagggcatactagcagtgatatttttagtctgatttttagaagcccatgctgtgtttcataaatggaaacgtcacatccaagaaagtgagaccagcggggaagagtgataggaactccagaggggcagccaaacagcagctcagagctgacatacgaggcaaaatgagcacttagcacctcctagcatatttatcagaagttgccaatctaaactatttgagtttcttcccacaaatggcgtgcactagtaaaacacatgtgttaagcaacttggacagcaccttgacggtgttagttaactaacagccatatttcatggggaattactgaagtgacgtcactcctttaatttcaacctaaacaaaactgtttacatggaaagttgcatgcataggtttctataaaagtctagaccagaaag

SEQ ID NO: 275016 - DNA, 560 bp, Homo sapiens
ggatattttttccaattacatctttattacttctgtayttgttttttaaatcttagtttggaattcatattacttacattccagtttctaggctctatgttgtgacctgtttattctcactgacttccagacaactaatttagcttgaagcagtgaccatccctttttttgcacttctgttgagtctaaatattgaaaggattcactctcctgaactaaagagagactttagtcttttaatttttgtctgtgacatgaattttctcactaccaatactagtaagttatatgggtttccctgacaataacacattttcaggctgtataaaataaggtcatttttattttgcaaagcaggtaacacagtactaggacccttctgttgagatgagaccgggggatgtctttgctcttgcgcctctcctggtgctaatgtataaaagacaggcatggtataaggttctaattccaggagccaggaatggttcacctccttacagaccactaccaccaccaccactgggccatcagtgccagcagggtcacttgattatcactgt

SEQ ID NO: 275017 - DNA, 560 bp, Homo sapiens
ggatattttttccaattacatctttattacttctgtacttgttttttaaatcttagtttggaattcatattacttacattccagtttctaggctctatgttgtgacctgtttattctcactgacttccagacaactaatttagcttgaagcagtgaccatccctttttttgcacttctgttgagtctaaatattgaaaggattcactctcctgaactaaagagagactttagtcttttaatttttgtctgtgacatgaattttctcactaccaatactagtaagttatatgggtttccctgacaataacacattttcaggctgtataaaataaggtcatttttattttgcaaagcaggtaacacagtactaggacccttctgttgagatgagaccgggggatgtctttgctcttgcgcctctcctggtgctaatgtataaaagacaggcatggtataaggttctaattccaggagccaggaatggttcacctccttacagaccactaccaccaccaccamtgggccatcagtgccagcagggtcacttgattatcactgt

SEQ ID NO: 275018 - DNA, 1152 bp, Homo sapiens
gtagatttttgtaaagtccatcggattttctacatagacaataacatcatctacaagtaaaacaattttacttcctcctttccaaatacatgactttcatttctttgtattgcctattgccattgctaggaccaaacagtgcaatgttcaacagaagtgacgagagtgactatccttgctttgtyaccatattacagtttttttggaaatgcccttctttcatgttgaggaaattctcttctattctttatcttgctgactgttttgggaacagattttggcatcagaatttgtcaaatgctttgtcagctatatttagatgaacactctgattttttagaatttgttcatatagtgaaacacgatgttttttaatatcataggataaatctcaattggctatgatctattatccttttaccatattattgatacatttgctaaaattttgttgagaaattgtatatcataattgatatttatatgttgttttcttcttgatatgtctttttctggttttggtatcaaggtaatttggcctcacagaagcagttgggaagttttwtataaaggatttcccattctgataatgatgtgctgctgccttgttgtagatcaactctgacaaaatataaaaaccatcttcttgaagacattcaagacatactaatgcagtgaagatttaatgaaaaaaaatctgtgtgaaagcgaaaaaagaacccttttcagcctcatttatccctactttttccctcaagatgtttgctgattcctcaawggaagtcaaaatccttgattttgaagcaaaaccttcagtaatctcaagaggctatgtaggcaaaaattagagttctgagccttgcacggaggaagaaatcctagtaagcacctaatgtattcagctggaactcctgaaaggctacgtgctagccatggattaaatggaattagaccaactattataaaaccgaagtccagtccccaattacttcctttctacagggaaatactacatccagagactcaaattgtttccacagtttttcatacacaatgttcatcctaactaagaattacccaaaacaccaaacacaaggccaaatggccaaacattaaatgaaaaacaaagtagcaaaacgtttgcagtttacc

SEQ ID NO: 275019 - DNA, 600 bp, Homo sapiens
gtaattaaatagcacttaacacccagtacctcaagtgttagaaagaatgaagaacaactgaaatcatttatttagtgttggtgggagaatatactattgaacaacaaaaaaagaaaattgcaaagaaatacaataattacatttatataaagttaaaaagaaaaagaaaatggagccacacattatttagggaataaaactatgttgtaaaaccataaaggaaacaaggcataaagtaataaaaaaagtataattcaagtagtgattatctctgatggacatgctgggaaactgagagagagtsgtaatgttctttttcttaaacttggcttaatgtgtccattttctgtatatctgacatctcttttataaataacccttggtgactacttaacaatgaatgaggacagttttcgagaagactataaatatcctctcatgctaactctaagtagctataacagtttgctgataatgccccagaaatggagcatttctgcagcctggacagaatatttcataacatttggaactgagcaacttctgggaaccccagccttttgtaaccttatttaacatcatattgtgcaaggttataat

SEQ ID NO: 275020 - DNA, 537 bp, Homo sapiens
acacttatcttgaaaatccctttttacttttctcacttgctaattgaaccagtgacttggagatgcttgtaatgattcatgttatcttacttttatttctaaatgttcatyccaaatagattatcctttatcataaatgttcttcctaaagtgccagcttcaggttagctatttcatgcttcacctaaatcataaatttaataaaaaaggaagaatttcagttcctctcctcagtttctttactccctacttccacatactagcagtaaattctttattttctcttctttggagttatatggcatctttcttgaaattactgtataaggggcatagaaattcctgagttatacttaggggtgttcctgacacgacagtgacatgtaaattaacattagtagcttcagcttcagaaaatagatgtttctattttccagtaaatttattcacttaatattttcctgctctataacatcaaaatacttcctatcccacaatgtttctatggcattgtagaatccctgtctccaccttctt

SEQ ID NO: 275021 - DNA, 608 bp, Homo sapiens
aaggttattagtagttactcacttgagagcaagcttccaagactctgtcaggcaaattatcarttctgtccatgtcattggatcagagtccttgaaacctaggaaaacttgctaaattctatatactttaaaatgaaaaacaatgcccatttggaacttgagtaattcattttgacagtttgaccagatgaattgtagaggaaaaactatcatgtatttcacaagcaaactttggtataaagaggaaattggttttgtatttttaggtgagtacttatataattataagagaagctcaaatttttactcaaggaatttagagttaaatgatttctagagaacatatgcaatgaaaagttaatgttttaaaaatagcaaatgtattatcattatggtttattccttttctttggcattcttgaatatcctaagcatagataagtgataaataaatagatacataggaacatagatgaacaaatgtatttgttggctgttggcaagtgagatatttatataacttcttaaagttctacgttgtatgtctgaattacattgattaaatcaacttgagtttcataggggaccaagaatacttagatcattca

SEQ ID NO: 275022 - DNA, 556 bp, Homo sapiens
tgatccatccaatttgtaaataccttagaccactctctaggtcatgaatgatcagaaaaggcatttatgcaaaattaatgaagtaaaatatatgttcattaatagctagaatcttctaaagttttttaattggtcaggttcattgtaatactccatccaagcttttaaaagaaaaaaacaccgtagctgggttattgcatacttttgaagaaaacatattttctttttgataattcaaaactaattattttgtgtttttctttttaaaaatactgaatatttctattaatagcacttctttacaaaatatacttccctggttccatcaacatttgtctgcttagaacaagtaatgatataaatatratgttcctatatcttggcagcccctctcttagagattaactgcataaagtacagacaaacagggcaaactggacctagacccattattttgaaccccctctctccaaacctggcacttaaatgagacaggtaagaagagaactaagttgtgaatgctggaaagaatcccatgctagagacaaaatgtact

SEQ ID NO: 275023 - DNA, 534 bp, Homo sapiens
tgttcctgggtgtgtctgtgagggtgttgccaaaggaggttaacatttcagtcagtggactgggaaagacagaccatcctcaatctgggtgggcacaaactaatcagctgccagcataggcagaataaaagcaggccgaagaacgtggagagattagactggcttaacctctgagcctacatctttctcctgtgctggatgcttcctgcccttgaacatcaaactccaagttcttcagtttgggactcacactggcttccttgctcctcagcttgcagatggactattgtgggacctcaccttgtgatcctgtgagttaatattccttaataaactctcctttatatatacatctatcctattaattctgtccctctagagaaccctgcctaatacgtgggttaaaatgaccgtagtatggttaagtggagcatggtttctagagagtctraaagtaggaagcaagggatgacagggagcctactgcagtactccaggcaagagatggtgttggcttgaattagagtagttttc

SEQ ID NO: 275024 - DNA, 619 bp, Homo sapiens
aagtaaaatggatgtgaagggccttagggattgtttcatgtaaaattgcaatgcccctttttatatcacatctccgctcccaagagatttctgaaaggatttagtcaaacatgaaactttttgttctatttgtaagtaatgtatttttatttcagaatcaaatctaatatgctgctttctatttttggaccttaaaaatagcacaaaaagctcttagatcttcattggggtccacatacatgtgtctgcaattggattagataaattggaacttcatgaaaatgagatagagttaaagtatttcatggtctggtttcttcataagaaataatataattttatcatggtgccctggtgctagacaaattctgaagscaactgtaggcttttatcaaaaattaaactttgacgtagagccaagattctggttttcagctaagatgctttatatctatggcagctttgcacttcatggactaattgccataatacatggttattgatgcagagtcctccatggttccttttgctctaacagacttgcatattaaaaatggaagctttaacatatttaatagcacaagtgactaagttgtcagaaattttcacacttaaatgc

SEQ ID NO: 275025 - DNA, 538 bp, Homo sapiens
cgaatgctgattatttttcattgaaccaaaaatggtaggtatatatttgtcctagggaatggattccctcttaggaatattttgataatgagtcagaattatgaactcttgtctcggatggaaatgccttatgagtaataaaccactgttttgcttgtcttagtcctttcttgcctctgtatgtcttaaatttctaagagtgtgtatagggagagagtaggtgtaggcttgataagtccatcttgaaacaagtcaaggaggtctggttagacaccccttgcaaacttttccgtgggtcactttatgtggatataatttmacttttctcagtcttatctttgcatccctgagaactactttgtttagacccatcttcctggagtctggagatccttcatcagcaatgatcagactcttggctcaattctggagacataaagttgcacctgaccatttctttctgattatggcggagctcttgaaattgtcttaatgtaaacctgagtctatgcctactctcggataagccatgtgacta

SEQ ID NO: 275026 - DNA, 538 bp, Homo sapiens
cgaatgctgattatttttcattgaaccaaaaatggtaggtatatatttgtcctagggaatggattccctcttaggaatattttgataatgagtcagaattatgaactcttgtctcggatggaaatgccttatgagtaataaaccactgttttgcttgtcttagtcctttcttgcctctgtatgtcttaaatttctaagagtgtgtatagggagagagtaggtgtaggcttgataagtccatcttgaaacaagtcaaggaggtctggttagacaccccttgcaaacttttccgtgggtcactttatgtggatataatttcacttttctcagtcttatctttgcatccctgagaactactttgtttagacccatcttcctggagtctggagatccttcatcagcaatgatyagactcttggctcaattctggagacataaagttgcacctgaccatttctttctgattatggcggagctcttgaaattgtcttaatgtaaacctgagtctatgcctactctcggataagccatgtgacta

SEQ ID NO: 275027 - DNA, 599 bp, Homo sapiens
ttgaatgacatatatgtatatatgctggacatagaattctgtttttattttttccccctcaggattttgaggaagtctttccgttttcgtcaggcttccatggtttgtgactagaagattgccataattcttttcttgtcatatttatataatgcaccatttcttttggctgccttaaggattccctttatctctcatttgcacaatttgattatgatgtgctttaatgtcatttatgcttctgtttggggttcactggcactgggaggtgattgaaaatatagtttttaayagttttataaaattttggctgttatttattcaagtaccttctcctcttttttcttctccttctggaattccagttatgcaaacttttttgtcatttgatatattcccacaggtcattgacgttctgatcatatttttaatatgtcttgtctctttacaccatttggaataatttctaattcctgctcaattcactatttatctcctgttaagtctagtgcatttttcatttatatgttgaattattcatctttagatattccattttagttgtttttacatgtcccatttccctcctagttatgttc

SEQ ID NO: 275028 - DNA, 611 bp, Homo sapiens
agactttttttaacaatgaaatcttgtggtaacttactaccataaggagagcatcaagtcactcatgagggacttgatgtgcccacaatattttaattaaactttggtcatgtaatagaatctgatttctgagctcctatatgttaatgttctcaaggaaagatgtgaagtccctgtaagcatttgatgctcttgtcctgtgtaaatgttgagctttagactttttttagttcctttgttaactttagtttccatatattcattttgggtggaaagaaggcttccataatggttttcatatagaaggttgtttttttctaaatgctcctaaagttggatcttaacatttacttctccccagggaggtggaatgagttgcctcgttgttgaatttggaagaactgggcatatgtcctcagtcyttccccacccttctctctggggtcagccttcctgcagaaagcacaccttctagccctccctaccttgaagaaagcttaacagagattggttccacatggagacttctgcagtatcagttatagcatcaatacagatgatttctaaaaatcttcattctggataacttttttgtcttattccttaattgg

SEQ ID NO: 275029 - DNA, 581 bp, Homo sapiens
gctttggttctggaaactggaagtccaaaatctaggggctgcatctggtaagggccatcttggtacaacataacatggcatgagggcatcatgtagtgagaaagggcaaaagatggcaagtacacagaagacagagaggaaaaaagggtggagctcctatgatgattaatttagccccttgataatggcattaattattcacaagagtaaagccctcctgacctagtcgcctttaaaggtcccaactcttaatactgggtattaaatctcaacatgagttttgaagaagaaatttaaaccatagcaataaggttagatgttttccatcttattcatgtttgccttgaatttctttattgattctattatttaccaaatttttctatattgtttgttcctcaatctctactctccactcttagtaaattgttaagtgtgctgcatattttcagttcaactaattattatttaataatttcaaataataagctggaatatrtattttatgcatttcccaatttataagcatttgaaattaaataagagctattaaattcatcctttaccccaaaagataatga

SEQ ID NO: 275030 - DNA, 567 bp, Homo sapiens
cttataatgttatgttgaaaagaggacattttaaataatacaatggggcaattctttaaatcagatcctctccccacacagtgtttgatatttttgctgctggttgtagttaccatttttgtttttagtggctttctgaaataattgtgtacaatctgtattctttgtcatgtatggccactgcagtctcyagtcagttaacttagttgtcaactaatgattagagaaagcattccttatacatccagaaccaatcggtctctcagcctttgctaagagactgtgtgcatattgggactggcttcaacacttggccagcagttgacaccaccactgtagccttcctgtcctactagtgaagagcctcaaggtcagatacaagtaagagagcatgtaggctcttctcagatctttcttgaacacgtgcgccatcttatgtatgcaatgactttctatattcccaataatattttgacacttttcaaagatccagtatatatcttattcagtaacttttcttcttaagctttcagttagtctattgtttactccagctgtgaaccacct

SEQ ID NO: 275031 - DNA, 567 bp, Homo sapiens
cttataatgttatgttgaaaagaggacattttaaataatacaatggggcaattctttaaatcagatcctctccccacacagtgtttgatatttttgctgctggttgtagttaccatttttgtttttagtggctttctgaaataattgtgtacaatctgtattctttgtcatgtatggccactgcagtctccrgtcagttaacttagttgtcaactaatgattagagaaagcattccttatacatccagaaccaatcggtctctcagcctttgctaagagactgtgtgcatattgggactggcttcaacacttggccagcagttgacaccaccactgtagccttcctgtcctactagtgaagagcctcaaggtcagatacaagtaagagagcatgtaggctcttctcagatctttcttgaacacgtgcgccatcttatgtatgcaatgactttctatattcccaataatattttgacacttttcaaagatccagtatatatcttattcagtaacttttcttcttaagctttcagttagtctattgtttactccagctgtgaaccacct

SEQ ID NO: 275032 - DNA, 563 bp, Homo sapiens
ctaacccctgtagatgaagactacatcctgggagacataaatacctaggtccctgaatggcttcttagagtatagccactgcatcagccctggacaattcacatctgaattatttgatgaaaacaggacaaaacaaagtttttatccaatttaggttactgaagttagtatcattttgttacaatggtttagcctgtaatggtgctactaaaagaaatcccggctggstgcggtgactcacacctgtaatcccagcaacttcaggaggccgaggcaggaggatcacttgagtctaagagttggagaccagcctgggcaacatagtgagaccctgtctctacaaaaatgtttaaaaaaatagctgagcatgttggtgcacacctgtagtcccagctaatcaggaggattagctgaggcaggaggattgcttgagcctggggaggtcaaggctgcagcgagccgtgatgaccactgcactccagcctgggtaacaaagcgagaccccgtctcagaaaataatgacaatgagaataataataataatacagaaattcaatgattat

SEQ ID NO: 275033 - DNA, 527 bp, Homo sapiens
ttcaattaacttcttgtaatttcagcttactctttaataatttgggtttttttctatactactttcctcagctccacaagctgataatttttattgtctccaaatatctttctggagcttgggaatttttgctttttacccttacttgatggargagttaatgtattaatttttttaatttatatgaaaaacattctcttttcgtttgatttcgtcttagtgcagatcctatgctggtgcctgcaggtatcactgaagaaggtgaatttttcctataccaaatatttgccaggagtatgtgtcagaaagggaaaagaataaagcttgaattatttttatgatcaaggtctctgggtgtgacatttcccccatgcaatggagacaggcactgttgagccttttctcatgcaaagtttctttccaggctgcagcagagagggtactacttgcatatgattatccatatgattactcatatagtctcaactcttctgcttcctggaaccatgagttaagtaaaactcatt

SEQ ID NO: 275034 - DNA, 532 bp, Homo sapiens
taccaatttactgtgttagtccattctcatgctcctaataaagacatacscaagactgggtaatttataaaggaaagaggtttaatggactcacagttcagcatggctggggaggcctcacaatcatggtggaaggtgaaggaagagcaaggcatgttttacatggtggcaggcaagacagcatgtgcaggggaactcccctttataaaaccatcagctctcatgagatgtattcactatctcgagaacagcatgggaaaaacccaccaacataattcaattacctcccactgagtccctcctgtgacacatattacaattcaaggtgagatttgggtggggacacagagccagcccatatcacttgtcaaccatcacttaggccttggggcataataggtgtacagctaagccctggagccctcagggaatcttccatggccctagtcttccctcttgctctaggatttatttgtatttcattgctttgggtatggattttcttcccaattaattgagctgattattctgt

SEQ ID NO: 275035 - DNA, 583 bp, Homo sapiens
gaaacactttcatcattgacattgatttgttatgcatttgactttctgatgaaatagaaggatcacccctccttgtcctattastatgatggcatggcattacatattatatgtttgttttctagaaaaatataaatgacactagagaaagcaattttttctaaaaccatagtataaactcctgtattttcaaagaactgatgtaatcaagttgataaaccatgaaccaggcttatttaaatgagttgtcttttggcatttgaagagaattattttctgttatgaaaatcaaacaagctgttagtgaatcacagaagacaaatacagaaaattgccttgtaacatcacatttcaggaggatccattgcccatagcaatgatgaaggaacaactgcaatatcagaaagaaaattgtcttagtaacaggaaaaacagaatatcctcttctgatattgagcaaaacaaatgaaatattaatcatgtgaataacataaatatttgaataacttaaatatatatagtgttgccaaaactactaaaactatgtttccagaagaaatggtagattagatactgtgattgt

SEQ ID NO: 275036 - DNA, 583 bp, Homo sapiens
gaaacactttcatcattgacattgatttgttatgcatttgactttctgatgaaatagaaggatcacccctccttgtcctattactatgatggcatggcattacatattatatgtttgttttctagaaaaatataaatgacactagagaaagcaattttttctaaaaccatagtataaactcctgtattttcaaagaactgatgtaatcaagttgataaaccatgaaccaggcttatttaaatgagttgtcttttggcatttgragagaattattttctgttatgaaaatcaaacaagctgttagtgaatcacagaagacaaatacagaaaattgccttgtaacatcacatttcaggaggatccattgcccatagcaatgatgaaggaacaactgcaatatcagaaagaaaattgtcttagtaacaggaaaaacagaatatcctcttctgatattgagcaaaacaaatgaaatattaatcatgtgaataacataaatatttgaataacttaaatatatatagtgttgccaaaactactaaaactatgtttccagaagaaatggtagattagatactgtgattgt

SEQ ID NO: 275037 - DNA, 583 bp, Homo sapiens
gaaacactttcatcattgacattgatttgttatgcatttgactttctgatgaaatagaaggatcacccctccttgtcctattactatgatggcatggcattacatattatatgtttgttttctagaaaaatataaatgacactagagaaagcaattttttctaaaaccatagtataaactcctgtattttcaaagaactgatgtaatcaagttgataaaccatgaaccaggcttatttaaatgagttgtcttttggcatttgaagagaattattttctgttatgaaaatcaaacaagctgttagtgaatcacagaagacaaatacagaaaattgccttgtaacatcacatttcaggaggatccattgcccatagcaatgatgaaggaacaactgcaatatcagaaagaaaattgtcttagtaacaggaaaaacagaatatcctcttctgatattgagcaaaacaaatgaaatattaatcatgtgaataacrtaaatatttgaataacttaaatatatatagtgttgccaaaactactaaaactatgtttccagaagaaatggtagattagatactgtgattgt

SEQ ID NO: 275038 - DNA, 576 bp, Homo sapiens
ctgtgtcctgctgagcttctctttgctattgactccatatctcagctctcagaagaagccaaactctcagcttgtgcccttcttttaagcttgcttaagactagacagttctgtgttgagatgggaagaaaaattattttagttcaatattttctactgctaaactctaatttataagaaaaaattaagtagggtggaaaaaataagaaatacatttatctactgaaattatttctgtggaggcataaataattttagaaaagtttattgaaagccaaatgggaagacagacctggaaagacacatcaacaaagttgggggtgttctagagtctttcataagctaaaagggctttatgggaaagtttagaagaagagaggaaggctcctcataccagagttgtcctctttttcatcggaggataaaataaaggagttacaatcattagattactacatacaggctaaatgtctacgtgcaaaacaatcagaaaacttcttgtttcagtgtaacttagaaataaatcatggtcctaytcagtgtcatcaggttctacattaatcagtacgtcaacaa

SEQ ID NO: 275039 - DNA, 545 bp, Homo sapiens
tttctaacccaatgtgacaatcagtgaccaatatgttttggctttttcaaaccaagaatctagttgagtccacagccacttctttcttgaaaaaaaaaaaaaaagcattcaggagtgcaagttttctgctatagarggcagtgggtacagacagaccttccctgagtggagggctgggagagagtctgcatggggacatccctccaagcaacttcagagtgacagaagagcagccttccttagcacctgcaacagtaacccttttctcatcacagggggagcaccaactgacaggagagaagtaagaagcttatcagcgtatcattgacacttcctgcagggtggtccctgcccttaccagagctgaaaatgaaaaagagaacagcagctttctagggacagctggaaaggacttaatgtgtttgactatttcttacgagggttctacttatttatgtatttatttttgaaagcttgtattttaatattttacatgctgttatttaaagatgtgagtgtgtttcatcaaacatagctcagtcctg

SEQ ID NO: 275040 - DNA, 318 bp, Homo sapiens
cctttacacacatccaggaaaggagccaaatccagggggttgagcagcaactgtctacaggcttcacttacactgcacctcacaggatgagacccattggtctaggactccagcctcccaccactggggttatgaggctagtagcagctctgcacttccccaggacagatctccagggcaagggggcagcaactttcctgccttgcagccctcactgttgttgccttcaggctctggagagcctacagtgactagggactggcrcaaacccccagcacagcacagctgtcccacagaaaaatggccagactctttttt

SEQ ID NO: 275041 - DNA, 574 bp, Homo sapiens
ggtaggctgccatctttgctttctcacagccctcactattgttgccttcaggctctggagagtatgtggtgacgagggactaacatgtaaccctagcacagtgcagctgcttcatcaaaaagtggccagactgttttacatgcaggttctcatcccaacttctccttagttggtgaggcctcctaaccttggactccagcacaaccaccctgccccmacttgaacacttcagttgggggcagctcagcatttctctgaggaggaaatctcagagtcaacccacaacctcttggccattgcagctgcagtagtactgccctaaccacctttcggctgaggaaggaacaaagggcctagtcacttcactggcacccaagcactccacagccaccatacagagaggagttcagtctaccttccctgtgagcccccagcacccactcttcagcaggcagggcccctgctcaggtccacagtttagatgccccacaaacagctgagaatacccactggtagtggctctgaatttcctgggaaggggctccaagaggcaatcaatgttcctttctgccac

SEQ ID NO: 275042 - DNA, 574 bp, Homo sapiens
ggtaggctgccatctttgctttctcacagccctcactattgttgccttcaggctctggagagtatgtggtgacgagggactaacatgtaaccctagcacagtgcagctgcttcatcaaaaagtggccagactgttttacatgcaggttctcatcccaacttctccttagttggtgaggcctcctaaccttggactccagcacaaccaccctgcccccacttgaacacttcagttgggggcagctcagcatttctctgaggaggaaatctcagagtcaacccacaacctcttggccattgcagctgcagtagtactgccctaaccacctttcggctgaggaaggaacaaagggcctagtcacttcactggcacccaagcactccacagccaccatacagagaggagttcagtctaycttccctgtgagcccccagcacccactcttcagcaggcagggcccctgctcaggtccacagtttagatgccccacaaacagctgagaatacccactggtagtggctctgaatttcctgggaaggggctccaagaggcaatcaatgttcctttctgccac

SEQ ID NO: 275043 - DNA, 567 bp, Homo sapiens
ccttgcacaagttacacagcatcagttctgccaaattatattgatcaaaaccagccacagggccagttcagattcacgggtatgaaacataggtgccacatctcaataggaagagtgacaataattttatggcaatcttttcctatgatgtgcaaaaagacttatataataatgtttacagccacttcataatagtcaaactattgaaaatgacccaactgtccaacaacagatgaatgaataaataaacctgcatatatttctacaattgaatgcttaatttgaattattcaatgaatatttaattgaatacaaagtatactactaatattcacaataacatgtgtgaatctcacagacattaagttgagcaaaaaaaagccaggcataaaagagtacacattggatgattccgtttttaaaaagttcaagagtaggcaaaactaaaaatcagaacagcaatttcctctggagaagagaatgaatggaaaaagcatsgattttctgaaaaaaaatgaaaatgttctcttgattagctatttacattttcaaaactcattgaactgt

SEQ ID NO: 275044 - DNA, 291 bp, Homo sapiens
ttctcaggtcccaggcatagtgtatggggcacgggtagaagcagctttgttgagggcttgccaytgaagagggtgaggcatccctctggtcacatccttgtgctggcagatggggaacatgcaagcccttcaaaccctagtccttatgggatttgcctcccctaccctggcttcaagagccctcactcagcttgcaaccaagtcccagcagcaactttccctcacctcgtgaccccacctcagatcactcacttcctggcactagttgctgcctctcaggcctagctcatt

SEQ ID NO: 275045 - DNA, 568 bp, Homo sapiens
gggtgaggcatccctctggtcacatccttgtgctggcagatggggaacatgcaagcccttcaaaccctagtccttatgggatttgcctcccctaccctggcttcaagagccctcactcagcttgcaaccaagtcccagcagcaactttccctcacctcgtgaccccacctcagatcactcacttcctggcactagttgctgcctctcaggcctagctcatttcctagccctggcaatgagagtgatccctacttgctctcctgtcccagcagtgacaacccaagttttcataacgccccagtcccagcactgctgggycccaggatagcatgaagttggcagaagctagttgctgtagccacttatctctcagaaagaatgtggaacctagtgtgagctccctcgctggagcagttccatcccacagtctcctggctggtcgtcatgttagtttcagggtttgggagggtcagagggctctttcatggcgaggattatactatttcacagtggggatatgaactgctagaagtctattacttgccccttctttgcattaggaagtcac

SEQ ID NO: 275046 - DNA, 621 bp, Homo sapiens
tgttgtccaaacatgcaaatgactgaattatctagtgtctttttacatattattcttctggtgacagttcctgtcttccctttgtccccctggcamattcctccgcccccttcaagagctagttcatggaacaattcctgtctgcagaatcagctaacatgccacttgcctgtgtgaaaggcagcacaatgtgaaagcaagaggagggagttgagagtcagacttatccgctcagcctctcccaagctgtgtcctccccgagactgtcagctcacctctatattgggaataatactctctaacttgcaatgtgggtgtgggaattttagatgatattctggcatttcctaagcatctataagttatgtttttcttaattagtttgtcatcctaaaaacccaccctttccaccaccaccaaagagattgaatggcaccatgttctattttctcttaggatttttatcctatgtctacacaaacattgtcaccttgggtaaaaattacattagctcatgaaaaatgactgcagctttctcattccacagctagattctgccttctgacccattgtggtagggtgaataatgccccccacccttgagatccccatgccctactc

SEQ ID NO: 275047 - DNA, 567 bp, Homo sapiens
tctcttgcctttctatcttgcagaactctgtctttcctgtttctcacaggtaacacacacacacacacacacacacacatatatatatattacacagagatacgtatgtgtgtgtgtgtatgtgtgtatttcatagtgttaaaaatggttttgtttcctaaactggaaaacactatgaaatcagagattataacatttatcactgtttcagtgtactggtagagactcaattcaaagtgccacattagcgaagatgatgtgttgaaaatgatgatgatgaagttttaacatatccatgtatytgctccttcaagcaattgaagtatacctctatattaacatgtgtaatatatagttgcaattatttgcctacttatctgcctctcccaccacatagtgatcttttcaagtgcaattctctgtgacttacatacagtagtgcagcacataacatttaggtcaacaatagactgcatatatgacaatggtcccataagattataatggagctgataaattcctgttgcctagtgatgtgattcgcattgcctcatggttgtaaagtca

SEQ ID NO: 275048 - DNA, 626 bp, Homo sapiens
gtacagttgtacaatgcgtttaaagtgttattacgaaagtcaaaaagtttaaaaattaagaagtttataaataaaaaacacagtaatctaaggttaatttattgttgaggaaaaaatattttttataaatttagtgtagcctaagtgtgtacagtgtttacaaagcctaaagaagtgtacagtcatgtcctaggccytcacattcactcaccactcacactccgactcatccagagccacttccagtcctacaagctccatttgtggtaactgccctacagaggtgtaccattttactcttttataccataattttactatatctttctacatttacagatgtttagatactcagatattcaccattgtgttacaacttcctatggtattcagcactgtaacatgctgtacaggcttatagcctaggagcaataggctgtactatatagcctaggtttgtagtaggctataccatttaggtttgtgtaagcacaccctgtgatgttcacacaatgacaaaatcacctaatgatgcatttctcggaatgtatcccaattgttaagcaaaacatgactgtatttttgaatatcctgtatccaacacaatggctgttgcagaatgtttt

SEQ ID NO: 275049 - DNA, 1253 bp, Homo sapiens
gtacagttgtacaatgcgtttaaagtgttattacgaaagtcaaaaagtttaaaaattaagaagtttataaataaaaaacacagtaatctaaggttaatttattgttgaggaaaaaatattttttataaatttagtgtagcctaagtgtgtacagtgtttacaaagcctaaagaagtgtacagtcatgtcctaggccttcacattcactcaccactcacactccgactcatccagagccacttccagtcctacaagctccatttgtggtaactgccctayagaggtgtaccattttactcttttataccataattttactatatctttctacatttacagatgtttagatactcagatattcaccattgtgttacaacttcctatggtattcagcactgtaacatgctgtacaggcttatagcctaggagcaataggctgtactatatagcctaggtttgtagtaggctataccatttaggtttgtgtaagcacaccctgtgatgttcacacaatgacaaaatcacctaatgatgcatttctcggaatgtatcccaattgttaagcaaaacatgactgtatttttgaatatcctgtatccaacacaatggctgttgcagaatgttttwgtacagttgtacaatgcgtttaaagtgttattacgaaagtcaaaaagtttaaaaattaagaagtttataaataaaaaacacagtaatctaaggttaatttattgttgaggaaaaaatattttttataaatttagtgtagcctaagtgtgtacagtgtttacaaagcctaaagaagtgtacagtcatgtcctaggccttcacattcactcaccactcacactccgactcatccagagccacttccagtcctacaagctccatttgtggtaactgccctacagaggtgtaccattttactcttttataccataattttactatatctttctacatttacagatgtttagatactcagatattcaccattgtgttacaacttcctatggtattcagcacwgtaacatgctgtacaggcttatagcctaggagcaataggctgtactatatagcctaggtttgtagtaggctataccatttaggtttgtgtaagcacaccctgtgatgttcacacaatgacaaaatcacctaatgatgcatttctcggaatgtatcccaattgttaagcaaaacatgactgtatttttgaatatcctgtatccaacacaatggctgttgcagaatgtttt

SEQ ID NO: 275050 - DNA, 554 bp, Homo sapiens
gtgtttatgaacctgaaacttgaagccccttctgagttaacagcagagagaatgaaggggagggatgattttgcatatggatgggcaacacgctgggtttttacagtcttacacccagattttaatgtttgcagtgtaaaggaatccaggtggtcctgagtggcaactraatcattctttctctgcatgtaaacagagtaactcaatacatgcactcaaaaacagaagacatctgcatctcgggaggtataagcatggtgtcaacactgtgccatgtctcaggagctggtcttgtcaagtttcagtgggaaaccactaaacataatgagtgagatgcctgataccctataattattatagtatatacagtatgctatttatgtatcaagttgtattacatgtgtgaataatactatgttatatgtaatgtaatctcttcattagagaaagaagagttgaggaaagcactgtggtgtggtggttaagagcacaatttgaaattcccactctgttacctacttagttatctgaaagtgggcaagtattttaaactc

SEQ ID NO: 275051 - DNA, 1057 bp, Homo sapiens
tctgggtggaaaactttgagagggtccctggatcaatgtttatctttggtactctagcccactgtcatttataycaatgtattattggagcaagtcgtaatagcaaaagtgagtaccacattaaattctctgtgaaaatttggagtgcaagcagacctccatttaggtcatcaaggtagcgggtggcagatagggttatttgagggaatggtcaccagatgatgagggcagaaaacagatgttctctgtattcaaagatcagtcttagaacagtgtgacacagcatgacctgtgactttgagaggcagacaacaatgtcaacagtacctgagacttttggggcaaataaactacaagagaaaaagaggaatgatggatgaccccactctgttattacgattccttatttgagaattatcctgaaatctcctgttagagatttccagaaactggtgggatgtgagagatacagagatggagcttctgcaatagccagwatgagggcagaaaacagatgttctctgtattcaaagatcagtcttagaacagtgtgacacagcatgacctgtgactttgagaggcagacaacaatgtcaacwgtacctgagacttttggggcaaataaactacaagagaaaaagaggaatgatggatgaccccactctgttattacgattccttatttgagaattatcctgaaatctcctgttagagatttccagaaactggtgggatgtgagagatacagagatggagcttctgcaatagccagtttgggcaatgtttcctctgctggaatatcaaagttataagacaggagttcatttgtactagatttcccatgaagaccgagacaaaggcttatgtggctataccaattctaagtccgcaagcccacatcaggggccttatctttagctgagtgtatggtatccctgtggaaatattttatcctctgccttaagattgatagtgacaggtgactgggttgtgccttttgctttcaatagtctgatggggaaacatatgatgatctggggagtgataaacagattaa

SEQ ID NO: 275052 - DNA, 569 bp, Homo sapiens
atctacttttggtgaggaagcctcaggaagcttacaatcatgagcctcaggaagcttacaatcatggtagaaggcaaagggggacccaacatacctcatggtgagagtsggagcaagaaagagagcaagtgagaagataccacacacttttaaacagcaaaatctcaggacaactcactcacttttgtgagaaaagcaccaagccatgaagaatctaccccaatgacccaaactactactcccaccaggccccacctccaacactggggattgcatttcaacatgagatctggggggacaagtatccaaactattaacatatcagtgtcctaaagctggcttcataaatcttgattgattgagatatttgcctcagtcactcattttggttatcagtacctgtcagaataagtaattatttttgagaagggagatacaaggtagttctaacggagtatttaatgtgatttaaaaatttgtattgtccttagagcagctggaagattatggttatgcagtaagttatttgaaacaaacctgagaatctgataatcttggaatttaaagag

SEQ ID NO: 275053 - DNA, 1184 bp, Homo sapiens
gattctttctcatatttgtgggcttatcttccggtgatgttggcttaagtgcagggcactggcgagcacagttctgtgtgccttctctatgccctgcaagcaggagtgatttctcagggcagagaaggatctattgttctctgcgtggtgttagtgcaagaacaggcaactggtggggctgggactggctgtctctgtccccggcaagactcagtctgtgatggtggttaccattgggaggggtgaggaccgcatgtattcctgtgcgctggcaggacaaggaaagcaaaatctgccacctgcaggcagacaccagcaaagcaatgtggggagtagcaatggatgtgggggaagcttcagtatggggagggagaatgcaggctggtgtgtggctgtaggggctgctctgctggatctcttcaccagtcaggcatgagtctgccagtgcagaagctatggggtgggcctccagggtatgcaaggtttccctgmaagcagctatggtcagtcagggccctgggagaggtcagcagaccaagaggtgctcagattggaccagccctatctgatgggcaagactgcccwgccatttgcatgtcttctttagagaaatgtctattcaagtctttgtacattatttggtttattggtattgagttgtgcagattctttgtaaattttggacattcaccttttatcaatacatggcttgcaaatattttcttttatttcataggttgctttttcattttgttgaatttttttcttggctgtgaagaagaagtgcttggtctgatgtagtcccacctgttcatttttgcttttgttgctggtacttttaggatcatattttaaaaatttattgccaagaccaatgtcaaagagctttttctctctggttttcttcaaggggtgttatggtttcagatttaagtctttaattagtttagagttcatttttttgtgtatagtgtaagagaaaggtcttatttatttttatttttwtttttttctgcatgtggacatccagtttgcccaacatcatttattgaagaggctgtgtttttctcattgtgtatttttggaaactttgtcaaggatcagttgaccataaatgggtgaatttatttctgagctctctattctgtttcattggtctatgtgtctcctttaatgcaaatacc

SEQ ID NO: 275054 - DNA, 497 bp, Homo sapiens
tggttacaaaacaacaggcaggtttccaagacaggaatgcagatggtcacaatttcacccacaacttattcccattcttgatcaaacaattgccagagaaatactatttttaattgaacaagtgattcatgtctctagagtacagaacatgaatttcacatagtacaaatatccagctaggaaaagctcagaaaatacacgggttagtgtccttatcggccctgagtgtcctggctttggaagaacattacattgagtcagcagttcttaagtacatttctggaaaactctctgaaagacatataaattgatttgctgttgggaaatttccctctgctgggttttataattttaatctactaaatgrcaattcccaagaaatacagcatctcaccaaggcagtaaaaccattggattggttggtttccaagggtactgaagctaaagtagactcattttgaaatgactcttgcctggaatcatagaaaataataaag

SEQ ID NO: 275055 - DNA, 1174 bp, Homo sapiens
gataaagcacttagtacagtccttgtgacataggtcaagctaatattcactattattatttttgttataaatttgatgagctcattgagccagatatccttcaaggtacttttaaacacccaacaatctttgttttccatcttgtggtcccttggtccattttttaaaaaatctctgtatatttcccctaccttgttatatgaggagagccgtatatctcatttgtcattaatatccctccctaaggaacaatatatgctttgtattcatttgcaaaacatattaaaatagtgatctccttttaatcagtgagtcataaaaacatggaagatgagtggaaatgagatagaataatccaaaagtataagaatcatcacttacacagccccatcaggtttgggccagatatcgttcccrtgatttataaacaatggcctcccttttagatttttagcttcttgttcaccttttgctactgatattatctgtgtatttattcaacaaatgtatttaaaataaatgttattgtgcatctttaaggtatacaatattatgttgtgggatacattaagattgtaaaaatwaatgagacaacatagaagggaatgggcctgggtgaactggtaatgttctagtatatggattactgctagacatgaatataacagaaatactgttgtatattgctatggactaaattgtctgtctccgaaattcctwtgttgaagccctaacccccagtatgactgtatttggagatagagcttttaggaggtaattaaggttaaatgaggtcatataggtggggtctgattctgataggattgggggccttattagaagagaaagattcattctctctctctccactccttcaacacaagcactgaggaaaattcacgtgaatgcacagcaaaaaagtgtttgtctggaagccaggcagagagtacgcaccaggacctgaccatgctagcaccctgatcttagacttccagcatccaaaagtatatgaaaataaatttatattgtttataccacctagtatggtattgttatggaaacctgcactgactaagacatacatatctagcactctgttattcatgcatccagcaaatatttatttttgtgaacatagcctatgctaaatactgtactagcccctgggttaaga

SEQ ID NO: 275056 - DNA, 388 bp, Homo sapiens
attgctatggactaaattgtctgtctccgaaattcctttgttgaagccctaacccccagtatgactgtatttggagatagagcttttaggaggtaattaaggttaaatgaggtcatataggtggggtctgattctgataggattgggggccttattagaagagaaagattcattctctctctctccactccttcaacacaarcactgaggaaaattcacgtgaatgcacagcaaaaaagtgtttgtctggaagccaggcagagagtacgcaccaggacctgaccatgctagcaccctgatcttagacttccagcatccaaaagtatatgaaaataaatttatattgtttataccacctagtatggtattgttatggaaacctgcactg

SEQ ID NO: 275057 - DNA, 590 bp, Homo sapiens
aatgagacaacatagaagggaatgggcctgggtgaactggtaatgttctagtatatggattactgctagacatgaatataacagaaatactgttgtatattgctatggactaaattgtctgtctccgaaattcctttgttgaagccctaacccccagtatgactgtatttggagatagagcttttaggaggtaattaaggttaaatgaggtcatataggtggggtctgattctgataggattgggggccttattagaagagaaagattcattctctctctctccactccttcaacacaagcactgaggaaaattcacgtgaatgcacagcaaaaaagtgtttgtctggaagccaggcagagagtacgcaccaggacctgacyatgctagcaccctgatcttagacttccagcatccaaaagtatatgaaaataaatttatattgtttataccacctagtatggtattgttatggaaacctgcactgactaagacatacatatctagcactctgttattcatgcatccagcaaatatttatttttgtgaacatagcctatgctaaatactgtactagcccctgggttaaga

SEQ ID NO: 275058 - DNA, 590 bp, Homo sapiens
aatgagacaacatagaagggaatgggcctgggtgaactggtaatgttctagtatatggattactgctagacatgaatataacagaaatactgttgtatattgctatggactaaattgtctgtctccgaaattcctttgttgaagccctaacccccagtatgactgtatttggagatagagcttttaggaggtaattaaggttaaatgaggtcatataggtggggtctgattctgataggattgggggccttattagaagagaaagattcattctctctctctccactccttcaacacaagcactgaggaaaattcacgtgaatgcacagcaaaaaagtgtttgtctggaagccaggcagagagtacgcaccaggacctgaccatgctagcaccctgatcttagacttccagcatccaaaagtatatgaaaataaatttatattgtttataccacctagtakggtattgttatggaaacctgcactgactaagacatacatatctagcactctgttattcatgcatccagcaaatatttatttttgtgaacatagcctatgctaaatactgtactagcccctgggttaaga

SEQ ID NO: 275059 - DNA, 590 bp, Homo sapiens
aatgagacaacatagaagggaatgggcctgggtgaactggtaatgttctagtatatggattactgctagacatgaatataacagaaatactgttgtatattgctatggactaaattgtctgtctccgaaattcctttgttgaagccctaacccccagtatgactgtatttggagatagagcttttaggaggtaattaaggttaaatgaggtcatataggtggggtctgattctgataggattgggggccttattagaagagaaagattcattctctctctctccactccttcaacacaagcactgaggaaaattcacgtgaatgcacagcaaaaaagtgtttgtctggaagccaggcagagagtacgcaccaggacctgaccatgctagcaccctgatcttagacttccagcatccaaaagtatatgaaaataaatttatattgtttataccacctagtatggtattgttatggaaacctgcactgactaagacatacatatctarcactctgttattcatgcatccagcaaatatttatttttgtgaacatagcctatgctaaatactgtactagcccctgggttaaga

SEQ ID NO: 275060 - DNA, 634 bp, Homo sapiens
ttcagtgttttcaattggcctgcaggttaaatccaaactacatcgcatgtcaattatcaaatgcctacattgaactctattcttattcagtattttgggggaggggctacaaaataattatacacttttgctcacatcattcctcttttctgggatgttctttcctacatatctttttttaccaaagtggtagcgttttccataatatgcaattcaagtctaatcatgttggatgaagagcaaaagattaatttaattgggttttagttgaaaatatttttcagagcctaactatccttatgagttatcaaatccttcatgtaagaaaactctgttatgcaatggaagcaaactgtgggagaagtggggcaggtgttgtctggatctgaaagtgggtggtaggtaacttgtatggtatttcctgactggtgggtggcagatttgaaaccaaatcctagatcccttgactcctaatcaacatccctaccctataatacgactggaggcatcaggacctacccattaagtaatacagacacatagctatcaggagtcctagaattgaaacctgactctgccacttaycaggaatgtgaagttagacaaatcacttaatgcttctgccttcatttcc

SEQ ID NO: 275061 - DNA, 556 bp, Homo sapiens
tttcaggtgtagcttcaaagatgaatgagctctatggaaggctggggaggggagacacagatgcatgaagaacatcttaggtaaagggattggtaagtgyagacatttgacataaacaatcatggaaaacaatcaaacattctccttgactttcaaactctagtaaacacccactccatgattcttgacttactttcctcctctgtcttctccccttctaggcccttatttttctctcttcctgcttatattagttttgcaagttccctttcctctgctcactcattaaaggttgctggttttcagcgctctgcccttggatctatttagtcctcactttaacacttagattgtatcatccattcatggatttaattactatctacatactaaaaaaaaaacaaccacactctacattcagttaataagtctattttaaaatcaagcctgtggttttggcttaacttctagtggacttgcctctttaaaagttttgtaggtatcttaatctctacttgcccaaaaagaaatcattattgtcctctcccaaaaggct

SEQ ID NO: 275062 - DNA, 499 bp, Homo sapiens
gcagttctgttacttctgcttaccaagcttttctcaaatgttatttctttctactctcattgccattaccttgtcatactacctgtggcagctgtgtaacgaagcatatactcccttgctaatccatcccacacgctaatcagaagaatctaccaaaaatgcaaatctgattattccattctcttcttacacttacatggcccttgggataagatgggagcacagacttccgttcgtatacccacctagcaccacttcagccccatttattatcacttctcacccttctcatctaccttccatctattctcaactttcattcggcacatacttttttttttttggccttcaggtctattattctgttacttcctcccattctgctttgcttaactctctcccactyaccctccatgtcctgaatttgacttcagaatacctttcattattctgtaattttaatgggtcagattctcctattatggttctataaccttgt

SEQ ID NO: 275063 - DNA, 540 bp, Homo sapiens
tttaaaattaaaaaaaaatgacacaaccacatggctcatcaatgattcttactataattagtctttttttgagtattctcatctcaaagtacttacatactcagtttttaagattttttttacattgatcaactctgctttgaaggtgttgttacatttctttttctaatcaagaaaagatatttyatgcaggtataagacaaggaaaaatttgtaggtaaaaacttcctcttttcaaggttaacctcaaaaccagagttcaaataactatttcctgttctctctaacatacaagtcctctattggatgcccacaacatcctttttttgtttttgagtcttgcatgacaattacttattttccttacaatctacttatacaaaaattttccattttattgtttcttccactctccgccaccatttcctttctaaatgctctgatggatttaatctttgtatgtattacaagagcaattaaagtgcctcctgcagatattttataaatatttcttagtgttttaagttgcccaagttaaga

SEQ ID NO: 275064 - DNA, 540 bp, Homo sapiens
tttaaaattaaaaaaaaatgacacaaccacatggctcatcaatgattcttactataattagtctttttttgagtattctcatctcaaagtacttacatactcagtttttaagattttttttacattgatcaactctgctttgaaggtgttgttacatttctttttctaatcaagaaaagatatttcatgcaggtataagacaaggaaaaatttgtaggtaaaaacttcctcttttcaaggttaacctcaaaaccagagttcaaataactrtttcctgttctctctaacatacaagtcctctattggatgcccacaacatcctttttttgtttttgagtcttgcatgacaattacttattttccttacaatctacttatacaaaaattttccattttattgtttcttccactctccgccaccatttcctttctaaatgctctgatggatttaatctttgtatgtattacaagagcaattaaagtgcctcctgcagatattttataaatatttcttagtgttttaagttgcccaagttaaga

SEQ ID NO: 275065 - DNA, 540 bp, Homo sapiens
tttaaaattaaaaaaaaatgacacaaccacatggctcatcaatgattcttactataattagtctttttttgagtattctcatctcaaagtacttacatactcagtttttaagattttttttacattgatcaactctgctttgaaggtgttgttacatttctttttctaatcaagaaaagatatttcatgcaggtataagacaaggaaaaatttgtaggtaaaaacttcctcttttcaaggttaacctcaaaaccagagttcaaataactatttcctgttctctctaacatacaagtcctctattggatgcccacaacatcctttttttgtttytgagtcttgcatgacaattacttattttccttacaatctacttatacaaaaattttccattttattgtttcttccactctccgccaccatttcctttctaaatgctctgatggatttaatctttgtatgtattacaagagcaattaaagtgcctcctgcagatattttataaatatttcttagtgttttaagttgcccaagttaaga

SEQ ID NO: 275066 - DNA, 540 bp, Homo sapiens
tttaaaattaaaaaaaaatgacacaaccacatggctcatcaatgattcttactataattagtctttttttgagtattctcatctcaaagtacttacatactcagtttttaagattttttttacattgatcaactctgctttgaaggtgttgttacatttctttttctaatcaagaaaagatatttcatgcaggtataagacaaggaaaaatttgtaggtaaaaacttcctcttttcaaggttaacctcaaaaccagagttcaaataactatttcctgttctctctaacatacaagtcctctattggatgcccacaacatcctttttttgtttttgagtcttgcatgacaattacttattttccttacaatctacttatacaaaaattttccattttattgtttcttccactctccrccaccatttcctttctaaatgctctgatggatttaatctttgtatgtattacaagagcaattaaagtgcctcctgcagatattttataaatatttcttagtgttttaagttgcccaagttaaga

SEQ ID NO: 275067 - DNA, 580 bp, Homo sapiens
tacaggtgtgtgaaatcccgtctcggatcccagtacttaagctcttcgctgtgggttggggctgccctcccccaacgtctaggtcatttcacttagaagataagaacaacgacaaggagtcgttttgagggatcaatgagatgccggtaataatattaagggcactctagtctcattcctgcggagagtttaacgtttaatgaatggtaggcattcttacagtcacaggagcaaggaagtgagagtcatatatttctctcttctaacaggatcagtgtgatcctgttagaatcagggaattctaacaggaattgggaaatgaagctatgtaaaagtaggaaatacaagtcagaacgatatacaatttaagaggattactgtagatccatatgtgagataatgagctttctcatacaatgttgtcggagatttaaaactcctaagttttctggcagacagtcartatgtatcaagactattaaaatgttcacatcgtttggtccagcaattccaccctttcagaagtatcctaaacctaatgagaactctaaaaagatttgggtatgaggtgtatccattt

SEQ ID NO: 275068 - DNA, 583 bp, Homo sapiens
aaattgttaacgtgatatgtaaatagcctaggcatctctcaggtgtggcaaatgggctgagcaggtgttctttcaaagagaaaatgtagccctgtaggaatgcttctctgtctgatttccaaagtaaaacatttgaattcaaagtttcttcrtgtatttttaagttacatgggtgtttttttattacaacgttccatccaccttttatacatttttcaaaaattgaactcacaagatactaagtacaaaaagcagaggaggctggtgggagaagggcatgagcaggggagttccaggatgcagtaagctgtgatcacaccattgcactcactaggcaacagtataagaccctgtttccaaaaaaaaagcaaaagagctaaaattcatgtttatcaggatgtttggaagtcctaaaattcatgtttatcagaaagtttgaaaagtaagtttatccgagatcacaatgcctgaaataccataggtaaacaataaatagttgttgaataaatgcatcttaaacagactaaaatattttactgtcatttgaaccatgtatattttctccagctaaatggtgctaaag

SEQ ID NO: 275069 - DNA, 497 bp, Homo sapiens
aatcgaatgcacttccttatcttctaagccatactgcctgaaatacaaggattattattttagatagctagaagtcctggtatatttaatgttctagatgctggatggaaatattcaaatacaagagtcattgatgacctcaggatgtctttcagagaaagaaatttaagrtggaattttaataaagtatttttccactttctgtttttgattgtctcaaggtgtcaacagcagcaactaaaatgtgatagtactggactaaacaagaaggcactgaatcattctctcaaccataattaccggctaattctgccctctagagaaatgcttcaaatttagttttaaattaaaaaaaaaagttgtcaatggtgtttaaattttaaaaatgtctttaacctttgtcttagtccatttgtgttgctataaagaatacctgaggctgggtatataaagaaaaaaaaggtttattttgctcataattccactggctgaaagat

SEQ ID NO: 275070 - DNA, 564 bp, Homo sapiens
cagccaagttctttgctatggcctcatcagcctgggctacactgtccatatttctattagcattttggtcacaaccatttaaccagtctctaagaacttccaacttttcctcatcttcctgtcttcttctgagccctccaaactcatccaacctatgtccattacccagtttcaaagctcccttcaaatattcagatatctttaacaaccccccaactcctagatatcratttttggtttagttcatttagcattgctataaaggaatatccaagactgggtaaattgtaaagaaaaaagggtttatttggctgatagttttgcaggctggacaagaagcatggcaccagcatctgttcctggtgagagtctcaggcttcttctactcatggtggaaggcaaagtggagctgtcatgtgtggagatcacgtggcaagagaggaagcaagaaaccgaggaggagggactaggctcttttaacaaccagcttttgctggaactaatagaacaagaactcactgattatcacaaggacagcaccatgccattcatgagggaggaatc

SEQ ID NO: 275071 - DNA, 564 bp, Homo sapiens
cagccaagttctttgctatggcctcatcagcctgggctacactgtccatatttctattagcattttggtcacaaccatttaaccagtctctaagaacttccaacttttcctcatcttcctgtcttcttctgagccctccaaactcatccaacctatgtccattacccagtttcaaagctcccttcaaatattcagatatctttaacaaccccccaactcctagatatcgatttttggtttagttcatttagcattgctataaaggaatatccaagactgggtaaattrtaaagaaaaaagggtttatttggctgatagttttgcaggctggacaagaagcatggcaccagcatctgttcctggtgagagtctcaggcttcttctactcatggtggaaggcaaagtggagctgtcatgtgtggagatcacgtggcaagagaggaagcaagaaaccgaggaggagggactaggctcttttaacaaccagcttttgctggaactaatagaacaagaactcactgattatcacaaggacagcaccatgccattcatgagggaggaatc

SEQ ID NO: 275072 - DNA, 605 bp, Homo sapiens
gttatctagaagaaaagagagaaaatgatgtatcccacatacaggctatcattcatcattttgcaaatgatacaatgtcactaaatgaggaattctgaaatcttcaccattctatacaagttcaactctgtatataaaataacaaaaacaaaaataataaatgaatgacaaaagtattaaagattagtttatagtctatactagacatatatttcaactctttattcacttacagcaaaatagcatataacaaattattatattctagtagaaaaatgtatactaaatcttgcttcaaaatctattataaaattctgcaagattagatatgtcgtggctttaaaccaatggttctcacttggggatgattcttcccatccaggggacttttgtcaatatctgaagatatttttgttcgtcatgacttaaaatgtgctacttgcatctagtggaagaggtcagaaatgcttctaaacatcctgcagtgcacaggacagatccttacaataaaaaatatctggcttaaatakttgtagtactgtggctgggggacacttatttagacaaatatgtgctgagcacttcctatgcttgatattgacctt

SEQ ID NO: 275073 - DNA, 599 bp, Homo sapiens
ctggcattatgctagacattggtagtaaagtgattctatacgcaatgatctgttctcaaggaggtcacaatgtgggatgagcagcaattagcagtgtttgactgaagcacagattatgaatagcaagttagtctggggccaagttctggctgaatttcagtgttactcattaacaaacatttaattcagcaaacaaagtaggcatgctgcagtgagagtagtcaggtggtcattacagatttttgagtatataccttgggagtaaacttcctaaaagagatgtaatttgccctactaaatagaggcttcatctatgtgttacggtatcaatttacaattcacaattatctttttccagagcataaagtatcctttgttcttgtataattcaaatttaataagaaattaatgcaactctgaatgttatrgtagtgttaattgctacttttgtttcaacacagaacccaaagaggtaaggaacctcacttctcattctacagttgaaaaaaattattttaccagtaaaatgcaatcataatgagacataaatgtatatttctagattatttttaacttcacaggattttaagcattggggc

SEQ ID NO: 275074 - DNA, 585 bp, Homo sapiens
tcttgtataattcaaatttaataagaaattaatgcaactctgaatgttatggtagtgttaattgctacttttgtttcaacacagaacccaaagaggtaaggaacctcacttctcattctacagttgaaaaaaattattttaccagtaaaatgcaatcataatgagacataaatgtatatttctagattatttttaacttcacaggattttaagcattggggcacattatcactttatcaataattattatcatataagaactgcttattttataacatttcattcatagattctttcatttccttatagtatatatttttcaaagaaaaagcagcaaaattagaaacaaasttttaatatttacaactctctcttctttgtaatgtggaattcaatttggtgtgtgtattttttccccttttttaatactcataacagtgtatagcggtgtttgcagcaagcatctggggagtggaacaaatggggagaggttggtcaaaaagtatgaactttcagttataagatgagtaaattctgaggatcctatatactgcatagtgactatagttagtaacaatgtattat

SEQ ID NO: 275075 - DNA, 585 bp, Homo sapiens
tcttgtataattcaaatttaataagaaattaatgcaactctgaatgttatggtagtgttaattgctacttttgtttcaacacagaacccaaagaggtaaggaacctcacttctcattctacagttgaaaaaaattattttaccagtaaaatgcaatcataatgagacataaatgtatatttctagattatttttaacttcacaggattttaagcattggggcacattatcactttatcaataattattatcatataagaactgcttattttataacatttcattcatagattctttcatttccttatagtatatatttttcaaagaaaaagcagcaaaattagaaacaaagttttaatatttacaactctctcttctttgtaatgtggaattcaatttggtgtgtgtattttttccccttttttaatactcataacagtgtatagcggtgtttgcagcaagcatctggggagtggaacaaatggggagaggttggtcaaraagtatgaactttcagttataagatgagtaaattctgaggatcctatatactgcatagtgactatagttagtaacaatgtattat

SEQ ID NO: 275076 - DNA, 518 bp, Homo sapiens
attagccattttggttgttgtacaaggttatataacatttataatttccatttctctattgactaatgatgttgcgcaactttctcatgcttatttgctgttcatagttttttcctttggtgaaacgtgggttccaatgttttaatctctttttttttttttttttcagacagagttttgctcttaccacccaggctggagtgcaatggcgcaatctcggctcactgcaacctccgcctcctgggttcaagcgattctcctgtttcagtctcccaagtagctgggattacaggcatgtgccaccaggctcagctaatttttgtatttttagtagagacaaggtttcatcatgttgsttaggctagtctggaactcctgacctcaagtgatccacccacctcagcctcccaaagtgctgggattacaggcatgagccactgtgcccggccccaaagttttaatcatttttaatgagattgtttgacttcttcttgtagaattgtaagtattctgtatat

SEQ ID NO: 275077 - DNA, 458 bp, Homo sapiens
ttgctttgcatgactttgagagttataaaaactatgggccaagtgttttgtagaatgtctttcaatttgggcatatctgatgtyttctcatgattgggctatgagtcttcttggggaaaaataccacagagatgaattgcccttctcatgacaatcaattagaggtacctgagaccaacatgcactatcattggtgagcttaaccttaatcatttgtctgaggttgtatctgccaggtttctccactaagtcaatttttccgtttacacattgtattctttgcaactaagctattaaatccaactcacattcaagagaaggagaattgagcttaccttctggaaggaggcattttagaaattttgtgcacatatgctaaaatcataataataaataatacatatttgaagggtggacaccttggagtatgcaagtatccttaaagttttgtccactaa

SEQ ID NO: 275078 - DNA, 564 bp, Homo sapiens
gtgtcatgatgtgtaagactaataaacactgtacatgatgattcccttggagagtgagakaataacctcgaagaagaatcagaattaacaagaaatgagaccaatctttcacagtactgtgaaggttagaaagataaagctatagtactccaaaagccatgaaattacttccaaaggcaataatcaatttagtgagaaacattagaaaactacaagtcaaaaaacaacatcaacaggaatggtaagccctgggggtcacaaccatcaaaaaagtggctggtaaatcctgttttcctccccttgctcctcagttaagattgattcatgctgaatcctgagcctgaaacaattgtttccagagaagaaacatttttacttacaaagaattacctttccttgcttgcttttttatagaaaaagaaaaaagaaatgaaggaagggaaggagggaagaaaggagggagagaataaaataagaaaaaagagaaagttttattattgtctaatttcttccttgatttattttttactggactcattgattgaaaactcttcaaggaaatag

SEQ ID NO: 275079 - DNA, 585 bp, Homo sapiens
cttctggggaagaaattgtgatgattttctcccattggcaattctgtttttcccctgtggtaaccttgaaacattttttcccggtccctaaagtaaatatactctagagagaaaaagccagcaaaaacaaacaaacaaacaaaaatgaccaaagacccgtaggggaggaatctttaaagggggcataataggtcatttattgtataccacacagcatttatcattctctaaaagtcttcgagaaaaatctgttcccatgtctctcttctcagttgcctgatggcaaagatctctccatttccacttctgtctaataatttatgtagttccttgcacatagatcttcctgcaattctcttacagttggttttacctctatcttttctgatgttttctattttagtccttctcagacttctctattattgaatcctcagaaacaaattttgctattcatgtcatgtctgtgaaaaagctttktattagtcaagataggctagattatttcctgataattaatagcccctaagatcaagtgcttaatataaagaaaacaattcttgctcacaatacaggtccaatgca

SEQ ID NO: 275080 - DNA, 428 bp, Homo sapiens
accttacttctgactaactcacccactggatcccatgtcagtggaacaaaagatataatttccctagtcttgaaacaccttcagaaaacaacctcctatgagtttacttttaaatttattattaaattaacttaaaaatatcataacgttggtggctggcaagatggctgaataggaacagctccagtctacagctcscagcgagatcaaagcagaaggtgggtgacttctgcatttccaactaaggtacccagctcatctcactgggactggttagacagtgggtacagcccacagagggttagccaaagcagggtggcgtgtcgcctcacctgggaagtgcagggggtcagggaactccctcccctagccaagggatgctatgagggactatgctgtgaggaacagtgcactccagcccagatacc

SEQ ID NO: 275081 - DNA, 607 bp, Homo sapiens
aaataatattaagtcttctccaaaacagaacaaaacaaaatctagagggcttgttcrctttttctttcaacataagcatggcagtatagtttaatgttactatttaagggctaattaattagactggtatcttcatatatttgttcttcttcacttttggcattcatattgtccattaacacttctttttgagtgaccatgtgaaaagagtagaggtgaaatttaagccatgcaatttgctccctgctgacagattttgtaatatgattgatgggggcagaaggtgaaactatctggtaaaatgagttttttgcattatctgtgtatttcatatatcaatgccagtatttcttaaactgcaggtcaagactccagagggaacggttacaataaaatctaaagagtttcatatatgggaaatatttggatgtataaattgtgggctatattgtatggttcttcttttcctcctaaattctgcatatctcctcccttctagtctattaaaatttgttattctgccaataagaggatagaaaatatttaagtcatatattattggtagtataagcactttaaaagaaacatttgagaatgttgaaatcat

SEQ ID NO: 275082 - DNA, 607 bp, Homo sapiens
aaataatattaagtcttctccaaaacagaacaaaacaaaatctagagggcttgttcactttttctttcaacataagcatggcagtatagtttaatgttactatttaagggctaattaattagactggtatcttcatatatttgttcttcttcacttttggcattcatattgtccattaacacttctttttgagtgaccaygtgaaaagagtagaggtgaaatttaagccatgcaatttgctccctgctgacagattttgtaatatgattgatgggggcagaaggtgaaactatctggtaaaatgagttttttgcattatctgtgtatttcatatatcaatgccagtatttcttaaactgcaggtcaagactccagagggaacggttacaataaaatctaaagagtttcatatatgggaaatatttggatgtataaattgtgggctatattgtatggttcttcttttcctcctaaattctgcatatctcctcccttctagtctattaaaatttgttattctgccaataagaggatagaaaatatttaagtcatatattattggtagtataagcactttaaaagaaacatttgagaatgttgaaatcat

SEQ ID NO: 275083 - DNA, 607 bp, Homo sapiens
aaataatattaagtcttctccaaaacagaacaaaacaaaatctagagggcttgttcactttttctttcaacataagcatggcagtatagtttaatgttactatttaagggctaattaattagactggtatcttcatatatttgttcttcttcacttttggcattcatattgtccattaacacttctttttgagtgaccatgtgaaaagagtagaggtgaaatttaagccatgcamtttgctccctgctgacagattttgtaatatgattgatgggggcagaaggtgaaactatctggtaaaatgagttttttgcattatctgtgtatttcatatatcaatgccagtatttcttaaactgcaggtcaagactccagagggaacggttacaataaaatctaaagagtttcatatatgggaaatatttggatgtataaattgtgggctatattgtatggttcttcttttcctcctaaattctgcatatctcctcccttctagtctattaaaatttgttattctgccaataagaggatagaaaatatttaagtcatatattattggtagtataagcactttaaaagaaacatttgagaatgttgaaatcat

SEQ ID NO: 275084 - DNA, 1011 bp, Homo sapiens
aaataatattaagtcttctccaaaacagaacaaaacaaaatctagagggcttgttcactttttctttcaacataagcatggcagtatagtttaatgttactatttaagggctaattaattagactggtatcttcatatatttgttcttcttcacttttggcattcatattgtccattaacacttctttttgagtgaccatgtgaaaagagtagaggtgaaatttaagccatgcaatttgctccctgctgacagattttgtaatatgattgatgggggcagaaggtgaaactatctggtaaaatgagttttttgcattatctgtgtatttcatatatcaatgccagtatttcttaaactgcaggtcaagactccagagggaacggttacaataaaatctaaagagtttcatatatgggaaatatttggatgtataaattgtrggctatattgtatggttcttcttttcctcctaaattctgcatatctcctcccttctagtctattaaaatttgttattctgccaataagaggatagaaaatatttaagtcatatattattggtagtataagcactttaaaagaaacatttgagaatgttgaaatcatwtttaggtgtcaacttgactgaattaagggatatggaggtagctagtaaagcattatttctggatgcatctgtgaggtgcttctagaggagataggtgtgtgactggatagattaagaaggatccaccctcactgtggggaggcatcatccaatcaggggtctggatagaacaaaaagatwgaggaatggtgaatttactctctcatacctggagctgggacacccttcctctcttgcctttggacataagaataccaggttctctggccactggactctgggactggtaccagcaccagcaatcccccaggttctgaagactttaaatttagacagagccacactgctggcttccctgtgacttctattatgggacttctcagcctccataattatgtgagcc

SEQ ID NO: 275085 - DNA, 660 bp, Homo sapiens
tctttcatttatactgagagtgtaggtagatgatgtagagacccaatactccttccagtgccatttatttccccctcactctgaggaaaaagagcattttatgtgcaatattaacccctttgatttataaaaayagaaaatttgctttaaaaagataacaatgttaaataaaaatagacaatgggtttggcatgctaggaaaggcatataatagaagaaagtgatttttaaatgactaagaaatattatatttactttaatattcatttttagagtcccttttactataacaattataatgttcatattttttgcaatgtactgattaagcacagttgaagtcaaatatgaaataccaaactactctaaaaaaatacctggtatcaacagttgggtattccatgtatattaagtagcctaaggggctaagttatagatattaaaattatctttatttcattttgatgaaaaatgtacttgaatatagtataaaatctaacacaaaagtgaagaaaaatatctgctatagaaattagctatgatgctaaattatcctgtatgaaaatgacttttttggtatttactagaaaaataataataagtactgttatataattatagctgtatttagatgacaggataaaaacattaaaatgcaga

SEQ ID NO: 275086 - DNA, 564 bp, Homo sapiens
cactgaaattttgggcttaaaaacaatagaacatttacttttttgactgccagagcagttttcacattagattcaagctgaggagcttcatacaaacrcacatttcaaaactccctctgaattcactgaagcagaattttcacatgttaagttttgccattacatgatcccctaaagtgactgctcatcagaaccatcttagaaataataatgatggggaagggagagcattaggaaaaatagctaatcatgctgagcttaatacctaggggatgggttgatgggtacaataaaccaccatggcacacatttacctatgtaacaaacctgcacatcctccatatttttaaaattaaaaaaaaatgacacaaccacatggctcatcaatgattcttactataattagtctttttttgagtattctcatctcaaagtacttacatactcagtttttaagattttttttacattgatcaactctgctttgaaggtgttgttacatttctttttctaatcaagaaaagatatttcatgcaggtataagacaaggaaaaatttgtaggt

SEQ ID NO: 275087 - DNA, 471 bp, Homo sapiens
acccaggataaattttctgtgctcaccttggtagagaagygacatgaatacaaattaaaatgcagagagaggtgccagaaatggggagaccagttaggaggtgaaaatgctatgcagataggagagaatgtgtatccaaaccaccatcacaatgttagtgatgctcaatatttgcaactcatttcatcagtgtattttttaaaaaatttttataatatggatcaaagaaagctagagtcatatggatgttagtaatctaaatttacatatgaagaaattgaatctcagaaatgagacatgacctaagtgcaaaaatctgatgggatataaagcctgttacaatctaagtaacagtgatacgtacacctgcaggacaatttcgattatgagaagattatgagaagtggagattttggtttgggatattttagcttaagttttgataagaatttcaagaggactaaatgggca

SEQ ID NO: 275088 - DNA, 471 bp, Homo sapiens
acccaggataaattttctgtgctcaccttggtagagaagtgacatgaatacaaattaaaatgcagagagaggtgccagaaatggggagaccagttaggaggtgaaaatgctatgcagataggagagaatgtgtatccaaaccaccatcacaatgttagtgatgctcaatatttgcaactcatttcatcrgtgtattttttaaaaaatttttataatatggatcaaagaaagctagagtcatatggatgttagtaatctaaatttacatatgaagaaattgaatctcagaaatgagacatgacctaagtgcaaaaatctgatgggatataaagcctgttacaatctaagtaacagtgatacgtacacctgcaggacaatttcgattatgagaagattatgagaagtggagattttggtttgggatattttagcttaagttttgataagaatttcaagaggactaaatgggca

SEQ ID NO: 275089 - DNA, 471 bp, Homo sapiens
acccaggataaattttctgtgctcaccttggtagagaagtgacatgaatacaaattaaaatgcagagagaggtgccagaaatggggagaccagttaggaggtgaaaatgctatgcagataggagagaatgtgtatccaaaccaccatcacaatgttagtgatgctcaatatttgcaactcatttcatcagtgtattttttaaaaaatttttataatatggatcaaagaaagctagagtcatayggatgttagtaatctaaatttacatatgaagaaattgaatctcagaaatgagacatgacctaagtgcaaaaatctgatgggatataaagcctgttacaatctaagtaacagtgatacgtacacctgcaggacaatttcgattatgagaagattatgagaagtggagattttggtttgggatattttagcttaagttttgataagaatttcaagaggactaaatgggca

SEQ ID NO: 275090 - DNA, 578 bp, Homo sapiens
agtgaagtttgtcttggtttatttttcaagtaaaaatggtgttccatgaaatagtgaactaaaactcagtgttacaaattatttccctcaagacaaccattatactttagcatgtcagcttcccatttagtcatacagaatattccctctagatgtattcaagggttgagatttactgaagccaattcactacyctgattcatcaagttcaagggcattttcaagtaaaaatggctttattttgtttcttgcaagtgcgtggatatgagcaatgcaatttggtgccactgccttgattgatgttaaggcaccagaacttctatccatttattttgcctcatcagtgcaaatgtcaacatagcgaaaatgacgaataacactttagtataattatgaaaattataactgcacaaccactccaaacaggccctgaagacccccattggtgtgtagatcacaatctaagaacgctactctgagatatcaaactgtcagcgcagaactacaataaaccaaggaactatctcttggtcttctcacacaaaggtagctggaaggcaaatctatttaactgctgt

SEQ ID NO: 275091 - DNA, 655 bp, Homo sapiens
caaatacacagagttgtttacatttctgcttacctggagcaaaagcctctagagctacaagctgttaggaacatttaaatggtgattttgaaaaattgctggatgttgagtgcagcttggcattaagagtgagaaactcatggaagttgcactcctatgaaagccctcacgccttcatggattttacgttcaggaatcccaacaggttctcttcgtggagagtcaaaaataattctctcatggctttgtcaggaagagtagaaaagaaaccatttctaaatcagyccagagcattctcaataacaaagacctacttccaggtaaaaagaccttatgagcttcgtatcatgcctaagcatgagtgcatttacgtccactccagccacatctagccttctcatcttacctaacagaaagagacctaagaaacatttttgagagtcatggccatggggcatagactcacaaaaatactgagatttaatcataaaattatatgatacttccccttgctcagacactaccacatcaatagggatccagtttaatgacaatagatcacaattgaggagctgcaaggtacactacttaaggaagaattattaggaaatgacaaaggcaataggagagacaaaaacaaggacacaagagaaat

SEQ ID NO: 275092 - DNA, 1169 bp, Homo sapiens
taacaatgtttgacatgtatgtacctaacaagagaacaagatgcaagagacaattacttacacaattacaaggagaactagggaaatcttttttgtacttagagacttcaacagttctytttttgtaattgatagaacaagtaagcagaaaattaggaacagggttgacctgaatagcattatcattcaacttgttctaactgacacttaaagaatactgcatccaacagcaaaatacacatttttctcacagtcacatggagcatttaccaaaatagaccacattcccaggcatgaattacaccttaacaaatttaaaagtatagaaatcatagaaaatatgctgtcagatcacagtggaattaaactggaaatcaaaaacaggaacacagatgggagattccaaaatatttggagttaaaacaacacatttctaaataacacatggaaaaatagaagtcacagagaaattttaaaaaaatagtttgaactaaatgaaaatgaaaatacaacttattaaaatttgtggtatatgacgaaagcagtgtttagaagaaaatatataatattagatgaatatattawtaacaatgtttgacatgtatgtacctaacaagagaacaagatgcaagagacaattacttacacaattacaaggagaactagggaaatcttttttgtacttagagacttcaacagttctctttttgtaattgatagaacaagtaagcagaaaattaggaacagggttgacctgaatagcattatcattcaacttgttctaactgacacttaaagaatactgcatccaacagcawaatacacatttttctcacagtcacatggagcatttaccaaaatagaccacattcccaggcatgaattacaccttaacaaatttaaaagtatagaaatcatagaaaatatgctgtcagatcacagtggaattaaactggaaatcaaaaacaggaacacagatgggagattccaaaatatttggagttaaaacaacacatttctaaataacacatggaaaaatagaagtcacagagaaattttaaaaaaatagtttgaactaaatgaaaatgaaaatacaacttattaaaatttgtggtatatgacgaaagcagtgtttagaagaaaatatataatattagatgaatatatta

SEQ ID NO: 275093 - DNA, 584 bp, Homo sapiens
taacaatgtttgacatgtatgtacctaacaagagaacaagatgcaagagacaattacttacacaattacaaggagaactagggaaatcttttttgtacttagagacttcaacagttctctttttgtaattgatagaacaagtaagcagaaaattaggaacagggttgacctgaatagcattatcattcaacttgttctaactgacacttaaagaatactgcatccaacagcaaaatacacatttttctcacagtcacatggagcatttaccaaaatagaccacattcccaggcatgaattacaccttaacaaatttaaaagtatagaaatcatagaaaatatgctgtcagatcacagtggaattaaactggaaatcaaaaacaggaacacagatgggagattccaaaatatttggagttaaaacaacacatttctaaataacacatggaaaaatagaagtcacagagaaattttaaaaaaatagtttgaactaaatgaaaatgaaaatacaacttattaaaatttgtggtatatgaygaaagcagtgtttagaagaaaatatataatattagatgaatatatta

SEQ ID NO: 275094 - DNA, 616 bp, Homo sapiens
caaaccattcatgcatttcaatttggactgtcccacaagtagctgaaaagcctatgctttccttcctctgttgagcacacttttaaaaccatcaagatcactctctatcttttgcaaaaggagctccaggttctttctgagaatctcccttactggatttgctggcttgccttctgatcctaccatccagtagaatttcctattggttcttttcaacattggcattttctctacttagccaattaaagaacacaatagggccagacytaagaattttccttcatgttgtctccttagcatagattaaaatagccttataatgcaccagaagataggttaagatctgttcattaaaattttagaggaaccaggtctttgatctttggagaaggtaattataactcacaagaggattccagactaatccccatatatgtttttcccctgtaaagtcagtttattagtttaacttggctgtgtgacaaactttcactctcattcagattattgactgaattcagttccttgtagttgtagagttgtagcactgaggttcccacttccttgctggctatcagcttaggtgccagtctcagctagattccttggtacaaga

SEQ ID NO: 275095 - DNA, 436 bp, Homo sapiens
aggatgaaaagacaaactaaagaatggaagaaaatgtttgcaaaccacatatacaacaaaggactagtacttagaatatatatattttaaaactttcaacactcaatagtataacaaagcaaaagaagtgaattagaaaatgggcgaaagacatgaagagatgttttactgaagaggatatacagatggcaaataagtcaygaaaagatgttcagtgtcattactcaataggaaaatacaaattaaaaccacaatatgacatcactatgcatctatcataacagctaaaataaaaaacagtgacaccatcaaatgctggcaaggacaaagagaagctggatcctcacacattgctggtgggagtgtgaaatggtacagtcactttggaaaactcttttatagtttcttacaaaattaaaaatacaactaaaataag

SEQ ID NO: 275096 - DNA, 439 bp, Homo sapiens
aaagatggtgcataaaatgattgctacccccacacccgccactgcttagctgagagcagggacttgataaacgtgagttattcccctttccctcatcgctttgtgaatggggccgtctcccctggacaggtctcactgattctctggccaagggcctggcagtagccgtgtgccctggagctcacctggcatcctggggctctggttccaggttacaatctggagccacacagcatccggcccttccagctggcagtagcgcagaagctcctctcccatgtgtgttccattgcggattccagcacccaaaatctggacctgggatcctttgagaaggtggactttctcatttgcattcccccctcagaagtgacctaccagcagactctgctccaygtgtggcattcaggtatggggcattttggggagaagtcacgtg

SEQ ID NO: 275097 - DNA, 613 bp, Homo sapiens
aatgcgatgacttattaatcactcagaatcctgtttcccccaagataaaaaatatagacgctctcgtgagaataaggttgagatagaagatataaacatgaggaaaccacagagccgttgctccatgaagctctagttgaccttgggtttgaatgctacacgtggctcacagaagagcagrccatacccggactcatgtcgaccccatggtcagagaccacacgcacaccatgcagtgccagggtgcatggaagtcactttggcccctgggatttagacacacctgggcatgtttagtgaccaggcagggtgggcctgactaactctatctgcatgaagggctgagcagcctcctgggggagaatgaggattcatgctaggggaagagggagcttgggcagacaccttatatgatgctgttgcttaaactgatctccagggacagaggctcaccaaccaaaatatgagtcctatggtgggaagagaaaatatcagcaacaattacaaaaagtgatgctgctaacatctctgtaagatctagatgaaagcccctgccccgaggtcatccccaagcacccctgttctcgtagcacagagcccctagcatcagcag

SEQ ID NO: 275098 - DNA, 571 bp, Homo sapiens
gataacccctaatgacagatcctctattaggagttggggatataaagacagacatacactatctctgtcctccaagatctcaaaatgatcagaatgacaaagatgttccatggtctctaagacctagaaatgatcgataaatcccagctcacctcatattcccattttagcacgcaacactcacacagattatacagcccaaaaataaaaaaaaataagataaacttctgttttcaatggttttgataaatttgaggatgagagacctaaacaatgttattaactacttaacctttgaaaaactgtgaatggagagacctgtattctcttgaccctgccctcagagataaccaagggaactaggaataccatgcatttgatttagagcagaatttcaaggggttctgtctgtacacatttcaaggttacaagggatgctggaaaatgcccggccaaacgtccrtgccgaaattcactgctgctgcagtggcttgaagggcagccttcaactcccagccacataccccggggactgcccactcctgccagcagccctggcagctaaattgtc

SEQ ID NO: 275099 - DNA, 544 bp, Homo sapiens
ttcaaatgctaaccaaaagagagcacagatggctatatgtatatcagaaaaaaatcaactttaaatcaaaacttgtgacaagagaaaaagaatgacattgtataataataaaagggtcaatccaccagaaacataaaacaatcacaaatatgtacgcacccaacaycagaacacctaaatatataaagcaaaacttaacaaaactgaagggacacattgacaaaaatacaacaatactgagacttttatgccctactttcaatagtggactgaacattcagacagaagatcaataaagcaatagaggacttgaataacactatagaccaaaaggaactaccaaactttggcagaaccttccatccaacagcagcagagtgcacattcttctcaactgtacatggacctatctccaggatagattacaggttaggtcacaaaacaagtcttaacaaacttaagaaggttgtaaccatgccaaatattttttttctacaatggagtgagactagaaatcagtagcagaagaaaactttgaaaactt

SEQ ID NO: 275100 - DNA, 544 bp, Homo sapiens
ttcaaatgctaaccaaaagagagcacagatggctatatgtatatcagaaaaaaatcaactttaaatcaaaacttgtgacaagagaaaaagaatgacattgtataataataaaagggtcaatccaccagaaacataaaacaatcacaaatatgtacgcacccaacaccagaacacctaaatatataaagcaaaacttaacaaaactgaagggacamattgacaaaaatacaacaatactgagacttttatgccctactttcaatagtggactgaacattcagacagaagatcaataaagcaatagaggacttgaataacactatagaccaaaaggaactaccaaactttggcagaaccttccatccaacagcagcagagtgcacattcttctcaactgtacatggacctatctccaggatagattacaggttaggtcacaaaacaagtcttaacaaacttaagaaggttgtaaccatgccaaatattttttttctacaatggagtgagactagaaatcagtagcagaagaaaactttgaaaactt

SEQ ID NO: 275101 - DNA, 595 bp, Homo sapiens
ctctgcctctctgtctctaacctttccagactgagctctaggatgccagggaaaagcagcagggcagttaattcccgcattccttccacctacagcaggctctgggagtccagtacatkcagggcctgggggacagcagagccccacctgagacagaggctgagctcagcagccagtcaaacccggtctggttctgcttccagatgaaaacgtctctatgttagtgtgtttctacactgctatgaagaaataccacagaatggtaatttgtaaagaaaagaggtttaattgactcacagttccacatggctgggagacctcaggaaacttataatcatggaggaaggcacctcttcacaggacagcaggagagaggataagagccagcagggaaaatgccagacgcttataaaaccatcagatctcgtgagaactcactcactatcacgaaaacagcatgggggaaccatcaccatgattgaattacctccacctggtcccactctgacacgaggggattattacaatccaaggtgagatttgtgtggggacacagagccaaaccatatcaacctcagaccaccgcagtcaacag

SEQ ID NO: 275102 - DNA, 618 bp, Homo sapiens
agtctttcttctatggaaattttctttccctcaaatggtagatatacttttgtatactatcttatgcatcacacattatcatgagtgtttttctaggtaattgaaaactttttaaagaagtgacatttttaaaggtaatataatattgcatcaaattaaattacatcacataatatcttgtttagaaaatttcctgctgttagacctcaatgttttccccagagaaaggatcagcatttgtaatttgatggcaaaaacaactagttatgacaaaaccagtcaaataagagctttctccgtcctgccaccagtgacccatccttctattctgcactttcctcaatgaaggtgtcctggayagaggaagtctgtactctgggaagagaccaattttaaactgggtaaaagcctatagttttgatattatatttgattggatttcctattatctgcaattgactagagaacttcttatgacccaagagtgtcttgaagagttctgggtcctgtccacgtcgttgttgagagttaggagaaagtagttaagggagcagttttgtaagacaataaggcaatggagtaaaggagtacagcagctttctgtttccagcgtgctat

SEQ ID NO: 275103 - DNA, 599 bp, Homo sapiens
ggatgaatctcacaggcctctgacttccccagcctggggcctggatggacagatctaagaccagtctcctgttcctttctagagccatcagtctccccaggtctttgcagacctgccaacttctctagaaggagcagcctcactgtctgatcccagcatcctgcccagctcctgcccagctcagcaaaggtttatggattcctgtggtgtgcaaggcaccgttagaccctggtaccacaatgaactaggtggtgagaggtayaggctgtgggtgtgcagccttccagggatcagctggaattcgtcctcgctaggctttctgccctgatgggcagatgttttttagcaactccagccgtgagtatttcctttggcaaaattttctcattgctgctctatcacacaggcaaggctggtttcaaggaagaacatgaaacatttcctttcattctcagctcacctgtcaacgaacatttcatttcaccttttcgaacacaaagtgacaacgtggttcgagttaaaatcatttattctctttttcaaacaaaagatctgagtgtgggggagatgaggtcagaggctgccgggagtgccttgtc

SEQ ID NO: 275104 - DNA, 1107 bp, Homo sapiens
ggatgaatctcacaggcctctgacttccccagcctggggcctggatggacagatctaagaccagtctcctgttcctttctagagccatcagtctccccaggtctttgcagacctgccaacttctctagaaggagcagcctcactgtctgatcccagcatcctgcccagctcctgcccagctcagcaaaggtttatggattcctgtggtgtgcaaggcaccgttagaccctggtaccacaatgaactaggtggtgagaggtacaggctgtgggtgtgcagccttccagggatcagctggaattcgtcctcgctaggctttctgccctgatgggcagatgttttttagcaactccagccgtgagtatttcctttggcaaaattttctcattgctgctctatcacacaggcaaggctggtttcaaggaagaacatgaaacatttcctttcattctcagctcacctgtcaacgaacatttcatttcaycttttcgaacacaaagtgacaacgtggttcgagttaaaatcatttattctctttttcaaacaaaagatctgagtgtgggggagatgaggtcagaggctgccgggagtgccttgtcwtctccctgctgtcaccacctctgctctgtgtccacatccccctcagaggctattcatccctcaaccgaaaaagcaaaataacagaaactctaagcatttccaggccttttagatgggtctgaaagattcatatagggggccacttaatcaccattgaaatccaccccagcttccattcttggaaaagcagacttccctctctaggatatgcaacaagggggaaacatgctggacaaggcagagaaattttaaaaaatttaaaaaaatttaaaaaacaagcagagggctctgaacgcaccctgtctctgcagcgaggtgggcctgctgcwtggacctggagggcacttcgaagtctccaatctgtggtctcggtaaactcaaaaaacgtggcacccacagaccttggaaccgtgatctggaatcaagagagaatgtgtaaaacatataaaacaatagtctctaattaaagactgcagaaaggagaagactgaaaccttcagaaaacta

SEQ ID NO: 275105 - DNA, 507 bp, Homo sapiens
tctccctgctgtcaccacctctgctctgtgtccacatccccctcagaggctattcatccctcaaccgaaaaagcaaaataacagaaactctaagcatttccaggccttttagatgggtctgaaagattcatatagggggccacttaatcaccattgaaatccaccccagcttccattcttggaaaagcagacttccctctctaggatatgcaacaagggggaaacatgctggacaaggcagagaaattttaaaaaatttaaaaaaatttaaaaaacaagcagagggctctgaacgcaccctgtctctgcagcgaggtgggcctgctgcttggacctggagggcacttygaagtctccaatctgtggtctcggtaaactcaaaaaacgtggcacccacagaccttggaaccgtgatctggaatcaagagagaatgtgtaaaacatataaaacaatagtctctaattaaagactgcagaaaggagaagactgaaaccttcagaaaacta

SEQ ID NO: 275106 - DNA, 602 bp, Homo sapiens
taggaattccagaagtaaaaagaacatacaaaattcaaaggcttggccaggcacagctcatgcctgtaatcccagcattttgggaggccgaggtggtcagatcacttgaggccaggagttcaagaccagcctggccaacatggtgaaaccctgtctctacaaaaaatacaaaaattagctgggtgtgatggtgtacacctgtagtcccagctactygggaggctgtagcaagagaatcgcttgaacctgggaggcagaggctgcagtgagccaagatcataccactgtactccagcctgggcgacagaatgagactctgactcaaaaaaaaaaaaaaaaaaaatcaaaggttaaacatattctggaactaaagagaaatccaaagcttaagatcaagaaaagtagttaaattttatgaaaaactattacaaatcatatatgcaatacatacacacaaatatatgtaattcaggatttttaaaaattataccaccattaccaataaaataacatattacctacaaatgaaaaaaataaaatagattggtattaaataaagcgtagtacttgaaaaaattctttaaactttcaaagaatgttac

SEQ ID NO: 275107 - DNA, 584 bp, Homo sapiens
cttaccaaactgataacctttctgatatcactgatggtccactcgcccatcagtgatatgtaaaataatgggaggactgttcttcaattttctttaacactgatatgaattctaaacacagagatacagtagaatctcgaggcagcatcttttgtygtttctgataagcacgagtgctttgagtgttgtcaaaatgtggaactgcaactcacagaggaggaggctgccaaagcaatgagtttcagctttgctgtgaagtctgacttggttgaggagggcaatttgccctccaggatggggtgcagtgtttaaaatacttgtcacatgaaggcagtgtctcagccctcccagaagccgcgatgcacccccagctacagcaggactgccttcactgcttcctacacatttcccatttgctgggttttgaaagtcattatgaaaagagaagccttgaaagagaaaaggaaagcaaatttcatggtacagtctttgtgagcagctctcagcaggaagcatctccatggtgaccaaggtctgctcctggacgtggaagaggcagtcaccaccccctaggttagaggaga

SEQ ID NO: 275108 - DNA, 564 bp, Homo sapiens
gtctactccacgggaagcacagtgactcctgagtgccgtctgagtgtggaggagctcgtgctctacaggaaaaggaaaactcagggcagaaccaacacggtgcagggcagggcactcccacggtctgctgagaggcccagcgcaaccctgaattgagaggaggatgagaaatctcattcctgaccagagaatcaggacaggcccgcagcaggcactcacggccttatgacagctgacctctggaattacgagaactcaactgaatttcactaaaagtttcacctctggaagagttcgtcgatccccggccagttaatgaggaacacgcccttacatttgtagatgtctaaagaaaatgtgcttgggaaacaactcrcatcagaaacccaaatctcatgaaaatgcacgaggcttcttgttgacggtccccataggaaacaaatgctcttttcaccgaacaactcgtttccgggctgccaccacattgtcacgctcttggactagctcaccccgatggggtgctgtgctgcaaggtaggggctgggagtcttatcaggaggtgat

SEQ ID NO: 275109 - DNA, 1166 bp, Homo sapiens
gtctactccacgggaagcacagtgactcctgagtgccgtctgagtgtggaggagctcgtgctctacaggaaaaggaaaactcagggcagaaccaacacggtgcagggcagggcactcccacggtctgctgagaggcccagcgcaaccctgaattgagaggaggatgagaaatctcattcctgaccagagaatcaggacaggcccgcagcaggcactcacggccttatgacagctgacctctggaattacgagaactcaactgaatttcactaaaagtttcacctctggaagagttcgtcgatccccggccagttaatgaggaacacgcccttacatttgtagatgtctaaagaaaatgtgcttgggaaacaactcacatcagaaacccaaatctcatgaaaatgcacgaggcttcttgttgacggtccccataggaaacaaatgctcttttcaccgaacaactcgtttccgggctgccaccacattgtcacgctcttggactagctcaccccgatggggtgctgtgctgcarggtaggggctgggagtcttatcaggaggtgatwccagctatgaacgcaagctaatcagcctttgaggcgtgggctctgcgacgtcctcatgttccccagtggctctctccaggccttcatgtatgccatgtccacgctgacagctgataggtgccacactcaggctgcagaatccagtccgctctgtgtctccccacatcctcatggatgaggtgttcctcctagagctcatttatctccttctcttcctgcaaaacttccccgttttcgaagatctgtttctagatctattttaaatgatctatttctaaaattccttaatatactaagtttattttactcgttgtcaataatatggtctcattttgcatttaattcatttatttgtccatatatccattctttatttatccagttttcattgactaaatttttatgggggactctcagatgttatgagctgagaatataacatgagaaaacacagcccatggctgctggagwcgttttgtagctggggagactcacattacacacagaattataatggaatataagtgttgtaataattcaggagattggcagcattaattctagagttaagcagaaaggtcagagatggagagtggtaaaa

SEQ ID NO: 275110 - DNA, 618 bp, Homo sapiens
tggccttgggcagaaagtttagtgagtgctttcctgatgctgattacttctccagttgtgaggcttttactatactttgaagatgccgctcctttctctgaagaccaacagcacagagaaaagtagggtttttgcttgttttctgtttgtttttagtagacatttttgagagcagttttaagttcacagcaaaattgagcagaaggtacagagatgtcccacatgccccctgccctacacacgcacttctccccatcaccaatatcccccacycactgccctagacatgcacttctccccatcaccaacatcccccacccactgccctacacacgcacttcaccccatcaccgacatctcccactagagtggtgcatttgtttcagttgaaccaacattgacacatcatggtcgcccaaggtcacagttacattagggtccattcttagtgtacattctatgagttggacaaatgtataatgacatatattcagtactacaatatacagtagtttcactgctctaaaaatcctctgtgcccagtcccttccccttatcccctggaaaacactgaattttcatcttctctatagcttttccttttctagagtgtcataa

SEQ ID NO: 275111 - DNA, 541 bp, Homo sapiens
taaacagggttgggatggcgacaagtaatttgaagaggaagcccagtaaggaagcactgaggtatggaggtagaaccaggtaggggcagcacattakcagcccaggaaggaaaaaaattgaggagggagtggctcccattcttcattgattcagaggttaaaccacaagctagtgagaacatatattatttttgtaacaaaacagaggatgtacaaactttacatagcagattgtgtatgaaagaactcactcttccattcagagttgaagaaatatttatagggtgcttactctgtgccagacactgtgactattatctaggtaacattgcacacaagtgtgttcctaacttctgaagcggacatcattacactctccatgcccctgggtgccatccgaaaaccatgagttatgttatttcacatggcattaaggagcacatggcattccttttcatggaaatctaaatacgcacagatgtctgattgtgcttcttgcctagggatttaactacaaaacaggggctaccttttttctcat

SEQ ID NO: 275112 - DNA, 646 bp, Homo sapiens
ggtggtggggcggtcagacaagagaggtataaaatcatgactttgttatatggtgtgatatttaccttctgttgttcaatcacagtctttagtctgaattgcctttgactaatgccaaataatcaatttcgccctcagtttccacctccaaaaagtctgtataattgaagaattatgaataaacattttcgaataaggtggctatatcttctcttaattttgcacaatagtttcacagattctccaaaattacattttcaagttattgtatagccaaatatatagtattagtgacagaattttaagagatgtgattatagaataacttcttcagggtctcttctaaaaggattcaggcaagagttcagctggtattcaaaaagagttacattagaagttctttctaaatcatgagaaattgaactggttgcactaaagtgcttcactttaatggtgaattcrataacttttttctgcttatgttatttatagaataacttttgcttatagatattcaaatatatgcagttggttataatcccagagaaaatatgggcaaaaaaatggattcttgatcattagtatggagaatcatctcaaacacaataggttttcctcatgacaaatcacacaaaatctccatagc

SEQ ID NO: 275113 - DNA, 574 bp, Homo sapiens
ttggtagttttagtcttgataacaccatataacaggcctcctgccttagcaaatcagctatgcctgtcttcttatgtaccaaaaaagaacctgatactcattgtattatttttgctggaatgctatgagaagaattgattaatgatggtgcaataggatttaatctttcagaatgaaagctrcactataagatgggggtgcatgattcaggttcctagtatgtgagtaaagaccttaggctctgaatgcttacttactacattctgttactaagaattagaatgcaatgacagaatcattcgtgtacatttagaattggtatgtttatataggaactctacatctttgaacatttgttgggagccttagagaatagcatgttgctattactctatagatagaatttcactccactgcttcacagcattaaaaaccaaatgtctgtgatggtacttgctatattttttcttaaccaaattatgaaattcaaatatttgatttcaacaaaaaaaaaatgcaatagacccatataattcagcttatccttcaatcatgctctttaaatattccaaga

SEQ ID NO: 275114 - DNA, 1167 bp, Homo sapiens
ttggtagttttagtcttgataacaccatataacaggcctcctgccttagcaaatcagctatgcctgtcttcttatgtaccaaaaaagaacctgatactcattgtattatttttgctggaatgctatgagaagaattgattaatgatggtgcaataggatttaatctttcagaatgaaagctgmactataagatgggggtgcatgattcaggttcctagtatgtgagtaaagaccttaggctctgaatgcttacttactacattctgttactaagaattagaatgcaatgacagaatcattcgtgtacatttagaattggtatgtttatataggaactctacatctttgaacatttgttgggagccttagagaatagcatgttgctattactctatagatagaatttcactccactgcttcacagcattaaaaaccaaatgtctgtgatggtacttgctatattttttcttaaccaaattatgaaattcaaatatttgatttcaacaaaaaaaaaatgcaatagacccatataattcagcttatccttcaatcatgctctttaaatattccaagawttggggcatgcaggctcccccgtgctgtttgcagtcactccacatgatgatgctgaactgaaatccccaagcttggtccaatgggatgctcaccaaaatgtatggttaacatgaggaagagattggattataaatcttaggaagtaggccttctgagataatatctgatgcaagaacctcaaggaaaactaaattctttaatcgattgaaaccctgccttacaaaagcttttaagcatttagacaccatcatataaatcaagttggaaatatcccaccaaggaataaagagttgttgccatgtaaaatattaatttgtcttttcaaggcaaagcaaacacttcatttggaagaacattgcctaggaggtggtagagaaagtaggaaacatggaataaactcactgcwttggccttggatgcccacttaagtatctcagggctttgggcttctcatgctgagaaatgggggccctttaatgctaaaacttggttctagtaacttttatttcaagtagttctcatgccttcaatgattacatattccatggcagttgttcccaactatttgctagaaaataatctggaattgaa

SEQ ID NO: 275115 - DNA, 561 bp, Homo sapiens
ggaaacatggaataaactcactgcattggccttggatgcccacttaagtatctcagggctttgggcttctcatgctgagaaatgggggccctttaatgctaaaacttggttctagtaacttttatttcaagtagttctcatgccttcaatgattacatattccatggcagttgttcccaactatttgctagaaaataatctggaattgaacaatggacttcagcctaaaacttaaagatgtgctcctggaattgaaaaggaatgttcagagtggatttayaaatatagtttttcttcaaaaacactatttgtgaatcacaaaagggcaaacatctaccacatggccatttcttcatttgctacaatatgcatgcatctggagtcacactgaaaccagcctggaagactaccagaaaggaaactatatgattagcaaagttaaaacctgatttgtatctaaaaaatgtggcgtatgctcatttatgtgcaaatgtaatggaaaaaggctgtaggtaaagtggctaaagcctaaacaaaataaacacttaattttcttttatt

SEQ ID NO: 275116 - DNA, 628 bp, Homo sapiens
tctagttaaatgttcaatggctattctttcatggttttatgagcattatatgcatctgctcctaagcgttattctagtaaatgagcgacaattattctattctcagaagtgtagattaaattttaattttatttaaagttgcaatatgaagtatattagtgaatatttctgaactccttttgatacttagtagtaataagatatttacagccaaactcatgttagaatatattgctcaaataggtaatatgcataaaattaaaatatattggccttcttcttaagatttattctgccattaattctaaaatcaggtagctctaagcagacctcaggcaatacaataattcattaatggatgaatttcagccctctatgtgattcagctcagtaagtgagcaatttagaattttttgctgaatgttaaagtatataaccatatagggtggtgaatatgtgtgagctaatttccttgttagtgttggaagggtagcaagaggaaaatgtagttagagggctcttatttrtgcatccaatggagacagagtgtaatttaaaatcataaaactaagcattagtcacaaatagcaccttttttctatctgctaattactagtaaaggaaaaat

SEQ ID NO: 275117 - DNA, 1080 bp, Homo sapiens
acagacactggaagccattatcttaaaatgctctaaattcagttccaaaatggaaagatgattacatgattaatggaggtttataaagatcattgaaatcttagcctggataaagccatcagaaactatttaatccaatttcccctgtctccaggccrgccacatgggaatcagtttgtcagatggaatctctgtcttcatcatgtacctctcaagtcccctttttgtatgaaatacaatgcatccttgtcctgacttaaggacctactcttacctggggcccctttgctacgaatgctgcacattagagatgaagctcatagctgtgttaacggaagacattggttggacagtgcagaaatggaaatacaaagatcttgttacacctatgacgtgtccgacagtcctgataatgttcataagcagctatgtagttgctgagagaaaggtggttaaatgtgtgggtttgacactacttagactggtaaagtttwcttctgggtccctcttaagtatctgattaggctctaaaaattgcaatatttcatgttactgggccatcttctctttgagtctgtgtctatgtacaaaacaattattggattagaaccaactctaatccaggatgacttcatcctaacttgattacagctacaaagaccctatttccaaataaagtcacattcacagcttccaggttggcawacattttgggggtttgggggctctaacccaaatacagcttgagcaatgaatgaaataatatatttttctctgccttgatttttggtaaaatattcttttagggctttagcatatgaaaaccttttataaggtttctcattttaccctggtggaaaaggtggagaactgtagtctggatactaataccatgtggtgaattagatcttggttgaattattgtccccaaaggaagattgatgtcaaccagaaggtttttgtggcatagtacgtgcctcttttgtggccttggagctattcaagtttttggttgatagtatgaataaagagaatagaaccatgtatatcccatttgagaatagtgtgtggttaaattga

SEQ ID NO: 275118 - DNA, 487 bp, Homo sapiens
ccaagtaaatgaatgatggaatgataggcatatactacatcaagccagaaagggtttgacttctttcgtttgcagatgaggaaactaagccacaaaaatattaatgattagcctgattttgcatattctgttagtgtcagtgctgggactaccatctagatttcttgacttagtytagggttgtcattataccatggtcatactggtcgagtatcctttatccaaaatgctggaaaacagaagtctttcagatttcaatttttttttgattttagaatatttgtatatacatcatgagatatcttgggatgggacccaacttcatttatatttcacatacaccttatacacacagcctgaaggtaattttatatagtattttaaataattttgtgcatgaagcaacatttgtgtacattgaactattagaaaagcaaaggtgtcaggtgtggaattttccacttgtggcatcatgttggtgctcaaa

SEQ ID NO: 275119 - DNA, 507 bp, Homo sapiens
ttaggtggaatgcaggcaagagaggatgacagtttggagaagatacttgtagttgggctacatggatagatttggggagtggggggatggtaaatatascaagaattgaaaattaattgcatgtatgggatggaggggcatgagctgtcaaggatagttccctgcttgagggtctgggtgaatgataatgcctcaaactgaactaacaaattcatgaagagtaactattttataaaggaagacgaaaaattcagttttgatcgcgtagaatgtgaggtgactcaaggtcagccatggaaagtgagcagagtcacaaaagcagggaaccaaaaaggaaccccgacatggaagtggcaggtgagagaagagaacaccatgaaggagatagaaaaagaacagagatatcaagtgaactcacccagccttccctgtccaatatgccagccactagccacatgtggatatctcaaattaaaccgattattcagtggatttcattaatgcaaa

SEQ ID NO: 275120 - DNA, 507 bp, Homo sapiens
ttaggtggaatgcaggcaagagaggatgacagtttggagaagatacttgtagttgggctacatggatagatttggggagtggggggatggtaaatatagcaagaattgaaaattaattgcatgtatgggatggagggrcatgagctgtcaaggatagttccctgcttgagggtctgggtgaatgataatgcctcaaactgaactaacaaattcatgaagagtaactattttataaaggaagacgaaaaattcagttttgatcgcgtagaatgtgaggtgactcaaggtcagccatggaaagtgagcagagtcacaaaagcagggaaccaaaaaggaaccccgacatggaagtggcaggtgagagaagagaacaccatgaaggagatagaaaaagaacagagatatcaagtgaactcacccagccttccctgtccaatatgccagccactagccacatgtggatatctcaaattaaaccgattattcagtggatttcattaatgcaaa

SEQ ID NO: 275121 - DNA, 536 bp, Homo sapiens
tattcccttgtactgcaataaagcagaaagacaactgattttcactaaatttggtctccactaaatggatctgtgatagttttgttctatttttgttgatacatactgtttgtacatatttatgaagtacatgtgatattttgttacatgcatagaatgtatatgcaagtcagggtatattagggcatccatcacctggagcatttatcatttctgtgcattagaaayatttcaagttctcttttctggctactttgaaatgttcccttccatggtggagaaacatcagttttgacaataaccagaactgagttaacattattgctccactacttaccagttatgtcacatgctcctgggcaagcaaccttggttacttcgttagcaaagtgattgtaacagtaatcaccttataaattcataaggattatgttaaagtaaactgattaagtatgtaaagtaactgaataaatgttaggcacataataattattaattcctctccttcgatgcaggcatgatgccttatacttctt

SEQ ID NO: 275122 - DNA, 1197 bp, Homo sapiens
tattatcttacgtgtgatgtctattctaagtaacggaaccagcaatgtgtagtagatggttaaatcatggctgtaaattcttcccattctacttcatacttggcacggagaggcaaatsgtgattaaaatgagacttgggagttgctactattaccctgtgggcattgttgcatatcaaagcaaccttgagcctttgctttgctgagtctatgattgacttttataatggtgcagcatggagtttccttcattggaacatgtctagtaccatttttattagtcattagttctgttaggacatttttaaaataacctcttaactaccatagttattatgtgtaagaaccttttttggtcatttggctagaagtctattcttatatagtcaatagtttgatccttcatagcaaagtctgagtaaatgcatttgttatagagtcatctcttacagatcccatgggaaagcatttctttgccctttttaagtcatgggctcctttagaaatctgatgaacaatgtagaccttttcctacaacattgcatacacatgcacacacatcccttgatttttagggtgttctcagacaactaaagccwtattatcttacgtgtgatgtctattctaagtaacggaaccagcaatgtgtagtagatggttaaatcatggctgtaaattcttcccattctacttcatacttggcacggagaggcaaatcgtgattaaaatgagacttgggagttgctactattaccctgtgggcattgttgcatatcaaagcaaccttgagcctttgctttgctgagtctatgattgacttttataatggtgcagcatggagtttccttcattggaacatgtctagtaccatttttattagtcattagttctgttaggacatttttaaaataacctcttaactaccatagttattatgtgtaagaaccttttttggtcatttggctagaagtctattcttatatagtcwatagtttgatccttcatagcaaagtctgagtaaatgcatttgttatagagtcatctcttacagatcccatgggaaagcatttctttgccctttttaagtcatgggctcctttagaaatctgatgaacaatgtagaccttttcctacaacattgcatacacatgcacacacatcccttgatttttagggtgttctcagacaactaaagcc

SEQ ID NO: 275123 - DNA, 408 bp, Homo sapiens
ttcacttttcactgtttcagttacctatggtcaactgaggttcaaaaatattaaatgaaaaacctcagaaataaatgagagaccacattcatataacttttattatagtgcatagattgttataattgttctatttaattattagttatygttaatcttttactatgcctacttcataaattaagctttatcatagctatatatgtatctatgtataggaaaaaacagtaatgtatatagggctcggtactgtctgaagtttcaggcatccactagtggttttggaatatatcccctgcagataagggggactactataacaaagttttatttcataatattgttttgcatataattgtgatcttgattaatgttgctcaatttaggcctgtatttcaacagttcaac

SEQ ID NO: 275124 - DNA, 589 bp, Homo sapiens
ggcataaggatagacttaaatgatgctaaccctctatactaccttttactcagaagggaatttgggactggtggaatgagatgggacttggagcatcacaggaaaygtgcccaaagtggggacattctccatggcagcactttgcaaaggtggtgacaggaagggccacagtaactaaagcagtttgcaccatccgccgttaaagctggtgccagccttgagttcttagaattacaatacatggactttcctgaaaatctagtacgtttcacatggatatgaaatatagtcatcttgaaccatgagtcttgtgttaaacactagacatccaaaattttcaaaactcaataaaacatcattgactagactaaatacatttagtaaaacctataagaaattacttgctacaccctgtggccatgcatatctccacaggccatttactttactcttatgaggtgctggctaaagtaaatttaattcaattaatttctgtattttttaatactgtggcaatgccaattgtcactaatcatcattggtgcatgacattttaattactcataattacttctttgtaaaatgaatg

SEQ ID NO: 275125 - DNA, 473 bp, Homo sapiens
tgtgcagaacttgtcctagataggattttgctactgggaacatttggctctggtgccttttttcttctctttgttttaagtacagaatggtatcatatgagaacaaaacacgaactttggagttagactgctattagttcaaatcttgtctctatcttaagtygtttgactttggcaagtaacttctctgacactaattttttcatatttaaaatgggggttctacctaactgggatatttaatagatatatcaatctatctttgtgtcaggactcaaaataactgtaaacacacagtaatttattccacttaaaagaagtccagagatagacggtctagcaccggtacatctgcttcctgaaatgaccagcaacttaggctccatttaaactcttcaatctgccattctcagcacgagttctatcctcaaagtggatgttggagctccaagccatcttcctcattccagaca

SEQ ID NO: 275126 - DNA, 431 bp, Homo sapiens
agatagacggtctagcaccggtacatctgcttcctgaaatgaccagcaacttaggctccatttaaactcttcaatctgccattctcagcacgagttctatcctcaaagtggatgttggagctccaagccatcttcctcattccagacagctggaagaaagatggggcatagggcaaaaagtttagctcccagttgagttctctctcttttagttgtcctagaagtcctgtacaatacttccattttgtttcttattggctagaatttagcaatataacctcacgtagcaacagaaggaggctgggaaatgtagtcttttagctggaataaaaatggggattggttactaaggaagaagtggaaagtgattttggctgtcarccaggaatctcagacacgatgttctcaacaaaactcttcatggcccctct

SEQ ID NO: 275127 - DNA, 480 bp, Homo sapiens
atattatagtaataagttccacaggctcaccatctccgtgtagagaagccacgcattttagctaaaaggcgtctgtccagtttgagaaggtacagctgagctgagttgtagtcttctggcatttgttcccttgcagactgggactaattagatctttctgaytggcagggctggatgtcctgatctgaacaccaagtgtagttagttcaaatttcaggtcttggctaactctatgagttcttgggggccttcttgccttaactatgccatgaggtaggttactgggctcaagggtcttgatagatcagaggacagtggaatgctctgaaccaggaaagcaagtactgaaatggaaatcagaaagacacctacctgcttcatgaagttgccagatcccgttcttgggctctgtgaacttatagcttgtcattctctaagtgtactttgttttatttttatcaggttggcatttcacacccc

SEQ ID NO: 275128 - DNA, 426 bp, Homo sapiens
aatatatgtttagatttatgtttgaattggcttggtattccacttgttgggaaaaggtagagttaatcttaacctcatactattgctggtcactcctaaattccagccccatttcaattcagagtaccctccttcttcaacaaatacttttgtgtaactgttttgtgccagaaattgcactcagggccaaggatgcagtgttgaagtgacacagggcctgccctcacggaacctctgaactcacaagctaataatgtgcgtaagaatcacccaaggggaatgttaaaattcagattctcagacccagcatgggtccccaaagcttccaaggattctgatgcaggtgaggtggtctttaggaacacaccctgaggaactggtccagatgaagccccctscagatagatcctataagtgtctgctacc

SEQ ID NO: 275129 - DNA, 541 bp, Homo sapiens
tttaggtgtcattgggaaagtctttcttcttatagcggctcaggcagcatgccttgccataaacaccaatagcttcatatgcttcttcaaataaagaccactgcagccaatcagagcactgcttttattccagacagatagctaatcaatacttctatcactgtgcaatagaaaaaactcttcagattctagattgattattacttgataagctacgtaattactaaaatgcatctgtactgactgttttgttgtattttttctatgtatgtagaactgctcccaaagtctgaagtttccggaaatcctatcttcatgtttacaaaaactgcayttacataaaacagatgtcagggaggaaaaaagtttttccgctgctctcttaggtttatttcctggaggtatgtgaattaaactgacagaaaataaaatagcaagagaaaagaaggagtttatttacacgtgcaatgcacacacatgtgggagtgcccagtgatgactaactcaaaggggtggttagaatatgagacttatataccta

SEQ ID NO: 275130 - DNA, 591 bp, Homo sapiens
tataaaatgcaacgacttgtgatttctactctccaaggaaaaaaaattcatttgtaacataccatggaccaacctgggaaataggtagatttgaattcacaatgacatactatcattacactgtagtagtctcaccggctcctgcagaagtcattaaaaaattgtccgactgaaaaaaatgagttaatattttaagaacaaaaataaaataaaataagaatactttgagaacattctatatttctaatatcatttattaaatgcctattatgagcctgatgatttacatacgttgtctcatgtaattctcacaacatcacagtaaattgctagtcccattttagaggcgaagaaacagagtctcagagaaatcaaacagtttggcccagattacaaactaaatatgacagaaagcgtttggctccagtccaaaatttttcctaccatatcatgctgctcctattaatagtggatatcaagttttggcactattaaacatggcctttgcaaactcatagagacagaaagtataaygatggttgccaggaatggggaggggtggaatatgaggagtaattggcagggtcagtt

SEQ ID NO: 275131 - DNA, 567 bp, Homo sapiens
tattctttatttgattctggaggaacttagggaagaaattctgtttcattagaaaaatctgtttctttactattacctatagtctacccaatcacatacagctagggttgccagatttaacaaataaaaacacaggatgctcacttaaatttgaattttaaataaacaataaataattttgcctaaattgtactaaaaacttatgtactgtttatctggaatgcaaatttgactgcatgccttgcattttgtctggcaaccacctacagcaactctgctaatactatacttactatttttcattatttttagtragcacaccataacaatagtgtcataaatcatgctttgtgctatatggcatgtaattacacaatcagctggcagcctgtgtaaagaactgcaatggattcaagaggattcctaacttttgagttaaagtggtaaccatttatggaattgttttaagacagttaaagacattctgtttcaatctgttcttgatatgtttcctaaggggacataacagcttttagtatttgcttttacccaaatggcaatgactgg

SEQ ID NO: 275132 - DNA, 573 bp, Homo sapiens
attcattgactatctaccttgtatcaaccatttaggtaagcactctacatgaattctctcatttaaatcctcccaaaaaccaccaaccacatatatatatatagagagagacaatcagtattccaattctggcagtccaattctagggccttttaatggtagtgctataccacctcttagatctagcacttaattctagaaacttctagccattctcctaatccctaatttatttctactgtttcacatagttattaagaaaattatctttaagctgggggcagtgstacatgcctgtaatcccaccactttgggaggccaagatgggaggatcacttgagcccaggagttcaagaccagcctggagagcccatctcttaaaaggaaaaatagaaaatcatttttaactgattttttacctatgatttttacctataattgcttccctattgaagaaaagtacaacggctttatacatcatattaaattgaatccagctgccatatcaagcctacctttggtgaactcatcatatcctctcaaattcaggagcatagtgtcttaatataaaga

SEQ ID NO: 275133 - DNA, 542 bp, Homo sapiens
atattctgaaatcattgttcgttttttcaggttgcaggtttggaagacaaaagaaaatgaagagtaaaagtataccttcccccaaccctactacatacacacacacacacacacacacacacacacacacacatgcataatagtgagccttggcttcctcatctctaaggtggaagtgataatgatagctacatgtcttcccagactgttgtaagaattgaagatattgtaagatcttgacaatggtgtgctcattattattctataacatgaaygcttgaaagaaacctccactacctatccctggtatcataaacaattctaattacattatctaattatcacaaataatctcattttaatgattctctgaaagaatgggagtgatagtagacagccggcttagtaaaatgaaagggtagaattggaaaatggtctctaagctcccattcagccctccaattctataacaatgtaattgaataagtaagcagtctcaagttgtggtataaacatatatttttttccctaactgctcattc

SEQ ID NO: 275134 - DNA, 379 bp, Homo sapiens
aatgctgatttgcccatggacagcagttcattctagggaattaatatgcttgcttttccagcagccctcatctaataactctctagaggtgacatataaatacyccagctccctcaccctcagatgagataattctgaagctgtgttttgcactagttctgaaagcttccccagggaattcagctccaagcacccactctggcagctgatttattagatgcttttccttctttgtctctcttccccacttccctaccactgttccctacttggggtctgcttctggagaacccatactaaatcctaaaattaggcattattgttattacacttctatgcactacctggattaaccccatggcgatcatcgtttgggaat

SEQ ID NO: 275135 - DNA, 533 bp, Homo sapiens
taatctttttggactagttatttgcagaaggaaaataaggatgatggtctgagttttccagttagttttgatgtcttccttatgcatagttatattagcgataacatatacctgagcgtttatgggtttatgttttggtggggctgttatttggctctttacttcagctggcaaagactggcaggcctggggttatgttacctttgcagtttctcttgtaccttataagttagagtgcttctttcaaagaggacatatttatgttttcttcattcatcctgrctcccctggtcctccatggtgtaaaactgaatttaagaagactttcatggccagctgatatatcctattctttttgagctaaacaaaggcttatgcctttgcctttcagagtgtgtcacatactttggagagatgcttagtgaaaggtgtcatttcactctggtctaggtttcatgtccttggtagacttctaattataacaattataacaggtgcttcctgaaaggttttatcaaaagtgaaggtagcag

SEQ ID NO: 275136 - DNA, 559 bp, Homo sapiens
aggacacataggacacagcacagctttttactggggaagcaggaaacataatatgtgtgacatttgaaataggtgttaatggaaaaaagaagtttgagagtcagggaaggggagaagagcatttcaagtagaagcccagaagagagaaggggagaatgcttggagagttgtggcaggaggtgagaagagagatggaaaataaaggtgcaatgaagaaagctcttgmattcgtttcctagggctgctgtaacacattaccacaaacatggtgacttgaaacaacatacatttattctctgacagttctggaggccagaactccaaaatcaaggcattcagaagattgatttttttttttttcctaagagcatctgtttcatgcctctcttctagaatgaggtggccaccagtaatcctggatattccttggcttgtagacccatcactccatctgtacctcagtcttcatactaccttctcctctgtgtgtctctgtgtcttctcttttgtacatatattataaggaaagtgtcacttgatttagaacccaccctaaatc

SEQ ID NO: 275137 - DNA, 581 bp, Homo sapiens
cctcaccagcctgagctacaagattctcatctttgtctgccttatggtggatgctgaccgctgctctcttttcctggtggaaggggcagctgctggcaagaagaccttggtctccaaattctttgatgtgcatgcaggaacmcctctgctgccttgcagcagcacagagaactcaaatgaggtgcaggtcccctggggcaaaggtatcattggctatgtcggggagcatggagaaacggtcaacattcctgatgcctaccaggtaggactttgcattgtccccttctcccagagccccattggcttgggagataagccttcggttatcatctggcatccaggaacacattaatttaggctctttacaatacaaattttgctatttaaattcccgagtttagactagttagaatgttactacggcatctttgatgtgttggtcctttcttaacacccaatggcttgtgggaagttaatatatcacccaataacaccacgtatttctctgtcaagacactttgtctttaacactgacactttggctggtctggcatccacagctccctcctcctctctttaat

SEQ ID NO: 275138 - DNA, 582 bp, Homo sapiens
aagcttttggggagatattttatttcttctatgttttccttctgcagaagtcaatctttgctaatatatttaatcatagactggaaaaaataaaaagacctggtgttgaactggtcacaagaagaatggcaagcagtattaacttctcactctgtcctagtacattaggctgaacataaactactgtttgtaccactgacaagtttctttatgatttttgagctgtattaaacaccagcatggacagaggccttgaggacaaattgctaactcttcaaagtaacataatatggtgaaaagagcccaagctttagactcaagcatctcttagttagcatcctggctcagttattggtaaattacttaacatgagataagttactgaycttctcttagcttcagtttcctcatatgtataatggggcgaatagtatccactttgcatggttgttgtgattattccatgtgtgcaaaactctggcacagatttttgcatacataaatgcacaggttatatggtaggctcctggtaaatgatagccatcattgctattatctgaggaatcaataagtcttataatt

SEQ ID NO: 275139 - DNA, 572 bp, Homo sapiens
tatctttatcttccaaggttattttctttgcaaacattcttagaggattgtttaggggaaaaaaaggcaatttttaaaaaatactttaagttctagggtacatgtgcacaacgtgcaggtttgttacataggtgtacatgtgccatgttggtttgctgcacccatcaacctgtcatttacattaggtatttccatatgaagatctttcttaactcacctcctgccacttctcacyacctaaacttcctcatttatagtttgttcccaccatattaaatgtcttgccattacatgacaaagtagactcttttatgactgtttattccatgccctctatttagaaggccattcttccactttccacctaagagactcctacttatattccaaggattaagtatcccttcctggaacagacttctgttatttttgcttgatagcatccattccactttcttccagtaattgcactttgatttctctttgggaattacccttccctcattgcatacagttttgattgcactgtaaatcaaagtgcctcccctgtcttatctaagtggtaggcatgt

SEQ ID NO: 275140 - DNA, 997 bp, Homo sapiens
tgggttcttcatcaccagcattccctccattttctgcttcttctggagggaggggcatgtattccaataacttatcaaatagtttccctaaatttgtttctagtttttccatgtcaccacaaaatgaactcatctccaccaacaatttcaatacctccaactgtatgtcaagaccttccactgyggtagtcaagataccaaggttagggagaacctgctcacagaaatatgtcacagaccttgtggaatggacagttttagagaagaagggtactgcctgctgagtgcactgtaagagcctgcccacacactcaggatctgagggattgaaggtctgttctaggtcggcctgttcagccaccaactttacaagttgctgtcttccacttactgtctgtaagctttttaacccagacagtaattcatgaatagaacaaattcttcatgagtcacatcttctaggacgtgtttggattcagttagtataagctcttccacttcctttgttaatacttcatctggtaaagtcttaagttttgtagaaaggaatttaattgctcattctctaacaatgtcctctccwgtgggcagccatgtttgtggatagggctcctggaaacttacaacctaatggtggaggcaggatatgaacacaactacaatttgcagagtgatatgcaactgtaccaaaaaacataaagtgtaaagtgaaatcaaagtacaaggttacagtagaaataaaggatcctaattaggatatttactgtaaaaagagataatctactgggaggccaaaaaaatcactgatttcttattttatagcaaattataatttaaaattgcaaawaatatacattcattgaaggaaagcagaaatacagaaaagcaaaaagaataaaaaccaccccaaattgtaccacacagaaatattatttaatattttgatgaatttcatcctttcatatgaatttcattattgtataagctccttttaaaa

SEQ ID NO: 275141 - DNA, 573 bp, Homo sapiens
  misc_feature (1)...(573): n = A,T,C or G
aacatttatcctaaaaattatctactctaaaactccttttagtcaaatagttcaatttggcaagagattacatctatttaaaaactccatgatgattcaagcagcagagaaaaaaaaaacttcacttttactcattaaaaaataatttttttctttgttcaaaatgactccaaatatctgttccatgctccatcttctcctaagctttaagataattttacagaaaatttcaaatacaccttttataccctccacttcaacacaactgctaacattatttacagatacatgtttttttactatgtatttgaacacagttgtgaacatcaagaaacttcatacctaaatattttagcattcatctctaagaataaagacaatcctgttacaatatcataatcacaacccagatatttgggccntntttgatttcgggggattacatatcttctattatctagtccatcttcaaatgtcttgtcaagagtgtcctttatacagttgtgttcccccccscaaactaagacccaatctagattcatactttataagataagacatctcctacccaaa

SEQ ID NO: 275142 - DNA, 1128 bp, Homo sapiens
ttcctcatgtgatctagtccttccataacggagaatctattttaaaacataaggctggacatggtggctcatgcctgtaatcctagcaccttggaaggccaagatgagaaaacgacttgaagccaggagttcaagaccaccctgggcaacatagtgagaacccatctctacaataatattatttaaagtaaaactaatagggaatattatgttatttttctggttaaaacctaccaagagtgcccaaaaatactcataaaagccagtttccctgataacctctgggctcctagtcagcttccttggccacactctccctctctctcagccactcacacygaatctttctaggctttgctgtaagtgggtttatactgagcttgctttgcttcagggcatttgagtttgctgctcctcaacagaatgatcttcccccaggtaatagggctcaggttcattccctcatctctttcaaatctttgcataacttcactttctcagcaaaactggccctaattacttgttagaaatgaagtctcttcccwtgagaacagcatagtggaaaccacttccatgattcaattacctctacctggtcccgcccttgacacgtggggattattacaattcaagatgagaattcgttggggacacaaaaccaaaccatatcattctgccctggcccctcccaaatctcatgttctcacatttcaaaacataatcatgcctttccaacagttccccaaagtcttaactcactccaacattagccccaaagtccatgtccaaagtcccctctgagwcaaggcaagttccttctgcttatgatgctgtaaaatcaaaagcaagttagttacttcctagatacaatggggcattgtataaatggggcactgtacaggcattgagtaaataccgccatttcaaatgggagaaattggccaaaacaaaggggctccaggcagaaaccgtctcccatgattcacttacctccagctcatcctgcccttaacacgtggagattattacaattcaaggtgagatttgggtggagacatagagccaaaccataccactgaatatcaagctttgctcactgtgatagacaactcatggctgctcctatac

SEQ ID NO: 275143 - DNA, 583 bp, Homo sapiens
tgagaacagcatagtggaaaccacttccatgattcaattacctctacctggtcccgcccttgacacgtggggattattacaattcaagatgagaattcgttggggacacaaaaccaaaccatatcattctgccctggcccctcccaaatctcatgttctcacatttcaaaacataatcatgcctttccaacagttccccaaagtcttaactcactccaacattagccccaaagtccatgtccaaagtcccctctgagacaaggcaagttccttctgcttatgatgctgtaaaatcaaaagcaagttagttacttcctagatacaatggggcattgtataaatggggcactgtacaggcattgagtaaataccgccatttcaaatgggagaaattggccaaaacaaaggggctccaggcagaaaccgtctcccatgattcacttacctccagctcatcctgcccttaacacgtggagattattacaattcaaggtgagatttgggtggagacatagagccaaaccataycactgaatatcaagctttgctcactgtgatagacaactcatggctgctcctatac

SEQ ID NO: 275144 - DNA, 578 bp, Homo sapiens
accttgtggagtttattataatcaattcatttgcatattttttaattttatataccctgtatttttatttcacatgaatcaactttccaayttaatttattataagacacttaaaaatcaagtttctaaacctcaaggcaaggggtcagacagcttctctgtgataaaaatcacaattgaaaagtcatcatttccctactgacatcattcttttgttgaaagtttcctgcaattttctttgtattagcatcaagatacattgtccagagctactcctatcattgtgaataaagacaagaaatatatataaatagatacaatgatgatagattagaaagatagagatgtgtgtatatagataggtatgtatttttatacatatgtatgtgtgtacagaaaatattttacttttaattttgtataaattatctattgctatgtaacaaactgtctcaaaatatggtgcttaaaataacacacatttattttcttatatttttttctggggtcacttatctgggcatggcttagctgggttctcaacttcaagttctctcaaaggctacagtcaagatatc

SEQ ID NO: 275145 - DNA, 578 bp, Homo sapiens
accttgtggagtttattataatcaattcatttgcatattttttaattttatataccctgtatttttatttcacatgaatcaactttccaacttaatttattataagacacttaaaaatcaagtttctaaacctcaaggcaaggggtcagacagcttctctgtgataaaaatcacaattgaaaagtcatcatttccctactgacatcattcttttgttgaaagtttcctgcaattttctttgtattagcatcaagatacattgtccagagctactcctatcattgtgaataaagacaagaaatatatataaatagatacaatgatgatagattagaaagatagagatgtgtgtatatagataggtatgtatttttrtacatatgtatgtgtgtacagaaaatattttacttttaattttgtataaattatctattgctatgtaacaaactgtctcaaaatatggtgcttaaaataacacacatttattttcttatatttttttctggggtcacttatctgggcatggcttagctgggttctcaacttcaagttctctcaaaggctacagtcaagatatc

SEQ ID NO: 275146 - DNA, 464 bp, Homo sapiens
tagaagtctactgaccacaggatattgttttctgtccattattttacttgcatgtttatcataataaacctctgtgttgattattaatgctgctgtttaaaaatgaagaggatgacatttatagattcaagtgacttttccascattgcaacaccaataaaaagcagaattaagtgttgagcacacatataccagactccacagcctaactccctttcctctgcaagtgtgccttatttctgagggtggtagaatcagtggccatgaaatgttaactggtgaagggccttgaggaacacagacaagctatgtttatccaaagcttgacctgtgacacccttgggtgtttcttcttttgatctgtagcttcatccagctcctctcagtgaagaactaagaatgaaagaagaaaccctgtaagattcagggtggtttatttcaaaaaacattatgaattactagag

SEQ ID NO: 275147 - DNA, 464 bp, Homo sapiens
tagaagtctactgaccacaggatattgttttctgtccattattttacttgcatgtttatcataataaacctctgtgttgattattaatgctgctgtttaaaaatgaagaggatgacatttatagattcaagtgacttttccagcattgcaacaccaataaaaagcagaattaagtgttgagcacacatataccagactccacagcctaactccctttcctctgcaagtgtgccttatttctgagggtggtagaatcagtggccatgaaatgttaactggtgaagggccttgaggaacacagacaagctatgtttatccaaagcttgacytgtgacacccttgggtgtttcttcttttgatctgtagcttcatccagctcctctcagtgaagaactaagaatgaaagaagaaaccctgtaagattcagggtggtttatttcaaaaaacattatgaattactagag

SEQ ID NO: 275148 - DNA, 569 bp, Homo sapiens
gaacatgtactgaaaacacttggcaaggtccamtttcagaaagtgtttgattaaagaattatgtgcccaaataatttattatctggttactggaggccaattatcaatattcacagatactcctcagatctagttaaatgagttaattgaactaaatttaaccaagatttactcagatctactttgtgccaggcactgtgctggctattaaacatacaaaatgaatgaaaaacaactctgtttttgaaaggctcaatgttatagaagagaaattaaggaaagagacaggcactactcccagaagcaatccttcatgggcagtgaacgtctcctgaggctatactagtttcactggaagcaggggatgtccagaaacaatcatcttgcttaattatgtgcctccgggcaaaatagttctgctgaagtcctttcaacctacctactcactcccacttcatcttgggaagcaatttatatttttccttctctcttatacctaagaatctaatgaagatagtgaaggttttttaatacttgccttaacaaatacctctcatagcagacagtaa

SEQ ID NO: 275149 - DNA, 573 bp, Homo sapiens
aaaagctgactgttttcctatataccaccaatgaaccrgtgacaaaacacattaacatttacattagcaaccaaataatgcaatacttaattataaatctaaatctaacagaaaatgtaaatatgtacaagatctatatgaggaaagctaaaaacactagtgaaacataccaaagtagaagtaaataaatggaaagattgtttatgttcacggatggaaatacaatattgttaagatgtcagttattcccaatttgatctatagattcagtgtgattccaatcaatcccagcaagttattttctagaacacagaaacttattcttaagtgtatggacaggcaaaagagtctagaatagccaactcaatattaaaagaaaagagcaaagtagaagtatggacactacccaactctacaacttactataaagctaccttgatcaagatggtgtggtattggtgaaagatagataaatagattaataaaacagaagagagatcccatgaaatagacttacattgatatgatcaattggtcattgacaaaggaacaaaaacaatacagcgaaaaaaa

SEQ ID NO: 275150 - DNA, 573 bp, Homo sapiens
aaaagctgactgttttcctatataccaccaatgaaccggtgacaaaacacattaacatttacattagcaaccaaataatgcaatacttaattataaatctaaatctaacagaaaatgtaaatatgtacaagatctatatgaggaaagctaaaaacactagtgaaacataccaaagtagaagtaaataaatggaaagattgtttatgttcacggatggaaatacaatattgttaagatgtcagttattcccaatttgatctatagattcagtgtgattccaatcaatcccagcaagttattttctagaacacagaaacttattcttaagtgtatggacaggcaaaagagtctagaatagccaactcaatattaaaagaaaagagcaaagtagaagtatggacactacccaactctacaayttactataaagctaccttgatcaagatggtgtggtattggtgaaagatagataaatagattaataaaacagaagagagatcccatgaaatagacttacattgatatgatcaattggtcattgacaaaggaacaaaaacaatacagcgaaaaaaa

SEQ ID NO: 275151 - DNA, 596 bp, Homo sapiens
gttctgggatacaagtgctgaatgtgcaggtttgttacataggtatacatgtgccatggtggtttgctgcacctatcaacccatcgtctaggttttaagcccctcatgcattaggggtttgtcctaatgctgtccctccccttgccccccaacccccaacagtccccagtgtgtgatattccctcccctccctgtgtccatgtgttcttattgttcgactcccacttatgagtgagaacatgtggtgtttggttttctgttcctgagttagtttgctgagaatgatggtttctagcttcattcatgtccctgcaatggacatgaactcatttttatggctgcatagtattccacggtgtatatgtgccacattatctttatccagtttattattgatrggcatggaaattgttttttagttattgctaataatcaataaaaatgtattgactgactgactgactactgtctgctgggctcagtgaaaaaatgagataagaatccttaccttcgtgatgattccacacacaggatatacaaataacaaataagtaacaatatcatatgatgtaacaaggggaggtcaaggatgttcc

SEQ ID NO: 275152 - DNA, 590 bp, Homo sapiens
aacatgatactatcttaccaatttgaagatagctttttaaaaaatttgagcatttggctggttaaagtaaacttttcattgcttttcagagctcaaagttggtttagcttctggttatttttttccgtatttctatagaagaacaagaacttggagatccatagtatttcattttgctgattaaaatatattttaatggtaatgattggccaggcgcrgtggctcacgcctctaatcccagcactttgggaggctgaggcaggcggatcacaaggtcaggagatcgagaccatcctggctaacacggtgaaaccccatctctaccaaaaatacaaaaaattagccgggcaaggtggtgggcgcctgtagttccagctattcgggaggctgaggcaggagaatggcgtgaacccgggaggtggagcttgcagtgagccgaggtcgtgccactgcactccagcctgggcgacagagcaagactccgtctcaaaaaaataatatatatatatatatatatatatatatatatatatatatagtaatgattatccaactgttttgttcatgttattataagactatcgatttaa

SEQ ID NO: 275153 - DNA, 475 bp, Homo sapiens
caatgcaaaccctatcaagataccaatgaccttattcacagaaatagaaaaaaagaatcctaaaattcatatgaaaccattaatgacacaaaatacttaaagctatcctgagaaataaaaactggaattacattacccgacttcaaattatactacagagctatagtaaccaaaacagcatgatactggcataaatacagagacatagaccaatggaacagaatagagaacccagaaagaaattcacatacctacagtgaactcattctcacaaagatgcaaakaacatacagtggggggtaaagacagccacttcagtaaatgatgctggtaaaactggatatccatatgaagaaaaatgaaactagacctctatttctcaccatatataaacatcaaataaaaataaattaaatacttaaatatgttatctcaaaactatgaaactactacaagaaaagattgggggaaatct

SEQ ID NO: 275154 - DNA, 1713 bp, Homo sapiens
agaccttggcaatgaccttgagccataggatacaatgtgtcacattgtgcccatcatggagtgatcataaaaattgaagataatgcatgcaccgtactcagtgcaatgccaagaaggtgttcttaaaatacaagctaccattatcatgatayggaaactatgctagtccagaagtcaaaagaactgcataattttcctaacacttttgtatgctcttggaacatgtccagtccctacacagatcttctctcatggaaaatgagaaggatggattgggtctcttcttgcaaaagccagagtaccaagcaacagagaaaccctagctacaaaagaatcacccacgggattttagaaaacatggcatgctggcaattgggcatttatttgcctgttcaccttatgagtgtcttcttgtgtttaagtaatttctgaccctgacaaatgtcattcagtgcctcccaatcaatcatctgtctggctttgtctgggctaggtcagactggatattcctcagatagtggaacactctgtctcagggaaggctgacaaaaacactacagawatcagtattcggccgggtgcagtggctcacgcctgtaatcctagaactttgggaggctgaggcgggcagatcatgaggtcaggagatcgagaccatcctggccaacatggtgaaaccccgtctctactacccctgtagtcccaactactcgggaggctgaagcgggagaatggcatgaacccgggaggcagagcttgcagtgagccgagatcgcaccactgcactctggcctgggcgacagagcgagactctgtcaaaaaaaaaaaaaaaaaaaaaaaaaaaaaagagaaatwtatcagtattcaagtaccggaagattatagatcatcaagaagatttaatgcaaataagcctacttcaagatatttaataatcaaactccagaaggtcaaggataaagaaaagatcctaaaagcttagaaaataaataaatagcatacaaaggtgttccaatatgtctggcagcagatttcttactgtatatcctactggtaaggagagagttctgtactatatttaaagtgctgaaagaaaaaaaaaaactttaatcttagaatagtatatacatcaaaatawatcagtattcggccgggtgcagtggctcacgcctgtaatcctagaactttgggaggctgaggcgggcagatcatgaggtcaggagatcgagaccatcctggccaacatggtgaaaccccgtctctactacccctgtagtcccaactactcgggaggctgaagcgggagaatggcatgaacccgggaggcagagcttgcagtgagccgagatcgcaccactgcactctggcctgggcgacagagcgagactctgtcaaaaaaaaaaaaaaaaaaaaaaaaaaaaaagagaaatatwtcagtattcaagtaccggaagattatagatcatcaagaagatttaatgcaaataagcctacttcaagatatttaataatcaaactccagaaggtcaaggataaagaaaagatcctaaaagcttagaaaataaataaatagcatacaaaggtgttccaatatgtctggcagcagatttcttactgtatatcctactggtaaggagagagttctgtactatatttaaagtgctgaaagaaaaaaaaaaactttaatcttagaatagtatatacatcaaaata

SEQ ID NO: 275155 - DNA, 612 bp, Homo sapiens
cacaataatggtgactcgggcattagataaaatggggtcctgatcccactccctctgcttgcctgccgagtgatcttgggcaggtccattaagctctcttggctccagtttccttatctgtaaaatgataatacaactgaccgtgtccaaggtgtgaggataactgatgttgaaccaatgttcactgcttttgctgttactgcaattggtaggaggtgaggaaagtgatgagaggagaaaaagctagaaggtaatctgtcaggtgttcacccacctctgtttctgaagcaatgggatccagctctatcatatatgtatccttaggcaggacagtttgggttgggctctgctgggtggttcttctgctggtctcacttgggatcacctgtgtggctgcagtcatctggtggctaatggagctgcatggtctaagaagcttctctcacaggcctggtggtcatgctggttgctggctctgctcagatagagctcctctgctccacatggccrctcatcctcccataggcagcctggatatcttcacagcattccatcaaggctgagagtggtaacagcatgttctcttgggactgaggttctgaagtcacacaa

SEQ ID NO: 275156 - DNA, 612 bp, Homo sapiens
cacaataatggtgactcgggcattagataaaatggggtcctgatcccactccctctgcttgcctgccgagtgatcttgggcaggtccattaagctctcttggctccagtttccttatctgtaaaatgataatacaactgaccgtgtccaaggtgtgaggataactgatgttgaaccaatgttcactgcttttgctgttactgcaattggtaggaggtgaggaaagtgatgagaggagaaaaagctagaaggtaatctgtcaggtgttcacccacctctgtttctgaagcaatgggatccagctctatcatatatgtatccttaggcaggacagtttgggttgggctctgctgggtggttcttctgctggtctcacttgggatcacctgtgtggctgcagtcatctggtggctaatggagctgcatggtctaagaagcttctctcacaggcctggtggtcatgctggttgctggctctgctcagatagagctcctctgctccacatggccgytcatcctcccataggcagcctggatatcttcacagcattccatcaaggctgagagtggtaacagcatgttctcttgggactgaggttctgaagtcacacaa

SEQ ID NO: 275157 - DNA, 551 bp, Homo sapiens
tggaggggacgcacagctcctcctgtgtacagggacctgcctttatccttggaggggacgcacagctcctcctgtgtacagggacctgcctttatccttggaggggacgcacagctcctcctgtrtacagggacctgtgtttatcctgggaggggacgtgtagctcctgtgtgcagggacctgcctttatcctgggaggggacacgcggctcctcgtatctgcagggacctgcttttatcctgggaggggtcacgcagctctgtgtccacaccacgctggcagtcccccaagcttacaaattgctgggagtgaaacctctctgcccctgcttcactgtgagacctggggcagggcccctcccttggtgggcctcagtttcctcatctgtaaagcaagtgggcccctggaatgctggctccatcaagaaaggcatctcggagcgccggaaacaattctgcggccagaaacaagtttgcagcgctgtgatctcagcgagtgtgaccctgtgagcctcacctttcctgtcttttaaatgggagcggaatgcctt

SEQ ID NO: 275158 - DNA, 551 bp, Homo sapiens
tggaggggacgcacagctcctcctgtgtacagggacctgcctttatccttggaggggacgcacagctcctcctgtgtacagggacctgcctttatccttggaggggacgcacagctcctcctgtgtacagggrcctgtgtttatcctgggaggggacgtgtagctcctgtgtgcagggacctgcctttatcctgggaggggacacgcggctcctcgtatctgcagggacctgcttttatcctgggaggggtcacgcagctctgtgtccacaccacgctggcagtcccccaagcttacaaattgctgggagtgaaacctctctgcccctgcttcactgtgagacctggggcagggcccctcccttggtgggcctcagtttcctcatctgtaaagcaagtgggcccctggaatgctggctccatcaagaaaggcatctcggagcgccggaaacaattctgcggccagaaacaagtttgcagcgctgtgatctcagcgagtgtgaccctgtgagcctcacctttcctgtcttttaaatgggagcggaatgcctt

SEQ ID NO: 275159 - DNA, 1165 bp, Homo sapiens
ttaaccgaagaattttaacccagatgaactgattgtttgagtaatagtcaatcagcagcatcttcagaggttcaccagaaacagagtattgtgctaggcacccagtccgggtgacagatagagaaggagaagagattaaatacaatgtttttaaaactattgctcagaaattaaaatttcagaatattccagaaatatatttacatttattgattaagcattatgtaatagtctttgctctgaatcttatayggtactcatcattttattagcaaggatatagatgcacgtaactttttccaagttcacagtgattgtgagtgattatttttaagtgaatatttgacatggactcttattatctaaaacacactaatgacttcctcttgctcttgaaataaaaaccagaatcatctaaaatgctctacaggactcttcatggtttaccctctgcccttttgtgccagcttcccactgttccacgtgctcccaggttccctgagctctggccacattcaacctcctgatacctgggcctggaatgcatcttcctttcccatcctaaccaagctgagctgctaawttaaccgaagaattttaacccagatgaactgattgtttgagtaatagtcaatcagcagcatcttcagaggttcaccagaaacagagtattgtgctaggcacccagtccgggtgacagatagagaaggagaagagattaaatacaatgtttttaaaactattgctcagaaattaaaatttcagaatattccagaaatatatttacatttattgattaagcattatgtaatagtctttgctctgaatcttatacggtactcatcattttattagcaaggatatagatgcacgtaactttttccaagttcacagtgattgtgagtgattatttttaagtgaatatttgacatggactcttattatctaaaacacwctaatgacttcctcttgctcttgaaataaaaaccagaatcatctaaaatgctctacaggactcttcatggtttaccctctgcccttttgtgccagcttcccactgttccacgtgctcccaggttccctgagctctggccacattcaacctcctgatacctgggcctggaatgcatcttcctttcccatcctaaccaagctgagctgctaa

SEQ ID NO: 275160 - DNA, 463 bp, Homo sapiens
tttacatgttgattattttgtatatcaagatgacatcagtcactaaaaaggaatgagcaaaatactgtacatgatggtgataatttctacttacctaatgactacaatgtataaaacctattagcttgtttcccygtgtttttttcataaatcttcacaactgtcccatcagatggaagctattatcccccagttgagattcgaagatgttaagtactttgctaaggccatcctacaaagaaatacagggctggaatttaaaccaagaagtccaaagtctgtagtctttctgctaggctttgcagagcttacaaatgacctaatagattgccttgcccagcagagccagaaattgcttccagaggcatgtctatattagcagcatgagttgatccctatgtgataattgtaccattaatgtaatagaaatattgagcagctcagaacttcctgaccccaggct

SEQ ID NO: 275161 - DNA, 615 bp, Homo sapiens
aattatttacatgttgattattttgtatatcaagatgacatcagtcactaaaaaggaatgagcaaaatactgtacatgatggtgataatttctacttacctaatgactacaatgtataaaacctattagcttgtttccctgtgtttttttcataaatcttcacaactgtcccatcagatggaagctattatcccccagttgagattcgaagatgttaagtactttgctaaggccatcctacaaagaaatacagggctggaatttaaaccaagaagtccaaagtctgtagtctttctgctaggctttgcagagcttacaaatgacctaatagattgccttgcccagcagagccagaaattgcttccagaggyatgtctatattagcagcatgagttgatccctatgtgataattgtaccattaatgtaatagaaatattgagcagctcagaacttcctgaccccaggctaaagtgtaaaaagggagaaagataatagtctcctgctggtttcaaccagggtcatttccaggacattgtctggcctagacagtaagaatcagatgcaaattgtaacaatcttctttgatctgtgtgttcagcacaaatagatttatg

SEQ ID NO: 275162 - DNA, 576 bp, Homo sapiens
tggctgggatggtcatttaacactttgtggcactgttggactaagtgagtatcataaatctagtaatatgtcactgtctatttggcccacagataggaggcagaccataacactattttggaaatatatcatctattttccaactaatttaaccataaggaagatgaatagctgcgtactttagccgcaatgcctttggtgagactgctactgaacagccaacatacrtttgccacctttgtcactcaaacttctaaagcacatttgactcatcagctggttgactcttacctcaagataaaaaaaacagaatgtgtgcctataacccctgcactttgagaggctgaggtggtaggatgacaggagcccaggagtttgaggttacagtgagctgtgattgtgcaactgcactccagtttgggtgacagagcaagacctaactattatgttcttgatattctgttttttattcagcaacaaaagctaaacctatctattaatggaaactacttcagagtcagtttactgcccatgatcataagcattttgcttaattaactcattctctggcagcta

SEQ ID NO: 275163 - DNA, 557 bp, Homo sapiens
actcattctctggcagctaatgagatttgacgcttattgggtgcttggtataaccatgagttgtttgaacatttaaaaacttagtttattattaaaatattttccaacaaatgtgatcttaattctgggactctgatacaacaaacccaggagggctgcaaacaatctataagcagagcaggcttcatggatttgggactaatgtagccctgtgttcacagggaccccatattrgggtttaatgttctgttgtcgtaatcttcaaattttttatgattttattcacaaactttgttttgcaagtgaagtatagtggggtaatggaatatgtacctaggctcacattcaatatcatctaccactaggttcttgcctgcctgctctccaacccgtgggctttgggggtggctgacccagtgggaatttctcacccacctctatatcaaacatattctcatgcagaagttacaattccttagggatcacctgtccacatgagatgggcagggtgtattacttttgtaatgcaattttaggaattaaaaacatctcttgag

SEQ ID NO: 275164 - DNA, 557 bp, Homo sapiens
actcattctctggcagctaatgagatttgacgcttattgggtgcttggtataaccatgagttgtttgaacatttaaaaacttagtttattattaaaatattttccaacaaatgtgatcttaattctgggactctgatacaacaaacccaggagggctgcaaacaatctataagcagagcaggcttcatggatttgggactaatgtagccctgtgttcacagggaccccatattagggtttaatgttctgttgtcgtaatcttcaaattttttatgattttattcacaaactttgttttgcaagtgaagtatagtggggtaatggaatatgtacctaggctcacattcaatatcatctaccactaggttcttgcctgcctgctctccaacccgtgggctttgggggtggctgacycagtgggaatttctcacccacctctatatcaaacatattctcatgcagaagttacaattccttagggatcacctgtccacatgagatgggcagggtgtattacttttgtaatgcaattttaggaattaaaaacatctcttgag

SEQ ID NO: 275165 - DNA, 1102 bp, Homo sapiens
gtgcattttctttgcccaaagctgtgaggagccaacagtacaacaatgactaagacagacaagttcccttcctcagaatctgaatgaggtgaacattcagagctcaaargaagacttggcccttgatggatcgtagatattcttctcattgtgtcagagagagaatggagagaatatggagaagttgcagatttcatatttggaatttgagagaccttctggtctaattctaatttctaaagtgtgaagtgaggttattagctgaagtatgggagggtatagaattttaaggcaatagaagaaattaacaaatgtagtctcttaaaagaaatgtgttcatatgtatatgtccaggttaacacataggaaaatgcatacaaagtgtgcatcaacaagctacaaatagtgataatctagggataagaaagcagaatggagtataaagtaatttttaaaaatattcattttaagttgtttcctttatctctgctaattataattatgagacgttccatgtactaaacaacatgatwcctcaaaaggggaaatattactatctttcttttgaaatataccaaactggttaaactcttttctgtctttcttcctttatttcttctattctccattctatttgtttattgcctatcaactctttgattaatttaatgtggtcctgttaaaatattgtcctatacacttttttttttacaaatttcatcaattgctctwgagtttgtgtgtgtgcatgtgttttgttttttttgttgttgttgttattttttgccggtaccttagaatcagctcactgtttgagagtaaagctctttacagttgtttacccagaaatagactgtttaaattcctttgcatctcagctctctggtgtcttctgaacccactcaccagctgtggtgaggattctggctggtggccatcttgtgctctatagctctagcctacaggaatattctgaagagatgtgaggaaaaggaaaaaaaaagtctttctatgttttaagaagtaaatttgtgaagtcctttaagaggggattttttttttaacttcaccagtgttccaaaactgagttgtttactggaaa

SEQ ID NO: 275166 - DNA, 499 bp, Homo sapiens
aaaagaaatgagtttgattcaagcacacaaaacttggcagtcaaaatttaacgcaggtatttttttttcctgaagatcctaaatacaaggtaccctgaaatgataaggtacagcaaaaattggagggtttgaattagggtacctacttggatcatttttaactttatatcataattggatgtcaaaagatttctattctagcatctttagtacaaataatccaggtacaggtaatcatttagttttaaatgtaatagtacagatagtatcaagtgggaaatggtttattttctcctagggccaggaaaagggytaaggtgacatttaaggtaggctttaaatatctgcagtacaggtgaaggctgttctgtgaaaggggaagaagggaccagtgctgtgtcagttaggagaggaagaaggttaactaccttgtgaaagccttatgtaatgttgaacttgaactttatttggtaaaagcaagacttcattgcaagatttt

SEQ ID NO: 275167 - DNA, 586 bp, Homo sapiens
ggtagtttcttggccatcaattgtctctgttttcttagaatcggagatttaaagagaaatctcataaatggtatatacatcctagatggaattttgaaatattaagatctaattataaagttgtgatgtggctagggaatcaataaatttgacaggttaatacaaaatagaaattttacggtatgtattagctctacatatgtatagaacctttcatttcattcatttaaagtatttaaaggccatatttaacataagctataacttttgcacagcaacattatttttctatgtaaaagtcctcatttcctgtttgtcatttgataacatgtctcatattgtcaagaagagttttaaattatgaacacgtattttctcataaaggtattatgagacagtagatttgaaagttaaaaaatggaacaactttctaattttttaaaatgtaaaactttagatatttgggcataatgtatttctttggcrtgcttaagatctctattaagccgaagtcaacgccataattaagatgtgaaaaactagtgataattcgattatgaacaacaaaagaaagaaaatgctgtca

SEQ ID NO: 275168 - DNA, 505 bp, Homo sapiens
agtctatataatcatagcatctcaaatgcttttagacaatgctgttttgggaatatgattgaaattgtctaataagaaaataattgaattatgtcaatatttagcaccttaaatcatgatgtttcaaatttmactatataactttatagtagtttgacacaataattttctcctatgatatctgaactgatatatttgaacacaaaatgttctaagacaaagaggtttcagtggatgtgagtcttctttttatcatgcccattgtaatttggtaagtaaaattagaattgtttttaagctagacataaacaagtttgctcgtttatttatctgaaaatgcgtgttgcctatttaccatatactgacattgttctaagtgctgggttaatatcaatgaaaaaacaaaaactgccactctgtcactagcatcataggttaacaaagttatgtaagatagttatgcaacaaagttatctaacatagttatgtaacaaagttatggaac

SEQ ID NO: 275169 - DNA, 523 bp, Homo sapiens
gccaaagaatacaaaacaaacagtatctggaaaggcattgatagcaatgaagctacgattacacacagagaataaaacatcagggaggagttggggagggaggacatttattcagatccagtaaactcaggcaacaagctcttctaatatgtaagcattatgaaggaaaaatatatacttttttccattttaacactcaattttgcaaatgtaaatacatccattatgtaacaaacgagaatctggtgagggctaaattacttatgtgtcatttagaaagttatgtttttaaaaataaggcagtcactttttctatatccaccaattaaataaattcatgttattttattatggaaattatgataatttacatatgctcacaagagtaacactcaataagccctctccaattttaatttaggcatgcaattacatcattacttatccttggttcaagtagaactattttraagattaaaaaatttaaataaagagctaatttttaacaaacctacattaaccc

SEQ ID NO: 275170 - DNA, 660 bp, Homo sapiens
gtttcactcttgtggcctagtctggagtggaagggcacgatctcggctcactgcaacctccacctcccggattcaggtgattctcctgcctcaacctcccaagyagttgggattacaggcgtgtgccaccgcacctggctaatttttgtatttttagtagagccggagttttaccatgttggtcaggcaggtcttgaacccctgaccttaggtgatccacccaccttggcctcccaaactgctgggattacaagcatgagccaccactgattttttacatacttccttattattttataattgtagaccaaatttttttgaaaatttcaaactttgagaaatagaaaatgcctgagctaagaaggcactcttttctagctattgccaaatggatgaagtcataaaatccaggaagcaggtaagccatggagtattcacttgtaggtttttccacgggacaaaaatctttttgagatggttggtgctaaaactactccgtttaccttgtatgtagatttcaaaatacacacaaccatttaaagtatatttgatactctgtttactttgaatgaaccaataagtaccaatgaaaataaaacatgacttagaagcccagagccaaaataacttggctatctgtattataatgaaagatttaaa

SEQ ID NO: 275171 - DNA, 613 bp, Homo sapiens
aaaatttcaaactttgagaaatagaaaatgcctgagctaagaaggcactcttttctagctattgccaaatggatgaagtcataaaatccaggaagcaggtaagccatggagtattcacttgtaggtttttccacgggacaaaaatctttttgagatggttggtgctaaaactactccgtttaccttgtatgtagatttcaaaatacacacaaccatttaaagtatatttgatactctgtttactttgaatgaaccaataagtaccaatgaaaataaaacatgacttagaagcccagagccaaaataacttggctatctgtattataatgaaagatttaaaaatcccgcctttctcttcgtttcttcctcttttttcttttttcttttcttttctttctctctctttctctctcactctttttctttttgttttaatggacttctcaagaagtacttatcaatgaatgcttgtgttaccagtctacccttcagcagttataattagacytttataccttcatgaaaaatctttgtattggaatctgaataacatatatcattacctttacaaattatgttggctgtaactcagaaataaaatgcatcttgatta

SEQ ID NO: 275172 - DNA, 604 bp, Homo sapiens
taatgtaatatatttagatttttgttgacataaatacaaacataaaataaaaattatcatagtgaatttttaagctcaaaatgtctagatcagttttgaaaatgctgatttaaaacaccattgtgtgtgaaaatgcattccaaatctaaaaatagatgatcgaaattgatttgccccacattggtatctcagggatggaactgggcatagtcccagtgatggaccctgtctcttgataagttgatacctgtcaaacttaaatgtcctctatacccaatctttcccaattgataccaccacatgttagggtacggcttccagatccaagctatatcattgcctgatttcctgaggagttggctcataaattacatgttcataggacatgtattcctgttctggaatcaaataattataaagacttagaagattgattttaaagtataatcttagtcctctgagtttaggtcagaaaaagtccaaaacattcagtctaagtagctgtctattctcaccaaaaaaagacacactgtaaagrtcattcagggaaaagataatggaaaagaaaaaatgtaaaataaagttgaaaggcaaaataagaaaa

SEQ ID NO: 275173 - DNA, 593 bp, Homo sapiens
tttgttgtggcagcaagtgttacatccttattatcaggagatattacctacaagtcatcactataaagccctttccatttgccataatttgttatagaataaaggggtttgtgataaccacaaccaggtgaggcacagcatggaagatgtgcaaccctgtcattctaaaatgaaaataatttattgccttagtgtagtcgattcaaataatggttgaaacccactgtccgactgcattattatcaggccacagccttttgcacagatatacgtctgccaaattgttctctatcactaaaaygtgtgtttatgatttatgagagctgaatgaaatactcaaaaagaattaccttctcaacaatattgatgctaagttgaaactgaaattacttaatgctattatatgtgagggtggcagtggaaagatactatttctctgaaatctaaagagacaagctaataaaaagctttcatccagctttaattgagactgcttgtacgctgatggaatctgctagttaaatcacagctctaatgaagatttagttcccaaagtctgtcttctcgcaacataagattttctaaaaattcaa

SEQ ID NO: 275174 - DNA, 578 bp, Homo sapiens
aataaatttccatgaatttatgtattcaaaataatttattttaaatgtaaatgaaaggtcaaatttcatagagaactcaattctcggtgatggcaytgcttttcaatcattcatatgttttactttcatacattgatacttagagaatttaataaccactccattttaaatctaaatgtgaatataatttttaaaagtcagtacagtcatcagatttctatatcgctttctaaatttatacctcccctttccacatttttgaaagcaatatcttcatgtgacttatctgtatcttttttctagctctcttatttttaattagagtaagaaactaaatatttacttaagagcaacactttgaaacttttggaattggcacgacctttaatgtcacctaagagaagcagggagaggctacatttggttaacaaatattatctaatgagtcaaaaaattcagacgtcttatctaaggaaaatgcaaactttaaaggatcagatagtcaatattttaggttttggggataacacagtatctatggcaattactcaactcaccattattgtagtgcaaaaatg

SEQ ID NO: 275175 - DNA, 578 bp, Homo sapiens
aataaatttccatgaatttatgtattcaaaataatttattttaaatgtaaatgaaaggtcaaatttcatagagaactcaattctcggtgatggcactgcttttcaatcattcatatgttttactttcatacaytgatacttagagaatttaataaccactccattttaaatctaaatgtgaatataatttttaaaagtcagtacagtcatcagatttctatatcgctttctaaatttatacctcccctttccacatttttgaaagcaatatcttcatgtgacttatctgtatcttttttctagctctcttatttttaattagagtaagaaactaaatatttacttaagagcaacactttgaaacttttggaattggcacgacctttaatgtcacctaagagaagcagggagaggctacatttggttaacaaatattatctaatgagtcaaaaaattcagacgtcttatctaaggaaaatgcaaactttaaaggatcagatagtcaatattttaggttttggggataacacagtatctatggcaattactcaactcaccattattgtagtgcaaaaatg

SEQ ID NO: 275176 - DNA, 543 bp, Homo sapiens
tctattataaaagtaataaaatatgctgcagtaaatctaggcattatggaaacacgtaaaggggaaaataaagataggcataactattgctatcatttatggaaaatttgcaaaataagttttcaattttgatcccatagcacttgatatatatatgttatttgttcatttgtcatcatatggtctgccttctcgtgttcttaaatgcctgttcacataatgaacataatgttcataagcactaagtttacacttaaatgcttaataagtgtttacatatttctgtctttgttaaataattaaacccactgtatattttactaagcagcagtctctgttctggacattgaggacacagcaacagataagacaggtaagattcttttcytcatggatctcacactgtaattgtggaaaaaaaaacagagaaaaaccatatgataagataaacttggcttatcaatgtgctgtgctcatagtaaaactggctaacatgacaatgactaaaagatgtgaaagggtgtctatttgtctattattttg

SEQ ID NO: 275177 - DNA, 1098 bp, Homo sapiens
cagaaataaatgaaaggaacattttcacaatacaggtaactcttataagacaatcaattatgggaaacaaagtaaacttcgagacctagaaaaaataatgaaatttttatttacttttggatgatgcttaattgttagattcctcactataatttactcattcccatcaagtgtaggatctaatttacctaaaactaccacaataatytcattccttgcatggggtaactggttcaggcatctgggttaatttaatcagactaaggtctcagacatttttttttttttttttttttttttttttttttacctctggaggagggacattttgtttaaatgaatgaatagaccctggggcagatggcagtaattttgtgctcaccagtggagccatactaaaaatgacactgaaccacagcagtagcaagacagggaaaaacataataactactgaatgtttaaaataatctattagctagcagagcaaagtaaacctaaacttagwaaaattcaccacacacacacgtatacaggtacatatacacatgcagttctgtatttatacagaactaggaactgctactgctgaatttttgactcaaaatacagttttaaggtttttttaataccwcttaagtattcaaattgtgtttatatatttatgcttactgttcattacagatagattggttggcttaaaaccctaagctatgatacaaattaaatatggcaacaagagtgacctcaaaccggttttgtattacatttaatgcaatctctctttaaccacttctataatactgtcaaaacagttcattccatttggagaattccagttatatttctgcaataaaattatctttcttgaaaattcccgaagtcatataagtaaaagactctttagcactggtatatcaataggctgatagcctccatatactgacccctacctagtttatttcttcacagcaggctatgacctgttaagctcaaaacccagccagttccaaactcaaattcacatccatttttgaaaaaatatatcccaaataagcagaattttagtcagtagcatccttctgtcttttcaagaaacta

SEQ ID NO: 275178 - DNA, 593 bp, Homo sapiens
aaaattcaccacacacacacgtatacaggtacatatacacatgcagttctgtatttatacagaactaggaactgctactgctgaatttttgactcaaaatacagttttaaggtttttttaataccacttaagtattcaaattgtgtttatatatttatgcttactgttcrttacagatagattggttggcttaaaaccctaagctatgatacaaattaaatatggcaacaagagtgacctcaaaccggttttgtattacatttaatgcaatctctctttaaccacttctataatactgtcaaaacagttcattccatttggagaattccagttatatttctgcaataaaattatctttcttgaaaattcccgaagtcatataagtaaaagactctttagcactggtatatcaataggctgatagcctccatatactgacccctacctagtttatttcttcacagcaggctatgacctgttaagctcaaaacccagccagttccaaactcaaattcacatccatttttgaaaaaatatatcccaaataagcagaattttagtcagtagcatccttctgtcttttcaagaaacta

SEQ ID NO: 275179 - DNA, 540 bp, Homo sapiens
atttattagcaattgtcagtattctaatgactgttacctgtaccctgatttagtctctgaaatgtcttttcttctctatgtaatggaccgccatatattttgggacatagctatcatatttcctctcttatttccacaacaagtaagataatgacttcaactctgtcacatatggcagagttttatgcacatctttttggctatcatctgtgcataaatcttgctttgtcaaaaatccttttcagagtgctgccaaagactgaacactttcccatggtgttggttttctggtatggtgaaagctgggactttttatgtataattccactaatcattatgtataatcccaacaccaaagtagatactaatatctatgaaatatgccattttatatatttggtcagtattctttsttggcatttaggaaatttagagtttagattatcaataatgatcaacactatcgcagcaaaaggggtcgagaccccttgatgaaataagaacggaaaaaggctcggggcaaatcatcaaataacccac

SEQ ID NO: 275180 - DNA, 1033 bp, Homo sapiens
gttggcaaatgagtattgtaattcmggctcaaaataaatatatatagaaggtatgattgaggaaaaaagcattaaggaccaccccaacacaatagcctgataatcatatctttcctgtgtccctattagatttttagatttagatttttcccattcatactatgcctacctggggtaccttgctatactgatattttaagtctttcattaaggttttcttagttataaaaatacaagtcttaaagcacaaactcaagagaatgtaatttttaaaacatcgtcttattttcttataatccactctaatacactttacccaagaaattaaaatccagtatttaatttatgggtttataagtacattgtcaggggaatgtagccataaaatcctccaaaataggctacctgctgaggtctcagcaattaacttcatctcatatggtwttctctttgggaaagtattttaaaatagaatttactattaacaaattaccagttaaatgtgacttaatattctcattttgactcatacattaacaaagaaccagaatgaatacccatctactctgaggcccagaatacaattcaagtctgagataacggtwttacaaactctggaaagaagttgagggtcacgatggagaaacaaaatgctctttgtttaaaaatgccaatatagcatatagttaaatgaatttgaaatagcattctaaggttaatatttagaggagtagcaaatcaggtcagtagtttgaatttaggcagtggaaagttggaaaataacctattttcacttcaaggatgcaaaggagcttgaaaactttgcaattttgtgccagcacattaccatcaaagagggtcactattttatatttcggtttagcaatggtaatatgatttcaacacttttgtcttcaaattataaagaacaatttcaaggaaacaatgaaaatgtcaaattcctttcaaacagacgagaatttttatttttttggggggggtatcttttccatattcacatcagttagacgtg

SEQ ID NO: 275181 - DNA, 1058 bp, Homo sapiens
tgttcttgtggtagtgagttctcacgagatctgatggttttataatggcttcccctttcactcagcactttctctcttgctgccctgtgaagaggtgactttgctaggattttaagtttcctgaggcctccccagccatggggaagtgtaagtcaattaaaactatgagtcaattaaacctattttctttataaattacccagtctcaggtatttcttcatagcagcatgagaacagaccaatacggtcttcatacggcattasttttagtagacatctcatgctaataaccaatttatagttcataagccattttatcttctttagctttacatatggaatacacactattgattagatgtctacaatttctcttacacactgaaattctatgattctttaaaaactgtgactatccagtgtttctcaaagcactaaagatttcagtttcaacatgttttcaagctttatcctaaaatacagatagcatctgataatcttttaccaactgacgtgaaacaaatttgcccagctawgaatacacactattgattagatgtctacaatttctcttacacactgaaattctatgattctttaaaaactgtgactatccagtgtttctcaaagcactaaagatttcagtttcaacatgttttcaagctttatcctaaaatacagatagcatctgataatcttttaccaactgacgtgaaacaaatttgcccagctacatttcagcaattagaaggctgaataaagtctataatcagataaacaacatatagcctacttgtaaagaagtacttcaagacaataaactgaccagaaactaaaatactctaaaaatgaatgttaaatactttaaaatttaaaaatattaatcatwtatgatatgaagcatctctacattggaattaaatcagctatccatttttaaaattttaatttatagcagtaatcttgctcaaattgaaaattaaatttcctttgctagtttattacttgtctctaaagtttttatttttagtgcaaaggaattgacaagtttttttaca

SEQ ID NO: 275182 - DNA, 596 bp, Homo sapiens
ttctgcccggtgtgggaaattaatgttgattgtggatggtgtcctagttgggttgaagctattaattcactctgtgtcaggattctggcatgatattttagctatgcctaccttctcttcattttcctccaggacacactatgaaatgactggagtcagtgctcagggctccatagatctctaaagactataaagttgttttaattgctaaacagaatttttgctgactatatcctaaatcactgtaatttyagcaagtaccaacactgagatcaaaccgtatgttttacttgacaggcattgctgggtggctgaattttccaggcaaattaaatttgcctttttaatcaaaatagtattttcattctagttttaaaaaatccattggagtcatgccaggaaaataaatccatggtaaaaaaccaagctgaaagagttctggtacaggggattgcttgcatttctgttggaaaagatgaaagagtgaagagaaagggagagagcaggggtagcaagtgtttagaaaggatcagttacccaaagaccaggaatctgctattgctcgaggaccacaagccagtatctgttgctaaact

SEQ ID NO: 275183 - DNA, 1191 bp, Homo sapiens
tcttatacccattaagaagttataagtaggcaggaagcggtggctcacgcctgtaatcccagcacttttgaaggccaaggcgggcagatcatgaggtcaagagatcaagaccatcctggccaacatgatgaaagtctgtctctactcaaaatacaaaaattagcttggcatggtggcgggcgcctgcagtcccgaacccgggaggcagatgttgcagtgagctgagataatgacactgcactccagcctggcaacagagcgagactcaaaaaaaaaaaaaaaaaamgttataagtgattgttactttaaaatagctttattacctatctcaaatctctaagacctaaaagtagccgaatgacataggtgtgaatgaatcaacactgactcttacttgttgcttagtttgtgtgataatttcatcatgtcatcctgacctcccctaatatcattgaacctctacagatctcagttaccacatcagtcaaagatgttaatagtttttactttgcaaggtagtactgaggttaaatgagataacgtgggaaaaccaatagggacataagaaatgctcaataaactgtagccattgagagcctttattttcagwtttggctgttaaagttagatggtaaggctgattaatttacttattaatttactcattgatccattgttggtgtaaattgaatgaatttgaatggcttgttggaagcacaagaaataagaataaagaagacattaaatttttgactcaagaaaaatcaagaatgcatgattttccccatatgaaaggaatattaaactgtaataaaagtatatttagaattaatttaatgaaaagcagggttttccttacaccagtctgagtttatagttacagctgcaattcattctgacattcagatataacagcaagaacaatattatgcagcagaatgtaggtaatgatgcttttagggaaagaaacacctctattttaaagcttttcactttattctgattttgccttacagacgacaaacagaactcatgctctagaaaagcagcttgattaaaaaatcacagaacaattatattctttctaagacactggctgaagcacagtagacagattttttwaaaaattataaacaatatgtattcattttagttgattagtcaagtccactctttttcctttaaacaatc

SEQ ID NO: 275184 - DNA, 556 bp, Homo sapiens
gtctgtcaagtgagaggaagacaaaacacttacctgaatgtattgtttacttgtcaggccagttaatacctctcagctgtgactgagttctcccgacaaggcaagacaagtatttgaatcctagtaaagtggttccttaacatggctgtgcacgaaacaaagctgggagtgtacacccccccgcccccccccccmcacacacacaaacacgaaccatccagactatttgctaatctgtttttctgggtttagtgatcctttttgcaatttctcaagtgattctgatattcagccagactggggaatctcccagcccatgccttgtgactgtggttcacctgcaaagatacatgagttgtctcgtcattcaaaccaagcccagatttcttgattctctaggaccaaagttagttggcaagaaaaagtgaaaagtatacaaatatataatgacaaaaatatatgtatgcttatttatacacaaaataacattccctttatgtatactaaggagtattaagtctagattcttattccaaatcaaagaacatcttcaaaa

SEQ ID NO: 275185 - DNA, 556 bp, Homo sapiens
gtctgtcaagtgagaggaagacaaaacacttacctgaatgtattgtttacttgtcaggccagttaatacctctcagctgtgactgagttctcccgacaaggcaagacaagtatttgaatcctagtaaagtggttccttaacatggctgtgcacgaaacaaagctgggagtgtacacccccccgcccccccccccccacacacacaaacacgaaccatccagactatttgctaatctgtttttctgggtttagtgatcctttttgcaatttctcaagtgattctgatattcagccagactggggaatctcccagcccatgccttgtgactgtggttcacctgcaaagatacatgagttgtctcgtcattcaaaccaagcccagatttcttgattctctaggaccaaagttagttggcaagaaaaagtraaaagtatacaaatatataatgacaaaaatatatgtatgcttatttatacacaaaataacattccctttatgtatactaaggagtattaagtctagattcttattccaaatcaaagaacatcttcaaaa

SEQ ID NO: 275186 - DNA, 590 bp, Homo sapiens
gacaattaaagataacttcagggatttttttttttaagagatgtgggtctcactatgttgcccaggttgctctcaaactcctggcctcaagggatcctcttgccttggcctcccaaagcattgggattacagttgygaaccactgcacctggcctagagataactttataaatggattatgtataaaattttaggcaggcttaagagaaatcaacatacaataggattttagtatcccagggctaaggtcaacaggaatcactactagctctagactggaaaatgcagagacaggctactgaaaccagaagaaattatggtagctgtaaagaggtcgggcaacagtagctgtggttctcaataagggaaaacagcgatgtgagctgactcaggagggaaggaacccagggaataaataacctagcttcattctcttgcctgatctctgggaagctgccttccactggccagtgagcagccaggacaaggaagccccctggtgaagtccatgtcagacttccaggactcaacgtagggttgtgacaagagaaaaattgaatataatccctagagaaactttaatgtacaca

SEQ ID NO: 275187 - DNA, 590 bp, Homo sapiens
gacaattaaagataacttcagggatttttttttttaagagatgtgggtctcactatgttgcccaggttgctctcaaactcctggcctcaagggatcctcttgccttggcctcccaaagcattgggattacagttgcgaaccactgcacctggcctagagataactttataaatggattatstataaaattttaggcaggcttaagagaaatcaacatacaataggattttagtatcccagggctaaggtcaacaggaatcactactagctctagactggaaaatgcagagacaggctactgaaaccagaagaaattatggtagctgtaaagaggtcgggcaacagtagctgtggttctcaataagggaaaacagcgatgtgagctgactcaggagggaaggaacccagggaataaataacctagcttcattctcttgcctgatctctgggaagctgccttccactggccagtgagcagccaggacaaggaagccccctggtgaagtccatgtcagacttccaggactcaacgtagggttgtgacaagagaaaaattgaatataatccctagagaaactttaatgtacaca

SEQ ID NO: 275188 - DNA, 590 bp, Homo sapiens
gacaattaaagataacttcagggatttttttttttaagagatgtgggtctcactatgttgcccaggttgctctcaaactcctggcctcaagggatcctcttgccttggcctcccaaagcattgggattacagttgcgaaccactgcacctggcctagagataactttataaatggattatgtataaaattttaggcaggcttaagagaaatcaacatacaataggattttagtatcccagggctaaggtcaacaggaatcactactagctctagactggaaaatgcagagacaggctactgaaaccagaagaaattatggtagctgtaaagaggtcgggcaacagtasctgtggttctcaataagggaaaacagcgatgtgagctgactcaggagggaaggaacccagggaataaataacctagcttcattctcttgcctgatctctgggaagctgccttccactggccagtgagcagccaggacaaggaagccccctggtgaagtccatgtcagacttccaggactcaacgtagggttgtgacaagagaaaaattgaatataatccctagagaaactttaatgtacaca

SEQ ID NO: 275189 - DNA, 590 bp, Homo sapiens
gacaattaaagataacttcagggatttttttttttaagagatgtgggtctcactatgttgcccaggttgctctcaaactcctggcctcaagggatcctcttgccttggcctcccaaagcattgggattacagttgcgaaccactgcacctggcctagagataactttataaatggattatgtataaaattttaggcaggcttaagagaaatcaacatacaataggattttagtatcccagggctaaggtcaacaggaatcactactagctctagactggaaaatgcagagacaggctactgaaaccagaagaaattatggtagctgtaaagaggtcgggcaacagtagctgtggttctcaataagggaaaacagcgatgtgagctgactcaggagggaaggaacccagggaataaataacctagcttcattctcttgcctgatctctgggaagctgccttccactggccagtgagcagccaggacaaggaagccccctggtgaagtccatgtcagacttccaggactcaacgtagggttgtgacaagagaaaaattsaatataatccctagagaaactttaatgtacaca

SEQ ID NO: 275190 - DNA, 607 bp, Homo sapiens
aggctaatgatctcatgaaataaggataagagaccacggtagcatctaccaaaaatgtgatactcaaaggattacatttcattgcttccctgttgaagtgaagatataaatgttccattctgacccacctttgaaaaacaattactttgccccatggattctttgttcaattaraaatttccccggggcaggtgacccatagtcttaaagaacaggctaaacaccacagagagattggttgctttttgcttttcatcacctgcaagatgtacataaaaatcacataagctggaattcaacaaaaggtatgtttatgaacttttattctcaaaagttgaaatgctgactttctcgattcctcattttcagacttttatttcagataaatactaaaaacctaagtgaaccttgataatgctgtagtgtagattacttcactaccccatataatagaaggacttgctgtttagttgtagaggataacagcgtttttcagtggaaattgaaagtggaaaaattgaattttgctctacacagttaacatatagtggcctttttttggtatatatgtaaacatgttgacactggaaatacgcagtctgaaata

SEQ ID NO: 275191 - DNA, 1163 bp, Homo sapiens
gttaactggatccctgtatttggagaatattacatcaaacactatgtataatttcaaaytgtagcattaataggagatacttcacccgtgagtacatttacttttagtgattctctagatggtcatctccaaagttattttgtcattcttttagaatatttttgtatgtattttcatgtgtgcatgcaaaagcatgtggcacattttctaaacaaatatacatatatttgacatacactaaaaattttgttgataggatgcatgatcagaaacatttagagactatttctttaggttttcactaaagtagatgaatatttgctctccccaaaataactcataattatgttctttaagtggtaagtcttaaaatgacaagttagtgtagcaatacaaagaggattgccttgtataagtttaacttatttgcataagtctttataataataaaactaagtcatcctttacagccaacagatatccaaattgtgttacaccaatttgaaatctatgttcccatatattcaactatgtgttgctgtgtgttgaaattcacatttttgtttctcagaagtttttttwgttaactggatccctgtatttggagaatattacatcaaacactatgtataatttcaaattgtagcwttaataggagatacttcacccgtgagtacatttacttttagtgattctctagatggtcatctccaaagttattttgtcattcttttagaatatttttgtatgtattttcatgtgtgcatgcaaaagcatgtggcacattttctaaacaaatatacatatatttgacatacactaaaaattttgttgataggatgcatgatcagaaacatttagagactatttctttaggttttcactaaagtagatgaatatttgctctccccaaaataactcataattatgttctttaagtggtaagtcttaaaatgacaagttagtgtagcaatacaaagaggattgccttgtataagtttaacttatttgcataagtctttataataataaaactaagtcatcctttacagccaacagatatccaaattgtgttacaccaatttgaaatctatgttcccatatattcaactatgtgttgctgtgtgttgaaattcacatttttgtttctcagaagttttttt

SEQ ID NO: 275192 - DNA, 1011 bp, Homo sapiens
catacctgtaatcccagcactttggttggccaaggcgagaggatcacttgagcccaggagtttgataacagcctgggcagactctgtctctactaaaaaaaaagaactaggtgtggtggcagcatgcacctgtagtcccacatactctggaggctgaagtgggaggattgcttgagcccagaagttcaaggctgcaggaagccactgcactccagtctgagaaacagagccagccccgtgcctcaaaaaaaataaataaatraaaataaaaaaaagactatgatcacatttttgtaaaaataaccccaccatatatagttaaaaaaaaggggtgggggctttgaaaagctgaacatttagatgctaatgatggcttctctggggatgataagttttctctgcaagtcttcttttctctttcccttcctccctccctcctttcttcttctctttcttcattcatgtctccctctctcccttcttctccttgttwtataattttttatagtttttctttctttttgagacagagtctcactctgttgcccaggctggagtgcaatggagccatctcagctcactgcaacctctgcctcccaggttcaagcaatactagtgcttcagcctcctgagtatctgggaccacaggtgacacaggtgagcccccatacctggctaattattgtattwttagtaaagagggggcttcactgtgttggccaggctggtctggaactcctaacctcaagtgatccacctgcctcagcctcccaaaatgctgggattataggcatgaggcaccacacccagccaagtggatgcatatttcaaacaaagcacccaaaaatgcccaggcatgaccatttctccttttcttgaaactacaaggtcaatccccttgggaacttcctaatacttctctaaaaaccaacctaaaaaacccaaaactaatacatcctccaattcttcaacatgtaaagtccttgtaaacaaagctacaatgacccagaa

SEQ ID NO: 275193 - DNA, 518 bp, Homo sapiens
tataattttttatagtttttctttctttttgagacagagtctcactctgttgcccaggctggagtgcaatggagccatctcagctcactgcaacctctgcctcccaggttcaagcaatactagtgcttcagcctcctgagtatctgggaccacaggtgacacaggtgagcccccatacctggctaattattgtatttttagtaaagagggggcttcactgtgttggccaggctggtctggaactcctaacctcaagtgatccacctgcctcagcctcccaaaatgctgggattataggcatgaggcaccacacccagccaagtggatgcatatttcaaacaaagcacccaaaaatgcccaggcatgaccatttctccttttcttgaaactacaaggtcaatccccttgggaacttcctaatacttctctaaaaaccaacctaaaaaacccaaaactaatacatcctccaattcttcaayatgtaaagtccttgtaaacaaagctacaatgacccagaa

SEQ ID NO: 275194 - DNA, 552 bp, Homo sapiens
tgcagagtctcagacctcagtctctttcaggttcaggaggtctgagaaattcacagttacaccaacaacttgggaaattctaaggcaggtgagccattgactctactgtgaaccctgctctgaaaatgactttagttttttttgtttttttttctctttgtacttaataactttattctgactcaaaagccatagaactcctcaccaaaggacacataggtcagtgcaaagaaggaaacaaacacgtctgtattctgcatgtctttctccttcccccttcagcaatgccccatcctattcccagccctggtcggctgcaccccmtgagccaggctctggtcactcactacaccatgacaaagccacctgccgcctgctaatggtgactcggctcagccattagagggcagcagataacaggtcactaagcagataatttctccgcgagcaggtttgcccatctttctaaataatccaatttttcttgaatattttctcatcaaggaacattttccaaaaacctcataaatgcaagtcatggaagtgacagca

SEQ ID NO: 275195 - DNA, 552 bp, Homo sapiens
tgcagagtctcagacctcagtctctttcaggttcaggaggtctgagaaattcacagttacaccaacaacttgggaaattctaaggcaggtgagccattgactctactgtgaaccctgctctgaaaatgactttagttttttttgtttttttttctctttgtacttaataactttattctgactcaaaagccatagaactcctcaccaaaggacacataggtcagtgcaaagaaggaaacaaacacgtctgtattctgcatgtctttctccttcccccttcagcaatgccccatcctattcccagccctggtcggctgcaccccctgagccaggctctggtcactcactacaccatgacaaagccacctgccgcctgctaatggtgactcggctcagccattagagggcagcagataacaggtcactaagcagataatttctccgcgagcaggtttgcccatctttctaaataatccaatttttctygaatattttctcatcaaggaacattttccaaaaacctcataaatgcaagtcatggaagtgacagca

SEQ ID NO: 275196 - DNA, 588 bp, Homo sapiens
agccactaagctactctaaatgctaaaatactttgacaattgtttttccatgctctctgtgcctaacacgtttttaacatgttgttttttccagttgttcttaaatgggacactgacccagtgcttggctgctccgaagccactccaaatgtgaaatatgtcgaagctaaagctgcactgccctcctttctcttctttctaatggggccaagtgaattaaatgtcactcatcccaaaaaagaaggcaaatcctctttaaaaccaaaaattcttttgggttaggctagcttctcctctattcatgtgaagagatttaattcctttttgttggttttgtttttttcaattctgggaagaggatgagccaccctggctctggccatcagagccactttctttttgcacatgtttgaaaggcatgacacaacttgaactggaaaaagggctggcatgaaccccggcatctcaagagagactagaggtgcttttcagagtgaggktcccattttgcaagaaattatttggaggatcaaagacaaaaactgaggcatcgaaagggaccaacttaggcttcagaggaaggggaga

SEQ ID NO: 275197 - DNA, 524 bp, Homo sapiens
ctattgtcacttcttgcttaaagatctttttttgatctcatgttccctacatgataaggctaagtttctttgcatgttgtttcaattaccatgccttcagccacaaataacagaaagccctatctcagattggcttaaacaataggaaacatttattatctcaaatagcaagaggttaccaagtagagcacctttatgtttggctgatgcagtgccccacaatgacataaatgactccagtttgttctatctctgctstaccattcttggagtattcgagcttggttttcaggctagatccattcatggtcacaacatagtagccctatttccaggcatcacatctcagacatcaacatcagtggaagaaaagagactgactattccttaggtatcctttaagagtgaagaaaccagctagggatggtggccagtagctgaagtccaaggctataaggaggctgaggctggaggatcccttgaggccaggagttcaaggctatggtcataccaatgaataccta

SEQ ID NO: 275198 - DNA, 596 bp, Homo sapiens
aaatgaactaaactctccaatcaaaagacatagagtggctgaatggatataaaaacaagacccaattatctgttacctacacaaaacacactttacctataaagacacacatagactaaaaataaagggatggaaaaagacattccatgaaaatggaaatgaaaaaaagcaggagtagctatacttagacaaaatagatttcaagtcaaaaactataaaaataggcaaagaaggtcattatataatgataaaggcatcaattcagcaagataatacaacaattataaatatatacatgcactcaacaatggagcatccagatatataaagcaaatattattagagctaaagatagagatagatcctaatataataatagctagagactttagcaccctgcttttagcattgcacagatcatccagacagcaaatcaacaaagaaacatcagacttaatctgcactatacaccaaatggacctagtagatgtttacaraacatttcatccaatggctacagaattaacattcttctcctcaagacatggatcattctcaagaacagaccatttattaggctatgaaaacactgcaat

SEQ ID NO: 275199 - DNA, 183 bp, Homo sapiens
ctcattctatgttaaagctctagggcggccccacagggcaggagttttcggagcgaggctactgaagaccaagtctaactctgagtagtttgcagaacctgggcacattgsctgccagttccctgcctcagtttcctgggttgcaaatggggagagaatgtctgggctcgtggtgtcgtgaga

SEQ ID NO: 275200 - DNA, 635 bp, Homo sapiens
ccaacctacttattgtaacccatgaaaacttgcactaccttcttaaatgtcaacgtaagctaaatgtaaaaacttattttaacttcgaaaattattttggctgagtgtggtggcttatacctgtaatcccagcactttgggaagctgaggctggaggattgcttgagcccaggagttcaagaccagcctgggcaacacagcaagacacgcaagatatcgtctctacaaaaaaaattaaaaaattaaccaggtgtggtggcacacacctgcagtcccagctactcgggaggctgaggtgggaggattgctggagcccaggaggttgaggttgcagtgagctgtgattgtggcactgtactccagcctgggcagcagagtgagatcctgtctcacaaaaaaattattttgttttacaataaaaaaatttttaattgctttgatttagtgataaatgcaaagtaatgcatttagtttctaagatgaccaagctgttaaataatcaaaygcacacaatttgaaaagttgttgaaaggattggctgtatcaaaaagaagaaaggagaaggcttaaaggaagaacacacagccttcttcatatgtttatagggaatagggattcgatatataatgtataaa

SEQ ID NO: 275201 - DNA, 406 bp, Homo sapiens
tttgctctgtcaccgacactggagttcagtggtgccatctcagctcactgcaacctccgcctcccaggttcaagtgatttcttctgcctcagcctcctgagtagctgggattacaggcacataaaaccrcacctggctaatttttgtatttttagtagagacagcgttttgccatgttggccaggctcgtcttgaactcctgacctcaagtgatctgcccacctcaggctcccaaagtgctgggattacaggcgtgagccactgtgcccagccttttttatgtattaaattcatatagagagagggggacattctttgtataggttattgactttttttgtgttttcctactgtaatatcatattgatttgatatagtatttgtatcaaatgtttaaaatataata

SEQ ID NO: 275202 - DNA, 406 bp, Homo sapiens
tttgctctgtcaccgacactggagttcagtggtgccatctcagctcactgcaacctccgcctcccaggttcaagtgatttcttctgcctcagcctcctgagtagctgggattacaggcacataaaaccacacctggctaatttttgtatttttagtagagacagcgttttgccatgttggccaggctcgtcttgaactcctgacctcaagtgatctgcccacctcaggctcccaaagtgctgggattacaggcgtgagccactgtgcccagccttttttatgtattaaattcatatagagagagggggacattctytgtataggttattgactttttttgtgttttcctactgtaatatcatattgatttgatatagtatttgtatcaaatgtttaaaatataata

SEQ ID NO: 275203 - DNA, 548 bp, Homo sapiens
aatttcctctagtagtttttgaaacattttcttgtagtagtttcatagttttggatcttacatttaagcttcaatcctttttttttttttgagatggagtctcactatgttgcycgggctggagtgtagtggcgtgatctcaactcactgcaccctctgcttcccaggttcaagcgattcttctgcctcagcctcccgagtagttgggattacaggcacctaccaccatgcccagctgatttcttttgtatttttagtagagatggggtttcaccatgttggccaggctggtcttgaactcccagcctcaggtgagctgcctgacttggcctcccaaagtgctaggattacaagcatgagctaccatgcctagcctttcaatccattttgagttgatttttgtatgtggtgagaggtagtgttccagtttcattttttctgcatatacatacctagttttcccagcgccatttgtagaagagactgtttcttcctcaatgaatgttcttggtgactttgtcaaaaatcagttggctctaaatttattt

SEQ ID NO: 275204 - DNA, 548 bp, Homo sapiens
aatttcctctagtagtttttgaaacattttcttgtagtagtttcatagttttggatcttacatttaagcttcaatcctttttttttttttgagatggagtctcactatgttgctcgggctggagtgtagtggcgtgatctcaactcactgcaccctctgcttcccaggttcaagcgattcttctgcctcagcctcccgagtagttgggattacaggcacctaccaccatgcccagctgatttcttttgtatttttagtagagatggggtttcaccatgttggccaggctggtcttgaactcccagcctcaggtgagctgcctgacttggcctcccaaagtgctaggattacaagcatgagctaccatgcctagcctttcaatccattttgagttgatttttgtatgtggtgagaggtagtgttcyagtttcattttttctgcatatacatacctagttttcccagcgccatttgtagaagagactgtttcttcctcaatgaatgttcttggtgactttgtcaaaaatcagttggctctaaatttattt

SEQ ID NO: 275205 - DNA, 548 bp, Homo sapiens
aatttcctctagtagtttttgaaacattttcttgtagtagtttcatagttttggatcttacatttaagcttcaatcctttttttttttttgagatggagtctcactatgttgctcgggctggagtgtagtggcgtgatctcaactcactgcaccctctgcttcccaggttcaagcgattcttctgcctcagcctcccgagtagttgggattacaggcacctaccaccatgcccagctgatttcttttgtatttttagtagagatggggtttcaccatgttggccaggctggtcttgaactcccagcctcaggtgagctgcctgacttggcctcccaaagtgctaggattacaagcatgagctaccatgcctagcctttcaatccattttgagttgatttttgtatgtggtgagaggtagtgttccagtttcattttttctgcatatacatacctagttttcccagcgccatttgtagaagagactgtttcttccycaatgaatgttcttggtgactttgtcaaaaatcagttggctctaaatttattt

SEQ ID NO: 275206 - DNA, 584 bp, Homo sapiens
aagtatgatgttccgggggcacctgccacctgaaaaaggaaaaaagcctcagatgggcatgcgtatagctccctaaatacattgtggcatgctcaattccaaagggtaaggaaagcacagcatgcgggaagcccaccctaggggaagaatttggggaaagagacaagcctagaaagtcctyggatcaaggttacaggccctttttttcctgctgtcttctcctctctcttggaccttcaggtgccacgtgggtctctcccaagagaattttcctttctttcctgttctaaagccttttaaaataaatttccactcctgctctgaaacttgcctgggtctctttttctgttttatgtccttcagttgaattctttcttctgaggaggcaagggctgaagttgctatggactggtaggtatatggcaccagtaactggaggtttcttggatctcttccactgctaacacttcagttggaagtatcattcacttctctacatcctcgctttagtcagatttaaaaatgttgcctatttgatggatgcaaatggcatctaattttgggcttaatttcttttgcctagt

SEQ ID NO: 275207 - DNA, 584 bp, Homo sapiens
aagtatgatgttccgggggcacctgccacctgaaaaaggaaaaaagcctcagatgggcatgcgtatagctccctaaatacattgtggcatgctcaattccaaagggtaaggaaagcacagcatgcgggaagcccaccctaggggaagaatttggggaaagagacaagcctagaaagtccttggatcaaggttacaggccctttttttcctgctgtcttctcctctctcttggaccttcaggtgccacgtgggtctctcccaagagaattttcctttctttcctgttctaaagccttttaaaataaatttccactcctgctctgaaacttgcctgggtctctttttctgttttatgtccttcagttgaattctttcttctgaggaggcaagggctgaagttgctatggactggtaggtatatggcaccagtaactggaggtttcttggatctcttccactgctaacacttcagttggaagtatcattcacttctctacatcctygctttagtcagatttaaaaatgttgcctatttgatggatgcaaatggcatctaattttgggcttaatttcttttgcctagt

SEQ ID NO: 275208 - DNA, 411 bp, Homo sapiens
tgaggaactttcatatttctaggaagtaccacatacaatgatttccttaaaatagcttgctactaaagctagagtttagcagataccacttctttctacttttcaacattatactttatccttgctatccctcaccattctctcattgatctacacatgttcaaatgtaaagaaatcaccttagctttttcttaaaatacttgatagtgaagagatgatacagttgccagaaagtatcaaaatcaagactgagaactggtatagtgggaataaargccactgaagtaggcaactccacctcctcttgacttgtgcctttaatatgatgcatttgaaaatatgtgcagacttctaaagaaagatgctttaagaataagagacctaactgggtatgctgtgtaacattaactc

SEQ ID NO: 275209 - DNA, 503 bp, Homo sapiens
agtcatcactcagaaaagccagaacaacaaaagaaacacaggaaggtactgcctagaggaagatagtctccgtagcgttttttttttattactgcgtttaaaacgggaaagaactgtaaaggttggtggaatgatttcagcccgtctaagcgtgtgtctacctgcctggctgtggccgggaggtttgtttggctgcctatcagctcttatttccttagaagkttggagaattagcttcctcattcccatcaaatgtgtgaaaaccattccttgatgtaggtgaagctttctgtggtttactgcgaaggaaaaagcgacaaagagtgagaaagttctactttagcaatttataatttcaccaccacccccccgcccccactgacttctgttttatttcagacgttattttctctcttccttttgagtttctgttaaacacactagatatctttggtgtgttgttgttattgttttcaagatcccctctccccgaaaagctacct

SEQ ID NO: 275210 - DNA, 578 bp, Homo sapiens
ttttttccccctgtttcttctacttattcttcagatgtcagctcaaacatttcctcggagaggtctcccccacctcaaccgttcccactctccaaagtaggtcagcatctctctcaattacacattttttcagggttctatgtacctttccttcattcaagcatttatcattgcttataactgtaattgattcaggtgatgatttaattaaaatctgtctcttcttttaaatcataagctccatgagtatatggagaaagtctgatcttgtttattatatatctcagcacttagaaaagtggctggcccattttggggctttagtaaacattttttgaataaacaaagtgataagagagacatgctgaaggtggaatgggcttaagttttattaaaagatatgagtttygaccttgggcttcaaagaattaaggaaatatttaaacagtatattcaaaacatatttatgcacaaacattcacaaagaagctatagtaaggcccacacataaacacattgtcaaatcaaagaacactttctcactttgttcccttgtataattttccatacattgaaaa

SEQ ID NO: 275211 - DNA, 598 bp, Homo sapiens
cagctactgtaaattttgttttcaattaaagttccaggagttagtgtggcatttcgtttttctacataggtatatcacctgcattgatagggccatggtcttggtgggggctgatgtccacgaactcagatttgcattccatgttgtgacatcactggtgttgaatttctggagtgaatgatatttcagattctagaagaacacctgtaagaataaagccaattatcacacaggagaacatgatttgccttggaattaaaatacttttctaagaaactgtgtattgtgtatacaccagtcagatttattaatgcattttcctaaagatgccagatgtcagttttaatatgcattgaaatgaaccctgaataattctgaattgaaacttacaaaagagtaccgctgaacaaccctgaagttatcttgcatagagctgtcttgtataggacaactcctcagtagtggacttsgctggtttggcacccatgaaagggaatgaactgggagttttttgtgctattctaaaatgcctgactctatttagaggagctagttagacatattccagtggcttacttgcctgacgtcaccttatttg

SEQ ID NO: 275212 - DNA, 598 bp, Homo sapiens
cagctactgtaaattttgttttcaattaaagttccaggagttagtgtggcatttcgtttttctacataggtatatcacctgcattgatagggccatggtcttggtgggggctgatgtccacgaactcagatttgcattccatgttgtgacatcactggtgttgaatttctggagtgaatgatatttcagattctagaagaacacctgtaagaataaagccaattatcacacaggagaacatgatttgccttggaattaaaatacttttctaagaaactgtgtattgtgtatacaccagtcagatttattaatgcattttcctaaagatgccagatgtcagttttaatatgcattgaaatgaaccctgaataattctgaattgaaacttacaaaagagtaccgctgaacaaccctgaagttatcttgcatagagctgtcttgtataggacaactcctcagtagtggacttggstggtttggcacccatgaaagggaatgaactgggagttttttgtgctattctaaaatgcctgactctatttagaggagctagttagacatattccagtggcttacttgcctgacgtcaccttatttg

SEQ ID NO: 275213 - DNA, 581 bp, Homo sapiens
aaaattaaagccaagtttcctggcaattgtacaaagaaaggatttcaatctcatctacagggattttcattttttttaagcacagatggcagggtcccatctcagaccttcttaatctgaatatttgaagatagggcctaggtgtgtatgtgagtttctttctttctttttatgtatttatttatttttgagatggggatctcactgtgtcacccaggctagagtgcagtggtgtaatctcggctcactgcaacctccacctcccaggctcgagcaatccttctaactcagcctcccgaatagccaggactccagtcacacaccaccatgcccagctaatttttgtattttctggtagagacggagtttcgctatgttggccaggttggtcccgaactcccgagctcaagcaatctgcccacctcagcctctcaaagtactgggattacagtcgtgagccactacrctcatctgtgagtttatttctatacatatttacacatggtggatctgttatgcaatcttggttaagaatcattggtataaaagaaacctttgatttcttgcatccctttcaccac

SEQ ID NO: 275214 - DNA, 549 bp, Homo sapiens
cataatttgctcatgttgtgagagggacccaatgggagataatttagtgtggtttcgcctatactgttcttatggtagtgaatacatctcacctcacaagatctgaygattttataagaggaaacccctttcacttgatgctgattctctcttgccgctgccatgtaagaagtgccttttgccttcccctgtgattgtgaggtctccccagccacatggaactgtgagtccattaaacctattttactttataaattacccagtgttgggtacatctttatcagcagcatgaaaacggactaatacaccatcattagtgagattttgtccttgtcctgtatgtctcatgttgttaatatgcctgctccatctccaggcttcacatccatgtttctggcacaaagaagagcagtaaaacaaagggcgataggcttaaaaaaatagtttaaagatatgccaatccagcctttttcaattaagaaagcaaaagctttccaggaagcccaatccaaaggatttccgcttatttcttattaaccagaaatgtgt

SEQ ID NO: 275215 - DNA, 549 bp, Homo sapiens
cataatttgctcatgttgtgagagggacccaatgggagataatttagtgtggtttcgcctatactgttcttatggtagtgaatacatctcacctcacaagatctgatgattttataagaggaaacccctttcacttgatgctgattctctcttgccgctgccatgtaagaagtgccttttgccttcccctgtgattgtgaggtctccccagccacatggaactgtgagtccattaaacctattttactttataaattacccagtgttgggtacatctttatcagcagcatgaaaacggactaatacaccatcattagtgagattttgtccttgtcctgtatgtctcatgttgttaatatgcctgctccatctccaggcttcacatccatgtttctggcacaaagaagagcagtaaaacaaagggygataggcttaaaaaaatagtttaaagatatgccaatccagcctttttcaattaagaaagcaaaagctttccaggaagcccaatccaaaggatttccgcttatttcttattaaccagaaatgtgt

SEQ ID NO: 275216 - DNA, 618 bp, Homo sapiens
gcaaactagttcattgagagatttgggaaatgcttcacatagcaggtaacatttgagttatatctcaaaaggtaaatcagtgtttcttaggtacagaaaggaattgtccaggcagaactgaacagagaatagaatgggtcaatcaaagacatgaatgagagctcataattcacagagcaagaaaaagctaaagcatagctcaaaaacaaagttgcagggcttataggaagatggtggaggaggtttgggagtcaaagataggttttaaactataggttgtccttaccttttggaaggtaatgtaggttgtcttggactttgttgtatcaacaatagagagtcacttcaggtttttaaagaagttattatcttgagaaaacctccaaactgttctccatagtggctgtgctaatttacattcccaccaacagtgtgcaagtgttctcctttctctgcatcctcrccagcatttgttattgcccgtcttttggagataagccattttaactggagtgagatgatagctcattgtagttttgatttacagttctctgatcagtgatgttgagcactttttcatgtacccatttgccatttgtatgtcttattttgagaaat

SEQ ID NO: 275217 - DNA, 563 bp, Homo sapiens
taaatttaaatagtcacacaagtctatattggacatcttagctccaggcatctctttgaatgcagtctctgaaacccttttaaaaactacttgatgaattccatgagcacagggaccaggccacgtctgttttgtgcaatgttgcatgaatcacacttagtactgtgtttggcacataggaggcactcaaatgttttcattcaacatgtgactgagtgagtgaatgaacagataaaccttgaggataaagagagtattcaatggggaagaaaaaagggcttgtatgcacccttttctttyagaatatatcaaatcaattccttttaaaaaagataatctctttaaggtagtatcactggttaaccaaacttttgggacacaaagaagtgatgatttttacactcatggtggtttatcttctgtattctagtcccttaatctaaaggcactgtgtcaaatatgtatgagttgcagaggaactgtatgtggatcagttctgctcacagggttgtatcaagcagttacatcagaggctggcacatattcactgtcaataaatgtaa

SEQ ID NO: 275218 - DNA, 615 bp, Homo sapiens
tttaattaacattgttaattaacattgattttttaaaaaactttttcagctgaagtgtaacacttaacattgaccttaacttttaaaataaaagctaggtgttaagaaagcccagagaagttgatgattgataacatgtattatgatctagctccatgtgatccgggtagaagttacgaagtaatgtgcattgtaccatataaaaccctaatgatggttaatgttagctaattaagatgaacattgaatggagccagcctggctcataggggtattaacatcccattagagtctaacaaaatattattttagtcagaactacatatggtgaatcattttagattctaagacatatatttggaatcaaattagacactaaaaccatattctaatcattgttgccaatagagataatgttaaacaccttcttgaatttaatgttataccacacagtctttttgtttcattttgttttaatcttaaacatagaagtatgccatacttttatatattacacctaagaaatcatgaatatttgccacccccaattcttttaaacatcagatatgtttcatattaacccagctaaytgtagtaagggtaattcaaaacagc

SEQ ID NO: 275219 - DNA, 561 bp, Homo sapiens
gaaattactgatatgggtttcttgtgtattgtttcaaagatttttaaacatgcatataaataagcaaatagaataacctttctgaagacaggatgttagaactgttttctccactgtcatatccctggtagttagaatggtccctgagacacagaaggtattcagtaaatatatgtcaaatggttaaaaatatttaaccccacaattttaaacaattaatatcatctgacatagtttggatgtgtgtccctgcctgaatctcatattcaaatgtaacccccagtgttggaggtggacaaggtgggaggtgattggatcatgggggtggatttgtaatgaatggtttagcaccatcttccttggtattgtcctcttgagagtgagtgagatctagtaatttaaaactgtgtaacacccctctgtccctctgcctccttgctcctgcttttgctrtggaatgcacctgctctccttttgccttctgccataactggaagctttcttaggcctcctcagaagcggatgccactatgcttcctctacaacctgcagaaccatgag

SEQ ID NO: 275220 - DNA, 550 bp, Homo sapiens
gtggtgattttctaaatccagcattccttttacatgagcaggaagacctttctcacctctccatttattctttcattcatttatatctgtgtggacttgtggtttcttattccatgtgttattatttattactatgacgattgactttgatgctcaaattgttccagattggcagatggtaaaccctcaatctgctgtgtcctttagatacttcccatcattatttaagtacttcctttctggcaaagcaagtattttagactcaccttgtgcttttcctgttgcagcccaggaatcaraaatctaagacttccttttttttttaaagaagagaatttagacatcaagatctgagtgcccacagttgtaattgggctgtcactgctactaggctctatcagaggacacaactaggaaatatgtgtgtgtgtattactacatgttaaatatttctatatttctattaatctatacttacttttaaaaacccatgagttcatactgatgtttctaattctaatccaataccataggaaaagaacccattgtt

SEQ ID NO: 275221 - DNA, 611 bp, Homo sapiens
tgtgtgtgtgtattactacatgttaaatatttctatatttctattaatctatacttacttttaaaaacccatgagttcatactgatgyttctaattctaatccaataccataggaaaagaacccattgtttttaatcgctatcttgaaactataccaagcacacaggcttaatgtcattaaactcttcatgctatagaatgggagctagaaggtatcctggatccacacagtgccagtcatctactcatccatttactaactcaatacatttactagacactttctatgtgctgggcacctggcaaggaatacggaaataaaagactttgtcctatcctaaagtagctcaattcattaggtaggatggaagaaaataacaatatagtataataagctctttattcaaggtatgcacagtgttctataggaagagaggaggagcacagaacccaagctgagttaactggaatatttcagagaaggaagtaaaaataggtggcttatactactcattgcaagaatttttagattttttacatgtctgcataaataatgggtgtactttgcttctgattgaaatgcattttaaggagagttctgatttatctaa

SEQ ID NO: 275222 - DNA, 593 bp, Homo sapiens
caggtcctacctctcttgcaagatcataaaaataaatgcaactatttatttttatgcaaatattctaaaggaggaggttataagccactcccaattgtggacagagaaatacacccaggatcacacacaaattatcaataacagtcactaaaaataaaccttatatcttgcagactaacgttaaaatttgttatagattccttaagtcagtgctttactattcatccccatgttaataataattattatgtaaaaaatgttgaggaaaattataagtgtgctaatattatgagcaggttttatgttgaatttaatacagaaacttcaggcatcctgtggaaacaagaaatgtatcaattattgattcagtcataggaaaattagggattatctcctaaagaaaatgatttaaaggcacaggaagcaactgaaattagcagtgttaaaccatytgtaggttctcaatggctggggcccagctgacaggtgagaagcagggcaagagcatcagtgtgtacctcagagaggagtctggttctttccgtcactcctccatttccctgctggtatcgctcctttgcctgagaggaaaa

SEQ ID NO: 275223 - DNA, 1065 bp, Homo sapiens
gctaaatacagagaaaatatggagaaaaagaagatttaaatcagctggtggtattagtaacttgttggagggacaatacttaaacggccttgtagaataagcaacaattaatcagatagactaacggggaaggktgttccaggcagagagaacagcatacgtaagagtggggagttgagaaagagccaggctcaatagggaagctgaaagacagtcattgaaggcagaatcctaaatctctgtggaataatggtggaagatgatagtggaagacaagggagatgccagaccttaagggatatgaagacatgcctgtgtattgagagagcttctgacaggctttaagacaagaattgaatcaccatgctcatatttcagaaagaaaattatagcaccagtgttgaggatgaaccaaaggggaaataaaaatgaacaggaggcaatggagtcaaaagataacttgggaagtagaattgccaagaattggttgagtctagaatgactcccagtttctggctgaggccagtgctgcccctaactattwtgcagaaatttgcataagtaaaatggagctgaatgttagtcaccaagacaatggggaaaatgtctacaggacatgtcagtaaccttcatggcagcccctcccatcacagacccagaggcctaggtagaaaaaatgctttcatgggccaagcccagggccctgctactgctctgtgcagccttgggacttggtactctacaacctagccatggctaaaaggggccaacattcagcwcaggccattgcttcagagggtgtaagctccaagccttggaagtttccacatggtgttgagcctgcaggtgcacagaagtcaagaactgaggtttgggaacctctgcctagatttcaaaggatgtatggaaacacctggatgcctaggcagaagtatgctacaggggtggagccctcaaggcagtatggaagagaaatgtggagttggaggccccatacaaaatccccactggaccactgtgtagtaaagctgtgaaaagagggccaccgtcctccagaccccagaa

SEQ ID NO: 275224 - DNA, 565 bp, Homo sapiens
ggccaagcccagggccctgctactgctctgtgcagccttgggacttggtactctacaacctagccatggctaaaaggggccaacattcagctcaggccattgcttcagagggtgtaagctccaagccttggaagtttccacatggtgttgagcctgcaggtgcacagaagtcaagaactgaggtttgggaacctctgcctagatttcaaaggatgtatggaaacacctggatgcctaggcagaagtatgctacaggggtggagccctcaaggcagtatggaagagaaatgtggagttggagsccccatacaaaatccccactggaccactgtgtagtaaagctgtgaaaagagggccaccgtcctccagaccccagaatgatagatccactgacagcttgcactgtgtgcctggaaaggatgaagacactcaatgccagcctgtgaaagcagctgggaggggtgttgtaccctgcaaagccacaggagtggagccacccaagaccataggagctcacctcttgcatcagcatgacctggatctgagacatagaatcaaaggagat

SEQ ID NO: 275225 - DNA, 536 bp, Homo sapiens
aagtacattaaataaacaaatattcatgaactcataatgatcatctttggtcacctttggaccaaaattgataaataaagagaaagaatcaaacatttattgggacttttctatataggctgtatttcacagtcactgaatagttaatgaggaaatgttcattatagaaaaatcacagctgataaatgtgggaagaatgatagagtatcaccattttacaacctctgatgaaataatggctcaaagcaacaaacartgttgctaatttgctaagtgagagattaatggagaactttctaaggggtcagactgactcaccttgtccccaatgatcaatcttaaccactaaaagtaggaaacgtgcatcctgatatgatgtagtaggaatgacacagcgtcacctatgacatactcttcaccaaaagaaattgaaccttaatgtaattaaacctataggtttcactagtggtttacacaaaacatgggaaatagaggaacatgttaaagaatatcattagaataaaatcagccagatc

SEQ ID NO: 275226 - DNA, 543 bp, Homo sapiens
tttgggctatctgggttaaaccctgtctctgctatgtaccagctgtgtggctttgggcaagtggttcaagagtgttggtctccattttctcatctatggcatggagatagtaatagcctaaacatcatagggtggttgagagatttcccccccacatcttccctccctccctccatccctctcttttcaaataagtgagcacattcaatgtaccaggcattgttccacatrgtaggacttggaaatgaatgagagtttcttccttcatgagcttatgttttaatgagggagacaaataataaacaagtaaataatataatatcaaggaaaatagagcaggctagagggctagaaaggaggaaaggaaactatttcagatggggtaaccagagaagaactctctgacatggtggtatttcagaaggcaaaaatgatgtgaaaaagcaagccacaaaaatctgggagatgataacctgtgctccacacagcgatagggaagcattaaaagcacttaagaaatggtagcagatacaggaagcacag

SEQ ID NO: 275227 - DNA, 1119 bp, Homo sapiens
tttgggctatctgggttaaaccctgtctctgctatgtaccagctgtgtggctttgggcaagtggttcaagagtgttggtctccattttctcatctatggcatggagatagtaatagcctaaacatcatagggtggttgagagatttcccccccacatcttccctccctccctccatccctctcttttcaaataagtgagcacattcaatgtaccaggcattgttccacatagtaggacttggaaatgaatgagagtttcttccttcatgagcttatgttttaatgagggagacaaataataaacaagtaaataatataatatcaaggaaaatagagcaggctagagggctagaaaggaggaaaggraactatttcagatggggtaaccagagaagaactctctgacatggtggtatttcagaaggcaaaaatgatgtgaaaaagcaagccacaaaaatctgggagatgataacctgtgctccacacagcgatagggaagcattaaaagcacttaagaaatggtagcagatacaggaagcacagwtgctgttttaatttgcatttctctgatgactaatgatattcagcattttctwcataagattattggccatcctttcttttctgaatgatctgttgaaatcttttcttcattgtttaattggttgtttgtcttattgagttatgagttctttatatatacggaattgaagtcctttgttaatacatattgctaatatttgcttccattctatgacttgcctttttgtttcttaatggtatctttcaaagaataaaactttttaagtttaaggaagtataatctatcattttaaaaaatggtttgtgctttttgtgtcttatccaaaaaatctttgcatactcaaggctgcaaaaattttcttctagaagttctatagttttagcttttataattaggtttataatacatttcaagctaattcttatgggtcccgcatttttctgctgtgaaactaaagctaattcttatgtatgatgtgaggtaagggtcaatgtttcttttcctcagtaagaatatccagttttttcagtcgcatttgttgaaagactttcctttcccaattgaattgccttggt

SEQ ID NO: 275228 - DNA, 611 bp, Homo sapiens
atcttaattgtgccctaattgaagaggactgataattaacaacacaaatagccaacaccacagcctaaaccacaattcaattggtttagcttatgtaattctgactgaaaaattaaagttaagcaaactttccaattgatgggtgccaaaaatgttgtgcccagatgagctgcagacaagagcagagatttcaatgraaattactaacaggtgagatgaaattcttcaaagaattgtaacagaggtgaaacatggctttgccagtatgatgctgaagacaaagcacaatcaaagcaatggcaaccaggaggaagtggtccagtctaatcaaaagcagactggtgaagagcaaaggtcatggcaacacgtttttgggatgctcaaggcattttcttgttagctttctggagggccaaagaacaatacttattgagaatactttaagaaaattggccaaagctttagcaggaaaatgtctgggaaagcttcaccagagagtccttccccactatgaccatgctcctgctcattcctctcatcaaacatgggcaattttgtgagagttttgatgggaaatcattaggcatccacattactgccctgatttggct

SEQ ID NO: 275229 - DNA, 611 bp, Homo sapiens
atcttaattgtgccctaattgaagaggactgataattaacaacacaaatagccaacaccacagcctaaaccacaattcaattggtttagcttatgtaattctgactgaaaaattaaagttaagcaaactttccaattgatgggtgccaaaaatgttgtgcccagatgagctgcagacaagagcagagatttcaatgaaaattactaacaggtgagatgaaattcttcaaagaattgtaacagaggtgaaacatggctttgccagtatgatgctgaagacaaagcacaatcaaagcaatggcaaccaggaggaagtggtccagtctaakcaaaagcagactggtgaagagcaaaggtcatggcaacacgtttttgggatgctcaaggcattttcttgttagctttctggagggccaaagaacaatacttattgagaatactttaagaaaattggccaaagctttagcaggaaaatgtctgggaaagcttcaccagagagtccttccccactatgaccatgctcctgctcattcctctcatcaaacatgggcaattttgtgagagttttgatgggaaatcattaggcatccacattactgccctgatttggct

SEQ ID NO: 275230 - DNA, 545 bp, Homo sapiens
ataaattattttcaaatgttaagatgcttatgactactaaatctaacaatgatgccagtgttaatgataatattaacttttatagacatttaaataaatatttattcaatttgttttggcagctttattctcatattttggtgtcagcaattttttttgccaagtctcaaacatttgtatgtctccaacacactgtgcctagatggtttgtggccctaagtgatattatactgaccctttacacaactgagaacatttaaaaagcccaatattctgcacaagtgcaagtgggaaatacgctaatccaagaggttcaagacattgatttttggtagtctatactgccttacggggactgtaagagcatatcattctgcgtatcttagccatggcatgatagggcttagctaggagacacttttcatgttaaactgccttaaaaatatgtgcagtgctattattctagttatcaaagatgtggataccacctcttcargtagcagagataagattctaccatataaaccaagcaatctcatcttgtt

SEQ ID NO: 275231 - DNA, 574 bp, Homo sapiens
gaacagcatgggggaaaccaccctcatgatccagtcatcagttccacagatctttagggcaggggcaaaatgycaccactttctttgctaaagcatagcaagaatgacttttactccagttcccaataagttcctcatgtccatctgagaccacttcagcctagacttcattgtccatatcacaatcagcattttggtcaaagccattcaacaagtctctaggaagctccaaactttccctcatcttcctgtcttcttctgagccctctaaactgctccaacctctgccagttaccagttccaaagttgtttccacattcttggatatctcataagaatgccccactacctcggtaccaatgttctgtattagtctgttttcacactgctataaagatactacctgaggtctcaggaaacttacaatcatggtggaaggccaaggggaagcagggtatgtcttacatggtggtgggtgagagagagagagaagggggaagcaccagacacttatcaaacaaccagatcttgtgagaactcactcatgagaacagcatgggggaatctcccccca

SEQ ID NO: 275232 - DNA, 535 bp, Homo sapiens
tatagtgactatgattcataaaataaggaaatcactcacaaaataaagcttcataaaataaagggaacataaaatcagaaaattatagtattgtyatttttaactatttaaaaaattggttctgcttctttgctaggcattgtgctaagtgttttatgcacatcaactctaatccacatgagaactctgcatgacagaaattgctattcctgtttactagatcatgacatggaagttcaggaggtagcttgccaaaatttagctctatacctcatgttcatagcatgtacatagcatttatatgaacatcagtatttatcagtatgtggttcaaccagattttcaaggactcaacagagttggtgtttttgttactgttgtgtgtaacaaactacccccacaactttgtggtataaaagagccattttattatgctcacagattctatgggttagaaatctagccagggaaatgaagacggcttatctctagagcctcagctgggaagactctatggctagaggggttttcactc

SEQ ID NO: 275233 - DNA, 572 bp, Homo sapiens
aactcttcctctgtgcttagggtgaaaaggaccatcagttactctttcagttatcactatctatagcctttttcaaatgcaaggagccatatcataaaaattgaaggtaaaattgttgcagttaactttttttaagcctaatytcctttattcatcacaaagcttttgcatagaccttttaaatatacaaaatagtggccagaactctgcttacagactaccatctttcattaccaccatattacagttaattttataaaattgattcacacttaacaatttcttttctccacaatgaattatatttaacacacttttggggataagggagaaaaagaatatgagtttatgtttatttcaggtaatctatttgacccacccgttttacctcaacccccaaacaaaatgagtatccatttcttaagttaaacataaagaattcataaaggtgacaaactccttaatgaatcatccactgaccttaggaacatagagatgtgaaacacatagctcatgcccactctcttttatataaatattatccctgttgctaacattgtggtgggtgggtc

SEQ ID NO: 275234 - DNA, 629 bp, Homo sapiens
aggccaggcgtgtggtggctctcggctgtaatcccagcactttgggaggccaaggcagatggatcacctgaggtcaggagttcaagaccagcctggtcaacatggcaaaatcccgtctctactaaaaatacaaaaattagccgggcgtggtggtgcatgcctgtaatcccagctactcgggaggctgaggcaggagaatcacttgaacccaggaggtggaggttgcagtgagctgagatcgtgccattgcactccagcctgggcaacagagggagactctgtcaaaaaaaaaagagagaaatgaaggattccttttatgggcttatcagtggactatgaacagcttaggagagaatctctgagcttgaggatatgacagtagaaacttccaaaactgaaaatcaaagagaaaaaagactggaaaaaaaaaacccataatatccaagaactgtggcaagaactgtagggcaactacgaaagatataacctgtaataggagtaccatagtacaaaggaacagaagcaatatttgaagaartgaagactaagaattaccccaaattaatgtcatacaccaaaccacagatctcagaagtttagagaacaccaagcagaataaatgcaaaaaa

SEQ ID NO: 275235 - DNA, 538 bp, Homo sapiens
tatctctttgtcacattttggtaattctcacaatattttaaacatgctcattatatctgtcattgtgatgactgatcagtggtcttggatgttactgtagtagttgatttggggcatgatgaactgcaaccatataagacaatgaacttaataaataggtaagcgttgtgtgtgttctgactgctccactgactggctattcctctctctctctctctctctctccctggcctggaggctccctattctctgaaacacaatgttgaaattaggccaattaataaccttacagtggcctctaagtgttcaagtgaaaggaagagttgcatgtccctcacttacatcaaaagccagaartgactaagcttagtgaggaaggcatgtcaaaagtccagagaggatgaaagctaggcatcttgtgccaaacatttagacaagttgtgaatgcaaaggaaaagttcttgattgaaagtaaagggctactccagtgaacatatgaatgataagaaaacaaaacagccttattgctgacagggag

SEQ ID NO: 275236 - DNA, 540 bp, Homo sapiens
acctgcacttaatattgtagggaacaacaaaggcacatttaggaaatactaatatatatttgggtaaaaaaggactgaagtagaattaattttgcatttcagagaggcaaacacaattcagggaatattctgaatatttgctttaacactagattgagaatccgttcttatttcatgagatatggaaaggttaacccaaagaaggataaaaagagagagaggaaaagattagacatttgggtatttctgccctcttctcaattcatgttcaaatcaaccatcaaaagatgtatctgcacttgctctggggtgacccaacacactggagtgacaaaaagttggggtacaaaatgtagttgagacttcagtgggcccttaaggccttcaaaaattttgtacacattctcctctttcttccttaaatgtttcctcctgactttaaacctagttagttccttctcatgattcaagtatcaccacctgagaaaggccaccrctggtcacctgtctaatccctccttcacttccccccatctctgt

SEQ ID NO: 275237 - DNA, 549 bp, Homo sapiens
tagaagtaagccatcactaatactttaccaagaatgcttcaacagccttctggcttccctgcctccactatggtctcttctaatatttcaagaatatgactctattaccactttgacgtaagtcatcactgcttcctctgcttttaagatgatgtttactctccttctacggtctaaagaagtctctggttacctcttcttcctcatcagtatctactgttcaactcatactccagggctaagtgatactaaacatgttttagctccctagcctscaggtctttgcacatgctgtttcctctctgttgaacagtattcctttcccctccctccttttctggctaacttctactaatccttaaagttcaagaagtctacttggattgacccaccccacctcaaaaggtgcttttttccatctgtgctcccatagcatgctgaacttcctgatcattttactcataactctgtgttataactgcttttttttgttatttgtcttactaaatactctggtcaggagggataaatgttatacctgtatgccaa

SEQ ID NO: 275238 - DNA, 561 bp, Homo sapiens
ttgtagcacaaaataattaaaaaaaaaccgttttcatgagactgtagatacaaatgttccaaattcatgttattttctgctactccccagaatgcttttagtgtgttggaagctagcatcacagacacagcacaaaaaccctaagaaacaggtggtagaaacgctggttgcagagtggccattcttaagaacagacaagaaaaagctgcctgggcaaggtggcaacaaaatcctagagaaagcagttaatctgtgcttttccaaacgttgtgcttatctatctacagtttagtactttttaaaaaaccytttggaaagtaatcataagcatgtggaagtccccaactttcaaacacaactatgaggatcccttttgtaaatcaagcaaatattcattcaataaaatctactttttatttttgaagatgaattttatatatgttgaaatgacttacttcaggaaacatgtgcctaaactttctaaggtaagtctgatacttgaaacagaggttttcagtacaaacattaaaaagccattatggaagtgaggctgcatgccaa

SEQ ID NO: 275239 - DNA, 468 bp, Homo sapiens
gagcagtttttacctacttaacacaagagaataggaactactggggagccaggcagtagaagagaggaaatttctccttttagaagtattccagctaataaaggaaaaagggttttagaattagaatatgagtgttttgcaacccctttggtggtaccacaaaggcaactgagtggaagaatatgatgccatctgttaagtagttttgcctctttstctctgtcccccaaaggaaaaagtattggtcttctaaagattcacttactaatttacaggaagtacagaaaagaggaacatgttaaactgcattctaggaaaacagcaaaatccagattgtgggaaactctggcagggcaaataatgaagtttcattaagaaataaatgttaagaaaaaatgaagggagaacctgtaggtgaaaagaaatgtaaagtaagactgatcagttgccatgtatgtaccttattta

SEQ ID NO: 275240 - DNA, 468 bp, Homo sapiens
gagcagtttttacctacttaacacaagagaataggaactactggggagccaggcagtagaagagaggaaatttctccttttagaagtattccagctaataaaggaaaaagggttttagaattagaatatgagtgttttgcaacccctttggtggtaccacaaaggcaactgagtggaagaatatgatgccatctgttaagtagttttgcctctttctctytgtcccccaaaggaaaaagtattggtcttctaaagattcacttactaatttacaggaagtacagaaaagaggaacatgttaaactgcattctaggaaaacagcaaaatccagattgtgggaaactctggcagggcaaataatgaagtttcattaagaaataaatgttaagaaaaaatgaagggagaacctgtaggtgaaaagaaatgtaaagtaagactgatcagttgccatgtatgtaccttattta

SEQ ID NO: 275241 - DNA, 534 bp, Homo sapiens
tacctgctcttatcttactgcttctctttaggtcctactcagtacttcctttctaaagagacagcttcctaatttccctacctcctaatgtatccactgtcttccctctccatttccttcaaatacataactgccagatacatttttcttaactagaggtatgatagtcattttcttactcaaatctttcagtggatctctatttctaactcagatgtgtccttctgacttggatatttgtaaagaacttcacgctctcgcccagctttcccttcccgaagcttgtcctgctcacctttacatgaggctccagcttattgtgcctattargtgcactttcaatacagcacattctttcctgccaccttggctttgtcttagctacttccttcctatgaaatgtctggattcccatcaatagaacattaactcatcctcaaggtcagttcaaaatcagttccttcatgaggaattccccaattcctgtaaataaacatgatctctcccttcctaatctctccttagattaggaaa

SEQ ID NO: 275242 - DNA, 602 bp, Homo sapiens
taagcaatcaaaattaagctgttttcagtttgaaatagactgttataaatgtaagatattctataaaattctcatgataaccaaagcaaaaattaaagattcaaaacatatcaccataggaaatagaaaattattaagtcttaaaggaagatggcaagagaggaaaaggggacaaaacaaycagaaaataattaacaaaatggcagcagaaagtttccacatatctataattaccttgaatggaaatggattaaatattctaatcaaaagatatcatgtgaatgcatgaattaaaaaaaaagaaaagccagctatatgctgtttacaagaaacttcatttttaaggatgcacataggctgaaagtgaagggatggaaaaagatattccatgcaaatagaaactgcaagtgagtgtgagtagcaattcttatatcagacaaaatacactttaggtcaaaaactgtaaaagtagaccaaaaaaagacattttgtaataataaaggacttatttatcaagaagatattacaatcgtaaatatatatacacccaacagtggagcacctaaatatgtaaagcgaatattcaaggatctgaagggata

SEQ ID NO: 275243 - DNA, 500 bp, Homo sapiens
ggacctgacagttttccctcaacagcatatcctaaagtactttaagtgacaataggtacatatggcttcacctgtatatttttgtttgttcgtttgtttatggctacatagttttcaatatatacgttggatttttgacagaccaataaatagtgtccctctatctctgcccccttcccrtgggttctgaagagtttgagaaggaaaacaaatagttggcataaggaggccacaaatttaattttattgcagatagaggcaagactagaagttagagttttgtgtgaatagtcaagcaggcttgttattactgaagctgtgtatgtagatcttgttgtgtagcctacagcagttcccaaaatgaaaagtacagttgggacaagatctaccagtcagataagtgataccaccttctcacaggtggagtgagtcaagggcaaaagcaagatcatcagggtgctttaaaaactcctttgcacaaaaacctgaatagagtagaa

SEQ ID NO: 275244 - DNA, 581 bp, Homo sapiens
gatgattaggtgtagtcagcagacacatcacgcattctccattcattgttcccagatctagcctttctagccaagggaggaacctaggcagttcagtcataggaataatagaaaatgactaagacttggtcagtggaaaacgcaaccaagatccccgcttctacatctctctttcctgcaccctgcattcccatgccacggcattttaaagcagccctctgttacaacagccccctgctccctgctctgctcatattccctctgctgaaatgttcttcccccagatatccatgtggctcatttcttcatttccttgagtctttgctcaaatgtcacattcccaggaaagtctgcctttaccaccttacttaaaaattgcaaatcccctggcccctgaaccccccctccaccaacttaacaccccgggtccgttttcctctgcttcactaggtgtcactagcccttatcacattgtagcatactacagaattcacttatttatgtatttatgtttattttccatctccttccactagaaagtaatccccrtcttcttttttcactcatgtattcctggtccc

SEQ ID NO: 275245 - DNA, 568 bp, Homo sapiens
tatctttggcttccctaacatgtcttccttatgtcaagctctgcaaagggcaagcatcgggtaggagtcacaaatacgttgactcacttgttttggccggtacaatgtttaaaaaataacccaatgtcaatgcttttaggagggacttgcactctaccattcatagtttcttccattcccatctccttacagcaaggtgaggcatgtactcgccctgtgtcacctgagaaggtatctgggttggggcaatggtacttccagagcagaggggttttgaggctgtaggcttgagacattctcctcctgtgacacattgctaagaaatgtggtgttccaaaatgaatctgccacaacatcatctgtcagcagctctggtatttgagttcccgagtaggaaaagaacaaaagccacattctacctgtcagcaatcatgaaatggtaggaggaactagccatgctggctggtttgtggatgtgtgatcacgggyagggaaaactggaggaatgccaactctttgagggagaaacgctgcttgtgacagcagcagacccactcagagcatattt

SEQ ID NO: 275246 - DNA, 568 bp, Homo sapiens
tatctttggcttccctaacatgtcttccttatgtcaagctctgcaaagggcaagcatcgggtaggagtcacaaatacgttgactcacttgttttggccggtacaatgtttaaaaaataacccaatgtcaatgcttttaggagggacttgcactctaccattcatagtttcttccattcccatctccttacagcaaggtgaggcatgtactcgccctgtgtcacctgagaaggtatctgggttggggcaatggtacttccagagcagaggggttttgaggctgtaggcttgagacattctcctcctgtgacacattgctaagaaatgtggtgttccaaaatgaatctgccacaacatcatctgtcagcagctctggtatttgagttcccgagtaggaaaagaacaaaagccacattctacctgtcagcaatcatgaaatggtaggaggaactagccatgctggctggtttgtggatgtgtgatcacgggcagggaaaactggaggaatgccaactctttgagggagaaacgctgcttgtgacrgcagcagacccactcagagcatattt

SEQ ID NO: 275247 - DNA, 613 bp, Homo sapiens
gtctaagagtccagaatgttgaaactgctttctgagtatcattttgtgggaatagggtgggtggatatagtttttggtaacctaatttattaaagggcatagatatagcatgatgcttgggaataataatgttaataacctgattttcaatttatagcaaaccaacccctatgaaatattatacggcttggttttaggcttatatagtgttattttctcaggggggaaatgatattcataggatgtttagtaattataggcaattaacaagaaatttttaatttaatgtatttatttatttattgaaaaaatatttatttactacttatcacgtgtcaggcacagtacaagggcctgggaatagagcagtgaatcagaaagacatgattgctgctctcaagttttttatcattttatagagaaagtggcgaaaacaaacaaataaagaaacaaacaaacaaagaaaaaaggccaatttcaattctggcctaagcagtgttaagtagggraatgtagggtccaaggagaacaaagaggagggtggtgtctgacagggtgacattcattctagcagagggaacagagaccaaagacaacatggaacatggaccca

SEQ ID NO: 275248 - DNA, 553 bp, Homo sapiens
tggtttacaacactttgccactcaccaagtttcacctcaaggatcacttgtgtttatgagtgagctgagttctaactacatcttccactgtagcaaattcttataattattttatgttgctttggcatccattttattttattttatttttattttgaaacaggttctcactcgtcacccaggctggagtgcagtggcgtratctcagttcactgcaacctccacctcctgggtttaagcaattctcctgcttcagcctcccaagtagctgggactacaggcacatgccaccatgcctggctaatttttgtattttttgtagtagagatggggtttcaccatgttggctcaaactcctgacctcaagtgatctgcccaccttagcctcccaaagttctgggattataggcatcagccactgtgctcagcttttggcattcattttaaacataagttgaatttctttcatatcagaaggaagggtaagtcatccctgacacagtttccagttcttcacctcttccctgttcctcaatgtgattgttccagacat

SEQ ID NO: 275249 - DNA, 566 bp, Homo sapiens
aaaaaatgcaaatttgatcttgtcacaacctcagtatagagccttgaaatgaatggcccccattctttataggatataagtcaagtttctcagcacgacaaaaaggacttccatgggctggccattaacagcttcccctcctgccacttgccatgtcacaaactgcaattaagcaagcctgaacaatttgcagttacacttgttaggcaacttcatactttatcttccctcatgtacttccctctkcctggaatgtgcgccctctcttcaaggagccacagttcaaaaatccattgctttacctccctgactttgtgccacccctcactcctctcccgctgaatgagagcaagtgccctctaccttacgtgcagaggaaccagtcatgcctctaaagcacccatcgcaccccatttaaatgtctattcactcatctgttttcctcattagactgtaaatttctaaaagaagctgccttctccactcacagtgcctggtatgcaataaatgttcattgaactgaactgaattttattcattaagtgcctcaatttctgctttatact

SEQ ID NO: 275250 - DNA, 563 bp, Homo sapiens
ttccaaatgtgacactaccgaaaaagtgaaaagagagccaacagaatggaagtcatacacaagggatttgtatccagcataaataatcttaaaattcagcaacaaaaatacaaataaaggtcaggtgcatcacatctagaataccagcaccttgggaggccaaggcaggagaattgcttgaagccaagagttcaagaccagcytagggaaaatagcaagaccctgtctctacaaaaaatttaaaaattagctgggcatggtggcacatacctgtagtcccagctactcacagtaggctgatgtgggaggatcatttgagcccaagagttcaaggatgcagtgagctttgatggtgccactgcactccagcctgggcaacagagcaagatcccaatgaagtaagtaaataagtaagtaaataaataggcaaagacatgaaatgatgtccagtatcattaatcattataaaaatgcaaaactacaagatactatttcaaatccattagaatggctacaattaaaagacaataacaagtgttaacaaggatatggagaaactggag

SEQ ID NO: 275251 - DNA, 617 bp, Homo sapiens
ctgattaaggatacttcatgcagtctcaaaatttaactactttaagatgatttttaaaatcgtgtcctatctggacagctaaggatcacatcttctgctgtgcaggtaacattcaagtatctacattaagagtttatgtacatgtttttttattcattccttctttgttttttgttgttgttgatgtttgctttgttttggtttgggttttggggttttgaattttttttcctaaatgaatacagatatagaggcacctgtggaataaagacaagaggaaattggggacaatgatcrggatgctgtgccatttctctccatgtctatactggagaatgggttcaaattcttccgagagcagtattagggcaaaaggctaaaggaagtatattcatgacaggaggctctgaacacaacatagctacttttttgtccaagtgatcatgtgcaatacagaatcacagagattatttttcctttcctctaacactactgtgaacatacttttggcctacagtaggtagagaacagaatacccatatgagtagcaccctcaaaaaaagctgttgggagaaatgcttctccctggtggcttgcagttaggaggcttacacaag

SEQ ID NO: 275252 - DNA, 1154 bp, Homo sapiens
aagtaagataaaatgtgagcttaggacatatacttcatgccataatatcctccacacttaactacagattggccagaaatctggctctgagcttcctggcaggcaatgcaaagaggaatatgatcagttataagatacagagtctccaaaaggtaaacaaaacaatagtttataagcagcagaactattacaggttytaagaacagagaaaaatcttccatgagtattcatacagaaaataatatataatgaattaaatcctatcctcaataacatccttacaatcaatacaataacatgttttatgggttacgtttatactattcttccacagataaattatgacaaagttcaatatttatctttaaatttcataaagttcaatagcaatcatactcatcacttagtatgtcagattaatgtcactgtaagtttcattgggtgcaatataaaattcagtttgtatttagtgtttagtgtttgtatgttcaaacatttataacaacaaaaaattaaactttactgaaatcttaagggaagaatctaggaggtatgataaactwcattgtaacatcttagtggaacacattattcaccagtttgtgtaaacaaacctactgctctgctagtcatataaaagtatagcacatacaattatgtgcagtacacagtatttgctaatgataaactactaaggtaattgtttatgtatttatcatactatgtttttgatcattcttttagagtatactccttctatttatttttttwaaaaatttaatgtaaatagcctcagacaggcctttcaggagctattctggaagaaggcattgttatcacaggagatgacagctccctgtgtgttattgcccaaggaccttccagtgagacaaaatatggagatggaagacagtgatactgatgatcctgaccctgtgtaggcctaggctaatgtgtgtgtctgtgtcttagtttttaacaaaaaagttttaaaagtataaaaatagaggagggggcaagatggacaactagatacagccaggaagtgctgctcctacagagaaagacaaggattttgtctaaaccaatgtaatttgaacagatctttggagagaacacaccaaatgtggaaggtgaaaaggcacagacactga

SEQ ID NO: 275253 - DNA, 1169 bp, Homo sapiens
aacttgacacttgatcaactggacctaatagacatttacagaataytccacccaacaaccacagaatatacatttttctcatctgcacatggaacatattctaagattgacacatgctcagtcataaagcaagtctcaaaaaattcaaaaaaattaaaatcataccaggaacactctgtggaccacggtgaaaaaaaaaacagaaatcaatatcaagaagatctctcaaaactacacaaatacatggaaattaaacaacttacttctaaataactcctgagtgaacattgaaattaaggcagacatttttaaattccttgaatttaatgataatagacacacagcttatcaaaatctctgggatgcagctaaagtaatgttaagaggaaagttttatagccctaaacaccttcatcaagaagttagaaagatctcatattaacaatctaactttctgcctaaaggcactacaaaaaaacaaaaagagagaaaaatgaaacaggacaaaccaactccaaagctagtagaagaaaagaagaaaaaactaaaatttgagaacttaatgaaactgacatgcaaaaatcwaacttgacacttgatcaactggacctaatagacatttacagaatattccacccaacaaccacagaatatacatttttctcatctgcacatggaacatattctaagattgacacatgctcagtcataaagcaagtctcaaaaaattcaaaaaaattaaaatcataccaggaacactctgtggaccacggtgaaaaaaaaaacagaaatcaatatcaagaagatctctcaaaactacacaaatacatggaaattaaacaacttacttctaaataactcctgagtgaacattgaaattaaggcagacatttttaaattccttgaawttaatgataatagacacacagcttatcaaaatctctgggatgcagctaaagtaatgttaagaggaaagttttatagccctaaacaccttcatcaagaagttagaaagatctcatattaacaatctaactttctgcctaaaggcactacaaaaaaacaaaaagagagaaaaatgaaacaggacaaaccaactccaaagctagtagaagaaaagaagaaaaaactaaaatttgagaacttaatgaaactgacatgcaaaaatc

SEQ ID NO: 275254 - DNA, 584 bp, Homo sapiens
aacttgacacttgatcaactggacctaatagacatttacagaatattccacccaacaaccacagaatatacatttttctcatctgcacatggaacatattctaagattgacacatgctcagtcataaagcaagtctcaaaaaattcaaaaaaattaaaatcataccaggaacactctgtggaccacggtgaaaaaaaaaacagaaatcaatatcaagaagatctctcaaaactacacaaatacatggaaattaaacaacttacttctaaataactcctgagtgaacattgaaattaaggcagacatttttaaattccttgaatttaatgataatagacacacagcttatcaaaatctctgggatgcagctaaagtaatgttaagaggaaagttttatagccctaaacaccttcatcaagaagttagaaagatctcatattaacaatctaactttstgcctaaaggcactacaaaaaaacaaaaagagagaaaaatgaaacaggacaaaccaactccaaagctagtagaagaaaagaagaaaaaactaaaatttgagaacttaatgaaactgacatgcaaaaatc

SEQ ID NO: 275255 - DNA, 617 bp, Homo sapiens
catgttaactagtggggtatgtacatttattgtaatcgttgtttagttgggttttttgtttttgcttcttgtttgtttgggttgggtggggagaaagactttcctagcatctgaaattgttttacttaaatatctacctacatcttttcttgtaaaacctatctttattctcttatactgggctctgctctttattgtacagctcatagtcacttcctgcttcagcctccaaactgagccttctaaatttgaggacatacctgcccaggggatgccaacccattttggtcagtttctacagcagcataaattagggttctcggagccattcagaaattgagccctcatctggcaaatacaatcctcccagggaaactcagaaacaaaaataatatgcacmgaagaaaaatatgtaaaatattttttaaacatacatttggacaaggattggaagatatatgtaaaattaaaatatcaagatggtggagttatggatgtacttctttttgaaaatgtggatattatatttttaaggttaaaaaaatgaaacatgttaagaaatgttaataacttttaacaagaatatcctgaaaggataaattttgattatgaagtag

SEQ ID NO: 275256 - DNA, 476 bp, Homo sapiens
acatatgctgcagatatttaaaagagaagaaaaatgtgaataattttctgccaaaaaatctgaaaatttggaggaaatgagcaatatcctagaaaaatagaacttatcaacatttgctcaaaaataagcagaaaacgtggatagtcctgtacaattaaggtaattgaagcaatagtttaaaatccttctaaaaataaaactctagctccaggtaattttatcagcagatttcaccaaatgttcagaaaacgaaaacaaacccaatcttttacaactatgaaaaaatgaaacactccactcattttatgatgctaccattatactgcataccaaatattgacaagaatgayaggagaaaagaaaagaaaataggccaatttttcttatgcaaagatatgcaaatgagcattagtcccctaatatatatatgagataatgcatcacaccaattggatttatttcatgagagtaatgtt

SEQ ID NO: 275257 - DNA, 607 bp, Homo sapiens
tatgacatataaaattctagagttaatttcatcccaaacccttcagatgttccatcaatggttgaaacagcaacaacaatgggttccttcactcttcaggactacaggaaaaaggcagcaaacataaggttcttgacatatccttgtaagtgactgagcaaaaaattttgaaaatattcaatttttctcattgcactgtatgtcacttgttaaatgaaaagtcaaaatgtctcttcattcataatgctatattaaatcatatattaaaataaacttyataacactacttaataatacaatatccatttaaaatccatatcttattcacgttatcttttatagacccaaaatgacagaatgctttttaaaaaataattcatagagcattcttcagaaataaggtcttgggtccaaaaaagttgagaacaaagcaagatgactagagtaccagcaaccgacacccagagttgttggaaaacaaaaatcaacaatgtaaaacaagatgaacaaaaatggttggcttctcaattaaccatctaaattcaaatagatactcccactattcatccctcactaagttcctgacagattggctttaaaagctctt

SEQ ID NO: 275258 - DNA, 607 bp, Homo sapiens
tatgacatataaaattctagagttaatttcatcccaaacccttcagatgttccatcaatggttgaaacagcaacaacaatgggttccttcactcttcaggactacaggaaaaaggcagcaaacataaggttcttgacatatccttgtaagtgactgagcaaaaaattttgaaaatattcaatttttctcattgcactgtatgtcacttgttaaatgaaaagtcaaaatgtctcttcattcataatgctatattaaatcatatattaaaataaacttcataacactacttaataatacaatatccatttaaaatccatatcttattcacgttatcttttatagacccaaaatgacagaatgctttttaaaaaataattcatagagcattcttcagaaataaggtcttgggtccaaaaaagttgagaacaaagcaagatgactagagtaccagcaaccgacacccagagttgttggaaaacaaaaatcaacaatgtaaaacaagatgaacaaaaatggttggcttctcaattaaccatctaaattcaaatagatactcccactattcatccctcactragttcctgacagattggctttaaaagctctt

SEQ ID NO: 275259 - DNA, 555 bp, Homo sapiens
ggagaacccaaaattttatagaaatactatataagtatctggctaaccaaggagccatatatgtacaggccagactcaaggcggcctgaaattagatctgagtcaccatctattgcaggcataacagaggctgcagcttgagtctaaccatgttaaatgcctgcttacaaaggaaaatattcaacatactttggatcaagataacagaaaccagaatcttacaacacagcattcaaaatgttgaacatataatctaaaattaatcctctaaaaaaaggctaagaaaatctgattcattctcaaagaaaaagacaatcaacagatgctatatagtgttctstgtgtgtgtgtgtgtgtgtgtgtatacacacatatatataggtatatattctttcctctagcaatatagtgtacacacacacagagagagagagagagcgtgagtgcgagagcactagaaagaattactggtggcaagttgaggaatggcgttgcaagggtccattcccaggaagcataagatagaaaagaaaagtgagacacaggcaactcaat

SEQ ID NO: 275260 - DNA, 646 bp, Homo sapiens
ttctgaagtatacaaataagagacagacattatctaggatgatgtttattactgcaaacaaacatcacatgtaattgttgataaagcccccaaaacggaagtataaaactatctccggaaataagcatttgctgggtccacacatctttcctaaataccttccctctgtaaggcactgtggtataggaaacattggccaatgattgtttcagacaaaattattaaagtttcgttactgctcttagcatttatttagaaatgaaaacaatgcttgtgcaagatctaccttatttaacgcaattaactgcaggggtgtcagagacagagaccctccaacccactacaaccctgtcacttcactaaggaatccgttataarcctggaggacacgaactaaactgaaaggttataaaagctttaaaaggtatatttaccacgacttaaggacacctaagtacctaacataatattttttctgtatcatgctattcttcacatgcctctattttagaggtaagtaaacattttaagaggcaggaacttgagaaaaaacaatttagtactatctcattttttgctgccttagatgttgttacaaatgtctttagtctatttttgcctctgctatatcttcagtacctagaac

SEQ ID NO: 275261 - DNA, 420 bp, Homo sapiens
tagttcctacctgttccataaagtgtctgactctggttgtacttctaacctgacaatacaattatcatgtattgtttatgaaataaacatgtattaagcactggctaagaaaggaagaagattaaacaaatagrtaagtacataaattacagtaaacagatatgggctaaagcatgagcaaagttaaatggacgcaggacaaaaaaaaaaaaaaaaaagccaactatggggccaacttcacttgggaggtgatatccaagctgggtactaaagcataagcattattttccaagcccagaaaaaagaagagtaagcgaaattggaaggtgaaatacagtcacgtttcacttaatgacagggataccttctgagaaatgtatcattggtgatttcatcattgtgtgaacatcattgagtgta

SEQ ID NO: 275262 - DNA, 420 bp, Homo sapiens
tagttcctacctgttccataaagtgtctgactctggttgtacttctaacctgacaatacaattatcatgtattgtttatgaaataaacatgtattaagcactggctaagaaaggaagaagattaaacaaatagataagtacataaattacagtaaacagatatgggytaaagcatgagcaaagttaaatggacgcaggacaaaaaaaaaaaaaaaaaagccaactatggggccaacttcacttgggaggtgatatccaagctgggtactaaagcataagcattattttccaagcccagaaaaaagaagagtaagcgaaattggaaggtgaaatacagtcacgtttcacttaatgacagggataccttctgagaaatgtatcattggtgatttcatcattgtgtgaacatcattgagtgta

SEQ ID NO: 275263 - DNA, 420 bp, Homo sapiens
tagttcctacctgttccataaagtgtctgactctggttgtacttctaacctgacaatacaattatcatgtattgtttatgaaataaacatgtattaagcactggctaagaaaggaagaagattaaacaaatagataagtacataaattacagtaaacagatatgggctaaagcatgagcaaagttaaatggacgcaggacaaaaaaaaaaaaaaaaaagccaactatggrgccaacttcacttgggaggtgatatccaagctgggtactaaagcataagcattattttccaagcccagaaaaaagaagagtaagcgaaattggaaggtgaaatacagtcacgtttcacttaatgacagggataccttctgagaaatgtatcattggtgatttcatcattgtgtgaacatcattgagtgta

SEQ ID NO: 275264 - DNA, 574 bp, Homo sapiens
taggcaattataacatgatggtaaatatgtgtatctaaacatatttaacacagaaaaggtacagagaatatacggtgttataatcttataggaccacagtcattgtatgtgtggtccattgttaaccaaaacatcatcatgcagctcccaactgtaactgtattttcctcttctctgtttcttaaaccaggaagatgagttttggaaaccaaaggaattgagccatgtgatcttatttaatctttctgatcatttttcttgtttataaaatgaaaacaatgccaggttgtggtaaaaattaattatatratgcacactgaaagactagttaggcattcaaaatttttttttcccttttctcctctaaaattataaactcagtggaggcaagaactgagttttttgtttgttttactttttttttttttttttttttttgagacagagtttcactcttgttgcccaggctggagtgcaatggtgtgatctcggctcactgcaacctctgcctcctgggttcaggcggttctcctgcctcagcctccctagtacctgggattacaggtatgcgcca

SEQ ID NO: 275265 - DNA, 552 bp, Homo sapiens
tacctaacagcctggaccttttctcctttaatgaaccatcatcagtttctgttgcttgcaaccaasaacattgtctttaggattaaagtgttgtgaaattcttgtctttccagaaagttagagatattgattaacttatacttcaaaagaggtgaggagggtcctacctaatgagagccatcagagatctttttaaaccagcaacatccaagaaaagagtcaaaacataagaaaaaacaaccctgagaagaaccataagattttgaaaaaattgcctccaatctgatagcacatatgatcagtgtgtagatcagaaccagtgatgggtgtacatttcacacttaaatttaatccatatttatggcatacttatatggaccaggcactgtaactatactatacactttaacacaatcatcttatttaaatcctcacaacaatgctgtgatacaagtaattttacttcatttttccagataaagaaaactgagattcaaagaagctttaaactgcatagtcaagatgatacagctcatcaatagtaaagcttag

SEQ ID NO: 275266 - DNA, 619 bp, Homo sapiens
atggtgctggaaaactagataatcatgcaaaagaatgaaactagaacactatctctcaccatatacaaaaatcaactcaagatggattaaagatttaaaagtaaaacccaaaactgtaaaactacaagaagaaaatttacggaaaactcttcaggacattggtgtaggcaaagattttatggctgagacctaaaaagcacaggcaacaaaaacaaaaatagacaaatgggactatattaaatttaacagyttctgcataacaaaagaaacaatcaaaggagtgaagaggcaatttcttgattggaataaaatatttacaaactattcatccaacaagggactaatatccagaatatgcaatcaacagtaaaatattaatagcatgtaaaaagagtcaaaagacgtacatagaaattttcaaaagacgacatacaaatggccaacaggtatacagaagaaaatgctcataactaatcatcagggaaatacaaatcaaaaccacaatgaagtatcatcttactccagttggaatgtctattaattaaaaaaagcaagaaatagcagatgttagtgaggatgtggagaaaagggaactctcacactgttggttgtaatgtaa

SEQ ID NO: 275267 - DNA, 607 bp, Homo sapiens
ggctattcacaagtgggatcatggtcctccaatatttttgtgacagctactaaaacccagaattaaaaaagaactaccctgagagtcaggccttcaaactgatgttttacaattttatttcaaggttttagtaaataagaaagcatattgaatgatgttactatttcttgcaaaagcaagatgcttttttgcacctttgtaaatgtacaaataaatttgtaatactgcaaaatttgctggaaaatgtggktgatttcacctttattcttttcaatgttctcttggagcaggtgtgtactcactaagtatggctgtattgggatgggcgctccagaatactttcagagggaggtcagaaacacctggagtcagctccttccccagctttcacctgagcctgccaccacccccaccctctgcccaaaagaccagacccttctcctggcagcagccagagtgcttatttcccaaccagggcaggtcacagccctcctcaaagacctccaaccacacccctctaaccagacttcacagtcccccatgcacaccccactctcctgacccctcaggctttccccactctgcccacccacccccacccctctga

SEQ ID NO: 275268 - DNA, 568 bp, Homo sapiens
cctgcatctcaggactcaggctgtgggatatggggcttgcagaacagtgcaggagcccagagctggggctcaccctctggctggcccctgtgtcccccctccctgggggccaggacccctctcctccagaagcaggctgcccacagaagggtgctgcccctgtggttggaagcccagaaygttcgcctgagccacttctgagaggacaatcatccccagccagtgtttccccacccaggaggctcaggatcaagtagagggacatcaagcggccagccttgaagttctgtctccagcctggccctccctggagggctagggacacagcccccagtgggaatctgaagcccctgatggagacatccttgccctgtgtgagcgcagggcctcccccctccccctgctcccctcccgccaagtttgtctctttgtccttcttccctttccctccccaccaccttcatctgggcctctgcctctgcctccctctgacacgcctgctcctctttctgtctctcagggagcctctgtctccccccgtcaccctccctttctgcttcttctctcc

SEQ ID NO: 275269 - DNA, 568 bp, Homo sapiens
cctgcatctcaggactcaggctgtgggatatggggcttgcagaacagtgcaggagcccagagctggggctcaccctctggctggcccctgtgtcccccctccctgggggccaggacccctctcctccagaagcaggctgcccacagaagggtgctgcccctgtggttggaagcccagaatgttcgcctgagccacttctgagaggacaatcatccccagccagtgtttccccacccaggaggctcaggatcaagtagagggacatcaagcggccagccttgaagttctgtctccagcctggccctccctggagggctagggacacagcccccagtgggaatctgaagcccctgatggagacatccttgccctgtgtgagcgcagggcctcccccctccccctgctcccctcccgccaagtttgtctctttgtccttcttccctttccctccccaccaccttcatctgggcctctgcctctgcctccctctgacacscctgctcctctttctgtctctcagggagcctctgtctccccccgtcaccctccctttctgcttcttctctcc

SEQ ID NO: 275270 - DNA, 1111 bp, Homo sapiens
gctctccccaagtagttgatgtcttggctgcgattgccggcaatgaaatattgtgctctctgatcgcttaatgcacggagctccgcagccccctccccttgcccgtggcagccctcccctccccctcctcccacccctcccccattccctggcagatctgcctccttgctcccagaagggccctgaatgtttaatggaggacacagctgatacccacgtccaccctggcactgaccccaggaggggccctgaaagccacagctggccaggacacctcagtccacagcctgggcaggagaggagagcccagccaggagctgggaaccctgcccatgcccagcaattgtggtgcccagggctctctccckgcagagaaagagctggctctgggggtctttgaggtgtgacagcatcctcagcccgagaaggaaatgaggcccatgtgtcactgatagggatcccctgcccttggagctctgagaggctggtgacacagccgaggctcctggagactwcagcttgattccttagaaccccttgatggactgtggtaaagtatagcggttatgactttgggctctgatgtcaagcagtttaggttcaagtcctacctctgacacttcctggtcatgactttggaaaagccccttcattgtaagctatggtctcctcaccctgcaaagtgggaggataataatggtacctgccccttggtaggtgttgcaaggattcagtgagatgcaacagtgcwggtacaaggtgagtcctgatggcgatgatggtggtgacggttttgttgaaagggatgatgatgatgatgatgatgatggaggtggtgatgatgttggggaattaggcgaaaaggatgatctagataaggtgatggtgctgatggtggtagaaaaggggaggatgacaaggatggggtgctgcaattcaggtctagtgaagaaagatagcaaggcacataggaagcttggtgatgcaggggtatgaagccaaagggtgcttctctgtggatcctgtgcctaccccacctactgttaacccccttgcctccagccagcccaggagaaggcagaggtttctcttctttcctgcctgaccctgg

SEQ ID NO: 275271 - DNA, 1811 bp, Homo sapiens
ggtggggagggagcgaggagagtgattaaaaagtcaatgtcttaagatttttaatagaaatgtatctaaatgaatttttagagccacattatgacatattcaatattaaatccatgttacagaggcaggggcgggcagatcacttgaggtcaggagttcgagaccagcctggccaacatggtgaaaccccgtttctactaaaaataataataaaaaaagtagctgggtgtggtggcaggcgcctgtagtcccagctactcaggaggctgaggcaggagaattgcttgaacccaggaggcagaggttgcagtgagccgagatcgtgtcactgcactccagcctgggcaacagagcaagactycatctcaaccaggggagaaaaaaaaaaaaagaagaagaaaaagcacacaagtgaaaaacatgacaataaccatttttagaaacctaaacataactttgaaatgatacgccaacctgtttctcactcctctggagataggaaaagatgagatatttttatctttattaagagaaataaaaatgagatgtaatgaaccttctggaccaggagtgtccaataggactgtctgtaataaaatwattaatgatccaactcatgcccctttcactgacatttattttagagtgatggtattctttaaatgttatacaattagttctaatcagttctttctacaaatttgaaaactctgaattctctgctgatacaaattatccaataaaaatctctatacatgtacaatcatggtgttatgttaagacatacatacatgctaacaatagttatataattattttaaatattcaacaacatgctttgaaatatcaaagattgtttacttgatagcactcaaaaaattcaaataattatatactatttcagcaatacaattttgaagcagacagtgatcttggaagtcatgtgatccagaccttacwgtataaaaactaaaaaacttgtatctaggaatgttattgacttggccatggtcataaagctagtaacactcactactaaagttcatagataaatgtaagtttttgctgcatttgctttgaggaaagaaaactgtacatttcaaatggcatatatggtttatcaatatttgctttaggttgaaattcattaatttttaaaaawttacttaattcctacggcaaacttgaacatggcccttgctccttttgtagctagagattcttagacaaagtgaggttccatgacctgtacaagaccccttagctaccaagcattagaacgaaaatttcagataagttctgcctgttctagtgtcaaatataacattctttaattgcaccaaccagttcttcattatttataagttgcaggtagtgtgtcaccctgataatttctttcctaagttattttcctgcttgcaaaagtttctctttatatattctcagccccaattcttttttttttwaaaaaggtaatccaacataagagagaagaaaaattgacagaggataacataaatgaatgtaaacgaagaaatcaggctaggagctatttggctgggattcctgcttgtttgctggtaactcacctttgtaaagtggccatatgttctctccccactagctggcaataacaaggggaacgtgctgctcccagccctcttagctggcctgcttctcatttcggtcctcttcagtctagaggcatcacttactgaacagctgtaatcaggctattaaaagcggtacatataatttaaaaaacaaatcccagacacatgtaactactgtattgctggctcatctgtcta

SEQ ID NO: 275272 - DNA, 649 bp, Homo sapiens
ttacttaattcctacggcaaacttgaacatggcccttgctccttttgtagctagagattcttagacaaagtgaggttccatgacctgtacaagaccccttagctaccaagcattagaacgaaaatttcagataagttctgcctgttctagtgtcaaatataacattctttaattgcaccaaccagttcttcattatttataagttgcaggtagtgtgtcaccctgataatttctttcctaagttattttcctgcttgcaaaagtttctctttatatattctcagccccaattcttttttttttaaaaaaggtaatccaacataagagagaagaaaaattgacagaggrtaacataaatgaatgtaaacgaagaaatcaggctaggagctatttggctgggattcctgcttgtttgctggtaactcacctttgtaaagtggccatatgttctctccccactagctggcaataacaaggggaacgtgctgctcccagccctcttagctggcctgcttctcatttcggtcctcttcagtctagaggcatcacttactgaacagctgtaatcaggctattaaaagcggtacatataatttaaaaaacaaatcccagacacatgtaactactgtattgctggctcatctgtcta

SEQ ID NO: 275273 - DNA, 598 bp, Homo sapiens
aagaacactaaataaccaactctactaacttcacaattatctaaaactttgagaatrtctttttttccccttttcaaatacaacttctgatagatttctgtaaaaacataccaaatcaacccactttctaccttttatcggttacagattcccattcagaagcaaaaaggctctccatggtaagcaaatatgtaattaagatttactttggttcagtgaaaatatgccttctttctaaagaagtccccaaggctaggttcaaagtaggcaaggttagatatggtggatttatcggtaaatttagcccaatgtaagaggcatgtcttcaaacctattaaagatggtgcttatgtgatagtctgtgatgtcttccgcctaaggatttgggcaatccgtgcactttacttcagccttgaaagtggatttataagagagaaaaggaaagtgctgggattttttgttttcttggtttaacatcctccctttgaccacataatagtccccaaactcacacaagcagttccatatggagatgaggaatgtctagccaaaacaagttgttcagcttattagccttgggctgaataagttactcaga

SEQ ID NO: 275274 - DNA, 378 bp, Homo sapiens
tgattttaattgggattgcattgaattgctagattaaaatgaaaataatgaatgtttttaaaatattgactctccaaatacatgaacatggtttatgtctccacttatttatcttttccttgatttatccaaattttttagttttcagcatataagtgatgtacatatttkgttggattcatcccttaatatttttatgatttgaagccattgtaaaaggtattatttctttcaacttcagttactcatgtctagaatgcagatattcagctaatgcatgtgtattggtcttgtatactgtgaccttgctaaatctactcactttttttgaatttttaaaaattttcttggggatatttatcttagataatcatgtta

SEQ ID NO: 275275 - DNA, 459 bp, Homo sapiens
tttcatgggattcactaactttatcatctatcttattgcaaagtaagccgcttagaataacaatgtatgctccaaaccagaaacaacaaataatattgtttcttttatagccatatcccaagcatctggaaaccaagcagttgacataagagtgaaaaaatgaacagaactatcatgccaaaatatttttgtaatgcgtaccttctctgctcaaatatttcagagccactttccaaatttacttgcttgttcaagtaataacccattaataactttttactccatctttttaacttttggttctattggtttgaaggttttgtacctgtgagatttrtgcttccaagatggagcaatgccaacttaatgataaattgagactgcagtttgggggtctttgtgccaaaaggtaaatggcaaaaattaatatttacaatattggctgggggataatcctga

SEQ ID NO: 275276 - DNA, 459 bp, Homo sapiens
tttcatgggattcactaactttatcatctatcttattgcaaagtaagccgcttagaataacaatgtatgctccaaaccagaaacaacaaataatattgtttcttttatagccatatcccaagcatctggaaaccaagcagttgacataagagtgaaaaaatgaacagaactatcatgccaaaatatttttgtaatgcgtaccttctctgctcaaatatttcagagccactttccaaatttacttgcttgttcaagtaataacccattaataactttttactccatctttttaacttttggttctattggtttgaaggttttgtacctgtgagatttgtgyttccaagatggagcaatgccaacttaatgataaattgagactgcagtttgggggtctttgtgccaaaaggtaaatggcaaaaattaatatttacaatattggctgggggataatcctga

SEQ ID NO: 275277 - DNA, 542 bp, Homo sapiens
aaagcattcttgttcccaggtagtttctatcgcacaatcacatttattttgctgtatggtagttgcttttacctatcactcctgtggttgcaaggataaaataagatattgtatacaaagagcctggcacacagattctaattcacactcagagctcaataaatggtagctaatatttaaattctgtatgttcagtagatgttattttccagggtgaatttccttctcagaaattgaaagtatgcatttgcatttcaaaaatatgctttgcrtttggaatcacactttgctgccaccttcatgactgacccttcctcatctctgttttaagtcctatttattcaaggctttcctatagttcagcagtgttagggactgaagctataaagataaataataataatcctggtcctcaagaagctcactgtcttgttgatggtataagtagagatataatacagcataaggtatgattacaaggttattcatcttaaaacatgagctgatgctttggcttttaaaatcaaatgaacccacaagca

SEQ ID NO: 275278 - DNA, 485 bp, Homo sapiens
  misc_feature (1)...(485): n = A,T,C or G
ttcagaaggtatacacaaaatgactatgaaaatcacaaaataccaatgaggacatctgtgggatttgagatattggtttcttctcctattggttgtagagaagaattgggagtgggattctgtgtgccatgcctgcattcagagaaggacgtaatggcttattaacatctacaattaaagtttattgttgagaactgaatagtttaagaaaactgagattttacccaacttactaggctcaatacagtttattytaaaagcataaaaaaattatttctgtcatcctcattactgttttgtatctggtcagagaaatctcagtgactctctgggcctcaggctgaaaataagtgtttcttcatactctgaccgccagattccaagtagacaggcaaggtcattatttggcacatgaaatactttgtcaacctgtgtatgtgtgaaagtgtatgtgaatatgtatgtgtgnnnnnnnnnnnnnnnnn

SEQ ID NO: 275279 - DNA, 543 bp, Homo sapiens
ctaactcaaggtttatcaattttattgatcctacagttagagattttggttttrttaattttctctattgttattttctatttgacttcttatttagcctttatgatttcttttttcttcttacttcagcttaattttctttctttttccctgttttcttatagtatatgtagtcattgacttgagctctttcttcttttagaacgtaggcatttagtgctatacattccccttcccaatgctgcttaaatgacacctacaaattttgataaaatcatgctttcatttttattccatttaaaatactttctaatttgaagcaattcttgtgctacttttttttgtccagacttagctaataaggtctggaccagcaaggagtgaggatattccgggtgtgttggttcatgtccacaatcccagcattttgggaggctaagcaggtgaatcacttgaggtcaggagttcgagaccagcctggccaacatggtgatacaccatctctacgaaaactacaaaaattagctgggcatggtggtgagt

SEQ ID NO: 275280 - DNA, 649 bp, Homo sapiens
ttacttaattcctacggcaaacttgaacatggcccttgctccttttgtagctagagattcttagacaaagtgaggttccatgacctgtacaagaccccttagctaccaagcattagaacgaaaatttcagataagttctgcctgttctagtgtcaaatataacattctttaattgcaccaaccagttcttcattatttataagttgcaggtagtgtgtcaccctgataatttctttcctaagttattttcctgcttgcaaaagtttctctttatatattctcagccccaattcttttttttttaaaaaaggtaatccaacataagagagaagaaaaattgacagaggataacataaatgaatgtaaacgaagaaatcaggctaggagctatttggctgggattcctgcttgtttgctggtaactcacctttgtaaagtggccatatgttctctccccactagctggcaataacaaggggaacgtgctgctcccagccctcttagctggcctgcttctcatttcggtcctcttcagtctagaggcatcacttactgaacagctgtaatcaggctattaaaagyggtacatataatttaaaaaacaaatcccagacacatgtaactactgtattgctggctcatctgtcta

SEQ ID NO: 275281 - DNA, 543 bp, Homo sapiens
ctaactcaaggtttatcaattttattgatcctacagttagagattttggttttattaattttctctattgttattttctatttgacttcttatttagcctttatgatttcttttttcttcttacttcagcttaattttctttctttttccctgttttcttatagtatatgtagtcattgacttgagctctttcttcttttagaacgtaggcatttagtgctatacattccccttcccaatgctgcttaaatgacacctacaaattttgataaaatcatgctttcatttttattccatttaaaatactttctaatttgaagcaattcttgtgctacttttttttgtccagacttagctaataaggtctggaccagcaaggagtgaggatattccgggtgtgktggttcatgtccacaatcccagcattttgggaggctaagcaggtgaatcacttgaggtcaggagttcgagaccagcctggccaacatggtgatacaccatctctacgaaaactacaaaaattagctgggcatggtggtgagt

SEQ ID NO: 275282 - DNA, 1151 bp, Homo sapiens
ctaactcaaggtttatcaattttattgatcctacagttagagattttggttttattaattttctctattgttattttctatttgacttcttatttagcctttatgatttcttttttcttcttacttcagcttaattttctttctttttccctgttttcttatagtatatgtagtcattgacttgagctctttcttcttttagaacgtaggcatttagtgctatacattccccttcccaatgctgcttaaatgacacctacaaattttgataaaatcatgctttcatttttattccatttaaaatactttctaatttgaagcaattcttgtgctacttttttttgtccagacttagctaataaggtctggaccagcaaggagtgaggatattccgggtgtgttggttcatgyccacaatcccagcattttgggaggctaagcaggtgaatcacttgaggtcaggagttcgagaccagcctggccaacatggtgatacaccatctctacgaaaactacaaaaattagctgggcatggtggtgagtwctacttttttttgtccagacttagctaataaggtctggaccagcaaggagtgaggatattccgggtgtgttggttcatgtccacaatcccagcattttgggaggctaagcaggtgaatcacttgaggtcaggagttcgagaccagcctggccaacatggtgawacaccatctctacgaaaactacaaaaattagctgggcatggtggtgagtggtgagtaatcccagttacttgggaagctgaggcaggagaattgctggaacccaggaggcagagattgcagtgagccgagatcacaccactgcactccagactgggcaacagagcaagactctgtctcaaaaaaaaaaaaaaaagaaagaaaaagaaagaacacaggacccagcattagtctctctgcctcagcaaagatcacgttgacacaaaccgtagaaccatctgaccatgagggcatgtaggttggataatagaaaagtatagggtgaacatagtggagttaaaacccaggcccttaccctggttgccattttttgagcatcacataagtttcccagatttgagatctcccaacattaaatttaccatcagctcagtaggatggaaattt

SEQ ID NO: 275283 - DNA, 607 bp, Homo sapiens
ctacttttttttgtccagacttagctaataaggtctggaccagcaaggagtgaggatattccgggtgtgttggttcatgtccacaatcccagcattttgggaggctaagcaggtgaatcacttgaggtcaggagttcgagaccagcctggccaacatggtgatmcaccatctctacgaaaactacaaaaattagctgggcatggtggtgagtggtgagtaatcccagttacttgggaagctgaggcaggagaattgctggaacccaggaggcagagattgcagtgagccgagatcacaccactgcactccagactgggcaacagagcaagactctgtctcaaaaaaaaaaaaaaaagaaagaaaaagaaagaacacaggacccagcattagtctctctgcctcagcaaagatcacgttgacacaaaccgtagaaccatctgaccatgagggcatgtaggttggataatagaaaagtatagggtgaacatagtggagttaaaacccaggcccttaccctggttgccattttttgagcatcacataagtttcccagatttgagatctcccaacattaaatttaccatcagctcagtaggatggaaattt

SEQ ID NO: 275284 - DNA, 627 bp, Homo sapiens
tcatctgacatagttcccttatttggttttgaaactgcaaatatgaacttttcatgattttagacycatgtctgtgtgaagctctttcagaagatcgagtatatgttacttttcttctttaaaaaattgtactttccattgctttctgctttagagcagcaaaccaatactgccatccactgtttctttgaataatcttttccccacagttctcaccaagatgttttgaagaaaaacctgacaataaaattaaatcctttgcaaggaaggggagtttgttaattttgagcaagcactgcctcaactatcataaaggaatcaaacatgacttatcttctttttccaaatacctccttggaggagaaacattaaaaaatgtgaccaagaccacgagcagtctgtagagtcaacttttttctgggtagcacaggagggaaaaattacctagttcctctttgctcactggtgaactttggttcattcacccccgggctcagggccctctcttaccccagtcacattctaatgcttcaggaggaaagccagtcttctccaagccagcaaacagggtgcctctgtctgtcttacaatcccatcaaagaggttccagagaggagcacatattcc

SEQ ID NO: 275285 - DNA, 577 bp, Homo sapiens
tatggtcaatatctgtcagagagccttgttcatcagcaaggcaaggaaatactctgtctggtagctaggaatgaaggataaatttaaatggcccagaaggtaacctgatatttgcctagaggtcagaagcrtgactgggattattttcctttttttcatagaaaaaggaaggcagcaatttcttcccaaccatggacattcttcagtccctttctctgcatctttttactttctaacattgacaggttctcatgcattgaaatgttcatcctttgaccttatttcctttaataattagcaccttacttcttttctattttctgctgccaaatacttgaatgagaaatctaaagctactgccttcattttctcatcaacctcctaacccctctgcaatctggcttttatccccacacggatacaactttcttaggcacaagagatcttttttggggcagcagaagtgtgcattgtggataaaaaccttgcacctggcatgagattttaatttaaatccttgcttttttgcttactaggatgttacttaaacataccatgcctcagtttcctcacctga

SEQ ID NO: 275286 - DNA, 577 bp, Homo sapiens
tatggtcaatatctgtcagagagccttgttcatcagcaaggcaaggaaatactctgtctggtagctaggaatgaaggataaatttaaatggcccagaaggtaacctgatatttgcctagaggtcagaagcatgactgggattattttcctttttttcatagaaaaaggaaggcagcaatttcttcccaaccatggacattcttcagtccctttctctgcatctttttactttctaacattgacaggttytcatgcattgaaatgttcatcctttgaccttatttcctttaataattagcaccttacttcttttctattttctgctgccaaatacttgaatgagaaatctaaagctactgccttcattttctcatcaacctcctaacccctctgcaatctggcttttatccccacacggatacaactttcttaggcacaagagatcttttttggggcagcagaagtgtgcattgtggataaaaaccttgcacctggcatgagattttaatttaaatccttgcttttttgcttactaggatgttacttaaacataccatgcctcagtttcctcacctga

SEQ ID NO: 275287 - DNA, 572 bp, Homo sapiens
tatttggaggtagaagtgacggcactaggtgactgaccaaataagggactgaaaggaagccatcactgatgaccacatggtttctagcctttagccactgagagtgctagtatgattgacttacaaagggaaagggagaaatatgtttgaagatttccagttttgtttagacatatcaaatttgaggagcttgaagaagatccatgaaaaataagttgtggtaagtcagatgcatatatacttggaaattagaagagcactgacccagaggagaaacgtattttatccctatcttcactccaaggtatatcaaaatctgtatgagacataaaaaatgaagaggcctgacatttattagcacagctttatgaaaacatcttctacctatcatgtcatttcaaatcccaagatgtagacctaattattattagcttttcagttttagagatggagaaatcatggattatgacagtaagctacaacagcagagyttttctttcaaatatatgcaaacataatcaacagaagaaatacttttttgggaaagataaaattaatggtagtatatcctt

SEQ ID NO: 275288 - DNA, 618 bp, Homo sapiens
tttgtatcctcttcaatatatttcatcagtgttttgtaattttccttgtagaggtcttgcacctacttggttaaatttattcctaggaattttatttttggtagttactgtaaatggaattgccttcttaatttcttttttagctaatttgttgttctttataaaagtgctactgatttttatatattgattttgtatcctgcaaacttgctgaacttatcagttctaagagttttttggtagactcttcaggtttttctatatgtgagattatggcatctgcaaacaggaacaatttgacttccttctttccaattttgatgctcttcatttctttctcttgcctaattgctctggctaggacttctagtgctatgcttagtaagagtgcagagggtaagcatccttgtcttgttccagttcttaaaacatttttggcttttccacatttagaccactgttagctgtgggtttgtcatatctgtcctttattattttatatacagaagaraagtattgagactcttctatatataatttcttgagaatttttatcatgaagggatactgaattttatcaaatgctgcttctgtacctcttgagatgattatatgttt

SEQ ID NO: 275289 - DNA, 1126 bp, Homo sapiens
tatttctctttcatttgctgggtaaaatattcttrgctgccagtagtttttctttcagtacttcaaatacattaaactgtttacttctggtctatgaggtttctgctgataaatcctctattagtctaatggggattcccttatatatgatttgatgttttctcttgctgcttttagaattctttgtcatttacttttgacaatttgactatagtttaccttgagaggacttgtttgggttgaatctatttggaattcttttaaattcctggacttggatgttcatctctctcccaaaatttgtgaagttttcagctgttatttcattaaatatgttttgtacaccttttctcttctccttctagacactcataatatgaatattcattcttttaatggtgtcccataaatcctgagggttttcttcattcttattctttctttttcttttcttttatatttattatttatttattgtctgcctgtgttatttcaaaagacttatcttcaagttctcaaattctttcttctgcttggtctagtctgwaatggccaaatgacgatagaaataaataaataaaatccctttcatacttgtttgaatataagctaacttcttcatgatatattttataaacagacaatcaagttgattagaaatcaggaaacgaagtagtttactgaattttctgattaactgttaaaaacaattcttaatttaaattttggtttcaaattttctaaaacagagccatacttaatttcctttgcaaaaataatagagattcaacatgtgatttttttcatctttggggaatttttttagcacctctaggtcaccatctagttcagtgtaggtagaagagatttaggtgaaactatagtaaactaagaaaatatgccagccatttcaacatatttgtwttattatttttttgtttattttttccctgaaatttggagtaaaatgtaatggtttatttgatgtatcaactcagattctaagtagttaggttttgattatatattttaatatcttaatattatcctaacctactgggtagagtttgtatcactaggcagtatgactagattaagtcagtagcctggcttggtgactgaaact

SEQ ID NO: 275290 - DNA, 615 bp, Homo sapiens
tagttactgtatctagttgctgagatgtttgccccttaagactattctcctgcttggaaattatagctataaactgattaaggaagccaccctctcttctcttaaagataggcttagttattacttcagaaacaatgtgattacacaagattagctagattaatcaatgctttacaaggttagtgagctctcctaaattagatagtgccttagctacttcctcattttgagcactgccaaactaattcaactattgttgctttttttttttcctaaaaatccaattcttattactaaatgtgactcccacccccaccaatccaccttcatttgtgatttgggaaggttgatattttttctgctccgtcctgaaagaactgacaatgtagttattctgttaaaagaatggaccctagtcctcagacctctgggctttcctttggtcttcccccaccccgtacccygccaccagactctcagtcacagtccaccctatagcatgttaatggtactccatctgttgaaccataacagggcaaatgttgatcacccttgaactttaaaaatatcagacactgctagtataataacaaacaaaatgagatacaatttcag

SEQ ID NO: 275291 - DNA, 1148 bp, Homo sapiens
gcagtattggttattgtgaaataagaatggaatgggaaaattctttaaataaaaaaattaataatttaatcaaaagcttcattttgaaaatattttagagcaaacacaagctttgtggaaagatgcttttccagacaattattttgtgtttcttagttttccagtttttaattaagtaagataaacacttaaatccaactgttttgtgcttaatatttcaatggctactttaaacaattcaaatgactagttcaataggaatgatgacttttggacattgaggaaagaagtccatgtgggtgtgcacctgcaggtgcacgtgtgtgtgtattcatgtatgtgtgtgtctgtgtattgtgtagcattcatttaaaaatagaaacattctggagaaatcaatttttttttastgtgcaaaatcatgggagtggggagtacaaggtatttggaaatctttcaggaaacaaacctgtttaatcaaagatcaagcagcttcgagctaaaagaatagcgacattcaatctgttctaattttcagatctcccatcatcaaccgagattttttaaaatgaattaaataagaatataagggaggtaattatwgaaggaactccaatgggaagcaacttttacgtctaggtggatgtagtggatattttgggttatgtacaaagcatttatgtcttgttctcctttcttaatgatacccagattttcatgtggaagtctgcgccttcaatcacagttcttgcacttgaggaaagatagccccacccacctagtawgttgttttcctgtccaaagccatagtttcagtggtgggcataactttacctgtataaagatccaatttagaaattttgctggaaatttgaaaggaaaaccttctctcatatagacttgaatgaagacaaatgcagccttggttgcatcctgtggccacaagtgagccaaccttagatgaagcttacagtgtgaacagtagaactcagagatagcaatgatgtaaacttgaattaaccaatccttaccctacgatttcattttccagttaggtaagtcagtaaagcccctttaatgtttaatccccttattgtctgagtcagaatttttattccttaaagcataaagattccaaactgacacat

SEQ ID NO: 275292 - DNA, 493 bp, Homo sapiens
gtctaaatgttactagttcttggacagactgtgagtctttcatcccagttacatctaataaaaaaatttagtgttaatttgcagggacctaacsttctcacacagctcatgtgactctgctctccacatatcagatgtaaaatgaagaagacacaatatgaaagggctataataaaattatatttaatatgatgaaaaatagagaagccgagagattctttggagggcaagggggaatcagggaaaatatcatttcaacggagtgaatgattaggacatttgcagatggatctggccatgtaaatggaaagaagttgcccacaagcaagggcacagaggttggacatacacagcgcacacaaggagttggtgagttgtctgctgtgagtacagggtagaacgaaaggaagagaatactgggttcaagtgtggaaagacatggttaacatgttcacatgcttggatgttctattgcaagcagagggaaggaaat

SEQ ID NO: 275293 - DNA, 493 bp, Homo sapiens
gtctaaatgttactagttcttggacagactgtgagtctttcatcccagttacatctaataaaaaaatttagtgttaatttgcagggacctaacgttctcacacagctcatgtgactctgctctccamatatcagatgtaaaatgaagaagacacaatatgaaagggctataataaaattatatttaatatgatgaaaaatagagaagccgagagattctttggagggcaagggggaatcagggaaaatatcatttcaacggagtgaatgattaggacatttgcagatggatctggccatgtaaatggaaagaagttgcccacaagcaagggcacagaggttggacatacacagcgcacacaaggagttggtgagttgtctgctgtgagtacagggtagaacgaaaggaagagaatactgggttcaagtgtggaaagacatggttaacatgttcacatgcttggatgttctattgcaagcagagggaaggaaat

SEQ ID NO: 275294 - DNA, 564 bp, Homo sapiens
cctcacaaaactgacatccttagtgatgagaggacatggatgttgatgcagagtattcgtgcatgtagatacaaagtattcaagcatggccacacaggcatgcakacctacacccaaggagggggctatcatggcctcgcctcatcatcatgctttgctagcaggggcattccttagtcctattcttggtccctaaatcagcatctgaaaaaccatcttttttaaaaaaaaacccaagcctctgacttaatatccccaaacattttttctcaaaagaatgaattttcttcttactgctttattgaagcatttcccaaagtatgttccatagaatccaagtgcttgggatgctactgggtattatacattctcttaaatccattactaaataagtctgggaacagttcacttaagcgtgatgttttaagactgctgtattactagaccctagaagctttactatgacaagtgggcattgggatcttctagaatgggacccagtacctgaacttttaacacacacccttacaccagtgacccaaattgccctcccttctccagatg

SEQ ID NO: 275295 - DNA, 603 bp, Homo sapiens
gtgcttgggatgctactgggtattatacattctcttaaatccattactaaataagtctgggaacagttcacttaagcgtgatgttttaagactgctgtattactagaccctagaagctttactatgacaagtgggcattgggatcttctagaatgggacccagtacctgaacttttaacacacacccttacaccagtgacccaaattgccctcccttctccagatgatgatggccatcaaaagtggatcttctttctctacggaatagtttcctcttggatgttccccacatcggaagcacaggaacatatttagaatcaagagcttaatcagtgccaggccacagagtctgtccatcccagcagcattttctgcccatcccactgttcctcaggcctcattttatytgcctggagcaactggtgacaaagtacaactagagagttagctttttattttctctttttaacttttctttgataggattatattatttttataataaaatttcaaagtatttttaaacttaatcttattttagtattaagaactgtctgtccaaataaacctctacataaaatttcaaaaaaaaaaaagaaattc

SEQ ID NO: 275296 - DNA, 573 bp, Homo sapiens
agtaccagctactcgggaggctgaggcaggagaatgacgtgaacccgggaggcggagcttgcagtgagccgagatcgcgtcactgcactscaggctgggcaattgaggaagactccatttcaaaaaaaaagtcccaagttgctgggtccaccttggggaatgtgtttgccttttccagtttagtaattattccatcgttttatcctttatcttacagacaaatttataatttagtttctaaaagcacttctataaaacataagggaatgaaaggttgagaattttaaaaaattgactagcttgctcacaacacacatgctcacaaatatatctagcaaagcaaggaaaaatgcattcggacttgcaattattttgagactaaaatttttgataccttcttccattgctcatttcctgtttcatttttcctctttaaggattgtagttgaacatgattctttacctactgaggtaacacaaacttttatttctcttgggtcagagcccttggtagtcttgcccgtattaggccattgccgttttgataacttttgtcacttgatgggatagtat

SEQ ID NO: 275297 - DNA, 573 bp, Homo sapiens
agtaccagctactcgggaggctgaggcaggagaatgacgtgaacccgggaggcggagcttgcagtgagccgagatcgcgtcactgcactccaggctgggcaattgaggaagactccatttcaaaaaaaaagtcccaagttgctgggtccaccttggggaatgtgtttgccttttccagtttagtaattattccatcgttttatcctttatcttacagacaaatttataatttagtttctaaaagcacttctataaaacataagggaatgaaaggttgagaattttaaaaaattgactagcttgctcacaacacacatgctcacaaatatatctagcaaagcaaggaaaaatgcattcggacttgcaattattttgagactaaaatttttgataccttcttccattgctcatttcctgtttcatttttcctctttaaggattgtagttgaacatgattctttacctactgaggtaacacaaacttttatttctcttgggtcagagcccttggtagtcttgcccgtattrggccattgccgttttgataacttttgtcacttgatgggatagtat

SEQ ID NO: 275298 - DNA, 413 bp, Homo sapiens
gctgcagactccacccagaactgacagccttgggcccaggcttcagaccatccctggcttgaaagtggggcttcaccccrggcctgcccctttccacccagaagcctgtctgcctcctgctgccatcgacatgttgtccatgggacccaggctgtttgtgccaaggggcaactgcaggcccgccccgagccaccctcagccccacgttggccttcctcccgtgctcatctgcgcccaaagtctggagggcgttaagaaggcagggggctggcgtgtcagtgctactctgagcacgcacatacccagctgggttgtgacagcacccaggcttggccacaactttgctttgctctggagcaggcaccgggagtagggagaggccaggcagcgggagcaggcactttcaagcctgc

SEQ ID NO: 275299 - DNA, 579 bp, Homo sapiens
acttgatttcaattgaatagcataactacagtgaacaggagggagtggactaacaygttatttttgcaatggcatttggattaaatatgctcaagctaaagacaaaaagaattgtaaacaaatgttgaattctgattgtagttttcttttcccccacaaaggtaacagtaagcaattttgaaattactttctgtgtaatctaggatttagcaaaataagtatatatgttgtgcataataagaaacagatttcccattgtccaaaagaaatttacagatttggaaagcaggaagactagaataagccctgtggaactggattggaattggagttatcagaatgaactcatgattacacttatatgtatatatatgtatgtatgtgtatgtgttaatatacatgtatatacatatacatgtctattcaatatatgcgtgtataaacacttgtccatatatatccaccaacacacatctgtatttctctatcaatctatgtatattctatccgtttattgatcaattgatctattacacatgtagattgatatagacatagatatagatatgtgtgggacac

SEQ ID NO: 275300 - DNA, 579 bp, Homo sapiens
acttgatttcaattgaatagcataactacagtgaacaggagggagtggactaacatgttatttttgcaatggcatttggattaaatatgctcaagctaaagacaaaaagaattgtaaacaaatgttgaattctgattgtagttttcttttcccccacaaaggtaacagtaagcaattttgaaattactttctgtgtaatctaggatttagcaaaataagtatatatgttgtgcataataagaaacagatttcccattgtccaaaagaaatttacagatttggaaagcaggaagactagaataarccctgtggaactggattggaattggagttatcagaatgaactcatgattacacttatatgtatatatatgtatgtatgtgtatgtgttaatatacatgtatatacatatacatgtctattcaatatatgcgtgtataaacacttgtccatatatatccaccaacacacatctgtatttctctatcaatctatgtatattctatccgtttattgatcaattgatctattacacatgtagattgatatagacatagatatagatatgtgtgggacac

SEQ ID NO: 275301 - DNA, 1029 bp, Homo sapiens
agtaagttactatagctgtctaaatttacatcactaatccatgtcagagccataatcatcaggaaaatctgcagaaagtgagaaagtattgcttccctcgcttgaagctattaccctgagacttactaggtcaccactgctaacaacacttcttcttttgttttgtcactcatatcccaatagagaaagctaccaagggtgaagaaggagatgagaatgagctgatagagaaaggaatttggagatgactgtgtcttgggcacataacttttatctcacacataaattcataatatgggaaaccctgagaaacaggccactttccccttyatagttgcgtgcccttgagcagttatttgacttcccttaagcccacttccatggtctgaaaggatgtttaataacacccatctccccccttcgaagtcataaagtgactaacatttagtaggtgcttagaaaaaaagtgaattttctctttactttccactaccctactccagtaactttatgtwagtaagttactatagctgtctaaatttacatcactaatccatgtcagagccataatcatcaggaaaatctgcagaaagtgagaaagtattgcttccctcgcttgaagctattaccctgagacttactaggtcaccactgctaacaacacttcttcttttgttttgtcactcatatcccaatagagaaagctaccaagggtgaagaaggagatgagaatgagctgatagagaaaggaatttggagatgactgtgtcttgggcacataacttttatctcacacataaattcataatatgggaaaccctgagaaacaggccactttcccctttatagttgcgwgcccttgagcagttatttgacttcccttaagcccacttccatggtctgaaaggatgtttaataacacccatctccccccttcgaagtcataaagtgactaacatttagtaggtgcttagaaaaaaagtgaattttctctttactttccactaccctactccagtaactttatgt

SEQ ID NO: 275302 - DNA, 631 bp, Homo sapiens
atttaggagaaaaacatttttaaaagctatgtaaagagtaagtcctctctctaaaactgctttaagtctgcacaagagaactcataacaaattaaaaatagcatctcaacaaaattaaatatacactatgattttagttactatccaacataaaatttacatggataggaaaatagaagagaakgcaatacattaaactagtaacactaattgctttgaggtggtgaaattatgggcaatttctatagtttttacaataatccacgtttttcttgatcagttaaaaagttaattttaagaatactttaaaaacgcaaaatttcattaagctctaaatagcaaaatactagtgactatgtgaagagtgacttccaaagtaaaaggaatgatcaaaatgatattaggtgaatgagagacttcatagtggaagtcagttcatgcatttgtggggagggcaagcggggagctcaggatgcactcagggtttctggatagagtcactcccctggcctatggtcatacagacacatttatttggactgcacaacatggattaattcgagcaaaacttgtttctttgaatttggtctgacatttaaagcttgtgaaatgccacacacaaaataagaac

SEQ ID NO: 275303 - DNA, 631 bp, Homo sapiens
atttaggagaaaaacatttttaaaagctatgtaaagagtaagtcctctctctaaaactgctttaagtctgcacaagagaactcataacaaattaaaaatagcatctcaacaaaattaaatatacactatgattttagttactatccaacataaaatttacatggataggaaaatagaagagaatgcaatacattaaactagtaacactaattgctttgaggtggtgaaattatgggcaatttctatagtttttacaataatccacgtttttcttgatcagttaaaaagttaattttaagaatactttaaaaaygcaaaatttcattaagctctaaatagcaaaatactagtgactatgtgaagagtgacttccaaagtaaaaggaatgatcaaaatgatattaggtgaatgagagacttcatagtggaagtcagttcatgcatttgtggggagggcaagcggggagctcaggatgcactcagggtttctggatagagtcactcccctggcctatggtcatacagacacatttatttggactgcacaacatggattaattcgagcaaaacttgtttctttgaatttggtctgacatttaaagcttgtgaaatgccacacacaaaataagaac

SEQ ID NO: 275304 - DNA, 474 bp, Homo sapiens
acagacatttttaacattgaaatgatgccttttttgtctttttctttctttcttcaatytcctttgtgggggcccaacatgtttcacacacattaaaaatagaggtttgcttggtttctcttttgttttccagattaaaagcaaaaacaaaaacaaacctcttataatataaaaggatttaaatcaccaccaagatatgaattacatctgcacgatcagcctcctgttgctatgtatttgataaaacagaaactaatttcactacaaatggtggtttctcttcaggtgttatttcactgctcctaaagcagtgtggtatatatgaaagttattttaatttttttgaatctgtttagtcagctctttaaaatctcctctttggtgaatactacatagtgaaatataggatcctttggcttgccttattttcaaacttaaggtggaggagaggggtctgaacatcgtgacaaaaag

SEQ ID NO: 275305 - DNA, 575 bp, Homo sapiens
ctagtcttacctggggaaaaaataaggtaaccttttctgactcatatttgagaaatctccttttcctatataccatagcacaggcatttaagttgaaggaaaaatgtgaaaattctacttgctatttatatttcaatatacaaaatttgtcatctactacaaacaaataaatttcccaacttgtgtctctggaaacttcttattgtttatatagaaaagctatgtaattttaataaatccaaggaaataatgctatttgttgtaacaactatacttacagaattttagcttattaaatgtggaaattgttatatattattgtaaaataatatatagtacttatagaaaataaaaatatattttatgtattcatattatttataartataattgtataaatatattttttactacatatgtgaaataaaaattgaggttttaccataaattttatggaataacaagagcatttgaatggagggtgttctgagtggttggttgaatagaacacttttgtaattagaactgaattctgtattactttagagttacaataatcatagtaaacattttct

SEQ ID NO: 275306 - DNA, 630 bp, Homo sapiens
attacagtgttgttgggggtggcttgtattagttagggttctctcgagaaagaaccaatgggatatatatgtgtgtgtgtatgtttgtgtataygtgtatatgtatatatacacacgtatatctttttgtgtgtatgtgtgcttttgtacacacacacacacatagacacacacatacacagacatatatgtatatatacacccaaagatatttattattaggaactggctcatgtgattctggaggctgagaagtcccacaatgtgccatctgcaagttggatgcccaggaaagtggatggtagagttttagaccaaacccaaaggcccaagaacctggagagccaatgtctaagggcaagagaggatgaatgcattagctcagagagcaaacttgcccttcctctgcattttgttcaggccctcagtggattggataatgtccagctgtattggtgaggacagtcttctttattcagtctaccagttcaaatgctaatcttttctagaaacactcttatgaacatgcccagaaatcaagtttaacagttctttgggcattcagttaagttgatacacaaattttaaccatcacttggggtcagcccacctcagccacccaagtttcaa

SEQ ID NO: 275307 - DNA, 630 bp, Homo sapiens
attacagtgttgttgggggtggcttgtattagttagggttctctcgagaaagaaccaatgggatatatatgtgtgtgtgtatgtttgtgtatatgtgtatatgtatatatacacacgtatatctttttgtgtgtatgtgtgcttttgtacacacacacacacatagacacacacatacacagacatatatgtatatatacacccaaagatatttattattaggaactggctsatgtgattctggaggctgagaagtcccacaatgtgccatctgcaagttggatgcccaggaaagtggatggtagagttttagaccaaacccaaaggcccaagaacctggagagccaatgtctaagggcaagagaggatgaatgcattagctcagagagcaaacttgcccttcctctgcattttgttcaggccctcagtggattggataatgtccagctgtattggtgaggacagtcttctttattcagtctaccagttcaaatgctaatcttttctagaaacactcttatgaacatgcccagaaatcaagtttaacagttctttgggcattcagttaagttgatacacaaattttaaccatcacttggggtcagcccacctcagccacccaagtttcaa

SEQ ID NO: 275308 - DNA, 508 bp, Homo sapiens
ggaggtccggcctggcaagaatgcgcatgccmcccatttacagtcgataaaattgagcctcattaggggattcgccaaggccgctgcgaaataacgagcaggagccctgaaaagtgtcctggttccgaaaacctcttcccacgagagcgcatcgtggactcgaaatgcttcatcacctttattactattgttcctcagtactcattcgagacgcgttccaggcggagggaagcagcccacctgctgacccaagaccaggcgccggcctctccacccggccgcgcccctcgcgccccgcccccggccccgcccccgccgacccggccccactcttcgccccggcctctactcccgccccgccagggctcccgcgccccataaggaccaccctcttccgcctcagccaatcagcaaagcttaggggggcggtgccacaggccccggccctcctatctgggcgccaattagccagcccatccgtcgctcacgaggtcgcgcctcgcacccg

SEQ ID NO: 275309 - DNA, 564 bp, Homo sapiens
cacgaagcagatattacagaattccatggtctcgctggctggatgcttcactggatggtgagtgaaggaaggaattgatcaattactaaatcactgggtcaataaataaaataaccaatcaactaaggaaatacatatgaaaaggacttagcattattatccttttacagttgtcactcggtatatgcaggggatttcaggacccctgtgtagaaccaaagctgggcatactraagtccagcagtcggccctgcagaacctgtgtgtacgagaagttggccctttgtatatgtggggtttgcatcccataaataccgtatttttgatccacacttggttgaaaaaaattcatatataaagggacccacacagttcactctaatttatatataaatggacccacagttcaaactaatattgtttaagagtcaattgtataagacatcaatgtgatggggatacaaaataagtaatgcagtcttagattgcactataagaaatccagtgtatggatcgaggaagatgatcattttcctgtactctggacagaccacctctggaata

SEQ ID NO: 275310 - DNA, 608 bp, Homo sapiens
ctacttaaactcttgtcctactaatgacagaagactttttaggaagtcagcatgtcaattatccaatttttaaataactgagactggattacgtatccagttctttgtttaacactctgaaggacataaacaaggaaaatacatgctctctaacttcagaaatttgtaatattaaggcaaagttatcatgcatgaaagttacataaaaaataaagacttctgttttatgattcatgagagtaacaaacattcaatgaaagaaaaagatgagtatcaactggaaaataataatgtgacaaggctctgagctagccctgaagaacagttaagatttagactagtaaagcagaagtgaaaaagtaattccagatggcaaggcaaatatgtaaagacaaagtgacaaaaacaagcmtaacttgtgtaggggacagtgaagagataaatctaactatggcagactataataaataaatttcattggtaaagggcacatagtttatgaaagtctggctcagcaatttagactcgcaacagtaaaccactaaagcaaggttcttaaaataaatctttaaacaatatttaaatacatagtcatgtttaattagaga

SEQ ID NO: 275311 - DNA, 594 bp, Homo sapiens
tttttaaagcagagatttgtgatgagtggaagacggaatctagattaaaagtatctcagcttctaaagaattgtcctttttaactgtgcagcagacttagcatatctttatgataaaattgattgtacgcaacttgagcatagctttctcttctggggtaatgtgaagtaattttcaattaggggtggatcacctgaggtcaggagttcaagaccagcctgacgaacatcatgaaaccccttctctactaaaaatacaaaaattagccaggcgtggtgacctgtgcctataattccagctactggggaggcagacataggagaatcacttgaacctgggaggcagaggttgcagtgagccgagatcgcaccactgcactctagccttagcgacagagcgagactccatctcaaaaaaaaaaaaaaaaaagcttctatatcaggtttgtctagttttagatactactttgtatgtatatattacatataatgacttaatttctaccccayagcaagcactgaccaaaaggaaaaactagaaattagtcatttctataaactgtataaaggtctttatttaatcaagatttctgag

SEQ ID NO: 275312 - DNA, 594 bp, Homo sapiens
tttttaaagcagagatttgtgatgagtggaagacggaatctagattaaaagtatctcagcttctaaagaattgtcctttttaactgtgcagcagacttagcatatctttatgataaaattgattgtacgcaacttgagcatagctttctcttctggggtaatgtgaagtaattttcaattaggggtggatcacctgaggtcaggagttcaagaccagcctgacgaacatcatgaaaccccttctctactaaaaatacaaaaattagccaggcgtggtgacctgtgcctataattccagctactggggaggcagacataggagaatcacttgaacctgggaggcagaggttgcagtgagccgagatcgcaccactgcactctagccttagcgacagagcgagactccatctcaaaaaaaaaaaaaaaaaagcttctatatcaggtttgtctagttttagatactactttgtatgtatatattacatataatgacttaatttctaccccacagmaagcactgaccaaaaggaaaaactagaaattagtcatttctataaactgtataaaggtctttatttaatcaagatttctgag

SEQ ID NO: 275313 - DNA, 558 bp, Homo sapiens
gtgtccagcttccttgtcccttttatttttattttttaaaagtgtttaatatatactgacggcagaaaagaaagcagtaaaaatgacaaattcttccctaatgccagtttgcagagtacgagcaattaatccagcattcgaaatttagacataaagacatacaacttgtggtttcatgagatggtattttaacaagttgattgaaaatatgtaatgtcacttctaaaatatcaaaactaatggggttggttatctctgcaagagcaaatattaggaaaccctcaccctctttatagaaatatatttatctcttgttgctgtcttcaatgaatacaatgaggcttacaaaagtaatgtgaaaaaaatgacaactcaacagtaaaaagataaatasctcaattttaaaatgggcaatggatttgagtagacattccaccaaagaaaatatacaaataactaataaatacatgaaaagatgttcaacatctttagtcatcatggaaatgcaggtcaaaaccatgatgagatgctgcttcacacccattaagagggctgtaa

SEQ ID NO: 275314 - DNA, 566 bp, Homo sapiens
tcggtgtccacaagaggaaaatagccttgttgttcagaagaatcacagattttctagatactgatgtttgagatgaatgtttcccacaggtctttataaagtgagtactgggagacgtcatttaggatgtccttgacatttttcgttgctcttcctcaggacatccctccaggtagttagttattcaatctcatctgttttccaaattgaaataaaaaggcatgsaaaagcaaggcaatccttatgaccttagacccaaaagaaataacgatgggcatgaaattgagagagtacaataaagatggcttcctcaaaacaagagttgactctcctcttcattccatttcaaattctatactttaaaatagttctccttcaaataatgcatttatgggtattgtctatttctgtttgatttgcccttttaaagtagaaatcaactttttattttagaacatttttctctttattaaggtataacttacatatcttaatggcacagacttttaagtgtactgtttagtaagttttgataaatatatgcatccttcaaactacctcctaag

SEQ ID NO: 275315 - DNA, 566 bp, Homo sapiens
tcggtgtccacaagaggaaaatagccttgttgttcagaagaatcacagattttctagatactgatgtttgagatgaatgtttcccacaggtctttataaagtgagtactgggagacgtcatttaggatgtccttgacatttttcgttgctcttcctcaggacatccctccaggtagttagttattcaatctcatctgttttccaaattgaaataaaaaggcatgcaaaagcaaggcaatccttatgaccttagacccaaaagaaataacgatgggcatgaaattgagagagtacaataaagatggcttcctcaaaacaagagttgactctcctcttcattccatttcaaattctrtactttaaaatagttctccttcaaataatgcatttatgggtattgtctatttctgtttgatttgcccttttaaagtagaaatcaactttttattttagaacatttttctctttattaaggtataacttacatatcttaatggcacagacttttaagtgtactgtttagtaagttttgataaatatatgcatccttcaaactacctcctaag

SEQ ID NO: 275316 - DNA, 566 bp, Homo sapiens
tcggtgtccacaagaggaaaatagccttgttgttcagaagaatcacagattttctagatactgatgtttgagatgaatgtttcccacaggtctttataaagtgagtactgggagacgtcatttaggatgtccttgacatttttcgttgctcttcctcaggacatccctccaggtagttagttattcaatctcatctgttttccaaattgaaataaaaaggcatgcaaaagcaaggcaatccttatgaccttagacccaaaagaaataacgatgggcatgaaattgagagagtacaataaagatggcttcctcaaaacaagagttgactctcctcttcattccatttcaaattctatactttaaaatagttctccttcaaataatgcatttatgggtattgtctatttctgtttgatttkcccttttaaagtagaaatcaactttttattttagaacatttttctctttattaaggtataacttacatatcttaatggcacagacttttaagtgtactgtttagtaagttttgataaatatatgcatccttcaaactacctcctaag

SEQ ID NO: 275317 - DNA, 536 bp, Homo sapiens
actcatttatagccacacatgatatatagtgaaatgctctaacacttaagtccagctcatgacaaacttattacccttcactgaagcctttaataaactaccaaaaaggtatgtaaagcaaattcccttaagccagcatgatgcactggcccattttaaagatggacttcaagcaagaacagtaactgcctctgttttgtcagctgtagcacaaaagtcctcattcctaccctttatacacctaagggagtttgtgacaataaaatatcaagagtatcaaaaagctgtsaaagtgctttgagaaatcaaaatgctttagaaacagaggatataaatgtggttaattttattaactcagagccttcagagcaacctatgtctgggtctcccccatcaggcaaggaaagggcgttacctttctcctgaagtccacatcacccaagacttcctatctacagagcgtgtctccagtgaagagatctttgctatacatgctcttgtcacggtagaacttccccggcctacttagctttcaa

SEQ ID NO: 275318 - DNA, 534 bp, Homo sapiens
ctagatggcaaatatttgcagctctgcaggcaacagctccagaaatgccctgtgagctgccttctcatgtaaacccagcagtgggcctttgtctgtgactcgatttcctccttagggagacctagctggcraggcctgcaactgagaaacaccaaaaatggtagtgaaagagcattgtatttttcaactaaaccaatttcctttaggatagaggtcaaaaaagctgtgctttgaaattagtcagctgtgggttcaattccatctccaaattgtctgtgaactggagtttccttaagtacaaaatggggctgagctgaccttggtagtgtgttatgttcatacatgcttgtacatgaagcatttagtcccaaaccatccaagcacagggtaaatgaaacaaaggacaactagtatacccttatgttttaaggtaaaaagggttttttgaggttttcgagggtagatagatgctcttggcattcctctaacaaacctaaatgtgattatttctcctgagtgactaaaactgtaaaa

SEQ ID NO: 275319 - DNA, 1607 bp, Homo sapiens
cttctggtagtttctctggtgataatgtatttaatctttgtagcactttgcctcccaagagcaatgtatgtttgaaatctgccataaataatgtgaaaatgcttgaccaactgatttggttagcaaacgctctctggctaacatccagaagtgctacagttttctgtattttttattttgataaattttgttgtagaacaagaaaaagatatagacactttaaaaaaaaaaaaaaaaaagcagataccactttcatggcctgcaaattataaaaattttgtgtcagaattcttttctgccaggtaggaatttgagaggggcaaagaagagctcratttaatttccctcagggtctttgctgaagggagaagaacagaaatctggattcagttttgttagtaaaaataatctttccaccagaaaatgtaaaaagctacattgttcaggatatttggacctattcatttcaatacagtctgataggtgggggtggggaggggagattttgagctgtgcagttttaatgaaatgtttaaggctgaaataatgwtatgtcactcaagctagaaaatcacccatcttcctttctggggctcaaacagataaaatatgctactaagatcacaatgtgtctctttacttacttccaacagaaatgaggggtttttatattgggtttgtatttcacctgagaaaaaagactacaatgacttatgtaaaatcattatttcccccatatctcttcagagaaaaaaaaggatacaatgactttgtcttaatttacccttttttccatccacccaccgtctatcctcctttcttccctctctgccttctctatgtccattcgtccatccatctactcatccatacatccatccataaacaattatwaaactccaacacaggttaccaagacactgccaacttgggggttcattgatctttttccttttgagtatattcagcttacacagggtgagaaggatgacttatgacatcaaagggtaacccactgaactcatcctgctttctgcagggggttcactaggttggcagaaaagcaatgaccgcccaataattcagcttggcccattaaattggcacatgggactattcatttwtggccccaccacctaagactatcactcatgagagctttactttcatcacctaatcacctctcaatgccccaccacctaagactatcacatcaggatttaacacaggaattttgttagtatttaacatatgaattttagtctacagcactccattactattttttggaaatatttgtgaagaacaggtattatttctttagtggaattcaccagtaaagccatctgggccagagcttttgtttgtgggaagttwaaaaattatgaattcaacctctttacttgttatagatctaattagttttctttcttcttgagtcagttttaatagtttgtgcctttctaggaatttggtcattttagctaaattacataacttagtggcatacagttcttcatagtattctcttttaatcatttttatttcagtaagatcagtagtgatcgcctttctttcattccggattttagtataataatttgagt

SEQ ID NO: 275320 - DNA, 563 bp, Homo sapiens
tggtgattcttgtcttgtcaaacgtaattatcatttgactgctcaccagcacttgccacagtgggtcaatttgtcctcttaacactttcttctcaggcatttgtgaaggggactctcttctaccttacagcaatgctcagtctcctaatttagtttttccttttctgagaatcagctgttgttaataagcattccacataatttctccctcattcatgatctggcataatgaaccctgtgattcctttgttatctcaatcacttattatgaagatattttgccctgtagttgagatgatttatcattaatacatttcattcttccattgaaaatctattatgttcaaacattcaaagaagcataatgcacagtcactgatcttyaagagaaagacccatatgaaaagttaaatgataaaagggataatgaaagtaaaagctatgaatttatagaaaaaaatgagtttttgtaaatttcttggaaaaagtagggattaaattaggcactgatagatggccatgctttaataaggtgagctatagatctagtttctgttttacaa

SEQ ID NO: 275321 - DNA, 573 bp, Homo sapiens
ttaaatcaatgagacacctctagacacctatcagaatgaagaaaacccaaaatactgacaacatcaaatgctggcaaggatgtgaaacaataagaactcttattcactgctggcaggaatgaaaaatagcacagaaactttggaagacaatytgacactttcttattaaactaaacacaccatacaattcagcaatcatgctccttgaaatgagttgaaaacttatgcccacaaaaacatgtacacacagatgttagcacagctttattcataattgccaaaactgggaagcaatcaggatgtctgttcttcactaggtgagtggataaataaactgtgatgcattgagacaatggaatattattcaccactgaaaataaatgctatcaagtcatgaaaacacatggaggctaaaaagcacattagtcaatgaaagacatcaatctagaaggctactgatatggtttggctgtgtccccacgcaaatctcatcttgaattgaagttcccataattctcacatgttgtgggagggacctgttgggaggtaattgaatcatggggacaggttttt

SEQ ID NO: 275322 - DNA, 601 bp, Homo sapiens
tgtgtctcatcccatacagcctctggtgtcaaatgtgcctttactcattttgaaattcaccctcaatggtctcatcatcattccctgtaatccagcctccacctaccaggtacgtttactatgtcagaaattgagtcatagacagggttcaagttattttccctgtaagagactagtgagtgtgcctgtctcaaaaagtctgaaaatgttcatacatagtttctctccatccttaaggaagcataattttctccaaattcaagatgatacaaaattgattttttatgcctgggaatgtcaaattgctgatgctgctagaggtaaatgattgattcaaatattcacaggtgacaagattgccagcaaacagyaagattccatatttctagagaaacaaaacaatgactagaacaaaaccatcagtttcaaatggatgagtgcttctctgtgaatgccaggccaaagagcaagggtggtagcaaacctggttcaatggtttgtgctattccacatctgcctgtcctgatggagaaggggtccccttctttacccctcacaaaggcgctgtatgggatagtgtaatcccacccaggctcattag

SEQ ID NO: 275323 - DNA, 601 bp, Homo sapiens
tgtgtctcatcccatacagcctctggtgtcaaatgtgcctttactcattttgaaattcaccctcaatggtctcatcatcattccctgtaatccagcctccacctaccaggtacgtttactatgtcagaaattgagtcatagacagggttcaagttattttccctgtaagagactagtgagtgtgcctgtctcaaaaagtctgaaaatgttcatacatagtttctctccatccttaaggaagcataattttctccaaattcaagatgatacaaaattgattttttatgcctgggaatgtcaaattgctgatgctgctagaggtaaatgattgattcaaatattcacaggtgacaagattgccagcaaacagtaagattccatatttctagagaaacaaaacaatgactagaacaaaaccatcagtttcaaatggatgagtgcttctctgtgaatgccaggccaaagagcaagrgtggtagcaaacctggttcaatggtttgtgctattccacatctgcctgtcctgatggagaaggggtccccttctttacccctcacaaaggcgctgtatgggatagtgtaatcccacccaggctcattag

SEQ ID NO: 275324 - DNA, 624 bp, Homo sapiens
atcacataacttacgcctgaactacctgcataacagctcaaatctgtgctcctcctttatcctctctgccttctcgcctattcagacatcacctccttcatgtggtctgttctgatctttaaagagttgtagagaggactgaagaaaataaaattgaaacatgaagcacagcatctagcatatggtacaagtttaattaatggaagtagctccagtagcagtagcaaacctgcccattggatttttgttgttgctgtttstctttgtcactcagcctgccgcaacccatgggtacagaattccacattccatattccatgatcccctcataagtgatccaggtgaaatttactactggttgcttcttccgcggtcattaattcatttatacatccactcattcatttcatctctaggtatttcttaagcaccacgatgtgccaggcattgaaccacaatcactaagggaacagtggtaaacaaggcagatatcatatccctctcctgatagagcttttattcttgtggagcaaatcacaagccaaaataaataaataaaataattgccagagcaggaagacaagaagctacttttcacaagacagtcaagaaaagacttcttta

SEQ ID NO: 275325 - DNA, 489 bp, Homo sapiens
tcttccgcggtcattaattcatttatacatccactcattcatttcatctctaggtatttcttaagcaccacgatgtgccaggcattgaaccacaatcactaagggaacagtggtaaacaaggcagatatcatatccctctcctgatagagcttttattcttgtggagcaaatcacaagccaaaataaataaataaaataattgccagagcaggaagacaagaagctactttycacaagacagtcaagaaaagacttctttaggaggacagttttaatcctacacacctgcagaagagctgaaattagaatggaactttcaacctaaatacatgacaggaagaaagctatgtattttcatgtagaagaacagtttaggagcagggggatcccagtttcctataatcagcttctctctcagtttatttgaatatgcactaataacagaaactgttataaaaatgatacggtttagcaaatttgacgccccc

SEQ ID NO: 275326 - DNA, 578 bp, Homo sapiens
aaatgttgcctgtgttctgactgcttcactgactagccattcccccatctttctccctctcccaatcctccttattccttgacatacacaatattaaaattaggccaattaataaccctatagtgtcttctaagtgttcaaatgaaatgagtcaccacatatctctcactttagatcaaaagctggaaagtattaagcttagtgaggaaggcatgtcaaaagctgatataggcagtaagctaggcctcttggatcaaacaggcaacctgtcaatccaaagaaaaagttcttgaaggacattaaaagtgctacttcaatgaatacatgaatgataagaaaacaagcagctttattgctgatataaaggaagtttttgatgtctgtgtaaaagatcaaactaggcrcaacctaccctaaaccaaagcctaatccagagcaagcccccaactcttcaattttatgaaggctgagagagatgagaaagctgcagaagaaaagtttgaagctagcagaagttggttcatgaggtttaaggaaagaagccatctccataacataaaagtacaagatgaagcatc

SEQ ID NO: 275327 - DNA, 548 bp, Homo sapiens
gagagagatgagaaagctgcagaagaaaagtttgaagctagcagaagttggttcatgaggtttaaggaaagaagccatctccataacataaaagtacaagatgaagcatcaagtcctgatttggaagatgcagcaagttacccaaatgatatagctgcactaagcaacaaactcagtgtagatgaaacagccttctattggaagaaaataccatcaaggactttcatagctagagagaagaagtcaatgcctggcttcaaaaatttaaaggaaaagttgactctcttgtkaggaactaatacagctggtgactctaagttgaagccaatgctcactggctattttgaaaaacctagcactgtaagagaattatgctaaatctactctgcctgtgctctgtaaagataacaacaaagccttgatgccagcacatctgtttactgcatggtttaataaatattttaaacaaattgttgaaacccacccctggcaaataagattcatttcaaaatattactgctcattgacaatgcacctagccacccaag

SEQ ID NO: 275328 - DNA, 548 bp, Homo sapiens
gagagagatgagaaagctgcagaagaaaagtttgaagctagcagaagttggttcatgaggtttaaggaaagaagccatctccataacataaaagtacaagatgaagcatcaagtcctgatttggaagatgcagcaagttacccaaatgatatagctgcactaagcaacaaactcagtgtagatgaaacagccttctattggaagaaaataccatcaaggactttcatagctagagagaagaagtcaatgcctggcttcaaaaatttaaaggaaaagttgactctcttgttaggaactaatacagctggtgactctaagttgaagccaatgctcactggctattttgaaaaacctagcactgtaagagaattatgctaaatctactctgcctgtgctctgtaaagataacaacaaagccttgatgccagcacatctgtttactgcatggtttaataaatattttaaacaaattgttgaaacccaccmctggcaaataagattcatttcaaaatattactgctcattgacaatgcacctagccacccaag

SEQ ID NO: 275329 - DNA, 456 bp, Homo sapiens
tcaacacacttctgcaatgcaaagctcctctgacacccagattatcagtaactcctggtctgctcacaaggagacctcttggaagtgttgtctgttgacttacatgttgtgtatatgtgtgtctattttcctatgaaaatcaagtaaaggggctgggtttagactatctatgcagggcagaaataaaacaatgctacaagtcttgagtaaaaaacaagaattcagtggaagctgcaagttaccatggaactcgccattmcctgaccagaattcccagaaatatagggaggtacttgtgacaagacggaaaagctgggagcttgagataattttattttgagcttaggaaactgagtgattctatctaatgtctgaaatatgtaacatatttttattttaacataaagcaaaatgttaaggaatgaagtttcttgcctgaaatttgaagggcagcta

SEQ ID NO: 275330 - DNA, 567 bp, Homo sapiens
tgattacatgatagaaaaaaatttagagttggtcttacattgtcatttgcattagtgaggttgagagtttttgtttgatctccattcaagcttttaagaagcttggaaattgcaggctgaagcaattcaaatttatgcagagtttgacagtgagttaattaccagaactatgcaaaattgaattttcagaaaacaattctggcatttttgaatagttgtatgttatgaatgtacttatacataagcatatgcaagctatctgtcaagtagctggcgcaatttgaagacatgtccmcttaacagaaaaatattatatttcagagagtcttacgaagcatagaggaaagactacaagtactttgccctttacccttgaaatatatgcagaaccccaaactggagttgaactcataataactgaattcccaggcaccatacttgttaaaatagatacagacactaatccaaacatgcagggtggtctcttcttaaatattcacattccacacactgtcacagacatacctcaaatcagagcaagccttaacatggaaacagagaagacaa

SEQ ID NO: 275331 - DNA, 1142 bp, Homo sapiens
gggagataaatgatcttggagcaatgtttcagaaggagacactgactaggcttttctaggaagttaataatgcagagatagatggaatttttttaaaaggtattgcgggatattgtaaattcttccatcacattggcaggttttccccaacactttggcaggtgacttgagttctgaaccctccaaataaaatatgcatgacccctactagtaatcatggaataaataattccaaagattagtcccaaaatgtgcaaaccaaatattttctcaaacagaagatatatacccagtataagcatacaaatttgtttatttgacatatatcagtagaatggttatgtggtgctttgccagtaagtaaagaaacaaaaggtgggaaaaagaaatcaattacaaaaatcagaaccttctaaatgatgttyctaaatagaacattttggaacacccaagatcaagattaaacaggagataggagaaacatgcaggagcatctwtatattttgtctttttattaatagcaactctaacaaatataaggtgatagctcattgtggctttaatatgcatttccttgatgaggagtgaaatagaggatcttttcacatatctgttagacatttgtatgtcatctttgagaaatatctatttaggtcctttgcccattttttaattgggttatttatttttttgctattgagttgagttccttatgtgttttagattttaatcccttctcagatacatggtttgaaaatattttctctcagtctgtgagttgtctcttcactctgtcattgcctttggtgtgtagaagctttttagtttgatgcaatcccattagtctatgcttttgttgactgtgcttttgtgatcacatctaaaacaattttctcccaatagttttgtggtttggagccttatacttaagtcttcaatcccttttgagtttattattgtatgtagtataagggtccaatttcattctttttttttttctgtgwcacagcctcaggagttcctgaggacatgtgtcccccaattttattcttctgcatacagatatttagttttcccaacatttatttaagagattgtcatttcctttgtatgctcttggcatctattgaaaatcagttgac

SEQ ID NO: 275332 - DNA, 628 bp, Homo sapiens
atgccaatatgctgttttgattactatagctttgtgatatattttgaagtcaggtagtgtgacacatctaccacatttctaattatttctttatctttttgtacattcaatgagatttcatttaatacttaacagtgtaccaagaactaagctagacaccaaagatacaaaaaataaggtgcaattgatgatcccagggatgtctttagtgaggatcacaaacttcagaactaactattataggaaagaggtactattatataaatatatytaatgtgtaatgaaagcacaaaggagggaactgtgccatggccttattatggattcaattgcaactcacttttatattgccaaacataaagagtatttcagtacaaactatgaattttttgttttcaagcagccgtttttcagtagttttcaatttctaatagttctcattgcctgatgccattgccaaaagacctggtccaaatctcagagcatagacactcagaccagaggatgcctgggttctaattatgaattcctttttacccttagctaaattgtccctggtgggtaatttacttatcacttaatatctatgacccagttcctcagtccataaaactgagacaataatatt

SEQ ID NO: 275333 - DNA, 628 bp, Homo sapiens
atgccaatatgctgttttgattactatagctttgtgatatattttgaagtcaggtagtgtgacacatctaccacatttctaattatttctttatctttttgtacattcaatgagatttcatttaatacttaacagtgtaccaagaactaagctagacaccaaagatacaaaaaataaggtgcaattgatgatcccagggatgtctttagtgaggatcacaaacttcagaactaactattataggaaagaggtactattatataaatatatttaatgtgtaatgaaagcacaaaggagggaactgtgycatggccttattatggattcaattgcaactcacttttatattgccaaacataaagagtatttcagtacaaactatgaattttttgttttcaagcagccgtttttcagtagttttcaatttctaatagttctcattgcctgatgccattgccaaaagacctggtccaaatctcagagcatagacactcagaccagaggatgcctgggttctaattatgaattcctttttacccttagctaaattgtccctggtgggtaatttacttatcacttaatatctatgacccagttcctcagtccataaaactgagacaataatatt

SEQ ID NO: 275334 - DNA, 231 bp, Homo sapiens
gtgctgagaatcagattttgaagagaatttgctgatgaattggatgtgccttgcagaagtatcccaaatgcctccaaggtttggatgtaagcagcttaaataatggagttgtcattaactaggaggagaaakattatgggcagaccagtcttggggaaaatagcataagatcagtttggtttgtgttaaatctaaaatagcaatgagacttccaagtagagatgttgaatt

SEQ ID NO: 275335 - DNA, 537 bp, Homo sapiens
agaattttgatctgaccttttttttctgagtctcttgtacatcatggtgggtggcattcagctttaacacattatttcaacacacacacacacacacacacacacacacacagagctgtagaagtaggatttcattttagttgcaaatcttaaagctgtaagcaaagtgartaaatattcttcatgtgacttacagccatctaagggctacttaaagaataaatccagtctacttgaaaaatatagaaaaacttctaacaaaaaaagactataataaatgcagaatatggtctgtcctgatacttctttctgcctgtcctcatgttcacctctttttccattaaactccctgaatggcttacatcaaacaaaaagctgattaaagtttaccaaaagtttcagtgtttgggagtcaaatacatatctcaccaaaaagtacaaatgaatgggaccctcaagtgtttttcaaaaacctatgtccccagtagtttttccaagaaagattctatttcttggaaatagaataaaataaaaaca

SEQ ID NO: 275336 - DNA, 562 bp, Homo sapiens
gctctcaaacatattcacttgaatgagtctcttcagagtctcagacctgtatatctggtgcacttgatatttcctcctggaggtctcacaagtaccctaaatacaacatggccagaacctaacttatgatttcatctgtaacctcttttagtgctccctaccacagtacgtgatatcatattgttcacagataactatatcacatcaatctcctggtcagaacccttgcatgcatcttgttcttttctcacttaacatctttgtgtgtatttatctctacctggagtgcttccagcctctgcatttcacttaataagtttccactcatcagatttcatctctacttccatggtctcagagaaacctccatgttgcctacactacaaatttatgacttactctcataaattcctttttttaaatatttttttacctttgtagaatttaccaggtttatcrttttctaattatagagttatttgcttatcgtttgtctacaagctgtcagtgcagagaccacttctattctgctgattttggcatacctagtgctaatagtcgt

SEQ ID NO: 275337 - DNA, 563 bp, Homo sapiens
taataaaatgtcagagtaaagtttgtataggcagaraagtaacgctcaccttcttgcctttggtaactatagagggcaaaatttacatgattgcaatacatacatggataacctcatttaaaaggtgttgaaaatcagctatcattatatacacttgacctcatttgcccagttgcaagtctaggtgcaatggtgcaattcatgagagtttttgggaagctagttaaagaacacatactatacatttgcacacatgtacacgtacaaattaactgtaacaattagtctgttgcaaagatactttttaaagttctgtttaatgcttttttaatttttttctcttacccttaccatatgaagaatatttttaagttctaaaaaagtaagtatactatgtttaaaaatttatatccatagtaggcttagaaaagtcagttgctaaaaatgtaggaaaatgtttatcatcccagaatttgttgacatgatagtggtaaatctttcagaaaacatcactgttgtgtgtgtgaggtcagttgtttttggccagctgggtgatttgttat

SEQ ID NO: 275338 - DNA, 514 bp, Homo sapiens
tttagaccatataatgcactcagcattgttcctagagcatcataaacactcaatgtaagtttcacttctccttcctctccttttcctcctctctcttctgccccttccttcttttttttctttcctttcttcttcctcttctcctccttttccttcttactgctgttgttgttacttattttcattatttctccttcctttacttcccatcctgacaatagagatcctacccaaccattcagttaacttcactagtatttgagttctacctccttcattaagctttctcyggctaatcctaacctgcattgacctcccatttggggattaatatctggtttcacactgtcttaaattgttccttgttactccaattattatttaatcttgtcagatgaataaagtgacaaatactttgaaggctgaaaccatagccttgtttctctgtattcaccataataattagaataatgttgaatatatagtaggtcttaaataaatgtttattgactaa

SEQ ID NO: 275339 - DNA, 631 bp, Homo sapiens
aattagcttggaattaagcgtacaataaagagtgatttttttcatgtttaattttctggttagggatataaactccacacagtatcttctaagattacaacctattcagccagatcttaaaaatcattcagttctctttggagaaaattagaactttttctaaatgcttgatagcagaatgcctccaagcactatgataaccataactcttgttcgagttcaatagtgcagacctgcacaaagctgaaaaagtactggcaagagagccatttctttctccaccaggtactgttcctcagcacttcacaggcaggccatagctggacaaatatcaataccartctcctctaaatactgggctaaatgagatagtttatggaaactctgccacaaagatattccattggcatggtggagttgggcttggtgttgtgcagtatgctttcatgtctacatctgtgtctatttctctgcatctgtgaacttgaaatgttcttcctttaacaattctgctccactgtacctagtggagtactacctcctctctatttaagacaacattatcatctttaaaaaaaaaagttttctcatgaatgaaaacacggctctcccacaaagaatctgaatattc

SEQ ID NO: 275340 - DNA, 631 bp, Homo sapiens
aattagcttggaattaagcgtacaataaagagtgatttttttcatgtttaattttctggttagggatataaactccacacagtatcttctaagattacaacctattcagccagatcttaaaaatcattcagttctctttggagaaaattagaactttttctaaatgcttgatagcagaatgcctccaagcactatgataaccataactcttgttcgagttcaatagtgcagacctgcacaaagctgaaaaagtactggcaagagagccatttctttctccaccaggtactgttcctcagcacttcacaggcaggccatagctggacaaatatcaataccaatctcctctaaatactgggctaaatgagatagtttatggaaactctgccacaaagatattccattggcatggtggagttgggcttggtgttgtgcagtatgctttcatgtctacatctgtgtctatttctctgcatctgtgaacttgaaatgttcttcctttaacaattctgctccactgtacctagtggagtactacctcctctctatttaagacaacrttatcatctttaaaaaaaaaagttttctcatgaatgaaaacacggctctcccacaaagaatctgaatattc

SEQ ID NO: 275341 - DNA, 601 bp, Homo sapiens
tgtaaatgcacagcgtggcttccagtgagagccagtctgtggcaactcagggttgtcagggctgactcaggttctgcacagcaagcctctgggacctgagagaatgtgggctgggttatcttctcaatgcttgcccctcactggggttggcttaggtgacaataaaatggacatttcaaaattttctaataactgtcattcctacccctctttatggccttaaaataacgtatgttcttagatttccccttgtattttatatgttcaacttaatattagctgtttcagaactgactttgtctagagaaggaagctgaagcacccatctgtgggtagaagaactctcttcatttcggcttgatgaactgtaagactctatggccgggaagggagccagttatacaaatctaagcagatttgtattctactcagamtcttaccctattatgtaaaagctatgtttatagttcgagaactcaagtttctacttaaaagaggtaatgttttataatatggaagataggaatcagttctgatcctgatcgttacccttttctctgaaatgttgactaacctaggtttagaggcagctacgctgttt

SEQ ID NO: 275342 - DNA, 599 bp, Homo sapiens
gatggggaaggaggtaggtggatcacgttttgagggggaatattagaagttcagttttggatatgtttattttacattgtaagcagagattcaagagtggagataaatttatatacctggtgttggtgggagatgaagatatagatgtagattttggagtcatttgcatactgttacaaactaagtcaygagaaacataaaagagtgagtatagaaagaaaagaaaagacatgcaaacggtaagcctaaagtcctccaatattaagatgtatgagacataaagaggaatgccaggctgcactgggaatgagtaaccagtgaagtaagagaaaaaccaggctttaatgtccttaagcccaatcaagaaagtgtatgaaggagaaggaattgatagtctgtacgtccagtgagataactgaacattgactatcacagttagaatcatggaggtcattaagatcatcgctagtaaaagttgtggtgggatgaatgcatggtgaatagaaaggaattagaaacagtgtgtttagacaaccgttacgggatttctgctgtaccagctagccaagaaatggagcagcagctaacgggaaagtagg

SEQ ID NO: 275343 - DNA, 627 bp, Homo sapiens
tttacagcttactttcttttctataagtcgagtatactctaatgataaaaatcatggcatagcaaatatataagcaagtaacagtcatttattgtcattatcgagcattatgtactgtacgtacttgtatatgctagacttttatatgactggcagtgcagtacatttgtttatacagcatcatcacccacaacatgagtaatgccttccactatgacattrtaacagctatgatgtcagtaggtgagaggaacgtgtcaggtccattataatcttatgagaccattgtatatgtggcctgcctttgaccaaaacattatgcagcacatgatagtatattcttcctctcttaaacatttcatcatagttaatatgagtttttgaaagtcatataatattgtcaatatgtggatttttcaaattggctcacaggaattcaaactagaaaatatagcatttttaaagacaaatttattttgctataaaattgacatcacaccaactcaatttgactttgaaagtaaggatttccatgttattcatcttggcatagtataaattggtcaatggtttttaggttttttttcagataaacattttacaaatgtttataagaaaaacaatttg

SEQ ID NO: 275344 - DNA, 627 bp, Homo sapiens
tttacagcttactttcttttctataagtcgagtatactctaatgataaaaatcatggcatagcaaatatataagcaagtaacagtcatttattgtcattatcgagcattatgtactgtacgtacttgtatatgctagacttttatatgactggcagtgcagtacatttgtttatacagcatcatcacccacaacatgagtaatgccttccactatgacattataacagctatgatgtcagtaggtgagaggaacgtgtcaggtccattataatcttatgagaccattgtatatgtggcctgcctttgaccaaaacattatgcagcacatgatagtatattcttcctctcttaaacatttcatcatagttaatatgagtttttgaaagtcatataatattgtcaatatgtggatttttcaaattggctcacaggaattcaaactagaaaatatagcatttttaaagacaaatttattttgctataaaattgacatcacaccaactcaatttgactttgaaagtaaggatttccatgttattcatcttggcatagtataaattsgtcaatggtttttaggttttttttcagataaacattttacaaatgtttataagaaaaacaatttg

SEQ ID NO: 275345 - DNA, 1134 bp, Homo sapiens
catgtgccaggtatcatggtcacctccagatgactccacgtgtgcaggacatcatggtgacctgtatttgcatattaaaagaccagggtgggagggccatgtttttcgctggctatgtgaatgacacacctggtcaaaccaatcccctgggccttgtgcaaattagacaccacctgctccagcctcccaatatagccaactgcttttccaytacatatgggattttctccattcagagctctcctctctctgtataggggagccattttcttctttcttctttcttgcctattaaactttcttctccttaaaacccaaaaaaaaaaaaaaaaaaaaaaagtcctgaaatagattggaaggttgtcttccttcttccatatctcctataatgattcttatgaagagaaatcaaatggaagttctggggatatgaaagagaagagagagacaacagaagaatgagaagaattatgaaacctaacctgaaatttaaaacaatttcaatttttttagcttcttgaagagaaggtttagcgtgattaataattatttgttattattactatttaataatgattgataattaatagactttggtaagctattttctwgagggcctaacaattaatatagaaaattataaaaatagcataaaagcacagtawtaatcaatatcaaggtagagagtaatagaaaataatgagtctaggtgaaaaataggtgtattaaataggtataatttacatgaattctgagatagagataaatgtaatcatcttctgaaataaaattgtcttcatgcatgtattaatttgtttactgatttatagcatattttggcaaatcaattctcaaggacctgcattatcaattcactaattttggtgctaatttctcaacataaaaaggatagcaaaacagagcacagagaacattttccttttgtattttttaagaatttgaagaactatggtgttaaagtgcttcaacataaaaaaaaattcagaaaattgctaattggatcactcacatattgtttgaacactgccaagaaagagatgataatgtaagtaccttataggaccttttatgggatgattttggtacctcaaacttagtcaaaattgcacattt

SEQ ID NO: 275346 - DNA, 523 bp, Homo sapiens
gagggcctaacaattaatatagaaaattataaaaatagcataaaagcacagtaataatcaatatcaaggtagagagtaatagaaaataatgagtctaggtgaaaaatargtgtattaaataggtataatttacatgaattctgagatagagataaatgtaatcatcttctgaaataaaattgtcttcatgcatgtattaatttgtttactgatttatagcatattttggcaaatcaattctcaaggacctgcattatcaattcactaattttggtgctaatttctcaacataaaaaggatagcaaaacagagcacagagaacattttccttttgtattttttaagaatttgaagaactatggtgttaaagtgcttcaacataaaaaaaaattcagaaaattgctaattggatcactcacatattgtttgaacactgccaagaaagagatgataatgtaagtaccttataggaccttttatgggatgattttggtacctcaaacttagtcaaaattgcacattt

SEQ ID NO: 275347 - DNA, 1116 bp, Homo sapiens
ggtgtattaaataggtataatttacatgaattctgagatagagataaatgtaatcatcttctgaaataaaattgtcttcatgcatgtattaatttgtttactgatttatagcatattttggcaaatcaattctcaaggacctgcattatcaattcactaattttggtgctaatttctcaacataaaaaggatagcaaaacagagcacagagaacattttccttttgtattttttaagaatttgaagaactrtggtgttaaagtgcttcaacataaaaaaaaattcagaaaattgctaattggatcactcacatattgtttgaacactgccaagaaagagatgataatgtaagtaccttataggaccttttatgggatgattttggtacctcaaacttagtcaaaattgcacatttaggctgacaggtcatattttctcagatcttcaactttgcttgattctcggttgtatcagtagggctcagcggagtgcagtggcactgtcacagctcactgcagcctcaacctcccaggctcaagcaatcctcctgcctcagccccacaagtagctggaagtacgggcacwtaaacattaaatgattaaattgattaaaaaagaaatattataagctactatatgcccacaaataaaataacttacattaaataggccagtttcctgaaagacaaaaactgtgatacacacaaaaaatagattctctaaagaggcctatatttattaaataaattttatcagtagaaaacaacccccaaaagagcacttggcctagatggtttcactggtaaattctattaaatatgtcagaaaaaaatawtggtaccaactctctccactttttttagaagacaggatcatagggaatacttcctaaatcattctgtgaaggtacattcctctaaagccaaaactatattaagaccttacaagaaaagaaaactgcataccaatatccttcatgaacagagatgcaaaaaatcttcaaaatttattagcaactatattcaacagtgaataaaaataattatacaccatgaccaagataaatttatttcaggcatgcaaaaatggttcaacatttgcaaatcaattcatgta

SEQ ID NO: 275348 - DNA, 517 bp, Homo sapiens
tctgaaaaacatggtttttttttcctttaatgcacttgtaaatctagaacttgaaactacagaaaatgtcattgcttgccctaaagaaaaatgttttcctgtacaattaaataaaatgagaaaatatctttcgtgtttagttacataaactgacaatttacaaaaagtttcattgtagcaattgctttgtgctacaactacaaagaaatatttattcaaaaattacactgttttatatattacatttttacatttgttcatgtactagaaaaagtcagcacaaccaaaacattgctatgttttaraataaataactttgtaaaaggtattttatattaagacacttttgtctatatgtatttgtattctttacaaatctggaagatgaaagattatgttttcttcacttttaatttaaaacagtagggaaacaactgtctgttattcagaaatcatcttttttatttatttttctgaatctaaaatagatatagaatatctttatcaccagtagtgc

SEQ ID NO: 275349 - DNA, 596 bp, Homo sapiens
gtctaaaaaaaaatttttttttaatgaatattcttttgtggtttgtcatttcacttttgctcagttttagcccagaggcatttgaaagtgaagcttaaaaaaaagtctccagttaccaaggcaaacacagcttgaaatgagaaccacagaactggagacatttgtacattcaagtgtttattcatttctgcacacaccctgcttcaagatttgtttatgtcagctgagtgctgttcaggaacagcctattgtacaggtggcaatattatatactgggacagcatctcatcccttgacactcccgtgagaatgaattctatggatatcccattctttatgacattgctatgagcaagaaaaaggcaagcagcgaggatccagcttatttgaatgatcagcatttgtagtgtaggagaataattcactgccactcacaggtgtctctaatggctgcattctccttgcctcctctgtgctgtggactacaattttatgcttttgtacaraaaggagctgcatctttatgcttaaaagccaagattccaagactctttttagctagacaaggactatcatggccatcctaatataacata

SEQ ID NO: 275350 - DNA, 571 bp, Homo sapiens
agccacacaataataatgggagacctcaataccccactaacagtgttagagagatcatcaaggcagaaaactaacaaaaagaattctgaacttaaacttgatacttgaccaattggacctaataaacatgtacagaatactgaaactaacaaccacagaatatacattcttctcatctgcacacagaacataatctaaattgaccacatgcttggccataagcgagtcacaayaaatttaaaaaaatcaagatcataccaagcaccttcttggaccacagttcaataaaatagaaatcaataccaggaatatctccagggttcacatagttacatggaaattaaatgacatgcttctaaatgacttgggtaaaaaataaaattaggcaaaaatttaaaagttctttgaaattaatgaaaattgagacacaacataccaaaatctttggaatgtaactaaggcaaggttaagaggaaaatttatagcacccaacatttacatcaggaagttagaaagatctcaaattaacaatctaacattgcacctggaggaactagaaaaacaagaacaa

SEQ ID NO: 275351 - DNA, 571 bp, Homo sapiens
agccacacaataataatgggagacctcaataccccactaacagtgttagagagatcatcaaggcagaaaactaacaaaaagaattctgaacttaaacttgatacttgaccaattggacctaataaacatgtacagaatactgaaactaacaaccacagaatatacattcttctcatctgcacacagaacataatctaaattgaccacatgcttggccataagcgagtcacaacaaatttaaaaaaatcaagatcataccaagcaccttcttggaccacagttcaataaaatagaaatcaataccaggaatatctccagggttcacatagttacatggaaattaaatgacatgcttctaaatgacttgggtaaaaaataaaattaggcaaaaatttaaaagttctttgaaattaatgaaaattgagacacaacataccaaaatctttggaatgtaactaargcaaggttaagaggaaaatttatagcacccaacatttacatcaggaagttagaaagatctcaaattaacaatctaacattgcacctggaggaactagaaaaacaagaacaa

SEQ ID NO: 275352 - DNA, 603 bp, Homo sapiens
accatctcttgggtgctatgttcactacctgagtgacagatttatttgtacatcaaatttcagcataacttaatagacctttgaaacaaacttgcacatgtccttcctgaatctaaaataaaagttgaaaaaataaataaataaattacaggccaaatggagtcattcacagcaagaagctatctcctttttaaatatatttcctaaagtgtgagctattaaaatatagttgtaggtaggcaatggggctttacataaacgttttgttctctctctggaaacattggtgagattgtatttctcyactgcattgaattcagtcatacttttatgatttcttcggcaatgaaatgtgagcactggagatagtttttatttgcaggtggaaggtggaaatttaaaaagtcagtgcttattttccacattttcttcttgtttttccatccattgttacttgcaatgttccagggggttactgttttgatattctagatcccaaaatggggatagtagggatgcagaacagtgcccagcctcccaaaatagacatagcgtgagcaaaaaataaaccactgagatctggggttttgtaatgctacagca

SEQ ID NO: 275353 - DNA, 589 bp, Homo sapiens
aattcagtcatacttttatgatttcttcggcaatgaaatgtgagcactggagatagtttttatttgcaggtggaaggtggaaatttaaaaagtcagtgcttattttccacattttcttcttgtttttccatccattgttacttgcaatgttccagggggttactgttttgatattctagatcccaaaatggggatagtagggatgcagaacagtgcccagcctcccaaaatagacatagygtgagcaaaaaataaaccactgagatctggggttttgtaatgctacagcacaacttcatctctctctggggagacaattatccagctgggaacacagggagaggaattcccttaagattcatcaggatcaattagtaatattatcttgattatggtgatggtttaatgggtttatacatatgtcaaagcttattaagttgtatactttaaatatgcagtttattgtatttcaataataggttactagaactgtttttaaaaaagggttaataaagagacatgctctgagactggagaaggagcaggcaattgtagttttcatcaaattcagccttacatttgctgtaca

SEQ ID NO: 275354 - DNA, 529 bp, Homo sapiens
agaagaaatcaaactatctctcttcattgacaatgtcattgtatacctagaaaactctaaaatttctgtcaaaagtctcctgcaactgataaatgacttcaggacagtttcaaggtacaaaattaatgtacacaattcagtagcatttctatatactaataacgttcaagctgagagccaaatcaaaaatggagtctcattacaacagccacacacacacacacacacacacacaaatacttagaaatacatgtaaccaaggaggtgaaatatctctacaaggagtgctatgaaacattcctgaaataaatcagaatgatacaagcatatggaaaaaarttccatgctcatgaattggaagaatcaataccattagaatgcccatattgcccaaagaaatctacagattcaatgctattcctatcaaaccaatgtcatttttcacagaattaggaaaaaaactattctgaattttatatggaaccaatgaaagagcccgaacagtcaaagaaatcctaagcaaaatgaa

SEQ ID NO: 275355 - DNA, 529 bp, Homo sapiens
agaagaaatcaaactatctctcttcattgacaatgtcattgtatacctagaaaactctaaaatttctgtcaaaagtctcctgcaactgataaatgacttcaggacagtttcaaggtacaaaattaatgtacacaattcagtagcatttctatatactaataacgttcaagctgagagccaaatcaaaaatggagtctcattacaacagccacacacacacacacacacacacacaaatacttagaaatacatgtaaccaaggaggtgaaatatctctacaaggagtgctatgaaacattcctgaaataaatcagaatgatacaagcatatggaaaaaaattccatgctcatgaattggaagaatcaataccattagaatgcccatattgcccaaagaaatctacagattcaatgctattcctatcaaaycaatgtcatttttcacagaattaggaaaaaaactattctgaattttatatggaaccaatgaaagagcccgaacagtcaaagaaatcctaagcaaaatgaa

SEQ ID NO: 275356 - DNA, 529 bp, Homo sapiens
agaagaaatcaaactatctctcttcattgacaatgtcattgtatacctagaaaactctaaaatttctgtcaaaagtctcctgcaactgataaatgacttcaggacagtttcaaggtacaaaattaatgtacacaattcagtagcatttctatatactaataacgttcaagctgagagccaaatcaaaaatggagtctcattacaacagccacacacacacacacacacacacacaaatacttagaaatacatgtaaccaaggaggtgaaatatctctacaaggagtgctatgaaacattcctgaaataaatcagaatgatacaagcatatggaaaaaaattccatgctcatgaattggaagaatcaataccattagaatgcccatattgcccaaagaaatctacagattcaatgctattcctatcaaaccaatgtcatttttcacagaattaggaaaaaaactrttctgaattttatatggaaccaatgaaagagcccgaacagtcaaagaaatcctaagcaaaatgaa

SEQ ID NO: 275357 - DNA, 570 bp, Homo sapiens
atctgtggcctgcaagctggagacccaggaaagccaatggcgttattcagtctgggtctgaaatcctgaggaccaggggagccaatggtgtagctcccagtcccaggctgaaggcctgaaaactgggattgggaggtgctggtgtaagtcccggagtctgaaagcccgtgaggcaggaactctgtcagagaacaagagaagatggatgtcccagctccagaagagaaagaatttaccttttctccacattattgttgtattcaggctctcaacagattggataaygcccatttacactggtaagggtggatcttccttactctgtctacagattcaaatactaatctcaagaaacacccttttagaccaacctaaaaataatgtttcaccagctgtcttagcccagtcatgttgacatataaaattaaccatcacattcagtaaataataaggttaagaaatagctttctttacaagtgtttgaaatacatagtcaaactctaaacttcagcaaaaataatatattattgctaataagatgacaagacaaaaagttgaactgccaaacgt

SEQ ID NO: 275358 - DNA, 632 bp, Homo sapiens
tggggtcctctttaacctccatccgagtggatctactgctaggctcacgcacatggctattgacaggattcagttcattgcaggctgttggctctaagttccttactatgtgggcttctcatggggtagtgcccatgaaggcagctggattctatcaaagtgagcaaatgagagaggaagagaggttgtaatttactttcagatgtagcctcctgtcacttttgctgtattctgtttatgagaggtgagtcactggggccagcccrcacgcaagcatctgtgtgaatacctgactttggggatgactagggaccatcttataaagcagcccacaacaaacagcaactcatcttttctggttgttgttgttgggaaagaggtagaagaggactttagttgaaggcaagtgttgagaattgctagcacattctcagcctagtagatctagtaaagattcagtaaagaatcggtccctgaaataaattaaatcctgagtgcctattcaggttggcaacatcctatcctattatcttatcaaatgactcttaagcattgtatctggaattctgaggaatgtgacaagggttctgagcagcagctgagtatggacagatctgtactttgtcatcact

SEQ ID NO: 275359 - DNA, 632 bp, Homo sapiens
tggggtcctctttaacctccatccgagtggatctactgctaggctcacgcacatggctattgacaggattcagttcattgcaggctgttggctctaagttccttactatgtgggcttctcatggggtagtgcccatgaaggcagctggattctatcaaagtgagcaaatgagagaggaagagaggttgtaatttactttcagatgtagcctcctgtcacttttgctgtattctgtttatgagaggtgagtcactggggccagcccacacgcaagcatctgtgtgaatacctgactttggggatgactagggaccatcttataaagcagcccacaacaaacagcaactcatcttttstggttgttgttgttgggaaagaggtagaagaggactttagttgaaggcaagtgttgagaattgctagcacattctcagcctagtagatctagtaaagattcagtaaagaatcggtccctgaaataaattaaatcctgagtgcctattcaggttggcaacatcctatcctattatcttatcaaatgactcttaagcattgtatctggaattctgaggaatgtgacaagggttctgagcagcagctgagtatggacagatctgtactttgtcatcact

SEQ ID NO: 275360 - DNA, 533 bp, Homo sapiens
ccaattaggaaaaaagtgcactcaaggtaaagtaaaatcaatgttataattacattgtgtgattattgaataaatgaatttttatatgtctrtatgacaaaaacactgaacccagacttatacctagtaaattttagatatgagtatcaaaaatgatgatggcagattagttgtttggtctcagtttctctctctttttctgtctttcagtagtcatctcccagttccagaactcccccaggattattaactgagggaggaaaagaaagaaaatccatgatggggccagatacattagatcatagaattcattagaattaccttgtcctgtctatccattgatgctgattcttttaagcttaggtcttacatgtgcatattaaataactatgatttgttactaattattgcataaaatatgtatttctacatatcaataattaaccataggtctatgagtgccagagacccatagagctctagaaaattcaggtggcaaaaggaagatctagagaatgtgtacaaggcaaagg

SEQ ID NO: 275361 - DNA, 1332 bp, Homo sapiens
cactctacacaatccctcagaagcattttgattgcttctgaatcaataactagtcatgaaccattttctgagattctagttgtgtaaaccaactgattaatggaaaggatttttaacttggatgtctcaaagacattttacacggaatatatccaaatctgaaataattatcatttttgtcattccagcaattcctcttctattctcctgttagggctaataaccctcctaggaacccagtcacccaaatgaaatgtctaggaaccatttcaaacttctgcctcttatcacaagtttcattcatcacatcttaacattctaatgtttctcttcttatcttaatrcccaatgctacttagttcaggtcttctgattagtcctcgtaccatcaaacatcttcctaccaaaaagaattacaaaaatgcaaatatgattcttttgcaaactctcaatggctccccatcagctgcaggccaaaactacaaatacagctgatatttttgcactcgtgttttcaaacatatacaggttacttttctgaactctattttcggcagtcacatcacttaataaagtccatattctttgagcaataatttcttatcaataataagctagcttgtaataacaagtaatacataagtgaatctattttaaattaaaagaccaatgagggttagcattwagttagttactattgtatcagaattatggaattctttaaatcacagcacttcagctgattatgagtgtgtgtatattgtacacatattgtattctaagtattttaatatataaattgcattctaaatttttaaaatacttttcaagttatagttcttttaaaggacatatttagtttactaagcaaaataatctgaccttaagttgttcttccaaagcagcagttgcgtgatctccactagattcatcaactaccaccaccatgtgagtgagagaattgaccctgacttgttcttgttctagatcttcttgaagcacctgaaagataaaatgttttaaaggaaattaaaatgatattcttacatgtgtgttgaaatgatttgcwctcaaatggtgaaatttatttctgctacatctcaggtactcctattttttattaaactaaaaccattccaagccaattttctgctatgacgctcagcaaaatttatatgttctattgttaatttaactggaaagtatctagagaagacaaatgttaagaaaggtacagcaggatgttctccttctcgtcccaccccctttctccctttcaaggacttttttcctacaactatcagcacttctggcattttcaggctcttcttc

SEQ ID NO: 275362 - DNA, 593 bp, Homo sapiens
tttagaataaaatgactatgcatctattttgtgtgtgcaatctatactgcctatcatgcctttgacattccagagcttataatggttaataaaactctttttgccatgaggccaaaaatggaaacattaaaattcagagttgtccttgacagtcatgttgagtctgtgttttctgagttatataagacaggactgggaacattttgaaggtgtcagccrggaatgtttcaaataataattaaaatgataatttggtggccagtgtatcataagttggttttctgaatttagtcaattcttttctgtccttcaatgagtatatataattacatatattacaaaattacaagtaaataatgccagttttcatttttacatgtaaattgctttttcacaattttaatatattttacttaagaagtgtaagaaaaacattggatccatggaatgaatccaactcttattgagtcttttaaagtctatgtgatcaaacgtactatattctccattacttagttgttctgattttgtttcgttcatctatttgttttataattggaaatggcattcttgccatattgatcaagggttta

SEQ ID NO: 275363 - DNA, 618 bp, Homo sapiens
tttacatctagaaaacccttaagactcctccaaaaggaccctatatttgataaatgacttcagtaaagtttcaggatatgaaatcaatgtacaaaattggtagcatttctatacaccaataatgatcaagctgagaaccaaatcaagaactcaatctcatttacaacaactacaaaaaaaaaaaaatacctaggaatgcctttaaacaaaaaagtgaaaggtgtctacaaggagaactacaaaacacccatgaaataaatcatagatgacacaaacaaatggaaaaactttccctgctcatggattgggagcatcaatattgttaaaataaccacactgctcaaagcaatttacagaytgaacacagtccttataaattaccaacatcatttttcacagaattagaaaaagatagtaaaatacatagagaatcaaaaaagagcccaaatagtcaaagcaatgctaagcaagaagaataaagttgaaggcatcacattacctgacttcaaattatactaaaaggctacagtaaccaaaacagtatggtactggtataaaaacagatacatatagattgatttaaccaaattaagaacccagatataaaaccacatatct

SEQ ID NO: 275364 - DNA, 609 bp, Homo sapiens
gtgtttatcccccttaccatcataaccattaaactttcattaagcacttatgagggcaaaagacaggaaataaaatgaaacttcatagcagaaacaaacaacatgtaattttaaccttgctaaatatgagagtgagtttgctaaccactaaaagcaccacttgatcctatggcactgtcaaacttaactgaatcacttatccttcttccaactaytgcatttctctttttcactgcctattttcttaattaccaatctcaagtcccaattgcccagtcccagaatctattactttgagctttttgttcatttcctaaatctagtcctattggttttgatttgatatccagaatgctttgtacctgtttacaatttttgttgtcattgctttcattcaggctctatatactttcagcaatatcctcttaacatgttttctggcctcctgtttctctgctcttttatttatcctcaaaaaatatcttcttaaatattaagataagttttcctaaattgctgctatttctagtttaatttctcatgaataatggtttcctgttactcatagaactactactgcaaatgcctgagtcttttatataagactca

SEQ ID NO: 275365 - DNA, 609 bp, Homo sapiens
gtgtttatcccccttaccatcataaccattaaactttcattaagcacttatgagggcaaaagacaggaaataaaatgaaacttcatagcagaaacaaacaacatgtaattttaaccttgctaaatatgagagtgagtttgctaaccactaaaagcaccacttgatcctatggcactgtcaaacttaactgaatcacttatccttcttccaactactgcatttctctttttcactgcctattttcttaattaccaatctcaagtcccaattgcccagtcccagaatctattactttgagctttttgttcatttcctaaatctagtcctattggttttgatttgatatccagaatgctttgtacctgtttacaatttttgttgtcattgctttcattcaggctctatatactttcagcaatatcctcttaacatgttttcyggcctcctgtttctctgctcttttatttatcctcaaaaaatatcttcttaaatattaagataagttttcctaaattgctgctatttctagtttaatttctcatgaataatggtttcctgttactcatagaactactactgcaaatgcctgagtcttttatataagactca

SEQ ID NO: 275366 - DNA, 567 bp, Homo sapiens
atttcaacaataaaactcagagctaattgtaatattttatggcacttattaaaataaagcaccctcataattttggataagaaatattattgtagaagtctcaataacagaaacaaaaaaaaatgctttctggcagcgagggagcataactggaaatgtacaagtaaactgaagaaaaaagatggaaatattaacatttaaaaaatgtcatattctatagaaaagcaatgcttcagactctcatttatcatcaagcttggccagcttcaatttactataaattgaatgtaaaattacrttaaaaaaaatcgtagccttattatttaaatttgcattacaagtaatccctatgaagtctgtcttccaggaaagcaaatttttaataaatcacataccctgcgttgttctcatccacaaatatgtttgatttcttttccaaatacgaaaagcctagctatgctgtattttttaaaaaaacaacaacaaatgtcttaatccattttgtgctgctgtaacaaaaataactgagaatgaggtaatttaggaagaatgtacctttattttttc

SEQ ID NO: 275367 - DNA, 605 bp, Homo sapiens
ttggagggtggcagaaggaaagaattaggaaaaaataactaatgagtactaagcttatacctggtgatgaaataatctgtacaataaacttccatgacacaagtttacccatgtaacaaaactgcacatgtacccttgcacctaaaagttaaaatataatagtaattaacgatatctttgtcaaaagaaaaaagaagagattatcacctcacttttgttagcatggctactatccaaaacaaaaaaagataaatgttgataacgatttaggaaaaaggcatgtattacgtacctgcaaaagttaaaaattactaattaaaaaaaagaaaacctttacacactgtaaatgggaatggcaatcagtacaggcatcatggaaaacagtatgaasgctccttgaaatatgaacaacaaaactacaatatgatacaaaatcccactatgaattatatatacaaaggaaatgaaatcagtatgtcaaagaaatatctgcactaccatttttattgcagcactattcatggccaagatatggaatcaatccaaatatccaccaacatatgaacggataaagaaaatgtggtatacatatatacaatggaata

SEQ ID NO: 275368 - DNA, 1129 bp, Homo sapiens
ttcccaccataaaaatgataaatatgtaaggtaatgcatatgttaattagctagattcaactgttccacaatatatatttactcagaagcatcacgttgtacatgatgaatatacaattttatctgtcaatttaaagtagggtttaaaaagcaatgtttagaaattgatagcatttcaaacaataaaatataaaagttgggtctgttgagtgtgtgtgtggatgctgcatactattggcagraaagatagaacacactcaaatatgtttcgctcagtagactacttacacatttatgtgaagggtcgggggaaaaataataaacgatagtgaaggagccaggacctaacaacaaagacaactgacctagcatccccggaactggaagaaaaaaggaagagagctgttgccggagctcagtgagaattagagacatggaacaagagctgtccaacagtagctgtagtttaagaggaacacaattccagccactccacagtaagaaacagaagaggaagagaaaagtaccacaatctctgctttcaccctcttgccawtttaagacttcatttacatccacaggcatttaaaaaaatatttccaggtaaaatactggagtacagatgggagggcaaataacagatacatggacagtctgcaccactgttgagtataaatttgtgcagggatggaaatgatctgtatctgtgtcatccaatatgatagccaataaccacatgtgggtattcagcacttgaaaggtggtcagcatgacttgaaaawaaaagaatatttaatttaatctaattttatttattttaaataatttaaaatttaaaggttacatgtgaccagtgttaactgtgattgtacagcgcagatctaatacattcctttaaaagcaaatagttaagagataggcctgtaatccgagctactcagaaggcctgggcaggaagactgcttcagtccagggatttgagatcagcctaggcaaaatcgagagacctccatctctaaacaaacaattttaaaaaattagtcaggcgtggtgacaggagcctgtagtcccagctactcaggaatctgaggcagaaggactgcttgagcacagtagtctgagtaggctg

SEQ ID NO: 275369 - DNA, 573 bp, Homo sapiens
tttaagacttcatttacatccacaggcatttaaaaaaatatttccaggtaaaatactggagtacagatgggagggcaaataacagatacatggacagtctgcaccactgttgagtataaatttgtgcagggatggaaatgatctgtatctgtgtcatccaatatgatagccaataaccacatgtgggtattcagcacttgaaaggtggtcagcatgacttgaaaataaaagaatatttaatttaatctaattttatttattttaaataatttaaaatttaaaggttacatgtgaccagtgttaactgtgattgtacagcgcagatctaatacattcctttaaaagcaaatagttaagagataggcctgtaatccgagctactcagaaggcctgggcaggaagactgcttcagtccagggatttgagatcagcctaggcaaaatcgagagacctccatctctraacaaacaattttaaaaaattagtcaggcgtggtgacaggagcctgtagtcccagctactcaggaatctgaggcagaaggactgcttgagcacagtagtctgagtaggctg

SEQ ID NO: 275370 - DNA, 630 bp, Homo sapiens
agtatgagagggtaaaggaaagaatcaggagtccgtaagggaatagagatagttcaggtcttctgattaaaaactgacttttatttgcactcaactatgcttctccttttagatgaataagtatgagtaccattttcttcactcaaaaaacgaacaaaattatatgtaacagctctgggaatgtgatcctgtcttctttcgtgttgatattcttttacgccttgcattctggaagaatacattttcacatagctactgtagccagacatccaaagatatagtatctcataggaccagttctcaatatagtgcatttctattcacagcttgaattgagcatctactacacagaagacatcacacaggtaacgaacaagaaatggatcctggcccagggaagctttaattctagtggatgaaacaagcatatggatagatcatttcatcataaagcagtaaggtgtcacaagatgcaacagtagcatcccttaayctgcccaggaatagatggcccctgtcaggcctctgagcccaagctaagccatcctttcccctatgacctgcacctttacgtccagatggcctgaagcaactgaagaatcacaaaagaagtgaaaatgcccggttgct

SEQ ID NO: 275371 - DNA, 591 bp, Homo sapiens
caataagtgttttgaattgattatcttattcaaaagatctagaaaaactcccttgctatgttgtaaagctttaataaatggtagctattatgacctcacaatggccctaagagtaagtactaatattattcctattttatagatgaaagtgaccttgttgaggcagataaaactttttagtagcaaagcatagatataaatccaagtctgaatgttcattcatccaactcttatcagctatgctcacttgctcctacacttgtacacttttttgaatggtggtttccttttaaggggtgtgtatttgtatgcatacacacacatatataaattcagaatactgaaattgtaaacaatggcacatcataactattatataggaagaattactcaatgttaaatatgtttggctcttgacrtgctatattgaaatctgtgcaaaattagtcaaaatacactacacacacacaatcaggttgacaactgtggatcaaggcttttcattgcgttgtctgtctatgtatatgtaaccctttggagtgatcagtaagttttaatgggcatggaggaattgcacttctgcagtttaaa

SEQ ID NO: 275372 - DNA, 591 bp, Homo sapiens
caataagtgttttgaattgattatcttattcaaaagatctagaaaaactcccttgctatgttgtaaagctttaataaatggtagctattatgacctcacaatggccctaagagtaagtactaatattattcctattttatagatgaaagtgaccttgttgaggcagataaaactttttagtagcaaagcatagatataaatccaagtctgaatgttcattcatccaactcttatcagctatgctcacttgctcctacacttgtacacttttttgaatggtggtttccttttaaggggtgtgtatttgtatgcatacacacacatatataaattcagaatactgaaattgtaaacaatggcacatcataactattatataggaagaattactcaatgttaaatatgtttggctcttgacatgctatattgaaatctgtgcaaaattagtcaaaatacactacacacacacaatcaggttgacaactgtggatcaaggcttttcattgcgttgtctgtctatgtatatgtaaccctttggagtgatcartaagttttaatgggcatggaggaattgcacttctgcagtttaaa

SEQ ID NO: 275373 - DNA, 1152 bp, Homo sapiens
gtttattctgtaaaactgtctgtccaatttaatgtattttgttcctcattttaaattgtctttagtacaaattgtatcagaaagaagagatgtatgttgtcttctggattcatattaaatacggaatttgagcaactgtgtgaattaactgcacctgcaaaaattgcaaagcaatgagatttaatttttctgatccatctggccttcctctacataccatctaacactgaagtaatgaaacacattctataattagggatggatattatcaagtataggcttaggaaaaagacttgtatttgtctttatgtgttatttcatttttttgtcaggagataataggcgtatcatacagatgctgagcattttgtctgtatggtattttaatgacatactcagtgaatacagtgtactaatttcataattaagtctcctttgaatagggataggatgttattatcattattttttagctgcctttccastggcaaaagtaggaatcttcttcactaagtactccagagtttcacataaaagcaaagagaaacatatcaaagacatttagawccttctggggatggaaggtgaagagaattttttcattcatgcatgtattcattcaacaaataagttttgaaaaccagaccatgcttctcttaagcaatcaccttgctccagggtttctagaccaagtgacttcttgaagtttctttcaaggctgtgattcttgattctactcagaaawggtggggatattgaggaagtgatattgataaggccccacaggcatcggagatttagggaatgtatgaaggcagcaggtgtccatcgtctttctgcctatcttaatacaaaagcactggtgaaattgctttaatgctttgtttggcatctgtttatgtcaagtcagatcttctcccaacatccaaatgaaacctgatgtgacctcacataatacagcagatgtgtcaccttgtaacaaaccctgcacaaaggtcttacttgacgtttaagtgcatcaaaatggaaattatatatgatcagatttacctttcctaagcattttgcttctagtggtacctaaattataccagttgattaaaataggcaatcaatgtctgcctgttggtggtgtcttaacttgctatatat

SEQ ID NO: 275374 - DNA, 617 bp, Homo sapiens
accaggcacataagaagaacaattacatgttctcacttatatatggagtctaaaataataaaactcatagaagcagagagtagattagtgattaccagaggctgggggtggggagtatggggaatgagggagatgttggtcaaagggcagaaagttgcagttagacagcaggaacaaatgataactatttaagttgatggatatgaaattagcttgtttcagtcattccacatcattcatacatatatatatattatatatatataacatataaaataacatcactgtgtacccccataattgtatgtaattataatgtgtcaaaaataaaattaaatttaaaaaactaaatttaaaaaagatcactstgttcagtgtttcctagggtaaataacttttttaaatgatggatgaaataaaggtaatgtttttctttatttcagaagaactctgaatttataatattgtgcactaagaatctctaaaaggagattatactgtaaagcatccaggaccaccactctttgttccaaaaccaggaaatctcaaggggtgataatattgtgttcatttccatttatgcaaactgtatgtctattggaaaaggccattccaca

SEQ ID NO: 275375 - DNA, 554 bp, Homo sapiens
gtactctctacaatattccaaaagataatagccataaacagctattgaataatctccatgatatgttttacagataaatgctgtgctaaattcattatcaccatgtctatgctcaaagtttttgtctctttattaatgatttgccagaagagagtagaggctgcaatgttattttttgttgggtttattggtttacacctatactgcctgaactagattcatgctttctttttgaaaattttcacccaagtaatcattataatttcttaccatctacagatgcattaggcaggtaggaaaaataaacacattatctcagggataaaaactttaggcaccaaagayttctctattttattacagccagcctacgggttatcagtggtggcacttaaagtattaataacatctgaggactttttttttctgttttacttgtgaatgtgccatggaagatgggctgtttcttcctcagacttggtagcctcatcatgatcatcatcatcaatatcatcaaacaatttttatttaaagcttaaattgaaacttcactg

SEQ ID NO: 275376 - DNA, 613 bp, Homo sapiens
tgtgtgtcatagaaggagaagaatcaaaattatgctaaagtatttgactaaagccrctgaaaaaaggagtggtaatcaactgaaatggggaatgctgcaagtgagacatggtttgggaggtaggttaggagttttcatttgtccataatacctctggtgatgttaaggaggcaaaatttggaacttggaagagagagctgaactggagatatgaatgtgggagtggttgacataagatatttgaaaccatgaaactggatgagatcacccagggagtgaatgcacatagaaaagaatagaccaatcgtggccctgtggcactccaactggttcatttcctggtgttctaagagagtctcttgcccccaggaaaaaacatagaggaagacttgaaagggaattctttctcaaattttgctggaagcagttcctctggactgagtgtttgggttctcctccaagtctcccataccacatctcactcatgcaagtaatgagaccacactgtccgtttagcaatgacttgtgaaccaatgcagagtgggtgtaaaggtacagttttccaccctctagaatctcagtttctatggcggagctgcatccctcttcaagg

SEQ ID NO: 275377 - DNA, 182 bp, Homo sapiens
atgcttatggaatagcatacagacttggttattttgaagtttcagtggtgcactcaaagaagatggcaaaaatcacagaaatggatttgccattgtcattctgccacttctagtcctgctcttggagatgtcactcaaagactatgaggaaasaacacagccacacgcacagtattctgact

SEQ ID NO: 275378 - DNA, 598 bp, Homo sapiens
ctgtcactaaatggattaaatttttgtatgaatcctagcctacatttagataaaaaagttttgatcctatgattaaaaaaggtatacatgttgagaaaaaggagaacatgcattataatttttagatatattctctttctttctgaattaaattgtaaaatacatgtaataagaatattaggaaatgcaaaaattagtaacttccttatatacctgtaatccctagttcaaagttaaaatggaagaaaattctgttcatgacaaaattaataatattaaaaacataggaaaaagctaaaaatgagtagaaacgagttgaagaaaatcatgaaattctgctcaaatacataaagcatatacacrtggagaatcatattgtttctttatacagaactcttaagtattaaggcactcagaacctacaaatatttaacagctttctcttcttaattttaacagtaagacttaaaaacttactgctcagttcactctttatcatctgtctgtgctcaatcacttttttctataaatgttagcattactttttaatttctgctttttgcttttcactaaaggaaaatgaatcaaactgtacaat

SEQ ID NO: 275379 - DNA, 600 bp, Homo sapiens
ccaacacacagaaatgataaatgtttgaggtgacagatatactaattatgctgatttgatcattacaaattgtatacttgtatcaaaatattactttgtactccatgatatgtaygactactgcctgtcaataaaaagacatgctttaggatcttgcttttatgtctagggttaacattccttggaagtttgtaatgaatgcagaacctcaggccccatgctagaccaaatgaatcagaatctgcattttactaaaatccccaagtgattagcaagtacataaaagtttgagaagacctgctctcatgttgcatgctacagctaggttacttatttgaagcttgtagctaagcctcaccccttcctctttcaaacctgccatgagaagctatgctgcagacactgagagtctacactgtgcaacaagatatattttcttctgttcatcagatcttccaaagcagtggaaatgcaggccctggacactttacgtagtggggaaaggcaagttcattcacagtaattagtcttaaagagtcctctgcacttactgcatgtggtatattctacaggaggtcttcttgtcagtacacatgcagc

SEQ ID NO: 275380 - DNA, 600 bp, Homo sapiens
ccaacacacagaaatgataaatgtttgaggtgacagatatactaattatgctgatttgatcattacaaattgtatacttgtatcaaaatattactttgtactccatgatatgtacgactactgcctgtcaataaaaagacatgctttaggatcttgcttttatgtctagggtyaacattccttggaagtttgtaatgaatgcagaacctcaggccccatgctagaccaaatgaatcagaatctgcattttactaaaatccccaagtgattagcaagtacataaaagtttgagaagacctgctctcatgttgcatgctacagctaggttacttatttgaagcttgtagctaagcctcaccccttcctctttcaaacctgccatgagaagctatgctgcagacactgagagtctacactgtgcaacaagatatattttcttctgttcatcagatcttccaaagcagtggaaatgcaggccctggacactttacgtagtggggaaaggcaagttcattcacagtaattagtcttaaagagtcctctgcacttactgcatgtggtatattctacaggaggtcttcttgtcagtacacatgcagc

SEQ ID NO: 275381 - DNA, 600 bp, Homo sapiens
ccaacacacagaaatgataaatgtttgaggtgacagatatactaattatgctgatttgatcattacaaattgtatacttgtatcaaaatattactttgtactccatgatatgtacgactactgcctgtcaataaaaagacatgctttaggatcttgcttttatgtctagggttaacattccttggaagtttgtaatgaatgcagaacctcaggccccatgctagaccaaatgaatcagaatctgcattttactaaaatccccaagtgattagcaagtacataaaagtttgagaagacctgctctcatgttgcatgctacagctaggttacttatttgaagcttgtagctaagcctcaccccttcctctttcaaacctgccatgagaagctatgctgcagacactgagagtctacactgtgcaacaagatatattttcttctgttcatcagatcttccaaagcagtggaaatgcaggccctggacactttacgtagtggrgaaaggcaagttcattcacagtaattagtcttaaagagtcctctgcacttactgcatgtggtatattctacaggaggtcttcttgtcagtacacatgcagc

SEQ ID NO: 275382 - DNA, 972 bp, Homo sapiens
tgaagctctcacaccaatagctactcacagggacacacactcgctagagtgcatttatgcataagcgagcaatagggaaggatggagctagccctactggaaggggtagggaaactttcagcgttgttatttgctggcatagaaagttttcttttaaggaaacttaaaactccaaaaccatggaagtaaaaagaggtgcaaagtagtgtgaggcaagacaaggaagagttcagagtgtcaccaaaaccaaatgagaaaaacacrtatatcagacataccccattttatcctttgggaatccaagactcaataaattatcaatgtttcccaagattatacaagtagaaagtaatatagcactgggactctaatttaaatttgcctgattcataaattgagtttcttttcactgctttatcttgtctgtctaattaataawtcagctctttcttggccctctcccttctggaagcaaacacagaaatggggaagtatacaaagtgtaggcaagggaatttgcacatgttcaaaaatatggaacaagccattgctcttctaatgtagctttcacagaactcaggagactgagtcgtcctggttgccatttggaccttcttcaaagcaagcatgaacactcttaggacagaacattgtgctccataaaaaaaggttgcagaatgagagaatcccctccagtatgccctgagaaactagggatttggtttatagcatgtcaactttagaaaaatacacacagatgtgcacatacacatatatacacacatacacatgtacgtatatatacaaatgcacaaagtatgtwtttgtgcacatatgtgtataatgttctgaatctataataatgtgtttgttgtaaacatttagaaaaatgcaggaagttatgataccatataattctaatggactttcctggaagatcttcctattagtattattactaaatataatatc

SEQ ID NO: 275383 - DNA, 550 bp, Homo sapiens
tcctcacggtagccttgagggaccttttctttccccagcacagtctgcttatttcctgtgaaactgctctcagggcacgaagccactgtatagtgagcctgtggtgactacagtgctaktccatatcttggcggtattattgggagaaatcacttaataccatcttatattaaatggaagaaaggttttaaataggattttcaaagatctagaatacaaacacattttcaccatgggtttttttttggactaggaaataaattcatttgtgtgctaccaaatatcataaacatctaggtctactaaccactaataactagaaaactggctttaaagttgttgaaatgaagatgattataaacacttaaggtattgatttgtacaaaccttcctgtttctgagtgcctttaagaaaattaaagggattttggaagtgtgcaaaatggatcttttttcactacagccctaagcaagtatccttcattccttggattaaagtcccaatacttgcctaaagttgcacaggcaatagtgacaaaggtcattggaa

SEQ ID NO: 275384 - DNA, 550 bp, Homo sapiens
tcctcacggtagccttgagggaccttttctttccccagcacagtctgcttatttcctgtgaaactgctctcagggcacgaagccactgtatagtgagcctgtggtgactacagtgctattccatatcttggcggtattattgggagaaatcacttaataccatcttatattaaatggaagaaaggttttaaataggattttcaaagatctagaatacaaacacattttcaccatgggtttttttttggactaggaaataaattcatttgtgtgctaccaaatatcataaacatctaggtctactaaccactaataactagaaaactggctttaaagttgttgaaatgaagatgattataaacacttaaggtattgatttgtacaaaccttcctgtttctgagtgcctttaaraaaattaaagggattttggaagtgtgcaaaatggatcttttttcactacagccctaagcaagtatccttcattccttggattaaagtcccaatacttgcctaaagttgcacaggcaatagtgacaaaggtcattggaa

SEQ ID NO: 275385 - DNA, 496 bp, Homo sapiens
tacatgctgcctgtattattgtctcattcattctcccgtggctgagaaaccaatgtcctgtaaacctcaaggagctcacaacttgtgattactgtcccaagcagaaacatccccaacttggggcaaaattcgatgtgggagaaaatgtaaaagtaaatatggcattatcattttcagaagtgcacatttgccataaaataggcataaattccccataacagcataataaaaattagactagaactatcatatatgaaaggttaaagctatgatttttaatgagagctaggacaactcaggatatcgataagctttgcacctgacacctccagttatatgaaggttttcaycttttgattgcattgattcaaacttatttctgtcttgggctcctgagtgacctatatgagatgagttgctggctctgatccattctctcatgattagatgaccacaactcatgatctgtattggtgggtactcagagagtttgtgc

SEQ ID NO: 275386 - DNA, 519 bp, Homo sapiens
caagagctaccaaattaaaagtgcatgcattttgacctggtaatcccacttgtgggcttgtgggactccagcccaaggaaacagacaaaaaaaaagacagtcatacrcatatgttcatcacagcgctatgtacaatagtgaaatactagaaaccatctaagtgcccaatagtagaagaatagtgcgatgaactatggcacagacattctgaagaatattttgcagttgttaaactggtggttctgaagtctatgtagcaatactaaaaatgtgcaatataaaatactgaggaaaaccacaaaattatatatgcaccatggttgcaattgtgtgaaatgtatatgtacatgggcagagacaaaaaatgacaatgagtaacaataaaatagctatgtagaagatatggtagtaggtgatatatttccttttctatgtttatggctctcaatgtactttttagcaataaaaaggaaagaaagtatgagcttattcttatcaagaaaatggcaatgtatgagt

SEQ ID NO: 275387 - DNA, 1166 bp, Homo sapiens
ttaaaggctactgatgtattgtaccagtgaatattagacttgaaagagagcacaccaaggggctaaaaagactttaaaatcatgattggaaatgaagttgaggttttgtttgaaggtgcaaaccaggctgtattcagctgtgtgtcagtacaaagctttttttctcctgcacttgtcctgtcttaagcagggcatttcagtgttgtttgataagaaggcaaaaaaaaaaattaaatgtctgtgaattartgcattacatatgagggactttcccaagctctgctataaaaagtgggtcccatttaaagatttgtatgtttttagagaaatataggatttcaagaataaggggaaaaactatcccaagagcaatgcattgcaggtgcactctgctcttagcaactcattttagaaggatgacagccagagtgtgactacagaaaaaaggtgaggatgagacaaggtatagaaaggcatgggaaaggaaaccaactttgttgaagcacatactttgcaccagggwgtttcttggccttcctagtatttttttctatttttttattgtcctgttatttttgttattgtctatgggtcatgctacagaagtgtgtgccatccctaaagatattttggaaacacagaactaaatgagaaaaattatgcaaagtcccttttccctcactgcttttwcctgctgtggagcctcccttcccaacagagtgagccctagggaaccataacatggctggggctgtgtgctccttttctcacagaattggacaaagatgatggagaacagtaactggggatggtgtttttgtgtgcctaagtcaaaatcaagtttgaaagtattaaagcaagatgtcagtgcaaaggtatcatgtgtccaatttctctcttattgctgtgtgactctgagcatgccagttcatctttctcagtcttgagtacctcatcactaaaatgtacataacaatgcctaccttaaacgacttctcatgattaaaagagacaatgtagagcatctgatagagaatctgacttgtcatacagtgtcaagaagtaaaagcagttatcattacttatagtaccctcggagactacaggaggggccggtgtggtgcagaggagcagaatggggaaaaggaaagaaggcctaggggaaa

SEQ ID NO: 275388 - DNA, 643 bp, Homo sapiens
gggaggtctagggtctccactgatgttgcagttctgtttgaggcagtcaatggagtggagccagagatttaacagagagttctgggagatgagataggattaaggggactgataagcagtccacatattctgaattgactggaggctgtgtggatgtgcaggaaagactgggaaggctcaagccacccaaaaataccaggtcaatggagaatgcacacattctcagaggcaatagaagacagcctggaaggaagcaaaagataggacaaatgagaatggcctaaaatttgaatgtcattcccagctaacacccagaaaatggaagccttactggctgaaggtgtttgaacacaacttttgaccaatcttgggctgaagtcaaagttatgcagacacagagatgatccctaggaagttagactaaaaataaaacaaaataaatgataatactgagtaggaacatcagcagctatagtttaccatggaggcagacttcacagatatagtctatgtaaattactaaacaaacaaaataaaaacaaaaataattatcttcagaggaggagaaatcagaacscagagttgctaaaatatattatctaaagtgtattcaaccaaaagttccaaagcatgcaaagaagca

SEQ ID NO: 275389 - DNA, 597 bp, Homo sapiens
gaggctgagactgggcagggcaatagttgggccttggaaggcaggaccagcatggtgaggggctcatggaccatgataagaagcatggacaaaactctacaaataaagctacttatgcctttcacacagatagaaacttgacatcactattttgacttgaagacagggcttcaggagagggaggggggaagagaagggcagttttaaagaaagagggttgtcactacagtgggtagtggactggttgagctctctctagattccctgggatccttcctactgattccatgcactctttccccagcttgtgtttttttaacttctgagggccatgcccgcaactctcttgaggggactttccaaggacttctggaactgctcttgcagaatgccagaagtttctgagagtttacaaacccctcaggtggccttrtcaataccaacccctgcacgcctttgaaagctgagctcccaagccttcagtggaacaaatgctaaaatgtaatttatgctccagagctccccttggggatcatgcttgagctaggactttggccaaaatcacacacttgattgacttctcctttcctgtcctgc

SEQ ID NO: 275390 - DNA, 556 bp, Homo sapiens
tttcttataagcagaatatagttaagtcatttttttcctttatccactgccagtctttatcttctgattggcatagttaggccatttacgtttaaggtaattattcatatgttaatgcttaagtgtttcattttattatttgttttctgcttcctttgtttcttagtcctctatgtttgttacttgaatctytttagaattccaccttgatttatttatggtgtgtgagtatatcactgtgtatagttttcttaaaggttgccttaagtattatactacacatatataacttatcatagtctactggtatcagtgttttaccacttcaagtgataggtagaaatcttattttcacttaggttcctttaccctctccacttttaaaacataattaccttaagtatattctctacacatatggagcaccacatcagatgatgttataagttttgcttcagccagcctgtaagttttaagaagttcatgagaagtagatacttgattatagttattcttatgttatatttactcccattccagtattctatcatttttg

SEQ ID NO: 275391 - DNA, 594 bp, Homo sapiens
agtggcctaataaaagtggcctctctgctaagggtctcccactccattaccaagtcttcatggggaatatccagtgcttccatgccacccttggcagtcctcattggtgccacatgttccaacaaagttaaggagccacttgactaatgaaatccccagacaacacataaatcacaggacttttttactgtctgaaatagcagaccataactaaaataatacctgagtagaaaggttatgttgctggcacagattacctggagcatatatattgtataagcagatttgaccaaaaacatgaagggaaaaaacttatttaaaatttggtgcagtaactagctatctttgctgcttgttttctaattttattttgtgtatcttagacaaaaaaaaaacccaatttcttaattccctggattctacaatagcaatttcataacagtttctctctgggaccttcttgaaaaatggccgtatgatgtgtgatgatgctgtscaatttgttctacaatattccctgagaaactgatcaacctctctgtgggccttggtaaagaagatgggaggggtgagtaagatgaggcaggatgtgaa

SEQ ID NO: 275392 - DNA, 665 bp, Homo sapiens
cttaaaatatattttttacttaaacaaaaatatagctctggaatgtagtcatcttactctatgaaacagaaacatatttggatcacaaacctgctttagaggagtaattccttcagtttcttccataattcttacaattctatacagtaacaaacaggatttgtgaggcaatataatgttcttcttaacctctcagtaattggaggcatcttctgtatgtattccacaagtccagctcatgctgatgaaggaagtataattacattacaggcaatctcatctaaggtaattacaattgtcaccgtcaatccaattaaacrggataactaactctactgagtcagaagcaccataaagctttctgactaaatccaggctttgggataaggatgtgattagaattctgagaattttcatttgctaaaatactgttgtgtatacaaatagataacaatgctgggaggggggcttgtggggagagattggatacaggtagacttttttttttttcatttactgatcaatttcttatttctaagccagaaatcactgtagattcttggcatcaaacttcaggccacacaacatcattatggaaaggttaccccagcatcacaacatcctaatgctctactgttcccatctggcctcttgtcctgaatcaa

SEQ ID NO: 275393 - DNA, 608 bp, Homo sapiens
tgctttagaacttactccttcaggaaagcaactctcactgaagtgtgggagcggagcagagaaaagactaggtaggaagagagccgagctcaattttatattccacaactaactggttctgactttctcaacaagtcgccaaagctagctgagtccaagttcctcatctgtaaaataaagatgttaccatctgtcccgccaaccccattttacttaatttcattgtgcgtgtctaaaatgaagttayaaatgtgcgaaaagtccctcgtaatttataaattccatacaaatttgagggaatatatataattattattcttattaagtcccctccccctcgccccgattatttccttctgttgattcctgcagcccttgcaatttaaatggtacttctaaaaacgccctcttttatttcctggtgtattgtttctgtactttctgtttccttttgagtgtctaagaacccaaaggctggcactatgttgcttatttcttttctgtttttcctaacatttaatttattttctgaccccctgagatggagtgatgtgtcgaggcattgcattgtgtttataccctcttttgttttcctcccatgactgcaa

SEQ ID NO: 275394 - DNA, 608 bp, Homo sapiens
tgctttagaacttactccttcaggaaagcaactctcactgaagtgtgggagcggagcagagaaaagactaggtaggaagagagccgagctcaattttatattccacaactaactggttctgactttctcaacaagtcgccaaagctagctgagtccaagttcctcatctgtaaaataaagatgttaccatctgtcccgccaaccccattttacttaatttcattgtgcgtgtctaaaatgaagttacaaatgtgcgaaaagtccctcgtaatttataaattccatacaaatttgagggaatatatataattattattmttattaagtcccctccccctcgccccgattatttccttctgttgattcctgcagcccttgcaatttaaatggtacttctaaaaacgccctcttttatttcctggtgtattgtttctgtactttctgtttccttttgagtgtctaagaacccaaaggctggcactatgttgcttatttcttttctgtttttcctaacatttaatttattttctgaccccctgagatggagtgatgtgtcgaggcattgcattgtgtttataccctcttttgttttcctcccatgactgcaa

SEQ ID NO: 275395 - DNA, 608 bp, Homo sapiens
tgctttagaacttactccttcaggaaagcaactctcactgaagtgtgggagcggagcagagaaaagactaggtaggaagagagccgagctcaattttatattccacaactaactggttctgactttctcaacaagtcgccaaagctagctgagtccaagttcctcatctgtaaaataaagatgttaccatctgtcccgccaaccccattttacttaatttcattgtgcgtgtctaaaatgaagttacaaatgtgcgaaaagtccctcgtaatttataaattccatacaaatttgagggaatatatataattattattcttattaagtcccctccccctcgccccgattatttccttctgttgattcctgcagcccttgcaatttaaatggtacttctaaaaaygccctcttttatttcctggtgtattgtttctgtactttctgtttccttttgagtgtctaagaacccaaaggctggcactatgttgcttatttcttttctgtttttcctaacatttaatttattttctgaccccctgagatggagtgatgtgtcgaggcattgcattgtgtttataccctcttttgttttcctcccatgactgcaa

SEQ ID NO: 275396 - DNA, 563 bp, Homo sapiens
atgtcaacatcataagattgagtgttgatagctgggacagatgaaaaataaagttgaagaggcagggstgattcctgtggaaatttcaagccaggctaagtttagacttggcttattaggtataaggagtccagctgattgatattcagcatgggacatgttttaatagtggcaatttaggaagattaatgccatgttaactatgagagatgaaagaaagaaagaccagcaatgatgcaccaccgttgtctccatgagactcaagatgaacatctggactagcagggtggcagagggaatgaacaaaatgggatgatttcttaagatattcccaagggagaaatgatagagcttaactgattgacgtaaaggccactttagagtgaatataagatcagtatttaattcaacggaagtttgtcatgtaaaaataattctatgttctggaacttttgaataacttctttagcatgcattttgtgactaaatcttgcctgttttataaggtttaattttgttttagcttattttctgatttttttttggagaataaacactttgtg

SEQ ID NO: 275397 - DNA, 562 bp, Homo sapiens
ggttaagatttcctggaaaagcagtagtacacattctgtgtttgtatttttcttgtattggaagaaagtgttgtatatatgtgtttgtgtgtttgcgtgtatatgtgtgagaatgcatgtgatttgattcttaatatgtcagtagagaaatgcctgtttctgaaggctgaccccagctatcaaggaaagcagaagagagggtggcaggtaatttctgaacagatggtggcagaggcagacccataaaggaagggccagggtctatcacagtttctgtgcygaatacagaagctgccatctaaaataaaacactttgtttcaaaacaccaacaataggaggaaaatgattataaaagaatttaaggcactgttctgtatttgtgttatattacaatagccaattcaaaaaaatcacaaagactaatacacaaataatttattatataaaaatagctgatataaagtctttcaaaaattgaaaataacctataaacctcatttgatatacatttgatcagaggaaactagccactattacagacacattttaagaaagatttta

SEQ ID NO: 275398 - DNA, 622 bp, Homo sapiens
tttcaacctcatctagagtcagaagtgatgttgatctgaacctatgacaatgtgtgatttggcttctgtttctataatactttaaactaagtactggataggaaactcaattccaaccagaaaataataggttttgtttttcaaggactttttgccagaagaaaaaatcatctctttgtttgtttcaggtaatgatgaactaaaggatgtacatgtacacacacacatcacacatacacagacacacacatgtatagccaaattttgagacccacattttcataatttaaccaaaatttgggcaatttcctattttgtaccaaaaatgatcttgcaaaaccttaatatttgtggttcccataatcattatccaatgaggcctacataactctaaatatgcctaaaccacagctgttaaataaaagttttagcagaatgttttctacagtgctttttcaggaaaccatcccagccacaaaatagttctcggcatcagatattttgctttcttaaacctggattgaagattgatgatgattctgggatgttttaaaatcactctataattgtaaatgkttaatcaaattcattgcagaattcaaagacttaccctttgacttaa

SEQ ID NO: 275399 - DNA, 557 bp, Homo sapiens
atgatggccataataataatattaataatattattcgtaataataacatactgctctatagtttaaaaagcactgttatgtgtgttagctcacttagtatctgcagtaacctaaaatagaggaaatagatayactaattcttaagatgaagcaacttgccctaggcacagtacgagtaagtttggtgcctatttttgttgatttttaatatgggaaaataaaacaaaatacgaaactcactgaggacacataataaatacttatatgctcatcaccagaaatgaatgattattaacattttatcatattacctgagatgtaattattaaagaagtaaaaaattacagataaataatgttatgctttcctctctcctttccttttctgcagaggaacctataaaattaatgtaatgtaatgtaatgggcccaggtacttgttttatttaaaaatgatatatagaattgcttgtaaattcaccttgtcactcaacattaaatcatttttactaatatttaacagtactgcatcacttgatcacattataattaatttat

SEQ ID NO: 275400 - DNA, 1176 bp, Homo sapiens
atgatggccataataataatattaataatattattcgtaataataacatactgctctatagtttaaaaagcactgttatgtgtgttagctcacttagtatctgcagtaacctaaaatagaggaaatagatacactaattcttaagatgaagcaacttgccctaggcacagtacgagtaagtttggtgcctatttttgttgatttttaatatgggaaaataaaacaaaatacgaaactcactgaggacacataataaatacttatatgctcatcaccagaaatgaatgattattaacattttatcatattacctgagatgtaattattaaagaagtaaaaaattacagataaataatgttatgctttcctctctcctttccttttctgcagaggaacctataaaattaatgtaatgtaatgtaatgggcccaggtacttgttttatttaaaaatgatatatagaattgcttgtaaaytcaccttgtcactcaacattaaatcatttttactaatatttaacagtactgcatcacttgatcacattataattaatttatwttctcagagttatattccttatgaaacttggggttcaactttacctattgcttatagtttcttagatggaaacaaaaggttctttaaatgaaagataaagctatatctggagggcttgaaattgcagttctaaagcttttgcaggtaaatcttgggttgatagcctgttatttctcccccatagaacaccaggctcacagatggtggtgtgactgattgtctcagtgggtcaagctttttttttgttttaawcttcagtgcttaaaggcaataccagtactcctacccatggaggttcttgacattatcatggctacttgaaggatagttgctaacactctggctcttaatccctcaatgataagctcaaacactcccatctctgcagcaaaaatctctttttgacactgcaatactactagactttctagtttcttgagaagtcattttcatagccagtttcatagccagtcagctgggatgctagtagaatgaccctcctgatgaaatataagacttttactggttagaagccactttgcccttgagaaatctctgtttaacagacacttcctgggtcacacagacctaattacactctgatggtgcactttcatt

SEQ ID NO: 275401 - DNA, 591 bp, Homo sapiens
cattgaaaccaggcctgccactccagtgttgttctcaggcatgcctacggaggagtacttatcataaaggaagaaaacagtaatagcccagaactgtctgtttgttcaactccaacttgaatgataccaaagattaaatcttggtttccaattgtttcatgccaaggctgttatatttaaggtccaaatatgtgcaccatatgtcatactgtagcttgacaattacctcaacaggcagtgtcagacagatggtaaacattactaccaggcatacgtacatttagaattagacatttaaataaattcaggcctatcttaagcttattaaaaggatttgggtctataaagccatttcgggcccctgcatatgctaaagtgtcttttgcatcctgaacagatttggtttggttcaagtaccttcgggctacagatggcaagtgacatgctttctctttgagccctgtacctgcaattaggccaataatggcaattaaggaaaatgtaaagagatttaaacttcagttcttaatatcataaccatgcaatactgcctatgaartgacagaaaatcctctgcagggaacatcacca

SEQ ID NO: 275402 - DNA, 593 bp, Homo sapiens
gctcaactttttaaaagcaatttcaatctgtgaacagtgcttgacacatcatagatactcaataatttgaaaggaaagaagtaaggaaggaagaaaggacagatgagaagaaggcataagacaaatcaggactttatttttcaaatgcaagtgtaacctcaggattgttatcccgcagggagtacacacctagtgtagtggctaactgcataaatgctgattcttggcctttctgagttcaaatactggctccatttcttacragctttgtgatcttgtcatgtttcttgacttatctatgtcttggatttctcatctataaaacagagataataaacattcctgttgtgagaattaaataatatatttataatgcatagaacagtgcctggcactatatttctgctggtttttttttgcggggggagacagaactgaaactcagtatttttttttcaaacagagccccattagcaggtttgataccattttcctcctcttcagctccatttggtatgtccagttttattctggacacctcttgagctgagagaatcacctcatcatgggaatctggtaatgcttccacaccc

SEQ ID NO: 275403 - DNA, 524 bp, Homo sapiens
aacattcctgttgtgagaattaaataatatatttataatgcatagaacagtgcctggcactatatttctgctggtttttttttgcggggggagacagaactgaaactcagtatttttttttcaaacagagccccattagcaggtttgataccattttcctcctcttcagctccatttggtatgtccagttttattctggacacctcttgagctgagagaatcacctcatcatgggaatctggtaatgcttccacacccatacagctagcaccaggctaaatcttaacttcagggctacagtctccttcaaacagatgagtgaggaagcatttgctaaattctggtgtacctgtgtgtttgtgtgtgtgtgtgataataaaagcagaatttcaaaaccctacactgtgcccaaactgggacctttgtcctgcttactcagataaactccagaagcatatggagtggcttttggaagaacacrtgtctcaattctattttggtttccccttaataaagacagcttg

SEQ ID NO: 275404 - DNA, 500 bp, Homo sapiens
aatcctgtgacctggcagcatttgcagcctgaaacaatctgttctattccagatggttttgccctgtgagcccatgcagcrtggcctactgcagcctctatggtctctgctttccttccttgttctttcgctcgctccattctttctcaacttgagaggttcaggcaagatcccttaatttctgtacatgtccgttaggggagttttcccctctctttcctattacttcagatgctgagagcagtcctgcctgcagttccagtccctggggtttaatccacttctgctgcttccaaacactcaaaagttacagcctgttctcaacttccacaaggggaatgtgggaagtgttctgcatttactgcattaaaaaataggttctccataagctttttgagggacaactctgtcactattcagacttgagaagatttcagttttttttggtgaggcaatagtgtgacgtctggtttctgggaataattacacagagtaatata

SEQ ID NO: 275405 - DNA, 500 bp, Homo sapiens
aatcctgtgacctggcagcatttgcagcctgaaacaatctgttctattccagatggttttgccctgtgagcccatgcagcatggcctactgcakcctctatggtctctgctttccttccttgttctttcgctcgctccattctttctcaacttgagaggttcaggcaagatcccttaatttctgtacatgtccgttaggggagttttcccctctctttcctattacttcagatgctgagagcagtcctgcctgcagttccagtccctggggtttaatccacttctgctgcttccaaacactcaaaagttacagcctgttctcaacttccacaaggggaatgtgggaagtgttctgcatttactgcattaaaaaataggttctccataagctttttgagggacaactctgtcactattcagacttgagaagatttcagttttttttggtgaggcaatagtgtgacgtctggtttctgggaataattacacagagtaatata

SEQ ID NO: 275406 - DNA, 500 bp, Homo sapiens
aatcctgtgacctggcagcatttgcagcctgaaacaatctgttctattccagatggttttgccctgtgagcccatgcagcatggcctactgcagcctctatggtctctgctttccttccttgttctttcgctcgctccattctttctcaacttgagaggttcaggcaagatcccttaatttctgtacatgtccgttaggggagttttcccctctctttcctattacttcagatgctgagagcagtcctgcctgcagttccagtccctggggtttaatccacttctgctrcttccaaacactcaaaagttacagcctgttctcaacttccacaaggggaatgtgggaagtgttctgcatttactgcattaaaaaataggttctccataagctttttgagggacaactctgtcactattcagacttgagaagatttcagttttttttggtgaggcaatagtgtgacgtctggtttctgggaataattacacagagtaatata

SEQ ID NO: 275407 - DNA, 500 bp, Homo sapiens
aatcctgtgacctggcagcatttgcagcctgaaacaatctgttctattccagatggttttgccctgtgagcccatgcagcatggcctactgcagcctctatggtctctgctttccttccttgttctttcgctcgctccattctttctcaacttgagaggttcaggcaagatcccttaatttctgtacatgtccgttaggggagttttcccctctctttcctattacttcagatgctgagagcagtcctgcctgcagttccagtccctggggtttaatccacttctgctgcttccaaacactcaaaagttacagcctgttctcaacttccacaaggggaatgtgggaagtgttctgcatttactgcattaaaaaataggttctccataagctttttgagggacaactctgtcactattcagacttgagaagatttcagttttttttggtgaggcaatagtgtracgtctggtttctgggaataattacacagagtaatata

SEQ ID NO: 275408 - DNA, 590 bp, Homo sapiens
gacgcctgcatagaagagagggtattacagcaggcccttgaggagaaacgggatttcacagagcacagatgggttgaaggtagaagggaggcagtgagggactcaggaggctctgatctagttgcaatttatcatagggtgctgggagtatttatttccccatggaattcagtgatttcctcttgtctgtatgttgacttcccatgccactgattcaagggctgtgaagcagagtagtgggtacaggggaaggctgattctactttggagacttctctctgggcaaaaatgtcttccattaaaattatartctctttatcctttccctaatcctgccaaactaagagataggagagttaacgttgtccgtctggtccagaaagatctaacctttcaaagcatcagaggggaaggggcacgattcccctcattgttcatgctacgtttctaacatgtcaccctcactttagcaactttaatggcatgacaaggcatacaggagcgccgtctggtcatgcaaagagctttccagctgcaagctccatttttcccaaaaaagggaaagcctgaagttccccaatacattcatg

SEQ ID NO: 275409 - DNA, 540 bp, Homo sapiens
ttggggaggtgtgtcttgaattggattaartattggatgttgtagcccgccaggataatgctgaaactaaggccacacatgctctgtctgagctaaaagaagggatgccaagtgcaccagtaatgtcctcagcagcagaggttccagatgcctggcaacctgctgggcagagaattcagaggcaccagctcttcccactattacatgaattacatctgcaaactgaatacatgaagatgaacaaaatcctgtatcattctaagttctacagatttatttgtccaaaatttaaataggaaaatggaaaataataatgaatgaatatttctagaaatccagattgataaattacagacaatgaagaacattttctactagaatagtctttttggctgggcatggtggctcatgcctgtaatcccagtgctttggaaggctgaggtgggaggatccctaaggggagaccatcacttgagcccaggagtttgagatcagcctgggcaacatagtgagactttgtctctgcaaataatttaaaaa

SEQ ID NO: 275410 - DNA, 540 bp, Homo sapiens
ttggggaggtgtgtcttgaattggattaaatattggatgttgtagcccgccaggataatgctgaaactaaggccacacatgctctgtctgagctaaaagaagggatgccaagkgcaccagtaatgtcctcagcagcagaggttccagatgcctggcaacctgctgggcagagaattcagaggcaccagctcttcccactattacatgaattacatctgcaaactgaatacatgaagatgaacaaaatcctgtatcattctaagttctacagatttatttgtccaaaatttaaataggaaaatggaaaataataatgaatgaatatttctagaaatccagattgataaattacagacaatgaagaacattttctactagaatagtctttttggctgggcatggtggctcatgcctgtaatcccagtgctttggaaggctgaggtgggaggatccctaaggggagaccatcacttgagcccaggagtttgagatcagcctgggcaacatagtgagactttgtctctgcaaataatttaaaaa

SEQ ID NO: 275411 - DNA, 2131 bp, Homo sapiens
ttggggaggtgtgtcttgaattggattaaatattggatgttgtagcccgccaggataatgctgaaactaaggccacacatgctctgtctgagctaaaagaagggatgccaagtgcaccagtaatgtcctcagcagcagaggttccagatgcctggcaacctgctgggcagagaattcagaggcaccagctcttcccactattacatgaattacatctgcaaactgaatacatgaagatgaacaamatcctgtatcattctaagttctacagatttatttgtccaaaatttaaataggaaaatggaaaataataatgaatgaatatttctagaaatccagattgataaattacagacaatgaagaacattttctactagaatagtctttttggctgggcatggtggctcatgcctgtaatcccagtgctttggaaggctgaggtgggaggatccctaaggggagaccatcacttgagcccaggagtttgagatcagcctgggcaacatagtgagactttgtctctgcaaataatttaaaaawttggggaggtgtgtcttgaattggattaaatattggatgttgtagcccgccaggataatgctgaaactaaggccacacatgctctgtctgagctaaaagaagggatgccaagtgcaccagtaatgtcctcagcagcagaggttccagatgcctggcaacctgctgggcagagaattcagaggcaccagctcttcccactattacatgaattacatctgcaaactgaatacatgaagatgaacaaaatcctgtatcattctaagttctacagatttatttgtccaaawtttaaataggaaaatggaaaataataatgaatgaatatttctagaaatccagattgataaattacagacaatgaagaacattttctactagaatagtctttttggctgggcatggtggctcatgcctgtaatcccagtgctttggaaggctgaggtgggaggatccctaaggggagaccatcacttgagcccaggagtttgagatcagcctgggcaacatagtgagactttgtctctgcaaataatttaaaaawccatcttatgtcttgttgggtcagttgtgattwtggagtcagaatggaatcttcccagatttccgcttggtgctgagctgtattgactttctgtagctgtgggaacaaaactacctctactctgacctttacttattctattaatatcttctcaaaacatagggatctagatttaaccctgctcggtttcctatcctgactgtggcaaactgcaaaacaaaatggccgttgcttcccaggttgtcacaaaccttcctgctttgtaagaaataaagtcagggtgatgagtcctttcattcatccatttatgccggagagaggagaaatggggagtgctttgtctgtcaattagggcatccggctgcctcatttccatccccagctccagtcaccagagctgctgccatgcaacgcctggagcctcctgcaaagtcctgccttcagtctccacttggttaggtctctgctttgtggctctctcccctcagtggcctgggctctgggccctgaagtcttcaggagatwccatcttatgtcttgttgggtcagttgtgattttggagtcagaatggaatcttcccagatttccgcttggtgctgagctgtattgactttctgtagctgtgggaacaaaactacctctactctgacctttacttattctattaatatcttctcaaaacatagggatctagatttaaccctgctcggtttcctwtcctgactgtggcaaactgcaaaacaaaatggccgttgcttcccaggttgtcacaaaccttcctgctttgtaagaaataaagtcagggtgatgagtcctttcattcatccatttatgccggagagaggagaaatggggagtgctttgtctgtcaattagggcatccggctgcctcatttccatccccagctccagtcaccagagctgctgccatgcaacgcctggagcctcctgcaaagtcctgccttcagtctccacttggttaggtctctgctttgtggctctctcccctcagtggcctgggctctgggccctgaagtcttcaggagat

SEQ ID NO: 275412 - DNA, 524 bp, Homo sapiens
ccatcttatgtcttgttgggtcagttgtgattttggagtcagaatggaatcttcccagatttccgcttggtgctgagctgtattgactttctgtagctgtgggaacaaaactacctctactctgacctttacttattctattaatatcttctcaaaacatagggatctagatttaaccctgctcggtttcctatcctgactgtggcaaactgcaaaacaaaatggccgttgcttcccaggttgtcacaaaccttcctgctttgtaagaaataaagtcagggtgatgagtcctttcattcatccatttatgccrgagagaggagaaatggggagtgctttgtctgtcaattagggcatccggctgcctcatttccatccccagctccagtcaccagagctgctgccatgcaacgcctggagcctcctgcaaagtcctgccttcagtctccacttggttaggtctctgctttgtggctctctcccctcagtggcctgggctctgggccctgaagtcttcaggagat

SEQ ID NO: 275413 - DNA, 617 bp, Homo sapiens
gtcaggtctttcagtgaaacagaaccaataggagattcatataataaataattggctcctgtgactgtggaggctgacaagtcccaagatctgcagttggccagctggagacccaggagagccggtgacgcggttccagtctgaagccagcagacccaagacccaggaacagctaatgcttaagtttgagtccaaaggttggggggcttggagagggtgacaaatgtcccagcttgaaggcagtcaggcaggaggcgttccctcttactcatgggagatcagcctttatgttctattcagaccttcagctgattggccactttcgccctctccttgtggtcctgtcaaactcctgggaaggtggkgaacacttgccctcctacttccttgcctgcctcagctcctcggcccactccacttgagcttctgcctcctgcactgtcattgggtgagtggctgatggctcactgactgccaagtccagtggacatgggcagccacaccttacttgacctctttgggactctcagccctgctggccttgtcccatcttcggtccctcccaagggcttctgaggtgccaccgtgcactgctggtgttttcacagcactgactg

SEQ ID NO: 275414 - DNA, 828 bp, Homo sapiens
ccttcctgctttctttcaggcatacatgagtcatctccttctcccctcaggggcttgaatcttgcctggcccccagaggtgacaatcactgcaggacagagccacaccgtagtaagcaagttacactccgctgtggggagccggcatcccagcctggaggaggagaccctgtcctgggcctaacccgcagataggagctgagtcatgatttggtaggtcagccttggcccctggctgaagcaagggggaaaagcatcagagaagaacatggttaggacaaggggctgagggtcattgctgctttcagtttcacccctcatgtgctgtgtgaccttgacaaaaatcttcactctctaaacaagccagagctgggaaatctgcccgctaatgctttgcatatgtatgttgcaaggaataatgagacaggctccaygaagcatgttctgtccttgggggacaaacagtacaagctatttatttcaagagcatggcttaaccagctcatccagcttagcccagaaacacccctggctatcctggcatgatctctgtagaagcaagaawacaggtgcctgccaccatgcctggctaatttttwaaatatttttagtagagatggggtttcaccatgttggccaggctgatctcgaaactcctgacctcaggtgatccgcctacttcagcctcccaaagtgctgggattacaggcgtgagccactgtgctgggccttgtagtcctgctttaaagaaacttggtgggagaattcaaattgcctcttgaatagtgatgtcaacattattagttccacatctgaccatcttgactag

SEQ ID NO: 275415 - DNA, 549 bp, Homo sapiens
caaacttataaaatacaacagttgaacaatgtcatcaatctactatatttaacagatatttatagaactccacccaacaatatcagaatacacattcttctcaagtgcatagggaacattatccatatgctaggccataaaacaagtctcagtaaattaaaaggattcaaatcatacaaagcatgttctccaactataatggaattagaaatctataatagagagaaatttgggaaatgcayaaatatgtgaaattaaacaacatactcctaaataaccaatgaatcaaaggagaaagtgttaggaaaattagaacatactttgagataaatgaaaatgaagacacattccaaaacttattgaatgcacttagaacggtgctcaaagagatatttttagctacacaagctttcacttcaaaaaaagtaaataacctacccttcaacattaagaaactggacatgaagtacagactaaactgaaagcaagcataagaaattgaataataaaaataagcgtggaaatagaaaaatgagagaaaaaaatcaa

SEQ ID NO: 275416 - DNA, 553 bp, Homo sapiens
gacaacattttaaaagcagtagcagaaaaatgtcaagtcacataagggaatgccaattagaccatcagtgcatttctcagcacacaccttgtagggcaggagagaatggaatgacatattcgaagtgctgaaaagaaactgctaactatactgctatactcagcaaagctgtccttcagaaataaatgagaaataatctttcccagacaaacaaaagttgaaggaatttattaccactagaccttccttacaagagatgtctaagggagttctttaagtggaaataaaaggacactaataactaacatggaaacatatgaaagtataaaattcactggtaaaggtaaatatatagtcaactctagaatattctaatattgttatatatasttctataaagtatatatagatacagatagtataaaggttaaagaccaaaatagtcaaagaaaaaaaagctatattaagagatacataatataaaatgatgtaaactgcaacatcagaaatataaatgagggagggtaaaagtctaatgtttttgtatgtgact

SEQ ID NO: 275417 - DNA, 442 bp, Homo sapiens
tttcatgcaaatgataaccaaaagaaagcagtgcagctataatcacagcagataaaatagacttcaagtcaagaactgccacaagaaaaatgcacctactaaaaatgcaaaaattagcagggtgtggtrctgcacatctgcaatcccagctactcagaaggctgaggcaggagaatcacttgaacccaggaggcagaggttgcagtgagccaagatcacgccactacactccagcctgggtgacagagtgagagaattcattaaaaaaaaaaaagagagagaagaaagattccaactaaacactaaacatttagcctaatattatgccccaaggaactagagaaagaacagattaaacccaaagttagcagaaggcaggaaataataatctgagcagaaataagccaaatagagaacagaaaaaccatagggaaaaattcaa

SEQ ID NO: 275418 - DNA, 604 bp, Homo sapiens
ctaaggacttggtgccctgcatcccagccaccccagccatgactaaaaagggccaaagtacagcttgggctttgcttcagaaggtggaagccccaagccttggcagcttccacgtggtgttgagtctgcaggtgcacagaagtcaagaattgaggtttaggaacctcggcctagatttcagatgtatgaaaatgcctggatgcccaggcaaaagtttgctgtggccagggtgggagtggggggctcatggagaacctcagctagggcagtgtgaaagggaaatgtggggtcagagcccccacacagagtccttactggggcrccatctagggatgctatgagaagagggccaccatcctccagaccccagaatggcagattcactgacagcttgtaccatccacctggaaaagtcacagatactcaatgccagccgacagaagcagccaagagagaggctgtacccaccaaagcctcaggggtggagctgcccaagaccatgggaacccacatcttgcatcagtgtgacctggatgtgagacacagagccaaaggaaatcatttcacagcttgaagatttgactgccttgctggatttcagatt

SEQ ID NO: 275419 - DNA, 627 bp, Homo sapiens
cagtagctctttaatttttcattgctgagtaacatttcattgtttgaagatttatagactttatatatcctttctcctgttagtgggcatttgggttgtatatgagtaatcaattactatgcaatatattactccaatatatagcagctgaaacatttattatctcacagtttctatggtgtaggaatctaggagtggcttagctgagttgttgtggcttggggtccctcatgatcttgccataatctgtcagccagggcttcagtcatctcaagatttgactgaagctgaggggtccacattcaagctccctcacgtgcttgttgggacaggcttcacttcctttctggctattagctacagcctccagttcatcaccacaaggctcccatcctaagrttacttacaatatgtcagcttgcttcctgcagagataataatccaagagggagagaaagcatgagaatcttcagcgatgtggattttatttttaatttactgattttaaaattatacatagttttaggctttttctcaaagttatatataaaattctctaagtttatcaattattctccattaggtgttatgcaaaaatcatcgttttctttcttgtatcaaaatgtt

SEQ ID NO: 275420 - DNA, 600 bp, Homo sapiens
gctgtccacgtagctgctgatgaaatcaaaggcgatacttgatgtggggcccacaggcatttgttacacaaagctcatgaggccaggactttcatgggtggtacagccttattttgtgtttacatgcacaggatcatagttattttaagcaaacagaatgatcatgcttaaatggtgcctcacttgttagatataattactgctaagtggtaccagactagaagataygaaaacttattttcttgctgttgaagccttgtgaattggattttttagcaagtttggtagattttagcaagtttggaagatttttgctttgactgcttttcttggcctttactgacaccaataacatcaaagggttcattttagactgaagagccatagttacaagcacatttttctgagatgaagaaaatagatatatgttttctgggggtataataagattagtttttaacaaatttgaaaaactaacaagtgttctaaagaatttcatatggaaatgcctggaaggcaagttgggtttactaataagaatagaactcaagcaaaagtctcttctgaaaatacagacaaagctattagagcaaatgagga

SEQ ID NO: 275421 - DNA, 600 bp, Homo sapiens
gctgtccacgtagctgctgatgaaatcaaaggcgatacttgatgtggggcccacaggcatttgttacacaaagctcatgaggccaggactttcatgggtggtacagccttattttgtgtttacatgcacaggatcatagttattttaagcaaacagaatgatcatgcttaaatggtgcctcacttgttagatataattactgctaagtggtaccagactagaagatatgaaaacttattttcttgctgttgaagccttgtgaattggattttttagcaagtttggtagattttagcaagtttggaagatttttgctttgactgcttttcttggcctttactgacaccaataacatcaaagggttcattttagactgaagagccatagttacaagcacatttttctgagatgaagaaaatagatatatgttttctgggggtataataagattagtttttaacaaatttsaaaaactaacaagtgttctaaagaatttcatatggaaatgcctggaaggcaagttgggtttactaataagaatagaactcaagcaaaagtctcttctgaaaatacagacaaagctattagagcaaatgagga

SEQ ID NO: 275422 - DNA, 616 bp, Homo sapiens
tacaaggccagtactaatgaggctatctagtgtcatatccataatccttgtatataaaaacctttttggcttggaaactgtctttctgccctccaatattcaaaagtactatttcatgtcaacaatatttgcccaaagaaaattagtaacctgaatcattaacaccataagctatttgcctgcttccactggagaaagtttaaaaaaaaaaggatgaaagaaagaaaagaaagaaagagagaaaagcaacttggattctctgtaattacctgtttgctttgacaatgaatttatgtattaaagccgtttataatcatgatgcctcaagcttatttagttgtcgagtgtgctatctctcagagcagagaaggtcagagagctcccagggcataaacaaaataatggaactaatgaattacatgacagttaaactgcacatatttcacattaaatggatagcttctttggttagttcagtcacacagctggtcaattcactgcattaatcagctatatttgatgtctaagctgagcagtatgataaggcaaatggccaaactgattgtttaatgyaaacactgttaaaaggactattctttctcaaattctggagact

SEQ ID NO: 275423 - DNA, 566 bp, Homo sapiens
agatttttgcaagattatccttgtaaaatctttctggcggttggttagaaaatgttttaaataaggcttttctataacagttgatatttgtgcacaatcatatcgaactatgtgtatggcttgtcatcctggtatgtatgatagtgtagttaacctagcctaatatggtctggggtccatttcggaaaataatcagttgaagtgaaagaggcattttacaactcaaggtttcttttacaggatttaaatcactgtttcaagagaaataaattaggagtgatgagaatgggcaactgtaagaaacagacaataagaagtggctggcagaaaaatgtcacttaaaagctttrtccagtgaagggatgttgtcaggtacatttgctaattaataactgatgctgagaggtaaaagtcagcttctcgacttttgacagccctgctccatgaaaaattttcttcaaatgtggtcacagaaaagtgggaaggagaggcaatgagcatcccattacaagcagtctctcagcagagacagaactagtggcatgttttgactaggagactgtgag

SEQ ID NO: 275424 - DNA, 543 bp, Homo sapiens
taattctgctattcactttcacatgtgacatcagtttttcttttataagctccgtacataatacttttaaaccttttgcacataattgtgtgtttaattgctcccattttgtattacattagtaaatttttaaaaaattgaaaatttcaatgttatcagaattaatattttaaagaatatcaatggttctacaatttaaataggaatagaaattgtttaaaatttttttgaaaatcccagtgttatcagaattaatgttttaaataatatcaakgattctacaatttaaataaggataggaattgtttaaaaatattttttgaaaattccaatgttatcagaattaatgcttcgaagaatatcaatggttctacagtttaggaataggaattgaaacatatttctttttaattagtaaaaaatatttacacgcttacgaagaatttacacatttataagaataaataaatcaacaaaattatatggcagaaacttaaactcatttttacacctttctatattttttcctaaaaattcaccact

SEQ ID NO: 275425 - DNA, 558 bp, Homo sapiens
aaacagttttgtggaaataaatggagaaaagaatactagctttggcttaaaagggctttcacttattaacagatgaaaatgacataagcagctcaaacgttctgagtctttactcttatctgtaaaatatcaaaatgaaagttgggttaaattgcaattttcctttagcatatatcttaagaatgacaaacatgcttcaccyaattttagcacagtatatagaattttgaatattatattaatttggaagagtgtacatcacaatcacagaaatctttcaagttaatcatcacataaaattatgtaagaataaaaatattaatgttaaaatatttaaggctaattcatattgtattctctaaattaagttggattaagaaaatttgaggttattgttttgaatgtgtacatgaaaaattattgattaatccattaacatcttttaaagaaatcatgaagtggaaaaacaaccgtaaacactttggaaagttttgaatagataactctgctaattttctctgcaacttactttcctcttatctttgtctatcacttacc

SEQ ID NO: 275426 - DNA, 492 bp, Homo sapiens
gatctttgcttggtgatggaagaattctatactttgcatggaaacttgggttatgtgggtayataaatttatcaaaactgatgtcactgtatacttaagatctgtgcatttaagcatatttaaattttacctaaatttaaaaaaaacaagaaggaatgtgtatatgtgtctataactggaatttcaaaggttcaagaagctctaagatatatattaagagcccattaggaccatatttatcaaactgtaatgtgcacataaataatttggtgattttgttatgcagattctgattcatccattggggatgtggtcattttgcatttttaataagcttccaggtcctagtaataatactactgatgcacagactgcactttgattatagcaagggttggagatggagatgttaaagccaaagaaaaacaataatggggcaaattgctgtctgcaaatattaaaagcactctcatgtgaaagagagttctagtt

SEQ ID NO: 275427 - DNA, 571 bp, Homo sapiens
tgagtattgttgtcattaatccctactctgtcaatttcaataaatagatttcttgtctaaggaagtatttgttaatagcttttcaagtgaacttgctcacatggatagaagagaaatccatttaccacatccactcattgcctttatttttccagacaactcagaaagtacttttagcagcaagtatcagcacattttgtaatacaggcatgastgagtcatatttccagaacttactggctataagatctcaggcaattcatttaacctctctaaacctcaatctatgttcccgtaaaattaataaacagttaactcttgagtaacatcggtttaaaatgcatagaacacttcaatgcagctttttaataaacatattagaaactttttggagatttgcaataatttgaaaatatttgcaggcaaaccacttagcctagaaatatttttaaaaattaagaaaagggtatgtcatgaagacatgaaatatgtatgcatagtagcctattttattatttattaccacacaaattcattacaaaaagttaacattgatcaaaacttagacaca

SEQ ID NO: 275428 - DNA, 619 bp, Homo sapiens
ttttaacgcattttatattatcagtaaggcttctggtcaacagtagactattcgagtttttgaggaatctaaacttatatacagatttttcagtgtgcaagaggtcagtgcccttagcttctgtattgttcaatggtcaactgtaattttatttctttattatggcacaataatctaaatatagaagatattccattaatcattaaataaaagacaaaaatactatgcaataatacactttatttctataaattattaaagtaattgatataaagcatttgattgcataaatatgaaatttccctccactatttgagcacttcaacataaatgccacargcataggatttgggattagacatgctagagatgaaattggattctgttgcatactcatcatgtgattagtatcaactgcttaatctgtcttattttctgaagttgaatgcaaataatatcggttcatttcttattgtagagattaaagacagtatatattaagtgtttgaactctgtcctgacacataataagcattccataagttaaagatttttgttattgctactaattataaaacacctattcaccattctgacattccagagacattgttgtaag

SEQ ID NO: 275429 - DNA, 619 bp, Homo sapiens
ttttaacgcattttatattatcagtaaggcttctggtcaacagtagactattcgagtttttgaggaatctaaacttatatacagatttttcagtgtgcaagaggtcagtgcccttagcttctgtattgttcaatggtcaactgtaattttatttctttattatggcacaataatctaaatatagaagatattccattaatcattaaataaaagacaaaaatactatgcaataatacactttatttctataaattattaaagtaattgatataaagcatttgattgcataaatatgaaatttccctccactatttgagcacttcaacataaatgccacaggcataggatttgggattagacatgctagagatgaaattggattctgttgcatactcatcatgtgattagtatcaactgcttaatctgtcttattttctgaagttgaatgcaaataatatcggttcatttcttattgtagagattaaagacagtatatattaagtgtttgaactctgtcctgacacatartaagcattccataagttaaagatttttgttattgctactaattataaaacacctattcaccattctgacattccagagacattgttgtaag

SEQ ID NO: 275430 - DNA, 516 bp, Homo sapiens
ggtgggtgaattgataattcttgatggattaatagaaggcagtctaataaatattgttaaattattaatatttcttccaactgaaaaatttgtcaagagtgaataaaatatcaaagtcaagttagagtctccaggagagcttacgtgtttcttctttgttctgaaaaatttcccaaatgggaaatatacatagtacattttgctgaccagaaatgactctaacttttaaaagtacaaatamaactttgggacccatgggaaaatgacaacacctgattcaaaaatcaccacttgatcaagattgtctgggagccaagagaaaccccaatacagggaaagggtgagagatcctcagtgagcttcattctcactcccggaatcttagcaactgaaaagtcccttggccctcatgggccttgcaactaacataggaagctactggaagattctctgatagcactgccccagggagaaagtgcaggctgagaccgtcacattctctgagaccttagcaac

SEQ ID NO: 275431 - DNA, 516 bp, Homo sapiens
ggtgggtgaattgataattcttgatggattaatagaaggcagtctaataaatattgttaaattattaatatttcttccaactgaaaaatttgtcaagagtgaataaaatatcaaagtcaagttagagtctccaggagagcttacgtgtttcttctttgttctgaaaaatttcccaaatgggaaatatacatagtacattttgctgaccagaaatgactctaacttttaaaagtacaaataaaactttgggacccatgggaaaatgacaacacctgattcaaaaatcaccacttgatcaagattgtctgggagccaagagaaaccccaatacagggaaagggtgagagatcctcagtgagcttcattctcactcccggaatcttagcaactgaaaagtcccttggccctcatgggccttgcaactaacataggaagctactggaagattctctgatagcactgccccagggagaaagygcaggctgagaccgtcacattctctgagaccttagcaac

SEQ ID NO: 275432 - DNA, 516 bp, Homo sapiens
ggtgggtgaattgataattcttgatggattaatagaaggcagtctaataaatattgttaaattattaatatttcttccaactgaaaaatttgtcaagagtgaataaaatatcaaagtcaagttagagtctccaggagagcttacgtgtttcttctttgttctgaaaaatttcccaaatgggaaatatacatagtacattttgctgaccagaaatgactctaacttttaaaagtacaaataaaactttgggacccatgggaaaatgacaacacctgattcaaaaatcaccacttgatcaagattgtctgggagccaagagaaaccccaatacagggaaagggtgagagatcctcagtgagcttcattctcactcccggaatcttagcaactgaaaagtcccttggccctcatgggccttgcaactaacataggaagctactggaagattctctgatagcactgccccagggagaaagtgcaggctgagacygtcacattctctgagaccttagcaac

SEQ ID NO: 275433 - DNA, 470 bp, Homo sapiens
aactatatgctgcctataagaaactgacttcacctttaaaggcacgattagactgaaagtaaagggaggagaaaatatagtctatgaaaatggaaatcaaagtgagcaaatgtagctattaggtaggtgcagaggaaattgtgktttttgccataatatatttacatcagatgaaacagactttaaactaaaatcagttaaaaaaaaaaaaaaggcaaagaaagtcattataataatgacaaaaaatcaacccagtaagaggagataacaattctaaatatatatgtaccaacgctggagaacccagatttataattcaaatattccaagatctaaagagagagatagaccataataaaataatagtaatagtggggaatttccatactccattcttagcattagacagatcatcaagacagaaaatcgagaagaaaacattggatttgaactagactgtaagcccaatg

SEQ ID NO: 275434 - DNA, 470 bp, Homo sapiens
aactatatgctgcctataagaaactgacttcacctttaaaggcacgattagactgaaagtaaagggaggagaaaatatagtctatgaaaatggaaatcaaagtgagcaaatgtagctattaggtaggtgcagaggaaattgtggtttttgccataatatatttacatcagatgaaacagactttaaactaaaatcagttaaaaaaaaaaaaaaggcaaagaaagtcattataataatgacaaaaaatcaacccagtaagaggagataacaattctaaatatatatgtaccaacgctggagaacccagatttataattcaaatattccaagatctaaagagagagatagaccayaataaaataatagtaatagtggggaatttccatactccattcttagcattagacagatcatcaagacagaaaatcgagaagaaaacattggatttgaactagactgtaagcccaatg

SEQ ID NO: 275435 - DNA, 642 bp, Homo sapiens
gcaataaatgcctccatcaaaagagtggaaagtttctaataaataatctaatcatgtacctcagagaaaactacaggcctatatccttgagaaacatagaagcaaaaatcttcagcaaagtactagcaaactgaattcaatagcacctcaaaagacattacagtaagattaagtgacaattttagtagggatacaaggatgatttaacatatgcaaaactaaatgtgataaaccaaataaagataattaaagacaaaaactatataatcatttcaatcgaggcaggaaaagtatttgataagcaccccttcataataaaaactcaacaaactaggcatataaagaacatataccataaaggcyatatatgagaaaccaacagctagcatcatattgaatgagaaaaagttgaaagttcttcctcaaagtaacttggttagttctatgcttcctcacattcttcaatatggttacattattcatatgtagcccaggtgctttcatatgtgacattttagcttcctctcatacactgcttgagttttcatcctgagatagtgcagttcatacaaatgccaatttacgtttgtagagcaaatggatggatggaaagatggatggctggatggatgggcagatgga

SEQ ID NO: 275436 - DNA, 535 bp, Homo sapiens
agaagaatgtgaggggaagaatgtgaggcacttgcctcagtcatgagatttgaaaaaggaaaagtatacttagtaattgatgtaaataatatcttaatttaataacactgaatgttccatttacccgaggctcaaacatagttaatcaagttcctgttgctgatctaatcagggtctaaatttttaatattttgttcattatgaattattgtaaattaattttaatgtttaaaatattgcattaaatgtaatttatcttgaatgctgagttttcgaggtatccccttamattttgccccagaggtaagtttctcatctaactcacttgcctgactagcacagccctgccaggagccttccttttttatgtacttgataattataagataatccagagtgtgtgtgtgtttgtatgtgtgtttgtgtgtgtgtgtgtacacacatacacaggtaagactaaaggagaatatcaacataaactaacatagtttgtctcctaataaactatttcttcttacagaatatatcagaatat

SEQ ID NO: 275437 - DNA, 535 bp, Homo sapiens
agaagaatgtgaggggaagaatgtgaggcacttgcctcagtcatgagatttgaaaaaggaaaagtatacttagtaattgatgtaaataatatcttaatttaataacactgaatgttccatttacccgaggctcaaacatagttaatcaagttcctgttgctgatctaatcagggtctaaatttttaatattttgttcattatgaattattgtaaattaattttaatgtttaaaatattgcattaaatgtaatttatcttgaatgctgagttttcgaggtatccccttaaattttgccccagaggtaagtttctcatytaactcacttgcctgactagcacagccctgccaggagccttccttttttatgtacttgataattataagataatccagagtgtgtgtgtgtttgtatgtgtgtttgtgtgtgtgtgtgtacacacatacacaggtaagactaaaggagaatatcaacataaactaacatagtttgtctcctaataaactatttcttcttacagaatatatcagaatat

SEQ ID NO: 275438 - DNA, 535 bp, Homo sapiens
agaagaatgtgaggggaagaatgtgaggcacttgcctcagtcatgagatttgaaaaaggaaaagtatacttagtaattgatgtaaataatatcttaatttaataacactgaatgttccatttacccgaggctcaaacatagttaatcaagttcctgttgctgatctaatcagggtctaaatttttaatattttgttcattatgaattattgtaaattaattttaatgtttaaaatattgcattaaatgtaatttatcttgaatgctgagttttcgaggtatccccttaaattttgccccagaggtaagtttctcatctamctcacttgcctgactagcacagccctgccaggagccttccttttttatgtacttgataattataagataatccagagtgtgtgtgtgtttgtatgtgtgtttgtgtgtgtgtgtgtacacacatacacaggtaagactaaaggagaatatcaacataaactaacatagtttgtctcctaataaactatttcttcttacagaatatatcagaatat

SEQ ID NO: 275439 - DNA, 1149 bp, Homo sapiens
gattgctgctattgattgtgaagatgctgatacagatgcagaccactagtttttcatatgggttgaaggagtcattggcaggagggaatttaaagagacagacactcttatttaaatttttctttttcttacttgataagtatttaaagaaatcaggttatttgctgactgaggacacagcacaactgaggcttcagtggaccacacacaagagaagcatagcctttccaaaagtggtttggaaaastcactaaacaaattgacaatttgagcattcatcagttaacaacagtgatcctaggagagggggaaaattctgatgtccaatgttaccacattacaatattcaaaatgttcagttctcaatacaaaaattataatgcatacaaaaatcatgaaattatgaaattatgactccttctagtagaaaaacaaataaaccatccatgagaagttcagacattgaatctactggataaaaaccttaaattatctgtcttaagtatgctcaaaggtatgaaggaaaccacagacagagaagcaaagaaattaagagaaaaataaatagwaacaaataaaccatccatgagaagttcagacattgaatctactggataaaaaccttaaattatctgtcttaagtatgctcaaaggtatgaaggaaaccacagacagagaagcaaagaaattaagagaaaaataaataggcatctagggaatattaatagatgatattataaaaaggagcaaagtaatacttctggaattgaagagtacactattccgataaattttcactggacttgttcaaaaacagttttaagcaggcagaagacagaagcagaggatttacatgtaagacaaatgaaatgatcagtataagaattcaaaaaaaaagaataaaagaaaaaagaattaaaaaaaaacttagcctaaggaacttatgggacactatcaagggtaccaacatatgtattgtggaatttccagaatgagattagaaatagaaagtgtagaaaagaatatttgaagaaaaaatggaagggaaattcwcaaattgtatgatggatgccaatgtgcacatgcaagaagctcaaaaaattcctaggataaactcaaagagatccacaccaagacacactgtcaaaa

SEQ ID NO: 275440 - DNA, 1120 bp, Homo sapiens
gaaacttgttctcttcccatccaaatctgcttacctccttgctacagtaagccagatcatgtcaaatggtcaacttcatccttgcattttctaaataaaaactttagcattatccttgactcttttagtactttcacaacccatatccaaattctgttggctctgtcttcaaaatctattaagattcttatcaccccttgccagctccacagcaggcactcctgcactgttccttgacatttttactaataccctcctaaaacacctccctgcttcaacacttgctccctttcagttgatttataacacatcactagagaattttatttttttaacaaagacaaattatgctaccttttggctcaaattcctaaaaayctgtgatgtttaaatttatgttttaacttgatgggtcatgaagtgcccagccatttgattaaatgttattgtgacattattgtgaaggtgtttctgggtgaaattaacatttgaatttatagactgagaaaattagattgtcttccttcatgtggggtgggcctcatwttactgcaggaatagcaccatgccattcatgaacaatccaccttcatgactcgaacacctcacgcaaggttccacctccaacactggagatcacatttcaacatgagatttaggggcatcaaatattcaaagtatatcaatgtccttcctttatttttgtttgttctttctaggagactttaggagtttcttaatagtttaaagcagcaaaaawctaaattttagcaagggcctgtcatacatttcaccttgaaatcaactgccttgaaagtatattcttaactgtaaaataatcatggggaaatagttgctgccttcataacagtattttgaaagtttttgaaattatttgaaaataaaattaacgagtaatttaaaaattaatctctttgtttactatgtattgctatttacatgattatttattaaatgcagctatggcttaagataattttatcacctctcaggaggtagaaggaagtggctgtgaattaaataaataagacttttaagaaatgttatagataaatattgtgcattcagtaacttaaaaaatattctgaaagtaacaact

SEQ ID NO: 275441 - DNA, 464 bp, Homo sapiens
tgcaatcaaatgctttgaaaatacctagaaaactgttttccctagaaagacagaattaattagttttaatttagatgtttaaaagtatggaaatattttagaagttttgaaaatcataactttatttttcttgtgggaaaactttactaagatccccaattgtgaagctgaaatccatgtgaagcattgtttacattcctcaactcaaaatggcacaccgtattttcagttacttaagccaaaatcaagrttatccttgatttgtctctttccctagaaacccatattcagtatatcaggaaatctttaacttccaaaacattttttgaatttcattctctccatctctactgctaaaactctgtcacgttcgatttgttcttatcttccccaacattttcccatttccccactcttggctcacctaccattcatttcctacattgcagaaaaagcaatgttat

SEQ ID NO: 275442 - DNA, 513 bp, Homo sapiens
tgaggacatgaaggtcaatctaagaatgaaattcatgagattcagtgaatgaatgttttgtatccatattcatgacacaaggactatgccaactgctggagctaygtgcactgttgttagtatacttgtaacagcagagacaaacccactgaaaaaaactgaagggttgtcaaactcgagatagagtatattaataaaattgtatatgttgcgtgctcaaagtcaagggttatatagttccttgtgctgctggaacagtgtaccatatactaggtgacgtaacagaaatttgccatcttaccgttttggaagctagaagtccaaaaatcaagatgttggctgaattatgctttccagaaacctgtaggagaatctttccatgcatagtataactccagtctctgccttcatgtggtcatcttctgtcctcacataacgtcttttctctgtgtatatttgtgcataaatttttcttttcttataaggacacctgccatattgaattaatgactt

SEQ ID NO: 275443 - DNA, 595 bp, Homo sapiens
agtagagttcacaaaacgtatttttttaaaaagctgatggtacagataaaatgtaggctcttttcaaatttataataatttacttatattgatataaacaaaaactatttggtatatatggtatgatagtatatgatgtattagatgtaatgtatatgtagtagatgatgtatatgatgyaaatttctctataaccagagaaatttgtctagactgctgggagagagtgggaagtaggaaatgctttcttgaagacatatcgttccctgaaaaacaggagtgagttagtcaggtagaaaacagggacgatcactatgaaagttttgaaggtggaagactagtcaatgtttgcaaataaaatagcttgtgcaaaatctctaatgcagtacaaattttaacaaatttggagaatagtcataaagcattattgctagactactgagagaggtcaggagtaggtaagtgtggagaaatatgccacaccatacaggctgacatgggggatggccaggcttacataggcttttagagaaaggctcattaatgctgcaagaaattgaacttgattatatagctggggggagttgacaaattc

SEQ ID NO: 275444 - DNA, 600 bp, Homo sapiens
agattgctgcatagttccaataaaggtgagaccaggccaatgggcagtacttgaacaaaacttgcccattgaagtcccacctgtcaccttattgccttgactttattacctttagtgtcagttatttgctgggagcacccttttgtaaacatggtctcaatataaaccctttagtggatccagaggggcagcccctcatgttaacaatctttgcagtgcacactaatctaattccaatcttcttcaatcattccataaaaccaaccttttgactaggtcatctataacctccatcttgctatatccaatggtattttaccatttggccatgmaccaagcattggacaatactcctgtcagttagttccttgataaactctctttcctttactgacaccaacgtttttttttaattgaattgtacatttttttaaattttattattattatactttaagttttggggtacatgtgcacaatgtgcaggttagttacatatgtatacatgtgccatgctggtgtgctgcacccattaactcgtcatttagcattaggtatatttcctaaagctatccctcccccctccccccaccccacaat

SEQ ID NO: 275445 - DNA, 410 bp, Homo sapiens
ttgcagtgcacactaatctaattccaatcttcttcaatcattccataaaaccaaccttttgactaggtcatctataacctccatcttgctatatccaatggtattttaccatttggccatgcaccaagcattggacaatactcctgtcagttagttccttgataaactctctttcctttactgacaccaacgtttttttttaattgaattgtacatttttttaaattttattattattatactttaagttttggggtacatgtgcacaatgtgcaggttagttacatatgtatacatgtgccatgctggtgtgctgcacccattaactcgtcatttagcattaggtatatttcctaaagctatccctccccyctccccccaccccacaatggttcccagagtgtgatggt

SEQ ID NO: 275446 - DNA, 519 bp, Homo sapiens
tgagaactcactcactatcacaagaacagcaagggggaaatccacctccatgttccatacacctcccagcaggccccttctccaatactgcggattacaattcgacataaggtttgagtggggacacaaatgcaaattgtatcaacttccaactttccaacaccaagaggatattccttccaggatatcctgttacaagaaatggcttcatcatccttccaatagcataagcaataaaacccaagacatccagatcaagtccctctctcacacatcctcaagttcatttatcgctcaattttgtagaatttgacacataaatatccttagaaactatccacattactctcctcttcacctaaataaygccattcaatttgtaataccttggtacaaacagacttccccatggaagccttccctgatatcccaaataagataaaaactctaatgaatcttcaaaatgctctttacataaacagttttaaagtggcccttagcattagttgattaataact

SEQ ID NO: 275447 - DNA, 519 bp, Homo sapiens
tgagaactcactcactatcacaagaacagcaagggggaaatccacctccatgttccatacacctcccagcaggccccttctccaatactgcggattacaattcgacataaggtttgagtggggacacaaatgcaaattgtatcaacttccaactttccaacaccaagaggatattccttccaggatatcctgttacaagaaatggcttcatcatccttccaatagcataagcaataaaacccaagacatccagatcaagtccctctctcacacatcctcaagttcatttatcgctcaattttgtagaatttgacacataaatatccttagaaactatccacattactctcctcttcacctaaataacgccattcaatttgtaataccttggtacaaacagacttccccatggaagycttccctgatatcccaaataagataaaaactctaatgaatcttcaaaatgctctttacataaacagttttaaagtggcccttagcattagttgattaataact

SEQ ID NO: 275448 - DNA, 581 bp, Homo sapiens
tgtgctttataaatatagagtgattcacataaaatctgaatctgaaagcttcaggaaaaatgtgtgaaaaataaaaatcagtaacccatcgttatgctttcatgggtgttgtcaaatcaattttgtttttcrggataaagaaatagttgagaaatgttgctaatataagacatcttttcacttttgccggatagatttacctggttctagacaggaaatcacacattggaacaaaaatggaattttgatcaaagtgggcagaaagacagataatatacagatcagttaatctatttgtataattatggttatacaaatatatatgtgtatagtttatagccaagaaatgtatacaccttttaatctttgaagttgatatgtgtattttcaaatcattccaatgcatttctcttctgattcttaccactgtaaatttaacccctaagaatttaaatagtcataaactaagtgcttacattaaaaacgtctactcttggagaagacatactgaaaatcaccagcagttttaggtcatattaaattagtttacacacatatacacacacacactagatagatag

SEQ ID NO: 275449 - DNA, 1774 bp, Homo sapiens
gctttcttccttcctaccttccttgctaccttccttcctgtataaatctcctttccttattttagcatatttaggcaggaacagaatgacaggagtttgcatgttgtctgttgtctcacaggaaataggcagtgctccctcatgaaccctcagcttatcagctctggaaaagtgattacaaaattgggtttggacttattcgtgatttaacttgmaaattgcctttttgcctccctgggattccagctaaggctattagaaatggagttggacaattccctcttgctattctccttaagttctgacatttcattatatgcatctttaatttttttaaacaaaagaaattgagaaaatattagtgaaatatttgagatcttttttcttttatgttcattgttcacattcttaagagaatcatttcagagatttttaatggatgtatttggaaaccagacatcaatggggatacaaatatacttgggattataaaagcaggactacataggccttataatagcacaacaaagaatacagccattgctatataagaagtataaagagatatgaaaacagtacaaaattttaattaaaacttgggcttcaagctgaaagtagtatgtgaattaggctttgaagctgatwgctttcttccttcctaccttccttgctaccttccttcctgtataaatctcctttccttattttagcatatttaggcaggaacagaatgacaggagtttgcatgttgtctgttgtctcacaggaaataggcagtgctccctcatgaaccctcagcttatcagctctggaaaagtgattacaaaattgggtttggacttattcgtgatttaacttgaaaattgcctttttgcctccctgggattccagctaaggctattagaaatggagttggacaattccctcttgctattctccttaagttctgacatttcattatatgcatctttaatttttttaaacaaaagaaattgagaaaatattagtgaaatatttgagwtcttttttcttttatgttcattgttcacattcttaagagaatcatttcagagatttttaatggatgtatttggaaaccagacatcaatggggatacaaatatacttgggattataaaagcaggactacataggccttataatagcacaacaaagaatacagccattgctatataagaagtataaagagatatgaaaacagtacaaaattttaattaaaacttgggcttcaagctgaaagtagtatgtgaattaggctttgaagctgatwaagtataaagagatatgaaaacagtacaaaattttaattaaaacttgggcttcaagctgaaagtagtatgtgaattaggctttgaagctgattgagtcaatgtaaataactggagagctgggcatacaagaaattctatgcacgggaaaagagaaacagtaaaaacagggacagcaagaaaacaaggacggaaaaaattctgtgagcagagaaacagtggcatgaagaacagaatgtgaggttagagttatgggagtttgaatctggctgtgacactccttggctctgtgacaaagttcctgtactgtgaatataacaatggtaactaaattacaagaatgttatgaagattatatgagataatggatttaaaagtgcttagcatagttcctggtgcataggaagcacttgtgggaatgaagttgttattcttgctgcaattaagaaaacaawgaaaactctatgtacctgagccgaagttcta

SEQ ID NO: 275450 - DNA, 431 bp, Homo sapiens
aatcattaacaaaatactaaccatccaaatccagtagcacatcaaaaagctaattcaccaaaatcaagtaggctttatcccttggctgcaaggttggttcaatatatgcaatttaataaatgtgtctcatcacataaacaacactaaaaccaaaatcacatgatcacctcaaaagatgcagaaacagcttttgataacattcaacatttcytcatgtcaaaaacactaacaacctaagcactggagatacatacctcaaaataataagagccatctatgacaaatccacagccaacatcatactgaatgggcaaaagctggaagtattccctttgagaaccagaacaagacaaggatgcccactctcaccactgctattacacatagtactgaaagccctagccagagcaatcaggcaagagaaagaaata

SEQ ID NO: 275451 - DNA, 436 bp, Homo sapiens
tacagtgttataatattctgtatttttccgtgtgcttactattacctgtgagttttgtaacttcaaatgatatcttcttgctcgctaaaattcttttctttcagatgaaataactgccttagcattccttgtaggacagacgtagtgtctacaaaatcctcagcttctgtttgtctgggaaggtatttatttctctttcatccttcacagatattttcaccttatatattattckagggtaaaggactttttctttcagcactttaaatatgtcatgccactctcatctggcctttaaggtttccactgaaaagtttgctgccagatgtattggagcttcactgtatgttacttgtttattttctcttgctgcttttaggactctttttaaatccttgaccttggggaatttgattattaaatgccttgacgtagt

SEQ ID NO: 275452 - DNA, 628 bp, Homo sapiens
tagtcatcaggcgatgagtcctgccagaactgggtccttcccttaaggcagcgagttcccttttggcccacattttatgtacccagacatgtcatccagaagctaggtattaaaatggggggcctagtgactctgcctggtgccttatcctactgtggctgagctggtatccaagatacaagaaaaaagttctctttactcttcactctccttcttgtaagcagaaagaaggcaaaatggcaaaacatttgctgctgtgagcttcactgcctaaggttagaggaggggtggcgcaagccttccaccagccacccaagctgttgtctcactaggtcacacgccattctagttcaccaggtctgagtacagcccagcactaggagttttctaggagttgcagtctttgtggcctaggctgcctttcaagtttatgtaggatcacagagcactttggcccatggtagcaagacttgccaagaaactcgagctctgactgctgggatgggtgattgattcccctctggccaggtctggcccaartgctccttctgggtgtgggtgcttgactttgctttccactgtgacagggcactattgagttcaatgtaaagtcccccagccactgtgt

SEQ ID NO: 275453 - DNA, 501 bp, Homo sapiens
agaagataaatttcccacaaaaggtaaaattaggaaatatacttttagtgttgtaaatttaaccgaaagtcaacaagaagtacgcacctacttctttaccagtgcatacatggccttaagaatagcattagcatcaagatacaataacaagagaatcagaacataaaaagattttatgtgcagatggtgccatgctatttatcactgagccacaaacaattatcctggaaatattgagataaatatgcccatttactaaaagagctaattgtgagaggcattgggataaatctgagctattttccatatcaaagttttctctaggtcaattgcatcttctttacgrttataaccaacccaccagtgccagaatctttttcctctttatctttgcttttaggacacttcattttataggaatatgttcattctgggattgtagaggtccatgtagataaacctggaaagtattactgtctaaggaattacagttacttgtag

SEQ ID NO: 275454 - DNA, 501 bp, Homo sapiens
agaagataaatttcccacaaaaggtaaaattaggaaatatacttttagtgttgtaaatttaaccgaaagtcaacaagaagtacgcacctacttctttaccagtgcatacatggccttaagaatagcattagcatcaagatacaataacaagagaatcagaacataaaaagattttatgtgcagatggtgccatgctatttatcactgagccacaaacaattatcctggaaatattgagataaatatgcccatttactaaaagagctaattgtgagaggcattgggataaatctgagctattttccatatcaaagttttctctaggtcaattgcatcttctttacgattataaccaacccaccagtgccagaatctttttcctctttatctttgcttttaggacacttcattttataggaatatgttcattctgggattgyagaggtccatgtagataaacctggaaagtattactgtctaaggaattacagttacttgtag

SEQ ID NO: 275455 - DNA, 528 bp, Homo sapiens
gcccagggcaatctcagagtcggtgaccgatgtaaaactgatatcacagacccctgagacagtaagtgtcattgcaacagggccagacaggactaaagctcttagggccaaggtaatgtgttaagaaaccaaagatcaccaaacagaattgtggtaaaagtgaagtaaaaaaaatactgaatcccaggacaatcatgcaggtaatatttatcaaagrtttttaactttttaaatttgtaatgaaatattatcattcctttcattttagctgacataagcataatataaaattttacataactattttaatatagaaaacatacccttatttttaattccatttcaatcttttcagtatctccatgagatgaagtgaaatggaggtgtgagagaatctattatcacgtcatgtgcattacccagaatatattaattagtaaaactaaaagttatataacacttatcaattgataataaaaagataactcaagaaaaaacaaaaataatccaatttagaaatacacaaag

SEQ ID NO: 275456 - DNA, 373 bp, Homo sapiens
aaatggaaaaatgaattctccatcaaatttgtcatctatacacaggaattgagaaatcaagataatgactgagattattaaagtaatagatatcataggaattgttaacaatcatagtatgctgttayactatagtgtttaggattcacacagtttctatttccaaggggctcacactgattgtcacaaagaggaaacaaagaaaatcttttcaacttctattaaaattcatcatcatgtttactgtctctgctattagtttaattaaaataatactctaactgtgtgaaagtaacaaatatctttatatttttttgttagaacttttttaaaggaataaatcccattgcttttctcactgtgatacatgtac

SEQ ID NO: 275457 - DNA, 539 bp, Homo sapiens
caggaacaaaccaacaaacaaaaaaaagctcccagctttttcctgggagggaaaagatttaaccatatataaagtgttctaactcatctgggggctatctgggaaactggcttctgtcctatctctctcagagtgctgaggaaacctgrcgttatgtagataactggggtccacatagaacaagcacaccagtttggactagcacaaaggtctgagaggctcagggaaactgtgacctgttacattagtaaaggtcttatattctacaagaccaatacataaagactgggagaaataaaagtttgttttattttcctatttgcatgaacaccaacaaaaagagccaaggaaatttaagaaacaggaacacaaaatcgaaacaaacaaacaaacagacaaaaaaacaagacaaaactccaaaaacaaatcgtaataaaatggagctgtgtgatttactgacagagaattgaaaataattgtcataaaaatgttcaatgagctcgagagagcaatgcatgaactaaaagagaattttaaca

SEQ ID NO: 275458 - DNA, 566 bp, Homo sapiens
atctgacatacaggtggcttctctgggttctagaaatactctattctcatctgatatggttgttacactctcatagatacttgtgcttactgagttgtaaacattaaattagtgtattttactacatgcaatttataccttagtaaaacattaaaaataaagattttgtagtataaatgccattttctagtttgcataattcatggtatcatactgacatgtatgtatttctaatagtttaccaatttaaataactggtaacaaacttttgacagagatttttgttccgcattattacaagtgttgatgttattactgttttaagccatgccaaacttagcagcaattatttttataaaagtaaatctgattgataattctaatttcatttcttaggttagtggygaaattattttttcaactatttattagctggctatttgtatatttttgtaaaatgactgtatccttcatccattttaatttttcactgatcaataggcattattacaaataataagtgtttgtatctttgtgttacagagcttgctttcccagtttgtctt

SEQ ID NO: 275459 - DNA, 580 bp, Homo sapiens
aaccaaatacacactggagactaaacatagaaaatagtaaaatcagagcaaaggatagaacacaattgattgttttttatgttttctttaaatactagatgaccatctgagcaaagctatcactcttgataccacgatcatgaaaatggctgcactatgggtgaccaattttgtctgccataacatgggctattaaagataagatatgatttccaactcaagaatctagaaaagtaaaaaaatcaataatttaataaaatgaataataaatgaaaattatgaatgaactagaaatcaagtaatacagtttaataacaaaagaaaattttttgaaaatgctaactgctctcacttcttccagtgtaccccttcctttaactcaaagtaaacattgctatgagttttatcttatgattgtgtatgtcagatgtccccatttttctcctcaagaacacataattttcttascaagttggaaaataatctcatgtcttgaagtggttattccaaaaactctgtattataatcatccctaatgatttctatacaatgtttatgctttttagtatcaatactgaat

SEQ ID NO: 275460 - DNA, 601 bp, Homo sapiens
caaattataaaataaggggaggtttgagaaaatcatactgaattcaggataaaatgacagaaagattaaagcgataaaaatgaaggtgataatcttaaatatcagacagaaatgatccaaaataattttcatccttgaagtagaaccccaaaagtgagacagaacctagcattagaatgtacaatagaaagaaagaaaggtaaaatttaaaatacattataaaatatttcagtaaagtagtagctaatgggcaattggcaatgctaaatgagtaatttactgaatgtcaaatatgaggaaagcatttttcaggtaattgggcagaataaaacaagtcacctatagtggaaaaataaaaattcaatcttgccttgaatttctctacaacaacattaaatatcaaaatatratggtgcaatagctacaaagttccaaggaaaaatgaaaaccgaagccaagattttatacataattaaattgtccttcaagtataataaaacaggacaaaataatagaaaacgtgttatttccaggcatgcagaaactcaaggaatagagtatttatgggccatttttgaaagaaaaaaataagcaaacttga

SEQ ID NO: 275461 - DNA, 541 bp, Homo sapiens
attacttcacataaaattttatttcttgctctcgtgacgtgtgttaggaaggcaactttctagggcagaaactttatcaagaatgacttgattgtgtctctgagtgtcaaccatctcaattctaggcatctttaattgcttgagtagaggaagcgattgactggaaaattgtgcaaaaacttggaagtagcacatgtcatttttgcgtgcatttatttgaacagaactatccacatggccagccatgcacacaacaaaagagtatgggaagtatagttttccataaacctgagaaagagaaatatgmaactggatatggtgaacacatagcattgtttccaccacattcatgctcagtaaggctcagatatcctggagcaaatcaaaagataaaccatctacaaacaactgaacatttatcaggagcctttcatctctccaaaagtccaagttgttttcctggtacagagattcgcgcgcgtgtgtgtgtgtgtgtttgttttctaggcatacagttgtatgtttaattcaaaacttacac

SEQ ID NO: 275462 - DNA, 563 bp, Homo sapiens
ttttcactttgtttatatttcttttgattcctaaatctatgaagataaattaatgggacattctcattttgttttaaataattgatttaaagtatttgtatatttataatactcttcacttctaaattgatctagtctattttcataaggacaaaaaattcatctgctgttttattttaaaactccaggtatagctagatgaatattaaatttacatcaattaacacttaaactattaattgaaatccagttaaatttacttatttttagaaattaaatatatttcatataatttatatcctaaataaatattaacaaaaatgcgtaacattttctattactcaattttaatattatttgtcaattagatttatttctgtcataatcattaaaagctaatgcattttagtattctaatacrattttgtttcaagccaatgctgaaatacacaattgattctctcactggttttctcatcattcagtgggtcaaatagttaactagagtagaatcactcttaattgctatcatctgtcggtagttaacccacccagattttcca

SEQ ID NO: 275463 - DNA, 622 bp, Homo sapiens
tgtcctttcaccttgtactttcttctggcatcttctgggataaatcttagtattgtattattattcaaaggagaaatatttaatgcacacagctctattttcacccagcagtgaatgcacagtgtattcatagttgagaggtaataaactgacaaatggcacagattacttgtagtttttggctattctaaataaaggtagcatgaattggtgtgcaagtctttgtgtagacatagattttcatatttcttgcrtaaatgcacagcagaagaattgctgagtcatgataagtgtaggtataaccttatgagaaactgataaaatgttttctaatacttggtgttgcccatctttttaattttaactattgtagtgaatgtaaagtagtagctcattgtgattttaccttgaaatttcttgctatttatttagttgagaatctttgtgtatttcttggccatctgtctatcatctattagaaaatatctgttcaaaacttttattatttacataatctgaatataagttgtctgtcagaattacattgtgtcaatttgcttgttcttaaatggttttataagaaaggcttggtaatataaggataagaccagattaagtgggc

SEQ ID NO: 275464 - DNA, 562 bp, Homo sapiens
cagctgcagacatatgcataagtaatgaggagctgaatgttaattgctaagacaatggcgaaatgcttccaggtcatgtcagagaccttcacagcagatcctccattcacaggcctggaggcctaggagggaataatggttttgtggtccaggcccaggcacccctgagatgtaaaaccctgggacatggtgccctgtatcccagctgcttcagcttcagccatggctaaaaggggcccaggtacagctctggtcactacttcagagggtgcaagccccaagccttggaagcttccatgtggtattaaccctgtaggtgcacaaatgaaaagaactgaggtttgggaacctccagctgcrtttcagaggatgtatggaaatgcctggatatccaggcagaagttggctgcaggggcagaaccctcatggagaacttctgctagggcagtgcagaaggtaaatgtaggtgcccgaacaaagagtctaaactgggacactgcctagtggagctttgagaagaggcccacagtcctccagaccctagaatggtatatccactgac

SEQ ID NO: 275465 - DNA, 1162 bp, Homo sapiens
gaacccatgcacatctgttaaaatcataaataatctttaaataaggacaataatatggttgtaattacacctaacataatacagctatccttcatacaactggaarcacactatttcttaacctaaatgttattacatagagttaatgacacttaactgctgatacgaagtcaataaatcttacgtcacatgataaagggaaaaaaagaaaacaaaatgaagatattttcttagtacacatgtatacaagaataaacatgttcataacaaaataaggaggaaatactcatgaaaattacagttcttgtttctgcaactggtcacatggttgtagctggtattagtgactaccttcttctacaacctattctgtattccctttgccttcagcaagcacctcagcaggtcatcgttttttacccggtggagtggtccaaaccttcattcctgaagggtctgggccatttgtagtcctgtcttgattgggctgttgtagtttcccattgaccttaatcacagaacacggtaatactaaaagatgctgtaagggatctcctgtattccacacwcaatttgaacccatgcacatctgttaaaatcataaataatctttaaataaggacaataatatggttgtaattacacctaacataatacagctatccttcatacaactggaagcacactatttcttaacctaaatgttattacatagagttaatgacacttaactgctgatacgaagtcaataaatcttacgtcacatgataaagggaaaaaaagaaaacwaaatgaagatattttcttagtacacatgtatacaagaataaacatgttcataacaaaataaggaggaaatactcatgaaaattacagttcttgtttctgcaactggtcacatggttgtagctggtattagtgactaccttcttctacaacctattctgtattccctttgccttcagcaagcacctcagcaggtcatcgttttttacccggtggagtggtccaaaccttcattcctgaagggtctgggccatttgtagtcctgtcttgattgggctgttgtagtttcccattgaccttaatcacagaacacggtaatactaaaagatgctgtaagggatctcctgtattccacacatactcttccttacctcca

SEQ ID NO: 275466 - DNA, 583 bp, Homo sapiens
gagtaaaattagtgaaaaatatttattttctattcttgaatctagatagtaaaactattactacatttactataagatgatagaatttaagtattcaagggatagtaatttggttaattttttaggataaaataaaataatctatataaatatacaaatttcaatttttaaatatatttatcttaaaaagattgaaaaatgagattctaattacattgaaattatgggacacaatcacctgtacaatatcccccttaaataatttccaaaaaggcatgtttgtgtctaaggcaaaattctagccttatcctgattacctcagaaatmcaaaaaaaaaaaaaaaaaaaatactaggaaagtctcatcataaaatcaagaacttataatacaaaatagtttttaatagaacatatttaatttccaactctatacacttaaataaattctattaaaccagttctgttctttaactcttgttgtcactcagtgaaaagtgctttcttcttaggctggtattgatgttagttaggacatgtcctgtgaacagtagctaaggtaccgtaaggctgttcactaagattca

SEQ ID NO: 275467 - DNA, 539 bp, Homo sapiens
aataaacaataatgactactgataaaatgaaacaattattaacatataccaaaataagagttatttgaatgtggtctctctctcaaaatatcatattgtatataatattttcagactgcagttgactgcaggtaactgaaaccacagaaagtgaaactgtggatgaggggagactctgcattttacatttccagaacatcactttggttcttttgtaaatctgcttctatttccacatcttagttcttaaatcattttaaaatatttaaaatatatgactgataattctgatgtctgaagtctttgcaagtctgattctaccaggttattttttatgtcctttgttcttgatgctktattccttcctgtctggaaagttttccatttttccttttataatttgaagctcttgactcataatttattgccctcttcttttgttcttttgttgctcatttcccacaatgccatcctcctacatagggtcagggtcctagttgcactggtgggaggagtaggtgctatgctccttgtattca

SEQ ID NO: 275468 - DNA, 1137 bp, Homo sapiens
ttataattttttcaaatgataacatccgttttgtcmatacaattctcattttttcagatgtgcataataaaggtaaaatttagtattttcgagtacaaattgacattgtcaagaatataaattaatgttatagctagagttttatagcaactcatcttttactgtatcctaatgtttttgcaatctttttttcctagaattatgtcacagctaataaattgacttgcggcagaattcatagcataaagccatttaccctgtcacaaatgacaatgaattcctaaatcaacagtccttaaactcaattcagaaaatagactaatgaaagtaaagtcattacaagatgagccattaagttaaagcattagaataatctcacctacttctggttttttgaagattcaagtccacatgtgtaaatggacattttgcttcccaggccacaaatatgaaatggtgcataagaaactgcctcactgggttagatcaggatttagcttttctaataatatcactagcagaatgtggggcagaaaagttgccatttagaatggtgattcaaaagatcaaaagcggaaawtagaataaatgctatgaatgattataaaaccaaaacattagggagaaaaagggcaattgcatactaggattaaagactaagccaataaattaatattcagctgatgacaaataatactattagaaggaaggaaggtcattagtgatgaggaattggtatcaatagtcaaactgaaaactgagattaggttcaaaaaacagtggctgctgtcacaccccagggcataaaagataatgcaaaagaatccattatattgctccatctgtatttgtaaataccaaatattttttwtattgaactgaaaccaagaaatacatcggcggcctcaacaaggaagacagtccacgtattatgtgaagaatgtgaattttagaaacttctgtaggaagaaaaaacacctgaagaaaatcctgctgtgtctctttgtagatgtaacaaatggaaatttatcaggtatgatatgtgagagaccatttgagtttctaaaaggccccattatcactgaagcaaaaaagtaggttgacagagcaaatggtttgcttcacctaataaaacag

SEQ ID NO: 275469 - DNA, 570 bp, Homo sapiens
tgtgtgttttttagtttggtgccttagtttgatgactttccagggtgtctcaaaaaacctgagaagttacttgaactggtccaatggcatttgcgatgatgatggtttcctcagaaaaaaatacccttcagcattgaaaaaggtaaaaatgacattcatcaagcagtgtaacaaaggaatttggtccatagttgaagttgtaaaaggagaatargtaaattttctttttaatggaaatcccaacgaataaaggtgcatttgccttggggctatacaaaagtgacagccatcactagggcatctgtggcagggcttaagtgtttatctgggcagtcctgagctcctgcatatttttttttttttttgaaatgctgagtccttcctcctgttctcagtcatgcccagaaacaaagattaatcaccatggtaaccatgatggagctgcgtatttagatagataaatatataatttgatagataaacagactagtaatagaaatttgcatttagatatttgaaaaggaattcaaaaggattgtgaacaaaggcactggtcctgtattcccaaac

SEQ ID NO: 275470 - DNA, 619 bp, Homo sapiens
atgataatacatctgattaatgactgagtaaagatgagaaccagggctcatttctatctttaatgctggggacagtccttaaatctggctaaactcaacagcctccaaaaaataaataaaaatacattacaccctctgcttctaatagtttcttttcatttatttctgttattgtgaattttcctataagattatcttacatccatacatttttattaaaaacagaaaactttcaaggtacttgcrtgatccttattattttatataatgtgatgatgaaaataattgcatttaaaacaataatttctctttctgaaggaattaaatgattgctttagagtttagattttttttctatttaagaagctcatttctaataatcatttggaaacagacaattaatgggtttgtttttgaattgctatttgaaactattttaatttgaatggattctggcctcctgttctgaaatgaggcagggcacagagataaacatcttaaggtatatgaaattgacttgtgatgattttagatggtaagatacctttaagtcttatttcacttatgcttatgatctctaaatgtgtttgaagttccgtttttgtttttgataaactca

SEQ ID NO: 275471 - DNA, 619 bp, Homo sapiens
atgataatacatctgattaatgactgagtaaagatgagaaccagggctcatttctatctttaatgctggggacagtccttaaatctggctaaactcaacagcctccaaaaaataaataaaaatacattacaccctctgcttctaatagtttcttttcatttatttctgttattgtgaattttcctataagattatcttacatccatacatttttattaaaaacagaaaactttcaaggtacttgcatgatccttattattttatataatgtgatgatgaaaataattgcatttaaaacaataatttctctttctgaaggaattaaatgattgctttagagtttagattttttttctatttaagaagctcatttctaataatcatttggaaasagacaattaatgggtttgtttttgaattgctatttgaaactattttaatttgaatggattctggcctcctgttctgaaatgaggcagggcacagagataaacatcttaaggtatatgaaattgacttgtgatgattttagatggtaagatacctttaagtcttatttcacttatgcttatgatctctaaatgtgtttgaagttccgtttttgtttttgataaactca

SEQ ID NO: 275472 - DNA, 619 bp, Homo sapiens
atgataatacatctgattaatgactgagtaaagatgagaaccagggctcatttctatctttaatgctggggacagtccttaaatctggctaaactcaacagcctccaaaaaataaataaaaatacattacaccctctgcttctaatagtttcttttcatttatttctgttattgtgaattttcctataagattatcttacatccatacatttttattaaaaacagaaaactttcaaggtacttgcatgatccttattattttatataatgtgatgatgaaaataattgcatttaaaacaataatttctctttctgaaggaattaaatgattgctttagagtttagattttttttctatttaagaagctcatttctaataatcatttggaaacagacaattaatgggtttgtttttgaattgctatttgaaactattttaatttgaatggattctggcctcctgttctgaaatgaggcagggcacrgagataaacatcttaaggtatatgaaattgacttgtgatgattttagatggtaagatacctttaagtcttatttcacttatgcttatgatctctaaatgtgtttgaagttccgtttttgtttttgataaactca

SEQ ID NO: 275473 - DNA, 1189 bp, Homo sapiens
atgcttatgatctctaaatgtgtttgaagttccgtttttgtttttgataaactcaccagtttaaattgacaaagataaagtaattgtataatttaagttgytatagttattggattagttatttctctatgtgaaagcttgactcagagaactctgtgatgccaaaaacctagcagaggaagacaaccagttattctgtcacttgataatggcagctttttatcctccaacccaaggtcaattgcattgtctttggtgaaagatagagaactatcgctaaaaaagattttactgggcagcaattctgaatctatttcctctgatgaaatgtcgatagctttctaggacaaaatgtagtttttctagaaacgaaggtgaaattggtttgaaaatgtactccacaaatcaattcctttcaatataaaacatttgagaaagaaaaattaacaagtaatccaatatgctgttatgtttccatctttttatttgaattcatcaaacatattacattttctccaaaaaaccaatttagggaagcattgatgttcttctaatggttttagagtcataaaatgtgtagtaaaaagtcagctgwatgcttatgatctctaaatgtgtttgaagttccgtttttgtttttgataaactcaccagtttaaattgacaaagataaagtaattgtataatttaagttgttatagttattggattagttatttctctatgtgaaagcttgactcagagaactctgtgatgccaaaaacctagcagaggaagacaaccagttattctgtcacttgataatggcagctttttatcctccaacccaaggtcaattgcattgtctttggtgaaagatagagaactatcgctaaaaawgattttactgggcagcaattctgaatctatttcctctgatgaaatgtcgatagctttctaggacaaaatgtagtttttctagaaacgaaggtgaaattggtttgaaaatgtactccacaaatcaattcctttcaatataaaacatttgagaaagaaaaattaacaagtaatccaatatgctgttatgtttccatctttttatttgaattcatcaaacatattacattttctccaaaaaaccaatttagggaagcattgatgttcttctaatggttttagagtcataaaatgtgtagtaaaaagtcagctg

SEQ ID NO: 275474 - DNA, 593 bp, Homo sapiens
  misc_feature (1)...(593): n = A,T,C or G
tgctgtagccagactgcctctcaagattcctcctctctgggcagggcatctctgagagaaaggcagcagtcccagtcaggggcttgtagataaaactgccatctccctgggatagagcacttgggggaaggggcagctgtgggtgcagtttcagcagacttaaacgttcccaactgccaggctccgaaganagcagaggatctccaagcacagtgctcgagctctgctaaaggacagactgcctcctcaagtgggtccttgacccccatgccttctgatggggagacacctcccagcaagaattgagagacacctcccacaggagagttctggttggcacctggcaggtgcccctctgggacaaagcttccagaggaaggagagacagcaatctttgctgttcttcagctgccgcaggtgatacccaggcaaacaaggtctggagtggrctcccagcaaactccagcagacctgcagcagaggggcctgactgttagaaggaaaactaaaaaacagaaaacaatagcagcaacaacaacaaaaatgatgaccacacaaaaactccatccgaagttcaccaacagcaaaggcca

SEQ ID NO: 275475 - DNA, 497 bp, Homo sapiens
acagggggaaggacaatgatcgggatataaacccaggcattcaagcagggagtggcaaccctttgtgtcccctccccttgtatggaagctctgttttcactctattaaatcttgcaactgcacactcttctggtccgtgtttgttctggcaggagctgagctttcgttgccgtccatcactgctgaatgctgccgtcgcagaccctccgctgacttccacccctccggatccagcagggtgtctgctgtgcttctgatycagtgaggcacccattgctgacttccacccctccagatccggcagggtgtccactgcgcttctgatccagtaaggcacccatggcggctcctgctccccactgggctagaggcttaccattgttcctgcccagctaagtgcccgggttcatcctaatcgagctgaccactagtcgctgggttccacagttctcttccatgacccacagcttctaatagagctataacactcactgcac

SEQ ID NO: 275476 - DNA, 1079 bp, Homo sapiens
acagggggaaggacaatgatcgggatataaacccaggcattcaagcagggagtggcaaccctttgtgtcccctccccttgtatggaagctctgttttcactctattaaatcttgcaactgcacactcttctggtccgtgtttgttctggcaggagctgagctttcgttgccgtccatcactgctgaatgctgccgtcgcagaccctccgctgacttccacccctccggatccagcagggtgtctgctgtgcttctgatccagtgargcacccattgctgacttccacccctccagatccggcagggtgtccactgcgcttctgatccagtaaggcacccatggcggctcctgctccccactgggctagaggcttaccattgttcctgcccagctaagtgcccgggttcatcctaatcgagctgaccactagtcgctgggttccacagttctcttccatgacccacagcttctaatagagctataacactcactgcacwttttttaaagaaacagtgttataaaccagctgtaaagttagctccaactggaaagtatgtgggaagcagcctacttcaacattwaaaaaaaatatagacaaaaatgacctctttcggcctggggtggtggctcatgcctgtaatcccagcactttgggaggccaaggcaggcagatcacctaaggtgaggagtttgaaaagagcctgaccaacacggtgaaaccccatctctactaaaaatacaaaaattagcagggcgtggtggcacgtgcctgtagtcccagctactccgtgggctgagacaggagaatcacgtgaaccctggaggcggaggttacagtgagccgagatcataccactgcactccagcctgggcgacagagcgagactctgtctcaaaaaacaaacaaaacaaaacaaaaaaacctctttcttacatcgtgctcatccttgtccagtttctttcacatatgtgatttccgaaagattgttcctttgaaattattaggagattgcctgacatctagtggacacccactaaatgcttgttaaattatgctgtgaaaggacaagagaaggaa

SEQ ID NO: 275477 - DNA, 601 bp, Homo sapiens
tgacagtgcgcctaacttttgtattcttcaagagtccacagcaaactaatacaggagttgaaaacgaaacacctcatgttctccctcataagtggagttgaacaatgagaacacatggacacagggaggggaacatcacacactggggcctgttgggcggtcgggggcaaggggaggaagagcattaggacaaatacctaatgcatgcggggattaaaacttagatgacgggttgataggtgcagcaaaccaccatggtgcatggatacctatgtaacaaaccagcatgttctgcatatgtatcccagaacttaaaagtcaactgtgtattagcaagaaagaaaaagagagatagaggtagagagagagaaagaaatatcttttttcatatataaaataacatgtatattatatacttaatatatagttatatagagagaaatrgaatatgtataataaatagaatatgattctgtttctcttgagaatcctatacacaaatttaacttatggggctttttttagtattacatcaaaacaattcatgtgcaaagctcttatgatacaagatactaaagttgaggtaatgtttttgttttta

SEQ ID NO: 275478 - DNA, 536 bp, Homo sapiens
gataaatattaagcaagagaaactttcaattagtcttgagctgcttgaggggtgctgcttgattgggacagtggatttgttttacttcaggtctgtactcttaggtgatgagaattactgtttgagatattgtgcacagtgccaattccaatatacgaagagcagagtggctgtaaattgtaggaaatctattctcgggcaccatggggaaaagttacaataaagctgatgaagattaaacagactgtatattttggttgaggctacaaaccaatatcaagatcaaaccaatagaaatgggtaatgtctccaattgaaaaaaaaaaagctagttttggatcattgtaaaaggtaaaatctttytgaaaaccagtaaagcctgtgagatcttattttctgttgcattatagtatctggcatacatgttattcagtgtatattatttaatgtttatctacctgtggctattttctatttctttaagaaaaataaaagctcttcaaaaaacacttgagcgcagtattttcttggtttcc

SEQ ID NO: 275479 - DNA, 659 bp, Homo sapiens
gatgagaattactgtttgagatattgtgcacagtgccaattccaatatacgaagagcagagtggctgtaaattgtaggaaatctattctcgggcaccatggggaaaagttacaataaagctgatgaagattaaacagactgtatattttggttgaggctacaaaccaatatcaagatcaaaccaatagaaatgggtaatgtctccaattgaaaaaaaaaaagctagttttggatcattgtaaaaggtaaaatctttctgaaaaccagtaaagcctgtgagatcttattttctgttgcattatagtatctggcatacatgttattcagtgtatattatttaatgtttatctacctgtggctattttctatttctttaagaaaaataaaagctcttcaaaaaacacttgagcgcagtattttcttggtttccagcatctacaccattaacttgcacatagtaatcacaaaatatttctatggtgataartggtgtttatggataaatatgattagtgagttcgataaaaggtcaacagggcagaaaaaaaaaactcagatattctgccaatggagaagaaacaagagcactttcaagaaaaatgcacatgataggaagaagcttgctatgaagaagatatgtaggactgcaagtgtgaatt

SEQ ID NO: 275480 - DNA, 602 bp, Homo sapiens
aaatggaagctaatacgctcttctgaagaaaagatgtttgagcgagattttttttccttatgtgttaaaatgtttttccttgtccaccaatcaccttttctgttcttcagtcattgctgatccaatatcattcgtacatttgatatttatctgtgaaaatataaggagcataaaaaaagaaataataacaaaatattctcttagaataatgaatagatttcaatatgcaaaatctaaatatattttgtattgtcacagcaatctggcagtatttctgcctaagaaaaccatatcaaacttaaacttttgaaaatgttccctacatacaaatattttcacagaattgtttactggtctgtgatagaattacaaattcttattcaaattataaataaggaaaatagattatataaaaaaaaatcgtttttgtttggccgggtgtggtggctcaagcctatatcccagcactttgggaggccaaggcaggcagatcacctgaggttgggagttcgagaccagcctgatcaacgtggagaaaccccatctctactrtaaaacacaaaaattagccggcatggtggtgcatgcctgtaagcacagct

SEQ ID NO: 275481 - DNA, 578 bp, Homo sapiens
gaaagatgtctcaagttatccactgctatgtttcctttcctgttttgtgtccttccaagtgaagccagcaccaagtacagcctacttaagtcccgtaagtctaactgatatattgagcccgagaaaactcagagaggggacatggtagaacgataataatcatgctacttaaaaaaaacgaaaccactatatcagaaaaatagcagcactcccatgttcattgctgcattagtcacgataaccaaaagaaggaaacaacctaaatctccacagacagattaatagataaaagaaatgtaatatacatacatrcatatatatgtgtatatatgcatgtgtgtatatatatatatatatatatatatatatatatatatatatacacacacacacacacaaagaaatactattcagccttaataaagaatgaaatctcacaacaacatggatgaacctggaggacattatcccaagtaaaatcagccaggcatagaaagacaaatattgcatgatattacttatatgtggaaccttattttcaaagtttgtattaaaaagtttacataaaaaacttgaac

SEQ ID NO: 275482 - DNA, 578 bp, Homo sapiens
gaaagatgtctcaagttatccactgctatgtttcctttcctgttttgtgtccttccaagtgaagccagcaccaagtacagcctacttaagtcccgtaagtctaactgatatattgagcccgagaaaactcagagaggggacatggtagaacgataataatcatgctacttaaaaaaaacgaaaccactatatcagaaaaatagcagcactcccatgttcattgctgcattagtcacgataaccaaaagaaggaaacaacctaaatctccacagacagattaatagataaaagaaatgtaatatacatacatgcatatatatgtgtatatatgcatgtgtgtatatatatatatatatatatatatatatatatatatatayacacacacacacacacaaagaaatactattcagccttaataaagaatgaaatctcacaacaacatggatgaacctggaggacattatcccaagtaaaatcagccaggcatagaaagacaaatattgcatgatattacttatatgtggaaccttattttcaaagtttgtattaaaaagtttacataaaaaacttgaac

SEQ ID NO: 275483 - DNA, 1183 bp, Homo sapiens
gttataatttatcacatttacatttttgttatgttttcttcttatgaactcactatagaacacaacttcctaattaaaatctaaatttaatgtgatcactgccacattttattatgtttcctttaatctctagattttgtctttttttatcactccctaytgaaataaagtccacccaaatgagagctggaagaagctgttttcagagattcagaggcaggcaggtgagtgtgaaggctttagggtgaaagaaagggaaggcttcagtcatgctctgaaagaagggtgtcatggggaggttgaaggagggcagactcaaaggagaacatcattttgtgactactcaagtggcggtggggctcctgcctgtggtggggagttgcagggcttggggcttgactttctctggttggtcctaattgcaagtcagagagaaagaggagaaagtttttgatcaagtcctgacctttctgagccactgcttccgagtttgtggtttggttctggactggttgctacagtggttgtgggtcagggctctgttggcatgtgtagattggtcattgtccacttgtacaaccagwgtatataaaatttatatttcatgtcatgtttgttaccaaagtaatatagatacctttaaagactgatctcatcagtctataaatgtatttgtttctagtgtatttaaaataattgcctcaatatattttctcatatttttctaaataattctcttctcttttttatgatctcaagtttgttaaagttataccaatggtatttttttctatttttaaattaaaaacaaatgtgtaatttcttgaatagtccatctgtatctttgagaatgctgatgcatattaactttgtattgttgcacaacagataatcagttatttgtagwgtgcatgatgctatattatatgatttatgtcataaaaatgttgcattacttgcttgaaattgaatacacttatgttataataaaaattttgttttaaaaaagtaattaaaaattggaatgattatttattttggggatatagatatgaagaaaaatattttcaaaccattaaacaatttttaatatttagtagacaccatttaatataatagcaaaactgagttttttaatgatgtcctcggttcattgtattaaaagagtttctcattggaaaaa

SEQ ID NO: 275484 - DNA, 580 bp, Homo sapiens
gacaattttctttattcttgttacttatagaataacatttcattttctgttttgtctttaaaaatatttcctttgctccttcgtagaagatatatatttattttccaagttatattttaagtttttagcaatatcttttcattatataaatggcaagaaatttattctcttattctaacctgatccttaatttcataaaatctagaattttaggtacagattagtaatacaatttttgtggtctgtatacatgtatttcagtatttttatatcataattacaggatattgatatgtgtgtacatgtaaatacattatatttaggcttctattttaaatagggctttttgtttgttcattttagtcactgtcaattcatttaaaaygtaaggccttctgcagtcagtattttagatggttaaatatatgaaatattttataggctcttccacctctgagaatttagtttttgctttttgtttaaaggactgtttcatagcatcatgtcattcttttgcctttatttaactgcagtattcctctaagtgttcttttaaactaatttttcatcttaagaatat

SEQ ID NO: 275485 - DNA, 474 bp, Homo sapiens
tatactatccctgactggttagtgtaaaagcaacactcttcctctaagaaggtgcaaagtcctcctttctcagcagggaggaggtccaggcctcagcggttttggagagtcactgctgtcaaagagtctatttgagattgtagagtaaggatagattccgttatttctagcaaactgtctgagaaatcctttgagagtgtgtggtagtaggataatgaagtagataaacctgcgattccagtttctgtagccatggccattcttaaccatataagtaggggtattagttgtatggctctgcactgacagacttgagctttgaggggtactgatagggtctgatttccataagattagaagttaggataatacatgttacactgttaacttttagcaaactttactttttttgaaaaccttgtaagtttgggrattttaatttttctttgctgttagtaagaactcgttcagtcc

SEQ ID NO: 275486 - DNA, 572 bp, Homo sapiens
atcactatggtgtgcaatagatctccaaaatgtttcctcctctctcactgaatctttgtacattcgaccaacatttcccctttccctgcccagcccagcccactcccaacccccagagtagatctagtgattctcagcttgcttaacccttgcactgctgttctggtcttctttgtccttctggatccaggaaggcatcctttgtactccgcagatgccagctgttraggcgaaaggcacttccctgggacatgcccatgttgctagttaggtagcaggggatactggattgagaatgtttcctctggcctgttcatcccacacctggtgccacaagcttccaggatatctttgctggtgctgttggggaaaggaagcacctacctggacagccttctgcaaatagatgagatcaggagttcctgaccctagtctaccttctgctgcagggtgaaggaaaaccaggagatcctggatctgttggagctgaagtacaatcagaccaggtctgctgttaccagatgtgttctgggtggtagatgagtcagtcggccccactcactggtgctgtt

SEQ ID NO: 275487 - DNA, 889 bp, Homo sapiens
atcactatggtgtgcaatagatctccaaaatgtttcctcctctctcactgaatctttgtacattcgaccaacatttcccctttccctgcccagcccagcccactcccaacccccagagtagatctagtgattctcagcttgcttaacccttgcactgctgttctggtcttctttgtccttctggatccaggaaggcatcctttgtactccgcagatgccagctgttgaggcgaaaggcacttccctgggacatgcccatgttgctagttaggtagcaggggatactggattgagaatgtttcctctggcctgttcatcccacacctggtgccacaagcttccaggatatctttgctggtgctgttggggaaaggaagcacctacctggacagccttctgcaaatagatgagatcaggagttcctgaccctagtctaccttctgctgcagggtgaaggaaaaccaggagatcctggatckgttggagctgaagtacaatcagaccaggtctgctgttaccagatgtgttctgggtggtagatgagtcagtcggccccactcactggtgctgttwggcactaatacatgatgatgggagtaaccgaagaagagaagagaaaaaggaacagaaaaaatattcaaaaaataatggttaaagttttcctagtttgatgaaaaatactaatctacacattcaagctcagtgaactccaagtcggataaactcaaagaggacacagacgtatcacagtaaaaatgctgaaaaacaaagacaaaaaawctttaaagcagcaacagaaaaatgactcatcatgtctagtaacattaatggctaaatttcattagaaaaaatgacccgggccgggcggggtggctcacgcctgtaatcc

SEQ ID NO: 275488 - DNA, 471 bp, Homo sapiens
acttataataactgtaaaataataggattatagcaaccttttgtcctacctcagtgacttgatgtatacactgggaacagccctcagtctgagaaagatcagttgaagtccttactgtacaagtccaaattttaaggaaaatgagtccctcgatgagttttctcatgcttcagccatacgtggaccagtcagcctccaggtgtgactagagcagggcttgtcgtcttctttagagtcgctttgcaaggattggagaagctgctcctgtccaygtacagctcacagtctactgatgttcaaagatggtctcggaggttgggcctgctagaataaactgagtctaacacttctacacagttatgttcaactaggctctctgatactgggagcaaggtgttggggtttagggtgttgcaaacttcaatggttatgcggggattttcacagaacatgctttggtatctagttagt

SEQ ID NO: 275489 - DNA, 574 bp, Homo sapiens
tgttttaagtctttaacttctatgatcctctagtaaaatgaatgtatggttttaggaaattacaaaaaccggttggggcagtccatcctagctctttagtggtccacagaatgttggaccaactayggcataaaagctctacattggggacagtacttgtggttggcactggggtctttattgaaatctccccagattaaatggtcctagtttactaatgcccagtgtgaggagagtcaggagggacagaagtacttttctgaagtagaaagctgtctttgacttggaaagtctcctcagggtataacaaggcaagcattaaatgcaatagtttgaggtgaaattgacttggttatattaataagtagatggtcagcaatagaacgaggaaagaagaaagagtaatagactagatgaaaagagttaaatttttattagctttagtttggtagggttttcccctgggactatggcccatgactctggaggtgggggcactttcttgactcgggtgtgatgaatccatccttttattttttatttttttttggctggacgaacaacagtcttggtg

SEQ ID NO: 275490 - DNA, 579 bp, Homo sapiens
attaaattaatttcactaatttaacataagcatggtttggaaagtttttaagcatttattgaccctaaaacaagattttccctaaaaaataattataaattaaatgtgaatgccaaaattatatatgtaccatgtagatttgtagtttataaaataagctgtgattatgtaatttatgtttataatatgtatatgttttttatttccttaataatggcatagakaaatgaaaagaaactattaatagatttagattttttatccacttgttagtgaaatattaaagtaaaattatttacagattttttcatgtctatttctcacacttacagcacattcacacacgtatttatatatttatgtcccactagattttagcaataaaaattaaacctcaaaaatctaaaatattgatacacataatattttaatttatctttaaaacgttgctagctggtataattttttttattataggcagcaaggaggaaatgaggagagacgttatagtgtagggtttaatgccatgtagtaatatatgacaaaggacagaataggtagagtttatgagcgtggctt

SEQ ID NO: 275491 - DNA, 579 bp, Homo sapiens
attaaattaatttcactaatttaacataagcatggtttggaaagtttttaagcatttattgaccctaaaacaagattttccctaaaaaataattataaattaaatgtgaatgccaaaattatatatgtaccatgtagatttgtagtttataaaataagctgtgattatgtaatttatgtttataatatgtatatgttttttatttccttaataatggcatagagaaatgaaaagaaactattaatagatttagattttttatccacttgttagtgaaatattaaagtaaaattatttacagattttttcatgtctatttctcacacttacagcacattcacacacrtatttatatatttatgtcccactagattttagcaataaaaattaaacctcaaaaatctaaaatattgatacacataatattttaatttatctttaaaacgttgctagctggtataattttttttattataggcagcaaggaggaaatgaggagagacgttatagtgtagggtttaatgccatgtagtaatatatgacaaaggacagaataggtagagtttatgagcgtggctt

SEQ ID NO: 275492 - DNA, 584 bp, Homo sapiens
agtattcaaaaacaggatctgtcaaacaattttctgtaacgattccaatcaaatgcagtcccccaaatattccatttaaagtatactttgctattataaaacactcacataaaataggaaatagaattccaagtacagttcatgacattttttattcatgataatcctatcatttctccatgctatttcaaatgtcrttaccataatcccttaaatatttttgcttttagcttcttataatatcttgatacaccaagtgaagaacatttcaaacaaagtaacattttccactttatgattagatgagaaattgagtttcaaatagattctcctgatgtattcaaatatttttctagttttaaattatacaaagtattaaactttcttttcttctaaaagtgtattttgaatgttaattttttttatcgtgcctcaacatgaattcccttctaaactagatgacattattatttctttatttcaagctttgatttctcacttttttatttgctaaaatcctttctatccattgatcctttttacctattatatgaagaactcagttttttaatttaccatctttt

SEQ ID NO: 275493 - DNA, 560 bp, Homo sapiens
tattttgaatgttaattttttttatcgtgcctcaacatgaattcccttctaaactagatgacattattatttctttatttcaagctttgatttctcacttttttatttgctaaaatcctttctatccattgatcctttttacctattatatgaagaactcagttttttaatttaccatcttttacctgaatactctacttcattattattccattttctctaatctcccaatctttaaataagctcttcttttcctctcttaygttttcaggatggcataagtacatacacttttgtggcaatgcctggggaaggattttagtcaatataaattcctaaggtgcaattcctactatcattaataatatttagcagctacccttgaataactgatcatttcaatttgaaacaaaattacctaacaaaagcacatttaaaattttctttcattattgaaattttttttctactgagttagcaagattactacacaaaaatagttgaagagttttcacagctacataatagaaaacaaacacacatcgaatgaaggggccagg

SEQ ID NO: 275494 - DNA, 560 bp, Homo sapiens
tattttgaatgttaattttttttatcgtgcctcaacatgaattcccttctaaactagatgacattattatttctttatttcaagctttgatttctcacttttttatttgctaaaatcctttctatccattgatcctttttacctattatatgaagaactcagttttttaatttaccatcttttacctgaatactctacttcattattattccattttctctaatctcccaatctttaaataagctcttcttttcctctcttatgttttcaggatggcataagtacatacacttttgtggcaatgcctggggaaggattttagtcaatataaattcytaaggtgcaattcctactatcattaataatatttagcagctacccttgaataactgatcatttcaatttgaaacaaaattacctaacaaaagcacatttaaaattttctttcattattgaaattttttttctactgagttagcaagattactacacaaaaatagttgaagagttttcacagctacataatagaaaacaaacacacatcgaatgaaggggccagg

SEQ ID NO: 275495 - DNA, 545 bp, Homo sapiens
aatgacatcatcctgtcactcaaacatggcccaagcttcaactcctccccacaaaccccataaaagtattaacaccctgagctctataaagagttgctgatttcacttcacagaaatcagccygctctccctttgagaatgtattactatacttcaataaactttgctttatgcttgcattttggtgctagtttgtaattctttgctcactatcacaggaacagagattgctggtccaaaagctccagctttgttgatctcctctgttgaagggtccaccccaaggcagtatccccggtaatagtaggacattttgttcattgacagaaaagaacaagaaatggtatattacttttattagggctgccacaacaatttaccacaaactctacagcgtaaaacaacagaaatttattattttaccattctgaaggccagaagtctggaatcaaggttggccaaggccaggttctttccagaggctctatgggagaacccttccttgactcttgcagtttctggtggttccaggtcttccttagatt

SEQ ID NO: 275496 - DNA, 1185 bp, Homo sapiens
ctctaactactgatgtggagagaaatctctgctctcacttctgttctcaccattttatacttaaacaacttcaatggaataccaggataatcactgcatactattggacagatttttctactgaaagaaatctgtatgagtaatgaaagaaacaagaaaaatcctatcacatttgtgtgtattagaaggagagcagttggarttaatgaaaagtcaaaatccacatgcatgggttccaaccagcaatgtgtattgcaaactcaccctggccccatcagaggaattgactgtcatttcttcttcacaacctgcagaccagagaaggatatagttatcactattttacaggtaaaaaacctgagactcacaaaagttaagtaacttgtccaaaattacagtcagtgaatggaagggtctggattccaaaccagaacgctcattctttaccattctgctgtactttaagaatagacctgtaattagtatggagctaaaggaaggggaaattcctgggggagttactctaatgagtaggtgagtatgatttgtaattagcatatcaaggatttctaagtaaattagtgtttccttcwctctaactactgatgtggagagaaatctctgctctcacttctgttctcaccattttatacttaaacaacttcaatggaataccaggataatcactgcatactattggacagatttttctactgaaagaaatctgtatgagtaatgaaagaaacaagaaaaatcctatcacatttgtgtgtattagaaggagagcagttggaattaatgaaaagtcaaaatccacatgcatgggtwccaaccagcaatgtgtattgcaaactcaccctggccccatcagaggaattgactgtcatttcttcttcacaacctgcagaccagagaaggatatagttatcactattttacaggtaaaaaacctgagactcacaaaagttaagtaacttgtccaaaattacagtcagtgaatggaagggtctggattccaaaccagaacgctcattctttaccattctgctgtactttaagaatagacctgtaattagtatggagctaaaggaaggggaaattcctgggggagttactctaatgagtaggtgagtatgatttgtaattagcatatcaaggatttctaagtaaattagtgtttccttc

SEQ ID NO: 275497 - DNA, 555 bp, Homo sapiens
ccaaaattgacaaatgagatctaattaaactaaagagctttgtacaacaaaagaaactatcatcagagtgaacaggcaacctacagaatgggagaaaatttttgcaatctacctgtctgacaaaggtctaatgtctagaatctacaaggaacttaaacaaatttacaagaaataaaacaagcaaccccatcaagaagtgggcagaggatatgaacaatcacttctaataaaaaaycaacaaccatcttttcactgagaaaagagaaattatattattttgggtgatgccggaaaatataacaggtttggaagggtggtgacaagagttccctaaagaaggctccaacactggaaaggactctctgataaagaaacaagcccctccacccagcagcccactccagttcccatgaataattgtacacctgggcagagtgattgagaggtggatgtattagtttcctattgcttccataactaactaatcaccacaaacagtggcttaaaacaacacacattttttatattgcagttatggaggtcaataggctgaaa

SEQ ID NO: 275498 - DNA, 555 bp, Homo sapiens
ccaaaattgacaaatgagatctaattaaactaaagagctttgtacaacaaaagaaactatcatcagagtgaacaggcaacctacagaatgggagaaaatttttgcaatctacctgtctgacaaaggtctaatgtctagaatctacaaggaacttaaacaaatttacaagaaataaaacaagcaaccccatcaagaagtgggcagaggatatgaacaatcacttctaataaaaaaccaacaaccatcttttcactgagaaaagagaaattatattattttgggtgatgccggaaaatataacaggtttggaagggtggtgacaagagttccctaaagaaggctccaacactggaaaggactctctgataaagaaacaagcccctccacccagcagcccactccagttcccatgaataattgtacacctgggcagagtgattgagaggtggatgtattagtttcctattgcttccataactaactaatcaccacaaacagtggcttraaacaacacacattttttatattgcagttatggaggtcaataggctgaaa

SEQ ID NO: 275499 - DNA, 570 bp, Homo sapiens
tggccctgcacactccctgagcaactggcaggggcctctgggtcacctctgctttccatcccatcagccccatttctctaccagagaatccttttattatgttaaaataggaygtcattacttgaattagaaagggaaataccagctgctttcgtcctccaggaagcactaattagccagcagccaccctgatctcaggcgaccagggagccggtgcagactaattacaaccctgctgcctcctgcacactggaactcaggctgcagcacctgcgcttctgagctgaaggatttttaggatctggaatttccccccggcactaaccttgcatttgatgccttcattacacatctccttccacaataccttcctcactggtctctgatttccagccaacccatcttgcacaaaacagccaaattcatctccttaaaacacagttccaatcacataattttcttaccccaaatttgtcagcatgatccccatgcagcatgtaaactatagtccagacccccctccacctggccctgcaggctttctctaaagggactcaagcccggattcct

SEQ ID NO: 275500 - DNA, 608 bp, Homo sapiens
aaatgagaccatttacacgccaggtgagctctagagcacaggacatgaaataatgaaaccagtgatttctacagattcctctggaaatgatggggccatttcatttcattatccratacataaatttaaatgagatcattgttattattcagcactctcattgcatgaagggctatctctgagtgttttacattttattgtgaaaccttagtcggatgctgcatcttcattgtaacccaccattatctttctgatgatgctctgagagattatccttatggctgagatttatgtggttcactcaagcaaatgctaaatacttgcaagtcaaagattttcatacggattttatggtgtagaaaatgttagcttcatagtcattgttgcagttgtggttgtaaggaagtttaaatttttcccctgaaaattcgatcatttgagtctataaaacaaactgataatagacaggttaataggaagaaaggcatacaaatttattaacatgcacatgtgtgcatgggaagcataaaaagtatagaaacataaagaaagacaagatggttgtcacttaaacatcctcttcattggggagagggaatatgggggct

SEQ ID NO: 275501 - DNA, 608 bp, Homo sapiens
aaatgagaccatttacacgccaggtgagctctagagcacaggacatgaaataatgaaaccagtgatttctacagattcctctggaaatgatggggccatttcatttcattatccaatacataaatttaaatgagatcattgttattattcagcactctcattgcatgaagggctatctctgartgttttacattttattgtgaaaccttagtcggatgctgcatcttcattgtaacccaccattatctttctgatgatgctctgagagattatccttatggctgagatttatgtggttcactcaagcaaatgctaaatacttgcaagtcaaagattttcatacggattttatggtgtagaaaatgttagcttcatagtcattgttgcagttgtggttgtaaggaagtttaaatttttcccctgaaaattcgatcatttgagtctataaaacaaactgataatagacaggttaataggaagaaaggcatacaaatttattaacatgcacatgtgtgcatgggaagcataaaaagtatagaaacataaagaaagacaagatggttgtcacttaaacatcctcttcattggggagagggaatatgggggct

SEQ ID NO: 275502 - DNA, 452 bp, Homo sapiens
tttaggctccttttacgttagtagaaggcagaagagggaggggattgagaccaagaggggaccaataaccacagacatctgggtagcagcaagggtccgaggaggttgtaaagcttctttattcttggtcagttgacttcagataatgtcagtcaggtcacagtgttcctataaatctttggcrtcattaattgtgtacatattttcttatgtcctcagggggttaatgttggaaaaaagactattactatcttttctttaaaaagttaaactataaactaaattcttcccatagttaccttaatatacatgtagagataagtaaaagcaatgaacctaaaagacatcactgcgtgcaggggggttaggagaaaaagttactcacgctaggcctccttttcattgttacaatagctttacctgcctacggatggttttttttttttttccat

SEQ ID NO: 275503 - DNA, 637 bp, Homo sapiens
atttctattatatttcatcacaaattagcatgacacagtgtgtgctgaagtctgctcaagttcatgacagattttcttgttttataaatactttctttcacttatctccttatataccagtatttctcttaccggtatgactgatatgaacttttttttatcaaatggccttcactgatggaacagatatctggatgggttcttttttattaccgcataaagttggagtatggcatcatccaggtacttagaaatgaatacaaatacagcattttgaaaytcctaaaaaagaaaaagaaaatggatataaagtttcagtcatgcaagatgtgtaagtcctagagaactactgtacagcatagtgcagatagttaacacttgaaaatatgttcagaggatagatcttatgctaagtgttcttactacaaacatacacacatatacacatacgtcaacacacatacacacatatatacacacacgcacatacacatatacacacacgctcacacatacacacatatatacatacatgcacacatgcacacacacatatacacacgaacacaaggaaactttgggaggtgatggatatatttaatatcttgattgtggtgatgagatcacagacagcata

SEQ ID NO: 275504 - DNA, 637 bp, Homo sapiens
atttctattatatttcatcacaaattagcatgacacagtgtgtgctgaagtctgctcaagttcatgacagattttcttgttttataaatactttctttcacttatctccttatataccagtatttctcttaccggtatgactgatatgaacttttttttatcaaatggccttcactgatggaacagatatctggatgggttcttttttattaccgcataaagttggagtatggcatcatccaggtacttagaaatgaatacaaatacagcattttgaaactcctaaaaaagaaaaagaaaatggatataaagtttcagtcatgcaagatgtgtaagtcctagagaactactgtacagcatagtgcagatagttaacacttgaaaatatgttcagaggatagatcttatgctaagtgttcttactacaaacatacacacatatayacatacgtcaacacacatacacacatatatacacacacgcacatacacatatacacacacgctcacacatacacacatatatacatacatgcacacatgcacacacacatatacacacgaacacaaggaaactttgggaggtgatggatatatttaatatcttgattgtggtgatgagatcacagacagcata

SEQ ID NO: 275505 - DNA, 450 bp, Homo sapiens
taggtgggttctctctttctctctttctctctctctctgtgtgtctctttcctgaggaaacatttttctaaaatgtaatttgaagtggaaaacatatcaaatatatattacttgaagaaagagcaatagatatttgataatgaacctaggatatagtgtacatatgaaaataamataatcactgaaggccaaagctactaaaacttcagacttagagaaacagaaatattatagtcttgtttcaaaccaccacatcacattcttggtctcatttttaacaggataggatataggttaggaagaggtataaaagagaaaagagcaagactgtgatttcacaacataatcttggtgaaatgtcttgtctacaaaatgagaagtgggttaaaccacatggtcccaaagtctctcccagccctaatgttccagaaatctaagcagaaaccacat

SEQ ID NO: 275506 - DNA, 450 bp, Homo sapiens
taggtgggttctctctttctctctttctctctctctctgtgtgtctctttcctgaggaaacatttttctaaaatgtaatttgaagtggaaaacatatcaaatatatattacttgaagaaagagcaatagatatttgataatgaacctaggatatagtgtacatatgaaaataaaataatcactgaaggccaaagctactaaaacttcagacttagagaaacagaaatattatagtcttgtttcaaaccaccacatcacattcttggtctcatttttaacaggataggatataggttaggaagaggtataaaagagaaaagagcaagactgtgatttcacaacataatcttggtgaaatgtcttgtctayaaaatgagaagtgggttaaaccacatggtcccaaagtctctcccagccctaatgttccagaaatctaagcagaaaccacat

SEQ ID NO: 275507 - DNA, 581 bp, Homo sapiens
aacgccaaagtactcttcatctagagtcaatccttgttaaaatcctaccatggttgccgtatctctaaatatatgtgtgtttgttgtgtgtgcatttgtgtacattgagtcatctgaaattatgttccaacacttgagctccaaatacttcttagcatgcaagaataattcttagcatggaaggtaattctctaaatcatttctctaaaatcatttaatcatttagagaatcattaaattctctaaaatcattaaatatacattctattttcaaatgttccaaattatatcctttatttttagttgtttttttctttgaatcccccaaaaggatccaatcaaaggtcatgcatcagttgcgtcacaagcctctttagtcttgtaatctagaacctacaatagtccccgcattyatgtcacaacatggactctgtgaagagtccaggaccattgtcttgtagcatattccacattctggatttgtcatgttcattcctcattcctgtatcctttatttttcccataaactgtaaattatgcctggagacttaatacttccagattaaacattttggaaaaaa

SEQ ID NO: 275508 - DNA, 470 bp, Homo sapiens
attcactataatgaaatggttgatgtaaggcactaaatgttgcaatagttggttatgcagcagtagacagccatggtaactgtctacagacagccacagaaaagaataacacggacacaaaggcagaggctgggaaascttgacccggtgcccgcacatctgcaaatgacaggaaattttcccaaatgaaagtttaagtccatttttagtctgtgctgatataaataagatgatcttaacatactttgaaaaaatatgtacaaacataaacatatgttttttaaaaaggagccctcaaacgaggaagatatgatccaaagagacagctattggctttaaaatattagttagtcagccttggctagacagctgctgctgctcctgagagctaagtcccactgtgtgaggttaccagttagaaatgggattttaaatcaaatattgggcagtttgtctgtgaacaccaaaat

SEQ ID NO: 275509 - DNA, 626 bp, Homo sapiens
ttgtttccaatgaaactaaggttcataaatgaaggaaagctatggtctttcaaagacaaacaaatgctgagagaatttgccattaccaagccagcactmcaagaactggtaaaaggagctctaaatcttgaaacaaatcctcaaaatacaccaaaatggaacccctttaagtcataaatatcacaggacctataaaacaataacacaatgaaagaaaaagcaaggtattcaggcaacaactagcaaaatgaatagaacagtacttcacatctcaatactaacattaaatgtaaatggcccaaatgctcaagagatacagaatggtagaatgtataagggttcaccaaccaaatatctgctgtcttcaagagactcacctaacacagaataactcacataaacttaaggcaaaggaatggaaaaagatattccatgccaatggacaccaatggtgaggaggagtagctattcttatatcagacaaaacagaatttaaagaaacaacagttaaaaaagacaaagaggggcattatataatgataaaaggactagtctaacaggaaaatgtcacaatcctaaatatatatgcaactgatgctggagctcctaaatttataagagaatta

SEQ ID NO: 275510 - DNA, 626 bp, Homo sapiens
ttgtttccaatgaaactaaggttcataaatgaaggaaagctatggtctttcaaagacaaacaaatgctgagagaatttgccattaccaagccagcactacaagaactggtaaaaggagctctaaatcttgaaacaaatcctcaaaatacaccaaaatggaacccctttaagtcataaatatcacaggacctataaaacaataacacaatgaaagaaaaagcaaggtattcaggcaacaastagcaaaatgaatagaacagtacttcacatctcaatactaacattaaatgtaaatggcccaaatgctcaagagatacagaatggtagaatgtataagggttcaccaaccaaatatctgctgtcttcaagagactcacctaacacagaataactcacataaacttaaggcaaaggaatggaaaaagatattccatgccaatggacaccaatggtgaggaggagtagctattcttatatcagacaaaacagaatttaaagaaacaacagttaaaaaagacaaagaggggcattatataatgataaaaggactagtctaacaggaaaatgtcacaatcctaaatatatatgcaactgatgctggagctcctaaatttataagagaatta

SEQ ID NO: 275511 - DNA, 519 bp, Homo sapiens
cacctagactcaactttaattcacagaaaataatataaatagagagaaacattaaatacccaataaggaaaaaatcctrtaattccagagtgttgaacactagacacaacaatcagacctgacttcaaaaaataaagatgatggagaagaaaagcatggactattttagactaaaagagactagagtcccatacaaatctaatgcaatgagctaactttgagtaaatcctggctggggtaaaaacactctaaaggacatttggaaaatcatgagtaaaattaaatatagtctgaaaattagataaaattcaagacattaattttcttaagtgtcataacggcattatagttaggtaggagaatatcgttaattcttcagaaatgtattctgacatatttagagttgaagagatatcatatctcttcaaatggtttgcattaaaatcattcgaatggcttacatagaaaatatggcaaaatattaacaattattaaatccacttagagcaggggctcagc

SEQ ID NO: 275512 - DNA, 681 bp, Homo sapiens
cagttatctgtcttctctatgtccctctagaaacataaggcataaatcctcagggggaaatttatatttcatgctcaggggtgcctttaagaaccaagaaataaaagtgacatacattttggaggacagcctctatgagaatcattctcaaatcatatcacataggttcccttcccattgaaaccactggacctagccttgcatctgaattgtggatggaaatgttgccgtcttttaaagttttgcatttggagagcaattgagccctttgaagtggattctgatagatatatgaggtttatattgatatacagaatcaccccactgagccaacctagatggagatgaaaaaaaaaaaagagtgatcttcaatctagacttccaacccattgctggaaagtggcaggaagaggaagtggagaaaaaggtgggatgrgggacaaggatctgaggagaaaggagatctggttaatacctgctatagtgtggatgtttgtgtccccagacttcatattgaaatttgattctcaatgttagaggtgggactgaaggagaggtgtttgggtcatggatccttcatgaatgaaggggatggatccttcatgaatgacttggtgccctcctcacagtaatgagtgaattattgctctatttgttcctgtgagaactgggttttacaaa

SEQ ID NO: 275513 - DNA, 590 bp, Homo sapiens
aatcgtacagtaaaaggttaactcagcaggctttggtgctcaaaccttacactattccagacaaaggactggctgttgaagggctcctgcatgatgacgtctgaggcctgatagaaatgtttgtgtgacggaggtttgggccatgctataccagcttgctcagatagtttgtgctatcagtgtgacttatgatgctcccttgttgtacgcttggggctttgggccgtgctctatcagctggaccttggtggggctggagagtcagtagctaaggtcagctatcaagacactgcctgcctacatgacgaacccccagtaaaaaccctggacaccaaaggcccaggcgagcttccctggatggcaacacctcgcaggtgtgtcacacaccattcctagggcattaagcacttgtcatgcaactccactgggggtagacaacttgaagcttgtgtcttttttttctctcagacctttccctgtgtgcctyttctctttgctgattttaatctgtgtcctttcacagtcacaaactataactctcctgagtcctgtgagtccttccagtaaatcatcaaatctgagagttgtca

SEQ ID NO: 275514 - DNA, 573 bp, Homo sapiens
ccattgattggatgccaatagcataacaagaatgtatatatatgtaatatgtgtatatgtatacatatcatatgtgtatatgatctcaatttattattgtatacattttatagtgaggaaaaacaagactttaggaattaacttgctcaagtttagctaagtagagagggaggagctgggattctagccccgtttgtctatttacaaagtcccacatctactccttgcacagagctagtaggactagcacgaaacttctctttttgtccatctaaaagagaagccacaggaaggggccctgacatataagcccttttctccagtttccacttgtggctccagccagcttcagtttccatgattgatttgttgtaaagaaaacctyacgggtgtgcagtcagggatttcaccaagcacccatccctgctctggatatgaaggcaattgtctcctgacaaggaaaaagtggagcttgtatttggatcgatgtgtttgttacttaaacaaagtcagcatcaactaagaactggaacaaaatgtcccctgtgctctgaagttccacagttatgaaat

SEQ ID NO: 275515 - DNA, 573 bp, Homo sapiens
ccattgattggatgccaatagcataacaagaatgtatatatatgtaatatgtgtatatgtatacatatcatatgtgtatatgatctcaatttattattgtatacattttatagtgaggaaaaacaagactttaggaattaacttgctcaagtttagctaagtagagagggaggagctgggattctagccccgtttgtctatttacaaagtcccacatctactccttgcacagagctagtaggactagcacgaaacttctctttttgtccatctaaaagagaagccacaggaaggggccctgacatataagcccttttctccagtttccacttgtggctccagccagcttcagtttccatgattgatttgttgtaaagaaaacctcacgggtgtgcagtcagggatttcaccaagcacccatccctgctctggatatgaaggcaattgtctcctgacaaggaaaaagtggagcttgtatttggatcgatgtktttgttacttaaacaaagtcagcatcaactaagaactggaacaaaatgtcccctgtgctctgaagttccacagttatgaaat

SEQ ID NO: 275516 - DNA, 626 bp, Homo sapiens
ttgtttccaatgaaactaaggttcataaatgaaggaaagctatggtctttcaaagacaaacaaatgctgagagaatttgccattaccaagccagcactacaagaactggtaaaaggagctctaaatcttgaaacaaatcctcaaaatacaccaaaatggaacccctttaagtcataaatatcacaggacctataaaacaataacacaatgaaagaaaaagcaaggtattcaggcaacaactagcaaaatgaatagaacagtacttcacatctcaatactaacattaaatgtaaatggcccaaatgctcaagagatacagaatggtagaatgtataagggttcaccaaccaaatatctgctgtcttcaagagactcacctaacacagaataactcacataaacttaaggcaaaggaatggaaaaagatattccatgccaatggacaccaatggtgaggaggagtagctattcttatatcagacaaaacagaatttaaagaaacaacagttaaaaaagacaaagaggggcattatataatgataaaaggactagtctaacaggaaaatgtcrcaatcctaaatatatatgcaactgatgctggagctcctaaatttataagagaatta

SEQ ID NO: 275517 - DNA, 571 bp, Homo sapiens
aatattcccttctcttctattttctggaagagcctaaattctggaagaatttctgaaggattsgtattaattcttcaaatgtttagaagaattcaccaatgaagttgtgtctgctggggattttctatgtgggaagtgttaaaattactaattcaatgttcttacttgctaaaattccattcaggtttcctatttcttctatcaaatcagtaatgtttgtctctagggatttgcccatcttacttagttttctcagttgttacagcatgtagctgtttgtactcttgtgatccttcttattgctgtgagtttagtagtaatgtcctctctttttcctcgaagttaataatttgattcttctctctttttttttcatggtctgtcatgtaaaagacttggtccgtttttgttgatcttttcaaataatcatatttggtttaatttatttttctctattatttttctgttttctatttcatttatttcaggtctaatctttatttctttcttcaactggcttggctttattttgttcttttttcatagttttctagagggctggttagattat

SEQ ID NO: 275518 - DNA, 626 bp, Homo sapiens
ttgtttccaatgaaactaaggttcataaatgaaggaaagctatggtctttcaaagacaaacaaatgctgagagaatttgccattaccaagccagcactacaagaactggtaaaaggagctctaaatcttgaaacaaatcctcaaaatacaccaaaatggaacccctttaagtcataaatatcacaggacctataaaacaataacacaatgaaagaaaaagcaaggtattcaggcaacaactagcaaaatgaatagaacagtacttcacatctcaatactaacattaaatgtaaatggcccaaatgctcaagagatacagaatggtagaatgtataagggttcaccaaccaaatatctgctgtcttcaagagactcacctaacacagaataactcacataaacttaaggcaaaggaatggaaaaagatattccatgccaatggacaccaatggtgaggaggagtagctattcttatatcagacaaaacagaatttaaagaaacaacagttaaaaaagacaaagaggggcattatataatgataaaaggactagtctaacaggaaaatgtcacaatcctaaatatatatgcaactgaygctggagctcctaaatttataagagaatta

SEQ ID NO: 275519 - DNA, 499 bp, Homo sapiens
ccttttcttctctatgtcccattattacttggtttctttattccttctttattgcctcgttttgtcttaagtagatattttcacatgcattattttaactcctttaattaactttgtactttttaaagttatattctttagcattgctctagggtttaccataaattttcagaatccaaatcagatttatrctaatttattacaataatttatacaaattatacttctacagactccatttattctccctttatgtgctattattctagaaagtacatctgtgtatattacaaagccagcagcactacattgttaccattattgccttacagaatcatatgttttaaagaagctaaaagaagaaacaagagcagaaatatatagagtttaaatatctgtctgtcttttatttactattttgaatttgcttcattttttttttttgttgtggattccggttaccttctgctgttacttagttactgtaatatagcttcat

SEQ ID NO: 275520 - DNA, 509 bp, Homo sapiens
tcccttcaggcagtactttgaaggtatccgtccttatgacctactcttaccttgggtaaaccctatcctgratgtggggttggaaacagttgccttatttttttggagtagcacttgtgctctatgagtgagctctggggagagtggccccttgtttcttgacttttcttttctggcctggaacctctatgtgcaagctggagagggagcagttgagtccagtgttctcagcctctacacttagagcagagtccttgccctgtgaatgggggctgaatgagggaaaggagccccagttcttctggctgcacttacccagaatagcactttcacagcgtggggctcggaaggatgacagatgccggaagcctgccccttgtgggatgcaactgtagcctagcccaacatctggggctggggacagaggaaaacccttgtcttcttggttgcacccaccctgaaaagagggtctagagtaagacccacattacatggggtggataggaaca

SEQ ID NO: 275521 - DNA, 591 bp, Homo sapiens
tctaagctccttgaaggcaggcacttcttctaaatcatccttacgtagccatgattccccctccctctctctcacttccaactctaatgcatgcattcaggctttcttctggtgacacattcaaaaaatgtttgctgagcccctattagggactagaagtgacaacaagaggacaaggctcagctccgtggaccttgcggctcggcacaaggcaggtgccccgaagctctgctgctaaatctgcctgctggactcatggcatcctactcctaaggcctggccagtggtgacttgggctgtggccgaagctgagtgagcattagggaccagcactgggtgtagagcagccttccgtggcagggccttagtgagaggaactcagaagagatgctagcagaaggtgggaggtgattgaaatgccagagactcagggggtcccagggactagtttgctagcagagrtggttgcattttctcaaatttctacaagtttctggagtaagcttggaaagccaggcagcttctgatgagtaagcagaggctgccaccgcacaatgtggggactctaactcccgccggtcagcgcagagg

SEQ ID NO: 275522 - DNA, 248 bp, Homo sapiens
accctcctctttacttccttcttactgaattgtttgcaacaaataccaagtattaagtcatgtcattttactgttagatacttattacagtatacatctctacaagcgtgggcatttgttttaaaggcctaattaggtttaggttcctctagccaagaataattcataagtgatactgtatacttyatattgaattacgtcaagaatatacaaagtctggctgtcccacttttagtaaggtttaagtt

SEQ ID NO: 275523 - DNA, 614 bp, Homo sapiens
aataatgaaatagaggacaaatgaagattctgtctctgagcaggactcgggatggggagcagtgggccccagctggaggggcgcaggtcaggctgtagggcccctggagctggctccctggcttgagagaaagggccacagtcaccttcgcctgcccaggcccagtcgtctttctcggragtggcggaatgtagctttctaccctacgggctcctgcgcctcacagtgctggctttgggtttcttctgggtctctgtgctaacttaggctccgacgtttctaactttggccaagaaggttttgtatacgaatttatagtgtactgtatatgtgtgtgtgtgtgtgtgtgtgtacgcgtgcacaccagcacatgcactttttaaaacaactaggaatcttctcagcaaacactattccttgtctactcccttctcttgaagatggtcactgagtggctacggagacacaaacttggaggaaagcaccctggccttgccaacagtggagagtgccccagggccaaccccgatgaatctctgccagatgaggtgcagaaggggatggggcaaaggaagcagatactcccccacgtgacttccccacaggagccactt

SEQ ID NO: 275524 - DNA, 614 bp, Homo sapiens
ttttccctccttggccatccaacttcctggggtgcccttgtgtgctcatgcaggtatgtgtagaggcaggaagaaagttgagagagttctgaggctccaagggtcccttytggttaataccagcatggcctttccaaggtggaggggcgaaaggagatgaaatcagagttttgggacaaggtttctctcccacagaagccaggaataggccagtccaaacacagctgccaccttgccatctttttagccctcagactagctgcaaactcaaggaccttttctcttcaagggttttatgaggatttggggccagaaaaaaaaaaaaagaaagaaaaagaaaacagagagggtgacaaaatagatatatgaggaaatttcaaagacctagacgttctccaagtagtcattttctagtcaataaatatttcttgggtaaattaatgatctgtttagaaattagctcgggcatcagcccagctttcctggcccctttctgaaccagctgtctcagctatcccctggaaatcacgatgttttatgtctatcagatgctttagacactcgggatgggggaacagattcttagtccaagcataagtagactcctgggataa

SEQ ID NO: 275525 - DNA, 562 bp, Homo sapiens
gagaggtttagacctgggaggtggccatggagaggagaatatgtagatgagataaattttagacacagagctatggatttgaattacatttttgaagtaagtacaaagatgtcccagagggagcatctctctccattaaatgtcctgaaaccagaagtcttcaccctcctcttcccagcccccatgacactgggtaggaggaatccttaaktgtgacatcaccataccccaaagaaccacgcctactagcaagcacatcattacttatgtggatctcatctttcagtgcgggtggattgggttgtctaatcatcacgggcgccggtcataaatactgctgtctgggctgttttcaacagtcacgtgatgtgggaaacactgtcactcacctaagccatctgctcagaaccaggagcagctgagctaggcctggcaaacgggacaatatatacacattctgctcctttgatagatttgtttggggaaaatgttctagtgattaatgggccatttccttgctgatacgctgcacgtgtagccattaacaaatgattccagtgca

SEQ ID NO: 275526 - DNA, 562 bp, Homo sapiens
gagaggtttagacctgggaggtggccatggagaggagaatatgtagatgagataaattttagacacagagctatggatttgaattacatttttgaagtaagtacaaagatgtcccagagggagcatctctctccattaaatgtcctgaaaccagaagtcttcaccctcctcttcccagcccccatgacactgggtaggaggaatccttaattgtgacatcaccataccccaaagaaccacgcctactagcaagcacatcattacttatgtggatctcatctttcagtgcgggtggattgggttgtctaatcatcacgggcgccrgtcataaatactgctgtctgggctgttttcaacagtcacgtgatgtgggaaacactgtcactcacctaagccatctgctcagaaccaggagcagctgagctaggcctggcaaacgggacaatatatacacattctgctcctttgatagatttgtttggggaaaatgttctagtgattaatgggccatttccttgctgatacgctgcacgtgtagccattaacaaatgattccagtgca

SEQ ID NO: 275527 - DNA, 562 bp, Homo sapiens
gagaggtttagacctgggaggtggccatggagaggagaatatgtagatgagataaattttagacacagagctatggatttgaattacatttttgaagtaagtacaaagatgtcccagagggagcatctctctccattaaatgtcctgaaaccagaagtcttcaccctcctcttcccagcccccatgacactgggtaggaggaatccttaattgtgacatcaccataccccaaagaaccacgcctactagcaagcacatcattacttatgtggatctcatctttcagtgcgggtggattgggttgtctaatcatcacgggcgccggtcataaatactgctgtctgggctgttttcaacagtcacgtgatgtgggaaacactgtcactcacctaagccatctgctcagaaccaggagcagctgagctaggcctggcaaacgggacaatatatacacrttctgctcctttgatagatttgtttggggaaaatgttctagtgattaatgggccatttccttgctgatacgctgcacgtgtagccattaacaaatgattccagtgca

SEQ ID NO: 275528 - DNA, 594 bp, Homo sapiens
catctctctgtacttgccacctccgacatccacgattggaagatggcagcagtcaccaagtctacacgtgtcctcattcacctccataagatttgagtcaattggaacactcctgaaccaaccccatatcccagagaaaggcaggctctgattagccaaggcctaattgacctgccctatccactgtactgggaataggcttgtccagtcaaggaattggggatggagttgctcttcccaaaactccacagctgctgaattgacacaaggaggttgggatggcaggtcctgggaggccaccctgcagttcatttcacctcttaagtatgcaaaggaaaaaggagacatggttgtttgatttcaggctttttacagcatgaatttggagtttgtcaccttaagaaaaggaagatcacaaaaggacctttttyttctccgagaaccttctaagggtccttttaagatatacacactggacatctactttgtgctgggcactgtatgaaatcctggaggagaaacatgaaaagggtagacttgaccttgaggggctctggagctttctcctctccttggtcctaccccaacccctca

SEQ ID NO: 275529 - DNA, 625 bp, Homo sapiens
taaacaaaattagccagctgtggtagcatgtgcctatagtcccagctgcttsggaggctgaggcaggatgatcacttgagcccaggagtttgaggctgtagtgagctatgatcactccactgcactttagcctgggcgacagagtgagaccttgtgtctaaaaaataaaaataaaataaaagtaaaatataattaatgggtaaatgtaagtaaagtgtttctgagtcctttgagctgctctagcaaattaatggaacctgcagagggggtcacaggaacccatgatttacagccagtcaatcagaagcgaaagccacaatgcaggcttgcacgattggcctctgaagcagggggcagtgttgtgggactgagcccttagcctgtgggactagaagctgtctccagggggatagtgtcagaattgaattcaaagcgaggacagacaggcagctggtgtctgctggagagttccttggtggcgggaaaacaactcgcacacgtctggtgttggaagcattgtgttgagctgtgtatgagagaaagaaaaacactttggttttctctatccctaatacctatccactcccatacatgtatcctcactttccctctccaccaacctccc

SEQ ID NO: 275530 - DNA, 625 bp, Homo sapiens
taaacaaaattagccagctgtggtagcatgtgcctatagtcccagctgcttgggaggctgaggcaggatgatcacttgagcccaggagtttgaggctgtagtgagctatgatcactccactgcactttagcctgggcgacagagtgagaccttgtgtctaaaaaataaaaataaaataaaagtaaaatataattaatgggtaaatgtaagtaaagtgtttctgagtcctttgagctgctctagcaaattaatggaacctgcagagggggtcacaggaacccatgatttacagccagtcaatcagaagcgaaagccacaatgcaggcttgcacgattggcctctgaagcagggggcagtgttgtgggactgagcccttagcctgtgggactagaagctgtctccagggggatagtgtcagaattgaattcaaagcgaggacagacaggcagctggtgtctgctggagagttccttggtggcgggaaaacaactcgcacacgtctggtgttggaagcattgtgttgagctgtgtrtgagagaaagaaaaacactttggttttctctatccctaatacctatccactcccatacatgtatcctcactttccctctccaccaacctccc

SEQ ID NO: 275531 - DNA, 555 bp, Homo sapiens
ttaacagactttacattattttgccagaaaatatggcatttctactagaatattgatgtagaaaagaaactccacyccattttattttcatatctttgcgtaagattgtgtttacagtgccattattcacaaaagccttccatagagtattttttttttcttgtaattaaaacagtaggacttaatgacaggctggggatgcttgctgtttttctaataatggattgaactatttgaatgggtaaaaaatgttaatacagtgattatttcaggctgagctaagtcttgtcataaaagataaagtattaaatttgcattagatgtttttaaaatgaaattgaatactgtaaagtcatataaaggtagtccaactttgccaaacatgatcataattgtaaaggaatatagaagttatgattcaaataaactcactttgacagcaaaagaaacccactgatttttgtaacacaaggtcactggtttcattaaatccatttattcggtaccatgacttgtgaatgttgctttgttgttttacgctttcagtgttttata

SEQ ID NO: 275532 - DNA, 987 bp, Homo sapiens
agtgagttgtatacacagtgtatattatgtatgcaataagctagaaagtgatcaagagaaaatttgtctttcctcctgtaactttaaatagctgataatctaatggaatatgcatacctatacacaaatataggacacaaggtgtccctgattttcatttgtaaggtatttctaagaggcaaaagtaaaattttaaaaatgtgaatgatagatttmcatgttataagtgagattcaattatagataacttaagagtaacacaaaatatttaattttgttttacctttaaacctcatgtacagttatatatttacagcttttctccatgtacttaaattttgttctaatgaatacatagtcatccagctaaagttcaatgagtgtccagtggaggctaaagataagccaattttagtctctttagtgatttttttaattcttcctaattatattactatgagaatgtttttcttatcatctctattttctaccctattatcttttaaacattaaagtgaaatgttatacagataawggtaagggtgctgaaattaaaccattataggaaagacagcattatcaggagatgtggttggcagttgatagatgatctttgggattctaagtataaaagtgtgttttatacttaaaatcggagggaatttcaagttacttaaaaactgaacttttgaaaatgagaatcatctgtaatgcaaggtgctggacaaaggacataatactawcaacattgagttttactcttaactgttctaagaattttacatacagtcattcacttaattctcacaacaaccttatgagataagtattattattattgccattttatagatgaagatattggcagactgagtaactaacatgtctaacgtgcctatggctgcatatagttagtggcagcgctgataatgaagtttgggaagtcttgtcccagaaatcactcttcattcctgcattccactcccc

SEQ ID NO: 275533 - DNA, 452 bp, Homo sapiens
ggtaagggtgctgaaattaaaccattataggaaagacagcattatcaggagatgtggttggcagttgatagatgatctttgggattctaagtataaaagtgtgttttatacttaaaatcggagggaatttcaagttacttaaaaactgaacttttgaaaatgagaatcatctgtaatgcaaggtgctggacaaaggacataatactatyaacattgagttttactcttaactgttctaagaattttacatacagtcattcacttaattctcacaacaaccttatgagataagtattattattattgccattttatagatgaagatattggcagactgagtaactaacatgtctaacgtgcctatggctgcatatagttagtggcagcgctgataatgaagtttgggaagtcttgtcccagaaatcactcttcattcctgcattccactcccc

SEQ ID NO: 275534 - DNA, 452 bp, Homo sapiens
ggtaagggtgctgaaattaaaccattataggaaagacagcattatcaggagatgtggttggcagttgatagatgatctttgggattctaagtataaaagtgtgttttatacttaaaatcggagggaatttcaagttacttaaaaactgaacttttgaaaatgagaatcatctgtaatgcaaggtgctggacaaaggacataatactatcaacattgagttttactcttaactgttctaagaattttacatacagtcattcacttaattctcacaacaaccttatgagataagtattattattattgccattttatagatgaagatattggcagactgagtaactaacatgtctaacgtgcctatggctgcatatagttagtggcagcgctgataatgaagtttgggaagtcttgtcccagaaatcactcttcattcctgcaytccactcccc

SEQ ID NO: 275535 - DNA, 535 bp, Homo sapiens
catatatacacacgtatacatatatacaggtatatacatacatacatataacacacacatatatacgtgtgtgtgtgtgtatacacacatatatattttggctttgtgctttatctactctctacatgaaactgttagcattgggtaatttgttatatagcatttttaaagtctgagcatacaagtttatgtcctttctgatcataaaaaaactttgatttagctgcaaatccaaaaagcttttttaaaataatgcttgataatctcagggtttagctccagatggatggttggatggatggatggatggatggatggatagatacctgtctatagataaagttggacattatcaytatgttgtagagtgacccaatctatttaggagttggggaagatcttgtggaggaaatgacatctaatttgtgatctaagaaacgttaaatttgaccaagcatgtgtctgtagcatggtaggaagagtgtggcagtgtatggtgagggggtgttccagataaaggaaatagtaagtgtaa

SEQ ID NO: 275536 - DNA, 565 bp, Homo sapiens
attattttgttgtgttataaatacctattgataagcctaatttcctaaagcagttaactctttgctttctcaatgaaaaaaaaatattttattttattttattttattttattttaagttctgsgatacacatgcagaacctgcaggtttgttgcgtaggtatacatgtggcatggtggtttgctgtacctatcaacccgtcatctaggttttaagccctgcatgcattaggtatttgtcctaatgctctccctccccttgccctccatccaccgacaggccccgatgtgtgatgttctcctccctgtgtccatgtgttcccattgaagagcaacaaaatattctaaatagcattgctatctgcctttttctgtttttttttttttcctggtttattacaatgtaatatactaatatttctgctaagatgttttccataagctgtggttttgtaggaacttgcctgatcattttgacagaaaaaaaaaaaatcagccaattttagtttagggacaatttcatagaatttcatggtgttaattttaagcaactttcaaaaacataa

SEQ ID NO: 275537 - DNA, 565 bp, Homo sapiens
attattttgttgtgttataaatacctattgataagcctaatttcctaaagcagttaactctttgctttctcaatgaaaaaaaaatattttattttattttattttattttattttaagttctgcgatacacatgcagaacctgcaggtttgttgcgtaggtatacatgtggcatggtggtttgctgtacctatcaacccgtcatctaggttttaagccctgcatgcattaggtatttgtcctaatgctctccctccccttgccctccatccaccgacaggccccgatgtgtgatgttctcctccctgtgtccatgtgttcccattgaagagcaacaaaatattctaaatagcaytgctatctgcctttttctgtttttttttttttcctggtttattacaatgtaatatactaatatttctgctaagatgttttccataagctgtggttttgtaggaacttgcctgatcattttgacagaaaaaaaaaaaatcagccaattttagtttagggacaatttcatagaatttcatggtgttaattttaagcaactttcaaaaacataa

SEQ ID NO: 275538 - DNA, 594 bp, Homo sapiens
tgggttattccttccacatatgtattccataggaggtggtaaaattttcatgaaggtttcatgtgtttattttactcagcttagaaatagaaaatgtcgtgtgtctgaggtatagacaaatgtagtggaaatgcttgacaaaacttacttgctaaactattgtaagaagtgtatagaaaaacatctattgcatgtattctgtgataactttatatattatatgatacagattagcatgtagattagcatttatacattacatgatatagataggtttatagaatatatattatgtcagatttatatattatatcatatagtatattttatatatgtatatacttttttctttttctttctacttacagttccctgaatcaaatatggcagtctcctgaaggcaaatttaaattagctcaagatatataggcagtctcctgaaggcaaatttaaattagctcaagatatatataaactgggcagaacagtcatatttttaatagtaaaatttgtcttttggggaaaatcttgttactcaggstgtaacatttttcttcatgttgagttgcaaaatcccaggaactgttcagcaaa

SEQ ID NO: 275539 - DNA, 499 bp, Homo sapiens
tctttatgaggttaggataaaaaccacacaagcagagacaacttcacgattcatttgaagaatcagttaggctactccagaatttacacatcgaaaaggcttgatgatttcatttctgttcttaaagacattgcattagaactagatgttcttaagcatacattaaaaaagaaagaaagaaaaagagcctaccctctctaactgaaaagaattactgagaagtctttgagaaactcctagaagttttcctcyttaggtttctggctatatgcattagctagtagctaagtgatcatgaggaaaaggttcaattatgacaacatgctaatggaaatgaatataaacatgccaaaaaagagaaagttgctagaaccaaccaaacaatacaaaaatgcagaacttgcaccagggtaaagagatcaattctgtgtgatcactcatctcaagaagggtgacacaattcttgttgcttatcttgaatgaagctaagcaatgttgg

SEQ ID NO: 275540 - DNA, 1053 bp, Homo sapiens
tctttatgaggttaggataaaaaccacacaagcagagacaacttcacgattcatttgaagaatcagttaggctactccagaatttacacatcgaaaaggcttgatgatttcatttctgttcttaaagacattgcattagaactagatgttcttaagcatacattaaaaaagaaagaaagaaaaagagcctaccctctctaactgaaaagaattactgagaagtctttgagaaactcctagaagttttcctctttaggtttctggctatatgcattagctagtagctaagtgatcatgaggaaaagsttcaattatgacaacatgctaatggaaatgaatataaacatgccaaaaaagagaaagttgctagaaccaaccaaacaatacaaaaatgcagaacttgcaccagggtaaagagatcaattctgtgtgatcactcatctcaagaagggtgacacaattcttgttgcttatcttgaatgaagctaagcaatgttggwaatcaaccttcatcttttaggattttcggtctttgcttaccatgtttcctctctcgtctctgcataatttcctcattttgcctttgccaacagtgagttaagaatttggtgtacatcgtgtagctgcctttgtagatgtgtttttatctcagctgataatccgaaattgagatatcatgcatcaacagtagctttcaatttttatctgaaggatttacctgggcacataaattatgcttctggatgtggaggtgatctttacttccctgattattggtcatgtactaaaaagtcagaattatagtgatgatcctctagttaggtactagagcctcaaattcataataaccacagaattttcgaagggaataaagacataggattattcaaaatatatccatgtacttctattcttaatgacaactgtctataattaatgacacttgcatttatcataaaaatwcactttgaaatttgtattaaatataggcacttgtgggaaaagggcatcaaatacattttattagaatatgtttcagttggttaataaaac

SEQ ID NO: 275541 - DNA, 557 bp, Homo sapiens
gtgtttcaccatgttggccaggctggtttcaaactcttgacctcaagtgatctgcctgcctcagcctcccaaagtgctgggattacaggcatgagccaccacacctggctatttttttaaaagctaatttgttactggtatgtaaatatgctactaatttggtacattgattttatatccccaaaattcagtraatttgtttattagttctaagagttttttggtgaagtttttagttttttgtttgtttgtttgttttttaacatataagattatgccatctaaaaagaggtataatttgacttcctcttttccaatttggatgccccatatttctttctctttgctaattgtttttgctctgacttccagtactgtgataataaaagtggtaaaagtaggcatccttgtcttgttctagtttttggagaaaaatctttcagtctttctccatttagcatgatgatatctgtggttttgtcatatatggccttttttgtgttgaatacattctttctatacctatatatagagagtttttatcatggaggatggta

SEQ ID NO: 275542 - DNA, 614 bp, Homo sapiens
atccagtaaaggcctaggctactgctacttgtagtatggtccctgaatcagcagcatccacattatttattattatttatataaatcagaatctcaggcaggccccgtctgaataggaatctggattttaacaagatccccaggctatctgcatacagcaatcagtcttgagaagcactattctaaacatattttgttgaaatatttgaatgaagtagcatactacaaagtgtcaggaccatagctttattggacttaattgcggagatcagaaagactggtattgttggcaaaagtgcctgatgcttttgatggcactaataaaagatttgtttgactcatttaaatgatgacatttaaacaacctagtttattataggaaaatattatgttcttataygacgtttttcaaaaattaaaggtttgaccctgtatatacttacaagcataccaccaagatttgaaaataataatctgtggttttacaaagcataacaataattttgtaaagttagtagtagaaatgttaagcacccaaatcaaataatgcttcaattttgcaacaaaacagcctttcttcttctatgctaacagtatcacaacagagaagatag

SEQ ID NO: 275543 - DNA, 566 bp, Homo sapiens
tccttcattctgttgatgtgatgtatcacatttattgatttacatatattgacttttccttgtatccctgggatcaatcatayttgactatggtgtattatccttttgatctgttgttgaatttggcttgctagtattttgttgagaaattttgcatctatgttcataagacacagtggcctataattccctttttttgttgtgttcttgtctggttctggtatcagggtagtgctggccttgtagagaagttgggaagaattctctcctcttcaatttttaggaatagtttgagaagaatttatgtttgttctttaccagtttggcagatttcagcagtgaagctctctgatctaaggtttgtctttgttgggggactttttagtattgatttaatcttgctacttattattgatctgttcaggtttttgatttcctcctggttccatcttgataggttgtatgtgtccaggaattcaccaatttccttcagtctttctaatttattgtcctatagttgttcatagaagtctctaacgatcatttgaatttctgtgatatcagtt

SEQ ID NO: 275544 - DNA, 573 bp, Homo sapiens
tgcttggggggatatcagattccagaggccaattgtagcaattgaaatttgcagaatcaattatgtaaatctgagacaaattagtattaaaattacacggagtatattttttaaatcacccaactttgtagattatacctattttgggcaggtatggaaaaattttgcagttaaatgattgcctaaagaaagtggtaaacaggtgaggaaagatggcctctgatctaggatagatccagaaccacaaagcatctgcaccacaaaaggtgttagactaccaagcagctcytggttttctgcatagtattagtagcacagcttaggatgagaatcctttctccagtaacattcttaaaatagcatgaaaaacaacgcaaaactcaaatttctattaaaacacacaaactaaaatcaagtgattcttttttgtagattagggagaaggactgaatatctaatttaagagaaggaatagtgtttaagtgttatagtgtgtgagctaataccttctaaaggaaagacatggcatgaagattgtgcatacttacaatgctaaggaaaaatcaagaaaag

SEQ ID NO: 275545 - DNA, 605 bp, Homo sapiens
ttgaagggtgccagaatagaagttgggactgtatgtgtatacacacaattacacaaacaaatatacacatattcttgcaactggacttgataatggaaaggaggtattaagcatgactcctacaattattattattataactgaataggtagtattgcctttgtctaaaatagaggaaaaatgaagcactttattgattaggagagataacctgagttcagttgtatatagcatgctttagaggtgcccctgagactttgtcttacacagttcaatatgccagtttagtgctaggaggataagactgagcgggagatgtaaatgtaagaacaatctagttataggtaacagttgaagtgataggcagasataaaatcacctgatgagaagttacagaatgagggcagtgggggacctaggcatgagcctcgtggagatcccagtacaagtcagggataatgaattcatagtggaatcactctgatctgtttctaggaacgatgcctactcaggcgtataaatgaagaaaagggattcctgaaagacgggattttcccccgagacaagttggataaaaatccctaaagtaagaagacagtttacaa

SEQ ID NO: 275546 - DNA, 605 bp, Homo sapiens
ttgaagggtgccagaatagaagttgggactgtatgtgtatacacacaattacacaaacaaatatacacatattcttgcaactggacttgataatggaaaggaggtattaagcatgactcctacaattattattattataactgaataggtagtattgcctttgtctaaaatagaggaaaaatgaagcactttattgattaggagagataacctgagttcagttgtatatagcatgctttagaggtgcccctgagactttgtcttacacagttcaatatgccagtttagtgctaggaggataagactgagcgggagatgtaaatgtaagaacaatctagttataggtaacagttgaagtgataggcagagataaaatcacctgatgagaagttacagaatgagggcagtgggggacctaggcatgagcctcgtggagatcccagtacaagtcagggataatgaattcatagtggaatcactctgatctgtttctaggaaygatgcctactcaggcgtataaatgaagaaaagggattcctgaaagacgggattttcccccgagacaagttggataaaaatccctaaagtaagaagacagtttacaa

SEQ ID NO: 275547 - DNA, 573 bp, Homo sapiens
ggaaaaataactttctaaaagatagaactttttaaaaaatggcttaaactatgcatatataattggaaaatgtaagcggaatttaatttagaaaattaagcatatgtgttcacactttcctgggatgccacttggtttccaggatcctgtggaggagttctggcagggaatgggggtacagcaaggtggcagaaaccaaacttatggatctcaaactcccagcagtgctcatccatccttctcatyctggtcatctccagtatatcctacctcagtcagtcaactccttcccttcagttataaaaaccagaaaactgggtgtccattatctatttcccacctatgttgaatcatacaccagtattttcagtttgctttcgtaaatttgtcttgaattcacaatttgttctctactaccattttagattaatctaccatatctttcctgaatttctgaattctggaatacccgatcttccttcatctattcttattctccaagtcattccctacacagtaccatagcaaatgttgccaagcttaaactgaatggtgccaatgccttgcttaaaa

SEQ ID NO: 275548 - DNA, 573 bp, Homo sapiens
ggaaaaataactttctaaaagatagaactttttaaaaaatggcttaaactatgcatatataattggaaaatgtaagcggaatttaatttagaaaattaagcatatgtgttcacactttcctgggatgccacttggtttccaggatcctgtggaggagttctggcagggaatgggggtacagcaaggtggcagaaaccaaacttatggatctcaaactcccagcagtgctcatccatccttctcatcctggtcatctccagtatatcctacctcagtcagtcaactccttcccttcagttataaaaaccagaaaactgggtgtccattatctatttcccacctatgttgaatcatacaccagtattttcagtttgctttcgtaaatttgtcttgaattcacaatttgttctctactaccattttagattaatctaccatatctttcctgaatttctgamttctggaatacccgatcttccttcatctattcttattctccaagtcattccctacacagtaccatagcaaatgttgccaagcttaaactgaatggtgccaatgccttgcttaaaa

SEQ ID NO: 275549 - DNA, 593 bp, Homo sapiens
atgtgtttgacagtgtgatattttttagcaactcagggataggaaaggagacaaactattgggctccaaggttggaattcggctacattggtatgatggaaraaaaggcactggatggaagtgaggtgctggcaaacattgaagaagtccattcattaaagcagtgcctttccaaaactattacatttgtttattcttttacctcactgaaatcttttctcaaatatcatttcatcagagttcttccttgatgattctattcaaaatatcattcctctttttatcctttatcttcttacaagattgtttttttaaaattcttatcatcatgtgatttagtattgtttgcttgtttatttacatctaccttgttacatttatgcttgtttattgtgcatctacctctcattttagaatatacactacataggagtaggtactttatcaaaaaaaagttgttaagggacttctaaaaacgttgttaaaccccacccctaactgttcctgaaacatagtaggagctcaatcaatatcaaatgtattatttatatagataattattataaagaccctgagtataaaatgactgtata

SEQ ID NO: 275550 - DNA, 554 bp, Homo sapiens
tttgtgttaacttctgtttaaattttaaaattttgaaagcactgacatatctgttagctcatagaaccttcacagtaaccctttaaagttcctcttcttgcaattttatagtttgaatttcagaccaaactcttctgtgactttctataaaatttcctcatctcactgtcatatgttagatccatattcccacaaaacattttttcttattttgattgytgttattacattgggctgaattatttatttatggtatttgtcttttactgtatagtgaatttttaagctagatttcatttgcatggtgttatattatcacctcaacacagaacctgcccctattaaattttaataaatatgtgttgaataaatgaatgaatgaatgaacctccatttgatggataagaaaactgagcccatggagtagttaattgatttatccaaggtcacagagatgacaagaaaaggagcactggccttacgatacctaggtaaaagctccttgtaacatatattatacatatattatactttagtcataaatttacatccct

SEQ ID NO: 275551 - DNA, 563 bp, Homo sapiens
catttttacttcagagcaattttagatttatagaaatattgcaaaagtggtacacaaatatcccagattcccccacccagttttgcctattgttaattaatgagccaatattgatacatcattattgactaaaatccatactttcctcagatttccttagtttttacctaatgttctttttctgttccaggattccatcatcagcatcacattacatttgcttctcatgtctccataggctcctcttggctgtccaatttcccgatctttccttgttttttgaggactttgacagttttgaggaatactggttagctattttacagaatatccctcatttgggatttgtctgatttttttycctcattggagtggggttttgggttttgggaggaaaacaatgaagagggtaaaatgccattcttatcacatcatatcaactgtacatactatgaacttgtcttagtccatttgcgttgctataaaagaatatctgaggctgagtaatatataaacaaaagaggtttatttggttcatggttttgcaggcggtacaagaagca

SEQ ID NO: 275552 - DNA, 451 bp, Homo sapiens
aaattaaaattcacatacaaaattactctagcagagtaatgagtgataatcaatgatcaagttctaccactatgtttattcaattcattagcaatttgctaatcgggagggactgctgtctgttaagaatgggtcttgggtcttgatatttgggtcttgttattcagttagacctaagaatcttctcattacaggaaaaaattaggtaatgaaggctctggggcatattgggaaataaaaggcagtgattaagttggtaattttatgcaaataaaaatcaaagcaccaggagagaaagaataagaaaagggtaagactttcagaaagtgtcaagctgtctcctgtgatycttttacataacaaatacaacttttttacttaatcaacaatgtagagagtaagtacaaggatggctatacataagctgaacatcttagaaaatattgtaggg

SEQ ID NO: 275553 - DNA, 484 bp, Homo sapiens
gtcttattggggaaaactatccaggccgttactgaatacaaagtcaaatatcatccaaaacttgacccctcctggtcagaaacaaggcctctttttaacccgggggactgggtatatctaaaaactttaccttcaaacagaaaactccttcaggctttctagactagactccttcaaatcctcccaacctctcctacarctgttaaattatagggaatctcccctgggatctatctttctgcataaagtctgcaccaacactggcccactcacacttatgagcccttggaagatctatgattcttgtttcataaacaaccaggtaacactaaccttttttttttcagaaactctttgctgtctttattatctactttccttcacctcccttttcacttacttatgtgctccagaagagcttaatggaaacccttgtcaaaactattcaatttagcaatatccttcaattttataatattatcct

SEQ ID NO: 275554 - DNA, 567 bp, Homo sapiens
attcctggccaggtgacattttgggcagaagtaaatgcttctatagtcacaagctaaaatgactctaagccccaatttcacggggggtattcacatgcttcctctggaaaatactctttgacagtcagctttgcaagtaagtgattaccttgttaggaatcaaagaaaaatgtatttctctctgacctttagaggaaaatagaatccttcccttttttgcccattgacacaactggcactgctctcttccctttctaccaccctggttcaaagtagtcccccgatgctgtcctgttcctttcttaagccatagtggatctctgagatcctacascccactttgtgaaacactgacttcatctttgccctcgaatgcctgattttttcataagagattctagcaatttggacactgtttaagtgaactatcaaactaccgcatagagaatatttaagctattaaaattatggtttcccatgaagatcaattctctgtgtccttccctataggaatttgagacgagttagccctgtgatgaatcttgaaactcacatatgtccacatac

SEQ ID NO: 275555 - DNA, 567 bp, Homo sapiens
attcctggccaggtgacattttgggcagaagtaaatgcttctatagtcacaagctaaaatgactctaagccccaatttcacggggggtattcacatgcttcctctggaaaatactctttgacagtcagctttgcaagtaagtgattaccttgttaggaatcaaagaaaaatgtatttctctctgacctttagaggaaaatagaatccttcccttttttgcccattgacacaactggcactgctctcttccctttctaccaccctggttcaaagtagtcccccgatgctgtcctgttcctttcttaagccatagtggatctctgagatcctacaccccactttgtgaaacactgacttcatctttgccctcgaatgcctgattttttcataagagattctagcaatttggacactgtttaagtgaactatcaaactacygcatagagaatatttaagctattaaaattatggtttcccatgaagatcaattctctgtgtccttccctataggaatttgagacgagttagccctgtgatgaatcttgaaactcacatatgtccacatac

SEQ ID NO: 275556 - DNA, 514 bp, Homo sapiens
tgttttaaaagctagatcttttccttccaggaatccaaaacagaaatcaaaatgtttgggggaagcggggagggacagccttaggagctatacctaatgctaaatgacaagttaatgggtgcagcacaccaacatggcacatgtatacatatgtaacaaacctgcacattgtgcacatgtaccctaaaacttaaagtataataataataaaatttaaaaaataataataattcaaagtgttttacatgaggataatggtaattgctggaaacgggaaccagtgttgtattttccagaatgacataagtacatatcctttcaaataaagaaatctttctaccttaaaaggttcttggcaggtataacagttccattctaatacagaaygtacatattgttcaagaagtttatttaccaactgtcaaatgaaaacttgcgtggacaaagtaaaagagacaaggaagacttcatttaaggctatcgcagtagggtagataggccagaactcagtctg

SEQ ID NO: 275557 - DNA, 505 bp, Homo sapiens
gactacaaccatagcactccaagaacccttttgggattactccagtaatcaactacgaaagttattttctaaatgtagatatgtaaggtgttcttttaaagtaagrtactttgaaatatgtagcataaactggtactgctgttaaatgggtcgattattaaacggagcagctgtgtgagggcagctaactttgaatgcctgtctccctggctggtgtgtctccttctcatgttgagagcaccagggattgcgtggctgcatgctgaaaccgcattttcccatggtgtatgactagttcatctctttcttgagcaccattacaagaagatcaaatgaaaatgagatcaatgtggaagacaattcatagcacaaaaaaagtcatcttaaatctactctcaaacattcatcttatacatgcatcaaagtaatttactgacatcagtttgggtgagagagggagtcactttactgaaaaggcagaggcttaaggtgtatacatttgtac

SEQ ID NO: 275558 - DNA, 602 bp, Homo sapiens
tgatcatcccagctgaacaatttgaaaactgttctgcctttttgttacatgaatctgtcagaaatatatttttaatttaatataaatgaaattcaataaaatatgaaacaaacgttctcttttgtgtcagaaatttgttattagataagccaactagcagagaggaagatttgttctaggtttaataatgtgaagatataaaaatgggcttattttgcccrtatttatgcagctcattagttattcctcagaactctttggtgtttgggatgtgatatgttccatatgtttttaccatccactgcatatgcccattgatgtgtacagacttactcatctgtgcatgctatgcttaattaactctggttggtttgtttctctgagaataaaaaaatatataaaatattttgtaggttgcatccaaacgacattaatatttttatatactttttttctttctgccctcattgcagtttataaaatggatcctggcaatccttggctataaagaatatcagatgttactactgtccttgaggtgggggagggagaataagaccttaaatagtcaatcagctgactagtgacttatgacaagccca

SEQ ID NO: 275559 - DNA, 594 bp, Homo sapiens
atgttggttcatttggcttactgcacccttttgaggtaagtattattagaataatcctagtcacccatataaggaaaataaaactgaaataacaagtgtaaactagaatcatacaaccattagtaagtgatggtactcactctcaaagcttcatattctgacttaaatatctttctttaattagttaccacttttctttcttcctctgataaggagtaaccaccttctgatgaaagcatgcataaagctgacacactgatgaaggtcaagaccttcaatggtcttttattagttttttgacaacckctcttgtgatgcaattaaaaaccttattccacatcctcaaactatctgggagcaacttatctataatggaggatgaggtttctttcattctagaaagattaagtgcaacataatcacaagtaaaataattgaaacaacaacaaaaccaccaccatgtggagagcctactgatggtgtgccctgcccaaggtgttagaaatctgcttggtaaggcacccacttctcccccacatatatcagagaatattgcagataactacacttatctctagcagtgttattgcatat

SEQ ID NO: 275560 - DNA, 594 bp, Homo sapiens
atgttggttcatttggcttactgcacccttttgaggtaagtattattagaataatcctagtcacccatataaggaaaataaaactgaaataacaagtgtaaactagaatcatacaaccattagtaagtgatggtactcactctcaaagcttcatattctgacttaaatatctttctttaattagttaccacttttctttcttcctctgataaggagtaaccaccttctgatgaaagcatgcataaagctgacacactgatgaaggtcaagaccttcaatggtcttttattagttttttgacaaccgytcttgtgatgcaattaaaaaccttattccacatcctcaaactatctgggagcaacttatctataatggaggatgaggtttctttcattctagaaagattaagtgcaacataatcacaagtaaaataattgaaacaacaacaaaaccaccaccatgtggagagcctactgatggtgtgccctgcccaaggtgttagaaatctgcttggtaaggcacccacttctcccccacatatatcagagaatattgcagataactacacttatctctagcagtgttattgcatat

SEQ ID NO: 275561 - DNA, 529 bp, Homo sapiens
gaggtcattgaatcatgagggcggttcccccatgctgttccctgagatctgatggttttataaggggctctcccccttcactcagcacttttccttcctgctgccttgtgaagaaggtgcctgcttccccttcgcctcccaccatgattataagtttctcttaggctcccccagccatgytgaactgtgagtcaattaaacctctttcctttataaattacacagtcacacagttatacatagcagtatgaaaatggactaattcagccttcttctactatatcaagattttccccagccttcaagtccccattcaatgccatcttttttataatgtctttcttgatcattttcttgattatgcaagcagcacattcacttcccttatactgacctcttatcaagtcataccatcacatggcaccttttctactttcatttttatttttgtttatctctttatttgattttaaactccttgaggattgtaaccctgtccaactctacctcattatgtttagaacagtag

SEQ ID NO: 275562 - DNA, 609 bp, Homo sapiens
attaacgcattgaactttttgaacactgctatagagtaaagctctaggctttagagtcagaaaaatctgggtttgaatcaccagtttcaatcacatgttattccagaataattgtgagacagttacttttacttttcattcttacttcttcagtaataaaacatcttttagtatttgggaaagaaataagtgacaatgtacaaaagggtctgtttttcatyaattaccttcctttataattaatcttcaatgtcatttatgctgggtttcctttctgattgtccttggacaagggaaagtctcctgcaatgggctccttcattcccataatcgcaccatcccagcattttttacaacttcattgtaattgtttctttaattatcaaccttctttgataaattgtaagatcactgagggcaggggccatatatttactgcgacctaagagtattttgcccataatctctactttgtacctgatacagagaaagtgcacaataaatattggaataacaattagtgattgaacaaaatcagagattgatagagatgagaaagagagagcggaagagagagaatattgtgcctgatgaaataggaataacagt

SEQ ID NO: 275563 - DNA, 1175 bp, Homo sapiens
tgagggcaggggccatatatttactgcgacctaagagtattttgcccataatctctactttgtacctgatacagagaaagtgcacaataaatattggaataacaattagtgattgaacaaaatcagagattgatagagatgagaaagagagagcggaagagagagaatattgtgcctgatgaaataggaataacagtacctaccatatgtcattatttctaggaaagaatctagcatagttttggacatgttaaaaggcatccaaaacatattagttgtcttttcccagcaataatgtatgaatgtggtgctcatactcccaagactttccaaaagagctatrttttaaagcagtttaattttttaaataaaagcaatttattcatatctgtaaaataatttttccacttttttggacattataaaataatgtcacaaatcaataagtttatgcatcacaatattgatctggacattggtaaaggcaagatacagtatatgaatggttaaaacagtgccctccawtatgaagctgttattactatgccatctatgccagtagtaatattaagtcttaaggtagtatgatacatttttataaggatgcccatcaactaaatgatgaagctgaagttttagatctttttgacttcaaatctatgtattttttactatccaacgggaaaatcattcttatgtcttcaagatttcattttgaaaagtgtgaagacccagctcattatgtcaggctagccttgatttttcttatgtcctcagaagatggtaattttcacaatcaaccagagctatcaatggcaaatgtcttactaaattcaaggaggctgaaatgatcaagcctcaggtctatcagtgaaggctgccacatgatttcctgtgtatgcccagcaatgcctgacttaggaagggtaaaacacagcatttgcccagctaaagtgatcacactccaaatgatgtggacaaaaacactgcctgattcttagcccgcatgctggggaatatttgcagtatgtacagagaccatccatggtatctggtgtgtgtgtgcgtgtgtgtgtgtgtgtgtgtgtgtgtgwgagagagagagagggaatgttcaattatgaccagtagtatcgtgtagccagacataacaagccatggcattacaggttaac

SEQ ID NO: 275564 - DNA, 615 bp, Homo sapiens
tgcacatgttcagtacagaggcatttttttctgaatattttgaatcctcgattagatgaatccatggatgtggaacccagggatacagagcrccaactggattttctctgcttagcatgcacctcgcctctcattttgcctgtcagggtgcagcttcggtgtcactctctctttgagaagccttttctaacctttccctgctcccagctctagccccagaagatacctttgttgtataaacccataatatctaaagcacatctttatcttctgtattatgcttgtttattttcttatctgactcccttgggcactcttgagataggaactatatccttttcatctttaaatcctcttgttttaatacttcaaaatgtattacatataatgaaaaagagaatatcagaaacaattctgtaaaagtaagacaaactataaattctgtgtgaaaatttgtattttatctctcacttaaatgagtttgatcaagataagtataggatgagtaaaataatgtattttttttaaatacaactccacctatccaggtctcagccaactctcaataaatgcctacttttaaaaatgagtgaatggtttcatatagccaaaata

SEQ ID NO: 275565 - DNA, 564 bp, Homo sapiens
ctgcacatgttcagtacagaggcatttttttctgaatattttgaatcctcgattagatgaatccatggatgtggaacccagggatacagagcgccaactggattttctctgcttagcatgcacctcgcctctcattttgcctgtcagggtgcagcttcrgtgtcactctctctttgagaagccttttctaacctttccctgctcccagctctagccccagaagatacctttgttgtataaacccataatatctaaagcacatctttatcttctgtattatgcttgtttattttcttatctgactcccttgggcactcttgagataggaactatatccttttcatctttaaatcctcttgttttaatacttcaaaatgtattacatataatgaaaaagagaatatcagaaacaattctgtaaaagtaagacaaactataaattctgtgtgaaaatttgtattttatctctcacttaaatgagtttgatcaagataagtataggatgagtaaaataatgtattttttttaaatacaactccacctatccaggtctcagccaactct

SEQ ID NO: 275566 - DNA, 613 bp, Homo sapiens
aaacccataatatctaaagcacatctttatcttctgtattatgcttgtttattttcttatctgactcccttgggcactcttgagataggaactatatccttttcatctttaaatcctcttgttttaatacttcaaaatgtattacatataatgaaaaagagaatatcagaaacaattctgtaaaagtaagacaaactataaattctgtgtgaaaatttgtattttatctctcacttaaatgagtttgatcaagataagtataggatgagtaaaataatgtattttttttaaatacaactccacctatccaggtctcagccaactctcaataaatgcctacttttaaaaatgagtgaatggtttcatatagccaaaataatcatgaagaggcctytgtaatttatagaattgaaatattgcaattatgctggcaatggttctctgagctccatcatgccaattcctcatcttactctttatctgttgtgatcctgcacccttgccagagctggctcaacaagaatcggcacctgactagaatgcagccacccagaagctggctgcaatccacgatgtggcctgacatggcaactgcactgaaaaggcctgccct

SEQ ID NO: 275567 - DNA, 506 bp, Homo sapiens
ataggatgagtaaaataatgtattttttttaaatacaactccacctatccaggtctcagccaactctcaataaatgcctacttttaaaaatgagtgaatggtttcatatagccaaaataatcatgaagaggcctctgtaatttatagaattgaaatattgcaattatgctggcaatggttctctgagctccatcatgccaattcctcatcttactctttatctgttgtgatcctgcacccttgccagagctggctcaacaagaatcggcacctgactagaatgcagccacccagaagctggctgcaatccacgatgtggcctgacatggcarctgcactgaaaaggcctgccctgggtcacatgacagatgatctagtcagattctctcccgggaattttgacaatcattcaaagactgagtaagtcagagcagaaagaggactctgctgagtcctcaaaatggcagagcactagcaaagggaatatcacatcagatgaccagagt

SEQ ID NO: 275568 - DNA, 650 bp, Homo sapiens
atggattaattcccacaagagcaggttgttacaaggagtctagcctcccccatttctctcttttggaaaactcttgacaactgatttctttgcacacacctgctcctcttcctcttttaaccatgagttgaagtagcctgtggctttcaccagatgcagctgcccgatcatgaactttccagccaccaaaatcatgagccaaatcaatctcttttctttgtaaattacccagtctcaggtattctgctattgaaacagtaaatggactaagacactaatactccctacctcgtaggtttgtttaaaaaataagatgagaaactgtaagcaggtatgatgcctgggatagagcaaaaagtcaagaaattgtggttaatataatattatcrtttaaagctagtttttctacacatataattaccttggataagatcatttttacagaggtggtaaatagaattttacaaggtaaaatacagaataaaggccagaagtcagaaatgctgggttctaatccttttcctgtcactattgttctctgtgaatttagataggctagtcaaattttgggttccatattcatatttattaaataggcaggggtggaagctagatattctgtaaaaccaatttcagctttaaaattccat

SEQ ID NO: 275569 - DNA, 473 bp, Homo sapiens
tgggtggggatacatatccaaaccataccagtgattatacataaaaagagcagattcagtttaattcatattgttacttattaacatctgtgataaaaatgttgtttggggaatratgattgattcaattgtggtttggagatttgctttattcaggcacataccatgatggtgaagaaacacacagactaagaactatttgtattataaaaataattaaatcacatgcaataactaaattatttccacactcagtgctatgttcatacactgtgttcaatattaactgctatggtatcttaaatagatttaattgaccaatgaataataattaaatctactaaagcaattggattcagtgcagattaatttagacaagaaaaaagtatatttgctaattcaattggcttccttttcattattattattattttttaagacatcttataattcaagtgggcaaaaaacaacac

SEQ ID NO: 275570 - DNA, 634 bp, Homo sapiens
tgtcatcttcccactcccacttgaattagcttgttataagcatttttattttttttctaataccctgaaggtgcaaactgtggaaagaaggtataaggaaagcttcttaaacaagtaaggtgggatttcattaaaagcttaaagcataagcaccaaaatcttaaactcgaatggttgtttccccatgttatagtgttgtgtacacatttgtggagtcttgattggtacccaaagcctcccataggacatacccctatgcatcctgaacccctgggactcttgaaaaaaatatckttttcctttctcctcttctgtcctctcttcacagataggtaattgtgtctctgcactaggggacactcccctcagatgcatcctccaaactggaaagagttaattttccaaaccttaaactctttggtttaggattgggctcaggagaagggaactcagaagcccaacatgccagcaaaagactcaagtttttcgttggtcgggcttttggcttccctctccctgtacgaagtggtaaaaggaattgggatttttgagcattccttaccccttctttgttttgtttcaatgcacgttttctaataacctgatttgtctcttcttgttttcaggccatcaa

SEQ ID NO: 275571 - DNA, 673 bp, Homo sapiens
cttttcaacatttgagtatccaaggtggcagaaaaaggtattcaggtggtaatttatgttttgcttcctttgtcgtggaagaaccagggagattaagagctgcttgtactttgttctctgtttttccctctgccattctagaaggtagtgcctttgtgttttcttatcctatgggcctttgcacgtgaccatctttttagcttttgtaaaagtctaaagtaactggagtgctcctggtaagcataacaaggaactccttctttggttggataagagagcaagagagggaaaaatgtttgaagctaggtagtgagtagcatttggagaccacaactattgcttacagggacttgaaacaatggcaacatacctagagaggatgtgtacataagacacttaggaaggctggactttagctccctgccttggcaatgttctccttatccaataatagaatagaagtaggaggacagaagtkgtagtagctatcacacacaatgtagggctgaataatgaacccatgatggcagtctgtgtggactgaaactggtgtggtcattcgtgaaagttttactctgctgaagccactttggtcacttggaatcttctagaaagactgatgtgaagtttaccttcagagcagtgaaaagcaagcataaactttctcacatgc

SEQ ID NO: 275572 - DNA, 580 bp, Homo sapiens
ccttttttttttttttttacatctaaaataaaaaacaaaatcagactatgtttagcggttgctttctatattaagccttaccattccaatcttacctgccaatttctcaaactatgaaaaagacttatattgattttaaaggttgttccttgtttgaagattgaaatttggattaaaaaaatrtgaaagcattaactaaattagccatggtattgggccacataggtgagttcacaaatttggtatttccgaattcttcacctttgtctcactttattgagatataatttacatgcaataaaatgtactcatttaacttacagtttgataattttaagcaatcatgtagtcttatcatcaccaccaaaatcaagatgtagaaaggtttccactatcctaaaagtttccttgtgacccttcatagtagattcacccttttagcccccagccataggctcacattgacctactgtcactctagttttgcttttttagaatttcaggtaaatggaataatacagaatatagtgttttatatttaacttttttcactcagcatattttttgaaatccattcatg

SEQ ID NO: 275573 - DNA, 580 bp, Homo sapiens
ccttttttttttttttttacatctaaaataaaaaacaaaatcagactatgtttagcggttgctttctatattaagccttaccattccaatcttacctgccaatttctcaaactatgaaaaagacttatattgattttaaaggttgttccttgtttgaagattgaaatttggattaaaaaaatatgaaagcattaactaaattagccatggtattgggccacataggtgagttcacaaatttggtatttccgaattcttcacctttgtctcactttattgagatataatttacatgcaataaaatgtactcatttaacttacagtttgataattttaagcaatcatgtagtcttatmatcaccaccaaaatcaagatgtagaaaggtttccactatcctaaaagtttccttgtgacccttcatagtagattcacccttttagcccccagccataggctcacattgacctactgtcactctagttttgcttttttagaatttcaggtaaatggaataatacagaatatagtgttttatatttaacttttttcactcagcatattttttgaaatccattcatg

SEQ ID NO: 275574 - DNA, 622 bp, Homo sapiens
agctgggattcaaaccagtttgttgatcttcaataaccatgctttttctctcayttgctgctgcttaatttgctagattcaaaaatagaaaaattagtctctggcattcacagttttttaaagcattcatctgtaattttcactttatcaatacctggcgtaagattcctatgttgtcttttctttatacttctgtttctatcctgtaccaagaacacacacacacacactcacacccctctttctttccctatcttacattttccagccaagtaactaatgctttgacatatttcctcaagtacctcttcttccctcctggatgacagaaataacacaaattcttgcacttaaattaaattttgttacaaatccctcccttctcatatttgataatctgtacatcatatcttcatattgaattattcaaggaatatccaattactcctccataatctagtcaaactgttatttaaatataatccatatatcctttcctccatgctttttgctccatatttcaattctttaaaaagttattattcatcaagttctgtactaaatagagaaatacattagtgagattatcacaatgcaacatgagaagtgctaaatcgtagaa

SEQ ID NO: 275575 - DNA, 536 bp, Homo sapiens
ctgggtaatgctaaatgaggcccacttccagttaggttaatgaagctacagcagactgcatgcttctgcaaaccaacgctgatctagcaccttcaaaattccccataggaacccaggaagaagtagtattagtaaaatcactgaggtgtgagtgtgcaatccacatagcaatattaaattagccttcttaatcaagtgagtagctttgcaatttgtacatgaacaaaccctgctggaatttgagccasgaatccttgaaactaaaaactatagctccgctttttgtaattgaaggagaatcactgattacagagattacactagattcctaacttctttttcagtcacagaattattattaagcaagggcatcacagcatgtaactaaagagcatcttccacctgagtttctaagtccctaggaatttcttttttctgggataattttagggtgggtaaattatttctaatttactcattctaactatggactacaatacagcagtggaatatttgtggtgagtttattcctaaag

SEQ ID NO: 275576 - DNA, 575 bp, Homo sapiens
gctataatacatgatacatattaattagggataagggcatttcttcacagatggtatgtgtgctttccatttcatactcagatttaatctaaattgcatatgaactatgtctattgagttttaaaagtgaatataagctactatcctcagcagaaaagaacaattagcacattcatgagctagagctcaatttatggttatattataatgaataaccatttcctaatttaatgaaaccctatgccttaactgcaaatgttaatagataaaaatagtagctgaacttttcactggttgtgaaatacaaaatattaaattttacaaaacagttaaactattgaggaaacatcttattttcataccagtttcagtattctgctactaatattacacggtctaaaacatttcagaacaatactgtgataacatgaaaatgcamcttatctttaagtaaattttatctagttcagccaaaaggttctgataggaattcagaaacattatcagcaatatcttaaatactagttatcaagcttcttgtaggaggtacactattgggtactaatcagtattaa

SEQ ID NO: 275577 - DNA, 544 bp, Homo sapiens
gctgggtgcaatggctcacacctgtgatcccagtactttgggaggctgaggcgggtggatcacttgaggtcaggagtttgagactagtctggccaacgtggagaaaccctgtctctacaaaaaatataaaaattagccaggtgtggtggcacgcatgtgtaatcgcagctactggggaggctgaagcaggagaatcacttgaacctaggaggcagaggttgcagtaagtggagatggtgccactgcactccatcctgggtgacagagcgagactctgtctcaaaaaataataatataataataagtctagacaaaatatacaatgaagttcttccttactsaccaaaccccagccatgtttctcttaacaggcgttcttaatgaagtgttcagttttgtacagactttgatttaaatattctaattcctaaggtcaaaagttgggttttatttttaaataaatcttaggtagcacttaattttaatgtttgaatagcttgaatctcctgacactggcaaacatttacatgcaaccacaatatgc

SEQ ID NO: 275578 - DNA, 559 bp, Homo sapiens
ctgttctgtggctgttatataacacttyggtaaatatcacaggcatattatacagttcaactcttactgtttcactctgagacaagatggagtttacacacacacacacacacacacgagagagagagagagagggagagacaccttttgtcaagcttgagtgtataaaccctcttctacccagtatttcttgtgtctgtatcaatactgcagagcaaacattgatggtccatcagcattttctctggaaagcctatgcatactctgaacaccttacttgaaatagcagctattcatagaaattaccatcatttacacatggagcctcaccagaagcaagttgtttctaggattctaccctggaaagtttagtcaattcccaattcccagcatgaaggattcaatgtggtgatttaaaattgggatctggctacatagctacttccacgttgcccagttaatattctttcttatttacttcctaccttcccaccaagaaaatatccatggatatgaccaaagcagatgtaccaaaaagcacttgtatatttacgttcag

SEQ ID NO: 275579 - DNA, 592 bp, Homo sapiens
atcaccaacaaatgattatgtgtgcagccaaacattctgcattccagttttggtgaaaaaaaaggatatttacttttattactataaaatatagtctcaaatgtataattattgttctaattttttttttttttttttgagacagagtctcactctgtcacccaggctgaagtacagtggcrcaatctcggcttaccgcaacctcagcctcccaggttcaagcgattctcctgcctcagcctcccaagtaactgggattacaggtatgcaccaccacgcccggctaatttttgtatttttcatagagatggggtttcaccatgttggccaggttggtctcaaactcctgacctcaggtgatctacctgctttggcctcccatagtgctgggattacaggcgtgagtcaccatgctcggccgtcatcctaattctttatcagattaactcacatatatattttaaaacccaaattgtaccacaaggtttatgactaaaaacacaagtaactatccagccacttcaaatttttgattcccactttcggtttgtgtgtctttattatttcaccttttcccccaactttttggagg

SEQ ID NO: 275580 - DNA, 562 bp, Homo sapiens
caattcaaaattcaaatcatctgagaaaaactttggttacaaattataaaggaaaaaaaatcccttcagtcattcactaattgccgaagctcttaagaggtaacctatgaggatttttgcatgggattttgtttgtttgttagttttgtttcttgcaagcctctgataggtatttgcaagacagaatgataagtgtacgggtaggtagaatggggaaggagagggttatttctagttcattctttaccctgaggatgtagcctagaagatgcctcatatggacattttctgtcatgctcataaytcatgaaactgtgataattgaggttcaaatccatccgtgtagcaaatacccccaagataaaaactggtttcagtttttactcccttctttaatttactgtgttcacttagcttttggccttgctaatttgcaaactcatcaatgcacttaaaaatatacatttgaaaatatttattcagcatgttaattgtttcatttgggagtttcttccatactactggaaataaaagctgctccttttttaatgcataaactgag

SEQ ID NO: 275581 - DNA, 562 bp, Homo sapiens
caattcaaaattcaaatcatctgagaaaaactttggttacaaattataaaggaaaaaaaatcccttcagtcattcactaattgccgaagctcttaagaggtaacctatgaggatttttgcatgggattttgtttgtttgttagttttgtttcttgcaagcctctgataggtatttgcaagacagaatgataagtgtacgggtaggtagaatggggaaggagagggttatttctagttcattctttaccctgaggatgtagcctagaagatgcctcatatggacattttctgtcatgctcataactcatgaaactgtgataattgaggttcaaatccatccrtgtagcaaatacccccaagataaaaactggtttcagtttttactcccttctttaatttactgtgttcacttagcttttggccttgctaatttgcaaactcatcaatgcacttaaaaatatacatttgaaaatatttattcagcatgttaattgtttcatttgggagtttcttccatactactggaaataaaagctgctccttttttaatgcataaactgag

SEQ ID NO: 275582 - DNA, 562 bp, Homo sapiens
caattcaaaattcaaatcatctgagaaaaactttggttacaaattataaaggaaaaaaaatcccttcagtcattcactaattgccgaagctcttaagaggtaacctatgaggatttttgcatgggattttgtttgtttgttagttttgtttcttgcaagcctctgataggtatttgcaagacagaatgataagtgtacgggtaggtagaatggggaaggagagggttatttctagttcattctttaccctgaggatgtagcctagaagatgcctcatatggacattttctgtcatgctcataactcatgaaactgtgataattgaggttcaaatccatccgtgtagcaaatacccccaagataaaaactggtttcagtttttactcccttctttaatttactgtgttcacttagcttttggccttgctaatttgcaaactcatcaatgcrcttaaaaatatacatttgaaaatatttattcagcatgttaattgtttcatttgggagtttcttccatactactggaaataaaagctgctccttttttaatgcataaactgag

SEQ ID NO: 275583 - DNA, 565 bp, Homo sapiens
tccttgattgctttatctcaacaattattttattcaagttaaatattttcagttagttcttcataaccacccattgctgttactcttatctttttaaaagtctttgttgtgcttgttttaaattgttgtcctggctactaggttcacttcctctggtgtagggtcttatttcttttactgtgcatataatatctgtattactccattctcacgctgctataaggacatatccgagactgggtaatttataaaggaaagaggtttaattgamtcacagatctgcaaggctggggaggcctcaagaaacttacaactatggcagaagaagaaggaaacacgtccttcttcacatggtggcaggaaggagaatgagtgcccagcgaagggggaagccccttataaaaccatcagatcttgtgagaactcactatcatgggagcagggtggggaaacccacccctgattcaattatatccacctcttccctcccacaacatgtggggattatgggaactacaattcaaggtgagatttgggtggggacacagccgaaccatatcaacat

SEQ ID NO: 275584 - DNA, 565 bp, Homo sapiens
tccttgattgctttatctcaacaattattttattcaagttaaatattttcagttagttcttcataaccacccattgctgttactcttatctttttaaaagtctttgttgtgcttgttttaaattgttgtcctggctactaggttcacttcctctggtgtagggtcttatttcttttactgtgcatataatatctgtattactccattctcacgctgctataaggacatatccgagactgggtaatttataaaggaaagaggtttaattgaatcacagatctgcaaggctggggaggcctcaagaaacttacaactatggcagaagaagaaggaaacacgtccttcttcacatggtggcargaaggagaatgagtgcccagcgaagggggaagccccttataaaaccatcagatcttgtgagaactcactatcatgggagcagggtggggaaacccacccctgattcaattatatccacctcttccctcccacaacatgtggggattatgggaactacaattcaaggtgagatttgggtggggacacagccgaaccatatcaacat

SEQ ID NO: 275585 - DNA, 565 bp, Homo sapiens
tccttgattgctttatctcaacaattattttattcaagttaaatattttcagttagttcttcataaccacccattgctgttactcttatctttttaaaagtctttgttgtgcttgttttaaattgttgtcctggctactaggttcacttcctctggtgtagggtcttatttcttttactgtgcatataatatctgtattactccattctcacgctgctataaggacatatccgagactgggtaatttataaaggaaagaggtttaattgaatcacagatctgcaaggctggggaggcctcaagaaacttacaactatggcagaagaagaaggaaacacgtccttcttcacatggtggcagraaggagaatgagtgcccagcgaagggggaagccccttataaaaccatcagatcttgtgagaactcactatcatgggagcagggtggggaaacccacccctgattcaattatatccacctcttccctcccacaacatgtggggattatgggaactacaattcaaggtgagatttgggtggggacacagccgaaccatatcaacat

SEQ ID NO: 275586 - DNA, 576 bp, Homo sapiens
ctcttacctacctgtgacctggaagcccctgtctgcttcaagttgtcctgcttttgcttcaagttgttctagctttctggacagaaccaatgttcattttacctatgttaattgatgtctcatatctccctaaaatgtataaaaccaagctgtgttctgaccactttgggcacatgtcatcaggacctcctgaggctgtgtcatgggtatgcrtccacaaccttggcacaataaactttctaaattaactgagacaagtgtcagattttcagtgttcacaatgcacagagtggcttttttatggtaatgttttataacaacacaaacgtactttgtcttagagccacttcacatgctaagactttataaaatgccatactgaagagatctctttagtttgtctcttttgatatccaagagtggtttttgtataaagctgttttattacataatattaacctcaaaaagctgggaatgagaaaaaaataatgaatacaaattaagtgtggaggacctatgtgtactggactaagtattttggagggacatttaaaaagacttgaagaagaaacaaac

SEQ ID NO: 275587 - DNA, 662 bp, Homo sapiens
tccaaactgacatgctataatttgcattgttcccaatccccagtaaactgaaaaatactcttggtacattcaaagtgatatgaaaatgtccatctgtaaagacaactctataagttatattttatcttattttattttttgagacagggtctcactacctctcccaggttggatcatgcctggctaatttttattattattttttgtagagacgagggtctcactatgttgctcaggctggtcttgaactcctgggctcaagtgatcctcctaccttggcttcccaaagtgctgggatggcagtcataagccaccatgccarggccaataagtagtattttaaacagaccatatgatattccataccacataccataaactaaatgtaaatttctataaaaatgtgaaaagtacccaatgcataatttcaaaacgaaaccatttaaactaactgaatttattaaggagaaattaattatagtaagaagaaaggggtgtgacattttgaagacctctaaaacgccctttgttggcctatcataacatagatttttacatttgttgatgagaatgagtgaatagaaatgactttaaatgacagtctagttatttctaaggaagcagatgaaaaatttatgctccactggtacgcatctgattaa

SEQ ID NO: 275588 - DNA, 549 bp, Homo sapiens
tcgtatttttcagcaagcaccttccttgtaaaatggaaaaacatttttctatgcccttgtggatcagacaatgtgtcattatagatgcttattttagctggatattaacttttgattakaaattattttaagaattttaaaaggaacagctcaatagttttctagcatccaatgttgaaggcaaaaagtgtgaagacagtcgtttttctcatttatgtgtaaatgacatgtgttcctaccctaaatcccagaaacttttagtatcattgactttaccctttggtatgatagcaagttaaaattgtatatctagttaatatcccattgtaagtattatgattccaaaatattttttaaacatcaagaacaagataactctacagaagatttattttcttgaatagataagctactaaataatgaatcaaacaagaaacactgtatctccttcctctggcagatgaaagtgcattgaagatgaagagctgtcagtttaagcactggataccaacatggtttgagccagtactggccttaaccccgctaatg

SEQ ID NO: 275589 - DNA, 1097 bp, Homo sapiens
aaacagtggcatagtcaaacatgactgaaattcacagcaaatgtggctcagagagtttcttttactcagctaatgaaagacctccagaatagggaatgttttycattataagggctacttaaatggtacagtggtctctaggtggctgctaatcttgggctcattctccacaccactacagcaggattaagagttgaggcattctatggaaaacgtagggtaaagggaatatggaagacaggaatgaatcagtggaagttgataaacattttacattttctccaacaggcaacaaagaacaacataaataaacaacaacatctgtaaatgccattttacacattgtcctttagaatcaaatgttagtgctgtgtgttatcacttatttcctgaatttttcaaagtcttccctcagcgcagtttcgatttcgataaggtgcttatacctgtgttttcctctgctgctgatcaaagacctgccaagagaaattttgttctacctctggcccttcttccaggtactgattatccatttagttwcttggaaacattgtagaaaatgcttggaaatattctatgtaatatttcctatggctatgccaagtagggtgctctgataatgcatataattaaacaatagctaatttaattatgagtggaattgggagataaattagtaccaagtatctctttcatcttaaccacaaaagaaagattgaaaaaaatctgctaaatccagtccacagaatcagcwatttttttctggaagcgtattagttcattctcacactgctatgaagaaatacccgagactggataatttacaaagaaaaaggtttaactgactcccagttcagcaggggtgaggaggcctcagaaacttacaatcatggtggaaggtacctcttcatagggaggcaggagagagaatgagtgccagcagtggaaatgccaaatgattataaaaccgtcagatttcgtgagaattcactcactatcatgagaacagcatgggggaaaccgcccccatgattcaattacccctcatcgtgtacttcccatgacatgtgtggattatgtggattacaattcaagat

SEQ ID NO: 275590 - DNA, 567 bp, Homo sapiens
gtgatgtttgtttaaagccttacatctttacaaatagtaagtcaaatgtaatagaatcaaagaaatgctataaatatttgaaattccaagttgagattctgaagtctccagaggatgatggccccaaaatttctgtatgatcaagtctttatttacctttccagattaaaaatacgtaaacatgacattcaaattaaggaaaaaataagaacagaataagtagaaaaacttaaaaggaaaaaaaatgagtaaaaaattagttgattaggaaaaaataattgaaataatgaataaaacaatttcttttaaaaattaaagtctctgactagattgatccagaatgaacacaaaattatacaatattaaaaattaacatggaaaaatattgaagatactttagaaactgttaaaacctaaaggaaaagttataaamtatttactaaccatttgcaaactagataaaagtgaaagttctagaaaaacacaaataatcaaatttaaccttagggggatgggaaatgagattagataattcattaaattacagtatctactgaaaacctatta

SEQ ID NO: 275591 - DNA, 390 bp, Homo sapiens
gggccacactttatgtagaacactccttctgttctcttctaacttagttattatacacaaggagaagataatcttgatctttctaaaagcatacatttgaaatctttaaataaaagcagtcccacacaamtgcatttctgatcatttaaaaatgtattttcttttttttcaatttaggattttctaaacagattaaagaaaagtaataactatagtaatattttctcaattattctagtacagtatctactcacatcacatatttaatatgacttggaattgtcaatttcacatgatttaacactacacaaaacattttcaaactgcatgaaaatgtaaccaacaggtttttctattgagaagttgtaatataaaaacgtacaaaaagat

SEQ ID NO: 275592 - DNA, 1199 bp, Homo sapiens
caaggcccctgttcacccaggggcacctttcagctggtaggagcaratgtcctttcccttcagagatgagaaaactcagtctctcatttacctatgaaaacaacagttcagttcctcacgcaaatgtgcacagacaaactgaattgagatcaattttgggaaaaaaagcaatacagaagactctttagaatgtgtctctgaactaaaatttggatccttaaacaacaacttcctaaaagagaaaaaaagaaaaaaaaatagcctagaccacttcttgtaaattgcactaggccactcataactttgtagctctcatccgccattatacacaccaaggtcaaatcctctcacagcgcaaggacatctctggtacccccaaagccaaaaagatcaggtcatgcaacacaagaaaacagagctttatacctaagaagattctgtccatggctcttggaactccacaaagaaacatccaaaataggagagtggtgcccttctgaattctttaaaggggttcaagtcattagacaccttctctagatatttttttggtactgcagatggcaaagggagaaggagatatagggtggaagaaaagtwcaaggcccctgttcacccaggggcacctttcagctggtaggagcagatgtcctttcccttcagagatgagaaaactcagtctctcatttacctatgaaaacaacagttcagttcctcacgcaaatgtgcacagacaaactgaattgagatcaattttgggaaaaaaagcaatacagaagactctttagaatgtgtctctgaactaaaatttggatccttaaacaacaacttcctaaaagagaaaaaaagaaaaaaaaatagcctagaccacttcttgtaaattgcactaggccactcataactttgtagctctcatccgccattatacacaccaaggtcaaatcctctcacagcgcaaggacatctctggtacccccaaagccaaaaagatcaggtcatgcaacacaagaaaacagagctttatacctaagaagattctgtccatggctcttggaactccacaaagaaacatccaaaataggwgagtggtgcccttctgaattctttaaaggggttcaagtcattagacaccttctctagatatttttttggtactgcagatggcaaagggagaaggagatatagggtggaagaaaagt

SEQ ID NO: 275593 - DNA, 557 bp, Homo sapiens
taacttacatgtactcatttggagtcaatttgttttcagtgcrctttccttaggtagcaaactatcacttccagttcatcatttttgttctgcattaaaacgatcagctatgtggtctccatccattgcatgtatcttagaaattatgaaaaggtcaagatttactttctggtaacgtccatgtgtctatccactatccagtgtctagaattctacaggagggggctttggtgagtccatgtggttccttccatggttcctaaggatgactcttcctttctaagcagtgtatcatgggttcacctacattatgtctttgttaaattcaatgatttttcaggcataaagatatatctttccctagtttcttagagatgtgatttctcccgcaatgtaatcctttagtaatttcagtggatatttgaatgatggataggggttcaaaatataagctaaggtcagcaggttagactcacatccagaaattaacatttaaaaatagataccttctgtttaaaagtgttaatgaatatggggaagcttctctgaggaagctt

SEQ ID NO: 275594 - DNA, 594 bp, Homo sapiens
tcttttactactgccttcacaatgcataactatgcttatgatattttactacaactaaaaatgtaattgttcttctttacccataaaacattttttttttctctcacatgacattcaaagctagtcatattttggaaccatcttccatttccccagttttctttcttkcacaaatctctataacttattttaaatagatttattattttttcaacattcctatttatagaacatcatcttataaagctgataatagaaaaaaagcacaaatatagtgcaactaaattaatgcaggatgaaatgaaaatcaaagaaataaaagaaatgaagaaaaatctatgataaagaaatcagggctgaggatagataatgtaatagaatccaaaacgtaactcagttttttatcaaacatgctaacaaaggaaatatgatagatcatacagaagtcttattagttactagttgaaagattaaactttacatataccatgctgactttttttctcaaaacactctttttgctttcttgaatttgattttcagaacttttacttggagtctctctctctcttaaatcactatttatcaagaact

SEQ ID NO: 275595 - DNA, 614 bp, Homo sapiens
ttaagataataggtgtcaacattttcaagataatagccaactattcagcctcaacttctgaatcctgggagatgaaatgtctggatgcttctgtcagttatgaagtggtggtaatgagtcacaataaggcaaatagtaaaataaggaggaaatcccatggccaggatgtgatggacaaaggagaaaagggggaggacataagcaaggagagagagcaagggagggtgtagagaagagtattaactctgcatattgtgtattaactacaccttccttgtggaatccagtcttattctgattgcaacatgtttaagtgtgtgtttgcggggaatggacatgaatgaatgcccaaattccttcccactggtggggtacatgcgagcatacctkagccagtgagcatgaagctcatgtgaaagactttcaaaggactctcaccattcatgagactgcatgttgccactgtatggtaccactttcaggaatgaatttcagttttaagtaactaaacctcttgtttaaaggaacacatctgcagtagagaaataagattaagccagcaacattgacctctattctgaaaccaaaacagttgaagaaatttataaataaat

SEQ ID NO: 275596 - DNA, 524 bp, Homo sapiens
cagagcagcatgagtttctaactttgcatagaacaccacacaaataaatactatgtacttaatcaatcacatggaaaactgatgccaagtattttttttatcacgaagacaagagtcttatgccaacctggtagacttctagtatgcagctgaaaaatgcagagttttttagaaggtcaaagtctcctttcttggactcttcctcctggagtarcattccttgtacctgagtccttaaaccacttttcagttcaaaacccgaatctaggacagcattttaataaaaggttaacattgagtagttgttaaaaccgcatggttaaagttcttcctgagagtaaaaatgtactttcaaatgttaattaattcaacatcttatgaatcctgacagaacaaaatagccagcacggaaagagccatcaccaccctccacctgaaaagttttcctgtgggaaatgctaaaaaggattcatattatagctgtcagtcctttcagttttgcttgtgttttggcattattcact

SEQ ID NO: 275597 - DNA, 589 bp, Homo sapiens
agccctccattatcaagtagaacagctaaaataartgagtgagctctagtgggttctggaggaataaacaagttgcacgagctaatgactcgcagtattgactctggatatattgccacttcttcctccacccacacctatgccactgaggcatttactaggactgtagactgaggaagaaaaaattaaatcctgaaaaacatgatttaacaaaatatcctattccacctggaaatggagttctaaaacaatattgtcagacttaggggtggccctaaagttcagtggagaaaatagtcctcccattgaggaaacctacaagaagttcattttgtttttccttttatttctgggaaagaaaaatatctagatacgtagatctatagcaattaattagaagctgatggcttggcaagatggttggatgtttggaagaaacaaggttactgacaacaaggtctggggaagtggcatgtaaataggcttctcagaatgacagcagagtcaaagcaatttgtgttgttagaatttttgtctctaatgtacactctgaagatacttagtactcagtactcagaataggtgcact

SEQ ID NO: 275598 - DNA, 517 bp, Homo sapiens
ctgacaccgcataacccaaaaacagacacctgaatcgtgtttcctctggaagcattttattctctgtcattgtctacaagagctgctgcctaatacacacaatggaagattcatgaatcactgaggcatgaaaaaatgtttttgtagcagcagaaatgtaattaactgcarctttggtaatattctagagtgaaaaaagaaaaacttagagacatttctcaggcaatgctaaatatgtatgaaattcccaacctttttatctcacacttaaatgatttcataggctctttaagagtcttgctcttgatgccctttaacattggaatgtctattctgcttgcttttccaggtagcattttgacgcttagctgatttactattaacagcaacattttactaatacttattaatatttggagttttttaacaatagcatacaagttatttaggagcttgttagagattcataagcgcattaaatttttaaaagattttgaagctcatgaagcatgaagaa

SEQ ID NO: 275599 - DNA, 615 bp, Homo sapiens
agagttcctttagttgatttgatcattatgtttaaattctttaaagacaatgtacatccttattggctatacttgagcaggccattccttctactctacccttgatattccactgtcataacgttaaagaaacaaggaagattatttttaggctccaggtaactaaataataagaaaactgaaayttaatgtatgggcaaaaaattaaattaatgagaaaatcttgtccacactgataacaatggaaaaaagaaataggtaatagtgcctgtggtggtgaattaatactgcatctggctgaagtaacctcattctcaattaaaaggatgaagtcctttggaggaagaagggatgagagcaagtgatgtttacatactttattacgggtaattacaattatagaaagaattttaatgttttaagaattgttttgaagttaaaaaataataaaaggggaaaataaatttaaaaaaggcagatggggaacaaaaacaaaggcattttaaaatagtgatagtgatcttctttagaaggacacaggtaaaaggagaatactgagagctaagtatgcctcagaggaagaaacattggagaggaggagggccaggcaccaag

SEQ ID NO: 275600 - DNA, 575 bp, Homo sapiens
aaccaagaaggctactaagggactaactggtaactgacaggtagcatgaacagtgtagatacactggccacagaaatgattcacatcccaggtgggatggcgtgggagggttaaagattttatcatgctcctcagaaaggcatgcaatttaaatttatgaattgtttacttctggaattttcacttaatatttttggaccccatttgactgcaggtaactgaatgtgtagaaagcaaaactgcagtgggcggcagttggstgctacaatagacatatgtgtagatagggagatatagaaataataagaatcagttattgcctttttaagccttcaatctcatgaagaagataagtacataaaatataatagtaatgaaatgtatgtatcattattgcaatgaacagtgactacatgaaaacttttgttttgttatttcgctaaaaatggtaagaatttcttggccggtagagaatacatctttcctcttatagctctaaaacatagttaagtttttgaaatgtagtagctatccagaaatatttattgagtgttgaatgagccatcatatagatt

SEQ ID NO: 275601 - DNA, 609 bp, Homo sapiens
atacaaaattaaatctgattaccttttgaaagcaggcattattgtctcttatttcttaataaaaactatgtatttatatttttatctaaatctcttgtttttaacagagagctgatataaccacagtttttccctctacagagttccagctctatggcaagctgagttctgtgtacacaggaaattaaattaaattcagcaaatgaatgaaattaaaattaggagaaaaaaggaagggaaaaaggatgagttggggagaacagatagataaattttgctaaacttgtatatttccttyctgattttactcacagatgttttcattatgagctttgatgagtcactgtgacaaattatggtgtgtgacatcgtcagcctaagatactgctttgatcatggcaaatacacaatatatattggagcactggttctatttttaaaatttgcttactatttgatgacactaaactctgcaatttacatgccatattgcacttaagtataacatgatactattattttagatattatttttattaatctatatatatataaattaaatcataataaactttaaaaatttgccattggtcacgaagctactgtgta

SEQ ID NO: 275602 - DNA, 626 bp, Homo sapiens
aattcataacagagattttctcctcttaaagagcagctctggaggaagccttaagcattagatcaagaatccacttagatgtctatgcctcttctacatcttttcttctgcttactctaattgctatgcagtcctatctaacctctaaaagagtctgactttcttctccctcctgttgcattgcttgatataatggtataaacaactaagaagctgaaataatatgatgtgaactttcctaaaagccagtctgagaattctgcaataggagctactaagtaataaaaaagaactcagctggaaatatactttgaaaaaataaattggaagatggctttaaatgcttttgagtagtcccatggaatataaaaggaagcagaacacagaaaatgataaacaaaactttcaagactgactcaataagtagctcttaaaatagctatgagtttycctcctaacacccagcaggctgccaataaccagacagacaaatcgaacaattaaatgctatgaggcagcatcagaaaagatccataacaacattctgagcagagccttaaccactgcctgaataaaatggtcccaggcacaagaggttgtttctgacctggacaaaacagtgaaaa

SEQ ID NO: 275603 - DNA, 566 bp, Homo sapiens
catgtgattccaggggttgagaaccattaatttagcttgtgagtaagcttttctagtaaataggcaagactaccagtggaatactatcttcaaagttctcagagaggccgagcatggtggctcatgcctgtaatcccaacactttgggataccgaggcaggcagatcacctgaggtcaggagtttgaaaccagccaggccaacatgatgaaacctgaaaccccatctctactaaacatagaaaaattagccgggcatggtggtgggtgcmtgtaatcccagctacttgggaggctgaagcacaggaatctcttgaacccaggaggtggaggtggcagtgagccgagattgtgccactgcactccaggtcggacgacagaacaaggctctgtctcaaaaaaaaaaaaaaaaaaagttctcagagaaaaaaaaaaatcaatccagaattatataccaagcaaaatgagattgatataaagacattttctggtagataaaagcagagattgtatcacaaaagacttccaccaaaggaatttctaaaggatatattccaaaaggagaaaa

SEQ ID NO: 275604 - DNA, 535 bp, Homo sapiens
actttccccatctcaagggtcgtacccttaatcacatcggcaaagtcctttttgcagtgtcacattttccaggtatctggatgtggatatatttgggagctattattctgcctaccacagggccacctgtcagaaagagagggtcaaattacagaacacaggataatgcaagtgttcccaggatctgtcttaaaggactccaaaatgggcaaggtcgttgtacattcaatatttgataaaatattgaatgttccatattttcatattcagataaatttcactttgtctgaatcagattagtggtagggcaggggctatgagatgatagtggaaatcacatttcagatcctgaatggcattataaggcactttagaagttgacatttattcccaagggcaatggggaacctcttacatatttttatgtrtcaagaggaagactaaattaagagtggaatagtagggtcatctctctgcttgctgcttagagaatgcattgacagcataaatctagaggacggaattaagaaataca

SEQ ID NO: 275605 - DNA, 555 bp, Homo sapiens
tttatctctttactaattatggaacgaaccctgtttaaactcttcataccatataattctctaagcaattcttagtggtagttattattattcacattttagcgatgagaaaattgaaatccagatagatcaagtgacttatctaagataacccaaccagtaagtggcagagatggaatttgacctcagccaatctgggtcctggtccccacccttgactctgtatgatacagtgttacaacaagagcatgggtagagatgcaattagaaggtaagaattatatctgcaaaatcttgattagtcctaacaatartaatgtagtcactactgttaacccaacttgatgcaggctaatagctaaaggtcataaagtgtccaaagaaagatttagtagtaagtacaatatcccaggagaatctacctccagagtgcaagtcgttatactactcaagttgatatcttccaatgtaggtgtctaaaagccctttctagttctgaatttcactgattctaaaagggagtttgtggttagtatagctggtgggggtagactt

SEQ ID NO: 275606 - DNA, 555 bp, Homo sapiens
tttatctctttactaattatggaacgaaccctgtttaaactcttcataccatataattctctaagcaattcttagtggtagttattattattcacattttagcgatgagaaaattgaaatccagatagatcaagtgacttatctaagataacccaaccagtaagtggcagagatggaatttgacctcagccaatctgggtcctggtccccacccttgactctgtatgatacagtgttacaacaagagcatgggtagagatgcaattagaaggtaagaattatatctgcaaaatcttgattagtcctaacaataataatktagtcactactgttaacccaacttgatgcaggctaatagctaaaggtcataaagtgtccaaagaaagatttagtagtaagtacaatatcccaggagaatctacctccagagtgcaagtcgttatactactcaagttgatatcttccaatgtaggtgtctaaaagccctttctagttctgaatttcactgattctaaaagggagtttgtggttagtatagctggtgggggtagactt

SEQ ID NO: 275607 - DNA, 555 bp, Homo sapiens
tttatctctttactaattatggaacgaaccctgtttaaactcttcataccatataattctctaagcaattcttagtggtagttattattattcacattttagcgatgagaaaattgaaatccagatagatcaagtgacttatctaagataacccaaccagtaagtggcagagatggaatttgacctcagccaatctgggtcctggtccccacccttgactctgtatgatacagtgttacaacaagagcatgggtagagatgcaattagaaggtaagaattatatctgcaaaatcttgattagtcctaacaataataatgtagtcactactgttaacccaacttgatgcaggctaatagctaaaggtcataaagtgtccaaagaaagatttagtagtaagtacaatatcccaggagaatctacctccagagtgcaagtcrttatactactcaagttgatatcttccaatgtaggtgtctaaaagccctttctagttctgaatttcactgattctaaaagggagtttgtggttagtatagctggtgggggtagactt

SEQ ID NO: 275608 - DNA, 1135 bp, Homo sapiens
acagtgattttcaacactagctgcatattaaaatctcctaacagttgcrgattgttgaatttttttcttttcatgagaaaagtggcatcctcagagatcttgatttgtctagaggggagcccaagcacagtctttaaaaaaaaaatcttaattaaccgtttctaggagattttaacatgcaaccagtttttaaaacagtgtcacggaatagtggttttcaaagtgtgattttagcactggcagcctaaatatcactggagcttataagaaatgcaaattcttgggctccatctgagatggatttaggcttggtgggtacagggtatgaggggtggttgcaacaatcgtgttttagcaaggtctccaggtcattttgatgagggtaaagcttgagaaacactgccattgagtattccttgccactcacgcaaaagttccatgaaaggtagaaaaatgaggaagtctggcgcttaccctggagtaatgcagacttacttggaagaaataccttgaacatatgggcagatccagwatggggaggacgagagtgggagtcacgtagaagtggactcagggtgatacaactcacaggatagatwttttgccaaaaccaagaaatcccaaagctagaaaacaatctatgaagggagcttcaagcaaacctgtctaaccttgccctggagggagacatttcatggttatactgcctctatctttgaaggatgtttgttaaacaaatattccttggaaaatagtccaaggacatgcagaaatgccatagaacactacacctcaacaccaggaacaggagatagcagacaggaccccccaaatacaacagaaataagaccagaacacaaaagattaaataaataaaatcaacatccagtgttagagtcccagttttccaactcagatgactaatgaattgggtttccagtaagagaaatgctgtgtgaatctaggatgcgatgggaattcttctgacacaattattctaatgtcccacaaccaacaaccagaatcatcatcataggtgtctgaaggtaaaatcaaagttaaggtattgcactggatgccacatttttaatggctgtccaggaaattaagtggttttgcatcccaaatgtacttc

SEQ ID NO: 275609 - DNA, 603 bp, Homo sapiens
atggggaggacgagagtgggagtcacgtagaagtggactcagggtgatacaactcacaggatagatattttgccaaaaccaagaaatcccaaagctagaaaacaatctatgaagggagcttcaagcaaacctgtctaaccttgccctggagggagacatttcatggttatactgcctctatctttgaaggatgtttgttaaacaaatattccttggaaaatagtccaaggacatgcagaaatgccatagaacactacacctcaacaccaggaacaggagatagcagayaggaccccccaaatacaacagaaataagaccagaacacaaaagattaaataaataaaatcaacatccagtgttagagtcccagttttccaactcagatgactaatgaattgggtttccagtaagagaaatgctgtgtgaatctaggatgcgatgggaattcttctgacacaattattctaatgtcccacaaccaacaaccagaatcatcatcataggtgtctgaaggtaaaatcaaagttaaggtattgcactggatgccacatttttaatggctgtccaggaaattaagtggttttgcatcccaaatgtacttc

SEQ ID NO: 275610 - DNA, 482 bp, Homo sapiens
gctggtgtgtaagcagcagagtcaccccagctctgccaggcaaacagacagggtagagccttcaattcctcatgctgtagacaggtgaggatactacactcagaaacaaaaggttaaaataaagtgtgtaaagtgtcaaaacaacttcaaaattgatctggaaacatgtgaaatggcttttgtggagagaaaacattcacccagaatatgcagtttacctcataagagaagcaggttatgctttcagttctcgtgctgtaaacagtacaagaactgctaattgagagaaattccaagacagagatttccataaaaaagttttcccaaaatccatgccctaccacctcagttcttcaggtatcttggcctatggtttaggacagtttgtttttyttagggcccaacttaggacacaagatagctgtgaaaataatggagagatggcaaatagaaatatactatatagagaacaataaattgag

SEQ ID NO: 275611 - DNA, 563 bp, Homo sapiens
tactatgaacatttgtgtataaacatctttgaatatttracaaattattttcttatgctaactactagaaatgctgcttcaacggtatacacattttaatgaatttaggtccatatcgtctaatctttctttagagtggctgtgccaattagcaacacctctgcaatgtagaaacctcactatttcactactgccaggcatcatttttgcccttttgccaattaaatgagatttaatgcacagtgctatgctgttatagtttgaaattatatttatcttattattaataaaggcaaacttcttttaaaatgttatcacccattttaattttcttatacattacccgttaacgacccaagtccactttatttgttaataacagctctttgtatcttaaagcccttaaccaatcttttgtgagagctgtttttaaatacatatattaagcatcttttcaaacatgttatcactttgattttgaatgagccaaacgtttttctgtaatcaataagtcccagttagccattagcagtgtgttagcaactgtcaattcagcgaaggca

SEQ ID NO: 275612 - DNA, 620 bp, Homo sapiens
accaattataccagctgaaataatcgctgtgttcagcgaggcttattttgctgattgttcacccctagagttgatgggaagatttcagccctacctgaagaacacacattgagaactgaggtgggacagtcctacaaagaaaagcagaagagctattagcaaaaaagcaacggattctgtgcaagaaattgtaaatattactgcacaagatatarcaatcatggaggcaattgtaaagtaatgcaaaaagcaaaaaaaaaaaaaagatagatggatggggatggatggatagatggacagattcagataagttggacagggcctaattcaaaaacttactgtgtggatttacacagtcaatactttcttttgaaccatattttctataaactataaaaagataataatgctcattttgtgaagatcaaataagcaagtataagtgaagtatctaccatataccacgctttctgccaaatagagagcattcaataaaagctagttttcttcaaggccaatgatgggttcatctcatttaggaagacaccctcagctactcctgtctcttcaagtgggctgtctgaaatctggttagtattagtctattactcaacttacca

SEQ ID NO: 275613 - DNA, 575 bp, Homo sapiens
ttgttctccaaataggagtatctgggcacgaggtattggcataagaaggccagagataggtgaaaatgaaaacggggctgtgtgtgctgaaacaagccatttttaaatcttacttcttggtctggaggtcaggaaaagaaaatgtgattaccttcttccacatttccattgctgccagaatacagattttatrttactcctcttagttgtttatttaacctctttatagttcaaggcaacttttacaggttaacgtggaataactagaccccaaaactaattaataaaatacaataaattctgaatttaaaatctattgtacaaagtcttcagctcccccttagactgtctgtttccagggtggggctacattatattcattgttaaactcccagggcccctctacattgcctctacagtaaatcttcagtgaaactcctgagcataggagttgagatttggggacacaaatgcttctcatttgaggcctgtgttttagatttcctaatttaacgagctgttcactgtttgtgtctttttgcacttcacatggctcaaagacagtatctaacttt

SEQ ID NO: 275614 - DNA, 565 bp, Homo sapiens
aggtatcacttttgcctcgtttcaaatcctcttggcttcacctcctgactcttgtcccatctgtgtgtggggtcagacccacttcacacaggcaccgctgggascaccccaccccctgcttctcacctcccatcccaggcttccctacagactattgtggctcctgggaatctgcaaatgaattgactgtcacggaagcagttcaggcccaggggataaatgttggcctagggagacacaagtcaaggatatttatctctttttccacccctgggagaaagttctgagatatagattatacagattcctggggagaaatatgcttccattgatcaagcaatgaataggtctccgccactccaaaatataccctcattgtggctcttgctgcttttctgctttgttttctggaaacttcactctcacttcctggagttgtattctcgatgaaagtgacggttcatcaaaccttccaagctctacattcttttttttaaccttttatttatttattcaaattttattttagattcttggggtatatgcacacgtttgctacctgagt

SEQ ID NO: 275615 - DNA, 530 bp, Homo sapiens
ttcgctaactttgcaatgttgccaaggaccagtctgagtyctagtgatcaagcccataaaatgcaggcataaaatagaaacaaagacagctggcccttcaagtatatcctgtttcattatttaaaggcttattaagtgtatagatcatggaacccatgtttcagatttcaagtgagacctgagtcaatatattaagacacaacattaaggtaaagaactgcaagctttattgaatactaaatatcttttatggtgggatgtctttataaaactaactctcctgcccaaatcgttatttcaacatttgggagatactgaatgaaatatgaacaagttaagccttgttcataacaggtagtggcttccaaacaggcaagttacccacttactggacatcttatatccaaataagagggagataatatgggctaaaataaaacagacttagagatgaaaagtgaacacccaagcccagttcttggcaaaacaattggaccttcatccttactttgaagtctgttccttacttg

SEQ ID NO: 275616 - DNA, 393 bp, Homo sapiens
ctcccttgtgcttctggttttggttgtacatgcgcaggtcaggtttttctggcattacttgccacagccttacagaaaccccaaggcaggaggcagaaatgggtcattggaggattyacagagcacaaaaggaggctctgtctaggggaaaaactgatcactacagcagtgactagagcaagaggtaggatggggaatatatatagggggagggaggagagagagagagcgtcttattctgtcacccagactggagtgcagtgacgcaaacacagctcactgcagcctagacctcctgggctcaagcaatcctcccacctcagccctccaagtagctgggatcacaggtgtgcgccacctcacccggctaatttttgcatttttagagatggg

SEQ ID NO: 275617 - DNA, 569 bp, Homo sapiens
cattacttgccacagccttacagaaaccccaaggcaggaggcagaaatgggtcattggaggatttacagagcacaaaaggaggctctgtctaggggaaaaactgatcactacagcagtgactagagcaagaggtaggatggggaatatatatagggggagggaggagagagagagagcgtcttattctgtcacccagactggagtgcagtgacgcaaacacagctcactgcagcctagacctcctgggctcaagcaatcctcccacctcagccctccaagtagctgggatcacaggtgtgygccacctcacccggctaatttttgcatttttagagatgggttttcgtcatgttgtccaggctggtctcaaactcctgggctcaaatgatctgcccttcttggcctgtcaaagtgctggaattacagatgtgcgccaccatgccaggcagatgggaaacagtttaagttacataaaacaagtataaaatgcaaatattttatgtttatatgtttagttatttaataactgtttcctgtctctatgagaacaggtaaattgttttaacgc

SEQ ID NO: 275618 - DNA, 562 bp, Homo sapiens
attaaaaaatatgcaacgtacatgcacacacacgcacaactgtaattaagtaggttgaggctsgcttcaaaagctgactttgaagactcatgattctttaatttcttccattgttagtcaggataatacccagggttggccaattaaggctaaagtgcgatgatgcatttgtgtacgacatttaaagaataaaaaatatcatacacaatttaatttaccttgtaaaaacaaaaaacaccttatatgtttttattacgaacatgatgattgtggaaaatttagaagatgcatgtgaggagagacaaatgcagatggccctggacgctccttccagtccttttcaataaatgagcaagcagctagctctgcagacctgagagaactcattggaagaacaggcagataccagaggctgagatcacgaggcttggcccttttgaaaaagatcattgtctttctcaagatgctcccccaattatatactcatctagatatgccctgcttccctttcccacatatgtaggctgttagggtgaagaggttctctaccagggggcttttc

SEQ ID NO: 275619 - DNA, 589 bp, Homo sapiens
cctgaaaaccctcttcagaaatgtatgtgggtaatatatttctaaggattrtgatttgtacagtgcaaaatccatgggcagttcaaaaaagttggaccaggaagaaaggaagccatttccagcacaagacagtgtttcctaggctgcagaattataaggtttgaatgtgacttgttggtcttcctgtactcttttcttattctaagaagagtttcaaaaataaatgagaatatggttataaaaaacaataaaatatacccattctcaaagagtacatttcatttacttctgaataaaagtcttaacatatgtaaagcctgtattaactgcttttagtccaataattgcaactatacactatataatgtatatattatatagttatgtactacatggtttataaaacattttcatatatcttttttatttttgaaaaagtatgtttggcagaaattcttatgccttcttttttttaattatgagaacactgatccttagaaagtctttttggctaccattatcttctctaataatttgatttccttttcaaaactcacactgctcagagaggtgtctccactcatcccct

SEQ ID NO: 275620 - DNA, 589 bp, Homo sapiens
cctgaaaaccctcttcagaaatgtatgtgggtaatatatttctaaggattgtgatttgtacagtgcaaaatccatgggcagttcaaaaaagttggaccaggaagaaaggaagccatttccagcacaagacagtgtttcctaggctgcagaattataaggtttgaatgtgacttgttggtcttcctgtactcttttcttattctaagaagagtttcaaaaataaatgagaatatggttataaaaaacaataaaatatacccattctcaaagagyacatttcatttacttctgaataaaagtcttaacatatgtaaagcctgtattaactgcttttagtccaataattgcaactatacactatataatgtatatattatatagttatgtactacatggtttataaaacattttcatatatcttttttatttttgaaaaagtatgtttggcagaaattcttatgccttcttttttttaattatgagaacactgatccttagaaagtctttttggctaccattatcttctctaataatttgatttccttttcaaaactcacactgctcagagaggtgtctccactcatcccct

SEQ ID NO: 275621 - DNA, 643 bp, Homo sapiens
caggtattaatttattcttttttctcctaatttttcatatggacaaatttagggacagaagagataatgaacttggcagagaatcaggagcaagacattgatggaaaatgrtgctgatttaaatgcttcctgcttgcatttctcataatgaaagcacagccatactgttacacttgtattttatggctcactgaagaacctcaataacaaattttaaatacctatcaaatgtcataaaatgtcatttaatattgttcttggtttgtaaagggaaaatgaaaactgataaagttcatgtatattttgtgctggttcaatatactaaataccatactataagactttcaacaaatatatagtccattgtaatatggtaatattaaataagagggtgctacattttttcaagagaaagcagtcatattaaaaaggttattttaatgatgctctaaacaatttctttggctgcatcacagcataggttcagttgataataaaaattgcctttgaatgaagtactctaaatttttacaagactccaattctcctgtgcaattatggaatttgaaatgtaattctccctggaaccataaaagaattagaccagagaaatgctgttaagaataaagcaagataaaaggga

SEQ ID NO: 275622 - DNA, 597 bp, Homo sapiens
ctctacctatctgagctcctgagaaccatatagagatttgacagcagaaacaaaaaattacaggaccataaatctttctgttatctgtgagcaggaaacaggctytatgaaaggatgacaagaggccctgatcccacttgaaattaagacagtaattaagcaccaaaataaaggtaacaattgagaagaaaatgtcctctagtggaaaattctcattaattcaatttgtattgatataaataatgttcctcaactttcttttgaatgatatatagtcttttaatggccaggttgtcagtggaaggaaaactaatactttattcgttgaagaggttcaaataagcaaggatcatcctccatggttgaaaatgaaaaaaaatcaatattgatgtgtttaagacactcttttccacagttgttgaaataactttgaatgtctcataaaagacaaatattttattctaggaaaaaattctaagaccttttactacaaataatctgaaaaatattaagcctaggtaccactatctgcctactgaacctccctgaaataaaaaaaaagtacatgttgaaaatgaaaatttattattagaataa

SEQ ID NO: 275623 - DNA, 560 bp, Homo sapiens
attacaagaacaccacccagtctgataacrtttccaagctttggcaccagcgaatttttactgcttgcaaaaaggcaggcgtgaatttcttctgttggggtagccctattttggtttccctaaaaaaagcaagagtttcaaagtttcaagactctagaaaatgtaaaaatctttcagatggtttttactgccattctttctctgtttcaagagctaataaacacactgttattatcatattagttttatccttccacttatgagattttctttcttttccttttttctaatgaccaagcaaatcccctttctatgagcataatgaaggattttgcttacaatcaggcgtcaccctcaaagaggtgaaatatcttggctctttgataatctttcatgatcacttccaagaggaactttgcaggcatttgagttgccagacgtaaaatttggctttctgaaaaagaagcacatgtaactagctcataagctgcagtttgttaattatttttttctaaataaagaaaaaatatcattgaccagagtgatgagtaggagacttt

SEQ ID NO: 275624 - DNA, 554 bp, Homo sapiens
tactcagaatcacttcccagggatcggaacatggttgacggaggatgtgggaagatggagggatgacaggggcaggcctatgcttccttcacacgcgtcctgtgtggttaactggccctgtgcctggtcctccctcggaggtgaggactgtccacagtgcccaccctcagacaggaggatgctgcagccagggcacgtagagggagagcccagggcagactgcacagggtctagggtagaaagccatccccatcttcacccttgggatcctggggagacagctgaggtggacgctgggtgggtttccattcaggtcttgggggactgcacagagacacagctgcctctccccacctctccttctgctttaacccacgtgcagggtcacctgttactagggatggtgtttttccttcatgccggtcttacagggaagaaccgcccattgaccacaagcgtcaggcccctctcctgggagccccggagcttgggacactgggaggctgccatttcytaagcttggattgtatctcttgcttttctgaatgttcttc

SEQ ID NO: 275625 - DNA, 560 bp, Homo sapiens
gaggagaggtgaraagaggagaggagaggtgaaaagaggagaggagaggagtggagtggagtggagtggaatagaatttagaatagaatagaatagaatagaggaaaaagtaaggagctgagacgaggcttatctgatttatgataagaggacaagaagaggaatagatggcataaaagactggaaatctaaaactgatagcctgtgatgcccaaattatatttgcactgctacagctgaaactggagaatagcccgctgtgtcaggggtccccaagaccaccctgaggttagatgatatcctagaagtgttatactcctatttactgcctatgagaggaaaagaatgcagatgaaaatgagcaaagggaaaaggtgctgcggcaaagtctgcaggaaaccagttgtaagtgtccccttctagttgagtcatatagatcacatttaattctcccagcaataatgtgtgacaacacacgcaaaatgttttcaacctaggaagctctccctagtctagatgtccaggacttttactgagggtcagccctgtaggcatgcagc

SEQ ID NO: 275626 - DNA, 563 bp, Homo sapiens
tattccaccttttataatctgaataggaatctgtaagttggtattccttagtgtataargtacaatggttttattttttgttaatttctctgagtggttatgaacatggtagcaagttataaaatgccaagggtatcagcatatgttcttggtttatcatattaagtaaaacaagaagttaagaaaaagatttgtcaagatccttggctctaacttataaagtaacctactttctacgaagactttcaccaacacattcctccaatgtatagtctttgttttctcattgggcaaagagaagtgcaggatttatgaggctgatgctgaagcaaattcagatataatgcacacctttccatttttgatgttagttcaaaatacaagaaaacttaagggcaactctaacgggtggccacataagataggcactataattttctaccactctcctgtttctctgctttgagatcaatcattgatagtagagaggcctcatttatgaagaacgcttcagaaatgaaacctcggaatgtttatatgaagtgaaatgataagtgagacaa

SEQ ID NO: 275627 - DNA, 377 bp, Homo sapiens
aaactagcagggtcgggggcacaggggagacagccaattatctcactagaaatactcttgagttattcaccttgtctttaagtagggctgagcctgagtccctacgaaaagaagtcatctgtttaggggccaagaagccatcyttccccctgccaaaaaaaaaaaaaaaatcatctagctcactgaagcctgtgagggaggtcctacaatcacatcttcatttgttggtgtaagcaacataatgagtgtggggtaacacagagatgccactctccacttcaggactgagttgcttattttccaagcttctggagacgttggcagcataaaaatgtcaaccaagtccctctctggtaactgtactctgcaaaagaaag

SEQ ID NO: 275628 - DNA, 450 bp, Homo sapiens
ctttggctgtacctaaaatgaatatattcttgaataaaccatgcacaaaaaatggggatagtttattactgcagcataattctgctttcctgactggtacagcagttgtgaatatctcattcagtaatgaagaatataggagttgatatctattggagagactacaggggggatctctaatacctgttattggaataaaaagagtaaatcaatttttaaactaactctatttgattacaaagtgcactggagtgtagacgatctaagattggcttaagcagatctttctcaattattggaaaaacagttcctgccaatgctcggcttttaagatatcttaatatcaaggggcctgagcaaatttgtcatccayttgattaacaaatgagatgacaatgcctttcatctgctatgtggtgaccaagaaatcttaaatatcaatatccaata

SEQ ID NO: 275629 - DNA, 589 bp, Homo sapiens
tcatacactgctttagaaaatggtcacaattgcttttattgaaatgctgattcagggaaatcagaatataaatctgagttatttacagaatgtrtgaaaatgatttctactatccaaccaccaaacacccactttcacaagcaacctattaccaactcttctaaatgcttcttatcatccctattgtcattatagtccaaagcactgcctttcctcctaggatgtctgcagcattctttaatttgtccctcagagtccaggcttattactctccaggcttatcttgataatgcagtcagaatataataaatctgactcctcatactcttactcaaaacattctaataacttaccactttttaattatgaagcttaatttacttagtgtgtcttagaaagccctccatgatcttcccatggtgtatattcttgtatcattgttaagaccatccattctacctccaggtctttgcctatctttgtcgagtccagcgttgtctaccaaatgcttagcacaacactgattcctaaataatttatgaataggcaaatctggtccaaatcctgttcaaagcagagagacttcata

SEQ ID NO: 275630 - DNA, 589 bp, Homo sapiens
tcatacactgctttagaaaatggtcacaattgcttttattgaaatgctgattcagggaaatcagaatataaatctgagttatttacagaatgtatgaaaatgatttctactatccaaccaccaaacacccactttcacaagcaacctattaccaactcttctaaatgcttcttatcatccctattgtcattatagtccaaagcactgcctttcctcctaggatgtctgcagcattctttaatttgtccctcagagtccaggcttattactctccaggcttatcttgataatgcagtcagaatataataaatctgacycctcatactcttactcaaaacattctaataacttaccactttttaattatgaagcttaatttacttagtgtgtcttagaaagccctccatgatcttcccatggtgtatattcttgtatcattgttaagaccatccattctacctccaggtctttgcctatctttgtcgagtccagcgttgtctaccaaatgcttagcacaacactgattcctaaataatttatgaataggcaaatctggtccaaatcctgttcaaagcagagagacttcata

SEQ ID NO: 275631 - DNA, 589 bp, Homo sapiens
tcatacactgctttagaaaatggtcacaattgcttttattgaaatgctgattcagggaaatcagaatataaatctgagttatttacagaatgtatgaaaatgatttctactatccaaccaccaaacacccactttcacaagcaacctattaccaactcttctaaatgcttcttatcatccctattgtcattatagtccaaagcactgcctttcctcctaggatgtctgcagcattctttaatttgtccctcagagtccaggcttattactctccaggcttatcttgataatgcagtcagaatataataaatctgactcctcatactcttactcaaaacattctaataacttaccactttttaattatgaagcttaatttacttagtgtgtcttagaaagccctccatgatcttcccatggygtatattcttgtatcattgttaagaccatccattctacctccaggtctttgcctatctttgtcgagtccagcgttgtctaccaaatgcttagcacaacactgattcctaaataatttatgaataggcaaatctggtccaaatcctgttcaaagcagagagacttcata

SEQ ID NO: 275632 - DNA, 608 bp, Homo sapiens
attagccagagaattcagcatttctttgaattttccctaaataatacacttctgcataagcattactgagcaatgtaagatttaatgaagagtaagaagagatattggaatatacactcctaataaaaatattttaaaaaagaaaacttctttaaaagcaaatatttggataaaatataattcgttatatcttgtccatgattcctaaccccatagaatgtccaaccttgctggaggctcttttctacattccgtctagatactttagtcactcgataatcgtgatgtggagtaatatagttctgcttccagtttgtttccgaactcatctatgaaaatcacaagatgttcaggatgaagcctttctttctgtgccttgtataccacattttgyctattaggttcccacattcacttgatacggtttattaaaatattactccaccaagaatgagtcacagcccaagaataatttgttagaaactctttttttgaaactcatttaataatattaactacgagagataatatacatgagtataaaaacatgagtatccagtattcacgggaagtgggattggtgtacattcaattttaacctaagttgg

SEQ ID NO: 275633 - DNA, 608 bp, Homo sapiens
attagccagagaattcagcatttctttgaattttccctaaataatacacttctgcataagcattactgagcaatgtaagatttaatgaagagtaagaagagatattggaatatacactcctaataaaaatattttaaaaaagaaaacttctttaaaagcaaatatttggataaaatataattcgttatatcttgtccatgattcctaaccccatagaatgtccaaccttgctggaggctcttttctacattccgtctagatactttagtcactcgataatcgtgatgtggagtaatatagttctgcttccagtttgtttccgaactcatctatgaaaatcacaagatgttcaggatgaagcctttctttctgtgccttgtataccacattttgcctattaggttcccacattcacttgatacggtttattaaaatattactccaccaagaatgagtcacagcccaagaataatttgttagaaactctttttttgaaactcatttaataayattaactacgagagataatatacatgagtataaaaacatgagtatccagtattcacgggaagtgggattggtgtacattcaattttaacctaagttgg

SEQ ID NO: 275634 - DNA, 432 bp, Homo sapiens
tctttttgtgttgatttattttcttcctcaatatggattgcagtttcctgcctcttttcatgcttggtaatatttgatcaggcgtcagacatygtgaatttcatcttgttgtgtcctaggtagctttgtattcctactttgtattccaaggtaaagattattgagctttgttatgggatatagttacctgtaagcaacttgatttttttttcaagtttttttttaagctttattagacagaatcagaactatgttaatctaggtccgcctttgccctactacacagtcaattcccttggaattactactacacccaatgcccagtgaattttaaggccttctctgtctggtagcaacatgaaatagtcctggtggagagtgatctctgagaattgttttatctgcttcttttggataagtatttctcagttc

SEQ ID NO: 275635 - DNA, 432 bp, Homo sapiens
tctttttgtgttgatttattttcttcctcaatatggattgcagtttcctgcctcttttcatgcttggtaatatttgatcaggcgtcagacatcgtgaatttcatcttgttgtgtcctaggtagctttgtattcctactttgtattccaaggtaaagattattgagctttgttatgggatatagttacctgtaagcaacttgatttttttttcaagtttttttttaagctttattagacagaatcagaactatgttaatctaggtccgcctttgccctactacacagtcaattcccttggaattactactacacccaatgcccagtgaattttaaggccttctctgkctggtagcaacatgaaatagtcctggtggagagtgatctctgagaattgttttatctgcttcttttggataagtatttctcagttc

SEQ ID NO: 275636 - DNA, 574 bp, Homo sapiens
atttagcacagtgtttgccacatagtaaatactcaagaaagttaataacatcattaacatcatcagaatcatcaccaagtgaaacttgtaattgccttgttctaatttcggtaaataataaaagtctattttcaatgcgggatttatccaacaaacattakaatttctaaaataaatgaaatagatgaagtttgctctttgctacttcccatcctttcaacccttacaccttgattttgaactacagattcccctatctctgctagagttttccttttctttctttttccctattgtatatattgtcgtttaacatactagattattaagttatttaatatgtttgatgtttactacctgtcttaagattccttagggcaaggtttttagtctgtgttgttcattgtcataccataggacagtgtatggcacatagtaggcacctgctatatatttgctaaataaatgagtaaatgaatggttttcatcctggtttacccctgaaaaaattatattttataaattattatatagcaatggccctccaaattcagactttatcaaagactgattc

SEQ ID NO: 275637 - DNA, 577 bp, Homo sapiens
gatcatgaaaggaggtgagagccacatgagttgactttctcttctagcacacaattatcttaacattaagtaatttactttgtaattattatgaaatcttacagcctctaaaactaggaacactcttaacatgaacagattcaattcaaatttcattccacttaaagaaaaacttgtattgagttcataccagggttcagatattgtaatgggaaccaagacttcaaagataaaaaatatctgctacattctcgcaaagacttcatggtctattctgtagcccaaacagcaaagacatttagcataatctcaaacacattggaggagaaaatatatactttttgaattttatgtacagtatacaaattgagacaagtatttagaggtcagtataaaatgcatggaagttcagagaaagaggtcaaacagagcctatgtgttttccscctgtttttttaatttaattcattaaatctcctactgacctgtacactccctgacccttcttgccctcagtgcacatgcaaaatccacactctacagacaggaccattctaccacaggtcatttcacttga

SEQ ID NO: 275638 - DNA, 599 bp, Homo sapiens
aatccctctttagtgcttttgtactgaagataggagttatatcagctttatggataaggatttacatcccaaattcagaagaaaatattttttatgctggatttcagattggtaaatattgagtaacagagtaaccaatagacaattattctacagtttaattgaacaaaaaatatttcttgcctcacatagttgatgcttactgcttagattttcataattatatcacttcttccacagtcctttcaatacttsagtttatttttagcagacaggttactaatctcaaacaccacccagggagaataagaaaaatggttactactatgggtgtaatatctctttgcattcctgacttttcttataaactggaaccatcttaatgtttcactgttgcaaaagaaaggtaatgtttgcatataaaagtacctagagttcttttagctgtcacttaggaagacccaaacattttatatagcatgatttatataacttttgaccttttatattttattttattttattttaaatttgttccaaatgtcaggaaccatcaaggtcacctcaaagaagaaagttagtcctggggtgagtgacag

SEQ ID NO: 275639 - DNA, 599 bp, Homo sapiens
aatccctctttagtgcttttgtactgaagataggagttatatcagctttatggataaggatttacatcccaaattcagaagaaaatattttttatgctggatttcagattggtaaatattgagtaacagagtaaccaatagacaattattctacagtttaattgaacaaaaaatatttcttgcctcacatagttgatgcttactgcttagattttcataattatatcacttcttccacagtcctttcaatacttcagtttatttttagcagacaggttactaatctcaaacaccacccagggagaataagaaaaatggttactactatgggtgtaatatctctttgcattcctgacttttcttataaactggaaccatcttaatgtttcactgttgcaaaagaaaggtaatgtttgcatataaaagtacctagagttcttttagctgtcacttaggaagacccaaacattttatatagcatgatttrtataacttttgaccttttatattttattttattttattttaaatttgttccaaatgtcaggaaccatcaaggtcacctcaaagaagaaagttagtcctggggtgagtgacag

SEQ ID NO: 275640 - DNA, 540 bp, Homo sapiens
agccgcctgggcttggagaagcttctaaacttcttgactgtaaaatgagaaacttcaacgtgttgcaatcatgtagaaagcctarggacataaaatcctctgtaactgttctataataaaggaaataaactaacatttttttgtctcatatgccttaattacaattttgttcaaaagttacatttgagaattaacaatatactttggataattttccagagtaatagggccgactgcctcaagaagatattctagttttctagcttaatactgtcccatagaactttcaaaaatgatggataggtagtctatctgtgctattcaacacacttgccattaaaaacatgtgtctattaagcccttgaaatgtggctaacatgaatgagaaactgatttctttaacaagtaattaaagttgaattgaaataaccacatgaatggctactgtggtgtaaaacacagattttagcctctatgtcataaatgtcttaacactggagcaattacagagcaacaaattgtctagtgtcttctcaacca

SEQ ID NO: 275641 - DNA, 2253 bp, Homo sapiens
aatatgttagtgtgcttggaagaaaacaatttgtagatatgcagaacaacttgcaaaataaacattagtccctacattaaagagaagagccatttagaaggtttgaaggctgtaagttcagaaaaccagcacaaatagccactcctcatgttcatctctgtccctgaacatatcaactgaggcaaactctctgcatagtggtatcattgrcaatattaatagactgaggtactaaatgtccatgaatgagattgaaatgatatattaccaaatatcctctgcttgtgggtatattacctatttttaaatgaagtagggtagattcacatttctcacttacattgagatattttaatttgagtgagagaagcaaagatagagtttcagttagtcagaaatatgacttagctttggataggatcatcagaagcacaagagacatcggaacaacaattgtaatgtttatagtgacactgccataagtttaagtatttcactcccgaccaggtagaatttcttaccagtgcttgagaaactttcattcctgaaaacctttcgtagaactgaatgtwtgttagtgaggactccttatttcatctagctaggagttgatttagccttcatccgtgttgtcatgctattattttaatgcatgactcccaaagtcgtttaagcagaggcagcatgggatagaggttgtacaaccwcttttcatttggtatactttaactagaattagccacatgaattcagtgtgctccaagggagttttgaaagtaaacagaagctcatttcatttggggaatttggcaaatactttctctgccacaaagattgctttcaatgtcataaattagatgagctgaaaatctagaaaactgtagccagtttgaatttatgatgttggcaatctgcagtgtttgttaacaaaatctatggtgtaaccttgggattgtgtggctaaaatagagaggatgaaaaggaatttggagatgacgttgtcaatcactgagcataaacaaaatttcaatgaagaatgcctacagatttcagcaaccaggtgggaaagagaaggttttaggtgaatggaatgaactttaagagctgacagtgttagaawcactggatctaatattgtccattggattcccataaccaatgctaacctgttttatacatgacaacttttggaatatataaggacacttaaaatgtcccccattttactgatwatttatttttcggcccctacatctcatactatttcatcaatattttttatggcagacttttgagtttattcatcatgttgatggcattttttcatgttactctaaaagtgcatgctctgatgagggaggataactgggaaggaatgtgccaccaatcaaattctttctcccatgaaagtgttggtctgtagtcttaggtattagtagttgtttccaacaagcagattgaaaagttaaatattttcatgagaagacatgttctatctctctctatttgtactattgaattattttattatagattacaactttttatcccttaaggtacttttattctgttttggtgactgtattggcctttcattccagtttctagtttctcagttccaactgagaaactgtgaagagccaatwgaatttaattgaagtattttttcatgcagatctattagtggcttgtaatttaaagtgtgaaactttcaaggtcattttcacttttgaagaatatgcttatagataacaaagtcttgaactataaagatgggggggatgacacacttgtttcatattcacttaatctcatatttgtttacatgaatctctttctagccatagttaaattcctatatctttttaaccttcttcwttcccaataatttctaccactgctctaagacaagggcgtagaaacattctgtggcatattctttcttgacctattctgattacaccttaacaggttgaatttctactgctttatttgccttaataaatactgctaaaatggtatgaaaaatcaaattaaattggaattcagtgataatagcaatatagtatagcactttctcattaaggtttctcatcctaatatgaactcccgcatcttttaatttacatacaactgcttcctatgctaacctaaaatagaccttgctataggtattataaaatgtttggttattctgtatctgaatatcttgaaagtcataaaatcatgcttgagttgtaatgacctacttgg

SEQ ID NO: 275642 - DNA, 500 bp, Homo sapiens
ttagtaaggctatttttacttcctgcagaaagggtacacttgccagaagttttgccatgacagtacactgaacaaaggagacgacagggtcatttataacctgacgcgtccaccctactgctgtgtccggtttccattggctggaaggagacctcacattctgtgtttgtcccaactggctagcaacttagaactttttaaaagaggcaaaaggagaggagaacaaaggaaggaggaagtaacttgtggaatgctgagaagggtaaaarcacttttaagtaaggaagaggaacaggctatgacctaatgcttgcttggaccagtataagcatgccagggcaaatatttaggctaaattgtgggagctaagaacataaagtacattgatttctttatgacggctagcagatatttcagaatgttagcacaggtatttgaatacattttgcttctaagagaagttactatttattcctaattagacggggaggaaagtcttt

SEQ ID NO: 275643 - DNA, 402 bp, Homo sapiens
gctgtttctgacctatgctgcatattcaygggcaaaatgaacaaatctgatatttgatgatatatttgctagaatctggtaccatataaggaacttgttcatatattactgacatagcaatttcaatatgagttgtcctgtccttctacatatacctgccacataatatgtactgtagatcacaattatacacttcttgctctcaggcacttttaggtctaggttgcatattccatataaaagatggcatgtgtgaccgctgatgttctcttgctcttatcaagaacatcagactgtttactgagctttctgaactttcctgaatcaacaacatagataagtcctctatatcacccagtttttaagataatttcaaaggttttcatgtaatttctaaagcat

SEQ ID NO: 275644 - DNA, 544 bp, Homo sapiens
aagatctttccaactttcaattctgcttatcttagagtgtaaaggctttcatgctcaagggtatccagtagtcatataagacctgctggctttaaaaccagttagacaggcaaaagggcaaaaggtgaaatgatgaagagattcttcctagagacatgttgcctttttattaaaaatggatttcctccccagaaattcctgcctatatctcattgrctagaattgtgtcacaaattcactgcagcttcaagggaggctgggaaattaggtatttctatttggactcattgacagcctaaataaacttgaagttcttttaataaagaatggagtagtggttcgagcgcaacggcttacacctgtaatcccagcacttgggaggctgaagcaggaggatcacgtgagtccaggagtttgaggccagcctaggcaacatagcaagaccccgtctctacaaaaaataaaataaaataaaattagccaggtgtggtggcatgcgtctgtagttccagccacttgggaggctgaggtgagaggatcacct

SEQ ID NO: 275645 - DNA, 544 bp, Homo sapiens
aagatctttccaactttcaattctgcttatcttagagtgtaaaggctttcatgctcaagggtatccagtagtcatataagacctgctggctttaaaaccagttagacaggcaaaagggcaaaaggtgaaatgatgaagagattcttcctagagacatgttgcctttttattaaaaatggatttcctccccagaaattcctgcctatatctcattgactagaattgtgtcacaaattcactgcagcttcaagggaggctgggaaattaggtatttctatttggactcattkacagcctaaataaacttgaagttcttttaataaagaatggagtagtggttcgagcgcaacggcttacacctgtaatcccagcacttgggaggctgaagcaggaggatcacgtgagtccaggagtttgaggccagcctaggcaacatagcaagaccccgtctctacaaaaaataaaataaaataaaattagccaggtgtggtggcatgcgtctgtagttccagccacttgggaggctgaggtgagaggatcacct

SEQ ID NO: 275646 - DNA, 1089 bp, Homo sapiens
aagatctttccaactttcaattctgcttatcttagagtgtaaaggctttcatgctcaagggtatccagtagtcatataagacctgctggctttaaaaccagttagacaggcaaaagggcaaaaggtgaaatgatgaagagattcttcctagagacatgttgcctttttattaaaaatggatttcctccccagaaattcctgcctatatctcattgactagaattgtgtcacaaattcactgcagcttcaagggaggctgggaaattaggtatttctatttggactcattgacagcctaaataaacttgaagttcttttaataaagaatggagtagtggttcgagygcaacggcttacacctgtaatcccagcacttgggaggctgaagcaggaggatcacgtgagtccaggagtttgaggccagcctaggcaacatagcaagaccccgtctctacaaaaaataaaataaaataaaattagccaggtgtggtggcatgcgtctgtagttccagccacttgggaggctgaggtgagaggatcacctwaagatctttccaactttcaattctgcttatcttagagtgtaaaggctttcatgctcaagggtatccagtagtcatataagacctgctggctttaaaaccagttagacaggcaaaagggcaaaaggtgaaatgatgaagagattcttcctagagacatgttgcctttttattaaaaatggatttcctccccagaaattcctgcctatatctcattgactagaattgtgtcacaaattcactgcagcttcaagggaggctgggaaattaggtatttctatttggactcattgacagcctaaataaacttgaagttcttttaataaagaatggagtagtggttcgagcgcaacggcttacacctgtaatcccagcacttgggaggctgaagcaggaggatcacgtgagtccaggagtttgaggccagcctaggcaacatagcaagaccccgtctctacaaaaaataaaataaawtaaaattagccaggtgtggtggcatgcgtctgtagttccagccacttgggaggctgaggtgagaggatcacct

SEQ ID NO: 275647 - DNA, 530 bp, Homo sapiens
atagctagttttattgggcttggggcccaagtccctttgaatacataaaagccttcccaagaagagcaggtattaacaagcccagactgtgaagactacaataaacatacaactcttcartgcccaggaaccaatgaatatctacaaccattaacacccagtagaaaatcttgacctcaccaaatgaactaaatgaggcaccagggaccaatccaggagaaacagaaatatataatttttcggacatagaattcaacatacctatgttgagaaaactcaaagaaattcaaaataatacaatgaaggaattcagaattttatcaggtaaatttaacagagattgaaataattaaaaacaatcaaacagaaatttgagagttgaaaaatgcaaataacatggcagaaaatacatcagagtctcttagtagcagaattaatcaagcagaagaaaatttagtgagcttgcagacagagtatttgaaaacacagtcagaggagacaaaaacaggaataaaaaacaatgaagcatg

SEQ ID NO: 275648 - DNA, 530 bp, Homo sapiens
atagctagttttattgggcttggggcccaagtccctttgaatacataaaagccttcccaagaagagcaggtattaacaagcccagactgtgaagactacaataaacatacaactcttcaatgcccaggaaccaatgaatatctacaaccattaacacccagtagaaaatcttgacctcaccaaatgaactaaatgaggcaccagggaccaatccaggagaaacagaaatatataatttttcrgacatagaattcaacatacctatgttgagaaaactcaaagaaattcaaaataatacaatgaaggaattcagaattttatcaggtaaatttaacagagattgaaataattaaaaacaatcaaacagaaatttgagagttgaaaaatgcaaataacatggcagaaaatacatcagagtctcttagtagcagaattaatcaagcagaagaaaatttagtgagcttgcagacagagtatttgaaaacacagtcagaggagacaaaaacaggaataaaaaacaatgaagcatg

SEQ ID NO: 275649 - DNA, 640 bp, Homo sapiens
ttttttctactacttttgggtttagtttcttctttttgtagttccttaacatatgaagttatgttgttgatttcagatctttcttctttgatttaatgcaattatttacaggtayaaatttttcccttagcaatgcttttgctgcactcttcttatttacagttctgtctaccctcattctatggtattgattccacaaatagtatttttaatatattctgtgcccaccaacatgtgtttataattttttatttatcctatataaaataaaaagtgaagttacaaataaaaattacaacaatactggtttttgtatttactcatgtatttacctttggtgaagatatttatattttcataaatctttaatttattatctagcatcattttatttcaacctgagagactttctttagcaattcatgtaaggaaggtctagtgaaaatagcatttttcagttttggtttacatgagaatgtctaaattttcttcaatttgaagggcaattttgtcaaatataaaatatctcattagacagtttttttcttctatactttaaatgcatcattccattgtctctgttctccaatgtttctactgagaaatctgctgcattttttattgaaaaatatatacccat

SEQ ID NO: 275650 - DNA, 640 bp, Homo sapiens
ttttttctactacttttgggtttagtttcttctttttgtagttccttaacatatgaagttatgttgttgatttcagatctttcttctttgatttaatgcaattatttacaggtacaaatttttcccttagcaatgcttttgctgcactcttcttatttacagttctgtctaccctcattctatggtattgattccacaaatrgtatttttaatatattctgtgcccaccaacatgtgtttataattttttatttatcctatataaaataaaaagtgaagttacaaataaaaattacaacaatactggtttttgtatttactcatgtatttacctttggtgaagatatttatattttcataaatctttaatttattatctagcatcattttatttcaacctgagagactttctttagcaattcatgtaaggaaggtctagtgaaaatagcatttttcagttttggtttacatgagaatgtctaaattttcttcaatttgaagggcaattttgtcaaatataaaatatctcattagacagtttttttcttctatactttaaatgcatcattccattgtctctgttctccaatgtttctactgagaaatctgctgcattttttattgaaaaatatatacccat

SEQ ID NO: 275651 - DNA, 640 bp, Homo sapiens
ttttttctactacttttgggtttagtttcttctttttgtagttccttaacatatgaagttatgttgttgatttcagatctttcttctttgatttaatgcaattatttacaggtacaaatttttcccttagcaatgcttttgctgcactcttcttatttacagttctgtctaccctcattctatggtattgattccacaaatagtatttttaatatattctgtgcccaccaacatgtgtttataattttttatttatcctatataaaataaaaagtgaagttacaaataaaaattacaacaatactggtttttgtatttactcatgtatttacctttggtgaagatatttatattttcataaatctttaatttattatctagcatcattttatttcaacctgagagactttctttagcaattcatgtaaggaaggtctagtgaaaatagcatttttcagttttggtttacatgagaatgtctaaattttcttcaatttgaagggcaattttgtcaaatataaaatatctcattagacagtttttttcttctatactttaaatgcatcattccattgtctctgttctccaatgtttctactgagaaatctgctgcatyttttattgaaaaatatatacccat

SEQ ID NO: 275652 - DNA, 530 bp, Homo sapiens
atagctagttttattgggcttggggcccaagtccctttgaatacataaaagccttcccaagaagagcaggtattaacaagcccagactgtgaagactacaataaacatacaactcttcaatgcccaggaaccaatgaatatctacaaccattaacacccagtagaaaatcttgacctcaccaaatgaactaaatgaggcaccagggaccaatccaggagaaacagaaatatataatttttcggacatagaattcaacatacctatgttgagaaaactcaaagaaattcaaaataatacaatgaaggaattcagaattttatcaggtaaatttaacagagattgaaataattaaaaacaatcaaacagaaatttgagagttgaaaaatgcaaataacatggcagaaaatacatcagagtctcttagtagcagaattaatcaagcagaagaaaatttagtgagcttgcagacagmgtatttgaaaacacagtcagaggagacaaaaacaggaataaaaaacaatgaagcatg

SEQ ID NO: 275653 - DNA, 623 bp, Homo sapiens
gctcactacaaactcgcctcccaggttcaagcaactctcctgcctcggcctcctgagtagctgggattacaggcagccaccaccaggccaggctaacttycatatttttagtagagatgggttttcaccatgttgaccaggctggtctcatactgctgacctcaagtgaacctctcgtctttgcctcccaaagtgctgggattacaggagtgagccactgcgcctggctttctgtgcctaattctatcagataattgaacttgaggagagattcatgggaactctcaaatctgtagtaagctaggtagagtgcagttaacttgggctgatgtcttgtggtggtgatcattttgtgggactgagccctcagcctgtgggttctctattgaccctgggcagttagtatcaaaattaaattgatttgcaggatgcctagatggtattggagagttgaacattgctgaaaaagcttcatatacagataaaaataataaagtgctaagttgattttctggtagatcatagatgcttaataaatcatggttaatatcaccttcagatgatttaggaagtaaccaattatttaagcattcctatatgtcctgaaatgctctgagtagggg

SEQ ID NO: 275654 - DNA, 623 bp, Homo sapiens
gctcactacaaactcgcctcccaggttcaagcaactctcctgcctcggcctcctgagtagctgggattacaggcagccaccaccaggccaggctaacttccatatttttagtagagatgggttttcaccatgttgaccaggctggtctcatactgctgacctcaagtgaacctctcgtctttgcctcccaaagtgctgggattacaggagtgagccactgcgcctggctttctgtgcctaattctatcagataattgaacttgaggagagattcatgggaactctcaaatctgtagtaagctaggtagagtgcagttaacttgggctgatgtcttgtggtggtgatcattttgtgggactgagccctcagcctgtgggttctctatygaccctgggcagttagtatcaaaattaaattgatttgcaggatgcctagatggtattggagagttgaacattgctgaaaaagcttcatatacagataaaaataataaagtgctaagttgattttctggtagatcatagatgcttaataaatcatggttaatatcaccttcagatgatttaggaagtaaccaattatttaagcattcctatatgtcctgaaatgctctgagtagggg

SEQ ID NO: 275655 - DNA, 623 bp, Homo sapiens
gctcactacaaactcgcctcccaggttcaagcaactctcctgcctcggcctcctgagtagctgggattacaggcagccaccaccaggccaggctaacttccatatttttagtagagatgggttttcaccatgttgaccaggctggtctcatactgctgacctcaagtgaacctctcgtctttgcctcccaaagtgctgggattacaggagtgagccactgcgcctggctttctgtgcctaattctatcagataattgaacttgaggagagattcatgggaactctcaaatctgtagtaagctaggtagagtgcagttaacttgggctgatgtcttgtggtggtgatcattttgtgggactgagccctcagcctgtgggttctctattgaccctgggcagttagtatcaaaattaaattgatttgcaggatgcctagatggtattggagagttgaacattgctgaaaaagcttcatatacagataaaaataataaagtgctaagttgattttctggtagatcatagatgcttaataaatcatrgttaatatcaccttcagatgatttaggaagtaaccaattatttaagcattcctatatgtcctgaaatgctctgagtagggg

SEQ ID NO: 275656 - DNA, 623 bp, Homo sapiens
gctcactacaaactcgcctcccaggttcaagcaactctcctgcctcggcctcctgagtagctgggattacaggcagccaccaccaggccaggctaacttccatatttttagtagagatgggttttcaccatgttgaccaggctggtctcatactgctgacctcaagtgaacctctcgtctttgcctcccaaagtgctgggattacaggagtgagccactgcgcctggctttctgtgcctaattctatcagataattgaacttgaggagagattcatgggaactctcaaatctgtagtaagctaggtagagtgcagttaacttgggctgatgtcttgtggtggtgatcattttgtgggactgagccctcagcctgtgggttctctattgaccctgggcagttagtatcaaaattaaattgatttgcaggatgcctagatggtattggagagttgaacattgctgaaaaagcttcatatacagataaaaataataaagtgctaagttgattttctggtagatcatagatgcttaataaatcatggytaatatcaccttcagatgatttaggaagtaaccaattatttaagcattcctatatgtcctgaaatgctctgagtagggg

SEQ ID NO: 275657 - DNA, 519 bp, Homo sapiens
tgcaatgcatgatcccccacctctgtggcttcttcccatgcagggcttgcctgcttcagtgacaaccttgtggtgcagtgcagctccccttccccaagttgaacactgtgaccacagctcagcattcctctgagagcctaagtgctaccacacctgcctctgccactgccaaccacaggctaggaatgtaatgaggaggtggggcatttttgcatgcrtgtaagacagaacctgcagccacagtgtggagaagaaggcagactgcacactgcgtgaccccttgcctttgtagctcttttccaggtggagcttacttacacagtaacagtctcccagtgcacccaccctgtccccatctgaagactgtggctatagctgaacttccagggccactgataggccatcctgggcatatgtcactgctgcctctgtccacccctgccaccctaggaccagggagggtatgggtaggccaggcaactttacatgctcccaatggtgaaacccagtgccacttct

SEQ ID NO: 275658 - DNA, 519 bp, Homo sapiens
tgcaatgcatgatcccccacctctgtggcttcttcccatgcagggcttgcctgcttcagtgacaaccttgtggtgcagtgcagctccccttccccaagttgaacactgtgaccacagctcagcattcctctgagagcctaagtgctaccacacctgcctctgccactgccaaccacaggctaggaatgtaatgaggaggtggggcatttttgcatgcatgtaagacagaacctgcagccacagtgtggagaagaaggcagactgcacactgcgtgaccycttgcctttgtagctcttttccaggtggagcttacttacacagtaacagtctcccagtgcacccaccctgtccccatctgaagactgtggctatagctgaacttccagggccactgataggccatcctgggcatatgtcactgctgcctctgtccacccctgccaccctaggaccagggagggtatgggtaggccaggcaactttacatgctcccaatggtgaaacccagtgccacttct

SEQ ID NO: 275659 - DNA, 519 bp, Homo sapiens
tgcaatgcatgatcccccacctctgtggcttcttcccatgcagggcttgcctgcttcagtgacaaccttgtggtgcagtgcagctccccttccccaagttgaacactgtgaccacagctcagcattcctctgagagcctaagtgctaccacacctgcctctgccactgccaaccacaggctaggaatgtaatgaggaggtggggcatttttgcatgcatgtaagacagaacctgcagccacagtgtggagaagaaggcagactgcacactgcgtgaccccttgcctttgtagctcttttccaggtggagcttacttacacagtaacagtctcccartgcacccaccctgtccccatctgaagactgtggctatagctgaacttccagggccactgataggccatcctgggcatatgtcactgctgcctctgtccacccctgccaccctaggaccagggagggtatgggtaggccaggcaactttacatgctcccaatggtgaaacccagtgccacttct

SEQ ID NO: 275660 - DNA, 501 bp, Homo sapiens
gacagatgatgtattcaaagcatgaattacaaggaagtataatgacgtccaagagaaggttgaaaattaacacaaagacatcatgaaagcaattgaggaaataaaggaagasatgataaaggaaaaacaacaaagagaacttctcaaaattaaaaaaaaaatcacttaagaaacttccaaatacagtggaaagctttaacagtagactagactaagcacaagaaagaatttcagagcttgaagaccagtttttgaattaagacaaacaaaataaagaaaaaataatttaaaaaacaaagctttgagaaatatagaattatgtaaagtgatcaaacctatgacttatagacattcctgagagagaataaaaagtaagccatctaaaaaaaatagtaattcaagaaaacttccctaatctctctagagaagcagttgtgcagatacaagaattttaaagaaaaccttcaagatattataaaaatacacacatgaacaaggcat

SEQ ID NO: 275661 - DNA, 1003 bp, Homo sapiens
gacagatgatgtattcaaagcatgaattacaaggaagtataatgacgtccaagagaaggttgaaaattaacacaaagacatcatgaaagcaattgaggaaataaaggaagacatgataaaggaaaaacaacaaagagaacttctcaaaattaaaaaaaaaatcacttaagaaacttccaaatacagtggaaagctttaacagtagactagactaagcasaagaaagaatttcagagcttgaagaccagtttttgaattaagacaaacaaaataaagaaaaaataatttaaaaaacaaagctttgagaaatatagaattatgtaaagtgatcaaacctatgacttatagacattcctgagagagaataaaaagtaagccatctaaaaaaaatagtaattcaagaaaacttccctaatctctctagagaagcagttgtgcagatacaagaattttaaagaaaaccttcaagatattataaaaatacacacatgaacaaggcatwgacagatgatgtattcaaagcatgaattacaaggaagtataatgacgtccaagagaaggttgaaaattaacacaaagacatcatgaaagcaattgaggaaataaaggaagacatgataaaggaaaaacaacaaagagaacttctcaaaattaaaaaaaaaatcacttaagaaacttccaaatacagtggaaagctttaacagtagactagactaagcacaagaaagaatttcagagcttgaagaccagtttttgaattaagacaaacaaaataaagaaaaaataatttwaaaaacaaagctttgagaaatatagaattatgtaaagtgatcaaacctatgacttatagacattcctgagagagaataaaaagtaagccatctaaaaaaaatagtaattcaagaaaacttccctaatctctctagagaagcagttgtgcagatacaagaattttaaagaaaaccttcaagatattataaaaatacacacatgaacaaggcat

SEQ ID NO: 275662 - DNA, 501 bp, Homo sapiens
gacagatgatgtattcaaagcatgaattacaaggaagtataatgacgtccaagagaaggttgaaaattaacacaaagacatcatgaaagcaattgaggaaataaaggaagacatgataaaggaaaaacaacaaagagaacttctcaaaattaaaaaaaaaatcacttaagaaacttccaaatacagtggaaagctttaacagtagactagactaagcacaagaaagaatttcagagcttgaagaccagtttttgaattaagacaaacaaaataaagaaaaaataatttaaaaaacaaagctttgagaaatatagaattatgtaaagtgatcaaacctatgacttatagacattcctgagagagaataaaaagtaagccatctaaaaaaaayagtaattcaagaaaacttccctaatctctctagagaagcagttgtgcagatacaagaattttaaagaaaaccttcaagatattataaaaatacacacatgaacaaggcat

SEQ ID NO: 275663 - DNA, 633 bp, Homo sapiens
ttctgggtttaagacttgcatggagcctatatcctctttcttttggttgatttctcccttttggaacaggactatttagccaatgcctatccctccattgtatcttgcaagtaactgacttttttttcttttattttgcaakcacataggtggaagggactagccttgtctcatatgagacttgggactgtgaacttttgcattaatgctggaataagttaagtctttgggggactgttggaaaggcatgactgtattttgacacgtgagaaaaacatgagatttggaggggccattggcaggatgatattgtttggatctgtttcctcacctaaatctcatgtagaattgtagccaccagtgtttgaggaagggcctggtgggaggtaactggatcatggcagtggtttctcatgaatgagagcaccatccttttggtgcttttcttgtgatagtgagttcttctaagatctggttgtttaaaagattttggcaccttcctcctctctctattactcccactctggacatataagccaagcctgcttcccctttgcctttcaccatgattggaggtttcctgaggcctttccaggagtgataagataccagtatcatgtaaccatgcaacca

SEQ ID NO: 275664 - DNA, 633 bp, Homo sapiens
ttctgggtttaagacttgcatggagcctatatcctctttcttttggttgatttctcccttttggaacaggactatttagccaatgcctatccctccattgtatcttgcaagtaactgacttttttttcttttattttgcaatcacataggtggaagggactagccttgtctcatatgagacttgggactgtgaacttttgcattaatgctggaataagttaagtctttgggggactgttggaaaggcatgactgtattttgacaygtgagaaaaacatgagatttggaggggccattggcaggatgatattgtttggatctgtttcctcacctaaatctcatgtagaattgtagccaccagtgtttgaggaagggcctggtgggaggtaactggatcatggcagtggtttctcatgaatgagagcaccatccttttggtgcttttcttgtgatagtgagttcttctaagatctggttgtttaaaagattttggcaccttcctcctctctctattactcccactctggacatataagccaagcctgcttcccctttgcctttcaccatgattggaggtttcctgaggcctttccaggagtgataagataccagtatcatgtaaccatgcaacca

SEQ ID NO: 275665 - DNA, 633 bp, Homo sapiens
ttctgggtttaagacttgcatggagcctatatcctctttcttttggttgatttctcccttttggaacaggactatttagccaatgcctatccctccattgtatcttgcaagtaactgacttttttttcttttattttgcaatcacataggtggaagggactagccttgtctcatatgagacttgggactgtgaacttttgcattaatgctggaataagttaagtctttgggggactgttggaaaggcatgactgtattttgacacgtgagaaaaacatgagatttggaggggccattggcaggatgatattgtttggatctgtttcctcacctaaatctcatgtagaattgtagccaccartgtttgaggaagggcctggtgggaggtaactggatcatggcagtggtttctcatgaatgagagcaccatccttttggtgcttttcttgtgatagtgagttcttctaagatctggttgtttaaaagattttggcaccttcctcctctctctattactcccactctggacatataagccaagcctgcttcccctttgcctttcaccatgattggaggtttcctgaggcctttccaggagtgataagataccagtatcatgtaaccatgcaacca

SEQ ID NO: 275666 - DNA, 633 bp, Homo sapiens
ttctgggtttaagacttgcatggagcctatatcctctttcttttggttgatttctcccttttggaacaggactatttagccaatgcctatccctccattgtatcttgcaagtaactgacttttttttcttttattttgcaatcacataggtggaagggactagccttgtctcatatgagacttgggactgtgaacttttgcattaatgctggaataagttaagtctttgggggactgttggaaaggcatgactgtattttgacacgtgagaaaaacatgagatttggaggggccattggcaggatgatattgtttggatctgtttcctcacctaaatctcatgtagaattgtagccaccagtgtttgaggaagggcctggtgggaggtaactggatcatggcagtggtttctcatgaatgagagcaccatccttttggtgcttttcttgtgatagtgagttctyctaagatctggttgtttaaaagattttggcaccttcctcctctctctattactcccactctggacatataagccaagcctgcttcccctttgcctttcaccatgattggaggtttcctgaggcctttccaggagtgataagataccagtatcatgtaaccatgcaacca

SEQ ID NO: 275667 - DNA, 529 bp, Homo sapiens
ctgtttctttgaaacagtatatctggttctttgaaagaaaaaacaatattgactgactgcgagctagactaaactaggaaaaaaagagaaaagaaatgataaaggtgacattacaattgatatcacaaaaatacaatagatcatcagagaatcctgtgaacatctctacatgcacaaactggaaaacctagaagaaatggatattttgctggaaacatacaacctccaagactgaaccaggaagaaagaaactctgaacagatccatattgagcaatgaaatcaaattagtaataaaaaatcttccagcaaataaaaggccaggaccagacagaytcacagccagtttttaaccaaatgtatatagaaaagctgataccaaaataatttcaacaaaattgaagaggagggatccctctataacttattctacaaatccagtatcacctttgtaccaaaaccaggcagtgatacaacaacaacagccaaaaggatagcacagaccaatacccttgatgaacacagatgca

SEQ ID NO: 275668 - DNA, 410 bp, Homo sapiens
agcaaagattgctgcctcttccttcctctggaagcttcatcccagagggccacctgccagatgccagcyagcactctcttgtatgaggtgtctgttgacccctgctgggtggtgtctcccagtcaggaggcatggcggtcagggacccactgtaggaggcagtctgtcccttaacagagctcacttactgtgctgggagatctgctgctctcctcggagccagcaggcaggaaagtttaagtctgctgaagctgcacccacagccaccacttcctccagatgctctgtctcagggagatgtgagtttcatctataaggccctgactggggctgctgcctttctttcagagataccctgcccagagaggaggaatctagagaggcagtgtgactacagcagctttgtggag

SEQ ID NO: 275669 - DNA, 410 bp, Homo sapiens
agcaaagattgctgcctcttccttcctctggaagcttcatcccagagggccacctgccagatgccagctagcactctcttgtatgaggtgtctgttgacccctgctgkgtggtgtctcccagtcaggaggcatggcggtcagggacccactgtaggaggcagtctgtcccttaacagagctcacttactgtgctgggagatctgctgctctcctcggagccagcaggcaggaaagtttaagtctgctgaagctgcacccacagccaccacttcctccagatgctctgtctcagggagatgtgagtttcatctataaggccctgactggggctgctgcctttctttcagagataccctgcccagagaggaggaatctagagaggcagtgtgactacagcagctttgtggag

SEQ ID NO: 275670 - DNA, 410 bp, Homo sapiens
agcaaagattgctgcctcttccttcctctggaagcttcatcccagagggccacctgccagatgccagctagcactctcttgtatgaggtgtctgttgacccctgctgggtggtgtctcccagtcaggaggcatggcggtcagggacccactgtaggaggcagtctgtcccttaacagagctcacttactstgctgggagatctgctgctctcctcggagccagcaggcaggaaagtttaagtctgctgaagctgcacccacagccaccacttcctccagatgctctgtctcagggagatgtgagtttcatctataaggccctgactggggctgctgcctttctttcagagataccctgcccagagaggaggaatctagagaggcagtgtgactacagcagctttgtggag

SEQ ID NO: 275671 - DNA, 441 bp, Homo sapiens
atcagaactccttgccaacaagggaacaaaaccaggcagagaatcagttgatgaattgacagaagtaggcctcagaaggtgggtaataacaaactcctctaagctaaaggagcatgttctaacccaattcaaggaaacttgataaaacgttagaggaattgctaactagaataatcagtttagagaagaacataaatgactgatggagctgaaamacacagcacgagaacttcatgaagcatacacaaagtatcgatagccaaatcgatcaagtggaagaaagaatatctgagattgaagaccaacttaatgaaataaagcgtgaagacaagaatagagaaaaaagaatgaaagggaatgaacaaagcctccaagaaatatgggactatgtgaaaagaacaaacctgtgtttgactggtgtacctaaaagtgacagggaga

SEQ ID NO: 275672 - DNA, 553 bp, Homo sapiens
tttggaaaacatatttgagtatgatggttgttcttaattcattaactaaaaagactctatggaatccatttccaccagaatcacactaaggattaatatcattcaacaattttatttatgtcttatataatggratagacaactggatattttaagagaatttttggaaatgaaaatatttaataataaagacattaaagaaagtttgagctttagactccatcataaactatcagtttcactttagccaacacattgttgtcacatctttctacatgtgcatatttgagtattcagcattttgccatatggttataagaatattcatgaaatactttgggaatttttaatgtttgaaaggaagaggtttggtctatatttgcacatctggccttttttaaatgttctatttatttcaaagagcaaatatttttcaagcagcatggaatataagatattctaaaagtctctgcaactaaaaatgaagcacatcctgggtgaatgatcactggtatgtactttatttctgagctccttatatattagaaaaatc

SEQ ID NO: 275673 - DNA, 553 bp, Homo sapiens
tttggaaaacatatttgagtatgatggttgttcttaattcattaactaaaaagactctatggaatccatttccaccagaatcacactaaggattaatatcattcaacaattttatttatgtcttatataatggaatagacaactggatattttaagagaatttttggaaatgaaaatatttaataataaagacattaaagaaagtttgagctttagactccatcataaactatcagtttcactttagccaacacattgttgtcacatctttctacatgtgcatatttgagtattcagcattttgccatatggttataagaatattcatgaaatactttgggaatttttaatgtttgaaaggaagaggtttggtctatatttgcacatctggccttttttaaatgttctatttatttcaaagagcaaatatttttcaagcagcatggaatataagatattctaaaagtctctgcaactaaaaatgaagyacatcctgggtgaatgatcactggtatgtactttatttctgagctccttatatattagaaaaatc

SEQ ID NO: 275674 - DNA, 547 bp, Homo sapiens
ccagagattcaactatcttgtctctttgttctcattagtttcaaaaaacttgatttctgccttaattccattatttacccaaaagtcaatcaggaggaggttgattaatttccatgtaattgtatggttttgagcaattttctttgtattgaattctatttctattgtgctgtggtctgagagtgtgactggtatgatttcatttttttaaaattttatgaggattattttatgtctgattatatggtcaagtttggtgtatgtgstatgtggtgatgagaataatgtacaatttgttgtttttggatgaagagttctgcagatgtctattagatccatgtggtcaagtgttgagttcaggtcctgagtacctttgttatttttctgcttggttctgtctaatactttcaatggagtgttgaagcctccaactagtattgtatggatatctaataaggagcttatttctccttcacctactaagtttatttggctgaatatgaaattccttgtttaagattttttctttaagaatgttgagtacagg

SEQ ID NO: 275675 - DNA, 547 bp, Homo sapiens
ccagagattcaactatcttgtctctttgttctcattagtttcaaaaaacttgatttctgccttaattccattatttacccaaaagtcaatcaggaggaggttgattaatttccatgtaattgtatggttttgagcaattttctttgtattgaattctatttctattgtgctgtggtctgagagtgtgactggtatgatttcatttttttaaaattttatgaggattattttatgtctgattatatggtcaagtttggtgtatgtgctatgtggtgatgagaataatgtacaatttgttgtttttggatgaagagttctgcagatgtctattagatccatgtggtcaagtgttgagttcaggtcctgagtacctttgttatttttctgcttggttctgtctaatactttcaatggagtgttgaagcctccaactagtattgtatggatatctaataaggagcttatttctccttcacctactaagtttatttggctgaatatgaaatyccttgtttaagattttttctttaagaatgttgagtacagg

SEQ ID NO: 275676 - DNA, 371 bp, Homo sapiens
tgggtatgctcagcaatggttggggtggctgttctgcattcctgagccaggggacctacctggtgaagagggggcatgggggctyccagggaagagagactggactcctctatgtatgctggctgcactgtactggaggtgccagtgtaatgactattgtctttgttcttttcccagcttgaaggcaattaaggcagtactactgcagctgcaatggtggaggggctgtggattgaatctgggatttcctccttggagaaggcaaggacaggggttaggctggagtcccaggtcaggaggtcctgcacagtaaggacaagtgtggacagggacctgcatggggaacagtcaggccacttttctgtggggca

SEQ ID NO: 275677 - DNA, 371 bp, Homo sapiens
tgggtatgctcagcaatggttggggtggctgttctgcattcctgagccaggggacctacctggtgaagagggggcatgggggcttccagggaagagagactggactcctctatgtatgctggctgcactgtactggaggtgccagtgtaatgactattgtctttgttcttttcccagcttgaaggcaattaaggcmgtactactgcagctgcaatggtggaggggctgtggattgaatctgggatttcctccttggagaaggcaaggacaggggttaggctggagtcccaggtcaggaggtcctgcacagtaaggacaagtgtggacagggacctgcatggggaacagtcaggccacttttctgtggggca

SEQ ID NO: 275678 - DNA, 501 bp, Homo sapiens
ggggcttccagggaagagagactggactcctctatgtatgctggctgcactgtactggaggtgccagtgtaatgactattgtctttgttcttttcccagcttgaaggcaattaaggcagtactactgcagctgcaatggtggaggggctgtggattgaatctgggatttcctccttggagaaggcaaggacaggggttaggctggagtcccaggtcaggaggtcctgcacagtraggacaagtgtggacagggacctgcatggggaacagtcaggccacttttctgtggggcagctgcactgcactgggggtctgtgccgagctctagtcgccatggattctccagaggctgaaggcaacagtggcaaagtatgtaaataagtaaagatggcaacccactcctccctttggggtctctgtctcagggaggttcagagctgctgatggcccaagaactccagcaaggaatggctggattctcagatctggaggtcctggcca

SEQ ID NO: 275679 - DNA, 501 bp, Homo sapiens
ggggcttccagggaagagagactggactcctctatgtatgctggctgcactgtactggaggtgccagtgtaatgactattgtctttgttcttttcccagcttgaaggcaattaaggcagtactactgcagctgcaatggtggaggggctgtggattgaatctgggatttcctccttggagaaggcaaggacaggggttaggctggagtcccaggtcaggaggtcctgcacagtaaggacaagtgtggacagggacctgcatggggaacagtcaggccacttttctgtggggcagctgcactgcactgggggtctgtgccgagytctagtcgccatggattctccagaggctgaaggcaacagtggcaaagtatgtaaataagtaaagatggcaacccactcctccctttggggtctctgtctcagggaggttcagagctgctgatggcccaagaactccagcaaggaatggctggattctcagatctggaggtcctggcca

SEQ ID NO: 275680 - DNA, 501 bp, Homo sapiens
ggggcttccagggaagagagactggactcctctatgtatgctggctgcactgtactggaggtgccagtgtaatgactattgtctttgttcttttcccagcttgaaggcaattaaggcagtactactgcagctgcaatggtggaggggctgtggattgaatctgggatttcctccttggagaaggcaaggacaggggttaggctggagtcccaggtcaggaggtcctgcacagtaaggacaagtgtggacagggacctgcatggggaacagtcaggccacttttctgtggggcagctgcactgcactgggggtctgtgccgagctctagtcgccatggattctccagaggctgaaggcaacagtggcaaagtatgtaaataagtaaagatggcaacccactcctccctttgggrtctctgtctcagggaggttcagagctgctgatggcccaagaactccagcaaggaatggctggattctcagatctggaggtcctggcca

SEQ ID NO: 275681 - DNA, 521 bp, Homo sapiens
caaggaatggctggattctcagatctggaggtcctggccagtgaggagaacggggataaaggcctgcattaaaaacagtctggatgcttttttgtaaggcagcttcaatgtgttgggggtcccagaaagaccctagttacctcagaatctccagagyatgaaggtaacagacagaaaagcatgagagctaacaaagatgacatcccacccctccctctgggaactttgtcccagggaagtgtggagctattactggcctcagagttccagtaggaggtggctggagtcccaaattagtggtctttattctctgaagtagagtggaagcaaagccttcagactggcgctgcttagcccttcgggttcagcccctttccccagggtatgtaagagagcctaacctccccctttgctggaactgcagctactaatgctgtgaagcccaggatccaaggctcccaggacactgtgtgtgcttgagtggtggctctatccagactccacgtagctcttcatagcag

SEQ ID NO: 275682 - DNA, 765 bp, Homo sapiens
caaggaatggctggattctcagatctggaggtcctggccagtgaggagaacggggataaaggcctgcattaaaaacagtctggatgcttttttgtaaggcagcttcaatgtgttgggggtcccagaaagaccctagttacctcagaatctccagagtatgaaggtaacagacagaaaagcatgagagctaacaaagatgacatcccacccctccctctgggaactttgtcccagggaagtgtggagctattactggcctcagagttccagtaggaggtggctggagtcccaaattagtggtctttattctctgaagtagagtggaagcaaagccttcagactggcgctgcttagcccttcgggttcagcccctttccccagggtatgtaagrgagcctaacctccccctttgctggaactgcagctactaatgctgtgaagcccaggatccaaggctcccaggacactgtgtgtgcttgagtggtggctctatccagactccacgtagctcttcatagcagwgtaaaatcaatgtacacaaatcaatggcactgctatacaccaacagtgaccaagctgaaaatcaaatcaagaagtctcttttacaatagctgaaaaaatataaaaatatctaggaatataagtaaacaagaaagtgaagaatctgtagaaggagaaatacaaaacattgctggaagaaaacwgagatgacaggttgggcacagtggctcacgcctgtaatcccagaactttcggaggatgagg

SEQ ID NO: 275683 - DNA, 609 bp, Homo sapiens
taacacagtgaaaccctgtctctactaaaactacaaaaaattagccgggcatggtggcacacgcctgtagtcccagctactcaggaggctgaggcaggagaatcacttaaacccaggagacggaggtttcagtgagccaagatcatgctacygcacaccaacatgggcgacagaatgagacaccatctcaaaaacaaaacaaaacaaaaaaaagatgacacaaacaaatgtagatgcatctgatgctcatggatagaaactcaatcaatattctgaaaatcaccacactgcccaaagcaatctacagattaaatgcaatttccatcaagataccaacattattttttacagaactagacaaaacaatcttaaaatttatatggaatcaaaaaagagccttaataggcaaaggaatgctaaggaaagagaacatatttggaaatattacacaaccagactacaagttatattacaaggctgtatttaccaaaatagcatgatacttttataaaagtaggcacacagaccagtgaaacagaagagaatactcaggaataaggtcagatacttataaacaactgatatttgatataacatacaaaaacataa

SEQ ID NO: 275684 - DNA, 1098 bp, Homo sapiens
taacacagtgaaaccctgtctctactaaaactacaaaaaattagccgggcatggtggcacacgcctgtagtcccagctactcaggaggctgaggcaggagaatcacttaaacccaggagacggaggtttcagtgagccaagatcatgctaccgcacaccaacatgggcgacagaatgagacaccatctcaaaaacaaaacaaaacaaaaaaaagatgacacaaacaaatgtagatgcatctgatgctcatggatagaaactcaatcaatattstgaaaatcaccacactgcccaaagcaatctacagattaaatgcaatttccatcaagataccaacattattttttacagaactagacaaaacaatcttaaaatttatatggaatcaaaaaagagccttaataggcaaaggaatgctaaggaaagagaacatatttggaaatattacacaaccagactacaagttatattacaaggctgtatttaccaaaatagcatgatacttttataaaagtaggcacacagaccagtgaaacagaagagaatactcaggaataaggtcagatacttataaacaactgatatttgatataacatacaaaaacataawtcaccttatacaaaaatcaactcaagatgaatgaaagatgtaaatctaagacctgaaaccataacaattctagaatatatccttggaaaaactcttctggatattggcctaagcagagaattcatgaccaatwtcctgtattagtctcttctcccattgtgataaagaaatacctgaggccagaacatttataaagaaaagaggcctcattggctcttggttctgcatactgtacaggaagcatggtgacatcagcttctgggaagacctcagggaacttacactcatggaaaaagttgaaatgggagccagcacaacacaaggctggagtaggaggaagaaagcaaagaggtgctacacccttttaaacaagcagatctcataataactcactccctatcataagaacagcactgaggaaatggtgctagacaatttatgagaactttgcccccatgatccagtcacctcccaccaggtcccacctt

SEQ ID NO: 275685 - DNA, 488 bp, Homo sapiens
tcaccttatacaaaaatcaactcaagatgaatgaaagatgtaaatctaagacctgaaaccataacaattctagaatatatccttggaaaaactcttctggatattggcctaagcagagaattcatgaccaatttcctgtattagtctcttctcccattgtgataaagaaatacctgaggccagaacatttataaagaaaagaggcctcattggctcttggttctgcatactgtacaggaagcatggtgacatcagcttctgggaagacctcagggaacttacactcatggaaaaagttgaaatgggagccagcacaacayaaggctggagtaggaggaagaaagcaaagaggtgctacacccttttaaacaagcagatctcataataactcactccctatcataagaacagcactgaggaaatggtgctagacaatttatgagaactttgcccccatgatccagtcacctcccaccaggtcccacctt

SEQ ID NO: 275686 - DNA, 488 bp, Homo sapiens
tcaccttatacaaaaatcaactcaagatgaatgaaagatgtaaatctaagacctgaaaccataacaattctagaatatatccttggaaaaactcttctggatattggcctaagcagagaattcatgaccaatttcctgtattagtctcttctcccattgtgataaagaaatacctgaggccagaacatttataaagaaaagaggcctcattggctcttggttctgcatactgtacaggaagcatggtgacatcagcttctgggaagacctcagggaacttacactcatggaaaaagttgaaatgggagccagcacaacacaaggctggagtaggaggaagaaagcaaagaggtgctacacccttttaaacaagcagatctcataataactcactccctatcataagaacagcactgaggaaatggtgctagmcaatttatgagaactttgcccccatgatccagtcacctcccaccaggtcccacctt

SEQ ID NO: 275687 - DNA, 608 bp, Homo sapiens
ctatccagaaaaacacgatttcaccaaataaataaaacaccagcaaaaacacaaatcctgaaaaargcacaaatacgtgagctttcagacagagaattcaaaatatctatgttgagaaaactcaaaaatactcaatataacacacagaaggaatttaaaattctataagataaatttaacaaaaagattgaaataattaaaaaaatcaagcagaggttctgcagtgaaatgttgggattcactcaggatggtggcagaaatattaaagggaaatattaaggaaagttgcaggaatagtcacaaaccttttgtttctttgttgattttatgtttggaaaggctgaaaggttacctatcttgtaataattgaataggctgaaggcagctggttcttaccttagagcattaggtcatagggtaaatactagggacgatagaggcttccccagttatgtctatttatcctacctgcattaactaacctttgagccaaatggccctggggcgggggaggtcgactagggatattgccccctaatggtatttaccttcaacagaggtaccagagctttaatcattcctagaactactctcttaaccatgttaat

SEQ ID NO: 275688 - DNA, 519 bp, Homo sapiens
tatctttgtagccaaaagcatttgtaccccagaagctattgaagtaaaaaaatttttaaaaacccaaaatattctctgagaattagtgcctattttgcatgaaccctcttttgtaatagttmcaaaattataattttctaattctatttataggttattccttgatattctatttatgtatctatttattaataggatgaactcgtaggtttttataatttatccactggtttataatttattactatacttactttggtattaaattgcccagatttgacagtgacacatttttcaaggtagaacctctctcattgtaccacattcccaacctatcaagatgttctaagtttattttggacccatactgcagcaggccagaaatcagatgcttctgtcagggaaccctcgttccttatagaatagtactagaaatcaaaatttaggtgttagttgtgcccattgctgttggaatgactttgcttctaggttgtctcagtgctagggatagaaaatata

SEQ ID NO: 275689 - DNA, 519 bp, Homo sapiens
tatctttgtagccaaaagcatttgtaccccagaagctattgaagtaaaaaaatttttaaaaacccaaaatattctctgagaattagtgcctattttgcatgaaccctcttttgtaatagttacaaaattataattttctaattctatttataggttattccttgatattctatttatgtatctatttattaataggatgaactcrtaggtttttataatttatccactggtttataatttattactatacttactttggtattaaattgcccagatttgacagtgacacatttttcaaggtagaacctctctcattgtaccacattcccaacctatcaagatgttctaagtttattttggacccatactgcagcaggccagaaatcagatgcttctgtcagggaaccctcgttccttatagaatagtactagaaatcaaaatttaggtgttagttgtgcccattgctgttggaatgactttgcttctaggttgtctcagtgctagggatagaaaatata

SEQ ID NO: 275690 - DNA, 608 bp, Homo sapiens
ctatccagaaaaacacgatttcaccaaataaataaaacaccagcaaaaacacaaatcctgaaaaaggcacaaatacgtgagctttcagacagagaattcaaaatatctatgttgagaaaactcaaaaatactcaatataacacacagaaggaatttaaaattctataagataaatttaacaaaaagattgaaataattaaaaaaatcaagcagaggttctgcagtgaaatgttgggattcactcaggatggtggcagaaatattaaagggaaatattaaggaaagttgyaggaatagtcacaaaccttttgtttctttgttgattttatgtttggaaaggctgaaaggttacctatcttgtaataattgaataggctgaaggcagctggttcttaccttagagcattaggtcatagggtaaatactagggacgatagaggcttccccagttatgtctatttatcctacctgcattaactaacctttgagccaaatggccctggggcgggggaggtcgactagggatattgccccctaatggtatttaccttcaacagaggtaccagagctttaatcattcctagaactactctcttaaccatgttaat

SEQ ID NO: 275691 - DNA, 1471 bp, Homo sapiens
tatctttgtagccaaaagcatttgtaccccagaagctattgaagtaaaaaaatttttaaaaacccaaaatattctctgagaattagtgcctattttgcatgaaccctcttttgtaatagttacaaaattataattttctaattctatttataggttattccttgatattctatttatgtatctatttattaataggatgaactcgtaggtttttataatttatccactggtttataatttattactatacttactttggtattaaattgcccagatttgacagtgacacatttttcaaggtagaacctctctcattgyaccacattcccaacctatcaagatgttctaagtttattttggacccatactgcagcaggccagaaatcagatgcttctgtcagggaaccctcgttccttatagaatagtactagaaatcaaaatttaggtgttagttgtgcccattgctgttggaatgactttgcttctaggttgtctcagtgctagggatagaaaatatawaagagaaaccagatgcagcattcccttctgtgttagtccattgtgcattgctctaaagaaatacctgaggctaggtaatttataaagaaaagaagtttatttggctcacagttctacaggctatagaagaagcatagtgatcacatttgcttctggtgagagccttaggatgcttacactcatggtggaaggtaaaaggggagcaggcatgccacatggcatwaaagggagaaagaatacggtgatcccagtctctttaacaaccgcatctaatatgaactcacttactgtagagagggcatcaagccattcatgaagaatcctcttatgacccaaacacctwctatccagaaaaacacgatttcaccaaataaataaaacaccagcaaaaacacaaatcctgaaaaaggcacaaatacgtgagctttcagacagagaattcaaaatatctatgttgagaaaactcaaaaatactcaatataacacacagaaggaatttaaaattctataagataaatttaacaaaaagattgaaataattaaaaaaatcaagcagaggttctgcagtgaaatgttgggattcactcaggatggtggcagaaatattaaagggaaatattaaggaaagttgcaggaatagtcacaaaccttttgtttctttgttgattttatgtttggaaaggctgaaaggttacctatcttgtaataattgaataggctgaaggcagctggttcttaccttagagcattaggtcatagggtaaatactagggacgatagaggcttccccagttawgtctatttatcctacctgcattaactaacctttgagccaaatggccctggggcgggggaggtcgactagggatattgccccctaatggtatttaccttcaacagaggtaccagagctttaatcattcctagaactactctcttaaccatgttaat

SEQ ID NO: 275692 - DNA, 312 bp, Homo sapiens
tgaattttcttgttagccaagacaaactactttcttatagattttggatattagacccktgtcagatgtacagctttcaaatattttctaccattatgtaggttgtctgattactctattttttgtttcttttgaaacaaatcaacaagcaaaaaacaaataacttcgttaaaaatgaacaaaggacataaagagacacctctgataagaatacatacaagcagtcaataaacatatgaagtaagaccatcatcacctttcattagagaaatgcaaatcaaaaccacaatgagataccatcttacaccagtg

SEQ ID NO: 275693 - DNA, 312 bp, Homo sapiens
tgaattttcttgttagccaagacaaactactttcttatagattttggatattagacccgtgtcagatgtacagctttcaaatattttctaccattatgtaggttgtctgattactctattttttgtttcttttgaaacaaatcaacaagcaaaaaacaaataacttygttaaaaatgaacaaaggacataaagagacacctctgataagaatacatacaagcagtcaataaacatatgaagtaagaccatcatcacctttcattagagaaatgcaaatcaaaaccacaatgagataccatcttacaccagtg

SEQ ID NO: 275694 - DNA, 592 bp, Homo sapiens
agtgaatttgcaggatacaaaaatcaacgtacaaaaattagtagtatttctctctgtaaacagtagagtctgaaaaagaaataaaaaagcaatcacatttatgatagccacaaatacaattaaatacctaagaattaacaaaaaagtaaactatgtctatagtaacaactataaatcactgaaaaaagaaattgaaaagcatactaaaaaatattccatgttcatggagtggaagaatctatattgttcaaatgtccatactacccaaagaaatctacagaatcaaagaaatccttatcaaataccagtgaaattcttcacagaaatagaaagaaactatcccaraatgtatatggaaccacaaaagacccagaatagctaaagctattctaatcaacagaacaaaactggaagaatcacattacctcacttcaaattataccacagagctatagtaagaaaaatgacatagtcaggtgtggtggtgggcgcctgtaataccagctactcacgagtctgaggcagtggaatcgcttgaagccaggaggcagaggttgcagtgagccaagatcacgccactgcactccagcct

SEQ ID NO: 275695 - DNA, 592 bp, Homo sapiens
agtgaatttgcaggatacaaaaatcaacgtacaaaaattagtagtatttctctctgtaaacagtagagtctgaaaaagaaataaaaaagcaatcacatttatgatagccacaaatacaattaaatacctaagaattaacaaaaaagtaaactatgtctatagtaacaactataaatcactgaaaaaagaaattgaaaagcatactaaaaaatattccatgttcatggagtggaagaatctatattgttcaaatgtccatactacccaaagaaatctacagaatcaaagaaatccttatcaaataccagtgaaattcttcacagaaatagaaagaaactatcccaaaatgtatatggaaccacaaaagacccagaatagctaaagctattctaatcaamagaacaaaactggaagaatcacattacctcacttcaaattataccacagagctatagtaagaaaaatgacatagtcaggtgtggtggtgggcgcctgtaataccagctactcacgagtctgaggcagtggaatcgcttgaagccaggaggcagaggttgcagtgagccaagatcacgccactgcactccagcct

SEQ ID NO: 275696 - DNA, 582 bp, Homo sapiens
atatgattttgtttttaattctgttgaggtggtgaatcagttaataatttccatatgtcaaaacaatcttgcattccacaaagaaagccttattggttgtgatgtattaacattttgatgtgctgctgaatttggtttgctagtattttgttatggacttttttatctgtgttcatcagagatactggcctcaagtttttttttttttttttttcattgtgtctctgccagatttgggtattaagctaatgctggcttcatagaatcagatagggaggagcctctccacctcgatttttttgtaatrgtttcattaggattggtaccagttcttttatgtctcgtagaactcagctatgaatttgtctggcccaggacttcttttggttgccaggatttttattgatgatttaatttcaggattcaattttggtctatgcaggttttaaatcttccgattcaattttgtgaaaatgtgtgttctagaaatttatcaatttcttctagattttctaatttgtgtgcatagtgttgttaaatagcattctatgaagatctttttcaactatatgggatcaatgg

SEQ ID NO: 275697 - DNA, 582 bp, Homo sapiens
atatgattttgtttttaattctgttgaggtggtgaatcagttaataatttccatatgtcaaaacaatcttgcattccacaaagaaagccttattggttgtgatgtattaacattttgatgtgctgctgaatttggtttgctagtattttgttatggacttttttatctgtgttcatcagagatactggcctcaagtttttttttttttttttttcattgtgtctctgccagatttgggtattaagctaatgctggcttcatagaatcagatagggaggagcctctccacctcgatttttttgtaatagtttcattaggattggtaccagttcttttatgtctcgtagaactcagctatgaatttgtctggcccaggacttcttttgrttgccaggatttttattgatgatttaatttcaggattcaattttggtctatgcaggttttaaatcttccgattcaattttgtgaaaatgtgtgttctagaaatttatcaatttcttctagattttctaatttgtgtgcatagtgttgttaaatagcattctatgaagatctttttcaactatatgggatcaatgg

SEQ ID NO: 275698 - DNA, 582 bp, Homo sapiens
atatgattttgtttttaattctgttgaggtggtgaatcagttaataatttccatatgtcaaaacaatcttgcattccacaaagaaagccttattggttgtgatgtattaacattttgatgtgctgctgaatttggtttgctagtattttgttatggacttttttatctgtgttcatcagagatactggcctcaagtttttttttttttttttttcattgtgtctctgccagatttgggtattaagctaatgctggcttcatagaatcagatagggaggagcctctccacctcgatttttttgtaatagtttcattaggattggtaccagttcttttatgtctcgtagaactcagctatgaatttgtctggcccaggacttcttttggttgcyaggatttttattgatgatttaatttcaggattcaattttggtctatgcaggttttaaatcttccgattcaattttgtgaaaatgtgtgttctagaaatttatcaatttcttctagattttctaatttgtgtgcatagtgttgttaaatagcattctatgaagatctttttcaactatatgggatcaatgg

SEQ ID NO: 275699 - DNA, 582 bp, Homo sapiens
atatgattttgtttttaattctgttgaggtggtgaatcagttaataatttccatatgtcaaaacaatcttgcattccacaaagaaagccttattggttgtgatgtattaacattttgatgtgctgctgaatttggtttgctagtattttgttatggacttttttatctgtgttcatcagagatactggcctcaagtttttttttttttttttttcattgtgtctctgccagatttgggtattaagctaatgctggcttcatagaatcagatagggaggagcctctccacctcgatttttttgtaatagtttcattaggattggtaccagttcttttatgtctcgtagaactcagctatgaatttgtctggcccaggacttcttttggttgccaggatttttattgatgatttaatttcaggattcaattttggtctatgcaggttttaaatcttcygattcaattttgtgaaaatgtgtgttctagaaatttatcaatttcttctagattttctaatttgtgtgcatagtgttgttaaatagcattctatgaagatctttttcaactatatgggatcaatgg

SEQ ID NO: 275700 - DNA, 586 bp, Homo sapiens
ttcattcggttgcacaacactgcactagccatgttctccttccacttcacaattgtttcacatttgatgcctaattcttctgctttctaactataattattaaccaaggcatgactttggtcaatttctttatatcctttatgttttatagttttatctaagagaggcagcattttatagttaacagaaaaggctctggatccagagtatttgagcttgaatacttgggctccactgttttctatatgtaaaacattgggctagatacttattctccctttgcttgaggttttttttttttarttaactattaaatggagataacaattattatgaaatcaaaggtttgtttaagattaagattatatgaaccaatacatttaaagtgcttataacaatgtattggtacgtagtaaatgattagtaatcattattattagttatcatgatttaaaaagtaaaaaggacggttgggtgcagtgactcatgcctgtaatccaagcgctttggaaagccaaggcaggagaattgcttgaaaccaggtgtttgaaaaaaaatttaaaaggagtgtggcaatggcaatatc

SEQ ID NO: 275701 - DNA, 586 bp, Homo sapiens
ttcattcggttgcacaacactgcactagccatgttctccttccacttcacaattgtttcacatttgatgcctaattcttctgctttctaactataattattaaccaaggcatgactttggtcaatttctttatatcctttatgttttatagttttatctaagagaggcagcattttatagttaacagaaaaggctctggatccagagtatttgagcttgaatacttgggctccactgttttctatatgtaaaacattgggctagatacttattctccctttgcttgaggttttttttttttagttaactattaaatggagataacaattattatgaaatcaaaggkttgtttaagattaagattatatgaaccaatacatttaaagtgcttataacaatgtattggtacgtagtaaatgattagtaatcattattattagttatcatgatttaaaaagtaaaaaggacggttgggtgcagtgactcatgcctgtaatccaagcgctttggaaagccaaggcaggagaattgcttgaaaccaggtgtttgaaaaaaaatttaaaaggagtgtggcaatggcaatatc

SEQ ID NO: 275702 - DNA, 586 bp, Homo sapiens
ttcattcggttgcacaacactgcactagccatgttctccttccacttcacaattgtttcacatttgatgcctaattcttctgctttctaactataattattaaccaaggcatgactttggtcaatttctttatatcctttatgttttatagttttatctaagagaggcagcattttatagttaacagaaaaggctctggatccagagtatttgagcttgaatacttgggctccactgttttctatatgtaaaacattgggctagatacttattctccctttgcttgaggttttttttttttagttaactattaaatggagataacaattattatgaaatcaaaggtttgtttargattaagattatatgaaccaatacatttaaagtgcttataacaatgtattggtacgtagtaaatgattagtaatcattattattagttatcatgatttaaaaagtaaaaaggacggttgggtgcagtgactcatgcctgtaatccaagcgctttggaaagccaaggcaggagaattgcttgaaaccaggtgtttgaaaaaaaatttaaaaggagtgtggcaatggcaatatc

SEQ ID NO: 275703 - DNA, 586 bp, Homo sapiens
ttcattcggttgcacaacactgcactagccatgttctccttccacttcacaattgtttcacatttgatgcctaattcttctgctttctaactataattattaaccaaggcatgactttggtcaatttctttatatcctttatgttttatagttttatctaagagaggcagcattttatagttaacagaaaaggctctggatccagagtatttgagcttgaatacttgggctccactgttttctatatgtaaaacattgggctagatacttattctccctttgcttgaggttttttttttttagttaactattaaatggagataacaattattatgaaatcaaaggtttgtttaagattaagattatatgaaccaatacatttaaagtgcttataacaatgtattggtacrtagtaaatgattagtaatcattattattagttatcatgatttaaaaagtaaaaaggacggttgggtgcagtgactcatgcctgtaatccaagcgctttggaaagccaaggcaggagaattgcttgaaaccaggtgtttgaaaaaaaatttaaaaggagtgtggcaatggcaatatc

SEQ ID NO: 275704 - DNA, 501 bp, Homo sapiens
tagtccgttttcatgctgctgataatgacatacctgagactgggcaatttccaaaagaaacagatttaatggactcaaagttctatgtggttgtgggggcctcacaacccttgcagagggtgaaaggcacatctcacatggcagcagagaagagaagataacttgagcatggaaaatcccctttgtgaaaccattggatctcataagacttattcaccatcatgaggatagcatgggaaaggccygcccctatgattcaattatctcccaccatgctcctttcacaacccatgggagttatgggtgctacaattcaagatgagatgtgggtggggtcacagtcaaaccatatcagtacccattagttatttttttctgatcctctcccacctcccacccttcaccatccaaaaggcccaagtgtgtttgtccccctctgtgtgttcatgttttatcatcatttaactcacacatacaagtgagaacatgtgaaatttggtt

SEQ ID NO: 275705 - DNA, 566 bp, Homo sapiens
ggataataattactgtattacaaagatttgagcactaaatgaaattgctgtgaaggcccttggcattggtaaataatgacattaccatgtctgctttttaatttttgaaattatgtattacgcattttaaaactcttaatatcaatctttatgtcacattaaagtacactttaagagaatccattctatttacatcttaagaattgctcttagtaatacatttccttctgtaaatactagcctagaagttacatatgttttcttctgtaaaatctaaatattgaaaatacacaaatattctttataaatattaaagttttaatattaaaagctattaaaatatatatgtacttttttatacttttgatgaaatatattcaaattggacaaattttcagtrgcataacatttcgttttaatttttttatcattgagaatgaacaaaagtcaagactgtgataaacatgtaaaataggaaagtaaagttcagttttttgtaggggccaagatggcagactacacacagccaggaggaacatctgtcactgagggactgggacatccaa

SEQ ID NO: 275706 - DNA, 1090 bp, Homo sapiens
tagtccgttttcatgctgctgataatgacatacctgagactgggcaatttccaaaagaaacagatttaatggactcaaagttctatgtggttgtgggggcctcacaacccttgcagagggtgaaaggcacatctcacatggcagcagagaagagaagataacttgagcatggaaaatcccctttgtgaaaccattggatctcataagacttattcaccatcatgaggatagcatgggaaaggcctgcccctatgattcaattatctcccaccatgctcctttcacaacccatgggagttatgggtgctacaattcaagatgagatgtgggtggggtcacagtcaaaccatatcagtacccattagttatttttttctgatcctctcccacctcccacccttcaccatccaaaaggcccmagtgtgtttgtccccctctgtgtgttcatgttttatcatcatttaactcacacatacaagtgagaacatgtgaaatttggttwttttgtaggaaccaaactgatatgacagagctgaaaaactcagttaaagagtttcaaaataaaatctcaaatgctaacagaagaattgatgaagctgaggaaaaaaaatctcagagcttaaaaaccagatctccaaagtaactcactcagacaaaaataaagaaaaaacaatatagaagaataacaaagccttccagaaacatgagattacgaaaggagaccaaatctacaaactcataggtgtccctgaaagaggagaggaaacaagcaacttggaaaacatatttgaggatattgtgcatgatatwttctccaacctcattagagatgccaacattcaactacaggaaaagcagaaaatccctgtgaggtactactcaagaagactgtatgcaatactcatagtcatgagattttccaaggttgaaatgaaagaaaaaatgttaaagtcagctagagaaggggaaagtcacctaccaagggaactgcattagactaacagcaggcctttccacagaaactctagaagccagaagagctcgtgtacctatattcgacattcctaaaaagaaaattctcacaatttca

SEQ ID NO: 275707 - DNA, 588 bp, Homo sapiens
ttttgtaggaaccaaactgatatgacagagctgaaaaactcagttaaagagtttcaaaataaaatctcaaatgctaacagaagaattgatgaagctgaggaaaaaaaatctcagagcttaaaaaccagatctccaaagtaactcactcagacaaaaataaagaaaaaacaatatagaagaataacaaagccttccagaaacatgagattacgaaaggagaccaaatctacaaactcataggtgtccctgaaagaggagaggaaacaagcaacttggaaaacatatttgaggatattgtgcatgatatattctccaacctcattagagatgccaacattcaactacaggaaaagcagaaaatccctgtgagrtactactcaagaagactgtatgcaatactcatagtcatgagattttccaaggttgaaatgaaagaaaaaatgttaaagtcagctagagaaggggaaagtcacctaccaagggaactgcattagactaacagcaggcctttccacagaaactctagaagccagaagagctcgtgtacctatattcgacattcctaaaaagaaaattctcacaatttca

SEQ ID NO: 275708 - DNA, 588 bp, Homo sapiens
ttttgtaggaaccaaactgatatgacagagctgaaaaactcagttaaagagtttcaaaataaaatctcaaatgctaacagaagaattgatgaagctgaggaaaaaaaatctcagagcttaaaaaccagatctccaaagtaactcactcagacaaaaataaagaaaaaacaatatagaagaataacaaagccttccagaaacatgagattacgaaaggagaccaaatctacaaactcataggtgtccctgaaagaggagaggaaacaagcaacttggaaaacatatttgaggatattgtgcatgatatattctccaacctcattagagatgccaacattcaactacaggaaaagcagaaaatccctgtgaggtactactcaagaagactgtatgcaatactcatagtcatgagattttccaaggttgaaatgaaagaaaaaatgttaaagtcagctagagaaggggaaagtcacctaccaagggaactgcattagactaacagcaggcctttccacagaaactctagaagccagaagagctcgtgtacctatattcgrcattcctaaaaagaaaattctcacaatttca

SEQ ID NO: 275709 - DNA, 406 bp, Homo sapiens
ctcttgctgcttcccttttctgcatctgggcttcttyctgtaggctctccaataggccctgggtctcttctctcagttttccatttggaacttttccattcaccagtaaatttgattttctttctgaggagaagaggcattagatggcccgagttagccatcttgaaaaacataattggaactacattgtaatttgacttttgtaaaatatcttcagatattttttaagaacactgtgtgtttttgggtttgtaagtttttaaatttaaaaaaacatttaattgacaaatgaagattgtatatattcaaggtgtacagtgtgataatctgatatatgtatatattgaataatgattatcataatgaaattaattacaatatccttcaccacccatgctgtacatta

SEQ ID NO: 275710 - DNA, 406 bp, Homo sapiens
ctcttgctgcttcccttttctgcatctgggcttcttcctgtaggctctccaataggccctgggtctcttctctcagttttccatttggaacttttccattcaccagtaaatttgattttctttctgaggagaagaggcattagatggcccgagttagccatcttgaaaaacataattggaactacattgtaatttgacttttgtaaaatatcttcagatattttttaagaacactgtgtgtttttgggtttgtaagtttttaaatttaaaaaaacatttaattgacaaatgaagattstatatattcaaggtgtacagtgtgataatctgatatatgtatatattgaataatgattatcataatgaaattaattacaatatccttcaccacccatgctgtacatta

SEQ ID NO: 275711 - DNA, 560 bp, Homo sapiens
atttattgctacaaattttactcttagaactgcttatgcygaatcttttaagtttttgtatgttatgtttccatttttggtgttcttataatggttttaaacttgcttttaatttattttttggccctcagttgtttaggaacaagttgtttaattttcacacatttctgaattttacaacatttctgctattggtgatttctagttttataacatagtggtcataaaagatatgtgatatgattacaatattcttaaatttgttaaaggttgttttgtggcccaaaatatgatatattctgatgaagattccatatatacttgagaaaaaaatttgtgctactgctattggataaaatgttccatatatatctcttaggtccatttgttctatgcatttgaatgagcaaacacttctttcagtatttacagactacttttggcagatgaagaccttctcctgttgatttcctgtgcttattggattatctccaagattgtggccaagtggtgtttgaaccaggtcatgtgactgctgctggttttgcattggaatttgc

SEQ ID NO: 275712 - DNA, 560 bp, Homo sapiens
atttattgctacaaattttactcttagaactgcttatgccgaatcttttaagtttttgtatgttatgtttccatttttggtgttcttataatggttttaaacttgcttttaatttattttttggccctcagttgtttaggamcaagttgtttaattttcacacatttctgaattttacaacatttctgctattggtgatttctagttttataacatagtggtcataaaagatatgtgatatgattacaatattcttaaatttgttaaaggttgttttgtggcccaaaatatgatatattctgatgaagattccatatatacttgagaaaaaaatttgtgctactgctattggataaaatgttccatatatatctcttaggtccatttgttctatgcatttgaatgagcaaacacttctttcagtatttacagactacttttggcagatgaagaccttctcctgttgatttcctgtgcttattggattatctccaagattgtggccaagtggtgtttgaaccaggtcatgtgactgctgctggttttgcattggaatttgc

SEQ ID NO: 275713 - DNA, 560 bp, Homo sapiens
atttattgctacaaattttactcttagaactgcttatgccgaatcttttaagtttttgtatgttatgtttccatttttggtgttcttataatggttttaaacttgcttttaatttattttttggccctcagttgtttaggaacaagttgtttaattttcacacatttctgaattttacaacatttctgctattggtgatttctagttttataacatagtggtcataaaagatatgtgatatgattacaatattcttaaatttgttaaaggttgttttgtggcccaaaatatgatatattctgatgaagattccatatatacttgagaaaaaaatttgtgctactgctattggataaaatgttccatatatatctcttaggtccatttgttctatgcatttgaatgagcaaacacttctttcagtatttacagactacttttggcagatgaagaccttytcctgttgatttcctgtgcttattggattatctccaagattgtggccaagtggtgtttgaaccaggtcatgtgactgctgctggttttgcattggaatttgc

SEQ ID NO: 275714 - DNA, 560 bp, Homo sapiens
atttattgctacaaattttactcttagaactgcttatgccgaatcttttaagtttttgtatgttatgtttccatttttggtgttcttataatggttttaaacttgcttttaatttattttttggccctcagttgtttaggaacaagttgtttaattttcacacatttctgaattttacaacatttctgctattggtgatttctagttttataacatagtggtcataaaagatatgtgatatgattacaatattcttaaatttgttaaaggttgttttgtggcccaaaatatgatatattctgatgaagattccatatatacttgagaaaaaaatttgtgctactgctattggataaaatgttccatatatatctcttaggtccatttgttctatgcatttgaatgagcaaacacttctttcagtatttacagactacttttggcagatgaagaccttctcctgttgatttcctgtgcttattggattatctccaagattgtggccaagtggtgtttgaaccaggtcatgtgactgctrctggttttgcattggaatttgc

SEQ ID NO: 275715 - DNA, 582 bp, Homo sapiens
atggacaaatagagtatattttatcagatattagtatagctacagattctctcttttgacttttctttacatggaatatgtttttatctcatgtcttgaataatatgttttatgaagatagaattctttgttttcagctcttttcttgaagcactctrtaaatgttagtctacagttttctcatcttcctggtgtgtgatgagaaattgtcaataaaattgtactttgcacatgtgtaatgtgcttcttaggctcctttcaagatttttttaaaatctttaacttatttgactatgatgtgtttgtgcatagtttcctgtgaatttacccttcttatggtttgctgagcttcttggacctggaaatgtatacatttcagaaaaattgagaaattgtcagacatattttcaaatattcttttacaagagtctcttgctcctctctttatataataatcaaactcaaaatatataaatgctagattttttatattgtcacattgacccctgaagctttgttcataatttttaaatctatcttaatttttgattttcatatagaataatttctatggacctttct

SEQ ID NO: 275716 - DNA, 1165 bp, Homo sapiens
atggacaaatagagtatattttatcagatattagtatagctacagattctctcttttgacttttctttacatggaatatgtttttatctcatgtcttgaataatatgttttatgaagatagaattctttgttttcagctcttttcttgaagcactctgtaaatgttagtctacagttttctcatcttcctggtgtstgatgagaaattgtcaataaaattgtactttgcacatgtgtaatgtgcttcttaggctcctttcaagatttttttaaaatctttaacttatttgactatgatgtgtttgtgcatagtttcctgtgaatttacccttcttatggtttgctgagcttcttggacctggaaatgtatacatttcagaaaaattgagaaattgtcagacatattttcaaatattcttttacaagagtctcttgctcctctctttatataataatcaaactcaaaatatataaatgctagattttttatattgtcacattgacccctgaagctttgttcataatttttaaatctatcttaatttttgattttcatatagaataatttctatggacctttctwatggacaaatagagtatattttatcagatattagtatagctacagattctctcttttgacttttctttacatggaatatgtttttatctcatgtcttgaataatatgttttatgaagatagaattctttgttttcagctcttttcttgaagcactctgtaaatgttagtctacagttttctcatcttcctggtgtgtgatgagaaattgtcaataaaattgtactttgcacatgtgtaatgtgcttcttaggctcctttcaagatttttttwaaatctttaacttatttgactatgatgtgtttgtgcatagtttcctgtgaatttacccttcttatggtttgctgagcttcttggacctggaaatgtatacatttcagaaaaattgagaaattgtcagacatattttcaaatattcttttacaagagtctcttgctcctctctttatataataatcaaactcaaaatatataaatgctagattttttatattgtcacattgacccctgaagctttgttcataatttttaaatctatcttaatttttgattttcatatagaataatttctatggacctttct

SEQ ID NO: 275717 - DNA, 484 bp, Homo sapiens
aatatatgatacatgtgtctcaaaacaaaaataacatgggtactatgctagttaaaattaataaccttatacattatagaaataatacttgatttgtatatttattatattactaataatttcaacacaaaaatataaatttggtcatatgatgtatatacatttatgtgtatctttgtgattatgtctgtygtggtatataaattccttgagggcatgcgttgtgtatgtttaatttgcattgtaattatatgtgacaaagtaacattaactagtgtttgcttgataatatatctgctagtaaatcaattattaagggacttagaatcattaatgtgattattttacaatcaaattataatatagagaaatcaagtttctctcacaacatttattttgttcttctttcaattttaccaagttaaggcactaaagttaaagcatagtaaaaggtcaccaaaagtgaaaaggacatagcagattg

SEQ ID NO: 275718 - DNA, 484 bp, Homo sapiens
aatatatgatacatgtgtctcaaaacaaaaataacatgggtactatgctagttaaaattaataaccttatacattatagaaataatacttgatttgtatatttattatattactaataatttcaacacaaaaatataaatttggtcatatgatgtatatacatttatgtgtatctttgtgattatgtctgttgtggtatataaattccttgagggcatgcrttgtgtatgtttaatttgcattgtaattatatgtgacaaagtaacattaactagtgtttgcttgataatatatctgctagtaaatcaattattaagggacttagaatcattaatgtgattattttacaatcaaattataatatagagaaatcaagtttctctcacaacatttattttgttcttctttcaattttaccaagttaaggcactaaagttaaagcatagtaaaaggtcaccaaaagtgaaaaggacatagcagattg

SEQ ID NO: 275719 - DNA, 484 bp, Homo sapiens
aatatatgatacatgtgtctcaaaacaaaaataacatgggtactatgctagttaaaattaataaccttatacattatagaaataatacttgatttgtatatttattatattactaataatttcaacacaaaaatataaatttggtcatatgatgtatatacatttatgtgtatctttgtgattatgtctgttgtggtatataaattccttgagggcatgcgttgtgtatgtttaatttgcattgtaattatatstgacaaagtaacattaactagtgtttgcttgataatatatctgctagtaaatcaattattaagggacttagaatcattaatgtgattattttacaatcaaattataatatagagaaatcaagtttctctcacaacatttattttgttcttctttcaattttaccaagttaaggcactaaagttaaagcatagtaaaaggtcaccaaaagtgaaaaggacatagcagattg

SEQ ID NO: 275720 - DNA, 484 bp, Homo sapiens
aatatatgatacatgtgtctcaaaacaaaaataacatgggtactatgctagttaaaattaataaccttatacattatagaaataatacttgatttgtatatttattatattactaataatttcaacacaaaaatataaatttggtcatatgatgtatatacatttatgtgtatctttgtgattatgtctgttgtggtatataaattccttgagggcatgcgttgtgtatgtttaatttgcattgtaattatatgtgacaaagtaacattaactagtgtttgcttgataatatatctgctagtaartcaattattaagggacttagaatcattaatgtgattattttacaatcaaattataatatagagaaatcaagtttctctcacaacatttattttgttcttctttcaattttaccaagttaaggcactaaagttaaagcatagtaaaaggtcaccaaaagtgaaaaggacatagcagattg

SEQ ID NO: 275721 - DNA, 396 bp, Homo sapiens
gctgactcaaaatttcagctcagttgtcaaatgaaatctgcttaattttaaaactcttagctttttatcacccagaaattatgggcagaatttgtttcaatctcagataatagaagtaaagcattgtcaytacattttggccagaagaattgctcagagttgactgctgtaagcaaatttcagtatactatgcttaagttaataaagatgtagttaaatttatttttccaataagacagctcttgaacaattcattcaggcaccttcacattagcatatttcacattttgcaataatactttctcaaatttcaagttttatctgtaatgaaaggaaatacgattacagactattataagatgtgtatgttatctaacattgctctttataacttag

SEQ ID NO: 275722 - DNA, 396 bp, Homo sapiens
gctgactcaaaatttcagctcagttgtcaaatgaaatctgcttaattttaaaactcttagctttttatcacccagaaattatgggcagaatttgtttcaatctcagataatagaagtaaagcattgtcattrcattttggccagaagaattgctcagagttgactgctgtaagcaaatttcagtatactatgcttaagttaataaagatgtagttaaatttatttttccaataagacagctcttgaacaattcattcaggcaccttcacattagcatatttcacattttgcaataatactttctcaaatttcaagttttatctgtaatgaaaggaaatacgattacagactattataagatgtgtatgttatctaacattgctctttataacttag

SEQ ID NO: 275723 - DNA, 396 bp, Homo sapiens
gctgactcaaaatttcagctcagttgtcaaatgaaatctgcttaattttaaaactcttagctttttatcacccagaaattatgggcagaatttgtttcaatctcagataatagaagtaaagcattgtcattacattttggccagaagaattgctcagagttgactgctgtaagcaaatttcagtatactatgcttaagttaataaagatgtagttamatttatttttccaataagacagctcttgaacaattcattcaggcaccttcacattagcatatttcacattttgcaataatactttctcaaatttcaagttttatctgtaatgaaaggaaatacgattacagactattataagatgtgtatgttatctaacattgctctttataacttag

SEQ ID NO: 275724 - DNA, 396 bp, Homo sapiens
gctgactcaaaatttcagctcagttgtcaaatgaaatctgcttaattttaaaactcttagctttttatcacccagaaattatgggcagaatttgtttcaatctcagataatagaagtaaagcattgtcattacattttggccagaagaattgctcagagttgactgctgtaagcaaatttcagtatactatgcttaagttaataaagatgtagttaaatttatttttccaataagacagctcttgaacaattcattcaggcaccttcacattagcatatttcacattttgmaataatactttctcaaatttcaagttttatctgtaatgaaaggaaatacgattacagactattataagatgtgtatgttatctaacattgctctttataacttag

SEQ ID NO: 275725 - DNA, 582 bp, Homo sapiens
atggacaaatagagtatattttatcagatattagtatagctacagattctctcttttgacttttctttacatggaatatgtttttatctcatgtcttgaataatatgttttatgaagatagaattctttgttttcagctcttttcttgaagcactctgtaaatgttagtctacagttttctcatcttcctggtgtgtgatgagaaattgtcaataaaattgtactttgcacatgtgtaatgtgcttcttaggctcctttcaagatttttttaaaatctttaacttatttgactatgatgtgtttgtgcatagtttcctgtgaatttacccttcttatggtttgctgagcttcttggacctggaaatgtatacatttcagaaaaattgagaaattgtcagacatattttcaaatattcttttacaagagtctcttgctcctctctttatataataatcaaactcaaaatatataaatgctagattttttatattgtcacattgayccctgaagctttgttcataatttttaaatctatcttaatttttgattttcatatagaataatttctatggacctttct

SEQ ID NO: 275726 - DNA, 635 bp, Homo sapiens
ttaagcctcttttctttataaattacctagccttaggttcttctttatagccatgcaakaattatctaatatagaaaattggtactgaggagtgggatattgtgactggaacttatatttaaaagggaagcagagcaaaaaagcttgaaaaatatgcagcctgattatatggtaggaaaaaaaggcctgttttcaggggaaaaattcaagcagactgcagaaatgtgcataagtaaagaggagccaagtagtaatagccaagacaatggggaaaaggcctagaaggcatttcagagacctttgtggcagcctctcccatcataggccaggaggcttaggagggaagaatggttttgtgtgccaggcccaggacaccactgccctttgtgtgccaggcccaggacaccactgcagcctcaggacactgctttccacatgccagttattccagctccagctctgggtaaaagggacccaggtacagctcagaccactgcttcagatggtgtaggccacaaaccttggctgctttcacatggagttaagcctgtggtttcacagagagcaagagttgaggctggagatacttcaactggatttcagagaatgtgtgaaaaagcctggatgtctaggca

SEQ ID NO: 275727 - DNA, 635 bp, Homo sapiens
ttaagcctcttttctttataaattacctagccttaggttcttctttatagccatgcaataattatctaatatagaaaattggtactgaggagtgggatattgtgactggaacttatatttaaaagggaagcagagcaaaaaagcttgaaaaatatgcagcctgattatrtggtaggaaaaaaaggcctgttttcaggggaaaaattcaagcagactgcagaaatgtgcataagtaaagaggagccaagtagtaatagccaagacaatggggaaaaggcctagaaggcatttcagagacctttgtggcagcctctcccatcataggccaggaggcttaggagggaagaatggttttgtgtgccaggcccaggacaccactgccctttgtgtgccaggcccaggacaccactgcagcctcaggacactgctttccacatgccagttattccagctccagctctgggtaaaagggacccaggtacagctcagaccactgcttcagatggtgtaggccacaaaccttggctgctttcacatggagttaagcctgtggtttcacagagagcaagagttgaggctggagatacttcaactggatttcagagaatgtgtgaaaaagcctggatgtctaggca

SEQ ID NO: 275728 - DNA, 855 bp, Homo sapiens
gatacttcaactggatttcagagaatgtgtgaaaaagcctggatgtctaggcagaagcctgctgtaggggcagcacccttatcaagaatctctgctatggtagtatggaaaagaaatgtgaggtttgagcccccacacagtatcccaacrggggcactgcatagtggagctgtcagaagagggccaccatcctccagacccctccagaatggtagacccaatggcagcttgctccctgcacgtggaaaagctgcagtcactcaatgccagtacttgagagcacttcagctggggctgatctctgcaaagtcatgagtatgaagcttcccaaggccttgggagaccatcccttataccagtgtgccctggatatgaggcatggagtcaaagtacattattttagagtttaaggtttaatgactgccctwgatacttcaactggatttcagagaatgtgtgaaaaagcctggatgtctaggcagaagcctgctgtaggggcagcacccttatcaagaatctctgctatggtagtatggaaaagaaatgtgaggtttgagcccccacacagtatcccaacaggggcactgcatagtggagctgtcagaagagggccaccatcctccagacccctccagaatggtagacccaatggcagcttgcwccctgcacgtggaaaagctgcagtcactcaatgccagtacttgagagcacttcagctggggctgatctctgcaaagtcatgagtatgaagcttcccaaggccttgggagaccatcccttataccagtgtgccctggatatgaggcatggagtcaaagtacattattttagagtttaaggtttaatgactgccct

SEQ ID NO: 275729 - DNA, 427 bp, Homo sapiens
gatacttcaactggatttcagagaatgtgtgaaaaagcctggatgtctaggcagaagcctgctgtaggggcagcacccttatcaagaatctctgctatggtagtatggaaaagaaatgtgaggtttgagcccccacacagtatcccaacaggggcactgcatagtggagctgtcagaagagggccaccatcctccagacccctccagaatggtagacccaatggcagcttgctccctgcacgtggaaaagctgcagtcactcaatgccagtacttgagagcacttcagctggggctgatctctgcaaagtcatgagtatgaagcttcccaaggccttgggagaccatcccttataccagtgtgccctggatatgaggcatggagtcaaagtasattattttagagtttaaggtttaatgactgccct

SEQ ID NO: 275730 - DNA, 610 bp, Homo sapiens
gtgtgctgcactgcccttcccccagggaggaaaactgtctctaggctagattactggggaccctgaagcacctttcggttcagccagtgcagtgtcactgcagctctctaggtggacattggggaatgtcagcagtagcttttagaatgtagagatggggtgctgtagttcccagggcaggatgcagtcccatgatagctacacttcacaatggtgccctgccacagcctctcaggtccgaggggaggggtgagtgatttagcatgagttcccagtctggagcaatgctctcaagaggtctccaaattaccactcatactaatgccaaggtttgtggcagtagaggaactctcctgtggtttggatcccaacagtctatggcaagaatgtgaacatcaaaactctcccactcaccctctccccagaacaccaagcctctacaggcgcctgaccaattctcagamaagttggcttcttgtttcctcctacttctgtgccttaggcatttcccctgagttctctgttggactctaatattttcttctttaatagtctattcaaagtgtgattatctgttcataattttggttcttttttctggaaaaaacag

SEQ ID NO: 275731 - DNA, 610 bp, Homo sapiens
gtgtgctgcactgcccttcccccagggaggaaaactgtctctaggctagattactggggaccctgaagcacctttcggttcagccagtgcagtgtcactgcagctctctaggtggacattggggaatgtcagcagtagcttttagaatgtagagatggggtgctgtagttcccagggcaggatgcagtcccatgatagctacacttcacaatggtgccctgccacagcctctcaggtccgaggggaggggtgagtgatttagcatgagttcccagtctggagcaatgctctcaagaggtctccaaattaccactcatactaatgccaaggtttgtggcagtagaggaactctcctgtggtttggatcccaacagtctatggcaagaatgtgaacatcaaaactctcccactcaccctctccccagaacaccaagcctctacaggcgcctgaccaattctcagaaaagttggcttcttgtttcctcctamttctgtgccttaggcatttcccctgagttctctgttggactctaatattttcttctttaatagtctattcaaagtgtgattatctgttcataattttggttcttttttctggaaaaaacag

SEQ ID NO: 275732 - DNA, 605 bp, Homo sapiens
aagtgatggtagaagcagttgttacatattgttattataatttcmaaaagttgagcaataattacatccaagtctgaaattccacggtaagtctcaagaacccttctcttttttctcaaatcactaacatttctctcttctctcacataaataatttctgcaaccatttttctttacaaagtctcactagacagatatgagtaaagaagaaattgttttctaaattccataccaaactccctgtaaatagaagttacactatcctaccttctcaatgcactagtaaaacatgtattatatgcaaacaattacattattgatagccattctgtttctaccaagctgaacaaataattcttgattctaacaaatgtaatttcaagtatacatatctcaatcatttttaatattctaatggatattagaatattccattttaatattgaggatgacagatcccaattcatttctcaagtggattgatttgccatcttaagggtgaaagtagtatttcttacttaatatagagggagaaaaattttatctattttcctaaaaagtatatttccaaattgcttccttggagctagaatcctctgtggttt

SEQ ID NO: 275733 - DNA, 605 bp, Homo sapiens
aagtgatggtagaagcagttgttacatattgttattataatttcaaaaagttgagcaataattacatccaagtctgaaattccacggtaagtctcaagaacccttctcttttttctcaaatcactaacatttctctcttctctcacataaataatttctgcaaccatttttctttacaaagtctcactagacagatatgagtaaagaagmaattgttttctaaattccataccaaactccctgtaaatagaagttacactatcctaccttctcaatgcactagtaaaacatgtattatatgcaaacaattacattattgatagccattctgtttctaccaagctgaacaaataattcttgattctaacaaatgtaatttcaagtatacatatctcaatcatttttaatattctaatggatattagaatattccattttaatattgaggatgacagatcccaattcatttctcaagtggattgatttgccatcttaagggtgaaagtagtatttcttacttaatatagagggagaaaaattttatctattttcctaaaaagtatatttccaaattgcttccttggagctagaatcctctgtggttt

SEQ ID NO: 275734 - DNA, 507 bp, Homo sapiens
tagccattctgtttctaccaagctgaacaaataattcttgattctaacaaatgtaatttcaagtatacatatctcaatcatttttaatattctaatggatattagaatattccattttaatattgaggatgacagatcccaattcatttctcaagtggattgatttgccatcttaagggtgaaagtagtatttcttacttaatatagagggagaaaaattttatctattttcctaaaaagtatatttccaaattgcttccttggagctagaatcctctgtggtttctggcaccaaaaatttctaacaatactctaaaagaaacataggaaacagacrtggttatggaaaaaatagctactgtaaggtcaagagtctaacacagtccctatctcattttttccagctacataaactcttctttgcaatagttttacaattgcactcagaagcagttggatatttatttaactgcaccacaatggcaggtttcagggagtactgtgact

SEQ ID NO: 275735 - DNA, 1015 bp, Homo sapiens
tagccattctgtttctaccaagctgaacaaataattcttgattctaacaaatgtaatttcaagtatacatatctcaatcatttttaatattctaatggatattagaatattccattttaatattgaggatgacagatcccaattcatttctcaagtggattgatttgccatcttaagggtgaaagtagtatttcttacttaatatagagggagaaaaattttatctattttcctaaaaagtatatttccaaattgcttccttggagctagaatcctctgtggtttctggcaccaaaaatttctaacaatactctaaaagaaacataggaaacagacgtggttatggaaaaaatagctactgtaaggtsaagagtctaacacagtccctatctcattttttccagctacataaactcttctttgcaatagttttacaattgcactcagaagcagttggatatttatttaactgcaccacaatggcaggtttcagggagtactgtgactwtagccattctgtttctaccaagctgaacaaataattcttgattctaacaaatgtaatttcaagtatacatatctcaatcatttttaatattctaatggatattagaatattccattttaatattgaggatgacagatcccaattcatttctcaagtggattgatttgccatcttaagggtgaaagtagtatttcttacttaatatagagggagaaaaattttatctattttcctaaaaagtatatttccaaattgcttccttggagctagaatcctctgtggtttctggcaccaaaaatttctaacaatactctaaaagaaacataggaaacagacgtggttatggaaaaaatagctactgtaaggtcaagagtctaacacagtccctawctcattttttccagctacataaactcttctttgcaatagttttacaattgcactcagaagcagttggatatttatttaactgcaccacaatggcaggtttcagggagtactgtgact

SEQ ID NO: 275736 - DNA, 580 bp, Homo sapiens
tagctctgtgcccctcagggacagaggttccagaggaaggagcaagcaccaacctttgctgctctgcagcctccttgggtgacatctctaggtgcaggggggagccaggtgaatagggcctaaagygaacccccagaaaactgcagcagcccagcagaagaggggcctgattgttaaaaaacaaacaaacagcaagcaacagcaacagcatcaataataaagtcctcacaataaccccatccaaaggtcagtaacattaaagaacaaaactagacaaactaattaagatgagaagaaatcaataaaaagatgttgaaacttcaaaaggccagagggcccctcctcctacaaatgatcacacctcctctccagcaagggcacagaactgggtggaggttgagatgaattgacagaagtaggcttcagaaggtgggtaataacaaactttactgagctaaaggagcatattcaaacccaatgcaaagcatctaagagccttgataagaggtacaggagctgctaactagaataaccagtttagagagaaacataaatgacctgatggagctgaaaaacacag

SEQ ID NO: 275737 - DNA, 580 bp, Homo sapiens
tagctctgtgcccctcagggacagaggttccagaggaaggagcaagcaccaacctttgctgctctgcagcctccttgggtgacatctctaggtgcaggggggagccaggtgaatagggcctaaagcgaacccccagaaaactgcagcagcccagcagaagaggggcctgattgttaaaaaacaaacaaacagcaagcaacagcaacagcatcartaataaagtcctcacaataaccccatccaaaggtcagtaacattaaagaacaaaactagacaaactaattaagatgagaagaaatcaataaaaagatgttgaaacttcaaaaggccagagggcccctcctcctacaaatgatcacacctcctctccagcaagggcacagaactgggtggaggttgagatgaattgacagaagtaggcttcagaaggtgggtaataacaaactttactgagctaaaggagcatattcaaacccaatgcaaagcatctaagagccttgataagaggtacaggagctgctaactagaataaccagtttagagagaaacataaatgacctgatggagctgaaaaacacag

SEQ ID NO: 275738 - DNA, 580 bp, Homo sapiens
tagctctgtgcccctcagggacagaggttccagaggaaggagcaagcaccaacctttgctgctctgcagcctccttgggtgacatctctaggtgcaggggggagccaggtgaatagggcctaaagcgaacccccagaaaactgcagcagcccagcagaagaggggcctgattgttaaaaaacaaacaaacagcaagcaacagcaacagcatcaataataaagtcctcacaataaccccatccaaaggtcagtaacattaaagaacaaaactagacaaactaattaagatgagaagraatcaataaaaagatgttgaaacttcaaaaggccagagggcccctcctcctacaaatgatcacacctcctctccagcaagggcacagaactgggtggaggttgagatgaattgacagaagtaggcttcagaaggtgggtaataacaaactttactgagctaaaggagcatattcaaacccaatgcaaagcatctaagagccttgataagaggtacaggagctgctaactagaataaccagtttagagagaaacataaatgacctgatggagctgaaaaacacag

SEQ ID NO: 275739 - DNA, 580 bp, Homo sapiens
tagctctgtgcccctcagggacagaggttccagaggaaggagcaagcaccaacctttgctgctctgcagcctccttgggtgacatctctaggtgcaggggggagccaggtgaatagggcctaaagcgaacccccagaaaactgcagcagcccagcagaagaggggcctgattgttaaaaaacaaacaaacagcaagcaacagcaacagcatcaataataaagtcctcacaataaccccatccaaaggtcagtaacattaaagaacaaaactagacaaactaattaagatgagaagaaatcaataaaaagatgttgaaacytcaaaaggccagagggcccctcctcctacaaatgatcacacctcctctccagcaagggcacagaactgggtggaggttgagatgaattgacagaagtaggcttcagaaggtgggtaataacaaactttactgagctaaaggagcatattcaaacccaatgcaaagcatctaagagccttgataagaggtacaggagctgctaactagaataaccagtttagagagaaacataaatgacctgatggagctgaaaaacacag

SEQ ID NO: 275740 - DNA, 579 bp, Homo sapiens
aatattagcaatgatgataaccagtttcacctaaatctaggtgctaccatttccaaaatagaaaagcaatgtcgaagtatgcacaactaggtaacagtgctataaaataaattttaacattttattaaatcataaaagctgtttctaaatatacattaatattgaaacataaacrgctgcttgaaaatcttgtatttttacgacggtataaattgtgacctctgcattgtggcacagatgctggtggatttgtgaaattgcccagaatcaaaaataaaaaaaaagaaaagaaaaagaaaaaacagaaatcaaaacagaaagatgagtggttcaagcaagatagcagaacagaagcccatgtcattcatcattcccattggaacactaattttaacaaagatctgcacacagaaaaccaccatcattagaatcaaaatccaggtgagcaatccaagtaatggttttaaactcatattcatattactgaaaaaagcattacaaaggggaggagaaacagtcttgactgtccaatgccacccctcctccatccactggcagtagctgagctatacagagaga

SEQ ID NO: 275741 - DNA, 499 bp, Homo sapiens
aatattatcacacatttctactttactgacatacatctgttttattataaatgggtaatggttgttgttcaatgcttttctgcatgtttagagaagaatatatggtattccttttttattatttaaacatggtaaattaaattgattgacatttgaatgttaacctggaatttctcatataaaccccactttttaatgctgcattatcactttaactttgcttgtttaaatttgataatattttgttaaaaattgcatcaatactaatgaacaacagttgtatacagtttttgctgttgtttttgtttagaatatatatgtctggttttgatatctggataatgctggccttataaaaataattggaaaatgtttccccctctattttccaaartagttttcttagcatttatattatttttttcttaaatatttcatagaattcaacagtgaaataggttgggcttcaagtttaatttgtaagaatgttttaaataat

SEQ ID NO: 275742 - DNA, 596 bp, Homo sapiens
taatcgatcttgaatttattcttatatgtaatgtaagacaggggtcattttaatcttttgcatatggctagccagttatcccaggaccatttattgtatagggagtcctttctctattgcttgctttgatgaacgttgtcaaagatcagatgattgtaggtrtgcagcattatttctaggctctctattctgctccatttgtctatgtgtatattttggtactagtctcttttgcttattgtagccttctaatatagtttgaagtcaagtaagataatgtctccagctttgtttgtttgtttctttttgttttgttttttgcttaggattgccttggctattcaggctttttttgttccatataatttttaaaatgcatttttgctaattctgtgcagaacatcattggtggtttgatgggaatagcattaaaactataatcgctttgggcaatattgtcattttaacaatattgattctttcctcacatgagactggaatgtgttttcatttgtttgtgcagtttcttatttctcagagcagtgttttgtagttctttttgtagacataatttgcctccctggttagctgtattc

SEQ ID NO: 275743 - DNA, 596 bp, Homo sapiens
taatcgatcttgaatttattcttatatgtaatgtaagacaggggtcattttaatcttttgcatatggctagccagttatcccaggaccatttattgtatagggagtcctttctctattgcttgctttgatgaacgttgtcaaagatcagatgattgtaggtatgcagcattatttctaggctctctattctgctccatttgtctatgtgtatattttggtactagtctcttttgcttattgtagccttctaatatagtttgaagtcaagtaagataatgtctccagctttgtttgtttgtttctttttgttttgttttttgcttargattgccttggctattcaggctttttttgttccatataatttttaaaatgcatttttgctaattctgtgcagaacatcattggtggtttgatgggaatagcattaaaactataatcgctttgggcaatattgtcattttaacaatattgattctttcctcacatgagactggaatgtgttttcatttgtttgtgcagtttcttatttctcagagcagtgttttgtagttctttttgtagacataatttgcctccctggttagctgtattc

SEQ ID NO: 275744 - DNA, 596 bp, Homo sapiens
taatcgatcttgaatttattcttatatgtaatgtaagacaggggtcattttaatcttttgcatatggctagccagttatcccaggaccatttattgtatagggagtcctttctctattgcttgctttgatgaacgttgtcaaagatcagatgattgtaggtatgcagcattatttctaggctctctattctgctccatttgtctatgtgtatattttggtactagtctcttttgcttattgtagccttctaatatagtttgaagtcaagtaagataatgtctccagctttgtttgtttgtttctttttgttttgttttttgcttaggattgccttggctattcaggctttttttgttccatataatttttaaaatgcatttttgctaattctgtgcagaacatcattggtggtttgatgggaatagcattaaaactataatcgctttgggcaatattgtcattttaacaatattgattctttcctcacatgagactggaatgtgttttcatttgtttgtgcartttcttatttctcagagcagtgttttgtagttctttttgtagacataatttgcctccctggttagctgtattc

SEQ ID NO: 275745 - DNA, 590 bp, Homo sapiens
gcatttgtgaaaataaggacatgtctgagctagacaatcattttgaagaaattggggataacatcagaagaagcaatgccaaaagtaccatatactccttcactgttctcaactatatttttatcagtatcgygtatcccgcagatacgctcaaggccctaattagccagtatctagttaataatggtcatttcatcaaaggattatgctgctttttatatctaggaaaaatggggagaaacacaatctattcagtcaaaattttaaggacaattttcacagaaaatagtgtgattatcactagaacctatgcgctcctgagagagcacaaactaatatacaacaacatctggcaagttttacatctcacttggctttaatttaatactgtctaacaacaagaaaaatggaaggtatcacttaaacagcaaaagaccaggtcattccaaaattgtaggtgtacccatacctctgttgaagaatacaggtctggtgggagaaaaggtatgataatatatgagttcaatggagagctgctggcgtaagtgtctacaaaggactacctcatgagtccggaaggcatatatgtt

SEQ ID NO: 275746 - DNA, 590 bp, Homo sapiens
gcatttgtgaaaataaggacatgtctgagctagacaatcattttgaagaaattggggataacatcagaagaagcaatgccaaaagtaccatatactccttcactgttctcaactatatttttatcagtatcgcgtatcccgcagataygctcaaggccctaattagccagtatctagttaataatggtcatttcatcaaaggattatgctgctttttatatctaggaaaaatggggagaaacacaatctattcagtcaaaattttaaggacaattttcacagaaaatagtgtgattatcactagaacctatgcgctcctgagagagcacaaactaatatacaacaacatctggcaagttttacatctcacttggctttaatttaatactgtctaacaacaagaaaaatggaaggtatcacttaaacagcaaaagaccaggtcattccaaaattgtaggtgtacccatacctctgttgaagaatacaggtctggtgggagaaaaggtatgataatatatgagttcaatggagagctgctggcgtaagtgtctacaaaggactacctcatgagtccggaaggcatatatgtt

SEQ ID NO: 275747 - DNA, 590 bp, Homo sapiens
gcatttgtgaaaataaggacatgtctgagctagacaatcattttgaagaaattggggataacatcagaagaagcaatgccaaaagtaccatatactccttcactgttctcaactatatttttatcagtatcgcgtatcccgcagatacgctcaaggccctaattagccagtatctagttaataatggtcatttcatcaaaggattatgctgctttttatatctaggaaaaatrgggagaaacacaatctattcagtcaaaattttaaggacaattttcacagaaaatagtgtgattatcactagaacctatgcgctcctgagagagcacaaactaatatacaacaacatctggcaagttttacatctcacttggctttaatttaatactgtctaacaacaagaaaaatggaaggtatcacttaaacagcaaaagaccaggtcattccaaaattgtaggtgtacccatacctctgttgaagaatacaggtctggtgggagaaaaggtatgataatatatgagttcaatggagagctgctggcgtaagtgtctacaaaggactacctcatgagtccggaaggcatatatgtt

SEQ ID NO: 275748 - DNA, 590 bp, Homo sapiens
gcatttgtgaaaataaggacatgtctgagctagacaatcattttgaagaaattggggataacatcagaagaagcaatgccaaaagtaccatatactccttcactgttctcaactatatttttatcagtatcgcgtatcccgcagatacgctcaaggccctaattagccagtatctagttaataatggtcatttcatcaaaggattatgctgctttttatatctaggaaaaatggggagaaacacaatctattcagtcaaaattttaaggacaattttcacagaaaatagtgtgattatcactagaacctatgcgctcctgagagagcacaaactaatatacaacaacatctggcaagttttacatctcacttggctttaatttaatactgtctaacaacaagaaaaatggaaggtatcacttaaacagcaaaagaccaggtcattccaaaattgtaggtgtacccatacctctgttgaagaatacaggtctggtgggagaaaagstatgataatatatgagttcaatggagagctgctggcgtaagtgtctacaaaggactacctcatgagtccggaaggcatatatgtt

SEQ ID NO: 275749 - DNA, 598 bp, Homo sapiens
taagagtgttttacacagcaaaattacagtgttatagtattatgtgttttaccctgtgctattaccagtgagttttgtaccttcagatgattttttattgatcatgaacatgctttttttcagattgcagaacttcctttagcattttttataggactggtctagtgttgatgaaatccctcagctttcctttgtctggaaaagtttttstttctctttcatggttgaataaggcttttgctggacatactattctaggataaaagttttttttcttcatcacttaaataagtcataccactctcacctctcctgtaaagtttccactgaaatgtctgctgccagatgtattggaactccattgtatgttattaggttttattttttttctcttgctgcttttaggactttttttaaacctttgacatttggaagtttgattattaaatgctttgaggtatttctttttgggttgtgttctattactttcttgtacttaaatatggatgtctttctctaggtttgggaatttatctgatattatccttttgaataagctttttactgctctttttttaccttctctgtaagaccagta

SEQ ID NO: 275750 - DNA, 409 bp, Homo sapiens
ttttcaactctagaatttctgcttgattctatttatacattttaatctctttgttaaatttatctgatagatttctgaattccttctctgggttattttgaatttacttgagttttctcaatttgctattttgaattctccatctgaaaagtcacgtatctctgtttctccagtattggtccttgatgccttatttagtttgtctggygaggtcattttttcttgattggtcttgatgcttgtagatgctcattgatgtttcagcatttaagggttaggcacttattgcagtctttgcaatctgggcttgtttgtgcttcttaggaaggctttctaggtatttgaagaaacttgggccccaaactcaataatgctgtggttcttgcacattcacagtgacaccgccttg

SEQ ID NO: 275751 - DNA, 409 bp, Homo sapiens
ttttcaactctagaatttctgcttgattctatttatacattttaatctctttgttaaatttatctgatagatttctgaattccttctctgggttattttgaatttacttgagttttctcaatttgctattttgaattctccatctgaaaagtcacgtatctctgtttctccagtattggtccttgatgccttatttagtttgtctggtgaggtcattttttcttgattggtcttgatgcttgtagatgctcattgatgtttcagcatttaagggttaggcacttattgcagtctttgcaatytgggcttgtttgtgcttcttaggaaggctttctaggtatttgaagaaacttgggccccaaactcaataatgctgtggttcttgcacattcacagtgacaccgccttg

SEQ ID NO: 275752 - DNA, 557 bp, Homo sapiens
ttacatttgctgttatcttacaagtatagacactgtggccataatttagaggaaagagcatgggctttggygatacaggccagactccagcacttagaacctggggcatcttggtgtgtcccttacactttttgagcctctgtttcctaatggggttaatgaaaataacacacctttcatactggtttgccttgaagctcaaataaatgaatggcctgtttgctggctgggttccatgcccctcttctgtgcgtgctttcattcaatcagcaaatattcctaggctctggtctaggaaggggacatacatcagtgaccaagacaagatcccttctttgtggaacttcattctagcgcatgttacatggcattgcattcatctgtctatgtgtttagccacttgcttgtgagctgcctggttgtgtatctctggcatcttgtgccatgcacatattatatgctcaatacatacttatggaacgaatgtgaaagtgcttcataaatgcataaatgttggaggtttgtctgttggagtctgttgcttcaatctgggtatt

SEQ ID NO: 275753 - DNA, 535 bp, Homo sapiens
tattgctggtgggattgtaaaatggtgctgccaatttggaaaacagtttggtagtttctcaaaatgtccaacatagagttaccacattatccagtaaatccactcctatgtataaactcgaattaaaaacagctattcacataaaaacctgtacatgaatatttatagcagcactatttacaatagccaagaaatagtagtagtacaaatgcccatctgttgacagaygggtaaacaaagtgtggaatatccatacaatggaattatttaaccataaaaagaataaaggcagtattggtccatgctacaatatggataaaccttgaaggcattatgttaggtgaaagcagcaatcacaaaaaactacatagtatatgattccatttatataaaatatccagaaaaaggcagattcataaagaaaaagtagactgctggttgccagggactgagagaagggaaaatagtgacggctaatcagtatggggttttttctttgtggtgaaaaaaagttctaaaatcagattgtagaaat

SEQ ID NO: 275754 - DNA, 579 bp, Homo sapiens
gtatactttaaaagggtaaattttatggtgtgtaaattacgtctctgtaaggctgttaaactaatttacaatatacgcagaaggttctaaagaggaatgtgatgcagkatttttccatagcagcatcaagttctatttaatgtcagccctcactcactaaatacatctccatatacatggctgacaggtgacttaactgaacaataaacaagaaatgaaatctgtctaacatctagatcaataaaaacagaccttgaactagtcttttatcttggaaagcaattgcttaagcttaaaggctccaaaaagaaacctacaagacagaaacagccaactattgttcccatcctccaatttcaatgggaaatgcaagaaaatgagaattatctggcccaagttactagaaatcacacagttaaatctaagtgcctatttgtgttccatgaaaaaactggaaataatccatatttgtatcataagttaaaatttatatctaactatgctaagttatcaattatctaaaatctaactttgagaatggttattaaggtcttcaaatactctttatgtatgtgttca

SEQ ID NO: 275755 - DNA, 579 bp, Homo sapiens
gtatactttaaaagggtaaattttatggtgtgtaaattacgtctctgtaaggctgttaaactaatttacaatatacgcagaaggttctaaagaggaatgtgatgcaggatttttccatagcagcatcaagttctatttaatgtcagccctcactcactaaatacatctccatatacatgrctgacaggtgacttaactgaacaataaacaagaaatgaaatctgtctaacatctagatcaataaaaacagaccttgaactagtcttttatcttggaaagcaattgcttaagcttaaaggctccaaaaagaaacctacaagacagaaacagccaactattgttcccatcctccaatttcaatgggaaatgcaagaaaatgagaattatctggcccaagttactagaaatcacacagttaaatctaagtgcctatttgtgttccatgaaaaaactggaaataatccatatttgtatcataagttaaaatttatatctaactatgctaagttatcaattatctaaaatctaactttgagaatggttattaaggtcttcaaatactctttatgtatgtgttca

SEQ ID NO: 275756 - DNA, 507 bp, Homo sapiens
aaacaaaaaatcttgtgcataccatttctggattatctattaagttcccttctatatttatacattcttatgcctctaccatgttaatatgatgaatatgattttatagtattttaaaaataatactgaaggtatttatggttataaatttcycttccacaccagatattgcctcctttcatggttttgctatgaggtacccacctattcatagctttctagagaaggcatacatttacttttcttctttggtataaggacaatctaagagtgagttttaaatttccaaatagataagatttgttttatactcacaaaacatgtaaatgatttgttgctaacttccttagattgtgagctgagaatgaagcctatagaatatctcattataacttttgttcaggcttcttaatggcagttacaagacagatttttgtaaatgttccacaaacgaaaattgttttaaggggatttgatatatagagtgagaagtatataaaagtatac

SEQ ID NO: 275757 - DNA, 553 bp, Homo sapiens
cagaagtaaaaacatttctctggggcaagaggaagatcccccttttctgaacatttttacagcgtttctctacttcagggtttctcctagactctgaagactaaatgtgttttatgaattataatctacaaatggaaacccactaaattccatccacttgtccatgcctcccattatttgatgacttggctgtaaaggaaagtagcctgagatttatacttttaaaaattttctttttctaattatttattaaaaaaaamaaaaaactgaaggctacatcacccagtcttccccagtcagcttcctatccaagggctaaccaggcctgaccctgcttagcttcagagataaggcatgttcagcatagtatggctgtaggcaaattttccattaggaaatatttgttctacctattatttcatctcttcctaaataaaaacaagcttaatggctaatatgcacatttctgttaatatcctctgcctaagtggggtgggatgtttattttacaaacctgaaagggaaatacagtcactcaggtcttgcccagtgt

SEQ ID NO: 275758 - DNA, 596 bp, Homo sapiens
ggtcttgcccagtgttttgtcaaaagaatagattcttcgagggatttgaaaagggaatcaaatacaacccactgaaactggaatracctcaacttcctcactgctcattaagaagctaagacgacagaaagcaggaaggtcaggaggagccacgatggcattttggcataattttcaactgtcttaaaaaagtatgatgaaattaaagtactgcaagaaataactgatatgcatttccaatttgtttcatctcatttcactctcaggccccattcctttaagattcctcccattaatattctccagttactctactcaaggttttatctgttgattttcctttgcctagataaagccaagaattgttgtgtgaattccttctagctagaattcaaagatgccaaatgaataattgtcccttagagagtttttagatccttataaaagatgaagcattgactacagtgaaagggaggaagaaaggaaaggagggagggaaggaagaaagaaggaaaggaagaatgaagggacattattctgtgatcttgcaagtcacttccccttttgtcatctcagtgttaccagtggagggtgtc

SEQ ID NO: 275759 - DNA, 596 bp, Homo sapiens
ggtcttgcccagtgttttgtcaaaagaatagattcttcgagggatttgaaaagggaatcaaatacaacccactgaaactggaatgacctcaacttcctcactgctcattaagaagctaagacgacagaaagcaggaaggtcaggaggagccaygatggcattttggcataattttcaactgtcttaaaaaagtatgatgaaattaaagtactgcaagaaataactgatatgcatttccaatttgtttcatctcatttcactctcaggccccattcctttaagattcctcccattaatattctccagttactctactcaaggttttatctgttgattttcctttgcctagataaagccaagaattgttgtgtgaattccttctagctagaattcaaagatgccaaatgaataattgtcccttagagagtttttagatccttataaaagatgaagcattgactacagtgaaagggaggaagaaaggaaaggagggagggaaggaagaaagaaggaaaggaagaatgaagggacattattctgtgatcttgcaagtcacttccccttttgtcatctcagtgttaccagtggagggtgtc

SEQ ID NO: 275760 - DNA, 596 bp, Homo sapiens
ggtcttgcccagtgttttgtcaaaagaatagattcttcgagggatttgaaaagggaatcaaatacaacccactgaaactggaatgacctcaacttcctcactgctcattaagaagctaagacgacagaaagcaggaaggtcaggaggagccacgatggcattttggcataattttcaactgtcttaaaaaagtatgatgaaattaaagtactgcaagaaataactgatatgcatttccaatttgtttcatctcatttcactctcaggccccattcctttaagattcctcccattaatattctccagttactctactcaaggttttatctgttgattttcctttgcctagataaagccaagaattgttgtgtgaattccttctagctagaattcaaagatgccaaatgaataattgtcccttagagagtttttagatccttataaaagatgaagcattgactacagtgaaagggaggaagaaaggaaaggagggarggaaggaagaaagaaggaaaggaagaatgaagggacattattctgtgatcttgcaagtcacttccccttttgtcatctcagtgttaccagtggagggtgtc

SEQ ID NO: 275761 - DNA, 559 bp, Homo sapiens
aatacctaatgtaggtgtcaggttgatgggtgcaccaaaccaccatggcacatgtatacctatgtaacaatactgcacattctgtacatgtatcccagaacttaaagtgtaataagaaaaaaaatagggacattatcctaattatmcagatgggtccaatggaaccacaggggttcttaaaactgggagagggaattagacaaaaaggaccagagaaatggcagcatgagaactgaacccactactgctgactttgaagatggaggaagaggccatgcgacagggaaggtgagcagcctctagaacccagaaacggcaagaaaacggattatcccctagagcctccagaaatgagttccattctgctgacaccttgattttatcccagggagatgagtcttgaacttttgaaccacaaactgcatgataataaatttttgtacctttgcagcactgaaaaaaaaaaaagttctacatattgaatgtgtgaatgtcaatattctaggtgtggattttatactatagattttcaagttgttaccactgggagaaactgggt

SEQ ID NO: 275762 - DNA, 559 bp, Homo sapiens
aatacctaatgtaggtgtcaggttgatgggtgcaccaaaccaccatggcacatgtatacctatgtaacaatactgcacattctgtacatgtatcccagaacttaaagtgtaataagaaaaaaaatagggacattatcctaattatacagatgggtccaatggaaccacaggggttcttaaaactgggagagggaattagacaaaaaggaccagagaaatggcagcatgagaactgaacccactactgctgactttgaagatggaggaagaggccatgcgacagggaaggtgagcagcctctagaacccagaaacggcaagaaaacggattatcccctagagcctccagaaatgagttccattctgctgacaccttgattttatcccagggagatgagtcttgaacttttgaaccacaaactgcatgatartaaatttttgtacctttgcagcactgaaaaaaaaaaaagttctacatattgaatgtgtgaatgtcaatattctaggtgtggattttatactatagattttcaagttgttaccactgggagaaactgggt

SEQ ID NO: 275763 - DNA, 446 bp, Homo sapiens
gtgctgtttcttacagcttcctgtgagtctaaaattatctcaaaataaaacatttaatttgaaaagaaaaagaaaaaaatacaagaacagaattcaaagctgaaagacaatgtaaaaaggattaaaatttatgtacttgagtaatttatgtaactgagaagaaatgtctgaatagcctagaatgttccaaaaattaatgatggacagcaaaccatagatccaagaagctcagaaaccatcaagcattagaatacacaaagcaaacaagtaaggaaacaaatactaggcatattcaaactgcggaaaaccaaagatccaaagacaaacaggaaaactgaaaaaatatattacatataggaayattgacaagagttagaggagcctacttttgggatgctctgcaaaccagaaaacaatgaaatgatatctttagagtgctgggggaa

SEQ ID NO: 275764 - DNA, 563 bp, Homo sapiens
ggaccaatgaaagcaaatagagtccagaaatagaccaacacatatatggccaattgatttttaacaaaggtgcaaagccgattaattttcaacaagtgttactagaacaattggatatacatatgcaagaaaatgatctagattcatactttatgcaaaaaycgattcaaaatggaccatagacttaaatataagtactaaaactatataatttccagaagaaaacaaagagaaaaatatttgtgatcatggcttaggcaaagatttcttagcttaaaattttcaaaacatgatctataagggaaaggatggatacattgaattttatcaaaattaagtactgtttgttggaataaattgctgagaaaatgaaaataaaagccaaaggttgagcagcaatatttgtaaatcacatctctagtcaagggtttgtatccagaatatgtaagattctccaactcaatgaaactctcaaaatttaataggaaaagagacagtccaataaaactgtgccaaatatgtgaacagacacatcccacatagacagcaagtcagtatataaa

SEQ ID NO: 275765 - DNA, 644 bp, Homo sapiens
taaactcacatatacctgctggtggaaatggaaatggtgcagacacactggaaaagtttggcaaattcttaagaagttaaacatatacttactgtatgacccagcaatctcactgctttgcatttactcaagtgaaatgaaaactacatcctcacgaaaatatgcacatgaatgtttgcagcagctttatctgtcatcaccaggaactaaaaactacccaaatgtttctcaactggagaatggataaacaaactggtacattccatacaataaaatccttactcagcaataaaaagaaacaaactactgttttgcacaacagcatgaatggatctcacatgcattatgctagctgaaagaagcaggataccaagggctacctactccatgactcagtttatacgacattcttaagaaagccaaactacaggaagaaaaacagattagtggttgccaagggctgcggtttgaagaggggatggttacaaaagaggcatgggggaattttaggggccgmtggcactgttgtgtatcttgattgtggtggtggttacataactgtatttcaaaattctaagaactgtgtgcttaaaagggtgaaatttactatatgtcaattgtacctcaatataaatggaaaataa

SEQ ID NO: 275766 - DNA, 518 bp, Homo sapiens
tcttggcttcacctttactcttgagcttggtaagcaacactgataatgataacatcatgatcaatcagcttgattgatgaattcctctgggactccccactttccatctctgacccctgctcaactttaagaacagtctcttagaaacacagaaaactttcctatgtacttttaagtaaattggcaaatgacagggtgtggtggctcacgcctgtaatcccaacactttgggaggccaaggcgagtggatcacttgaggccaggagttcgagaccagcctggccaatgtggcaaaaccctgtctctactaaaaatacaaaaattagctgggtgtggtgctggtgtgcgcctataatcccagctactcaggaggctgaggcaagagaatcacttaaacccaggaggcggaggttgcagtgacacaagatcatgccactgtactccaacctgggcracagggcgagacagaaaagtggacttttcaatgctccttttatgagacttcctgttggatgggc

SEQ ID NO: 275767 - DNA, 635 bp, Homo sapiens
taacaagctctaatacaatttaaatggaaataggaaattatggaagtattagatataatttcttccactataaaaaatttatggtagctaataatgtcaaatgggtttcctctaagtcaccttacaataaactgagtatggaacactaggagaaaaacatactagtggcaaagatcactgtggatacatgagctgtggtcccagttctgtcacgaacttcttgtgggaccttgagaaaattacttatctattgycaatatccttggattttgaaggagaagatttaaaaataataatccttagggccatttctaactataacacctatgattttgtgacttcattttgaaatttagttaatcaaatgccattcattcaaagatgagtaaggctataagcactggctacatgctgaaattgcttagatctgagcacgaaatatttgtgtcttgcccaacatcaatgcacctgcaatgcaacacggaggcgaggtctggaaggtgtcaggtttgtcttgttactgcagccaattttggctactgaagttgtgagttggtactcggtagtcagcattaaaaccagggtgataaataccaaatcttcactttatttgatggcatatgtgtacaacctac

SEQ ID NO: 275768 - DNA, 268 bp, Homo sapiens
tgggagagcattaggacaaatgcttaatgcatgtggagcttaaaacytaaatgacaggttgatggttgcagcaaaccaccacggcacacgtatactgatgtaacaaatgttcacattcagcacatgtattccagagcttaaagtaaaataaaaaataaaaagcagaatgtgaaaaaaagcaaagaagtcaaaatttttcagctaagttaatgaggtcaatgtaaccctcataccaaaataattgaaaaaacattatgaaaaaatatat

SEQ ID NO: 275769 - DNA, 566 bp, Homo sapiens
catttggacaaaattcattccatgtccaagcaacaaccaacacttcctttccacttccaattgtttggctagctttactttattttcaaacctcacgttatgaacactttccacaatcccattgctgttgcatttagttggacattgyggggtaaatagttctgctaaaacatctcaaagctatgcacaaacattgtgaatcatcgactaagataaagtatgctgctttcacagagccattaatgccaacagggttgaaatccccacatctgcagcatggcttggttcctgtctgtgagtgcttttagattggaaattcttaagcaaagcactttatgtatatccaaagacatctgaggatctttgaaaaaaattatatttatagatataatgtaactttcatggccaaacctaattgctgaagatttattttttagcttataataataatcatctctgtcttcccaacctctgtgaggaaaacagcaaagtctatagaaaactaaccagaatcagagcaagaaagactgtccctgcctgctgcctttttctccctctttttgtga

SEQ ID NO: 275770 - DNA, 472 bp, Homo sapiens
agagaaaactttttttagaaaaaggcacacacatacacataaatacacacagaaacactagaaagataaattgcgatatgaccaacagcaaaaataacctctttactatttgctgaatatttgtgatattaattaaattacctctaccatgaaccgtatcttttccttcaaaaacaaatttacaaggtaataggaatattaattaagcttcgaaattgaagtggatgtttcatgtaatctacccatgaatttcaaattcaaagacactacttcttggccatggatgtaaagagaattagcattcagaacaacggtttcaagtaatcaagctggtcaatacctggtaagaggtcaatatctggtacaaaggaaattttgaagaaattggagcaggaacaattgttccttcttaaaaagatgaggtgtttytaaagcctaactagaaattagaatgccaattcaaacaaaaatg

SEQ ID NO: 275771 - DNA, 571 bp, Homo sapiens
tccagccagccagagagggaaacagagaacacagggtacaaaaacaacaacataggactctaaaatcagggatctgtccactccagcaagaatctttccaggcaatcaaaggggataacacagttcctaattttagaggtggggaaactgagactcagtgatgagaaaggacctgcctgagcccatcaggggaagagtgaagtcagaacacagagttttcccgagcccagactgcattttcctgtccaaaataagtggaggcaaatgtggcagtggatggggcttggaggttggggtaagatggccttttctgcacctgtcaactgagtttcaaagccaaagtgttagtgctcatcacccaccctccccactttagcccctttgggatgctataacaaaatgccatggactgagtaatttataaacaacagtgatttgttgcttacagttgtggagactgaagagtcccagattaagrtgacagcagatccagtatctggcgaaggcccgctttccagttcatagacgtcatctcctgtgtgtcctcacgtggtgaaagaggcaaacaaga

SEQ ID NO: 275772 - DNA, 538 bp, Homo sapiens
tatgagacctgcagagttgatagaatcgcagctaaaacaaagacatttgacattttagttattcatgcagccttgctcagggcacatgtacaatgatcattaagctgtttgaaatagtgatattccagcacttgtgaaaagaatatactagtgcccaccaatccaacattgtgtcccaggagaactcaggaacaggtgggtgaatgcaattccagctacacttgttcgactgcaggaaaaccctacaggttgctgggctgcagtgggggaggtaggtctttgctcttgaggggttcctgatctgtgagccaagccattttttaaactgactgctctttgtagcgggtggataagaggcaaggactaaacagggctaccttaagataacactctaaggatgtcatcatgattcttagggactgtgcatcrcaccttattcagtactcaaagcccaggtatttgccctgcccaggactgctcatggatcataccagttgttcctggggcagagtgatgaggatcttatatcactgggcat

SEQ ID NO: 275773 - DNA, 536 bp, Homo sapiens
gtgatgatatggaaaacagtgaagcagaaggagtggaggggaaccattggggggagtgggagaggctgacgtttcaaacatactggctggggacattctggggaggtggcgatgtgggcaagacaagaatgaggccagggagtggtcacaggctggctcaaggaagagcagttgaggctgtgatagttaattttaggtgtcaacttgactgggctaagacagatagctgataaaacgtgatttctgggtgcgtctgtgaggatgtttccagaaaaaattagcatatcaatcaatagagtgagtaaagaagacctgccctcaccaatgtgggcatcatcctgttgctggcctaaatagcacaaaaaggcggaagaggccaggtgcagtggctcactcctgtaatcccaggactttggaaggcccagrtggggggatcacttgaggccagcttgggcaacatagcaagatcttgcctctacccaaaaaaaaaaaaaaaaaaaaaaaaaaaaagcccaggcatggtggcatgtgcctgg

SEQ ID NO: 275774 - DNA, 574 bp, Homo sapiens
cttgttcctgaacaacagaggagaaacaatcaggcttttatgattaggtatgatattagcagcaggttttttcataggtgatcttttgtcaggttgaggaagttcctttcaattactagttttctgatagctcttcattatgaatgaatgttgaatttattaaacaactttttctacatcaattaatatgattatataatttttctgtagcctattaatatggtagattaccttgattaattttcagatattgaagcagccttgtacctctggaataaattscacttggtcacagtgtataattcattttatagattgctgaattgttgaattcaaaatatttgctaatattttgtcaagaattcttgtatctatatgtttatgaaggacattagtttgtagtatttttttttgtcgttgactttttattagggcaatacaagcttcattaaatgataaggagagtgttccctcctcttctattttctgaaagagactgtgaagaaatggtattgattctcccttaaacattagtagatggcacatggaatacagaaataccagccacctgcct

SEQ ID NO: 275775 - DNA, 574 bp, Homo sapiens
cttgttcctgaacaacagaggagaaacaatcaggcttttatgattaggtatgatattagcagcaggttttttcataggtgatcttttgtcaggttgaggaagttcctttcaattactagttttctgatagctcttcattatgaatgaatgttgaatttattaaacaactttttctacatcaattaatatgattatataatttttctgtagcctattaatatggtagattaccttgattaattttcagatattgaagcagccttgtacctctggaataaattccacttggtcacagtgtataattcattttatagattgctgaattgttgaattcaaaatatttgctaatattttgtcaagaattcttgtatctatatgtttatgaaggacattagtttgtagtatktttttttgtcgttgactttttattagggcaatacaagcttcattaaatgataaggagagtgttccctcctcttctattttctgaaagagactgtgaagaaatggtattgattctcccttaaacattagtagatggcacatggaatacagaaataccagccacctgcct

SEQ ID NO: 275776 - DNA, 582 bp, Homo sapiens
gacaaatacaatgtttatggtgtttaaaaaatccaatcagtgcaagtaaaagtaaagggtgaatgttagttactcagaaatrggaccacaaagttatcacagatagttctttataatttccagcttactgagctacttttgaagacaagtaaactcacagattgtcataaatggggctattaaagtaaaacagaaaacatgttggtgtaaatgttgtgtgcagttttggctgccacaacttgaaaaagaaaaatgcaattgtaacaataggtgttgtagaagaggagggaagcctgaagtgtgtggtaagattaagaatttgggattcttcattgtaaaaatataagtttttttttttaatggtctttaaatatctgacaggcaaatcccaaaatactgagagtagaaaagcttagagtacatgacaaaacttcctatttcctacattaagtccctctatcatttattttgtaataaagaatcatacaaggcaaatatatatatatatttacatatgtaaaatgtctattcacatacacacatgtaaacatatgcatgtatccatgcatgtgtacatattta

SEQ ID NO: 275777 - DNA, 582 bp, Homo sapiens
gacaaatacaatgtttatggtgtttaaaaaatccaatcagtgcaagtaaaagtaaagggtgaatgttagttactcagaaataggaccacaaagttatcacagatagttctttataatttccagcttactgagctacttttgaagacaagtaaactyacagattgtcataaatggggctattaaagtaaaacagaaaacatgttggtgtaaatgttgtgtgcagttttggctgccacaacttgaaaaagaaaaatgcaattgtaacaataggtgttgtagaagaggagggaagcctgaagtgtgtggtaagattaagaatttgggattcttcattgtaaaaatataagtttttttttttaatggtctttaaatatctgacaggcaaatcccaaaatactgagagtagaaaagcttagagtacatgacaaaacttcctatttcctacattaagtccctctatcatttattttgtaataaagaatcatacaaggcaaatatatatatatatttacatatgtaaaatgtctattcacatacacacatgtaaacatatgcatgtatccatgcatgtgtacatattta

SEQ ID NO: 275778 - DNA, 554 bp, Homo sapiens
agatcacagaataatttatctacttagaatattcatgttttgttttcctaagcatagttttatttctggcctaaatactcttcaaaattttaagaagacaattgcatgcaaattaatcacaccactccaagagtcaggatagctgagggattaagcatacagtcagagcgcatgcattcgcatcttgacactggcactttcaaactgagaaagttactttatctccrtgttcactggagtcttcttttattaaaatagtaataatattatcatctagttaatagagttaccaggaagattaaaaaatatggccgggcgcggtggctcacacctgtaatcccagcactttggggggcccaggcaggcggatcacgaggtcaggagatcgagaccatcctggctaacacggtgaaaccccgtctctactaaaaatacaaaaaattagccgggtgtggtggcaggcacctgtagtcccagctactccagaggctgaggcaggagaatggcatgaacccagggggcggagcttgcaatgagcggacatcggccactgc

SEQ ID NO: 275779 - DNA, 604 bp, Homo sapiens
actgatattttttccctagattttcttcataggcattaactcaacatgtttaaaaagaaaaaaaaaaagataaaaaaggacccagatggtttgtccayaaatcagctttcttgttttaataactaatctattacaagataaagtgagatatgcaaagcctcactctatacctagtactcagggggccttcagtatatattagctctcttcccattaagaatgtctcatcttgggcttgtaaaactctaaaggtcaaccatctcttgctctgataagcaccttccttccttaatcttcccagagtcctttttccccttcatattgcccactgtttcacaaacagaccacctatcaaaggtttttattacagcttccagcttcactcccacttacatactgcaagacctgcctcttcttaacattgtttaaaacatgacacttgcctgttcaaaaacttttactcattaacagaatccagttcagacaaaacctacccttgcaagctcaccttctctcaccttttagtcacattggtctacttactgtccttccaaatgaattttaccatttcctgtctctactgcttgactcagattctttttct

SEQ ID NO: 275780 - DNA, 604 bp, Homo sapiens
actgatattttttccctagattttcttcataggcattaactcaacatgtttaaaaagaaaaaaaaaaagataaaaaaggacccagatggtttgtccataaatcagctttcttgttttaataactaatctattacaagataaagtgagatatgcaaagcctcactctatacctagtactcagggggccttcagtatatattagctctcttcccattaagaatgtctcatcttgggcttgtaaaactctaaaggtcaaccatctcttgctctgataagcaccttccttccttaatcttcccagagtcctttttccccttcatattgcccrctgtttcacaaacagaccacctatcaaaggtttttattacagcttccagcttcactcccacttacatactgcaagacctgcctcttcttaacattgtttaaaacatgacacttgcctgttcaaaaacttttactcattaacagaatccagttcagacaaaacctacccttgcaagctcaccttctctcaccttttagtcacattggtctacttactgtccttccaaatgaattttaccatttcctgtctctactgcttgactcagattctttttct

SEQ ID NO: 275781 - DNA, 577 bp, Homo sapiens
attttctttgtttacatgttcattctataagttttttccattttaaaaatttcaatttttaaaaaactttaaacttttttgtttaaaaactaagacacaaacatacacattagcctargcctacacaggatcaggattgtcggtatcactgtcttccatctccacaatttgtctcactggaagctctactagggcaagcatagagctgtcatctcctatgacaataatgacttcttctggaataccacctgaaggatctgtctgagactgttttagagttaaccttttttaatatgtaggagtacgctctaaaataaagataaaaggtatagtatagtaaatatacaaaccagccacagtcgtttgttatcattatcaagtattaatgtgctgcacataattgcatgtgttatacttttaccccattggcagcacagtaggtttgtttataccagcatcacaaacgtgagaaatgcaatgtgtgacaacattatgatgataggaaatttccagctccattataatcttatgggaccacaatgtatatgtgatctatcactgaccaaaacatttttat

SEQ ID NO: 275782 - DNA, 577 bp, Homo sapiens
attttctttgtttacatgttcattctataagttttttccattttaaaaatttcaatttttaaaaaactttaaacttttttgtttaaaaactaagacacaaacatacacattagcctaggcctacacaggatcaggattgtcggtatcactgtcttccayctccacaatttgtctcactggaagctctactagggcaagcatagagctgtcatctcctatgacaataatgacttcttctggaataccacctgaaggatctgtctgagactgttttagagttaaccttttttaatatgtaggagtacgctctaaaataaagataaaaggtatagtatagtaaatatacaaaccagccacagtcgtttgttatcattatcaagtattaatgtgctgcacataattgcatgtgttatacttttaccccattggcagcacagtaggtttgtttataccagcatcacaaacgtgagaaatgcaatgtgtgacaacattatgatgataggaaatttccagctccattataatcttatgggaccacaatgtatatgtgatctatcactgaccaaaacatttttat

SEQ ID NO: 275783 - DNA, 602 bp, Homo sapiens
aaccaattgaatgccataggtattattactactgataattatagttcagaagactaaggcagaaagcagtaaagcagcttgaggccacacaattaataaacagaagtgtcagaaatcataccatggcagccttaactagtatgcttcctctcaaacactaaaagtrttcactaatttaaagtgaaagttttcttcagtaaatatatttgaagaatcagcattccctaactatgaaaagaaattggaataaattccagagttaaaaaataaaataagttaccaaataatatatttattcaagaaaaccaattaaagtgaagaagattcacaaaagtgaaaattgagacagtgtgtgtcaaccctctcattttaatgattaaaaaatgaactaccaaagaggtttaattaatttgcttaagtcatataggtacataaaggcagagcaagataaccacacatatgttagtatttctagtccagcgaccatactcctgtaccatcattcagaattttaaatcctcacctttctctaattcaatttattgcctgagaaggcagagtatggcatataccttcaaagttaattgttgaattattaacaa

SEQ ID NO: 275784 - DNA, 554 bp, Homo sapiens
aaaagtgaaaattgagacagtgtgtgtcaaccctctcattttaatgattaaaaaatgaactaccaaagaggtttaattaatttgcttaagtcatataggtacataaaggcagagcaagataaccacacatatgttagtatttctagtccagcgaccatactcctgtaccatcattcagaattttaaatcctcacctttctctaattcaatttattgcctgagaaggcagagtatggcatataccttcaaagttaattgttgaattattaacaaatagccatctgcccttgctaatctagtaaacatactgaagaatttattgaaaaggcttgttgctgtgatgtataccatatgtgaaatacaaacaaatgtaaaatgagagcaaacttatatcccttgactggaaaagaagactgttattacataaaaatgacaactgctatatcaagaccaattataccaaccagtttatggcttactctaaagccggatttaaggagaaacagtaactactaacattccattttagacytacgtaatactctagccaagga

SEQ ID NO: 275785 - DNA, 624 bp, Homo sapiens
ctactgagctacgtattgcttttgcaccatcacaaagtaaaaaaaaaaaaaaaaaacataaatcaaaccattgtaagtcagggaatatctgtagttcaccacatgtgtgaaagacaagtcaaatggacagcaagaaaaggaaattcagtaggttttatcaagcatttacaatgtgcaaagccctaggccaggtactgggaatacaggaataaattcacactcaaggtgacccaaggaagctaccgcctgggataaaaccccactactgccccattatcagccttgaagagttttatggtatgaatattgaactgctttgggggaataatctcttcctctgataaggatatttarataaggagtttttccccttatctaaatatattctaggcgtttacactgaattcgggggattcagtagagaaggaaacagagttctcatggagcctacattgcaccatcatggcaactctgcatgacaacaccctaagaccagctccacccaccagagaataatcctagatgacctattaaagtcccctgcactctattatcctatgatttttctgtaactctcttggcctctttgcttctttcctctcctaaatttcatgcagcatatga

SEQ ID NO: 275786 - DNA, 322 bp, Homo sapiens
cttacgataatctaatgcctaatgatctgaagtgggacagtttcatcactacctccccacccaccccccragcccccacgggtctgtggaaaaattgccttccaagaaactggtccctggtgcaaaaaaagtttgggtaccactgctctaggggaagcaagttgccctgttttgagctgccctatggggagacctacttggcatggaataggtgtcccaggccagcagccagcagggatctgagccctgccaaaagccagatgagcaaacttggaagcagatccttcctgtcgggcttgagaccattctcaccccagccaac

SEQ ID NO: 275787 - DNA, 838 bp, Homo sapiens
cttacgataatctaatgcctaatgatctgaagtgggacagtttcatcactacctccccacccaccccccaagcccccaygggtctgtggaaaaattgccttccaagaaactggtccctggtgcaaaaaaagtttgggtaccactgctctaggggaagcaagttgccctgttttgagctgccctatggggagacctacttggcatggaataggtgtcccaggccagcagccagcagggatctgagccctgccaaaagccagatgagcaaacttggaagcagatccttcctgtcgggcttgagaccattctcaccccagccaacwaattccatgatttttttaaatgtaatatcattacttcttgggctgcagacctttattctgataaaagtgattacatttcagttgcgtggtactgctttatgtaatattctccctgtcattttctagtttttcttgcaaaatcctgaatttctgccattgaagcaccactttagattaacagctttcattggcatctcttaaaaaattgacccaattaaaaaaawacacagacctaaactcaagaattattactttcctaggatttcttccagacttttattttctccggctctccattcaaagtaaattgtttgctttttgtaaaatggccaggaatctacatgaataaattaaacctaactgtgggatgtcagaggatatttaactcaaacggactcgaatgaagagttagagttagtatttatagtatgttagaagagacatttgaagttaaaagattttactggttagcttcccccactgaatagttgtgtagctcttcctgaacttcagtt

SEQ ID NO: 275788 - DNA, 558 bp, Homo sapiens
acatgcatacatatataatgagtttatatgtatacaaactcatttagatttataagattttattaactgctacatacatactgtcattttttgaggataaagaagaaatagccttctagaaaataagctttttaaaaggggcttatattttgaatttagaaacatggcttctgctgtgtggattggtaggtcagtcttgtcccatctttcaatctggctctcaataccagctccccacattccccagatgtcaccgttcattgttacagatgttggacactctatttgctttgcactggatgagmcttgattgtccagctttcagatagaaggtgaattttcttcatctcccatttgtagtctgtaataatatacttccaccactcatctttaagtgtcaattgcttctgtgcaaggacatttgtgaattgtggaatttgaaatatttattttatggccttaaataattattctattcttagtctctaaaaaatctcaaataaaggttgaagattctccggagttgctgctctagatttttcttgttttgttttgttt

SEQ ID NO: 275789 - DNA, 566 bp, Homo sapiens
aagtgaggagcacatttttgagaaaggggaggtaagaagaatccagtcacgaaaaagaagaaacatttttgttttgggggagggaacatcaggatatttctatttttgttgcttgtcccataggaatgtgtaagttggagtattttaattacataaaagtagatcaatatcttcaagatgtctgtttgtgttctgaagagaaagaatcgcgctgcaaacaagcacagcatgcctttccatctgaggaagccagatttaagtaggaaaacagggtctctaactcagttacrtctaatacaagctgtgcaatcaccttgagtaccagtcttcttactgagaaatacaattgctgtgaggattaaaataaatcatattcagaaaacttcttaaatccctgacctcttttaatgaccagaaatacccatacattttactctttgttaagctatgtttgcatcctcctccaacactaaaaagagagaaattgaaagtaggttcatttgttaacagaaaaattgaaattctgggtgtgttttcgtccaagtacgctagaatggtaaggcctg

SEQ ID NO: 275790 - DNA, 560 bp, Homo sapiens
gcattctggccctgattttttcctcttgtcctgtctgcacagtctgccatatgctggccatgtccacacaggctggcttccctcatggacagaagttgcctgccagaaatctccaggaccacatgcttccttagtcatccaggagaaaagaaatattctgtattccttttagttttctccaaaaatgagaagtattttccaataaattgctagcaaaactgtcctgagagattactggccagaatttaatcatatgaccattccgaaacttattactagaataccattggatcaacaaggccaatccctttgtcagttctccaaatggatactaggaagtcaaatatycactgaaagtgcatacgcatgttagagaatagttttaagtgaaaccacatttgtaaaataccaagtatagtggctggcataaaataagagttcaacacacagtattttgctaggatatgggaatagcaatggtggtggaatttattcactatcccttgaactgtattttccatctaatttctgggttgttatttgcaaaccttcaattgtct

SEQ ID NO: 275791 - DNA, 552 bp, Homo sapiens
gttgtcaaaattgacattgtaatagggaagctatgacttcaaagcttaccaaatggaaatgaagaagagaactggacaggaagccagaatgagtaacatgctaaaattacaagatgaccaagaagagatactgttaaaacattagaaataagaaaaacaaacttaattatattaacyaaagttgaaatttaactgagaaaacacaagatatagtgacaatgattaaaaatgtgaaatagaggaaaaatgaaagtatgagccacattctcacctttcaaagcagaaagtcaataaataatgaataaagttggttaataaaaaaaagtggtatgtgatctaatacttatagatatgagggtaaccctcctgactgccacaggatagatcacatattattagaattttgcctttgggcaaattgagggttgaagggcatttcctaataaaggtttctattgtattttgtctttttctcatgtattattttgttttttaaaatgcctaatagttactctctatttgatttgggtatgctgtagccaaatagatgtg

SEQ ID NO: 275792 - DNA, 552 bp, Homo sapiens
gttgtcaaaattgacattgtaatagggaagctatgacttcaaagcttaccaaatggaaatgaagaagagaactggacaggaagccagaatgagtaacatgctaaaattacaagatgaccaagaagagatactgttaaaacattagaaataagaaaaacaaacttaattatattaaccaaagttgaaatttaactgagaaaacacaagatatagtgacratgattaaaaatgtgaaatagaggaaaaatgaaagtatgagccacattctcacctttcaaagcagaaagtcaataaataatgaataaagttggttaataaaaaaaagtggtatgtgatctaatacttatagatatgagggtaaccctcctgactgccacaggatagatcacatattattagaattttgcctttgggcaaattgagggttgaagggcatttcctaataaaggtttctattgtattttgtctttttctcatgtattattttgttttttaaaatgcctaatagttactctctatttgatttgggtatgctgtagccaaatagatgtg

SEQ ID NO: 275793 - DNA, 552 bp, Homo sapiens
gttgtcaaaattgacattgtaatagggaagctatgacttcaaagcttaccaaatggaaatgaagaagagaactggacaggaagccagaatgagtaacatgctaaaattacaagatgaccaagaagagatactgttaaaacattagaaataagaaaaacaaacttaattatattaaccaaagttgaaatttaactgagaaaacacaagatatagtgacaatgattaaaaatgtgaaatagaggaaaaatgaaagtatgagccacattctcacctttcaaagcagaaagtcaataaataatgaataaagttggttaataaaaaaaagtggtatgtgatctaatacttatagatatgagggtaaccctcctgactgccacaggatagatcacatattattagaattttgcctttgggcaaattgagggttgaagggcatttcctaataaaggtttctattgtattttgtctttttctcatgtattattttgttttttaaaatgcctaatagttaytctctatttgatttgggtatgctgtagccaaatagatgtg

SEQ ID NO: 275794 - DNA, 439 bp, Homo sapiens
caaatctcatgtccttcatacattgcaaagtacaatcttcctctctcaayagtcccccaagtcttaactcatttcagcattaacttaaaagtccaaaatccaaagtcccattcaagataagacaagtcccttacacctatgagacagtaaaattaaaaataaatttgttacttgcaagatttaatgaggatacaggcatcgggtaaatacaactgttccaaaagggagagactgaacaaaacaaaggagctacaagcccccatgcaattcccaacccagtagggcagtcgttaaatcttaaagctccaaaataatctcctttgactccatgtgtcacatccaggcaacaccgagataaggggttgggtcccaaggccttgagaagcttcaccccggtggctctgcaaggctcaagtcccttggctactctcaagggctg

SEQ ID NO: 275795 - DNA, 615 bp, Homo sapiens
aaaaactatctattgggtggtatgctcactatctgggtgcaatatactcatgtaacaaagcggaaccccctatatttcagatataggacccactatatctaaaaaaaaaattgaaataaaaaaatgaaattgttgacttaaaagtaggatagagtcatcaaataaaccaaagccaacatgtagaagaataaaacatagaaatataggaaatcacacctttagcagagttaaaggcataacaaaaattacaactttggggaattcttgtttttagtcagtattattatttaaaaatgtattacartgtgagtaaagcagctaagctacaaagctttaaacatgcattttgattatgaggcttataatcttgtagttaagagtctccatagaaaaacataatggatctatctatggtagatctttgcaataggcagctattcagtcttcacataaacattttcaatatacacagaaccacataaaacaaatataaaacttaaaaaatatagaaaaaagaaagtgtttacccttgtaactgccacctaagttaagaaataaaactatgctagacgtgtctaaacctgttccatgtggtccatccctatcacagcccca

SEQ ID NO: 275796 - DNA, 1241 bp, Homo sapiens
cattatattttaaatgaaactgcaaagtctaaagcacttgataactagttctatttcctaataggrtatacatatgtgtatactttttctagaggattcatacagacacacaaatgtacatacacaatagactggattgttcattttaggaacttcaaattgctattacctgcaatttgttttgcttttagtggactgcttctgtttattttattgaataaatacgtactctaatataagtaaaaacaaaacatttaattattatattaccaatattgatagtataatagtattttaaaaatatatatgtgggttgcatagagactggaagataaaatccaaatattagcaatgaaaggtgaagctacagataattattttgtcttacagatttttgtcattgtgcatatccaatatttttacattgagtatattttgctttaaaaaatattcagagcaatatttactgtttttttgttttgttttgttttttacaaactctcaaaaaagcagcccaaaactaagcaagagaagaaggaagaatacatttttaaaaagaaagtagagactttttatgaagaagggattaggcaatgggatcaaattctgcaaataatttawcattatattttaaatgaaactgcaaagtctaaagcacttgataactagttctatttcctaataggatatacatatgtgtatactttttctagaggattcatacagacacacaaatgtacatacacaatagactggattgttcattttaggaacttcaaattgctattacctgcaatttgttttgcttttagtggactgcttctgtttattttattgaataaatacgtactctaatataagtaaaaacaaaacatttaattattatattaccawtattgatagtataatagtattttaaaaatatatatgtgggttgcatagagactggaagataaaatccaaatattagcaatgaaaggtgaagctacagataattattttgtcttacagatttttgtcattgtgcatatccaatatttttacattgagtatattttgctttaaaaaatattcagagcaatatttactgtttttttgttttgttttgttttttacaaactctcaaaaaagcagcccaaaactaagcaagagaagaaggaagaatacatttttaaaaagaaagtagagactttttatgaagaagggattaggcaatgggatcaaattctgcaaataattta

SEQ ID NO: 275797 - DNA, 568 bp, Homo sapiens
atttgtttatatccatgagatggaattagctaactaaatttgaaataagatatatttttataattaatttatttttgtaacattaaatattacaatgcaaacagttctctgtaactaactgaactattctttcagcttttgatgagaccacaaatcatttgcttcctcttcctctacctgaacagaaagacatcttcaaagttaggagggaagtccttatttatatktatctaatttgcagcttttctacttgtatattacagtctgattctttcagaaaaattcctcaaaaaatttcaacttcctatataatagcattttcaaaatttattttcacattttgctctatttttactcttaatattaatactttaatattagtattaatagtaatattagaataagcactatgaatatttcttataaaactccccttcagttaattagatggcattacactttcttttctctaaattcctcctccttcaattcactgcctacatttcagatgttatctgacttttatttttactataataactctttccctgccaagtcatgtccccat

SEQ ID NO: 275798 - DNA, 537 bp, Homo sapiens
aactaatcaagcaatatcacacttgstaacagatcatttgtattatttagaactgaaaattataaacgtgtaataccatatgcctttactatttaaaaaggaaaaatatatgctttatggaaatacaagtgtagatacctagaaatctctagagtgcacatttatgggcaggacacctgcatttacatatgagtgaagctgtgagttgtgtcagccagagttcaaggcacacgagcttttctcacactgacatgttctaaagccaaatgatgcttccgccagctgagagtaccttttttgcttaatcatgcaagatgaggagtagcctcttaataaggataaagaaaacttggaatcaaactgaaataattaagcatatttacatatttactacacaaatccttcatattttgttgagtttacataatcaagactgaaaatctcagaacagcattctctgaattttctattttcaatttcagaagtttctagtaacaattctatgtaaataataaatagatcaaaatgccaaaggaa

SEQ ID NO: 275799 - DNA, 537 bp, Homo sapiens
aactaatcaagcaatatcacacttggtaacagatcatttgtattatttagaactgaaaattataaacgtgtaataccatatgcctttactatttaaaaaggaaaaatatatgctttatggaaatacaagtgtagatacctagaaatctctagagtgcacatttatgggcaggacacctgcatttacatatgagtgaagctgtgagttgtgtcagccagagttcaaggcacacgagcttttctcacactgacatgttctaaagccaaatgatgcttccgccagctgagagtaccttttttgcttaatcatgcaagatgaggagtagcctcttaataaggataaagaaaacttggaatcaaactgaaataattaagcatatttacatatttactacacaaatccttcatattttgttgagtttacataatcaagactgaaaatctcagaacagcattctctgaattttctrttttcaatttcagaagtttctagtaacaattctatgtaaataataaatagatcaaaatgccaaaggaa

SEQ ID NO: 275800 - DNA, 1055 bp, Homo sapiens
gaggatgctctctagatgaaaaatggacctcagaatttagacaagtatctactctgaccaaatgatcaacagttcaatagttcactatgataaatattttcccagatggaaaaaaaggaatcatttaatgcttatatgcttcagcctcattcactggagctgtttctgaatggcgcttactcagacggaggctccaactttctggattcacacttctacttatgttccacttcctcatccataacatttttaatcttctctagtgttagagaaaaatgattttctaagaagatgactggatttcattttcttatgcttagcctttggctttaactatatataaaattattttgttttgttttgtcttgctttcagattcttttgctttcttattatacagctgaaaacttagatccagttgtttgctttggascattctgtcttcttaagccctcattacatgatwtaatattccttcaaggccctttcctttgtatatacatcttggctcactgttttgcgcaacaagcctacctattagcttttctcagcttgtgacatgttttccttaataaatgtgtcatttctagcttttggttgaaagtgagggatgtgcaactcttctttwtatttgaatgctaagaggctgttttaggattactaattagtatggtttggctgtgtctccacccaaatctcatcttgaatacccatgtgttgtgggagggacctggggaggtaattgaatcatgggggcaagtctttctcatgctgttctcatgatagtgaataagtctcatgagatttgatggttttaaaaagaggagttctcttgcctgctggcatctgtgtaagacaagacttgctcttccttgactttttccatgattgtgaggcttccccagccatgtggaactataagtccaattaaacctctttcttttgtaaattgtctagtcccaggtatatctttattagaagcatgaaaacagactaatacagtaagtcggtaccagtagagcggggcattgctgaaaagatacccaaaaatgtgg

SEQ ID NO: 275801 - DNA, 439 bp, Homo sapiens
caaatctcatgtccttcatacattgcaaagtacaatcttcctctctcaatagtcccccaagtcttaactcatttcagcattaacttaaaagtccaaaatccaaagtcccattcaagataagacaagtcccttacacctatgagacagtaaaattaaaaataaatttgttacttgcaagatttaatgaggatacaggcatcgggtaaatacaactgttccaaaagggagagactgaacaaaacaaaggagctacaagcccccatgcaattcccaacccagtagggcagtcgttaaatcttaaagctccaaaataatctcctttgactccatgtgtcacatccaggcaacaccgagataaggggytgggtcccaaggccttgagaagcttcaccccggtggctctgcaaggctcaagtcccttggctactctcaagggctg

SEQ ID NO: 275802 - DNA, 565 bp, Homo sapiens
ttgttggtcatgttgtgattatggtatattttattttttgctactttcactgctaagttttaggcaattattaatttcatggaatattagaaaagaagtaaattggaatgataagattgaaagtggttaatttgctgttaataacaacacttaaaatatattcctatcctttcttagtttcataattccattgaaaatgaacagtttaatttttttttttttaagagggagtctctctctgtcacccaggctggagtgtagtggtgcaatctcagctcactgtaacctccacctcttgggttcaagtgattctccgtctcagcctcccaagtagctgagactacaggtgcccaccaccacgcctggstacatttttttttgtattttttagtagacatgggggtttcatcatgttggccagcctgatctcaaactcctgacctcaggtgatccacctgcctcgggcctcccattatgcagaaaagctgggagatgaggactgtccccatcctacttgccagagcaaagtgtacattctgaaatttctggaggaattgagtagccc

SEQ ID NO: 275803 - DNA, 1031 bp, Homo sapiens
gtcccttacacctatgagacagtaaaattaaaaataaatttgttacttgcaagatttaatgaggatacaggcatcgggtaaatacaactgttccaaaagggagagactgaacaaaacaaaggagctacaagcccccatgcaattcccaacccagtagggcagtcgttaaatcttaaagctccaaaataatctcctttgactccatgtgtcacatccaggcaacaccgagataaggggttgggtcccaaggccttgagaascttcaccccggtggctctgcaaggctcaagtcccttggctactctcaagggctggccttcaatgtctgcgactttttcaggtgcatagtgcaagctattggtgaatccactgttctgaggwagtagtgggaacaaaaaatgcagtgtcttcaagtttgcagaagagcaagaaaaacatgatgactgggtggaaaaagcaagaacttgttatagggagtaaaatagtctgaagtcagggcattaatgaggccatattgtagcaggacttgaagagcacagttaggactttggtgcgagaaagaagggaagtgtttgttagcaaaagcgtatgatgttttgctgawttttaacaagatcattctggcagaagaaattaggggaaataaaagctggacagggtgaccattcttgggaggttgctgcaataatcataaagaatggcacagagactgagggaggcagacagaggtagttagaagttatcaattacagatatatttttccagatacagccaacaccattttcaaatggattaaatgttgttaaaattttttattctgttttgtctccaaaagcaattggaaaaaatgaaatgtaaaataagtgagatattgtttgggaagactgtcgagctcatgaataagaagaaaaagagaataaattttcacatccatcccacaggtgactaataaaagtaaatattggcttatatttagatatggtgttactaaagtgttggcagaatattaaaattgaaaaggcaggaacat

SEQ ID NO: 275804 - DNA, 519 bp, Homo sapiens
aagcttctgatcataagaggtacatgtcaaatcaactcacatttctttggataaaggaacttaagggaccaaatcattataaatctcacccagcatctctggtgcatagtatattgtttctttattgcttaacaagaattggattcatgcagcatattaataggaaatttttgtgcaattgcttgtaatagaacgtaagtttagataaaaagcaaattgtgtaaaattaatgtatgttttctaatagcatgtaacctagggrcagaaattagccagatatcagaaacaaactggaaataactgaaaaaattgataaagatatagatatattttgggggatattttttcatttatattgggtctatattttttttcttatttttcttgaaactatagctagttctatctttctctcattctctctgtctcaatcaaccttttctacataatggagcaaggctgatcaacaggtacttcatttttatatcacatatgctttaagctacttataggaactgt

SEQ ID NO: 275805 - DNA, 647 bp, Homo sapiens
ttaaggtcctgacagtttatgacgctaaaaaaaaaaaaaaaaaaaaaaggtaatactggaagcatctagctatgatcctgatgatttgagaaaagccacaaaacttggctaattgggatcatctcccttttataagctccaaatttgatggcccttcaaagacactttctaaatcctacctcacactacctatcattcttagtagaagctacccactttccacaaagtaatacagactatcagataatgagtttctagaatttatctatgcccacccastctatctttgcacttctgttagagaaaaagatactcctgtacttctccaaatctgaccaggctacttttgactctttcagtctctctccccacaacctttccccacacatgcacatacatagacacacacatatatctttaatctttccgtttaatttgtcttcttctctcccatctgtaaacatgctcaaaactcttcttaaaaataaaacataagtgccccaaatcataaaacgacttctcttctccaactctctctcaggataaggaccatctttatctctcacttgtagagagaaaactgtatgcaaagaaatggaaacccatttgcccctatcacaaatcaatttctgctcacaccactgctg

SEQ ID NO: 275806 - DNA, 1039 bp, Homo sapiens
ctgagaaataaatgtgtgtgtgtgtgtgtgtgtgtgtgtgtgtgtgtgtatttaatggcatttttgttataggaactaagatggactaagacagagataaaataaaaatcgaaagaaaaaacagtcttaactgactgtacttggaacaaatctgtttttggttattgttgcaagttttgcaaatgtgaccttcrgtgcacatgtgtagggctccttccaagtcttagaaagatttgtgcaagtgaggcacccagaaacttgtgtcattaatttaacaataaatctgctttcatttacaaattattttaagggtctatttttattgtctattttttcttggttctgtttctagtatgtctactaaattttgattgaatgttagacattacgtaaaaaaaattatcaaggctgtggataatgtcattttccttcagagagcattcactctgtcctttttggcgggtagagagttggggaagtttatcttaatctaatcaggaactgaatcaactggtggcagaaatacctccagagataggaatggaaatcttgggatttttactagggatgttacttcctggcaggctctgaatttcaattgctatcttctcagaatcatgawagttgttaatgttagggcaawggtgttcaaccaagagtgattttgccttccaggggacatttggcaatgagtgcagacattctgatcttcatgactggggagggtgctactaacatctaggaaatagaagccagagatgctgctgggggaagctaagtgaagggtatatgtgaactatctgcactatttttgaaactttttgtgagtctaaattatttcaaaattaaaagttaatatataaaaatagagttcagcaaatgccttgagtgggaatcctctgcattttgagcctttttctgagcttttattatttcaatatcttgaccttttgagatccacttgtgttagacgttccaaagtcaagtttttctctccagcattgtgaagtgacaaccaaattctcagctgaattataca

SEQ ID NO: 275807 - DNA, 417 bp, Homo sapiens
agttgttaatgttagggcaatggtgttcaaccaagagtgattttgccttccagggkacatttggcaatgagtgcagacattctgatcttcatgactggggagggtgctactaacatctaggaaatagaagccagagatgctgctgggggaagctaagtgaagggtatatgtgaactatctgcactatttttgaaactttttgtgagtctaaattatttcaaaattaaaagttaatatataaaaatagagttcagcaaatgccttgagtgggaatcctctgcattttgagcctttttctgagcttttattatttcaatatcttgaccttttgagatccacttgtgttagacgttccaaagtcaagtttttctctccagcattgtgaagtgacaaccaaattctcagctgaattataca

SEQ ID NO: 275808 - DNA, 417 bp, Homo sapiens
agttgttaatgttagggcaatggtgttcaaccaagagtgattttgccttccaggggacatttggcaatgagtgcagacattctgatcttcatgactsgggagggtgctactaacatctaggaaatagaagccagagatgctgctgggggaagctaagtgaagggtatatgtgaactatctgcactatttttgaaactttttgtgagtctaaattatttcaaaattaaaagttaatatataaaaatagagttcagcaaatgccttgagtgggaatcctctgcattttgagcctttttctgagcttttattatttcaatatcttgaccttttgagatccacttgtgttagacgttccaaagtcaagtttttctctccagcattgtgaagtgacaaccaaattctcagctgaattataca

SEQ ID NO: 275809 - DNA, 417 bp, Homo sapiens
agttgttaatgttagggcaatggtgttcaaccaagagtgattttgccttccaggggacatttggcaatgagtgcagacattctgatcttcatgactggggagggtgctactaacatctaggaaatagaagccagagatgctgctgggggaagctaagtgaagggtatatgtgaactatctgcactatttttgaaactttttgtgagtctaaattatttcaaaattaaaagttaatatataaaaatagagttcagcaaatgccttgagtgggaatcctctgcattttgagcctttttctgagcttttattatttcaatatcttgaccttttragatccacttgtgttagacgttccaaagtcaagtttttctctccagcattgtgaagtgacaaccaaattctcagctgaattataca

SEQ ID NO: 275810 - DNA, 612 bp, Homo sapiens
taaagtatagttatattctttctctcagattagtttattgtctattttattagttattccgaggaacttctgttttgctgttcattaatttctggtgcttattaacttttacatcttcatattgctactctttagcacctaacacttgctcaaaagaagtttgttgaatgaatgaatgaaatcaaaacacagtttcctyggggaatataggaactcaagaaagcatgtttttaaaatggagaaaatggtagaagcagagaagcagaaaaagtgatgtgtaagcaattctaaatctccagacatcaacccccaacttattttcatatctaaacttttaataaacattaaaatctttccttttgcagagtggtgcgcatttttaccatataagaatcaaatgttgcatgtatttcgatgtttacattgctcttgttttgaaaaatacccaatcaaatcatcatttataagtagagttacttgaaaagcattcaaacttttggagaaactcccaaggaccttggaatttgaaaacacaataaatattctgccgcgggtaaggcacatttgaaatggaatcaagcatgataatgcaacgaagctgcgaaggaaggc

SEQ ID NO: 275811 - DNA, 940 bp, Homo sapiens
aggcaccgtgctcggaatgtgtgttacatccccaggagttctgcatcataaaaatcataaagagtaacgtcccatgtctggaaacagaaacgattcctacgagaatttatgcgctcaatgtaattaatctgtatgtctgggacatctcatcacaggcctgtcttctttggctaattattaaagcctgattcaatggatctgctcaattatagtcccagataaacagcccttctycccgcccacccccggattattttacttaagggtttagcaaattcacctgacaaagagttaggtttcaacattgaccctcataaagtgatttttttctctttctgttttgttttctcccttcttaaagagatagtcgccagaggcaattcgactttctgtagccacaagattcaacaaggcctcagctaattgcccttcagtacatcagcgtttcccaccacgtgggagaaactcgaccacgttcattatagaaatccgtctaaccaagataattgtattgtatgtaacaagtattttcaggcttactctgtttcccaaaccttttataatagaawctttttaatattctgagtgatgaaatgggaacttctgcctcacaacaaaggaagatgttgtctccaggaaaagcatttgcatgactgttgggtctgggagctgaaccagccacatttttcatggaacaccatttttgctcaaaagaatgactgacagaaaaactatggttattcacatttgggtatttggcacacattttctcaaaatgaacaaagtgagcctgtaactacagggaaaawtaactgacagcatttgttgccaaggataaaattcaatctttcgagtgaaaattagaattttgaaaaacattgtctaccaccatgagcttgacagcttcccaaaacttaaagacttttcttatgagattggg

SEQ ID NO: 275812 - DNA, 202 bp, Homo sapiens
actttctattctcacaatcatcccatgaattaagcattctcattctcatattatgaatgaggaaactgaggctgaaaagttcagatgatttcacagggacacacaaggtggtaaaargtattctaaccctggtgtcccccatgtaccagagggttcttacagcataagtttagtgggctgagttagcaggagacagaggtgg

SEQ ID NO: 275813 - DNA, 544 bp, Homo sapiens
ctgtatgcgtggtctgcaggcagatgatcaggaatttgaagttagtgaataaaacacaaaagggaatgtagacaacatcacacaacagtcaagaacagctccaggggagtccacttttcaagaggaagagaagagaacaaagagacaaaacagccaaagcggggtcccacaaacagggtcacggtgcagagaggggcacacagggtctgagagtctgggggaaaagaacgctgctgacatagtgcatggcttctcaacggcctcayagcacagctgccacagaggcagggtggaatcttcccaaaagtgaacatgtgtctgtgtgtgcctgaggcctgcatgggaacttgagacttggagctggaactaggtagcaggactcagaaaacggagtcaggtgtgaagatcacagtaaggaccagacaatctgagggggactgagatccagaaagagaacccgagcacagggacacacttcacaagcaagcctaatgaagaggctccaaaagccagggagtgacgaagagggaagggatgcaagcca

SEQ ID NO: 275814 - DNA, 572 bp, Homo sapiens
accttgaaccctcaccagacataatgacatatgtgtaaaacctctgggaagtcctgtaggaaaaaaagattgatgaatttggggcrggggatttgcaagaaaagtgtagaattatttttaatacagaattttaattttcataactgatctgatctcacagtgaaacttattgagctcaattagtgagaactcaagtcttttactgaattctcaagtcctattatgataaattaaggacaaagtgtttctaaataacatgtagagatataatttacttactataaaatgtagccttaagtgtccaattcagtggtttttaatatactcacagaattgtgaaacttttaccataactaattttagaatatttttataaccccataaagaaatctcatgaccatcagcagtcactccttcctccccattcttagagaccctgacaaccacatcctgtttctatggctttacctattctggacatttcagataaattgaaccatccaacatgtggtcttttgtgactggctctcactaagtataatgttttccagttcatctttgttgcagcatgt

SEQ ID NO: 275815 - DNA, 572 bp, Homo sapiens
accttgaaccctcaccagacataatgacatatgtgtaaaacctctgggaagtcctgtaggaaaaaaagattgatgaatttggggcgggggatttgcaagaaaagtgtagaattatttttaatacagaattttaattttcataactgatctgatctcacagtgaaacttattgagctcaattagtgagaactcaagtcttttactgaattctcaagtcctattatgataaattaaggacaaagtgtttctaaataacatgtagagatataatttacttactataaaatgtagccttaagtgtccaattcagtggtttttaatatactcacagaattgtgaaacttttaccataactaattttagaatatttttataaccccataaagaaatctcatgaccatcagcagtcactccttcctccccattcttagagaccctgacaaccacatcctgtttctatggctttacctattctggacatttcagataaattgaaycatccaacatgtggtcttttgtgactggctctcactaagtataatgttttccagttcatctttgttgcagcatgt

SEQ ID NO: 275816 - DNA, 428 bp, Homo sapiens
accatagcccttcttgtgcagagttcaccattgtgacttttgtgaccctggtgtaatcacagaaaacagacaacaaacaaagctcccatcttcagttactgctcctggcctgatttcctcctgaaggacagataatcctctaggttggctcttgaggacattgacagggagtgacctggtgatccagaaggaaacctggagagaggaaagccatgtcggttggacgtggaaggcagcagctcacacggaggagttttggcaggactcatgtctcaaagctacacgttaacatcgttggttccagcaacttcctgattatgggaagtgagaaggcacaaacatgttcccaaaattcaactctccaagatgctctaactactccaaaatatgttttatttmttttagtgcaaaaatattcagatcctaat

SEQ ID NO: 275817 - DNA, 530 bp, Homo sapiens
tcagcagcttgctatattagagagacatttgcagtcagcatttaagagaaaggtccagatggtcagtgagcaaagatgtacaaatcagggagcagaagtgattttagggttgtgctgtccarggatgggttgcgttaattatttttgttcatctctttgaccaaatttaaatcaagcaatcagttttatctcctggcttttttatacaaaatacattatttggttgacttaattaattacagaccacaagctggagaggcattaggaggatgatctgaaggaaatgaggaccaggaaagaggaggttttaaatacatatgtgcttgaggacctccgggcttcctggaaatagacaagctgtatggcctgtaacagagaaagaaggatttataataatggacttattcaagtagtccggcacctgggtaaaattagggctgaaagtggaaacaacctaaaaggccatcaactggtaacggataaataaaatgtgctatatccatacaatggaatactattcagccatggaa

SEQ ID NO: 275818 - DNA, 567 bp, Homo sapiens
atctagatactgttttgttgttttaatgatgatctagaaacttctctcctgctgcacataggcaaaatgagagctaaaatcagaagcagaataattacttttcaaaacaatattatttatgtagtctcttttttaacaatagccttagagtttttaatccttagcaagaaattgggcttttttaaaaaatacgtttaattcactaagaagaccacagtcaattcacggtcatgtgaattgtcatgtgagatgccaagtgcacggtcctgtggtatttgaaaggtcagtgtggtttatgagtggaatacttgggcacccaaatgaccaggatgaagctgctggggccagggctgagaggtgtttttcctggaatacatctgctccatrggcttatctgaaaacagaacagacatggtctgttacatttgttcctttggttcaaagttttagcctacaaaaaaaaaatagtacctgaaagaagtaatatatttacaaataagtgaagctttaaaataacagactctgcatcaggcatggtccaaccaggagttaaatgcagagaagcag

SEQ ID NO: 275819 - DNA, 603 bp, Homo sapiens
ctgcaacacatcataggcacagtacttaaaaccattgatgagaaattcttgaaagcagaattattgtaataaaagttgtattatgtacagataaagataatagccaacttctcattggaaataatacaacattggaaatgttgaagcaacattgctaaagtgctaaaagggaaacaaatgctgacttagaattctacaccaagtgaaaataattttcagtaataaargtgaaataaaaatgtttttcagatatacaaaagctgactaaattcattgtgcacaaacttgcactacaaggcagaaggaaaatgatattggtacagtgtacattgctcgggtgacagatgcaccaaaatctcagaaattaccactaaataatgtatccctgtaaccaaaaaccacctgttcccccaaactattgaaattttagaaagatggaagtaggggtctacacaaaataatgaagaacactagaaaaggtaaatctgtgagcaaatataaaagactactttccttgtttttaaaatctctcgaaaagataattgtttaaaacaaaaataaaaaaacagtttttaatatatataaaatgtattacaataatag

SEQ ID NO: 275820 - DNA, 603 bp, Homo sapiens
ctgcaacacatcataggcacagtacttaaaaccattgatgagaaattcttgaaagcagaattattgtaataaaagttgtattatgtacagataaagataatagccaacttctcattggaaataatacaacattggaaatgttgaagcaacattgctaaagtgctaaaagggaaacaaatgctgacttagaattctacaccaagtgaaaataattttcagtaataaaggtgaaataaaaatgtttttcagatatacaaaagctgactaaattcattgtgcacaaacttgcactacaaggcagaaggaaaatgatattggtacagtgtacattgctcgggtgacagatgcaccaaaatctcagaaattaccactaaataatgtatccctgtaaccaaaaaccacctgttcccccaaactattgaaattttagaaagatggaagtaggggtctacacaaaataatgaagaacactagaaaaggtaaatctgtgagcaaatatraaagactactttccttgtttttaaaatctctcgaaaagataattgtttaaaacaaaaataaaaaaacagtttttaatatatataaaatgtattacaataatag

SEQ ID NO: 275821 - DNA, 621 bp, Homo sapiens
atacagtctgattccagaggttgagctcttctccactgtgctatatgctaagaactaagtcataatttcaaggttggttagtcttttgttccaaaaggaagatcaattctgttaggaatctccagtaactttgtcttggctgagttgttggtgtcagctagatgaagatgccccctttttaagtcctcttcccttctctataaaatatattcactgattagtagtaatagtggacacaaacattttcaactttctcatatgattcaggcccaggaaaagctagattcttattgtctaactgtatatagcctcagaagtcataatatttactgctaatatcaggtgttttcaatctatattcaatgggaatcaagctagtattcagtgagagtgcaccagaaccctggytatcctggttgttaaaattatacaatagccatcaccccaattctctcacacaatctagaaaattgaaggctaaattcggcaactgcagagttaatgtctggcacagcaggggccttctggactctgctcctgctctgcagccaatgtccattctcaagatatggtgactgccacatattctcacttagaagtaggagctaaacaatgagaaca

SEQ ID NO: 275822 - DNA, 621 bp, Homo sapiens
atacagtctgattccagaggttgagctcttctccactgtgctatatgctaagaactaagtcataatttcaaggttggttagtcttttgttccaaaaggaagatcaattctgttaggaatctccagtaactttgtcttggctgagttgttggtgtcagctagatgaagatgccccctttttaagtcctcttcccttctctataaaatatattcactgattagtagtaatagtggacacaaacattttcaactttctcatatgattcaggcccaggaaaagctagattcttattgtctaactgtatatagcctcagaagtcataatatttactgctaatatcaggtgttttcaatctatattcaatgggaatcaagctagtattcagtgagagtgcaccagaaccctggctatcctggttgttaaaattatacaatagccatcaccccaattctctcacacaatctagaaaattgaaggctaaattcggcaactgcagagttaatgtctggcacagcrggggccttctggactctgctcctgctctgcagccaatgtccattctcaagatatggtgactgccacatattctcacttagaagtaggagctaaacaatgagaaca

SEQ ID NO: 275823 - DNA, 583 bp, Homo sapiens
atgcagtgtgaaatacgcacatcgtggagaatggaatatccatcttctcaagcatccatcctttgagttacaaacaacgcaattagactttttattttaaattgttcaattaagttattattgatgacagttaccctgttgtgctttcaaatagtaggtcttatttattctttctaactactattttgtacccatgagagcgactttagtactgggtttgccagatgtaaggaataaggttgttttggccggatgttagggagaaagaggcacagccttcgtggtggaggaaatgaggtgagcagagacacagaggcaggagagggcaggaggccagggatggtctgggttggagtaaayactgggtgaggagggaagtggtaagccagccttgcttactttgcttgggagtttggattttcttctatgagcacttcaaagtcttcattgcctgtacttcattgcaaaggctttcttgtttatctgcctatttgtagttaaatctgtgtctctcagtttcatctgttaagagggaaaacctggagttcctttggctgctgagatgccctttttgaatcccttg

SEQ ID NO: 275824 - DNA, 516 bp, Homo sapiens
ccctttttgaatcccttgctttctgctaaccctttttatctaggtcccactgttttgcttggcttttcttgattgccttctrgtgctatctacacacagcagtttcatttgctttgatgcttttgagagttcaggaccacagttttgccaattttaactttcaatacattttctcacctttttcatgactgtctttgaaaagaaaaaaacatatacatgcaattagcaatagatggcatcctgaatattgtttattgcatcatagctaagatgaaaacattaaggaacacagcaacatctcattccctgagaagagtttggtcctaaaaccactcaaaacaaaaactgacagatgagaaaatgaaaggaagatctttatctatgttatttttgcttagcaagctcaataatgacaagtttagagggttccagtatgacacttagcaggtgctcagttaaatactgattgttagttctgctcccagtgaggaattcctggtaaggtgggagacacta

SEQ ID NO: 275825 - DNA, 516 bp, Homo sapiens
ccctttttgaatcccttgctttctgctaaccctttttatctaggtcccactgttttgcttggcttttcttgattgccttctggtgctatctacacacagcagtttcatttgctttgatgcttttgagagttcaggaccacagttttgccaattttaactttcaatacattttctcacctttttcatgactgtctttgaaaagaaaaaaacatatacatgcaattagcaatagatggcatcctgaatattgtttattgcatcatagctaagatgaaaacattaaggaacacagcaacatctcattccctgagaagagtttggtcctaaaaccactcaaaacaaaarctgacagatgagaaaatgaaaggaagatctttatctatgttatttttgcttagcaagctcaataatgacaagtttagagggttccagtatgacacttagcaggtgctcagttaaatactgattgttagttctgctcccagtgaggaattcctggtaaggtgggagacacta

SEQ ID NO: 275826 - DNA, 576 bp, Homo sapiens
taatgattcgtgagaaatctcccccatgatccaattccctcccacctggccccacctccaacactggggattacatttcagcatgagatttgggcaaggacacagatccaaactatgtcaggagcgcagggtaccacacaaaatgccagaactgaatggaggccacagattctctggtttaccctgcaccttctagatgaacaaacagatgcccaagagcattgctcaagatcacatatgtgtaagtggcagctaggggacaagatctcagattacttctatctcaatctgatggccttttcatgatgtaattgtgtttacttgagttactttcttttctagatgctatgcaggcaaagcctaggtttccctcataactttgtccaaatgccatctttttcaggaagtttttatagatggacccagacacaagagaattttgcaatcacccttagcactttttaaaactgtgcaaagcttttgtagtctacagtattgccatcaattagggttaattacgtacatgttttaccctctctaatggactatragagctgcttgaaggcagcaattttg

SEQ ID NO: 275827 - DNA, 569 bp, Homo sapiens
tatttcatttatgtttctgctgtgacactgacattgttctatctttgcttgtttacccttctatgtgaccctccaactacaagcttcttgggaaaatctcttggcctctttactcattatgcattatttcatgtaatcctctaaaactttaagaaccaagcggagaactgctattatctctaagttacagatgaggcaagagaggctcactgagggtaagtcactagaccaaccttatactgcttggaagtaggggagcaggacataggcagagatacttctatttacaaagcctgtgtgcgaaggaccagatcgcattgaatgaactgaagggcacagcaccaagccaggcctagacaagagggaaaatgaaagcctgctcctacttcctccatcagacgcctctcttctctttcacygggagctgctcccagagtctggagtgaaaaacatctgaaaattattcaatttccgtaggcatcctcgcatccattagttcaacagatatttaatgagtactctgtatgtgtcaaactctgtgctcaaagctgtgaacacaattatgacca

SEQ ID NO: 275828 - DNA, 551 bp, Homo sapiens
atgtgaagaagaaattcctgggtttctacatctctgcacaggaccattgtatcccatgagatcattgtctagctgattagtataaagcagtgattatctcagaacacaacatttacctatgatttttctctgaactgaacacgtacctgaaaatagatgaagcaagatgaccaatcctctgtctgggtttgagcaatacaaaacaatcacagactttcattgagatctaatattaccctttctttatttagccagtaaacatacattgagtgaatgtctgctgtgtgtgtcacactttactaggggaaatgcaggtacacacaaagaaggagaaggcaaagcctctgtgggtaagaatattacactactgttgagtgaaatgatatacacactccagaaaacacaaataacaaaagtaattgcatcagaggagagctgtcatagctcaatgtatgctaagtgtaaagtggatgckacgaggaaagctggaaaattcagataaaaagctttctggaaggagattggccttggaggacggtaagtaattttaa

SEQ ID NO: 275829 - DNA, 562 bp, Homo sapiens
acacaattggtgatatatgtgatacttaaatatacacacatttatatgtatatatgtgtgtatatacacacacgtggtatatatagaatatagatatatataaattatataaatgtgtgtatatrtaatatggatttcatatatatcttacatatgtgtgtatacataaaaatatttataaaaaaagagatttagtataggaattggcttacatgactatggaagccaagaaatcccacaatctaccatctgtaagcaggagaaccaggaaagccagtggtgtcactgagtctgagtctcatgtcctgagatccagggaagccaacaatgtaacttctagtctaaggccaaagacctgagacctgggggtggagggggacactggtgtaagctctggggtccaaaggcccaagaatcaggagctccaatgtccaagggcaggagaagatgggtgtcccagctcaaaaagaagagagagtgaatttgccctttctctgtctttttgctctattcaggccttcagtggcttggatgatgcccacccacattggtgaaaagtgat

SEQ ID NO: 275830 - DNA, 598 bp, Homo sapiens
cctagaaatttcgttcctaggtataaactcaaaaaactaaaatcagggactcaaatagagccctgcacaccaatgttcatagcagcattattcacagtaactaaaatgtggaaacaacccaaatgtccatcaatagrtgaatggacaaacaaaatgtggtaaatacataatatggtttggatatctgtcccctccaaatctcatgttgaaatgtgattcccagtgtcataggtgggcctgatgggaggtgtttgtgtcacgggggcagatccctcacgaatggcttgctgcatcccctgtggtaatgagttcatgcgagatctgattgtttaaaacagcctaggcattttctccttgctctcttgttccccctcttgccagggatacaatagctctccttcccttccaccatgactaaaatcttcctgggcctcagcagaagccgagcagatgtgggtgtcgtgcttgtacagcctgcagaactgtgagccaaataaacctcttttcttgatagattacccagcatcaggtattcctttttatcacagtgtgaatggactcacacaatacatacaatggaatatcattcagccttaaa

SEQ ID NO: 275831 - DNA, 597 bp, Homo sapiens
ttccccctcttgccagggatacaatagctctccttcccttccaccatgactaaaatcttcctgggcctcagcagaagccgagcagatgtgggtgtcgtgcttgtacagcctgcagaactgtgagccaaataaacctcttttcttgatagattacccagcatcaggtattcctttttatcacagtgtgaatggactcacacaatacatacaatggaatatcattcagccttaaaaattaggaaattctgacacatgctacaacataaatgaacgttgaggacattatgctaagtgaaacaagccaatcacaaaaagcaaatattrtatttttccacttatatgagatccttagagtaatcaaattcatagagacagaaagtagaccagtggtttccaggggctgggaaagtagggagtttttgtttttgttttttgagatggagtcctgatctgtcgcccaggctggggtgcattggcatgatctcggctcaaactcctgacctcaagtgatccacccacctcagcctcccaaagagctaggattataagtgtgaaccaccgcgtccggcccaggagttcttgtttaacaggtaaaga

SEQ ID NO: 275832 - DNA, 626 bp, Homo sapiens
tgattggccattattaagtattcaggaaaagtgataatggagtgcaaacacagaaataacttgagrtggtttctaatcactagttagccaacctaagggatttaagaccacctaaattcttagaaagttaatagaattgggtattttctcattaattttgcaccctgttgcaatttgtgccattactgttaaacatagcattaattagaacagcatccaagttccccgattgtcatatttcttaaacttgactggtgttcttactgcaatgtaacttgaattttataaaaagttcaatgccccttgtttgtttggtcttgatataagcaaacatttgaaacttatttagcgctatgggaaaatcatatcttgagacagatctactattgaaaaaggaagaattcatagaaatccataagcccctattatcacctttgctgcccccaagtctcatgcttttatataactcttatgcatttagatgacctagtcctggataagtacaaagtgacagtttgttaatgggtatcttgattaaagtgcaatgaaatggccatttttaccatggagaaaatgtttattatttacagcaggtccagagaaggtcaagagtccataaagaaggg

SEQ ID NO: 275833 - DNA, 613 bp, Homo sapiens
tagctctgctttccagctagaacttttattaacccatgtgccctctgagcagaatagtgtggctatagcagaggggtcaagaatgaccctcacattcaataatccatgaatgtaacctgtaggacaagaggagaggataccccttgtaatttagctgtcgtaccacatgtaccaagtacatgtgaggctttcataagttttgtgttgtggttttttaagcaaaaaaaaaaaaaaaaaaaaacaattgaggatattctttgagacacttaggccccagtgttgttgaraaatctgagacactctcagtacacctagtcatatttggggaaacctcgtgctttcaaagctccctatgttgtttccctccttccttccccactcattatgtgttccatatatgaaggctgtagtatgaataaagaccaagataattctagttgtctccaaacactcaatacaattccctaatcccctctttttccattaagtttgatagaagtctgttttgacattcatgcatttggttactgaagcctttttaaaataacacattttttacatagactagcctctactctgatgaaatatatgaaaaaattatttccatgcataa

SEQ ID NO: 275834 - DNA, 560 bp, Homo sapiens
aatactagtgtgctgtctattaagcactcactagggggccagttactgtgcgtcttagtctaaactcattatctcattgagtaggcatgacttactggggtaggtattattatattattcctgttttacagagaacacatctgagtttggcagaattaattgctttcctcaagtcactaacctcataagcatgagagttgggaactggatctcaaggctttgtcttaaccagctaggctgcaccagaatcagagaatcagacctttgatgattctccacggccaccatgatttccaatgattttgccaataatactaaccaaactctccccaaatacagtgacacattttaagggacaaaatgaaggrttggaaagacaccagcttaagcaagaaactcagccccattctgtctgaaacagacgggaacacagagatcacagagagtttattgtcaaatatttattaaaccagtattgtgggctcatttctatgctaaaccttatcagattataggagagattctggttactactgtcaaggaataaactgtttctgtgt

SEQ ID NO: 275835 - DNA, 560 bp, Homo sapiens
aatactagtgtgctgtctattaagcactcactagggggccagttactgtgcgtcttagtctaaactcattatctcattgagtaggcatgacttactggggtaggtattattatattattcctgttttacagagaacacatctgagtttggcagaattaattgctttcctcaagtcactaacctcataagcatgagagttgggaactggatctcaaggctttgtcttaaccagctaggctgcaccagaatcagagaatcagacctttgatgattctccacggccaccatgatttccaatgattttgccaataatactaaccaaactctccccaaatacagtgacacattttaagggacaaaatgaagggttggaaagacaccagcttaagcaagaaactcagccccattctgtctgaaacagacgggaacacagagatcacagagagtttattgtcaaatatttattaaaccagtattgtgkgctcatttctatgctaaaccttatcagattataggagagattctggttactactgtcaaggaataaactgtttctgtgt

SEQ ID NO: 275836 - DNA, 630 bp, Homo sapiens
catatcatcaaataacatgtagaatggccaggcagtgggggaaagagggctgacataggtatagctttcttgtaggaatattttgtttggacactaagttataggsaaaggggaaaaaaaaatccctaaaatttggtacaatgactgagccaaatagtcagatggtgtttgtggcactggttcattagaaattgagatatgagggccgggcacgatggctcacacctgtaatcccagcactttgggaggccggggtggtcggatcatgaggtcaggagatcgagaccatcctggctaacatggtgaaaccccatctctactaaaaatacaaaaaaattagccaggcatggtggcggcgcctgtagtcccagctacttgggaggctgaggcaggagaatggcatgaacccagtaggtggagcttgcagtgagccaagatggcaccactgcaactccagcctgggtggcagacagagattccatctcaaaaaaaaagaaattgagatatgaggaagccagttgatactaaataagcatttgtcaaatgaagaaataaatggatggatgaatgcatcatgcatcagcagctacacagttataagtactacagtctaaaactccctggccaagt

SEQ ID NO: 275837 - DNA, 541 bp, Homo sapiens
agcatccgccaggtaggctttgccaagacacttaatggagtgtcacagcaggttgttttactgccatckgccaaaagacttctgtagcaaacatagacattgactttgtgatattttcctagggtttttcagtgtgcaacctcctcagccttatgaggcaaccctcactaaagacattgatatccagctacatcctctacaccttgctgcctacctgatgaatgcccagtgctgatggtttccagaactgagtcccaggctgccctggacgtctggactcactcctagagcccatgtgtctccaactgtcaagactcttactctccagcccaccccgttgccaatgcccatgtccaagttatgagagtgagttttctcactctgaaacccatttacccaacacctatttaatgagcagtttctttgtttcaaaccctgctggatctcagggatgcagagacaagtaggactcactccattccactaagtacctggcaggttttggaccccagtcattatgttgcaagttctctatacaaat

SEQ ID NO: 275838 - DNA, 541 bp, Homo sapiens
agcatccgccaggtaggctttgccaagacacttaatggagtgtcacagcaggttgttttactgccatcggccaaaagacttctgtagcaaacatagacattgactttgtgatattttcctagggtttttcagtgygcaacctcctcagccttatgaggcaaccctcactaaagacattgatatccagctacatcctctacaccttgctgcctacctgatgaatgcccagtgctgatggtttccagaactgagtcccaggctgccctggacgtctggactcactcctagagcccatgtgtctccaactgtcaagactcttactctccagcccaccccgttgccaatgcccatgtccaagttatgagagtgagttttctcactctgaaacccatttacccaacacctatttaatgagcagtttctttgtttcaaaccctgctggatctcagggatgcagagacaagtaggactcactccattccactaagtacctggcaggttttggaccccagtcattatgttgcaagttctctatacaaat

SEQ ID NO: 275839 - DNA, 541 bp, Homo sapiens
agcatccgccaggtaggctttgccaagacacttaatggagtgtcacagcaggttgttttactgccatcggccaaaagacttctgtagcaaacatagacattgactttgtgatattttcctagggtttttcagtgtgcaacctcctcagccttatgaggcaaccctcactaaagacattgatatccagctacatcctctacacctygctgcctacctgatgaatgcccagtgctgatggtttccagaactgagtcccaggctgccctggacgtctggactcactcctagagcccatgtgtctccaactgtcaagactcttactctccagcccaccccgttgccaatgcccatgtccaagttatgagagtgagttttctcactctgaaacccatttacccaacacctatttaatgagcagtttctttgtttcaaaccctgctggatctcagggatgcagagacaagtaggactcactccattccactaagtacctggcaggttttggaccccagtcattatgttgcaagttctctatacaaat

SEQ ID NO: 275840 - DNA, 606 bp, Homo sapiens
ggcaaccctcactaaagacattgatatccagctacatcctctacaccttgctgcctacctgatgaatgcccagtgctgatggtttccagaactgagtcccaggctgccctggacgtctggactcactcctagagcccatgtgtctccaactgtcaagactcttactctccagcccaccccgttgccaatgcccatgtccaagttatgagagtgagttttctcactctgaaacccatttacccaacacctatttaatgagcagtttctttgtttcaaaccctgctggatctcagggatgcagagacaagtaggactcactccattccactaagtacctggcaggttttggaccccagtcattatgttgcaagttctctatacaaatatcagcttattctgaagagctttcccaacaacctctctgaaatgtctaaaactctaaccctcctaccattyttaaccagcttgattttgttttattgcatttatcactatccgatatgctatcaatgtattaccagccccctatgagaatgtaattctatgatgatgggatacatgtttccttcattgctgtatcctttgcacacagagcagagtcggaca

SEQ ID NO: 275841 - DNA, 606 bp, Homo sapiens
ggcaaccctcactaaagacattgatatccagctacatcctctacaccttgctgcctacctgatgaatgcccagtgctgatggtttccagaactgagtcccaggctgccctggacgtctggactcactcctagagcccatgtgtctccaactgtcaagactcttactctccagcccaccccgttgccaatgcccatgtccaagttatgagagtgagttttctcactctgaaacccatttacccaacacctatttaatgagcagtttctttgtttcaaaccctgctggatctcagggatgcagagacaagtaggactcactccattccactaagtacctggcaggttttggaccccagtcattatgttgcaagttctctatacaaatatcagcttattctgaagagctttcccaacaacctctctgaaatgtctaaaactctaaccctcctaccatttttaaccagcttgattttgttttattgcatttatcactatccgatatgctatcaatgtattaycagccccctatgagaatgtaattctatgatgatgggatacatgtttccttcattgctgtatcctttgcacacagagcagagtcggaca

SEQ ID NO: 275842 - DNA, 1172 bp, Homo sapiens
atcatgcataaccaagagatgatttttttttttttttttttgagacagagtcttgctctgtcgcccaggctggagtgcagtggcatgatcttggctcactgcaacctccacttcccaggttcaagcgattttcctgcctcagcctcctgagaagctcagattacaggtgcccaccattacacccaggcaatttttgtattttcagtagagatggggttttgccatgttggccaggctggtctcgaactcctgacctcaggtgatccacccgcctcagactcccaaagtgctgggattataggcgtcagccaccaatgcctggccagggatgattatttttattatgcctatgttttttttaaaaaaaatcttattttcaattcaacacaatccaaagtcttggcaaatatcagataccttaagctcaagaccatatttccagactgccaagtctcccatttccattaatccatgtacacataacctggygtgctcatgaaacagagagctccaggaaatggtcctgtttccaaatcacacttccttcattcaaatgtgagccaagcaagcctctcaccaaggtatgagggwccagttcaacacatctagagagctgtaagaaagaaggaccagcaatcagtataaggtcacattcaataccctttgtagtgaattaatgtgtagacttttccaataatgtagatttaattctgggcagagaagagaagaaaggtgtccagttttccctcttgcatctctggagaatgagtgtgagtagagacattccagcctgggccaaagtgcatggagtgtacctggagaggcctgtggcaaggtgagaatgacaaatcaatatcattgtcatagtagaagccaaggtccaaatgcaaggcatggatggacatgagagagaatatattccggtcattagcaaaaaaagaatggaatcaagacaaaatcagaaatgcagagaagctcaagggggcaaagttcagtagtacaaagactgtcagggtagtcctgttggagctttaggtttcatgctctttggaagagcaggcaggcaggttatggaggtaccatgtttggacagctcgccctggggaaatagttwtctcctccacttgtagtttcactacaaagcccagatgatacacaattgctggctgtac

SEQ ID NO: 275843 - DNA, 628 bp, Homo sapiens
aggctgaataatgtttcattgatgtgtatactacattctgtttattcattcatttgtggatgaacacttgggttgcttcttcctttaggctattatgaataatgctgttatgaacatagataggtatgtaattatctctccaagatatggctttcaattctttttggtacatacccaaaagtggaattgctggccatacgataatcctttttttttttttttttttgtcatttgaggaaccgtcacgctggctttttccatagkgtctgcaaaattttagattcccaccaatggtacacaagggttccttccaattgctccacatcctgccgacacttgttattttctggtttttgatggtagccatcctaatagatgtgacatggtatctacttgtgattttctttcattttcctaatgattactgatgttgggcatcttttcgtgtgcttattgaccatttctacgtcttctttgcagaaatatctatgcaagtcttttactcatttttaaattgggttgctttaggttttttgttgatttgttgcattttaatactctctttgtatgcttcaagctagaacttttctattacctatcttttaataaacattatattcagcaagga

SEQ ID NO: 275844 - DNA, 620 bp, Homo sapiens
cacaacattatgtacatgagaatcattttgttgtgtgtgttcatttattctcatttctatttagtrttccattgtaagagtataacacaattcatttatccaacctgctattcatgggcatttgagatgctttcagtctgaggttattataaatagtgctaactgtggatattcatatacatgtttttggtgtcatgaatttacttacttctctgaagagtaggatctctctcagagtgcaattgctaggtcataagatacgacaaattcactgatactaccaaagaatttttcaaggtatttgtacggatttaagttctcatcagccatgcagccatgtggtcagtgcctagtagtatcacattacagtttgcatttccctgataactaacacagtttatcgcctttccctatgcttactagaatttcagaagtcctattttattaaatacctgtttatgtcttttgcctactttcctgttgggttctctgcctttttctttttttgttttgtttctaaatattttttattattatactttaagttctggggtacatgtgcagaacgtgcaggttttttacataggtacacacgtgccatggtggtttgctgcacccat

SEQ ID NO: 275845 - DNA, 524 bp, Homo sapiens
ctgttattaggtactgtacaacctcatgacacagatattgttattacccaattttatcaataagaaatgaagatttatgaagatcaaatggctggcttaacattcacagagttaggaatagcatcaaaactcagactcaggtataagcagctctttttcctagtggtccagtgtggaccacggttagcacctctcttccttatacaataaaattattttcagtactaatcttaaaatggcataaaaaataacaataatagtggccagaaaagaaatacagaaaataaacattttatttttttgaagcttctaataatgccaggaaaaacaattttatttagaaaaataaaataaaaccaagcttttcacaattcatcatttaaccaaaaagcatgtatcacttktatcatctgaaaaaagggagttaaaataagaaaatatagatattctctaaatttgaattgaaaaagtagactatagcacacatgaaataagataatttctcatcatcctttctacaaagt

SEQ ID NO: 275846 - DNA, 535 bp, Homo sapiens
ttcacaattcatcatttaaccaaaaagcatgtatcacttgtatcatctgaaaaaagggagttaaaataagaaaatatagatattctctaaatttgaattgaaaaagtagactatagcacacatgaaataagataatttctcatcatcctttctacaaagtcacttggtttaggttccaatcacaccagtaggcaacctaactcttcagtctcttagctgtgtatgcaagtttgaaagatctctctcagtagaaagctgaytggctattttaaagatattatggtctgcatgagagtaactggaaagataggaagctgaaaaatgatgaagccattttggggaacaatgagtccattaggaaaaattctaatacttctggtagcaaaactattttaagtcatacttcctgaacaagaaaataaatgattctttttgagttatggggtaatagccttgtgcaataatttatgaggcttatgttgtaggtgtttactataaaatattcagtttctacatgtaaattaaggaaggctgc

SEQ ID NO: 275847 - DNA, 584 bp, Homo sapiens
ctttcttagaagggtactgatttaaggattaagatgggttagatttggtcgtttgtttgtttttttttttccagaggagagtctacatgctattaagagcatgtaatcctactgtctgctggctccataactcccacatactcagtaacaagttcttataacyaccttccctgccactgaaacagcctccatttctttctttgagagcttgcttaaatagtttctacaaatgggatccatgggccccatggcaacaggcaacaggcaagacagacaatggcaacttcctgttgtctccccatcttctcaccttaatgtccccatctctgatgcataaagccacttggaaaaaccttgttttcaacactgtacatcatgaaaatgccactgcccatgccagaagggcagtcgctgcatattcctaaaccatccatgccttaacacggcagagtccacagagccctgtacaaagctgccgaacatcatgctttcccaatcctacaacactgctattgggtttcaccaagtctctcccaagtaattttgttaactcgtatcccatataccttgcccagaataataat

SEQ ID NO: 275848 - DNA, 562 bp, Homo sapiens
ccacctgagctccaccctctgtcagatcagctgcagcattagattctcataggagcacaaaccctactgtgaactacgcatgtgagggatctaggttgtgcgctccttatgataaccttatgcctgatgatctgaggtagaacagtttcatcgccaaactattccaacccccttactcccagtctgtggaaaaattgtcttccatgaaattggtccctggtgccraaaagggtagggactgctggtttagactatctggctctaccaaatcaattttggtaagttgtatttttctttaaaaatgattaccaattttgggcgcctgtaatcccagctacttgggaggccgaggcaggcagatgaatgccatgaacccgggaggtggaggttgcactgagccgagatcgcgccactgcactccagcctgggtgatagagcaagactccgtctcaaaaacaaaaacaaaaaatcacttccacttactttgtcaggaaatttgttttgggaaatgaagttttgtaagtgtgacaccagctgaggcctggaaagcacctgtgggctg

SEQ ID NO: 275849 - DNA, 562 bp, Homo sapiens
ccacctgagctccaccctctgtcagatcagctgcagcattagattctcataggagcacaaaccctactgtgaactacgcatgtgagggatctaggttgtgcgctccttatgataaccttatgcctgatgatctgaggtagaacagtttcatcgccaaactattccaacccccttactcccagtctgtggaaaaattgtcttccatgaaattggtccctggtgccgaaaagggtagggactgctggtttagactatctggctctaccaaatcaattttggtaagttgtatttttctttaaaaatgattaccaattttgggcgcctgtaatcccagctacttgggaggccgaggcaggcagatgaatgccatgaacccgggaggtggaggttgcactgagccgagatcgcgccactgcactccagcctgggtgatagagcaagactccgtctcaaaaacaaaaacaaaaaatcacttccacttackttgtcaggaaatttgttttgggaaatgaagttttgtaagtgtgacaccagctgaggcctggaaagcacctgtgggctg

SEQ ID NO: 275850 - DNA, 565 bp, Homo sapiens
acaagaagctgctgttgtactggccaggaaggcgggagatcatggcatttgatatttcacttgcacgagaaaaagcaggtccctaatatgcaatgctatatcagagatttcttcaataaagcaaagtctttggaccctcccrgtggtatgttccttctttcagggttcacgccatccaccctgtcataacaggaaaagctcaatgccctatgcaacacccaacatcccaacttttgataaccatgaatcatttaaaaaactctcttaagaaatattgaactaatacattctaaaaaatatcaaaacttttgtgtttagaaaatttttaatgttaaaaaattaaaacttttaatttaaataaattttagcaaccaagtggttaatttatttttaaatattacctattttattttgttttggttcaaactcaggatgtaaacccaattataatcatttgaactttctcaggtcaagtccctggcagccctgaatgcttctgatgtgcacctctctaagcttcctccaagtttgtccacagtgccagtcatcaccaatgtggcagtgc

SEQ ID NO: 275851 - DNA, 574 bp, Homo sapiens
gagtcaaactcaggagcagagagcagaatggtggttgtcacaggctgcaaggagaagcaaatggggtgttgttgctgaatggatatagagtttcagtaatgcaagatgagtaagttctggagatcttctgtacaacactgtggcaacaatattaactaacaatattttactgtacacctaaaattctgttaagaaggtagacttcaagccgtgttcttaccaagataaaataaacacaaaaaatgaaaatttcatactgaaagttgatttctcaatagcaacaatggaaatagaaagaaatggaacaatattttaatcaatatgagagaaaatarctctcaaattataatttcatctttagtaaaacctttttataagaacaaagacaaaatcaacatttttcaaataagaaaaacctaggagaatttactactagatcctcactagagaacattctaaaggagacactttttaaaaaagaaaatgtgctaacatggaagctttgatatgcaaggagaaatgataaacaaacatattggtaaatatatggaaatttcagtatttattgatcata

SEQ ID NO: 275852 - DNA, 1132 bp, Homo sapiens
gagtcaaactcaggagcagagagcagaatggtggttgtcacaggctgcaaggagaagcaaatggggtgttgttgctgaatggatatagagtttcagtaatgcaagatgagtaagttctggagatcttctgtacaacactgtggcaacaatattaactaacaatattttactgtacacctaaaattctgttaagaaggtagacttcaagccgtgttcttaccaagataaaataaacacaaaaaatgaaaatttcatactgaaagttgatttctcaatagcaacaatggaaatagaaagaaatggaacaatattttaatcaatatgagagaaaatagctctcaaattataatttcatctttagtaaaacctttttataagaacaaagacaaaatcaacatttttcaaataagmaaaacctaggagaatttactactagatcctcactagagaacattctaaaggagacactttttaaaaaagaaaatgtgctaacatggaagctttgatatgcaaggagaaatgataaacaaacatattggtaaatatatggaaatttcagtatttattgatcatawtgaggcactattacaggttggaggagatcaagagacawgacagctgaatacatgtgggatcttgaatcagaaaaagacactatagagaaactggtgaaatgtaaagaagttctgttatttggtgaatcgtattgtaccaaggttaatttcttagtttgataaatgttgtatagttatataagatgttaacataaaggtaagctgggtgaggaatatacaataagtttgcaatatttttcatctcttttgtaaatttaaatattgcaaaattttttagtgtaaagaacaaacaaagtgaaaatgaattgttggaaaagagtaataaaataaacatactcctggcaaggtaaatgccaagaaagcactgcagaaaacacaagttcttgtcccctgtattttccccgaactccaattccaactcagtaggtttaggatgcaccacaggcccaggcattagatatttcaagatccacaagtgtttctgggagccatagagacactcattttgaatcctgtttctgcacttcatcccagtacctccattcactgttttatat

SEQ ID NO: 275853 - DNA, 540 bp, Homo sapiens
agctttgtttatggtccacaggccactctttctagtgagggagaaacactttcctatttccatcccattgtaataatgtctttatttgtctgtcttctccacactaaactgtgaacttctccaaggtagggatagaatttcccacagggaaggaaatgaaagaatatctcagggggctggagattcctgcaccccatctgcccacctgcatgactttcttctccttggcaaagttcagccttcgacctgacrgcatttagatttttgcctttctggaagccatggtggaattacttccagtttggtgactgtttcacttgcttcacctctggagtgggccaagcagctcccacaatctccccatggtgcttggctatgttactgctgagcacagtgtagtcagcatgtgatctttaaatagcactaagtctgatatttccagtttacaagcatttggagaataagataagagcctttggcagctgcatttgactgggttttgatgagaagcgaggctagaatgagcctgcctctagggta

SEQ ID NO: 275854 - DNA, 540 bp, Homo sapiens
agctttgtttatggtccacaggccactctttctagtgagggagaaacactttcctatttccatcccattgtaataatgtctttatttgtctgtcttctccacactaaactgtgaacttctccaaggtagggatagaatttcccacagggaaggaaatgaaagaatatctcagggggctggagattcctgcaccccatctgcccacctgcatgactttcttctccttggcaaagttcagccttcgacctgacagcatttagatttttgcctttctggaagccatggtggaattacttccagtttggtgactgtttcacttgcttcacctctggagtgggccaagcagctcccacaatctccccatggtgcttggctatgttactgctgagcacagtgtagtcagcrtgtgatctttaaatagcactaagtctgatatttccagtttacaagcatttggagaataagataagagcctttggcagctgcatttgactgggttttgatgagaagcgaggctagaatgagcctgcctctagggta

SEQ ID NO: 275855 - DNA, 637 bp, Homo sapiens
gcctgctgtctctaaataatttctttgttctttctgactgcagagttccaattttgctgaaattttcaatcccttctccccttccacattgttcagggtaaatcctgactaatttaagccaatcacagtaatttcattcctttttccagtgattgattagaagattatgtgacctaaygttggttaatgagaaagaagaggaattcaacagggaggcttcagaatgctgctataatcaagaagagacataagtaaatcaccaggggtaaccatcttgtggtcatgagggtttgctgacctgaggttggcagagatgaaagtaataaagattctggacctccatgacgtcactgagctattgaatctcctaaaattgaagtcgtccagcattgggacttcttttaaagtaacaaaacagaatttccttattggttatggtgtttaaattatgtaagtatttatttcactttcagcatcccaaatacactcataattctttatccttctcattttcagttcccagtgtctcaaagtacttcttttagaaaccttgctcagattttaaaatcatccaatccattctcacacatgtaggggcaacttggattaagctattgattcagaaagttagttaaaa

SEQ ID NO: 275856 - DNA, 637 bp, Homo sapiens
gcctgctgtctctaaataatttctttgttctttctgactgcagagttccaattttgctgaaattttcaatcccttctccccttccacattgttcagggtaaatcctgactaatttaagccaatcacagtaatttcattcctttttccagtgattgattagaagattatgtgacctaatgttggttaatgagaaagaagaggaattcaacagggaggcttcagaatgctgctataatcaagaagagacataagtaaaycaccaggggtaaccatcttgtggtcatgagggtttgctgacctgaggttggcagagatgaaagtaataaagattctggacctccatgacgtcactgagctattgaatctcctaaaattgaagtcgtccagcattgggacttcttttaaagtaacaaaacagaatttccttattggttatggtgtttaaattatgtaagtatttatttcactttcagcatcccaaatacactcataattctttatccttctcattttcagttcccagtgtctcaaagtacttcttttagaaaccttgctcagattttaaaatcatccaatccattctcacacatgtaggggcaacttggattaagctattgattcagaaagttagttaaaa

SEQ ID NO: 275857 - DNA, 637 bp, Homo sapiens
gcctgctgtctctaaataatttctttgttctttctgactgcagagttccaattttgctgaaattttcaatcccttctccccttccacattgttcagggtaaatcctgactaatttaagccaatcacagtaatttcattcctttttccagtgattgattagaagattatgtgacctaatgttggttaatgagaaagaagaggaattcaacagggaggcttcagaatgctgctataatcaagaagagacataagtaaatcaccaggggtaaccatcttgtggtcatgagggtttgctgacctgaggttggcagagatgaaagtmataaagattctggacctccatgacgtcactgagctattgaatctcctaaaattgaagtcgtccagcattgggacttcttttaaagtaacaaaacagaatttccttattggttatggtgtttaaattatgtaagtatttatttcactttcagcatcccaaatacactcataattctttatccttctcattttcagttcccagtgtctcaaagtacttcttttagaaaccttgctcagattttaaaatcatccaatccattctcacacatgtaggggcaacttggattaagctattgattcagaaagttagttaaaa

SEQ ID NO: 275858 - DNA, 637 bp, Homo sapiens
gcctgctgtctctaaataatttctttgttctttctgactgcagagttccaattttgctgaaattttcaatcccttctccccttccacattgttcagggtaaatcctgactaatttaagccaatcacagtaatttcattcctttttccagtgattgattagaagattatgtgacctaatgttggttaatgagaaagaagaggaattcaacagggaggcttcagaatgctgctataatcaagaagagacataagtaaatcaccaggggtaaccatcttgtggtcatgagggtttgctgacctgaggttggcagagatgaaagtaataaagattctggacctccatgacgtcactgagctattgaatctcctaaaattgaagtcgtccagcattgggacttcttttaaagtaacaaaacagaatttccttattggttatggygtttaaattatgtaagtatttatttcactttcagcatcccaaatacactcataattctttatccttctcattttcagttcccagtgtctcaaagtacttcttttagaaaccttgctcagattttaaaatcatccaatccattctcacacatgtaggggcaacttggattaagctattgattcagaaagttagttaaaa

SEQ ID NO: 275859 - DNA, 611 bp, Homo sapiens
gtaacagtactgcttctaatatcacagattttttttgtacagagtgattatttcctattgatgtatctagtgttgtttgggtagggctctttggctttgattctgagtgggtgcaaaagtctccgtatgacttctcctgtaatcagtgtcagtgatgcctgagttcctcagtggcctaggctacagtcaggtaggctggtccttgggcaccagtggtggcagcagcaggctggatatgccaattttgaggcctccagttgggttgttcaagtgctggtaatggcagtggtgggccaggtgygtaggtggatcctcaggctcctgggtggcatgagtggcattagcaatggcagttataacagtgggctaacgcttgggtgtctttgtcctggggcccctcaatggtgcacacaggtacaggctgtggtgggcaggttgtttgattcccaggctcccaggtggcatgctggggcactggcagtgctagtggtagatagggtaagcttatattcaataccctggatagtgtgaatgcatgccagcattgacaggcagggtggatcaatccccaagcccccagaggatgcatgaaagtactgccagtggagggt

SEQ ID NO: 275860 - DNA, 570 bp, Homo sapiens
ttgtgtctacgttttctttgtccctctcatttcaacaatccagactgtctatttttcatattctgtttcttttctttctgtttttcttttaataaaatatttcttttgacattgaatagctatcattttgcgccttctcctcattcagcttataaataattgtgttatctgaggattttgtaattcagattccctttctctagagggttcttgaaatactggtgctccccgttttttaaggttggtacagtgattttcaggaaaatctgacttgaagggactttttcaaatccaagatttcagatggtatctaaagattccctgagcatgttyttcatttctcaatgcattgctagtgaagcgttagctcttaaataatttttaaacaaattagaatctcaaaaaaatatgatgaatgttttctggaaattcttaacctcaaggtattgaaagccaatttcagatccagaattctgtaacataagaacctaaaagcaaaatcatacacatgtaaagatactgtagtttttatttttagataatatcaagaacatagctgtgctgtggaat

SEQ ID NO: 275861 - DNA, 598 bp, Homo sapiens
caagtgagaaaaatatttataaggtaagaataagctttaaaaagccaaatatgcaaaatcccacacatttgttccaattayttgctacctgatctgtgtttaatgttaagccaaatctgtattcccaagtatttactatttaattaaatgttcctttctgttaactgcagacctgctaagccattatttattaccagtctctctctctctctcttttttttttccacgcgggctgtattctggattacataactggtcggagcgaactgtcaaggctcggcattcacaggcatacctcccacccaaatgccagcctgggcttttcagcctcagctgctttcctttattttctcctggcgcaagtcataattctgttgacttaaggcagatcattttgtttaaccatatatatttatttaaaatgaactttggactcaaataatgcctatgttgtcagtgtgagtgctatttcctttcgaaatgtaaagagagttgattttgctcattttgtagtttgaaagaagccagactcccaatacagcacactaaaagcttggctttcgctatagagcacggccaactctagaataaaatttct

SEQ ID NO: 275862 - DNA, 598 bp, Homo sapiens
caagtgagaaaaatatttataaggtaagaataagctttaaaaagccaaatatgcaaaatcccacacatttgttccaattacttgctacctgatctgtgtttaatgttaagccaaatctgtattcccaagtatttactatttaattaaatgttcctttctgttaactgcagrcctgctaagccattatttattaccagtctctctctctctctcttttttttttccacgcgggctgtattctggattacataactggtcggagcgaactgtcaaggctcggcattcacaggcatacctcccacccaaatgccagcctgggcttttcagcctcagctgctttcctttattttctcctggcgcaagtcataattctgttgacttaaggcagatcattttgtttaaccatatatatttatttaaaatgaactttggactcaaataatgcctatgttgtcagtgtgagtgctatttcctttcgaaatgtaaagagagttgattttgctcattttgtagtttgaaagaagccagactcccaatacagcacactaaaagcttggctttcgctatagagcacggccaactctagaataaaatttct

SEQ ID NO: 275863 - DNA, 598 bp, Homo sapiens
caagtgagaaaaatatttataaggtaagaataagctttaaaaagccaaatatgcaaaatcccacacatttgttccaattacttgctacctgatctgtgtttaatgttaagccaaatctgtattcccaagtatttactatttaattaaatgttcctttctgttaactgcagacctgctaagccattatttattaccagtctctctctctctctcttttttttttccacgcgggctgtattctggattacataactggtcggagcgaactgtcaaggctcggcattcacaggcatacctcccacccaaaygccagcctgggcttttcagcctcagctgctttcctttattttctcctggcgcaagtcataattctgttgacttaaggcagatcattttgtttaaccatatatatttatttaaaatgaactttggactcaaataatgcctatgttgtcagtgtgagtgctatttcctttcgaaatgtaaagagagttgattttgctcattttgtagtttgaaagaagccagactcccaatacagcacactaaaagcttggctttcgctatagagcacggccaactctagaataaaatttct

SEQ ID NO: 275864 - DNA, 578 bp, Homo sapiens
atgtttacagcatcttcaccaggagtagattccgtctcaataaaccattctctgttcatccataagaagcaagtcttcattcatttgttttatagtgagattgcagcaaattcagtcacatcktcaggctccacttctaatcttctaattctagttctctggctatttctaccacatctacacttacctcctccactgaggtcttgaactcctcaaagtcttctatgaggaggcttgtaatcaacttccaagctcctgttaatgatatttggacctactgtgaatcacagatgttcttaagggcatctaaatgacaaatcctttcaagaaggttttcaatttacttttcccaaatccattggaagaatcactatctgtggcagctagagctgtacaaaatgtatttcttaaataataagacttgaaagtcaaaattactccttgatccatgagctgcagaatgaatattgtattagcaggcaagaaaacgtttatttctttctacatcttctttagagctttgggatgactaggtacattgtcaatgaatgataatactttgaatcttctttgtttcc

SEQ ID NO: 275865 - DNA, 638 bp, Homo sapiens
acatcctttgccacactttttgctgcaaaaatagaataagccatttctctaattagcactagattcttttcatggaaaatgattcttagagtcaaaaatttgggctataattgtcattgttagagaattggtcactgctaagctattgagtatgtgaagcaaaaatagatatatttttaagagaaaartaaatcattttcacatggcattttcaattcagatttaaggctttggacttcccatgtaacctctttgattctatgtgtgcatttatttggtcttaggctgaaaattttgtatcctaatgccatgaattatttatttggtttataaaataaacaatattttatgtatgttttagatagtagtttcaaatataacagtgttattgctctctttctcattattttacttcttattatttctttttcttaattaatttctttttttttttgtaaagacaaggtgtcactatgttgcccaggctgttcttgaactcctggattcaagtgatcgtcccacctcagtctcccaaagtgttgagattacaggtgtgagccactgcacctagcctaattaatatttaattcattattattgtatttctatcttaaagggcggtaaattatatacacagt

SEQ ID NO: 275866 - DNA, 551 bp, Homo sapiens
ataagttttggaaagaaaatgagaatgcagaagagacagcaatggtgggagggaagagactaataaagaataatgtataaacagaaagttgttaatcaaaggaaaaaagaaaacaagtgagagtacccctcacccccaccaaacaaagaagagtgggaacctgaaaactgaacttggacttttcacctgaccatcggrtacctcattttattctaggcaaaaattagaatgattagtttaatttataatggatggagggagctaaaagacatataatcttcatgacacccaaataccaacatcgtgggcattacttttactgtcccacacagctccaagaaaaagaaaataacttggaaagggagagcctggctgaagaggtcagaatagaattgtttttgatataagtttgcaggtcaacaaaataggattcaatagtttgtttcattatttgctgttttaccttgagcaagttatttcatcatgctgagcctcaattttttttcatcttacaattgaggattattatgaggatcacatgacgtacgttt

SEQ ID NO: 275867 - DNA, 600 bp, Homo sapiens
tgtggtggctacagtgaaggacttctattgaaaaaaagcaaaggggaaattaagagggactttctcttgctccttaggtaccagctcatccacagtgcagtaaaaaaacaagcaggcacttagggtccccgaatccaggccaaggctcttggacagcatgttctggacctgccctgggacagagtctagcccactgtcctgaagagtgagtcccaggccaggcagcattcaccacagactgatggaagagtccttgggctttaagtgaatattggtgatggactggaagaatgcccttgtgagctggttgtggtagtgcccacagggagaggctcccgtgactatagaaggcggggggaagagtgggaaggactttatattgtggttagagtgccaacatagctgaaatgaaatcaaacatcagttgagtttctaagattattgactcaaatttctggctcccaratagcatctctagactcccccagggcccagggcaacttgctacactgaagggaaggatgcaaacctagctggctttatcacctgcagattgcagagccttacaggcttgagtgaacataagtggtagccaggtag

SEQ ID NO: 275868 - DNA, 613 bp, Homo sapiens
cctgcagattgcagagccttacaggcttgagtgaacataagtggtagccaggtagcagttacagtgcagtgggccttgggcaaaacccagtgctgttatggcttttgttccaacccagcacagttcctgtggtcatggaaacaagagtacttgcaacaccacacccccagttccaggaggttcagcacaaagagagagtccctttgtttgggaaaaagcaagggaaaataacaagaaatctcttcctggggaaccagatcctattcaagaccaccaaggcagtgcatctacragtctgcaaaaacccaagtccctttgaatacttggaaatccttgtcaagaaggaagggcacaaacaaaaccagactgtgaagagtgcaattaatacctaactcttcaatgctaagacagcaaagaacatacacaagtatcgacacccaggaaaacatgacctcaccgaatgaactaaataagcctccagggaccaatgttgaagaaatagacaacatgtgacctgtcagacagagcattcaaaatagctgttttgaggaaacaaagaaaatcaagataacacagagaaaattcagaattctgttatataaatttgataaag

SEQ ID NO: 275869 - DNA, 613 bp, Homo sapiens
cctgcagattgcagagccttacaggcttgagtgaacataagtggtagccaggtagcagttacagtgcagtgggccttgggcaaaacccagtgctgttatggcttttgttccaacccagcacagttcctgtggtcatggaaacaagagtacttgcaacaccacacccccagttccaggaggttcagcacaaagagagagtccctttgtttgggaaaaagcaagggaaaataacaagaaatctcttcctggggaaccagatcctattcaagaccaccaaggcagtgcatctacgagtctgcaaaaacccaagtccctttgaatacttggaaatccttgtcaagaaggaagggcacaaacaaaaccagactgtgaagagtgcaattaatacctaactcttcaatgctaagacagcaaagaacatacrcaagtatcgacacccaggaaaacatgacctcaccgaatgaactaaataagcctccagggaccaatgttgaagaaatagacaacatgtgacctgtcagacagagcattcaaaatagctgttttgaggaaacaaagaaaatcaagataacacagagaaaattcagaattctgttatataaatttgataaag

SEQ ID NO: 275870 - DNA, 613 bp, Homo sapiens
cctgcagattgcagagccttacaggcttgagtgaacataagtggtagccaggtagcagttacagtgcagtgggccttgggcaaaacccagtgctgttatggcttttgttccaacccagcacagttcctgtggtcatggaaacaagagtacttgcaacaccacacccccagttccaggaggttcagcacaaagagagagtccctttgtttgggaaaaagcaagggaaaataacaagaaatctcttcctggggaaccagatcctattcaagaccaccaaggcagtgcatctacgagtctgcaaaaacccaagtccctttgaatacttggaaatccttgtcaagaaggaagggcacaaacaaaaccagactgtgaagagtgcaattaatacctaactcttcaatgctaagacagcaaagaacatacacaagtatcgacacccaggaaaacatgacctcaccgaatgaactaaataagcctccagggamcaatgttgaagaaatagacaacatgtgacctgtcagacagagcattcaaaatagctgttttgaggaaacaaagaaaatcaagataacacagagaaaattcagaattctgttatataaatttgataaag

SEQ ID NO: 275871 - DNA, 1179 bp, Homo sapiens
attcatttctgataggtcaatattttcactttttttttttaaagaaagcccagggagagtgatgtcagcaagatagcagaataaaagttctctggctctagtcttcctcacagaagtccacctagcaactatccacagataagaatatcctcatggatgtatcagaacttgagagtggaccacggaactgagaaaagctgcatttgaagagtaagagaaacagtttcacttggcttgtgttgtcctttcctccaagctggcatagcatcacacaaagatgattccccttggcccacgacttcaacagtggagaaagagagtcagagacagccatttaccttccccaccattctggaatcctctgcaagaracctatttctgtcctgtctcatggggaacattaagggtattggtagtgctagactacctggggtcagttagaaacaaagagcaggggtggagctcaaagtgaccagagaatggatgttggtagtagctctgcattctggccaacagaggaatctcaccagagaaacaacacaatcccaccaggaaatcccacctggccaacaacattgatctgcagaaagcacagtagacagwaatctccagtgaaattcaacccaaagaggaagtcacaatgaaataccataatcaaattatctaaaatcaaagtcaaataaagaattcagaaagcagtaacagataagaaacatcatattcaaagaagtcacaatacagtttaatctgctgatttatcagtagaaatcctacaggctaagagagaatgggttgatataatcaaagtgctgaagaaaagcaaaaaaacaaaaactggcaaccaagaatactttacctaaaaaaatctatccttcataaawaagggagtcataaacttccccagacaaacaaatgcataagtagtctattaccaataggcctttcttacagaaaatgctacaggaaaaaatttaagctgaagcacaaggctactaattaataacataaaacatatgaaagtaatgaaaaaatctcaattatatatgtaatacatagttatattcagaatactctaataccataatggtgttatgtaaagggatattctttctaccaggagatttaaaagacaaaactgtatttgtctttttattgtttctatttatatttaaaaaattt

SEQ ID NO: 275872 - DNA, 1099 bp, Homo sapiens
agcagttcatacatcaacaggtatgaagggtgtttatatataaactgctgtagttatttctcttaaagttgatatcaagttgtctagcttcacttttcagagctttaggaaaaaagcagttttaattcctcattatttcaaatcagaattttgggaggcaaattagaaatgttagtctggagagtcacagtcagatattagaactaaacatttaggatttagtttagacagcaggtatttcataaaatctggaaaaaaaaagagctggaattaataacaggtgtaccatrggtctgattttttttttctgtttttggctgttgttgaaacataatttttctctctccagtgctccatttctaccaagaagaaatcatagtatgaacaacttatttgcaaactaaactttagctttttaaatacttgactattcacataaagtgcaagaagaatagtgattggwtggcttttttggaacttttgtatacaaaattttggattagacttgcaaaaattgagaattgggggacgaggcaaagattgtgtctgtaatatttgtatatattgaatgaatttctctattgttgactacaaaaaaagataaagaaccagcaatgtttccaacaatataaatcattaaaataattttagttcctcatcagttcagwcacatgtaattaattctttttctatttgatgttaggttagcaattttatgagtccagctttttcttccaatggagttttaaaattttaacctagttgtattcttattcagtgttaaccagttgaatcatactcaactttgaatatgttatcaaaattgtcagaaacctgtatttaagggtacttattgtagtctttttgtgaacctcctcaaatatacaacactttagtatttgccaagagcttttagaaaaatgaaaagtatcagaatataggagttgactgtggacaacaatacttaaaatggccattgttaaagataaaattgaaaaaaagtttatttcctgtggcctccaacaattgtacacattaaccataattacgattgataacataggccaagacatatcaaatttttaggaatctcatacaa

SEQ ID NO: 275873 - DNA, 574 bp, Homo sapiens
ctttccatttttcatctgtggggcagaaggtgggggtagtgattgcaaagggatctttttgttatttggacatggaaagttggggttttccttttgattcagttattggaagtcagtgcaaattggccctaggttccctgcctccagacccttttctcctgcctcaatatttaaggtagcatacaggaaagaargatagaagtaaatgggagaacaagtcttatagaaaactattgtggagattttaagttttccccaaatccagtgaagttctagttagcaggagtttcagggaaaaaaaaaatctagttcagtaagaagttgccatgtgagaaataggattttaaagagatcagagaagaatagcagcttttaattaagcttatttttgtccagagtgctcttaaaaatcctttcaaatataccagtagcaaactttatgtctcttgagaggctgagctttcactggagctgagaatatggcagaggtagctgaggaagagatctctctaccttcctggccagggagaatccagcctctttcactcatttgtttgattcccagggtggaggg

SEQ ID NO: 275874 - DNA, 597 bp, Homo sapiens
tgttaactgcaaatgaggtatacaccacatttctgcccagcaatattctttaggatttcagcttctcagctgactgtctgcacacaaagccttgacaatccatgtgctccagagatggaagattaaaagaaacagtaggtaagacaggaaatcaaaagttgtccatggggatagaaaagatattaatggttaccccaaaagatcaagagtcacaaaatataaattcaaaatgaataattcagactcatttttgtaaatgtttcttttttcttcttagttaaaagacttacatttctgagggtctggttccctgaccaggaaccaaatcctggccctgatggttaaatagtggaatcctagccactgaactacaggctgcagtgcctttttgaaaatcccacaagggatccaacacagcactttgagcgaactgcccactgtggtgtcagagccccaacaytggaaaatgtttgactcacaggttggcaagaagaatttatcgacaacagttaggtttgaaaaaggaaggttttattagaaagaaagaacgctgtagaagagtgcagtgggatgcctcagcaggagaggactgagcta

SEQ ID NO: 275875 - DNA, 520 bp, Homo sapiens
tcttggtttgcgaagataaataaaacatggtttccaatcgagcttatagtccagctttgaattgcctgtgaaaatygatttagtatttacaaggtgctatggaaagtaaaggattattattttttgttctttagacactgtaatgttttctgtatatgaaggccagattttcaatagtaaaagatattggaaaggcgtaaaaaccagaaaataacagaacaaattgggaaaagctgactgcattaagaccacaaatatctctcaacgagtggtgtcaggtaggtgacaagaaggcaagggacttttccattcattgaaagcaataaataaaaattaatatctggacagtgctttaaagcttatgaagtactgtcacaatatctatgcccacacttaaggtgtgcaatctcagttctggtattgtagaaaatgagaaatggtagggaaagagaaataattgaaatttctctgaaggaaactgtgtgtagagaagagattaggccaccaaccaggaagaaat

SEQ ID NO: 275876 - DNA, 576 bp, Homo sapiens
tgttggactggacatgtctttggtagstttattattgggccaaatgggaaaccttctgaacacctggggtgagcctttcagctgtaaaatctttcccgccagagcatgagtgtccatggatggctagttctgaagcggaagagaaactattaggcccagggtctcagaaccaggctttcaatttgcagaagctgcattttgtaggcagcttcagtaacaaaggcatccacgccctcagattgcttctgaagaatgtatcttagaaccaggttctatgggctctgattcatcttcccagctgtcagagatcaaagtgacatagcatctccaaagtgtgcatgaaagtttcaaaaatttcagagagaatctttctggctttcaacaatccaattgtagattgttatggcttagcaacctctagaaacatatatacatatatatatatatgtatttctatatatatatagatagatagatatattcttctaataacttagcataactattgctaattgggataaggcaggtctcaaaaacttttttaaaaaatgacttcataacaacattcagaacact

SEQ ID NO: 275877 - DNA, 623 bp, Homo sapiens
caatattaaaaataattccctttggtaatttgctggttcataaagttggaaacgtcttacttagagaaattgatggtataaagtcaaatatgaaacaatatggtttctggcatctgcagcaagcattgttaatatgggatctatgaatagaattgaggcgatctttgaatatggaaaataaaacaaaattgcatctttattttaattaacattaaactgaaacttgcattttcttcaaatacaaatttttgcaaaaatatgattaagctactgtttaatcaagcaagacatatgactttgtcactaataaaaaccacagatattgtaatatgtgtattttctcaaattatacttgtgtagatatctgyattattaatctcatcgctatcttgaaagtatgattgttattataataaaactacaccaggctgttaatattttaattaaaaagcacatagatgactacattgataaattgcatttttagtattttgatcactatgttttgacataattgttttcctttgtaatcctatgctttttattttatgcatttaaaaataattctgagagggtgtctttgtacttcatcagactactcatggggtccagggtacaaaaag

SEQ ID NO: 275878 - DNA, 607 bp, Homo sapiens
taggtctttctaggtggtaagaatattggtgatataattyttttgttattgtaagtattatctaagaaaacactaacatttctaccattaatcccagtaattccattactgaatatcttattatgtgtcatatctttctattaaggttttagaactctttaaatgtggtcctcaagctgctacttaaatcagatttcaaaaagcatatgtattgtattagaattcataggataaatgacatttatatatggcacaatcatgtacgatggctggctgtctctcacacacacatgcacatcagaattcataaattatattattttaggatgaccttgaaaccacttttcactttgtaaattatgaaactactttcgcttttttactttttaaattaaattatttttaaaactttacatgcttattgctacaggtagaggttattatttctgtctctgaaatgtgtgagttgggctacatcagtatgttaaaaccttctatcaaagtctataacatttgagctagcaatttcatgtctgaaaagtgggcctacataaattgaagacatatggaaattttttgaatattaaatgaaattattaaaacatgt

SEQ ID NO: 275879 - DNA, 582 bp, Homo sapiens
tggtgatataattcttttgttattgtaagtattatctaagaaaacactaacatttctaccattaatcccagtaattccattactgaatatcttattatgtgtcatatctttctattaaggttttagaactctttaaatgtggtccycaagctgctacttaaatcagatttcaaaaagcatatgtattgtattagaattcataggataaatgacatttatatatggcacaatcatgtacgatggctggctgtctctcacacacacatgcacatcagaattcataaattatattattttaggatgaccttgaaaccacttttcactttgtaaattatgaaactactttcgcttttttactttttaaattaaattatttttaaaactttacatgcttattgctacaggtagaggttattatttctgtctctgaaatgtgtgagttgggctacatcagtatgttaaaaccttctatcaaagtctataacatttgagctagcaatttcatgtctgaaaagtgggcctacataaattgaagacatatggaaattttttgaatattaaatgaaattattaaaacatgtg

SEQ ID NO: 275880 - DNA, 587 bp, Homo sapiens
attatattattttaggatgaccttgaaaccacttttcactttgtaaattatgaaactactttcgcttttttactttttaaattaaattatttttaaaactttacatgcttattgctacaggtagaggttattatttctgtctctgaaatgtgtgagttgggctacatcagtatgttaaaaccttctatcaaagtctataacatttgagctagcaatttcatgtctgaaaagtgggcctacataaattgaagacatatggaaattttttgaatattaaatgaaattattaaaacatgtggcacataggaaatgttaaatacatatttctatcattactgttatttttagcagtagaaatataatccatgaatgtaagaggtgaaatgggtctctagtaggaattgaaatgttraagtttttttccaacttttcagtttatttctatcaaaggacagcttgggatatatgtagtcatgtccctaaatgagtatgataaatatcacattcatttcaccaaaaacatgaaggcacaaatatttaagattactggcatctgcatttctctaatgttacagagctcagagtaa

SEQ ID NO: 275881 - DNA, 473 bp, Homo sapiens
aatattgccaaatattcatatggccttatgatttcagctgcatatcttaaaagaagaaatttttagaaaactaaaactatagagaaatagtatttttcattttttttcttgaaaagctgcagtacaatcagtgtggagtttttttccctcataagtggagagcagatgaaaaattatgaattttggaacaaagaaaaccaccacattttacatatgtttaataaaatacaaagcaatatcatactaaagcaattcaatttaaatatttaagacacaaataaaataaaaagtattattaaacagtctaatgcktttagacaatttcctgccatattattcatgaacatggtcttaagtaaatagcctccctgtaattgtttatttttctgagcaataaaagctatgtctcttggacaattgtacttcaacttccaggcaattaatgtgtcttgctatagaaatgcaatgtgcaa

SEQ ID NO: 275882 - DNA, 473 bp, Homo sapiens
aatattgccaaatattcatatggccttatgatttcagctgcatatcttaaaagaagaaatttttagaaaactaaaactatagagaaatagtatttttcattttttttcttgaaaagctgcagtacaatcagtgtggagtttttttccctcataagtggagagcagatgaaaaattatgaattttggaacaaagaaaaccaccacattttacatatgtttaataaaatacaaagcaatatcatactaaagcaattcaatttaaatatttaagacacaaataaaataaaaagtattattaaacagtctaatgcgtttagacaatttcctgccatattattcatgaacatggtcttaagtaaatagcctccctgtaattgtttatttttytgagcaataaaagctatgtctcttggacaattgtacttcaacttccaggcaattaatgtgtcttgctatagaaatgcaatgtgcaa

SEQ ID NO: 275883 - DNA, 567 bp, Homo sapiens
gactctgtggcaatgtctctttgatgaaatatacacaataaaggatgatagatctataatatctctgatgtggccagtagaattaaaggatgaaaaatatttaaataaaagatggaaagaagaggaaaacaggttttaagaataatcattcagttttcttttacttttgcaaatgtcagaatcataccttgcttccatagcaagtgaacaagtttggaagtccatatgtttctatattggagatgctttcagttctaccattctggtttgacaatagattgggccatgtttatggagccacatgaatcctgagtctctgagggctttaaggttcaaaataaaatttaattaatctcatcataataaagggaagtttatagctgcttatctgtkataatgaacatcctcacgttattgtaggaccttagcaaaaaagacaaactattgtctatcactcttgaaacatgcccttcatcatttactattccccaaaatacagagggacaattagatcagctctatgactagccaaggcaatactgaaggagcttaatttgcatcacaata

SEQ ID NO: 275884 - DNA, 630 bp, Homo sapiens
actaaaaaaattattgctaaagaaaaaatatatatcaaatgaatagctgtaatacaaaggactatttattcattgatgttaaaatttgaattgcagacaaatatttccttttagtatctttacaaacattgtaatataatttttaagcatgaatatgttttcttcctttaatgcaaccccatcaccatttaaatatgggataaaaacattaagggtctcattgtgttgcggatttgccagttctatagataatccatttgtatttaaagactaagagaggtggaaaagcaaaattgtgactaaaatccttttgctttttgaaactgctctacggttgaaatgtcggcatcttgtatgtattattttaataatgaatacactattttttaccacagtgttagatttacagaataatctaacagataatatagagttctacgtatgcattccatctgctccctccactctcacacaattacccctcatgagcaactttcattagtgcagtatactcattataactaatgaamcaatattgatgcattcttcttatattatggtccatggtttacattaagctttactttttgtgttgtacatttctatgggtttgacaaatacataattatt

SEQ ID NO: 275885 - DNA, 534 bp, Homo sapiens
tgatactcactcacactggtgagggcagatattctttactctgtgtatggattcaaatgctaatttcttctggaaacattctcacaggtgcatccataagtaatgttttcactgtctatctgggcatcctttagcccagtgaagttgagacaaaaaaataactatcaatgcctaatttgtttagatgtcacattatcattttacagatgttaaaatccaagctcagaaagagatttaaagatttaaaccttgattttcttgatttctgagcgcatgttattagtccactcaatgctatccaaccacaatgataatatcaaaaacaataataaaacacaagagtaatcagagctacaacygaaaagcttctaactcttattgaattcttatcatatacccattcttagtgctagagatatatgatgcaatttaattctcactgctaagctatacatttgtcattcccacttgacagaggcacagagacatagacacaatgctgaaagattacactgcctttacatcatagaacca

SEQ ID NO: 275886 - DNA, 577 bp, Homo sapiens
tgtaagaatcagttctgtcctctaagcttgagaggaaattccctttaagcttctttcttcctgaaacgttctgctctagacatcttcagagaaaaaaaaaaaagtctccattttatttaagtcactattattcttggcaccaaatgctaatatatgcagaataatattatgttttattcccagctgatttgagttgaaggtccattccaagctacaatatgttggggtccagtctgcctctcctcctataattgatagaattttctttctttcctcctgtaataatacataaatttcattgaatatttactgtatgtgatgcactgttctaaggtgcttttcacaaaatgtttatgtaatcctcaaaagcaatgctatggaatagctattgtaactgttcctggtttacaaaaraaaatcttactcacagaatttaaacagccaaggtcaaaaacctacttaatgttgagattggtacggaccacctggattcgtgaggcaatagtgtattctcttaaccgctaatgctaaatgattaatatatgactagtatagcattacttatggggggacaatg

SEQ ID NO: 275887 - DNA, 542 bp, Homo sapiens
taaaatttagctaatggattcaggtgcttatctgtttccccttccatctctctatatatgtagttcaataattatagtatgctatcatgattttcatcatatctgcaamaagtctctacttatcttccttttgattgactctttttaatgtaaacaaatgtatcttaaagggaaaccttatgttactacacaggagaaattaacaagcgttaataaagtggtaaagacatgttaacttaaagctaaggcttctttagtaatgcaattagaatggacaagaaagtaacttcctcagcaattcaatggcgtttgtttccagtgtctgtctaccctctataaaatgtttcaatgtttactcacactttccagttaaatggtctatgtattagggcagtaggattttgatacctatttttaggtggttgtctagttcataaaacaatttttgctttgactcatactgtataatgtctccctttcacaccaaacccctcaagtattgcttcaaagagaataaaatacctaggaatccaacttacaag

SEQ ID NO: 275888 - DNA, 542 bp, Homo sapiens
taaaatttagctaatggattcaggtgcttatctgtttccccttccatctctctatatatgtagttcaataattatagtatgctatcatgattttcatcatatctgcaacaagtctctacttatcttccttttgattgactctttttaatgtaaacaaatgtatcttaaagggaaaccttatgttactacacaggagaaattaacaagcgttaataaagtggtaaagacatgttaacttaaagctaaggcttctttagtaatgcaattagaatggacaagaaagtaacttcctcagcaattcaatggcrtttgtttccagtgtctgtctaccctctataaaatgtttcaatgtttactcacactttccagttaaatggtctatgtattagggcagtaggattttgatacctatttttaggtggttgtctagttcataaaacaatttttgctttgactcatactgtataatgtctccctttcacaccaaacccctcaagtattgcttcaaagagaataaaatacctaggaatccaacttacaag

SEQ ID NO: 275889 - DNA, 596 bp, Homo sapiens
taatgtctcttagagtggtaatttttgttagaccctgaaacaaataaaacaatgctttgaatcttaaatactgtgtgcttattgcctcaaaagaagacatatttcatcttgcagtaaatccttttttgtcttcatttctgactttttcttccagagattcaagatatttctgtaaatccattagacactcatagtttataagcataatggcaatcacagtcaatggagtggagaaactcaactttgttgtgttctgaattcgaagaaaatatttatcatagtctctgttacagtccttaaccgtagtccgtaaatgaataaactacccctccagaaacggaaaacatggatattattatcttaatgattaacctctcctttaattttaaacacagccatgaaacaagtttattattgtyaatggtttgaaccccagtttaaagactgtttacattcttttatatgaggcagaaacaccctaactctctgatctccagtgatcttagaaggcaatcaggaataaaggcaagagacttaagttatttcttttttgaatgttttatcaacaactattatttgatatccacctctcaaaa

SEQ ID NO: 275890 - DNA, 1183 bp, Homo sapiens
aataagctgctaaacctatcttcacttcttaggatatgccaaaatctcatcctttgccattgacacaaaacatttkttaaaaatacaaaacagtttttccaattgttataataatttctttttttaacatatatgctttataagtgtgcttaagtctatgaatgtatgtaaagatacatatctttgtcatgtagatgcataaattttctataacatggagactttctgctcaacaagatgacaaggcaaaaacatactgaaattctgatttccacagtgatagttttggattcaaattcttatttttaataagtattatcatatttattataaacattaaaatattattacacatcccttaggattcatgtgaaaaaataaaagaattaagacatacatacagtatcacaataatgaaaagaattattagagcttcaaagttttttgttgtttgttttttgtaattctcaattttatttgaatcataaaatggtttcaggtgacgtgtgaaaagagatattctctgtccaagttatgtgttcacagtagtaaatggttatgtaaagacacccaaaggtgagtgaaataacawaataagctgctaaacctatcttcacttcttaggatatgccaaaatctcatcctttgccattgacacaaaacatttgttaaaaatacaaaacagtttttccaattgttataatawtttctttttttaacatatatgctttataagtgtgcttaagtctatgaatgtatgtaaagatacatatctttgtcatgtagatgcataaattttctataacatggagactttctgctcaacaagatgacaaggcaaaaacatactgaaattctgatttccacagtgatagttttggattcaaattcttatttttaataagtattatcatatttattataaacattaaaatattattacacatcccttaggattcatgtgaaaaaataaaagaattaagacatacatacagtatcacaataatgaaaagaattattagagcttcaaagttttttgttgtttgttttttgtaattctcaattttatttgaatcataaaatggtttcaggtgacgtgtgaaaagagatattctctgtccaagttatgtgttcacagtagtaaatggttatgtaaagacacccaaaggtgagtgaaataaca

SEQ ID NO: 275891 - DNA, 591 bp, Homo sapiens
aataagctgctaaacctatcttcacttcttaggatatgccaaaatctcatcctttgccattgacacaaaacatttgttaaaaatacaaaacagtttttccaattgttataataatttctttttttaacatatatgctttataagtgtgcttaagtctatgaatgtatgtaaagatacatatctttgtcatgtagatgcataaattttctataacatggagactttctgctcaacaagatgacaaggcaaaaacatactgaaattctgatttccacagtgatagttttggattcaaattcttatttttaataagtattatcatatttattataaacattaaaatattattacacatcccttaggattcatgtgaaaaaataaaagaattaagacatacatacagtatcacaataatgaaaagaattattagagcttcaaagttttttgttgtttgttttttgtaattctcaattttatttgaatcataaaatggtttcaggtgaygtgtgaaaagagatattctctgtccaagttatgtgttcacagtagtaaatggttatgtaaagacacccaaaggtgagtgaaataaca

SEQ ID NO: 275892 - DNA, 586 bp, Homo sapiens
taacaaacctgcacattgtgcacatgtaccctaaaagttaaagtataataataataaaatttttaaaaaaagatgaataacaacacattgttcttattcatgagaacttcagaatatgtacagggacagggttagatgagatttcatatgatgacttaaagtattcctataaatattaaaataaagataggtatagatttatttaggggcaagcaatcttatcctttgatcatgtaggaaaggccatgttatttttcagaactctgcaatagttcacaagtttactcagggttaaagccaaaaccctcacagtagcctacaaggccttacagaagcttttgtgtcatatagttttatgactcccatctcctactctttccttctgctcactctaaatcaactctttgggctctcaaatatggcayacatgctcctgacttaggctctttgtaccagcttgcttctccacctagacatcaaattggagagttaagcttatatttcaggcaattttttaaattttaagcagaataagtcatattacattcatctttgagtaatagcccttgtaacatgggtggactga

SEQ ID NO: 275893 - DNA, 459 bp, Homo sapiens
aaggcttttacacactgaggagtaaagatccctggggggcgggttgtggggaagaaccatagaaaagtcaacctgtcattttgctttgtttgctcacaaggcacatgccaacatataaatttccaggaataaaaggttaaatattctgcaaaagtctgatgcttagaggttaaaaagcctggcagagcattaataaccttgcagtgttgargaagaaaaacaactgaagcctaggaaccatggtaagtatataaagctttgagtttaagtcctaggagggctcagctctaggagtagtgcaaacaagaagtagaccagcctaaaattcagcttcagattaactcaaatattaaatgcatgaagctaaacatgctactttccaatagttcactatacaaaagttaaatcatctctggaaaaaaatagtatcatttacactttctgggttgtttttttttc

SEQ ID NO: 275894 - DNA, 574 bp, Homo sapiens
tatttgccatcttttatgtcctcttttttgatgaaacgcctgttctatgtctttggtttattttgtaatcattttttttcctttarataatacagttgtgtttggagacttcctcacaccttcttgtcagatgtatgatttgcaaatattttcttctggtatttactttcttgttttatccagctaaaaggctatttcacagagtttgggtttttaattttgatgactttccagcctcccgaaatgtgagaatgaatgtatattgtttataaacacccccagtctatgatatgttgttacagcagcctgaacagagtaaggcaaggtataaacacagaactgctgaactaaacacagcagcatgtgatttacagcaattctgtgcaggttgatatctcttcatctgagtctatgtcacatttaaaatgtactgcactacttttaacttattagttgaataagtaatcaaattcagcctttgaattatacaaagaaaaaataaaatgatcatagactttgattctcagaaatgttttttgcacttcccaccaaaagcctcatttaccccaaaata

SEQ ID NO: 275895 - DNA, 632 bp, Homo sapiens
gtgtgcatttgatttaattttacaaattcaagaaatctaggcagcatcaataaataacctactgctatgatttgaatgtttttgttccctccaaacttttgttgaaacttaacccccaatacaacagtattgggaggtgtggccttttgggaggtgtttagctaatgagggctctgctctcttgaatagattaatgtctctataaaaagagcttgcagtggtragttctcccttctctgctcttcttttatgtgaggacacagcattagctttctcttgcccttctatcttccaccatgtgaagatgggaaagaaggttgtcaccagatactagtaccttgatcttgaacttcccagcctctagatctgtgagatgataaacttcttttctttataaattacccagtttcagatattctgttatagcagtacaaaatggaataagatgccttcaaagaatgtagttcatggtaaaccaggagttttcttttatacacaagactgaaagacactggtggagtagtgaaaggaagtgaatttctttgttaagcctccaaatagacttcatttttgaaacccttgtattcaggtgaaagatgcaggcaacaattattaactagcttgaggatttt

SEQ ID NO: 275896 - DNA, 568 bp, Homo sapiens
attttctctatccatttgtctgttgatggacacttagattgattctgtatctttgctattgtgaatattgctgcaataaacattgcaagtgcacgtacccctttgattactgatttattttcctttggaaaacacagtagtgagattgctggatcatactgaagttctgcttttagttttttgagaaatctccatactgttttccatagtggttgtactaatttacattcccacyaaaagtgtatgagtttcctgttctccacatccttgacagcatctgttattttttcgtctttttcataatggccattctaaatggagtaagatggtatctcattgtggctttgattttcatttgtttgatggttagtgatgtcgagcatttattttcacgtgtttgttagccatttgtatttgttcttttgagaattgtctattcatgtcctgtgcttactttttaatggaattgtgtatttgtatcattaagttgtgtgattttcttatacattctatatattagtcccttaccagatgaatggtttgcagatagtttctcccatgtaacaga

SEQ ID NO: 275897 - DNA, 568 bp, Homo sapiens
attttctctatccatttgtctgttgatggacacttagattgattctgtatctttgctattgtgaatattgctgcaataaacattgcaagtgcacgtacccctttgattactgatttattttcctttggaaaacacagtagtgagattgctggatcatactgaagttctgcttttagttttttgagaaatctccatactgttttccatagtggttgtactaatttacattcccactaaaagtgtatgagtttcctgttctccacatccttgacagcatctgttattttttcgtctttttcataatggccattctaaatggagtaagatggtatctcattgtggctttgattttcatttgtttgatggttagtgatgtcgagcatttattttcacrtgtttgttagccatttgtatttgttcttttgagaattgtctattcatgtcctgtgcttactttttaatggaattgtgtatttgtatcattaagttgtgtgattttcttatacattctatatattagtcccttaccagatgaatggtttgcagatagtttctcccatgtaacaga

SEQ ID NO: 275898 - DNA, 587 bp, Homo sapiens
catcttttctcatcattaaaactatgacaacttgcactaccacatgctctgataagctttaggcttggaaatcagaaaatcaaacccatccttttaacttactgaagggatacttatggtatagttagttagacaataagtataatgttgacctaaaagcaacttaaatagtccctaccttatagaatgagagtgtaagtccagtaggcaattcataaaagagagttacataaaggaacaatagctacaataagtggaaagaacaataatgctatgaatatatatgctaaagaaaattgtcccagctatggaattgtgtctgaagaagtatttattatcattattgttaataacatgaagttttatacatgtggtcagacataattatcataattttgaaagcctrtttctcaatatctggtctgggaaagtgaaaagcaaagaactgatgacttcttttacaccgccctttttctgacccactgatcatcacaaggacagtgactcagcttttttcccctcctccatatttattcccagccttggcatcattatatgctggcaacttatattccataatttaaatt

SEQ ID NO: 275899 - DNA, 571 bp, Homo sapiens
catttgccactaaattccaattgcaaaagccagatggagaactgaaatgcaataaaacaagatgtgtatttccatttcaaatgtttaatgacttgccattggtagataaaaaattaggaacttaaggttaggtacagcagtcaggaaakgtgggcacatcaggacagaatctatagaataaaattttataaatgtctagagtgtctgaaagaaatatcatcaacattataaaatagaagttctgggaaggatctttgagaatacctattgaattttataggtgaggaaacagaatcaaggttaaaatgctgcataatcctattgaattccattaagtggcagggctagtatttgatctgaaacagacatcctgtgacttttttctaaatcacattaataagttttggaaagaaaatgagaatgcagaagagacagcaatggtgggagggaagagactaataaagaataatgtataaacagaaagttgttaatcaaaggaaaaaagaaaacaagtgagagtacccctcacccccaccaaacaaagaagagtgggaacctgaaaactgaactt

SEQ ID NO: 275900 - DNA, 540 bp, Homo sapiens
ctgcagctatactgcctctctagattcctcctctctgggcagggcatctctgraagaaaggcagcaacctcagtaagggacttataggtaaaactcccatctccctgggacagagcaactgcgggaaggggcagctataggcgcagcttcagcttcagcagtcttagccattcctgcctgccagctctgaagagaggaatggatctcccagcacagcgcttgagctctgctaagggacaggctgcctcgtcaagtgggtccctgacccccatgcctcctgactgggagacacgtcacagcaggggtcaatagacacctcataaaggagagctctggctggcatcttgtgggtgcccctctgggacaaagcttctagagaaaggaacaggcagcaatatttgctcttctgcagcctccaccagttatacccaggcaaacaggatctggagtggacctccaggaaactccagcagacctgcagcagagaggcctgactcgtggaaggaaaactaacaaacagaaaggaatagcatcaacatc

SEQ ID NO: 275901 - DNA, 540 bp, Homo sapiens
ctgcagctatactgcctctctagattcctcctctctgggcagggcatctctgaaagaaaggcagcaacctcagtaagggacttataggtaaaactcccatctccctgggacagagcaactgcgggaaggggcagctataggcgcagcttcagcttcagcagtcttagccattcctgcctgccagctctgaagagaggaatggatctcccagcacagcgcttgagctctgctaagggacaggctgcctcgtcaagtgggtccctgacccccatgcctcctgactgggagacamgtcacagcaggggtcaatagacacctcataaaggagagctctggctggcatcttgtgggtgcccctctgggacaaagcttctagagaaaggaacaggcagcaatatttgctcttctgcagcctccaccagttatacccaggcaaacaggatctggagtggacctccaggaaactccagcagacctgcagcagagaggcctgactcgtggaaggaaaactaacaaacagaaaggaatagcatcaacatc

SEQ ID NO: 275902 - DNA, 540 bp, Homo sapiens
ctgcagctatactgcctctctagattcctcctctctgggcagggcatctctgaaagaaaggcagcaacctcagtaagggacttataggtaaaactcccatctccctgggacagagcaactgcgggaaggggcagctataggcgcagcttcagcttcagcagtcttagccattcctgcctgccagctctgaagagaggaatggatctcccagcacagcgcttgagctctgctaagggacaggctgcctcgtcaagtgggtccctgacccccatgcctcctgactgggagacacgtcacagcaggggtcaatagacacctcataaaggagagctctggctggcatcttgtgggtgcccctctgggacaaagcttctagagaaaggaacaggcagcaatatttgctcttctgcagcctccaccagttatacccaggcaaacaggrtctggagtggacctccaggaaactccagcagacctgcagcagagaggcctgactcgtggaaggaaaactaacaaacagaaaggaatagcatcaacatc

SEQ ID NO: 275903 - DNA, 595 bp, Homo sapiens
taatgtatcatacaaaaaaaaccacaaaaaacaaaaaacaaaattaagccaggctcatgcctrtaatcacagcactttgggaggctgaggcaaggggattacttgaggtcaggatttcatgacctgcctggacaatatagtgagaccccatttctcaaaaaaaaaatagctggacatagtggaacatgtttgtagttgcagctactcaggaagctgagatgggaagatcccttaagcccaggagtttggagctgcagtgaataggatcccaaaactgcactccagcctgggtgacagagtgcgaccctattgctaaaaaaattattagataaataaaaattaaaagtataatttatatgagaaaatttgaattttctaaaaatcaatctataaaaatgcaaggcataatggataaaacaatgacattctggaatctagtaatccaggtataaaaccattgcagtaatccaggcaagtgtagattacaacctattctgggatggcaaagtgagaaaggagaaagaaaagatccttgtttacagctaatatcgtttattttattattgcctatcattgccagatctagttctatcaa

SEQ ID NO: 275904 - DNA, 614 bp, Homo sapiens
caaatagttttgtctgctgaataaaartgggtaataaatatgaggagctatattcttcattatttgatcaatatttagaaaatttcttttgaggttgacacttgtaaggatctaaatgaacttggacttgatagtaatgggactcattgaggaactaatagagattaacaagttgattgtcatagaattggactactgaaccacttggcaagtacttactaaataaaatagaagtaaagaggactcaggacttacactatttcctgacctaataaagcttcatattgttaaatctgtgcaacaaagccaaactggtgaattagtaagttgtctcctgatatcatgatccaaacaatatacaggccacaacttgttattctcactaatcagaaaggagtatgaggaggatgaaaacttcatgaatctccaccataaacccttcctcagacattgtgtgaaattcttgggaagaagcaagggttaaagattcttatgattgcacacgtttaaagagacctaagctgaaggcagaaaataattaacttggatatttcatctttttccatttattcaaatgtttatattcaccccaagacagacaagtccaatatatt

SEQ ID NO: 275905 - DNA, 562 bp, Homo sapiens
ctttgcatctctcaaaacagctagctagtatcctatatagaaagaaaaaaatgattcaatatagttttagtaaataaattaacagatattaatggaaagaaaagaaagttatttggatcctggtaagacggtatttgatttaaatagctctatgatcatctcctgttccagaagtatgagtagcctaactcaaatacccatacatggctatttaaatttactttttgattaaataaattaaatctagaaatcaattcatcagcttcattagccacattttaagtgttcaatagccacatgtggctmgtgtctaccatactggatatctcagatgttataatttcttcttcatcatagggaccaagacaaatctaacctatgctaatcttaaacatataggcatagtttagtatgccctagaaatttctttaatcatttatttatttcttcatccatagagtaaccaacttctcgcagttttctctagtctttgtttatgttggcaccaaggcagagggggcaagaaggaatattatccaagctctcatgaagattttacact

SEQ ID NO: 275906 - DNA, 512 bp, Homo sapiens
taaataaaagcaactgaatgaaataatctggaacttgacacagttgaaaaaccctgagatatgggaaattagaaaaagcataacttagaactctaggagaaacctggccccacagatctctcacaaacacctaataatttttctgtgcttggcaaataccattatttatgataaacaggatcattttgacactgcaacctgaatgtcatgtagggacagatacacattattggcatttatttcaaattttctccaggcagaggttaaaatgaaagcaaattacaggaaaatgaagtctgarggaataggcaaaaacaacattttaatgtttaaaaatagagatattcagcatgccctgtcatagactgaaaattataactggaaaatacccctgaaattgattcaaaacgggcagaaaataaacccattctgtttttccataggttcttttttgtttgtttgtttgtttgtttgtttgcaaaaggctttgattctctctcacgtttgaagaa

SEQ ID NO: 275907 - DNA, 607 bp, Homo sapiens
gatttttaaaacattggttggtcaaaaagttggagattattgtttattggtcgcctttcttttaataacactaattcatattttctagccatgtagttgaattaagattgacccccacctctataatcagaaatatgactgattgacataatccagttaaaatactcctttctctggttataaatccaattagagttgtgcagcttaatttttcttttttgctagatttgaatatgggaacrtgtagtctggggaaatactagacagacgtgactcagatggaaaatggaagttttccataaaataatccaaagcaaagctgacaagctaggaaagacacagatgaaattgagccctgattacattgtttgattaatcaaataaaaatgaaatttcatttgttttagaaaataaatccagattaattttaaagctgatttgaaagcagtcactgattcctgaaactagaattatactaagtgaaacaaatgatgagaaaaggattaaagattatcaatgggaaatacatgttgctaaaattttacatagccaaaaatatttaaactaacaattaatattcttgaccatgccaaaatttctccaaaaa

SEQ ID NO: 275908 - DNA, 545 bp, Homo sapiens
atggggtctcatcatcttgtccagactagtctcaaactcctaggttcaagggatcctcctgtcttggcttcccaaaattctgggattacaggagtgagccactgcccttggcaacatatgctttccgtatagacttcaagggcagagatgtactatgaatgttgtaagtaaacaactatccaatgaatgactcataatttgtcttttttacttaactaaaagggagttacagataaaattttatatattatcattttgtccatgatataacttcattttttgtaaggtaattgcatatacatttatttgtggtaatcacagttattctttcttagggataacatcagtactgagcattgtagttagattttattagcaattttacattaactcactatcatctcccaatggcaaatatatggttataaatatgttattagaggcaaacaattccaacaattcatatgactgttgagatgttggagraaaatgaaaatttcatgaagtttaaaggtttggagctaatttttgtacagttgttttta

SEQ ID NO: 275909 - DNA, 581 bp, Homo sapiens
ttcaaagggaaataaaattagttttataagaaatggcttctttagaactaaaaccttgaaacttaatggcattttggggtgcatttacaactttaatttcattattaggaatttacatatatatcactagtatattattaattattatgattaggagcaacaatgttcacagtaatccagttttaaatgaggttaaatcaggatttgcacaaaaacatttttgcatgtatatcattctatgagtatatatagttttctcaaaagataaaacaaaatgattgataaagacattaacattatttataatatatgtacgtaatataatataaacagtatatcatatgttcgcttatgaatggtacttaaattaggtttgcactgctcctggtagaattgacctaaatctcttcattctggttgtatttgatccagcctttccagggttcaaatccaagtctgcattcataagcttatttgagataycgaacttggacttttgtagcttaaaagaaatagtgctattaaccaaatagcagattttgtattagtttcagctagaaggtctttcctaacaatgtttc

SEQ ID NO: 275910 - DNA, 541 bp, Homo sapiens
cggaattggtatttaaaggtaatggaagatgtattaggttcccatcgcagctgtgacacaggaacataaatttggtagattaaaacaacacaaattcactacctaaggatctgcaggttaaaagttcaaaatargcttcactgcaataaaatcaacatatcactagggtttcattcctgtcttgaggttttagaggaaactatgtttccttgccttttctagtttctaaagactgaatgcatttctgagctcatgctcccatttcaccttcaagcccacaactgcctgtctttctcgctttacattgctccaaaacaagtcgtcttttgctttcttcttctacatttaaggatcctgtgattctactggaccaacccagattatacaggacaatttcctcactttaaggttggttgattagcatccataatcccatttgcaatcttaatttcccttttccaggagacgtaaaaatttggggataatgatgtggctatctttggtataccatttttctgcatatgacagaagaggaaaacag

SEQ ID NO: 275911 - DNA, 1627 bp, Homo sapiens
aaaacaacacaaattcactacctaaggatctgcaggttaaaagttcaaaataggcttcactgcaataaaatcaacatatcactagggtttcattcctgtcttgaggttttagaggaaactatgtttccttgccttttctagtttctaaagactgaatgcatttctgagctcatgctcccatttcaccttcaagcccacaactgcctgtctttctcgctttacattgctccaaaacaagtcgtcttttgctttcttcttctacatttaaggatcctgtgattmtactggaccaacccagattatacaggacaatttcctcactttaaggttggttgattagcatccataatcccatttgcaatcttaatttcccttttccaggagacgtaaaaatttggggataatgatgtggctatctttggtataccatttttctgcatatgacagaagaggaaaacagttttaagctattctaatatacatatgtaaaaattgttttaaaattatttaaatataatatggcttgaattaaaatatttaataaaagtgattcagaacaactggwaaaacaacacaaattcactacctaaggatctgcaggttaaaagttcaaaataggcttcactgcaataaaatcaacatatcactagggtttcattcctgtcttgaggttttagaggaaactatgtttccttgccttttctagtttctaaagactgaatgcatttctgagctcatgctcccatttcaccttcaagcccacaactgcctgtctttctcgctttacattgctccaaaacaagtcgtcttttgctttcttcttctacatttaaggatcctgtgattctactggaccaacccagattatacaggacaatttcctcactttaaggttggttgattagcatccataatcccatttgcaatcttaatttcccttttccaggagacgtaaaaatttggggataatgatgtggctatctttggtataccatttttctgcatatgacagaagaggaaaacagttttaagctattctaatatacatatgtaaaaattgttttwaaattatttaaatataatatggcttgaattaaaatatttaataaaagtgattcagaacaactggwccgtaaaactaatgaacaaattcagcaatactgaatacaagatcaatatattaaaatcaattgtatttccatacactctcagtgaacaaccaagaaattaaattaaaataattacatttacaatagcaccaaaaagaatataatacttaggcataacttttacataagaagtatcagacttgaacactacaattttttaagtgatagaaagttaaatatctcaataaactaaagataacatattttcaaagatcagaggagtaaatattaagatgacaatacttaccaaattaatctacagaaacaacacaaactgtatcaaaatatcaagtggcttttttcagaaattaacaagctgatcctcwaatttgtatgaaaatataagtaacccagaatagatcaacaatcttggaaaagaagaacaaagttaaataaaccacatctcccaatttaagaacttaatataaaccaataataatcaagatactgtggtcttc

SEQ ID NO: 275912 - DNA, 535 bp, Homo sapiens
aataaaccacatctcccaatttaagaacttaatataaaccaataataatcaagatactgtggtcttccataagtaaatatttataggtcaatggaataaaattgagggtccagaaataaattttcacatttatagtcagtcaggttttgacaagggttccaagagaaatcattgggaaaataatagtcttttcaacaaatcatgcacaaagtctgggtatccatatgcaaaataatgtaattgtactcctaccttacatcaaattaaaaattgttctcaaaaagaataatctatgtgtaataactaaaactataaaaatattaraagaaaattggagtaaatttttaaaacattgggttaagtgggttaggcaatgtttttcttagataagacaaaattataagtgaccaaaagaaaaatagataaattggatagcataaaactatttaaattaaaattaaaaacctttttgtgcacaaaaaaaatcataaagtggaaaaaatccacagaatgaaagaaacatctgcaaatcata

SEQ ID NO: 275913 - DNA, 601 bp, Homo sapiens
agtgaccaaaagaaaaatagataaattggatagcataaaactatttaaattaaaattaaaaacctttttgtgcacaaaaaaaatcataaagtggaaaaaatccacagaatgaaagaaacatctgcaaatcatatatctgtgaaggtatccagaatatataaayacctttttaaaattggacaattaaaaagacaattcaattgaaaactggcacaaagatatgggcagacattttgatacagaagatatacaaatgggtaataagcacattaaatgatgttctatatgattagtcattaggaaaatataaatcacaatgacatacttcacagcaactagaatggctataattaaaaagacaaacaataagtgttgtagaggatgtgggtaaattgaaacattcatgcattaatgatagacacataaaatgttttagctgttttagaaacagtttttcagtttctcaaaaagttaaacatacagttaccatatacccattgactgtacatctttgtatatactcaagggaattgaaatatataaaatatagctatcaggtactgggcgtaattcctgggtgatgaaataatacgtgcaacaa

SEQ ID NO: 275914 - DNA, 498 bp, Homo sapiens
atagacacataaaatgttttagctgttttagaaacagtttttcagtttctcaaaaagttaaacatacagttaccatatacccattgactgtacatctttgtatatactcaagggaattgaaatatataaaatatagctatcargtactgggcgtaattcctgggtgatgaaataatacgtgcaacaagcccccatgacacatgtttaactatgtagcaaaccttcccatgtacccccaaacctaaaataaacgttaaaaaagggatatttattaatgcaaaatatcatatatggatgctgtgacagcatttttcatccttggctaaatagttgaaacaacccaaatgttcttcaactgattaatggataaataaaatgtgctacattcacacaataagatgttattcaacaataaaaaaaatatgtactgacacctgctataacatggataattcttgaaaacatgctaagtgaaatataattcagtcacaaaacacc

SEQ ID NO: 275915 - DNA, 619 bp, Homo sapiens
ttgccaaattgccatctctgttgctctccttcatgctctcctaagagacacatctgtggaaatatgacagtaaaaataaaatcattcagtacggagagtagttgtgtgaattttttgtactcttgggttgtttccctaaacctttaggaaaccatgcatttcctctgtaccacatttttcactgctgtctcatccatggcttcttgttgcttctcaataacttggttcccttttgaaaatgctgcctactctgttatggaaggaaaacttaattttcattgtttgcatatctatgaaaatcatttctctatggctcctacctttgggacttagactacaaatgtaactatttgttggactctgtatctctgtgccttttcctctgctcagtgtaacttctatttattggactctgtatatatgtccccaacataacttccagatatcttttagggccagcagttacatcacacagaaagggcagttcaatatcatcctattatatttgctttgagacttagaaaaagggaatatgtttgacaacmatattttcataaaaacaattaccagggagaaatcaatggaaaaatcgctttgacatggaacattatgatatttc

SEQ ID NO: 275916 - DNA, 1043 bp, Homo sapiens
atcccactgattgttaaatgatcctgtgatttgctttaaccaacagaagaggatgatggaacactgtatctgctttgcttctaaaccttaagaaggcctggaagcttccatgtttgatgtttgaatctcttagttatcatgtaaatagttcagctatcagggagagtgactgggagaggccaagttcccagtaggaagggagagcttcccagtatcccagtgaaacttcagatgactccagcttcacttggcctrtgactgaaactgcttaagagaccaaagacctgcccttggttatacagcagttagctatgcagcagtagattccagacataaatccagagttatagacttccccttctgccctcttaggatgttgattttttcctaataattttataactgaaaaacccttatcactttatcttatttttcagaatattttaaatagattacaaatatatctgcatgcatgtaatagtgctacactagctaatgtgaaagtggaacaaggaactagcwatcccactgattgttaaatgatcctgtgatttgctttaaccaacagaagaggatgatggaacactgtatctgctttgcttctaaaccttaagaaggcctggaagcttccatgtttgatgtttgaatctcttagttatcatgtaaatagttcagctatcagggagagtgactgggagaggccaagttcccagtaggaagggagagcttcccagtatcccagtgaaacttcagatgactccagcttcacttggcctgtgwctgaaactgcttaagagaccaaagacctgcccttggttatacagcagttagctatgcagcagtagattccagacataaatccagagttatagacttccccttctgccctcttaggatgttgattttttcctaataattttataactgaaaaacccttatcactttatcttatttttcagaatattttaaatagattacaaatatatctgcatgcatgtaatagtgctacactagctaatgtgaaagtggaacaaggaactagc

SEQ ID NO: 275917 - DNA, 418 bp, Homo sapiens
cccactgattgttaaatgatcctgtgatttgctttaaccaacagaagaggatgatggaacactgtatctgctttgcttctaaaccttaagaaggcctggaagcttccatgtttgatgtttgaatctcttagttatcatgtaaatagttcagctatcagggagagtgactgggagaggccaagttcccagtaggaagggagagcttcccagtatcccagtgaaacttcagatgactccagcttcacttggcctgtgactgaaactgcttaagagaccaaagacctgcccttggttatacagcagttagctatgcagcagtagattccagacataaatccagagttatagacttccccytctgccctcttaggatgttgattttttcctaataattttataactgaaaaacccttatcac

SEQ ID NO: 275918 - DNA, 632 bp, Homo sapiens
atctcctagggtattattgtctaaatacagtaagaattaatgctcaccttctatctaacttagcaaagttttttttttgaaaatttatatatgttattctaagtcctggatctaaaggatatttacaagtgtattaacaccacatataccttgaaaactttaaaatgtagcctaatacttcccaagtcagtgagccattatcatgtgacttttccatagatcctcagcattgcaggtagccagactatccttctaattttaaatgaaactttgaatacatacttggtgatacttttatgtctccctattactatgtctacataacagttaaatattaccaaataccaccatagcaggaaacatgtaaggaacacacttattgatgttaataatgttcaggaaagaaggaaatggatgacaactatgccgaagctcactctcttttatacaaaaccactttaaatatttatatcgcagttcaaaacaaaaagtatgggtaarcatcaagaacattcaccaattcagacatgaggatgagaaattagatatgattattattgcatatctctaatgtaaagatactttcttggcaacaagcctgggaaggacagtcaatgggatgtgagtcaacc

SEQ ID NO: 275919 - DNA, 600 bp, Homo sapiens
tgccactgcactgctgtgacatcttagagcctcatttatttaatgtgatttttctataccttattctgggggagagtctcttctcccctcccaaacgagcgttagaccccaccaattctcccgtttttgtgtgaaagggaaaataacttagaaagtctcatttggcctgcagagaaactagttactcattacttatttccttctttttgtctttccagggtaaagggacaaaagtatttcctttttgaatgttggaacagaatcagtttctttctttctctgtctctatctctatcaytttcatctctatctctctcatctctcccacatctctatctctctcatctctaatatctctcatctctctctctttttctatttcttttatctctccagcttaatactttcccccatcccactctatctcagtttcttttttctctctctcacatgctcatacatatgaacatttgttctgtggcaaatatcaagcaaatatgaattagtctcaatctacgcaatagcattggtggaatgtttgtaggaatatgctgcagataattttaaatgtcagaaataaagcatttgaacattaattgc

SEQ ID NO: 275920 - DNA, 600 bp, Homo sapiens
tgccactgcactgctgtgacatcttagagcctcatttatttaatgtgatttttctataccttattctgggggagagtctcttctcccctcccaaacgagcgttagaccccaccaattctcccgtttttgtgtgaaagggaaaataacttagaaagtctcatttggcctgcagagaaactagttactcattacttatttccttctttttgtctttccagggtaaagggacaaaagtatttcctttttgaatgttggaacagaatcagtttctttctttctctgtctctatctctatcactttcatctctatctctctcatctctcccacatctctatctctctcatctctaatatctctcatctctctctctttttctatttcttttatctctccagcttaatactttcccccatcccactctatctcagtttcttttttctstctctcacatgctcatacatatgaacatttgttctgtggcaaatatcaagcaaatatgaattagtctcaatctacgcaatagcattggtggaatgtttgtaggaatatgctgcagataattttaaatgtcagaaataaagcatttgaacattaattgc

SEQ ID NO: 275921 - DNA, 601 bp, Homo sapiens
taacctcacttccatgtacaatctttggtagttcaacatgagttgtataaaaacagatatctgcatgcaatgaagtagttttctgagaagataactctatttccactgaagtgtggacttgagagaagaaaagattaactgaagattaactgatactcgcctatacaggaaactgcaaaaactttcagggaaaagataatgaagacctgaactaaggcactggcaggggaaatggacaggaaaagccagattcaagagatatttatgaggaaggattagtaagtgaatgattggctgtgcaagatragggagacatcaggagtcaagattggctctgaagtttctatcttaggaaaccgggcgtctgtgatgcttcttgagatagaaacaccaattgactatctgaaagatttccataatgtgcaggataccaggcagttctactgtgcttatagagagaatccagtctgatatctcaattactgtaggtgaggcaggatgtgtcagttatagcaaaaagcagcagtatcagtgccagtttccctgcttagaggaggcaggatattttcataccccctgaagcttaaggtaaccacagaca

SEQ ID NO: 275922 - DNA, 601 bp, Homo sapiens
taacctcacttccatgtacaatctttggtagttcaacatgagttgtataaaaacagatatctgcatgcaatgaagtagttttctgagaagataactctatttccactgaagtgtggacttgagagaagaaaagattaactgaagattaactgatactcgcctatacaggaaactgcaaaaactttcagggaaaagataatgaagacctgaactaaggcactggcaggggaaatggacaggaaaagccagattcaagagatatttatgaggaaggattagtaagtgaatgattggctgtgcaagataagggagacatcaggagtcaagattggctctgaagtttctatcttagkaaaccgggcgtctgtgatgcttcttgagatagaaacaccaattgactatctgaaagatttccataatgtgcaggataccaggcagttctactgtgcttatagagagaatccagtctgatatctcaattactgtaggtgaggcaggatgtgtcagttatagcaaaaagcagcagtatcagtgccagtttccctgcttagaggaggcaggatattttcataccccctgaagcttaaggtaaccacagaca

SEQ ID NO: 275923 - DNA, 601 bp, Homo sapiens
taacctcacttccatgtacaatctttggtagttcaacatgagttgtataaaaacagatatctgcatgcaatgaagtagttttctgagaagataactctatttccactgaagtgtggacttgagagaagaaaagattaactgaagattaactgatactcgcctatacaggaaactgcaaaaactttcagggaaaagataatgaagacctgaactaaggcactggcaggggaaatggacaggaaaagccagattcaagagatatttatgaggaaggattagtaagtgaatgattggctgtgcaagataagggagacatcaggagtcaagattggctctgaagtttctatcttaggaaaccgggcgtctgtgatgcttcttgagatagaaacaccaattgactatctgaaagatttccataatgtgcaggataccaggcagttctactgtgcttatagagrgaatccagtctgatatctcaattactgtaggtgaggcaggatgtgtcagttatagcaaaaagcagcagtatcagtgccagtttccctgcttagaggaggcaggatattttcataccccctgaagcttaaggtaaccacagaca

SEQ ID NO: 275924 - DNA, 601 bp, Homo sapiens
taacctcacttccatgtacaatctttggtagttcaacatgagttgtataaaaacagatatctgcatgcaatgaagtagttttctgagaagataactctatttccactgaagtgtggacttgagagaagaaaagattaactgaagattaactgatactcgcctatacaggaaactgcaaaaactttcagggaaaagataatgaagacctgaactaaggcactggcaggggaaatggacaggaaaagccagattcaagagatatttatgaggaaggattagtaagtgaatgattggctgtgcaagataagggagacatcaggagtcaagattggctctgaagtttctatcttaggaaaccgggcgtctgtgatgcttcttgagatagaaacaccaattgactatctgaaagatttccataatgtgcaggataccaggcagttctactgtgcttatagagagaatccagtctgatatctcaattactgtaggtgaggcaggatgtgtcarttatagcaaaaagcagcagtatcagtgccagtttccctgcttagaggaggcaggatattttcataccccctgaagcttaaggtaaccacagaca

SEQ ID NO: 275925 - DNA, 452 bp, Homo sapiens
caacttcaaattcacttctgagaattcttttcatcttctgatactaagtgaaattgagtttcccctgcaaactctgattggtgcatctgtgtcacatggggtctgctagacaactaggcctggggttggagtaggtaggttcyttaatcttctttgccatttttaaaccatatttctattctccttatatagtcacaacttggaatcttgtgtcacaagctaaactgtctagttaccgtctccttgtctatcatcttccaactcttgggatagtctaccatatgctcttaagattttacctcctgacctgatcacttcttttcttcagtactattccttattctttcattaacatcaggtgatttctttcttcttttttttttctttctgagatagagtcttgctctgtcacccaggctgcagtataggggcttaatcttggctcactgcaa

SEQ ID NO: 275926 - DNA, 580 bp, Homo sapiens
attctatttatttactaattgtcttacaattttaacatggatgtttgtacttttgttagtttattgatcttggaaatttataaacagcattagtcaagcagtaaaaattcttaaaaagcagtaaaaaattttattatgatttaactgaatctctcatctactttatgtttgtgaaaatgatctaatttatttccagattttcaayattcttgaaaaaaacttctaatttttataacatttaagattttagaccgggctcagtggatcacgcctgtaatcccagcactttgggaggcaaaggtgggtggatcacttggggtcaggagttcaagactagcctggccaacatggtgaaaccctgtctctactaaaaatacaaaaattagccaggcgtggtgacaggtgcctgtaatctcagctactcaggaggctaaggcaggagacttgcttgaacctgggaggcagaggttgcagtgagcagagatcctgccactgctctccagcctgggtgacagagtgagcctccatctcaaaataaataaacaaacaaaaacatttgaacgtcaagatataaagttgt

SEQ ID NO: 275927 - DNA, 580 bp, Homo sapiens
attctatttatttactaattgtcttacaattttaacatggatgtttgtacttttgttagtttattgatcttggaaatttataaacagcattagtcaagcagtaaaaattcttaaaaagcagtaaaaaattttattatgatttaactgaatctctcatctactttatgtttgtgaaaatgatctaatttatttccagattttcaatattcttgaaaaaaacttctaatttttataacatttaagattttagaccgggctcagtggatcacgcctgtaatcccagcactttgggaggcaaaggtgggtggatcacttggggtcaggarttcaagactagcctggccaacatggtgaaaccctgtctctactaaaaatacaaaaattagccaggcgtggtgacaggtgcctgtaatctcagctactcaggaggctaaggcaggagacttgcttgaacctgggaggcagaggttgcagtgagcagagatcctgccactgctctccagcctgggtgacagagtgagcctccatctcaaaataaataaacaaacaaaaacatttgaacgtcaagatataaagttgt

SEQ ID NO: 275928 - DNA, 580 bp, Homo sapiens
attctatttatttactaattgtcttacaattttaacatggatgtttgtacttttgttagtttattgatcttggaaatttataaacagcattagtcaagcagtaaaaattcttaaaaagcagtaaaaaattttattatgatttaactgaatctctcatctactttatgtttgtgaaaatgatctaatttatttccagattttcaatattcttgaaaaaaacttctaatttttataacatttaagattttagaccgggctcagtggatcacgcctgtaatcccagcactttgggaggcaaaggtgggtggatcacttggggtcaggagttcaagactagcctggccaacatggtgaaaccctgtctctactaaaaatacaaaaatyagccaggcgtggtgacaggtgcctgtaatctcagctactcaggaggctaaggcaggagacttgcttgaacctgggaggcagaggttgcagtgagcagagatcctgccactgctctccagcctgggtgacagagtgagcctccatctcaaaataaataaacaaacaaaaacatttgaacgtcaagatataaagttgt

SEQ ID NO: 275929 - DNA, 580 bp, Homo sapiens
attctatttatttactaattgtcttacaattttaacatggatgtttgtacttttgttagtttattgatcttggaaatttataaacagcattagtcaagcagtaaaaattcttaaaaagcagtaaaaaattttattatgatttaactgaatctctcatctactttatgtttgtgaaaatgatctaatttatttccagattttcaatattcttgaaaaaaacttctaatttttataacatttaagattttagaccgggctcagtggatcacgcctgtaatcccagcactttgggaggcaaaggtgggtggatcacttggggtcaggagttcaagactagcctggccaacatggtgaaaccctgtctctactaaaaatacaaaaattagccaggcrtggtgacaggtgcctgtaatctcagctactcaggaggctaaggcaggagacttgcttgaacctgggaggcagaggttgcagtgagcagagatcctgccactgctctccagcctgggtgacagagtgagcctccatctcaaaataaataaacaaacaaaaacatttgaacgtcaagatataaagttgt

SEQ ID NO: 275930 - DNA, 565 bp, Homo sapiens
aaactagctggttctaggagttaaatttttgacaaattagtggtaaatgttttttcaaacatgttttaagcaaattgttttatttaagtaaactacctacatttaccatttgggctcattaattcaacgatttcatactcagtacccaatttatattataagtcgtttataagaaagctaaggagactgaccaggcggagtggctcatgcctgcaatcctagcactttgggagaccgaagggggcagatcacctgaggtcacaagttggagaccagtctgacccacatggtgaaaccccatctctactaatctctactaaaaatacaaaaattggccaggcgtggtggagggtgcctgtactcctagctactggggaggctgagatgggagaatcacttgaacctgggagggggaggttgcagtgaaccaagatcrtgcccctgcactccagactgggggaccgaccgagactccgtctcacaaaagagaaaaaaaaaagctaacgagactaaaatatgagtctttatttgagcatgcttattttgtatacagaaaaactgagac

SEQ ID NO: 275931 - DNA, 615 bp, Homo sapiens
ctaagtctccagaagcaattatgacgaaaacaaaaattgaaaagtggggcctaattaaactatagtgcttctgcacagcaaaagaaactatcaacagattaaacagacaacctacagaattggagaaaatattcacaaactatacattcatcaaagcactgttctttgatactgtgttttcctgttgagaataatctggagaagtattttggtgtctacagtctaaagtcaacctctcttagtggcattcaagctagtacttcatttggtctcaaactagaattgcagctttatttctattgaggaatgttctgccagaggcccagtgacatttacatcccaggcattttcacaatgatgttggctttgatattgcccagcaccaacctcctttgtaactgttttttgaaaagaagaaagaatttcygctattttctcagtctgaaacagcctgcctcaattttctttctctctgtagcacagtatttagagtattttcagtcccagatcagtttcttatctttcttaacacattagttgtttcttttctatactatgaaaacctttattatcatgccgttcttcattgtattgcagtaaaatgtttatgtatca

SEQ ID NO: 275932 - DNA, 1206 bp, Homo sapiens
tgattggtatttacgttgttttgatgattaaaaataatgctattgggccaggcatggtggctcacacctgtaatcccagcactttgggaggctgaggctggtggattgcttgtgcccaggagtttgagaccagcctgggcaatatagtgaaaccctgtctctactaaaatatacaaaaattagccaggtgtggtggcatatgcctttagtcccagctgattgggaggctgaggtgggagtatcacttaagccaggaggttaagactgcagtgagctgtgatcctaccactgcagtccacactgggcaasagagcaagaccatctctcaaaaaaaaaatagtgtattataaacatttttgtatatgtcattggtcaagctatacaagctatataagtatttcttccatttagctgtctagtagtttaactgttgagttgcaagatttgctgttgttcacctttaagtgatattggcaaaagacttttcagggtggaaattggcagaccaagaagcaacatataagcacatcagatactccacattttacaaatagtgtcattttcattttagccattgaacgagaaagtacacagttgtatcccattgtgatttcaatgtacatttccataatgaaatgttgagtaacwtatttagctgccacacattcaggagccaggcaaggttaatattccatgcacatgaggacaaggtggtcagctggagtgtaccgtgagccagcaaggttcagacagtggttactcttcttgccaacttaaatggatgacatcccaggctcagacctcctaatggttgggcacttcattcctttgttcattatcccctgaatgtgtatgactttcatcacttacatttttcacaaaagccctttatggtcagtcaataataactttaatgttccattgaaatcaagacatttwaacgtcctatgtcattacagcaataacaccaccactatcaccactaccaccaaatgcatttccttttcttgcattattcaaagtattcagtcttcatataacacatttgactgtttagcatgtcctaattctgtcctcaaaaatgttattttcatgataatatgggcagaatcactattctgaatgaagcaaaaaaataaagattattatcaaaagagaatgactattcaaattatgctgcaacatgaagaaaaacacactgttatt

SEQ ID NO: 275933 - DNA, 596 bp, Homo sapiens
tgactaattttagtttgtggaccatgcatagaggtgatgtgtgtctcattaggaaagacagtgaaaaggccgtgtgcaatgttgtaggttctctttcctggccactgtggtcatagagaagaacctgtgctgaaactttgaagccatgaaagcaaagcatcctgtatctctggaggaatatcactgaggagatttgctgggactcaatgcactttgaatacatgaaaaataaatctttattgtgttaactcattgaaatttggagactgcctgttataacattataactgggccaatcataggaagtaaagcrcagacactgaaggaaaaaatttagaataagtaaacgagattaagaaaagaaaaaattattgcaaagcatgatacatatgaattaaatgccattagtctttacacactattttgtaacctgcttcgtaggttaacattgcctcatgatcattttccaagccattaaatattattctacaacataatgtttaatgactgaatagtattatatgctatggtctatcaaaatttattcaatcgatttcatactcttagacaattagattgcttagaaattgtttccc

SEQ ID NO: 275934 - DNA, 583 bp, Homo sapiens
gtccaaatgtattactctttgaaatgtgttgccataaatttcttaaaagagctttacacgggcaagcagttggttaatgaattttttttgaattctgaatattatttctgacaaggctaattgtattaaggccattctctgtgttaaaacactgggaaagccttgtccaaatcaattacttttttaaccaagagtttagataaagagctaaggtaagttgrtgcattcacaagtgggttttcttatggcttctgttccttatatctatcatcattgtctttcattatgcatgatgcatgatgccctgtacatatctctttctttgcattgttctttccctccttttttttttctgatacacagtcccactcccacacccaggctggagggcagtggtggtatcactgcacactgccgcctcgacttcctgacctcaggtgattttcccacctcagcctccggagtagctgggattacaggtatgtgacaccacgcccagctaagttttgtgggtttttttttttggaaagaagggttttcactatgttgccctggctgatcttgaactcctggcctcaagcta

SEQ ID NO: 275935 - DNA, 529 bp, Homo sapiens
ttgccctggctgatcttgaactcctggcctcaagctatcctcctgccttggcctcccaaaatgctcagcagacagagccaccacacttggactttctttgcatttaagacatgttttatgttattcctttttctctctgaaagttctttgtaacttatttctctttgtctctctgaaactttttttttaactttgctaggtcttttgatatagaacaattagattaacctatccttgaatttgggaaacttcaaattatgcatttttactatctttttaaaaatacaaagcctgattttcaccaatatctatatagtgaattttcaacattgtaaaaaccagaagtattgtcttttattcaaatcaagtagattaagcaaatgatggagtaaagcactggttacattaatrcaaaagcaactaagctgggttttctttatttcttggcaagacaaacataaaataacaacattcatcttcctatgttttattctgtatcaaaataacattatttaatatattttaagat

SEQ ID NO: 275936 - DNA, 1073 bp, Homo sapiens
tagtggagctgttctaggaagaggcagtaattatggtgagaaaatgaagcataaaagatgaaatgttagaagaaagggattagagtcccatgacgaagagagagaaagagaaaaagattaggcttctggggagacccatgaggggagccctaattcactacttcagagcccctggaatggagcaggacatctgagattgatccctatataatgaatttagaaagattgcatggtacattgtagggctatcttgttaaagacccaaaagaagccacagaacataaataagagcatacataagccaaagaacagcatattttcaagggaagatacagacttaataaactatcattgagaattgatgagtgttgacaaaaatcaaaagtgtactctataaatgttttagtgtcccaaattacttacagtaccctgaataggctgagcaaattcctcaatyatgactgagaatgatctgtttgttacaatcatgagtgagatggttaatttgttaagaaatataaagtgatatttaatgatwctctctaaacctcagttacctcattggtttgcttaagaattagcaaaaataacatgttawcaatcctagttgtgcccaacacgtgccaattttttcagagttaatagtatgtagatgtatcaacttgatgtagcctatttttacgttattcagatgttttaaatactttttgttcacttgtataaagctgtgagagctaaattgaatgttccttctataagtatttttttctgtctattttttctcatattataagctacacatatatacataaagttttgctcatatatattatataatggtaagttttatgcttcatagatattctaggatttttcattttgggatatatacttagtcattaaaaaataaacattttattttaaataaaaaattttcccctgattataatttagcatcatttaaagtgaatcttcatttaagtgaatcttaaatttcaggtttttatttgcctagtatgactttgctcattttaaaactttcagtcttccttatctgtttttgtgttatcttt

SEQ ID NO: 275937 - DNA, 535 bp, Homo sapiens
ctctctaaacctcagttacctcattggtttgcttaagaattagcaaaaataacatgttaacaatcctagttgtgcccaacacgtgccaattttttcagagttaatagtatgtagatgtatcaacttgatgtagcctatttttacgttattcagatgttttaaatactttttgttcacttgtataaarctgtgagagctaaattgaatgttccttctataagtatttttttctgtctattttttctcatattataagctacacatatatacataaagttttgctcatatatattatataatggtaagttttatgcttcatagatattctaggatttttcattttgggatatatacttagtcattaaaaaataaacattttattttaaataaaaaattttcccctgattataatttagcatcatttaaagtgaatcttcatttaagtgaatcttaaatttcaggtttttatttgcctagtatgactttgctcattttaaaactttcagtcttccttatctgtttttgtgttatcttt

SEQ ID NO: 275938 - DNA, 515 bp, Homo sapiens
gtgccattgcacttcagcctgggcaagaagagcgaaaccccatctcagaaaaataaaattaaaaaaatgcccgtatgacagtctttgcctttgggttagatccattatcttcctccactgtttgctttcttgctcagaaggccaataagtgataggggtggygactagagtagtttagctgcccagcagccaagcccacccccactttatccaccagatcaacactcaccatttatctctctgcggactagaacacacattttatcacagttcataatggcaaagatgttcgaagtcacatcccaagcgcgtcgtccagggaaacgctctatcaagagatgaaccacctctgcccagctggctgtctcgacctggtcccaggtgatgggcatggtgccagtactgagctcagtcagtaagagctgcttgaaccgttgtagctcctcatggctcacgtttctcatgtacagcatgaccccattttcacatggggagccggggtagcaagagaatgt

SEQ ID NO: 275939 - DNA, 445 bp, Homo sapiens
gaggatgttggcagttacatcatcgttttgctttactttcattcactgctgaagggaacataagcagggggaacctatctgaaaggccttttcacaatactaccaatcgtgtgcactgccatggaattcagtagttctactcctaaaactgcaacctgaggccaggtgtggtggctcatgcctgtaatttcagcactttgggaggctgaggtgggaggatcacgaggtcaagagatcgagaccatcctggccaacatggtgaaaacccgtctctacttaaaaaaaaamaaaaaaaaaaatattggctgggcgtggtggcatgcacctgtagtcccagctacttgggaagctgaggcaggagaatcacttgaaaccaagagggggagtttgcagtgagtgagccgagatcccgccactgcactccagcctgggcaacagagcgaga

SEQ ID NO: 275940 - DNA, 445 bp, Homo sapiens
gaggatgttggcagttacatcatcgttttgctttactttcattcactgctgaagggaacataagcagggggaacctatctgaaaggccttttcacaatactaccaatcgtgtgcactgccatggaattcagtagttctactcctaaaactgcaacctgaggccaggtgtggtggctcatgcctgtaatttcagcactttgggaggctgaggtgggaggatcacgaggtcaagagatcgagaccatcctggccaacatggtgaaaacccgtctctacttaaaaaaaaaaaaaaaaamaaatattggctgggcgtggtggcatgcacctgtagtcccagctacttgggaagctgaggcaggagaatcacttgaaaccaagagggggagtttgcagtgagtgagccgagatcccgccactgcactccagcctgggcaacagagcgaga

SEQ ID NO: 275941 - DNA, 445 bp, Homo sapiens
gaggatgttggcagttacatcatcgttttgctttactttcattcactgctgaagggaacataagcagggggaacctatctgaaaggccttttcacaatactaccaatcgtgtgcactgccatggaattcagtagttctactcctaaaactgcaacctgaggccaggtgtggtggctcatgcctgtaatttcagcactttgggaggctgaggtgggaggatcacgaggtcaagagatcgagaccatcctggccaacatggtgaaaacccgtctctacttaaaaaaaaaaaaaaaaaaaaatattggctgggcgtggtggcatgcacctgtagtcccagctacttgggaagctgaggcaggagaatcacttgaaaccaagagggggagtttgcagtgagtgagccragatcccgccactgcactccagcctgggcaacagagcgaga

SEQ ID NO: 275942 - DNA, 567 bp, Homo sapiens
ttccatgatccactgggagggctgacagctctcagcattgtagcagatggagacagagaaagatgagcaaaggaaaatgtycctatgttagagccatggttcccaaatattaatgtatatcagcctcaccttgggggaggttattttttattttgttttgtttttgagacagggtcttactctgttgcccaggctggagtgcagtgatgtgatctctgcttgctgcaacttctgcctccttggctcaagcaatcctcccaccgcagccccccagtagctgggaccacaggtgtgtgccaccacacccagctaataaccactcagtcatggacattcagttagatacaagtagatgtcttagcacaatgcctggtacttaaaccctccatattcaatgcctaagatataaagatgtctttaagttgatcaattagattagctaggaaactaggtgatgcctaaaggacaacattctttcaagttagagctgctccagaccatttggtcggaaataagcacgaatacataacgacaacacatccctggttttgcatgaaagaatttgca

SEQ ID NO: 275943 - DNA, 567 bp, Homo sapiens
ttccatgatccactgggagggctgacagctctcagcattgtagcagatggagacagagaaagatgagcaaaggaaaatgtccctatgttagagccatggttcccaaatattaatgtatatcagcctcaccttgggggaggttattttttattttgttttgtttttgagacagggtcttaytctgttgcccaggctggagtgcagtgatgtgatctctgcttgctgcaacttctgcctccttggctcaagcaatcctcccaccgcagccccccagtagctgggaccacaggtgtgtgccaccacacccagctaataaccactcagtcatggacattcagttagatacaagtagatgtcttagcacaatgcctggtacttaaaccctccatattcaatgcctaagatataaagatgtctttaagttgatcaattagattagctaggaaactaggtgatgcctaaaggacaacattctttcaagttagagctgctccagaccatttggtcggaaataagcacgaatacataacgacaacacatccctggttttgcatgaaagaatttgca

SEQ ID NO: 275944 - DNA, 567 bp, Homo sapiens
ttccatgatccactgggagggctgacagctctcagcattgtagcagatggagacagagaaagatgagcaaaggaaaatgtccctatgttagagccatggttcccaaatattaatgtatatcagcctcaccttgggggaggttattttttattttgttttgtttttgagacagggtcttactctgttgcccaggctggagtgcagtgatgtgatctctgcttgctgcaacttctgcctccttggctcaagcaatcctcccacygcagccccccagtagctgggaccacaggtgtgtgccaccacacccagctaataaccactcagtcatggacattcagttagatacaagtagatgtcttagcacaatgcctggtacttaaaccctccatattcaatgcctaagatataaagatgtctttaagttgatcaattagattagctaggaaactaggtgatgcctaaaggacaacattctttcaagttagagctgctccagaccatttggtcggaaataagcacgaatacataacgacaacacatccctggttttgcatgaaagaatttgca

SEQ ID NO: 275945 - DNA, 567 bp, Homo sapiens
ttccatgatccactgggagggctgacagctctcagcattgtagcagatggagacagagaaagatgagcaaaggaaaatgtccctatgttagagccatggttcccaaatattaatgtatatcagcctcaccttgggggaggttattttttattttgttttgtttttgagacagggtcttactctgttgcccaggctggagtgcagtgatgtgatctctgcttgctgcaacttctgcctccttggctcaagcaatcctcccaccgcagccccccagtagctgggaccacaggtgtgtgccaccacacccagctaataaccactcagtcatggacattcagttagatacaagtagatgtcttagcacaatgcctggtacttaaaccctccatattcaatgcctaagatataaagatgtctttaagttgatcaattagattagctaggaaactaggtgatgcctaaaggacaacattctttcaagttagagctgctccagaccatttggtcggaaataagcacgaatacrtaacgacaacacatccctggttttgcatgaaagaatttgca

SEQ ID NO: 275946 - DNA, 595 bp, Homo sapiens
atagcaatgtaactgtagttaataacagtgtgttatatagttcaacayttcagaaaaagtagattttaagtgttcttaccacaaagaaaaagtaagtgttgtggattaaggaggttcgagatggctgactggagacattgggtgccagttcttagaaccaaaattacaaataggtaattacagccatgtgcggtggctcatgcctgtaatcccagcactttgggaggccgaagcaggtggatcacctgaggtcaggagttcgagaccagcctgaccaacatggtaaaaccccatctctactaaaaatacaaagattagccaggcatggtggcacgcgcctgtaatcccagctactcgggaggctgaggcaggagaatcacttgaacccgggaggcagaggttgcagcaggccaagatcgcaccactgtactccagcctgggcaacggggcaagactctgtctcaaaaacaaacaaaacaaatagataatcacaattcaaacagagtatcaggagagaatattcgagcccaacagagaactcataggaagaagctggggcacagaaaaaggaagagaagccaactcagccagcaga

SEQ ID NO: 275947 - DNA, 596 bp, Homo sapiens
caaaattacaaataggtaattacagccatgtgcggtggctcatgcctgtaatcccagcactttgggaggccgaagcaggtggatcacctgaggtcaggagttcgagaccagcctgaccaacatggtaaaaccccatctctactaaaaatacaaagattagccaggcatggtggcacgcgcctgtaatcccagctactcgggaggctgaggcaggagaatcacttgaacccgggaggcagaggttgcagcaggccaagatcgcaccactgtactccagcctgggcaacggggcaagactctgtctcaaaaacaaacaaaacaaatagataatcacaattcaaacagagtatcaggagagaatattcgagcccaacagagaactcataggaagaagctggggcacagaaaaaggaagagaagccaactcagccagcagagatcagctaggataggcttgccttgtccagccccacccaacttcactcccacccctccatggctgatcatggarcccaagctcctatgcatttcacagaccagcccattgcctgatgcacaagaaagtttctcctggtaaacaacaatcaagcataaaa

SEQ ID NO: 275948 - DNA, 516 bp, Homo sapiens
ctgatcattacgttgtaaaaagatggctgtttcagaaggggaaaaaaaacattgtgattgctttctagatctttgagttttaaatgctgccataactaatttaagaatgtagtagttagttaggaccttaaaaagttaagagttacacttcatttttagagctccttaaacatgaggtgatttcctttttccagtacttgctacatttattatcttccttagaagttccttgtgcacactttccccagacacgttaagarcaggtttcttccttaacagttgatggaccagtctattggtaaataaatcacactctaaaaaatttcaaattgcattcatgcatatttttaattaaatttttctaatacccttgaagatatgaagacatatctccaagagatgtttacatgacatattcaaagacattctggtagccaggagtagatgtgggttggaactcaccttaccttggtgcccccaatgcagtgactaatctatgtgttaacacatgacact

SEQ ID NO: 275949 - DNA, 581 bp, Homo sapiens
gtattctgttataagcagcagaaaacagactaagacagatagggtccatgaattttacactgagccaagttactgctcatgaccaaaactagattaaaaaataatctcagtaactcgccatttaacattacgtatatctccaaatgctatccctcccccctctaaaacttaaagtataataaaaaaatttaaaaaaaattaaattaaacagcaaacccaaaggggacaggtggatgaaaaggacccaaagcagataactgtcttgttagccccacaggtatactggaaacataaaattaattytgtgatctgaaaaaaataataataatctcatacaagcaaaggcttagaaaatactgcataaacactttcaagtgtagaaagttcttttctacctgaaaatatatttcactcaatctaagagataaatcaacatttaaaacccaaactagatttgaggcatcaaagaatcatgactggcagtgaattcatactgaatttcatttgagaagcaaatcatcaacaaaaatgaacaccattatccaaactaatcctggaaatgaaagatgttctacaagaca

SEQ ID NO: 275950 - DNA, 558 bp, Homo sapiens
ctttttatcatcttggcctgattacaggcccttaagactcagcagagctaaggggaagggaagggaattgagggaaccaccaagagagctccaaaaacaagagttggcaggtaattctgttcatcyacgcctgctctgtaacagctttcagagttcagctcttactttcagtcacttccttgcaacccttgcagtcagaatttcagggttcagaaacataggcctaaagtgttatcaccaagtggtgaaagcaagtttgctgggtggaggatctcctcggctattttgccaagttcttctcatttttatagctgggcatgaagatttccttttttgacattctgtgactgttacaatgtaggaaaatctgtggagatacaacattttcatatttcaagtagctgctctcaaataagggacattttctaagttctactgtttatttttccctggaattttctaggatatattgctttagctctgttttctagttttctctttatgacattttggcttctcccggtcaacaaaaatactgcactggaagaattccagaga

SEQ ID NO: 275951 - DNA, 594 bp, Homo sapiens
gcatctgtgaattttaagtctctcgggttatagttaagatatgtaattagagttccagatatacatcttacctaaaaacttctgctatggggaggggagaaaccaattaagtcagttttactcagcttcaaaaaaaacccttcaacctgaaaactgatgaaataactaatgaggacacttcatgtggggcatgttatttcttgatagagcaagtgtgttctgggacagaggctcttctttccctgaaggctggagtcaggaggtttacttggttaataaaaccacctccttgagacatgtgacttgatgtgtgtgtggtggagggggtagaaactagtatttttgaacatttgttatatatagtttcctaagcatttatacttatcagaagaaagttagctatctgagaaactctattaacttaaacaggccaatgaagagctgcttcaatgcactgaagcacaaatgcattacaatccctgggctgctgaggactaattccagactagaaacacttctaataattctaatgactataatgacaaaaagtaactaatatttmctgagcagatagtacatgcaagacttactaaa

SEQ ID NO: 275952 - DNA, 571 bp, Homo sapiens
taccataactttgtggcaaattttgaaatcagaaagtgtgaatcctccaacttttttatcctttcataggattgcttctggctatgctgggtcccttgaatttccgtgtgaattttaggattaactcatcaatgggaaattgggatgcrggcttctccaaactctccaggcaaaactaatgttccatcaggattgtaaaccacaggtaaagatctgagaggaggcaaataacatttactgattacctaccatgcatctaaattctgcagtggtgaatttatatgtcttattgtttaatccccatggtagccttatggaacaaatactccaattttcaggtaataaatatgagtctaagaaaggttgtcttgccatagtttataaatagtgatgtcaagatttatcttaggtttccacattagttattctacctctctccccaaagaaaagtagagtagataggctggaaactaacccttccactcctatgaatagcctttgcatcccattagggatgcaatgtaacatttatgttgtattagactttatacatatatttcttccatttgta

SEQ ID NO: 275953 - DNA, 612 bp, Homo sapiens
agatctgagaggaggcaaataacatttactgattacctaccatgcatctaaattctgcagtggtgaatttatatgtyttattgtttaatccccatggtagccttatggaacaaatactccaattttcaggtaataaatatgagtctaagaaaggttgtcttgccatagtttataaatagtgatgtcaagatttatcttaggtttccacattagttattctacctctctccccaaagaaaagtagagtagataggctggaaactaacccttccactcctatgaatagcctttgcatcccattagggatgcaatgtaacatttatgttgtattagactttatacatatatttcttccatttgtagaatgggaatgtgtggagtcattccagccaaaagcagaagaacaaaagaaaatgaatcatacattttcaatatggctacatcataaagttatataagaggaagaatacaaaagatgaaacatgttagtaagagggagctatggtggttcccaaatgacaaactatgataaatatttccccaaaaacaaaactacaatgagacaccccctcacaaaagtcagaatggctattactacaaaaacaaaaagta

SEQ ID NO: 275954 - DNA, 622 bp, Homo sapiens
gttaattttactttgctggttcaagaaggccaaatctagaaaccactaccatagatgacgggaagctactgaagaattttgaatattaagtggaatgaatctttagacttatgtgtaagacaaatcacccttccaacaaacgacgttaggacaactgcacatgcaaatgcaaaagaatgaagttgaacccatacctcacacaaccctccaaaattaacaaagtaaattatagacttaaatggaggatataaaactcctgcaggaaaacagaagagtaaatttccatgatcatggagtaggcaattactttttacatttgaaatcagaagcataagcaacaacaataaagaacaatagatacgttaaactttrtcaaaattaaaaacctttgtccttcaaagggtaccatcaagaaaatgaaaaatcaggacttggggtggagcaaggtggagtaggagtctccactgatcatccctcacacaaggagattaatttaacaactatgtacacagaataaaacaccttcataagaaccaaaactcaggtgagcattcacagtacacagtacgtggttttaacttcatatcaatgcaagaggcactgaagaggcaggaaaaacagc

SEQ ID NO: 275955 - DNA, 554 bp, Homo sapiens
ttgtgagtccttatattgtgcttcccaagaacctacagtgcatttcagttatttaccttgaaaattcttcagcccatccagagtgggtttggaaatttgtaatcattttgtagaatgtgataagggaggacctgtcttcctaaattctcaagcttggaattttcaagtcagtgtcaggaccataggctctctaatgcatatatatttgccctgagcaaataattatttatctctgtgcttcggtagttgcatctgtatgttaaaaataagattattgctatgttgatttcttatgacatgagagaagaggctttaaaaattaaagaaaagaagaaaacactttaaacttaagatgggaatcatatcttattctttcatattcccagcgcctagcagaatgccyggttaactcaccgggggcattagccagttccttgtctactacatcattccatcttgtatcattccacgctttgaagcaggtactattacaccctatttgtaaggcttagagaggtctagtggcttgcccaagaacagaccacaagtacaca

SEQ ID NO: 275956 - DNA, 593 bp, Homo sapiens
tgtttctgctcatgtatcaaagcaaagtcatcctgggtgtgagtggaaatgctagttgcattcatgtcagcactagacatttcctggaacccattaaacaagattcattttccaaatggattttgttaatttatttttttttccttttgtagttagaaacctaggggaaaattgagaagaataaatgtggttaaactgccccaggggatggcttgtctgtagaagcatcccaggcataccgaatggcgtacaaaacagaccttaatgagtactgcttgtcaaaggatctgatatgcattttgcagaataaacataactcytttttcagcagttgatccactattctctagggaaatgaatgaagggccatatactgctgtctttgctgcccaaacatacacttgtttgaagggaaagcaacaaaaacaaaacaaaacaaaaaaccctgctggtttctctattttctaattacgttttctttccaagacatattttgttgtattggtacaaaatacgttcagtaaattcaaggaggagaaaacattccagtctgaaatggatttcagcttggcaaaaagaattaatagaggcat

SEQ ID NO: 275957 - DNA, 527 bp, Homo sapiens
ctactttttttaaaaaggcaacttccgcacttataagggacagtaatccttgtgccagttgaaatattttcacagccatgattttatcacagaytgtaggaaacagattctcttgcttctagaaagcgtgttttgttagggaactgtgttgaattcttcacctcaattaacctttattttaaaccttctgagcatcagaagtatttactatcttatattataaatgcaaatactttttcctggatcaaataattgaagaataactaggattatgaatgggaaagaaaggtttcctatgcctgagtgagttgagttgctgttctttgcttatcatatataaagagtgagtgaatttattatcatcctggtaggtacatgttaactcaaaattattgtggtactcactgtactttgtactattgggttccaatggtttgtaagctagtgatttatgcacataaatccttaattcttaactaagaaaatttagaaattttaaaatttaataccctattaagaaaaaaggg

SEQ ID NO: 275958 - DNA, 527 bp, Homo sapiens
ctactttttttaaaaaggcaacttccgcacttataagggacagtaatccttgtgccagttgaaatattttcacagccatgattttatcacagattgtaggaaacagattctcttgcttctagaaagcrtgttttgttagggaactgtgttgaattcttcacctcaattaacctttattttaaaccttctgagcatcagaagtatttactatcttatattataaatgcaaatactttttcctggatcaaataattgaagaataactaggattatgaatgggaaagaaaggtttcctatgcctgagtgagttgagttgctgttctttgcttatcatatataaagagtgagtgaatttattatcatcctggtaggtacatgttaactcaaaattattgtggtactcactgtactttgtactattgggttccaatggtttgtaagctagtgatttatgcacataaatccttaattcttaactaagaaaatttagaaattttaaaatttaataccctattaagaaaaaaggg

SEQ ID NO: 275959 - DNA, 527 bp, Homo sapiens
ctactttttttaaaaaggcaacttccgcacttataagggacagtaatccttgtgccagttgaaatattttcacagccatgattttatcacagattgtaggaaacagattctcttgcttctagaaagcgtgttttgttagggaactgtgttgaattcttcacctcaattaacctttattttaaaccttctgagcatcagaagtatttactatcttatattataaatgcaaatactttttcctggatcaaataattgaagaataactaggattatgaatgggaaagaaaggtttcctatgcctgagtgagttgagttgctgttctttgcttatcatatataaagagtgagtgaatttattatcatcctggtakgtacatgttaactcaaaattattgtggtactcactgtactttgtactattgggttccaatggtttgtaagctagtgatttatgcacataaatccttaattcttaactaagaaaatttagaaattttaaaatttaataccctattaagaaaaaaggg

SEQ ID NO: 275960 - DNA, 573 bp, Homo sapiens
ttatcagttaaagggaagctttgctgatgtcagaccatagcccagaaagttaactaaaagttttgtagaagtagataatcttttcctggtgatcgatgtggtgagattggaagtgagttgccaggggagtcatggggaaataggcttamtcattttatttgtatttgtgctgaaggcagtgctgaacaaacctctgaagtcacttagccatgtcttttccagggggcatgcaaggcgactgctgatttctacagacactttttaagcgattaccagtgctggcaagtggaactacctttccggtcctcttacaagcatccagtcacttgctgaaatgtcataagcgatataaacctgctgacaggccaggatcattgcatctcctgcctcctccttccacgtaacaaatctcattgttgattggcatatggcagcaagcatcccaacacccagagtggtgttcttatttctgagggagcagggtctgtgtgtgaattgcacacacagggagcaatcccctgccctgatacaggcaacctgagtgcttagttccttctctgctcagaacttagt

SEQ ID NO: 275961 - DNA, 531 bp, Homo sapiens
ttgtttgtgttacacctacacaggaaaaaggaaaaatgtccttttgattccatgcttatagagatgttcatccaatttgaatgaacatgtagccaaggtagtgtcttccccctttcttctcctttttttttttgtctcataggtgtaataacatttcattttaaaaataaatatgaaaaatggaaaagcataaataaaaaataaacayatttgtgagttttttatgcagatataaatactgttaatattttaatttttatcctctggccttgtacttctaggaagtaatgaatggtctggttctttgggtccttggagccagtgtgggtaggagtggggttggcagggacagtagagaaggatgcaaggaaaatatttgctctggatagataattttgtctttttcatccaatcttatggggaagaaaatgttcaaaattcaataaatattcattgaacacctactatgtgctaaggactatttagatagtagaaacactgcaatgaataatgcaaaatgcctttgtgaaa

SEQ ID NO: 275962 - DNA, 577 bp, Homo sapiens
aaatattcattgaacacctactatgtgctaaggactatttagatagtagaaacactgcaatraataatgcaaaatgcctttgtgaaagttataatctatggaaaatggaagagagagagtagaaatacccagtatgaaacttgacaattcaatacaaagtagccaaattatttaaataaacactttaagcacctggtatatggcacagttttgagtgatgatgtgttaaattcaaaatcaggaatttttatctaaactgtgtatctacaataatggattatataaaatgagacagtcttataaaccctatttctagatattttatagccttttgacaattatttaagtctgcatgtagaatttatcaccacttaagtagaatctattaggaccgtagaatctcagagatgaatttaaatggtctaccttctctatttctattatctatactacactcctgctcccatggctgaatcctctccctgatacattaagcagtaattatcagcctctttttaaaatcttcaggcacaaaaagctctctacttcctgaagcagcccattccaccaaccagta

SEQ ID NO: 275963 - DNA, 579 bp, Homo sapiens
ataaaccctatttctagatattttatagccttttgacaattatttaagtctgcatgtagaatttatcaccacttaagtagaatctattaggaccgtagaatctcagagatgaatttaaatggtctaccttctctatttctattatctatactacactcctgctcccatggctgaatcctctccctgatacattaagcagtaattatcagcctctttttraaatcttcaggcacaaaaagctctctacttcctgaagcagcccattccaccaaccagtagctccaattttcaaaatgatcttccttatattaatctgaaattcaagggcccatagtttcttccgctgaaagtatgtgcaagtctctgggaactatctcaggcagttgaagcctggggatatttcttttccaagtttcaaagttcaaattgccagaaagagccctgaaagggtctaaggtgttaaaggtgtccgtaaaactgatgaagaaaataatagcttgtatcaaagagcaccagtagcatgtggaagaatgggttgttaggggatatggctttgatctgccactcgcttgtcagcag

SEQ ID NO: 275964 - DNA, 577 bp, Homo sapiens
ccgtagacactgtggaaaatgaagtgtttttgtatgtcctgataaactgaagttttgatgttacaaaatgtccaaaatgcaatttggctttcatttgaattgcttcctgcaaagttaattgtttgctcccaatccataattgatgatagcttttcccctattgcagttagaccaaggaatcttggcagtctagtgctatagaagccaracacatgcaggtaataacaccccaagaagagctgaaatattagcctttggagacacaggctgtgcaaatttctctggcttacaaaagagacatcagttacaccttagagcctgtcttgtagacttagtttcataaaagttgtataataattttggaaagtacagatgacatgtcagaaaaaatgccagaggaaaagctctagggagcctgattaatcagtttcacagtaggtataaggaatgagggggttctgatagctaaagtagtgatttgcatgtctaactaattttcttctgccatttcttctccattcccatgatatccagtacagagtgaccatgcagtgttgattgatcgaacagcaaccac

SEQ ID NO: 275965 - DNA, 1135 bp, Homo sapiens
ccgtagacactgtggaaaatgaagtgtttttgtatgtcctgataaactgaagttttgatgttacaaaatgtccaaaatgcaatttggctttcatttgaattgcttcctgcaaagttaattgtttgctcccaatccataattgatgatagcttttcccctattgcagttagaccaaggaatcttggcagtctagtgctatagaagccaaacacatgcaggtaataacaccccaagaagagctgaaatattagccttyggagacacaggctgtgcaaatttctctggcttacaaaagagacatcagttacaccttagagcctgtcttgtagacttagtttcataaaagttgtataataattttggaaagtacagatgacatgtcagaaaaaatgccagaggaaaagctctagggagcctgattaatcagtttcacagtaggtataaggaatgagggggttctgatagctaaagtagtgatttgcatgtctaactaattttcttctgccatttcttctccattcccatgatatccagtacagagtgaccatgcagtgttgattgatcgaacagcaaccacwaaacacgtctctttccttgtctcctctcatttaagggactgtagctagctcctacagcttattctgtactacccatcaggactaatataaagtcattctaagaataatccacccaaactggccttcatatctggtgtctggaatatagcagaaatcttttcattcagtgttaaagcattgcatcatccaacgaactgactgcaaatggacacacagtctaacttaaaggttatggatcagtaggtaaatgcaaaaattctattagttttcagacctggggtttatgacattcatttaaaatgaaatcaaaatcctgtacagaaataggaaaggcaccatggatagattcacttttaacagcatccacttggctattacacaagggccaagaagaccatagtttctatatcatgtagttactttttattcctgttcactgactttgacaaagacggtaaawagcatgcagagaatagatacattttgaagaaatattaaaacactgattaatgtcacattaagaagtgtaaagtcccttgggtagagggagaaaaatt

SEQ ID NO: 275966 - DNA, 560 bp, Homo sapiens
gatgccatttttcatacagatttgaataatccctttctctactttcttcrtctctgtgatttctgtcatacactctggctctcagaggtacctttttctggtattctgtccagacattcaggcggttggcctccctgagttgcattgcacttccctcaattgggtctacctggaagtggaggattcagagaaaagaaccttcagtgccactgccgccactgccaccacaagtgtagagatgcagcttcattactgtagctccatcctgcaggggcctgctcctctaattggagaaagaaagaatttttattagagatttatctgaccatgaatgttgtactattctgggattttggccacactagagtgtaatccaggagagatgagaaacacacacacacacataaagcaaaaattaggaatttattgctagatgggatgttcttcaagtttttgttcccatccccagtctaactgtcattatttatttttcagttatcaaatagttcctttaattttttttctaggaatttttgctgtaatcagtaggagataggatg

SEQ ID NO: 275967 - DNA, 560 bp, Homo sapiens
gatgccatttttcatacagatttgaataatccctttctctactttcttcgtctctgtgatttctgtcatacactctggctctcagaggtacctttttctggtattctgtccagacattcaggcggttggcctccctgagttgcattgcacttccctcaattgggtctacctggaagtggaggattcagagaaaagaaccttcagtgccactgccgccactgccaccacaagtgtagagatgcagcttcattactgtagctccatcctgcaggggcctgctcctctaattggagaaagaaagaatttttattagagatttatctgaccatgaatgttgtactattctgggattttggccacactagagtgtaatccaggagagatgagaaacacacacacacacataaagcaaaaattaggaatttattgctagatgggatgttcttcaagtttttgttyccatccccagtctaactgtcattatttatttttcagttatcaaatagttcctttaattttttttctaggaatttttgctgtaatcagtaggagataggatg

SEQ ID NO: 275968 - DNA, 635 bp, Homo sapiens
tgtaatattttgagaaacttaacaaatgtcatatgctttacctttgattggattctaaaagtaaataaagcattgtacttctttccttttggctggaattctgttaattccattagtaattctaattttctcattctgattagaagtttagaatagatgtaaaattgctcagttataagaagtggaaaacaaattacttgtttcttaataagtgcaatatagtagacaacatctttcaaaatatggagtgtcatattattggtagactctcttagtctagattcttttggcagtaaacagccaaataataaaaatccaatttagttcttagacagtttgaaacaaaaaagaaaagggacatttattggctcatataattgggaataacattcttaaataaacatcagtcacaatttttttgttgggggagtttcaaaagatcaccagctagcttttgtctttttacttctttgmagcataggcatttttcccatttacggtaagatagctgttggtcagatagactgttaacatatattcctagtaatatcactgggaagagccagttcttcctccaagaatctatacatccatcacagggaagagatcctgattgtccacgcttggaatagaag

SEQ ID NO: 275969 - DNA, 590 bp, Homo sapiens
aataaaacatttcccttgctgattttgactactacttataattcaaatgtgctatgctaatagaacctccctcttagtgtgcaagagagaaaatgaaggaggaatgaaaaattataatcaattacaatataaagtggcccagaattgacagatggaggaatctattccatggatgtacttgcaacagtatctgaagatacatctgagaaagtaattgaaactttgtaattgcagaacataaaatgtaaatagccgtaaatagacaaccgacaaaataaagcatggtgaatttctaacyggaatactatgcgatccttaagaatggggcagatcttccattatgctctaatagaaagttacctagaatacaaaagaatctcatcttcttcaatgtggagatttaaaaaaaaaagcctttggccaacttaaatatacatgcttttagaatcataaatgaaattattgaatgtttacttatatttaatttattaatctagttacacattcacatttaagattgcatatcatataacctattacttcagaaatatttctactttttgcatttcttgaatcagtattatatgaat

SEQ ID NO: 275970 - DNA, 617 bp, Homo sapiens
ctgttcattatttcacaaacagacaaaactcaaattctgactagtccagagctatatcgctcaggagctgctgctaggttcaatcctgttggtcctaagtataaggtaggtgaacttggagggagaggtcgctggaggaggtaatatggtcaagtaaccagtgacacagctcaagaaatcatctttattggacatatttattcttttcacttcttttttccttttcttttttaaaataaaacagctttattaggatataattcacatgctatataatttacccatttaaagtgtataattcaatggcttttagtatattcagagttgtgcaatcattctcacaatcaattttaggacactttcaccactccaaaattaagccgcatacctcttagccaacacctctcaggccccccaacacttgctgggcccttgaaaccaccaatctactttctgtctctataggtttgcctattctggctattccatataaatgcactgataaatatgtggtctattgtgagtgacktaatgttttcaaggttcgtctgtattgtagcatgtatctgtacttcattcatttttatggctaagttatactctgtcatattatggaa

SEQ ID NO: 275971 - DNA, 465 bp, Homo sapiens
acttcatattaagaatgggtggaaatttataatattggggtttggctgatgctacaggattttcttggtcagaatcataaaaagatagagaagccatgctaattctgacactttgaaatgtaagagcagttcttgaggtattgaatctacatgaaagggatggaataaactggaaatgatttataccaacgagatttgagttaggggaatgtgttagttttctattgctgctataacaaattatcaccaactttgtggtttaaaacaacacaaagttattttatacagttcgaagttagaagtctaaaatgggttgttagggctgcattccttctggaagatccaagggagaatctatttctttttccagcaaaaaatgcaagactgcctacatccttggctcayggccccactccaccaatttctgcttccattctcacatatcttttcctcacattgctgttt

SEQ ID NO: 275972 - DNA, 455 bp, Homo sapiens
ggatggaataaactggaaatgatttataccaacgagatttgagttaggggaatgtgttagttttctattgctgctataacaaattatcaccaactttgtggtttaaaacaacacaaagttattttatacagttcgaagttagaagtctaaaatgggttgttagggctgcattccttctggaagatccaagggagaatctatttctttttccagcaaaaaatgcaagactgcctacatccttggctcacggccccactccaccaatttctgcttccattctcacatatcytttcctcacattgctgtttctctatttctcttttaaggacccccatggttacattgggccagaataatccttcaaattcaagatccttaatttaattgcacctatgaagtcctttttggcatgtaaagcaacatattcacaggtttcaagtattagagtggggata

SEQ ID NO: 275973 - DNA, 580 bp, Homo sapiens
tgatttataatttgtgtccaaatacaacagtgaayttgtttatttctccttataaaattttaataagttgaccttatatttttgatgcatgttgctaagtacctatgatgtattatcttaatattttttaattattttcatcttatactcaagtatatttatgattgataggaccagtcttgatttattagtgaatcttcatgttcgaccattctatgtcattttcatgtaattatgattctagtaaagagaatgtagctaaaattattatgtatatctgacatggcttctatttttaatgaggagttttacttaattcacatttgttgtaatgatcgaaatatttaatcatgtataacctgcttgtttatttttcttcttcttttgtattaagcttattttattagggtattttttcttcattctttctttagtaattctgcattccatttttctcacatcgtgtttgtttaaatacagtatgtaaacttacaatttccaattctatgttgacattaagtatgtcctaaaattgctctttctgaattagattctcagtaatttttcattttctttctac

SEQ ID NO: 275974 - DNA, 507 bp, Homo sapiens
ctatatgaaacttgcagcttataaagagagaattaagaaagaaccagaaatgtatatatttggtcagaaggaaagagaagtgtgaacttaagggtattaagcagaggaaactgcctaaaatgataaataaaatggttagttcagttgtttctttacatccctggagttataagtatctccatctgaccatgagttaatggtattgkgtatatttactgttgtatgattttcagagcttctagcccaaaactggagacaaaagctctatgttctaccaatgctcacagatgaataatgctttttttaaaaatatcaccaattctgctgtcatttcagacctcagagactctgcttattaggataggaggcaagcaaagaaatgaggtgggcatagaggtggcaggggttaatttcatatttatcatgagatcttgcatgatttccctaaaagatatttaatttccactgggcataataacttgcagctgccagaatgtgctgtgtacc

SEQ ID NO: 275975 - DNA, 541 bp, Homo sapiens
tgactcccactaactgaaccagacagcttctttcctaattcctagagccttgaaagagtatgatgactcccaaatatctccccaatttgcctcaaaatagttaccctagaatacttccttggggataaaacattttctctggaaaatggtaatgagtagcagcggataaactcatgaacatcatggtccaggtgagttcatgaaattaaccagatttaggaagttgggaaccaaggcaaaaagtaacaggtttgtcaaagctcaagtgggaggatttgtgggagcagaaaggtatgattgacagacctgtctttggacctggttctaatactcccttgctaagtaamcttgagtccaccatttaacttcagtacttcatttggtaaaatgggagcaatgagacctgtctaatggcattgccgtgaagataaactgtgaaaagacttttttaagcagagaaggtttggggtaaatattagttatttttttggcccactgaacccaatgcctcactcactacaatggcctggcttttactgag

SEQ ID NO: 275976 - DNA, 602 bp, Homo sapiens
gctggcacacaatgggggcacttgctgattttgccagtctttgctcttggcttctggtatcagcactgctgttttggggatatggacgttaggaaggagcaggaaatggcagcacaaattttgtagagcatctcatccaagggcacaattgccaaggcaacagtggggttacgattggaaaatgrcctctccccagtcttttaaaatgttacttttgcatccactcacccatttattcattttgtattcatttattagtttgtaacatcttcaaatgtgataatgctgaatattttccaggcagtaaaattgcttatggttaaggaaaactatctttaagattgcgatagaaattgaccagattgttttcatagtctctgaaaataaaactggcaccattgatgtattggggatgtccagagctttagcagaactggtttagttgcccagtagtttctccctcccctgtcttcacatagcctggtctctcatcccttggcctagaaattctgtttcaaaagggaagagagggcaagtcgttggagggaactaacattcactgattatgtactgtctgtgagctacagagctaggcactttac

SEQ ID NO: 275977 - DNA, 633 bp, Homo sapiens
atggagttggggatgggtaagagttaagagttcagctccactgtggaagggtaacacagggctgaacgcattgaagagcygaacacattgttttggcctgtttggaatttgttatgcataacttttgaggacattttgcccaattgctcacttgtttcccctgtggaaacactatctgataactatgtctatacatccctatctactttgccttccaaaattaggatgaattatttcttcccttctcgccactctccaaaacttaaaaagaatgctttggacaacctggcactctctcagccctctcttattctttttaaaagaataattgtttcagggcaaatgaagaaatgcattccctttcagacccactagcccactagttacttctgtcctctacaacaagcctgagtttataccgcaagagggctgcatctcctccctgtcacatggcactgggcctttccctatagtcacaggctgacatgcattcagagactgctgagagatcaggataggagccagctggagcgaaatgttatagctcagaacagtttaatccaaacacaagggcagtgcttgtgcctaacacaactgtggtaggggtgtggtgtggtgtgtggagtggtggca

SEQ ID NO: 275978 - DNA, 543 bp, Homo sapiens
ttctgcctgtgtctctcattgctgaagtaactcacctctctcatatcgactcttacccaggagccgcactgcagactctttgatgtaggtcctttctgcatggcagctaaggccaagctgtggttttcatttgcatgatgcaacctccccctttcggttgtcgcctccaggttaaccagattcttttgcctgcactgcccaagcatgttgacgtgctttccccgatggccctgaacgtggtaagcactggacgcatgcatgaattaaagcagcgagcattccaatacactgaagcactgggccctgaggcttctcctggatcatccctgtgggccctcagtttgctgtgatatcacaaaggccaccatgtcccttgaaaattcaagactaggacattggaaaagagagarataaatctcccgtttttaggtttatgctgagcaaagactaatgacaaataattagaagctaggaccagttttccaagtaacaacctacctgatcatcagtcctacatgttcctgactccacctgggtgtgcac

SEQ ID NO: 275979 - DNA, 610 bp, Homo sapiens
acttccttctcccccatgaatgagctcaccagcccttgtcccttttcttytgttcattcattcatgtctaaattcacaaaacattcattgagggttccttttagtaacttcagtaagacttgacacagtgcctagaatgtggtaatgggaatgtctgttgaatgaaacaaaatgagctaaaaagaaataagtggatggaggtggatgaatcccaactactgtgcatctgcaggacacggtcaaagagaaggtccctaacagggtaactgggaaggctctcctcctgttcccctgctcttctccaagggtgtcaacggagtaagtcctgccccagagtaaatccactccagttactataaccacgcactgaggatccctcagctgcctccctatatgatcactctgaaatattcacaccagtccacttcctggctccccaaagaaggatgcaaattcctccccctgctcacctttttctcttgtctggaatgctcttggccctccactccacttagttaaggcttttccatgttttaagactcaactcaagtccagctcccccagcaagtccctatggctacaggcacatctgcctacttttaacttatag

SEQ ID NO: 275980 - DNA, 590 bp, Homo sapiens
tcatttggttttcttgtcctgttaactgcctggttctgcagcacccagagccagataatagaggtgttccttcaccagccacagctactatcaggatccctcttagtccggaggtaacagaagcaactggttgaacgtgtttcctcctgggaaatcctaaatgttccatatggcaatagggaatctrgagttgtgtttctccttgtattagggatattttccctctttcagtttcttcccattttttcccatctaaaatatgttttttccactttgctgagatgaagaccagccagagagtcaaaggaaatgacagacatgccataatagaaagaaaaaaatacagacttctgaagaatgagttgattcatgccatgaaaactcacgataaaaatattcactacttttttttggccacttgtcatagtgtgctgcctctgctaggcagctgaaagtgtctcatatgaaaagctctattatcctccacagaaatgacctttgggacccacccaacggtagtcaatggtaatattatactaacttgccccccaagaggaaagaatgaaataataatacttaaaatatgaatg

SEQ ID NO: 275981 - DNA, 442 bp, Homo sapiens
tccttggcccaccccctgcttctttgtcccattgttttcagcatcttctctcattaccaaccccagccccctcttagttctctgttacaggctacattatggacccccatccctgccaaagtcgtaggttgaagcccaaaccccaatgtgatggtatttggagatgaggtactttagggagygattaggtttagacaagatcatgaggatagggccctcatgatgagattagtgccattataagaagagagaccagagagtttgctctttctccctctctgccatgtcaggacacagtgagagggcagccgcctgcaagccagaaagagagccctcaccagaacctgaccatgctggaatgctgatctcagatgtccagctttcagaactgtgagaaaataaatctctgttatttcagccacccagtttttgatatcttgtt

SEQ ID NO: 275982 - DNA, 1039 bp, Homo sapiens
ccctcaaccctgtacaaagtaatagtacatttattcaacaacatattttcatggagtacctatttagaaaagagacggaatctgggcccagtgttataggattcaaatcccagctctgccattaattgggagtgagcattagcaagttccttcaactcaaagtatctcagtttccccaactataaaatgggaacagtaatagtaacctacctcatggggttattgtgaggaatgaattaatatctataacrgttaaaattgtccttggcacataggaaatgttcagtcagtgcttgctataattattactaggagccagatactgggctaaccatattggggatacaaatgtgatttgctctaaatctatcctcaaaaaatgtacagtcttgaggagctgtttacaatctacatttgtatttagctaagataggaaagatgactatctacataattttaggggacgatccaccagcccccaaaagaaattawagcattacccagtaagaaaaaactgtgccttgggttcaaatggatgtaagttttgaccctggctctgctcctgatgcactgagagaccctggctgcttatatgaaacctgaawgtctatgactgcatgtaaaaaataaagatgagaagctgggcgcggtggctcatgcctgtaatcccagcactttgggaggccaaggcaggcagataggttgaggccaggagtttgagaccagcctagtcaacatggcaaaacttcgtctcttctaaaaaatacaaaaattagccaggcgtggtggcctgcacctgtagtcccagctactggggaggctgaagcaggagaatcacttgaacccaggaggtggaggttgcagtgagcggagatggtgccactacactccagcctgggtgacagagcaagacttcatctcaaaaaaaaaaaaaaaaaaaaaaaaaaaagaaagaaagaaagaaaaaagatgagaattatgcctctcaggggctgtgaaataaattgatctacgtgtgttttaaaatgcctttcacaca

SEQ ID NO: 275983 - DNA, 547 bp, Homo sapiens
agcattacccagtaagaaaaaactgtgccttgggttcaaatggatgtaagttttgaccctggctctgctcctgatgcactgagagaccctggctgcttatatgaaacctgaaagtctatgactgcatgtaaaaaataaagatgagaagctgggcgcggtggctcatgcctgtaatcccagcactttgggaggccaaggcaggcagataggttgaggccaggagtttgagaccagcctagtcaacatggcaaaacttcgtctcttctaaaaaatacaaaaattagccaggcgtggtggcctgcacctgtagtcccagctactggggaggctgaagcaggagaatcrcttgaacccaggaggtggaggttgcagtgagcggagatggtgccactacactccagcctgggtgacagagcaagacttcatctcaaaaaaaaaaaaaaaaaaaaaaaaaaaagaaagaaagaaagaaaaaagatgagaattatgcctctcaggggctgtgaaataaattgatctacgtgtgttttaaaatgcctttcacaca

SEQ ID NO: 275984 - DNA, 547 bp, Homo sapiens
agcattacccagtaagaaaaaactgtgccttgggttcaaatggatgtaagttttgaccctggctctgctcctgatgcactgagagaccctggctgcttatatgaaacctgaaagtctatgactgcatgtaaaaaataaagatgagaagctgggcgcggtggctcatgcctgtaatcccagcactttgggaggccaaggcaggcagataggttgaggccaggagtttgagaccagcctagtcaacatggcaaaacttcgtctcttctaaaaaatacaaaaattagccaggcgtggtggcctgcacctgtagtcccagctactggggaggctgaagcaggagaatcacttgaacccaggaggtggaggttgcagtgagcggagatggtgccactacactccagcctgggtgacagagcaagacttcatctcaaaaaaaaaaaaaaaaaaaaaaaaraaagaaagaaagaaagaaaaaagatgagaattatgcctctcaggggctgtgaaataaattgatctacgtgtgttttaaaatgcctttcacaca

SEQ ID NO: 275985 - DNA, 570 bp, Homo sapiens
gttacaatggacggggaaggaggttgggggagaggagatggggagatataggtcatgtgatgcaaaagagtagctatttaggaggaacaggtttagacatctaatgtataatatgagactaaagttgataagatcgtattaagggttttcattaaataaatagattttagtgacttttgtcacaaaaaaggattatgtgagatgatagatacgtcaatatacttcactataataatcattttactatccataggtattccatcacgtcatgttgtaaacctcaatacacaataaaatttattttttcgaaagaaaaaatatattttgaaaaaaaytgacacaataagcttttctccatgtaagcattaacgtacactgagtgtaaaagcccacgtatattatcttgttccaagcactactccaggtgtcttccttatagcatctcaattaatacttacatatcctcccctcttctctgcaagatagatagtattttaaccctgtttaagagatgagtaaactgaaacaccaaaagattaagtaccttgtctaaggtcacatgctaaatgg

SEQ ID NO: 275986 - DNA, 627 bp, Homo sapiens
tgccaaatgaaacagatggaaattttctttgacatatagcaagggaccctgatgtgggcttcttctgtctattctgttgggaattctaagatataaggacttttggagaaggtcgggccattgaggattccagcatgtgccagtcccaataggcttatatttaggatagttaggaaaatattatcaacactcacaaggaaaagtgatatcctataattttctgaaggctttcctagattgagagggcacctgtcacaggctggtagagaatcaaagtatagtttccagttcagtcttgggaaactggtaaagaaagagggagtgatgtttaagatgattgtgtgaaatgttcttttatgactcatcccgtaaggaggttttcctgagaaactgaaaggacaagtcaaatactacaatcccaggaaagtgaaaagtaaagaccaagggaaaatgaatacagaacaaatgaaataattttaacactgatgattaaggttagtttgagtcataaaaggagaaggacaattcaacggagaccaagagactgagggaaaratgtacaagaaccccagaaggagcaggcctcagggactgccaaagaatcaagaacccagagaacagtatgct

SEQ ID NO: 275987 - DNA, 465 bp, Homo sapiens
gtaaaactaaacttttgccttctaagcacaagaggcaaatttttatccgcacagctaaatttggtgtaataggctccatcacggaggacaagaaataagaggaggagtgttcacctccatgtggggagaaccaaagggtacagagaaaggaattttgaaattaatgcactgtaggttcttaaggcaaaagtcctctaactttcatttctatcttctctccttactttgagagagggctgggaaaacagttactagggccagcttgggtttggaagccctgcttaaagttttgcaaggcctggaatggacttcccattttcacggttgcctgcagcccacttccatgtattgatttgcacttttcatgtttaaaatamgacttatggcaaacaacatgggttcattttaaaatctgcacagataccagtagttggatgggggttgacaatgacttagaaaatggtg

SEQ ID NO: 275988 - DNA, 567 bp, Homo sapiens
ggggtgtattaggtagtggtgtggtagaattaaattgtgcagtagatgctttgtattcaccrggctccttttgggaaagcctttactctttactaacttgaatcactctgcctaatggtttttcttttttttctgccccagatcatcacagaacaagctttcttgtcatatagtcctcagctcaactgttatctcagtgagactttccttagctacccaaatagaattgaaactcccttccctgacactccattattgtgtattattttctgggtaacatttattgttgtctgcaatttcttgtttgtttgagagtaaggaccttgtcttcacttatcactactgcttagtgcttagactaatgcctgagacaaagtagatgctcagtaaaattttgtcgactgagtgaaaaatgaatactgttaacattctgaatgttcacgctaatgtaatctacagccattttacaagaaaaactgccaaaaattccaagttggttgagtagtaagttttagattatgaaggcctaataaaattttagtatcatgttatcacactggtgggttg

SEQ ID NO: 275989 - DNA, 575 bp, Homo sapiens
gcaaaacccttttttttttttttttttttttaaatggaggtgggcagtgggagagatcactaagatagagtcctcccgggagccaaacctctcgcccggttgattctggcaagcctgagacaggcaaactgtctactttcctgttttgatgtggtccgaagaaataaacaagaaacaaggagagacccttcctcaaactgtaactccagccaattagcatgaaaagctcaagaagctattaaccagaagtttcggctttaggggaccagggacttgcccgaggccctggcatgcgcggcggctaggtttaactttcaactcatagtgaccttttccttaatttaatgcaaaaaatctttcccagaggtggagatttaagatgctaatgatacatacrtcctatgaagaagcatgttaaaccaccatgcatgcaccagaaaaactccacctctacatgccctgtctatagttctccttatttccccttacgggagaggcccgtaaaagaaacccacaccctgacttcgaggaacagcccacttttttttttcttggtgttagctcccttgtgcgca

SEQ ID NO: 275990 - DNA, 536 bp, Homo sapiens
ttatagcttaatggcataacaaaacttaaataaagaaatcaaagtaatctaacaataagttttcccagtcaggcaccactacaaggaaagtgacaatttatttctgtaccacacgctttcctctgttaatctactttaaaattctacatatatgtgtgtgtatatatatatatgtatgtatgtgtgtatgtatgtgtgtgtatgtatatatatatatacacacatatatataaatatatacatatatatacatatatatatatayacacttacatttaatggtaaacgtatgtcacagtggtttgctgagcctatcaacctatcacctatgtattaagctccacgtggatttgctatttatcctgatgctcttcctacccctgctgcccaccctgccccaacaggccccagtgtgtgttgttcccctccctatgtccatgtgttctcattgttcagctcccacttataagtgagaacatgtgttgttggttttctcttcctgcattagtttgctgaggataatggtgtcaagctct

SEQ ID NO: 275991 - DNA, 604 bp, Homo sapiens
gctcacatccaaaaacaaaaagaattaaggaccagggtaaattggaagcatatgccccttctaaacaagtactgctcagctatcactgatggctttcacacagaaatgtagcgccatattgctgagtctctgaatttttcaagatctcarttgtgacctaattacttagttttcaaaacactctgtgccccaaacagataataactgagtgctaaaggcagccagtgaactgtccatttgtgaccctttttctaatatttttagtactctcagcttgtcttggcagagaggtcttctcaacaaatgtatggcaaaagccaccccaacccgagctttattcttagccttttagaacccaagacttgtgatttccattggtgcagataccttgcaaattctttcagaaaagaatgaatgacaaaaagtgtgtccaaatagaattctataaacttacatttttcttttaagatctctcataggtctagttggagaaggtcgagtattaagaaatgattcagtgggtagttagcagggatgatttctgtggctgcattgacattatcattgaaaagcctggtaagtctttctaaccaatctcatccac

SEQ ID NO: 275992 - DNA, 604 bp, Homo sapiens
gctcacatccaaaaacaaaaagaattaaggaccagggtaaattggaagcatatgccccttctaaacaagtactgctcagctatcactgatggctttcacacagaaatgtagcgccatattgctgagtctctgaatttttcaagatctcaattgtgacctaattacttagttttcaaaacactctgtgccccaaacagataataactgagtgctaaaggcagccagtgaactgtccatttgtgaccctttttctaatatttttagtactctcagcttgtcttggcagagaggtcttctcaacaaatgtatggcaaaagccaccccaacccgagctttattcttagccttttagaacccaagacttgtgatttccattggtgcagataccttgcaaattctttcagaaaagaatgaatgacaaaaagtgtgtccaaatagaattctayaaacttacatttttcttttaagatctctcataggtctagttggagaaggtcgagtattaagaaatgattcagtgggtagttagcagggatgatttctgtggctgcattgacattatcattgaaaagcctggtaagtctttctaaccaatctcatccac

SEQ ID NO: 275993 - DNA, 588 bp, Homo sapiens
taatccttaatatagctttttttttttgcaacatccccctctcacctttgctaaattttacctataaagtcatttttttaaagaactaatggggaaaaccaatctgaagagtaaaaacaaacaaacaaacaaaaaaaaccctcaacattttactttgtccttaacatagatgtcagtgttttatctaatayctagaattttctgttttaaaggctgggttgaatagtgctttcagcaaagaagaaagatagaatttatttatttatttttaagtatgatggcctacaatcttctctgttacaaaaaacccacaccaaagagatgacaaaatgacttgctgagggacatcatcctgagaagataaatagacgttaaaatggttttggcctgaaaaatcaatttggttgtctataggcctcatggaaagaaaatcacctttgctgaggaaaatattatttctacctctgagaggaccaaaccagtatcagggaggaaggaaggctcttttttttttttttttttttaaatgatgacactttctccaacaaagaatgagtgtttacagaaaaataggggacatatacttat

SEQ ID NO: 275994 - DNA, 599 bp, Homo sapiens
gaagttaatcctgttttaaatttttcaggactatcaaaatgtatgttctctgctgtgaagcatgaatagcttttggaatcaattatcaaaagaatctttgatcactcagtaaagactttggtttcctctttcaggaaaagctcaatttcagtagttttgtcactgcraaatgtgaatctctggataatgtgcccagttcaaaagtagcaaaattagaacctgaactcaagatccttctgatcccaaagtttatgacttaaaaatagattcaatggtgttatcagtgattaagtaattaattgctggtttaaataaacccagttcctcatggaagataatacacttgtattttaatacgagatttcaacatcttaaagtcaggatgtgcataaaagtgggaatttctagtgcttaagccaatgtgaggagaatagatgagggagaaaaaagagagaggttgtgattttcactgagctcttctgtcagccctcaaatgacagcatttggatctatgcaaccagcattctgcatcttctctgtccaacaccactcaaccagtggggcaggccgacttctaaaacatgtatgtatcagcaaat

SEQ ID NO: 275995 - DNA, 601 bp, Homo sapiens
caagtacttgaggtctcagaatctaccagctattaatcacaagcagcccattttctaattatcattttggaatgggctgtttgctctaaatttttttaatgaccatggaaaccagagccacacatacattagaaaagaaatttctatgtctgccttcatgcacttttcataatgaagacaaccaagatgtggtgctaattctactctgaatacattcatgtgttcagtcatccacggaaatgtgtcctgttgaaagaaatgtcatttgaaccaataattgaccctttcaaataccagcatgaaaattgcttatgacacagttagagcctatgaccccatgaatatccatcaagaagtggaccattaataaattgtactacattaagtacactgtttctaactggattgtttgtttttataacagatakctcgtgtcatcaatggggaattagctgattgtaacaatattgtccttcctgagatggaataaaattcaaaataacaatgggttactattaatataggcttatcatatacaaaacacaatattaagtatttaatgttatcactcattcatcaaatatttacagaattaatatat

SEQ ID NO: 275996 - DNA, 601 bp, Homo sapiens
caagtacttgaggtctcagaatctaccagctattaatcacaagcagcccattttctaattatcattttggaatgggctgtttgctctaaatttttttaatgaccatggaaaccagagccacacatacattagaaaagaaatttctatgtctgccttcatgcacttttcataatgaagacaaccaagatgtggtgctaattctactctgaatacattcatgtgttcagtcatccacggaaatgtgtcctgttgaaagaaatgtcatttgaaccaataattgaccctttcaaataccagcatgaaaattgcttatgacacagttagagcctatgaccccatgaatatccatcaagaagtggaccattaataaattgtactacattaagtacactgtttctaactggattgtttgtttttataacagatagctcgtgtcatcaatggggaattagctgattgtaacaatattgtccttcctgagatggaataaaattcaaaataacaatgggttactattaatataggcytatcatatacaaaacacaatattaagtatttaatgttatcactcattcatcaaatatttacagaattaatatat

SEQ ID NO: 275997 - DNA, 986 bp, Homo sapiens
atacaagtactctaggattcttggagattatctattttattattctctgccttcctagtgttgattcatagaggtggttacttgttgaaagagctctcatagaattaaagagttagcttttttttttttttttcagagtctcaytctctcgccagactggagtacagtggtgtgatctcagctcactgcaaccaccacctcccaggttcaagctattctcctgcctcagcctcctgagtagctgggactacaggcttgtgccaccatgtccagctaacttttgtatttttagtagagatggggtttcaccatgttggccaggatggtcttgatctcttcaccttgtgacaacccagcggtttcaaaacttggctatggattataataacctatggagatcattaaaaacagacacctgggtatagatcwggtaaacaaattgtaaaatatacagacaacagaatattacacataaataaaaagaataaacaacttgtatacctgggaacacagatgaatctcaaaaacattatgcttaaggaaagaagccagacacaaagagttcacattgtagattccatagatcatgttctagagccagaaaaactaatttacaatgacaaaaagcataccagtggtggtctggacctgagaggggaacaattgactacagtgacatttttgtaacttccaaggaagtttttggagttatataaatattgtacatcttgatttcagtgaatatatgggtatatacatttgtcaaaattcatcaaactttgcacttgaatgggtgctgttaaagwatgttgattataactcacagatttctgggtccaaattcagatctactaaatcagaatttttggaaaaagggcctaggaatgagtttgtttgtttgtttgtttataagaatcccatccacaggagattctgatatagttgtgtgtaggggtgataatatggtccaaccagtgcaggcatcc

SEQ ID NO: 275998 - DNA, 557 bp, Homo sapiens
ggtaaacaaattgtaaaatatacagacaacagaatattacacataaataaaaagaataaacaacttgtatacctgggaacacagatgaatctcaaaaacattatgcttaaggaaagaagccagacacaaagagttcacattgtagattccatagatcatgttctagagccagaaaaactaatttacaatgacaaaaagcataccagtggtggtctggacctgagaggggaacaattgactacagtgacatttttgtaacttccaaggaagtttttggagttatataaatattgtacatcttgatttcagtgaatatatgggtatatacatttgtcaaaattcatcaaactttgcacttgaatgggtgctgttaaagaatgttrattataactcacagatttctgggtccaaattcagatctactaaatcagaatttttggaaaaagggcctaggaatgagtttgtttgtttgtttgtttataagaatcccatccacaggagattctgatatagttgtgtgtaggggtgataatatggtccaaccagtgcaggcatcc

SEQ ID NO: 275999 - DNA, 537 bp, Homo sapiens
ttaacagtcgtacaacataaagactaggcagctaatgaatataagtccttagcatgggcttaaacattgtacacatttaataaatgctgactactgctggggaacaggccaagacagtgatgagggggaattgtcaggggaatgaagaaaggccttaacaacatacacctcccaaaatgatggctattcaaggacayaagtgattaaaattgggaatgagagctcaacttcctaataattagactttgggattgttaagattattagttggtttggggaaaataactctcaagatgtgaagttttaataaacttatggtattttttctatcataagtagcttttgatgactgttaaaaatattaatgtctgaaatgttttgccctttgtatgttaatacaatcttctgggtggaattttatttttcaatttttacagtttttcattgtctatttatttttccattttcgttttgggtgatgttttttggttaaaagtcttcatgataatgcagtccctcttagcacctatattaaac

SEQ ID NO: 276000 - DNA, 537 bp, Homo sapiens
ttaacagtcgtacaacataaagactaggcagctaatgaatataagtccttagcatgggcttaaacattgtacacatttaataaatgctgactactgctggggaacaggccaagacagtgatgagggggaattgtcaggggaatgaagaaaggccttaacaacatacacctcccaaaatgatggctattcaaggacacaagtgaktaaaattgggaatgagagctcaacttcctaataattagactttgggattgttaagattattagttggtttggggaaaataactctcaagatgtgaagttttaataaacttatggtattttttctatcataagtagcttttgatgactgttaaaaatattaatgtctgaaatgttttgccctttgtatgttaatacaatcttctgggtggaattttatttttcaatttttacagtttttcattgtctatttatttttccattttcgttttgggtgatgttttttggttaaaagtcttcatgataatgcagtccctcttagcacctatattaaac

SEQ ID NO: 276001 - DNA, 593 bp, Homo sapiens
caacatggattcaaattgcagccccacagaatctatctctatatatcttgaagtcactactgaattgctacccagtgctgtyttcttaatgctaagaaaccttaaggttttcatctcttctctatagtctgtcacccaaacccctcccccaaagctttttcaagtttctagcatcccacagtcatgctcccatatccaaacctgcatgtagcaatcttgaaggttatttggtacatttaatcatctggcttcatcactgccatgaatactgctcgaactggggtagttaataaacatttggggtctttaacttgttcatactggccacagtctttttattctgaaattttatactcaacatgccgagtgtcaggacctgaattggagaacaaaatgaatgagattctgattccctctgacatacctgcccagagggtctgtcttctgtctttgaaagtctgtttttgaaagttctggctatctcctttggataccctgttctagcctggttgaggatgcttcaaactcatttagcatatttgcacctttcctttcttcttgtctaaaattatatcttgcaagctaacacgaag

SEQ ID NO: 276002 - DNA, 593 bp, Homo sapiens
cttgaaaacaagaaacagtgaaagtgcctaataggctacatcacttcgttacttagctcacttgccagtcctggggccagatcttcaaggttttcttttcaaaaattcttccccccttaatgttctcacttaactggtcttctcaaaaatgtctacttagaggagaacagacccagagcaatcatggaaattagggaggtcattaagattgcttgggcagattaaattgggtgtgttggagatttgaacctctytttttaggaataaaaggaatacagctgcctttgtcaacctggacagccttaggtattaatgtgttcatctcttctgtgtctgcttttccacatctagaccatatggtagaataaacatatattgtaatcaagctctaaatccaaggacaaaagcccatcatcctgaagattcaaggaaactaaatgctccccaaaagtttccacttaattcctatccctggggtaaactatgcatctggaggcattgacacaggaggggaaatctgaccctagaatctaatgggaaatgagtggtattctttttatccttaagcattgcaatgggctgactgtgcacat

SEQ ID NO: 276003 - DNA, 580 bp, Homo sapiens
ggtgcttgccaatttggttcctgctaagggccctcttcttggtttgcagatggatgcccctccctgttgtrtcctcacatggtagagagatagatcttctttctcttttctcttattatgatcacattaatcccatatatgaaggccccaccctcataaactaattaccttccaaagacccgacctccaattgccatcacactggggatcagagcttccatatatgaacttggggagacacaaaccattcagtccgtagtagccaaacttttctttgggttacattaaccgttttttcctgttgacccttcaggccaagaggcagttaatagctctcatgtccttttaaattctgttcactcacttataaatcattcaatttgagtgtgctatatcatcttgagacccctaaactagcaaatcttccaggatgctaacggtttttttacatagttattgtgaagaacaaatgagggaacataagaaaatgtgtgatcattgtctaatacaccagcttctcaccccaggtagagcccctctcctctgttccctttctaaaccaatggcgccactatcctgc

SEQ ID NO: 276004 - DNA, 627 bp, Homo sapiens
tgccaaatgaaacagatggaaattttctttgacatatagcaagggaccctgatgtgggcttcttctgtctattcygttgggaattctaagatataaggacttttggagaaggtcgggccattgaggattccagcatgtgccagtcccaataggcttatatttaggatagttaggaaaatattatcaacactcacaaggaaaagtgatatcctataattttctgaaggctttcctagattgagagggcacctgtcacaggctggtagagaatcaaagtatagtttccagttcagtcttgggaaactggtaaagaaagagggagtgatgtttaagatgattgtgtgaaatgttcttttatgactcatcccgtaaggaggttttcctgagaaactgaaaggacaagtcaaatactacaatcccaggaaagtgaaaagtaaagaccaagggaaaatgaatacagaacaaatgaaataattttaacactgatgattaaggttagtttgagtcataaaaggagaaggacaattcaacggagaccaagagactgagggaaagatgtacaagaaccccagaaggagcaggcctcagggactgccaaagaatcaagaacccagagaacagtatgct

SEQ ID NO: 276005 - DNA, 629 bp, Homo sapiens
acagtggcaaaacaggaccaacatctcttgattctaagcctgtttctctttctactacaccactccatgtaataatgtatgtgcacttttaaaaatgcattctgcattgtagagtgcagagattgacattgtatcaatgattatgccaatttcttttctgaattcatctttaaaaagtgggaagttcagcaaagcaaaagcaatgagtattgatagtcaatcctgacaatttcactattttcagtggcaaatctctgagtttaatttttatggctaatcatatcacagattcaccatacccatagaggtatatgctgtctacatttacacaatttttagtcttcagcaagtagtatgagtaaagtcaaccaagatgatttttaaatggattgttaaaatgataaaactaaatttaaaatattttatagtaatatgtggtatcaaaaactagacttycattttctaacttatattttgtactgtgtgttcattaggatccagtccaaagtgccttagaaaactcaaataactcaacttctgaaggaaaaaactatggttatattaacttctataaagtactagtgatcttagaggtgtttgataaaacaaagtgatgaagagcataaagt

SEQ ID NO: 276006 - DNA, 629 bp, Homo sapiens
acagtggcaaaacaggaccaacatctcttgattctaagcctgtttctctttctactacaccactccatgtaataatgtatgtgcacttttaaaaatgcattctgcattgtagagtgcagagattgacattgtatcaatgattatgccaatttcttttctgaattcatctttaaaaagtgggaagttcagcaaagcaaaagcaatgagtattgatagtcaatcctgacaatttcactattttcagtggcaaatctctgagtttaatttttatggctaatcatatcacagattcaccatacccatagaggtatatgctgtctacatttacacaatttttagtcttcagcaagtagtatgagtaaagtcaaccaagatgatttttaaatggattgttaaaatgataaaactaaatttaaaatattttatagtaatatgtggtatcaaaaactagacttccattttctaacttatattttgtactgtgtgttcattaggatccagtccaaagtgccttagaaaastcaaataactcaacttctgaaggaaaaaactatggttatattaacttctataaagtactagtgatcttagaggtgtttgataaaacaaagtgatgaagagcataaagt

SEQ ID NO: 276007 - DNA, 627 bp, Homo sapiens
tgccaaatgaaacagatggaaattttctttgacatatagcaagggaccctgatgtgggcttcttctgtctattctgttgggaattctaagatataaggacttttggagaaggtcgggccattgaggattccagcatgtgccagtcccaataggcttatatttaggatagttaggaaaatattatcaacactcacaaggaaaagtgatatcctataattttctgaaggctttcctagattgagagggcacctgtcacaggctggtrgagaatcaaagtatagtttccagttcagtcttgggaaactggtaaagaaagagggagtgatgtttaagatgattgtgtgaaatgttcttttatgactcatcccgtaaggaggttttcctgagaaactgaaaggacaagtcaaatactacaatcccaggaaagtgaaaagtaaagaccaagggaaaatgaatacagaacaaatgaaataattttaacactgatgattaaggttagtttgagtcataaaaggagaaggacaattcaacggagaccaagagactgagggaaagatgtacaagaaccccagaaggagcaggcctcagggactgccaaagaatcaagaacccagagaacagtatgct

SEQ ID NO: 276008 - DNA, 601 bp, Homo sapiens
tatctgggctgtggaaatggggcatgttttctaaatgtaaaacaaggtcaccaggtctggcatatctcagagctctggtggggaccatggcacagaatatcgatattcacaatagacctggtaaacccaggatatatgtcctcacaacaaaagccataccagtattctatttacctacaggcaagttttagacttagattttcaagctctsgggaattctaagaaataagccttaaacagatccaccgaagtattgtttctgagccagtgctgttctccattgtcatttacagaactctgaatgtatacagaataggagatgggggatgattcactattctggaagttgtgctgatttttctaagaaaactcctagacttcctctgtagtcaaggtgaagtctagatgacagatttgctatgttgaggcagatttttgcaaaaggaaggaagaggccctggctcttaaatggccatactattgaccctgtaatagagcaatgccaagaattctaggtgtggcttgaccagccagctcacatggcctgagggctcctgctctacccagtgagtttctgaagcaagttctaaaatgcagctga

SEQ ID NO: 276009 - DNA, 601 bp, Homo sapiens
tatctgggctgtggaaatggggcatgttttctaaatgtaaaacaaggtcaccaggtctggcatatctcagagctctggtggggaccatggcacagaatatcgatattcacaatagacctggtaaacccaggatatatgtcctcacaacaaaagccataccagtattctatttacctacaggcaagttttagacttagattttcaagctctggggaattctaagaaatamgccttaaacagatccaccgaagtattgtttctgagccagtgctgttctccattgtcatttacagaactctgaatgtatacagaataggagatgggggatgattcactattctggaagttgtgctgatttttctaagaaaactcctagacttcctctgtagtcaaggtgaagtctagatgacagatttgctatgttgaggcagatttttgcaaaaggaaggaagaggccctggctcttaaatggccatactattgaccctgtaatagagcaatgccaagaattctaggtgtggcttgaccagccagctcacatggcctgagggctcctgctctacccagtgagtttctgaagcaagttctaaaatgcagctga

SEQ ID NO: 276010 - DNA, 601 bp, Homo sapiens
tatctgggctgtggaaatggggcatgttttctaaatgtaaaacaaggtcaccaggtctggcatatctcagagctctggtggggaccatggcacagaatatcgatattcacaatagacctggtaaacccaggatatatgtcctcacaacaaaagccataccagtattctatttacctacaggcaagttttagacttagattttcaagctctggggaattctaagaaataagccttaaacagatccaccgaagtattgtttctgagccagtgctgttctccattgtcatttacagaactctgaatgtatacagaataggagatgggggatgattcactattctggaagttgtgctgatttttctaagaaaactcctagacttcctctgtagtcaaggtgaagtctagatgacagatttgctatgttgaggcagmtttttgcaaaaggaaggaagaggccctggctcttaaatggccatactattgaccctgtaatagagcaatgccaagaattctaggtgtggcttgaccagccagctcacatggcctgagggctcctgctctacccagtgagtttctgaagcaagttctaaaatgcagctga

SEQ ID NO: 276011 - DNA, 459 bp, Homo sapiens
atctatttaataatgaccatggacttttgaaaaaggcattaaattacagctatatgtttgtcttgttggctatcattctagaaatgagccttaagtattgctaaacataaccactgtaatggagaattgtttttgtatttttcaaagtataactgaatgctaaggtctctttcatttggctatacctgtgggaaatccagatactgagaccaggagcataagaatggaagcagtgccacttgcctgggatggtgagatagtttggctctgtgtccccacccaaatctcatcacgaattgtaattcccataatccccacatgtcaagcacgggacctggtgggaggtgactgggtcatgggggcrgtttcccccatgctgttctcatgatagtgagtgagttctcagagatctggtggttttataaggggctcctcctgctttgctcattcacccttctc

SEQ ID NO: 276012 - DNA, 613 bp, Homo sapiens
tgggtagactgagtaaagcagactgactttcccaatgtgggtgtgcctcatccagtcagttgaaggtctcaataaaataaaagactgattaataaatagttctttctttckgcttgactatctttgagctgggacattggttttcttctgccttcagacttggactcggactggatcttacaccatctgctctcttggttcttggactcagattgaaactagactataagctctcttgggtcttcagctttctaactgcacatcttggatatctcagcctccataactgtgtaagccaattccttataataaatctctctctctctctctctctctctctctctctctatatatatataaatataaatgcacacacatacacatatatataatgtatatatacacacacacttatatgcatgtgtgtgtatgtatctcctattggttctctttctctggagaacccagactagtacatcaatatacatgaaaacatcatatttttctaaaagtagatatgacttgcaatcaaaatggatataatataaaagacaggacgttacgactggacaccactgcccttagcacacagtttgacatccttggtccacct

SEQ ID NO: 276013 - DNA, 559 bp, Homo sapiens
ataagcccaatcaaatgtactttctcctgcctttcaatacccctgtagcrctaaactcactctttattatggtagtccatatccaataagcaggataatactataagcctcttccagacaggggctatatctcactgttctctgcaacctctgagtgctcagtcatacctgtgcccagcagctgttcaatgcctatgagatgaagtgagaagccaggagaatgctcagcacagagcctgccagtcagtcgtccacaaatcacaggagtgagaaaagaaggagcagcagctgcagcagtggtggcagatgttgctgctgttcctgggttgcccaggaatctggggtcttgttctgtgtgcccatcttaggaaagtcatataacctcagggtccccagtttctacattaacaaaatcatagagattgagtgtgaatattctttgactctagaatattaatgagttgaatccttccccatccactgtctcttattaaccaagatgcctcttaaagatactgtcacaaaagccaagtgtctccatattttaagacatgcatcc

SEQ ID NO: 276014 - DNA, 548 bp, Homo sapiens
gatgatttggaacaggtggcctctggcattgagctagctagaagcaacaacaatccaagtccaccatctttactcataaagcacagtaacctgctgcccgaggccaccagccctgccgtgctgactcctgctgctggtacggttttactatgagcctcgcacatcttatttttccctattctagagataaagatattgaagctctgcaggttaagcccaagaacacaagccttgaactaggcaagaatgaacctggacagggattttctgactctcccaatccccatggtttttcagacataccctgcaccctctaaaatatatatatatatatatatatatatatatatatatcargtaacatgctaatattagtcatatgttttccactcccataatgaagtgctcacaagcctgaaaaacatctctggataaactgctgctattaaaacagcagagaccacgcacatagctgcttccctgtccagacccccattctagcccagtgtgtgggtaatctgccctatcgcacagctcccccgccactt

SEQ ID NO: 276015 - DNA, 567 bp, Homo sapiens
tgccaacaccactgttccttggcactcccaatcctagttgccctagttgtttgatttgtttccctattaatatacatcactttgtggcatactgtttaattgactcattgaatgtatttaataagcttaatgaaggcagggattttctctgttttgttcagtgttgtgccccagtgtcttgcacagtgctaggcacatagaagatgcacaataaatatctgtcaagcaaaggaaaaccatgacaagcttctaaaaccagaaattaatttttaaaaaagttaattccaatgctcctaaaaatattgtttgcagacactctgccaacaatagctagagcctgctcgccaatgtgaatactgarcgaggcttcaaatttataaggatctctactgtcaaacacaagacactgacatttggaagatgtagtgggcaaagcctgtcttctatgtggccatcttcttatttgaattaatggtatcaccaaaaagggggcccttagacacccacgtgtacatccagagggccataagtgctgttagtgctgttaaaaaacgtgataataacatt

SEQ ID NO: 276016 - DNA, 574 bp, Homo sapiens
ggtcctcttagggaaatgagaggccccatgtgaaattcaaaggagacttggccctacacttctccaatccagaagtgaaaggagaaagctgttattctggtggctcttcccagacttcayctatcaggttttgtccaatgagaaggcaaaaagcctcccttaaactgtacagctcccagaaaaaataaagatgggtttaatgtttctgctctcgttttttgctctatataatctcccccaaggattaatttttaatatatcatgtgtgcctgcacgcatgcacacacacacacacacacacacacacacacacacacacacaccctcacaacttgaagtattttagttactctccaattgcaggtcatgaatgtcaataattccagctgtccccagtgacaaacacggcctgtacccccacgcccatgcccacttggcagcttctcctccctatctctccactcattccttcctctttggaatccaagttgaccctgctaaaaagagtctccaataaaatgagaaatacgaggcctatttttcaacttctaagccaagcacagagatgtgagta

SEQ ID NO: 276017 - DNA, 664 bp, Homo sapiens
acaaaggaggctggtcagtaaattaaccattttttttttaaacatagaatggaatattattcaggcttaaaaatgaggaaaccttcccattgcaacaatatagaggatattatgctaagtgaaataagccagagacagaaagacaattctgtatatgatctcatttaaatgtggaacctgttaataaaataggcaaactcatagaagctgagagtagaatggtagtggctaggggttgtagggaggaggaaatggagaggtgttgattaaagggtccaagttatgccagatacataagttctggagattcgttacagagcatagggcctctagctaacaaaatggtattatatacttaaactctgctaagagagcagatcttacgtcaagtrttcttaaccaccattctttatgtattcttccatttactttcaacatcttgatcgctatcttgtaaacccttccatggttctagaaaaaattcagagtgactagtgacaagaactaaaactgcatatccagggaaaacattggggcacaccaaggaaatgaaatgcaaaagatataaatgcattctctttccaaatataaaagtttaaatataaaaattttaaaaataaaatctgcaaccaaaaaattgagattcagttttggacaggaagca

SEQ ID NO: 276018 - DNA, 664 bp, Homo sapiens
acaaaggaggctggtcagtaaattaaccattttttttttaaacatagaatggaatattattcaggcttaaaaatgaggaaaccttcccattgcaacaatatagaggatattatgctaagtgaaataagccagagacagaaagacaattctgtatatgatctcatttaaatgtggaacctgttaataaaataggcaaactcatagaagctgagagtagaatggtagtggctaggggttgtagggaggaggaaatggagaggtgttgattaaagggtccaagttatgccagatacataagttctggagattcgttacagagcatagggcctctagctaacaaaatggtattatatacttaaactctgctaagagagcagatcttacgtcaagtgttcttaaccaccattctttaygtattcttccatttactttcaacatcttgatcgctatcttgtaaacccttccatggttctagaaaaaattcagagtgactagtgacaagaactaaaactgcatatccagggaaaacattggggcacaccaaggaaatgaaatgcaaaagatataaatgcattctctttccaaatataaaagtttaaatataaaaattttaaaaataaaatctgcaaccaaaaaattgagattcagttttggacaggaagca

SEQ ID NO: 276019 - DNA, 664 bp, Homo sapiens
acaaaggaggctggtcagtaaattaaccattttttttttaaacatagaatggaatattattcaggcttaaaaatgaggaaaccttcccattgcaacaatatagaggatattatgctaagtgaaataagccagagacagaaagacaattctgtatatgatctcatttaaatgtggaacctgttaataaaataggcaaactcatagaagctgagagtagaatggtagtggctaggggttgtagggaggaggaaatggagaggtgttgattaaagggtccaagttatgccagatacataagttctggagattcgttacagagcatagggcctctagctaacaaaatggtattatatacttaaactctgctaagagagcagatcttacgtcaagtgttcttaaccaccattctttatrtattcttccatttactttcaacatcttgatcgctatcttgtaaacccttccatggttctagaaaaaattcagagtgactagtgacaagaactaaaactgcatatccagggaaaacattggggcacaccaaggaaatgaaatgcaaaagatataaatgcattctctttccaaatataaaagtttaaatataaaaattttaaaaataaaatctgcaaccaaaaaattgagattcagttttggacaggaagca

SEQ ID NO: 276020 - DNA, 508 bp, Homo sapiens
ggttgtttgttacacagcagtagataatagtaacactgtcccatgggcttggctttggaagggtgttagatccttaaaagatttaaagagattttggttgagctcactatcttaagcttggtaaagtttaatttatactattttactaagaaagcaacygaggcccataaaggttaaatggcttgcccaggatagcagaatgtatcaatcaccttgtcataggcaagtgggggagaagcctagaactctgttctctcacttctttagtgccgtccagccattctcctagttactttttcaagctgtttgtccagagcacaaatgtattaatgaaatacatggagaaccaaggcttcagactagaaaaaaatagccaataacagatataaaagatttcagttcatcatagttatgtttccaatttaggtgaccctgtaggaatgaataatggcttcccccagatgaaagtgtgtctgtcaggagaatataacgtgctcccagtggcttc

SEQ ID NO: 276021 - DNA, 319 bp, Homo sapiens
cattcctgacattactcttcatctttcaccacctgaagggttaggtcccctgcctctttgctcctgtaagatacttggactactcctgccactacatctccagcatcttaaacaacaatcattactaatgtagtttcaagaggctatgacatacktattctttgtttctctggcacctaacaccaagcctggcattgtagtggatgctcaaggaatttttaataattggatgattaaacgattctatgaatgtaagtctcaggggatacatctgtaccaaaatatattagttatctatcgctgtgcaacaatattacaa

SEQ ID NO: 276022 - DNA, 612 bp, Homo sapiens
catggtgaaatcccatctttaccaaaaattcaaaaattagcggggtgtagtggcatgcacctgcagtcccagctacttgggagactgaggcatgagaatcacttgaacctggggggcagaggttgcagtaagccgagctcatatcactgcactccagcctgggtgacagaacaagactgtctcaaaaaaaaaaaaaaaagattggtgttgttggagctcagaaaatgatatcccaaaatatggcactttaacatgctgaactaaggaggccacccccctaatcctctgtctctcccaaagcacaggatcacacagttctttgaagtttccttatctacccagaaactggacccctaaagacacaattgccttcaatcgcttccctgaaatttcattaaccaggaaagatgaaaactcatatcacagaggaagagactgaaaattaaacatcacacctagagcctagctaatcatcccaaaccatcctctgttctcaggtcccattcaattcccaaacagcatcatgtamaaaccattgactggtcttcagcctcattcatttacagccctcgctgccctccttccctctccccaatgaagagggcatttaag

SEQ ID NO: 276023 - DNA, 641 bp, Homo sapiens
tgctcagcactgattaaccactgattatcgaccactgtgctgaaagctgggtaaactcatcttagatgctcagtctatgagttagataagcacatacatatacacacacacacacacgcattctattacagcaaggtcagtgctatatcagaggacaatgcaaagctgagaatgtcgtcatttgttttggaaggaattaaagacacagcacaaatccctcatgagtacttagttaatgttaatttatgatggatcagctatactgccgctcttcaatcatattctctttacaaaattattgagttttgataaaaactccatgaaatatcaagatttagtttctttcagtgctcaaggttatgaggaaatcttaactgcaagaactygaaggtctcattttctgtaagcggtctagaagcttgaataagagaaatataaaataattaatcattcaaaacccgatactattttccctatttataaaagccctcatataaaaatacacctatggctgtttgcatatgaaataaatatgatttaatattaaagattttcctttcgacatttttcgttcttgtcaatgtgacttagaaaagacttaggccacagctaacagagttgtttgacagtcaacaacaaca

SEQ ID NO: 276024 - DNA, 603 bp, Homo sapiens
tttttttcttggattctgaacttgtttaagttacctctttggttcaccactacctactggccaaatggtcaacagatgtcagattggtccctcccccaagtcattgctgttcatttttgcagctgccgtyttaactgtctaaaggggaccctatgtttccctctgtatttgaagcagcatgataccacttatctgctattgattgttttatctatccttaaagccacagatggaacagccactaaagcagcttgcaggtgtgtttgttcaggggtgggagttgaaggggagctcctgcagagaagcacagcacactgcagcttccaactggtctggaagaccacagagcgaaggcagaacatcaggagaatgtaatgacttcatggcccacagggatgggaggccattcctgagtgcttccaccagtctgcagaggaccttgactattgttatttgctccaatccatctgcttacttgcttttaagtaaaagaatgggaaacaatccctgcagtcagaaatggaatgacttccatgtacctgattgtgttggtagatactgagcatgcctcacttccactaaatctgctcctaatgttcctac

SEQ ID NO: 276025 - DNA, 603 bp, Homo sapiens
tttttttcttggattctgaacttgtttaagttacctctttggttcaccactacctactggccaaatggtcaacagatgtcagattggtccctcccccaagtcattgctgttcatttttgcagctgccgtcttaactgtctaaaggggaccctatgtttccctctgtatttgaagcagcatgataccacttatctgctattgattgttttatctatccttaaagccacagatggaacagccactaaagcagcttgcaggtgtgtttgttcaggggtgggagttgaaggggagctcctgcagagaagcacagcacactgcagcttccaactggtctggaagaccacagagcgaaggcagaacatcaggagaatgtaatgacttcatggcccacagggatgggaggccattcctgagtgcttccaccagtctgcagaggaccttgactattgttatttgctccaatccatctgcttacttgcttttaagtaaaagaatgggaaacaatccctgcagtcagaaatkgaatgacttccatgtacctgattgtgttggtagatactgagcatgcctcacttccactaaatctgctcctaatgttcctac

SEQ ID NO: 276026 - DNA, 570 bp, Homo sapiens
gttccagacagtagttctgcagctctgaaagcagttttccctcccatgtggcaggtctagggctctaaactgtgatgactcaactaatagcatttcacagggcagggagaactccccaaccctctaagtggcctgagttttcagagcgtctttctctcccttcctgtctaatgtcacctctacttccttttatatccttttttatccttcctccccattcccctcttttgctttgtcttccaattcttccccttcctcccatttgccttcttttaaaactagccataaagagaaatcttttaatgttcttctmttaatttgaaggtaatttaaatatttcttatttctttccaaaaacatttttaaaggaattaaacacaattgatttttgtttgtctgtgccctgtaatcatttgattttggtatttgaaacactatccttgacttgttttgaatataaaggtcttttctttccttgtgtttctgtcttttaatggctcattttcattctctatgcctcaaatgaatactaaaattcagtagtccagcttctgaatttttttctgtata

SEQ ID NO: 276027 - DNA, 623 bp, Homo sapiens
ttgcagtaggctcactacagatttgatgatggaattatctgccagatgcccagttctccctttgaggatacacagatagactccagtgtcattagactatcttcccctgaaatgcttttactatggctcctgcacaacttcagggtgtgccacctaccagccatccagacaaaaagtcatgctgaccacccaggctgcagcagaaggaggagatgagctctgggcaagtatgaaaagatattgatggcaagaaaactccttttttccccaaaaatatgaaggttaatgataattattcttctcatcaaaatgtttttgtctccctccttccaggtaaaagtgctaatgcttttagaacttacaaaatgaaaytggccataacctgagccttcttttgcactcatctggacttatggtcttcatctccaaatgagacaaacaggagagaatggaacttctgagccctaggggcagcattcacttgaaagtcaattacgtccaaagtaagacactcatgataaggacacttctgaaaaacagagtgaggtgtctgctttcatgggagtaaacctattacttccacttacaataataattctcttaacatctccttaatgctccct

SEQ ID NO: 276028 - DNA, 553 bp, Homo sapiens
ttgtgtctctcccaaatcactatggttctgtggcttttagaataagtagttgctagtaacacaaagcttccagtaacataaccttctacttttgtgcctggtggaaagataggaaatatctcggccctaacaatttggtgaatgtgtgacccacattaggacaacctgatatgcaaatgtacacacttatgaaataaatcagagtgtgattagtaatcctccaaaaattgttctaggttgttttgatattcatattttattgtsttacacacaagtctgcaggaacacatatataaaataaagtgaagcatttctatagttttcttaggtattccattattcatgtgcccacacgctggataaaccagactgattgcttaatgcagtcatcttttccagtgtttaaaagcgggccctgggtttgtactgaatgaggaatttttttctcgtgaaaaggaaactccagcttccaaagaatccagaacttcaaaagttctctcttacttgtgggatattctgtcagcctaagattcaaggttcacagaatgctttt

SEQ ID NO: 276029 - DNA, 468 bp, Homo sapiens
ggcaaccaggcatttgtgcataagtgcatatatagcatgagtatacaaacacaagaaaaagaattaataggttcattttgagcctggttatttctgggagatctttcctagggtgcccttgatatgatgacaatgtcacctggtggaccaggatattgccttctctttgttccctcacagctccataactctgggattgacaatcaccattgcctcctccccagaacatctaacttgagcatgcccatacatcacgcccccrccaacctatccaaggaattgtgcctattccattacaaggggatgatgagcaggccatgtcctgcagggttggggagggaggccccgggatctggctgtggcctctggtgaccataacccatctcccagctccccaaagagaactgggcatgagcagactcaatctgctttgagtctgcattccaaggccctgaaactcctggggag

SEQ ID NO: 276030 - DNA, 460 bp, Homo sapiens
cagactattacacattttcatgttttctctttgacagtgtttcatttgcagactctccatggcttataaaaatatacccagagtccaaatctccacagcatgagatttttcacattctctaatttgcagtaatgtattgtgtcaaattccgtctttaacccgcccagggacaacactggcacatggggcctctgctgcacaaactaacatttcagtccaggcaccatggggagctctggagcrgggcgtgagcttggctactgtgagagtgtcccctcaaatgttgaacccctagtttcactcttgctgtggatggagtttcaccacaaatcatgagccctccaggtctctgctcagtgcctgtggtagaggcagctctgagttcatcaaaatttgtttcttccccttgggttcacagctggactacatttcccaggcacccttgcagtttatgagacca

SEQ ID NO: 276031 - DNA, 1020 bp, Homo sapiens
cagactattacacattttcatgttttctctttgacagtgtttcatttgcagactctccatggcttataaaaatatacccagagtccaaatctccacagcatgagatttttcacattctctaatttgcagtaatgtattgtgtcaaattccgtctttaacccgcccagggacaacactggcacatggggcctctgctgcacaaactaacatttcagtccaggcaccatggggagctctggagcagggcgtgagcttggctactgtgagagtgtcccctcaaatgttgaacccctagtttsactcttgctgtggatggagtttcaccacaaatcatgagccctccaggtctctgctcagtgcctgtggtagaggcagctctgagttcatcaaaatttgtttcttccccttgggttcacagctggactacatttcccaggcacccttgcagtttatgagaccawatcattgctagaatgctcgttacactccatcacaaaagaaacccacttcaaactatcttctaaagggacagaaaaaccacgtttcctacctcagctttgcctgtagcctgacttgccgaaacctgcaagttaaacaaaaaaagacattagtattgattcaacaagaagctaattggattaattgtctttttaaaggaactggcatcaataatttgttatgacccgaggggacaaaggttgcaacacacaccacacacacacacacacacacacatgcattttcttccaccaagcacagcaacatgatttgtttatccagccctgttaataaggtgaataggataattagtattttcaacatattataacaatcttgtcaagaaaaaaataagtggggagggctgtgagcaatgwccatgtactgataatgattaaataaacactgaaaaagaaaacaaaggcactgaagacatttttaatgtgtttttttccttcccttaaagtttcaagtcagtgttatgagaaacaccaggtaaaagctacaatgacagcaacagca

SEQ ID NO: 276032 - DNA, 675 bp, Homo sapiens
gctgtgaatagtgttgtgatcatggacttcgcagggacatcgatggagctggaggccattatccttagcaaactaacacagcaacagaaaaccaaatactgcatatcctcacctagaagttggagctaaatgatgagagcacatggacacatagaaaggaacaatacacaatggggccttctggagggtggaaggtgaaaggagggggaggatcacgaaaaataatgggcactaggcttaatacctgggggatgaaatcatctgtacaacaaaccctcatgacacaagtttacctttgtaacctgcaatatgtacctctgagcttaaaagttaaaagaaattcacgaaaaaattggaaagaaagagaccttgtggaaatgttggctatttttttcttattaaagaggagactaaaaagaactctctcaaacattcacatatgagggcacagtagaaggtaaggcatatagtgatgcaayagggagtggtacggcttgtggccaactaaaggtaaactataccgcattaatcattttaccaatcagctaaatatatgaaacaaggggtaaactttactgaggcccctctaggtatctagaaccctctctacgctgcattcagagtggatttcatagtcaaaattatattagattcagagactcccttctaaggcag

SEQ ID NO: 276033 - DNA, 502 bp, Homo sapiens
tgctgccactgcctcttggtcacratgggtgtctccttttgttgagtctgccgcatgacctgaggtttcttgctgcttcctgtcacatagaggagggtagcacaggagtcttgggatatggatggttggtctctgtccacttatatcttgacattcatgaaggcactttgttgtttctcatagatgttgtctatttactcattttgttctggttactctttttttttatgtagggattttggaagaattagagactatatggccatcattcttccagaattctaaatattaaacacgtgtttctggtggggatttgaaaccccagagggtgagtggcttgcttatggtcatttttttgggattaaaaccaaggcagtctcctctcttgactatggtggcatatttctgctacacataaggaacattctctaggttataagccagaatgcacgctaatcacatttccagtttcaaccaatgagttgctcaagtagaaataaga

SEQ ID NO: 276034 - DNA, 587 bp, Homo sapiens
acaacaacccaccagtagataagtatgttattccttctactgtaaagatgaggaaacagactcagaaggtcattcaattaaggggcagaattgagattcaaaccgaggcagtctgactccaaaatcaagacctcagctccttcttacacacagcccaacatgtaaacgcagggttggaacccccacccagccacctagatcccaagcggaaatgctcacagcacagctgccagcccaagtcccatatgtgccagactagccggctgtggcctcagcaaagaatttatttstcctcccctccacttgaatgatttcattttcccctctaattcctggcctagaaactgctctgctgaaatggtgatttaccacgggtgctcccactatggggcaggccctttaattgcttcctgaaggagtcttttggtgctgttctgagagccctgattgaaatttttaaagaattataatttcccaaagcaagctgtcattaaaattctacaaacctccctgtgaggatcttaatatccccatagatctgggctcagtctgacattcccccatggttttccaggtgggtgaccttg

SEQ ID NO: 276035 - DNA, 638 bp, Homo sapiens
cttctctctttaaaaacagtgcaaagggacattatgctgcatttgaccaaaggcagtcattcttggcagcatcctttcgttcttccatcaygacaaaactgctgttaggtcacattaaaatagtagcaatctttggcagaaacctactgtatgcttccttaatgagttgtcagaggttctgtagtgccatttgtcttctaagctagttttttatgaaggctgtcagtaaagggtaaagatggggatatgcaatatattcaccagtcagcagggggttgagaatctgttcattcagaatcagcaggggactgtgggaaaatgtctattctttaagcatgcctctgaaggactacaattcaaaagagggggtgaggtttgtaagaggctaagaaagtcttcctctaatgtaaacttccaggagtctctgcaggccctctccttatagacagggaatgaaataaagcctagcagactttctaccatcagaatgatcttaattttgacaactcaacaaaacttaattcagagatcaacagatgaatctgatactatccagaaggtcatgtgtatgggtaattaagttgacagtcacagatatcaaaataattcccactcaggctgcaacttatgaatttcac

SEQ ID NO: 276036 - DNA, 638 bp, Homo sapiens
cttctctctttaaaaacagtgcaaagggacattatgctgcatttgaccaaaggcagtcattcttggcagcatcctttcgttcttccatcatgacaaaactgctgttaggtcacattaaaatagtagcaatctttggcagaaacctactgtatgcttccttaatgagttgtcagaggttctgtagtgccatttgtcttctaagctagttttttatgaaggctgtcagtaaagggtaaagatggggatatgcaatatattcaccagtcagcagggggttgagaatctgttcattcagaatcagcaggggactgtgggaaaatgtctattctttaagcatgcctctgaaggactacaattcaaaagagggggtgaggtttgtaagaggctaagaaagtcttcctctaatgtaaacttccaggagtctctgcaggccctctccttayagacagggaatgaaataaagcctagcagactttctaccatcagaatgatcttaattttgacaactcaacaaaacttaattcagagatcaacagatgaatctgatactatccagaaggtcatgtgtatgggtaattaagttgacagtcacagatatcaaaataattcccactcaggctgcaacttatgaatttcac

SEQ ID NO: 276037 - DNA, 589 bp, Homo sapiens
atgaaataaagcctagcagactttctaccatcagaatgatcttaattttgacaactcaacaaaacttaattcagagatcaacagatgaatctgatactatccagaaggtcatgtgtatgggtaattaagttgacagtcacagatatcaaaataattcccactcaggctgcaacttaygaatttcactgtcttactgaggctatgaactatatgtagcattaagaattgaggtgtttgttttgttttgttgtttgtttcttcctgaagttcttacagtttgggttagaagagctaaggagtaaagtttggaagcagacagatcctggctctgtgacttattctttgtgaaaccttgagcaagttacttaggaattctagctaataatacctgttttacggagtggctgtaaggattaaatgagataatgaatgtaaagcattggcacagaagtgctcaataaatggcaatcatcatgatgaatattacttttctgtatatccaagagcagtctagactttctccagaacagaatatgtacctatagggagatgaaaacttttattaaatataaataattatggataaatg
